United States Patent Application Publication US 2007/0042381 A1 - sequence listing, part 27

SEQ ID NO: 1179657 - RNA, 15 nt, Human
ggaaauauuuauuuu

SEQ ID NO: 1179658 - RNA, 17 nt, Human
ggaaauauuuauuuuaa

SEQ ID NO: 1179659 - RNA, 18 nt, Human
ggaaauauuuauuuuaau

SEQ ID NO: 1179660 - RNA, 21 nt, Human
ggaagcacaugccucucucag

SEQ ID NO: 1179661 - RNA, 22 nt, Human
ggaagcacaugccucucucagg

SEQ ID NO: 1179662 - RNA, 23 nt, Human
ggaagcacaugccucucucaggc

SEQ ID NO: 1179663 - RNA, 13 nt, Human
ggaagccagcagg

SEQ ID NO: 1179664 - RNA, 14 nt, Human
ggaagccagcaggc

SEQ ID NO: 1179665 - RNA, 15 nt, Human
ggaagccagcaggcu

SEQ ID NO: 1179666 - RNA, 16 nt, Human
ggaagccagcaggcuc

SEQ ID NO: 1179667 - RNA, 17 nt, Human
ggaagccagcaggcucu

SEQ ID NO: 1179668 - RNA, 18 nt, Human
ggaagccagcaggcucuc

SEQ ID NO: 1179669 - RNA, 13 nt, Human
ggaagagccuugc

SEQ ID NO: 1179670 - RNA, 17 nt, Human
ggaagcacagcuucauu

SEQ ID NO: 1179671 - RNA, 13 nt, Human
ggaagcacaugcc

SEQ ID NO: 1179672 - RNA, 14 nt, Human
ggaagcacaugccu

SEQ ID NO: 1179673 - RNA, 15 nt, Human
ggaagcacaugccuc

SEQ ID NO: 1179674 - RNA, 17 nt, Human
ggaagcacaugccucuc

SEQ ID NO: 1179675 - RNA, 20 nt, Human
ggaagccagcaggcucucag

SEQ ID NO: 1179676 - RNA, 21 nt, Human
ggagagcuagcagcagggagg

SEQ ID NO: 1179677 - RNA, 15 nt, Human
ggagaggggcacagg

SEQ ID NO: 1179678 - RNA, 20 nt, Human
ggagauuuacaacuggggga

SEQ ID NO: 1179679 - RNA, 20 nt, Human
ggagcaaaaucgaugcagug

SEQ ID NO: 1179680 - RNA, 20 nt, Human
ggaggacgcucucuggccuu

SEQ ID NO: 1179681 - RNA, 21 nt, Human
ggaggacgcucucuggccuuc

SEQ ID NO: 1179682 - RNA, 23 nt, Human
ggaggaucacuugaguccagaag

SEQ ID NO: 1179683 - RNA, 17 nt, Human
ggaggaucucuugagcc

SEQ ID NO: 1179684 - RNA, 21 nt, Human
ggaggaucucuugagccuggg

SEQ ID NO: 1179685 - RNA, 15 nt, Human
ggaggauguucuggg

SEQ ID NO: 1179686 - RNA, 12 nt, Human
ggagggagggcu

SEQ ID NO: 1179687 - RNA, 12 nt, Human
ggagggcuccag

SEQ ID NO: 1179688 - RNA, 13 nt, Human
ggagggcuccaga

SEQ ID NO: 1179689 - RNA, 14 nt, Human
ggagggcuccagac

SEQ ID NO: 1179690 - RNA, 15 nt, Human
ggagggcuccagaca

SEQ ID NO: 1179691 - RNA, 17 nt, Human
ggagggcuccagacaca

SEQ ID NO: 1179692 - RNA, 19 nt, Human
ggaggggagcaugggaagu

SEQ ID NO: 1179693 - RNA, 20 nt, Human
ggagucccaccuuggcugca

SEQ ID NO: 1179694 - RNA, 21 nt, Human
ggagucccaccuuggcugcag

SEQ ID NO: 1179695 - RNA, 11 nt, Human
ggagugacaga

SEQ ID NO: 1179696 - RNA, 16 nt, Human
ggagugacagaggcag

SEQ ID NO: 1179697 - RNA, 17 nt, Human
ggagugacagaggcagc

SEQ ID NO: 1179698 - RNA, 18 nt, Human
ggagugacagaggcagcc

SEQ ID NO: 1179699 - RNA, 19 nt, Human
ggagugacagaggcagccc

SEQ ID NO: 1179700 - RNA, 21 nt, Human
ggagugacagaggcagcccca

SEQ ID NO: 1179701 - RNA, 12 nt, Human
ggagugagcugg

SEQ ID NO: 1179702 - RNA, 14 nt, Human
ggagugagcugguu

SEQ ID NO: 1179703 - RNA, 21 nt, Human
ggagugaguugauagcacaga

SEQ ID NO: 1179704 - RNA, 23 nt, Human
ggagugaguugauagcacagacc

SEQ ID NO: 1179705 - RNA, 16 nt, Human
ggaucacagccucuga

SEQ ID NO: 1179706 - RNA, 19 nt, Human
ggcaacugcauuggcuuug

SEQ ID NO: 1179707 - RNA, 18 nt, Human
ggcaacugcauuggcuuu

SEQ ID NO: 1179708 - RNA, 21 nt, Human
ggaucagucugauucccaagc

SEQ ID NO: 1179709 - RNA, 16 nt, Human
ggcaaggcugucaauu

SEQ ID NO: 1179710 - RNA, 15 nt, Human
ggcacccggccccug

SEQ ID NO: 1179711 - RNA, 16 nt, Human
ggcacccggccccugc

SEQ ID NO: 1179712 - RNA, 17 nt, Human
ggcacccggccccugcu

SEQ ID NO: 1179713 - RNA, 15 nt, Human
ggcagagcagagacc

SEQ ID NO: 1179714 - RNA, 16 nt, Human
ggcagagcagagacca

SEQ ID NO: 1179715 - RNA, 20 nt, Human
ggcagagcagagaccauccc

SEQ ID NO: 1179716 - RNA, 22 nt, Human
ggcagagcagagaccaucccug

SEQ ID NO: 1179717 - RNA, 13 nt, Human
ggcagguccaggg

SEQ ID NO: 1179718 - RNA, 23 nt, Human
ggcaggucuugaacuccuggccu

SEQ ID NO: 1179719 - RNA, 18 nt, Human
ggcagcucaccucucccu

SEQ ID NO: 1179720 - RNA, 21 nt, Human
ggcagcucaccucucccuugg

SEQ ID NO: 1179721 - RNA, 22 nt, Human
ggcagcucaccucucccuugga

SEQ ID NO: 1179722 - RNA, 13 nt, Human
ggcagcucagaga

SEQ ID NO: 1179723 - RNA, 19 nt, Human
ggcagcugcgguccaccca

SEQ ID NO: 1179724 - RNA, 21 nt, Human
ggcagcugcgguccacccagg

SEQ ID NO: 1179725 - RNA, 21 nt, Human
ggcagcuugaggguugggcug

SEQ ID NO: 1179726 - RNA, 17 nt, Human
ggcagaggaaagcaaag

SEQ ID NO: 1179727 - RNA, 23 nt, Human
ggcagaguugaagacagagcuac

SEQ ID NO: 1179728 - RNA, 23 nt, Human
ggcagauacaggaaaagcugcug

SEQ ID NO: 1179729 - RNA, 11 nt, Human
ggccaggcugg

SEQ ID NO: 1179730 - RNA, 14 nt, Human
ggccaggccagagg

SEQ ID NO: 1179731 - RNA, 16 nt, Human
ggccaggccagaggga

SEQ ID NO: 1179732 - RNA, 11 nt, Human
ggccacuguga

SEQ ID NO: 1179733 - RNA, 16 nt, Human
ggccacugugaagaga

SEQ ID NO: 1179734 - RNA, 20 nt, Human
ggccacugugaagagaacca

SEQ ID NO: 1179735 - RNA, 16 nt, Human
ggccaggagccuccug

SEQ ID NO: 1179736 - RNA, 15 nt, Human
ggcagguuggugggg

SEQ ID NO: 1179737 - RNA, 17 nt, Human
ggcagguuggugggggc

SEQ ID NO: 1179738 - RNA, 15 nt, Human
ggcauuccccaggag

SEQ ID NO: 1179739 - RNA, 16 nt, Human
ggcauuccccaggagg

SEQ ID NO: 1179740 - RNA, 16 nt, Human
ggccacaagacccuug

SEQ ID NO: 1179741 - RNA, 17 nt, Human
ggccacaagacccuugu

SEQ ID NO: 1179742 - RNA, 16 nt, Human
ggccaccugcggugcu

SEQ ID NO: 1179743 - RNA, 22 nt, Human
ggccaccugcggugcuaucucc

SEQ ID NO: 1179744 - RNA, 12 nt, Human
ggccaggcuggu

SEQ ID NO: 1179745 - RNA, 14 nt, Human
ggccaggcccucug

SEQ ID NO: 1179746 - RNA, 22 nt, Human
ggccaugggacagggaggacgc

SEQ ID NO: 1179747 - RNA, 13 nt, Human
ggccaugggccuc

SEQ ID NO: 1179748 - RNA, 16 nt, Human
ggccaugggccuccug

SEQ ID NO: 1179749 - RNA, 16 nt, Human
ggccccucaggguccc

SEQ ID NO: 1179750 - RNA, 19 nt, Human
ggccccucagggucccugg

SEQ ID NO: 1179751 - RNA, 20 nt, Human
ggccccucagggucccuggu

SEQ ID NO: 1179752 - RNA, 21 nt, Human
ggccccucagggucccuggug

SEQ ID NO: 1179753 - RNA, 12 nt, Human
ggccccugccac

SEQ ID NO: 1179754 - RNA, 13 nt, Human
ggccccugccacc

SEQ ID NO: 1179755 - RNA, 16 nt, Human
ggccccugccacccug

SEQ ID NO: 1179756 - RNA, 17 nt, Human
ggccccugccacccugg

SEQ ID NO: 1179757 - RNA, 18 nt, Human
ggccccugccacccuggg

SEQ ID NO: 1179758 - RNA, 13 nt, Human
ggccccugcccgg

SEQ ID NO: 1179759 - RNA, 21 nt, Human
ggcuuagucacugagacagcc

SEQ ID NO: 1179760 - RNA, 17 nt, Human
ggcugggcucccuuccc

SEQ ID NO: 1179761 - RNA, 18 nt, Human
ggcugggcucccuuccca

SEQ ID NO: 1179762 - RNA, 12 nt, Human
ggcugggcuuca

SEQ ID NO: 1179763 - RNA, 13 nt, Human
ggcugggcuucag

SEQ ID NO: 1179764 - RNA, 17 nt, Human
ggcugggcuucaguggc

SEQ ID NO: 1179765 - RNA, 18 nt, Human
ggcugggcuucaguggca

SEQ ID NO: 1179766 - RNA, 10 nt, Human
ggcuuuugug

SEQ ID NO: 1179767 - RNA, 22 nt, Human
ggcuugaguuuaaauuguaaua

SEQ ID NO: 1179768 - RNA, 21 nt, Human
ggcuuggggaccagagcugcc

SEQ ID NO: 1179769 - RNA, 14 nt, Human
ggcuuuugugcauu

SEQ ID NO: 1179770 - RNA, 21 nt, Human
gggaaggauacaaaagcaugu

SEQ ID NO: 1179771 - RNA, 23 nt, Human
gggaaggauacaaaagcauguga

SEQ ID NO: 1179772 - RNA, 14 nt, Human
gggaagggggcugg

SEQ ID NO: 1179773 - RNA, 16 nt, Human
gggaagggggcuggga

SEQ ID NO: 1179774 - RNA, 17 nt, Human
gggaagggggcugggac

SEQ ID NO: 1179775 - RNA, 12 nt, Human
gggaccucaggc

SEQ ID NO: 1179776 - RNA, 13 nt, Human
gggaccucaggcc

SEQ ID NO: 1179777 - RNA, 15 nt, Human
gggaccucaggccug

SEQ ID NO: 1179778 - RNA, 17 nt, Human
gggacuacaggcaccca

SEQ ID NO: 1179779 - RNA, 16 nt, Human
gggacucaaugcacug

SEQ ID NO: 1179780 - RNA, 13 nt, Human
ggcugggcagagg

SEQ ID NO: 1179781 - RNA, 14 nt, Human
ggcugggcagagga

SEQ ID NO: 1179782 - RNA, 20 nt, Human
ggcugggagagccuuccagg

SEQ ID NO: 1179783 - RNA, 23 nt, Human
ggcugggagagccuuccaggggu

SEQ ID NO: 1179784 - RNA, 15 nt, Human
ggcugggcagaggaa

SEQ ID NO: 1179785 - RNA, 19 nt, Human
ggcugggcagaggaaagca

SEQ ID NO: 1179786 - RNA, 23 nt, Human
ggcugcuucaaggauccugagcc

SEQ ID NO: 1179787 - RNA, 19 nt, Human
ggcugggagagccuuccag

SEQ ID NO: 1179788 - RNA, 12 nt, Human
ggcugcagggag

SEQ ID NO: 1179789 - RNA, 13 nt, Human
ggcugcagggagu

SEQ ID NO: 1179790 - RNA, 14 nt, Human
ggcugcugaaggcu

SEQ ID NO: 1179791 - RNA, 15 nt, Human
ggcugcugaaggcuc

SEQ ID NO: 1179792 - RNA, 17 nt, Human
ggcugcugaaggcucga

SEQ ID NO: 1179793 - RNA, 18 nt, Human
ggcugcugaaggcucgag

SEQ ID NO: 1179794 - RNA, 17 nt, Human
ggcugcagggaguccga

SEQ ID NO: 1179795 - RNA, 11 nt, Human
ggcugcuucaa

SEQ ID NO: 1179796 - RNA, 12 nt, Human
ggcugcuucaag

SEQ ID NO: 1179797 - RNA, 14 nt, Human
ggcugcuucaagga

SEQ ID NO: 1179798 - RNA, 22 nt, Human
ggcugcuucaaggauccugagc

SEQ ID NO: 1179799 - RNA, 16 nt, Human
ggccccugcccggcug

SEQ ID NO: 1179800 - RNA, 17 nt, Human
ggccccugcccggcugc

SEQ ID NO: 1179801 - RNA, 20 nt, Human
ggccccugcccggcugcgga

SEQ ID NO: 1179802 - RNA, 13 nt, Human
ggcugagguggga

SEQ ID NO: 1179803 - RNA, 15 nt, Human
ggcugaggugggagg

SEQ ID NO: 1179804 - RNA, 18 nt, Human
ggcugcaaaggguaucag

SEQ ID NO: 1179805 - RNA, 22 nt, Human
ggcugcaaaggguaucaggugc

SEQ ID NO: 1179806 - RNA, 23 nt, Human
ggcugcaaaggguaucaggugcu

SEQ ID NO: 1179807 - RNA, 24 nt, Human
ggcugcaaaggguaucaggugcug

SEQ ID NO: 1179808 - RNA, 17 nt, Human
ggcugcaccggcuggcc

SEQ ID NO: 1179809 - RNA, 18 nt, Human
ggcugcaccggcuggccu

SEQ ID NO: 1179810 - RNA, 19 nt, Human
ggcugcaccggcuggccug

SEQ ID NO: 1179811 - RNA, 16 nt, Human
gggcacucagaagaca

SEQ ID NO: 1179812 - RNA, 19 nt, Human
gggcacucagaagacacug

SEQ ID NO: 1179813 - RNA, 13 nt, Human
gggcacagggucu

SEQ ID NO: 1179814 - RNA, 16 nt, Human
gggcacagggucucua

SEQ ID NO: 1179815 - RNA, 23 nt, Human
gggcacaccgggcacucagaaga

SEQ ID NO: 1179816 - RNA, 18 nt, Human
gggcacagaaaauggaag

SEQ ID NO: 1179817 - RNA, 20 nt, Human
gggcacagaaaauggaagac

SEQ ID NO: 1179818 - RNA, 21 nt, Human
gggcacagaaaauggaagaca

SEQ ID NO: 1179819 - RNA, 20 nt, Human
gggcacucagaagacacuga

SEQ ID NO: 1179820 - RNA, 14 nt, Human
gggcagaaggaaga

SEQ ID NO: 1179821 - RNA, 18 nt, Human
gggcagaaggaagacuuc

SEQ ID NO: 1179822 - RNA, 11 nt, Human
gggcagagcag

SEQ ID NO: 1179823 - RNA, 12 nt, Human
gggcagagcaga

SEQ ID NO: 1179824 - RNA, 17 nt, Human
gggcagguugguggggg

SEQ ID NO: 1179825 - RNA, 16 nt, Human
gggaggugaccccagg

SEQ ID NO: 1179826 - RNA, 17 nt, Human
gggaggugggauccucc

SEQ ID NO: 1179827 - RNA, 20 nt, Human
gggaggugggauccuccagg

SEQ ID NO: 1179828 - RNA, 18 nt, Human
gggagugacagaggcagc

SEQ ID NO: 1179829 - RNA, 11 nt, Human
gggagugagcu

SEQ ID NO: 1179830 - RNA, 14 nt, Human
gggagugagcuggu

SEQ ID NO: 1179831 - RNA, 13 nt, Human
gggauagagagag

SEQ ID NO: 1179832 - RNA, 21 nt, Human
gggauaugauuuaaaucagcc

SEQ ID NO: 1179833 - RNA, 15 nt, Human
gggauccuccaggug

SEQ ID NO: 1179834 - RNA, 16 nt, Human
gggauccuccaggugc

SEQ ID NO: 1179835 - RNA, 23 nt, Human
gggauccuggaguucugguuccu

SEQ ID NO: 1179836 - RNA, 18 nt, Human
gggcaacccuggugacca

SEQ ID NO: 1179837 - RNA, 12 nt, Human
gggcaugacacg

SEQ ID NO: 1179838 - RNA, 16 nt, Human
gggccacagagaaagu

SEQ ID NO: 1179839 - RNA, 23 nt, Human
gggccacagagaaaguacuucuc

SEQ ID NO: 1179840 - RNA, 17 nt, Human
gggcccagagagggugg

SEQ ID NO: 1179841 - RNA, 13 nt, Human
gggcccugccucc

SEQ ID NO: 1179842 - RNA, 13 nt, Human
gggccuggccuga

SEQ ID NO: 1179843 - RNA, 14 nt, Human
gggccuggccugag

SEQ ID NO: 1179844 - RNA, 18 nt, Human
gggccuggccugagcugg

SEQ ID NO: 1179845 - RNA, 13 nt, Human
gggccuggcuccc

SEQ ID NO: 1179846 - RNA, 19 nt, Human
gggccuggccugagcuggg

SEQ ID NO: 1179847 - RNA, 16 nt, Human
ggggaaaaucagccug

SEQ ID NO: 1179848 - RNA, 17 nt, Human
ggggaaaaucagccugc

SEQ ID NO: 1179849 - RNA, 19 nt, Human
ggggaaaaucagccugcuc

SEQ ID NO: 1179850 - RNA, 21 nt, Human
ggggaaaaucagccugcucca

SEQ ID NO: 1179851 - RNA, 24 nt, Human
ggggaaaaucagccugcuccagcu

SEQ ID NO: 1179852 - RNA, 16 nt, Human
ggggcaacccugguga

SEQ ID NO: 1179853 - RNA, 17 nt, Human
ggggcugaggugggagg

SEQ ID NO: 1179854 - RNA, 17 nt, Human
ggguaagugagagaggg

SEQ ID NO: 1179855 - RNA, 14 nt, Human
gggucucacucugu

SEQ ID NO: 1179856 - RNA, 12 nt, Human
gggucugaggaa

SEQ ID NO: 1179857 - RNA, 21 nt, Human
gggucugaggaauccagaccc

SEQ ID NO: 1179858 - RNA, 19 nt, Human
ggggcugaggugggaggau

SEQ ID NO: 1179859 - RNA, 12 nt, Human
ggggcugcaccg

SEQ ID NO: 1179860 - RNA, 21 nt, Human
ggggcugcaccggcuggccug

SEQ ID NO: 1179861 - RNA, 22 nt, Human
ggggcugcaccggcuggccugg

SEQ ID NO: 1179862 - RNA, 23 nt, Human
ggggcugcaccggcuggccuggc

SEQ ID NO: 1179863 - RNA, 22 nt, Human
gggggaggugggauccuccagg

SEQ ID NO: 1179864 - RNA, 17 nt, Human
gggggaucacagccucu

SEQ ID NO: 1179865 - RNA, 12 nt, Human
gggguggccucc

SEQ ID NO: 1179866 - RNA, 17 nt, Human
gggguggggaccucagg

SEQ ID NO: 1179867 - RNA, 12 nt, Human
ggguucuaccca

SEQ ID NO: 1179868 - RNA, 17 nt, Human
ggguucuacccaggugc

SEQ ID NO: 1179869 - RNA, 16 nt, Human
ggguuggccccugccc

SEQ ID NO: 1179870 - RNA, 22 nt, Human
ggguucaagcgauucuucugcu

SEQ ID NO: 1179871 - RNA, 23 nt, Human
ggguucaagcgauucuucugcuu

SEQ ID NO: 1179872 - RNA, 17 nt, Human
gggugaagugaagacaa

SEQ ID NO: 1179873 - RNA, 19 nt, Human
gggugacagagcaagugag

SEQ ID NO: 1179874 - RNA, 12 nt, Human
ggucacucuggc

SEQ ID NO: 1179875 - RNA, 11 nt, Human
ggucagagccu

SEQ ID NO: 1179876 - RNA, 15 nt, Human
ggucccaccccacac

SEQ ID NO: 1179877 - RNA, 16 nt, Human
ggucccaccccacaca

SEQ ID NO: 1179878 - RNA, 11 nt, Human
gguacccacug

SEQ ID NO: 1179879 - RNA, 13 nt, Human
gguacccacugcu

SEQ ID NO: 1179880 - RNA, 16 nt, Human
gguacccacugcucug

SEQ ID NO: 1179881 - RNA, 16 nt, Human
gguacuuguggacaca

SEQ ID NO: 1179882 - RNA, 17 nt, Human
gguacuuguggacacag

SEQ ID NO: 1179883 - RNA, 20 nt, Human
gguacuuguggacacagcuc

SEQ ID NO: 1179884 - RNA, 23 nt, Human
gguagaaauaucugaaaauguau

SEQ ID NO: 1179885 - RNA, 22 nt, Human
gguagaagcccuucuaccuucc

SEQ ID NO: 1179886 - RNA, 22 nt, Human
gguggccucccaacucacccca

SEQ ID NO: 1179887 - RNA, 23 nt, Human
gguggccucccaacucaccccag

SEQ ID NO: 1179888 - RNA, 21 nt, Human
ggugcuaucucccccagcccc

SEQ ID NO: 1179889 - RNA, 15 nt, Human
ggugcugccauccag

SEQ ID NO: 1179890 - RNA, 21 nt, Human
ggugcugccauccagguucag

SEQ ID NO: 1179891 - RNA, 19 nt, Human
gguggcagugggagcugcc

SEQ ID NO: 1179892 - RNA, 22 nt, Human
gguggcagugggagcugccugu

SEQ ID NO: 1179893 - RNA, 15 nt, Human
ggugagaagcagagg

SEQ ID NO: 1179894 - RNA, 16 nt, Human
ggugagaggggaacag

SEQ ID NO: 1179895 - RNA, 15 nt, Human
ggugcgaucuggguu

SEQ ID NO: 1179896 - RNA, 16 nt, Human
ggugcuaucuccccca

SEQ ID NO: 1179897 - RNA, 17 nt, Human
ggugcuaucucccccag

SEQ ID NO: 1179898 - RNA, 19 nt, Human
ggugcuaucucccccagcc

SEQ ID NO: 1179899 - RNA, 20 nt, Human
ggugcuaucucccccagccc

SEQ ID NO: 1179900 - RNA, 17 nt, Human
ggucccaccccacacac

SEQ ID NO: 1179901 - RNA, 22 nt, Human
ggucccaccccacacacgccag

SEQ ID NO: 1179902 - RNA, 21 nt, Human
ggucucacuauguugcccagg

SEQ ID NO: 1179903 - RNA, 22 nt, Human
ggucucacucugucgcccaguc

SEQ ID NO: 1179904 - RNA, 23 nt, Human
ggucucacucugucgcccagucu

SEQ ID NO: 1179905 - RNA, 14 nt, Human
ggucugacccacug

SEQ ID NO: 1179906 - RNA, 22 nt, Human
ggugaccagcaccaucucuccu

SEQ ID NO: 1179907 - RNA, 13 nt, Human
gguuauggagagg

SEQ ID NO: 1179908 - RNA, 17 nt, Human
gguuaggcauuguggga

SEQ ID NO: 1179909 - RNA, 21 nt, Human
gguuacccaguuagcucucaa

SEQ ID NO: 1179910 - RNA, 20 nt, Human
gguucacugcaaccuccgcc

SEQ ID NO: 1179911 - RNA, 13 nt, Human
gguugagguuuca

SEQ ID NO: 1179912 - RNA, 13 nt, Human
gguucaaagauau

SEQ ID NO: 1179913 - RNA, 21 nt, Human
gguucaaagauauuuugcuuu

SEQ ID NO: 1179914 - RNA, 12 nt, Human
gguggcuggguu

SEQ ID NO: 1179915 - RNA, 14 nt, Human
gguggugaccucug

SEQ ID NO: 1179916 - RNA, 15 nt, Human
gguggugaccucugc

SEQ ID NO: 1179917 - RNA, 16 nt, Human
gguggugaccucugcc

SEQ ID NO: 1179918 - RNA, 21 nt, Human
ggugguuauggagaggguguc

SEQ ID NO: 1179919 - RNA, 17 nt, Human
ggugguuucagaaaugu

SEQ ID NO: 1179920 - RNA, 18 nt, Human
ggugguuucagaaaugug

SEQ ID NO: 1179921 - RNA, 15 nt, Human
ggugguuuucuguuc

SEQ ID NO: 1179922 - RNA, 18 nt, Human
ggugguuuucuguucuuu

SEQ ID NO: 1179923 - RNA, 17 nt, Human
ggugucaagagggucug

SEQ ID NO: 1179924 - RNA, 19 nt, Human
ggugucaagagggucugag

SEQ ID NO: 1179925 - RNA, 19 nt, Human
ggugucaccugaagacuca

SEQ ID NO: 1179926 - RNA, 16 nt, Human
guuuccuggcacugcu

SEQ ID NO: 1179927 - RNA, 20 nt, Human
guuuccuggcacugcuucca

SEQ ID NO: 1179928 - RNA, 21 nt, Human
guuuccuggcacugcuuccag

SEQ ID NO: 1179929 - RNA, 22 nt, Human
guuuccuggcacugcuuccagu

SEQ ID NO: 1179930 - RNA, 18 nt, Human
guuucagaaauguguuau

SEQ ID NO: 1179931 - RNA, 20 nt, Human
guuuagcuggaaaaguaugu

SEQ ID NO: 1179932 - RNA, 21 nt, Human
gguuggccccugcccggcugc

SEQ ID NO: 1179933 - RNA, 13 nt, Human
guuuagaaagcuu

SEQ ID NO: 1179934 - RNA, 17 nt, Human
guuuagaaagcuugccc

SEQ ID NO: 1179935 - RNA, 17 nt, Human
guuuguaaauuaacuuu

SEQ ID NO: 1179936 - RNA, 19 nt, Human
guuuguaaauuaacuuuua

SEQ ID NO: 1179937 - RNA, 20 nt, Human
guuuguaaauuaacuuuuau

SEQ ID NO: 1179938 - RNA, 17 nt, Human
guuugauuaaauucuug

SEQ ID NO: 1179939 - RNA, 19 nt, Human
guuugauuaaauucuugca

SEQ ID NO: 1179940 - RNA, 22 nt, Human
guuugauuaaauucuugcaaag

SEQ ID NO: 1179941 - RNA, 23 nt, Human
guuugauuaaauucuugcaaagu

SEQ ID NO: 1179942 - RNA, 14 nt, Human
guuucuaaagcugc

SEQ ID NO: 1179943 - RNA, 15 nt, Human
guuucuaaagcugcc

SEQ ID NO: 1179944 - RNA, 16 nt, Human
guuucuaaagcugcca

SEQ ID NO: 1179945 - RNA, 20 nt, Human
guuucuaaagcugccagccg

SEQ ID NO: 1179946 - RNA, 16 nt, Human
guuugaaccaagaacu

SEQ ID NO: 1179947 - RNA, 18 nt, Human
guuuguuucugaaaggga

SEQ ID NO: 1179948 - RNA, 18 nt, Human
guuuucaggcuagaugua

SEQ ID NO: 1179949 - RNA, 16 nt, Human
guuuucaguguacaug

SEQ ID NO: 1179950 - RNA, 17 nt, Human
guuuucaguguacaugg

SEQ ID NO: 1179951 - RNA, 20 nt, Human
guuuuccagguuuaagcugu

SEQ ID NO: 1179952 - RNA, 12 nt, Human
guuuucucuuga

SEQ ID NO: 1179953 - RNA, 19 nt, Human
guuuucucuugagagggug

SEQ ID NO: 1179954 - RNA, 19 nt, Human
guuuuuauggcuuuugugc

SEQ ID NO: 1179955 - RNA, 22 nt, Human
guuuuuauggcuuuugugcauu

SEQ ID NO: 1179956 - RNA, 23 nt, Human
guuuuuauggcuuuugugcauua

SEQ ID NO: 1179957 - RNA, 20 nt, Human
uaaaaaacugcugacuguuu

SEQ ID NO: 1179958 - RNA, 23 nt, Human
uaaaaaacugcugacuguuuucu

SEQ ID NO: 1179959 - RNA, 16 nt, Human
uaaaaaagaaacauuu

SEQ ID NO: 1179960 - RNA, 14 nt, Human
uaaacuuaaucuaa

SEQ ID NO: 1179961 - RNA, 18 nt, Human
uaaacuuaaucuaaaugg

SEQ ID NO: 1179962 - RNA, 19 nt, Human
uaaacuuaaucuaaaugga

SEQ ID NO: 1179963 - RNA, 16 nt, Human
uaaacuuuaccuuuuu

SEQ ID NO: 1179964 - RNA, 22 nt, Human
uaaacuuuaccuuuuuuauaca

SEQ ID NO: 1179965 - RNA, 19 nt, Human
uaaacaagaccacguuucu

SEQ ID NO: 1179966 - RNA, 18 nt, Human
uaaacaagaccacguuuc

SEQ ID NO: 1179967 - RNA, 15 nt, Human
uaaaaaugguuuaaa

SEQ ID NO: 1179968 - RNA, 19 nt, Human
uaaaauccauacauuugug

SEQ ID NO: 1179969 - RNA, 17 nt, Human
uaaauaaaaauaauccu

SEQ ID NO: 1179970 - RNA, 13 nt, Human
uaaaguuucuguu

SEQ ID NO: 1179971 - RNA, 21 nt, Human
uaaaguguauuuuuuuacuaa

SEQ ID NO: 1179972 - RNA, 22 nt, Human
uaaaguguauuuuuuuacuaau

SEQ ID NO: 1179973 - RNA, 23 nt, Human
uaaaguguauuuuuuuacuaaua

SEQ ID NO: 1179974 - RNA, 19 nt, Human
uaaaucagccguguaacca

SEQ ID NO: 1179975 - RNA, 18 nt, Human
uaaauauaugcuaagucu

SEQ ID NO: 1179976 - RNA, 13 nt, Human
uaacagaaaugua

SEQ ID NO: 1179977 - RNA, 14 nt, Human
uaacagaaauguac

SEQ ID NO: 1179978 - RNA, 15 nt, Human
uaacagaaauguaca

SEQ ID NO: 1179979 - RNA, 20 nt, Human
uaacuuuuauaaacuuuacc

SEQ ID NO: 1179980 - RNA, 19 nt, Human
uaacaggcagauacaggaa

SEQ ID NO: 1179981 - RNA, 14 nt, Human
uaaccagcagaaau

SEQ ID NO: 1179982 - RNA, 16 nt, Human
uaaccagcagaaaugc

SEQ ID NO: 1179983 - RNA, 19 nt, Human
uaaccagcagaaaugccuu

SEQ ID NO: 1179984 - RNA, 17 nt, Human
uaaccaggggccaugaa

SEQ ID NO: 1179985 - RNA, 19 nt, Human
uaaggaugcuuguacauaa

SEQ ID NO: 1179986 - RNA, 20 nt, Human
uaagccagacaucaacagau

SEQ ID NO: 1179987 - RNA, 21 nt, Human
uaagccagacaucaacagaua

SEQ ID NO: 1179988 - RNA, 20 nt, Human
uaaggaugcuuguacauaau

SEQ ID NO: 1179989 - RNA, 21 nt, Human
uaaggaugcuuguacauaaug

SEQ ID NO: 1179990 - RNA, 22 nt, Human
uaaggaugcuuguacauaaugc

SEQ ID NO: 1179991 - RNA, 23 nt, Human
uaaggaugcuuguacauaaugcg

SEQ ID NO: 1179992 - RNA, 16 nt, Human
uaaggauguucuagca

SEQ ID NO: 1179993 - RNA, 16 nt, Human
uaagcauuccaacuau

SEQ ID NO: 1179994 - RNA, 18 nt, Human
uaagcauuccaacuaucu

SEQ ID NO: 1179995 - RNA, 20 nt, Human
uaagcauuccaacuaucuca

SEQ ID NO: 1179996 - RNA, 13 nt, Human
uaagccagacauc

SEQ ID NO: 1179997 - RNA, 21 nt, Human
uaacuuuuauaaacuuuaccu

SEQ ID NO: 1179998 - RNA, 22 nt, Human
uaacuuuuauaaacuuuaccuu

SEQ ID NO: 1179999 - RNA, 12 nt, Human
uaagagggaggg

SEQ ID NO: 1180000 - RNA, 22 nt, Human
uaagagggagggagggcuccag

SEQ ID NO: 1180001 - RNA, 23 nt, Human
uaagagggagggagggcuccaga

SEQ ID NO: 1180002 - RNA, 14 nt, Human
uaagauaaaugugc

SEQ ID NO: 1180003 - RNA, 16 nt, Human
uaagauaaaugugcug

SEQ ID NO: 1180004 - RNA, 17 nt, Human
uaagauaaaugugcuga

SEQ ID NO: 1180005 - RNA, 19 nt, Human
uaaugccacuaaauugaca

SEQ ID NO: 1180006 - RNA, 11 nt, Human
uaaucuaaaug

SEQ ID NO: 1180007 - RNA, 12 nt, Human
uaaucuaaaugg

SEQ ID NO: 1180008 - RNA, 20 nt, Human
uaagugguacuaacuuuccu

SEQ ID NO: 1180009 - RNA, 15 nt, Human
uaauaauguuucaaa

SEQ ID NO: 1180010 - RNA, 14 nt, Human
uaauacaccacuac

SEQ ID NO: 1180011 - RNA, 14 nt, Human
uaaugcgugcauac

SEQ ID NO: 1180012 - RNA, 14 nt, Human
uaauguuucaaaca

SEQ ID NO: 1180013 - RNA, 15 nt, Human
uaauguuucaaacau

SEQ ID NO: 1180014 - RNA, 22 nt, Human
uaauguuucaaacauauauaac

SEQ ID NO: 1180015 - RNA, 17 nt, Human
uaauuaaaacacaacau

SEQ ID NO: 1180016 - RNA, 18 nt, Human
uaauucuuagcucauucu

SEQ ID NO: 1180017 - RNA, 20 nt, Human
uaauugacaggauuauugga

SEQ ID NO: 1180018 - RNA, 22 nt, Human
uaauugacaggauuauuggaaa

SEQ ID NO: 1180019 - RNA, 20 nt, Human
uaauuuguaguguuggagaa

SEQ ID NO: 1180020 - RNA, 23 nt, Human
uaauuuguaguguuggagaagaa

SEQ ID NO: 1180021 - RNA, 14 nt, Human
uaauuugugauaca

SEQ ID NO: 1180022 - RNA, 15 nt, Human
uaauuugugauacaa

SEQ ID NO: 1180023 - RNA, 18 nt, Human
uaauuugugauacaaugc

SEQ ID NO: 1180024 - RNA, 19 nt, Human
uaauuugugauacaaugcu

SEQ ID NO: 1180025 - RNA, 22 nt, Human
uaauuugugauacaaugcugug

SEQ ID NO: 1180026 - RNA, 22 nt, Human
uaauuggaaaggcagcucuaaa

SEQ ID NO: 1180027 - RNA, 13 nt, Human
uaauuuugugaag

SEQ ID NO: 1180028 - RNA, 17 nt, Human
uacacaaugguuuucuu

SEQ ID NO: 1180029 - RNA, 21 nt, Human
uacacaaugguuuucuugugu

SEQ ID NO: 1180030 - RNA, 23 nt, Human
uacacaaugguuuucuugugugu

SEQ ID NO: 1180031 - RNA, 21 nt, Human
uacacacacacgcgugcacac

SEQ ID NO: 1180032 - RNA, 15 nt, Human
uacacacacauacac

SEQ ID NO: 1180033 - RNA, 22 nt, Human
uacacacacacacacagccaca

SEQ ID NO: 1180034 - RNA, 23 nt, Human
uacacacacacacacagccacac

SEQ ID NO: 1180035 - RNA, 22 nt, Human
uacacacugcauguuugugauu

SEQ ID NO: 1180036 - RNA, 16 nt, Human
uacacugugcugaguc

SEQ ID NO: 1180037 - RNA, 19 nt, Human
uacaggaaaagcugcugac

SEQ ID NO: 1180038 - RNA, 16 nt, Human
uacaggcacccaccau

SEQ ID NO: 1180039 - RNA, 22 nt, Human
uacagcuugaccgugaggccag

SEQ ID NO: 1180040 - RNA, 23 nt, Human
uacagcuugaccgugaggccaga

SEQ ID NO: 1180041 - RNA, 17 nt, Human
uacaggaaaagcugcug

SEQ ID NO: 1180042 - RNA, 18 nt, Human
uacaggaaaagcugcuga

SEQ ID NO: 1180043 - RNA, 13 nt, Human
uacagaauuuuau

SEQ ID NO: 1180044 - RNA, 17 nt, Human
uacacuguuucaaacuu

SEQ ID NO: 1180045 - RNA, 18 nt, Human
uacacuguuucaaacuuu

SEQ ID NO: 1180046 - RNA, 19 nt, Human
uacacuguuucaaacuuua

SEQ ID NO: 1180047 - RNA, 13 nt, Human
uacacuuuaugca

SEQ ID NO: 1180048 - RNA, 23 nt, Human
uaccacaggaaccacaagacugc

SEQ ID NO: 1180049 - RNA, 18 nt, Human
uaccaccagucugacugu

SEQ ID NO: 1180050 - RNA, 23 nt, Human
uaccauuuugggguacccacugc

SEQ ID NO: 1180051 - RNA, 13 nt, Human
uaccacagacaua

SEQ ID NO: 1180052 - RNA, 12 nt, Human
uacccaccccca

SEQ ID NO: 1180053 - RNA, 15 nt, Human
uacccacccccaccc

SEQ ID NO: 1180054 - RNA, 17 nt, Human
uacccacccccacccaa

SEQ ID NO: 1180055 - RNA, 19 nt, Human
uacccacccccacccaagg

SEQ ID NO: 1180056 - RNA, 23 nt, Human
uacccacccccacccaagggccu

SEQ ID NO: 1180057 - RNA, 11 nt, Human
uacccacugcu

SEQ ID NO: 1180058 - RNA, 12 nt, Human
uacccacugcuc

SEQ ID NO: 1180059 - RNA, 13 nt, Human
uacccacugcucu

SEQ ID NO: 1180060 - RNA, 14 nt, Human
uacccacugcucug

SEQ ID NO: 1180061 - RNA, 15 nt, Human
uacccacugcucugg

SEQ ID NO: 1180062 - RNA, 18 nt, Human
uacccagcgagcccuggu

SEQ ID NO: 1180063 - RNA, 22 nt, Human
uacccaggugcuaggaacacuc

SEQ ID NO: 1180064 - RNA, 21 nt, Human
uacaugagguacugagaguga

SEQ ID NO: 1180065 - RNA, 22 nt, Human
uacaugagguacugagagugaa

SEQ ID NO: 1180066 - RNA, 16 nt, Human
uacauuuguauaaaau

SEQ ID NO: 1180067 - RNA, 17 nt, Human
uacauuuguauaaaaua

SEQ ID NO: 1180068 - RNA, 11 nt, Human
uacauuugugu

SEQ ID NO: 1180069 - RNA, 19 nt, Human
uacaguuacucagaauucu

SEQ ID NO: 1180070 - RNA, 23 nt, Human
uacaguuacucagaauucucuag

SEQ ID NO: 1180071 - RNA, 18 nt, Human
uacauaagauaaaugugc

SEQ ID NO: 1180072 - RNA, 19 nt, Human
uacauaagauaaaugugcu

SEQ ID NO: 1180073 - RNA, 22 nt, Human
uacauaagauaaaugugcugaa

SEQ ID NO: 1180074 - RNA, 21 nt, Human
uacuguaucaugacaaagacu

SEQ ID NO: 1180075 - RNA, 17 nt, Human
uacugcauaugaaagga

SEQ ID NO: 1180076 - RNA, 15 nt, Human
uacuuguggacacag

SEQ ID NO: 1180077 - RNA, 18 nt, Human
uacuuguggacacagcuc

SEQ ID NO: 1180078 - RNA, 19 nt, Human
uacuuguggacacagcucu

SEQ ID NO: 1180079 - RNA, 15 nt, Human
uagaaauauaauuga

SEQ ID NO: 1180080 - RNA, 20 nt, Human
uagaaauaucugaaaaugua

SEQ ID NO: 1180081 - RNA, 21 nt, Human
uagaaauaucugaaaauguau

SEQ ID NO: 1180082 - RNA, 23 nt, Human
uagaaauaucugaaaauguaugu

SEQ ID NO: 1180083 - RNA, 18 nt, Human
uacucgaguuacagacaa

SEQ ID NO: 1180084 - RNA, 15 nt, Human
uacugaggugcuaug

SEQ ID NO: 1180085 - RNA, 14 nt, Human
uacucccaucugug

SEQ ID NO: 1180086 - RNA, 16 nt, Human
uacucccaucugugaa

SEQ ID NO: 1180087 - RNA, 17 nt, Human
uacucccaucugugaaa

SEQ ID NO: 1180088 - RNA, 20 nt, Human
uacuacaguccucccaucuc

SEQ ID NO: 1180089 - RNA, 13 nt, Human
uacuacuccugua

SEQ ID NO: 1180090 - RNA, 12 nt, Human
uacucaccucac

SEQ ID NO: 1180091 - RNA, 14 nt, Human
uacucaccucaccc

SEQ ID NO: 1180092 - RNA, 16 nt, Human
uacucagaauucucua

SEQ ID NO: 1180093 - RNA, 22 nt, Human
uacucagaauucucuaguuuga

SEQ ID NO: 1180094 - RNA, 22 nt, Human
uacccaucccauaugccugggc

SEQ ID NO: 1180095 - RNA, 20 nt, Human
uaccuuuguauucucuccug

SEQ ID NO: 1180096 - RNA, 18 nt, Human
uaccuuuuuuauacauaa

SEQ ID NO: 1180097 - RNA, 19 nt, Human
uaccuuuuuuauacauaaa

SEQ ID NO: 1180098 - RNA, 20 nt, Human
uaccuuuuuuauacauaaac

SEQ ID NO: 1180099 - RNA, 22 nt, Human
uaccuuuuuuauacauaaacaa

SEQ ID NO: 1180100 - RNA, 18 nt, Human
uacuaaccagcagaaaug

SEQ ID NO: 1180101 - RNA, 19 nt, Human
uacuaaccagcagaaaugc

SEQ ID NO: 1180102 - RNA, 13 nt, Human
uacuaacuuuccu

SEQ ID NO: 1180103 - RNA, 15 nt, Human
uacuaauagacaauu

SEQ ID NO: 1180104 - RNA, 17 nt, Human
uacuaauagacaauuua

SEQ ID NO: 1180105 - RNA, 20 nt, Human
uacuaauagacaauuuauua

SEQ ID NO: 1180106 - RNA, 12 nt, Human
uacuacaguccu

SEQ ID NO: 1180107 - RNA, 17 nt, Human
uacuacaguccucccau

SEQ ID NO: 1180108 - RNA, 16 nt, Human
uagagagagaccacuu

SEQ ID NO: 1180109 - RNA, 19 nt, Human
uagagguucaaagauauuu

SEQ ID NO: 1180110 - RNA, 21 nt, Human
uagagguucaaagauauuuug

SEQ ID NO: 1180111 - RNA, 17 nt, Human
uagaguuuagcuggaaa

SEQ ID NO: 1180112 - RNA, 18 nt, Human
uagaguuuagcuggaaaa

SEQ ID NO: 1180113 - RNA, 18 nt, Human
uagauaauacaccacuac

SEQ ID NO: 1180114 - RNA, 12 nt, Human
uagauguauaua

SEQ ID NO: 1180115 - RNA, 16 nt, Human
uagauguauguacuuc

SEQ ID NO: 1180116 - RNA, 20 nt, Human
uagauguauguacuucaugc

SEQ ID NO: 1180117 - RNA, 19 nt, Human
uagcagagaaugaaagggc

SEQ ID NO: 1180118 - RNA, 23 nt, Human
uagcagagaaugaaagggcccag

SEQ ID NO: 1180119 - RNA, 16 nt, Human
uagcauacguacacau

SEQ ID NO: 1180120 - RNA, 14 nt, Human
uagcccaaaaccaa

SEQ ID NO: 1180121 - RNA, 18 nt, Human
uagcugggacuacaggug

SEQ ID NO: 1180122 - RNA, 12 nt, Human
uagcugggacua

SEQ ID NO: 1180123 - RNA, 20 nt, Human
uagcugggacuacaggcacc

SEQ ID NO: 1180124 - RNA, 11 nt, Human
uagcugggacu

SEQ ID NO: 1180125 - RNA, 21 nt, Human
uagcucuaggagggcuggcaa

SEQ ID NO: 1180126 - RNA, 17 nt, Human
uagccugccucuucucu

SEQ ID NO: 1180127 - RNA, 15 nt, Human
uaggaagguuaaugu

SEQ ID NO: 1180128 - RNA, 23 nt, Human
uaggaauugacccacaagaaaug

SEQ ID NO: 1180129 - RNA, 13 nt, Human
uaggccaugggac

SEQ ID NO: 1180130 - RNA, 16 nt, Human
uaggccaugggacagg

SEQ ID NO: 1180131 - RNA, 13 nt, Human
uaggccuggccag

SEQ ID NO: 1180132 - RNA, 14 nt, Human
uaggccuggccaga

SEQ ID NO: 1180133 - RNA, 13 nt, Human
uaggaacacuccu

SEQ ID NO: 1180134 - RNA, 14 nt, Human
uaggaacacuccuu

SEQ ID NO: 1180135 - RNA, 17 nt, Human
uaggaacacuccuucac

SEQ ID NO: 1180136 - RNA, 21 nt, Human
uaggaacuuaaauaaugugaa

SEQ ID NO: 1180137 - RNA, 13 nt, Human
uaggaagacuuug

SEQ ID NO: 1180138 - RNA, 14 nt, Human
uaggaagacuuugg

SEQ ID NO: 1180139 - RNA, 15 nt, Human
uaggaagacuuugga

SEQ ID NO: 1180140 - RNA, 16 nt, Human
uaggaagacuuuggaa

SEQ ID NO: 1180141 - RNA, 17 nt, Human
uaggaagacuuuggaaa

SEQ ID NO: 1180142 - RNA, 18 nt, Human
uagucaaauugugugaaa

SEQ ID NO: 1180143 - RNA, 15 nt, Human
uaguggauguucuga

SEQ ID NO: 1180144 - RNA, 21 nt, Human
uaguuguaccgcaaugugacu

SEQ ID NO: 1180145 - RNA, 13 nt, Human
uaguuucuccaag

SEQ ID NO: 1180146 - RNA, 23 nt, Human
uaguuugauuaaauucuugcaaa

SEQ ID NO: 1180147 - RNA, 12 nt, Human
uaguuugcaguu

SEQ ID NO: 1180148 - RNA, 14 nt, Human
uauaauguaagcuc

SEQ ID NO: 1180149 - RNA, 19 nt, Human
uauaauguaagcucuacug

SEQ ID NO: 1180150 - RNA, 20 nt, Human
uauaauguaagcucuacuga

SEQ ID NO: 1180151 - RNA, 17 nt, Human
uauaauucuacuuugag

SEQ ID NO: 1180152 - RNA, 15 nt, Human
uaguuuuauaugcuu

SEQ ID NO: 1180153 - RNA, 18 nt, Human
uauaacaaugcuguauuu

SEQ ID NO: 1180154 - RNA, 18 nt, Human
uauaaugaaugaaacauu

SEQ ID NO: 1180155 - RNA, 20 nt, Human
uauaaugaaugaaacauuuu

SEQ ID NO: 1180156 - RNA, 17 nt, Human
uaucaugacaaagacug

SEQ ID NO: 1180157 - RNA, 16 nt, Human
uaucaugacaaagacu

SEQ ID NO: 1180158 - RNA, 19 nt, Human
uauauuuuuuguuaaauga

SEQ ID NO: 1180159 - RNA, 17 nt, Human
uaucaggugcugccauc

SEQ ID NO: 1180160 - RNA, 14 nt, Human
uauccuucagccug

SEQ ID NO: 1180161 - RNA, 19 nt, Human
uaucgucacugcuuaacuu

SEQ ID NO: 1180162 - RNA, 15 nt, Human
uaucuaaauguugaa

SEQ ID NO: 1180163 - RNA, 16 nt, Human
uaucuaaauguugaaa

SEQ ID NO: 1180164 - RNA, 23 nt, Human
uauauuuauuacuguaagaaaau

SEQ ID NO: 1180165 - RNA, 13 nt, Human
uauauuugaaaua

SEQ ID NO: 1180166 - RNA, 14 nt, Human
uauauuugaaauau

SEQ ID NO: 1180167 - RNA, 20 nt, Human
uauauuugaaauauugacuu

SEQ ID NO: 1180168 - RNA, 20 nt, Human
uauaugcucugcauguuaca

SEQ ID NO: 1180169 - RNA, 23 nt, Human
uauacuguaaagaaagagagaaa

SEQ ID NO: 1180170 - RNA, 22 nt, Human
ucaaaacgguuuuacugcagcu

SEQ ID NO: 1180171 - RNA, 14 nt, Human
ucaaacucuuaaaa

SEQ ID NO: 1180172 - RNA, 14 nt, Human
uaucugaaaaugua

SEQ ID NO: 1180173 - RNA, 15 nt, Human
uaucugaaaauguau

SEQ ID NO: 1180174 - RNA, 20 nt, Human
uaucugaaaauguaugugua

SEQ ID NO: 1180175 - RNA, 23 nt, Human
uauuuauuaaaugcccagccccu

SEQ ID NO: 1180176 - RNA, 13 nt, Human
uauuuauuacugu

SEQ ID NO: 1180177 - RNA, 22 nt, Human
uauuucuaugaaauauuauguu

SEQ ID NO: 1180178 - RNA, 13 nt, Human
ucaaugcagcccc

SEQ ID NO: 1180179 - RNA, 18 nt, Human
ucaaugcacugacauugu

SEQ ID NO: 1180180 - RNA, 13 nt, Human
ucaauuacaggaa

SEQ ID NO: 1180181 - RNA, 18 nt, Human
ucaauuacaggaaguacu

SEQ ID NO: 1180182 - RNA, 13 nt, Human
ucaauaggaaaaa

SEQ ID NO: 1180183 - RNA, 14 nt, Human
ucaauaggaaaaac

SEQ ID NO: 1180184 - RNA, 17 nt, Human
ucaauaggaaaaacuga

SEQ ID NO: 1180185 - RNA, 14 nt, Human
ucaaugcacugaca

SEQ ID NO: 1180186 - RNA, 19 nt, Human
ucaauuacaggaaguacug

SEQ ID NO: 1180187 - RNA, 20 nt, Human
ucaauuacaggaaguacugg

SEQ ID NO: 1180188 - RNA, 21 nt, Human
ucacacaguauuacuucugcu

SEQ ID NO: 1180189 - RNA, 22 nt, Human
ucacacaguauuacuucugcua

SEQ ID NO: 1180190 - RNA, 13 nt, Human
ucacacagugagu

SEQ ID NO: 1180191 - RNA, 22 nt, Human
ucacacagugagucgaggacag

SEQ ID NO: 1180192 - RNA, 23 nt, Human
ucacacagugagucgaggacagg

SEQ ID NO: 1180193 - RNA, 21 nt, Human
ucacacaugagcaucaggcca

SEQ ID NO: 1180194 - RNA, 22 nt, Human
ucacacaugagcaucaggccag

SEQ ID NO: 1180195 - RNA, 19 nt, Human
ucacaggaaguagaggagg

SEQ ID NO: 1180196 - RNA, 23 nt, Human
ucacaggacagcccuucuuucca

SEQ ID NO: 1180197 - RNA, 11 nt, Human
ucacaggcagg

SEQ ID NO: 1180198 - RNA, 22 nt, Human
ucaaacucuugaccucagguga

SEQ ID NO: 1180199 - RNA, 15 nt, Human
ucaaacuuuacuaug

SEQ ID NO: 1180200 - RNA, 16 nt, Human
ucaaacuuuacuaugg

SEQ ID NO: 1180201 - RNA, 23 nt, Human
ucaaacugaaugaaacccccaca

SEQ ID NO: 1180202 - RNA, 13 nt, Human
ucaaccuccuggg

SEQ ID NO: 1180203 - RNA, 14 nt, Human
ucaaccuccugggc

SEQ ID NO: 1180204 - RNA, 19 nt, Human
ucaacuccaaacugacucu

SEQ ID NO: 1180205 - RNA, 16 nt, Human
ucaagcgauucuucug

SEQ ID NO: 1180206 - RNA, 17 nt, Human
ucaagcgauucuucugc

SEQ ID NO: 1180207 - RNA, 18 nt, Human
ucaaggauccugagccag

SEQ ID NO: 1180208 - RNA, 19 nt, Human
ucaaggauccugagccaga

SEQ ID NO: 1180209 - RNA, 20 nt, Human
ucaaggauccugagccagau

SEQ ID NO: 1180210 - RNA, 23 nt, Human
ucaaggauccugagccagauuuc

SEQ ID NO: 1180211 - RNA, 22 nt, Human
ucaagugauucuccugccucag

SEQ ID NO: 1180212 - RNA, 16 nt, Human
ucacaggcagguccag

SEQ ID NO: 1180213 - RNA, 12 nt, Human
ucacaggcaggu

SEQ ID NO: 1180214 - RNA, 15 nt, Human
ucacaggcaggucca

SEQ ID NO: 1180215 - RNA, 14 nt, Human
ucaccuuucccauc

SEQ ID NO: 1180216 - RNA, 12 nt, Human
ucaccuuugucc

SEQ ID NO: 1180217 - RNA, 14 nt, Human
ucaccuuugucccc

SEQ ID NO: 1180218 - RNA, 15 nt, Human
ucaccuuugucccca

SEQ ID NO: 1180219 - RNA, 17 nt, Human
ucaccuuuguccccacc

SEQ ID NO: 1180220 - RNA, 18 nt, Human
ucaccuuuguccccaccg

SEQ ID NO: 1180221 - RNA, 22 nt, Human
ucaccuuuguccccaccgcaga

SEQ ID NO: 1180222 - RNA, 13 nt, Human
ucacgccacugca

SEQ ID NO: 1180223 - RNA, 14 nt, Human
ucacgccacugcac

SEQ ID NO: 1180224 - RNA, 16 nt, Human
ucacgccacugcacua

SEQ ID NO: 1180225 - RNA, 19 nt, Human
ucacgccuguaauccuagc

SEQ ID NO: 1180226 - RNA, 20 nt, Human
ucacgccuguaauccuagca

SEQ ID NO: 1180227 - RNA, 13 nt, Human
ucacuccuugaaa

SEQ ID NO: 1180228 - RNA, 14 nt, Human
ucacggaagagccu

SEQ ID NO: 1180229 - RNA, 16 nt, Human
ucacggaagagccuug

SEQ ID NO: 1180230 - RNA, 17 nt, Human
ucacggaagagccuugc

SEQ ID NO: 1180231 - RNA, 13 nt, Human
ucacggcucacug

SEQ ID NO: 1180232 - RNA, 15 nt, Human
ucacggcucacugca

SEQ ID NO: 1180233 - RNA, 20 nt, Human
ucacggcucacugcagccuc

SEQ ID NO: 1180234 - RNA, 12 nt, Human
ucacucuccuug

SEQ ID NO: 1180235 - RNA, 14 nt, Human
ucacucuccuuggu

SEQ ID NO: 1180236 - RNA, 23 nt, Human
ucacucuccuuggugucgggcau

SEQ ID NO: 1180237 - RNA, 12 nt, Human
ucacucuggcag

SEQ ID NO: 1180238 - RNA, 13 nt, Human
ucacucuggcagc

SEQ ID NO: 1180239 - RNA, 14 nt, Human
ucacucuggcagcu

SEQ ID NO: 1180240 - RNA, 15 nt, Human
ucacucuggcagcuc

SEQ ID NO: 1180241 - RNA, 16 nt, Human
ucacucuggcagcuca

SEQ ID NO: 1180242 - RNA, 17 nt, Human
ucacucuggcagcucag

SEQ ID NO: 1180243 - RNA, 18 nt, Human
ucacucuggcagcucaga

SEQ ID NO: 1180244 - RNA, 19 nt, Human
ucacucuggcagcucagag

SEQ ID NO: 1180245 - RNA, 20 nt, Human
ucacucuggcagcucagaga

SEQ ID NO: 1180246 - RNA, 22 nt, Human
ucacucuggcagcucagagagg

SEQ ID NO: 1180247 - RNA, 12 nt, Human
ucacucugucgc

SEQ ID NO: 1180248 - RNA, 16 nt, Human
ucacucugucgcccag

SEQ ID NO: 1180249 - RNA, 19 nt, Human
ucacucugucgcccagucu

SEQ ID NO: 1180250 - RNA, 22 nt, Human
ucacucugucgcccagucugga

SEQ ID NO: 1180251 - RNA, 15 nt, Human
ucacugcuuaacuuc

SEQ ID NO: 1180252 - RNA, 17 nt, Human
ucacugcuuaacuucac

SEQ ID NO: 1180253 - RNA, 18 nt, Human
ucacugcuuaacuucaca

SEQ ID NO: 1180254 - RNA, 20 nt, Human
ucacugcuuaacuucacaua

SEQ ID NO: 1180255 - RNA, 17 nt, Human
ucacuugucaauaaaau

SEQ ID NO: 1180256 - RNA, 19 nt, Human
ucagcacgauuucuguuua

SEQ ID NO: 1180257 - RNA, 15 nt, Human
ucagacagcugccug

SEQ ID NO: 1180258 - RNA, 16 nt, Human
ucagacagcugccugg

SEQ ID NO: 1180259 - RNA, 17 nt, Human
ucagacagcugccuggg

SEQ ID NO: 1180260 - RNA, 18 nt, Human
ucagacagcugccuggga

SEQ ID NO: 1180261 - RNA, 19 nt, Human
ucagacagcugccugggau

SEQ ID NO: 1180262 - RNA, 20 nt, Human
ucagacagcugccugggauc

SEQ ID NO: 1180263 - RNA, 19 nt, Human
ucagacauagaauuaacac

SEQ ID NO: 1180264 - RNA, 22 nt, Human
ucagacauagaauuaacacaug

SEQ ID NO: 1180265 - RNA, 17 nt, Human
ucaguuguuaguguguc

SEQ ID NO: 1180266 - RNA, 13 nt, Human
ucauacccacccc

SEQ ID NO: 1180267 - RNA, 24 nt, Human
ucagucugauucccaagcucugcu

SEQ ID NO: 1180268 - RNA, 15 nt, Human
ucagucuggcccuuc

SEQ ID NO: 1180269 - RNA, 23 nt, Human
ucagugguuggcaauuguuucaa

SEQ ID NO: 1180270 - RNA, 11 nt, Human
ucaguguacau

SEQ ID NO: 1180271 - RNA, 13 nt, Human
ucagugugacuga

SEQ ID NO: 1180272 - RNA, 17 nt, Human
ucagugugacugaucuc

SEQ ID NO: 1180273 - RNA, 14 nt, Human
ucauacccaccccc

SEQ ID NO: 1180274 - RNA, 15 nt, Human
ucauacccaccccca

SEQ ID NO: 1180275 - RNA, 20 nt, Human
ucauacccacccccacccaa

SEQ ID NO: 1180276 - RNA, 21 nt, Human
ucauacccacccccacccaag

SEQ ID NO: 1180277 - RNA, 16 nt, Human
ucauuaggugugacug

SEQ ID NO: 1180278 - RNA, 18 nt, Human
ucauuaggugugacugaa

SEQ ID NO: 1180279 - RNA, 21 nt, Human
ucauuaggugugacugaauuu

SEQ ID NO: 1180280 - RNA, 22 nt, Human
ucauuaggugugacugaauuuc

SEQ ID NO: 1180281 - RNA, 20 nt, Human
uccaagcauuuagauguaua

SEQ ID NO: 1180282 - RNA, 14 nt, Human
uccacaagagccca

SEQ ID NO: 1180283 - RNA, 15 nt, Human
uccacaagagcccag

SEQ ID NO: 1180284 - RNA, 14 nt, Human
uccaccuacaugag

SEQ ID NO: 1180285 - RNA, 12 nt, Human
uccaccugccag

SEQ ID NO: 1180286 - RNA, 13 nt, Human
uccaccugccagg

SEQ ID NO: 1180287 - RNA, 15 nt, Human
uccaccugccaggga

SEQ ID NO: 1180288 - RNA, 12 nt, Human
uccacuuggucu

SEQ ID NO: 1180289 - RNA, 13 nt, Human
uccacuuggucug

SEQ ID NO: 1180290 - RNA, 14 nt, Human
uccacuuggucugu

SEQ ID NO: 1180291 - RNA, 16 nt, Human
uccagauccuggaaau

SEQ ID NO: 1180292 - RNA, 17 nt, Human
uccagauccuggaaauc

SEQ ID NO: 1180293 - RNA, 23 nt, Human
uccagccaaagccuccuccagcc

SEQ ID NO: 1180294 - RNA, 16 nt, Human
uccaaaauaaaacuuu

SEQ ID NO: 1180295 - RNA, 17 nt, Human
uccaaaauaaaacuuuu

SEQ ID NO: 1180296 - RNA, 18 nt, Human
uccaaaauaaaacuuuuu

SEQ ID NO: 1180297 - RNA, 23 nt, Human
uccaaacugacucuuaagaagac

SEQ ID NO: 1180298 - RNA, 20 nt, Human
uccaagaagcccaggaaagg

SEQ ID NO: 1180299 - RNA, 22 nt, Human
uccaagaagcccaggaaaggcu

SEQ ID NO: 1180300 - RNA, 19 nt, Human
uccaagaccuucuccuuca

SEQ ID NO: 1180301 - RNA, 17 nt, Human
uccaagcauuuagaugu

SEQ ID NO: 1180302 - RNA, 23 nt, Human
uccagcucaccagccccagugcc

SEQ ID NO: 1180303 - RNA, 14 nt, Human
uccauggacuuugu

SEQ ID NO: 1180304 - RNA, 15 nt, Human
uccauggacuuuguu

SEQ ID NO: 1180305 - RNA, 17 nt, Human
ucccaagcucugcuccu

SEQ ID NO: 1180306 - RNA, 17 nt, Human
ucccaacucaccccagc

SEQ ID NO: 1180307 - RNA, 12 nt, Human
ucccaagcucug

SEQ ID NO: 1180308 - RNA, 13 nt, Human
ucccaagcucugc

SEQ ID NO: 1180309 - RNA, 14 nt, Human
ucccaagcucugcu

SEQ ID NO: 1180310 - RNA, 15 nt, Human
ucccaagcucugcuc

SEQ ID NO: 1180311 - RNA, 14 nt, Human
ucccaacucacccc

SEQ ID NO: 1180312 - RNA, 15 nt, Human
ucccaacucacccca

SEQ ID NO: 1180313 - RNA, 16 nt, Human
ucccaacucaccccag

SEQ ID NO: 1180314 - RNA, 13 nt, Human
ucccaccucagcc

SEQ ID NO: 1180315 - RNA, 14 nt, Human
ucccaccucagccu

SEQ ID NO: 1180316 - RNA, 15 nt, Human
ucccaccucagccuc

SEQ ID NO: 1180317 - RNA, 16 nt, Human
ucccaccucagccucc

SEQ ID NO: 1180318 - RNA, 23 nt, Human
ucccaggcauuccccaggaggcc

SEQ ID NO: 1180319 - RNA, 22 nt, Human
ucccaggcauuccccaggaggc

SEQ ID NO: 1180320 - RNA, 20 nt, Human
ucccaggcauuccccaggag

SEQ ID NO: 1180321 - RNA, 21 nt, Human
ucccaggcauuccccaggagg

SEQ ID NO: 1180322 - RNA, 23 nt, Human
ucccaucucacacaugagcauca

SEQ ID NO: 1180323 - RNA, 21 nt, Human
ucccaucugugaaaggaaaga

SEQ ID NO: 1180324 - RNA, 13 nt, Human
uccccaggaggcc

SEQ ID NO: 1180325 - RNA, 20 nt, Human
uccccgcacugggcuugggg

SEQ ID NO: 1180326 - RNA, 22 nt, Human
uccccuguagagugggagcuga

SEQ ID NO: 1180327 - RNA, 23 nt, Human
uccccuguccccgcacugggcuu

SEQ ID NO: 1180328 - RNA, 24 nt, Human
uccccugcuggguguggcgcagca

SEQ ID NO: 1180329 - RNA, 19 nt, Human
uccccuguagagugggagc

SEQ ID NO: 1180330 - RNA, 14 nt, Human
uccccugcugggug

SEQ ID NO: 1180331 - RNA, 15 nt, Human
uccccugcugggugu

SEQ ID NO: 1180332 - RNA, 20 nt, Human
uccccugcuggguguggcgc

SEQ ID NO: 1180333 - RNA, 21 nt, Human
uccccugcuggguguggcgca

SEQ ID NO: 1180334 - RNA, 18 nt, Human
uccccuguuuguuucuga

SEQ ID NO: 1180335 - RNA, 15 nt, Human
ucccucccucuuucc

SEQ ID NO: 1180336 - RNA, 17 nt, Human
ucccucccucuuucccu

SEQ ID NO: 1180337 - RNA, 15 nt, Human
ucccuacuguaauuu

SEQ ID NO: 1180338 - RNA, 14 nt, Human
uccuuaccagcaga

SEQ ID NO: 1180339 - RNA, 12 nt, Human
uccuucuguccu

SEQ ID NO: 1180340 - RNA, 19 nt, Human
uccuucuguccuacucugu

SEQ ID NO: 1180341 - RNA, 15 nt, Human
uccugguguggaaga

SEQ ID NO: 1180342 - RNA, 10 nt, Human
ucccucccuu

SEQ ID NO: 1180343 - RNA, 22 nt, Human
uccuggcaugggaaugaauguc

SEQ ID NO: 1180344 - RNA, 18 nt, Human
ucccucccuuccucuuuc

SEQ ID NO: 1180345 - RNA, 17 nt, Human
uccuggcccacugcauc

SEQ ID NO: 1180346 - RNA, 15 nt, Human
ucgaguuacagacaa

SEQ ID NO: 1180347 - RNA, 17 nt, Human
ucgaguuacagacaaag

SEQ ID NO: 1180348 - RNA, 15 nt, Human
ucuaacuucaccaua

SEQ ID NO: 1180349 - RNA, 16 nt, Human
ucuaacuucaccauau

SEQ ID NO: 1180350 - RNA, 22 nt, Human
ucuaacuucaccauauuaccac

SEQ ID NO: 1180351 - RNA, 21 nt, Human
ucuacacuaagagagaaugag

SEQ ID NO: 1180352 - RNA, 17 nt, Human
ucuacacuccagugaga

SEQ ID NO: 1180353 - RNA, 12 nt, Human
ucuacacugugc

SEQ ID NO: 1180354 - RNA, 14 nt, Human
ucuacacugugcug

SEQ ID NO: 1180355 - RNA, 15 nt, Human
ucuacacugugcuga

SEQ ID NO: 1180356 - RNA, 21 nt, Human
ucuacacugugcugagucuga

SEQ ID NO: 1180357 - RNA, 18 nt, Human
ucuacugaggugcuaugu

SEQ ID NO: 1180358 - RNA, 19 nt, Human
ucuacugaggugcuauguu

SEQ ID NO: 1180359 - RNA, 22 nt, Human
ucuacugaggugcuauguucuu

SEQ ID NO: 1180360 - RNA, 22 nt, Human
ucuagggaaaaaccagcgugug

SEQ ID NO: 1180361 - RNA, 13 nt, Human
ucucaaacucuug

SEQ ID NO: 1180362 - RNA, 21 nt, Human
ucucaaacucuugaccucagg

SEQ ID NO: 1180363 - RNA, 22 nt, Human
ucucaaacucuugaccucaggu

SEQ ID NO: 1180364 - RNA, 15 nt, Human
ucucaacuccaaacu

SEQ ID NO: 1180365 - RNA, 17 nt, Human
ucucacucugucgccca

SEQ ID NO: 1180366 - RNA, 18 nt, Human
ucucacucugucgcccag

SEQ ID NO: 1180367 - RNA, 22 nt, Human
ucucacucugucgcccagucug

SEQ ID NO: 1180368 - RNA, 18 nt, Human
ucucacuguugcccaggc

SEQ ID NO: 1180369 - RNA, 19 nt, Human
ucucacuguugcccaggcu

SEQ ID NO: 1180370 - RNA, 20 nt, Human
ucucacuguugcccaggcug

SEQ ID NO: 1180371 - RNA, 21 nt, Human
ucucacuguugcccaggcugg

SEQ ID NO: 1180372 - RNA, 17 nt, Human
ucucagaaucucaaaua

SEQ ID NO: 1180373 - RNA, 21 nt, Human
ucucagaaucucaaauaacua

SEQ ID NO: 1180374 - RNA, 21 nt, Human
ucucagugucaaugcagcccc

SEQ ID NO: 1180375 - RNA, 14 nt, Human
ucucccccagcccc

SEQ ID NO: 1180376 - RNA, 15 nt, Human
ucucccccagcccca

SEQ ID NO: 1180377 - RNA, 17 nt, Human
ucucccccagccccauc

SEQ ID NO: 1180378 - RNA, 18 nt, Human
ucucccccagccccaucc

SEQ ID NO: 1180379 - RNA, 20 nt, Human
ucucccccagccccauccuc

SEQ ID NO: 1180380 - RNA, 22 nt, Human
ucucccccagccccauccucug

SEQ ID NO: 1180381 - RNA, 22 nt, Human
ucuccugccucagccucccaaa

SEQ ID NO: 1180382 - RNA, 15 nt, Human
ucucuacaaaaagca

SEQ ID NO: 1180383 - RNA, 13 nt, Human
ucuccuguaccuc

SEQ ID NO: 1180384 - RNA, 13 nt, Human
ucucuaggaaaua

SEQ ID NO: 1180385 - RNA, 19 nt, Human
ucucuaggaaauauuuauu

SEQ ID NO: 1180386 - RNA, 18 nt, Human
ucucuaguuugauuaaau

SEQ ID NO: 1180387 - RNA, 19 nt, Human
ucucuaguuugauuaaauu

SEQ ID NO: 1180388 - RNA, 13 nt, Human
ucucugaggacac

SEQ ID NO: 1180389 - RNA, 14 nt, Human
ucucugaggacacu

SEQ ID NO: 1180390 - RNA, 18 nt, Human
ucucuucacagucacauu

SEQ ID NO: 1180391 - RNA, 15 nt, Human
ucucuuuucaaaaca

SEQ ID NO: 1180392 - RNA, 16 nt, Human
ucucuuuucaaaacau

SEQ ID NO: 1180393 - RNA, 16 nt, Human
ucugaaaauguaugug

SEQ ID NO: 1180394 - RNA, 23 nt, Human
ucugaaaauguauguguaaguau

SEQ ID NO: 1180395 - RNA, 13 nt, Human
ucugaaagggacg

SEQ ID NO: 1180396 - RNA, 19 nt, Human
ucugacccaugcugcccug

SEQ ID NO: 1180397 - RNA, 15 nt, Human
ucugacccaugcugc

SEQ ID NO: 1180398 - RNA, 16 nt, Human
ucugacccaugcugcc

SEQ ID NO: 1180399 - RNA, 17 nt, Human
ucugacccaugcugccc

SEQ ID NO: 1180400 - RNA, 18 nt, Human
ucugacccaugcugcccu

SEQ ID NO: 1180401 - RNA, 20 nt, Human
ucugaacuuggcgcugcccc

SEQ ID NO: 1180402 - RNA, 21 nt, Human
ucugaacuuggcgcugccccu

SEQ ID NO: 1180403 - RNA, 14 nt, Human
ucugacccaugcug

SEQ ID NO: 1180404 - RNA, 16 nt, Human
ucugaggaauccagac

SEQ ID NO: 1180405 - RNA, 17 nt, Human
ucugaggaauccagacc

SEQ ID NO: 1180406 - RNA, 20 nt, Human
ucugaggacacuaaccacgc

SEQ ID NO: 1180407 - RNA, 23 nt, Human
ucugaggacacuaaccacgcugg

SEQ ID NO: 1180408 - RNA, 19 nt, Human
ucugcacaagcugcacccu

SEQ ID NO: 1180409 - RNA, 14 nt, Human
ucugcacaagcugc

SEQ ID NO: 1180410 - RNA, 23 nt, Human
ucugauucccaagcucugcuccu

SEQ ID NO: 1180411 - RNA, 19 nt, Human
ucuucuccacuuucuagcc

SEQ ID NO: 1180412 - RNA, 21 nt, Human
ucuucuccacuuucuagccag

SEQ ID NO: 1180413 - RNA, 21 nt, Human
ucuuccacaagagcccaggcc

SEQ ID NO: 1180414 - RNA, 16 nt, Human
ucuucaguaagccgug

SEQ ID NO: 1180415 - RNA, 14 nt, Human
ucuuccaggcuggg

SEQ ID NO: 1180416 - RNA, 15 nt, Human
ucuuauacauuugau

SEQ ID NO: 1180417 - RNA, 14 nt, Human
ucuuagugugugca

SEQ ID NO: 1180418 - RNA, 13 nt, Human
ucuuaugggcugg

SEQ ID NO: 1180419 - RNA, 15 nt, Human
ucuucaguaagccgu

SEQ ID NO: 1180420 - RNA, 12 nt, Human
ucuucuccaggc

SEQ ID NO: 1180421 - RNA, 13 nt, Human
ucuucuccaggcu

SEQ ID NO: 1180422 - RNA, 14 nt, Human
ucuucuccaggcug

SEQ ID NO: 1180423 - RNA, 15 nt, Human
ucuucuccaggcugu

SEQ ID NO: 1180424 - RNA, 16 nt, Human
ucuugaacuccuggcc

SEQ ID NO: 1180425 - RNA, 17 nt, Human
ucuugaacuccuggccu

SEQ ID NO: 1180426 - RNA, 18 nt, Human
ucuugaacuccuggccuc

SEQ ID NO: 1180427 - RNA, 21 nt, Human
ucuugaauuguaaggaaugau

SEQ ID NO: 1180428 - RNA, 11 nt, Human
ucuugcucugc

SEQ ID NO: 1180429 - RNA, 12 nt, Human
ucuugcucugcu

SEQ ID NO: 1180430 - RNA, 13 nt, Human
ucuugcucugcug

SEQ ID NO: 1180431 - RNA, 14 nt, Human
ucuguccuacucug

SEQ ID NO: 1180432 - RNA, 22 nt, Human
ucuguggguuucuaaagcugcc

SEQ ID NO: 1180433 - RNA, 19 nt, Human
ucuguccgagcuuugaaaa

SEQ ID NO: 1180434 - RNA, 17 nt, Human
ucuguacgucugacagg

SEQ ID NO: 1180435 - RNA, 18 nt, Human
ucuguacgucugacaggc

SEQ ID NO: 1180436 - RNA, 23 nt, Human
ucuguggguuucuaaagcugcca

SEQ ID NO: 1180437 - RNA, 22 nt, Human
ucuguuuuauaauuuugugaag

SEQ ID NO: 1180438 - RNA, 18 nt, Human
ucuuaaaaaguggaaaaa

SEQ ID NO: 1180439 - RNA, 18 nt, Human
ucuggagguacgaaaaga

SEQ ID NO: 1180440 - RNA, 14 nt, Human
ucuggcuaugcauu

SEQ ID NO: 1180441 - RNA, 17 nt, Human
ucuggcuaugcauuuga

SEQ ID NO: 1180442 - RNA, 15 nt, Human
ucuggcucuuccagg

SEQ ID NO: 1180443 - RNA, 16 nt, Human
ucuggcucuuccaggc

SEQ ID NO: 1180444 - RNA, 17 nt, Human
ucuggcucuuccaggcu

SEQ ID NO: 1180445 - RNA, 18 nt, Human
ucuggcucuuccaggcug

SEQ ID NO: 1180446 - RNA, 12 nt, Human
ucugggacacag

SEQ ID NO: 1180447 - RNA, 13 nt, Human
ucugggacacagu

SEQ ID NO: 1180448 - RNA, 16 nt, Human
ugaaacgcaaccacca

SEQ ID NO: 1180449 - RNA, 17 nt, Human
ugaaaggaaagaggcuc

SEQ ID NO: 1180450 - RNA, 12 nt, Human
ugaaaggaaaga

SEQ ID NO: 1180451 - RNA, 18 nt, Human
ugaaagcagggacuugaa

SEQ ID NO: 1180452 - RNA, 19 nt, Human
ugaaagcagggacuugaac

SEQ ID NO: 1180453 - RNA, 23 nt, Human
ugaaagcagggacuugaacccau

SEQ ID NO: 1180454 - RNA, 16 nt, Human
ugaaagggcccagaga

SEQ ID NO: 1180455 - RNA, 17 nt, Human
ugaaagggcccagagag

SEQ ID NO: 1180456 - RNA, 18 nt, Human
ugaaagggcccagagagg

SEQ ID NO: 1180457 - RNA, 17 nt, Human
ugaaaucuuuuugcuuu

SEQ ID NO: 1180458 - RNA, 19 nt, Human
ugaaaugaggucagagccu

SEQ ID NO: 1180459 - RNA, 20 nt, Human
ugaaaugaggucagagccug

SEQ ID NO: 1180460 - RNA, 21 nt, Human
ugaaaugaggucagagccugc

SEQ ID NO: 1180461 - RNA, 22 nt, Human
ugaaaugaggucagagccugca

SEQ ID NO: 1180462 - RNA, 23 nt, Human
ugaaaugaggucagagccugcag

SEQ ID NO: 1180463 - RNA, 17 nt, Human
ucuuucacauuuaaaua

SEQ ID NO: 1180464 - RNA, 21 nt, Human
ucuuuucucccuuuuaauccu

SEQ ID NO: 1180465 - RNA, 17 nt, Human
ucuuuugccguuauuaa

SEQ ID NO: 1180466 - RNA, 19 nt, Human
ucuuuugccguuauuaaaa

SEQ ID NO: 1180467 - RNA, 16 nt, Human
ucuuuuugcuuugcuu

SEQ ID NO: 1180468 - RNA, 19 nt, Human
ugaaaacuuuaugcuaagu

SEQ ID NO: 1180469 - RNA, 15 nt, Human
ugaaaagaaaaauga

SEQ ID NO: 1180470 - RNA, 18 nt, Human
ugaacucuucaaucucuu

SEQ ID NO: 1180471 - RNA, 20 nt, Human
ugaaccacaucuugcucugc

SEQ ID NO: 1180472 - RNA, 21 nt, Human
ugaaccacaucuugcucugcu

SEQ ID NO: 1180473 - RNA, 22 nt, Human
ugaaccacaucuugcucugcug

SEQ ID NO: 1180474 - RNA, 15 nt, Human
ugaacucuucaaucu

SEQ ID NO: 1180475 - RNA, 13 nt, Human
ugaacugauaaag

SEQ ID NO: 1180476 - RNA, 15 nt, Human
ugaacugauaaagau

SEQ ID NO: 1180477 - RNA, 19 nt, Human
ugaaauggacuuuuguaca

SEQ ID NO: 1180478 - RNA, 17 nt, Human
ugaagacuuuucuuuca

SEQ ID NO: 1180479 - RNA, 22 nt, Human
ugaagacuuuucuuucagccaa

SEQ ID NO: 1180480 - RNA, 14 nt, Human
ugaagacuuuucuu

SEQ ID NO: 1180481 - RNA, 23 nt, Human
ugaacuggguacuuguggacaca

SEQ ID NO: 1180482 - RNA, 22 nt, Human
ugaacuuguaaaggaauuuaaa

SEQ ID NO: 1180483 - RNA, 14 nt, Human
ugaagacagagcua

SEQ ID NO: 1180484 - RNA, 16 nt, Human
ugaagacagagcuaca

SEQ ID NO: 1180485 - RNA, 19 nt, Human
ugaacuggguacuugugga

SEQ ID NO: 1180486 - RNA, 14 nt, Human
ugaacuuggcgcug

SEQ ID NO: 1180487 - RNA, 12 nt, Human
ugaacuugguuc

SEQ ID NO: 1180488 - RNA, 17 nt, Human
ugaagauguagaggaga

SEQ ID NO: 1180489 - RNA, 20 nt, Human
ugaaggcucgagcaugccug

SEQ ID NO: 1180490 - RNA, 21 nt, Human
ugaaggcucgagcaugccugg

SEQ ID NO: 1180491 - RNA, 21 nt, Human
ugaaguccaagcauuuagaug

SEQ ID NO: 1180492 - RNA, 22 nt, Human
ugaaguccaagcauuuagaugu

SEQ ID NO: 1180493 - RNA, 23 nt, Human
ugcacagcuaacauggaaguacu

SEQ ID NO: 1180494 - RNA, 18 nt, Human
ugcacagcuaacauggaa

SEQ ID NO: 1180495 - RNA, 20 nt, Human
ugcacagcuaacauggaagu

SEQ ID NO: 1180496 - RNA, 15 nt, Human
ugcacaucaaaauau

SEQ ID NO: 1180497 - RNA, 17 nt, Human
ugcacagcuaacaugga

SEQ ID NO: 1180498 - RNA, 23 nt, Human
ugcacagaguuguuacauuuuua

SEQ ID NO: 1180499 - RNA, 21 nt, Human
ugcacagaguuguuacauuuu

SEQ ID NO: 1180500 - RNA, 22 nt, Human
ugcacagaguuguuacauuuuu

SEQ ID NO: 1180501 - RNA, 16 nt, Human
ugaaggcuggguucug

SEQ ID NO: 1180502 - RNA, 17 nt, Human
ugaagucuuuguacaga

SEQ ID NO: 1180503 - RNA, 20 nt, Human
ugaagucuuuguacagacaa

SEQ ID NO: 1180504 - RNA, 22 nt, Human
ugaagucuuuguacagacaaca

SEQ ID NO: 1180505 - RNA, 14 nt, Human
ugcagcaauaaagc

SEQ ID NO: 1180506 - RNA, 15 nt, Human
ugcagcaauaaagca

SEQ ID NO: 1180507 - RNA, 16 nt, Human
ugcagcaauaaagcag

SEQ ID NO: 1180508 - RNA, 20 nt, Human
ugcagcaauaaagcagcguu

SEQ ID NO: 1180509 - RNA, 14 nt, Human
ugcaggaccucagg

SEQ ID NO: 1180510 - RNA, 15 nt, Human
ugcaggaccucaggu

SEQ ID NO: 1180511 - RNA, 16 nt, Human
ugcaggaccucaggug

SEQ ID NO: 1180512 - RNA, 18 nt, Human
ugcaggaccucaggugag

SEQ ID NO: 1180513 - RNA, 16 nt, Human
ugcacguacacacaca

SEQ ID NO: 1180514 - RNA, 19 nt, Human
ugcacguacacacacauac

SEQ ID NO: 1180515 - RNA, 21 nt, Human
ugcacuugcagacucuacaga

SEQ ID NO: 1180516 - RNA, 15 nt, Human
ugcacuuuguucugg

SEQ ID NO: 1180517 - RNA, 18 nt, Human
ugcacuuuguucuggcuc

SEQ ID NO: 1180518 - RNA, 19 nt, Human
ugcacuuuguucuggcucu

SEQ ID NO: 1180519 - RNA, 20 nt, Human
ugcacuuuguucuggcucuu

SEQ ID NO: 1180520 - RNA, 16 nt, Human
ugcagauaaacaguag

SEQ ID NO: 1180521 - RNA, 17 nt, Human
ugcagauaaacaguagu

SEQ ID NO: 1180522 - RNA, 15 nt, Human
ugcaucguuucaucu

SEQ ID NO: 1180523 - RNA, 17 nt, Human
ugcaucguuucaucuuc

SEQ ID NO: 1180524 - RNA, 16 nt, Human
ugcaggcagccaggcc

SEQ ID NO: 1180525 - RNA, 17 nt, Human
ugcaggcagccaggcca

SEQ ID NO: 1180526 - RNA, 18 nt, Human
ugcaggcagccaggccac

SEQ ID NO: 1180527 - RNA, 19 nt, Human
ugcaggcagccaggccaca

SEQ ID NO: 1180528 - RNA, 19 nt, Human
ugcauguuacauaagauaa

SEQ ID NO: 1180529 - RNA, 15 nt, Human
ugcauuauauuuauu

SEQ ID NO: 1180530 - RNA, 20 nt, Human
ugcauuauauuuauuacugu

SEQ ID NO: 1180531 - RNA, 21 nt, Human
ugcauuauauuuauuacugua

SEQ ID NO: 1180532 - RNA, 11 nt, Human
ugccagggaca

SEQ ID NO: 1180533 - RNA, 22 nt, Human
ugccagggacagaggggguggc

SEQ ID NO: 1180534 - RNA, 14 nt, Human
ugccagucaccccg

SEQ ID NO: 1180535 - RNA, 15 nt, Human
ugccagucaccccgg

SEQ ID NO: 1180536 - RNA, 20 nt, Human
ugccaucucaccuccugcug

SEQ ID NO: 1180537 - RNA, 21 nt, Human
ugccaucucaccuccugcugg

SEQ ID NO: 1180538 - RNA, 22 nt, Human
ugccaucucaccuccugcuggg

SEQ ID NO: 1180539 - RNA, 23 nt, Human
ugccaucucaccuccugcugggc

SEQ ID NO: 1180540 - RNA, 15 nt, Human
ugcccaccuggccuc

SEQ ID NO: 1180541 - RNA, 17 nt, Human
ugcccaccuggccucug

SEQ ID NO: 1180542 - RNA, 18 nt, Human
ugcccaccuggccucugc

SEQ ID NO: 1180543 - RNA, 19 nt, Human
ugcccaccuggccucugca

SEQ ID NO: 1180544 - RNA, 10 nt, Human
ugcccagccc

SEQ ID NO: 1180545 - RNA, 11 nt, Human
ugcccagcccc

SEQ ID NO: 1180546 - RNA, 12 nt, Human
ugcccagccccu

SEQ ID NO: 1180547 - RNA, 23 nt, Human
ugcccaggcuggcgugcaguggu

SEQ ID NO: 1180548 - RNA, 16 nt, Human
ugccuccuuugugagg

SEQ ID NO: 1180549 - RNA, 17 nt, Human
ugccuccuuugugagga

SEQ ID NO: 1180550 - RNA, 18 nt, Human
ugccuccuuugugaggaa

SEQ ID NO: 1180551 - RNA, 20 nt, Human
ugccuccuuugugaggaagc

SEQ ID NO: 1180552 - RNA, 18 nt, Human
ugccugaagucacacagu

SEQ ID NO: 1180553 - RNA, 22 nt, Human
ugccugaagucacacagugagu

SEQ ID NO: 1180554 - RNA, 18 nt, Human
ugccuuauggaacacucu

SEQ ID NO: 1180555 - RNA, 20 nt, Human
ugccuuauggaacacucuga

SEQ ID NO: 1180556 - RNA, 21 nt, Human
ugccuuauggaacacucugag

SEQ ID NO: 1180557 - RNA, 22 nt, Human
ugccuuauggaacacucugaga

SEQ ID NO: 1180558 - RNA, 13 nt, Human
ugcgccuacagga

SEQ ID NO: 1180559 - RNA, 23 nt, Human
ugcggugcuaucucccccagccc

SEQ ID NO: 1180560 - RNA, 22 nt, Human
ugccuucucaacuccaaacuga

SEQ ID NO: 1180561 - RNA, 19 nt, Human
ugcuagaacucccuuucaa

SEQ ID NO: 1180562 - RNA, 20 nt, Human
ugcuagaacucccuuucaac

SEQ ID NO: 1180563 - RNA, 21 nt, Human
ugcuagaacucccuuucaaca

SEQ ID NO: 1180564 - RNA, 16 nt, Human
ugcuaggaacacuccu

SEQ ID NO: 1180565 - RNA, 17 nt, Human
ugcuaggaacacuccuu

SEQ ID NO: 1180566 - RNA, 19 nt, Human
ugcuaggaacacuccuuca

SEQ ID NO: 1180567 - RNA, 20 nt, Human
ugcuaggaacacuccuucac

SEQ ID NO: 1180568 - RNA, 14 nt, Human
ugcuaguaauugga

SEQ ID NO: 1180569 - RNA, 11 nt, Human
ugcucauggaa

SEQ ID NO: 1180570 - RNA, 19 nt, Human
ugcuccucuccccagcaag

SEQ ID NO: 1180571 - RNA, 19 nt, Human
ugcuccuggcccacugcau

SEQ ID NO: 1180572 - RNA, 18 nt, Human
ugcugaauacagaggcaa

SEQ ID NO: 1180573 - RNA, 23 nt, Human
ugcugaauacagaggcaacugca

SEQ ID NO: 1180574 - RNA, 17 nt, Human
ugcugaaugguuuucaa

SEQ ID NO: 1180575 - RNA, 18 nt, Human
ugcugaaugguuuucaaa

SEQ ID NO: 1180576 - RNA, 22 nt, Human
ugcugaaugguuuucaaaauaa

SEQ ID NO: 1180577 - RNA, 15 nt, Human
ugcugacagacacag

SEQ ID NO: 1180578 - RNA, 16 nt, Human
ugcugacagacacagg

SEQ ID NO: 1180579 - RNA, 19 nt, Human
ugcugacagacacaggccc

SEQ ID NO: 1180580 - RNA, 20 nt, Human
ugcugauggugcaaugaccu

SEQ ID NO: 1180581 - RNA, 23 nt, Human
ugcugauggugcaaugaccuuuc

SEQ ID NO: 1180582 - RNA, 15 nt, Human
ugcugcaguugccag

SEQ ID NO: 1180583 - RNA, 16 nt, Human
ugcugcaguugccagu

SEQ ID NO: 1180584 - RNA, 18 nt, Human
ugcuuccagugaggcucu

SEQ ID NO: 1180585 - RNA, 19 nt, Human
ugcuuccagugaggcucug

SEQ ID NO: 1180586 - RNA, 20 nt, Human
ugcuuccagugaggcucugc

SEQ ID NO: 1180587 - RNA, 21 nt, Human
ugcuuccagugaggcucugcc

SEQ ID NO: 1180588 - RNA, 12 nt, Human
ugcuucucacug

SEQ ID NO: 1180589 - RNA, 14 nt, Human
ugcuucuguuuuau

SEQ ID NO: 1180590 - RNA, 16 nt, Human
ugcuucuucagagacu

SEQ ID NO: 1180591 - RNA, 17 nt, Human
ugcuucuguuuuauaau

SEQ ID NO: 1180592 - RNA, 17 nt, Human
uggaaaaauagccugcc

SEQ ID NO: 1180593 - RNA, 15 nt, Human
uggaaaauaaauuau

SEQ ID NO: 1180594 - RNA, 16 nt, Human
uggaaaauaaauuauu

SEQ ID NO: 1180595 - RNA, 14 nt, Human
uggaacucucgagc

SEQ ID NO: 1180596 - RNA, 11 nt, Human
uggaagacagc

SEQ ID NO: 1180597 - RNA, 12 nt, Human
uggaagacagcu

SEQ ID NO: 1180598 - RNA, 14 nt, Human
uggaagacagcucu

SEQ ID NO: 1180599 - RNA, 15 nt, Human
uggaagacagcucuu

SEQ ID NO: 1180600 - RNA, 12 nt, Human
uggacaggcaug

SEQ ID NO: 1180601 - RNA, 16 nt, Human
uggacaggcauguucu

SEQ ID NO: 1180602 - RNA, 17 nt, Human
uggacaggcauguucuc

SEQ ID NO: 1180603 - RNA, 22 nt, Human
uggaggcaugugaugagaggaa

SEQ ID NO: 1180604 - RNA, 20 nt, Human
uggcagugggagcugccugu

SEQ ID NO: 1180605 - RNA, 14 nt, Human
uggcagugggagcu

SEQ ID NO: 1180606 - RNA, 15 nt, Human
uggcagugggagcug

SEQ ID NO: 1180607 - RNA, 16 nt, Human
uggcagugggagcugc

SEQ ID NO: 1180608 - RNA, 19 nt, Human
uggcagugggagcugccug

SEQ ID NO: 1180609 - RNA, 14 nt, Human
uggaugccuggugg

SEQ ID NO: 1180610 - RNA, 15 nt, Human
uggaugccugguggc

SEQ ID NO: 1180611 - RNA, 14 nt, Human
uggcacugcuucca

SEQ ID NO: 1180612 - RNA, 16 nt, Human
uggcacugcuuccagu

SEQ ID NO: 1180613 - RNA, 18 nt, Human
uggcacugcuuccaguga

SEQ ID NO: 1180614 - RNA, 19 nt, Human
uggcacugcuuccagugag

SEQ ID NO: 1180615 - RNA, 21 nt, Human
uggcagcugcgguccacccag

SEQ ID NO: 1180616 - RNA, 22 nt, Human
uggcagcugcgguccacccagg

SEQ ID NO: 1180617 - RNA, 23 nt, Human
uggcagcugcgguccacccagga

SEQ ID NO: 1180618 - RNA, 20 nt, Human
uggcucagguggggucacuc

SEQ ID NO: 1180619 - RNA, 22 nt, Human
uggcucagguggggucacucug

SEQ ID NO: 1180620 - RNA, 14 nt, Human
uggcuaaauucaug

SEQ ID NO: 1180621 - RNA, 13 nt, Human
uggcucuuccagg

SEQ ID NO: 1180622 - RNA, 15 nt, Human
uggcucuuccaggcu

SEQ ID NO: 1180623 - RNA, 16 nt, Human
uggcucuuccaggcug

SEQ ID NO: 1180624 - RNA, 19 nt, Human
uggcucuuccaggcuggga

SEQ ID NO: 1180625 - RNA, 12 nt, Human
uggcugggggcc

SEQ ID NO: 1180626 - RNA, 15 nt, Human
uggccagaugcacca

SEQ ID NO: 1180627 - RNA, 17 nt, Human
uggccuucggccuccau

SEQ ID NO: 1180628 - RNA, 18 nt, Human
uggccuucggccuccauc

SEQ ID NO: 1180629 - RNA, 20 nt, Human
uggccuucggccuccauccu

SEQ ID NO: 1180630 - RNA, 14 nt, Human
uggcgcugccccug

SEQ ID NO: 1180631 - RNA, 15 nt, Human
uggcgcugccccugg

SEQ ID NO: 1180632 - RNA, 22 nt, Human
uggcgugcaguggugcgaucug

SEQ ID NO: 1180633 - RNA, 22 nt, Human
ugggaaugaaugucagugugac

SEQ ID NO: 1180634 - RNA, 18 nt, Human
ugggacagucaccucaug

SEQ ID NO: 1180635 - RNA, 20 nt, Human
ugggacagucaccucaugga

SEQ ID NO: 1180636 - RNA, 21 nt, Human
ugggacagucaccucauggaa

SEQ ID NO: 1180637 - RNA, 14 nt, Human
uggcugggggccuc

SEQ ID NO: 1180638 - RNA, 22 nt, Human
uggcugguuagagguucccuuu

SEQ ID NO: 1180639 - RNA, 15 nt, Human
uggcugggggccuca

SEQ ID NO: 1180640 - RNA, 16 nt, Human
ugggacaugggaaagg

SEQ ID NO: 1180641 - RNA, 19 nt, Human
ugggacauuugcucaugga

SEQ ID NO: 1180642 - RNA, 20 nt, Human
ugggacauuugcucauggaa

SEQ ID NO: 1180643 - RNA, 16 nt, Human
ugggccuccugugugu

SEQ ID NO: 1180644 - RNA, 22 nt, Human
ugggccuccugugugugcgccu

SEQ ID NO: 1180645 - RNA, 14 nt, Human
ugggccuccugugu

SEQ ID NO: 1180646 - RNA, 24 nt, Human
ugggagcugccuguucagcuccag

SEQ ID NO: 1180647 - RNA, 18 nt, Human
ugggcuucaguggcagcu

SEQ ID NO: 1180648 - RNA, 19 nt, Human
ugggcuucaguggcagcug

SEQ ID NO: 1180649 - RNA, 21 nt, Human
ugggcuucaguggcagcugcu

SEQ ID NO: 1180650 - RNA, 20 nt, Human
ugggcuucaguggcagcugc

SEQ ID NO: 1180651 - RNA, 19 nt, Human
ugggcuuggggaccagagc

SEQ ID NO: 1180652 - RNA, 21 nt, Human
ugggcuuggggaccagagcug

SEQ ID NO: 1180653 - RNA, 22 nt, Human
ugggcuuggggaccagagcugc

SEQ ID NO: 1180654 - RNA, 16 nt, Human
uggggcagcuugaggg

SEQ ID NO: 1180655 - RNA, 15 nt, Human
uggguucuacccagg

SEQ ID NO: 1180656 - RNA, 21 nt, Human
ugggugucaagagggucugag

SEQ ID NO: 1180657 - RNA, 23 nt, Human
ugggugucaagagggucugagga

SEQ ID NO: 1180658 - RNA, 14 nt, Human
uggguguggcgcag

SEQ ID NO: 1180659 - RNA, 23 nt, Human
uggguucaagcgauucuucugcu

SEQ ID NO: 1180660 - RNA, 16 nt, Human
uggguucacugcaacc

SEQ ID NO: 1180661 - RNA, 17 nt, Human
ugggguggggaccucag

SEQ ID NO: 1180662 - RNA, 17 nt, Human
uggguagacacacauga

SEQ ID NO: 1180663 - RNA, 17 nt, Human
uguacgucugacaggca

SEQ ID NO: 1180664 - RNA, 17 nt, Human
uguagauaauacaguuc

SEQ ID NO: 1180665 - RNA, 19 nt, Human
uguacugcauaugaaagga

SEQ ID NO: 1180666 - RNA, 15 nt, Human
uguaccgcaauguga

SEQ ID NO: 1180667 - RNA, 22 nt, Human
uguaccucuugagccuugaacu

SEQ ID NO: 1180668 - RNA, 23 nt, Human
uguaccucuugagccuugaacuu

SEQ ID NO: 1180669 - RNA, 15 nt, Human
uguaaucacagcuac

SEQ ID NO: 1180670 - RNA, 13 nt, Human
uguaaauuaacuu

SEQ ID NO: 1180671 - RNA, 14 nt, Human
uguaaauuaacuuu

SEQ ID NO: 1180672 - RNA, 15 nt, Human
uguaaauuaacuuuu

SEQ ID NO: 1180673 - RNA, 16 nt, Human
uguaaauuaacuuuua

SEQ ID NO: 1180674 - RNA, 17 nt, Human
uguaaauuaacuuuuau

SEQ ID NO: 1180675 - RNA, 19 nt, Human
uguaucccaugagccucag

SEQ ID NO: 1180676 - RNA, 23 nt, Human
uguaucccaugagccucagcauc

SEQ ID NO: 1180677 - RNA, 12 nt, Human
ugucagugugac

SEQ ID NO: 1180678 - RNA, 20 nt, Human
ugucagugugacugaucucu

SEQ ID NO: 1180679 - RNA, 14 nt, Human
ugucagugugacug

SEQ ID NO: 1180680 - RNA, 23 nt, Human
ugucccaaaaagaaaggagggga

SEQ ID NO: 1180681 - RNA, 13 nt, Human
uguccccaccgca

SEQ ID NO: 1180682 - RNA, 21 nt, Human
ugucucaguccaugaagaugu

SEQ ID NO: 1180683 - RNA, 22 nt, Human
ugucucaguccaugaagaugua

SEQ ID NO: 1180684 - RNA, 18 nt, Human
ugucuuuggacccugagg

SEQ ID NO: 1180685 - RNA, 19 nt, Human
ugucuuuggacccugaggc

SEQ ID NO: 1180686 - RNA, 22 nt, Human
ugucuuuggacccugaggccca

SEQ ID NO: 1180687 - RNA, 13 nt, Human
ugugaaaggaaag

SEQ ID NO: 1180688 - RNA, 14 nt, Human
ugugaaaggaaaga

SEQ ID NO: 1180689 - RNA, 21 nt, Human
ugugacaaggauugcuacugu

SEQ ID NO: 1180690 - RNA, 15 nt, Human
ugugacauguuuuau

SEQ ID NO: 1180691 - RNA, 22 nt, Human
ugugaccacugcagaagacagu

SEQ ID NO: 1180692 - RNA, 18 nt, Human
ugugaguacuacaguccu

SEQ ID NO: 1180693 - RNA, 19 nt, Human
ugugaguacuacaguccuc

SEQ ID NO: 1180694 - RNA, 20 nt, Human
ugugaguacuacaguccucc

SEQ ID NO: 1180695 - RNA, 23 nt, Human
ugugaguacuacaguccucccau

SEQ ID NO: 1180696 - RNA, 15 nt, Human
ugugagucaccaagc

SEQ ID NO: 1180697 - RNA, 21 nt, Human
ugugauacaaugcugugcccu

SEQ ID NO: 1180698 - RNA, 13 nt, Human
ugugccucuggga

SEQ ID NO: 1180699 - RNA, 15 nt, Human
ugugccucugggacu

SEQ ID NO: 1180700 - RNA, 16 nt, Human
ugugccucugggacug

SEQ ID NO: 1180701 - RNA, 22 nt, Human
ugugcacaugcacgugugugca

SEQ ID NO: 1180702 - RNA, 14 nt, Human
ugugcacguacaca

SEQ ID NO: 1180703 - RNA, 17 nt, Human
ugugccucugggacugg

SEQ ID NO: 1180704 - RNA, 20 nt, Human
ugugcgugcauguguguuca

SEQ ID NO: 1180705 - RNA, 14 nt, Human
uguggacacagcuc

SEQ ID NO: 1180706 - RNA, 12 nt, Human
uguggagaagcg

SEQ ID NO: 1180707 - RNA, 21 nt, Human
uguggagaagcggcuggcagc

SEQ ID NO: 1180708 - RNA, 15 nt, Human
uguggacacagcucu

SEQ ID NO: 1180709 - RNA, 16 nt, Human
uguggacacagcucuu

SEQ ID NO: 1180710 - RNA, 12 nt, Human
ugugggaagggg

SEQ ID NO: 1180711 - RNA, 14 nt, Human
uguucuuucuggcu

SEQ ID NO: 1180712 - RNA, 18 nt, Human
uguucugacccugcuuca

SEQ ID NO: 1180713 - RNA, 19 nt, Human
uguucucugcccuccaaga

SEQ ID NO: 1180714 - RNA, 15 nt, Human
uguucugacccugcu

SEQ ID NO: 1180715 - RNA, 20 nt, Human
uguucuuucuggcuaugcau

SEQ ID NO: 1180716 - RNA, 22 nt, Human
uguucuuucuggcuaugcauuu

SEQ ID NO: 1180717 - RNA, 23 nt, Human
uguucuuucuggcuaugcauuug

SEQ ID NO: 1180718 - RNA, 11 nt, Human
uguugaaagau

SEQ ID NO: 1180719 - RNA, 16 nt, Human
uguucucugaggacac

SEQ ID NO: 1180720 - RNA, 18 nt, Human
uguucucugaggacacua

SEQ ID NO: 1180721 - RNA, 12 nt, Human
uguucucugccc

SEQ ID NO: 1180722 - RNA, 21 nt, Human
uguuggagaagaacugaaauc

SEQ ID NO: 1180723 - RNA, 11 nt, Human
uguuggccagg

SEQ ID NO: 1180724 - RNA, 14 nt, Human
uguuggccaggcug

SEQ ID NO: 1180725 - RNA, 13 nt, Human
uguguuuauuguc

SEQ ID NO: 1180726 - RNA, 19 nt, Human
ugugucagcauagaaguaa

SEQ ID NO: 1180727 - RNA, 13 nt, Human
uguuacauuuuua

SEQ ID NO: 1180728 - RNA, 22 nt, Human
uguuacauuuuuaagugcugca

SEQ ID NO: 1180729 - RNA, 15 nt, Human
uguuacugucuucag

SEQ ID NO: 1180730 - RNA, 16 nt, Human
uguuacugucuucagu

SEQ ID NO: 1180731 - RNA, 12 nt, Human
uguuauaaucuu

SEQ ID NO: 1180732 - RNA, 15 nt, Human
uguucagcuccagcu

SEQ ID NO: 1180733 - RNA, 16 nt, Human
uguucagcuccagcuc

SEQ ID NO: 1180734 - RNA, 18 nt, Human
uguucagcuccagcucac

SEQ ID NO: 1180735 - RNA, 11 nt, Human
uguucagcugg

SEQ ID NO: 1180736 - RNA, 16 nt, Human
uuaaaugcaccuggaa

SEQ ID NO: 1180737 - RNA, 17 nt, Human
uuaaaugcaccuggaau

SEQ ID NO: 1180738 - RNA, 18 nt, Human
uuaaaugcaccuggaaua

SEQ ID NO: 1180739 - RNA, 13 nt, Human
uuaaaugcccagc

SEQ ID NO: 1180740 - RNA, 18 nt, Human
uuaaaugcccagccccuu

SEQ ID NO: 1180741 - RNA, 12 nt, Human
uuaaaugcugcu

SEQ ID NO: 1180742 - RNA, 14 nt, Human
uuaaaacccaagug

SEQ ID NO: 1180743 - RNA, 19 nt, Human
uuaaaagaaugauuaugaa

SEQ ID NO: 1180744 - RNA, 16 nt, Human
uuaaacuuaaucuaaa

SEQ ID NO: 1180745 - RNA, 18 nt, Human
uuaaacuuaaucuaaaug

SEQ ID NO: 1180746 - RNA, 20 nt, Human
uuaaacuuaaucuaaaugga

SEQ ID NO: 1180747 - RNA, 22 nt, Human
uuaaacuuaaucuaaauggaac

SEQ ID NO: 1180748 - RNA, 17 nt, Human
uguuuguugucagcuga

SEQ ID NO: 1180749 - RNA, 20 nt, Human
uguuuccuggcacugcuucc

SEQ ID NO: 1180750 - RNA, 21 nt, Human
uguuuccuggcacugcuucca

SEQ ID NO: 1180751 - RNA, 22 nt, Human
uguuuccuggcacugcuuccag

SEQ ID NO: 1180752 - RNA, 23 nt, Human
uguuuccuggcacugcuuccagu

SEQ ID NO: 1180753 - RNA, 17 nt, Human
uuaaugucacaggcagg

SEQ ID NO: 1180754 - RNA, 18 nt, Human
uuaaugucacaggcaggu

SEQ ID NO: 1180755 - RNA, 21 nt, Human
uuaaggaagacaaugugaaaa

SEQ ID NO: 1180756 - RNA, 17 nt, Human
uuaaggaugcuuguaca

SEQ ID NO: 1180757 - RNA, 18 nt, Human
uuaaggaugcuuguacau

SEQ ID NO: 1180758 - RNA, 19 nt, Human
uuaaggaugcuuguacaua

SEQ ID NO: 1180759 - RNA, 20 nt, Human
uuaaggaugcuuguacauaa

SEQ ID NO: 1180760 - RNA, 22 nt, Human
uuaaggaugcuuguacauaaug

SEQ ID NO: 1180761 - RNA, 18 nt, Human
uuaauaauguuucaaaca

SEQ ID NO: 1180762 - RNA, 14 nt, Human
uuacauuuguauaa

SEQ ID NO: 1180763 - RNA, 15 nt, Human
uuacauuuguauaaa

SEQ ID NO: 1180764 - RNA, 20 nt, Human
uuacauuuuuaagugcugca

SEQ ID NO: 1180765 - RNA, 21 nt, Human
uuacauuuuuaagugcugcau

SEQ ID NO: 1180766 - RNA, 22 nt, Human
uuacauuuuuaagugcugcauu

SEQ ID NO: 1180767 - RNA, 20 nt, Human
uuacauuuguauaaaauaau

SEQ ID NO: 1180768 - RNA, 23 nt, Human
uuacauuuuuaagugcugcauuu

SEQ ID NO: 1180769 - RNA, 21 nt, Human
uuaccacuuguguuuugcaag

SEQ ID NO: 1180770 - RNA, 14 nt, Human
uuaccagcagagca

SEQ ID NO: 1180771 - RNA, 19 nt, Human
uuaccuuuuuuauacauaa

SEQ ID NO: 1180772 - RNA, 20 nt, Human
uuaccuuuuuuauacauaaa

SEQ ID NO: 1180773 - RNA, 22 nt, Human
uuaccuuuuuuauacauaaaca

SEQ ID NO: 1180774 - RNA, 20 nt, Human
uuacgguuuuccagguuuaa

SEQ ID NO: 1180775 - RNA, 13 nt, Human
uucaaagauauuu

SEQ ID NO: 1180776 - RNA, 13 nt, Human
uuacgugaguccu

SEQ ID NO: 1180777 - RNA, 14 nt, Human
uuacgugaguccug

SEQ ID NO: 1180778 - RNA, 21 nt, Human
uucaacagguuuuccugaaga

SEQ ID NO: 1180779 - RNA, 18 nt, Human
uucaauucucauuuguca

SEQ ID NO: 1180780 - RNA, 17 nt, Human
uucaggaagcucagggc

SEQ ID NO: 1180781 - RNA, 19 nt, Human
uucaggaagcucagggccu

SEQ ID NO: 1180782 - RNA, 20 nt, Human
uucaggaagcucagggccug

SEQ ID NO: 1180783 - RNA, 23 nt, Human
uucagcuccagcucaccagcccc

SEQ ID NO: 1180784 - RNA, 17 nt, Human
uucagcucugcaagaau

SEQ ID NO: 1180785 - RNA, 24 nt, Human
uucagcucugcaagaauugaagca

SEQ ID NO: 1180786 - RNA, 17 nt, Human
uucagcugacuuuucug

SEQ ID NO: 1180787 - RNA, 21 nt, Human
uucagcugguugagguuucaa

SEQ ID NO: 1180788 - RNA, 16 nt, Human
uucaggaagcucaggg

SEQ ID NO: 1180789 - RNA, 14 nt, Human
uucacucuccuugg

SEQ ID NO: 1180790 - RNA, 15 nt, Human
uucagagacuccugc

SEQ ID NO: 1180791 - RNA, 19 nt, Human
uucagagacuccugcaggc

SEQ ID NO: 1180792 - RNA, 19 nt, Human
uucagugccuuauggaaca

SEQ ID NO: 1180793 - RNA, 21 nt, Human
uucagugccuuauggaacacu

SEQ ID NO: 1180794 - RNA, 13 nt, Human
uucaguggcagcu

SEQ ID NO: 1180795 - RNA, 13 nt, Human
uucauaaugacuu

SEQ ID NO: 1180796 - RNA, 23 nt, Human
uucauaaugacuuaagcacacuu

SEQ ID NO: 1180797 - RNA, 20 nt, Human
uucaucuuccaacucaaacu

SEQ ID NO: 1180798 - RNA, 11 nt, Human
uucaucuugaa

SEQ ID NO: 1180799 - RNA, 12 nt, Human
uucaucuugaau

SEQ ID NO: 1180800 - RNA, 17 nt, Human
uucaucuugaauuguaa

SEQ ID NO: 1180801 - RNA, 19 nt, Human
uucauuuaggugaggaagc

SEQ ID NO: 1180802 - RNA, 19 nt, Human
uuccacuuauaggaauuga

SEQ ID NO: 1180803 - RNA, 17 nt, Human
uuccaugaguccccugu

SEQ ID NO: 1180804 - RNA, 16 nt, Human
uuccuucagugccuua

SEQ ID NO: 1180805 - RNA, 19 nt, Human
uuccuucagugccuuaugg

SEQ ID NO: 1180806 - RNA, 23 nt, Human
uuccuucagugccuuauggaaca

SEQ ID NO: 1180807 - RNA, 19 nt, Human
uuccuucauucaacccacc

SEQ ID NO: 1180808 - RNA, 18 nt, Human
uucggccuccauccugag

SEQ ID NO: 1180809 - RNA, 19 nt, Human
uucggccuccauccugagg

SEQ ID NO: 1180810 - RNA, 22 nt, Human
uucggccuccauccugaggcuc

SEQ ID NO: 1180811 - RNA, 16 nt, Human
uucuaaaggcuaccuu

SEQ ID NO: 1180812 - RNA, 17 nt, Human
uucuaaaggcuaccuuu

SEQ ID NO: 1180813 - RNA, 18 nt, Human
uucuaaaggcuaccuuug

SEQ ID NO: 1180814 - RNA, 19 nt, Human
uucuaaaggcuaccuuugu

SEQ ID NO: 1180815 - RNA, 22 nt, Human
uuccccacuugagaauuacccu

SEQ ID NO: 1180816 - RNA, 19 nt, Human
uucccuuugacgccauccc

SEQ ID NO: 1180817 - RNA, 23 nt, Human
uuccucauaguaugguggcuggg

SEQ ID NO: 1180818 - RNA, 12 nt, Human
uuccucccuccc

SEQ ID NO: 1180819 - RNA, 19 nt, Human
uuccucccucccucuuucc

SEQ ID NO: 1180820 - RNA, 21 nt, Human
uuccucccucccucuuucccu

SEQ ID NO: 1180821 - RNA, 22 nt, Human
uuccucccucccucuuucccuc

SEQ ID NO: 1180822 - RNA, 14 nt, Human
uucuauuguuucuu

SEQ ID NO: 1180823 - RNA, 16 nt, Human
uucuaugacacaugca

SEQ ID NO: 1180824 - RNA, 17 nt, Human
uucuaugacacaugcaa

SEQ ID NO: 1180825 - RNA, 16 nt, Human
uucuccaagcaggaca

SEQ ID NO: 1180826 - RNA, 13 nt, Human
uucuccacccugc

SEQ ID NO: 1180827 - RNA, 16 nt, Human
uucuccacccugcucu

SEQ ID NO: 1180828 - RNA, 11 nt, Human
uucuccaggcu

SEQ ID NO: 1180829 - RNA, 18 nt, Human
uucucuccagccccugga

SEQ ID NO: 1180830 - RNA, 23 nt, Human
uucucuccucuccccaugauguu

SEQ ID NO: 1180831 - RNA, 18 nt, Human
uucugacccaugcugccc

SEQ ID NO: 1180832 - RNA, 20 nt, Human
uucugacccaugcugcccug

SEQ ID NO: 1180833 - RNA, 21 nt, Human
uucugacccaugcugcccugu

SEQ ID NO: 1180834 - RNA, 22 nt, Human
uucugacccaugcugcccugug

SEQ ID NO: 1180835 - RNA, 23 nt, Human
uucuguggguuucuaaagcugcc

SEQ ID NO: 1180836 - RNA, 17 nt, Human
uucuguccuacucugug

SEQ ID NO: 1180837 - RNA, 19 nt, Human
uucuguccuacucuguguc

SEQ ID NO: 1180838 - RNA, 14 nt, Human
uucugagcauuuaa

SEQ ID NO: 1180839 - RNA, 21 nt, Human
uucuguccgagcuuugaaaau

SEQ ID NO: 1180840 - RNA, 11 nt, Human
uucuguucuuu

SEQ ID NO: 1180841 - RNA, 19 nt, Human
uucuuauuuaaugaaagac

SEQ ID NO: 1180842 - RNA, 23 nt, Human
uucuuauuuaaugaaagacugua

SEQ ID NO: 1180843 - RNA, 13 nt, Human
uucuugguuugua

SEQ ID NO: 1180844 - RNA, 16 nt, Human
uucuugguuuguaaau

SEQ ID NO: 1180845 - RNA, 17 nt, Human
uucuugguuuguaaauu

SEQ ID NO: 1180846 - RNA, 18 nt, Human
uucuugguuuguaaauua

SEQ ID NO: 1180847 - RNA, 23 nt, Human
uucuugguuuguaaauuaacuuu

SEQ ID NO: 1180848 - RNA, 18 nt, Human
uucuuuauaauucuacuu

SEQ ID NO: 1180849 - RNA, 19 nt, Human
uugaaaacacuguucucug

SEQ ID NO: 1180850 - RNA, 21 nt, Human
uugaaaacacuguucucugcc

SEQ ID NO: 1180851 - RNA, 22 nt, Human
uugaaaacacuguucucugccc

SEQ ID NO: 1180852 - RNA, 19 nt, Human
uugaacucuucaaucucuu

SEQ ID NO: 1180853 - RNA, 16 nt, Human
uugaacugauaaagau

SEQ ID NO: 1180854 - RNA, 22 nt, Human
uugaacuuugaccucugcagca

SEQ ID NO: 1180855 - RNA, 17 nt, Human
uugaagacagagcuaca

SEQ ID NO: 1180856 - RNA, 19 nt, Human
uugaagacuuuucuuucag

SEQ ID NO: 1180857 - RNA, 22 nt, Human
uugcagacaggcaagcaccucc

SEQ ID NO: 1180858 - RNA, 16 nt, Human
uugcagacaggcaagc

SEQ ID NO: 1180859 - RNA, 14 nt, Human
uugcaacaggcugg

SEQ ID NO: 1180860 - RNA, 17 nt, Human
uugcaacaggcugggcu

SEQ ID NO: 1180861 - RNA, 18 nt, Human
uugauuuccguuaaaaua

SEQ ID NO: 1180862 - RNA, 21 nt, Human
uugauagcacagacccugccc

SEQ ID NO: 1180863 - RNA, 23 nt, Human
uugauagcacagacccugcccug

SEQ ID NO: 1180864 - RNA, 12 nt, Human
uugaugaagaag

SEQ ID NO: 1180865 - RNA, 13 nt, Human
uugaugaagaagu

SEQ ID NO: 1180866 - RNA, 22 nt, Human
uugaccugaggcccuucucucc

SEQ ID NO: 1180867 - RNA, 12 nt, Human
uugaccugaggc

SEQ ID NO: 1180868 - RNA, 19 nt, Human
uugaccugaggcccuucuc

SEQ ID NO: 1180869 - RNA, 14 nt, Human
uugacgccauccca

SEQ ID NO: 1180870 - RNA, 15 nt, Human
uugacgccaucccag

SEQ ID NO: 1180871 - RNA, 22 nt, Human
uugacgccaucccagccccaau

SEQ ID NO: 1180872 - RNA, 20 nt, Human
uugaccgugaggccagagac

SEQ ID NO: 1180873 - RNA, 21 nt, Human
uugaccgugaggccagagaca

SEQ ID NO: 1180874 - RNA, 15 nt, Human
uugaccucaggugau

SEQ ID NO: 1180875 - RNA, 21 nt, Human
uugaccucaggugauccaccc

SEQ ID NO: 1180876 - RNA, 14 nt, Human
uugaggacacugau

SEQ ID NO: 1180877 - RNA, 15 nt, Human
uugaggacacugaua

SEQ ID NO: 1180878 - RNA, 19 nt, Human
uugauagcacagacccugc

SEQ ID NO: 1180879 - RNA, 20 nt, Human
uugauagcacagacccugcc

SEQ ID NO: 1180880 - RNA, 18 nt, Human
uugccagucaccccggcc

SEQ ID NO: 1180881 - RNA, 11 nt, Human
uugcccaggca

SEQ ID NO: 1180882 - RNA, 11 nt, Human
uugccucugcc

SEQ ID NO: 1180883 - RNA, 14 nt, Human
uugccucugccucu

SEQ ID NO: 1180884 - RNA, 16 nt, Human
uugccucugccucuga

SEQ ID NO: 1180885 - RNA, 18 nt, Human
uugccucugccucugaca

SEQ ID NO: 1180886 - RNA, 20 nt, Human
uugcugauggugcaaugacc

SEQ ID NO: 1180887 - RNA, 22 nt, Human
uugcugauggugcaaugaccuu

SEQ ID NO: 1180888 - RNA, 15 nt, Human
uuggacccugaggcc

SEQ ID NO: 1180889 - RNA, 14 nt, Human
uuggauuguccccg

SEQ ID NO: 1180890 - RNA, 17 nt, Human
uuggcaaaaaggcagga

SEQ ID NO: 1180891 - RNA, 19 nt, Human
uuggaaggaacguccccug

SEQ ID NO: 1180892 - RNA, 14 nt, Human
uuggccaggcuggu

SEQ ID NO: 1180893 - RNA, 24 nt, Human
uuggccaaagccaaagcuaggccu

SEQ ID NO: 1180894 - RNA, 13 nt, Human
uuggcauucccca

SEQ ID NO: 1180895 - RNA, 18 nt, Human
uuggcugggggccucagu

SEQ ID NO: 1180896 - RNA, 21 nt, Human
uuggcugggggccucagugcc

SEQ ID NO: 1180897 - RNA, 22 nt, Human
uuggcugggggccucagugcca

SEQ ID NO: 1180898 - RNA, 22 nt, Human
uuggcuuuggguugcaggaccu

SEQ ID NO: 1180899 - RNA, 16 nt, Human
uugggaggccauuugu

SEQ ID NO: 1180900 - RNA, 12 nt, Human
uugggaggcuga

SEQ ID NO: 1180901 - RNA, 14 nt, Human
uuguagagccaggg

SEQ ID NO: 1180902 - RNA, 15 nt, Human
uuguagagccagggu

SEQ ID NO: 1180903 - RNA, 14 nt, Human
uuguacauaaugcg

SEQ ID NO: 1180904 - RNA, 12 nt, Human
uuguacagacaa

SEQ ID NO: 1180905 - RNA, 13 nt, Human
uuguacagacaac

SEQ ID NO: 1180906 - RNA, 16 nt, Human
uuguaaaggaauuuaa

SEQ ID NO: 1180907 - RNA, 22 nt, Human
uuggucccccuuccauggacuu

SEQ ID NO: 1180908 - RNA, 12 nt, Human
uugguccugcug

SEQ ID NO: 1180909 - RNA, 13 nt, Human
uugguccugcugc

SEQ ID NO: 1180910 - RNA, 20 nt, Human
uuguauuuuacuaauaaaau

SEQ ID NO: 1180911 - RNA, 15 nt, Human
uuuacuuuguguuca

SEQ ID NO: 1180912 - RNA, 12 nt, Human
uuuagaaacaca

SEQ ID NO: 1180913 - RNA, 20 nt, Human
uuuagaaacacaacuauauu

SEQ ID NO: 1180914 - RNA, 14 nt, Human
uuuauugucaaagu

SEQ ID NO: 1180915 - RNA, 16 nt, Human
uuuauugucaaagugg

SEQ ID NO: 1180916 - RNA, 18 nt, Human
uuuagaguugauacuaca

SEQ ID NO: 1180917 - RNA, 14 nt, Human
uuuauaaacuuuac

SEQ ID NO: 1180918 - RNA, 16 nt, Human
uuuauaaacuuuaccu

SEQ ID NO: 1180919 - RNA, 21 nt, Human
uuuaucgucacugcuuaacuu

SEQ ID NO: 1180920 - RNA, 18 nt, Human
uuuauaaacuuuaccuuu

SEQ ID NO: 1180921 - RNA, 20 nt, Human
uuucaauaggaaaaacugau

SEQ ID NO: 1180922 - RNA, 22 nt, Human
uuucaauaggaaaaacugauuu

SEQ ID NO: 1180923 - RNA, 15 nt, Human
uuucagauaaucaca

SEQ ID NO: 1180924 - RNA, 21 nt, Human
uuucagauaaucacaauacau

SEQ ID NO: 1180925 - RNA, 15 nt, Human
uuucagccaagaauu

SEQ ID NO: 1180926 - RNA, 16 nt, Human
uuucagccaagaauuc

SEQ ID NO: 1180927 - RNA, 22 nt, Human
uuucauugcugggcuugucugu

SEQ ID NO: 1180928 - RNA, 12 nt, Human
uuuccaaaguac

SEQ ID NO: 1180929 - RNA, 15 nt, Human
uuuccaaaguacacu

SEQ ID NO: 1180930 - RNA, 13 nt, Human
uuuccaggaaggc

SEQ ID NO: 1180931 - RNA, 21 nt, Human
uuuccucuuuggucuacacug

SEQ ID NO: 1180932 - RNA, 22 nt, Human
uuuccucaaaacuucagacaua

SEQ ID NO: 1180933 - RNA, 17 nt, Human
uuucuaaagcugccagc

SEQ ID NO: 1180934 - RNA, 14 nt, Human
uuucuaaaggcuac

SEQ ID NO: 1180935 - RNA, 18 nt, Human
uuucuaaaggcuaccuuu

SEQ ID NO: 1180936 - RNA, 15 nt, Human
uuucuagccagagga

SEQ ID NO: 1180937 - RNA, 22 nt, Human
uuugaggucuguucuuuccaaa

SEQ ID NO: 1180938 - RNA, 13 nt, Human
uuugagugccuua

SEQ ID NO: 1180939 - RNA, 15 nt, Human
uuugagcagggcuca

SEQ ID NO: 1180940 - RNA, 18 nt, Human
uuugccauguuggccagg

SEQ ID NO: 1180941 - RNA, 22 nt, Human
uuugccauguuggccaggcugg

SEQ ID NO: 1180942 - RNA, 14 nt, Human
uuugcagacaggca

SEQ ID NO: 1180943 - RNA, 13 nt, Human
uuuguccccaccg

SEQ ID NO: 1180944 - RNA, 21 nt, Human
uuuguccccaccgcagacagg

SEQ ID NO: 1180945 - RNA, 15 nt, Human
uuuguaaauuaacuu

SEQ ID NO: 1180946 - RNA, 16 nt, Human
uuuguaaauuaacuuu

SEQ ID NO: 1180947 - RNA, 17 nt, Human
uuuguaaauuaacuuuu

SEQ ID NO: 1180948 - RNA, 22 nt, Human
uuuguaaauuaacuuuuauaaa

SEQ ID NO: 1180949 - RNA, 21 nt, Human
uuuguauaaaauaauuuuuau

SEQ ID NO: 1180950 - RNA, 20 nt, Human
uuuuauaucaauuuaaaaaa

SEQ ID NO: 1180951 - RNA, 15 nt, Human
uuuuauaugcuucug

SEQ ID NO: 1180952 - RNA, 20 nt, Human
uuuuauaugcuucuguuuua

SEQ ID NO: 1180953 - RNA, 10 nt, Human
uuuuauauuu

SEQ ID NO: 1180954 - RNA, 18 nt, Human
uuuuaucgucacugcuua

SEQ ID NO: 1180955 - RNA, 19 nt, Human
uuuuaucgucacugcuuaa

SEQ ID NO: 1180956 - RNA, 15 nt, Human
uuuucacaguucucu

SEQ ID NO: 1180957 - RNA, 15 nt, Human
uuuuccuucagugcc

SEQ ID NO: 1180958 - RNA, 17 nt, Human
uuuucuugcaugaggcu

SEQ ID NO: 1180959 - RNA, 19 nt, Human
uuuuccaugaguccccugu

SEQ ID NO: 1180960 - RNA, 13 nt, Human
uuuuccugaaaac

SEQ ID NO: 1180961 - RNA, 11 nt, Human
caaaaugaaac

SEQ ID NO: 1180962 - RNA, 22 nt, Human
caaaaugaaacgcaaccaccac

SEQ ID NO: 1180963 - RNA, 16 nt, Human
caaaauuuuuucucua

SEQ ID NO: 1180964 - RNA, 13 nt, Human
caaacagaggccg

SEQ ID NO: 1180965 - RNA, 15 nt, Human
caaacagaggccgcc

SEQ ID NO: 1180966 - RNA, 17 nt, Human
caaacucuugaccucag

SEQ ID NO: 1180967 - RNA, 19 nt, Human
caaacucuugaccucaggu

SEQ ID NO: 1180968 - RNA, 20 nt, Human
caaacucuugaccucaggug

SEQ ID NO: 1180969 - RNA, 21 nt, Human
caaacucuugaccucagguga

SEQ ID NO: 1180970 - RNA, 21 nt, Human
caaacugaaugaaacccccac

SEQ ID NO: 1180971 - RNA, 16 nt, Human
caaacugacucuuaag

SEQ ID NO: 1180972 - RNA, 17 nt, Human
caaacugacucuuaaga

SEQ ID NO: 1180973 - RNA, 21 nt, Human
caaacugacucuuaagaagac

SEQ ID NO: 1180974 - RNA, 22 nt, Human
caaacugaaugaaacccccaca

SEQ ID NO: 1180975 - RNA, 21 nt, Human
caaaaucgaugcagugcuucc

SEQ ID NO: 1180976 - RNA, 16 nt, Human
caaaauaaaacuuuuu

SEQ ID NO: 1180977 - RNA, 20 nt, Human
caaaauaaaacuuuuuaaaa

SEQ ID NO: 1180978 - RNA, 18 nt, Human
auuuuauuuuauuaugca

SEQ ID NO: 1180979 - RNA, 15 nt, Human
caaaacgguuuuacu

SEQ ID NO: 1180980 - RNA, 21 nt, Human
caaaacgguuuuacugcagcu

SEQ ID NO: 1180981 - RNA, 15 nt, Human
caaaacucuccucug

SEQ ID NO: 1180982 - RNA, 16 nt, Human
caaaacucuccucugc

SEQ ID NO: 1180983 - RNA, 19 nt, Human
caaaacucuccucugcugc

SEQ ID NO: 1180984 - RNA, 14 nt, Human
caaaaguuucucuu

SEQ ID NO: 1180985 - RNA, 13 nt, Human
caacaggcugggc

SEQ ID NO: 1180986 - RNA, 23 nt, Human
caaagugcugggauuacaagcgu

SEQ ID NO: 1180987 - RNA, 19 nt, Human
caaagugcugggauuacaa

SEQ ID NO: 1180988 - RNA, 23 nt, Human
caaauggaaaugggcagagcaga

SEQ ID NO: 1180989 - RNA, 14 nt, Human
caaauguucaucaa

SEQ ID NO: 1180990 - RNA, 18 nt, Human
caaauguucaucaaugaa

SEQ ID NO: 1180991 - RNA, 20 nt, Human
caaauguucaucaaugaaug

SEQ ID NO: 1180992 - RNA, 20 nt, Human
caacauacucccaucuguga

SEQ ID NO: 1180993 - RNA, 12 nt, Human
caacaggcuggg

SEQ ID NO: 1180994 - RNA, 17 nt, Human
caacauacucccaucug

SEQ ID NO: 1180995 - RNA, 19 nt, Human
caacauacucccaucugug

SEQ ID NO: 1180996 - RNA, 15 nt, Human
caaauuucuaaaucu

SEQ ID NO: 1180997 - RNA, 22 nt, Human
caaauuucuaaaucuccaaaau

SEQ ID NO: 1180998 - RNA, 17 nt, Human
caagaaaugaaagcagg

SEQ ID NO: 1180999 - RNA, 19 nt, Human
caagaaaugaaagcaggga

SEQ ID NO: 1181000 - RNA, 13 nt, Human
caagaagcccagg

SEQ ID NO: 1181001 - RNA, 14 nt, Human
caagaagcccagga

SEQ ID NO: 1181002 - RNA, 13 nt, Human
caagagcccaggc

SEQ ID NO: 1181003 - RNA, 21 nt, Human
caagaccuucuccuucaccuu

SEQ ID NO: 1181004 - RNA, 23 nt, Human
caagaccuucuccuucaccuuug

SEQ ID NO: 1181005 - RNA, 13 nt, Human
caagacgcugugc

SEQ ID NO: 1181006 - RNA, 15 nt, Human
caagacgcugugcug

SEQ ID NO: 1181007 - RNA, 22 nt, Human
caaggauccugagccagauuuc

SEQ ID NO: 1181008 - RNA, 20 nt, Human
caaggauccugagccagauu

SEQ ID NO: 1181009 - RNA, 17 nt, Human
caaggcugcagugagcc

SEQ ID NO: 1181010 - RNA, 22 nt, Human
caaggcugcagugagccgagau

SEQ ID NO: 1181011 - RNA, 16 nt, Human
caaggagauuuacaac

SEQ ID NO: 1181012 - RNA, 18 nt, Human
caaggauccugagccaga

SEQ ID NO: 1181013 - RNA, 19 nt, Human
caaggauccugagccagau

SEQ ID NO: 1181014 - RNA, 20 nt, Human
caaggaaaaaauaacaauga

SEQ ID NO: 1181015 - RNA, 18 nt, Human
caaggaaaaaauaacaau

SEQ ID NO: 1181016 - RNA, 22 nt, Human
caagcuggucccacucagucca

SEQ ID NO: 1181017 - RNA, 23 nt, Human
caagcuggucccacucaguccau

SEQ ID NO: 1181018 - RNA, 15 nt, Human
caagcgauucuucug

SEQ ID NO: 1181019 - RNA, 17 nt, Human
caagcgauucuucugcu

SEQ ID NO: 1181020 - RNA, 18 nt, Human
caagcgauucuucugcuu

SEQ ID NO: 1181021 - RNA, 21 nt, Human
caagcugcacccucaggcagg

SEQ ID NO: 1181022 - RNA, 22 nt, Human
caagcugcacccucaggcaggu

SEQ ID NO: 1181023 - RNA, 19 nt, Human
caagcgauucuucugcuuc

SEQ ID NO: 1181024 - RNA, 15 nt, Human
caauaggaaaaacug

SEQ ID NO: 1181025 - RNA, 16 nt, Human
caauaggaaaaacuga

SEQ ID NO: 1181026 - RNA, 17 nt, Human
caauaggaaaaacugau

SEQ ID NO: 1181027 - RNA, 19 nt, Human
caauagucaaauuguguga

SEQ ID NO: 1181028 - RNA, 18 nt, Human
caaggcugggggaagaag

SEQ ID NO: 1181029 - RNA, 18 nt, Human
caauaggaaaaacugauu

SEQ ID NO: 1181030 - RNA, 13 nt, Human
cacacugaagaag

SEQ ID NO: 1181031 - RNA, 14 nt, Human
cacacugaagaagc

SEQ ID NO: 1181032 - RNA, 19 nt, Human
cacagagaaaguacuucuc

SEQ ID NO: 1181033 - RNA, 20 nt, Human
cacagagaaaguacuucucc

SEQ ID NO: 1181034 - RNA, 21 nt, Human
cacagagaaaguacuucucca

SEQ ID NO: 1181035 - RNA, 13 nt, Human
cacagaggcugcc

SEQ ID NO: 1181036 - RNA, 22 nt, Human
cacagaguuguuacauuuuuaa

SEQ ID NO: 1181037 - RNA, 17 nt, Human
cacagccacacacacag

SEQ ID NO: 1181038 - RNA, 18 nt, Human
cacagccacacacacaga

SEQ ID NO: 1181039 - RNA, 19 nt, Human
cacagccacacacacagaa

SEQ ID NO: 1181040 - RNA, 20 nt, Human
cacagccacacacacagaaa

SEQ ID NO: 1181041 - RNA, 21 nt, Human
cacagccacacacacagaaaa

SEQ ID NO: 1181042 - RNA, 22 nt, Human
cacagccacacacacagaaaau

SEQ ID NO: 1181043 - RNA, 23 nt, Human
cacagccacacacacagaaaaua

SEQ ID NO: 1181044 - RNA, 17 nt, Human
cacaaagguagcuuuuc

SEQ ID NO: 1181045 - RNA, 20 nt, Human
cacaagaaaugaaagcaggg

SEQ ID NO: 1181046 - RNA, 21 nt, Human
cacaagaaaugaaagcaggga

SEQ ID NO: 1181047 - RNA, 13 nt, Human
cacaaaggagagc

SEQ ID NO: 1181048 - RNA, 13 nt, Human
cacacacacacac

SEQ ID NO: 1181049 - RNA, 14 nt, Human
cacacacacacaca

SEQ ID NO: 1181050 - RNA, 15 nt, Human
cacacacacacacag

SEQ ID NO: 1181051 - RNA, 16 nt, Human
cacacacacacacagc

SEQ ID NO: 1181052 - RNA, 15 nt, Human
cacacacacacacau

SEQ ID NO: 1181053 - RNA, 16 nt, Human
cacacacacacacaug

SEQ ID NO: 1181054 - RNA, 13 nt, Human
cacacacacacag

SEQ ID NO: 1181055 - RNA, 14 nt, Human
cacacacacacagc

SEQ ID NO: 1181056 - RNA, 15 nt, Human
cacacacacacagcc

SEQ ID NO: 1181057 - RNA, 16 nt, Human
cacacacacacagcca

SEQ ID NO: 1181058 - RNA, 13 nt, Human
cacacacacacau

SEQ ID NO: 1181059 - RNA, 14 nt, Human
cacacacacacaug

SEQ ID NO: 1181060 - RNA, 15 nt, Human
cacacacacacaugc

SEQ ID NO: 1181061 - RNA, 16 nt, Human
cacacacacacaugca

SEQ ID NO: 1181062 - RNA, 11 nt, Human
cacacacacag

SEQ ID NO: 1181063 - RNA, 12 nt, Human
cacacacacaga

SEQ ID NO: 1181064 - RNA, 13 nt, Human
cacacacacagaa

SEQ ID NO: 1181065 - RNA, 14 nt, Human
cacacacacagaaa

SEQ ID NO: 1181066 - RNA, 15 nt, Human
cacacacacagaaaa

SEQ ID NO: 1181067 - RNA, 12 nt, Human
cacacacacagc

SEQ ID NO: 1181068 - RNA, 13 nt, Human
cacacacacagcc

SEQ ID NO: 1181069 - RNA, 14 nt, Human
cacacacacagcca

SEQ ID NO: 1181070 - RNA, 15 nt, Human
cacacacacagccac

SEQ ID NO: 1181071 - RNA, 12 nt, Human
cacacacacaug

SEQ ID NO: 1181072 - RNA, 13 nt, Human
cacacacacaugc

SEQ ID NO: 1181073 - RNA, 14 nt, Human
cacacacacaugca

SEQ ID NO: 1181074 - RNA, 15 nt, Human
cacacacacaugcau

SEQ ID NO: 1181075 - RNA, 11 nt, Human
cacacacagaa

SEQ ID NO: 1181076 - RNA, 13 nt, Human
cacacacagaaaa

SEQ ID NO: 1181077 - RNA, 14 nt, Human
cacacacagaaaau

SEQ ID NO: 1181078 - RNA, 15 nt, Human
cacacacagaaaaua

SEQ ID NO: 1181079 - RNA, 16 nt, Human
cacacacagaaaauau

SEQ ID NO: 1181080 - RNA, 19 nt, Human
cacacacagaaaauauacu

SEQ ID NO: 1181081 - RNA, 20 nt, Human
cacacacagaaaauauacug

SEQ ID NO: 1181082 - RNA, 21 nt, Human
cacacacagaaaauauacugu

SEQ ID NO: 1181083 - RNA, 23 nt, Human
cacacacagaaaauauacuguaa

SEQ ID NO: 1181084 - RNA, 11 nt, Human
cacacacagcc

SEQ ID NO: 1181085 - RNA, 12 nt, Human
cacacacagcca

SEQ ID NO: 1181086 - RNA, 13 nt, Human
cacacacagccac

SEQ ID NO: 1181087 - RNA, 14 nt, Human
cacacacagccaca

SEQ ID NO: 1181088 - RNA, 15 nt, Human
cacacacagccacac

SEQ ID NO: 1181089 - RNA, 16 nt, Human
cacacacagccacaca

SEQ ID NO: 1181090 - RNA, 17 nt, Human
cacacacgcgugcacac

SEQ ID NO: 1181091 - RNA, 18 nt, Human
caauuacaggaaguacug

SEQ ID NO: 1181092 - RNA, 13 nt, Human
cacaaacagaggc

SEQ ID NO: 1181093 - RNA, 14 nt, Human
cacaaacagaggcc

SEQ ID NO: 1181094 - RNA, 15 nt, Human
cacaaacagaggccg

SEQ ID NO: 1181095 - RNA, 21 nt, Human
caauaucuuuuuuuuaauaaa

SEQ ID NO: 1181096 - RNA, 22 nt, Human
caaugugaaaagaaaaaugagc

SEQ ID NO: 1181097 - RNA, 22 nt, Human
caaugugacuuaaugccacuaa

SEQ ID NO: 1181098 - RNA, 19 nt, Human
cacaggaaccacaagacug

SEQ ID NO: 1181099 - RNA, 17 nt, Human
cacaguucaauucucau

SEQ ID NO: 1181100 - RNA, 15 nt, Human
guauaaaauaauuuu

SEQ ID NO: 1181101 - RNA, 21 nt, Human
guauaaaauaauuuuuauauu

SEQ ID NO: 1181102 - RNA, 16 nt, Human
guaucaggugcugcca

SEQ ID NO: 1181103 - RNA, 18 nt, Human
guaucaggugcugccauc

SEQ ID NO: 1181104 - RNA, 16 nt, Human
guauauuuuauaucaa

SEQ ID NO: 1181105 - RNA, 21 nt, Human
guaucccaugagccucagcau

SEQ ID NO: 1181106 - RNA, 14 nt, Human
guaugguggcuggg

SEQ ID NO: 1181107 - RNA, 15 nt, Human
guaugguggcugggu

SEQ ID NO: 1181108 - RNA, 16 nt, Human
guaugguggcuggguu

SEQ ID NO: 1181109 - RNA, 22 nt, Human
guaucaggugcugccauccagg

SEQ ID NO: 1181110 - RNA, 19 nt, Human
guaucccaugagccucagc

SEQ ID NO: 1181111 - RNA, 22 nt, Human
guaacaggaaaauuuuaaaaau

SEQ ID NO: 1181112 - RNA, 12 nt, Human
guaacaggcaga

SEQ ID NO: 1181113 - RNA, 20 nt, Human
guaguguuggagaagaacug

SEQ ID NO: 1181114 - RNA, 18 nt, Human
guauguacuucaugcugu

SEQ ID NO: 1181115 - RNA, 19 nt, Human
aaaugucuaguuguaacac

SEQ ID NO: 1181116 - RNA, 24 nt, Human
aaaugucuaguuguaacaccauga

SEQ ID NO: 1181117 - RNA, 18 nt, Human
gucaaaguggugagaggc

SEQ ID NO: 1181118 - RNA, 22 nt, Human
guauuuuguuuuugucuuaaaa

SEQ ID NO: 1181119 - RNA, 17 nt, Human
aacaaugcuguauuuua

SEQ ID NO: 1181120 - RNA, 22 nt, Human
aacaaugcuguauuuuaaaaga

SEQ ID NO: 1181121 - RNA, 15 nt, Human
aacacaacuauauug

SEQ ID NO: 1181122 - RNA, 16 nt, Human
aacacaacuauauugu

SEQ ID NO: 1181123 - RNA, 12 nt, Human
aacaauaaaaga

SEQ ID NO: 1181124 - RNA, 15 nt, Human
aacaaugcuguauuu

SEQ ID NO: 1181125 - RNA, 18 nt, Human
aacaaggcaaggcuguca

SEQ ID NO: 1181126 - RNA, 21 nt, Human
aacaaggcaaggcugucaauu

SEQ ID NO: 1181127 - RNA, 23 nt, Human
aacaaggcaaggcugucaauuac

SEQ ID NO: 1181128 - RNA, 21 nt, Human
aacaagccuccuuuuaaagua

SEQ ID NO: 1181129 - RNA, 16 nt, Human
aacaaggcaaggcugu

SEQ ID NO: 1181130 - RNA, 18 nt, Human
aaauuuugauguuuuaag

SEQ ID NO: 1181131 - RNA, 23 nt, Human
aaauuuugauguuuuaaggaugc

SEQ ID NO: 1181132 - RNA, 20 nt, Human
aaauuuuuucucuaggaaau

SEQ ID NO: 1181133 - RNA, 22 nt, Human
gucacacaguauuacuucugcu

SEQ ID NO: 1181134 - RNA, 18 nt, Human
aaauuuguuauaaugaau

SEQ ID NO: 1181135 - RNA, 17 nt, Human
aacacaacuauauuguu

SEQ ID NO: 1181136 - RNA, 19 nt, Human
gucauuuuuuuuaagaaaa

SEQ ID NO: 1181137 - RNA, 21 nt, Human
gucauuuuuuuuaagaaaaag

SEQ ID NO: 1181138 - RNA, 13 nt, Human
guccaagaagccc

SEQ ID NO: 1181139 - RNA, 15 nt, Human
guccaagaagcccag

SEQ ID NO: 1181140 - RNA, 16 nt, Human
guccaagaagcccagg

SEQ ID NO: 1181141 - RNA, 17 nt, Human
guccaagaagcccagga

SEQ ID NO: 1181142 - RNA, 18 nt, Human
guccaagaagcccaggaa

SEQ ID NO: 1181143 - RNA, 20 nt, Human
guccaagaagcccaggaaag

SEQ ID NO: 1181144 - RNA, 13 nt, Human
guccauagagagc

SEQ ID NO: 1181145 - RNA, 14 nt, Human
guccauagagagca

SEQ ID NO: 1181146 - RNA, 21 nt, Human
gucccaccccacacacgccag

SEQ ID NO: 1181147 - RNA, 14 nt, Human
gucccaccuuggcu

SEQ ID NO: 1181148 - RNA, 15 nt, Human
gucccaccuuggcug

SEQ ID NO: 1181149 - RNA, 16 nt, Human
gucccaccuuggcugc

SEQ ID NO: 1181150 - RNA, 17 nt, Human
gucccaccuuggcugca

SEQ ID NO: 1181151 - RNA, 14 nt, Human
gucccccuuccaug

SEQ ID NO: 1181152 - RNA, 16 nt, Human
gucccccuuccaugga

SEQ ID NO: 1181153 - RNA, 18 nt, Human
gucccccuuccauggacu

SEQ ID NO: 1181154 - RNA, 16 nt, Human
guccuacccacccucc

SEQ ID NO: 1181155 - RNA, 12 nt, Human
guccuacucugu

SEQ ID NO: 1181156 - RNA, 12 nt, Human
aacagaaaugua

SEQ ID NO: 1181157 - RNA, 13 nt, Human
aacagaaauguac

SEQ ID NO: 1181158 - RNA, 14 nt, Human
aacagaaauguaca

SEQ ID NO: 1181159 - RNA, 15 nt, Human
aacagaaauguacag

SEQ ID NO: 1181160 - RNA, 13 nt, Human
guccuacucugug

SEQ ID NO: 1181161 - RNA, 22 nt, Human
aacagugauuaccagggacuga

SEQ ID NO: 1181162 - RNA, 15 nt, Human
aaccaagucaaguga

SEQ ID NO: 1181163 - RNA, 19 nt, Human
aaccaccacacccagccca

SEQ ID NO: 1181164 - RNA, 23 nt, Human
aaccauuuugcugucccuuuucc

SEQ ID NO: 1181165 - RNA, 21 nt, Human
aaccaccacacccagcccacu

SEQ ID NO: 1181166 - RNA, 12 nt, Human
aaccaucauuga

SEQ ID NO: 1181167 - RNA, 17 nt, Human
aaccaucauugaaaucu

SEQ ID NO: 1181168 - RNA, 18 nt, Human
aaccaucauugaaaucuu

SEQ ID NO: 1181169 - RNA, 18 nt, Human
aaccugagccccaaaagg

SEQ ID NO: 1181170 - RNA, 16 nt, Human
aacccgggaggcagag

SEQ ID NO: 1181171 - RNA, 10 nt, Human
aacccagcuc

SEQ ID NO: 1181172 - RNA, 12 nt, Human
aacccccacaca

SEQ ID NO: 1181173 - RNA, 13 nt, Human
aacccccacacac

SEQ ID NO: 1181174 - RNA, 14 nt, Human
aacccccacacaca

SEQ ID NO: 1181175 - RNA, 15 nt, Human
aacccccacacacac

SEQ ID NO: 1181176 - RNA, 21 nt, Human
aacuagaguuuagcuggaaaa

SEQ ID NO: 1181177 - RNA, 12 nt, Human
aaccugugucuc

SEQ ID NO: 1181178 - RNA, 18 nt, Human
aaccuugaaaacuuuaug

SEQ ID NO: 1181179 - RNA, 15 nt, Human
aacucuccuccagag

SEQ ID NO: 1181180 - RNA, 18 nt, Human
aacucuccuccagaguca

SEQ ID NO: 1181181 - RNA, 16 nt, Human
aacucuccucugcugc

SEQ ID NO: 1181182 - RNA, 17 nt, Human
aacucuccucugcugcu

SEQ ID NO: 1181183 - RNA, 22 nt, Human
gugaaccaccacacccagccca

SEQ ID NO: 1181184 - RNA, 23 nt, Human
gugaaccaccacacccagcccac

SEQ ID NO: 1181185 - RNA, 16 nt, Human
gucuuucacauuuaaa

SEQ ID NO: 1181186 - RNA, 17 nt, Human
gucuuuaaaugcugcuu

SEQ ID NO: 1181187 - RNA, 16 nt, Human
gucuuuuuucacuaca

SEQ ID NO: 1181188 - RNA, 20 nt, Human
aaccugagccccaaaaggua

SEQ ID NO: 1181189 - RNA, 14 nt, Human
gucuggcccuuccu

SEQ ID NO: 1181190 - RNA, 22 nt, Human
gugagucgaggacagggaggug

SEQ ID NO: 1181191 - RNA, 21 nt, Human
aacucuucaaucucuugcacu

SEQ ID NO: 1181192 - RNA, 12 nt, Human
aacugaaaucau

SEQ ID NO: 1181193 - RNA, 13 nt, Human
aacugaaaucaua

SEQ ID NO: 1181194 - RNA, 17 nt, Human
gugaacuugggccacug

SEQ ID NO: 1181195 - RNA, 19 nt, Human
gugaacuugggccacugug

SEQ ID NO: 1181196 - RNA, 21 nt, Human
gugagaugcuagaacucccuu

SEQ ID NO: 1181197 - RNA, 15 nt, Human
gugagcaauccugca

SEQ ID NO: 1181198 - RNA, 17 nt, Human
gugaggccagagacaca

SEQ ID NO: 1181199 - RNA, 22 nt, Human
gugaggccagagacacaagccu

SEQ ID NO: 1181200 - RNA, 15 nt, Human
aacugcugacuguuu

SEQ ID NO: 1181201 - RNA, 20 nt, Human
aacugcugacuguuuucucu

SEQ ID NO: 1181202 - RNA, 21 nt, Human
aacugcugacuguuuucucuu

SEQ ID NO: 1181203 - RNA, 23 nt, Human
aacugcugacuguuuucucuuga

SEQ ID NO: 1181204 - RNA, 15 nt, Human
aacuggauuaaacuu

SEQ ID NO: 1181205 - RNA, 16 nt, Human
aacuggauuaaacuua

SEQ ID NO: 1181206 - RNA, 11 nt, Human
aacuggcugca

SEQ ID NO: 1181207 - RNA, 17 nt, Human
aacugggacaggggaga

SEQ ID NO: 1181208 - RNA, 21 nt, Human
aacugggggagggugaaguga

SEQ ID NO: 1181209 - RNA, 22 nt, Human
aacugggggagggugaagugaa

SEQ ID NO: 1181210 - RNA, 16 nt, Human
aacuggguacuugugg

SEQ ID NO: 1181211 - RNA, 21 nt, Human
aacuggguacuuguggacaca

SEQ ID NO: 1181212 - RNA, 19 nt, Human
gugauggggcccugccucc

SEQ ID NO: 1181213 - RNA, 21 nt, Human
gugcacacaccagagcccacc

SEQ ID NO: 1181214 - RNA, 19 nt, Human
gugcauguguguucaugca

SEQ ID NO: 1181215 - RNA, 15 nt, Human
gugcauuaucuagau

SEQ ID NO: 1181216 - RNA, 19 nt, Human
gugcauuaucuagauacug

SEQ ID NO: 1181217 - RNA, 23 nt, Human
gugcauuaucuagauacuguauc

SEQ ID NO: 1181218 - RNA, 13 nt, Human
aacuuccaauuua

SEQ ID NO: 1181219 - RNA, 18 nt, Human
aacuuccagauccuggaa

SEQ ID NO: 1181220 - RNA, 14 nt, Human
gugaugagaggaaa

SEQ ID NO: 1181221 - RNA, 16 nt, Human
gugaugagaggaaauc

SEQ ID NO: 1181222 - RNA, 22 nt, Human
gugaugcgcaugucacggaggg

SEQ ID NO: 1181223 - RNA, 14 nt, Human
gugauggggcccug

SEQ ID NO: 1181224 - RNA, 16 nt, Human
gugauggggcccugcc

SEQ ID NO: 1181225 - RNA, 17 nt, Human
gugauggggcccugccu

SEQ ID NO: 1181226 - RNA, 18 nt, Human
gugauggggcccugccuc

SEQ ID NO: 1181227 - RNA, 23 nt, Human
gugggaggaucucuugagccugg

SEQ ID NO: 1181228 - RNA, 22 nt, Human
gugggacacccugugauggggc

SEQ ID NO: 1181229 - RNA, 15 nt, Human
gugggagcugccugu

SEQ ID NO: 1181230 - RNA, 18 nt, Human
gugggagcugccuguuca

SEQ ID NO: 1181231 - RNA, 15 nt, Human
guggggucacucugg

SEQ ID NO: 1181232 - RNA, 22 nt, Human
guggcgcagcauauucaggaag

SEQ ID NO: 1181233 - RNA, 13 nt, Human
gugggacacccug

SEQ ID NO: 1181234 - RNA, 15 nt, Human
gugggacacccugug

SEQ ID NO: 1181235 - RNA, 23 nt, Human
aagaggaaugaaguacucauaca

SEQ ID NO: 1181236 - RNA, 21 nt, Human
guggccucccaacucacccca

SEQ ID NO: 1181237 - RNA, 22 nt, Human
guggccucccaacucaccccag

SEQ ID NO: 1181238 - RNA, 13 nt, Human
aagacgcugugcu

SEQ ID NO: 1181239 - RNA, 15 nt, Human
aagacgcugugcugc

SEQ ID NO: 1181240 - RNA, 17 nt, Human
aagacgcugugcugccc

SEQ ID NO: 1181241 - RNA, 18 nt, Human
aagacgcugugcugcccu

SEQ ID NO: 1181242 - RNA, 19 nt, Human
aagacgcugugcugcccug

SEQ ID NO: 1181243 - RNA, 11 nt, Human
gugccuuaugg

SEQ ID NO: 1181244 - RNA, 15 nt, Human
aagaccuucuccuuc

SEQ ID NO: 1181245 - RNA, 18 nt, Human
aagaccuucuccuucacc

SEQ ID NO: 1181246 - RNA, 19 nt, Human
aagaccuucuccuucaccu

SEQ ID NO: 1181247 - RNA, 20 nt, Human
aagacgcugugcugcccugc

SEQ ID NO: 1181248 - RNA, 23 nt, Human
aagacugaguacguugugcauuu

SEQ ID NO: 1181249 - RNA, 16 nt, Human
aagacugcacaucaaa

SEQ ID NO: 1181250 - RNA, 17 nt, Human
aagacugcauuauauuu

SEQ ID NO: 1181251 - RNA, 16 nt, Human
aagacuuuggaaagac

SEQ ID NO: 1181252 - RNA, 19 nt, Human
aagaugcuucucacugcca

SEQ ID NO: 1181253 - RNA, 17 nt, Human
aagaugcuucucacugc

SEQ ID NO: 1181254 - RNA, 13 nt, Human
aagaguaggaaga

SEQ ID NO: 1181255 - RNA, 14 nt, Human
aagaguaggaagac

SEQ ID NO: 1181256 - RNA, 17 nt, Human
guggggucacucuggca

SEQ ID NO: 1181257 - RNA, 20 nt, Human
guggggucacucuggcagcu

SEQ ID NO: 1181258 - RNA, 21 nt, Human
guggggucacucuggcagcuc

SEQ ID NO: 1181259 - RNA, 22 nt, Human
guggggucacucuggcagcuca

SEQ ID NO: 1181260 - RNA, 23 nt, Human
aagagggagggagggcuccagac

SEQ ID NO: 1181261 - RNA, 22 nt, Human
aagagggucugaggaauccaga

SEQ ID NO: 1181262 - RNA, 12 nt, Human
aagaguaggaag

SEQ ID NO: 1181263 - RNA, 16 nt, Human
gugugguagagugugc

SEQ ID NO: 1181264 - RNA, 22 nt, Human
gugugacaaggauugcuacugu

SEQ ID NO: 1181265 - RNA, 21 nt, Human
gugugaccacugcagaagaca

SEQ ID NO: 1181266 - RNA, 13 nt, Human
aagauguagagga

SEQ ID NO: 1181267 - RNA, 19 nt, Human
aagauguagaggagaaacu

SEQ ID NO: 1181268 - RNA, 17 nt, Human
guguauuuuuuuacuaa

SEQ ID NO: 1181269 - RNA, 23 nt, Human
guguauuuuuuuacuaauagaca

SEQ ID NO: 1181270 - RNA, 20 nt, Human
gugucaagagggucugagga

SEQ ID NO: 1181271 - RNA, 16 nt, Human
gugucagcauagaagu

SEQ ID NO: 1181272 - RNA, 21 nt, Human
aagcccugugcuccauggcug

SEQ ID NO: 1181273 - RNA, 20 nt, Human
aagccgcuggggccaguugg

SEQ ID NO: 1181274 - RNA, 19 nt, Human
aagcccugagcuuucugcu

SEQ ID NO: 1181275 - RNA, 22 nt, Human
aagccaaagcuaggccuggcca

SEQ ID NO: 1181276 - RNA, 17 nt, Human
aagcccaggaaaggcuc

SEQ ID NO: 1181277 - RNA, 19 nt, Human
aagcccaggaaaggcucca

SEQ ID NO: 1181278 - RNA, 22 nt, Human
aagcccaggaaaggcuccagga

SEQ ID NO: 1181279 - RNA, 21 nt, Human
gugugugcgccuacaggagug

SEQ ID NO: 1181280 - RNA, 12 nt, Human
aagcagugcaug

SEQ ID NO: 1181281 - RNA, 14 nt, Human
aagcagugcaugcu

SEQ ID NO: 1181282 - RNA, 15 nt, Human
aagcagugcaugcug

SEQ ID NO: 1181283 - RNA, 20 nt, Human
aagcagugcaugcugucccu

SEQ ID NO: 1181284 - RNA, 16 nt, Human
aagcauuuagauguau

SEQ ID NO: 1181285 - RNA, 23 nt, Human
guuauuuuuauuuauuuaaauuu

SEQ ID NO: 1181286 - RNA, 20 nt, Human
guucaaagauauuuugcuuu

SEQ ID NO: 1181287 - RNA, 21 nt, Human
guucaaagauauuuugcuuug

SEQ ID NO: 1181288 - RNA, 22 nt, Human
guucaaagauauuuugcuuugu

SEQ ID NO: 1181289 - RNA, 18 nt, Human
guucaagcgauucuucug

SEQ ID NO: 1181290 - RNA, 11 nt, Human
guuaagagaaa

SEQ ID NO: 1181291 - RNA, 12 nt, Human
guuaagagaaau

SEQ ID NO: 1181292 - RNA, 18 nt, Human
guuaagagaaaugagcuu

SEQ ID NO: 1181293 - RNA, 19 nt, Human
guuaggcauugugggaagg

SEQ ID NO: 1181294 - RNA, 20 nt, Human
guuaggcauugugggaaggg

SEQ ID NO: 1181295 - RNA, 13 nt, Human
guucagccugccu

SEQ ID NO: 1181296 - RNA, 13 nt, Human
guucagcuccagc

SEQ ID NO: 1181297 - RNA, 15 nt, Human
guucagcuccagcuc

SEQ ID NO: 1181298 - RNA, 12 nt, Human
aagcuaggccug

SEQ ID NO: 1181299 - RNA, 16 nt, Human
aagcuaggccuggcca

SEQ ID NO: 1181300 - RNA, 20 nt, Human
aagcucacagaccuuugaac

SEQ ID NO: 1181301 - RNA, 12 nt, Human
aagcucagggcc

SEQ ID NO: 1181302 - RNA, 13 nt, Human
aagcucagggccu

SEQ ID NO: 1181303 - RNA, 16 nt, Human
aagcucagggccuggc

SEQ ID NO: 1181304 - RNA, 17 nt, Human
aagcucagggccuggcu

SEQ ID NO: 1181305 - RNA, 18 nt, Human
aagcucagggccuggcuc

SEQ ID NO: 1181306 - RNA, 19 nt, Human
aagcucagggccuggcuca

SEQ ID NO: 1181307 - RNA, 20 nt, Human
aagcucagggccuggcucag

SEQ ID NO: 1181308 - RNA, 17 nt, Human
aagcuccaagcucccag

SEQ ID NO: 1181309 - RNA, 18 nt, Human
aagcuccaagcucccagg

SEQ ID NO: 1181310 - RNA, 13 nt, Human
aagcuccagguag

SEQ ID NO: 1181311 - RNA, 14 nt, Human
aagcuccagguaga

SEQ ID NO: 1181312 - RNA, 15 nt, Human
aaggaaagagggagg

SEQ ID NO: 1181313 - RNA, 17 nt, Human
aaggaauaccugucccc

SEQ ID NO: 1181314 - RNA, 16 nt, Human
aaggaagcacaugccu

SEQ ID NO: 1181315 - RNA, 14 nt, Human
aaggaagacuucau

SEQ ID NO: 1181316 - RNA, 15 nt, Human
aaggaagacuucauc

SEQ ID NO: 1181317 - RNA, 13 nt, Human
aaggaagcacaug

SEQ ID NO: 1181318 - RNA, 18 nt, Human
aaggaauaccuguccccc

SEQ ID NO: 1181319 - RNA, 11 nt, Human
aaggagagcua

SEQ ID NO: 1181320 - RNA, 14 nt, Human
aaggagauuuacaa

SEQ ID NO: 1181321 - RNA, 17 nt, Human
aaggagauuuacaacug

SEQ ID NO: 1181322 - RNA, 18 nt, Human
aaggaggaagagaaaaaa

SEQ ID NO: 1181323 - RNA, 20 nt, Human
aaggaggggauagagagaga

SEQ ID NO: 1181324 - RNA, 13 nt, Human
aaggauacaaaag

SEQ ID NO: 1181325 - RNA, 21 nt, Human
aaggauacaaaagcaugugag

SEQ ID NO: 1181326 - RNA, 16 nt, Human
aaggccaaaggaagca

SEQ ID NO: 1181327 - RNA, 23 nt, Human
guugcccaggcaggucuugaacu

SEQ ID NO: 1181328 - RNA, 12 nt, Human
guugcccaggcu

SEQ ID NO: 1181329 - RNA, 13 nt, Human
guugcccaggcug

SEQ ID NO: 1181330 - RNA, 14 nt, Human
guugcccaggcugg

SEQ ID NO: 1181331 - RNA, 22 nt, Human
aaggggcccaaauucuuucagu

SEQ ID NO: 1181332 - RNA, 14 nt, Human
aagguacuucaaau

SEQ ID NO: 1181333 - RNA, 20 nt, Human
aagguagaaauaucugaaaa

SEQ ID NO: 1181334 - RNA, 12 nt, Human
aaggucauuuuu

SEQ ID NO: 1181335 - RNA, 18 nt, Human
aaggucauuuuuuuuaag

SEQ ID NO: 1181336 - RNA, 19 nt, Human
guuucuauguguagggcgg

SEQ ID NO: 1181337 - RNA, 18 nt, Human
guuucugaaagggacgcu

SEQ ID NO: 1181338 - RNA, 13 nt, Human
guuuauugucaaa

SEQ ID NO: 1181339 - RNA, 15 nt, Human
guugggcugguguca

SEQ ID NO: 1181340 - RNA, 15 nt, Human
guugggccaggagcc

SEQ ID NO: 1181341 - RNA, 17 nt, Human
guugggccaggagccuc

SEQ ID NO: 1181342 - RNA, 13 nt, Human
guugggcuggugu

SEQ ID NO: 1181343 - RNA, 13 nt, Human
guuucaaacuuua

SEQ ID NO: 1181344 - RNA, 14 nt, Human
guuucaaacuuuac

SEQ ID NO: 1181345 - RNA, 16 nt, Human
guuucaaacuuuacua

SEQ ID NO: 1181346 - RNA, 17 nt, Human
guuucaaacuuuacuau

SEQ ID NO: 1181347 - RNA, 16 nt, Human
aaggcuccaggagcag

SEQ ID NO: 1181348 - RNA, 18 nt, Human
aaggcuccaggagcagcc

SEQ ID NO: 1181349 - RNA, 19 nt, Human
aaggcuccaggagcagcca

SEQ ID NO: 1181350 - RNA, 22 nt, Human
aaggcuccaggagcagccacau

SEQ ID NO: 1181351 - RNA, 16 nt, Human
aaggcucgagcaugcc

SEQ ID NO: 1181352 - RNA, 18 nt, Human
aaggcucgagcaugccug

SEQ ID NO: 1181353 - RNA, 19 nt, Human
aaggcucgagcaugccugg

SEQ ID NO: 1181354 - RNA, 20 nt, Human
aaggcucgagcaugccugga

SEQ ID NO: 1181355 - RNA, 22 nt, Human
aaggcucgagcaugccuggaug

SEQ ID NO: 1181356 - RNA, 16 nt, Human
aagucuuucacauuua

SEQ ID NO: 1181357 - RNA, 21 nt, Human
aagugaaaaaggaggaagaga

SEQ ID NO: 1181358 - RNA, 17 nt, Human
aagugaagacaaugacu

SEQ ID NO: 1181359 - RNA, 19 nt, Human
aagugaagacaaugacuua

SEQ ID NO: 1181360 - RNA, 12 nt, Human
aagugagagagg

SEQ ID NO: 1181361 - RNA, 14 nt, Human
aagugagagcuggg

SEQ ID NO: 1181362 - RNA, 15 nt, Human
aagugagagcugggu

SEQ ID NO: 1181363 - RNA, 14 nt, Human
guuucugccgcagc

SEQ ID NO: 1181364 - RNA, 15 nt, Human
guuucugccgcagcc

SEQ ID NO: 1181365 - RNA, 18 nt, Human
guuucugccgcagcccug

SEQ ID NO: 1181366 - RNA, 16 nt, Human
guuuugccauguuggc

SEQ ID NO: 1181367 - RNA, 20 nt, Human
guuuugccauguuggccagg

SEQ ID NO: 1181368 - RNA, 21 nt, Human
guuuugccauguuggccaggc

SEQ ID NO: 1181369 - RNA, 22 nt, Human
guuuugccauguuggccaggcu

SEQ ID NO: 1181370 - RNA, 14 nt, Human
aaguaaugauaacu

SEQ ID NO: 1181371 - RNA, 19 nt, Human
aaguaaugauaacuggaaa

SEQ ID NO: 1181372 - RNA, 13 nt, Human
aaguacacuguuu

SEQ ID NO: 1181373 - RNA, 18 nt, Human
aaguacacuguuucaaac

SEQ ID NO: 1181374 - RNA, 19 nt, Human
aaguacacuguuucaaacu

SEQ ID NO: 1181375 - RNA, 20 nt, Human
aaguacacuguuucaaacuu

SEQ ID NO: 1181376 - RNA, 23 nt, Human
aaguacacuguuucaaacuuuac

SEQ ID NO: 1181377 - RNA, 13 nt, Human
aaguauuagaaua

SEQ ID NO: 1181378 - RNA, 16 nt, Human
aagugaggaugaaaaa

SEQ ID NO: 1181379 - RNA, 20 nt, Human
aagugauucuccugccucag

SEQ ID NO: 1181380 - RNA, 19 nt, Human
aagugauucuccugccuca

SEQ ID NO: 1181381 - RNA, 15 nt, Human
aagugauucuccugc

SEQ ID NO: 1181382 - RNA, 16 nt, Human
aagugauucuccugcc

SEQ ID NO: 1181383 - RNA, 17 nt, Human
aagugauucuccugccu

SEQ ID NO: 1181384 - RNA, 18 nt, Human
aagugauucuccugccuc

SEQ ID NO: 1181385 - RNA, 20 nt, Human
uaaaagacagugaaagaaaa

SEQ ID NO: 1181386 - RNA, 20 nt, Human
uaaaauaauuuuuauauuug

SEQ ID NO: 1181387 - RNA, 22 nt, Human
uaaaauaccagccaguaaaugg

SEQ ID NO: 1181388 - RNA, 19 nt, Human
uaaaaaucucaaauuucua

SEQ ID NO: 1181389 - RNA, 20 nt, Human
uaaaaaucucaaauuucuaa

SEQ ID NO: 1181390 - RNA, 21 nt, Human
uaaaaaucucaaauuucuaaa

SEQ ID NO: 1181391 - RNA, 23 nt, Human
uaaaaaucucaaauuucuaaauc

SEQ ID NO: 1181392 - RNA, 20 nt, Human
uaaaacuugauguguuaucu

SEQ ID NO: 1181393 - RNA, 22 nt, Human
uaaaacuugauguguuaucucu

SEQ ID NO: 1181394 - RNA, 12 nt, Human
uaaaagaaugau

SEQ ID NO: 1181395 - RNA, 15 nt, Human
guuuuucuucucccu

SEQ ID NO: 1181396 - RNA, 15 nt, Human
uaaaaaguggaaaaa

SEQ ID NO: 1181397 - RNA, 9 nt, Human
uaaaaaguu

SEQ ID NO: 1181398 - RNA, 11 nt, Human
uaaaaaguuaa

SEQ ID NO: 1181399 - RNA, 12 nt, Human
uaaaaaguuaaa

SEQ ID NO: 1181400 - RNA, 13 nt, Human
uaaaaaguuaaaa

SEQ ID NO: 1181401 - RNA, 15 nt, Human
uaaaaaguuaaaaag

SEQ ID NO: 1181402 - RNA, 17 nt, Human
uaaaaaguuaaaaaguu

SEQ ID NO: 1181403 - RNA, 15 nt, Human
uaaaaaucucaaauu

SEQ ID NO: 1181404 - RNA, 16 nt, Human
uaaaaaucucaaauuu

SEQ ID NO: 1181405 - RNA, 17 nt, Human
uaaaaaucucaaauuuc

SEQ ID NO: 1181406 - RNA, 19 nt, Human
uaaauuaacuuuuauaaac

SEQ ID NO: 1181407 - RNA, 20 nt, Human
uaaauuaacuuuuauaaacu

SEQ ID NO: 1181408 - RNA, 18 nt, Human
aaguguauuuuuuuacua

SEQ ID NO: 1181409 - RNA, 21 nt, Human
aaguguauuuuuuuacuaaua

SEQ ID NO: 1181410 - RNA, 18 nt, Human
uaaaugaaaaucgugaca

SEQ ID NO: 1181411 - RNA, 23 nt, Human
aaguguauuuuuuuacuaauaga

SEQ ID NO: 1181412 - RNA, 21 nt, Human
uaaauuaacuuuuauaaacuu

SEQ ID NO: 1181413 - RNA, 22 nt, Human
uaaauuaacuuuuauaaacuuu

SEQ ID NO: 1181414 - RNA, 11 nt, Human
uaaauuauuuu

SEQ ID NO: 1181415 - RNA, 13 nt, Human
uaacaaugcugua

SEQ ID NO: 1181416 - RNA, 13 nt, Human
aauacagaggcaa

SEQ ID NO: 1181417 - RNA, 21 nt, Human
aauaccugucccccugacaac

SEQ ID NO: 1181418 - RNA, 19 nt, Human
aauaccugucccccugaca

SEQ ID NO: 1181419 - RNA, 15 nt, Human
aauaccugucccccu

SEQ ID NO: 1181420 - RNA, 18 nt, Human
aauaccugucccccugac

SEQ ID NO: 1181421 - RNA, 23 nt, Human
aauaccacaggaaccacaagacu

SEQ ID NO: 1181422 - RNA, 17 nt, Human
aauaccagccaguaaau

SEQ ID NO: 1181423 - RNA, 19 nt, Human
aauaccagccaguaaaugg

SEQ ID NO: 1181424 - RNA, 13 nt, Human
uaacuucacauau

SEQ ID NO: 1181425 - RNA, 14 nt, Human
uaacuaaaagguau

SEQ ID NO: 1181426 - RNA, 16 nt, Human
uaacuugucuuuggac

SEQ ID NO: 1181427 - RNA, 20 nt, Human
uaacuugucuuuggacccug

SEQ ID NO: 1181428 - RNA, 13 nt, Human
uaagaagugaaaa

SEQ ID NO: 1181429 - RNA, 18 nt, Human
uaagaagugaaaaucuac

SEQ ID NO: 1181430 - RNA, 16 nt, Human
aauaguggugugauuu

SEQ ID NO: 1181431 - RNA, 21 nt, Human
aauaguucagguaacaggcag

SEQ ID NO: 1181432 - RNA, 19 nt, Human
uaacauguaauuaaguacu

SEQ ID NO: 1181433 - RNA, 15 nt, Human
aauauuuauuuuaau

SEQ ID NO: 1181434 - RNA, 16 nt, Human
aaucagccuaguugau

SEQ ID NO: 1181435 - RNA, 11 nt, Human
aaucagccugc

SEQ ID NO: 1181436 - RNA, 13 nt, Human
aaucagccugcuc

SEQ ID NO: 1181437 - RNA, 18 nt, Human
aaucagccugcuccagcu

SEQ ID NO: 1181438 - RNA, 19 nt, Human
aaucagccugcuccagcug

SEQ ID NO: 1181439 - RNA, 16 nt, Human
aaucaggguuaguauu

SEQ ID NO: 1181440 - RNA, 14 nt, Human
uaagauucauauuu

SEQ ID NO: 1181441 - RNA, 14 nt, Human
uaagcaaaauguga

SEQ ID NO: 1181442 - RNA, 15 nt, Human
uaagcaaaaugugau

SEQ ID NO: 1181443 - RNA, 21 nt, Human
uaagcaaaaugugauauguac

SEQ ID NO: 1181444 - RNA, 21 nt, Human
uaagcuauucaguaauaacuc

SEQ ID NO: 1181445 - RNA, 13 nt, Human
uaaggaagacaau

SEQ ID NO: 1181446 - RNA, 9 nt, Human
uaaggaaua

SEQ ID NO: 1181447 - RNA, 17 nt, Human
uaaggaauaccuguccc

SEQ ID NO: 1181448 - RNA, 18 nt, Human
uaaggaauaccugucccc

SEQ ID NO: 1181449 - RNA, 17 nt, Human
aaucccauuuaaaaaaa

SEQ ID NO: 1181450 - RNA, 12 nt, Human
aaucuaaaugga

SEQ ID NO: 1181451 - RNA, 13 nt, Human
aaucucaaauaac

SEQ ID NO: 1181452 - RNA, 18 nt, Human
uaaggaugcuuguacaua

SEQ ID NO: 1181453 - RNA, 20 nt, Human
uaaguaaugauaacuggaaa

SEQ ID NO: 1181454 - RNA, 14 nt, Human
aaugauaacuggaa

SEQ ID NO: 1181455 - RNA, 12 nt, Human
aaugagccuggc

SEQ ID NO: 1181456 - RNA, 13 nt, Human
aaugagccuggca

SEQ ID NO: 1181457 - RNA, 14 nt, Human
aaugagccuggcaa

SEQ ID NO: 1181458 - RNA, 16 nt, Human
aaugaggucagagccu

SEQ ID NO: 1181459 - RNA, 18 nt, Human
aaugaggucagagccugc

SEQ ID NO: 1181460 - RNA, 21 nt, Human
aaugaccuuucaauaggaaaa

SEQ ID NO: 1181461 - RNA, 22 nt, Human
aaugagagacacacugaagaag

SEQ ID NO: 1181462 - RNA, 11 nt, Human
aaugagccugg

SEQ ID NO: 1181463 - RNA, 22 nt, Human
uaauuccguagguuauuuucag

SEQ ID NO: 1181464 - RNA, 18 nt, Human
uaauuuuuauauuugaaa

SEQ ID NO: 1181465 - RNA, 19 nt, Human
uaauuuuuauauuugaaau

SEQ ID NO: 1181466 - RNA, 21 nt, Human
uaauuuuuauauuugaaauau

SEQ ID NO: 1181467 - RNA, 16 nt, Human
aaugauuucauucaau

SEQ ID NO: 1181468 - RNA, 13 nt, Human
aaugauuuuuaaa

SEQ ID NO: 1181469 - RNA, 11 nt, Human
aaugcaaacca

SEQ ID NO: 1181470 - RNA, 12 nt, Human
aaugcaaaccau

SEQ ID NO: 1181471 - RNA, 14 nt, Human
aaugcaaaccauca

SEQ ID NO: 1181472 - RNA, 13 nt, Human
aaugcaccuggaa

SEQ ID NO: 1181473 - RNA, 18 nt, Human
uaauuuuuuugagacaga

SEQ ID NO: 1181474 - RNA, 21 nt, Human
uacaaaaaaaaaaaaaaauua

SEQ ID NO: 1181475 - RNA, 13 nt, Human
uacaaugcugugc

SEQ ID NO: 1181476 - RNA, 14 nt, Human
uacaaugcugugcc

SEQ ID NO: 1181477 - RNA, 16 nt, Human
uacaaugcugugcccu

SEQ ID NO: 1181478 - RNA, 22 nt, Human
aaugcuggcuguuggcuggggg

SEQ ID NO: 1181479 - RNA, 21 nt, Human
aaugcuguauuuuaaaagaau

SEQ ID NO: 1181480 - RNA, 22 nt, Human
aaugcuguauuuuaaaagaaug

SEQ ID NO: 1181481 - RNA, 13 nt, Human
aauggaagacagc

SEQ ID NO: 1181482 - RNA, 16 nt, Human
aaugguuuucaaaaua

SEQ ID NO: 1181483 - RNA, 16 nt, Human
aaugguuuucuugugu

SEQ ID NO: 1181484 - RNA, 16 nt, Human
aauggaagacagcucu

SEQ ID NO: 1181485 - RNA, 18 nt, Human
aauggaagacagcucuua

SEQ ID NO: 1181486 - RNA, 14 nt, Human
aaugguuuucaaaa

SEQ ID NO: 1181487 - RNA, 13 nt, Human
uacagacaaagcg

SEQ ID NO: 1181488 - RNA, 14 nt, Human
uacagacaaagcgu

SEQ ID NO: 1181489 - RNA, 15 nt, Human
uacagacaaagcgug

SEQ ID NO: 1181490 - RNA, 19 nt, Human
uacagacaaagcguggugg

SEQ ID NO: 1181491 - RNA, 17 nt, Human
uacagagacagaaagca

SEQ ID NO: 1181492 - RNA, 23 nt, Human
uacagagcagacaguuaagagaa

SEQ ID NO: 1181493 - RNA, 19 nt, Human
uacagagcccacgccccca

SEQ ID NO: 1181494 - RNA, 22 nt, Human
uacagagcccacgcccccacug

SEQ ID NO: 1181495 - RNA, 19 nt, Human
uaccagggacugaggggag

SEQ ID NO: 1181496 - RNA, 12 nt, Human
uacauucuguua

SEQ ID NO: 1181497 - RNA, 12 nt, Human
uaccagcagagc

SEQ ID NO: 1181498 - RNA, 13 nt, Human
uaccagcagagca

SEQ ID NO: 1181499 - RNA, 14 nt, Human
uaccagcagagcac

SEQ ID NO: 1181500 - RNA, 22 nt, Human
uaccagcagagcaccuuagaca

SEQ ID NO: 1181501 - RNA, 18 nt, Human
uaccagccaguaaauggg

SEQ ID NO: 1181502 - RNA, 13 nt, Human
aauguucaucaau

SEQ ID NO: 1181503 - RNA, 23 nt, Human
uacagagcccacgcccccacugg

SEQ ID NO: 1181504 - RNA, 16 nt, Human
aauguucaucaaugaa

SEQ ID NO: 1181505 - RNA, 20 nt, Human
aauguucaucaaugaaugaa

SEQ ID NO: 1181506 - RNA, 21 nt, Human
aauguucucucuucuccaccu

SEQ ID NO: 1181507 - RNA, 12 nt, Human
aauuaacuuuua

SEQ ID NO: 1181508 - RNA, 13 nt, Human
aauuaacuuuuau

SEQ ID NO: 1181509 - RNA, 15 nt, Human
aauuaacuuuuauaa

SEQ ID NO: 1181510 - RNA, 16 nt, Human
aauuaacuuuuauaaa

SEQ ID NO: 1181511 - RNA, 16 nt, Human
aauuaaguacuaugua

SEQ ID NO: 1181512 - RNA, 17 nt, Human
aauuaaguacuauguau

SEQ ID NO: 1181513 - RNA, 21 nt, Human
aauuauuuauuaaaugcccag

SEQ ID NO: 1181514 - RNA, 22 nt, Human
aauuauuuauuaaaugcccagc

SEQ ID NO: 1181515 - RNA, 11 nt, Human
aauucaguugu

SEQ ID NO: 1181516 - RNA, 17 nt, Human
aauucaguuguuagugu

SEQ ID NO: 1181517 - RNA, 22 nt, Human
aauucaguuguuagugugucuu

SEQ ID NO: 1181518 - RNA, 16 nt, Human
uaccugaagucuuugu

SEQ ID NO: 1181519 - RNA, 13 nt, Human
uaccugaggggcc

SEQ ID NO: 1181520 - RNA, 15 nt, Human
uaccugaggggccuc

SEQ ID NO: 1181521 - RNA, 13 nt, Human
uaccugaagucuu

SEQ ID NO: 1181522 - RNA, 14 nt, Human
uaccugaagucuuu

SEQ ID NO: 1181523 - RNA, 15 nt, Human
uacccucauguucuu

SEQ ID NO: 1181524 - RNA, 22 nt, Human
uaccucuugagccuugaacuuu

SEQ ID NO: 1181525 - RNA, 23 nt, Human
uaccucuugagccuugaacuuug

SEQ ID NO: 1181526 - RNA, 16 nt, Human
uaccugaggggccucu

SEQ ID NO: 1181527 - RNA, 16 nt, Human
uaccugccaggaagcc

SEQ ID NO: 1181528 - RNA, 17 nt, Human
aauuacaggaaguacug

SEQ ID NO: 1181529 - RNA, 19 nt, Human
aauuacaggaaguacugga

SEQ ID NO: 1181530 - RNA, 20 nt, Human
aauuacaggaaguacuggag

SEQ ID NO: 1181531 - RNA, 13 nt, Human
aauuacauuugua

SEQ ID NO: 1181532 - RNA, 14 nt, Human
aauuacauuuguau

SEQ ID NO: 1181533 - RNA, 15 nt, Human
uagaaacacaacuau

SEQ ID NO: 1181534 - RNA, 16 nt, Human
uagaacucccuuucaa

SEQ ID NO: 1181535 - RNA, 17 nt, Human
uagaacucccuuucaac

SEQ ID NO: 1181536 - RNA, 18 nt, Human
uagaacucccuuucaaca

SEQ ID NO: 1181537 - RNA, 18 nt, Human
aauuugggggaaaauuua

SEQ ID NO: 1181538 - RNA, 14 nt, Human
aauuugugauacaa

SEQ ID NO: 1181539 - RNA, 17 nt, Human
aauuugugauacaaugc

SEQ ID NO: 1181540 - RNA, 18 nt, Human
aauuugugauacaaugcu

SEQ ID NO: 1181541 - RNA, 20 nt, Human
aauuugugauacaaugcugu

SEQ ID NO: 1181542 - RNA, 17 nt, Human
uagacagucccugccaa

SEQ ID NO: 1181543 - RNA, 21 nt, Human
uagacagucccugccaaugga

SEQ ID NO: 1181544 - RNA, 21 nt, Human
uagacagagucucacuguugc

SEQ ID NO: 1181545 - RNA, 15 nt, Human
uagaagucacacagu

SEQ ID NO: 1181546 - RNA, 13 nt, Human
uagacacacauga

SEQ ID NO: 1181547 - RNA, 10 nt, Human
uagacagagu

SEQ ID NO: 1181548 - RNA, 14 nt, Human
uagagccagggucu

SEQ ID NO: 1181549 - RNA, 22 nt, Human
uagagcggagaaaggaagggcu

SEQ ID NO: 1181550 - RNA, 14 nt, Human
uagaggguguguaa

SEQ ID NO: 1181551 - RNA, 14 nt, Human
uagcacagacccug

SEQ ID NO: 1181552 - RNA, 15 nt, Human
uagcacagacccugc

SEQ ID NO: 1181553 - RNA, 16 nt, Human
uagcacagacccugcc

SEQ ID NO: 1181554 - RNA, 20 nt, Human
uagcacagacccugcccugu

SEQ ID NO: 1181555 - RNA, 21 nt, Human
uagcacagacccugcccugug

SEQ ID NO: 1181556 - RNA, 22 nt, Human
uagcacagacccugcccugugg

SEQ ID NO: 1181557 - RNA, 24 nt, Human
uagcacagacccugcccugugggc

SEQ ID NO: 1181558 - RNA, 16 nt, Human
uagcacuuugggaggc

SEQ ID NO: 1181559 - RNA, 12 nt, Human
uagccaaggcca

SEQ ID NO: 1181560 - RNA, 13 nt, Human
uagccaaggccaa

SEQ ID NO: 1181561 - RNA, 14 nt, Human
uagccaaggccaaa

SEQ ID NO: 1181562 - RNA, 13 nt, Human
uaggaaaaacuga

SEQ ID NO: 1181563 - RNA, 14 nt, Human
uaggaaaaacugau

SEQ ID NO: 1181564 - RNA, 17 nt, Human
uagcgcccaguugggug

SEQ ID NO: 1181565 - RNA, 21 nt, Human
uagccuuagaagucacacagu

SEQ ID NO: 1181566 - RNA, 14 nt, Human
uagcgcccaguugg

SEQ ID NO: 1181567 - RNA, 20 nt, Human
uagccuuagaagucacacag

SEQ ID NO: 1181568 - RNA, 14 nt, Human
uaggcauuguggga

SEQ ID NO: 1181569 - RNA, 13 nt, Human
uagggaagauaau

SEQ ID NO: 1181570 - RNA, 21 nt, Human
uagggaaggauacaaaagcau

SEQ ID NO: 1181571 - RNA, 16 nt, Human
uaggaaaaacugauuu

SEQ ID NO: 1181572 - RNA, 17 nt, Human
uaggaaaaacugauuuu

SEQ ID NO: 1181573 - RNA, 13 nt, Human
uaggauguugaaa

SEQ ID NO: 1181574 - RNA, 19 nt, Human
uaggguaagugagagaggg

SEQ ID NO: 1181575 - RNA, 15 nt, Human
uaggguuauaauaau

SEQ ID NO: 1181576 - RNA, 17 nt, Human
uaggguuauaauaaugu

SEQ ID NO: 1181577 - RNA, 20 nt, Human
acaaugacuuacuguacaug

SEQ ID NO: 1181578 - RNA, 22 nt, Human
acaaugacuuacuguacaugaa

SEQ ID NO: 1181579 - RNA, 11 nt, Human
acaaugcaaac

SEQ ID NO: 1181580 - RNA, 16 nt, Human
acaaugcaaaccauca

SEQ ID NO: 1181581 - RNA, 17 nt, Human
acaaugcaaaccaucau

SEQ ID NO: 1181582 - RNA, 18 nt, Human
acaaugcaaaccaucauu

SEQ ID NO: 1181583 - RNA, 19 nt, Human
acaaugcaaaccaucauug

SEQ ID NO: 1181584 - RNA, 21 nt, Human
acaaugcaaaccaucauugaa

SEQ ID NO: 1181585 - RNA, 23 nt, Human
acaaugcaaaccaucauugaaau

SEQ ID NO: 1181586 - RNA, 13 nt, Human
acacaacuauauu

SEQ ID NO: 1181587 - RNA, 14 nt, Human
acacaacuauauug

SEQ ID NO: 1181588 - RNA, 14 nt, Human
acacacacacacag

SEQ ID NO: 1181589 - RNA, 15 nt, Human
acacacacacacagc

SEQ ID NO: 1181590 - RNA, 16 nt, Human
acacacacacacagcc

SEQ ID NO: 1181591 - RNA, 14 nt, Human
acacacacacacau

SEQ ID NO: 1181592 - RNA, 15 nt, Human
acacacacacacaug

SEQ ID NO: 1181593 - RNA, 16 nt, Human
acacacacacacaugc

SEQ ID NO: 1181594 - RNA, 17 nt, Human
acacacacacacaugca

SEQ ID NO: 1181595 - RNA, 12 nt, Human
acacacacacag

SEQ ID NO: 1181596 - RNA, 13 nt, Human
acacacacacagc

SEQ ID NO: 1181597 - RNA, 14 nt, Human
acacacacacagcc

SEQ ID NO: 1181598 - RNA, 15 nt, Human
acacacacacagcca

SEQ ID NO: 1181599 - RNA, 12 nt, Human
acacacacacau

SEQ ID NO: 1181600 - RNA, 13 nt, Human
acacacacacaug

SEQ ID NO: 1181601 - RNA, 14 nt, Human
acacacacacaugc

SEQ ID NO: 1181602 - RNA, 20 nt, Human
acacacagaaaauauacugu

SEQ ID NO: 1181603 - RNA, 21 nt, Human
acacacagaaaauauacugua

SEQ ID NO: 1181604 - RNA, 22 nt, Human
acacacagaaaauauacuguaa

SEQ ID NO: 1181605 - RNA, 15 nt, Human
acacacacacaugca

SEQ ID NO: 1181606 - RNA, 13 nt, Human
acacacagaaaau

SEQ ID NO: 1181607 - RNA, 14 nt, Human
acacacagaaaaua

SEQ ID NO: 1181608 - RNA, 15 nt, Human
acacacagaaaauau

SEQ ID NO: 1181609 - RNA, 16 nt, Human
acacacagaaaauaua

SEQ ID NO: 1181610 - RNA, 17 nt, Human
acacacagaaaauauac

SEQ ID NO: 1181611 - RNA, 18 nt, Human
acacacagaaaauauacu

SEQ ID NO: 1181612 - RNA, 19 nt, Human
acacacagaaaauauacug

SEQ ID NO: 1181613 - RNA, 11 nt, Human
acacacagcca

SEQ ID NO: 1181614 - RNA, 12 nt, Human
acacacagccac

SEQ ID NO: 1181615 - RNA, 16 nt, Human
acacaggcccggcucc

SEQ ID NO: 1181616 - RNA, 17 nt, Human
acacaggcccggcucca

SEQ ID NO: 1181617 - RNA, 18 nt, Human
acacaggcccggcuccag

SEQ ID NO: 1181618 - RNA, 19 nt, Human
acacaggcccggcuccagg

SEQ ID NO: 1181619 - RNA, 20 nt, Human
acacaggcccggcuccaggc

SEQ ID NO: 1181620 - RNA, 21 nt, Human
acacaggcccggcuccaggcu

SEQ ID NO: 1181621 - RNA, 22 nt, Human
acacaggcccggcuccaggcuc

SEQ ID NO: 1181622 - RNA, 23 nt, Human
acacaggcccggcuccaggcucc

SEQ ID NO: 1181623 - RNA, 24 nt, Human
acacaggcccggcuccaggcuccu

SEQ ID NO: 1181624 - RNA, 16 nt, Human
acacaguauuacuucu

SEQ ID NO: 1181625 - RNA, 14 nt, Human
uagucacugagaca

SEQ ID NO: 1181626 - RNA, 15 nt, Human
uaguagagacagggu

SEQ ID NO: 1181627 - RNA, 22 nt, Human
uaguagagacaggguuuugcca

SEQ ID NO: 1181628 - RNA, 23 nt, Human
uauaggaacuuaaauaaugugaa

SEQ ID NO: 1181629 - RNA, 12 nt, Human
uauaggaauuga

SEQ ID NO: 1181630 - RNA, 18 nt, Human
uauagccuaggugacaga

SEQ ID NO: 1181631 - RNA, 16 nt, Human
acacucauugaccuga

SEQ ID NO: 1181632 - RNA, 17 nt, Human
uagucacugagacagcc

SEQ ID NO: 1181633 - RNA, 20 nt, Human
uagucacugagacagcccgg

SEQ ID NO: 1181634 - RNA, 15 nt, Human
acacuaaugaggaaa

SEQ ID NO: 1181635 - RNA, 22 nt, Human
acacuaaugaggaaacugcacu

SEQ ID NO: 1181636 - RNA, 21 nt, Human
acacucaaaagcugggcaggu

SEQ ID NO: 1181637 - RNA, 18 nt, Human
uauaauuuaccugaaguc

SEQ ID NO: 1181638 - RNA, 21 nt, Human
uauaauuuaccugaagucuuu

SEQ ID NO: 1181639 - RNA, 22 nt, Human
uauacacuuacacuuuaugcac

SEQ ID NO: 1181640 - RNA, 18 nt, Human
acacuuacacuuuaugca

SEQ ID NO: 1181641 - RNA, 21 nt, Human
acacuuacacuuuaugcacaa

SEQ ID NO: 1181642 - RNA, 17 nt, Human
acacucauugaccugag

SEQ ID NO: 1181643 - RNA, 19 nt, Human
acacucauugaccugaggc

SEQ ID NO: 1181644 - RNA, 17 nt, Human
acacuguuucaaacuuu

SEQ ID NO: 1181645 - RNA, 18 nt, Human
acacuguuucaaacuuua

SEQ ID NO: 1181646 - RNA, 20 nt, Human
acacuguuucaaacuuuacu

SEQ ID NO: 1181647 - RNA, 23 nt, Human
acacuguuucaaacuuuacuaug

SEQ ID NO: 1181648 - RNA, 16 nt, Human
acacuuacacuuuaug

SEQ ID NO: 1181649 - RNA, 12 nt, Human
acagaaaauaua

SEQ ID NO: 1181650 - RNA, 13 nt, Human
acagaaaauauac

SEQ ID NO: 1181651 - RNA, 14 nt, Human
acagaaaauauacu

SEQ ID NO: 1181652 - RNA, 15 nt, Human
acagaaaauauacug

SEQ ID NO: 1181653 - RNA, 16 nt, Human
acagaaaauauacugu

SEQ ID NO: 1181654 - RNA, 13 nt, Human
acagaaauguaca

SEQ ID NO: 1181655 - RNA, 18 nt, Human
acagacauacuaaccagc

SEQ ID NO: 1181656 - RNA, 19 nt, Human
acagacauacuaaccagca

SEQ ID NO: 1181657 - RNA, 17 nt, Human
uaucagaauucucagaa

SEQ ID NO: 1181658 - RNA, 19 nt, Human
uauccaacaucaacaucuu

SEQ ID NO: 1181659 - RNA, 14 nt, Human
acagaccuuugaac

SEQ ID NO: 1181660 - RNA, 19 nt, Human
uaucacccagaagaaaaua

SEQ ID NO: 1181661 - RNA, 22 nt, Human
uaucacccagaagaaaauagug

SEQ ID NO: 1181662 - RNA, 16 nt, Human
acagcccgggcucugc

SEQ ID NO: 1181663 - RNA, 15 nt, Human
acagcccgggcucug

SEQ ID NO: 1181664 - RNA, 19 nt, Human
acagcccuucuuuccacag

SEQ ID NO: 1181665 - RNA, 14 nt, Human
uaugaggcauuugu

SEQ ID NO: 1181666 - RNA, 15 nt, Human
uaugaggcauuuguu

SEQ ID NO: 1181667 - RNA, 21 nt, Human
uaugaggcauuuguuugaacu

SEQ ID NO: 1181668 - RNA, 23 nt, Human
uaugaggcauuuguuugaacuga

SEQ ID NO: 1181669 - RNA, 20 nt, Human
uauggcccuggccuagcaua

SEQ ID NO: 1181670 - RNA, 21 nt, Human
uauggcccuggccuagcauac

SEQ ID NO: 1181671 - RNA, 22 nt, Human
uauggcccuggccuagcauacg

SEQ ID NO: 1181672 - RNA, 16 nt, Human
uaugggacucaaugca

SEQ ID NO: 1181673 - RNA, 23 nt, Human
uaugggacucaaugcacugacau

SEQ ID NO: 1181674 - RNA, 10 nt, Human
uaugggagag

SEQ ID NO: 1181675 - RNA, 22 nt, Human
uaugcaugaaguaauaugcaca

SEQ ID NO: 1181676 - RNA, 14 nt, Human
uaugaucacggcuc

SEQ ID NO: 1181677 - RNA, 15 nt, Human
uaugccccauucaac

SEQ ID NO: 1181678 - RNA, 14 nt, Human
uaugcucugcaugu

SEQ ID NO: 1181679 - RNA, 20 nt, Human
acaggaaaauuuuaaaaaua

SEQ ID NO: 1181680 - RNA, 22 nt, Human
acaggaaccacaagacugcaca

SEQ ID NO: 1181681 - RNA, 13 nt, Human
acaggcaggucca

SEQ ID NO: 1181682 - RNA, 16 nt, Human
acaggcccggcuccag

SEQ ID NO: 1181683 - RNA, 17 nt, Human
acaggcccggcuccagg

SEQ ID NO: 1181684 - RNA, 18 nt, Human
acaggcccggcuccaggc

SEQ ID NO: 1181685 - RNA, 20 nt, Human
acaggcccggcuccaggcuc

SEQ ID NO: 1181686 - RNA, 21 nt, Human
acaggcccggcuccaggcucc

SEQ ID NO: 1181687 - RNA, 22 nt, Human
acaggcccggcuccaggcuccu

SEQ ID NO: 1181688 - RNA, 15 nt, Human
acagcuaaugggaca

SEQ ID NO: 1181689 - RNA, 16 nt, Human
acagcuaaugggacac

SEQ ID NO: 1181690 - RNA, 17 nt, Human
acagcuaaugggacacu

SEQ ID NO: 1181691 - RNA, 19 nt, Human
acagcuaaugggacacuaa

SEQ ID NO: 1181692 - RNA, 14 nt, Human
acagcuguaugauu

SEQ ID NO: 1181693 - RNA, 19 nt, Human
acagcuguaugauucccag

SEQ ID NO: 1181694 - RNA, 20 nt, Human
acagcuguaugauucccagc

SEQ ID NO: 1181695 - RNA, 23 nt, Human
acagcuguaugauucccagccag

SEQ ID NO: 1181696 - RNA, 17 nt, Human
acagcuucauuuccugu

SEQ ID NO: 1181697 - RNA, 19 nt, Human
acagcuucauuuccugugu

SEQ ID NO: 1181698 - RNA, 21 nt, Human
acagcuucauuuccugugucu

SEQ ID NO: 1181699 - RNA, 17 nt, Human
acagcuugaccgugagg

SEQ ID NO: 1181700 - RNA, 20 nt, Human
acagcuugaccgugaggcca

SEQ ID NO: 1181701 - RNA, 21 nt, Human
acagcuugaccgugaggccag

SEQ ID NO: 1181702 - RNA, 22 nt, Human
acagcuugaccgugaggccaga

SEQ ID NO: 1181703 - RNA, 23 nt, Human
acagcuugaccgugaggccagag

SEQ ID NO: 1181704 - RNA, 19 nt, Human
acaggaaaagcugcugaca

SEQ ID NO: 1181705 - RNA, 20 nt, Human
acaggaaaagcugcugacag

SEQ ID NO: 1181706 - RNA, 21 nt, Human
acaggaaaagcugcugacagu

SEQ ID NO: 1181707 - RNA, 13 nt, Human
ucaaagauauuuu

SEQ ID NO: 1181708 - RNA, 20 nt, Human
ucaaagauauuuugcuuugu

SEQ ID NO: 1181709 - RNA, 22 nt, Human
ucaaagauauuuugcuuuguga

SEQ ID NO: 1181710 - RNA, 13 nt, Human
acaugagcaucag

SEQ ID NO: 1181711 - RNA, 23 nt, Human
acaugaaaacacauuuuucuuag

SEQ ID NO: 1181712 - RNA, 23 nt, Human
acaugagcaucaggccaggcccu

SEQ ID NO: 1181713 - RNA, 16 nt, Human
acaugagguacugaga

SEQ ID NO: 1181714 - RNA, 18 nt, Human
acauggaauaacauguaa

SEQ ID NO: 1181715 - RNA, 20 nt, Human
acauggaauaacauguaauu

SEQ ID NO: 1181716 - RNA, 15 nt, Human
acauggaguauaugu

SEQ ID NO: 1181717 - RNA, 19 nt, Human
acauggaguauaugucaag

SEQ ID NO: 1181718 - RNA, 21 nt, Human
acaugucuuuucuugcaugag

SEQ ID NO: 1181719 - RNA, 15 nt, Human
acaucuugcucugcu

SEQ ID NO: 1181720 - RNA, 16 nt, Human
acaucuugcucugcug

SEQ ID NO: 1181721 - RNA, 17 nt, Human
acaucuugcucugcuga

SEQ ID NO: 1181722 - RNA, 19 nt, Human
acaucuuggucagauuuga

SEQ ID NO: 1181723 - RNA, 15 nt, Human
acaugaaaacacauu

SEQ ID NO: 1181724 - RNA, 16 nt, Human
acaugaaaacacauuu

SEQ ID NO: 1181725 - RNA, 14 nt, Human
uauuuuaaaagaau

SEQ ID NO: 1181726 - RNA, 18 nt, Human
uauuuuaaaagaaugauu

SEQ ID NO: 1181727 - RNA, 19 nt, Human
uauuuuaauaauguuucaa

SEQ ID NO: 1181728 - RNA, 22 nt, Human
uauuuuaauaauguuucaaaca

SEQ ID NO: 1181729 - RNA, 13 nt, Human
uauuuugcuuugu

SEQ ID NO: 1181730 - RNA, 15 nt, Human
uauuuugcuuuguga

SEQ ID NO: 1181731 - RNA, 20 nt, Human
uauuuugcuuugugauuuuu

SEQ ID NO: 1181732 - RNA, 17 nt, Human
uauuuuuguagagccag

SEQ ID NO: 1181733 - RNA, 17 nt, Human
ucaagagggucugagga

SEQ ID NO: 1181734 - RNA, 16 nt, Human
ucaagugauucuccug

SEQ ID NO: 1181735 - RNA, 17 nt, Human
ucaagugauucuccugc

SEQ ID NO: 1181736 - RNA, 18 nt, Human
ucaagugauucuccugcc

SEQ ID NO: 1181737 - RNA, 18 nt, Human
ucaauaggaaaaacugau

SEQ ID NO: 1181738 - RNA, 19 nt, Human
ucaauaggaaaaacugauu

SEQ ID NO: 1181739 - RNA, 22 nt, Human
ucaauaggaaaaacugauuuuu

SEQ ID NO: 1181740 - RNA, 14 nt, Human
acauuuuauuuuau

SEQ ID NO: 1181741 - RNA, 15 nt, Human
acauuuuuaagugcu

SEQ ID NO: 1181742 - RNA, 18 nt, Human
acauuuuuaagugcugca

SEQ ID NO: 1181743 - RNA, 19 nt, Human
acauuuuuaagugcugcau

SEQ ID NO: 1181744 - RNA, 13 nt, Human
acauuuuucuuag

SEQ ID NO: 1181745 - RNA, 23 nt, Human
acauuuuucuuagggaaggauac

SEQ ID NO: 1181746 - RNA, 21 nt, Human
acauugcggacagccacggcc

SEQ ID NO: 1181747 - RNA, 22 nt, Human
acauugcggacagccacggcca

SEQ ID NO: 1181748 - RNA, 16 nt, Human
accacaagacugcaca

SEQ ID NO: 1181749 - RNA, 17 nt, Human
accacacagaggcugcc

SEQ ID NO: 1181750 - RNA, 15 nt, Human
accacacccagccca

SEQ ID NO: 1181751 - RNA, 16 nt, Human
accacacccagcccac

SEQ ID NO: 1181752 - RNA, 20 nt, Human
accacacccagcccacuucu

SEQ ID NO: 1181753 - RNA, 21 nt, Human
accacacccagcccacuucug

SEQ ID NO: 1181754 - RNA, 23 nt, Human
accacacccagcccacuucugcc

SEQ ID NO: 1181755 - RNA, 23 nt, Human
accaaaaaucucaauauuucaga

SEQ ID NO: 1181756 - RNA, 16 nt, Human
accaaaucagcugcua

SEQ ID NO: 1181757 - RNA, 19 nt, Human
accaaaucagcugcuacua

SEQ ID NO: 1181758 - RNA, 16 nt, Human
accaacauacucccau

SEQ ID NO: 1181759 - RNA, 17 nt, Human
accaacauacucccauc

SEQ ID NO: 1181760 - RNA, 20 nt, Human
accaaccacugcgaccacaa

SEQ ID NO: 1181761 - RNA, 13 nt, Human
ucaauuuaaaaaa

SEQ ID NO: 1181762 - RNA, 12 nt, Human
ucaauuuaaaaa

SEQ ID NO: 1181763 - RNA, 16 nt, Human
ucacagaccuuugaac

SEQ ID NO: 1181764 - RNA, 14 nt, Human
ucacagaugggugc

SEQ ID NO: 1181765 - RNA, 15 nt, Human
ucacagaugggugcu

SEQ ID NO: 1181766 - RNA, 14 nt, Human
ucacaggaaguaga

SEQ ID NO: 1181767 - RNA, 16 nt, Human
ucacauauugauuucc

SEQ ID NO: 1181768 - RNA, 18 nt, Human
ucacauauugauuuccgu

SEQ ID NO: 1181769 - RNA, 20 nt, Human
ucacauauugauuuccguua

SEQ ID NO: 1181770 - RNA, 17 nt, Human
ucaccagccccagugcc

SEQ ID NO: 1181771 - RNA, 18 nt, Human
ucacugcaaccuccgccu

SEQ ID NO: 1181772 - RNA, 14 nt, Human
ucacuguugcccag

SEQ ID NO: 1181773 - RNA, 15 nt, Human
ucacuguugcccagg

SEQ ID NO: 1181774 - RNA, 16 nt, Human
ucacuguugcccaggc

SEQ ID NO: 1181775 - RNA, 23 nt, Human
ucacugagacagcccgggcucug

SEQ ID NO: 1181776 - RNA, 22 nt, Human
ucaccagccccagugcccacag

SEQ ID NO: 1181777 - RNA, 21 nt, Human
ucacuauguugcccaggcagg

SEQ ID NO: 1181778 - RNA, 19 nt, Human
accauucuccaccugccag

SEQ ID NO: 1181779 - RNA, 20 nt, Human
accauucuccaccugccagg

SEQ ID NO: 1181780 - RNA, 21 nt, Human
accauucuccaccugccaggg

SEQ ID NO: 1181781 - RNA, 22 nt, Human
accauuuugcugucccuuuucc

SEQ ID NO: 1181782 - RNA, 23 nt, Human
accauuuugcugucccuuuuccu

SEQ ID NO: 1181783 - RNA, 21 nt, Human
accauuuugggguacccacug

SEQ ID NO: 1181784 - RNA, 20 nt, Human
acccacugcuuuuggucugu

SEQ ID NO: 1181785 - RNA, 22 nt, Human
accauuuugggguacccacugc

SEQ ID NO: 1181786 - RNA, 16 nt, Human
acccaaauguucauca

SEQ ID NO: 1181787 - RNA, 20 nt, Human
acccaaauguucaucaauga

SEQ ID NO: 1181788 - RNA, 23 nt, Human
ucagagacuccugcaggcagcca

SEQ ID NO: 1181789 - RNA, 16 nt, Human
ucagagacuccugcag

SEQ ID NO: 1181790 - RNA, 16 nt, Human
ucagaucucuaacuuc

SEQ ID NO: 1181791 - RNA, 15 nt, Human
acccagcccacuucu

SEQ ID NO: 1181792 - RNA, 10 nt, Human
ucagaauucu

SEQ ID NO: 1181793 - RNA, 12 nt, Human
ucagaauucuca

SEQ ID NO: 1181794 - RNA, 20 nt, Human
ucagaauucucagaaucuca

SEQ ID NO: 1181795 - RNA, 16 nt, Human
ucagaauucucuaguu

SEQ ID NO: 1181796 - RNA, 13 nt, Human
acccagcgagccc

SEQ ID NO: 1181797 - RNA, 16 nt, Human
acccagcgagcccugg

SEQ ID NO: 1181798 - RNA, 17 nt, Human
acccagcgagcccuggu

SEQ ID NO: 1181799 - RNA, 13 nt, Human
acccaggagcccc

SEQ ID NO: 1181800 - RNA, 15 nt, Human
acccaggagccccga

SEQ ID NO: 1181801 - RNA, 19 nt, Human
acccaggagccccgaggcc

SEQ ID NO: 1181802 - RNA, 11 nt, Human
acccaggugcu

SEQ ID NO: 1181803 - RNA, 23 nt, Human
acccaggugcuaggaacacuccu

SEQ ID NO: 1181804 - RNA, 13 nt, Human
accccagguuucu

SEQ ID NO: 1181805 - RNA, 13 nt, Human
ucaggccagcugc

SEQ ID NO: 1181806 - RNA, 14 nt, Human
ucaggccagcugcu

SEQ ID NO: 1181807 - RNA, 13 nt, Human
ucaggccaggccc

SEQ ID NO: 1181808 - RNA, 14 nt, Human
ucaggccaggcccu

SEQ ID NO: 1181809 - RNA, 15 nt, Human
ucaggccaggcccuc

SEQ ID NO: 1181810 - RNA, 16 nt, Human
ucaggccaggcccucu

SEQ ID NO: 1181811 - RNA, 12 nt, Human
acccccagccug

SEQ ID NO: 1181812 - RNA, 13 nt, Human
acccccagccugc

SEQ ID NO: 1181813 - RNA, 14 nt, Human
acccccagccugcu

SEQ ID NO: 1181814 - RNA, 17 nt, Human
ucaggcaggugggaugg

SEQ ID NO: 1181815 - RNA, 18 nt, Human
ucaggcaggugggaugga

SEQ ID NO: 1181816 - RNA, 23 nt, Human
ucaggguuggccccugcccggcu

SEQ ID NO: 1181817 - RNA, 18 nt, Human
ucaggguuggccccugcc

SEQ ID NO: 1181818 - RNA, 19 nt, Human
ucaggguuggccccugccc

SEQ ID NO: 1181819 - RNA, 19 nt, Human
acccgcuaagagggaggga

SEQ ID NO: 1181820 - RNA, 17 nt, Human
ucaggccaggcccucug

SEQ ID NO: 1181821 - RNA, 18 nt, Human
ucaggccaggcccucugc

SEQ ID NO: 1181822 - RNA, 19 nt, Human
ucaggccaggcccucugcc

SEQ ID NO: 1181823 - RNA, 20 nt, Human
ucaggccaggcccucugccc

SEQ ID NO: 1181824 - RNA, 12 nt, Human
ucaggggugugc

SEQ ID NO: 1181825 - RNA, 19 nt, Human
ucaggggugugcggccuuu

SEQ ID NO: 1181826 - RNA, 23 nt, Human
ucaggggugugcggccuuuggcu

SEQ ID NO: 1181827 - RNA, 11 nt, Human
acccugaggcc

SEQ ID NO: 1181828 - RNA, 13 nt, Human
acccugaggccca

SEQ ID NO: 1181829 - RNA, 19 nt, Human
acccugaggcccagagggc

SEQ ID NO: 1181830 - RNA, 21 nt, Human
acccugaggcccagagggccu

SEQ ID NO: 1181831 - RNA, 23 nt, Human
acccugaggcccagagggccugc

SEQ ID NO: 1181832 - RNA, 19 nt, Human
acccgggaagggggcuggg

SEQ ID NO: 1181833 - RNA, 20 nt, Human
acccgggaagggggcuggga

SEQ ID NO: 1181834 - RNA, 22 nt, Human
acccgggaagggggcugggaca

SEQ ID NO: 1181835 - RNA, 14 nt, Human
acccucauguucuu

SEQ ID NO: 1181836 - RNA, 15 nt, Human
acccucauguucuua

SEQ ID NO: 1181837 - RNA, 17 nt, Human
acccucauguucuuaau

SEQ ID NO: 1181838 - RNA, 15 nt, Human
acccgggaggcagag

SEQ ID NO: 1181839 - RNA, 21 nt, Human
acccuccuuucaccacaugug

SEQ ID NO: 1181840 - RNA, 22 nt, Human
ucaggugucccugcacuugcag

SEQ ID NO: 1181841 - RNA, 13 nt, Human
ucaguaagccgug

SEQ ID NO: 1181842 - RNA, 13 nt, Human
ucaguaauaacuc

SEQ ID NO: 1181843 - RNA, 20 nt, Human
acccuugccgucuaccugag

SEQ ID NO: 1181844 - RNA, 15 nt, Human
acccuugugguccca

SEQ ID NO: 1181845 - RNA, 21 nt, Human
accgaaaacguggcugcuuca

SEQ ID NO: 1181846 - RNA, 22 nt, Human
accgaaaacguggcugcuucaa

SEQ ID NO: 1181847 - RNA, 22 nt, Human
ucagguggggucacucuggcag

SEQ ID NO: 1181848 - RNA, 23 nt, Human
ucagguggggucacucuggcagc

SEQ ID NO: 1181849 - RNA, 15 nt, Human
ucaggugucccugca

SEQ ID NO: 1181850 - RNA, 17 nt, Human
ucaggugucccugcacu

SEQ ID NO: 1181851 - RNA, 18 nt, Human
ucaggugucccugcacuu

SEQ ID NO: 1181852 - RNA, 14 nt, Human
ucaguggcagcugc

SEQ ID NO: 1181853 - RNA, 15 nt, Human
ucaguggcagcugcu

SEQ ID NO: 1181854 - RNA, 16 nt, Human
ucaguggcagcugcuu

SEQ ID NO: 1181855 - RNA, 19 nt, Human
ucagugccuuauggaacac

SEQ ID NO: 1181856 - RNA, 20 nt, Human
ucagugccuuauggaacacu

SEQ ID NO: 1181857 - RNA, 22 nt, Human
ucagugccuuauggaacacucu

SEQ ID NO: 1181858 - RNA, 23 nt, Human
ucagugccuuauggaacacucug

SEQ ID NO: 1181859 - RNA, 19 nt, Human
ucaguuguuagugugucuu

SEQ ID NO: 1181860 - RNA, 12 nt, Human
accugagcccca

SEQ ID NO: 1181861 - RNA, 17 nt, Human
accugagccccaaaagg

SEQ ID NO: 1181862 - RNA, 23 nt, Human
accugaggcccuucucuccagcc

SEQ ID NO: 1181863 - RNA, 16 nt, Human
ucauaauaaguugcau

SEQ ID NO: 1181864 - RNA, 12 nt, Human
ucauaaugacuu

SEQ ID NO: 1181865 - RNA, 13 nt, Human
ucauaaugacuua

SEQ ID NO: 1181866 - RNA, 18 nt, Human
accugaagacucauucuu

SEQ ID NO: 1181867 - RNA, 19 nt, Human
accugaauuuuggcugugu

SEQ ID NO: 1181868 - RNA, 18 nt, Human
accugccaggaagccagc

SEQ ID NO: 1181869 - RNA, 19 nt, Human
accugccaggaagccagca

SEQ ID NO: 1181870 - RNA, 16 nt, Human
accugccaggaagcca

SEQ ID NO: 1181871 - RNA, 17 nt, Human
accugccaggaagccag

SEQ ID NO: 1181872 - RNA, 14 nt, Human
accugaggggccuc

SEQ ID NO: 1181873 - RNA, 16 nt, Human
accugaggggccucuu

SEQ ID NO: 1181874 - RNA, 14 nt, Human
accugauugugucu

SEQ ID NO: 1181875 - RNA, 20 nt, Human
accuggaauauauaaccagu

SEQ ID NO: 1181876 - RNA, 23 nt, Human
accugccuguugggccaggagcc

SEQ ID NO: 1181877 - RNA, 16 nt, Human
accugcggugcuaucu

SEQ ID NO: 1181878 - RNA, 21 nt, Human
accugcgucucauacucaccu

SEQ ID NO: 1181879 - RNA, 18 nt, Human
accugcggugcuaucucc

SEQ ID NO: 1181880 - RNA, 18 nt, Human
ucauuuuuuuuaagaaaa

SEQ ID NO: 1181881 - RNA, 19 nt, Human
ucauuuuuaguagagacag

SEQ ID NO: 1181882 - RNA, 14 nt, Human
ucauuugucacaca

SEQ ID NO: 1181883 - RNA, 16 nt, Human
ucauuugucacacacu

SEQ ID NO: 1181884 - RNA, 18 nt, Human
uccaaggguacuaaggaa

SEQ ID NO: 1181885 - RNA, 12 nt, Human
uccacccaccuc

SEQ ID NO: 1181886 - RNA, 13 nt, Human
uccacccaccuca

SEQ ID NO: 1181887 - RNA, 17 nt, Human
uccacccaccucagccu

SEQ ID NO: 1181888 - RNA, 20 nt, Human
uccacccaggagccccgagg

SEQ ID NO: 1181889 - RNA, 12 nt, Human
accuggccucug

SEQ ID NO: 1181890 - RNA, 13 nt, Human
accuggccucugc

SEQ ID NO: 1181891 - RNA, 21 nt, Human
accuggguaacuagggaagau

SEQ ID NO: 1181892 - RNA, 22 nt, Human
accuucuccuucaccuuugucc

SEQ ID NO: 1181893 - RNA, 14 nt, Human
accuuuguccccac

SEQ ID NO: 1181894 - RNA, 15 nt, Human
accuuuguccccacc

SEQ ID NO: 1181895 - RNA, 16 nt, Human
accuuuguccccaccg

SEQ ID NO: 1181896 - RNA, 17 nt, Human
accuuuguccccaccgc

SEQ ID NO: 1181897 - RNA, 16 nt, Human
accuuuuuuauacaua

SEQ ID NO: 1181898 - RNA, 17 nt, Human
accuuuuuuauacauaa

SEQ ID NO: 1181899 - RNA, 18 nt, Human
accuuuuuuauacauaaa

SEQ ID NO: 1181900 - RNA, 16 nt, Human
ucccaaagugcuggga

SEQ ID NO: 1181901 - RNA, 15 nt, Human
ucccaaagugcuggg

SEQ ID NO: 1181902 - RNA, 16 nt, Human
ucccacaaaggagagc

SEQ ID NO: 1181903 - RNA, 21 nt, Human
ucccaaagugcugggauuaca

SEQ ID NO: 1181904 - RNA, 14 nt, Human
ucccacaaaggaga

SEQ ID NO: 1181905 - RNA, 11 nt, Human
ucccaccccac

SEQ ID NO: 1181906 - RNA, 14 nt, Human
ucccaccccacaca

SEQ ID NO: 1181907 - RNA, 15 nt, Human
uccaugaguccccug

SEQ ID NO: 1181908 - RNA, 16 nt, Human
uccaugaguccccugu

SEQ ID NO: 1181909 - RNA, 17 nt, Human
uccaugaguccccuguu

SEQ ID NO: 1181910 - RNA, 11 nt, Human
uccauccugag

SEQ ID NO: 1181911 - RNA, 14 nt, Human
acggcucacugcag

SEQ ID NO: 1181912 - RNA, 15 nt, Human
acggcucacugcagc

SEQ ID NO: 1181913 - RNA, 14 nt, Human
uccagugagacagc

SEQ ID NO: 1181914 - RNA, 18 nt, Human
uccagugaggcucugccc

SEQ ID NO: 1181915 - RNA, 19 nt, Human
uccagugaggcucugcccu

SEQ ID NO: 1181916 - RNA, 20 nt, Human
uccagugaggcucugcccuu

SEQ ID NO: 1181917 - RNA, 15 nt, Human
acgacugcccggcag

SEQ ID NO: 1181918 - RNA, 18 nt, Human
acgccaggggaaaaucag

SEQ ID NO: 1181919 - RNA, 23 nt, Human
acgccaggggaaaaucagccugc

SEQ ID NO: 1181920 - RNA, 11 nt, Human
acgccauccca

SEQ ID NO: 1181921 - RNA, 14 nt, Human
acgccaucccagcc

SEQ ID NO: 1181922 - RNA, 15 nt, Human
acgccaucccagccc

SEQ ID NO: 1181923 - RNA, 16 nt, Human
acgccaucccagcccc

SEQ ID NO: 1181924 - RNA, 17 nt, Human
acgccaucccagcccca

SEQ ID NO: 1181925 - RNA, 18 nt, Human
acgccaucccagccccaa

SEQ ID NO: 1181926 - RNA, 14 nt, Human
uccaggcugggaga

SEQ ID NO: 1181927 - RNA, 17 nt, Human
uccaggcugggagagcc

SEQ ID NO: 1181928 - RNA, 18 nt, Human
uccaggcugggagagccu

SEQ ID NO: 1181929 - RNA, 14 nt, Human
acgaauauugcuga

SEQ ID NO: 1181930 - RNA, 14 nt, Human
acgcccccacuggu

SEQ ID NO: 1181931 - RNA, 23 nt, Human
acgcgugcacacaccagagccca

SEQ ID NO: 1181932 - RNA, 13 nt, Human
acgcuacccggga

SEQ ID NO: 1181933 - RNA, 17 nt, Human
acgcuacccgggaaggg

SEQ ID NO: 1181934 - RNA, 18 nt, Human
acgcuacccgggaagggg

SEQ ID NO: 1181935 - RNA, 15 nt, Human
acgcucucuggccuu

SEQ ID NO: 1181936 - RNA, 16 nt, Human
acgcucucuggccuuc

SEQ ID NO: 1181937 - RNA, 17 nt, Human
acgcucucuggccuucg

SEQ ID NO: 1181938 - RNA, 19 nt, Human
acggagucccaccuuggcu

SEQ ID NO: 1181939 - RNA, 21 nt, Human
acggagucccaccuuggcugc

SEQ ID NO: 1181940 - RNA, 16 nt, Human
acggccaggccagagg

SEQ ID NO: 1181941 - RNA, 21 nt, Human
acuauaauguaagcucuacug

SEQ ID NO: 1181942 - RNA, 12 nt, Human
acuauaauguaa

SEQ ID NO: 1181943 - RNA, 13 nt, Human
acuauaauguaag

SEQ ID NO: 1181944 - RNA, 14 nt, Human
acuauaauguaagc

SEQ ID NO: 1181945 - RNA, 14 nt, Human
acuauguugcccag

SEQ ID NO: 1181946 - RNA, 12 nt, Human
acuauguaucaa

SEQ ID NO: 1181947 - RNA, 14 nt, Human
acucaaugcacuga

SEQ ID NO: 1181948 - RNA, 19 nt, Human
acucacauuuauucugcuc

SEQ ID NO: 1181949 - RNA, 20 nt, Human
acucacauuuauucugcuca

SEQ ID NO: 1181950 - RNA, 21 nt, Human
acucacauuuauucugcucac

SEQ ID NO: 1181951 - RNA, 13 nt, Human
acguacacacaca

SEQ ID NO: 1181952 - RNA, 12 nt, Human
acguacacauuu

SEQ ID NO: 1181953 - RNA, 13 nt, Human
acguacacauuuu

SEQ ID NO: 1181954 - RNA, 14 nt, Human
acguacacauuuua

SEQ ID NO: 1181955 - RNA, 22 nt, Human
uccccacuugagaauuacccuu

SEQ ID NO: 1181956 - RNA, 11 nt, Human
ucccccagccc

SEQ ID NO: 1181957 - RNA, 18 nt, Human
acuacggaauaguuggcu

SEQ ID NO: 1181958 - RNA, 20 nt, Human
acuagaguuuagcuggaaaa

SEQ ID NO: 1181959 - RNA, 17 nt, Human
acucaccccagccccaa

SEQ ID NO: 1181960 - RNA, 23 nt, Human
ucccugaaggccccgcccaggcu

SEQ ID NO: 1181961 - RNA, 14 nt, Human
ucccucuuucccuc

SEQ ID NO: 1181962 - RNA, 18 nt, Human
ucccugaaggccccgccc

SEQ ID NO: 1181963 - RNA, 21 nt, Human
ucccugaaggccccgcccagg

SEQ ID NO: 1181964 - RNA, 22 nt, Human
ucccugaaggccccgcccaggc

SEQ ID NO: 1181965 - RNA, 18 nt, Human
ucccucagucuggcccuu

SEQ ID NO: 1181966 - RNA, 20 nt, Human
ucccucagucuggcccuucc

SEQ ID NO: 1181967 - RNA, 11 nt, Human
ucccucuuucc

SEQ ID NO: 1181968 - RNA, 13 nt, Human
ucccucuuucccu

SEQ ID NO: 1181969 - RNA, 14 nt, Human
acucaccugccccu

SEQ ID NO: 1181970 - RNA, 19 nt, Human
acucaccugccccucaacu

SEQ ID NO: 1181971 - RNA, 21 nt, Human
acucaccugccccucaacucu

SEQ ID NO: 1181972 - RNA, 14 nt, Human
acucagaagacacu

SEQ ID NO: 1181973 - RNA, 15 nt, Human
acucagaagacacug

SEQ ID NO: 1181974 - RNA, 16 nt, Human
acucagaagacacuga

SEQ ID NO: 1181975 - RNA, 17 nt, Human
acucagaagacacugau

SEQ ID NO: 1181976 - RNA, 18 nt, Human
acucagaagacacugaug

SEQ ID NO: 1181977 - RNA, 14 nt, Human
acucagaauucucu

SEQ ID NO: 1181978 - RNA, 21 nt, Human
acucagaauucucuaguuuga

SEQ ID NO: 1181979 - RNA, 22 nt, Human
acucagaauucucuaguuugau

SEQ ID NO: 1181980 - RNA, 12 nt, Human
acucaucuuagg

SEQ ID NO: 1181981 - RNA, 16 nt, Human
acucauugaccugagg

SEQ ID NO: 1181982 - RNA, 17 nt, Human
acucauugaccugaggc

SEQ ID NO: 1181983 - RNA, 18 nt, Human
acucauugaccugaggcc

SEQ ID NO: 1181984 - RNA, 22 nt, Human
acucauugaccugaggcccuuc

SEQ ID NO: 1181985 - RNA, 21 nt, Human
acuccaaacugacucuuaaga

SEQ ID NO: 1181986 - RNA, 15 nt, Human
acucgcgacaaugca

SEQ ID NO: 1181987 - RNA, 16 nt, Human
acucgcgacaaugcaa

SEQ ID NO: 1181988 - RNA, 17 nt, Human
acucgcgacaaugcaaa

SEQ ID NO: 1181989 - RNA, 11 nt, Human
acucugagacu

SEQ ID NO: 1181990 - RNA, 17 nt, Human
acucuggcagcucagag

SEQ ID NO: 1181991 - RNA, 19 nt, Human
acucuggcagcucagagag

SEQ ID NO: 1181992 - RNA, 20 nt, Human
acucuggcagcucagagagg

SEQ ID NO: 1181993 - RNA, 21 nt, Human
acucuuauugcccacgcugga

SEQ ID NO: 1181994 - RNA, 14 nt, Human
acuccagaaaguga

SEQ ID NO: 1181995 - RNA, 18 nt, Human
acuccagaaagugacaag

SEQ ID NO: 1181996 - RNA, 13 nt, Human
uccguuaaaauac

SEQ ID NO: 1181997 - RNA, 15 nt, Human
uccguuaaaauacca

SEQ ID NO: 1181998 - RNA, 12 nt, Human
uccuacucugug

SEQ ID NO: 1181999 - RNA, 21 nt, Human
uccuagccugugccucuggga

SEQ ID NO: 1182000 - RNA, 16 nt, Human
acucgaguuacagaca

SEQ ID NO: 1182001 - RNA, 17 nt, Human
uccucuccccaugaugu

SEQ ID NO: 1182002 - RNA, 14 nt, Human
uccucccaccucag

SEQ ID NO: 1182003 - RNA, 15 nt, Human
uccucccaccucagc

SEQ ID NO: 1182004 - RNA, 16 nt, Human
uccucccaccucagcc

SEQ ID NO: 1182005 - RNA, 18 nt, Human
uccucccaccucagccuc

SEQ ID NO: 1182006 - RNA, 20 nt, Human
uccucccaccucagccuccc

SEQ ID NO: 1182007 - RNA, 21 nt, Human
uccucccaccucagccucccg

SEQ ID NO: 1182008 - RNA, 12 nt, Human
uccucugcugcu

SEQ ID NO: 1182009 - RNA, 21 nt, Human
uccugaaaacccuugccaugu

SEQ ID NO: 1182010 - RNA, 22 nt, Human
uccugaaaacccuugccaugug

SEQ ID NO: 1182011 - RNA, 15 nt, Human
uccugaagaauugaa

SEQ ID NO: 1182012 - RNA, 20 nt, Human
acuguacaugaaaacacauu

SEQ ID NO: 1182013 - RNA, 21 nt, Human
acuguacaugaaaacacauuu

SEQ ID NO: 1182014 - RNA, 14 nt, Human
acuguaucaugaca

SEQ ID NO: 1182015 - RNA, 17 nt, Human
acuggguacuuguggac

SEQ ID NO: 1182016 - RNA, 18 nt, Human
acuggguacuuguggaca

SEQ ID NO: 1182017 - RNA, 16 nt, Human
acuguacaaaguagaa

SEQ ID NO: 1182018 - RNA, 22 nt, Human
acuguacaaaguagaagucuua

SEQ ID NO: 1182019 - RNA, 19 nt, Human
acuguacaugaaaacacau

SEQ ID NO: 1182020 - RNA, 16 nt, Human
acuguaucaugacaaa

SEQ ID NO: 1182021 - RNA, 20 nt, Human
acuguaucaugacaaagacu

SEQ ID NO: 1182022 - RNA, 22 nt, Human
acugaagaagcaccaaucauga

SEQ ID NO: 1182023 - RNA, 23 nt, Human
ucgcugugucagcauagaaguaa

SEQ ID NO: 1182024 - RNA, 21 nt, Human
acugggcuuggggaccagagc

SEQ ID NO: 1182025 - RNA, 22 nt, Human
acugggcuuggggaccagagcu

SEQ ID NO: 1182026 - RNA, 15 nt, Human
acuggguacuugugg

SEQ ID NO: 1182027 - RNA, 17 nt, Human
ucgggaggucgaggcag

SEQ ID NO: 1182028 - RNA, 23 nt, Human
ucgucacugcuuaacuucacaua

SEQ ID NO: 1182029 - RNA, 13 nt, Human
acuguggguagac

SEQ ID NO: 1182030 - RNA, 17 nt, Human
acuguuaauaguucagg

SEQ ID NO: 1182031 - RNA, 21 nt, Human
acuguuaauaguucagguaac

SEQ ID NO: 1182032 - RNA, 17 nt, Human
ucuaaagcugccagccg

SEQ ID NO: 1182033 - RNA, 13 nt, Human
ucuaaaggcuacc

SEQ ID NO: 1182034 - RNA, 16 nt, Human
ucuaaaggcuaccuuu

SEQ ID NO: 1182035 - RNA, 17 nt, Human
ucuaaaggcuaccuuug

SEQ ID NO: 1182036 - RNA, 17 nt, Human
ucuaccaaaaaucucaa

SEQ ID NO: 1182037 - RNA, 21 nt, Human
ucuacccucuuagaaaaacca

SEQ ID NO: 1182038 - RNA, 14 nt, Human
ucuacccuggcacu

SEQ ID NO: 1182039 - RNA, 20 nt, Human
acuuccagauccuggaaauc

SEQ ID NO: 1182040 - RNA, 18 nt, Human
acuuccaauuuacauacu

SEQ ID NO: 1182041 - RNA, 17 nt, Human
acuuccacugccauccu

SEQ ID NO: 1182042 - RNA, 16 nt, Human
acuuacuguacaugaa

SEQ ID NO: 1182043 - RNA, 12 nt, Human
ucuaccugaggg

SEQ ID NO: 1182044 - RNA, 19 nt, Human
ucuaccugaggggccucuu

SEQ ID NO: 1182045 - RNA, 13 nt, Human
acuuacuguacau

SEQ ID NO: 1182046 - RNA, 14 nt, Human
acuuacuguacaug

SEQ ID NO: 1182047 - RNA, 15 nt, Human
acuuacuguacauga

SEQ ID NO: 1182048 - RNA, 20 nt, Human
acuuagagguggggagcaga

SEQ ID NO: 1182049 - RNA, 13 nt, Human
ucuauaauuuaaa

SEQ ID NO: 1182050 - RNA, 23 nt, Human
ucuaguuugauuaaauucuugca

SEQ ID NO: 1182051 - RNA, 16 nt, Human
ucuaggaaauauuuau

SEQ ID NO: 1182052 - RNA, 24 nt, Human
ucuagauacuguaucaugacaaag

SEQ ID NO: 1182053 - RNA, 16 nt, Human
ucuauuguuucuuuca

SEQ ID NO: 1182054 - RNA, 16 nt, Human
ucucaaaaaaagaaaa

SEQ ID NO: 1182055 - RNA, 17 nt, Human
acuucgggaggucgagg

SEQ ID NO: 1182056 - RNA, 20 nt, Human
acuucgggaggucgaggcag

SEQ ID NO: 1182057 - RNA, 22 nt, Human
acuucgggaggucgaggcagga

SEQ ID NO: 1182058 - RNA, 14 nt, Human
acuugucuuuggac

SEQ ID NO: 1182059 - RNA, 14 nt, Human
acuuggaagcuccg

SEQ ID NO: 1182060 - RNA, 23 nt, Human
acuugaacccgggaggcagaggu

SEQ ID NO: 1182061 - RNA, 19 nt, Human
acuugagaauuacccuuuu

SEQ ID NO: 1182062 - RNA, 15 nt, Human
acuuguggacacagc

SEQ ID NO: 1182063 - RNA, 16 nt, Human
acuuuaaaaggagcca

SEQ ID NO: 1182064 - RNA, 18 nt, Human
acuugucuuuggacccug

SEQ ID NO: 1182065 - RNA, 14 nt, Human
acuuguggacacag

SEQ ID NO: 1182066 - RNA, 12 nt, Human
acuuuggaaaga

SEQ ID NO: 1182067 - RNA, 13 nt, Human
acuuuggaaagag

SEQ ID NO: 1182068 - RNA, 14 nt, Human
acuuuggaaagagu

SEQ ID NO: 1182069 - RNA, 23 nt, Human
acuuuggaaagaguaggaagacu

SEQ ID NO: 1182070 - RNA, 12 nt, Human
ucucucaggcca

SEQ ID NO: 1182071 - RNA, 21 nt, Human
ucucucaggccaaacucaccu

SEQ ID NO: 1182072 - RNA, 16 nt, Human
acuuuguguucaccuu

SEQ ID NO: 1182073 - RNA, 18 nt, Human
acuuuguguucaccuugu

SEQ ID NO: 1182074 - RNA, 20 nt, Human
ucuccuuaaagaguguggca

SEQ ID NO: 1182075 - RNA, 21 nt, Human
ucuccuuggugucgggcauga

SEQ ID NO: 1182076 - RNA, 23 nt, Human
ucuccuuggugucgggcaugaca

SEQ ID NO: 1182077 - RNA, 18 nt, Human
ucugaaggcuggguucug

SEQ ID NO: 1182078 - RNA, 20 nt, Human
agaaagacuaucuaaauguu

SEQ ID NO: 1182079 - RNA, 22 nt, Human
agaaagacuaucuaaauguuga

SEQ ID NO: 1182080 - RNA, 10 nt, Human
agaaagagag

SEQ ID NO: 1182081 - RNA, 11 nt, Human
agaaagagaga

SEQ ID NO: 1182082 - RNA, 12 nt, Human
agaaagagagaa

SEQ ID NO: 1182083 - RNA, 13 nt, Human
agaaagagagaaa

SEQ ID NO: 1182084 - RNA, 14 nt, Human
agaaagagagaaaa

SEQ ID NO: 1182085 - RNA, 15 nt, Human
agaaagagagaaaau

SEQ ID NO: 1182086 - RNA, 16 nt, Human
agaaagagagaaaaua

SEQ ID NO: 1182087 - RNA, 17 nt, Human
agaaagagagaaaauaa

SEQ ID NO: 1182088 - RNA, 18 nt, Human
agaaagagagaaaauaaa

SEQ ID NO: 1182089 - RNA, 22 nt, Human
agaaagagagaaaauaaaaagu

SEQ ID NO: 1182090 - RNA, 17 nt, Human
agaaagcagaacaguga

SEQ ID NO: 1182091 - RNA, 18 nt, Human
agaaagcagaacagugau

SEQ ID NO: 1182092 - RNA, 20 nt, Human
agaaagcagaacagugauua

SEQ ID NO: 1182093 - RNA, 18 nt, Human
agaaaaaugagccuggca

SEQ ID NO: 1182094 - RNA, 17 nt, Human
agaaaaaauauuuuccu

SEQ ID NO: 1182095 - RNA, 23 nt, Human
agaaaaaauauuuuccugccagg

SEQ ID NO: 1182096 - RNA, 17 nt, Human
ucucuugguccugcugc

SEQ ID NO: 1182097 - RNA, 18 nt, Human
ucucuugguccugcugca

SEQ ID NO: 1182098 - RNA, 16 nt, Human
agaaaacaaggaugaa

SEQ ID NO: 1182099 - RNA, 16 nt, Human
agaaacacaacuauau

SEQ ID NO: 1182100 - RNA, 15 nt, Human
agaaacauuugguaa

SEQ ID NO: 1182101 - RNA, 19 nt, Human
agaagcaccaaucaugaau

SEQ ID NO: 1182102 - RNA, 16 nt, Human
agaagcagaggaagga

SEQ ID NO: 1182103 - RNA, 20 nt, Human
ucugcccauccugccccuga

SEQ ID NO: 1182104 - RNA, 12 nt, Human
ucugcccuuggu

SEQ ID NO: 1182105 - RNA, 23 nt, Human
ucugcccuugguuaggcauugug

SEQ ID NO: 1182106 - RNA, 19 nt, Human
agaaccuuuugagugccuu

SEQ ID NO: 1182107 - RNA, 23 nt, Human
agaaccuuuugagugccuuacac

SEQ ID NO: 1182108 - RNA, 16 nt, Human
agaacucccuuucaac

SEQ ID NO: 1182109 - RNA, 17 nt, Human
agaacucccuuucaaca

SEQ ID NO: 1182110 - RNA, 22 nt, Human
ucugcuuugggguuuaucagaa

SEQ ID NO: 1182111 - RNA, 23 nt, Human
ucugcuuuuuaaagaaugcucuu

SEQ ID NO: 1182112 - RNA, 19 nt, Human
ucuggaauaaggagaauga

SEQ ID NO: 1182113 - RNA, 20 nt, Human
ucuggcagaguugaagacag

SEQ ID NO: 1182114 - RNA, 23 nt, Human
ucuggcagaguugaagacagagc

SEQ ID NO: 1182115 - RNA, 17 nt, Human
ucuggcagcucagagag

SEQ ID NO: 1182116 - RNA, 18 nt, Human
ucuggcagcucagagagg

SEQ ID NO: 1182117 - RNA, 21 nt, Human
ucuggcagcucagagagggug

SEQ ID NO: 1182118 - RNA, 10 nt, Human
ucuggccuuc

SEQ ID NO: 1182119 - RNA, 13 nt, Human
agaaguugauaug

SEQ ID NO: 1182120 - RNA, 22 nt, Human
agaaguuugagaucagccuggg

SEQ ID NO: 1182121 - RNA, 14 nt, Human
agaaucacuugaac

SEQ ID NO: 1182122 - RNA, 17 nt, Human
ucuucagagacuccugc

SEQ ID NO: 1182123 - RNA, 18 nt, Human
ucuucagagacuccugca

SEQ ID NO: 1182124 - RNA, 21 nt, Human
ucuuccaggcugggagagccu

SEQ ID NO: 1182125 - RNA, 20 nt, Human
ucuucagagacuccugcagg

SEQ ID NO: 1182126 - RNA, 15 nt, Human
ucuuccaggcuggga

SEQ ID NO: 1182127 - RNA, 17 nt, Human
ucuuccaggcugggaga

SEQ ID NO: 1182128 - RNA, 20 nt, Human
ucuuccaggcugggagagcc

SEQ ID NO: 1182129 - RNA, 15 nt, Human
ucuuccucccucccu

SEQ ID NO: 1182130 - RNA, 19 nt, Human
ucuucccuacaguugaaaa

SEQ ID NO: 1182131 - RNA, 22 nt, Human
ucuucccuacaguugaaaaaca

SEQ ID NO: 1182132 - RNA, 14 nt, Human
ucuuccucccuccc

SEQ ID NO: 1182133 - RNA, 15 nt, Human
ucuucuguacgucug

SEQ ID NO: 1182134 - RNA, 20 nt, Human
ucuucuguacgucugacagg

SEQ ID NO: 1182135 - RNA, 20 nt, Human
ucuucuguggguuucuaaag

SEQ ID NO: 1182136 - RNA, 21 nt, Human
ucuucugaacuuggcgcugcc

SEQ ID NO: 1182137 - RNA, 12 nt, Human
ucuucugcuuca

SEQ ID NO: 1182138 - RNA, 19 nt, Human
ucuucugcuucagccuccc

SEQ ID NO: 1182139 - RNA, 19 nt, Human
agacauacuaaccagcaga

SEQ ID NO: 1182140 - RNA, 23 nt, Human
agacauacuaaccagcagaaaug

SEQ ID NO: 1182141 - RNA, 21 nt, Human
agacauagaauuaacacauga

SEQ ID NO: 1182142 - RNA, 17 nt, Human
agacaucaacagauaaa

SEQ ID NO: 1182143 - RNA, 18 nt, Human
agacaucaacagauaaau

SEQ ID NO: 1182144 - RNA, 11 nt, Human
agaccuucucc

SEQ ID NO: 1182145 - RNA, 15 nt, Human
agaccuucuccuuca

SEQ ID NO: 1182146 - RNA, 18 nt, Human
agaccuucuccuucaccu

SEQ ID NO: 1182147 - RNA, 21 nt, Human
agaccuucuccuucaccuuug

SEQ ID NO: 1182148 - RNA, 23 nt, Human
agaccuucuccuucaccuuuguc

SEQ ID NO: 1182149 - RNA, 13 nt, Human
ucuugagccuggg

SEQ ID NO: 1182150 - RNA, 16 nt, Human
ucuugagccugggagg

SEQ ID NO: 1182151 - RNA, 16 nt, Human
ucuugagccuugaacu

SEQ ID NO: 1182152 - RNA, 13 nt, Human
ucuugauucauaa

SEQ ID NO: 1182153 - RNA, 17 nt, Human
ucuuuccugaggcuggg

SEQ ID NO: 1182154 - RNA, 15 nt, Human
ucuugguccugcugc

SEQ ID NO: 1182155 - RNA, 17 nt, Human
ucuugguccugcugcag

SEQ ID NO: 1182156 - RNA, 19 nt, Human
ucuugguccugcugcaguu

SEQ ID NO: 1182157 - RNA, 16 nt, Human
ucuuuaaaugcugcuu

SEQ ID NO: 1182158 - RNA, 19 nt, Human
ucuugcaauggcagccuug

SEQ ID NO: 1182159 - RNA, 22 nt, Human
ucuugcaauggcagccuuggca

SEQ ID NO: 1182160 - RNA, 23 nt, Human
ucuugcaauggcagccuuggcaa

SEQ ID NO: 1182161 - RNA, 17 nt, Human
ucuuggucagauuugaa

SEQ ID NO: 1182162 - RNA, 14 nt, Human
ucuugguccugcug

SEQ ID NO: 1182163 - RNA, 11 nt, Human
agagacuccug

SEQ ID NO: 1182164 - RNA, 17 nt, Human
agagacuccugcaggca

SEQ ID NO: 1182165 - RNA, 18 nt, Human
agagacuccugcaggcag

SEQ ID NO: 1182166 - RNA, 19 nt, Human
agagacuccugcaggcagc

SEQ ID NO: 1182167 - RNA, 20 nt, Human
agagacuccugcaggcagcc

SEQ ID NO: 1182168 - RNA, 21 nt, Human
agagacuccugcaggcagcca

SEQ ID NO: 1182169 - RNA, 22 nt, Human
agagacuccugcaggcagccag

SEQ ID NO: 1182170 - RNA, 13 nt, Human
ugaaagacuguac

SEQ ID NO: 1182171 - RNA, 15 nt, Human
ugaaagacuguacaa

SEQ ID NO: 1182172 - RNA, 23 nt, Human
agagacuccugcaggcagccagg

SEQ ID NO: 1182173 - RNA, 13 nt, Human
agagagaaaauaa

SEQ ID NO: 1182174 - RNA, 15 nt, Human
agagagaaaauaaaa

SEQ ID NO: 1182175 - RNA, 16 nt, Human
agagagaaaauaaaaa

SEQ ID NO: 1182176 - RNA, 17 nt, Human
agagagaaaauaaaaag

SEQ ID NO: 1182177 - RNA, 18 nt, Human
agagagaaaauaaaaagu

SEQ ID NO: 1182178 - RNA, 20 nt, Human
agagagaaaauaaaaaguua

SEQ ID NO: 1182179 - RNA, 22 nt, Human
agagagaaaauaaaaaguuaaa

SEQ ID NO: 1182180 - RNA, 22 nt, Human
agagaucaaccccuucgcuccu

SEQ ID NO: 1182181 - RNA, 19 nt, Human
agagcaagacgcugugcug

SEQ ID NO: 1182182 - RNA, 23 nt, Human
agagcaagacgcugugcugcccu

SEQ ID NO: 1182183 - RNA, 22 nt, Human
agagcaccuuagacagucccug

SEQ ID NO: 1182184 - RNA, 23 nt, Human
agagcaccuuagacagucccugc

SEQ ID NO: 1182185 - RNA, 13 nt, Human
agagccuuccagg

SEQ ID NO: 1182186 - RNA, 15 nt, Human
agagccuuccagggg

SEQ ID NO: 1182187 - RNA, 17 nt, Human
agagccuuccaggggug

SEQ ID NO: 1182188 - RNA, 22 nt, Human
agagccuuccaggggugggaca

SEQ ID NO: 1182189 - RNA, 13 nt, Human
agagccagggucu

SEQ ID NO: 1182190 - RNA, 20 nt, Human
agagcuagcagcagggaggg

SEQ ID NO: 1182191 - RNA, 14 nt, Human
agagcugccaccug

SEQ ID NO: 1182192 - RNA, 19 nt, Human
ugaaacucguuaauuugua

SEQ ID NO: 1182193 - RNA, 20 nt, Human
ugaaaaucuuauaauuuaaa

SEQ ID NO: 1182194 - RNA, 19 nt, Human
ugaaaaucgugacaacacu

SEQ ID NO: 1182195 - RNA, 17 nt, Human
ugaaaauguauguguaa

SEQ ID NO: 1182196 - RNA, 20 nt, Human
ugaaaaaggaggaagagaaa

SEQ ID NO: 1182197 - RNA, 22 nt, Human
ugaaaaaggaggaagagaaaaa

SEQ ID NO: 1182198 - RNA, 22 nt, Human
ugaaaaaguucugcagauaaac

SEQ ID NO: 1182199 - RNA, 20 nt, Human
ucuuucuggcuaugcauuug

SEQ ID NO: 1182200 - RNA, 21 nt, Human
ucuuucuggcuaugcauuuga

SEQ ID NO: 1182201 - RNA, 22 nt, Human
ucuuuggucuacacugugcuga

SEQ ID NO: 1182202 - RNA, 16 nt, Human
ugaaaaaggaggaaga

SEQ ID NO: 1182203 - RNA, 16 nt, Human
agagguggggagcaga

SEQ ID NO: 1182204 - RNA, 15 nt, Human
agagguuaagguggg

SEQ ID NO: 1182205 - RNA, 13 nt, Human
agagguucaaaga

SEQ ID NO: 1182206 - RNA, 16 nt, Human
agagggagggagggcu

SEQ ID NO: 1182207 - RNA, 20 nt, Human
agagggagggagggcuccag

SEQ ID NO: 1182208 - RNA, 15 nt, Human
ugaauacuuuauaaa

SEQ ID NO: 1182209 - RNA, 23 nt, Human
ugaauuucuuuugccguuauuaa

SEQ ID NO: 1182210 - RNA, 14 nt, Human
agaucaaccccuuc

SEQ ID NO: 1182211 - RNA, 19 nt, Human
ugacaaagacugaguacgu

SEQ ID NO: 1182212 - RNA, 18 nt, Human
ugacacacagcucugucc

SEQ ID NO: 1182213 - RNA, 19 nt, Human
ugacacacagcucuguccu

SEQ ID NO: 1182214 - RNA, 20 nt, Human
ugacacacagcucuguccug

SEQ ID NO: 1182215 - RNA, 12 nt, Human
ugacacaugcaa

SEQ ID NO: 1182216 - RNA, 20 nt, Human
ugacacaugcaaggucauuu

SEQ ID NO: 1182217 - RNA, 15 nt, Human
agagucacuggaaca

SEQ ID NO: 1182218 - RNA, 22 nt, Human
agagucagaaguuucugccgca

SEQ ID NO: 1182219 - RNA, 17 nt, Human
agaguuguuacauuuuu

SEQ ID NO: 1182220 - RNA, 19 nt, Human
agaguuguuacauuuuuaa

SEQ ID NO: 1182221 - RNA, 20 nt, Human
agaguuguuacauuuuuaag

SEQ ID NO: 1182222 - RNA, 21 nt, Human
agaguuguuacauuuuuaagu

SEQ ID NO: 1182223 - RNA, 17 nt, Human
agauaaggguaucuggu

SEQ ID NO: 1182224 - RNA, 18 nt, Human
agauaauauuaaggaaga

SEQ ID NO: 1182225 - RNA, 22 nt, Human
agauaauauuaaggaagacaau

SEQ ID NO: 1182226 - RNA, 20 nt, Human
agauacaggaaaagcugcug

SEQ ID NO: 1182227 - RNA, 13 nt, Human
agauacaguuacu

SEQ ID NO: 1182228 - RNA, 22 nt, Human
agauacaguuacucagaauucu

SEQ ID NO: 1182229 - RNA, 11 nt, Human
agauacuguau

SEQ ID NO: 1182230 - RNA, 15 nt, Human
agauacuguaucaug

SEQ ID NO: 1182231 - RNA, 16 nt, Human
agauacuguaucauga

SEQ ID NO: 1182232 - RNA, 20 nt, Human
agauauuuugcuuugugauu

SEQ ID NO: 1182233 - RNA, 21 nt, Human
agauauuuugcuuugugauuu

SEQ ID NO: 1182234 - RNA, 18 nt, Human
agaucaaaagguuaauaa

SEQ ID NO: 1182235 - RNA, 22 nt, Human
agauauuuugcuuugugauuuu

SEQ ID NO: 1182236 - RNA, 16 nt, Human
agaugccgcauuugga

SEQ ID NO: 1182237 - RNA, 17 nt, Human
ugacacuuaaaaauggu

SEQ ID NO: 1182238 - RNA, 16 nt, Human
agaugcaguucugaag

SEQ ID NO: 1182239 - RNA, 17 nt, Human
agaugcaguucugaaga

SEQ ID NO: 1182240 - RNA, 14 nt, Human
ugacccaugcugcc

SEQ ID NO: 1182241 - RNA, 15 nt, Human
ugacccaugcugccc

SEQ ID NO: 1182242 - RNA, 16 nt, Human
ugacccaugcugcccu

SEQ ID NO: 1182243 - RNA, 17 nt, Human
ugacccaugcugcccug

SEQ ID NO: 1182244 - RNA, 21 nt, Human
ugacccaugcugcccugugag

SEQ ID NO: 1182245 - RNA, 13 nt, Human
ugacuuacuguac

SEQ ID NO: 1182246 - RNA, 15 nt, Human
ugacuuacuguacau

SEQ ID NO: 1182247 - RNA, 16 nt, Human
ugacuuacuguacaug

SEQ ID NO: 1182248 - RNA, 18 nt, Human
ugaccugaggcccuucuc

SEQ ID NO: 1182249 - RNA, 19 nt, Human
ugaccugaggcccuucucu

SEQ ID NO: 1182250 - RNA, 22 nt, Human
agauucauauuuacuucuuaua

SEQ ID NO: 1182251 - RNA, 19 nt, Human
ugacuuacuguacaugaaa

SEQ ID NO: 1182252 - RNA, 13 nt, Human
agauuggaaggaa

SEQ ID NO: 1182253 - RNA, 17 nt, Human
agauuugaacucuucaa

SEQ ID NO: 1182254 - RNA, 21 nt, Human
agauuuugaaauuuuuauuaa

SEQ ID NO: 1182255 - RNA, 13 nt, Human
agcaagacgcugu

SEQ ID NO: 1182256 - RNA, 16 nt, Human
agcaagacgcugugcu

SEQ ID NO: 1182257 - RNA, 17 nt, Human
agcaagacgcugugcug

SEQ ID NO: 1182258 - RNA, 20 nt, Human
agcaagacgcugugcugccc

SEQ ID NO: 1182259 - RNA, 21 nt, Human
agcaagacgcugugcugcccu

SEQ ID NO: 1182260 - RNA, 22 nt, Human
agcaagacgcugugcugcccug

SEQ ID NO: 1182261 - RNA, 23 nt, Human
agcaagacgcugugcugcccugc

SEQ ID NO: 1182262 - RNA, 20 nt, Human
ugagaagcagaggaaggaga

SEQ ID NO: 1182263 - RNA, 17 nt, Human
ugaguacuacaguccuc

SEQ ID NO: 1182264 - RNA, 21 nt, Human
ugaguacuacaguccucccau

SEQ ID NO: 1182265 - RNA, 22 nt, Human
ugaguacuacaguccucccauc

SEQ ID NO: 1182266 - RNA, 23 nt, Human
ugaguacuacaguccucccaucu

SEQ ID NO: 1182267 - RNA, 22 nt, Human
ugaguaacugauuuguaacaag

SEQ ID NO: 1182268 - RNA, 15 nt, Human
ugaguacuacagucc

SEQ ID NO: 1182269 - RNA, 14 nt, Human
agcauauucaggaa

SEQ ID NO: 1182270 - RNA, 16 nt, Human
agcauauucaggaagc

SEQ ID NO: 1182271 - RNA, 23 nt, Human
agcauaaauguugacaugggaca

SEQ ID NO: 1182272 - RNA, 15 nt, Human
agcauacguacacau

SEQ ID NO: 1182273 - RNA, 16 nt, Human
agcauacguacacauu

SEQ ID NO: 1182274 - RNA, 17 nt, Human
agcauacguacacauuu

SEQ ID NO: 1182275 - RNA, 18 nt, Human
agcauacguacacauuuu

SEQ ID NO: 1182276 - RNA, 19 nt, Human
agcauacguacacauuuua

SEQ ID NO: 1182277 - RNA, 20 nt, Human
agcauacguacacauuuuau

SEQ ID NO: 1182278 - RNA, 21 nt, Human
agcauacguacacauuuuauu

SEQ ID NO: 1182279 - RNA, 14 nt, Human
ugagucaccaagcc

SEQ ID NO: 1182280 - RNA, 16 nt, Human
ugagucaccaagccca

SEQ ID NO: 1182281 - RNA, 17 nt, Human
ugagucaccaagcccag

SEQ ID NO: 1182282 - RNA, 17 nt, Human
ugagugccuuacacaau

SEQ ID NO: 1182283 - RNA, 20 nt, Human
ugagugccuuacacaauggu

SEQ ID NO: 1182284 - RNA, 18 nt, Human
ugagucaccaagcccagu

SEQ ID NO: 1182285 - RNA, 21 nt, Human
ugagugggugaauaauacagu

SEQ ID NO: 1182286 - RNA, 17 nt, Human
ugaguucauacccuguu

SEQ ID NO: 1182287 - RNA, 18 nt, Human
ugaguucauacccuguua

SEQ ID NO: 1182288 - RNA, 20 nt, Human
ugauacaaugcugugcccua

SEQ ID NO: 1182289 - RNA, 21 nt, Human
ugauacaaugcugugcccuaa

SEQ ID NO: 1182290 - RNA, 14 nt, Human
ugauacuacaguuu

SEQ ID NO: 1182291 - RNA, 17 nt, Human
ugauacuacaguuuguu

SEQ ID NO: 1182292 - RNA, 12 nt, Human
ugauaugggucu

SEQ ID NO: 1182293 - RNA, 20 nt, Human
agcaucacaugaacuuguaa

SEQ ID NO: 1182294 - RNA, 13 nt, Human
agcaucaggccag

SEQ ID NO: 1182295 - RNA, 20 nt, Human
ugaucacggcucacugcagc

SEQ ID NO: 1182296 - RNA, 21 nt, Human
ugaucacggcucacugcagcc

SEQ ID NO: 1182297 - RNA, 19 nt, Human
ugaucacggcucacugcag

SEQ ID NO: 1182298 - RNA, 20 nt, Human
agcaugucgucaaagcugaa

SEQ ID NO: 1182299 - RNA, 17 nt, Human
agcaugucgucaaagcu

SEQ ID NO: 1182300 - RNA, 12 nt, Human
agcauggcugcc

SEQ ID NO: 1182301 - RNA, 21 nt, Human
agcaucaggccaggcccucug

SEQ ID NO: 1182302 - RNA, 13 nt, Human
agcauggcugcca

SEQ ID NO: 1182303 - RNA, 14 nt, Human
agcaucaggccagg

SEQ ID NO: 1182304 - RNA, 16 nt, Human
agcaucaggccaggcc

SEQ ID NO: 1182305 - RNA, 17 nt, Human
agcaucaggccaggccc

SEQ ID NO: 1182306 - RNA, 18 nt, Human
agcaucaggccaggcccu

SEQ ID NO: 1182307 - RNA, 19 nt, Human
agcaucaggccaggcccuc

SEQ ID NO: 1182308 - RNA, 20 nt, Human
agcaucaggccaggcccucu

SEQ ID NO: 1182309 - RNA, 14 nt, Human
agccacggccaggc

SEQ ID NO: 1182310 - RNA, 14 nt, Human
agccacauuccuga

SEQ ID NO: 1182311 - RNA, 18 nt, Human
agccacauuccugaugcu

SEQ ID NO: 1182312 - RNA, 19 nt, Human
agccaccaacauacuccca

SEQ ID NO: 1182313 - RNA, 20 nt, Human
agccaccaacauacucccau

SEQ ID NO: 1182314 - RNA, 23 nt, Human
agccaccaacauacucccaucug

SEQ ID NO: 1182315 - RNA, 15 nt, Human
agccacggccaggcc

SEQ ID NO: 1182316 - RNA, 16 nt, Human
agccacggccaggcca

SEQ ID NO: 1182317 - RNA, 17 nt, Human
ugaugaagaaguugaua

SEQ ID NO: 1182318 - RNA, 13 nt, Human
agccacugcaccg

SEQ ID NO: 1182319 - RNA, 16 nt, Human
agccacugcaccgggc

SEQ ID NO: 1182320 - RNA, 21 nt, Human
agccacugcaccgggccacag

SEQ ID NO: 1182321 - RNA, 22 nt, Human
agccacugcaccgggccacaga

SEQ ID NO: 1182322 - RNA, 12 nt, Human
ugauuaaaccaa

SEQ ID NO: 1182323 - RNA, 14 nt, Human
ugauuaccagggac

SEQ ID NO: 1182324 - RNA, 16 nt, Human
ugauuaccagggacug

SEQ ID NO: 1182325 - RNA, 15 nt, Human
ugauggugguauguu

SEQ ID NO: 1182326 - RNA, 17 nt, Human
ugauguuuuaaggaugc

SEQ ID NO: 1182327 - RNA, 18 nt, Human
ugauguuuuaaggaugcu

SEQ ID NO: 1182328 - RNA, 14 nt, Human
ugaugauccuaggc

SEQ ID NO: 1182329 - RNA, 20 nt, Human
ugaugauccuaggcauuugc

SEQ ID NO: 1182330 - RNA, 16 nt, Human
ugauggugcaaugacc

SEQ ID NO: 1182331 - RNA, 17 nt, Human
ugauggugcaaugaccu

SEQ ID NO: 1182332 - RNA, 23 nt, Human
ugauggugcaaugaccuuucaau

SEQ ID NO: 1182333 - RNA, 23 nt, Human
agccaguaaaugggggugcauuu

SEQ ID NO: 1182334 - RNA, 21 nt, Human
agccaggccacaagacccuug

SEQ ID NO: 1182335 - RNA, 22 nt, Human
agccaggccacaagacccuugu

SEQ ID NO: 1182336 - RNA, 12 nt, Human
agccagggucuc

SEQ ID NO: 1182337 - RNA, 12 nt, Human
agccaggccaca

SEQ ID NO: 1182338 - RNA, 14 nt, Human
agccaggccacaag

SEQ ID NO: 1182339 - RNA, 19 nt, Human
agcccaggaaaggcuccag

SEQ ID NO: 1182340 - RNA, 20 nt, Human
agcccaggaaaggcuccagg

SEQ ID NO: 1182341 - RNA, 21 nt, Human
agcccaggaaaggcuccagga

SEQ ID NO: 1182342 - RNA, 22 nt, Human
agcccaggaaaggcuccaggag

SEQ ID NO: 1182343 - RNA, 23 nt, Human
agcccaggaaaggcuccaggagc

SEQ ID NO: 1182344 - RNA, 24 nt, Human
agcccaggaaaggcuccaggagca

SEQ ID NO: 1182345 - RNA, 14 nt, Human
ugauucagcucugc

SEQ ID NO: 1182346 - RNA, 15 nt, Human
ugauucauaaugacu

SEQ ID NO: 1182347 - RNA, 15 nt, Human
ugauucccaagcucu

SEQ ID NO: 1182348 - RNA, 16 nt, Human
ugauucccaagcucug

SEQ ID NO: 1182349 - RNA, 18 nt, Human
ugauucccaagcucugcu

SEQ ID NO: 1182350 - RNA, 19 nt, Human
ugauucccaagcucugcuc

SEQ ID NO: 1182351 - RNA, 21 nt, Human
ugauucccaagcucugcuccu

SEQ ID NO: 1182352 - RNA, 20 nt, Human
agccccuucugacccaugcu

SEQ ID NO: 1182353 - RNA, 24 nt, Human
agccccuucugacccaugcugccc

SEQ ID NO: 1182354 - RNA, 18 nt, Human
ugcacaagcugcacccuc

SEQ ID NO: 1182355 - RNA, 21 nt, Human
ugcacaagcugcacccucagg

SEQ ID NO: 1182356 - RNA, 22 nt, Human
agcccugguggcagugggagcu

SEQ ID NO: 1182357 - RNA, 23 nt, Human
agcccugguggcagugggagcug

SEQ ID NO: 1182358 - RNA, 15 nt, Human
ugcacaagcugcacc

SEQ ID NO: 1182359 - RNA, 10 nt, Human
ugcacacauu

SEQ ID NO: 1182360 - RNA, 11 nt, Human
ugcacacauuu

SEQ ID NO: 1182361 - RNA, 16 nt, Human
ugcacccucaggcagg

SEQ ID NO: 1182362 - RNA, 17 nt, Human
ugcacccucaggcaggu

SEQ ID NO: 1182363 - RNA, 14 nt, Human
ugcacgugugugca

SEQ ID NO: 1182364 - RNA, 15 nt, Human
ugcacgugugugcac

SEQ ID NO: 1182365 - RNA, 17 nt, Human
agccccuggaugcagcc

SEQ ID NO: 1182366 - RNA, 18 nt, Human
agccccuggaugcagccu

SEQ ID NO: 1182367 - RNA, 19 nt, Human
agccccuggaugcagccuc

SEQ ID NO: 1182368 - RNA, 22 nt, Human
agccccuggaugcagccucaca

SEQ ID NO: 1182369 - RNA, 24 nt, Human
agccccaaaacucuccucugcugc

SEQ ID NO: 1182370 - RNA, 17 nt, Human
agccccgaggccuucuc

SEQ ID NO: 1182371 - RNA, 22 nt, Human
agccccgaggccuucucugaag

SEQ ID NO: 1182372 - RNA, 15 nt, Human
ugauucuccugccuc

SEQ ID NO: 1182373 - RNA, 19 nt, Human
ugauucuccugccucagcc

SEQ ID NO: 1182374 - RNA, 20 nt, Human
ugauucuccugccucagccu

SEQ ID NO: 1182375 - RNA, 18 nt, Human
agcccauggcacucuaug

SEQ ID NO: 1182376 - RNA, 21 nt, Human
agccccaaaacucuccucugc

SEQ ID NO: 1182377 - RNA, 22 nt, Human
agccccaaaacucuccucugcu

SEQ ID NO: 1182378 - RNA, 20 nt, Human
agccgagauagccaaggcca

SEQ ID NO: 1182379 - RNA, 17 nt, Human
agcccuucuuuccacag

SEQ ID NO: 1182380 - RNA, 23 nt, Human
ugcacuauagccuaggugacaga

SEQ ID NO: 1182381 - RNA, 23 nt, Human
agcccuucuaccuuccugcaaca

SEQ ID NO: 1182382 - RNA, 20 nt, Human
agccucauguccacugguuc

SEQ ID NO: 1182383 - RNA, 16 nt, Human
agccucccaaagugcu

SEQ ID NO: 1182384 - RNA, 22 nt, Human
agccucagcauccuggcacccg

SEQ ID NO: 1182385 - RNA, 23 nt, Human
agccucagcauccuggcacccgg

SEQ ID NO: 1182386 - RNA, 15 nt, Human
agccucauguccacu

SEQ ID NO: 1182387 - RNA, 17 nt, Human
agccucagcauccuggc

SEQ ID NO: 1182388 - RNA, 19 nt, Human
agccucagcauccuggcac

SEQ ID NO: 1182389 - RNA, 20 nt, Human
agccucagcauccuggcacc

SEQ ID NO: 1182390 - RNA, 21 nt, Human
agccucagcauccuggcaccc

SEQ ID NO: 1182391 - RNA, 14 nt, Human
ugcauaaguuaacu

SEQ ID NO: 1182392 - RNA, 17 nt, Human
ugcauaaguuaacuucc

SEQ ID NO: 1182393 - RNA, 22 nt, Human
agccugaaagaggaaugaagua

SEQ ID NO: 1182394 - RNA, 17 nt, Human
agccucccaaagugcug

SEQ ID NO: 1182395 - RNA, 13 nt, Human
ugcagccucacag

SEQ ID NO: 1182396 - RNA, 15 nt, Human
ugcagccucacaguc

SEQ ID NO: 1182397 - RNA, 16 nt, Human
ugcagccucacagucc

SEQ ID NO: 1182398 - RNA, 17 nt, Human
ugcagccucacaguccu

SEQ ID NO: 1182399 - RNA, 21 nt, Human
ugcauuaucuagauacuguau

SEQ ID NO: 1182400 - RNA, 22 nt, Human
ugcauuaucuagauacuguauc

SEQ ID NO: 1182401 - RNA, 11 nt, Human
agccuuccagg

SEQ ID NO: 1182402 - RNA, 14 nt, Human
agccuuccaggggu

SEQ ID NO: 1182403 - RNA, 16 nt, Human
agccuuccaggggugg

SEQ ID NO: 1182404 - RNA, 17 nt, Human
agccuuccagggguggg

SEQ ID NO: 1182405 - RNA, 16 nt, Human
agcggagaaaggaagg

SEQ ID NO: 1182406 - RNA, 20 nt, Human
agcggagaaaggaagggcug

SEQ ID NO: 1182407 - RNA, 18 nt, Human
agcggagacggaguccca

SEQ ID NO: 1182408 - RNA, 20 nt, Human
ugcauuaucuagauacugua

SEQ ID NO: 1182409 - RNA, 12 nt, Human
ugcauaccacuu

SEQ ID NO: 1182410 - RNA, 14 nt, Human
ugcauacacacaca

SEQ ID NO: 1182411 - RNA, 15 nt, Human
ugcauacacacacac

SEQ ID NO: 1182412 - RNA, 16 nt, Human
ugcauacacacacaca

SEQ ID NO: 1182413 - RNA, 21 nt, Human
ugcauacacacacacacacag

SEQ ID NO: 1182414 - RNA, 22 nt, Human
ugcauacacacacacacacagc

SEQ ID NO: 1182415 - RNA, 23 nt, Human
ugcauacacacacacacacagcc

SEQ ID NO: 1182416 - RNA, 14 nt, Human
ugcauaccacuuuu

SEQ ID NO: 1182417 - RNA, 15 nt, Human
agccugcuccagcug

SEQ ID NO: 1182418 - RNA, 16 nt, Human
agccugcuccagcugu

SEQ ID NO: 1182419 - RNA, 17 nt, Human
agccugcuccagcuguu

SEQ ID NO: 1182420 - RNA, 19 nt, Human
agccugcuccagcuguuca

SEQ ID NO: 1182421 - RNA, 22 nt, Human
agccugcuccagcuguucagcu

SEQ ID NO: 1182422 - RNA, 22 nt, Human
agccugggugacagagcaagug

SEQ ID NO: 1182423 - RNA, 21 nt, Human
agccugugccucugggacugg

SEQ ID NO: 1182424 - RNA, 16 nt, Human
agccugugucuuuaaa

SEQ ID NO: 1182425 - RNA, 23 nt, Human
agccugugucuuuaaaugcugcu

SEQ ID NO: 1182426 - RNA, 19 nt, Human
agcuacuaauuuuaaaaug

SEQ ID NO: 1182427 - RNA, 19 nt, Human
agcgugagccacugcaccg

SEQ ID NO: 1182428 - RNA, 22 nt, Human
agcgugagccacugcaccgggc

SEQ ID NO: 1182429 - RNA, 15 nt, Human
agcgugcauaaguua

SEQ ID NO: 1182430 - RNA, 17 nt, Human
agcuacuugggaggcug

SEQ ID NO: 1182431 - RNA, 18 nt, Human
agcuacuugggaggcuga

SEQ ID NO: 1182432 - RNA, 18 nt, Human
agcuagacgagcaggcuu

SEQ ID NO: 1182433 - RNA, 20 nt, Human
agcucauucuccuuguguua

SEQ ID NO: 1182434 - RNA, 21 nt, Human
agcucauucuccuuguguuac

SEQ ID NO: 1182435 - RNA, 19 nt, Human
ugcccacaggaucagucug

SEQ ID NO: 1182436 - RNA, 20 nt, Human
ugcccacaggaucagucuga

SEQ ID NO: 1182437 - RNA, 21 nt, Human
ugcccagccccuucugaccca

SEQ ID NO: 1182438 - RNA, 12 nt, Human
agcuaggccugg

SEQ ID NO: 1182439 - RNA, 14 nt, Human
agcuaggccuggcc

SEQ ID NO: 1182440 - RNA, 15 nt, Human
agcuaggccuggcca

SEQ ID NO: 1182441 - RNA, 16 nt, Human
agcuaggccuggccag

SEQ ID NO: 1182442 - RNA, 18 nt, Human
agcucaggugucccugca

SEQ ID NO: 1182443 - RNA, 20 nt, Human
agcucaggugucccugcacu

SEQ ID NO: 1182444 - RNA, 21 nt, Human
agcucaggugucccugcacuu

SEQ ID NO: 1182445 - RNA, 22 nt, Human
agcucaggugucccugcacuug

SEQ ID NO: 1182446 - RNA, 18 nt, Human
ugcgguccacccaggagc

SEQ ID NO: 1182447 - RNA, 17 nt, Human
ugcggugcuaucucccc

SEQ ID NO: 1182448 - RNA, 21 nt, Human
ugcggugcuaucucccccagc

SEQ ID NO: 1182449 - RNA, 17 nt, Human
ugcggccuuuggcuuca

SEQ ID NO: 1182450 - RNA, 19 nt, Human
ugcggccuuuggcuucacg

SEQ ID NO: 1182451 - RNA, 20 nt, Human
ugcgggcuuccuccuggugu

SEQ ID NO: 1182452 - RNA, 17 nt, Human
ugccuuuucccaacucc

SEQ ID NO: 1182453 - RNA, 22 nt, Human
ugcggacagccacggccaggcc

SEQ ID NO: 1182454 - RNA, 23 nt, Human
ugcggacagccacggccaggcca

SEQ ID NO: 1182455 - RNA, 11 nt, Human
ugcuacacacu

SEQ ID NO: 1182456 - RNA, 19 nt, Human
agcuugaccgugaggccag

SEQ ID NO: 1182457 - RNA, 14 nt, Human
agcuugaggguugg

SEQ ID NO: 1182458 - RNA, 18 nt, Human
agcuugaggguugggcug

SEQ ID NO: 1182459 - RNA, 22 nt, Human
agcuugaggguugggcuggugu

SEQ ID NO: 1182460 - RNA, 18 nt, Human
agcuuguaaauagcucag

SEQ ID NO: 1182461 - RNA, 12 nt, Human
ugcccaggcagg

SEQ ID NO: 1182462 - RNA, 13 nt, Human
ugcccaggcaggu

SEQ ID NO: 1182463 - RNA, 14 nt, Human
ugcccaggcagguc

SEQ ID NO: 1182464 - RNA, 13 nt, Human
ugccucugccucu

SEQ ID NO: 1182465 - RNA, 14 nt, Human
ugccucugccucug

SEQ ID NO: 1182466 - RNA, 15 nt, Human
ugccucugccucuga

SEQ ID NO: 1182467 - RNA, 17 nt, Human
ugccucugccucugaca

SEQ ID NO: 1182468 - RNA, 14 nt, Human
ugccugcccaggcc

SEQ ID NO: 1182469 - RNA, 15 nt, Human
ugccugcccaggccc

SEQ ID NO: 1182470 - RNA, 16 nt, Human
ugccugcccaggcccc

SEQ ID NO: 1182471 - RNA, 14 nt, Human
ugccuggauggggc

SEQ ID NO: 1182472 - RNA, 15 nt, Human
ugccuggauggggcu

SEQ ID NO: 1182473 - RNA, 20 nt, Human
agcugccuguucagcuccag

SEQ ID NO: 1182474 - RNA, 21 nt, Human
agcugccuguucagcuccagc

SEQ ID NO: 1182475 - RNA, 22 nt, Human
agcugccuguucagcuccagcu

SEQ ID NO: 1182476 - RNA, 21 nt, Human
agcugcuugggcuucauccuc

SEQ ID NO: 1182477 - RNA, 21 nt, Human
agcugcuuuugucuaugggac

SEQ ID NO: 1182478 - RNA, 22 nt, Human
agcugcuuuugucuaugggacu

SEQ ID NO: 1182479 - RNA, 15 nt, Human
agcugggacuacagg

SEQ ID NO: 1182480 - RNA, 20 nt, Human
agcugugcucuggacaggca

SEQ ID NO: 1182481 - RNA, 21 nt, Human
agcugugcucuggacaggcau

SEQ ID NO: 1182482 - RNA, 23 nt, Human
agcugugcucuggacaggcaugu

SEQ ID NO: 1182483 - RNA, 14 nt, Human
agcuguuacugucu

SEQ ID NO: 1182484 - RNA, 13 nt, Human
agcuguucagcug

SEQ ID NO: 1182485 - RNA, 14 nt, Human
agcuguucagcugg

SEQ ID NO: 1182486 - RNA, 18 nt, Human
ugccuguucagcuccagc

SEQ ID NO: 1182487 - RNA, 20 nt, Human
ugccuguucagcuccagcuc

SEQ ID NO: 1182488 - RNA, 21 nt, Human
ugccuguucagcuccagcuca

SEQ ID NO: 1182489 - RNA, 20 nt, Human
ugccuguugggccaggagcc

SEQ ID NO: 1182490 - RNA, 15 nt, Human
ugccuuauggaacac

SEQ ID NO: 1182491 - RNA, 16 nt, Human
ugccuuauggaacacu

SEQ ID NO: 1182492 - RNA, 17 nt, Human
ugcucuggacaggcaug

SEQ ID NO: 1182493 - RNA, 15 nt, Human
ugcucuggacaggca

SEQ ID NO: 1182494 - RNA, 16 nt, Human
ugcucuggacaggcau

SEQ ID NO: 1182495 - RNA, 14 nt, Human
ugcucuggacaggc

SEQ ID NO: 1182496 - RNA, 14 nt, Human
ugcucauggaauug

SEQ ID NO: 1182497 - RNA, 19 nt, Human
ugcuaucucccccagcccc

SEQ ID NO: 1182498 - RNA, 20 nt, Human
ugcuaucucccccagcccca

SEQ ID NO: 1182499 - RNA, 16 nt, Human
ugcugacuguuuucuc

SEQ ID NO: 1182500 - RNA, 13 nt, Human
aggaaaggcucca

SEQ ID NO: 1182501 - RNA, 14 nt, Human
aggaaaggcuccag

SEQ ID NO: 1182502 - RNA, 15 nt, Human
aggaaaggcuccagg

SEQ ID NO: 1182503 - RNA, 16 nt, Human
aggaaaggcuccagga

SEQ ID NO: 1182504 - RNA, 12 nt, Human
aggaaauauuua

SEQ ID NO: 1182505 - RNA, 11 nt, Human
aggaagcacau

SEQ ID NO: 1182506 - RNA, 16 nt, Human
aggaagcacaugccuc

SEQ ID NO: 1182507 - RNA, 17 nt, Human
aggaagcacaugccucu

SEQ ID NO: 1182508 - RNA, 13 nt, Human
aggaaauauuuau

SEQ ID NO: 1182509 - RNA, 15 nt, Human
aggaaaucaccgaaa

SEQ ID NO: 1182510 - RNA, 19 nt, Human
aggaaaucaccgaaaacgu

SEQ ID NO: 1182511 - RNA, 22 nt, Human
aggaagcacaugccucucucag

SEQ ID NO: 1182512 - RNA, 21 nt, Human
aggaagccagcaggcucucag

SEQ ID NO: 1182513 - RNA, 22 nt, Human
aggaagccagcaggcucucagg

SEQ ID NO: 1182514 - RNA, 23 nt, Human
aggaagccagcaggcucucaggc

SEQ ID NO: 1182515 - RNA, 18 nt, Human
aggaagccgcuggggcca

SEQ ID NO: 1182516 - RNA, 19 nt, Human
aggaagccgcuggggccag

SEQ ID NO: 1182517 - RNA, 20 nt, Human
aggaagccgcuggggccagu

SEQ ID NO: 1182518 - RNA, 12 nt, Human
aggaagcucagg

SEQ ID NO: 1182519 - RNA, 22 nt, Human
aggaaggaaacccagcucuggu

SEQ ID NO: 1182520 - RNA, 23 nt, Human
aggaaggaaacccagcucugguc

SEQ ID NO: 1182521 - RNA, 19 nt, Human
ugcuggcuguuggcugggg

SEQ ID NO: 1182522 - RNA, 21 nt, Human
ugcuggcuguuggcugggggc

SEQ ID NO: 1182523 - RNA, 19 nt, Human
ugcugggauuacaagcgug

SEQ ID NO: 1182524 - RNA, 20 nt, Human
ugcugggauuacagguguga

SEQ ID NO: 1182525 - RNA, 21 nt, Human
ugcugggauuacaagcgugag

SEQ ID NO: 1182526 - RNA, 17 nt, Human
ugcugggauuacaggug

SEQ ID NO: 1182527 - RNA, 13 nt, Human
ugcuguauuuuaa

SEQ ID NO: 1182528 - RNA, 21 nt, Human
ugcuguauuuuaaaagaauga

SEQ ID NO: 1182529 - RNA, 22 nt, Human
ugcuguauuuuaaaagaaugau

SEQ ID NO: 1182530 - RNA, 13 nt, Human
ugcugcccugccc

SEQ ID NO: 1182531 - RNA, 16 nt, Human
ugcugcccugcccacc

SEQ ID NO: 1182532 - RNA, 17 nt, Human
ugcugcccugcccaccu

SEQ ID NO: 1182533 - RNA, 18 nt, Human
ugcugcccugcccaccug

SEQ ID NO: 1182534 - RNA, 19 nt, Human
ugcugcccugcccaccugg

SEQ ID NO: 1182535 - RNA, 21 nt, Human
ugcugcccugcccaccuggcc

SEQ ID NO: 1182536 - RNA, 11 nt, Human
ugcugcccugu

SEQ ID NO: 1182537 - RNA, 12 nt, Human
ugcugcccugug

SEQ ID NO: 1182538 - RNA, 17 nt, Human
ugcugucccuuuuccuu

SEQ ID NO: 1182539 - RNA, 23 nt, Human
ugcuguauuuuaaaagaaugauu

SEQ ID NO: 1182540 - RNA, 19 nt, Human
ugcugucccuuacgugagu

SEQ ID NO: 1182541 - RNA, 15 nt, Human
ugcugucccuuuucc

SEQ ID NO: 1182542 - RNA, 19 nt, Human
aggacacuaaccacgcugg

SEQ ID NO: 1182543 - RNA, 16 nt, Human
ugcuuccagugaggcu

SEQ ID NO: 1182544 - RNA, 18 nt, Human
aggacacuaaccacgcug

SEQ ID NO: 1182545 - RNA, 12 nt, Human
ugcuucaaggau

SEQ ID NO: 1182546 - RNA, 21 nt, Human
ugcuucaaggauccugagcca

SEQ ID NO: 1182547 - RNA, 23 nt, Human
ugcuucaaggauccugagccaga

SEQ ID NO: 1182548 - RNA, 18 nt, Human
uggaaguacuauaauuua

SEQ ID NO: 1182549 - RNA, 17 nt, Human
uggaaaugggcagagca

SEQ ID NO: 1182550 - RNA, 18 nt, Human
uggaaaugggcagagcag

SEQ ID NO: 1182551 - RNA, 16 nt, Human
uggaagcacagcuuca

SEQ ID NO: 1182552 - RNA, 13 nt, Human
aggauccugagcc

SEQ ID NO: 1182553 - RNA, 14 nt, Human
aggauccugagcca

SEQ ID NO: 1182554 - RNA, 23 nt, Human
aggacagcccuucuuuccacaga

SEQ ID NO: 1182555 - RNA, 21 nt, Human
ugcuugaggcaacucaucuua

SEQ ID NO: 1182556 - RNA, 14 nt, Human
ugcuuggaggaagg

SEQ ID NO: 1182557 - RNA, 15 nt, Human
ugcuuggaggaagga

SEQ ID NO: 1182558 - RNA, 16 nt, Human
ugcuuggaggaaggaa

SEQ ID NO: 1182559 - RNA, 12 nt, Human
ugcuuguacaua

SEQ ID NO: 1182560 - RNA, 13 nt, Human
ugcuuguacauaa

SEQ ID NO: 1182561 - RNA, 14 nt, Human
ugcuuguacauaau

SEQ ID NO: 1182562 - RNA, 16 nt, Human
ugcuuguacauaaugc

SEQ ID NO: 1182563 - RNA, 22 nt, Human
ugcuuguacauaaugcgugcau

SEQ ID NO: 1182564 - RNA, 12 nt, Human
ugcuuugugauu

SEQ ID NO: 1182565 - RNA, 14 nt, Human
ugcuuugugauuuu

SEQ ID NO: 1182566 - RNA, 16 nt, Human
ugcuuugugauuuuug

SEQ ID NO: 1182567 - RNA, 17 nt, Human
ugcuuugugauuuuugu

SEQ ID NO: 1182568 - RNA, 14 nt, Human
ugcuuuuggucugu

SEQ ID NO: 1182569 - RNA, 17 nt, Human
ugcuuuuggucugugug

SEQ ID NO: 1182570 - RNA, 13 nt, Human
uggagaagaacug

SEQ ID NO: 1182571 - RNA, 11 nt, Human
uggacuuuguu

SEQ ID NO: 1182572 - RNA, 14 nt, Human
uggagaagaacuga

SEQ ID NO: 1182573 - RNA, 13 nt, Human
uggagaagcggcu

SEQ ID NO: 1182574 - RNA, 22 nt, Human
uggagaagcggcuggcagccca

SEQ ID NO: 1182575 - RNA, 14 nt, Human
aggcaaugcuggcu

SEQ ID NO: 1182576 - RNA, 20 nt, Human
aggcacccaccaucaugucu

SEQ ID NO: 1182577 - RNA, 21 nt, Human
aggcacccaccaucaugucug

SEQ ID NO: 1182578 - RNA, 22 nt, Human
aggcacccaccaucaugucugg

SEQ ID NO: 1182579 - RNA, 14 nt, Human
uggagcucguggaa

SEQ ID NO: 1182580 - RNA, 17 nt, Human
aggaucucuugagccug

SEQ ID NO: 1182581 - RNA, 18 nt, Human
aggaucucuugagccugg

SEQ ID NO: 1182582 - RNA, 19 nt, Human
aggaucucuugagccuggg

SEQ ID NO: 1182583 - RNA, 13 nt, Human
uggacacagcucu

SEQ ID NO: 1182584 - RNA, 14 nt, Human
uggacacagcucuu

SEQ ID NO: 1182585 - RNA, 22 nt, Human
uggacacagcucuucuccaggc

SEQ ID NO: 1182586 - RNA, 23 nt, Human
uggacacagcucuucuccaggcu

SEQ ID NO: 1182587 - RNA, 16 nt, Human
uggacccugaggccca

SEQ ID NO: 1182588 - RNA, 18 nt, Human
uggacccugaggcccaga

SEQ ID NO: 1182589 - RNA, 19 nt, Human
uggacccugaggcccagag

SEQ ID NO: 1182590 - RNA, 20 nt, Human
uggacccugaggcccagagg

SEQ ID NO: 1182591 - RNA, 21 nt, Human
uggacccugaggcccagaggg

SEQ ID NO: 1182592 - RNA, 23 nt, Human
uggacccuguggaugauaaaaca

SEQ ID NO: 1182593 - RNA, 20 nt, Human
uggaccuugaacuggguacu

SEQ ID NO: 1182594 - RNA, 14 nt, Human
uggaguauauguca

SEQ ID NO: 1182595 - RNA, 13 nt, Human
uggauuguccccg

SEQ ID NO: 1182596 - RNA, 21 nt, Human
uggauuguccccgacccuugc

SEQ ID NO: 1182597 - RNA, 16 nt, Human
aggcagccccauucug

SEQ ID NO: 1182598 - RNA, 17 nt, Human
aggcagccccauucugc

SEQ ID NO: 1182599 - RNA, 16 nt, Human
aggccaaaggaagcac

SEQ ID NO: 1182600 - RNA, 18 nt, Human
aggccaaaggaagcacau

SEQ ID NO: 1182601 - RNA, 19 nt, Human
aggccaaaggaagcacaug

SEQ ID NO: 1182602 - RNA, 19 nt, Human
aggcagccccauucugccu

SEQ ID NO: 1182603 - RNA, 20 nt, Human
aggccaaaggaagcacaugc

SEQ ID NO: 1182604 - RNA, 16 nt, Human
aggccaaggugggagg

SEQ ID NO: 1182605 - RNA, 18 nt, Human
aggccaaggugggaggau

SEQ ID NO: 1182606 - RNA, 20 nt, Human
uggagguacgaaaagagggg

SEQ ID NO: 1182607 - RNA, 17 nt, Human
uggcagccuuggcaaac

SEQ ID NO: 1182608 - RNA, 15 nt, Human
uggcagcucaccucu

SEQ ID NO: 1182609 - RNA, 19 nt, Human
uggcagcucaccucucccu

SEQ ID NO: 1182610 - RNA, 17 nt, Human
aggccacaagacccuug

SEQ ID NO: 1182611 - RNA, 18 nt, Human
aggccacaagacccuugu

SEQ ID NO: 1182612 - RNA, 19 nt, Human
aggccacaagacccuugug

SEQ ID NO: 1182613 - RNA, 14 nt, Human
aggccagagggagu

SEQ ID NO: 1182614 - RNA, 20 nt, Human
aggccagagggagugacaga

SEQ ID NO: 1182615 - RNA, 20 nt, Human
aggccacaagacccuugugg

SEQ ID NO: 1182616 - RNA, 21 nt, Human
aggcccagagggccugcaagg

SEQ ID NO: 1182617 - RNA, 21 nt, Human
uggccaaagccaaagcuaggc

SEQ ID NO: 1182618 - RNA, 23 nt, Human
uggccaaagccaaagcuaggccu

SEQ ID NO: 1182619 - RNA, 23 nt, Human
uggccagugugacaaggauugcu

SEQ ID NO: 1182620 - RNA, 17 nt, Human
aggccccgcccaggcuu

SEQ ID NO: 1182621 - RNA, 12 nt, Human
aggccccugcca

SEQ ID NO: 1182622 - RNA, 13 nt, Human
uggcccacgcacu

SEQ ID NO: 1182623 - RNA, 18 nt, Human
uggccugagcugggauga

SEQ ID NO: 1182624 - RNA, 18 nt, Human
uggccuggccccucaggg

SEQ ID NO: 1182625 - RNA, 21 nt, Human
uggccuggccccucagggucc

SEQ ID NO: 1182626 - RNA, 14 nt, Human
uggccuucggccuc

SEQ ID NO: 1182627 - RNA, 12 nt, Human
aggccuggggac

SEQ ID NO: 1182628 - RNA, 18 nt, Human
aggccugggggcugggca

SEQ ID NO: 1182629 - RNA, 20 nt, Human
aggccugggggcugggcaga

SEQ ID NO: 1182630 - RNA, 17 nt, Human
ugggcaacccccagccu

SEQ ID NO: 1182631 - RNA, 20 nt, Human
ugggcaacccccagccugcu

SEQ ID NO: 1182632 - RNA, 21 nt, Human
ugggcaacccccagccugcua

SEQ ID NO: 1182633 - RNA, 13 nt, Human
ugggccaggagcc

SEQ ID NO: 1182634 - RNA, 14 nt, Human
ugggccaggagccu

SEQ ID NO: 1182635 - RNA, 16 nt, Human
ugggccaggagccucc

SEQ ID NO: 1182636 - RNA, 20 nt, Human
ugggcccaaugcacuuuguu

SEQ ID NO: 1182637 - RNA, 14 nt, Human
ugggaguacaaaag

SEQ ID NO: 1182638 - RNA, 17 nt, Human
aggccuucucugaagga

SEQ ID NO: 1182639 - RNA, 18 nt, Human
ugggaggucaaggcugca

SEQ ID NO: 1182640 - RNA, 19 nt, Human
ugggaggucaaggcugcag

SEQ ID NO: 1182641 - RNA, 20 nt, Human
ugggaggucaaggcugcagu

SEQ ID NO: 1182642 - RNA, 23 nt, Human
ugggaggucaaggcugcagugag

SEQ ID NO: 1182643 - RNA, 17 nt, Human
agggaggugaccccagg

SEQ ID NO: 1182644 - RNA, 17 nt, Human
agggagugacagaggca

SEQ ID NO: 1182645 - RNA, 18 nt, Human
agggagugacagaggcag

SEQ ID NO: 1182646 - RNA, 19 nt, Human
agggagugacagaggcagc

SEQ ID NO: 1182647 - RNA, 20 nt, Human
agggagugacagaggcagcc

SEQ ID NO: 1182648 - RNA, 23 nt, Human
agggcccagagaggguggugacc

SEQ ID NO: 1182649 - RNA, 20 nt, Human
ugggcucccuucccaccucu

SEQ ID NO: 1182650 - RNA, 21 nt, Human
ugggcucccuucccaccucuc

SEQ ID NO: 1182651 - RNA, 23 nt, Human
agggcuucugccauuucugagau

SEQ ID NO: 1182652 - RNA, 18 nt, Human
ugggcucccuucccaccu

SEQ ID NO: 1182653 - RNA, 19 nt, Human
ugggcucccuucccaccuc

SEQ ID NO: 1182654 - RNA, 14 nt, Human
uggggaccagagcu

SEQ ID NO: 1182655 - RNA, 15 nt, Human
uggggaccagagcug

SEQ ID NO: 1182656 - RNA, 17 nt, Human
uggggaccagagcugcc

SEQ ID NO: 1182657 - RNA, 18 nt, Human
uggggaccagagcugcca

SEQ ID NO: 1182658 - RNA, 13 nt, Human
uggggaccucagg

SEQ ID NO: 1182659 - RNA, 18 nt, Human
ugggcuggguucuaccca

SEQ ID NO: 1182660 - RNA, 19 nt, Human
ugggcuggguucuacccag

SEQ ID NO: 1182661 - RNA, 23 nt, Human
ugggcuggguucuacccaggugc

SEQ ID NO: 1182662 - RNA, 18 nt, Human
uggggcggugagagggga

SEQ ID NO: 1182663 - RNA, 15 nt, Human
uggggcccugccucc

SEQ ID NO: 1182664 - RNA, 16 nt, Human
uggggcccugccuccu

SEQ ID NO: 1182665 - RNA, 23 nt, Human
uggggaccucaggccugggggcu

SEQ ID NO: 1182666 - RNA, 12 nt, Human
uggggagaaagu

SEQ ID NO: 1182667 - RNA, 20 nt, Human
uggggcugcaccggcuggcc

SEQ ID NO: 1182668 - RNA, 22 nt, Human
uggggcugcaccggcuggccug

SEQ ID NO: 1182669 - RNA, 14 nt, Human
ugggguacccacug

SEQ ID NO: 1182670 - RNA, 15 nt, Human
ugggguacccacugc

SEQ ID NO: 1182671 - RNA, 16 nt, Human
ugggguacccacugcu

SEQ ID NO: 1182672 - RNA, 15 nt, Human
ugggguaugggagag

SEQ ID NO: 1182673 - RNA, 17 nt, Human
uggggucacucuggcag

SEQ ID NO: 1182674 - RNA, 18 nt, Human
uggggucacucuggcagc

SEQ ID NO: 1182675 - RNA, 23 nt, Human
aggggagcaaaaucgaugcagug

SEQ ID NO: 1182676 - RNA, 19 nt, Human
uggggucacucuggcagcu

SEQ ID NO: 1182677 - RNA, 20 nt, Human
uggggucacucuggcagcuc

SEQ ID NO: 1182678 - RNA, 15 nt, Human
aggggguggccuccc

SEQ ID NO: 1182679 - RNA, 17 nt, Human
aggggguggccucccaa

SEQ ID NO: 1182680 - RNA, 18 nt, Human
aggggguggccucccaac

SEQ ID NO: 1182681 - RNA, 20 nt, Human
aggggugggacacccuguga

SEQ ID NO: 1182682 - RNA, 22 nt, Human
aggggugggacacccugugaug

SEQ ID NO: 1182683 - RNA, 24 nt, Human
agggguucccuuuuuuggcugcug

SEQ ID NO: 1182684 - RNA, 21 nt, Human
agggucucacuauguugccca

SEQ ID NO: 1182685 - RNA, 22 nt, Human
agggucucacuauguugcccag

SEQ ID NO: 1182686 - RNA, 23 nt, Human
agggucucacuauguugcccagg

SEQ ID NO: 1182687 - RNA, 16 nt, Human
ugguacuaacuuuccu

SEQ ID NO: 1182688 - RNA, 20 nt, Human
ugguaaggggaauugaggac

SEQ ID NO: 1182689 - RNA, 22 nt, Human
agggucucacucugucgcccag

SEQ ID NO: 1182690 - RNA, 15 nt, Human
agggugggagugggc

SEQ ID NO: 1182691 - RNA, 15 nt, Human
ugggugcuuggagga

SEQ ID NO: 1182692 - RNA, 19 nt, Human
ugggugcuuggaggaagga

SEQ ID NO: 1182693 - RNA, 22 nt, Human
ugggugcuuggaggaaggaaac

SEQ ID NO: 1182694 - RNA, 16 nt, Human
uggucucaaacucuug

SEQ ID NO: 1182695 - RNA, 16 nt, Human
uggucccaccccacac

SEQ ID NO: 1182696 - RNA, 13 nt, Human
uggucccacucag

SEQ ID NO: 1182697 - RNA, 17 nt, Human
uggucucaaacucuuga

SEQ ID NO: 1182698 - RNA, 23 nt, Human
uggucucaaacucuugaccucag

SEQ ID NO: 1182699 - RNA, 18 nt, Human
uggucaccaaaucagcug

SEQ ID NO: 1182700 - RNA, 20 nt, Human
uggucaccaaaucagcugcu

SEQ ID NO: 1182701 - RNA, 14 nt, Human
uggucccaccccac

SEQ ID NO: 1182702 - RNA, 15 nt, Human
uggucccaccccaca

SEQ ID NO: 1182703 - RNA, 16 nt, Human
uggucugacccacugc

SEQ ID NO: 1182704 - RNA, 17 nt, Human
uggucugacccacugcu

SEQ ID NO: 1182705 - RNA, 18 nt, Human
uggucugacccacugcuu

SEQ ID NO: 1182706 - RNA, 22 nt, Human
aggguguccggucccuguccca

SEQ ID NO: 1182707 - RNA, 13 nt, Human
aggguuauaauaa

SEQ ID NO: 1182708 - RNA, 17 nt, Human
aggguuaugauuaagua

SEQ ID NO: 1182709 - RNA, 21 nt, Human
agguaugcaaucaaaucugcu

SEQ ID NO: 1182710 - RNA, 23 nt, Human
agguagaaauaucugaaaaugua

SEQ ID NO: 1182711 - RNA, 23 nt, Human
agguacuucaaauccuugaagau

SEQ ID NO: 1182712 - RNA, 17 nt, Human
agguagaaauaucugaa

SEQ ID NO: 1182713 - RNA, 19 nt, Human
agguagaaauaucugaaaa

SEQ ID NO: 1182714 - RNA, 13 nt, Human
aggguugggcugg

SEQ ID NO: 1182715 - RNA, 18 nt, Human
aggguuggccccugcccg

SEQ ID NO: 1182716 - RNA, 23 nt, Human
aggguuggccccugcccggcugc

SEQ ID NO: 1182717 - RNA, 12 nt, Human
aggucagagccu

SEQ ID NO: 1182718 - RNA, 13 nt, Human
aggucagagccug

SEQ ID NO: 1182719 - RNA, 17 nt, Human
aggucauuuuuuuuaag

SEQ ID NO: 1182720 - RNA, 20 nt, Human
aggucauuuuuuuuaagaaa

SEQ ID NO: 1182721 - RNA, 21 nt, Human
aggugcacaagcuccaagcuc

SEQ ID NO: 1182722 - RNA, 20 nt, Human
aggugggauccuccaggugc

SEQ ID NO: 1182723 - RNA, 23 nt, Human
aggucuugaacuccuggccucaa

SEQ ID NO: 1182724 - RNA, 15 nt, Human
aggugcacaagcucc

SEQ ID NO: 1182725 - RNA, 16 nt, Human
aggugcacaagcucca

SEQ ID NO: 1182726 - RNA, 17 nt, Human
aggugcacaagcuccaa

SEQ ID NO: 1182727 - RNA, 18 nt, Human
aggugcacaagcuccaag

SEQ ID NO: 1182728 - RNA, 20 nt, Human
aggugcacaagcuccaagcu

SEQ ID NO: 1182729 - RNA, 17 nt, Human
aggugguuauggagagg

SEQ ID NO: 1182730 - RNA, 14 nt, Human
agguugcagugagc

SEQ ID NO: 1182731 - RNA, 14 nt, Human
agguuggugggggc

SEQ ID NO: 1182732 - RNA, 17 nt, Human
uguaagaaaauaucacu

SEQ ID NO: 1182733 - RNA, 22 nt, Human
uguaagcucuacugaggugcua

SEQ ID NO: 1182734 - RNA, 11 nt, Human
agguuuuccug

SEQ ID NO: 1182735 - RNA, 18 nt, Human
aguaauaugcacacauuu

SEQ ID NO: 1182736 - RNA, 19 nt, Human
aguaauaugcacacauuuu

SEQ ID NO: 1182737 - RNA, 20 nt, Human
aguaauaugcacacauuuuu

SEQ ID NO: 1182738 - RNA, 14 nt, Human
uguaauuugugaua

SEQ ID NO: 1182739 - RNA, 18 nt, Human
uguagaggagaaacugga

SEQ ID NO: 1182740 - RNA, 13 nt, Human
uguagagugggag

SEQ ID NO: 1182741 - RNA, 14 nt, Human
uguagagugggagc

SEQ ID NO: 1182742 - RNA, 20 nt, Human
uguaggaagguuaauguuca

SEQ ID NO: 1182743 - RNA, 19 nt, Human
aguagauaggccaugggca

SEQ ID NO: 1182744 - RNA, 17 nt, Human
aguagaagucuuagaug

SEQ ID NO: 1182745 - RNA, 14 nt, Human
aguacacuguuuca

SEQ ID NO: 1182746 - RNA, 16 nt, Human
aguacacuguuucaaa

SEQ ID NO: 1182747 - RNA, 20 nt, Human
aguacacuguuucaaacuuu

SEQ ID NO: 1182748 - RNA, 16 nt, Human
ugucagcugaaccugg

SEQ ID NO: 1182749 - RNA, 19 nt, Human
agucacugagacagcccgg

SEQ ID NO: 1182750 - RNA, 19 nt, Human
ugucagcugaaccugggua

SEQ ID NO: 1182751 - RNA, 16 nt, Human
ugucagguggggcagc

SEQ ID NO: 1182752 - RNA, 13 nt, Human
aguauuucuauga

SEQ ID NO: 1182753 - RNA, 15 nt, Human
aguauuucuaugaaa

SEQ ID NO: 1182754 - RNA, 16 nt, Human
aguauuucuaugaaau

SEQ ID NO: 1182755 - RNA, 13 nt, Human
agucaccaagccc

SEQ ID NO: 1182756 - RNA, 14 nt, Human
agucaccaagccca

SEQ ID NO: 1182757 - RNA, 20 nt, Human
ugucaaucagccuaguugau

SEQ ID NO: 1182758 - RNA, 16 nt, Human
aguaggaagacuuugg

SEQ ID NO: 1182759 - RNA, 17 nt, Human
aguaggaagacuuugga

SEQ ID NO: 1182760 - RNA, 18 nt, Human
aguaggaagacuuuggaa

SEQ ID NO: 1182761 - RNA, 19 nt, Human
aguaggaagacuuuggaaa

SEQ ID NO: 1182762 - RNA, 22 nt, Human
aguaggaagacuuuggaaagac

SEQ ID NO: 1182763 - RNA, 19 nt, Human
ugucaagagggucugagga

SEQ ID NO: 1182764 - RNA, 15 nt, Human
ugucaagccauaauu

SEQ ID NO: 1182765 - RNA, 14 nt, Human
uguauuuuuuuacu

SEQ ID NO: 1182766 - RNA, 16 nt, Human
uguauuuuuuuacuaa

SEQ ID NO: 1182767 - RNA, 16 nt, Human
uguccuacccacccuc

SEQ ID NO: 1182768 - RNA, 13 nt, Human
uguccgagcuuug

SEQ ID NO: 1182769 - RNA, 14 nt, Human
uguccgagcuuuga

SEQ ID NO: 1182770 - RNA, 12 nt, Human
ugucgggcauga

SEQ ID NO: 1182771 - RNA, 14 nt, Human
ugucgcccagucug

SEQ ID NO: 1182772 - RNA, 15 nt, Human
ugucgcccagucugg

SEQ ID NO: 1182773 - RNA, 14 nt, Human
ugucgggcaugaca

SEQ ID NO: 1182774 - RNA, 15 nt, Human
ugucgggcaugacac

SEQ ID NO: 1182775 - RNA, 16 nt, Human
agucaggaaagagaac

SEQ ID NO: 1182776 - RNA, 19 nt, Human
agucagggguucccuuuuu

SEQ ID NO: 1182777 - RNA, 12 nt, Human
agucccugccaa

SEQ ID NO: 1182778 - RNA, 23 nt, Human
aguccgaaagggacuuggaagcu

SEQ ID NO: 1182779 - RNA, 16 nt, Human
agucucacuguugccc

SEQ ID NO: 1182780 - RNA, 17 nt, Human
agucucacuguugccca

SEQ ID NO: 1182781 - RNA, 22 nt, Human
ugugcucugaucauccacugug

SEQ ID NO: 1182782 - RNA, 23 nt, Human
ugugcucugaucauccacugugc

SEQ ID NO: 1182783 - RNA, 15 nt, Human
ugugcucuggacagg

SEQ ID NO: 1182784 - RNA, 18 nt, Human
agucucacuguugcccag

SEQ ID NO: 1182785 - RNA, 19 nt, Human
agucucacuguugcccagg

SEQ ID NO: 1182786 - RNA, 20 nt, Human
agucucacuguugcccaggc

SEQ ID NO: 1182787 - RNA, 21 nt, Human
agucucacuguugcccaggcu

SEQ ID NO: 1182788 - RNA, 20 nt, Human
ugugcccuaaaguguauuuu

SEQ ID NO: 1182789 - RNA, 21 nt, Human
ugugcccuaaaguguauuuuu

SEQ ID NO: 1182790 - RNA, 16 nt, Human
ugugcucuggacaggc

SEQ ID NO: 1182791 - RNA, 18 nt, Human
ugugcucuggacaggcau

SEQ ID NO: 1182792 - RNA, 19 nt, Human
ugugcucuggacaggcaug

SEQ ID NO: 1182793 - RNA, 13 nt, Human
ugugcugcccugc

SEQ ID NO: 1182794 - RNA, 14 nt, Human
ugugcugcccugcc

SEQ ID NO: 1182795 - RNA, 15 nt, Human
ugugcugcccugccc

SEQ ID NO: 1182796 - RNA, 18 nt, Human
ugugcugcccugcccacc

SEQ ID NO: 1182797 - RNA, 16 nt, Human
agugccaaaaacaaca

SEQ ID NO: 1182798 - RNA, 14 nt, Human
agugcaugcugucc

SEQ ID NO: 1182799 - RNA, 14 nt, Human
agugcccacaggau

SEQ ID NO: 1182800 - RNA, 16 nt, Human
agugagucgaggacag

SEQ ID NO: 1182801 - RNA, 24 nt, Human
agugauucuccugccucagccucc

SEQ ID NO: 1182802 - RNA, 21 nt, Human
agugaguugauagcacagacc

SEQ ID NO: 1182803 - RNA, 18 nt, Human
agugcaaauugucacagg

SEQ ID NO: 1182804 - RNA, 21 nt, Human
agugcaaauugucacaggaca

SEQ ID NO: 1182805 - RNA, 22 nt, Human
agugcaaauugucacaggacag

SEQ ID NO: 1182806 - RNA, 19 nt, Human
agugcugggauuacaggug

SEQ ID NO: 1182807 - RNA, 20 nt, Human
agugcugggauuacaggugu

SEQ ID NO: 1182808 - RNA, 22 nt, Human
agugcugcauuuaaaagauaca

SEQ ID NO: 1182809 - RNA, 20 nt, Human
agugcugggauuacaagcgu

SEQ ID NO: 1182810 - RNA, 21 nt, Human
agugccuguaaucacagcuac

SEQ ID NO: 1182811 - RNA, 15 nt, Human
agugccuuacacaau

SEQ ID NO: 1182812 - RNA, 17 nt, Human
agugccuuacacaaugg

SEQ ID NO: 1182813 - RNA, 12 nt, Human
ugugguuucauu

SEQ ID NO: 1182814 - RNA, 16 nt, Human
agugcuuccaaggaug

SEQ ID NO: 1182815 - RNA, 17 nt, Human
ugugucagguggggcag

SEQ ID NO: 1182816 - RNA, 19 nt, Human
ugugucagguggggcagcu

SEQ ID NO: 1182817 - RNA, 20 nt, Human
ugugucagguggggcagcuu

SEQ ID NO: 1182818 - RNA, 13 nt, Human
ugugucucuuggu

SEQ ID NO: 1182819 - RNA, 16 nt, Human
ugugucucuugguccu

SEQ ID NO: 1182820 - RNA, 14 nt, Human
uguguuaugaagca

SEQ ID NO: 1182821 - RNA, 21 nt, Human
uguuaacauggacaugaucuu

SEQ ID NO: 1182822 - RNA, 19 nt, Human
uguuaaugauagcuacugu

SEQ ID NO: 1182823 - RNA, 11 nt, Human
aguggaaaaau

SEQ ID NO: 1182824 - RNA, 18 nt, Human
aguggaaaaauagccugc

SEQ ID NO: 1182825 - RNA, 19 nt, Human
aguggaaaaauagccugcc

SEQ ID NO: 1182826 - RNA, 23 nt, Human
aguguuggagaagaacugaaauc

SEQ ID NO: 1182827 - RNA, 17 nt, Human
aguguuggagaagaacu

SEQ ID NO: 1182828 - RNA, 18 nt, Human
aguguuggagaagaacug

SEQ ID NO: 1182829 - RNA, 14 nt, Human
aguguuggagaaga

SEQ ID NO: 1182830 - RNA, 16 nt, Human
aguguuggagaagaac

SEQ ID NO: 1182831 - RNA, 20 nt, Human
uguucuugguuuguaaauua

SEQ ID NO: 1182832 - RNA, 22 nt, Human
uguucuugguuuguaaauuaac

SEQ ID NO: 1182833 - RNA, 19 nt, Human
uguucuuucacccuuuucu

SEQ ID NO: 1182834 - RNA, 13 nt, Human
uguugcccaggcu

SEQ ID NO: 1182835 - RNA, 15 nt, Human
uguugcccaggcugg

SEQ ID NO: 1182836 - RNA, 20 nt, Human
uguugcccaggcuggcgugc

SEQ ID NO: 1182837 - RNA, 18 nt, Human
uguucuagcauggcugcc

SEQ ID NO: 1182838 - RNA, 18 nt, Human
uguucuuaguuugcaguu

SEQ ID NO: 1182839 - RNA, 16 nt, Human
agugugguguuuccug

SEQ ID NO: 1182840 - RNA, 23 nt, Human
aguuccucauuagcauuuugcua

SEQ ID NO: 1182841 - RNA, 16 nt, Human
aguucaauucucauuu

SEQ ID NO: 1182842 - RNA, 20 nt, Human
aguucggugagcuacaaaug

SEQ ID NO: 1182843 - RNA, 19 nt, Human
aguucggugagcuacaaau

SEQ ID NO: 1182844 - RNA, 12 nt, Human
aguucucuccuu

SEQ ID NO: 1182845 - RNA, 14 nt, Human
uguuuauugucaaa

SEQ ID NO: 1182846 - RNA, 17 nt, Human
uguuuauugucaaagug

SEQ ID NO: 1182847 - RNA, 13 nt, Human
uuaaucauuaggu

SEQ ID NO: 1182848 - RNA, 22 nt, Human
uuaaucauuaggugugacugaa

SEQ ID NO: 1182849 - RNA, 23 nt, Human
uuaaucauuaggugugacugaau

SEQ ID NO: 1182850 - RNA, 22 nt, Human
uuaaucugguuuauuuuuguuc

SEQ ID NO: 1182851 - RNA, 18 nt, Human
uuaaugaaagacuguaca

SEQ ID NO: 1182852 - RNA, 19 nt, Human
uuaaugaaagacuguacaa

SEQ ID NO: 1182853 - RNA, 20 nt, Human
uuaaugaaagacuguacaaa

SEQ ID NO: 1182854 - RNA, 22 nt, Human
uuaagaaagacuaucuaaaugu

SEQ ID NO: 1182855 - RNA, 20 nt, Human
uuaagaagacugcauuauau

SEQ ID NO: 1182856 - RNA, 9 nt, Human
uuaaggugg

SEQ ID NO: 1182857 - RNA, 15 nt, Human
uuaagugcugcauuu

SEQ ID NO: 1182858 - RNA, 16 nt, Human
uuaagugcugcauuua

SEQ ID NO: 1182859 - RNA, 19 nt, Human
uuaagugcugcauuuaaaa

SEQ ID NO: 1182860 - RNA, 22 nt, Human
uuaagugcugcauuuaaaagau

SEQ ID NO: 1182861 - RNA, 23 nt, Human
aguuuuuauggcuuuugugcauu

SEQ ID NO: 1182862 - RNA, 12 nt, Human
auaaaauaauuu

SEQ ID NO: 1182863 - RNA, 15 nt, Human
auaaaauaauuuuua

SEQ ID NO: 1182864 - RNA, 20 nt, Human
uuaagaaaaaggaugcacag

SEQ ID NO: 1182865 - RNA, 21 nt, Human
uuaagaaaaaggaugcacaga

SEQ ID NO: 1182866 - RNA, 15 nt, Human
uuaaauaaugugaaa

SEQ ID NO: 1182867 - RNA, 14 nt, Human
uuaaaaaucucaaa

SEQ ID NO: 1182868 - RNA, 15 nt, Human
uuaaaaaucucaaau

SEQ ID NO: 1182869 - RNA, 16 nt, Human
uuaaaaaucucaaauu

SEQ ID NO: 1182870 - RNA, 17 nt, Human
uuaaaaaucucaaauuu

SEQ ID NO: 1182871 - RNA, 16 nt, Human
uuaaauaaugugaaac

SEQ ID NO: 1182872 - RNA, 18 nt, Human
uuaaauaaugugaaacug

SEQ ID NO: 1182873 - RNA, 19 nt, Human
uuaaauaaugugaaacugg

SEQ ID NO: 1182874 - RNA, 19 nt, Human
uuaacagaaauguacagca

SEQ ID NO: 1182875 - RNA, 20 nt, Human
uuaacagaaauguacagcaa

SEQ ID NO: 1182876 - RNA, 14 nt, Human
aguuuaaauuguaa

SEQ ID NO: 1182877 - RNA, 11 nt, Human
aguuggucccc

SEQ ID NO: 1182878 - RNA, 13 nt, Human
aguuggucccccu

SEQ ID NO: 1182879 - RNA, 17 nt, Human
aguuggucccccuucca

SEQ ID NO: 1182880 - RNA, 18 nt, Human
aguuggucccccuuccau

SEQ ID NO: 1182881 - RNA, 13 nt, Human
uuaaaaaaaaucc

SEQ ID NO: 1182882 - RNA, 13 nt, Human
uguuucaaacaua

SEQ ID NO: 1182883 - RNA, 19 nt, Human
uguuucaaacauauauaac

SEQ ID NO: 1182884 - RNA, 23 nt, Human
aguugccagucaccccggccacc

SEQ ID NO: 1182885 - RNA, 19 nt, Human
aguugggcuuccucauagu

SEQ ID NO: 1182886 - RNA, 17 nt, Human
aguuggguggaugccug

SEQ ID NO: 1182887 - RNA, 19 nt, Human
uuacccucauguucuuaau

SEQ ID NO: 1182888 - RNA, 20 nt, Human
uuagacagagucucacuguu

SEQ ID NO: 1182889 - RNA, 13 nt, Human
uuagacagucccu

SEQ ID NO: 1182890 - RNA, 22 nt, Human
auaacgauaaaagacagugaaa

SEQ ID NO: 1182891 - RNA, 16 nt, Human
auaacuaaaagguaug

SEQ ID NO: 1182892 - RNA, 11 nt, Human
auaaauuauuu

SEQ ID NO: 1182893 - RNA, 14 nt, Human
auaaauaaaaauaa

SEQ ID NO: 1182894 - RNA, 15 nt, Human
auaaauaguuuauga

SEQ ID NO: 1182895 - RNA, 13 nt, Human
auaaauaaaaaua

SEQ ID NO: 1182896 - RNA, 18 nt, Human
auaauccuaaacauauga

SEQ ID NO: 1182897 - RNA, 15 nt, Human
auaaugcgugcauac

SEQ ID NO: 1182898 - RNA, 20 nt, Human
auaaugcgugcauaccacuu

SEQ ID NO: 1182899 - RNA, 22 nt, Human
auaauugacaggauuauuggaa

SEQ ID NO: 1182900 - RNA, 14 nt, Human
uuagacagucccug

SEQ ID NO: 1182901 - RNA, 12 nt, Human
auaauacaccac

SEQ ID NO: 1182902 - RNA, 18 nt, Human
auaauacaccacuacauu

SEQ ID NO: 1182903 - RNA, 20 nt, Human
auaauacaccacuacauucu

SEQ ID NO: 1182904 - RNA, 21 nt, Human
auaauacaccacuacauucug

SEQ ID NO: 1182905 - RNA, 18 nt, Human
uuagcaaauucuguuuuu

SEQ ID NO: 1182906 - RNA, 18 nt, Human
auaauuuaccugaagucu

SEQ ID NO: 1182907 - RNA, 18 nt, Human
uuagccaagugugguaga

SEQ ID NO: 1182908 - RNA, 14 nt, Human
uuagcggagacgga

SEQ ID NO: 1182909 - RNA, 20 nt, Human
uuagggaaggauacaaaagc

SEQ ID NO: 1182910 - RNA, 16 nt, Human
uuaggugaggaagcaa

SEQ ID NO: 1182911 - RNA, 16 nt, Human
uuaggugugacugaau

SEQ ID NO: 1182912 - RNA, 21 nt, Human
uuaggugugacugaauuucuu

SEQ ID NO: 1182913 - RNA, 15 nt, Human
uuaguuucuccaagc

SEQ ID NO: 1182914 - RNA, 22 nt, Human
uuaguuugcaguuacacuaaaa

SEQ ID NO: 1182915 - RNA, 23 nt, Human
uucacaagacccaaaaggcagaa

SEQ ID NO: 1182916 - RNA, 20 nt, Human
uucacagaugggugcuugga

SEQ ID NO: 1182917 - RNA, 15 nt, Human
uucacaguucucucc

SEQ ID NO: 1182918 - RNA, 20 nt, Human
uucacaguucucuccuucuu

SEQ ID NO: 1182919 - RNA, 17 nt, Human
auaggcguaacuaauuu

SEQ ID NO: 1182920 - RNA, 19 nt, Human
auaggaacuuaaauaaugu

SEQ ID NO: 1182921 - RNA, 12 nt, Human
auaggaaaaacu

SEQ ID NO: 1182922 - RNA, 14 nt, Human
auaggaaaaacuga

SEQ ID NO: 1182923 - RNA, 16 nt, Human
auaggaaaaacugauu

SEQ ID NO: 1182924 - RNA, 17 nt, Human
auaggaaaaacugauuu

SEQ ID NO: 1182925 - RNA, 21 nt, Human
uucaagcgauucuucugcuuc

SEQ ID NO: 1182926 - RNA, 17 nt, Human
uucaaaauaaaaaugag

SEQ ID NO: 1182927 - RNA, 14 nt, Human
uucaaacauauaua

SEQ ID NO: 1182928 - RNA, 17 nt, Human
uuauuuuuagacagagu

SEQ ID NO: 1182929 - RNA, 18 nt, Human
uuauuuuuagacagaguc

SEQ ID NO: 1182930 - RNA, 17 nt, Human
auaguggcuuaaaacaa

SEQ ID NO: 1182931 - RNA, 15 nt, Human
auaguggugugauuu

SEQ ID NO: 1182932 - RNA, 22 nt, Human
auaguuaagcgugcauaaguua

SEQ ID NO: 1182933 - RNA, 22 nt, Human
auaguuggcuaggaccccucca

SEQ ID NO: 1182934 - RNA, 20 nt, Human
auaguuguaccgcaauguga

SEQ ID NO: 1182935 - RNA, 14 nt, Human
auauauaacaaugc

SEQ ID NO: 1182936 - RNA, 12 nt, Human
auauauaaccag

SEQ ID NO: 1182937 - RNA, 13 nt, Human
auauauaaccagu

SEQ ID NO: 1182938 - RNA, 17 nt, Human
uuccagguuuaagcugu

SEQ ID NO: 1182939 - RNA, 23 nt, Human
uucccaaagcagugcaugcuguc

SEQ ID NO: 1182940 - RNA, 21 nt, Human
uuccaggggugggacacccug

SEQ ID NO: 1182941 - RNA, 13 nt, Human
uuccaggcuggga

SEQ ID NO: 1182942 - RNA, 19 nt, Human
uuccagugaggcucugccc

SEQ ID NO: 1182943 - RNA, 20 nt, Human
uuccagugaggcucugcccu

SEQ ID NO: 1182944 - RNA, 21 nt, Human
uuccagugaggcucugcccuu

SEQ ID NO: 1182945 - RNA, 22 nt, Human
uuccagugaggcucugcccuug

SEQ ID NO: 1182946 - RNA, 18 nt, Human
uucccaacuccagaaagu

SEQ ID NO: 1182947 - RNA, 13 nt, Human
uucccaagcucug

SEQ ID NO: 1182948 - RNA, 14 nt, Human
uucccaagcucugc

SEQ ID NO: 1182949 - RNA, 15 nt, Human
uucccaagcucugcu

SEQ ID NO: 1182950 - RNA, 16 nt, Human
uucccaagcucugcuc

SEQ ID NO: 1182951 - RNA, 18 nt, Human
uucccaagcucugcuccu

SEQ ID NO: 1182952 - RNA, 12 nt, Human
uucccaccucuc

SEQ ID NO: 1182953 - RNA, 22 nt, Human
uucccaccucucucacuccuug

SEQ ID NO: 1182954 - RNA, 15 nt, Human
auauguggaguucau

SEQ ID NO: 1182955 - RNA, 16 nt, Human
auauguggaguucauc

SEQ ID NO: 1182956 - RNA, 18 nt, Human
uucauuuaggugaggaag

SEQ ID NO: 1182957 - RNA, 15 nt, Human
uuccaaggguacuaa

SEQ ID NO: 1182958 - RNA, 17 nt, Human
uuccaaggguacuaagg

SEQ ID NO: 1182959 - RNA, 19 nt, Human
uuccaccaucaagccacca

SEQ ID NO: 1182960 - RNA, 16 nt, Human
auaucugaaaauguau

SEQ ID NO: 1182961 - RNA, 17 nt, Human
auaucugaaaauguaug

SEQ ID NO: 1182962 - RNA, 20 nt, Human
auaucugaaaauguaugugu

SEQ ID NO: 1182963 - RNA, 22 nt, Human
auaucugaaaauguauguguaa

SEQ ID NO: 1182964 - RNA, 14 nt, Human
auaugcacacauuu

SEQ ID NO: 1182965 - RNA, 15 nt, Human
auaugcacacauuuu

SEQ ID NO: 1182966 - RNA, 16 nt, Human
auaugcacacauuuuu

SEQ ID NO: 1182967 - RNA, 22 nt, Human
auaugcacacauuuuuuaaaug

SEQ ID NO: 1182968 - RNA, 16 nt, Human
auauguaacaagccac

SEQ ID NO: 1182969 - RNA, 17 nt, Human
auauguaacaagccacc

SEQ ID NO: 1182970 - RNA, 18 nt, Human
uucagugccuuauggaac

SEQ ID NO: 1182971 - RNA, 11 nt, Human
uucagaaaugu

SEQ ID NO: 1182972 - RNA, 13 nt, Human
uucagaaaugugu

SEQ ID NO: 1182973 - RNA, 12 nt, Human
uucagugccuua

SEQ ID NO: 1182974 - RNA, 13 nt, Human
uucagugccuuau

SEQ ID NO: 1182975 - RNA, 17 nt, Human
uucaucccucuggggcu

SEQ ID NO: 1182976 - RNA, 21 nt, Human
uucaucccucuggggcuguuc

SEQ ID NO: 1182977 - RNA, 15 nt, Human
uucccuauuagagaa

SEQ ID NO: 1182978 - RNA, 18 nt, Human
uucccuuuuuuggcugcu

SEQ ID NO: 1182979 - RNA, 19 nt, Human
uucccuuuuuuggcugcug

SEQ ID NO: 1182980 - RNA, 20 nt, Human
uucccuuuuuuggcugcuga

SEQ ID NO: 1182981 - RNA, 22 nt, Human
aucaaccccuucgcuccugugu

SEQ ID NO: 1182982 - RNA, 19 nt, Human
aucaaccccuucgcuccug

SEQ ID NO: 1182983 - RNA, 20 nt, Human
aucaaccccuucgcuccugu

SEQ ID NO: 1182984 - RNA, 21 nt, Human
uucgcaggauucuuccucccu

SEQ ID NO: 1182985 - RNA, 13 nt, Human
uucgcuccugugu

SEQ ID NO: 1182986 - RNA, 19 nt, Human
uucuaaaucuccaaaauaa

SEQ ID NO: 1182987 - RNA, 13 nt, Human
uucuaagaaguga

SEQ ID NO: 1182988 - RNA, 13 nt, Human
uucucagaaucuc

SEQ ID NO: 1182989 - RNA, 13 nt, Human
aucaggccaggcc

SEQ ID NO: 1182990 - RNA, 14 nt, Human
aucaggccaggccc

SEQ ID NO: 1182991 - RNA, 14 nt, Human
uucuauaauuuaaa

SEQ ID NO: 1182992 - RNA, 13 nt, Human
uucuauaauuuaa

SEQ ID NO: 1182993 - RNA, 21 nt, Human
aucaggccaggcccucugccc

SEQ ID NO: 1182994 - RNA, 22 nt, Human
aucaggccaggcccucugccca

SEQ ID NO: 1182995 - RNA, 23 nt, Human
aucaggccaggcccucugcccac

SEQ ID NO: 1182996 - RNA, 21 nt, Human
aucauugaaaucuuuuugcuu

SEQ ID NO: 1182997 - RNA, 16 nt, Human
uucugacccaugcugc

SEQ ID NO: 1182998 - RNA, 14 nt, Human
uucugacccaugcu

SEQ ID NO: 1182999 - RNA, 19 nt, Human
uucugcagccacuauuguu

SEQ ID NO: 1183000 - RNA, 13 nt, Human
uucugccgcagcc

SEQ ID NO: 1183001 - RNA, 17 nt, Human
uucucuacucuagggaa

SEQ ID NO: 1183002 - RNA, 12 nt, Human
uucucuaggaaa

SEQ ID NO: 1183003 - RNA, 16 nt, Human
uucucuuuucaaaaca

SEQ ID NO: 1183004 - RNA, 14 nt, Human
uucugccgcagccc

SEQ ID NO: 1183005 - RNA, 15 nt, Human
uucugccgcagcccu

SEQ ID NO: 1183006 - RNA, 18 nt, Human
uucuggcuaugcauuuga

SEQ ID NO: 1183007 - RNA, 20 nt, Human
uucuggcuaugcauuugaaa

SEQ ID NO: 1183008 - RNA, 16 nt, Human
uucugccgcagcccug

SEQ ID NO: 1183009 - RNA, 15 nt, Human
uucuggcucuuccag

SEQ ID NO: 1183010 - RNA, 14 nt, Human
auccauacauuugu

SEQ ID NO: 1183011 - RNA, 18 nt, Human
uucuguucuuucuggcua

SEQ ID NO: 1183012 - RNA, 21 nt, Human
uucuguuggccagugugacaa

SEQ ID NO: 1183013 - RNA, 20 nt, Human
uucuguuuuucuaggccugg

SEQ ID NO: 1183014 - RNA, 13 nt, Human
uucuuaauucuua

SEQ ID NO: 1183015 - RNA, 12 nt, Human
uucuugcaaagu

SEQ ID NO: 1183016 - RNA, 13 nt, Human
uucuugcaaagua

SEQ ID NO: 1183017 - RNA, 20 nt, Human
uugaaauauaggaacuuaaa

SEQ ID NO: 1183018 - RNA, 19 nt, Human
uugaaauauugacuuuuua

SEQ ID NO: 1183019 - RNA, 11 nt, Human
uugaaaucuuu

SEQ ID NO: 1183020 - RNA, 21 nt, Human
uugaaauuuuuauuaaauuau

SEQ ID NO: 1183021 - RNA, 13 nt, Human
auccuaguuccac

SEQ ID NO: 1183022 - RNA, 18 nt, Human
uugaacccgggaggcaga

SEQ ID NO: 1183023 - RNA, 20 nt, Human
aucucaccuccugcugggca

SEQ ID NO: 1183024 - RNA, 21 nt, Human
aucucaccuccugcugggcag

SEQ ID NO: 1183025 - RNA, 14 nt, Human
aucucagggccugg

SEQ ID NO: 1183026 - RNA, 15 nt, Human
auccuaguuccacca

SEQ ID NO: 1183027 - RNA, 19 nt, Human
auccuaguuccaccaucaa

SEQ ID NO: 1183028 - RNA, 15 nt, Human
aucucacacaugagc

SEQ ID NO: 1183029 - RNA, 16 nt, Human
aucucacacaugagca

SEQ ID NO: 1183030 - RNA, 21 nt, Human
aucucauuuccaagcaaguau

SEQ ID NO: 1183031 - RNA, 23 nt, Human
aucucauuuccaagcaaguauua

SEQ ID NO: 1183032 - RNA, 13 nt, Human
aucuccaaaauaa

SEQ ID NO: 1183033 - RNA, 12 nt, Human
aucucccccagc

SEQ ID NO: 1183034 - RNA, 13 nt, Human
aucucccccagcc

SEQ ID NO: 1183035 - RNA, 14 nt, Human
aucucccccagccc

SEQ ID NO: 1183036 - RNA, 18 nt, Human
uugauggugguauguuuu

SEQ ID NO: 1183037 - RNA, 19 nt, Human
uugauggugguauguuuuc

SEQ ID NO: 1183038 - RNA, 14 nt, Human
uugauucagacagc

SEQ ID NO: 1183039 - RNA, 15 nt, Human
uugauucagacagcu

SEQ ID NO: 1183040 - RNA, 16 nt, Human
uugauucagacagcug

SEQ ID NO: 1183041 - RNA, 14 nt, Human
uugcaccacugcac

SEQ ID NO: 1183042 - RNA, 12 nt, Human
uugcaugaggcu

SEQ ID NO: 1183043 - RNA, 13 nt, Human
uugccgucuaccu

SEQ ID NO: 1183044 - RNA, 15 nt, Human
uugccgucuaccuga

SEQ ID NO: 1183045 - RNA, 18 nt, Human
uugccgucuaccugaggg

SEQ ID NO: 1183046 - RNA, 19 nt, Human
uugccgucuaccugagggg

SEQ ID NO: 1183047 - RNA, 14 nt, Human
uugccguuauuaaa

SEQ ID NO: 1183048 - RNA, 19 nt, Human
aucuggguucacugcaacc

SEQ ID NO: 1183049 - RNA, 18 nt, Human
aucuugaauuguaaggaa

SEQ ID NO: 1183050 - RNA, 19 nt, Human
aucuugcucugcugacaga

SEQ ID NO: 1183051 - RNA, 15 nt, Human
augaaagcagggacu

SEQ ID NO: 1183052 - RNA, 13 nt, Human
uuggcugcaggga

SEQ ID NO: 1183053 - RNA, 23 nt, Human
uuggcgcugccccuggcagcccc

SEQ ID NO: 1183054 - RNA, 18 nt, Human
uuggcuagagguucaaag

SEQ ID NO: 1183055 - RNA, 15 nt, Human
augaauuaaguuuuu

SEQ ID NO: 1183056 - RNA, 22 nt, Human
uuggggggcugaggugggagga

SEQ ID NO: 1183057 - RNA, 18 nt, Human
augaagauguagaggaga

SEQ ID NO: 1183058 - RNA, 17 nt, Human
augaaauauuauguuaa

SEQ ID NO: 1183059 - RNA, 18 nt, Human
augaaauauuauguuaaa

SEQ ID NO: 1183060 - RNA, 15 nt, Human
augaaagggcccaga

SEQ ID NO: 1183061 - RNA, 20 nt, Human
augaaauauuauguuaaaac

SEQ ID NO: 1183062 - RNA, 22 nt, Human
augacuuaagcacacuugacau

SEQ ID NO: 1183063 - RNA, 14 nt, Human
augacuuacuguac

SEQ ID NO: 1183064 - RNA, 18 nt, Human
augacacgaauauugcug

SEQ ID NO: 1183065 - RNA, 16 nt, Human
augacuuacuguacau

SEQ ID NO: 1183066 - RNA, 17 nt, Human
augacuuacuguacaug

SEQ ID NO: 1183067 - RNA, 21 nt, Human
augagaaagguugaagcacca

SEQ ID NO: 1183068 - RNA, 22 nt, Human
augagaaagguugaagcaccaa

SEQ ID NO: 1183069 - RNA, 13 nt, Human
augagagacacac

SEQ ID NO: 1183070 - RNA, 14 nt, Human
augagagacacacu

SEQ ID NO: 1183071 - RNA, 17 nt, Human
augagagacacacugaa

SEQ ID NO: 1183072 - RNA, 19 nt, Human
augagagacacacugaaga

SEQ ID NO: 1183073 - RNA, 16 nt, Human
uuguauaaaauaauuu

SEQ ID NO: 1183074 - RNA, 17 nt, Human
uuguauaaaauaauuuu

SEQ ID NO: 1183075 - RNA, 23 nt, Human
uuguaguguuggagaagaacuga

SEQ ID NO: 1183076 - RNA, 19 nt, Human
uuguauaaaauaauuuuua

SEQ ID NO: 1183077 - RNA, 14 nt, Human
augacacaugcaag

SEQ ID NO: 1183078 - RNA, 22 nt, Human
augacacaugcaaggucauuuu

SEQ ID NO: 1183079 - RNA, 12 nt, Human
augauucccagc

SEQ ID NO: 1183080 - RNA, 21 nt, Human
augauucaacagguuuuccug

SEQ ID NO: 1183081 - RNA, 19 nt, Human
augauuaaccacuucagcu

SEQ ID NO: 1183082 - RNA, 20 nt, Human
augauuaaccacuucagcug

SEQ ID NO: 1183083 - RNA, 21 nt, Human
augauuaaccacuucagcuga

SEQ ID NO: 1183084 - RNA, 14 nt, Human
augauuaaguaaug

SEQ ID NO: 1183085 - RNA, 22 nt, Human
augauuaugaauuacauuugua

SEQ ID NO: 1183086 - RNA, 13 nt, Human
augcaccagcccu

SEQ ID NO: 1183087 - RNA, 14 nt, Human
augcaccagcccuu

SEQ ID NO: 1183088 - RNA, 12 nt, Human
augcacuuuguu

SEQ ID NO: 1183089 - RNA, 13 nt, Human
uugugguuaaucu

SEQ ID NO: 1183090 - RNA, 23 nt, Human
uugugugaaagguacuucaaauc

SEQ ID NO: 1183091 - RNA, 17 nt, Human
uuguguguuuauuguca

SEQ ID NO: 1183092 - RNA, 19 nt, Human
uuguucuggcucuuccagg

SEQ ID NO: 1183093 - RNA, 20 nt, Human
uuguucuggcucuuccaggc

SEQ ID NO: 1183094 - RNA, 22 nt, Human
uuguucuggcucuuccaggcug

SEQ ID NO: 1183095 - RNA, 18 nt, Human
uugugauacaaugcugug

SEQ ID NO: 1183096 - RNA, 19 nt, Human
uugugauacaaugcugugc

SEQ ID NO: 1183097 - RNA, 20 nt, Human
augagagacacacugaagaa

SEQ ID NO: 1183098 - RNA, 21 nt, Human
augagagacacacugaagaag

SEQ ID NO: 1183099 - RNA, 23 nt, Human
augagagacacacugaagaagca

SEQ ID NO: 1183100 - RNA, 13 nt, Human
augcagugcuucc

SEQ ID NO: 1183101 - RNA, 17 nt, Human
augcaguucugaagaag

SEQ ID NO: 1183102 - RNA, 19 nt, Human
uuuaauuuuuuugagacag

SEQ ID NO: 1183103 - RNA, 13 nt, Human
augcagccucaca

SEQ ID NO: 1183104 - RNA, 14 nt, Human
augcagccucacag

SEQ ID NO: 1183105 - RNA, 15 nt, Human
augcagccucacagu

SEQ ID NO: 1183106 - RNA, 17 nt, Human
augcagccucacagucc

SEQ ID NO: 1183107 - RNA, 18 nt, Human
augcaguucugaagaaga

SEQ ID NO: 1183108 - RNA, 19 nt, Human
augcaguucugaagaagau

SEQ ID NO: 1183109 - RNA, 15 nt, Human
augccacuaaauuga

SEQ ID NO: 1183110 - RNA, 17 nt, Human
augccacuaaauugaca

SEQ ID NO: 1183111 - RNA, 11 nt, Human
augcccagccc

SEQ ID NO: 1183112 - RNA, 17 nt, Human
uuuaagugcugcauuua

SEQ ID NO: 1183113 - RNA, 19 nt, Human
uuuaagugcugcauuuaaa

SEQ ID NO: 1183114 - RNA, 15 nt, Human
uuuaagugcugcauu

SEQ ID NO: 1183115 - RNA, 16 nt, Human
uuuaagugcugcauuu

SEQ ID NO: 1183116 - RNA, 15 nt, Human
augcacuuuguucug

SEQ ID NO: 1183117 - RNA, 16 nt, Human
augcacuuuguucugg

SEQ ID NO: 1183118 - RNA, 13 nt, Human
uuguuuucagugu

SEQ ID NO: 1183119 - RNA, 16 nt, Human
uuguuuucaguguaca

SEQ ID NO: 1183120 - RNA, 22 nt, Human
uuuagcuggaaaaguauguuag

SEQ ID NO: 1183121 - RNA, 24 nt, Human
uuuauggcuuuugugcauuaucua

SEQ ID NO: 1183122 - RNA, 13 nt, Human
uuuauauaagcuu

SEQ ID NO: 1183123 - RNA, 15 nt, Human
augcuagaacucccu

SEQ ID NO: 1183124 - RNA, 16 nt, Human
augcuagaacucccuu

SEQ ID NO: 1183125 - RNA, 19 nt, Human
augcuagaacucccuuuca

SEQ ID NO: 1183126 - RNA, 16 nt, Human
uuuauuacuguaagaa

SEQ ID NO: 1183127 - RNA, 15 nt, Human
augcucugcauguua

SEQ ID NO: 1183128 - RNA, 19 nt, Human
augcugucccuuacgugag

SEQ ID NO: 1183129 - RNA, 23 nt, Human
augcugucccuuacgugaguccu

SEQ ID NO: 1183130 - RNA, 22 nt, Human
augcugucuacacuaagagaga

SEQ ID NO: 1183131 - RNA, 23 nt, Human
augcugucuacacuaagagagaa

SEQ ID NO: 1183132 - RNA, 14 nt, Human
auggaacacucuga

SEQ ID NO: 1183133 - RNA, 15 nt, Human
auggaacacucugag

SEQ ID NO: 1183134 - RNA, 16 nt, Human
auggaacacucugaga

SEQ ID NO: 1183135 - RNA, 17 nt, Human
auggaacacucugagac

SEQ ID NO: 1183136 - RNA, 15 nt, Human
auggaagacagcucu

SEQ ID NO: 1183137 - RNA, 16 nt, Human
auggaagacagcucuu

SEQ ID NO: 1183138 - RNA, 14 nt, Human
auggacaugaucuu

SEQ ID NO: 1183139 - RNA, 19 nt, Human
auggacaugaucuucuuua

SEQ ID NO: 1183140 - RNA, 17 nt, Human
auggcacaucagcacga

SEQ ID NO: 1183141 - RNA, 23 nt, Human
auggcacaucagcacgauuucug

SEQ ID NO: 1183142 - RNA, 19 nt, Human
auggacguguuaugacucc

SEQ ID NO: 1183143 - RNA, 20 nt, Human
auggacguguuaugacucca

SEQ ID NO: 1183144 - RNA, 23 nt, Human
auggacguguuaugacuccagaa

SEQ ID NO: 1183145 - RNA, 19 nt, Human
auggacuaacuugucuuug

SEQ ID NO: 1183146 - RNA, 21 nt, Human
auggccgggcgcgguggcuca

SEQ ID NO: 1183147 - RNA, 20 nt, Human
auggcuaguaucaaaagaaa

SEQ ID NO: 1183148 - RNA, 16 nt, Human
auguccacugguucuu

SEQ ID NO: 1183149 - RNA, 16 nt, Human
augucagugugacuga

SEQ ID NO: 1183150 - RNA, 21 nt, Human
augucagugugacugaucucu

SEQ ID NO: 1183151 - RNA, 19 nt, Human
auguccaagaagcccagga

SEQ ID NO: 1183152 - RNA, 23 nt, Human
auguccaagaagcccaggaaagg

SEQ ID NO: 1183153 - RNA, 22 nt, Human
uuugggggaaaauuuagaaaua

SEQ ID NO: 1183154 - RNA, 15 nt, Human
auguaucugagcagg

SEQ ID NO: 1183155 - RNA, 12 nt, Human
auguauguguaa

SEQ ID NO: 1183156 - RNA, 15 nt, Human
auguauguguaagua

SEQ ID NO: 1183157 - RNA, 13 nt, Human
uuugcucauggaa

SEQ ID NO: 1183158 - RNA, 22 nt, Human
uuugggaggccaaggugggagg

SEQ ID NO: 1183159 - RNA, 14 nt, Human
uuuggggauauuuu

SEQ ID NO: 1183160 - RNA, 11 nt, Human
uuugcucaugg

SEQ ID NO: 1183161 - RNA, 12 nt, Human
uuugcucaugga

SEQ ID NO: 1183162 - RNA, 13 nt, Human
uuuguagagccag

SEQ ID NO: 1183163 - RNA, 18 nt, Human
uuugugaggaagccgcug

SEQ ID NO: 1183164 - RNA, 19 nt, Human
uuugugaggaagccgcugg

SEQ ID NO: 1183165 - RNA, 15 nt, Human
uuugugauacaaugc

SEQ ID NO: 1183166 - RNA, 12 nt, Human
uuuguuugaacu

SEQ ID NO: 1183167 - RNA, 13 nt, Human
uuuguuugaacug

SEQ ID NO: 1183168 - RNA, 14 nt, Human
uuuguuugaacuga

SEQ ID NO: 1183169 - RNA, 14 nt, Human
uuuuaaaagaauga

SEQ ID NO: 1183170 - RNA, 15 nt, Human
uuuuaaaagaaugau

SEQ ID NO: 1183171 - RNA, 18 nt, Human
uuuguuugaacugauaaa

SEQ ID NO: 1183172 - RNA, 13 nt, Human
uuuuaaaaaagaa

SEQ ID NO: 1183173 - RNA, 15 nt, Human
uuuuaagugcugcau

SEQ ID NO: 1183174 - RNA, 15 nt, Human
uuuuaagaggcaggg

SEQ ID NO: 1183175 - RNA, 16 nt, Human
uuuuaagaggcagggu

SEQ ID NO: 1183176 - RNA, 15 nt, Human
auguugacaugggac

SEQ ID NO: 1183177 - RNA, 19 nt, Human
auguucaucaaugaaugaa

SEQ ID NO: 1183178 - RNA, 21 nt, Human
auguucaucauccuaagcuau

SEQ ID NO: 1183179 - RNA, 16 nt, Human
uuuuaagugcugcauu

SEQ ID NO: 1183180 - RNA, 17 nt, Human
uuuuaagugcugcauuu

SEQ ID NO: 1183181 - RNA, 21 nt, Human
uuuuaagugcugcauuuaaaa

SEQ ID NO: 1183182 - RNA, 16 nt, Human
auguuggccaggcugg

SEQ ID NO: 1183183 - RNA, 14 nt, Human
auguuggccaggcu

SEQ ID NO: 1183184 - RNA, 12 nt, Human
uuuuauaaacuu

SEQ ID NO: 1183185 - RNA, 13 nt, Human
uuuuauaaacuuu

SEQ ID NO: 1183186 - RNA, 21 nt, Human
uuuuauaauuuugugaagcaa

SEQ ID NO: 1183187 - RNA, 22 nt, Human
uuuuauggcacuaguauuucua

SEQ ID NO: 1183188 - RNA, 19 nt, Human
uuuuauggcacuaguauuu

SEQ ID NO: 1183189 - RNA, 14 nt, Human
uuuuauaaacuuua

SEQ ID NO: 1183190 - RNA, 17 nt, Human
uuuuauaaacuuuaccu

SEQ ID NO: 1183191 - RNA, 19 nt, Human
uuuuauaaacuuuaccuuu

SEQ ID NO: 1183192 - RNA, 14 nt, Human
uuuuauaauuuugu

SEQ ID NO: 1183193 - RNA, 19 nt, Human
uuuuccagguuuaagcugu

SEQ ID NO: 1183194 - RNA, 18 nt, Human
uuuuccaugaguccccug

SEQ ID NO: 1183195 - RNA, 18 nt, Human
auguuucaaacauauaua

SEQ ID NO: 1183196 - RNA, 21 nt, Human
auguuucaaacauauauaaca

SEQ ID NO: 1183197 - RNA, 14 nt, Human
auguuuuccaugag

SEQ ID NO: 1183198 - RNA, 18 nt, Human
auguuuuucuucucccuc

SEQ ID NO: 1183199 - RNA, 15 nt, Human
auuaaaaaucucaaa

SEQ ID NO: 1183200 - RNA, 17 nt, Human
auuaaacuuaaucuaaa

SEQ ID NO: 1183201 - RNA, 19 nt, Human
auuaaacuuaaucuaaaug

SEQ ID NO: 1183202 - RNA, 21 nt, Human
auuaaacuuaaucuaaaugga

SEQ ID NO: 1183203 - RNA, 17 nt, Human
auuaaccacuucagcug

SEQ ID NO: 1183204 - RNA, 18 nt, Human
auuaaccacuucagcuga

SEQ ID NO: 1183205 - RNA, 20 nt, Human
auuaaccacuucagcugacu

SEQ ID NO: 1183206 - RNA, 12 nt, Human
auuaacuuuuau

SEQ ID NO: 1183207 - RNA, 16 nt, Human
auuaacuuuuauaaac

SEQ ID NO: 1183208 - RNA, 17 nt, Human
auuaacuuuuauaaacu

SEQ ID NO: 1183209 - RNA, 19 nt, Human
auuaacuuuuauaaacuuu

SEQ ID NO: 1183210 - RNA, 20 nt, Human
auuaacuuuuauaaacuuua

SEQ ID NO: 1183211 - RNA, 23 nt, Human
auuaacuuuuauaaacuuuaccu

SEQ ID NO: 1183212 - RNA, 13 nt, Human
auuaagaaagacu

SEQ ID NO: 1183213 - RNA, 14 nt, Human
auuaagaaagacua

SEQ ID NO: 1183214 - RNA, 14 nt, Human
auucagcucugcaa

SEQ ID NO: 1183215 - RNA, 18 nt, Human
auucagcucugcaagaau

SEQ ID NO: 1183216 - RNA, 21 nt, Human
auucaggaagcucagggccug

SEQ ID NO: 1183217 - RNA, 22 nt, Human
auucaggaagcucagggccugg

SEQ ID NO: 1183218 - RNA, 23 nt, Human
auucaggaagcucagggccuggc

SEQ ID NO: 1183219 - RNA, 21 nt, Human
auucaguuguuagugugucuu

SEQ ID NO: 1183220 - RNA, 14 nt, Human
auucauaaugacuu

SEQ ID NO: 1183221 - RNA, 20 nt, Human
auuccacuuauaggaauuga

SEQ ID NO: 1183222 - RNA, 20 nt, Human
auuccccagauugcaacagg

SEQ ID NO: 1183223 - RNA, 16 nt, Human
auuccccaggaggcca

SEQ ID NO: 1183224 - RNA, 19 nt, Human
auuccccaggaggccagcc

SEQ ID NO: 1183225 - RNA, 17 nt, Human
auuauauuuacaaaugg

SEQ ID NO: 1183226 - RNA, 23 nt, Human
auuauuuauuaaaugcccagccc

SEQ ID NO: 1183227 - RNA, 16 nt, Human
auuauauuuacaaaug

SEQ ID NO: 1183228 - RNA, 23 nt, Human
uuuuuuaaaaaagaaacauuugg

SEQ ID NO: 1183229 - RNA, 13 nt, Human
auuaaguaaugau

SEQ ID NO: 1183230 - RNA, 15 nt, Human
auuaaguaaugauaa

SEQ ID NO: 1183231 - RNA, 21 nt, Human
auuaaguaaugauaacuggaa

SEQ ID NO: 1183232 - RNA, 13 nt, Human
auuacauuuguau

SEQ ID NO: 1183233 - RNA, 15 nt, Human
auuacauuuguauaa

SEQ ID NO: 1183234 - RNA, 16 nt, Human
auuacauuuguauaaa

SEQ ID NO: 1183235 - RNA, 19 nt, Human
auuaccacagacauacuaa

SEQ ID NO: 1183236 - RNA, 12 nt, Human
auuaccagggac

SEQ ID NO: 1183237 - RNA, 22 nt, Human
auuaccugaauuuuggcugugu

SEQ ID NO: 1183238 - RNA, 23 nt, Human
auugccauuucuuccacaagagc

SEQ ID NO: 1183239 - RNA, 17 nt, Human
auugcccacgcuggagu

SEQ ID NO: 1183240 - RNA, 21 nt, Human
auugcccacgcuggagugcag

SEQ ID NO: 1183241 - RNA, 16 nt, Human
auugcggacagccacg

SEQ ID NO: 1183242 - RNA, 18 nt, Human
auugcggacagccacggc

SEQ ID NO: 1183243 - RNA, 19 nt, Human
auugcggacagccacggcc

SEQ ID NO: 1183244 - RNA, 18 nt, Human
auugacaggauuauugga

SEQ ID NO: 1183245 - RNA, 13 nt, Human
auugaccugaggc

SEQ ID NO: 1183246 - RNA, 17 nt, Human
auugaccugaggcccuu

SEQ ID NO: 1183247 - RNA, 15 nt, Human
auugcaacaggcugg

SEQ ID NO: 1183248 - RNA, 16 nt, Human
auugcaacaggcuggg

SEQ ID NO: 1183249 - RNA, 21 nt, Human
auugcaacaggcugggcuuca

SEQ ID NO: 1183250 - RNA, 18 nt, Human
auucuccaccugccaggg

SEQ ID NO: 1183251 - RNA, 13 nt, Human
auucuacuuugag

SEQ ID NO: 1183252 - RNA, 16 nt, Human
auucuacuuugagugc

SEQ ID NO: 1183253 - RNA, 14 nt, Human
auucucagaaucuc

SEQ ID NO: 1183254 - RNA, 18 nt, Human
auucucagaaucucaaau

SEQ ID NO: 1183255 - RNA, 20 nt, Human
auucucagaaucucaaauaa

SEQ ID NO: 1183256 - RNA, 13 nt, Human
auucuccaccugc

SEQ ID NO: 1183257 - RNA, 16 nt, Human
auucuccaccugccag

SEQ ID NO: 1183258 - RNA, 17 nt, Human
auucuccaccugccagg

SEQ ID NO: 1183259 - RNA, 14 nt, Human
auugcuacuguccu

SEQ ID NO: 1183260 - RNA, 22 nt, Human
auuuacaacugggggaggguga

SEQ ID NO: 1183261 - RNA, 16 nt, Human
auuuacaaaugggaaa

SEQ ID NO: 1183262 - RNA, 19 nt, Human
auuuaauuuuuuugagaca

SEQ ID NO: 1183263 - RNA, 23 nt, Human
auuuaauuuuuuugagacagagu

SEQ ID NO: 1183264 - RNA, 21 nt, Human
auuguuuggggaugagaaagg

SEQ ID NO: 1183265 - RNA, 16 nt, Human
auuuaacagaaaugua

SEQ ID NO: 1183266 - RNA, 17 nt, Human
auuuaacagaaauguac

SEQ ID NO: 1183267 - RNA, 19 nt, Human
auuuaacagaaauguacag

SEQ ID NO: 1183268 - RNA, 20 nt, Human
auuuaacagaaauguacagc

SEQ ID NO: 1183269 - RNA, 15 nt, Human
auuguauuacaaauc

SEQ ID NO: 1183270 - RNA, 14 nt, Human
auuguauuacaaau

SEQ ID NO: 1183271 - RNA, 13 nt, Human
auugugccccugc

SEQ ID NO: 1183272 - RNA, 23 nt, Human
auuggcuuuggguugcaggaccu

SEQ ID NO: 1183273 - RNA, 13 nt, Human
auuuaaaagauac

SEQ ID NO: 1183274 - RNA, 23 nt, Human
auuucuuuugccguuauuaaaaa

SEQ ID NO: 1183275 - RNA, 20 nt, Human
auuuauuaaaugcccagccc

SEQ ID NO: 1183276 - RNA, 22 nt, Human
auuuauuacuguaagaaaauau

SEQ ID NO: 1183277 - RNA, 22 nt, Human
auuuauuaaaugcccagccccu

SEQ ID NO: 1183278 - RNA, 13 nt, Human
auuuauuauggca

SEQ ID NO: 1183279 - RNA, 16 nt, Human
auuuauuauggcacau

SEQ ID NO: 1183280 - RNA, 14 nt, Human
auuuccugugucuu

SEQ ID NO: 1183281 - RNA, 12 nt, Human
auuucuaaaucu

SEQ ID NO: 1183282 - RNA, 13 nt, Human
auuucuaaaucuc

SEQ ID NO: 1183283 - RNA, 21 nt, Human
auuucuaaaucuccaaaauaa

SEQ ID NO: 1183284 - RNA, 20 nt, Human
auuucuuuugccguuauuaa

SEQ ID NO: 1183285 - RNA, 17 nt, Human
auuugagcagggcucag

SEQ ID NO: 1183286 - RNA, 15 nt, Human
auuugaggucuguuc

SEQ ID NO: 1183287 - RNA, 23 nt, Human
auuugaggucuguucuuuccaaa

SEQ ID NO: 1183288 - RNA, 23 nt, Human
auuugguaaggggaauugaggac

SEQ ID NO: 1183289 - RNA, 17 nt, Human
auuuggugguuucagaa

SEQ ID NO: 1183290 - RNA, 18 nt, Human
auuuggugguuucagaaa

SEQ ID NO: 1183291 - RNA, 20 nt, Human
auuuggugguuucagaaaug

SEQ ID NO: 1183292 - RNA, 21 nt, Human
auuuggugguuucagaaaugu

SEQ ID NO: 1183293 - RNA, 18 nt, Human
auuuguaguguuggagaa

SEQ ID NO: 1183294 - RNA, 19 nt, Human
auuuguaguguuggagaag

SEQ ID NO: 1183295 - RNA, 14 nt, Human
auuuuaauaauguu

SEQ ID NO: 1183296 - RNA, 15 nt, Human
auuuuaauaauguuu

SEQ ID NO: 1183297 - RNA, 16 nt, Human
auuuuaauaauguuuc

SEQ ID NO: 1183298 - RNA, 21 nt, Human
auuuuacuuuaaaaggagcca

SEQ ID NO: 1183299 - RNA, 13 nt, Human
auuuuauuaugca

SEQ ID NO: 1183300 - RNA, 14 nt, Human
auuuuauuaugcau

SEQ ID NO: 1183301 - RNA, 15 nt, Human
auuuuauuaugcaug

SEQ ID NO: 1183302 - RNA, 17 nt, Human
auuuuauuaugcaugaa

SEQ ID NO: 1183303 - RNA, 21 nt, Human
cauaaugcgugcauaccacuu

SEQ ID NO: 1183304 - RNA, 23 nt, Human
cauaaugcgugcauaccacuuuu

SEQ ID NO: 1183305 - RNA, 15 nt, Human
cauacaauuccaaac

SEQ ID NO: 1183306 - RNA, 12 nt, Human
cauacacacaca

SEQ ID NO: 1183307 - RNA, 14 nt, Human
cauacacacacaca

SEQ ID NO: 1183308 - RNA, 15 nt, Human
cauacacacacacac

SEQ ID NO: 1183309 - RNA, 16 nt, Human
cauacacacacacaca

SEQ ID NO: 1183310 - RNA, 19 nt, Human
cauacacacacacacacag

SEQ ID NO: 1183311 - RNA, 20 nt, Human
cauacacacacacacacagc

SEQ ID NO: 1183312 - RNA, 22 nt, Human
cauauuaccacagacauacuaa

SEQ ID NO: 1183313 - RNA, 17 nt, Human
cauauuaccacagacau

SEQ ID NO: 1183314 - RNA, 20 nt, Human
cauauuaccacagacauacu

SEQ ID NO: 1183315 - RNA, 21 nt, Human
cauauuaccacagacauacua

SEQ ID NO: 1183316 - RNA, 21 nt, Human
caguuuguuaguaugaggcau

SEQ ID NO: 1183317 - RNA, 14 nt, Human
cauaaugcgugcau

SEQ ID NO: 1183318 - RNA, 17 nt, Human
cauaaugcgugcauacc

SEQ ID NO: 1183319 - RNA, 19 nt, Human
cagucaccccggccaccug

SEQ ID NO: 1183320 - RNA, 18 nt, Human
cagucaccccggccaccu

SEQ ID NO: 1183321 - RNA, 16 nt, Human
caugcugcccugugag

SEQ ID NO: 1183322 - RNA, 18 nt, Human
caugcugcccugugagua

SEQ ID NO: 1183323 - RNA, 17 nt, Human
caugcaaggucauuuuu

SEQ ID NO: 1183324 - RNA, 18 nt, Human
caugcaaggucauuuuuu

SEQ ID NO: 1183325 - RNA, 22 nt, Human
caugcaaggucauuuuuuuuaa

SEQ ID NO: 1183326 - RNA, 16 nt, Human
caugaauuaguuuuau

SEQ ID NO: 1183327 - RNA, 14 nt, Human
caugacacgaauau

SEQ ID NO: 1183328 - RNA, 17 nt, Human
caugacacgaauauugc

SEQ ID NO: 1183329 - RNA, 18 nt, Human
caugacacgaauauugcu

SEQ ID NO: 1183330 - RNA, 21 nt, Human
caugacacgaauauugcugau

SEQ ID NO: 1183331 - RNA, 18 nt, Human
caucugugaaaggaaaga

SEQ ID NO: 1183332 - RNA, 19 nt, Human
caucugugaaaggaaagag

SEQ ID NO: 1183333 - RNA, 21 nt, Human
caucuuagguuggcaaaaagg

SEQ ID NO: 1183334 - RNA, 22 nt, Human
caucuuagguuggcaaaaaggc

SEQ ID NO: 1183335 - RNA, 17 nt, Human
caucagcacgauuucug

SEQ ID NO: 1183336 - RNA, 18 nt, Human
caucagcacgauuucugu

SEQ ID NO: 1183337 - RNA, 19 nt, Human
caucagcacgauuucuguu

SEQ ID NO: 1183338 - RNA, 13 nt, Human
caucaggccaggc

SEQ ID NO: 1183339 - RNA, 14 nt, Human
caucaggccaggcc

SEQ ID NO: 1183340 - RNA, 21 nt, Human
caucaggccaggcccucugcc

SEQ ID NO: 1183341 - RNA, 22 nt, Human
caucaggccaggcccucugccc

SEQ ID NO: 1183342 - RNA, 23 nt, Human
caucaggccaggcccucugccca

SEQ ID NO: 1183343 - RNA, 13 nt, Human
caucccagcccca

SEQ ID NO: 1183344 - RNA, 14 nt, Human
caucccagccccaa

SEQ ID NO: 1183345 - RNA, 16 nt, Human
caucccagccccaaug

SEQ ID NO: 1183346 - RNA, 17 nt, Human
caucccagccccaauga

SEQ ID NO: 1183347 - RNA, 16 nt, Human
cauuuauucugcucac

SEQ ID NO: 1183348 - RNA, 12 nt, Human
cauuuccaagca

SEQ ID NO: 1183349 - RNA, 22 nt, Human
cauuuggugguuucagaaaugu

SEQ ID NO: 1183350 - RNA, 23 nt, Human
cauuuggugguuucagaaaugug

SEQ ID NO: 1183351 - RNA, 17 nt, Human
ccaaaacucuccucugc

SEQ ID NO: 1183352 - RNA, 14 nt, Human
cauugcggacagcc

SEQ ID NO: 1183353 - RNA, 15 nt, Human
cauugcggacagcca

SEQ ID NO: 1183354 - RNA, 17 nt, Human
cauugcggacagccacg

SEQ ID NO: 1183355 - RNA, 21 nt, Human
cauugcggacagccacggcca

SEQ ID NO: 1183356 - RNA, 18 nt, Human
cauugcugggcuugucug

SEQ ID NO: 1183357 - RNA, 18 nt, Human
cauuaucuagauacugua

SEQ ID NO: 1183358 - RNA, 16 nt, Human
cauucuccuuguguua

SEQ ID NO: 1183359 - RNA, 20 nt, Human
cauucuccuuguguuacuaa

SEQ ID NO: 1183360 - RNA, 22 nt, Human
cauggcugccaaugggagcuca

SEQ ID NO: 1183361 - RNA, 15 nt, Human
cauguucucugagga

SEQ ID NO: 1183362 - RNA, 15 nt, Human
cauuaggauggcuag

SEQ ID NO: 1183363 - RNA, 16 nt, Human
cauuaucuagauacug

SEQ ID NO: 1183364 - RNA, 17 nt, Human
cauuaucuagauacugu

SEQ ID NO: 1183365 - RNA, 20 nt, Human
ccaaaacucuccucugcugc

SEQ ID NO: 1183366 - RNA, 20 nt, Human
ccaauguucucucuucucca

SEQ ID NO: 1183367 - RNA, 20 nt, Human
ccaaugcacuuuguucuggc

SEQ ID NO: 1183368 - RNA, 22 nt, Human
ccaaugcacuuuguucuggcuc

SEQ ID NO: 1183369 - RNA, 23 nt, Human
ccaaugcacuuuguucuggcucu

SEQ ID NO: 1183370 - RNA, 18 nt, Human
ccaccgcagacaggacca

SEQ ID NO: 1183371 - RNA, 19 nt, Human
ccaccgcagacaggaccag

SEQ ID NO: 1183372 - RNA, 14 nt, Human
ccaccuuggcucaa

SEQ ID NO: 1183373 - RNA, 15 nt, Human
ccaccuuggcucaag

SEQ ID NO: 1183374 - RNA, 20 nt, Human
ccaccaucaagccaccaaca

SEQ ID NO: 1183375 - RNA, 18 nt, Human
ccaccaucaccagacagg

SEQ ID NO: 1183376 - RNA, 14 nt, Human
ccaccgcagacagg

SEQ ID NO: 1183377 - RNA, 17 nt, Human
ccaccgcagacaggacc

SEQ ID NO: 1183378 - RNA, 23 nt, Human
ccacagaaaagaaaguucaugcu

SEQ ID NO: 1183379 - RNA, 16 nt, Human
ccaccaucaagccacc

SEQ ID NO: 1183380 - RNA, 17 nt, Human
ccaccaucaagccacca

SEQ ID NO: 1183381 - RNA, 16 nt, Human
cagggagggcuucugc

SEQ ID NO: 1183382 - RNA, 20 nt, Human
cagggcucagcggggacagc

SEQ ID NO: 1183383 - RNA, 12 nt, Human
cagggcucagcg

SEQ ID NO: 1183384 - RNA, 15 nt, Human
cagggcucagcgggg

SEQ ID NO: 1183385 - RNA, 14 nt, Human
caggcugggcuuca

SEQ ID NO: 1183386 - RNA, 15 nt, Human
caggcugggcuucag

SEQ ID NO: 1183387 - RNA, 22 nt, Human
cagggaggacgcucucuggccu

SEQ ID NO: 1183388 - RNA, 20 nt, Human
caggccugggggcugggcag

SEQ ID NO: 1183389 - RNA, 22 nt, Human
caggccugggggcugggcagag

SEQ ID NO: 1183390 - RNA, 23 nt, Human
caggccugggggcugggcagagg

SEQ ID NO: 1183391 - RNA, 17 nt, Human
caggcuggcgugcagug

SEQ ID NO: 1183392 - RNA, 18 nt, Human
caggcuggcgugcagugg

SEQ ID NO: 1183393 - RNA, 19 nt, Human
caggcuggcgugcaguggu

SEQ ID NO: 1183394 - RNA, 16 nt, Human
caggcugggagagccu

SEQ ID NO: 1183395 - RNA, 18 nt, Human
caggcugggagagccuuc

SEQ ID NO: 1183396 - RNA, 19 nt, Human
caggcugggagagccuucc

SEQ ID NO: 1183397 - RNA, 20 nt, Human
caggcugggagagccuucca

SEQ ID NO: 1183398 - RNA, 23 nt, Human
cagguuuuuggucugacccacug

SEQ ID NO: 1183399 - RNA, 17 nt, Human
caggguuggccccugcc

SEQ ID NO: 1183400 - RNA, 21 nt, Human
caggguuggccccugcccggc

SEQ ID NO: 1183401 - RNA, 13 nt, Human
caggugcugccau

SEQ ID NO: 1183402 - RNA, 14 nt, Human
caggugcugccauc

SEQ ID NO: 1183403 - RNA, 18 nt, Human
caguaaaugggggugcau

SEQ ID NO: 1183404 - RNA, 19 nt, Human
caguaaaugggggugcauu

SEQ ID NO: 1183405 - RNA, 20 nt, Human
caguaaaugggggugcauuu

SEQ ID NO: 1183406 - RNA, 16 nt, Human
cagucaccccggccac

SEQ ID NO: 1183407 - RNA, 17 nt, Human
cagucaccccggccacc

SEQ ID NO: 1183408 - RNA, 23 nt, Human
cagggucucacucugucgcccag

SEQ ID NO: 1183409 - RNA, 21 nt, Human
cagggucucuaccauccccug

SEQ ID NO: 1183410 - RNA, 15 nt, Human
caggguuggccccug

SEQ ID NO: 1183411 - RNA, 16 nt, Human
caggguuggccccugc

SEQ ID NO: 1183412 - RNA, 21 nt, Human
caggcaaugcuggcuguuggc

SEQ ID NO: 1183413 - RNA, 14 nt, Human
caggaggccagccu

SEQ ID NO: 1183414 - RNA, 12 nt, Human
caggaggccagc

SEQ ID NO: 1183415 - RNA, 13 nt, Human
caggaggccagcc

SEQ ID NO: 1183416 - RNA, 19 nt, Human
caggcaaugcuggcuguug

SEQ ID NO: 1183417 - RNA, 20 nt, Human
caggcaaugcuggcuguugg

SEQ ID NO: 1183418 - RNA, 13 nt, Human
caggccagcugcu

SEQ ID NO: 1183419 - RNA, 15 nt, Human
caggccagcugcuug

SEQ ID NO: 1183420 - RNA, 17 nt, Human
caggccagcugcuuggg

SEQ ID NO: 1183421 - RNA, 13 nt, Human
caggccaggcccu

SEQ ID NO: 1183422 - RNA, 14 nt, Human
caggccaggcccuc

SEQ ID NO: 1183423 - RNA, 15 nt, Human
caggccaggcccucu

SEQ ID NO: 1183424 - RNA, 16 nt, Human
caggccaggcccucug

SEQ ID NO: 1183425 - RNA, 23 nt, Human
caggacagcccuucuuuccacag

SEQ ID NO: 1183426 - RNA, 24 nt, Human
caggacagcccuucuuuccacaga

SEQ ID NO: 1183427 - RNA, 13 nt, Human
caggaccagggau

SEQ ID NO: 1183428 - RNA, 21 nt, Human
caggaccagggauuuccauga

SEQ ID NO: 1183429 - RNA, 13 nt, Human
caggaccucaggu

SEQ ID NO: 1183430 - RNA, 15 nt, Human
cagcuguucagcugg

SEQ ID NO: 1183431 - RNA, 16 nt, Human
cagcuguucagcuggu

SEQ ID NO: 1183432 - RNA, 19 nt, Human
cagcuguucagcugguuga

SEQ ID NO: 1183433 - RNA, 16 nt, Human
cagcuuauucacaaga

SEQ ID NO: 1183434 - RNA, 17 nt, Human
cagcuuauucacaagac

SEQ ID NO: 1183435 - RNA, 19 nt, Human
caggaaaagcugcugacag

SEQ ID NO: 1183436 - RNA, 20 nt, Human
caggaaaagcugcugacagu

SEQ ID NO: 1183437 - RNA, 21 nt, Human
caggaaaggcuccaggagcag

SEQ ID NO: 1183438 - RNA, 22 nt, Human
caggaaaggcuccaggagcagc

SEQ ID NO: 1183439 - RNA, 23 nt, Human
caggaaaggcuccaggagcagcc

SEQ ID NO: 1183440 - RNA, 19 nt, Human
cagccccgugggguuccuc

SEQ ID NO: 1183441 - RNA, 19 nt, Human
cagccccauucugccugcc

SEQ ID NO: 1183442 - RNA, 20 nt, Human
cagccccauucugccugccc

SEQ ID NO: 1183443 - RNA, 22 nt, Human
cagccccauucugccugcccag

SEQ ID NO: 1183444 - RNA, 23 nt, Human
cagccccauucugccugcccagg

SEQ ID NO: 1183445 - RNA, 24 nt, Human
cagccccauucugccugcccaggc

SEQ ID NO: 1183446 - RNA, 14 nt, Human
cagcguuucuauga

SEQ ID NO: 1183447 - RNA, 16 nt, Human
cagcguuucuaugaca

SEQ ID NO: 1183448 - RNA, 19 nt, Human
cagcguuucuaugacacau

SEQ ID NO: 1183449 - RNA, 14 nt, Human
cagcggggacagcu

SEQ ID NO: 1183450 - RNA, 17 nt, Human
cagccucugaaaaccaa

SEQ ID NO: 1183451 - RNA, 23 nt, Human
cagccugagcgacagugagacuc

SEQ ID NO: 1183452 - RNA, 13 nt, Human
cagcccuuagcag

SEQ ID NO: 1183453 - RNA, 15 nt, Human
cagcccuuagcaggg

SEQ ID NO: 1183454 - RNA, 23 nt, Human
cagccgccaugcuccuggcccac

SEQ ID NO: 1183455 - RNA, 15 nt, Human
cagauuucacucucc

SEQ ID NO: 1183456 - RNA, 16 nt, Human
cagauuucacucuccu

SEQ ID NO: 1183457 - RNA, 18 nt, Human
cagauuucacucuccuug

SEQ ID NO: 1183458 - RNA, 19 nt, Human
cagauuucacucuccuugg

SEQ ID NO: 1183459 - RNA, 16 nt, Human
cagcauauucaggaag

SEQ ID NO: 1183460 - RNA, 17 nt, Human
cagcauauucaggaagc

SEQ ID NO: 1183461 - RNA, 18 nt, Human
cagcauauucaggaagcu

SEQ ID NO: 1183462 - RNA, 16 nt, Human
cagagguugcagugag

SEQ ID NO: 1183463 - RNA, 20 nt, Human
cagagacuccugcaggcagc

SEQ ID NO: 1183464 - RNA, 23 nt, Human
cagagacuccugcaggcagccag

SEQ ID NO: 1183465 - RNA, 21 nt, Human
cagagacuccugcaggcagcc

SEQ ID NO: 1183466 - RNA, 22 nt, Human
cagagacuccugcaggcagcca

SEQ ID NO: 1183467 - RNA, 16 nt, Human
cagagagggugggagu

SEQ ID NO: 1183468 - RNA, 20 nt, Human
cagagagggugggagugggc

SEQ ID NO: 1183469 - RNA, 22 nt, Human
cagagagggugggagugggccc

SEQ ID NO: 1183470 - RNA, 14 nt, Human
cagagccugcaguu

SEQ ID NO: 1183471 - RNA, 23 nt, Human
cagagagggugggagugggccca

SEQ ID NO: 1183472 - RNA, 17 nt, Human
cagagcuacacagggga

SEQ ID NO: 1183473 - RNA, 22 nt, Human
cagagcuacacaggggaaaaga

SEQ ID NO: 1183474 - RNA, 13 nt, Human
caagcucugcucc

SEQ ID NO: 1183475 - RNA, 12 nt, Human
caagcuccaagc

SEQ ID NO: 1183476 - RNA, 17 nt, Human
caagcuccaagcuccca

SEQ ID NO: 1183477 - RNA, 14 nt, Human
caagcucugcuccu

SEQ ID NO: 1183478 - RNA, 15 nt, Human
caagcucugcuccuc

SEQ ID NO: 1183479 - RNA, 14 nt, Human
caagcugcacccuc

SEQ ID NO: 1183480 - RNA, 18 nt, Human
caagcugcacccucaggc

SEQ ID NO: 1183481 - RNA, 20 nt, Human
caagcugcacccucaggcag

SEQ ID NO: 1183482 - RNA, 19 nt, Human
caaggccaaaggaagcaca

SEQ ID NO: 1183483 - RNA, 17 nt, Human
caaggccaaaggaagca

SEQ ID NO: 1183484 - RNA, 18 nt, Human
caaggccaaaggaagcac

SEQ ID NO: 1183485 - RNA, 15 nt, Human
caaggccaaaggaag

SEQ ID NO: 1183486 - RNA, 16 nt, Human
caaggccaaaggaagc

SEQ ID NO: 1183487 - RNA, 13 nt, Human
caagucaagugaa

SEQ ID NO: 1183488 - RNA, 17 nt, Human
caagucaagugaaaaag

SEQ ID NO: 1183489 - RNA, 19 nt, Human
caauaaagcagcguuucua

SEQ ID NO: 1183490 - RNA, 23 nt, Human
caaugcuguauuuuaaaagaaug

SEQ ID NO: 1183491 - RNA, 16 nt, Human
caaugcuguauuuuaa

SEQ ID NO: 1183492 - RNA, 17 nt, Human
caaugcuguauuuuaaa

SEQ ID NO: 1183493 - RNA, 15 nt, Human
caauucuugccaaau

SEQ ID NO: 1183494 - RNA, 11 nt, Human
caauggcagcc

SEQ ID NO: 1183495 - RNA, 12 nt, Human
caauggcagccu

SEQ ID NO: 1183496 - RNA, 13 nt, Human
caauuuauuaugg

SEQ ID NO: 1183497 - RNA, 14 nt, Human
cacaagagcccagg

SEQ ID NO: 1183498 - RNA, 16 nt, Human
cacaagagcccaggcc

SEQ ID NO: 1183499 - RNA, 14 nt, Human
cacaagcuccaagc

SEQ ID NO: 1183500 - RNA, 15 nt, Human
cacaagcuccaagcu

SEQ ID NO: 1183501 - RNA, 17 nt, Human
cacaagagcccaggccu

SEQ ID NO: 1183502 - RNA, 17 nt, Human
cacaagcuccaagcucc

SEQ ID NO: 1183503 - RNA, 23 nt, Human
cacaagcuccaagcucccaggca

SEQ ID NO: 1183504 - RNA, 17 nt, Human
cacaagcugcacccuca

SEQ ID NO: 1183505 - RNA, 23 nt, Human
cacaagcugcacccucaggcagg

SEQ ID NO: 1183506 - RNA, 17 nt, Human
cacacagcucuguccug

SEQ ID NO: 1183507 - RNA, 20 nt, Human
cacacagcucuguccuggga

SEQ ID NO: 1183508 - RNA, 17 nt, Human
cacagccucuuagaugc

SEQ ID NO: 1183509 - RNA, 21 nt, Human
cacagccucuuagaugcaguu

SEQ ID NO: 1183510 - RNA, 17 nt, Human
cacaggggaaaagagga

SEQ ID NO: 1183511 - RNA, 18 nt, Human
cacaggggaaaagaggag

SEQ ID NO: 1183512 - RNA, 19 nt, Human
cacaggggaaaagaggagu

SEQ ID NO: 1183513 - RNA, 13 nt, Human
cacaguccuuacc

SEQ ID NO: 1183514 - RNA, 20 nt, Human
cacaguauuacuucugcuac

SEQ ID NO: 1183515 - RNA, 21 nt, Human
cacaguauuacuucugcuaca

SEQ ID NO: 1183516 - RNA, 20 nt, Human
cacacaguauuacuucugcu

SEQ ID NO: 1183517 - RNA, 23 nt, Human
cacacaguauuacuucugcuaca

SEQ ID NO: 1183518 - RNA, 18 nt, Human
cacacagugagucgagga

SEQ ID NO: 1183519 - RNA, 21 nt, Human
cacacagugagucgaggacag

SEQ ID NO: 1183520 - RNA, 23 nt, Human
cacacagugagucgaggacaggg

SEQ ID NO: 1183521 - RNA, 15 nt, Human
cacacauacacacac

SEQ ID NO: 1183522 - RNA, 17 nt, Human
cacacaugaaguccaag

SEQ ID NO: 1183523 - RNA, 22 nt, Human
cacacaugaaguccaagcauuu

SEQ ID NO: 1183524 - RNA, 20 nt, Human
cacacaugagcaucaggcca

SEQ ID NO: 1183525 - RNA, 14 nt, Human
cacacaugcauaca

SEQ ID NO: 1183526 - RNA, 15 nt, Human
cacacaugcauacac

SEQ ID NO: 1183527 - RNA, 16 nt, Human
cacacaugcauacaca

SEQ ID NO: 1183528 - RNA, 17 nt, Human
cacacaugcauacacac

SEQ ID NO: 1183529 - RNA, 18 nt, Human
cacacaugcauacacaca

SEQ ID NO: 1183530 - RNA, 19 nt, Human
cacacaugcauacacacac

SEQ ID NO: 1183531 - RNA, 21 nt, Human
cacacaugagcaucaggccag

SEQ ID NO: 1183532 - RNA, 22 nt, Human
cacacaugagcaucaggccagg

SEQ ID NO: 1183533 - RNA, 18 nt, Human
cacagaaaauggaagaca

SEQ ID NO: 1183534 - RNA, 19 nt, Human
cacagaaaauggaagacag

SEQ ID NO: 1183535 - RNA, 20 nt, Human
cacagaaaauggaagacagc

SEQ ID NO: 1183536 - RNA, 22 nt, Human
cacagaaaauggaagacagcuc

SEQ ID NO: 1183537 - RNA, 23 nt, Human
cacagaaaauggaagacagcucu

SEQ ID NO: 1183538 - RNA, 19 nt, Human
cacagaaaauucuucucca

SEQ ID NO: 1183539 - RNA, 22 nt, Human
cacagaaaauauacuguaaaga

SEQ ID NO: 1183540 - RNA, 19 nt, Human
cacagacauacuaaccagc

SEQ ID NO: 1183541 - RNA, 21 nt, Human
cacagacauacuaaccagcag

SEQ ID NO: 1183542 - RNA, 13 nt, Human
cacagacccugcc

SEQ ID NO: 1183543 - RNA, 16 nt, Human
cacugcauguuuguga

SEQ ID NO: 1183544 - RNA, 13 nt, Human
cacugcagccuca

SEQ ID NO: 1183545 - RNA, 14 nt, Human
cacugcagccucaa

SEQ ID NO: 1183546 - RNA, 15 nt, Human
cacugcacuccagcc

SEQ ID NO: 1183547 - RNA, 16 nt, Human
cacugcacuccagccu

SEQ ID NO: 1183548 - RNA, 18 nt, Human
cacugcacuccagccugg

SEQ ID NO: 1183549 - RNA, 19 nt, Human
cacugcacuccagccuggg

SEQ ID NO: 1183550 - RNA, 20 nt, Human
cacugcacuccagccugggu

SEQ ID NO: 1183551 - RNA, 21 nt, Human
cacugcagaagacaguauggc

SEQ ID NO: 1183552 - RNA, 12 nt, Human
cacugcagccuc

SEQ ID NO: 1183553 - RNA, 22 nt, Human
cacugguucuucuuggucucag

SEQ ID NO: 1183554 - RNA, 18 nt, Human
cacuuacacuuuaugcac

SEQ ID NO: 1183555 - RNA, 16 nt, Human
cacuugucaauaaaau

SEQ ID NO: 1183556 - RNA, 19 nt, Human
cacuuguguuuugcaagcc

SEQ ID NO: 1183557 - RNA, 22 nt, Human
cacuuguguuuugcaagccaga

SEQ ID NO: 1183558 - RNA, 16 nt, Human
cacuccagugagacag

SEQ ID NO: 1183559 - RNA, 16 nt, Human
cacuccagccugggug

SEQ ID NO: 1183560 - RNA, 14 nt, Human
cacuaguauuucua

SEQ ID NO: 1183561 - RNA, 12 nt, Human
cacuccccugcu

SEQ ID NO: 1183562 - RNA, 13 nt, Human
cacuccccugcug

SEQ ID NO: 1183563 - RNA, 14 nt, Human
cacuccccugcugg

SEQ ID NO: 1183564 - RNA, 15 nt, Human
cacuccccugcuggg

SEQ ID NO: 1183565 - RNA, 14 nt, Human
caccuuggcugcag

SEQ ID NO: 1183566 - RNA, 15 nt, Human
caccuuggcucaagu

SEQ ID NO: 1183567 - RNA, 13 nt, Human
caccuuggcugca

SEQ ID NO: 1183568 - RNA, 17 nt, Human
caccugccuguugggcc

SEQ ID NO: 1183569 - RNA, 19 nt, Human
caccugccuguugggccag

SEQ ID NO: 1183570 - RNA, 24 nt, Human
caccugccuguugggccaggagcc

SEQ ID NO: 1183571 - RNA, 14 nt, Human
cacccucaggcagg

SEQ ID NO: 1183572 - RNA, 17 nt, Human
cacccugaaagcccuga

SEQ ID NO: 1183573 - RNA, 15 nt, Human
cacccuggggagaaa

SEQ ID NO: 1183574 - RNA, 16 nt, Human
cacccuggggagaaag

SEQ ID NO: 1183575 - RNA, 17 nt, Human
cacccuggggagaaagu

SEQ ID NO: 1183576 - RNA, 13 nt, Human
caccucagccucc

SEQ ID NO: 1183577 - RNA, 14 nt, Human
caccucagccuccc

SEQ ID NO: 1183578 - RNA, 14 nt, Human
caccugccccucaa

SEQ ID NO: 1183579 - RNA, 15 nt, Human
caccugccccucaac

SEQ ID NO: 1183580 - RNA, 16 nt, Human
caccugccccucaacu

SEQ ID NO: 1183581 - RNA, 12 nt, Human
caccccagcccc

SEQ ID NO: 1183582 - RNA, 11 nt, Human
caccccagccc

SEQ ID NO: 1183583 - RNA, 14 nt, Human
auuugcucauggaa

SEQ ID NO: 1183584 - RNA, 17 nt, Human
auuugcucauggaauug

SEQ ID NO: 1183585 - RNA, 13 nt, Human
auuugcuccuuuc

SEQ ID NO: 1183586 - RNA, 20 nt, Human
auuugugauacaaugcugug

SEQ ID NO: 1183587 - RNA, 17 nt, Human
auuugugauacaaugcu

SEQ ID NO: 1183588 - RNA, 19 nt, Human
auuuuauagcuacuaauuu

SEQ ID NO: 1183589 - RNA, 22 nt, Human
auuuguuugaacugauaaagau

SEQ ID NO: 1183590 - RNA, 23 nt, Human
auuuguuugaacugauaaagaug

SEQ ID NO: 1183591 - RNA, 20 nt, Human
caaaaaaaaaaaaaaauuag

SEQ ID NO: 1183592 - RNA, 16 nt, Human
caaaagaugcuucuca

SEQ ID NO: 1183593 - RNA, 18 nt, Human
caaaagaugcuucucacu

SEQ ID NO: 1183594 - RNA, 15 nt, Human
caaaaggcagaagca

SEQ ID NO: 1183595 - RNA, 21 nt, Human
caaaccaucauugaaaucuuu

SEQ ID NO: 1183596 - RNA, 20 nt, Human
caaagauauuuugcuuugug

SEQ ID NO: 1183597 - RNA, 22 nt, Human
caacacucacauuuauucugcu

SEQ ID NO: 1183598 - RNA, 15 nt, Human
caaauccuugaagau

SEQ ID NO: 1183599 - RNA, 20 nt, Human
caaauggaaaugggcagagc

SEQ ID NO: 1183600 - RNA, 21 nt, Human
caaauggaaaugggcagagca

SEQ ID NO: 1183601 - RNA, 22 nt, Human
caaauggaaaugggcagagcag

SEQ ID NO: 1183602 - RNA, 20 nt, Human
caacaccucugcacaagcug

SEQ ID NO: 1183603 - RNA, 22 nt, Human
caaagauauuuugcuuugugau

SEQ ID NO: 1183604 - RNA, 23 nt, Human
caaagauauuuugcuuugugauu

SEQ ID NO: 1183605 - RNA, 15 nt, Human
caaagcagugcaugc

SEQ ID NO: 1183606 - RNA, 17 nt, Human
caaagcagugcaugcug

SEQ ID NO: 1183607 - RNA, 14 nt, Human
caaaguagaagucu

SEQ ID NO: 1183608 - RNA, 21 nt, Human
caaaguagaagucuuagaugu

SEQ ID NO: 1183609 - RNA, 22 nt, Human
caaaguagaagucuuagaugua

SEQ ID NO: 1183610 - RNA, 13 nt, Human
caaagugcuggga

SEQ ID NO: 1183611 - RNA, 18 nt, Human
auguuugccucugccucu

SEQ ID NO: 1183612 - RNA, 17 nt, Human
auuacaggaaguacugg

SEQ ID NO: 1183613 - RNA, 22 nt, Human
auuacaagcgugagccacugca

SEQ ID NO: 1183614 - RNA, 18 nt, Human
auuaugaauuacauuugu

SEQ ID NO: 1183615 - RNA, 23 nt, Human
auuaugcaugaaguaauaugcac

SEQ ID NO: 1183616 - RNA, 16 nt, Human
auuaggugugacugaa

SEQ ID NO: 1183617 - RNA, 18 nt, Human
auuaggugugacugaauu

SEQ ID NO: 1183618 - RNA, 21 nt, Human
auuaggugugacugaauuucu

SEQ ID NO: 1183619 - RNA, 14 nt, Human
auuaugaauuacau

SEQ ID NO: 1183620 - RNA, 17 nt, Human
auuaugaauuacauuug

SEQ ID NO: 1183621 - RNA, 15 nt, Human
auucauaaugacuua

SEQ ID NO: 1183622 - RNA, 19 nt, Human
auucauaaugacuuaagca

SEQ ID NO: 1183623 - RNA, 19 nt, Human
auucauagcagcuuauuca

SEQ ID NO: 1183624 - RNA, 22 nt, Human
auucauagcagcuuauucacaa

SEQ ID NO: 1183625 - RNA, 15 nt, Human
auugcugauggugca

SEQ ID NO: 1183626 - RNA, 16 nt, Human
auugcugauggugcaa

SEQ ID NO: 1183627 - RNA, 18 nt, Human
auugcugauggugcaaug

SEQ ID NO: 1183628 - RNA, 19 nt, Human
auugcugauggugcaauga

SEQ ID NO: 1183629 - RNA, 23 nt, Human
auugcugauggugcaaugaccuu

SEQ ID NO: 1183630 - RNA, 12 nt, Human
auugcugcuuga

SEQ ID NO: 1183631 - RNA, 14 nt, Human
auugcuugagcuca

SEQ ID NO: 1183632 - RNA, 18 nt, Human
auugcuugagcucaggag

SEQ ID NO: 1183633 - RNA, 14 nt, Human
auuguaaaauggug

SEQ ID NO: 1183634 - RNA, 21 nt, Human
auugugucucuugguccugcu

SEQ ID NO: 1183635 - RNA, 23 nt, Human
auugugucucuugguccugcugc

SEQ ID NO: 1183636 - RNA, 16 nt, Human
auuguuagucucuuga

SEQ ID NO: 1183637 - RNA, 21 nt, Human
auugauaagaaccuuuugagu

SEQ ID NO: 1183638 - RNA, 17 nt, Human
auugauaugcuuauaca

SEQ ID NO: 1183639 - RNA, 15 nt, Human
auugcuacuguccua

SEQ ID NO: 1183640 - RNA, 20 nt, Human
auugcuacuguccuacccac

SEQ ID NO: 1183641 - RNA, 22 nt, Human
auugcuacuguccuacccaccc

SEQ ID NO: 1183642 - RNA, 11 nt, Human
auucuucugcu

SEQ ID NO: 1183643 - RNA, 12 nt, Human
auucuucugcuu

SEQ ID NO: 1183644 - RNA, 14 nt, Human
auucuucugcuuca

SEQ ID NO: 1183645 - RNA, 11 nt, Human
auucuuuccug

SEQ ID NO: 1183646 - RNA, 13 nt, Human
auucuuuccugag

SEQ ID NO: 1183647 - RNA, 18 nt, Human
ccuggcacccggccccug

SEQ ID NO: 1183648 - RNA, 13 nt, Human
ccuggaugcagcc

SEQ ID NO: 1183649 - RNA, 14 nt, Human
ccuggaugcagccu

SEQ ID NO: 1183650 - RNA, 17 nt, Human
ccuggaugcagccucac

SEQ ID NO: 1183651 - RNA, 19 nt, Human
ccuggaugcagccucacag

SEQ ID NO: 1183652 - RNA, 15 nt, Human
ccuggaguucugguu

SEQ ID NO: 1183653 - RNA, 16 nt, Human
ccuggaguucugguuc

SEQ ID NO: 1183654 - RNA, 17 nt, Human
ccuggaguucugguucc

SEQ ID NO: 1183655 - RNA, 14 nt, Human
ccugcccaggcccc

SEQ ID NO: 1183656 - RNA, 15 nt, Human
ccugcccaggccccu

SEQ ID NO: 1183657 - RNA, 16 nt, Human
ccugcccaggccccug

SEQ ID NO: 1183658 - RNA, 18 nt, Human
ccugcccaggccccugcc

SEQ ID NO: 1183659 - RNA, 12 nt, Human
ccugcugggugu

SEQ ID NO: 1183660 - RNA, 14 nt, Human
ccugcugggugugg

SEQ ID NO: 1183661 - RNA, 20 nt, Human
ccugcuggguguggcgcagc

SEQ ID NO: 1183662 - RNA, 21 nt, Human
ccugcuggguguggcgcagca

SEQ ID NO: 1183663 - RNA, 12 nt, Human
ccuggccucugc

SEQ ID NO: 1183664 - RNA, 14 nt, Human
ccuggccucugcac

SEQ ID NO: 1183665 - RNA, 15 nt, Human
ccuggccucugcacu

SEQ ID NO: 1183666 - RNA, 16 nt, Human
ccuggccucugcacuc

SEQ ID NO: 1183667 - RNA, 13 nt, Human
ccuggccugagcu

SEQ ID NO: 1183668 - RNA, 13 nt, Human
ccucuugagccuu

SEQ ID NO: 1183669 - RNA, 19 nt, Human
ccucuugagccuugaacuu

SEQ ID NO: 1183670 - RNA, 22 nt, Human
ccugcacuugcagacucuacag

SEQ ID NO: 1183671 - RNA, 22 nt, Human
ccucugccugaagucacacagu

SEQ ID NO: 1183672 - RNA, 13 nt, Human
ccucugcugcugg

SEQ ID NO: 1183673 - RNA, 14 nt, Human
ccucugcugcuggc

SEQ ID NO: 1183674 - RNA, 15 nt, Human
ccucugcugcuggcu

SEQ ID NO: 1183675 - RNA, 16 nt, Human
ccucugcugcuggcug

SEQ ID NO: 1183676 - RNA, 17 nt, Human
ccucugcugcuggcugg

SEQ ID NO: 1183677 - RNA, 18 nt, Human
ccucugcugcuggcuggu

SEQ ID NO: 1183678 - RNA, 13 nt, Human
ccucucucacucc

SEQ ID NO: 1183679 - RNA, 14 nt, Human
ccucucucacuccu

SEQ ID NO: 1183680 - RNA, 15 nt, Human
ccucucucacuccuu

SEQ ID NO: 1183681 - RNA, 17 nt, Human
ccucucucacuccuuga

SEQ ID NO: 1183682 - RNA, 12 nt, Human
ccucucucaggc

SEQ ID NO: 1183683 - RNA, 14 nt, Human
ccucucucaggcca

SEQ ID NO: 1183684 - RNA, 23 nt, Human
ccucagccucccaaagugcuggg

SEQ ID NO: 1183685 - RNA, 22 nt, Human
ccucagccucccgaauagcugg

SEQ ID NO: 1183686 - RNA, 20 nt, Human
ccucauguccacugguucuu

SEQ ID NO: 1183687 - RNA, 13 nt, Human
ccucauguucuua

SEQ ID NO: 1183688 - RNA, 18 nt, Human
ccucauuagcauuuugcu

SEQ ID NO: 1183689 - RNA, 19 nt, Human
ccucauguucuuaauucuu

SEQ ID NO: 1183690 - RNA, 22 nt, Human
ccucccaaggggcccaaauucu

SEQ ID NO: 1183691 - RNA, 15 nt, Human
ccucaacucuccucc

SEQ ID NO: 1183692 - RNA, 15 nt, Human
ccucaagagaaggca

SEQ ID NO: 1183693 - RNA, 19 nt, Human
ccucaacucuccuccagag

SEQ ID NO: 1183694 - RNA, 11 nt, Human
ccucagccucc

SEQ ID NO: 1183695 - RNA, 22 nt, Human
ccucagccucccaaagugcugg

SEQ ID NO: 1183696 - RNA, 16 nt, Human
ccguagguuauuuuca

SEQ ID NO: 1183697 - RNA, 12 nt, Human
ccggcuccaggc

SEQ ID NO: 1183698 - RNA, 23 nt, Human
ccuaggcauuugcugaauacaga

SEQ ID NO: 1183699 - RNA, 17 nt, Human
ccuagcacuuugggagg

SEQ ID NO: 1183700 - RNA, 14 nt, Human
cccuggcagccccu

SEQ ID NO: 1183701 - RNA, 16 nt, Human
cccuggcagccccugu

SEQ ID NO: 1183702 - RNA, 12 nt, Human
cccugcccugug

SEQ ID NO: 1183703 - RNA, 13 nt, Human
cccugcccugugg

SEQ ID NO: 1183704 - RNA, 14 nt, Human
cccugcccuguggg

SEQ ID NO: 1183705 - RNA, 15 nt, Human
cccugcccugugggc

SEQ ID NO: 1183706 - RNA, 16 nt, Human
cccugcccugugggcc

SEQ ID NO: 1183707 - RNA, 20 nt, Human
cccugcccugugggccccca

SEQ ID NO: 1183708 - RNA, 21 nt, Human
cccugcccugugggcccccaa

SEQ ID NO: 1183709 - RNA, 12 nt, Human
cccuggcagccc

SEQ ID NO: 1183710 - RNA, 13 nt, Human
cccuggcagcccc

SEQ ID NO: 1183711 - RNA, 16 nt, Human
ccgccaugcuccuggc

SEQ ID NO: 1183712 - RNA, 20 nt, Human
ccgcccaggcuuagucacug

SEQ ID NO: 1183713 - RNA, 17 nt, Human
cccuucuuuccacagaa

SEQ ID NO: 1183714 - RNA, 20 nt, Human
ccgaauagcugggacuacag

SEQ ID NO: 1183715 - RNA, 16 nt, Human
ccgacccuugccgucu

SEQ ID NO: 1183716 - RNA, 17 nt, Human
ccgccaaggcuggggga

SEQ ID NO: 1183717 - RNA, 16 nt, Human
cccuucuaccuuccug

SEQ ID NO: 1183718 - RNA, 16 nt, Human
cccuucgcuccugugu

SEQ ID NO: 1183719 - RNA, 18 nt, Human
cccuucgcuccugugucu

SEQ ID NO: 1183720 - RNA, 21 nt, Human
cccuucugacccaugcugccc

SEQ ID NO: 1183721 - RNA, 22 nt, Human
cccuucugacccaugcugcccu

SEQ ID NO: 1183722 - RNA, 23 nt, Human
cccuucugacccaugcugcccug

SEQ ID NO: 1183723 - RNA, 18 nt, Human
cccuauuagagaagagau

SEQ ID NO: 1183724 - RNA, 23 nt, Human
cccgggaggcagagguugcagug

SEQ ID NO: 1183725 - RNA, 17 nt, Human
cccggccaccugcggug

SEQ ID NO: 1183726 - RNA, 13 nt, Human
cccggccaccugc

SEQ ID NO: 1183727 - RNA, 14 nt, Human
cccggccaccugcg

SEQ ID NO: 1183728 - RNA, 12 nt, Human
cccggcuccagg

SEQ ID NO: 1183729 - RNA, 13 nt, Human
cccggcuccaggc

SEQ ID NO: 1183730 - RNA, 14 nt, Human
cccggcuccaggcu

SEQ ID NO: 1183731 - RNA, 15 nt, Human
cccggcuccaggcuc

SEQ ID NO: 1183732 - RNA, 16 nt, Human
cccggcuccaggcucc

SEQ ID NO: 1183733 - RNA, 14 nt, Human
cccgaauagcuggg

SEQ ID NO: 1183734 - RNA, 16 nt, Human
cccgaauagcugggac

SEQ ID NO: 1183735 - RNA, 22 nt, Human
ccccagcaagugagagcugggu

SEQ ID NO: 1183736 - RNA, 22 nt, Human
cccccaaauggaaaugggcaga

SEQ ID NO: 1183737 - RNA, 23 nt, Human
ccccaaaacucuccucugcugcu

SEQ ID NO: 1183738 - RNA, 22 nt, Human
cccauuguggucacaggaagua

SEQ ID NO: 1183739 - RNA, 23 nt, Human
cccauuguggucacaggaaguag

SEQ ID NO: 1183740 - RNA, 22 nt, Human
ccccaaaacucuccucugcugc

SEQ ID NO: 1183741 - RNA, 13 nt, Human
ccccggccaccug

SEQ ID NO: 1183742 - RNA, 23 nt, Human
ccccgaggccuucucugaaggac

SEQ ID NO: 1183743 - RNA, 12 nt, Human
cccacucccugc

SEQ ID NO: 1183744 - RNA, 12 nt, Human
cccacugcucug

SEQ ID NO: 1183745 - RNA, 13 nt, Human
cccacugcucugg

SEQ ID NO: 1183746 - RNA, 19 nt, Human
cccacugcuuuuggucugu

SEQ ID NO: 1183747 - RNA, 22 nt, Human
cccacugcuuuuggucugugug

SEQ ID NO: 1183748 - RNA, 20 nt, Human
cccacccaagggccuggccu

SEQ ID NO: 1183749 - RNA, 21 nt, Human
cccacccaagggccuggccug

SEQ ID NO: 1183750 - RNA, 22 nt, Human
cccacccaagggccuggccuga

SEQ ID NO: 1183751 - RNA, 17 nt, Human
cccacccccacccaagg

SEQ ID NO: 1183752 - RNA, 15 nt, Human
cccacccccacccaa

SEQ ID NO: 1183753 - RNA, 18 nt, Human
cccacccugaaagcccug

SEQ ID NO: 1183754 - RNA, 12 nt, Human
cccacuucugcc

SEQ ID NO: 1183755 - RNA, 15 nt, Human
cccaggaaaggcucc

SEQ ID NO: 1183756 - RNA, 13 nt, Human
cccaggcuggcgu

SEQ ID NO: 1183757 - RNA, 17 nt, Human
cccaggcuggcgugcag

SEQ ID NO: 1183758 - RNA, 20 nt, Human
cccauauuuguacaccaaua

SEQ ID NO: 1183759 - RNA, 13 nt, Human
cccauccucugua

SEQ ID NO: 1183760 - RNA, 23 nt, Human
cccagcucugguccauagagagc

SEQ ID NO: 1183761 - RNA, 20 nt, Human
ccaggcuccuuuagcgccca

SEQ ID NO: 1183762 - RNA, 21 nt, Human
ccaggcuccuuuagcgcccag

SEQ ID NO: 1183763 - RNA, 17 nt, Human
ccaggcuggcgugcagu

SEQ ID NO: 1183764 - RNA, 18 nt, Human
ccaggcuggcgugcagug

SEQ ID NO: 1183765 - RNA, 19 nt, Human
ccaggcuggcgugcagugg

SEQ ID NO: 1183766 - RNA, 19 nt, Human
ccaggggaaaaucagccug

SEQ ID NO: 1183767 - RNA, 20 nt, Human
ccaggggaaaaucagccugc

SEQ ID NO: 1183768 - RNA, 13 nt, Human
ccaggggugggac

SEQ ID NO: 1183769 - RNA, 14 nt, Human
ccaggggugggaca

SEQ ID NO: 1183770 - RNA, 17 nt, Human
ccaggggugggacaccc

SEQ ID NO: 1183771 - RNA, 21 nt, Human
ccaggggaaaaucagccugcu

SEQ ID NO: 1183772 - RNA, 19 nt, Human
ccaggggugggacacccug

SEQ ID NO: 1183773 - RNA, 21 nt, Human
ccaugagccucagcauccugg

SEQ ID NO: 1183774 - RNA, 23 nt, Human
ccaugagccucagcauccuggca

SEQ ID NO: 1183775 - RNA, 20 nt, Human
ccauggucggaaaacaugcu

SEQ ID NO: 1183776 - RNA, 23 nt, Human
ccaguuggguggaugccuggugg

SEQ ID NO: 1183777 - RNA, 23 nt, Human
ccaguuggucccccuuccaugga

SEQ ID NO: 1183778 - RNA, 14 nt, Human
ccaucccagcccca

SEQ ID NO: 1183779 - RNA, 15 nt, Human
ccaucccagccccaa

SEQ ID NO: 1183780 - RNA, 14 nt, Human
ccaucccugaaggc

SEQ ID NO: 1183781 - RNA, 15 nt, Human
ccaucccugaaggcc

SEQ ID NO: 1183782 - RNA, 17 nt, Human
ccaucccugaaggcccc

SEQ ID NO: 1183783 - RNA, 20 nt, Human
ccaucccugaaggccccgcc

SEQ ID NO: 1183784 - RNA, 19 nt, Human
ccaucccauaugccugggc

SEQ ID NO: 1183785 - RNA, 17 nt, Human
ccaguuggguggaugcc

SEQ ID NO: 1183786 - RNA, 19 nt, Human
ccaguuggguggaugccug

SEQ ID NO: 1183787 - RNA, 20 nt, Human
ccaguuggguggaugccugg

SEQ ID NO: 1183788 - RNA, 13 nt, Human
ccagcaggcucuc

SEQ ID NO: 1183789 - RNA, 15 nt, Human
ccagcaggcucucag

SEQ ID NO: 1183790 - RNA, 14 nt, Human
ccaggaagccagca

SEQ ID NO: 1183791 - RNA, 13 nt, Human
ccaggaagccagc

SEQ ID NO: 1183792 - RNA, 12 nt, Human
ccaggaagccag

SEQ ID NO: 1183793 - RNA, 14 nt, Human
ccaggaaaggcucc

SEQ ID NO: 1183794 - RNA, 15 nt, Human
ccaggaaaggcucca

SEQ ID NO: 1183795 - RNA, 16 nt, Human
ccaggaaaggcuccag

SEQ ID NO: 1183796 - RNA, 17 nt, Human
ccaggaaaggcuccagg

SEQ ID NO: 1183797 - RNA, 11 nt, Human
ccagccccugg

SEQ ID NO: 1183798 - RNA, 12 nt, Human
ccagccccugga

SEQ ID NO: 1183799 - RNA, 15 nt, Human
ccagcucaccagccc

SEQ ID NO: 1183800 - RNA, 16 nt, Human
ccagcucaccagcccc

SEQ ID NO: 1183801 - RNA, 22 nt, Human
ccagcucaccagccccagugcc

SEQ ID NO: 1183802 - RNA, 17 nt, Human
ccagcuguucagcuggu

SEQ ID NO: 1183803 - RNA, 19 nt, Human
ccagcuuaaaggggcuaga

SEQ ID NO: 1183804 - RNA, 16 nt, Human
ccagcuuaucucaggg

SEQ ID NO: 1183805 - RNA, 23 nt, Human
ccagaugcaccagcccuuagcag

SEQ ID NO: 1183806 - RNA, 18 nt, Human
ccagaugcaccagcccuu

SEQ ID NO: 1183807 - RNA, 17 nt, Human
ccagaugcaccagcccu

SEQ ID NO: 1183808 - RNA, 16 nt, Human
ccaccuuggcucaagu

SEQ ID NO: 1183809 - RNA, 17 nt, Human
ccagagggccugcaagg

SEQ ID NO: 1183810 - RNA, 18 nt, Human
ccagagggccugcaaggg

SEQ ID NO: 1183811 - RNA, 19 nt, Human
ccagagggccugcaaggga

SEQ ID NO: 1183812 - RNA, 20 nt, Human
ccagagggccugcaagggag

SEQ ID NO: 1183813 - RNA, 15 nt, Human
ccagauccuggaaau

SEQ ID NO: 1183814 - RNA, 23 nt, Human
cgaccagacaccuugacagggca

SEQ ID NO: 1183815 - RNA, 19 nt, Human
ccuuuuuuauacauaaaca

SEQ ID NO: 1183816 - RNA, 17 nt, Human
ccuuuuuuauacauaaa

SEQ ID NO: 1183817 - RNA, 18 nt, Human
ccuuuuuuauacauaaac

SEQ ID NO: 1183818 - RNA, 15 nt, Human
cgacagugagacucu

SEQ ID NO: 1183819 - RNA, 16 nt, Human
cgacagugagacucug

SEQ ID NO: 1183820 - RNA, 12 nt, Human
ccuuuuuuauac

SEQ ID NO: 1183821 - RNA, 14 nt, Human
ccuuuagcgcccag

SEQ ID NO: 1183822 - RNA, 20 nt, Human
ccuuuagcgcccaguugggu

SEQ ID NO: 1183823 - RNA, 20 nt, Human
ccuugccgucuaccugaggg

SEQ ID NO: 1183824 - RNA, 20 nt, Human
ccuucuguccuacucugugu

SEQ ID NO: 1183825 - RNA, 14 nt, Human
ccuggccugagcug

SEQ ID NO: 1183826 - RNA, 15 nt, Human
ccuggccugagcugg

SEQ ID NO: 1183827 - RNA, 20 nt, Human
ccuggccugagcugggauga

SEQ ID NO: 1183828 - RNA, 12 nt, Human
ccuucugaccca

SEQ ID NO: 1183829 - RNA, 16 nt, Human
ccuucugacccaugcu

SEQ ID NO: 1183830 - RNA, 17 nt, Human
ccuucugacccaugcug

SEQ ID NO: 1183831 - RNA, 20 nt, Human
ccuucugacccaugcugccc

SEQ ID NO: 1183832 - RNA, 21 nt, Human
ccuucugacccaugcugcccu

SEQ ID NO: 1183833 - RNA, 22 nt, Human
ccuucugacccaugcugcccug

SEQ ID NO: 1183834 - RNA, 23 nt, Human
ccuucugacccaugcugcccugu

SEQ ID NO: 1183835 - RNA, 22 nt, Human
ccuucuggaauaaggagaauga

SEQ ID NO: 1183836 - RNA, 14 nt, Human
cggagucccaccuu

SEQ ID NO: 1183837 - RNA, 19 nt, Human
cggcucacugcagccucaa

SEQ ID NO: 1183838 - RNA, 18 nt, Human
cggcucacugcagccuca

SEQ ID NO: 1183839 - RNA, 12 nt, Human
cgccaaggcugg

SEQ ID NO: 1183840 - RNA, 23 nt, Human
cgccaaggcugggggaagaagcu

SEQ ID NO: 1183841 - RNA, 13 nt, Human
cgccaaggcuggg

SEQ ID NO: 1183842 - RNA, 16 nt, Human
cgccaaggcuggggga

SEQ ID NO: 1183843 - RNA, 14 nt, Human
cgccuacaggagug

SEQ ID NO: 1183844 - RNA, 17 nt, Human
cgaguuacagacaaagc

SEQ ID NO: 1183845 - RNA, 18 nt, Human
cgaguuacagacaaagcg

SEQ ID NO: 1183846 - RNA, 14 nt, Human
cgaguagcugggac

SEQ ID NO: 1183847 - RNA, 15 nt, Human
cgaguagcugggacu

SEQ ID NO: 1183848 - RNA, 16 nt, Human
cgaguagcugggacua

SEQ ID NO: 1183849 - RNA, 18 nt, Human
cuaagugaggaugaaaaa

SEQ ID NO: 1183850 - RNA, 20 nt, Human
cuaagugauccucccaccuc

SEQ ID NO: 1183851 - RNA, 22 nt, Human
cuaagugauccucccaccucag

SEQ ID NO: 1183852 - RNA, 23 nt, Human
cuaagugauccucccaccucagc

SEQ ID NO: 1183853 - RNA, 18 nt, Human
cuacauacaauuccaaac

SEQ ID NO: 1183854 - RNA, 15 nt, Human
cuacaugagguacug

SEQ ID NO: 1183855 - RNA, 18 nt, Human
cuacaugagguacugaga

SEQ ID NO: 1183856 - RNA, 15 nt, Human
cuacaguccucccau

SEQ ID NO: 1183857 - RNA, 16 nt, Human
cuacaguccucccauc

SEQ ID NO: 1183858 - RNA, 17 nt, Human
cuacaguccucccaucu

SEQ ID NO: 1183859 - RNA, 18 nt, Human
cuacaguccucccaucuc

SEQ ID NO: 1183860 - RNA, 13 nt, Human
cuacaguugaaaa

SEQ ID NO: 1183861 - RNA, 19 nt, Human
cuacaguugaaaaacagcu

SEQ ID NO: 1183862 - RNA, 20 nt, Human
cuaagugaaauaagccagac

SEQ ID NO: 1183863 - RNA, 23 nt, Human
cuaagugaaauaagccagacauc

SEQ ID NO: 1183864 - RNA, 16 nt, Human
cuaacuucaccauauu

SEQ ID NO: 1183865 - RNA, 20 nt, Human
cuaacgaaguauccuucagc

SEQ ID NO: 1183866 - RNA, 15 nt, Human
cuaacuucaccauau

SEQ ID NO: 1183867 - RNA, 22 nt, Human
cuaguuccaccaucaagccacc

SEQ ID NO: 1183868 - RNA, 23 nt, Human
cuaguugaucagcuuauugucua

SEQ ID NO: 1183869 - RNA, 22 nt, Human
cuaguuguuugauucagacagc

SEQ ID NO: 1183870 - RNA, 19 nt, Human
cuagccugugccucuggga

SEQ ID NO: 1183871 - RNA, 19 nt, Human
cuagggaaaaaccagcgug

SEQ ID NO: 1183872 - RNA, 21 nt, Human
cuagggaaaaaccagcgugug

SEQ ID NO: 1183873 - RNA, 18 nt, Human
cuaguuccaccaucaagc

SEQ ID NO: 1183874 - RNA, 20 nt, Human
cuaguuccaccaucaagcca

SEQ ID NO: 1183875 - RNA, 19 nt, Human
cuagaaauuccccacccug

SEQ ID NO: 1183876 - RNA, 16 nt, Human
cuagaacucccuuuca

SEQ ID NO: 1183877 - RNA, 17 nt, Human
cuagaacucccuuucaa

SEQ ID NO: 1183878 - RNA, 18 nt, Human
cuagaacucccuuucaac

SEQ ID NO: 1183879 - RNA, 19 nt, Human
cuagaacucccuuucaaca

SEQ ID NO: 1183880 - RNA, 22 nt, Human
cuagcagcagggagggcuucug

SEQ ID NO: 1183881 - RNA, 23 nt, Human
cuagcagcagggagggcuucugc

SEQ ID NO: 1183882 - RNA, 16 nt, Human
cuagcauacguacaca

SEQ ID NO: 1183883 - RNA, 17 nt, Human
cuagcauggcugccaau

SEQ ID NO: 1183884 - RNA, 15 nt, Human
cuaccugaggggccu

SEQ ID NO: 1183885 - RNA, 11 nt, Human
cuaccugaggg

SEQ ID NO: 1183886 - RNA, 14 nt, Human
cuaccugaggggcc

SEQ ID NO: 1183887 - RNA, 16 nt, Human
cuccaagaccuucucc

SEQ ID NO: 1183888 - RNA, 17 nt, Human
cuccaagaccuucuccu

SEQ ID NO: 1183889 - RNA, 18 nt, Human
cuccaagaccuucuccuu

SEQ ID NO: 1183890 - RNA, 21 nt, Human
cuccaagaccuucuccuucac

SEQ ID NO: 1183891 - RNA, 22 nt, Human
cuccacuuucuagccagaggag

SEQ ID NO: 1183892 - RNA, 15 nt, Human
cuccagaauuuccca

SEQ ID NO: 1183893 - RNA, 18 nt, Human
cuccagaauuucccaaag

SEQ ID NO: 1183894 - RNA, 21 nt, Human
cuccagaauuucccaaagcag

SEQ ID NO: 1183895 - RNA, 17 nt, Human
cuccagacacaugucca

SEQ ID NO: 1183896 - RNA, 19 nt, Human
cuccagacacauguccaag

SEQ ID NO: 1183897 - RNA, 11 nt, Human
cuccaggugca

SEQ ID NO: 1183898 - RNA, 19 nt, Human
cuccgcuuucuacccagcg

SEQ ID NO: 1183899 - RNA, 21 nt, Human
cuccagugagacagcucugca

SEQ ID NO: 1183900 - RNA, 12 nt, Human
cucccaccucag

SEQ ID NO: 1183901 - RNA, 13 nt, Human
cucccaccucagc

SEQ ID NO: 1183902 - RNA, 14 nt, Human
cucauguucuuaau

SEQ ID NO: 1183903 - RNA, 18 nt, Human
cucauguucuuaauucuu

SEQ ID NO: 1183904 - RNA, 19 nt, Human
cucauguucuuaauucuua

SEQ ID NO: 1183905 - RNA, 17 nt, Human
cucagucuggcccuucc

SEQ ID NO: 1183906 - RNA, 18 nt, Human
cucagucuggcccuuccu

SEQ ID NO: 1183907 - RNA, 20 nt, Human
cucagucuggcccuuccuuu

SEQ ID NO: 1183908 - RNA, 13 nt, Human
cucagugccacua

SEQ ID NO: 1183909 - RNA, 13 nt, Human
cucagccucccaa

SEQ ID NO: 1183910 - RNA, 21 nt, Human
cucagccucccaaagugcugg

SEQ ID NO: 1183911 - RNA, 14 nt, Human
cucagccucccaaa

SEQ ID NO: 1183912 - RNA, 16 nt, Human
cucagccucccaaagu

SEQ ID NO: 1183913 - RNA, 22 nt, Human
cucagccucccaaagugcuggg

SEQ ID NO: 1183914 - RNA, 13 nt, Human
cucagccucccga

SEQ ID NO: 1183915 - RNA, 13 nt, Human
cucagcggggaca

SEQ ID NO: 1183916 - RNA, 13 nt, Human
cucaggccagcug

SEQ ID NO: 1183917 - RNA, 14 nt, Human
cucaggccagcugc

SEQ ID NO: 1183918 - RNA, 15 nt, Human
cucaggccagcugcu

SEQ ID NO: 1183919 - RNA, 21 nt, Human
cucaggccagcugcuugggcu

SEQ ID NO: 1183920 - RNA, 22 nt, Human
cucaggccagcugcuugggcuu

SEQ ID NO: 1183921 - RNA, 22 nt, Human
cucaggccugggggcugggcag

SEQ ID NO: 1183922 - RNA, 21 nt, Human
cucaggccugggggcugggca

SEQ ID NO: 1183923 - RNA, 14 nt, Human
cucaggccuggggg

SEQ ID NO: 1183924 - RNA, 20 nt, Human
cucaggccugggggcugggc

SEQ ID NO: 1183925 - RNA, 20 nt, Human
cuccgcuuucuacccagcga

SEQ ID NO: 1183926 - RNA, 12 nt, Human
cucucacuccuu

SEQ ID NO: 1183927 - RNA, 14 nt, Human
cucucacuccuuga

SEQ ID NO: 1183928 - RNA, 15 nt, Human
cucucacuccuugaa

SEQ ID NO: 1183929 - RNA, 19 nt, Human
cucucagauuguaccauug

SEQ ID NO: 1183930 - RNA, 15 nt, Human
cucuccccaugaugu

SEQ ID NO: 1183931 - RNA, 12 nt, Human
cucuccuccaga

SEQ ID NO: 1183932 - RNA, 11 nt, Human
cucucuggccu

SEQ ID NO: 1183933 - RNA, 12 nt, Human
cucucuggccuu

SEQ ID NO: 1183934 - RNA, 13 nt, Human
cucucuggccuuc

SEQ ID NO: 1183935 - RNA, 15 nt, Human
cucugaaggacauug

SEQ ID NO: 1183936 - RNA, 19 nt, Human
cucugguccauagagagca

SEQ ID NO: 1183937 - RNA, 16 nt, Human
cucugguccauagaga

SEQ ID NO: 1183938 - RNA, 18 nt, Human
cucugguccauagagagc

SEQ ID NO: 1183939 - RNA, 17 nt, Human
cucugcugacagacaca

SEQ ID NO: 1183940 - RNA, 18 nt, Human
cucugcugacagacacag

SEQ ID NO: 1183941 - RNA, 19 nt, Human
cucugcugacagacacagg

SEQ ID NO: 1183942 - RNA, 20 nt, Human
cucugcugacagacacaggc

SEQ ID NO: 1183943 - RNA, 15 nt, Human
cucuuagaugcaguu

SEQ ID NO: 1183944 - RNA, 13 nt, Human
cucuguacagagc

SEQ ID NO: 1183945 - RNA, 21 nt, Human
cucuguacagagcccacgccc

SEQ ID NO: 1183946 - RNA, 14 nt, Human
cucugcacuccccu

SEQ ID NO: 1183947 - RNA, 18 nt, Human
cucugcagcaauaaagca

SEQ ID NO: 1183948 - RNA, 19 nt, Human
cucugcagcaauaaagcag

SEQ ID NO: 1183949 - RNA, 23 nt, Human
cucugcagcaauaaagcagcguu

SEQ ID NO: 1183950 - RNA, 22 nt, Human
cucugaaggacauugcggacag

SEQ ID NO: 1183951 - RNA, 16 nt, Human
cugaaaauguaugugu

SEQ ID NO: 1183952 - RNA, 19 nt, Human
cugaaggacauugcggaca

SEQ ID NO: 1183953 - RNA, 20 nt, Human
cugaaggacauugcggacag

SEQ ID NO: 1183954 - RNA, 21 nt, Human
cugaaggacauugcggacagc

SEQ ID NO: 1183955 - RNA, 13 nt, Human
cugaaggccccgc

SEQ ID NO: 1183956 - RNA, 14 nt, Human
cugaaggccccgcc

SEQ ID NO: 1183957 - RNA, 17 nt, Human
cugaaggccccgcccag

SEQ ID NO: 1183958 - RNA, 18 nt, Human
cugaaggccccgcccagg

SEQ ID NO: 1183959 - RNA, 20 nt, Human
cucuuagaugcaguucugaa

SEQ ID NO: 1183960 - RNA, 21 nt, Human
cucuuagaugcaguucugaag

SEQ ID NO: 1183961 - RNA, 12 nt, Human
cugacagacaca

SEQ ID NO: 1183962 - RNA, 14 nt, Human
cugacagacacagg

SEQ ID NO: 1183963 - RNA, 15 nt, Human
cugacagacacaggc

SEQ ID NO: 1183964 - RNA, 18 nt, Human
cugacccaugcugcccug

SEQ ID NO: 1183965 - RNA, 19 nt, Human
cugacccaugcugcccugu

SEQ ID NO: 1183966 - RNA, 20 nt, Human
cugacccaugcugcccugug

SEQ ID NO: 1183967 - RNA, 12 nt, Human
cugccauccagg

SEQ ID NO: 1183968 - RNA, 11 nt, Human
cugccagggac

SEQ ID NO: 1183969 - RNA, 12 nt, Human
cugccagggaca

SEQ ID NO: 1183970 - RNA, 15 nt, Human
cugccagggacagag

SEQ ID NO: 1183971 - RNA, 21 nt, Human
cugccauauucuguuggccag

SEQ ID NO: 1183972 - RNA, 22 nt, Human
cugccauauucuguuggccagu

SEQ ID NO: 1183973 - RNA, 23 nt, Human
cugccauauucuguuggccagug

SEQ ID NO: 1183974 - RNA, 14 nt, Human
cugccccucaacuc

SEQ ID NO: 1183975 - RNA, 22 nt, Human
cugccccucaacucuccuccag

SEQ ID NO: 1183976 - RNA, 12 nt, Human
cugcccugugag

SEQ ID NO: 1183977 - RNA, 13 nt, Human
cugcccugugagu

SEQ ID NO: 1183978 - RNA, 15 nt, Human
cugcccugugggccc

SEQ ID NO: 1183979 - RNA, 16 nt, Human
cugcccugugggcccc

SEQ ID NO: 1183980 - RNA, 18 nt, Human
cugcccugugggccccca

SEQ ID NO: 1183981 - RNA, 15 nt, Human
cugccaaugggagcu

SEQ ID NO: 1183982 - RNA, 17 nt, Human
cugccaaugggagcuca

SEQ ID NO: 1183983 - RNA, 13 nt, Human
cugcauuggcuuu

SEQ ID NO: 1183984 - RNA, 20 nt, Human
cugcauuuaaaagauacagu

SEQ ID NO: 1183985 - RNA, 22 nt, Human
cugcauuuaaaagauacaguua

SEQ ID NO: 1183986 - RNA, 13 nt, Human
cugcauguuacau

SEQ ID NO: 1183987 - RNA, 15 nt, Human
cugcauguuugugau

SEQ ID NO: 1183988 - RNA, 17 nt, Human
cugagacucgcgacaau

SEQ ID NO: 1183989 - RNA, 19 nt, Human
cugagacucgcgacaaugc

SEQ ID NO: 1183990 - RNA, 20 nt, Human
cugagacucgcgacaaugca

SEQ ID NO: 1183991 - RNA, 19 nt, Human
cugcccugugggcccccaa

SEQ ID NO: 1183992 - RNA, 15 nt, Human
cugccucgaacuggc

SEQ ID NO: 1183993 - RNA, 17 nt, Human
cugccucgaacuggcug

SEQ ID NO: 1183994 - RNA, 18 nt, Human
cugccucgaacuggcugc

SEQ ID NO: 1183995 - RNA, 19 nt, Human
cugccucgaacuggcugca

SEQ ID NO: 1183996 - RNA, 23 nt, Human
cugccugggaucccucauccuca

SEQ ID NO: 1183997 - RNA, 14 nt, Human
cugccuguucagcu

SEQ ID NO: 1183998 - RNA, 15 nt, Human
cugccuguucagcuc

SEQ ID NO: 1183999 - RNA, 16 nt, Human
cugccuguugggccag

SEQ ID NO: 1184000 - RNA, 18 nt, Human
cugccuguugggccagga

SEQ ID NO: 1184001 - RNA, 19 nt, Human
cugccuguugggccaggag

SEQ ID NO: 1184002 - RNA, 20 nt, Human
cugccuguugggccaggagc

SEQ ID NO: 1184003 - RNA, 16 nt, Human
cugcuaauuccccaga

SEQ ID NO: 1184004 - RNA, 15 nt, Human
cugcuacagagcaga

SEQ ID NO: 1184005 - RNA, 15 nt, Human
cugcugacagacaca

SEQ ID NO: 1184006 - RNA, 18 nt, Human
cugcugacagacacaggc

SEQ ID NO: 1184007 - RNA, 19 nt, Human
cugcugacagacacaggcc

SEQ ID NO: 1184008 - RNA, 20 nt, Human
cugcugacagacacaggccc

SEQ ID NO: 1184009 - RNA, 21 nt, Human
cugcugacagacacaggcccg

SEQ ID NO: 1184010 - RNA, 23 nt, Human
cugcugacagacacaggcccggc

SEQ ID NO: 1184011 - RNA, 11 nt, Human
cugcugacagu

SEQ ID NO: 1184012 - RNA, 13 nt, Human
cugcuuaacuuca

SEQ ID NO: 1184013 - RNA, 15 nt, Human
cugcuuaacuucaca

SEQ ID NO: 1184014 - RNA, 17 nt, Human
cugcuuaacuucacaua

SEQ ID NO: 1184015 - RNA, 20 nt, Human
cugcuuaacuucacauauug

SEQ ID NO: 1184016 - RNA, 13 nt, Human
cugcuucagccuc

SEQ ID NO: 1184017 - RNA, 14 nt, Human
cugcuucagccucc

SEQ ID NO: 1184018 - RNA, 16 nt, Human
cugcuucagccucccg

SEQ ID NO: 1184019 - RNA, 22 nt, Human
cugcuuuuuaaagaaugcucuu

SEQ ID NO: 1184020 - RNA, 23 nt, Human
cugcuucagccucccgaguagcu

SEQ ID NO: 1184021 - RNA, 16 nt, Human
cuggaaauauuaagaa

SEQ ID NO: 1184022 - RNA, 21 nt, Human
cuggaaaucaggguuaguauu

SEQ ID NO: 1184023 - RNA, 17 nt, Human
cuggaacacuaaugagg

SEQ ID NO: 1184024 - RNA, 13 nt, Human
cugucgcccaguc

SEQ ID NO: 1184025 - RNA, 19 nt, Human
cugucgagaaacagccugu

SEQ ID NO: 1184026 - RNA, 15 nt, Human
cugucgcccagucug

SEQ ID NO: 1184027 - RNA, 15 nt, Human
cugugaagagaacca

SEQ ID NO: 1184028 - RNA, 16 nt, Human
cugugagaugcuagaa

SEQ ID NO: 1184029 - RNA, 21 nt, Human
cugugagaugcuagaacuccc

SEQ ID NO: 1184030 - RNA, 19 nt, Human
cugugcuccauggcugcca

SEQ ID NO: 1184031 - RNA, 14 nt, Human
cugugcucuggaca

SEQ ID NO: 1184032 - RNA, 15 nt, Human
cugugcucuggacag

SEQ ID NO: 1184033 - RNA, 20 nt, Human
cugucauuugagcagggcuc

SEQ ID NO: 1184034 - RNA, 17 nt, Human
cugucauuugagcaggg

SEQ ID NO: 1184035 - RNA, 18 nt, Human
cugucauuugagcagggc

SEQ ID NO: 1184036 - RNA, 18 nt, Human
cugucagccauuccuguu

SEQ ID NO: 1184037 - RNA, 21 nt, Human
cuguaggaagguuaauguuca

SEQ ID NO: 1184038 - RNA, 14 nt, Human
cuggguucacugca

SEQ ID NO: 1184039 - RNA, 15 nt, Human
cuggguucacugcaa

SEQ ID NO: 1184040 - RNA, 14 nt, Human
cuggguucuaccca

SEQ ID NO: 1184041 - RNA, 15 nt, Human
cuggugacuuuccuc

SEQ ID NO: 1184042 - RNA, 20 nt, Human
cuggugacuuuccucuuugg

SEQ ID NO: 1184043 - RNA, 21 nt, Human
cuggugacuuuccucuuuggu

SEQ ID NO: 1184044 - RNA, 23 nt, Human
cuggguggcaccagcagccugga

SEQ ID NO: 1184045 - RNA, 16 nt, Human
cuggguguggcgcagc

SEQ ID NO: 1184046 - RNA, 17 nt, Human
cuggguguggcgcagca

SEQ ID NO: 1184047 - RNA, 23 nt, Human
cuggugacuuuccucuuuggucu

SEQ ID NO: 1184048 - RNA, 18 nt, Human
cugggcagaaggaagacu

SEQ ID NO: 1184049 - RNA, 12 nt, Human
cugggcagagga

SEQ ID NO: 1184050 - RNA, 17 nt, Human
cugggcagaaggaagac

SEQ ID NO: 1184051 - RNA, 17 nt, Human
cuggccccucagggucc

SEQ ID NO: 1184052 - RNA, 18 nt, Human
cuggccccucaggguccc

SEQ ID NO: 1184053 - RNA, 20 nt, Human
cuggccccucagggucccug

SEQ ID NO: 1184054 - RNA, 21 nt, Human
cuggccccucagggucccugg

SEQ ID NO: 1184055 - RNA, 10 nt, Human
cugggacagg

SEQ ID NO: 1184056 - RNA, 12 nt, Human
cugggacacagu

SEQ ID NO: 1184057 - RNA, 13 nt, Human
cugggacacaguu

SEQ ID NO: 1184058 - RNA, 12 nt, Human
cuggcagcucag

SEQ ID NO: 1184059 - RNA, 13 nt, Human
cuggcagcucaga

SEQ ID NO: 1184060 - RNA, 14 nt, Human
cuggcagcucagag

SEQ ID NO: 1184061 - RNA, 15 nt, Human
cuggcagcucagaga

SEQ ID NO: 1184062 - RNA, 13 nt, Human
cuggccccucagg

SEQ ID NO: 1184063 - RNA, 16 nt, Human
cuuuugccguuauuaa

SEQ ID NO: 1184064 - RNA, 23 nt, Human
cuuuugcccacacuugggagcaa

SEQ ID NO: 1184065 - RNA, 18 nt, Human
cuuuugucuaugggacuc

SEQ ID NO: 1184066 - RNA, 12 nt, Human
cuuuugugcauu

SEQ ID NO: 1184067 - RNA, 13 nt, Human
cuuuugugcauua

SEQ ID NO: 1184068 - RNA, 21 nt, Human
gaaaauggaagacagcucuua

SEQ ID NO: 1184069 - RNA, 18 nt, Human
gaaaagaaaaaugagccu

SEQ ID NO: 1184070 - RNA, 14 nt, Human
gaaaaacugauuuu

SEQ ID NO: 1184071 - RNA, 19 nt, Human
gaaaauggacguguuauga

SEQ ID NO: 1184072 - RNA, 23 nt, Human
gaaaauggacguguuaugacucc

SEQ ID NO: 1184073 - RNA, 15 nt, Human
gaaaauguaugugua

SEQ ID NO: 1184074 - RNA, 14 nt, Human
gaaaauuuuaaaaa

SEQ ID NO: 1184075 - RNA, 22 nt, Human
gaaagggacuuggaagcuccgc

SEQ ID NO: 1184076 - RNA, 20 nt, Human
gaaagggacgcuacccggga

SEQ ID NO: 1184077 - RNA, 19 nt, Human
gaaagggacuuggaagcuc

SEQ ID NO: 1184078 - RNA, 17 nt, Human
gaaauauuuauuuuaau

SEQ ID NO: 1184079 - RNA, 18 nt, Human
gaaauauuuauuuuaaua

SEQ ID NO: 1184080 - RNA, 22 nt, Human
gaaauauuuauuuuaauaaugu

SEQ ID NO: 1184081 - RNA, 22 nt, Human
gaaaggcuccaggagcagccac

SEQ ID NO: 1184082 - RNA, 21 nt, Human
gaaaggcuccaggagcagcca

SEQ ID NO: 1184083 - RNA, 16 nt, Human
cuuucuagccagagga

SEQ ID NO: 1184084 - RNA, 15 nt, Human
cuuucuagccagagg

SEQ ID NO: 1184085 - RNA, 13 nt, Human
cuuuuauaaacuu

SEQ ID NO: 1184086 - RNA, 14 nt, Human
cuuuuauaaacuuu

SEQ ID NO: 1184087 - RNA, 23 nt, Human
cuuucagccaagaauucuuaaau

SEQ ID NO: 1184088 - RNA, 22 nt, Human
cuuuccugaggcugggcucccu

SEQ ID NO: 1184089 - RNA, 17 nt, Human
cuuccugcaacaccuug

SEQ ID NO: 1184090 - RNA, 15 nt, Human
cuucugccauauucu

SEQ ID NO: 1184091 - RNA, 21 nt, Human
cuucugacccaugcugcccug

SEQ ID NO: 1184092 - RNA, 22 nt, Human
cuucugacccaugcugcccugu

SEQ ID NO: 1184093 - RNA, 23 nt, Human
cuucugacccaugcugcccugug

SEQ ID NO: 1184094 - RNA, 19 nt, Human
cuugaauuguaaggaauga

SEQ ID NO: 1184095 - RNA, 14 nt, Human
cuugacagggcaca

SEQ ID NO: 1184096 - RNA, 15 nt, Human
cuugacagggcacac

SEQ ID NO: 1184097 - RNA, 20 nt, Human
cuugacagggcacaccgggc

SEQ ID NO: 1184098 - RNA, 17 nt, Human
cuugauauccucuuuga

SEQ ID NO: 1184099 - RNA, 12 nt, Human
cuugaugaagaa

SEQ ID NO: 1184100 - RNA, 13 nt, Human
cuugaugaagaag

SEQ ID NO: 1184101 - RNA, 12 nt, Human
cuuggcgcugcc

SEQ ID NO: 1184102 - RNA, 14 nt, Human
cuuggcgcugcccc

SEQ ID NO: 1184103 - RNA, 17 nt, Human
cuuggcgcugccccugg

SEQ ID NO: 1184104 - RNA, 20 nt, Human
cuuggcgcugccccuggcag

SEQ ID NO: 1184105 - RNA, 11 nt, Human
cuucccaccuc

SEQ ID NO: 1184106 - RNA, 21 nt, Human
cuucccaccucucucacuccu

SEQ ID NO: 1184107 - RNA, 23 nt, Human
cuucccaccucucucacuccuug

SEQ ID NO: 1184108 - RNA, 15 nt, Human
cuucacuguaaaaua

SEQ ID NO: 1184109 - RNA, 18 nt, Human
cuucagagacuccugcag

SEQ ID NO: 1184110 - RNA, 19 nt, Human
cuucagagacuccugcagg

SEQ ID NO: 1184111 - RNA, 20 nt, Human
cuucagagacuccugcaggc

SEQ ID NO: 1184112 - RNA, 21 nt, Human
cuuccagugaggcucugcccu

SEQ ID NO: 1184113 - RNA, 22 nt, Human
cuuccagugaggcucugcccuu

SEQ ID NO: 1184114 - RNA, 23 nt, Human
cuuccagugaggcucugcccuug

SEQ ID NO: 1184115 - RNA, 13 nt, Human
cuuauggaacacu

SEQ ID NO: 1184116 - RNA, 16 nt, Human
cuuauggaacacucug

SEQ ID NO: 1184117 - RNA, 17 nt, Human
cuuauggaacacucuga

SEQ ID NO: 1184118 - RNA, 19 nt, Human
cuuauggaacacucugaga

SEQ ID NO: 1184119 - RNA, 20 nt, Human
cuuauggaacacucugagac

SEQ ID NO: 1184120 - RNA, 21 nt, Human
cuuauggaacacucugagacu

SEQ ID NO: 1184121 - RNA, 12 nt, Human
cuuauugcccac

SEQ ID NO: 1184122 - RNA, 21 nt, Human
cuucaccuuuguccccaccgc

SEQ ID NO: 1184123 - RNA, 22 nt, Human
cuucaccuuuguccccaccgca

SEQ ID NO: 1184124 - RNA, 15 nt, Human
cuucacggaagagcc

SEQ ID NO: 1184125 - RNA, 19 nt, Human
cuucacggaagagccuugc

SEQ ID NO: 1184126 - RNA, 12 nt, Human
cugugcugaguc

SEQ ID NO: 1184127 - RNA, 14 nt, Human
cugugcugagucug

SEQ ID NO: 1184128 - RNA, 19 nt, Human
cugugcugagucugaaggc

SEQ ID NO: 1184129 - RNA, 23 nt, Human
gcaggcucucaggccagcugcuu

SEQ ID NO: 1184130 - RNA, 17 nt, Human
gcagcugcgguccaccc

SEQ ID NO: 1184131 - RNA, 19 nt, Human
gcagcugcgguccacccag

SEQ ID NO: 1184132 - RNA, 20 nt, Human
gcaggcucucaggccagcug

SEQ ID NO: 1184133 - RNA, 22 nt, Human
gcaggcucucaggccagcugcu

SEQ ID NO: 1184134 - RNA, 13 nt, Human
gcagggaaacagc

SEQ ID NO: 1184135 - RNA, 14 nt, Human
gcauacguacacau

SEQ ID NO: 1184136 - RNA, 17 nt, Human
gcauaccacuuuuguuc

SEQ ID NO: 1184137 - RNA, 20 nt, Human
gcauaccacuuuuguucuug

SEQ ID NO: 1184138 - RNA, 16 nt, Human
gcagccacauuccuga

SEQ ID NO: 1184139 - RNA, 14 nt, Human
gcagccacuauugu

SEQ ID NO: 1184140 - RNA, 12 nt, Human
gcagccaggcca

SEQ ID NO: 1184141 - RNA, 13 nt, Human
gcagccaggccac

SEQ ID NO: 1184142 - RNA, 14 nt, Human
gcagccaggccaca

SEQ ID NO: 1184143 - RNA, 16 nt, Human
gcagccaggccacaag

SEQ ID NO: 1184144 - RNA, 17 nt, Human
gcagccccauucugccu

SEQ ID NO: 1184145 - RNA, 22 nt, Human
gcacaagcugcacccucaggca

SEQ ID NO: 1184146 - RNA, 19 nt, Human
gcacaucagcacgauuucu

SEQ ID NO: 1184147 - RNA, 20 nt, Human
gcacaucagcacgauuucug

SEQ ID NO: 1184148 - RNA, 21 nt, Human
gcacaucagcacgauuucugu

SEQ ID NO: 1184149 - RNA, 13 nt, Human
gcacaugccucuc

SEQ ID NO: 1184150 - RNA, 14 nt, Human
gcacaugccucucu

SEQ ID NO: 1184151 - RNA, 17 nt, Human
gcacaugccucucucag

SEQ ID NO: 1184152 - RNA, 18 nt, Human
gcacaugccucucucagg

SEQ ID NO: 1184153 - RNA, 19 nt, Human
gcacaugccucucucaggc

SEQ ID NO: 1184154 - RNA, 20 nt, Human
gcacaugccucucucaggcc

SEQ ID NO: 1184155 - RNA, 21 nt, Human
gcacaugccucucucaggcca

SEQ ID NO: 1184156 - RNA, 22 nt, Human
gcacaugccucucucaggccaa

SEQ ID NO: 1184157 - RNA, 19 nt, Human
gcaccggcuggccuggccc

SEQ ID NO: 1184158 - RNA, 21 nt, Human
gcaccggcuggccuggccccu

SEQ ID NO: 1184159 - RNA, 23 nt, Human
gcaccggcuggccuggccccuca

SEQ ID NO: 1184160 - RNA, 14 nt, Human
gcaccgggccacag

SEQ ID NO: 1184161 - RNA, 13 nt, Human
gcaagugagagcu

SEQ ID NO: 1184162 - RNA, 15 nt, Human
gcaagugagagcugg

SEQ ID NO: 1184163 - RNA, 23 nt, Human
gcaauaaggggagaguaacccug

SEQ ID NO: 1184164 - RNA, 22 nt, Human
gcacaagcuccaagcucccagg

SEQ ID NO: 1184165 - RNA, 23 nt, Human
gcacaagcuccaagcucccaggc

SEQ ID NO: 1184166 - RNA, 14 nt, Human
gcacaagcugcacc

SEQ ID NO: 1184167 - RNA, 19 nt, Human
gcagagcaccuuagacagu

SEQ ID NO: 1184168 - RNA, 22 nt, Human
gcagagcaccuuagacaguccc

SEQ ID NO: 1184169 - RNA, 23 nt, Human
gcagagcaccuuagacagucccu

SEQ ID NO: 1184170 - RNA, 24 nt, Human
gcagagcaccuuagacagucccug

SEQ ID NO: 1184171 - RNA, 12 nt, Human
gcagagcagaga

SEQ ID NO: 1184172 - RNA, 14 nt, Human
gcagagcagagacc

SEQ ID NO: 1184173 - RNA, 15 nt, Human
gcagagcagagacca

SEQ ID NO: 1184174 - RNA, 19 nt, Human
gcagagcagagaccauccc

SEQ ID NO: 1184175 - RNA, 20 nt, Human
gcagagcagagaccaucccu

SEQ ID NO: 1184176 - RNA, 12 nt, Human
gcacugacauug

SEQ ID NO: 1184177 - RNA, 14 nt, Human
gauuaccagggacu

SEQ ID NO: 1184178 - RNA, 18 nt, Human
gaucucuugagccuggga

SEQ ID NO: 1184179 - RNA, 17 nt, Human
gaucucuugagccuggg

SEQ ID NO: 1184180 - RNA, 12 nt, Human
gaucucuugagc

SEQ ID NO: 1184181 - RNA, 16 nt, Human
gaucucuugagccugg

SEQ ID NO: 1184182 - RNA, 16 nt, Human
gauauuuugcuuugug

SEQ ID NO: 1184183 - RNA, 15 nt, Human
gauauuuuuuucuuu

SEQ ID NO: 1184184 - RNA, 17 nt, Human
gauauuuuuuucuuuuc

SEQ ID NO: 1184185 - RNA, 15 nt, Human
gaucucuaacuucac

SEQ ID NO: 1184186 - RNA, 20 nt, Human
gaugaucuuugcagacaggc

SEQ ID NO: 1184187 - RNA, 21 nt, Human
gaugaucuuugcagacaggca

SEQ ID NO: 1184188 - RNA, 21 nt, Human
gaugaugaaaugaggucagag

SEQ ID NO: 1184189 - RNA, 13 nt, Human
gauacccauccca

SEQ ID NO: 1184190 - RNA, 14 nt, Human
gauacccaucccau

SEQ ID NO: 1184191 - RNA, 11 nt, Human
gauacuacagu

SEQ ID NO: 1184192 - RNA, 16 nt, Human
gauacuacaguuuguu

SEQ ID NO: 1184193 - RNA, 20 nt, Human
gauauguaccuaacgaagua

SEQ ID NO: 1184194 - RNA, 13 nt, Human
gaggucuguucuu

SEQ ID NO: 1184195 - RNA, 14 nt, Human
gaggucuguucuuu

SEQ ID NO: 1184196 - RNA, 11 nt, Human
gaggugggagg

SEQ ID NO: 1184197 - RNA, 12 nt, Human
gaggugggaucc

SEQ ID NO: 1184198 - RNA, 13 nt, Human
gaggugggauccu

SEQ ID NO: 1184199 - RNA, 13 nt, Human
gagucaccaagcc

SEQ ID NO: 1184200 - RNA, 14 nt, Human
gagucaccaagccc

SEQ ID NO: 1184201 - RNA, 15 nt, Human
gagucaccaagccca

SEQ ID NO: 1184202 - RNA, 16 nt, Human
gagucccaccuuggcu

SEQ ID NO: 1184203 - RNA, 20 nt, Human
gagucccaccuuggcugcag

SEQ ID NO: 1184204 - RNA, 21 nt, Human
gagucccaccuuggcugcagg

SEQ ID NO: 1184205 - RNA, 12 nt, Human
gagugagcuggu

SEQ ID NO: 1184206 - RNA, 11 nt, Human
gagugcaguga

SEQ ID NO: 1184207 - RNA, 12 nt, Human
gagugcagugag

SEQ ID NO: 1184208 - RNA, 13 nt, Human
gagugcagugagc

SEQ ID NO: 1184209 - RNA, 16 nt, Human
gaguuguuacauuuuu

SEQ ID NO: 1184210 - RNA, 20 nt, Human
gaguuguuacauuuuuaagu

SEQ ID NO: 1184211 - RNA, 22 nt, Human
gaguuguuacauuuuuaagugc

SEQ ID NO: 1184212 - RNA, 16 nt, Human
gaguuuagcuggaaaa

SEQ ID NO: 1184213 - RNA, 20 nt, Human
gaguuugggguaugggagag

SEQ ID NO: 1184214 - RNA, 21 nt, Human
gagacccugucucaaaaaaag

SEQ ID NO: 1184215 - RNA, 14 nt, Human
gagaaucacuugaa

SEQ ID NO: 1184216 - RNA, 15 nt, Human
gagaaucacuugaac

SEQ ID NO: 1184217 - RNA, 12 nt, Human
gagaaggaagcc

SEQ ID NO: 1184218 - RNA, 13 nt, Human
gagaagcggcugg

SEQ ID NO: 1184219 - RNA, 15 nt, Human
gagaagcggcuggca

SEQ ID NO: 1184220 - RNA, 16 nt, Human
gagaagcggcuggcag

SEQ ID NO: 1184221 - RNA, 23 nt, Human
gacuuuucuuucagccaagaauu

SEQ ID NO: 1184222 - RNA, 21 nt, Human
gacuuuucuuuguggcuuccu

SEQ ID NO: 1184223 - RNA, 22 nt, Human
gacuaucuaaauguugaaagau

SEQ ID NO: 1184224 - RNA, 12 nt, Human
gacucugucuca

SEQ ID NO: 1184225 - RNA, 19 nt, Human
gacucugucucaaaaaaac

SEQ ID NO: 1184226 - RNA, 16 nt, Human
gacucuuaagaagacu

SEQ ID NO: 1184227 - RNA, 17 nt, Human
gacucuuaagaagacug

SEQ ID NO: 1184228 - RNA, 18 nt, Human
gacucuuaagaagacugc

SEQ ID NO: 1184229 - RNA, 18 nt, Human
gagcugggugucaagagg

SEQ ID NO: 1184230 - RNA, 14 nt, Human
gagccuuccagggg

SEQ ID NO: 1184231 - RNA, 15 nt, Human
gagccuuccaggggu

SEQ ID NO: 1184232 - RNA, 16 nt, Human
gagccuuccaggggug

SEQ ID NO: 1184233 - RNA, 17 nt, Human
gagccuuccaggggugg

SEQ ID NO: 1184234 - RNA, 22 nt, Human
gagccuugaacuuugaccucug

SEQ ID NO: 1184235 - RNA, 13 nt, Human
gagccccgaggcc

SEQ ID NO: 1184236 - RNA, 18 nt, Human
gagcggagaaaggaaggg

SEQ ID NO: 1184237 - RNA, 21 nt, Human
gagcggagaaaggaagggcug

SEQ ID NO: 1184238 - RNA, 13 nt, Human
gagcgacagugag

SEQ ID NO: 1184239 - RNA, 21 nt, Human
gagcugccuguucagcuccag

SEQ ID NO: 1184240 - RNA, 22 nt, Human
gagcugccuguucagcuccagc

SEQ ID NO: 1184241 - RNA, 14 nt, Human
gagcagggcucagc

SEQ ID NO: 1184242 - RNA, 21 nt, Human
gagcagggcucagcggggaca

SEQ ID NO: 1184243 - RNA, 12 nt, Human
gagcaucaggcc

SEQ ID NO: 1184244 - RNA, 22 nt, Human
gagcaugccuggauggggcugc

SEQ ID NO: 1184245 - RNA, 13 nt, Human
gagcaucaggcca

SEQ ID NO: 1184246 - RNA, 22 nt, Human
gagaggcauccaguaucuugaa

SEQ ID NO: 1184247 - RNA, 21 nt, Human
gagaugaugccaugggcccuc

SEQ ID NO: 1184248 - RNA, 15 nt, Human
gagacuccugcaggc

SEQ ID NO: 1184249 - RNA, 16 nt, Human
gagacuccugcaggca

SEQ ID NO: 1184250 - RNA, 17 nt, Human
gagacuccugcaggcag

SEQ ID NO: 1184251 - RNA, 18 nt, Human
gagacuccugcaggcagc

SEQ ID NO: 1184252 - RNA, 14 nt, Human
gagaggcauccagu

SEQ ID NO: 1184253 - RNA, 18 nt, Human
gagauugcaccacugcac

SEQ ID NO: 1184254 - RNA, 21 nt, Human
gagauugcaccacugcacucc

SEQ ID NO: 1184255 - RNA, 13 nt, Human
gagauuuacaacu

SEQ ID NO: 1184256 - RNA, 11 nt, Human
gacagcuccuu

SEQ ID NO: 1184257 - RNA, 20 nt, Human
gacaggguuuugccauguug

SEQ ID NO: 1184258 - RNA, 22 nt, Human
gacaggguuuugccauguuggc

SEQ ID NO: 1184259 - RNA, 14 nt, Human
gacagugaaagaaa

SEQ ID NO: 1184260 - RNA, 17 nt, Human
gacagucaccucaugga

SEQ ID NO: 1184261 - RNA, 13 nt, Human
gacacugaugggc

SEQ ID NO: 1184262 - RNA, 15 nt, Human
gacacugaugggcaa

SEQ ID NO: 1184263 - RNA, 16 nt, Human
gacacuuaaaaauggu

SEQ ID NO: 1184264 - RNA, 12 nt, Human
gacagacacagg

SEQ ID NO: 1184265 - RNA, 21 nt, Human
gacagcccgggcucugccucc

SEQ ID NO: 1184266 - RNA, 22 nt, Human
gacagcccgggcucugccuccc

SEQ ID NO: 1184267 - RNA, 23 nt, Human
gacagcccgggcucugccuccca

SEQ ID NO: 1184268 - RNA, 19 nt, Human
gaauuuuggcugugucucc

SEQ ID NO: 1184269 - RNA, 11 nt, Human
gaauuaguuuu

SEQ ID NO: 1184270 - RNA, 14 nt, Human
gacacacagcucug

SEQ ID NO: 1184271 - RNA, 15 nt, Human
gacacacagcucugu

SEQ ID NO: 1184272 - RNA, 17 nt, Human
gacacacagcucugucc

SEQ ID NO: 1184273 - RNA, 18 nt, Human
gacacacagcucuguccu

SEQ ID NO: 1184274 - RNA, 19 nt, Human
gacacacagcucuguccug

SEQ ID NO: 1184275 - RNA, 23 nt, Human
gaauuuuggcugugucucccuuc

SEQ ID NO: 1184276 - RNA, 20 nt, Human
gaauuuugugcccccaugua

SEQ ID NO: 1184277 - RNA, 21 nt, Human
gaauuuugugcccccauguaa

SEQ ID NO: 1184278 - RNA, 13 nt, Human
gacacacugaaga

SEQ ID NO: 1184279 - RNA, 21 nt, Human
gacacacagcucuguccuggg

SEQ ID NO: 1184280 - RNA, 12 nt, Human
gacacacaugaa

SEQ ID NO: 1184281 - RNA, 14 nt, Human
gacacacugaagaa

SEQ ID NO: 1184282 - RNA, 18 nt, Human
gaagucuuuguacagaca

SEQ ID NO: 1184283 - RNA, 19 nt, Human
gaagucuuuguacagacaa

SEQ ID NO: 1184284 - RNA, 20 nt, Human
gaagucuuuguacagacaac

SEQ ID NO: 1184285 - RNA, 19 nt, Human
gaagcuccgcuuucuaccc

SEQ ID NO: 1184286 - RNA, 16 nt, Human
gaaggcucgagcaugc

SEQ ID NO: 1184287 - RNA, 17 nt, Human
gaaggcucgagcaugcc

SEQ ID NO: 1184288 - RNA, 19 nt, Human
gaaggcucgagcaugccug

SEQ ID NO: 1184289 - RNA, 14 nt, Human
gaagcucagggccu

SEQ ID NO: 1184290 - RNA, 15 nt, Human
gaagcucagggccug

SEQ ID NO: 1184291 - RNA, 16 nt, Human
gaagcucagggccugg

SEQ ID NO: 1184292 - RNA, 17 nt, Human
gaagcucagggccuggc

SEQ ID NO: 1184293 - RNA, 18 nt, Human
gaagcucagggccuggcu

SEQ ID NO: 1184294 - RNA, 19 nt, Human
gaagcucagggccuggcuc

SEQ ID NO: 1184295 - RNA, 20 nt, Human
gaagcucagggccuggcuca

SEQ ID NO: 1184296 - RNA, 21 nt, Human
gaagcucagggccuggcucag

SEQ ID NO: 1184297 - RNA, 23 nt, Human
gaagcucagggccuggcucaggu

SEQ ID NO: 1184298 - RNA, 11 nt, Human
gaaugaauguc

SEQ ID NO: 1184299 - RNA, 14 nt, Human
gaaugaaugucagu

SEQ ID NO: 1184300 - RNA, 18 nt, Human
gaaugaaugucaguguga

SEQ ID NO: 1184301 - RNA, 22 nt, Human
gaaugaaugucagugugacuga

SEQ ID NO: 1184302 - RNA, 20 nt, Human
gaaugagagacacacugaag

SEQ ID NO: 1184303 - RNA, 22 nt, Human
gaaugagagacacacugaagaa

SEQ ID NO: 1184304 - RNA, 23 nt, Human
gaaugagagacacacugaagaag

SEQ ID NO: 1184305 - RNA, 21 nt, Human
gggacagcuccuucuguccua

SEQ ID NO: 1184306 - RNA, 20 nt, Human
gggacauuugcucauggaau

SEQ ID NO: 1184307 - RNA, 21 nt, Human
gggacauuugcucauggaauu

SEQ ID NO: 1184308 - RNA, 13 nt, Human
gggaaggauacaa

SEQ ID NO: 1184309 - RNA, 16 nt, Human
gggaaggauacaaaag

SEQ ID NO: 1184310 - RNA, 13 nt, Human
gggacagaggggg

SEQ ID NO: 1184311 - RNA, 22 nt, Human
gggacagaggggguggccuccc

SEQ ID NO: 1184312 - RNA, 23 nt, Human
gggacagaggggguggccuccca

SEQ ID NO: 1184313 - RNA, 14 nt, Human
aaaaaucucaaauu

SEQ ID NO: 1184314 - RNA, 17 nt, Human
aaaaaucucaaauuucu

SEQ ID NO: 1184315 - RNA, 22 nt, Human
aaaacugcugacuguuuucucu

SEQ ID NO: 1184316 - RNA, 23 nt, Human
aaaacugcugacuguuuucucuu

SEQ ID NO: 1184317 - RNA, 13 nt, Human
aaaagaugcuucu

SEQ ID NO: 1184318 - RNA, 15 nt, Human
gggauuacaggugug

SEQ ID NO: 1184319 - RNA, 16 nt, Human
gggauuguaaaauggu

SEQ ID NO: 1184320 - RNA, 17 nt, Human
gggauuguaaaauggug

SEQ ID NO: 1184321 - RNA, 23 nt, Human
gggcagagcagagaccaucccug

SEQ ID NO: 1184322 - RNA, 17 nt, Human
gggcagagcagagacca

SEQ ID NO: 1184323 - RNA, 22 nt, Human
gggcagagcagagaccaucccu

SEQ ID NO: 1184324 - RNA, 16 nt, Human
gggcaacccccagccu

SEQ ID NO: 1184325 - RNA, 18 nt, Human
gggcaacccccagccugc

SEQ ID NO: 1184326 - RNA, 20 nt, Human
gggcaacccccagccugcua

SEQ ID NO: 1184327 - RNA, 16 nt, Human
gggcagagcagagacc

SEQ ID NO: 1184328 - RNA, 19 nt, Human
aaaagguaugcaaucaaau

SEQ ID NO: 1184329 - RNA, 14 nt, Human
gggagggcuccaga

SEQ ID NO: 1184330 - RNA, 15 nt, Human
gggagggcuccagac

SEQ ID NO: 1184331 - RNA, 17 nt, Human
gggagggcuccagacac

SEQ ID NO: 1184332 - RNA, 18 nt, Human
gggagggcuccagacaca

SEQ ID NO: 1184333 - RNA, 17 nt, Human
gggaggucgaggcagga

SEQ ID NO: 1184334 - RNA, 18 nt, Human
gggaggucgaggcaggag

SEQ ID NO: 1184335 - RNA, 19 nt, Human
gggaggucgaggcaggagg

SEQ ID NO: 1184336 - RNA, 11 nt, Human
gggccaggagc

SEQ ID NO: 1184337 - RNA, 12 nt, Human
gggccaggagcc

SEQ ID NO: 1184338 - RNA, 14 nt, Human
gggccagugcucca

SEQ ID NO: 1184339 - RNA, 19 nt, Human
aaaaguauguuagugcaaa

SEQ ID NO: 1184340 - RNA, 14 nt, Human
aaaaugagccuggc

SEQ ID NO: 1184341 - RNA, 21 nt, Human
aaaaugagccuggcaagaaug

SEQ ID NO: 1184342 - RNA, 15 nt, Human
gggccuccugugugu

SEQ ID NO: 1184343 - RNA, 13 nt, Human
gggccuccugugu

SEQ ID NO: 1184344 - RNA, 20 nt, Human
gggccucuuaugggcugggu

SEQ ID NO: 1184345 - RNA, 21 nt, Human
gggcggugagaggggaacaga

SEQ ID NO: 1184346 - RNA, 15 nt, Human
gggcgggaggauguu

SEQ ID NO: 1184347 - RNA, 14 nt, Human
gggccaguuggucc

SEQ ID NO: 1184348 - RNA, 18 nt, Human
gggccaguuggucccccu

SEQ ID NO: 1184349 - RNA, 22 nt, Human
gggccaguuggucccccuucca

SEQ ID NO: 1184350 - RNA, 23 nt, Human
gggccaguuggucccccuuccau

SEQ ID NO: 1184351 - RNA, 18 nt, Human
gggccagugcuccagcca

SEQ ID NO: 1184352 - RNA, 12 nt, Human
gggcugggcaga

SEQ ID NO: 1184353 - RNA, 20 nt, Human
gggcuggguucuacccaggu

SEQ ID NO: 1184354 - RNA, 10 nt, Human
gggcucagca

SEQ ID NO: 1184355 - RNA, 18 nt, Human
gggcucagcaaaagaugc

SEQ ID NO: 1184356 - RNA, 18 nt, Human
gggcugcaugcgggcuuc

SEQ ID NO: 1184357 - RNA, 21 nt, Human
gggcugcaugcgggcuuccuc

SEQ ID NO: 1184358 - RNA, 22 nt, Human
gggcuggguucuacccaggugc

SEQ ID NO: 1184359 - RNA, 15 nt, Human
aaaaugugauaugua

SEQ ID NO: 1184360 - RNA, 12 nt, Human
ggggacagcucc

SEQ ID NO: 1184361 - RNA, 14 nt, Human
ggggacagcuccuu

SEQ ID NO: 1184362 - RNA, 20 nt, Human
ggggacagcuccuucugucc

SEQ ID NO: 1184363 - RNA, 16 nt, Human
aaacaugcuacacacu

SEQ ID NO: 1184364 - RNA, 20 nt, Human
aaacaagcacuaaacaaaga

SEQ ID NO: 1184365 - RNA, 16 nt, Human
aaacacauuuuucuua

SEQ ID NO: 1184366 - RNA, 20 nt, Human
aaacaagaccacguuucuaa

SEQ ID NO: 1184367 - RNA, 17 nt, Human
ggguggaugccuggugg

SEQ ID NO: 1184368 - RNA, 15 nt, Human
ggguggcaccagcag

SEQ ID NO: 1184369 - RNA, 19 nt, Human
ggguggcaccagcagccug

SEQ ID NO: 1184370 - RNA, 20 nt, Human
ggguggggaccucaggccug

SEQ ID NO: 1184371 - RNA, 12 nt, Human
ggguggugaccu

SEQ ID NO: 1184372 - RNA, 17 nt, Human
ggguguggcgcagcaua

SEQ ID NO: 1184373 - RNA, 17 nt, Human
ggguuucuaaagcugcc

SEQ ID NO: 1184374 - RNA, 14 nt, Human
gguaacaggcagau

SEQ ID NO: 1184375 - RNA, 20 nt, Human
gguaacaggcagauacagga

SEQ ID NO: 1184376 - RNA, 18 nt, Human
gguaacuagggaagauaa

SEQ ID NO: 1184377 - RNA, 22 nt, Human
gguaugaucacggcucacugca

SEQ ID NO: 1184378 - RNA, 14 nt, Human
gguaugcaaucaaa

SEQ ID NO: 1184379 - RNA, 12 nt, Human
gguccacccagg

SEQ ID NO: 1184380 - RNA, 13 nt, Human
gguccacccagga

SEQ ID NO: 1184381 - RNA, 15 nt, Human
gguccacccaggagc

SEQ ID NO: 1184382 - RNA, 16 nt, Human
gguccacccaggagcc

SEQ ID NO: 1184383 - RNA, 17 nt, Human
gguccacccaggagccc

SEQ ID NO: 1184384 - RNA, 19 nt, Human
gguccacccaggagccccg

SEQ ID NO: 1184385 - RNA, 12 nt, Human
aaacuuuacuau

SEQ ID NO: 1184386 - RNA, 18 nt, Human
aaacuuuacuauggcccu

SEQ ID NO: 1184387 - RNA, 15 nt, Human
gguccauagagagca

SEQ ID NO: 1184388 - RNA, 22 nt, Human
aaacuuuaccuuuuuuauacau

SEQ ID NO: 1184389 - RNA, 17 nt, Human
aaagacuaucuaaaugu

SEQ ID NO: 1184390 - RNA, 16 nt, Human
aaagaaugauuaugaa

SEQ ID NO: 1184391 - RNA, 21 nt, Human
gguccugcugcaguugccagu

SEQ ID NO: 1184392 - RNA, 23 nt, Human
gguccugcugcaguugccaguca

SEQ ID NO: 1184393 - RNA, 13 nt, Human
aaagcaaaggaga

SEQ ID NO: 1184394 - RNA, 14 nt, Human
ggucggaaaacaug

SEQ ID NO: 1184395 - RNA, 17 nt, Human
ggucuacacugugcuga

SEQ ID NO: 1184396 - RNA, 13 nt, Human
ggucggaaaacau

SEQ ID NO: 1184397 - RNA, 18 nt, Human
ggugcaaugaccuuucaa

SEQ ID NO: 1184398 - RNA, 19 nt, Human
ggugcaaugaccuuucaau

SEQ ID NO: 1184399 - RNA, 20 nt, Human
ggugcaaugaccuuucaaua

SEQ ID NO: 1184400 - RNA, 21 nt, Human
ggucuugaacuccuggccuca

SEQ ID NO: 1184401 - RNA, 16 nt, Human
ggugcacaagcuccaa

SEQ ID NO: 1184402 - RNA, 14 nt, Human
gguggaugccuggu

SEQ ID NO: 1184403 - RNA, 21 nt, Human
gguggaugccugguggcagcu

SEQ ID NO: 1184404 - RNA, 16 nt, Human
aaagcagcguuucuau

SEQ ID NO: 1184405 - RNA, 18 nt, Human
aaagcagcguuucuauga

SEQ ID NO: 1184406 - RNA, 22 nt, Human
aaagcagcguuucuaugacaca

SEQ ID NO: 1184407 - RNA, 17 nt, Human
aaagcagggacuugaac

SEQ ID NO: 1184408 - RNA, 22 nt, Human
gguucccuuugacgccauccca

SEQ ID NO: 1184409 - RNA, 21 nt, Human
gguucccuuugacgccauccc

SEQ ID NO: 1184410 - RNA, 21 nt, Human
ggugugcggccuuuggcuuca

SEQ ID NO: 1184411 - RNA, 13 nt, Human
ggugugcucugau

SEQ ID NO: 1184412 - RNA, 12 nt, Human
gguguggaagag

SEQ ID NO: 1184413 - RNA, 12 nt, Human
gguguggagaag

SEQ ID NO: 1184414 - RNA, 18 nt, Human
gguucaggguuggccccu

SEQ ID NO: 1184415 - RNA, 21 nt, Human
gguucaggguuggccccugcc

SEQ ID NO: 1184416 - RNA, 22 nt, Human
gguucaggguuggccccugccc

SEQ ID NO: 1184417 - RNA, 12 nt, Human
gguuucagaaau

SEQ ID NO: 1184418 - RNA, 13 nt, Human
gguuucagaaaug

SEQ ID NO: 1184419 - RNA, 14 nt, Human
gguuucagaaaugu

SEQ ID NO: 1184420 - RNA, 15 nt, Human
gguuucagaaaugug

SEQ ID NO: 1184421 - RNA, 20 nt, Human
ggugggaggauugcuugagc

SEQ ID NO: 1184422 - RNA, 14 nt, Human
ggugggauccucca

SEQ ID NO: 1184423 - RNA, 15 nt, Human
ggugggauccuccag

SEQ ID NO: 1184424 - RNA, 19 nt, Human
ggugggauccuccaggugc

SEQ ID NO: 1184425 - RNA, 13 nt, Human
gguggggcagcuu

SEQ ID NO: 1184426 - RNA, 17 nt, Human
gguggggcagcuugagg

SEQ ID NO: 1184427 - RNA, 15 nt, Human
gguggggucacucug

SEQ ID NO: 1184428 - RNA, 23 nt, Human
gguggggucacucuggcagcuca

SEQ ID NO: 1184429 - RNA, 13 nt, Human
ggugucgggcaug

SEQ ID NO: 1184430 - RNA, 16 nt, Human
ggugucgggcaugaca

SEQ ID NO: 1184431 - RNA, 16 nt, Human
ggugugaccacugcag

SEQ ID NO: 1184432 - RNA, 16 nt, Human
ggugugacugaauuuc

SEQ ID NO: 1184433 - RNA, 18 nt, Human
ggugugagucaccaagcc

SEQ ID NO: 1184434 - RNA, 21 nt, Human
aaaguuucucuuuucaaaaca

SEQ ID NO: 1184435 - RNA, 23 nt, Human
aaaguuucucuuuucaaaacauu

SEQ ID NO: 1184436 - RNA, 12 nt, Human
aaauaaugugaa

SEQ ID NO: 1184437 - RNA, 13 nt, Human
aaauaaugugaaa

SEQ ID NO: 1184438 - RNA, 18 nt, Human
aaauaauuuuuauauuug

SEQ ID NO: 1184439 - RNA, 20 nt, Human
aaauaauuuuuauauuugaa

SEQ ID NO: 1184440 - RNA, 14 nt, Human
aaauaaugugaaac

SEQ ID NO: 1184441 - RNA, 21 nt, Human
aaauaauuuuuauauuugaaa

SEQ ID NO: 1184442 - RNA, 17 nt, Human
ggcucacugcagccuca

SEQ ID NO: 1184443 - RNA, 16 nt, Human
ggcucacugcagccuc

SEQ ID NO: 1184444 - RNA, 19 nt, Human
ggcgugcaguggugcgauc

SEQ ID NO: 1184445 - RNA, 23 nt, Human
ggcucagcaaaagaugcuucuca

SEQ ID NO: 1184446 - RNA, 21 nt, Human
ggcucagcggggacagcuccu

SEQ ID NO: 1184447 - RNA, 22 nt, Human
ggcucagcggggacagcuccuu

SEQ ID NO: 1184448 - RNA, 23 nt, Human
ggcucagcggggacagcuccuuc

SEQ ID NO: 1184449 - RNA, 15 nt, Human
ggccugagcugggau

SEQ ID NO: 1184450 - RNA, 13 nt, Human
ggccuccauccug

SEQ ID NO: 1184451 - RNA, 21 nt, Human
ggccuggccagaugcaccagc

SEQ ID NO: 1184452 - RNA, 21 nt, Human
ggccugugucuaguuguuuga

SEQ ID NO: 1184453 - RNA, 23 nt, Human
ggccuucggccuccauccugagg

SEQ ID NO: 1184454 - RNA, 12 nt, Human
ggccuucucuga

SEQ ID NO: 1184455 - RNA, 15 nt, Human
ggccuucucugaagg

SEQ ID NO: 1184456 - RNA, 16 nt, Human
ggccuucucugaagga

SEQ ID NO: 1184457 - RNA, 13 nt, Human
ggccuuuggcuuc

SEQ ID NO: 1184458 - RNA, 14 nt, Human
ggccuuuggcuuca

SEQ ID NO: 1184459 - RNA, 16 nt, Human
ggcccuucucuccagc

SEQ ID NO: 1184460 - RNA, 17 nt, Human
ggcccuucucuccagcc

SEQ ID NO: 1184461 - RNA, 19 nt, Human
ggcccuucucuccagcccc

SEQ ID NO: 1184462 - RNA, 18 nt, Human
ggcccuucucuccagccc

SEQ ID NO: 1184463 - RNA, 17 nt, Human
ggcagugggagcugccu

SEQ ID NO: 1184464 - RNA, 15 nt, Human
ggcaccagcagccug

SEQ ID NO: 1184465 - RNA, 16 nt, Human
ggcaccagcagccugg

SEQ ID NO: 1184466 - RNA, 24 nt, Human
ggcacugcuuccagugaggcucug

SEQ ID NO: 1184467 - RNA, 18 nt, Human
ggcagugggagcugccug

SEQ ID NO: 1184468 - RNA, 19 nt, Human
ggcagugggagcugccugu

SEQ ID NO: 1184469 - RNA, 18 nt, Human
ggcauccaguaucuugaa

SEQ ID NO: 1184470 - RNA, 17 nt, Human
ggccaaacucaccugcc

SEQ ID NO: 1184471 - RNA, 21 nt, Human
ggccaaacucaccugccccuc

SEQ ID NO: 1184472 - RNA, 14 nt, Human
ggccaggcuggucu

SEQ ID NO: 1184473 - RNA, 16 nt, Human
ggccaggcuggucuca

SEQ ID NO: 1184474 - RNA, 18 nt, Human
ggccaggcuggucucaaa

SEQ ID NO: 1184475 - RNA, 13 nt, Human
ggccagugcucca

SEQ ID NO: 1184476 - RNA, 15 nt, Human
ggccagugcuccagc

SEQ ID NO: 1184477 - RNA, 16 nt, Human
ggccagugugacaagg

SEQ ID NO: 1184478 - RNA, 24 nt, Human
ggcacagaaaauggaagacagcuc

SEQ ID NO: 1184479 - RNA, 15 nt, Human
ggauguucugggaca

SEQ ID NO: 1184480 - RNA, 16 nt, Human
ggauguucugggacac

SEQ ID NO: 1184481 - RNA, 22 nt, Human
ggauguugaaaaaguucugcag

SEQ ID NO: 1184482 - RNA, 14 nt, Human
ggaguggccacaga

SEQ ID NO: 1184483 - RNA, 15 nt, Human
ggaguucugguuccu

SEQ ID NO: 1184484 - RNA, 16 nt, Human
ggauggggcugcaccg

SEQ ID NO: 1184485 - RNA, 18 nt, Human
ggauggauuuccagccaa

SEQ ID NO: 1184486 - RNA, 18 nt, Human
ggauacaaaagcauguga

SEQ ID NO: 1184487 - RNA, 15 nt, Human
ggauccuccaggugc

SEQ ID NO: 1184488 - RNA, 13 nt, Human
ggauccugagcca

SEQ ID NO: 1184489 - RNA, 14 nt, Human
ggauccugagccag

SEQ ID NO: 1184490 - RNA, 15 nt, Human
ggauccugagccaga

SEQ ID NO: 1184491 - RNA, 16 nt, Human
ggagccccgaggccuu

SEQ ID NO: 1184492 - RNA, 22 nt, Human
ggagccccgaggccuucucuga

SEQ ID NO: 1184493 - RNA, 12 nt, Human
ggagcugccugu

SEQ ID NO: 1184494 - RNA, 21 nt, Human
ggagcugccuguucagcucca

SEQ ID NO: 1184495 - RNA, 22 nt, Human
ggagcugccuguucagcuccag

SEQ ID NO: 1184496 - RNA, 20 nt, Human
ggaggaaggaaacccagcuc

SEQ ID NO: 1184497 - RNA, 23 nt, Human
ggaggaaggaaacccagcucugg

SEQ ID NO: 1184498 - RNA, 11 nt, Human
ggaggccagcc

SEQ ID NO: 1184499 - RNA, 12 nt, Human
ggaggccagccu

SEQ ID NO: 1184500 - RNA, 16 nt, Human
ggaggggggagguggg

SEQ ID NO: 1184501 - RNA, 20 nt, Human
ggaggucaaggcugcaguga

SEQ ID NO: 1184502 - RNA, 14 nt, Human
ggaggucgaggcag

SEQ ID NO: 1184503 - RNA, 14 nt, Human
ggaggugaccccag

SEQ ID NO: 1184504 - RNA, 15 nt, Human
ggaacaaggcaaggc

SEQ ID NO: 1184505 - RNA, 17 nt, Human
ggaacaaggcaaggcug

SEQ ID NO: 1184506 - RNA, 21 nt, Human
ggaacaaggcaaggcugucaa

SEQ ID NO: 1184507 - RNA, 14 nt, Human
ggaaaugggcagag

SEQ ID NO: 1184508 - RNA, 16 nt, Human
ggaaaugggcagagca

SEQ ID NO: 1184509 - RNA, 17 nt, Human
ggaaaugggcagagcag

SEQ ID NO: 1184510 - RNA, 18 nt, Human
ggaaaugggcagagcaga

SEQ ID NO: 1184511 - RNA, 22 nt, Human
ggaaaugggcagagcagagacc

SEQ ID NO: 1184512 - RNA, 23 nt, Human
ggaacaaggcaaggcugucaauu

SEQ ID NO: 1184513 - RNA, 15 nt, Human
ggaacacuccuucac

SEQ ID NO: 1184514 - RNA, 19 nt, Human
ggaacacuccuucacagau

SEQ ID NO: 1184515 - RNA, 14 nt, Human
ggaagacaauguga

SEQ ID NO: 1184516 - RNA, 16 nt, Human
ggaagacaaugugaaa

SEQ ID NO: 1184517 - RNA, 12 nt, Human
ggaagacuuugg

SEQ ID NO: 1184518 - RNA, 22 nt, Human
ggaagacaaugugaaaagaaaa

SEQ ID NO: 1184519 - RNA, 17 nt, Human
ggaagacuucaucccuc

SEQ ID NO: 1184520 - RNA, 20 nt, Human
ggaagacuucaucccucugg

SEQ ID NO: 1184521 - RNA, 15 nt, Human
gcuuuuggucugugu

SEQ ID NO: 1184522 - RNA, 18 nt, Human
gcuuuugucuaugggacu

SEQ ID NO: 1184523 - RNA, 12 nt, Human
gcuuuugugcau

SEQ ID NO: 1184524 - RNA, 18 nt, Human
ggaaaauuuuaaaaauac

SEQ ID NO: 1184525 - RNA, 16 nt, Human
ggaaacccagcucugg

SEQ ID NO: 1184526 - RNA, 14 nt, Human
gcuuugaucccuuc

SEQ ID NO: 1184527 - RNA, 17 nt, Human
gcuuugaucccuucuua

SEQ ID NO: 1184528 - RNA, 18 nt, Human
gcuuguaaauagcucagg

SEQ ID NO: 1184529 - RNA, 19 nt, Human
gcuuguaaauagcucaggu

SEQ ID NO: 1184530 - RNA, 23 nt, Human
gcuugaccgugaggccagagaca

SEQ ID NO: 1184531 - RNA, 18 nt, Human
gcuugaccuuuaagagaa

SEQ ID NO: 1184532 - RNA, 16 nt, Human
gcuugaccgugaggcc

SEQ ID NO: 1184533 - RNA, 22 nt, Human
gcuugaccuuuaagagaaauga

SEQ ID NO: 1184534 - RNA, 17 nt, Human
gcuuguaaauagcucag

SEQ ID NO: 1184535 - RNA, 23 nt, Human
gcuuccagugaggcucugcccuu

SEQ ID NO: 1184536 - RNA, 19 nt, Human
gcuuccuggcaauagucaa

SEQ ID NO: 1184537 - RNA, 12 nt, Human
gcuucuucagag

SEQ ID NO: 1184538 - RNA, 15 nt, Human
gcuucuucagagacu

SEQ ID NO: 1184539 - RNA, 13 nt, Human
gcuguuggcuggg

SEQ ID NO: 1184540 - RNA, 14 nt, Human
gcuguuggcugggg

SEQ ID NO: 1184541 - RNA, 14 nt, Human
gcuucaaggauccu

SEQ ID NO: 1184542 - RNA, 18 nt, Human
gcuucaaggauccugagc

SEQ ID NO: 1184543 - RNA, 14 nt, Human
gcuucaguggcagc

SEQ ID NO: 1184544 - RNA, 15 nt, Human
gcuucaguggcagcu

SEQ ID NO: 1184545 - RNA, 14 nt, Human
gcuggagcucugcc

SEQ ID NO: 1184546 - RNA, 23 nt, Human
gcugguucaggguuggccccugc

SEQ ID NO: 1184547 - RNA, 12 nt, Human
gcuguauuuuaa

SEQ ID NO: 1184548 - RNA, 13 nt, Human
gcuguauuuuaaa

SEQ ID NO: 1184549 - RNA, 18 nt, Human
gcuguauuuuaaaagaau

SEQ ID NO: 1184550 - RNA, 13 nt, Human
gcugcacccucag

SEQ ID NO: 1184551 - RNA, 15 nt, Human
gcugcacccucaggc

SEQ ID NO: 1184552 - RNA, 16 nt, Human
gcugcacccucaggca

SEQ ID NO: 1184553 - RNA, 12 nt, Human
gcugccauccag

SEQ ID NO: 1184554 - RNA, 13 nt, Human
gcugccauccagg

SEQ ID NO: 1184555 - RNA, 12 nt, Human
gcugcugacagu

SEQ ID NO: 1184556 - RNA, 17 nt, Human
gcugccauccagguuca

SEQ ID NO: 1184557 - RNA, 13 nt, Human
gcugccccuggca

SEQ ID NO: 1184558 - RNA, 15 nt, Human
gcugccccuggcagc

SEQ ID NO: 1184559 - RNA, 16 nt, Human
gcugccccuggcagcc

SEQ ID NO: 1184560 - RNA, 17 nt, Human
gcugccccuggcagccc

SEQ ID NO: 1184561 - RNA, 17 nt, Human
gcugaauacagaggcaa

SEQ ID NO: 1184562 - RNA, 22 nt, Human
gcugaauacagaggcaacugca

SEQ ID NO: 1184563 - RNA, 13 nt, Human
gcugacagacaca

SEQ ID NO: 1184564 - RNA, 14 nt, Human
gcucuguccuggga

SEQ ID NO: 1184565 - RNA, 20 nt, Human
gcucugaucauccacugugc

SEQ ID NO: 1184566 - RNA, 21 nt, Human
gcucugaucauccacugugcc

SEQ ID NO: 1184567 - RNA, 22 nt, Human
gcucugaucauccacugugcca

SEQ ID NO: 1184568 - RNA, 23 nt, Human
gcucugaucauccacugugccau

SEQ ID NO: 1184569 - RNA, 15 nt, Human
gcucugcccauccug

SEQ ID NO: 1184570 - RNA, 21 nt, Human
gcucugcccauccugccccug

SEQ ID NO: 1184571 - RNA, 15 nt, Human
gcuccucuccccagc

SEQ ID NO: 1184572 - RNA, 13 nt, Human
gcuccagcucacc

SEQ ID NO: 1184573 - RNA, 14 nt, Human
gcuccagcucacca

SEQ ID NO: 1184574 - RNA, 17 nt, Human
gcuccagcucaccagcc

SEQ ID NO: 1184575 - RNA, 20 nt, Human
gcuccacuuggucugugaga

SEQ ID NO: 1184576 - RNA, 9 nt, Human
gcuccagac

SEQ ID NO: 1184577 - RNA, 18 nt, Human
gcuccagacacaugucca

SEQ ID NO: 1184578 - RNA, 21 nt, Human
gcuccagacacauguccaaga

SEQ ID NO: 1184579 - RNA, 23 nt, Human
gcuccagacacauguccaagaag

SEQ ID NO: 1184580 - RNA, 17 nt, Human
gcucucaggccagcugc

SEQ ID NO: 1184581 - RNA, 18 nt, Human
gcucucaggccagcugcu

SEQ ID NO: 1184582 - RNA, 19 nt, Human
gcucucaggccagcugcuu

SEQ ID NO: 1184583 - RNA, 20 nt, Human
gcucucaggccagcugcuug

SEQ ID NO: 1184584 - RNA, 16 nt, Human
gcuccucuccccagca

SEQ ID NO: 1184585 - RNA, 19 nt, Human
gcuccucuccccagcaagu

SEQ ID NO: 1184586 - RNA, 19 nt, Human
gcucuacugaggugcuaug

SEQ ID NO: 1184587 - RNA, 18 nt, Human
gcucucaaguuaucaggg

SEQ ID NO: 1184588 - RNA, 17 nt, Human
gccugcuaauuccccag

SEQ ID NO: 1184589 - RNA, 23 nt, Human
gccugcuaauuccccagauugca

SEQ ID NO: 1184590 - RNA, 13 nt, Human
gccugcuccagcu

SEQ ID NO: 1184591 - RNA, 19 nt, Human
gccuccuuugugaggaagc

SEQ ID NO: 1184592 - RNA, 20 nt, Human
gccuccuuugugaggaagcc

SEQ ID NO: 1184593 - RNA, 21 nt, Human
gccuccuuugugaggaagccg

SEQ ID NO: 1184594 - RNA, 16 nt, Human
gccuccauccugaggc

SEQ ID NO: 1184595 - RNA, 20 nt, Human
gccuccauccugaggcucca

SEQ ID NO: 1184596 - RNA, 14 nt, Human
gcgauucuucugcu

SEQ ID NO: 1184597 - RNA, 17 nt, Human
gcgauucuucugcuuca

SEQ ID NO: 1184598 - RNA, 15 nt, Human
gcgagcccugguggc

SEQ ID NO: 1184599 - RNA, 13 nt, Human
gcgauucuucugc

SEQ ID NO: 1184600 - RNA, 16 nt, Human
gcggccuuuggcuuca

SEQ ID NO: 1184601 - RNA, 14 nt, Human
gcgugcacacacca

SEQ ID NO: 1184602 - RNA, 18 nt, Human
gcgugcacacaccagagc

SEQ ID NO: 1184603 - RNA, 19 nt, Human
gcgugcacacaccagagcc

SEQ ID NO: 1184604 - RNA, 20 nt, Human
gcgugguggacaugcacagc

SEQ ID NO: 1184605 - RNA, 17 nt, Human
gcguuucuaugacacau

SEQ ID NO: 1184606 - RNA, 18 nt, Human
gcguuucuaugacacaug

SEQ ID NO: 1184607 - RNA, 16 nt, Human
gcuaauuuuucauuuu

SEQ ID NO: 1184608 - RNA, 19 nt, Human
gcuacuguccuacccaccc

SEQ ID NO: 1184609 - RNA, 20 nt, Human
gcuacuguccuacccacccu

SEQ ID NO: 1184610 - RNA, 17 nt, Human
gcuacuugggaggcuga

SEQ ID NO: 1184611 - RNA, 15 nt, Human
gccccuggaugcagc

SEQ ID NO: 1184612 - RNA, 22 nt, Human
gccccugcugguucaggguugg

SEQ ID NO: 1184613 - RNA, 14 nt, Human
gccaugugccaggu

SEQ ID NO: 1184614 - RNA, 22 nt, Human
gccaugugcuaguaauuggaaa

SEQ ID NO: 1184615 - RNA, 13 nt, Human
gcccaggcagguc

SEQ ID NO: 1184616 - RNA, 14 nt, Human
gcccaggcaggucu

SEQ ID NO: 1184617 - RNA, 16 nt, Human
gcccaggcaggucuug

SEQ ID NO: 1184618 - RNA, 15 nt, Human
gcccaggccccugcc

SEQ ID NO: 1184619 - RNA, 17 nt, Human
gcccaggccccugccac

SEQ ID NO: 1184620 - RNA, 18 nt, Human
gcccaggccccugccacc

SEQ ID NO: 1184621 - RNA, 13 nt, Human
gccaggccacaag

SEQ ID NO: 1184622 - RNA, 18 nt, Human
gccaggccacaagacccu

SEQ ID NO: 1184623 - RNA, 21 nt, Human
gccaggccacaagacccuugu

SEQ ID NO: 1184624 - RNA, 15 nt, Human
gccaggccagaggga

SEQ ID NO: 1184625 - RNA, 22 nt, Human
gccaggccagagggagugacag

SEQ ID NO: 1184626 - RNA, 23 nt, Human
gccaggccacaagacccuugugg

SEQ ID NO: 1184627 - RNA, 13 nt, Human
gccaggcccucug

SEQ ID NO: 1184628 - RNA, 14 nt, Human
gccaggcccucugc

SEQ ID NO: 1184629 - RNA, 15 nt, Human
gccaggcccucugcc

SEQ ID NO: 1184630 - RNA, 16 nt, Human
gccauaugaaaaggcu

SEQ ID NO: 1184631 - RNA, 16 nt, Human
gccaguuggucccccu

SEQ ID NO: 1184632 - RNA, 18 nt, Human
gccaguuggucccccuuc

SEQ ID NO: 1184633 - RNA, 20 nt, Human
gccaguuggucccccuucca

SEQ ID NO: 1184634 - RNA, 21 nt, Human
gccaguuggucccccuuccau

SEQ ID NO: 1184635 - RNA, 22 nt, Human
gccaguuggucccccuuccaug

SEQ ID NO: 1184636 - RNA, 23 nt, Human
gccaguuggucccccuuccaugg

SEQ ID NO: 1184637 - RNA, 15 nt, Human
gccagugcuccagcc

SEQ ID NO: 1184638 - RNA, 13 nt, Human
gccagugugacaa

SEQ ID NO: 1184639 - RNA, 13 nt, Human
gccaguugguccc

SEQ ID NO: 1184640 - RNA, 18 nt, Human
accucaggugagaagcag

SEQ ID NO: 1184641 - RNA, 14 nt, Human
accucaggccuggg

SEQ ID NO: 1184642 - RNA, 22 nt, Human
accucaggccugggggcugggc

SEQ ID NO: 1184643 - RNA, 16 nt, Human
accgugaggccagaga

SEQ ID NO: 1184644 - RNA, 17 nt, Human
accgugaggccagagac

SEQ ID NO: 1184645 - RNA, 12 nt, Human
accucaggccug

SEQ ID NO: 1184646 - RNA, 13 nt, Human
accucaggccugg

SEQ ID NO: 1184647 - RNA, 17 nt, Human
acccuguuaccauuuug

SEQ ID NO: 1184648 - RNA, 14 nt, Human
acccaugcugcccu

SEQ ID NO: 1184649 - RNA, 15 nt, Human
acccaugcugcccug

SEQ ID NO: 1184650 - RNA, 16 nt, Human
acccaugcugcccugu

SEQ ID NO: 1184651 - RNA, 16 nt, Human
accccacacacgccag

SEQ ID NO: 1184652 - RNA, 22 nt, Human
acccugugauggggcccugccu

SEQ ID NO: 1184653 - RNA, 17 nt, Human
accccacacacgccaga

SEQ ID NO: 1184654 - RNA, 14 nt, Human
accggcuggccugg

SEQ ID NO: 1184655 - RNA, 15 nt, Human
accggcuggccuggc

SEQ ID NO: 1184656 - RNA, 17 nt, Human
accggcuggccuggccc

SEQ ID NO: 1184657 - RNA, 18 nt, Human
accggcuggccuggcccc

SEQ ID NO: 1184658 - RNA, 19 nt, Human
accggcuggccuggccccu

SEQ ID NO: 1184659 - RNA, 15 nt, Human
accgggccacagaga

SEQ ID NO: 1184660 - RNA, 19 nt, Human
accgggccacagagaaagu

SEQ ID NO: 1184661 - RNA, 20 nt, Human
accgggccacagagaaagua

SEQ ID NO: 1184662 - RNA, 14 nt, Human
accgugaggccaga

SEQ ID NO: 1184663 - RNA, 20 nt, Human
accucugccucagaaaacaa

SEQ ID NO: 1184664 - RNA, 11 nt, Human
accugccaggg

SEQ ID NO: 1184665 - RNA, 12 nt, Human
accugccaggga

SEQ ID NO: 1184666 - RNA, 13 nt, Human
accugccagggac

SEQ ID NO: 1184667 - RNA, 15 nt, Human
accugccagggacag

SEQ ID NO: 1184668 - RNA, 16 nt, Human
accugccagggacaga

SEQ ID NO: 1184669 - RNA, 18 nt, Human
accugccagggacagagg

SEQ ID NO: 1184670 - RNA, 17 nt, Human
accucugccucagaaaa

SEQ ID NO: 1184671 - RNA, 18 nt, Human
accucugccucagaaaac

SEQ ID NO: 1184672 - RNA, 19 nt, Human
accucuugagccuugaacu

SEQ ID NO: 1184673 - RNA, 20 nt, Human
accucuugagccuugaacuu

SEQ ID NO: 1184674 - RNA, 21 nt, Human
accucuugagccuugaacuuu

SEQ ID NO: 1184675 - RNA, 11 nt, Human
acguggcugcu

SEQ ID NO: 1184676 - RNA, 15 nt, Human
acuaauagacaauuu

SEQ ID NO: 1184677 - RNA, 23 nt, Human
acgucugacaggcaaugcuggcu

SEQ ID NO: 1184678 - RNA, 12 nt, Human
acgucugugcca

SEQ ID NO: 1184679 - RNA, 19 nt, Human
acgcuggagugcagugagc

SEQ ID NO: 1184680 - RNA, 15 nt, Human
acggaauaguuggcu

SEQ ID NO: 1184681 - RNA, 19 nt, Human
acggacgaaccuugaaaac

SEQ ID NO: 1184682 - RNA, 15 nt, Human
acggaagagccuugc

SEQ ID NO: 1184683 - RNA, 16 nt, Human
acggaagagccuugcg

SEQ ID NO: 1184684 - RNA, 11 nt, Human
accugugucuc

SEQ ID NO: 1184685 - RNA, 17 nt, Human
acuagggaagauaauau

SEQ ID NO: 1184686 - RNA, 18 nt, Human
acuaguauuucuaugaaa

SEQ ID NO: 1184687 - RNA, 19 nt, Human
acuaguauuucuaugaaau

SEQ ID NO: 1184688 - RNA, 16 nt, Human
acuauuguuagucucu

SEQ ID NO: 1184689 - RNA, 15 nt, Human
acugcccggcagggu

SEQ ID NO: 1184690 - RNA, 22 nt, Human
acugcccggcaggguccuagaa

SEQ ID NO: 1184691 - RNA, 14 nt, Human
acugccaugccagc

SEQ ID NO: 1184692 - RNA, 15 nt, Human
acugcuuuuggucug

SEQ ID NO: 1184693 - RNA, 16 nt, Human
acugcuuuuggucugu

SEQ ID NO: 1184694 - RNA, 20 nt, Human
acugcuuuuggucuguguga

SEQ ID NO: 1184695 - RNA, 19 nt, Human
acucugucucaaaaaaaca

SEQ ID NO: 1184696 - RNA, 15 nt, Human
acucugucucagucc

SEQ ID NO: 1184697 - RNA, 17 nt, Human
acucugucucaguccau

SEQ ID NO: 1184698 - RNA, 21 nt, Human
acucugugucagguggggcag

SEQ ID NO: 1184699 - RNA, 14 nt, Human
acucuuaagaagac

SEQ ID NO: 1184700 - RNA, 15 nt, Human
acucuuaagaagacu

SEQ ID NO: 1184701 - RNA, 20 nt, Human
acucuuaagaagacugcauu

SEQ ID NO: 1184702 - RNA, 16 nt, Human
acugaaugaaaccccc

SEQ ID NO: 1184703 - RNA, 19 nt, Human
acugaaugaaacccccaca

SEQ ID NO: 1184704 - RNA, 21 nt, Human
acugaaugaaacccccacaca

SEQ ID NO: 1184705 - RNA, 22 nt, Human
acugaaugaaacccccacacac

SEQ ID NO: 1184706 - RNA, 23 nt, Human
acugacauuguuggccaaagcca

SEQ ID NO: 1184707 - RNA, 13 nt, Human
acugaucucucgu

SEQ ID NO: 1184708 - RNA, 22 nt, Human
acugauggcuaauguacugcau

SEQ ID NO: 1184709 - RNA, 12 nt, Human
acugaugggcaa

SEQ ID NO: 1184710 - RNA, 22 nt, Human
acugaugggcaacccccagccu

SEQ ID NO: 1184711 - RNA, 23 nt, Human
acugaugggcaacccccagccug

SEQ ID NO: 1184712 - RNA, 21 nt, Human
acugauuuuuuuuuccuucag

SEQ ID NO: 1184713 - RNA, 22 nt, Human
acugauuuuuuuuuccuucagu

SEQ ID NO: 1184714 - RNA, 23 nt, Human
acugauuuuuuuuuccuucagug

SEQ ID NO: 1184715 - RNA, 12 nt, Human
acuuuaugcuaa

SEQ ID NO: 1184716 - RNA, 17 nt, Human
acuuuaugcuaagugaa

SEQ ID NO: 1184717 - RNA, 22 nt, Human
acuugggaggcugagaugggag

SEQ ID NO: 1184718 - RNA, 14 nt, Human
acuuaaauaaugug

SEQ ID NO: 1184719 - RNA, 15 nt, Human
acuuaaauaauguga

SEQ ID NO: 1184720 - RNA, 21 nt, Human
acuuaaaaaugguuuaaaugg

SEQ ID NO: 1184721 - RNA, 13 nt, Human
acuuaaaaauggu

SEQ ID NO: 1184722 - RNA, 14 nt, Human
acuuaaaaaugguu

SEQ ID NO: 1184723 - RNA, 20 nt, Human
acuucugccauauucuguug

SEQ ID NO: 1184724 - RNA, 19 nt, Human
acuucagcgguuuauauaa

SEQ ID NO: 1184725 - RNA, 20 nt, Human
acuucaaauccuugaagauu

SEQ ID NO: 1184726 - RNA, 18 nt, Human
acuucagcgguuuauaua

SEQ ID NO: 1184727 - RNA, 17 nt, Human
acuucuuauacauuuga

SEQ ID NO: 1184728 - RNA, 18 nt, Human
acuucuuauacauuugau

SEQ ID NO: 1184729 - RNA, 23 nt, Human
acagugagucgaggacagggagg

SEQ ID NO: 1184730 - RNA, 21 nt, Human
acagugauuaccagggacuga

SEQ ID NO: 1184731 - RNA, 13 nt, Human
acagcugccuggg

SEQ ID NO: 1184732 - RNA, 20 nt, Human
acaggcaagcaccuccugcc

SEQ ID NO: 1184733 - RNA, 23 nt, Human
acaggcaagcaccuccugccucg

SEQ ID NO: 1184734 - RNA, 16 nt, Human
acagcucuguccuggg

SEQ ID NO: 1184735 - RNA, 17 nt, Human
acagcucuguccuggga

SEQ ID NO: 1184736 - RNA, 17 nt, Human
acagaggggguggccuc

SEQ ID NO: 1184737 - RNA, 18 nt, Human
acagaggggguggccucc

SEQ ID NO: 1184738 - RNA, 19 nt, Human
acagaggggguggccuccc

SEQ ID NO: 1184739 - RNA, 21 nt, Human
acagaggggguggccucccaa

SEQ ID NO: 1184740 - RNA, 16 nt, Human
acagcuccuucugucc

SEQ ID NO: 1184741 - RNA, 18 nt, Human
acagcuccuucuguccua

SEQ ID NO: 1184742 - RNA, 23 nt, Human
acagcuccuucuguccuacucug

SEQ ID NO: 1184743 - RNA, 14 nt, Human
acagcucuguccug

SEQ ID NO: 1184744 - RNA, 22 nt, Human
acagugagucgaggacagggag

SEQ ID NO: 1184745 - RNA, 19 nt, Human
acaggugugaaccaccaca

SEQ ID NO: 1184746 - RNA, 23 nt, Human
acaggugugagucaccaagccca

SEQ ID NO: 1184747 - RNA, 14 nt, Human
acaggcaaugcugg

SEQ ID NO: 1184748 - RNA, 16 nt, Human
acauaagauaaaugug

SEQ ID NO: 1184749 - RNA, 16 nt, Human
acaugcaaggucauuu

SEQ ID NO: 1184750 - RNA, 17 nt, Human
acaugcaaggucauuuu

SEQ ID NO: 1184751 - RNA, 18 nt, Human
acaugcaaggucauuuuu

SEQ ID NO: 1184752 - RNA, 15 nt, Human
acaugccucucucag

SEQ ID NO: 1184753 - RNA, 16 nt, Human
acaugccucucucagg

SEQ ID NO: 1184754 - RNA, 17 nt, Human
acaugccucucucaggc

SEQ ID NO: 1184755 - RNA, 18 nt, Human
acaugccucucucaggcc

SEQ ID NO: 1184756 - RNA, 14 nt, Human
accaucaagccacc

SEQ ID NO: 1184757 - RNA, 15 nt, Human
accaucaagccacca

SEQ ID NO: 1184758 - RNA, 15 nt, Human
accaucauugaaauc

SEQ ID NO: 1184759 - RNA, 23 nt, Human
accaucauugaaaucuuuuugcu

SEQ ID NO: 1184760 - RNA, 16 nt, Human
accaucccugaaggcc

SEQ ID NO: 1184761 - RNA, 15 nt, Human
acccacccccaccca

SEQ ID NO: 1184762 - RNA, 17 nt, Human
acccacccccacccaag

SEQ ID NO: 1184763 - RNA, 15 nt, Human
acccacccuccuuuc

SEQ ID NO: 1184764 - RNA, 13 nt, Human
acccaugcugccc

SEQ ID NO: 1184765 - RNA, 20 nt, Human
accaaggcugauuaaaccaa

SEQ ID NO: 1184766 - RNA, 19 nt, Human
accaaggcugauuaaacca

SEQ ID NO: 1184767 - RNA, 18 nt, Human
accagccccagugcccac

SEQ ID NO: 1184768 - RNA, 19 nt, Human
accagccccagugcccaca

SEQ ID NO: 1184769 - RNA, 20 nt, Human
accagccccagugcccacag

SEQ ID NO: 1184770 - RNA, 12 nt, Human
accagcagagca

SEQ ID NO: 1184771 - RNA, 13 nt, Human
accagcagagcac

SEQ ID NO: 1184772 - RNA, 13 nt, Human
accagcagccugg

SEQ ID NO: 1184773 - RNA, 16 nt, Human
accagccccagugccc

SEQ ID NO: 1184774 - RNA, 17 nt, Human
accagccccagugccca

SEQ ID NO: 1184775 - RNA, 19 nt, Human
acaugccucucucaggcca

SEQ ID NO: 1184776 - RNA, 20 nt, Human
acaugccucucucaggccaa

SEQ ID NO: 1184777 - RNA, 23 nt, Human
acaugucuuuucuugcaugaggc

SEQ ID NO: 1184778 - RNA, 14 nt, Human
acauuuauucugcu

SEQ ID NO: 1184779 - RNA, 15 nt, Human
acaagaaaugaaagc

SEQ ID NO: 1184780 - RNA, 16 nt, Human
acaagaaaugaaagca

SEQ ID NO: 1184781 - RNA, 22 nt, Human
acaagaaaugaaagcagggacu

SEQ ID NO: 1184782 - RNA, 21 nt, Human
acaaggaugaauuaaguuuuu

SEQ ID NO: 1184783 - RNA, 13 nt, Human
acaaaaugaaacg

SEQ ID NO: 1184784 - RNA, 22 nt, Human
acaaaaugaaacgcaaccacca

SEQ ID NO: 1184785 - RNA, 14 nt, Human
aauuuugauguuuu

SEQ ID NO: 1184786 - RNA, 17 nt, Human
aauuuugugaagcaaaa

SEQ ID NO: 1184787 - RNA, 18 nt, Human
aauuuugugaagcaaaau

SEQ ID NO: 1184788 - RNA, 16 nt, Human
aauuuugugcccccau

SEQ ID NO: 1184789 - RNA, 16 nt, Human
aaugucacaggcaggu

SEQ ID NO: 1184790 - RNA, 19 nt, Human
aaugucacaggcaggucca

SEQ ID NO: 1184791 - RNA, 12 nt, Human
aauuguaaggaa

SEQ ID NO: 1184792 - RNA, 16 nt, Human
aauuguaaggaaugau

SEQ ID NO: 1184793 - RNA, 23 nt, Human
aauugugugaaagguacuucaaa

SEQ ID NO: 1184794 - RNA, 20 nt, Human
aauuuauuuaugggauccug

SEQ ID NO: 1184795 - RNA, 22 nt, Human
acacugugcugagucugaaggc

SEQ ID NO: 1184796 - RNA, 16 nt, Human
acagaagcuccaggua

SEQ ID NO: 1184797 - RNA, 14 nt, Human
acagacaaagcgug

SEQ ID NO: 1184798 - RNA, 11 nt, Human
acagacacagg

SEQ ID NO: 1184799 - RNA, 13 nt, Human
acagaggcagccc

SEQ ID NO: 1184800 - RNA, 14 nt, Human
acagaggcagcccc

SEQ ID NO: 1184801 - RNA, 17 nt, Human
acagaggccaugggccu

SEQ ID NO: 1184802 - RNA, 21 nt, Human
acagaggccaugggccuccug

SEQ ID NO: 1184803 - RNA, 23 nt, Human
acagaggccaugggccuccugug

SEQ ID NO: 1184804 - RNA, 15 nt, Human
acacgaauauugcug

SEQ ID NO: 1184805 - RNA, 21 nt, Human
acacgaauauugcugauggug

SEQ ID NO: 1184806 - RNA, 21 nt, Human
acaccacuacauucuguuaau

SEQ ID NO: 1184807 - RNA, 19 nt, Human
acacaaaaguuucucuuuu

SEQ ID NO: 1184808 - RNA, 20 nt, Human
acacagcucuucuccaggcu

SEQ ID NO: 1184809 - RNA, 21 nt, Human
acacagcucuucuccaggcug

SEQ ID NO: 1184810 - RNA, 22 nt, Human
acacagcucuucuccaggcugu

SEQ ID NO: 1184811 - RNA, 14 nt, Human
acacauuuuuuaaa

SEQ ID NO: 1184812 - RNA, 16 nt, Human
acacauuuuuuaaaug

SEQ ID NO: 1184813 - RNA, 18 nt, Human
acacauuuuuuaaaugca

SEQ ID NO: 1184814 - RNA, 19 nt, Human
acacauuuuuuaaaugcac

SEQ ID NO: 1184815 - RNA, 15 nt, Human
acaccacuacauucu

SEQ ID NO: 1184816 - RNA, 17 nt, Human
acaccacuacauucugu

SEQ ID NO: 1184817 - RNA, 20 nt, Human
acaccacuacauucuguuaa

SEQ ID NO: 1184818 - RNA, 14 nt, Human
acacgaauauugcu

SEQ ID NO: 1184819 - RNA, 20 nt, Human
acaaggaugaucuaggaaga

SEQ ID NO: 1184820 - RNA, 16 nt, Human
acaaggauugcuacug

SEQ ID NO: 1184821 - RNA, 13 nt, Human
acaauuuauuaug

SEQ ID NO: 1184822 - RNA, 14 nt, Human
acaauuuauuaugg

SEQ ID NO: 1184823 - RNA, 23 nt, Human
aaugcgugcauaccacuuuuguu

SEQ ID NO: 1184824 - RNA, 23 nt, Human
aaugcucuuuacuucauggacuu

SEQ ID NO: 1184825 - RNA, 13 nt, Human
aaugggacacuaa

SEQ ID NO: 1184826 - RNA, 14 nt, Human
aaugggagcucaug

SEQ ID NO: 1184827 - RNA, 15 nt, Human
aaugggggugcauuu

SEQ ID NO: 1184828 - RNA, 17 nt, Human
aaugggggugcauuuga

SEQ ID NO: 1184829 - RNA, 13 nt, Human
aaugggcagagca

SEQ ID NO: 1184830 - RNA, 15 nt, Human
aaugauagcuacugu

SEQ ID NO: 1184831 - RNA, 16 nt, Human
aaugauuaauuaaaac

SEQ ID NO: 1184832 - RNA, 12 nt, Human
aaugauuaauua

SEQ ID NO: 1184833 - RNA, 13 nt, Human
aaugauuaauuaa

SEQ ID NO: 1184834 - RNA, 15 nt, Human
aaugauaacuggaaa

SEQ ID NO: 1184835 - RNA, 16 nt, Human
aaugauaacuggaaac

SEQ ID NO: 1184836 - RNA, 17 nt, Human
aaugauaacuggaaacu

SEQ ID NO: 1184837 - RNA, 16 nt, Human
aauccauacauuugug

SEQ ID NO: 1184838 - RNA, 17 nt, Human
aauccauacauuugugu

SEQ ID NO: 1184839 - RNA, 17 nt, Human
aauccagacccggcugc

SEQ ID NO: 1184840 - RNA, 22 nt, Human
aaguugauaugccuuuucccaa

SEQ ID NO: 1184841 - RNA, 13 nt, Human
aagugcugcauuu

SEQ ID NO: 1184842 - RNA, 14 nt, Human
aagugcugcauuua

SEQ ID NO: 1184843 - RNA, 14 nt, Human
aauaauguuucaaa

SEQ ID NO: 1184844 - RNA, 19 nt, Human
aauaauguuucaaacauau

SEQ ID NO: 1184845 - RNA, 12 nt, Human
aauaauguuuca

SEQ ID NO: 1184846 - RNA, 16 nt, Human
aauauaggaacuuaaa

SEQ ID NO: 1184847 - RNA, 13 nt, Human
aaggacacuagaa

SEQ ID NO: 1184848 - RNA, 20 nt, Human
aaggcagcucuaaaugucaa

SEQ ID NO: 1184849 - RNA, 21 nt, Human
aagcgugagccacugcaccgg

SEQ ID NO: 1184850 - RNA, 17 nt, Human
aagcgugagccacugca

SEQ ID NO: 1184851 - RNA, 20 nt, Human
aagcgugagccacugcaccg

SEQ ID NO: 1184852 - RNA, 11 nt, Human
aagcugccagc

SEQ ID NO: 1184853 - RNA, 12 nt, Human
aagcugccagcc

SEQ ID NO: 1184854 - RNA, 22 nt, Human
aagcugccagccgagauagcca

SEQ ID NO: 1184855 - RNA, 16 nt, Human
aagcugcugacagugu

SEQ ID NO: 1184856 - RNA, 23 nt, Human
aaggaaugauuaauuaaaacaca

SEQ ID NO: 1184857 - RNA, 19 nt, Human
aagccagcaggcucucagg

SEQ ID NO: 1184858 - RNA, 18 nt, Human
aagccagcaggcucucag

SEQ ID NO: 1184859 - RNA, 15 nt, Human
aagccagcaggcucu

SEQ ID NO: 1184860 - RNA, 21 nt, Human
aagccaccaacauacucccau

SEQ ID NO: 1184861 - RNA, 15 nt, Human
aagcgauucuucugc

SEQ ID NO: 1184862 - RNA, 16 nt, Human
aagcgauucuucugcu

SEQ ID NO: 1184863 - RNA, 17 nt, Human
aagcgauucuucugcuu

SEQ ID NO: 1184864 - RNA, 20 nt, Human
aagggacuuggaagcuccgc

SEQ ID NO: 1184865 - RNA, 12 nt, Human
aaguagaggagg

SEQ ID NO: 1184866 - RNA, 20 nt, Human
aagauucauauuuacuucuu

SEQ ID NO: 1184867 - RNA, 19 nt, Human
aagauuuugaaauuuuuau

SEQ ID NO: 1184868 - RNA, 19 nt, Human
aagccaccaacauacuccc

SEQ ID NO: 1184869 - RNA, 23 nt, Human
aagacagugaaagaaaauaacaa

SEQ ID NO: 1184870 - RNA, 16 nt, Human
aagacuuuggaaagag

SEQ ID NO: 1184871 - RNA, 19 nt, Human
aagagagaaaauaaaaagu

SEQ ID NO: 1184872 - RNA, 20 nt, Human
aagagagaaaauaaaaaguu

SEQ ID NO: 1184873 - RNA, 21 nt, Human
aagagagaaaauaaaaaguua

SEQ ID NO: 1184874 - RNA, 22 nt, Human
aagagagaaaauaaaaaguuaa

SEQ ID NO: 1184875 - RNA, 23 nt, Human
aagagagaaaauaaaaaguuaaa

SEQ ID NO: 1184876 - RNA, 17 nt, Human
aagacuuuuccaacccu

SEQ ID NO: 1184877 - RNA, 15 nt, Human
aagagaacuuccaga

SEQ ID NO: 1184878 - RNA, 22 nt, Human
aaaaucccuuaccucggugccu

SEQ ID NO: 1184879 - RNA, 19 nt, Human
aaaauccauacauuugugu

SEQ ID NO: 1184880 - RNA, 15 nt, Human
aaaauuagccaagug

SEQ ID NO: 1184881 - RNA, 12 nt, Human
aaaauaaaaagu

SEQ ID NO: 1184882 - RNA, 13 nt, Human
aaaauaaaaaguu

SEQ ID NO: 1184883 - RNA, 14 nt, Human
aaaauaaaaaguua

SEQ ID NO: 1184884 - RNA, 17 nt, Human
aaacagcuaaugggaca

SEQ ID NO: 1184885 - RNA, 15 nt, Human
aaacagccugugucu

SEQ ID NO: 1184886 - RNA, 11 nt, Human
aaauaaauuau

SEQ ID NO: 1184887 - RNA, 15 nt, Human
aaagccaaagcuagg

SEQ ID NO: 1184888 - RNA, 17 nt, Human
aaaggcuaccuuuguau

SEQ ID NO: 1184889 - RNA, 14 nt, Human
aaaggcuccaggag

SEQ ID NO: 1184890 - RNA, 15 nt, Human
aaaggcuccaggagc

SEQ ID NO: 1184891 - RNA, 21 nt, Human
aaaggcuccaggagcagccac

SEQ ID NO: 1184892 - RNA, 22 nt, Human
aaaggcuccaggagcagccaca

SEQ ID NO: 1184893 - RNA, 17 nt, Human
aaaccccaucucuacaa

SEQ ID NO: 1184894 - RNA, 15 nt, Human
aaacccccacacaca

SEQ ID NO: 1184895 - RNA, 16 nt, Human
aaacccccacacacac

SEQ ID NO: 1184896 - RNA, 22 nt, Human
aaacccccacacacacacacau

SEQ ID NO: 1184897 - RNA, 21 nt, Human
aaacccugucucuacuaaaaa

SEQ ID NO: 1184898 - RNA, 14 nt, Human
aaacccuucagugc

SEQ ID NO: 1184899 - RNA, 19 nt, Human
aaacccuugccaugugcua

SEQ ID NO: 1184900 - RNA, 17 nt, Human
aaacucuugaccucagg

SEQ ID NO: 1184901 - RNA, 13 nt, Human
aaacugauuuuuu

SEQ ID NO: 1184902 - RNA, 19 nt, Human
aaacugauuuuuuuuuccu

SEQ ID NO: 1184903 - RNA, 20 nt, Human
aaacugauuuuuuuuuccuu

SEQ ID NO: 1184904 - RNA, 22 nt, Human
aaacugauuuuuuuuuccuuca

SEQ ID NO: 1184905 - RNA, 13 nt, Human
aaagaaacauuug

SEQ ID NO: 1184906 - RNA, 15 nt, Human
aaagauacaguuacu

SEQ ID NO: 1184907 - RNA, 11 nt, Human
aaagagguuuu

SEQ ID NO: 1184908 - RNA, 16 nt, Human
aacagcuaaugggaca

SEQ ID NO: 1184909 - RNA, 13 nt, Human
aacccuucagugc

SEQ ID NO: 1184910 - RNA, 19 nt, Human
aaccaguguuguggauuua

SEQ ID NO: 1184911 - RNA, 15 nt, Human
aacauggaaguacua

SEQ ID NO: 1184912 - RNA, 13 nt, Human
aacgucugugcca

SEQ ID NO: 1184913 - RNA, 17 nt, Human
aacucaaacucuuaaaa

SEQ ID NO: 1184914 - RNA, 16 nt, Human
aacucaccccagcccc

SEQ ID NO: 1184915 - RNA, 17 nt, Human
aacucaccccagcccca

SEQ ID NO: 1184916 - RNA, 18 nt, Human
aacucaccccagccccaa

SEQ ID NO: 1184917 - RNA, 18 nt, Human
aacugaaugaaaccccca

SEQ ID NO: 1184918 - RNA, 23 nt, Human
aacugaaugaaacccccacacac

SEQ ID NO: 1184919 - RNA, 14 nt, Human
aaauggacguguua

SEQ ID NO: 1184920 - RNA, 15 nt, Human
aaauggacguguuau

SEQ ID NO: 1184921 - RNA, 17 nt, Human
aaauggacguguuauga

SEQ ID NO: 1184922 - RNA, 22 nt, Human
aaaucuccaaaauaaaacuuuu

SEQ ID NO: 1184923 - RNA, 18 nt, Human
aaaucugcuuuuuaaaga

SEQ ID NO: 1184924 - RNA, 21 nt, Human
aacacauacaggaagguagaa

SEQ ID NO: 1184925 - RNA, 22 nt, Human
aacaaaccuguuucugcagcca

SEQ ID NO: 1184926 - RNA, 19 nt, Human
aacaccucugcacaagcug

SEQ ID NO: 1184927 - RNA, 12 nt, Human
aaauuaacuuuu

SEQ ID NO: 1184928 - RNA, 13 nt, Human
aaauuaacuuuua

SEQ ID NO: 1184929 - RNA, 14 nt, Human
aaauuaacuuuuau

SEQ ID NO: 1184930 - RNA, 19 nt, Human
aaauuaacuuuuauaaacu

SEQ ID NO: 1184931 - RNA, 20 nt, Human
aaauguucaucaaugaauga

SEQ ID NO: 1184932 - RNA, 22 nt, Human
agugggcccaaugcacuuuguu

SEQ ID NO: 1184933 - RNA, 19 nt, Human
agugucaaugcagccccca

SEQ ID NO: 1184934 - RNA, 14 nt, Human
agugauucuccugc

SEQ ID NO: 1184935 - RNA, 15 nt, Human
agugauucuccugcc

SEQ ID NO: 1184936 - RNA, 17 nt, Human
agugauucuccugccuc

SEQ ID NO: 1184937 - RNA, 18 nt, Human
agugccuuacacaauggu

SEQ ID NO: 1184938 - RNA, 14 nt, Human
agugauccucccac

SEQ ID NO: 1184939 - RNA, 15 nt, Human
agugauccucccacc

SEQ ID NO: 1184940 - RNA, 18 nt, Human
agugauccucccaccuca

SEQ ID NO: 1184941 - RNA, 19 nt, Human
agugauccucccaccucag

SEQ ID NO: 1184942 - RNA, 24 nt, Human
agugauccucccaccucagccucc

SEQ ID NO: 1184943 - RNA, 10 nt, Human
agugccuuau

SEQ ID NO: 1184944 - RNA, 13 nt, Human
agugccuuaugga

SEQ ID NO: 1184945 - RNA, 14 nt, Human
agugccuuauggaa

SEQ ID NO: 1184946 - RNA, 15 nt, Human
agugccuuauggaac

SEQ ID NO: 1184947 - RNA, 16 nt, Human
agugccuuauggaaca

SEQ ID NO: 1184948 - RNA, 18 nt, Human
agugccuuauggaacacu

SEQ ID NO: 1184949 - RNA, 18 nt, Human
aguucagguaacaggcag

SEQ ID NO: 1184950 - RNA, 13 nt, Human
aguucaucuugaa

SEQ ID NO: 1184951 - RNA, 15 nt, Human
aguucaucuugaauu

SEQ ID NO: 1184952 - RNA, 19 nt, Human
aguucaucuugaauuguaa

SEQ ID NO: 1184953 - RNA, 22 nt, Human
aguucaucuugaauuguaagga

SEQ ID NO: 1184954 - RNA, 16 nt, Human
aguugauacuacaguu

SEQ ID NO: 1184955 - RNA, 14 nt, Human
aguugauagcacag

SEQ ID NO: 1184956 - RNA, 19 nt, Human
aguccucuuuucugagagg

SEQ ID NO: 1184957 - RNA, 22 nt, Human
aguccucuuuucugagaggacu

SEQ ID NO: 1184958 - RNA, 20 nt, Human
aguccuuaccagcagagcac

SEQ ID NO: 1184959 - RNA, 15 nt, Human
aguaucucagggccu

SEQ ID NO: 1184960 - RNA, 20 nt, Human
aguaugaggcauuuguuuga

SEQ ID NO: 1184961 - RNA, 21 nt, Human
aguaugaggcauuuguuugaa

SEQ ID NO: 1184962 - RNA, 23 nt, Human
aguaugaggcauuuguuugaacu

SEQ ID NO: 1184963 - RNA, 22 nt, Human
agucacacaguauuacuucugc

SEQ ID NO: 1184964 - RNA, 23 nt, Human
agucacacaguauuacuucugcu

SEQ ID NO: 1184965 - RNA, 13 nt, Human
aggucuguucuuu

SEQ ID NO: 1184966 - RNA, 15 nt, Human
aggucuguucuuucc

SEQ ID NO: 1184967 - RNA, 16 nt, Human
aggucuguucuuucca

SEQ ID NO: 1184968 - RNA, 18 nt, Human
aggucuguucuuuccaaa

SEQ ID NO: 1184969 - RNA, 18 nt, Human
aguaaaugggggugcauu

SEQ ID NO: 1184970 - RNA, 15 nt, Human
aguacguugugcauu

SEQ ID NO: 1184971 - RNA, 16 nt, Human
aguacguugugcauuu

SEQ ID NO: 1184972 - RNA, 17 nt, Human
aguacguugugcauuug

SEQ ID NO: 1184973 - RNA, 18 nt, Human
aguacguugugcauuugg

SEQ ID NO: 1184974 - RNA, 19 nt, Human
aguacuacaguccucccau

SEQ ID NO: 1184975 - RNA, 22 nt, Human
aguacuacaguccucccaucuc

SEQ ID NO: 1184976 - RNA, 14 nt, Human
aguacuauaauuua

SEQ ID NO: 1184977 - RNA, 20 nt, Human
aguaagccgugauuuucauu

SEQ ID NO: 1184978 - RNA, 12 nt, Human
aguacuauguau

SEQ ID NO: 1184979 - RNA, 14 nt, Human
aguacuauguauca

SEQ ID NO: 1184980 - RNA, 13 nt, Human
aguacucauacau

SEQ ID NO: 1184981 - RNA, 17 nt, Human
aguacuucuccacccug

SEQ ID NO: 1184982 - RNA, 19 nt, Human
aguacuucuccacccugcu

SEQ ID NO: 1184983 - RNA, 12 nt, Human
aguacuucuuuu

SEQ ID NO: 1184984 - RNA, 15 nt, Human
auagccuaggugaca

SEQ ID NO: 1184985 - RNA, 17 nt, Human
auagccuaggugacaga

SEQ ID NO: 1184986 - RNA, 17 nt, Human
auagcacagacccugcc

SEQ ID NO: 1184987 - RNA, 18 nt, Human
auagcacagacccugccc

SEQ ID NO: 1184988 - RNA, 15 nt, Human
auagcagcuuauuca

SEQ ID NO: 1184989 - RNA, 18 nt, Human
auagcagcuuauucacaa

SEQ ID NO: 1184990 - RNA, 14 nt, Human
auauuauguuaaaa

SEQ ID NO: 1184991 - RNA, 16 nt, Human
auauuauguuaaaacu

SEQ ID NO: 1184992 - RNA, 19 nt, Human
auauucaggaagcucaggg

SEQ ID NO: 1184993 - RNA, 17 nt, Human
auaugcucugcauguua

SEQ ID NO: 1184994 - RNA, 20 nt, Human
auaugcucugcauguuacau

SEQ ID NO: 1184995 - RNA, 13 nt, Human
auauuauguuaaa

SEQ ID NO: 1184996 - RNA, 14 nt, Human
auaauguaagcucu

SEQ ID NO: 1184997 - RNA, 13 nt, Human
auaauguuucaaa

SEQ ID NO: 1184998 - RNA, 18 nt, Human
auaaggguaucuggugac

SEQ ID NO: 1184999 - RNA, 21 nt, Human
auaagccagacaucaacagau

SEQ ID NO: 1185000 - RNA, 22 nt, Human
auaagccagacaucaacagaua

SEQ ID NO: 1185001 - RNA, 17 nt, Human
auaccugucccccugac

SEQ ID NO: 1185002 - RNA, 14 nt, Human
auaccugucccccu

SEQ ID NO: 1185003 - RNA, 15 nt, Human
auaccugucccccug

SEQ ID NO: 1185004 - RNA, 16 nt, Human
auaccugucccccuga

SEQ ID NO: 1185005 - RNA, 17 nt, Human
auacccacccccaccca

SEQ ID NO: 1185006 - RNA, 14 nt, Human
auacccacccccac

SEQ ID NO: 1185007 - RNA, 16 nt, Human
auacccacccccaccc

SEQ ID NO: 1185008 - RNA, 18 nt, Human
auaauguuucaaacauau

SEQ ID NO: 1185009 - RNA, 23 nt, Human
auaauguuucaaacauauauaac

SEQ ID NO: 1185010 - RNA, 14 nt, Human
auacaaugcugugc

SEQ ID NO: 1185011 - RNA, 17 nt, Human
auacaaugcugugcccu

SEQ ID NO: 1185012 - RNA, 22 nt, Human
auacacuuacacuuuaugcaca

SEQ ID NO: 1185013 - RNA, 14 nt, Human
auaacaaugaaagu

SEQ ID NO: 1185014 - RNA, 15 nt, Human
auaacaaugcuguau

SEQ ID NO: 1185015 - RNA, 17 nt, Human
auaacaaugcuguauuu

SEQ ID NO: 1185016 - RNA, 19 nt, Human
auaacaaugcuguauuuua

SEQ ID NO: 1185017 - RNA, 20 nt, Human
auaacaaugcuguauuuuaa

SEQ ID NO: 1185018 - RNA, 21 nt, Human
auaacaaugcuguauuuuaaa

SEQ ID NO: 1185019 - RNA, 20 nt, Human
auaacauguaauuaaguacu

SEQ ID NO: 1185020 - RNA, 13 nt, Human
auaacauguaauu

SEQ ID NO: 1185021 - RNA, 18 nt, Human
auaacauguaauuaagua

SEQ ID NO: 1185022 - RNA, 20 nt, Human
aguuguuacauuuuuaagug

SEQ ID NO: 1185023 - RNA, 22 nt, Human
aguuguuacauuuuuaagugcu

SEQ ID NO: 1185024 - RNA, 18 nt, Human
aguuugagaucagccugg

SEQ ID NO: 1185025 - RNA, 19 nt, Human
aguuugagaucagccuggg

SEQ ID NO: 1185026 - RNA, 20 nt, Human
aguuugagaucagccugggc

SEQ ID NO: 1185027 - RNA, 17 nt, Human
aguuugauuaaauucuu

SEQ ID NO: 1185028 - RNA, 18 nt, Human
aguuugauuaaauucuug

SEQ ID NO: 1185029 - RNA, 20 nt, Human
aguuugauuaaauucuugca

SEQ ID NO: 1185030 - RNA, 22 nt, Human
aguuugauuaaauucuugcaaa

SEQ ID NO: 1185031 - RNA, 23 nt, Human
aguuugauuaaauucuugcaaag

SEQ ID NO: 1185032 - RNA, 11 nt, Human
auaaaacuuuu

SEQ ID NO: 1185033 - RNA, 16 nt, Human
augcugcccugugagu

SEQ ID NO: 1185034 - RNA, 13 nt, Human
augcugcccugug

SEQ ID NO: 1185035 - RNA, 14 nt, Human
augcugcccuguga

SEQ ID NO: 1185036 - RNA, 15 nt, Human
augcugcccugugag

SEQ ID NO: 1185037 - RNA, 16 nt, Human
augcuuguacauaaug

SEQ ID NO: 1185038 - RNA, 18 nt, Human
auggcuuuugugcauuau

SEQ ID NO: 1185039 - RNA, 16 nt, Human
auggcuuuugugcauu

SEQ ID NO: 1185040 - RNA, 17 nt, Human
auggcuuuugugcauua

SEQ ID NO: 1185041 - RNA, 18 nt, Human
augaugaaaugaggucag

SEQ ID NO: 1185042 - RNA, 23 nt, Human
augaugaaaugaggucagagccu

SEQ ID NO: 1185043 - RNA, 15 nt, Human
augaugauccuaggc

SEQ ID NO: 1185044 - RNA, 17 nt, Human
augaucuuugcagacag

SEQ ID NO: 1185045 - RNA, 18 nt, Human
augaucuuugcagacagg

SEQ ID NO: 1185046 - RNA, 19 nt, Human
augaucuuugcagacaggc

SEQ ID NO: 1185047 - RNA, 21 nt, Human
augaucuuugcagacaggcaa

SEQ ID NO: 1185048 - RNA, 13 nt, Human
augcacacauuuu

SEQ ID NO: 1185049 - RNA, 14 nt, Human
augcacacauuuuu

SEQ ID NO: 1185050 - RNA, 15 nt, Human
augcacacauuuuuu

SEQ ID NO: 1185051 - RNA, 19 nt, Human
augcacagaguuguuacau

SEQ ID NO: 1185052 - RNA, 21 nt, Human
augcacagaguuguuacauuu

SEQ ID NO: 1185053 - RNA, 22 nt, Human
augcacagaguuguuacauuuu

SEQ ID NO: 1185054 - RNA, 23 nt, Human
augcacagaguuguuacauuuuu

SEQ ID NO: 1185055 - RNA, 19 nt, Human
augccuggauggggcugca

SEQ ID NO: 1185056 - RNA, 20 nt, Human
augccuggauggggcugcac

SEQ ID NO: 1185057 - RNA, 21 nt, Human
augccuggauggggcugcacc

SEQ ID NO: 1185058 - RNA, 13 nt, Human
auguguaaguauu

SEQ ID NO: 1185059 - RNA, 14 nt, Human
auguguaaguauuc

SEQ ID NO: 1185060 - RNA, 17 nt, Human
auguucucucuucucca

SEQ ID NO: 1185061 - RNA, 13 nt, Human
auguucucugagg

SEQ ID NO: 1185062 - RNA, 17 nt, Human
auguucucugaggacac

SEQ ID NO: 1185063 - RNA, 14 nt, Human
auguucugggacac

SEQ ID NO: 1185064 - RNA, 15 nt, Human
auguucugggacaca

SEQ ID NO: 1185065 - RNA, 14 nt, Human
auguucuuaauucu

SEQ ID NO: 1185066 - RNA, 15 nt, Human
auguuugccucugcc

SEQ ID NO: 1185067 - RNA, 17 nt, Human
auguuugccucugccuc

SEQ ID NO: 1185068 - RNA, 21 nt, Human
augggugcuuggaggaaggaa

SEQ ID NO: 1185069 - RNA, 23 nt, Human
augggugcuuggaggaaggaaac

SEQ ID NO: 1185070 - RNA, 14 nt, Human
augucacaggcagg

SEQ ID NO: 1185071 - RNA, 19 nt, Human
augucacaggcagguccag

SEQ ID NO: 1185072 - RNA, 21 nt, Human
augucaaucagccuaguugau

SEQ ID NO: 1185073 - RNA, 13 nt, Human
augucacaggcag

SEQ ID NO: 1185074 - RNA, 19 nt, Human
auccagacccggcugcgug

SEQ ID NO: 1185075 - RNA, 19 nt, Human
aucccaugagccucagcau

SEQ ID NO: 1185076 - RNA, 19 nt, Human
auccucaguuuuugugaaa

SEQ ID NO: 1185077 - RNA, 15 nt, Human
aucccuacuguaauu

SEQ ID NO: 1185078 - RNA, 17 nt, Human
auccucauacccacccc

SEQ ID NO: 1185079 - RNA, 13 nt, Human
aucagcuuauugu

SEQ ID NO: 1185080 - RNA, 17 nt, Human
aucaugaauuaguuuua

SEQ ID NO: 1185081 - RNA, 21 nt, Human
aucaugaauuaguuuuauaug

SEQ ID NO: 1185082 - RNA, 14 nt, Human
aucaugucuggcua

SEQ ID NO: 1185083 - RNA, 23 nt, Human
aucaaagagguuuuaaaaaaauc

SEQ ID NO: 1185084 - RNA, 13 nt, Human
aucacagccucug

SEQ ID NO: 1185085 - RNA, 13 nt, Human
aucaccagacagg

SEQ ID NO: 1185086 - RNA, 23 nt, Human
aucacccgcuaagagggagggag

SEQ ID NO: 1185087 - RNA, 17 nt, Human
aucuggguucacugcaa

SEQ ID NO: 1185088 - RNA, 21 nt, Human
augaaguacucauacauguua

SEQ ID NO: 1185089 - RNA, 20 nt, Human
augaaguccaagcauuuaga

SEQ ID NO: 1185090 - RNA, 23 nt, Human
augaaguccaagcauuuagaugu

SEQ ID NO: 1185091 - RNA, 14 nt, Human
augaggcauuuguu

SEQ ID NO: 1185092 - RNA, 21 nt, Human
augaggcauuuguuugaacug

SEQ ID NO: 1185093 - RNA, 22 nt, Human
augaggcauuuguuugaacuga

SEQ ID NO: 1185094 - RNA, 14 nt, Human
augaaaacacauuu

SEQ ID NO: 1185095 - RNA, 15 nt, Human
augaaaacacauuuu

SEQ ID NO: 1185096 - RNA, 16 nt, Human
augaaaacacauuuuu

SEQ ID NO: 1185097 - RNA, 13 nt, Human
agcgagcccuggu

SEQ ID NO: 1185098 - RNA, 19 nt, Human
agcgagcccugguggcagu

SEQ ID NO: 1185099 - RNA, 12 nt, Human
agccugggaggu

SEQ ID NO: 1185100 - RNA, 20 nt, Human
agccugggaggucaaggcug

SEQ ID NO: 1185101 - RNA, 12 nt, Human
agcuacaaaugc

SEQ ID NO: 1185102 - RNA, 16 nt, Human
agcucaccagccccag

SEQ ID NO: 1185103 - RNA, 19 nt, Human
agcucaccagccccagugc

SEQ ID NO: 1185104 - RNA, 20 nt, Human
agcucaccagccccagugcc

SEQ ID NO: 1185105 - RNA, 12 nt, Human
agcucaccucuc

SEQ ID NO: 1185106 - RNA, 15 nt, Human
agcucaccucucccu

SEQ ID NO: 1185107 - RNA, 18 nt, Human
agcucaccucucccuugg

SEQ ID NO: 1185108 - RNA, 19 nt, Human
agcucaccucucccuugga

SEQ ID NO: 1185109 - RNA, 12 nt, Human
agcucagagagg

SEQ ID NO: 1185110 - RNA, 14 nt, Human
agcucagagagggu

SEQ ID NO: 1185111 - RNA, 18 nt, Human
agcucagagaggguggga

SEQ ID NO: 1185112 - RNA, 15 nt, Human
agcugaaccugggua

SEQ ID NO: 1185113 - RNA, 13 nt, Human
agcugcgguccac

SEQ ID NO: 1185114 - RNA, 16 nt, Human
agcugcgguccaccca

SEQ ID NO: 1185115 - RNA, 17 nt, Human
agcugcgguccacccag

SEQ ID NO: 1185116 - RNA, 18 nt, Human
agcugcgguccacccagg

SEQ ID NO: 1185117 - RNA, 19 nt, Human
agcugcgguccacccagga

SEQ ID NO: 1185118 - RNA, 20 nt, Human
agcugcgguccacccaggag

SEQ ID NO: 1185119 - RNA, 21 nt, Human
agcugcgguccacccaggagc

SEQ ID NO: 1185120 - RNA, 12 nt, Human
agcugcugacag

SEQ ID NO: 1185121 - RNA, 13 nt, Human
agcugcugacagu

SEQ ID NO: 1185122 - RNA, 14 nt, Human
agcugcugacagug

SEQ ID NO: 1185123 - RNA, 17 nt, Human
agcuggucccacucagu

SEQ ID NO: 1185124 - RNA, 18 nt, Human
agcuggucccacucaguc

SEQ ID NO: 1185125 - RNA, 19 nt, Human
agcuggucccacucagucc

SEQ ID NO: 1185126 - RNA, 22 nt, Human
agcugguuuuuagcggagacgg

SEQ ID NO: 1185127 - RNA, 23 nt, Human
agcuuuguuuguugucagcugaa

SEQ ID NO: 1185128 - RNA, 19 nt, Human
agcuucauuuccugugucu

SEQ ID NO: 1185129 - RNA, 18 nt, Human
agcuucacuguaaaauaa

SEQ ID NO: 1185130 - RNA, 18 nt, Human
agcuucauuuccuguguc

SEQ ID NO: 1185131 - RNA, 23 nt, Human
aggaacuuaaauaaugugaaacu

SEQ ID NO: 1185132 - RNA, 15 nt, Human
aggaauaccuguccc

SEQ ID NO: 1185133 - RNA, 18 nt, Human
aggaauaccugucccccu

SEQ ID NO: 1185134 - RNA, 22 nt, Human
aggaauaccugucccccugaca

SEQ ID NO: 1185135 - RNA, 12 nt, Human
aggaacaaggca

SEQ ID NO: 1185136 - RNA, 13 nt, Human
aggaacaaggcaa

SEQ ID NO: 1185137 - RNA, 16 nt, Human
aggaacaaggcaaggc

SEQ ID NO: 1185138 - RNA, 17 nt, Human
aggaacaaggcaaggcu

SEQ ID NO: 1185139 - RNA, 19 nt, Human
aggaacaaggcaaggcugu

SEQ ID NO: 1185140 - RNA, 20 nt, Human
aggaacaaggcaaggcuguc

SEQ ID NO: 1185141 - RNA, 23 nt, Human
aggaacaaggcaaggcugucaau

SEQ ID NO: 1185142 - RNA, 21 nt, Human
aggaacuuaaauaaugugaaa

SEQ ID NO: 1185143 - RNA, 12 nt, Human
aggcccuucucu

SEQ ID NO: 1185144 - RNA, 15 nt, Human
aggcccuucucucca

SEQ ID NO: 1185145 - RNA, 19 nt, Human
aggcccuucucuccagccc

SEQ ID NO: 1185146 - RNA, 21 nt, Human
aggccaugggcacugugggua

SEQ ID NO: 1185147 - RNA, 23 nt, Human
aggccaugggcacuguggguaga

SEQ ID NO: 1185148 - RNA, 22 nt, Human
aggcccucugcccacucccugc

SEQ ID NO: 1185149 - RNA, 23 nt, Human
aggcccucugcccacucccugca

SEQ ID NO: 1185150 - RNA, 19 nt, Human
aggcauuccccaggaggcc

SEQ ID NO: 1185151 - RNA, 20 nt, Human
aggcauuccccaggaggcca

SEQ ID NO: 1185152 - RNA, 21 nt, Human
aggcauuccccaggaggccag

SEQ ID NO: 1185153 - RNA, 13 nt, Human
aggccaggcccuc

SEQ ID NO: 1185154 - RNA, 14 nt, Human
aggccaggcccucu

SEQ ID NO: 1185155 - RNA, 15 nt, Human
aggccaggcccucug

SEQ ID NO: 1185156 - RNA, 16 nt, Human
aggccaggcccucugc

SEQ ID NO: 1185157 - RNA, 14 nt, Human
aggagaggggcaca

SEQ ID NO: 1185158 - RNA, 15 nt, Human
aggcaugguggccca

SEQ ID NO: 1185159 - RNA, 17 nt, Human
aggcaugugaugagagg

SEQ ID NO: 1185160 - RNA, 19 nt, Human
aggcaugugaugagaggaa

SEQ ID NO: 1185161 - RNA, 20 nt, Human
aggcaugugaugagaggaaa

SEQ ID NO: 1185162 - RNA, 21 nt, Human
aggcaugugaugagaggaaau

SEQ ID NO: 1185163 - RNA, 17 nt, Human
aggcauguucucugagg

SEQ ID NO: 1185164 - RNA, 18 nt, Human
aggcauguucucugagga

SEQ ID NO: 1185165 - RNA, 19 nt, Human
aggcauguucucugaggac

SEQ ID NO: 1185166 - RNA, 18 nt, Human
aggcauuccccaggaggc

SEQ ID NO: 1185167 - RNA, 18 nt, Human
aggcuggguucugauccu

SEQ ID NO: 1185168 - RNA, 13 nt, Human
aggcuaccuuugu

SEQ ID NO: 1185169 - RNA, 14 nt, Human
aggcuaccuuugua

SEQ ID NO: 1185170 - RNA, 15 nt, Human
aggcuaccuuuguau

SEQ ID NO: 1185171 - RNA, 20 nt, Human
aggcuguaucccaugagccu

SEQ ID NO: 1185172 - RNA, 21 nt, Human
aggcuguaucccaugagccuc

SEQ ID NO: 1185173 - RNA, 22 nt, Human
aggcuguaucccaugagccuca

SEQ ID NO: 1185174 - RNA, 23 nt, Human
aggcuguaucccaugagccucag

SEQ ID NO: 1185175 - RNA, 17 nt, Human
aggcuuagucacugaga

SEQ ID NO: 1185176 - RNA, 15 nt, Human
agggacugaggggag

SEQ ID NO: 1185177 - RNA, 15 nt, Human
agggacccuccacca

SEQ ID NO: 1185178 - RNA, 18 nt, Human
aggcuuagucacugagac

SEQ ID NO: 1185179 - RNA, 21 nt, Human
aggcuuagucacugagacagc

SEQ ID NO: 1185180 - RNA, 21 nt, Human
aggguaucuggugacuuuccu

SEQ ID NO: 1185181 - RNA, 13 nt, Human
aggguauuccaga

SEQ ID NO: 1185182 - RNA, 14 nt, Human
agggucccuggugg

SEQ ID NO: 1185183 - RNA, 16 nt, Human
agggucccugguggca

SEQ ID NO: 1185184 - RNA, 17 nt, Human
agggucccugguggcag

SEQ ID NO: 1185185 - RNA, 20 nt, Human
agggucccugguggcagcuc

SEQ ID NO: 1185186 - RNA, 22 nt, Human
agggucccugguggcagcucac

SEQ ID NO: 1185187 - RNA, 14 nt, Human
agggccuggccuga

SEQ ID NO: 1185188 - RNA, 14 nt, Human
agggccugcaaggg

SEQ ID NO: 1185189 - RNA, 15 nt, Human
agggccugcaaggga

SEQ ID NO: 1185190 - RNA, 12 nt, Human
agggccuggccu

SEQ ID NO: 1185191 - RNA, 13 nt, Human
agggccuggccug

SEQ ID NO: 1185192 - RNA, 13 nt, Human
agguacucuccug

SEQ ID NO: 1185193 - RNA, 14 nt, Human
agguacucuccugg

SEQ ID NO: 1185194 - RNA, 13 nt, Human
agguaacaggcag

SEQ ID NO: 1185195 - RNA, 14 nt, Human
agguaacaggcaga

SEQ ID NO: 1185196 - RNA, 16 nt, Human
agguaacaggcagaua

SEQ ID NO: 1185197 - RNA, 22 nt, Human
aggguuuugccauguuggccag

SEQ ID NO: 1185198 - RNA, 23 nt, Human
aggguuuugccauguuggccagg

SEQ ID NO: 1185199 - RNA, 20 nt, Human
agggucucacuauguugccc

SEQ ID NO: 1185200 - RNA, 23 nt, Human
agaggacuuuucuuuguggcuuc

SEQ ID NO: 1185201 - RNA, 21 nt, Human
agaggacuuuucuuuguggcu

SEQ ID NO: 1185202 - RNA, 22 nt, Human
agaggacuuuucuuuguggcuu

SEQ ID NO: 1185203 - RNA, 13 nt, Human
agagggccugcaa

SEQ ID NO: 1185204 - RNA, 16 nt, Human
agagggccugcaaggg

SEQ ID NO: 1185205 - RNA, 17 nt, Human
agaggggguggccuccc

SEQ ID NO: 1185206 - RNA, 19 nt, Human
agaggggguggccucccaa

SEQ ID NO: 1185207 - RNA, 13 nt, Human
agaggaaugaagu

SEQ ID NO: 1185208 - RNA, 16 nt, Human
agacgcugugcugccc

SEQ ID NO: 1185209 - RNA, 18 nt, Human
agacucugucucagucca

SEQ ID NO: 1185210 - RNA, 20 nt, Human
agacugaguacguugugcau

SEQ ID NO: 1185211 - RNA, 22 nt, Human
agacugaguacguugugcauuu

SEQ ID NO: 1185212 - RNA, 23 nt, Human
agacugaguacguugugcauuug

SEQ ID NO: 1185213 - RNA, 18 nt, Human
agacucugucucaaaaaa

SEQ ID NO: 1185214 - RNA, 16 nt, Human
agagagaccacuuuuc

SEQ ID NO: 1185215 - RNA, 16 nt, Human
agacuggaagcacagc

SEQ ID NO: 1185216 - RNA, 13 nt, Human
agagcccaccuug

SEQ ID NO: 1185217 - RNA, 21 nt, Human
acuuuccucuuuggucuacac

SEQ ID NO: 1185218 - RNA, 13 nt, Human
agaagacacugau

SEQ ID NO: 1185219 - RNA, 21 nt, Human
agaagacacugaugggcaacc

SEQ ID NO: 1185220 - RNA, 18 nt, Human
agaagacugcauuauauu

SEQ ID NO: 1185221 - RNA, 21 nt, Human
agaagagauugugguuucauu

SEQ ID NO: 1185222 - RNA, 14 nt, Human
agaaguaacuuacu

SEQ ID NO: 1185223 - RNA, 21 nt, Human
agaagugaaaaucuacacucc

SEQ ID NO: 1185224 - RNA, 18 nt, Human
agaaugaaagggcccaga

SEQ ID NO: 1185225 - RNA, 17 nt, Human
agaaugagagacacacu

SEQ ID NO: 1185226 - RNA, 22 nt, Human
agaaugagagacacacugaaga

SEQ ID NO: 1185227 - RNA, 19 nt, Human
agaaugcacaaacagaggc

SEQ ID NO: 1185228 - RNA, 22 nt, Human
agaaugcacaaacagaggccgc

SEQ ID NO: 1185229 - RNA, 20 nt, Human
agacaaugacuuacuguaca

SEQ ID NO: 1185230 - RNA, 21 nt, Human
agacaaugacuuacuguacau

SEQ ID NO: 1185231 - RNA, 22 nt, Human
agacaaugacuuacuguacaug

SEQ ID NO: 1185232 - RNA, 23 nt, Human
agacaaugacuuacuguacauga

SEQ ID NO: 1185233 - RNA, 15 nt, Human
agacagagcuacaca

SEQ ID NO: 1185234 - RNA, 11 nt, Human
agacagagucu

SEQ ID NO: 1185235 - RNA, 19 nt, Human
agacagagucucacuguug

SEQ ID NO: 1185236 - RNA, 20 nt, Human
agacagagucucacuguugc

SEQ ID NO: 1185237 - RNA, 21 nt, Human
agacagagucucacuguugcc

SEQ ID NO: 1185238 - RNA, 23 nt, Human
agacagagucucacuguugccca

SEQ ID NO: 1185239 - RNA, 19 nt, Human
agacccaaaaggcagaagc

SEQ ID NO: 1185240 - RNA, 20 nt, Human
agccccauucugccugccca

SEQ ID NO: 1185241 - RNA, 18 nt, Human
agcccgggcucugccucc

SEQ ID NO: 1185242 - RNA, 20 nt, Human
agcccgggcucugccuccca

SEQ ID NO: 1185243 - RNA, 21 nt, Human
agcccgggcucugccucccau

SEQ ID NO: 1185244 - RNA, 15 nt, Human
agccccauccucugu

SEQ ID NO: 1185245 - RNA, 17 nt, Human
agccccauccucuguac

SEQ ID NO: 1185246 - RNA, 23 nt, Human
agccccauccucuguacagagcc

SEQ ID NO: 1185247 - RNA, 18 nt, Human
agccccauucugccugcc

SEQ ID NO: 1185248 - RNA, 19 nt, Human
agccccauucugccugccc

SEQ ID NO: 1185249 - RNA, 14 nt, Human
agcccacgccccca

SEQ ID NO: 1185250 - RNA, 15 nt, Human
agcccacgcccccac

SEQ ID NO: 1185251 - RNA, 23 nt, Human
agcccacgcccccacuggugaca

SEQ ID NO: 1185252 - RNA, 16 nt, Human
agccagcaggcucuca

SEQ ID NO: 1185253 - RNA, 17 nt, Human
agccagcaggcucucag

SEQ ID NO: 1185254 - RNA, 15 nt, Human
agcccaccccucaac

SEQ ID NO: 1185255 - RNA, 16 nt, Human
agcccaccuuggcuca

SEQ ID NO: 1185256 - RNA, 14 nt, Human
agcauccuggcacc

SEQ ID NO: 1185257 - RNA, 17 nt, Human
agcauccuggcacccgg

SEQ ID NO: 1185258 - RNA, 18 nt, Human
agcauccuggcacccggc

SEQ ID NO: 1185259 - RNA, 16 nt, Human
agccaaagcuaggccu

SEQ ID NO: 1185260 - RNA, 18 nt, Human
agccaaagcuaggccugg

SEQ ID NO: 1185261 - RNA, 20 nt, Human
agccaaggccaaaggaagca

SEQ ID NO: 1185262 - RNA, 13 nt, Human
agccagaggagag

SEQ ID NO: 1185263 - RNA, 15 nt, Human
agccagaggagagag

SEQ ID NO: 1185264 - RNA, 17 nt, Human
agccagaggagagagga

SEQ ID NO: 1185265 - RNA, 18 nt, Human
agccagaggagagaggac

SEQ ID NO: 1185266 - RNA, 14 nt, Human
agccagcaggcucu

SEQ ID NO: 1185267 - RNA, 20 nt, Human
agcaaaggagauuggaagga

SEQ ID NO: 1185268 - RNA, 19 nt, Human
agauucuuuccugaggcug

SEQ ID NO: 1185269 - RNA, 21 nt, Human
agauucuuuccugaggcuggg

SEQ ID NO: 1185270 - RNA, 20 nt, Human
agauugcaacaggcugggcu

SEQ ID NO: 1185271 - RNA, 21 nt, Human
agauugcaacaggcugggcuu

SEQ ID NO: 1185272 - RNA, 23 nt, Human
agauugcaacaggcugggcuuca

SEQ ID NO: 1185273 - RNA, 18 nt, Human
agcaaaagaugcuucuca

SEQ ID NO: 1185274 - RNA, 24 nt, Human
agcaaaauuuuuucucuaggaaau

SEQ ID NO: 1185275 - RNA, 19 nt, Human
agauguagaggagaaacug

SEQ ID NO: 1185276 - RNA, 14 nt, Human
agaugagugagcau

SEQ ID NO: 1185277 - RNA, 23 nt, Human
agaggggguggccucccaacuca

SEQ ID NO: 1185278 - RNA, 17 nt, Human
agcacagacccugcccu

SEQ ID NO: 1185279 - RNA, 16 nt, Human
agcacagacccugccc

SEQ ID NO: 1185280 - RNA, 19 nt, Human
agcacgauuucuguuuaga

SEQ ID NO: 1185281 - RNA, 21 nt, Human
agcacgauuucuguuuagaua

SEQ ID NO: 1185282 - RNA, 14 nt, Human
agcacagacccugc

SEQ ID NO: 1185283 - RNA, 15 nt, Human
agcacagacccugcc

SEQ ID NO: 1185284 - RNA, 22 nt, Human
cagugguuccuaauccucuagg

SEQ ID NO: 1185285 - RNA, 12 nt, Human
caguggcagcug

SEQ ID NO: 1185286 - RNA, 13 nt, Human
caguggcagcugc

SEQ ID NO: 1185287 - RNA, 14 nt, Human
caguggcagcugcu

SEQ ID NO: 1185288 - RNA, 15 nt, Human
caguggcagcugcuu

SEQ ID NO: 1185289 - RNA, 16 nt, Human
caguggcagcugcuuu

SEQ ID NO: 1185290 - RNA, 16 nt, Human
caguguacauggaaua

SEQ ID NO: 1185291 - RNA, 20 nt, Human
caguguacauggaauaacau

SEQ ID NO: 1185292 - RNA, 23 nt, Human
caguguacauggaauaacaugua

SEQ ID NO: 1185293 - RNA, 14 nt, Human
cagugucaaugcag

SEQ ID NO: 1185294 - RNA, 14 nt, Human
cagugugacaagga

SEQ ID NO: 1185295 - RNA, 12 nt, Human
cagugugacuga

SEQ ID NO: 1185296 - RNA, 13 nt, Human
caguuaagagaaa

SEQ ID NO: 1185297 - RNA, 14 nt, Human
caguuaagagaaau

SEQ ID NO: 1185298 - RNA, 21 nt, Human
caguuaccucugccucagaaa

SEQ ID NO: 1185299 - RNA, 14 nt, Human
caguuacucagaau

SEQ ID NO: 1185300 - RNA, 19 nt, Human
caguguuguggauuuaaca

SEQ ID NO: 1185301 - RNA, 20 nt, Human
caguguuguggauuuaacag

SEQ ID NO: 1185302 - RNA, 22 nt, Human
caguguuguggauuuaacagaa

SEQ ID NO: 1185303 - RNA, 12 nt, Human
caguugaaaaac

SEQ ID NO: 1185304 - RNA, 18 nt, Human
caguugaaaaacagcuga

SEQ ID NO: 1185305 - RNA, 19 nt, Human
caguugaaaaacagcugag

SEQ ID NO: 1185306 - RNA, 22 nt, Human
caguucggugagcuacaaaugc

SEQ ID NO: 1185307 - RNA, 13 nt, Human
caguucucuccuu

SEQ ID NO: 1185308 - RNA, 14 nt, Human
caguucucuccuuc

SEQ ID NO: 1185309 - RNA, 15 nt, Human
caguucucuccuucu

SEQ ID NO: 1185310 - RNA, 22 nt, Human
caguucucuccuucuucccccc

SEQ ID NO: 1185311 - RNA, 12 nt, Human
caguucugaaga

SEQ ID NO: 1185312 - RNA, 13 nt, Human
caguucugaagaa

SEQ ID NO: 1185313 - RNA, 14 nt, Human
caguucugaagaag

SEQ ID NO: 1185314 - RNA, 15 nt, Human
caguucugaagaaga

SEQ ID NO: 1185315 - RNA, 16 nt, Human
caguucugaagaagau

SEQ ID NO: 1185316 - RNA, 22 nt, Human
caguucugaagaagaugguacc

SEQ ID NO: 1185317 - RNA, 19 nt, Human
cauaccacuuuuguucuug

SEQ ID NO: 1185318 - RNA, 11 nt, Human
cauacccaccc

SEQ ID NO: 1185319 - RNA, 12 nt, Human
cauacccacccc

SEQ ID NO: 1185320 - RNA, 13 nt, Human
cauaccacuuuug

SEQ ID NO: 1185321 - RNA, 14 nt, Human
cauaccacuuuugu

SEQ ID NO: 1185322 - RNA, 15 nt, Human
cauaccacuuuuguu

SEQ ID NO: 1185323 - RNA, 18 nt, Human
cauaccacuuuuguucuu

SEQ ID NO: 1185324 - RNA, 14 nt, Human
cauaagauaaaugu

SEQ ID NO: 1185325 - RNA, 21 nt, Human
cauaaaaauuagccaagugug

SEQ ID NO: 1185326 - RNA, 20 nt, Human
cauaaacaagaccacguuuc

SEQ ID NO: 1185327 - RNA, 21 nt, Human
cauaaacaagaccacguuucu

SEQ ID NO: 1185328 - RNA, 22 nt, Human
cauaaacaagaccacguuucua

SEQ ID NO: 1185329 - RNA, 16 nt, Human
cauaaccuagccuuag

SEQ ID NO: 1185330 - RNA, 23 nt, Human
caguugccagucaccccggccac

SEQ ID NO: 1185331 - RNA, 16 nt, Human
caguuggguggaugcc

SEQ ID NO: 1185332 - RNA, 18 nt, Human
caguuggguggaugccug

SEQ ID NO: 1185333 - RNA, 19 nt, Human
caguuggguggaugccugg

SEQ ID NO: 1185334 - RNA, 18 nt, Human
caguuggucccccuucca

SEQ ID NO: 1185335 - RNA, 19 nt, Human
caguuggucccccuuccau

SEQ ID NO: 1185336 - RNA, 20 nt, Human
caguuggucccccuuccaug

SEQ ID NO: 1185337 - RNA, 21 nt, Human
caguuggucccccuuccaugg

SEQ ID NO: 1185338 - RNA, 22 nt, Human
caguuggucccccuuccaugga

SEQ ID NO: 1185339 - RNA, 17 nt, Human
caguuguuagugugucu

SEQ ID NO: 1185340 - RNA, 18 nt, Human
caguuguuagugugucuu

SEQ ID NO: 1185341 - RNA, 15 nt, Human
cauacucccaucugu

SEQ ID NO: 1185342 - RNA, 14 nt, Human
cauacccaccccca

SEQ ID NO: 1185343 - RNA, 17 nt, Human
cauacccacccccaccc

SEQ ID NO: 1185344 - RNA, 18 nt, Human
cauacccacccccaccca

SEQ ID NO: 1185345 - RNA, 21 nt, Human
cauacccacccccacccaagg

SEQ ID NO: 1185346 - RNA, 13 nt, Human
cauacguacacau

SEQ ID NO: 1185347 - RNA, 15 nt, Human
cauacguacacauuu

SEQ ID NO: 1185348 - RNA, 16 nt, Human
cauacguacacauuuu

SEQ ID NO: 1185349 - RNA, 17 nt, Human
cauacguacacauuuua

SEQ ID NO: 1185350 - RNA, 18 nt, Human
cauacguacacauuuuau

SEQ ID NO: 1185351 - RNA, 14 nt, Human
cauacuaaccagca

SEQ ID NO: 1185352 - RNA, 21 nt, Human
cauacuaaccagcagaaaugc

SEQ ID NO: 1185353 - RNA, 15 nt, Human
cauccagguucagcu

SEQ ID NO: 1185354 - RNA, 17 nt, Human
cauccagguucagcuug

SEQ ID NO: 1185355 - RNA, 19 nt, Human
caucccucuggggcuguuc

SEQ ID NO: 1185356 - RNA, 11 nt, Human
caucccugaag

SEQ ID NO: 1185357 - RNA, 13 nt, Human
caucccugaaggc

SEQ ID NO: 1185358 - RNA, 15 nt, Human
caucaccaacgucug

SEQ ID NO: 1185359 - RNA, 20 nt, Human
caucaccaacgucugugcca

SEQ ID NO: 1185360 - RNA, 13 nt, Human
caucauugaaauc

SEQ ID NO: 1185361 - RNA, 14 nt, Human
caucauugaaaucu

SEQ ID NO: 1185362 - RNA, 15 nt, Human
caucauugaaaucuu

SEQ ID NO: 1185363 - RNA, 20 nt, Human
caucauugaaaucuuuuugc

SEQ ID NO: 1185364 - RNA, 21 nt, Human
caucauugaaaucuuuuugcu

SEQ ID NO: 1185365 - RNA, 22 nt, Human
caucccugaaggccccgcccag

SEQ ID NO: 1185366 - RNA, 17 nt, Human
caucccugaaggccccg

SEQ ID NO: 1185367 - RNA, 18 nt, Human
caucccugaaggccccgc

SEQ ID NO: 1185368 - RNA, 19 nt, Human
caucccugaaggccccgcc

SEQ ID NO: 1185369 - RNA, 21 nt, Human
caucccugaaggccccgccca

SEQ ID NO: 1185370 - RNA, 15 nt, Human
cauccucauacccac

SEQ ID NO: 1185371 - RNA, 16 nt, Human
cauccucauacccacc

SEQ ID NO: 1185372 - RNA, 11 nt, Human
cauccuccuca

SEQ ID NO: 1185373 - RNA, 12 nt, Human
cauccuccucag

SEQ ID NO: 1185374 - RNA, 15 nt, Human
cauccuccucagauc

SEQ ID NO: 1185375 - RNA, 16 nt, Human
cauccuccucagaucu

SEQ ID NO: 1185376 - RNA, 18 nt, Human
cauccuccucagaucuuc

SEQ ID NO: 1185377 - RNA, 19 nt, Human
cauccuccucagaucuucu

SEQ ID NO: 1185378 - RNA, 17 nt, Human
cauccucauacccaccc

SEQ ID NO: 1185379 - RNA, 18 nt, Human
cauccucauacccacccc

SEQ ID NO: 1185380 - RNA, 21 nt, Human
cauccucauacccacccccac

SEQ ID NO: 1185381 - RNA, 22 nt, Human
cauccucauacccacccccacc

SEQ ID NO: 1185382 - RNA, 13 nt, Human
cauccucccaagg

SEQ ID NO: 1185383 - RNA, 20 nt, Human
caucucacacaugagcauca

SEQ ID NO: 1185384 - RNA, 16 nt, Human
caucucaccuccugcu

SEQ ID NO: 1185385 - RNA, 17 nt, Human
caucucaccuccugcug

SEQ ID NO: 1185386 - RNA, 18 nt, Human
caucucaccuccugcugg

SEQ ID NO: 1185387 - RNA, 22 nt, Human
caucuagugagcagucaggaaa

SEQ ID NO: 1185388 - RNA, 16 nt, Human
caucucacacaugagc

SEQ ID NO: 1185389 - RNA, 17 nt, Human
caucucacacaugagca

SEQ ID NO: 1185390 - RNA, 15 nt, Human
cauccucuguacaga

SEQ ID NO: 1185391 - RNA, 18 nt, Human
cauccucuguacagagcc

SEQ ID NO: 1185392 - RNA, 19 nt, Human
cauccucuguacagagccc

SEQ ID NO: 1185393 - RNA, 21 nt, Human
cauccucuguacagagcccac

SEQ ID NO: 1185394 - RNA, 15 nt, Human
caucuacccuccgau

SEQ ID NO: 1185395 - RNA, 14 nt, Human
caucuagugagcag

SEQ ID NO: 1185396 - RNA, 22 nt, Human
caucuuccaaggguacuaagga

SEQ ID NO: 1185397 - RNA, 13 nt, Human
caucuugcucugc

SEQ ID NO: 1185398 - RNA, 14 nt, Human
caucuugcucugcu

SEQ ID NO: 1185399 - RNA, 15 nt, Human
caucuugcucugcug

SEQ ID NO: 1185400 - RNA, 20 nt, Human
caucuugcucugcugacaga

SEQ ID NO: 1185401 - RNA, 22 nt, Human
caucaagucuuucacauuuaaa

SEQ ID NO: 1185402 - RNA, 14 nt, Human
caucaagaugugac

SEQ ID NO: 1185403 - RNA, 18 nt, Human
caucaaugaaugaaugaa

SEQ ID NO: 1185404 - RNA, 13 nt, Human
cauaugccugggc

SEQ ID NO: 1185405 - RNA, 14 nt, Human
cauauuuacuucuu

SEQ ID NO: 1185406 - RNA, 16 nt, Human
cauauuuacuucuuau

SEQ ID NO: 1185407 - RNA, 17 nt, Human
cauauuuacuucuuaua

SEQ ID NO: 1185408 - RNA, 20 nt, Human
cauauuuacuucuuauacau

SEQ ID NO: 1185409 - RNA, 22 nt, Human
cauaguggcuuaaaacaacacu

SEQ ID NO: 1185410 - RNA, 20 nt, Human
cauaguaugguggcuggguu

SEQ ID NO: 1185411 - RNA, 18 nt, Human
cauaguaugguggcuggg

SEQ ID NO: 1185412 - RNA, 19 nt, Human
cauaguaugguggcugggu

SEQ ID NO: 1185413 - RNA, 22 nt, Human
cauauauauguuuuaagaggca

SEQ ID NO: 1185414 - RNA, 23 nt, Human
cauauauauguuuuaagaggcag

SEQ ID NO: 1185415 - RNA, 23 nt, Human
cauagagagcaagacgcugugcu

SEQ ID NO: 1185416 - RNA, 19 nt, Human
cauagagagcaagacgcug

SEQ ID NO: 1185417 - RNA, 21 nt, Human
cauagagagcaagacgcugug

SEQ ID NO: 1185418 - RNA, 16 nt, Human
cauacucccaucugug

SEQ ID NO: 1185419 - RNA, 18 nt, Human
cauacucccaucugugaa

SEQ ID NO: 1185420 - RNA, 20 nt, Human
cauacucccaucugugaaag

SEQ ID NO: 1185421 - RNA, 11 nt, Human
cauacucugcu

SEQ ID NO: 1185422 - RNA, 18 nt, Human
cauguaauuaaguacuau

SEQ ID NO: 1185423 - RNA, 21 nt, Human
cauguaauuaaguacuaugua

SEQ ID NO: 1185424 - RNA, 14 nt, Human
caugucuuuucuug

SEQ ID NO: 1185425 - RNA, 19 nt, Human
caugucuuuucuugcauga

SEQ ID NO: 1185426 - RNA, 21 nt, Human
caugucuuuucuugcaugagg

SEQ ID NO: 1185427 - RNA, 23 nt, Human
caugucuuuucuugcaugaggcu

SEQ ID NO: 1185428 - RNA, 16 nt, Human
cauggucggaaaacau

SEQ ID NO: 1185429 - RNA, 21 nt, Human
caugugccagguuuuuggucu

SEQ ID NO: 1185430 - RNA, 22 nt, Human
caugugccagguuuuuggucug

SEQ ID NO: 1185431 - RNA, 23 nt, Human
cauguuugauguaucugagcagg

SEQ ID NO: 1185432 - RNA, 15 nt, Human
cauguuuuguuuacg

SEQ ID NO: 1185433 - RNA, 18 nt, Human
cauguuuuucuucucccu

SEQ ID NO: 1185434 - RNA, 11 nt, Human
caugcauacac

SEQ ID NO: 1185435 - RNA, 12 nt, Human
caugcauacaca

SEQ ID NO: 1185436 - RNA, 13 nt, Human
caugcauacacac

SEQ ID NO: 1185437 - RNA, 14 nt, Human
caugcauacacaca

SEQ ID NO: 1185438 - RNA, 15 nt, Human
caugcauacacacac

SEQ ID NO: 1185439 - RNA, 16 nt, Human
caugcauacacacaca

SEQ ID NO: 1185440 - RNA, 23 nt, Human
caugcauacacacacacacacag

SEQ ID NO: 1185441 - RNA, 19 nt, Human
caugccagcuuaucucagg

SEQ ID NO: 1185442 - RNA, 20 nt, Human
caugccagcuuaucucaggg

SEQ ID NO: 1185443 - RNA, 13 nt, Human
caugccccugaac

SEQ ID NO: 1185444 - RNA, 14 nt, Human
caugccucucucag

SEQ ID NO: 1185445 - RNA, 15 nt, Human
caugccucucucagg

SEQ ID NO: 1185446 - RNA, 16 nt, Human
caugccucucucaggc

SEQ ID NO: 1185447 - RNA, 17 nt, Human
caugccucucucaggcc

SEQ ID NO: 1185448 - RNA, 18 nt, Human
caugccucucucaggcca

SEQ ID NO: 1185449 - RNA, 19 nt, Human
caugccucucucaggccaa

SEQ ID NO: 1185450 - RNA, 13 nt, Human
caugccuggaugg

SEQ ID NO: 1185451 - RNA, 18 nt, Human
caugccuggauggggcug

SEQ ID NO: 1185452 - RNA, 21 nt, Human
caugccuggauggggcugcac

SEQ ID NO: 1185453 - RNA, 23 nt, Human
caugccuggauggggcugcaccg

SEQ ID NO: 1185454 - RNA, 22 nt, Human
caugcugucccuuacgugaguc

SEQ ID NO: 1185455 - RNA, 23 nt, Human
caugcugucuacacuaagagaga

SEQ ID NO: 1185456 - RNA, 20 nt, Human
cauggaaguacuauaauuua

SEQ ID NO: 1185457 - RNA, 22 nt, Human
cauggaaguacuauaauuuacc

SEQ ID NO: 1185458 - RNA, 16 nt, Human
cauggaauaacaugua

SEQ ID NO: 1185459 - RNA, 18 nt, Human
cauggacaugaucuucuu

SEQ ID NO: 1185460 - RNA, 11 nt, Human
cauggacuuug

SEQ ID NO: 1185461 - RNA, 13 nt, Human
cauggacuuuguu

SEQ ID NO: 1185462 - RNA, 17 nt, Human
cauggagguuugaagau

SEQ ID NO: 1185463 - RNA, 16 nt, Human
cauggaguauauguca

SEQ ID NO: 1185464 - RNA, 18 nt, Human
caugggaaugaaugucag

SEQ ID NO: 1185465 - RNA, 22 nt, Human
caugggaaugaaugucagugug

SEQ ID NO: 1185466 - RNA, 17 nt, Human
caugggacagggaggac

SEQ ID NO: 1185467 - RNA, 23 nt, Human
caugggacagggaggacgcucuc

SEQ ID NO: 1185468 - RNA, 15 nt, Human
caugggccuccugug

SEQ ID NO: 1185469 - RNA, 16 nt, Human
caugggccuccugugu

SEQ ID NO: 1185470 - RNA, 17 nt, Human
caugggccuccugugug

SEQ ID NO: 1185471 - RNA, 18 nt, Human
caugggccuccugugugu

SEQ ID NO: 1185472 - RNA, 17 nt, Human
cauggucggaaaacaug

SEQ ID NO: 1185473 - RNA, 15 nt, Human
ccaacccucaucacc

SEQ ID NO: 1185474 - RNA, 15 nt, Human
ccaagaccuucuccu

SEQ ID NO: 1185475 - RNA, 15 nt, Human
ccaaauucuuucagu

SEQ ID NO: 1185476 - RNA, 22 nt, Human
ccaaauucuuucaguggcuacc

SEQ ID NO: 1185477 - RNA, 19 nt, Human
ccaaagcagugcaugcugu

SEQ ID NO: 1185478 - RNA, 14 nt, Human
ccaacauacuccca

SEQ ID NO: 1185479 - RNA, 16 nt, Human
ccaacauacucccauc

SEQ ID NO: 1185480 - RNA, 16 nt, Human
ccaacaucaacaucuu

SEQ ID NO: 1185481 - RNA, 13 nt, Human
ccaaagaugcagc

SEQ ID NO: 1185482 - RNA, 14 nt, Human
ccaaagaugcagcc

SEQ ID NO: 1185483 - RNA, 14 nt, Human
ccaagcaggacaug

SEQ ID NO: 1185484 - RNA, 12 nt, Human
ccaagcucccag

SEQ ID NO: 1185485 - RNA, 13 nt, Human
ccaagcucccagg

SEQ ID NO: 1185486 - RNA, 14 nt, Human
ccaagcucccaggc

SEQ ID NO: 1185487 - RNA, 18 nt, Human
ccaaggcuagaaccaccu

SEQ ID NO: 1185488 - RNA, 19 nt, Human
ccaaggcugauuaaaccaa

SEQ ID NO: 1185489 - RNA, 14 nt, Human
ccaaggcuggggga

SEQ ID NO: 1185490 - RNA, 20 nt, Human
ccaauauucauagcagcuua

SEQ ID NO: 1185491 - RNA, 18 nt, Human
ccacaaaggagagcuagc

SEQ ID NO: 1185492 - RNA, 16 nt, Human
ccacaagaaaugaaag

SEQ ID NO: 1185493 - RNA, 22 nt, Human
ccacaagaaaugaaagcaggga

SEQ ID NO: 1185494 - RNA, 16 nt, Human
ccacaagacccuugug

SEQ ID NO: 1185495 - RNA, 13 nt, Human
ccacaagagccca

SEQ ID NO: 1185496 - RNA, 16 nt, Human
ccacaagagcccaggc

SEQ ID NO: 1185497 - RNA, 17 nt, Human
ccacaagagcccaggcc

SEQ ID NO: 1185498 - RNA, 18 nt, Human
ccacaagagcccaggccu

SEQ ID NO: 1185499 - RNA, 19 nt, Human
ccacaagagcccaggccuc

SEQ ID NO: 1185500 - RNA, 20 nt, Human
ccacaagagcccaggccucc

SEQ ID NO: 1185501 - RNA, 21 nt, Human
ccacaagagcccaggccuccu

SEQ ID NO: 1185502 - RNA, 15 nt, Human
ccacaaguuaaauaa

SEQ ID NO: 1185503 - RNA, 20 nt, Human
ccacaaguuaaauaaaucau

SEQ ID NO: 1185504 - RNA, 11 nt, Human
ccacacacaca

SEQ ID NO: 1185505 - RNA, 13 nt, Human
ccacacacacaca

SEQ ID NO: 1185506 - RNA, 14 nt, Human
ccacacacacacac

SEQ ID NO: 1185507 - RNA, 15 nt, Human
ccacacacacacaca

SEQ ID NO: 1185508 - RNA, 17 nt, Human
ccacacacacacacaug

SEQ ID NO: 1185509 - RNA, 21 nt, Human
ccacacacacacacaugcaua

SEQ ID NO: 1185510 - RNA, 24 nt, Human
ccacacacacacacaugcauacac

SEQ ID NO: 1185511 - RNA, 12 nt, Human
ccacacacacag

SEQ ID NO: 1185512 - RNA, 17 nt, Human
ccacacacacagaaaau

SEQ ID NO: 1185513 - RNA, 19 nt, Human
cauuuuauuuuauuaugca

SEQ ID NO: 1185514 - RNA, 21 nt, Human
cauuuuauuuuauuaugcaug

SEQ ID NO: 1185515 - RNA, 22 nt, Human
cauuuuauuuuauuaugcauga

SEQ ID NO: 1185516 - RNA, 15 nt, Human
cauuugcucauggaa

SEQ ID NO: 1185517 - RNA, 16 nt, Human
cauuugcucauggaau

SEQ ID NO: 1185518 - RNA, 22 nt, Human
cauuugaggucuguucuuucca

SEQ ID NO: 1185519 - RNA, 18 nt, Human
cauuugcucauggaauug

SEQ ID NO: 1185520 - RNA, 18 nt, Human
cauuuugcuaaaugugaa

SEQ ID NO: 1185521 - RNA, 21 nt, Human
cauuuugcuaaaugugaauga

SEQ ID NO: 1185522 - RNA, 24 nt, Human
cauuuugcuaaaugugaaugauga

SEQ ID NO: 1185523 - RNA, 20 nt, Human
cauuuugggguacccacugc

SEQ ID NO: 1185524 - RNA, 21 nt, Human
cauuuugggguacccacugcu

SEQ ID NO: 1185525 - RNA, 22 nt, Human
cauuuugggguacccacugcuc

SEQ ID NO: 1185526 - RNA, 23 nt, Human
cauuuugggguacccacugcucu

SEQ ID NO: 1185527 - RNA, 15 nt, Human
cauuuuuaagugcug

SEQ ID NO: 1185528 - RNA, 20 nt, Human
cauuuuuaagugcugcauuu

SEQ ID NO: 1185529 - RNA, 21 nt, Human
cauuuuuaagugcugcauuua

SEQ ID NO: 1185530 - RNA, 19 nt, Human
cauuuuuaguagagacagg

SEQ ID NO: 1185531 - RNA, 20 nt, Human
cauuuuuaguagagacaggg

SEQ ID NO: 1185532 - RNA, 18 nt, Human
ccaaaauaaaacuuuuua

SEQ ID NO: 1185533 - RNA, 21 nt, Human
ccaaaauaaaacuuuuuaaaa

SEQ ID NO: 1185534 - RNA, 17 nt, Human
ccaaacucaccugcccc

SEQ ID NO: 1185535 - RNA, 23 nt, Human
cauuucuuccacaagagcccagg

SEQ ID NO: 1185536 - RNA, 14 nt, Human
cauuugagcagggc

SEQ ID NO: 1185537 - RNA, 16 nt, Human
cauuugagcagggcuc

SEQ ID NO: 1185538 - RNA, 17 nt, Human
cauuugaggucuguucu

SEQ ID NO: 1185539 - RNA, 18 nt, Human
cauuugaggucuguucuu

SEQ ID NO: 1185540 - RNA, 19 nt, Human
cauuugaggucuguucuuu

SEQ ID NO: 1185541 - RNA, 17 nt, Human
cauuuacuuuguguuca

SEQ ID NO: 1185542 - RNA, 21 nt, Human
cauuuacuuuguguucaccuu

SEQ ID NO: 1185543 - RNA, 21 nt, Human
cauuucuuccacaagagccca

SEQ ID NO: 1185544 - RNA, 19 nt, Human
cauugaaaucuuuuugcuu

SEQ ID NO: 1185545 - RNA, 13 nt, Human
cauugaccugagg

SEQ ID NO: 1185546 - RNA, 22 nt, Human
cauugaccugaggcccuucucu

SEQ ID NO: 1185547 - RNA, 14 nt, Human
cauugaccugaggc

SEQ ID NO: 1185548 - RNA, 20 nt, Human
ccagcugcuugggcuucauc

SEQ ID NO: 1185549 - RNA, 16 nt, Human
ccagcugcuugggcuu

SEQ ID NO: 1185550 - RNA, 18 nt, Human
ccagcugcuugggcuuca

SEQ ID NO: 1185551 - RNA, 15 nt, Human
ccagcugcuugggcu

SEQ ID NO: 1185552 - RNA, 18 nt, Human
ccagcugugcucuggaca

SEQ ID NO: 1185553 - RNA, 20 nt, Human
ccagcugugcucuggacagg

SEQ ID NO: 1185554 - RNA, 21 nt, Human
ccagcugugcucuggacaggc

SEQ ID NO: 1185555 - RNA, 19 nt, Human
ccagccugagcgacaguga

SEQ ID NO: 1185556 - RNA, 13 nt, Human
ccacacacacaga

SEQ ID NO: 1185557 - RNA, 14 nt, Human
ccacacacacagaa

SEQ ID NO: 1185558 - RNA, 15 nt, Human
ccacacacacagaaa

SEQ ID NO: 1185559 - RNA, 16 nt, Human
ccacacacacagaaaa

SEQ ID NO: 1185560 - RNA, 22 nt, Human
ccagcugugcucuggacaggca

SEQ ID NO: 1185561 - RNA, 23 nt, Human
ccagcugugcucuggacaggcau

SEQ ID NO: 1185562 - RNA, 16 nt, Human
ccagcuguucagcugg

SEQ ID NO: 1185563 - RNA, 15 nt, Human
ccaggaagccagcag

SEQ ID NO: 1185564 - RNA, 17 nt, Human
ccaggaagccagcaggc

SEQ ID NO: 1185565 - RNA, 19 nt, Human
ccaggaagccagcaggcuc

SEQ ID NO: 1185566 - RNA, 20 nt, Human
ccaggaagccagcaggcucu

SEQ ID NO: 1185567 - RNA, 12 nt, Human
ccaggagcagcc

SEQ ID NO: 1185568 - RNA, 13 nt, Human
ccaggagcagcca

SEQ ID NO: 1185569 - RNA, 14 nt, Human
ccaggagcagccac

SEQ ID NO: 1185570 - RNA, 15 nt, Human
ccaggagcagccaca

SEQ ID NO: 1185571 - RNA, 14 nt, Human
ccaggccagaggga

SEQ ID NO: 1185572 - RNA, 21 nt, Human
ccaggccagagggagugacag

SEQ ID NO: 1185573 - RNA, 21 nt, Human
ccaggccccugccacccuggg

SEQ ID NO: 1185574 - RNA, 23 nt, Human
ccaggccccugccacccugggga

SEQ ID NO: 1185575 - RNA, 17 nt, Human
ccaggcccucugcccac

SEQ ID NO: 1185576 - RNA, 18 nt, Human
ccaggcccucugcccacu

SEQ ID NO: 1185577 - RNA, 19 nt, Human
ccaggcccucugcccacuc

SEQ ID NO: 1185578 - RNA, 20 nt, Human
ccaggcccucugcccacucc

SEQ ID NO: 1185579 - RNA, 13 nt, Human
ccaggccuccuac

SEQ ID NO: 1185580 - RNA, 18 nt, Human
ccaggccuccuacagcuu

SEQ ID NO: 1185581 - RNA, 19 nt, Human
ccaggccuccuacagcuug

SEQ ID NO: 1185582 - RNA, 14 nt, Human
ccagggacagaggg

SEQ ID NO: 1185583 - RNA, 23 nt, Human
ccagggacagaggggguggccuc

SEQ ID NO: 1185584 - RNA, 19 nt, Human
ccaucucaccuccugcugg

SEQ ID NO: 1185585 - RNA, 21 nt, Human
ccaucucaccuccugcugggc

SEQ ID NO: 1185586 - RNA, 23 nt, Human
ccaucucaccuccugcugggcag

SEQ ID NO: 1185587 - RNA, 16 nt, Human
ccaucaugucuggcua

SEQ ID NO: 1185588 - RNA, 21 nt, Human
ccauccucuguacagagccca

SEQ ID NO: 1185589 - RNA, 15 nt, Human
ccauccugaggcucc

SEQ ID NO: 1185590 - RNA, 16 nt, Human
ccauccugaggcucca

SEQ ID NO: 1185591 - RNA, 22 nt, Human
ccagugguuccuaauccucuag

SEQ ID NO: 1185592 - RNA, 23 nt, Human
ccauagagagcaagacgcugugc

SEQ ID NO: 1185593 - RNA, 15 nt, Human
ccauauucuguuggc

SEQ ID NO: 1185594 - RNA, 18 nt, Human
ccauauucuguuggccag

SEQ ID NO: 1185595 - RNA, 19 nt, Human
ccauauucuguuggccagu

SEQ ID NO: 1185596 - RNA, 12 nt, Human
ccaucaagccac

SEQ ID NO: 1185597 - RNA, 12 nt, Human
ccaucacccgcu

SEQ ID NO: 1185598 - RNA, 16 nt, Human
ccaugcugcccuguga

SEQ ID NO: 1185599 - RNA, 17 nt, Human
ccaugcugcccugugag

SEQ ID NO: 1185600 - RNA, 15 nt, Human
ccaugcuccuggccc

SEQ ID NO: 1185601 - RNA, 18 nt, Human
ccaugcuccuggcccacu

SEQ ID NO: 1185602 - RNA, 23 nt, Human
ccauggcacucuauguucuaaga

SEQ ID NO: 1185603 - RNA, 13 nt, Human
ccaugugccaggu

SEQ ID NO: 1185604 - RNA, 13 nt, Human
ccauguuggccag

SEQ ID NO: 1185605 - RNA, 14 nt, Human
ccauguuggccagg

SEQ ID NO: 1185606 - RNA, 16 nt, Human
ccauguuggccaggcu

SEQ ID NO: 1185607 - RNA, 15 nt, Human
ccauguuggccaggc

SEQ ID NO: 1185608 - RNA, 19 nt, Human
ccauguuggccaggcuggu

SEQ ID NO: 1185609 - RNA, 21 nt, Human
ccauguuggccaggcuggucu

SEQ ID NO: 1185610 - RNA, 12 nt, Human
cccaccuggccu

SEQ ID NO: 1185611 - RNA, 15 nt, Human
cccaccuggccucug

SEQ ID NO: 1185612 - RNA, 16 nt, Human
cccaccuggccucugc

SEQ ID NO: 1185613 - RNA, 17 nt, Human
cccaccuuggcugcagg

SEQ ID NO: 1185614 - RNA, 19 nt, Human
cccaccuuggcugcaggga

SEQ ID NO: 1185615 - RNA, 20 nt, Human
cccaccuuggcugcagggag

SEQ ID NO: 1185616 - RNA, 13 nt, Human
cccacgcccccac

SEQ ID NO: 1185617 - RNA, 14 nt, Human
cccacgcccccacu

SEQ ID NO: 1185618 - RNA, 15 nt, Human
cccacgcccccacug

SEQ ID NO: 1185619 - RNA, 16 nt, Human
cccagcaagugagagc

SEQ ID NO: 1185620 - RNA, 17 nt, Human
cccagccccaaugaaca

SEQ ID NO: 1185621 - RNA, 11 nt, Human
cccagccccau

SEQ ID NO: 1185622 - RNA, 12 nt, Human
cccagccccauc

SEQ ID NO: 1185623 - RNA, 18 nt, Human
cccagccccauccucugu

SEQ ID NO: 1185624 - RNA, 19 nt, Human
cccagccccauccucugua

SEQ ID NO: 1185625 - RNA, 13 nt, Human
cccagccccaucc

SEQ ID NO: 1185626 - RNA, 14 nt, Human
cccagccccauccc

SEQ ID NO: 1185627 - RNA, 14 nt, Human
cccagccccauccu

SEQ ID NO: 1185628 - RNA, 15 nt, Human
cccagccccauccuc

SEQ ID NO: 1185629 - RNA, 14 nt, Human
cccagcgagcccug

SEQ ID NO: 1185630 - RNA, 15 nt, Human
cccagcgagcccugg

SEQ ID NO: 1185631 - RNA, 12 nt, Human
cccagcucuggu

SEQ ID NO: 1185632 - RNA, 13 nt, Human
cccagcucugguc

SEQ ID NO: 1185633 - RNA, 14 nt, Human
cccagcucuggucc

SEQ ID NO: 1185634 - RNA, 15 nt, Human
cccagcucuggucca

SEQ ID NO: 1185635 - RNA, 16 nt, Human
cccagcucugguccau

SEQ ID NO: 1185636 - RNA, 18 nt, Human
cccagcucugguccauag

SEQ ID NO: 1185637 - RNA, 13 nt, Human
cccaggagccccg

SEQ ID NO: 1185638 - RNA, 14 nt, Human
cccaggagccccga

SEQ ID NO: 1185639 - RNA, 18 nt, Human
cccaggagccccgaggcc

SEQ ID NO: 1185640 - RNA, 14 nt, Human
cccaggaggccagc

SEQ ID NO: 1185641 - RNA, 18 nt, Human
cccaggaggccagccuug

SEQ ID NO: 1185642 - RNA, 17 nt, Human
cccaggcauuccccagg

SEQ ID NO: 1185643 - RNA, 18 nt, Human
cccaggcauuccccagga

SEQ ID NO: 1185644 - RNA, 15 nt, Human
cccaggaggccagcc

SEQ ID NO: 1185645 - RNA, 16 nt, Human
cccaggaggccagccu

SEQ ID NO: 1185646 - RNA, 23 nt, Human
cccaggcaggucuugaacuccug

SEQ ID NO: 1185647 - RNA, 15 nt, Human
cccaggcauucccca

SEQ ID NO: 1185648 - RNA, 10 nt, Human
cccagucugg

SEQ ID NO: 1185649 - RNA, 18 nt, Human
cccagucuggaaugcagu

SEQ ID NO: 1185650 - RNA, 19 nt, Human
cccagucuggaaugcagug

SEQ ID NO: 1185651 - RNA, 15 nt, Human
cccagugccgagaag

SEQ ID NO: 1185652 - RNA, 17 nt, Human
cccagugccgagaagga

SEQ ID NO: 1185653 - RNA, 20 nt, Human
cccagugguuccuaauccuc

SEQ ID NO: 1185654 - RNA, 14 nt, Human
cccaguuagcucuc

SEQ ID NO: 1185655 - RNA, 21 nt, Human
ccccaaauggaaaugggcaga

SEQ ID NO: 1185656 - RNA, 13 nt, Human
cccaucucacaca

SEQ ID NO: 1185657 - RNA, 18 nt, Human
cccaucucacacaugagc

SEQ ID NO: 1185658 - RNA, 20 nt, Human
cccaucugugaaaggaaaga

SEQ ID NO: 1185659 - RNA, 16 nt, Human
cccaugagccucagca

SEQ ID NO: 1185660 - RNA, 20 nt, Human
cccaugagccucagcauccu

SEQ ID NO: 1185661 - RNA, 12 nt, Human
cccaugcugccc

SEQ ID NO: 1185662 - RNA, 13 nt, Human
cccaugcugcccu

SEQ ID NO: 1185663 - RNA, 14 nt, Human
cccaugcugcccug

SEQ ID NO: 1185664 - RNA, 22 nt, Human
cccaugagccucagcauccugg

SEQ ID NO: 1185665 - RNA, 13 nt, Human
ccccaggaggcca

SEQ ID NO: 1185666 - RNA, 15 nt, Human
ccccagccccauccu

SEQ ID NO: 1185667 - RNA, 13 nt, Human
ccccagccugcua

SEQ ID NO: 1185668 - RNA, 12 nt, Human
ccccaggaggcc

SEQ ID NO: 1185669 - RNA, 22 nt, Human
ccccaggugguuauggagaggg

SEQ ID NO: 1185670 - RNA, 12 nt, Human
ccccuggcagcc

SEQ ID NO: 1185671 - RNA, 14 nt, Human
ccccuggcagcccc

SEQ ID NO: 1185672 - RNA, 15 nt, Human
ccccuggcagccccu

SEQ ID NO: 1185673 - RNA, 22 nt, Human
ccccuguccccgcacugggcuu

SEQ ID NO: 1185674 - RNA, 22 nt, Human
cccgcuaagagggagggagggc

SEQ ID NO: 1185675 - RNA, 15 nt, Human
cccgaggccuucucu

SEQ ID NO: 1185676 - RNA, 20 nt, Human
cccgaggccuucucugaagg

SEQ ID NO: 1185677 - RNA, 21 nt, Human
cccgaggccuucucugaagga

SEQ ID NO: 1185678 - RNA, 16 nt, Human
cccggcaggguccuag

SEQ ID NO: 1185679 - RNA, 17 nt, Human
cccuaaaguguauuuuu

SEQ ID NO: 1185680 - RNA, 22 nt, Human
cccuaaaguguauuuuuuuacu

SEQ ID NO: 1185681 - RNA, 15 nt, Human
cccucagggucccug

SEQ ID NO: 1185682 - RNA, 16 nt, Human
cccucagggucccugg

SEQ ID NO: 1185683 - RNA, 17 nt, Human
cccucagggucccuggu

SEQ ID NO: 1185684 - RNA, 18 nt, Human
cccucagggucccuggug

SEQ ID NO: 1185685 - RNA, 19 nt, Human
cccucagggucccuggugg

SEQ ID NO: 1185686 - RNA, 21 nt, Human
cccucagggucccugguggca

SEQ ID NO: 1185687 - RNA, 20 nt, Human
cccucagucuggcccuuccu

SEQ ID NO: 1185688 - RNA, 22 nt, Human
cccucaucaccaacgucugugc

SEQ ID NO: 1185689 - RNA, 17 nt, Human
cccucauccucauaccc

SEQ ID NO: 1185690 - RNA, 20 nt, Human
cccucauccucauacccacc

SEQ ID NO: 1185691 - RNA, 21 nt, Human
cccuccaagaccuucuccuuc

SEQ ID NO: 1185692 - RNA, 22 nt, Human
cccucauccucauacccacccc

SEQ ID NO: 1185693 - RNA, 17 nt, Human
cccuccaugugggcuag

SEQ ID NO: 1185694 - RNA, 23 nt, Human
cccucccucuuucccucccuucc

SEQ ID NO: 1185695 - RNA, 13 nt, Human
cccucccucuuuc

SEQ ID NO: 1185696 - RNA, 14 nt, Human
cccugguggcagcu

SEQ ID NO: 1185697 - RNA, 19 nt, Human
cccugcugguucaggguug

SEQ ID NO: 1185698 - RNA, 20 nt, Human
cccugcugguucaggguugg

SEQ ID NO: 1185699 - RNA, 13 nt, Human
cccugcugguuca

SEQ ID NO: 1185700 - RNA, 22 nt, Human
cccugguggcagugggagcugc

SEQ ID NO: 1185701 - RNA, 22 nt, Human
cccugcaaccugauugugucuc

SEQ ID NO: 1185702 - RNA, 12 nt, Human
cccugcagaggg

SEQ ID NO: 1185703 - RNA, 18 nt, Human
cccugcagagggcacaga

SEQ ID NO: 1185704 - RNA, 20 nt, Human
cccugcagagggcacagaaa

SEQ ID NO: 1185705 - RNA, 12 nt, Human
cccugccacccu

SEQ ID NO: 1185706 - RNA, 14 nt, Human
cccugccacccugg

SEQ ID NO: 1185707 - RNA, 15 nt, Human
cccugccacccuggg

SEQ ID NO: 1185708 - RNA, 17 nt, Human
cccugccacccugggga

SEQ ID NO: 1185709 - RNA, 18 nt, Human
cccugccacccuggggag

SEQ ID NO: 1185710 - RNA, 13 nt, Human
cccugcccaccug

SEQ ID NO: 1185711 - RNA, 16 nt, Human
cccugccuccuuugug

SEQ ID NO: 1185712 - RNA, 23 nt, Human
cccugccuccuuugugaggaagc

SEQ ID NO: 1185713 - RNA, 12 nt, Human
cccuucccaccu

SEQ ID NO: 1185714 - RNA, 13 nt, Human
cccuucccaccuc

SEQ ID NO: 1185715 - RNA, 17 nt, Human
cccuuggauuguccccg

SEQ ID NO: 1185716 - RNA, 22 nt, Human
cccuugguuaggcauuguggga

SEQ ID NO: 1185717 - RNA, 23 nt, Human
cccuugguuaggcauugugggaa

SEQ ID NO: 1185718 - RNA, 22 nt, Human
cccuuguggucccaccccacac

SEQ ID NO: 1185719 - RNA, 17 nt, Human
ccgggaagggggcuggg

SEQ ID NO: 1185720 - RNA, 20 nt, Human
ccgggaagggggcugggaca

SEQ ID NO: 1185721 - RNA, 22 nt, Human
ccgggaggcagagguugcagug

SEQ ID NO: 1185722 - RNA, 21 nt, Human
ccuagaaauuccccacccuga

SEQ ID NO: 1185723 - RNA, 13 nt, Human
ccuaggugacaga

SEQ ID NO: 1185724 - RNA, 18 nt, Human
ccuacaggagugagcacu

SEQ ID NO: 1185725 - RNA, 13 nt, Human
ccuacccacccuc

SEQ ID NO: 1185726 - RNA, 18 nt, Human
ccuacccacccuccuuuc

SEQ ID NO: 1185727 - RNA, 19 nt, Human
ccuacuguaauuugugaua

SEQ ID NO: 1185728 - RNA, 13 nt, Human
ccuaaacauauga

SEQ ID NO: 1185729 - RNA, 16 nt, Human
ccuaaaauucagugga

SEQ ID NO: 1185730 - RNA, 19 nt, Human
ccuacagcuugaccgugag

SEQ ID NO: 1185731 - RNA, 22 nt, Human
ccuacaguugaaaaacagcuga

SEQ ID NO: 1185732 - RNA, 12 nt, Human
ccguuauuaaaa

SEQ ID NO: 1185733 - RNA, 16 nt, Human
ccucagaucuucugug

SEQ ID NO: 1185734 - RNA, 14 nt, Human
ccucagcauccugg

SEQ ID NO: 1185735 - RNA, 16 nt, Human
ccucagggucccuggu

SEQ ID NO: 1185736 - RNA, 17 nt, Human
ccucagggucccuggug

SEQ ID NO: 1185737 - RNA, 20 nt, Human
ccucagggucccugguggca

SEQ ID NO: 1185738 - RNA, 22 nt, Human
ccucagggucccugguggcagc

SEQ ID NO: 1185739 - RNA, 15 nt, Human
ccuaggugacagagu

SEQ ID NO: 1185740 - RNA, 18 nt, Human
ccuaggugacagagugag

SEQ ID NO: 1185741 - RNA, 16 nt, Human
ccuauuagagaagaga

SEQ ID NO: 1185742 - RNA, 17 nt, Human
ccuauuagagaagagau

SEQ ID NO: 1185743 - RNA, 24 nt, Human
ccucacaguccuuaccagcagagc

SEQ ID NO: 1185744 - RNA, 22 nt, Human
ccucaggugagaagcagaggaa

SEQ ID NO: 1185745 - RNA, 14 nt, Human
ccuccauccugagg

SEQ ID NO: 1185746 - RNA, 12 nt, Human
ccuccauccuga

SEQ ID NO: 1185747 - RNA, 13 nt, Human
ccuccauccugag

SEQ ID NO: 1185748 - RNA, 12 nt, Human
ccuccauguggg

SEQ ID NO: 1185749 - RNA, 15 nt, Human
ccuccaugugggcua

SEQ ID NO: 1185750 - RNA, 17 nt, Human
ccucccaaagugcuggg

SEQ ID NO: 1185751 - RNA, 14 nt, Human
ccucccaacucacc

SEQ ID NO: 1185752 - RNA, 11 nt, Human
ccuccaggugc

SEQ ID NO: 1185753 - RNA, 12 nt, Human
ccuccaggugca

SEQ ID NO: 1185754 - RNA, 17 nt, Human
ccuccaggugcacaagc

SEQ ID NO: 1185755 - RNA, 18 nt, Human
ccucaggugagaagcaga

SEQ ID NO: 1185756 - RNA, 20 nt, Human
ccucaggugagaagcagagg

SEQ ID NO: 1185757 - RNA, 12 nt, Human
ccucauacccac

SEQ ID NO: 1185758 - RNA, 18 nt, Human
ccucccgaauagcuggga

SEQ ID NO: 1185759 - RNA, 15 nt, Human
ccucccaacucaccc

SEQ ID NO: 1185760 - RNA, 19 nt, Human
ccucccgaauagcugggac

SEQ ID NO: 1185761 - RNA, 20 nt, Human
ccucccgaauagcugggacu

SEQ ID NO: 1185762 - RNA, 17 nt, Human
ccucccgaguagcuggg

SEQ ID NO: 1185763 - RNA, 18 nt, Human
ccucccgaguagcuggga

SEQ ID NO: 1185764 - RNA, 19 nt, Human
ccucccgaguagcugggac

SEQ ID NO: 1185765 - RNA, 13 nt, Human
ccucccucuuucc

SEQ ID NO: 1185766 - RNA, 11 nt, Human
ccuccucagau

SEQ ID NO: 1185767 - RNA, 12 nt, Human
ccuccuccagcc

SEQ ID NO: 1185768 - RNA, 14 nt, Human
ccuccucagaucuu

SEQ ID NO: 1185769 - RNA, 21 nt, Human
ccucccgaauagcugggacua

SEQ ID NO: 1185770 - RNA, 21 nt, Human
ccuccuccagccgccaugcuc

SEQ ID NO: 1185771 - RNA, 15 nt, Human
ccucuccccagcaag

SEQ ID NO: 1185772 - RNA, 20 nt, Human
ccucuccccagcaagugaga

SEQ ID NO: 1185773 - RNA, 13 nt, Human
ccucucccuugga

SEQ ID NO: 1185774 - RNA, 22 nt, Human
ccucucccuuggauuguccccg

SEQ ID NO: 1185775 - RNA, 11 nt, Human
ccucugcacaa

SEQ ID NO: 1185776 - RNA, 16 nt, Human
ccucugcacuccccug

SEQ ID NO: 1185777 - RNA, 17 nt, Human
ccucugcacuccccugc

SEQ ID NO: 1185778 - RNA, 18 nt, Human
ccucugcacuccccugcu

SEQ ID NO: 1185779 - RNA, 14 nt, Human
ccucugcagcaaua

SEQ ID NO: 1185780 - RNA, 18 nt, Human
ccucugcagcaauaaagc

SEQ ID NO: 1185781 - RNA, 19 nt, Human
ccucugcagcaauaaagca

SEQ ID NO: 1185782 - RNA, 19 nt, Human
ccucugcacuccccugcug

SEQ ID NO: 1185783 - RNA, 13 nt, Human
ccucugcccacuc

SEQ ID NO: 1185784 - RNA, 16 nt, Human
ccucugcccacucccu

SEQ ID NO: 1185785 - RNA, 13 nt, Human
ccucugacacaca

SEQ ID NO: 1185786 - RNA, 14 nt, Human
ccucugacacacag

SEQ ID NO: 1185787 - RNA, 15 nt, Human
ccucugacacacagc

SEQ ID NO: 1185788 - RNA, 19 nt, Human
ccucugacacacagcucug

SEQ ID NO: 1185789 - RNA, 20 nt, Human
ccucugacacacagcucugu

SEQ ID NO: 1185790 - RNA, 21 nt, Human
ccucugacacacagcucuguc

SEQ ID NO: 1185791 - RNA, 12 nt, Human
cgcccagucugg

SEQ ID NO: 1185792 - RNA, 22 nt, Human
cgcccaggcuuagucacugaga

SEQ ID NO: 1185793 - RNA, 17 nt, Human
ccucugcccacucccug

SEQ ID NO: 1185794 - RNA, 19 nt, Human
ccucugcccacucccugca

SEQ ID NO: 1185795 - RNA, 20 nt, Human
ccucugcccacucccugcaa

SEQ ID NO: 1185796 - RNA, 23 nt, Human
cgccaggggaaaaucagccugcu

SEQ ID NO: 1185797 - RNA, 14 nt, Human
cgccaucccagccc

SEQ ID NO: 1185798 - RNA, 16 nt, Human
cgccaucccagcccca

SEQ ID NO: 1185799 - RNA, 17 nt, Human
cgccaucccagccccaa

SEQ ID NO: 1185800 - RNA, 17 nt, Human
cgcuacccgggaagggg

SEQ ID NO: 1185801 - RNA, 16 nt, Human
cgcuacccgggaaggg

SEQ ID NO: 1185802 - RNA, 15 nt, Human
cgcucucuggccuuc

SEQ ID NO: 1185803 - RNA, 22 nt, Human
cgcuaagagggagggagggcuc

SEQ ID NO: 1185804 - RNA, 18 nt, Human
cgcucucuggccuucggc

SEQ ID NO: 1185805 - RNA, 22 nt, Human
cgcugucagccauuccuguucc

SEQ ID NO: 1185806 - RNA, 15 nt, Human
cgcugugcugcccug

SEQ ID NO: 1185807 - RNA, 16 nt, Human
cgcugugcugcccugc

SEQ ID NO: 1185808 - RNA, 17 nt, Human
cgcugugcugcccugcc

SEQ ID NO: 1185809 - RNA, 18 nt, Human
cgcugugcugcccugccc

SEQ ID NO: 1185810 - RNA, 15 nt, Human
cggaaaacaugcuac

SEQ ID NO: 1185811 - RNA, 20 nt, Human
cggaaaacaugcuacacacu

SEQ ID NO: 1185812 - RNA, 12 nt, Human
cggccuccaucc

SEQ ID NO: 1185813 - RNA, 14 nt, Human
cggccuccauccug

SEQ ID NO: 1185814 - RNA, 13 nt, Human
cggccccugcugg

SEQ ID NO: 1185815 - RNA, 18 nt, Human
cggccccugcugguucag

SEQ ID NO: 1185816 - RNA, 19 nt, Human
cggccccugcugguucagg

SEQ ID NO: 1185817 - RNA, 13 nt, Human
cggaagagccuug

SEQ ID NO: 1185818 - RNA, 14 nt, Human
cggaauaguuggcu

SEQ ID NO: 1185819 - RNA, 11 nt, Human
cggccaccugc

SEQ ID NO: 1185820 - RNA, 15 nt, Human
cggccaccugcggug

SEQ ID NO: 1185821 - RNA, 16 nt, Human
cggccaccugcggugc

SEQ ID NO: 1185822 - RNA, 17 nt, Human
cggccaccugcggugcu

SEQ ID NO: 1185823 - RNA, 14 nt, Human
cggcuggcagccca

SEQ ID NO: 1185824 - RNA, 22 nt, Human
cggcuggccuggccccucaggg

SEQ ID NO: 1185825 - RNA, 23 nt, Human
cggcuggccuggccccucagggu

SEQ ID NO: 1185826 - RNA, 18 nt, Human
cgggaggucgaggcagga

SEQ ID NO: 1185827 - RNA, 20 nt, Human
cgggaggucgaggcaggagg

SEQ ID NO: 1185828 - RNA, 14 nt, Human
cgggcacucagaag

SEQ ID NO: 1185829 - RNA, 22 nt, Human
cgggcacucagaagacacugau

SEQ ID NO: 1185830 - RNA, 23 nt, Human
cggggacagcuccuucuguccua

SEQ ID NO: 1185831 - RNA, 15 nt, Human
cgggggcagagaggg

SEQ ID NO: 1185832 - RNA, 14 nt, Human
cgguccacccagga

SEQ ID NO: 1185833 - RNA, 15 nt, Human
cgguccacccaggag

SEQ ID NO: 1185834 - RNA, 16 nt, Human
cgguccacccaggagc

SEQ ID NO: 1185835 - RNA, 20 nt, Human
cgguccacccaggagccccg

SEQ ID NO: 1185836 - RNA, 17 nt, Human
cggugagcuacaaaugc

SEQ ID NO: 1185837 - RNA, 20 nt, Human
cggugagaggggaacagacu

SEQ ID NO: 1185838 - RNA, 21 nt, Human
cggugagaggggaacagacug

SEQ ID NO: 1185839 - RNA, 16 nt, Human
cgucucauacucaccu

SEQ ID NO: 1185840 - RNA, 18 nt, Human
cggugcuaucucccccag

SEQ ID NO: 1185841 - RNA, 20 nt, Human
cggugcuaucucccccagcc

SEQ ID NO: 1185842 - RNA, 21 nt, Human
cggugcuaucucccccagccc

SEQ ID NO: 1185843 - RNA, 22 nt, Human
cggugcuaucucccccagcccc

SEQ ID NO: 1185844 - RNA, 20 nt, Human
cgucugacaggcaaugcugg

SEQ ID NO: 1185845 - RNA, 21 nt, Human
cgucugacaggcaaugcuggc

SEQ ID NO: 1185846 - RNA, 22 nt, Human
cgucugacaggcaaugcuggcu

SEQ ID NO: 1185847 - RNA, 16 nt, Human
cgugcacacaccagag

SEQ ID NO: 1185848 - RNA, 18 nt, Human
cgugcacacaccagagcc

SEQ ID NO: 1185849 - RNA, 19 nt, Human
cgugcacacaccagagccc

SEQ ID NO: 1185850 - RNA, 20 nt, Human
cgugcacacaccagagccca

SEQ ID NO: 1185851 - RNA, 21 nt, Human
cgugcaguggugcgaucuggg

SEQ ID NO: 1185852 - RNA, 22 nt, Human
cgugcaguggugcgaucugggu

SEQ ID NO: 1185853 - RNA, 20 nt, Human
cuaaaucuccaaaauaaaac

SEQ ID NO: 1185854 - RNA, 15 nt, Human
cuaaauggaaccacu

SEQ ID NO: 1185855 - RNA, 16 nt, Human
cuaaauggaaccacuc

SEQ ID NO: 1185856 - RNA, 17 nt, Human
cuaaauggaaccacucu

SEQ ID NO: 1185857 - RNA, 18 nt, Human
cuaaauggaaccacucua

SEQ ID NO: 1185858 - RNA, 16 nt, Human
cuaaauguugaaagau

SEQ ID NO: 1185859 - RNA, 16 nt, Human
cuaaauucaugcugcu

SEQ ID NO: 1185860 - RNA, 15 nt, Human
cuaacauggaaguac

SEQ ID NO: 1185861 - RNA, 17 nt, Human
cuaacauggaaguacua

SEQ ID NO: 1185862 - RNA, 22 nt, Human
cuaagcuauucaguaauaacuc

SEQ ID NO: 1185863 - RNA, 15 nt, Human
cuaaggugugcucug

SEQ ID NO: 1185864 - RNA, 19 nt, Human
cuaagcuauucaguaauaa

SEQ ID NO: 1185865 - RNA, 21 nt, Human
cuaagcuauucaguaauaacu

SEQ ID NO: 1185866 - RNA, 17 nt, Human
cuaaccacgcuggaccu

SEQ ID NO: 1185867 - RNA, 16 nt, Human
cuaaccagcagaaaug

SEQ ID NO: 1185868 - RNA, 17 nt, Human
cuaaccagcagaaaugc

SEQ ID NO: 1185869 - RNA, 14 nt, Human
cuaagcaaaaugug

SEQ ID NO: 1185870 - RNA, 15 nt, Human
cuaagcaaaauguga

SEQ ID NO: 1185871 - RNA, 18 nt, Human
cuaagcaaaaugugauau

SEQ ID NO: 1185872 - RNA, 16 nt, Human
cuaaggugugcucuga

SEQ ID NO: 1185873 - RNA, 21 nt, Human
cuaauaaaauuuaaaagucuu

SEQ ID NO: 1185874 - RNA, 14 nt, Human
cuaauguacugcau

SEQ ID NO: 1185875 - RNA, 16 nt, Human
cuaauguacugcauau

SEQ ID NO: 1185876 - RNA, 13 nt, Human
cuacacacugcau

SEQ ID NO: 1185877 - RNA, 15 nt, Human
cuacacacugcaugu

SEQ ID NO: 1185878 - RNA, 21 nt, Human
cuacacacugcauguuuguga

SEQ ID NO: 1185879 - RNA, 16 nt, Human
cuacacuccagugaga

SEQ ID NO: 1185880 - RNA, 17 nt, Human
cuacacuccagugagac

SEQ ID NO: 1185881 - RNA, 15 nt, Human
cuacagaggccaugg

SEQ ID NO: 1185882 - RNA, 17 nt, Human
cuacagaggccaugggc

SEQ ID NO: 1185883 - RNA, 18 nt, Human
cuaccauccccuguagag

SEQ ID NO: 1185884 - RNA, 17 nt, Human
cuacccacccuccuuuc

SEQ ID NO: 1185885 - RNA, 22 nt, Human
cuacccacccuccuuucaccac

SEQ ID NO: 1185886 - RNA, 20 nt, Human
cuacccagcgagcccuggug

SEQ ID NO: 1185887 - RNA, 12 nt, Human
cuacccaggugc

SEQ ID NO: 1185888 - RNA, 15 nt, Human
cuacuugggaggcug

SEQ ID NO: 1185889 - RNA, 18 nt, Human
cuacuugggaggcugaga

SEQ ID NO: 1185890 - RNA, 19 nt, Human
cuacuugggaggcugagau

SEQ ID NO: 1185891 - RNA, 14 nt, Human
cuacccgggaaggg

SEQ ID NO: 1185892 - RNA, 15 nt, Human
cuacccgggaagggg

SEQ ID NO: 1185893 - RNA, 20 nt, Human
cuacccgggaagggggcugg

SEQ ID NO: 1185894 - RNA, 21 nt, Human
cuacccgggaagggggcuggg

SEQ ID NO: 1185895 - RNA, 16 nt, Human
cuacucugugucaggu

SEQ ID NO: 1185896 - RNA, 21 nt, Human
cuacucugugucagguggggc

SEQ ID NO: 1185897 - RNA, 14 nt, Human
cuacugaggugcua

SEQ ID NO: 1185898 - RNA, 16 nt, Human
cuacuguaauuuguga

SEQ ID NO: 1185899 - RNA, 17 nt, Human
cuacuguaauuugugau

SEQ ID NO: 1185900 - RNA, 20 nt, Human
cuagacgagcaggcuucuuc

SEQ ID NO: 1185901 - RNA, 21 nt, Human
cuagacgagcaggcuucuucc

SEQ ID NO: 1185902 - RNA, 15 nt, Human
cuagagguucaaaga

SEQ ID NO: 1185903 - RNA, 17 nt, Human
cuagagugaacuugggc

SEQ ID NO: 1185904 - RNA, 21 nt, Human
cuagagugaacuugggccacu

SEQ ID NO: 1185905 - RNA, 17 nt, Human
cuagcacuuugggaggc

SEQ ID NO: 1185906 - RNA, 21 nt, Human
cuacuguaauuugugauacaa

SEQ ID NO: 1185907 - RNA, 13 nt, Human
cuaggaacacucc

SEQ ID NO: 1185908 - RNA, 15 nt, Human
cuaggaacacuccuu

SEQ ID NO: 1185909 - RNA, 21 nt, Human
cuaggaagacuuuggaaagag

SEQ ID NO: 1185910 - RNA, 12 nt, Human
cuagcagcaggg

SEQ ID NO: 1185911 - RNA, 22 nt, Human
cuaggaccccuccaugugggcu

SEQ ID NO: 1185912 - RNA, 17 nt, Human
cuaggaggucucuaaga

SEQ ID NO: 1185913 - RNA, 23 nt, Human
cuagugugguguuuccuggcacu

SEQ ID NO: 1185914 - RNA, 21 nt, Human
cuagugugguguuuccuggca

SEQ ID NO: 1185915 - RNA, 22 nt, Human
cuagugugguguuuccuggcac

SEQ ID NO: 1185916 - RNA, 19 nt, Human
cuagugugguguuuccugg

SEQ ID NO: 1185917 - RNA, 22 nt, Human
cuaguauuucuaugaaauauua

SEQ ID NO: 1185918 - RNA, 19 nt, Human
cuaguauuucuaugaaaua

SEQ ID NO: 1185919 - RNA, 20 nt, Human
cuaguauuucuaugaaauau

SEQ ID NO: 1185920 - RNA, 15 nt, Human
cuaguaucaaaagaa

SEQ ID NO: 1185921 - RNA, 17 nt, Human
cuaguaucaaaagaaag

SEQ ID NO: 1185922 - RNA, 23 nt, Human
cuaguaucaaaagaaagaaaauc

SEQ ID NO: 1185923 - RNA, 21 nt, Human
cuaggcauuugcugaauacag

SEQ ID NO: 1185924 - RNA, 14 nt, Human
cuaguuccaccauc

SEQ ID NO: 1185925 - RNA, 19 nt, Human
cuauauuguuugcuaagca

SEQ ID NO: 1185926 - RNA, 22 nt, Human
cuauauuguuuucaguguacau

SEQ ID NO: 1185927 - RNA, 23 nt, Human
cuauauuguuuucaguguacaug

SEQ ID NO: 1185928 - RNA, 20 nt, Human
cuauauuuuuuguuaaauga

SEQ ID NO: 1185929 - RNA, 22 nt, Human
cuauauuuuuuguuaaaugauu

SEQ ID NO: 1185930 - RNA, 20 nt, Human
cuaucaaguauuauaccuuu

SEQ ID NO: 1185931 - RNA, 13 nt, Human
cuaugaaauauua

SEQ ID NO: 1185932 - RNA, 18 nt, Human
cuaugaaauauuauguua

SEQ ID NO: 1185933 - RNA, 14 nt, Human
cuaugacacaugca

SEQ ID NO: 1185934 - RNA, 13 nt, Human
cucaaauuucuaa

SEQ ID NO: 1185935 - RNA, 20 nt, Human
cucaacucuccuccagaguc

SEQ ID NO: 1185936 - RNA, 21 nt, Human
cucaacucuccuccagaguca

SEQ ID NO: 1185937 - RNA, 14 nt, Human
cuaugcauuugaaa

SEQ ID NO: 1185938 - RNA, 17 nt, Human
cucaccccuugccauaa

SEQ ID NO: 1185939 - RNA, 16 nt, Human
cucacuauguugccca

SEQ ID NO: 1185940 - RNA, 17 nt, Human
cucacuauguugcccag

SEQ ID NO: 1185941 - RNA, 12 nt, Human
cucaccccagcc

SEQ ID NO: 1185942 - RNA, 13 nt, Human
cucaccccagccc

SEQ ID NO: 1185943 - RNA, 14 nt, Human
cucaccccagcccc

SEQ ID NO: 1185944 - RNA, 13 nt, Human
cucacauuuauau

SEQ ID NO: 1185945 - RNA, 20 nt, Human
cucaccagccccagugccca

SEQ ID NO: 1185946 - RNA, 21 nt, Human
cucaccagccccagugcccac

SEQ ID NO: 1185947 - RNA, 18 nt, Human
cucaagugauucuccugc

SEQ ID NO: 1185948 - RNA, 19 nt, Human
cucaagugauucuccugcc

SEQ ID NO: 1185949 - RNA, 20 nt, Human
cucaagugauucuccugccu

SEQ ID NO: 1185950 - RNA, 21 nt, Human
cucaagugauucuccugccuc

SEQ ID NO: 1185951 - RNA, 11 nt, Human
cuaugcauuug

SEQ ID NO: 1185952 - RNA, 12 nt, Human
cuaugcauuuga

SEQ ID NO: 1185953 - RNA, 21 nt, Human
cuaugcauuugaaaauuuuga

SEQ ID NO: 1185954 - RNA, 17 nt, Human
cucccaaagugcuggga

SEQ ID NO: 1185955 - RNA, 13 nt, Human
cuccaugugggcu

SEQ ID NO: 1185956 - RNA, 18 nt, Human
cucacuauguugcccagg

SEQ ID NO: 1185957 - RNA, 19 nt, Human
cucacuauguugcccaggc

SEQ ID NO: 1185958 - RNA, 11 nt, Human
cuccauccuga

SEQ ID NO: 1185959 - RNA, 16 nt, Human
cuccauccugaggcuc

SEQ ID NO: 1185960 - RNA, 18 nt, Human
cuccauccugaggcucca

SEQ ID NO: 1185961 - RNA, 20 nt, Human
cuccauccugaggcuccacu

SEQ ID NO: 1185962 - RNA, 18 nt, Human
cucccaaagugcugggau

SEQ ID NO: 1185963 - RNA, 14 nt, Human
cuccaugugggcua

SEQ ID NO: 1185964 - RNA, 23 nt, Human
cucccaaagugcugggauuacag

SEQ ID NO: 1185965 - RNA, 17 nt, Human
cucccaacucaccccag

SEQ ID NO: 1185966 - RNA, 22 nt, Human
cucccaacucaccccagcccca

SEQ ID NO: 1185967 - RNA, 11 nt, Human
cucccaucugu

SEQ ID NO: 1185968 - RNA, 14 nt, Human
cucccaucugugaa

SEQ ID NO: 1185969 - RNA, 15 nt, Human
cucccaucugugaaa

SEQ ID NO: 1185970 - RNA, 18 nt, Human
cucccaucugugaaagga

SEQ ID NO: 1185971 - RNA, 23 nt, Human
cucccaucugugaaaggaaagag

SEQ ID NO: 1185972 - RNA, 19 nt, Human
cucccgaauagcugggacu

SEQ ID NO: 1185973 - RNA, 18 nt, Human
cucccgaguagcugggac

SEQ ID NO: 1185974 - RNA, 13 nt, Human
cuccccugcuggg

SEQ ID NO: 1185975 - RNA, 14 nt, Human
cuccccugcugggu

SEQ ID NO: 1185976 - RNA, 17 nt, Human
cucccgaauagcuggga

SEQ ID NO: 1185977 - RNA, 18 nt, Human
cucccgaauagcugggac

SEQ ID NO: 1185978 - RNA, 16 nt, Human
cucccgaguagcuggg

SEQ ID NO: 1185979 - RNA, 17 nt, Human
cucccgaguagcuggga

SEQ ID NO: 1185980 - RNA, 12 nt, Human
cuccccagcaag

SEQ ID NO: 1185981 - RNA, 20 nt, Human
cuccccagcaagugagagcu

SEQ ID NO: 1185982 - RNA, 21 nt, Human
cuccccagcaagugagagcug

SEQ ID NO: 1185983 - RNA, 12 nt, Human
cuccccugcugg

SEQ ID NO: 1185984 - RNA, 20 nt, Human
cucccuuuuaauccuggcug

SEQ ID NO: 1185985 - RNA, 19 nt, Human
cucccuuuuaauccuggcu

SEQ ID NO: 1185986 - RNA, 15 nt, Human
cuccgaccagacacc

SEQ ID NO: 1185987 - RNA, 16 nt, Human
cuccugccucagccuc

SEQ ID NO: 1185988 - RNA, 15 nt, Human
cuccugccucagccu

SEQ ID NO: 1185989 - RNA, 16 nt, Human
cuccugugugugcgcc

SEQ ID NO: 1185990 - RNA, 19 nt, Human
cuccugugugugcgccuac

SEQ ID NO: 1185991 - RNA, 11 nt, Human
cuccugcaggc

SEQ ID NO: 1185992 - RNA, 12 nt, Human
cuccugcaggca

SEQ ID NO: 1185993 - RNA, 17 nt, Human
cuccugcaggcagccag

SEQ ID NO: 1185994 - RNA, 18 nt, Human
cuccugcaggcagccagg

SEQ ID NO: 1185995 - RNA, 20 nt, Human
cuccugcaggcagccaggcc

SEQ ID NO: 1185996 - RNA, 21 nt, Human
cuccugcaggcagccaggcca

SEQ ID NO: 1185997 - RNA, 11 nt, Human
cuccugcccuu

SEQ ID NO: 1185998 - RNA, 13 nt, Human
cuccugccucagc

SEQ ID NO: 1185999 - RNA, 14 nt, Human
cuccugccucagcc

SEQ ID NO: 1186000 - RNA, 20 nt, Human
cuccugugugugcgccuaca

SEQ ID NO: 1186001 - RNA, 15 nt, Human
cuccugugucuugca

SEQ ID NO: 1186002 - RNA, 16 nt, Human
cuccuucacagauggg

SEQ ID NO: 1186003 - RNA, 17 nt, Human
cuccuucacagaugggu

SEQ ID NO: 1186004 - RNA, 19 nt, Human
cuccuucacagaugggugc

SEQ ID NO: 1186005 - RNA, 13 nt, Human
cuccuucaccuuu

SEQ ID NO: 1186006 - RNA, 19 nt, Human
cucuacagaggccaugggc

SEQ ID NO: 1186007 - RNA, 14 nt, Human
cucuacagaggcca

SEQ ID NO: 1186008 - RNA, 16 nt, Human
cucuacagaggccaug

SEQ ID NO: 1186009 - RNA, 13 nt, Human
cucuacagaggcc

SEQ ID NO: 1186010 - RNA, 13 nt, Human
cucuacaaaaagc

SEQ ID NO: 1186011 - RNA, 20 nt, Human
cucuaccauccccuguagag

SEQ ID NO: 1186012 - RNA, 13 nt, Human
cucuacccuggca

SEQ ID NO: 1186013 - RNA, 15 nt, Human
cucuaggaaauauuu

SEQ ID NO: 1186014 - RNA, 17 nt, Human
cucuaggaaauauuuau

SEQ ID NO: 1186015 - RNA, 23 nt, Human
cucuagggaaaaaccagcgugug

SEQ ID NO: 1186016 - RNA, 14 nt, Human
cucuccagccccug

SEQ ID NO: 1186017 - RNA, 15 nt, Human
cucuccagccccugg

SEQ ID NO: 1186018 - RNA, 16 nt, Human
cucuccagccccugga

SEQ ID NO: 1186019 - RNA, 17 nt, Human
cucuccagccccuggau

SEQ ID NO: 1186020 - RNA, 18 nt, Human
cucuccagccccuggaug

SEQ ID NO: 1186021 - RNA, 17 nt, Human
cucucaggccagcugcu

SEQ ID NO: 1186022 - RNA, 18 nt, Human
cucucaggccagcugcuu

SEQ ID NO: 1186023 - RNA, 19 nt, Human
cucucaggccagcugcuug

SEQ ID NO: 1186024 - RNA, 21 nt, Human
cucucaggccagcugcuuggg

SEQ ID NO: 1186025 - RNA, 22 nt, Human
cucucaggccagcugcuugggc

SEQ ID NO: 1186026 - RNA, 15 nt, Human
cucuaguuugauuaa

SEQ ID NO: 1186027 - RNA, 19 nt, Human
cucuaguuugauuaaauuc

SEQ ID NO: 1186028 - RNA, 20 nt, Human
cucuaguuugauuaaauucu

SEQ ID NO: 1186029 - RNA, 21 nt, Human
cucuaguuugauuaaauucuu

SEQ ID NO: 1186030 - RNA, 12 nt, Human
cucucaggccaa

SEQ ID NO: 1186031 - RNA, 20 nt, Human
cucucaggccaaacucaccu

SEQ ID NO: 1186032 - RNA, 21 nt, Human
cucucaggccaaacucaccug

SEQ ID NO: 1186033 - RNA, 22 nt, Human
cucucaggccaaacucaccugc

SEQ ID NO: 1186034 - RNA, 23 nt, Human
cucucaggccaaacucaccugcc

SEQ ID NO: 1186035 - RNA, 13 nt, Human
cucucaggccagc

SEQ ID NO: 1186036 - RNA, 15 nt, Human
cucucaggccagcug

SEQ ID NO: 1186037 - RNA, 19 nt, Human
cucuccagccccuggaugc

SEQ ID NO: 1186038 - RNA, 14 nt, Human
cucuccccagcaag

SEQ ID NO: 1186039 - RNA, 22 nt, Human
cucuccccagcaagugagagcu

SEQ ID NO: 1186040 - RNA, 24 nt, Human
cucuccccagcaagugagagcugg

SEQ ID NO: 1186041 - RNA, 13 nt, Human
cucuccucugcug

SEQ ID NO: 1186042 - RNA, 14 nt, Human
cucuccucugcugc

SEQ ID NO: 1186043 - RNA, 15 nt, Human
cucuccucugcugcu

SEQ ID NO: 1186044 - RNA, 18 nt, Human
cucuccucugcugcuggc

SEQ ID NO: 1186045 - RNA, 12 nt, Human
cucucucacucc

SEQ ID NO: 1186046 - RNA, 14 nt, Human
cucucucacuccuu

SEQ ID NO: 1186047 - RNA, 19 nt, Human
cucuggccuucggccucca

SEQ ID NO: 1186048 - RNA, 15 nt, Human
cucuggcagcucaga

SEQ ID NO: 1186049 - RNA, 16 nt, Human
cucuggcagcucagag

SEQ ID NO: 1186050 - RNA, 12 nt, Human
cucuggccuucg

SEQ ID NO: 1186051 - RNA, 16 nt, Human
cucuggacaggcaugu

SEQ ID NO: 1186052 - RNA, 22 nt, Human
cucuggacaggcauguucucug

SEQ ID NO: 1186053 - RNA, 12 nt, Human
cucuggcagcuc

SEQ ID NO: 1186054 - RNA, 14 nt, Human
cucuggcagcucag

SEQ ID NO: 1186055 - RNA, 13 nt, Human
cucucuccucccu

SEQ ID NO: 1186056 - RNA, 21 nt, Human
cucugccugaagucacacagu

SEQ ID NO: 1186057 - RNA, 22 nt, Human
cucugccugaagucacacagug

SEQ ID NO: 1186058 - RNA, 15 nt, Human
cucuggacaggcaug

SEQ ID NO: 1186059 - RNA, 15 nt, Human
cucugugucaggugg

SEQ ID NO: 1186060 - RNA, 19 nt, Human
cucugugucagguggggca

SEQ ID NO: 1186061 - RNA, 13 nt, Human
cucuuagaaaaac

SEQ ID NO: 1186062 - RNA, 15 nt, Human
cucuuagaaaaacca

SEQ ID NO: 1186063 - RNA, 13 nt, Human
cucuuccaggcug

SEQ ID NO: 1186064 - RNA, 14 nt, Human
cucuuccaggcugg

SEQ ID NO: 1186065 - RNA, 15 nt, Human
cucuuccaggcuggg

SEQ ID NO: 1186066 - RNA, 19 nt, Human
cucuuggguucaagcgauu

SEQ ID NO: 1186067 - RNA, 21 nt, Human
cucuuggguucaagcgauucu

SEQ ID NO: 1186068 - RNA, 22 nt, Human
cucuugaaauauaggaacuuaa

SEQ ID NO: 1186069 - RNA, 21 nt, Human
cucuuccaggcugggagagcc

SEQ ID NO: 1186070 - RNA, 13 nt, Human
cucuugguccugc

SEQ ID NO: 1186071 - RNA, 15 nt, Human
cucuugguccugcug

SEQ ID NO: 1186072 - RNA, 16 nt, Human
cucuugguccugcugc

SEQ ID NO: 1186073 - RNA, 17 nt, Human
cucuugguccugcugca

SEQ ID NO: 1186074 - RNA, 18 nt, Human
cucuuuaaugucacaggc

SEQ ID NO: 1186075 - RNA, 20 nt, Human
cucuuuaaugucacaggcag

SEQ ID NO: 1186076 - RNA, 21 nt, Human
cucuuuaaugucacaggcagg

SEQ ID NO: 1186077 - RNA, 22 nt, Human
cucuuuaaugucacaggcaggu

SEQ ID NO: 1186078 - RNA, 23 nt, Human
cucuuuaaugucacaggcagguc

SEQ ID NO: 1186079 - RNA, 17 nt, Human
cucuuucccucccuucc

SEQ ID NO: 1186080 - RNA, 23 nt, Human
cugaaagcccugagcuuucugcu

SEQ ID NO: 1186081 - RNA, 16 nt, Human
cugaaagcccugagcu

SEQ ID NO: 1186082 - RNA, 17 nt, Human
cugaaagcccugagcuu

SEQ ID NO: 1186083 - RNA, 18 nt, Human
cugaaagcccugagcuuu

SEQ ID NO: 1186084 - RNA, 19 nt, Human
cugaaagcccugagcuuuc

SEQ ID NO: 1186085 - RNA, 17 nt, Human
cucuuucuauuguuucu

SEQ ID NO: 1186086 - RNA, 15 nt, Human
cugaaagcccugagc

SEQ ID NO: 1186087 - RNA, 23 nt, Human
cugaagaagcaccaaucaugaau

SEQ ID NO: 1186088 - RNA, 19 nt, Human
cugaagaauugaaaaacca

SEQ ID NO: 1186089 - RNA, 19 nt, Human
cugagacagcccgggcucu

SEQ ID NO: 1186090 - RNA, 16 nt, Human
cugagacagcccgggc

SEQ ID NO: 1186091 - RNA, 17 nt, Human
cugagacagcccgggcu

SEQ ID NO: 1186092 - RNA, 18 nt, Human
cugagacagcccgggcuc

SEQ ID NO: 1186093 - RNA, 17 nt, Human
cugagccagauuucacu

SEQ ID NO: 1186094 - RNA, 18 nt, Human
cugagccagauuucacuc

SEQ ID NO: 1186095 - RNA, 19 nt, Human
cugagccagauuucacucu

SEQ ID NO: 1186096 - RNA, 20 nt, Human
cugagccagauuucacucuc

SEQ ID NO: 1186097 - RNA, 21 nt, Human
cugagccagauuucacucucc

SEQ ID NO: 1186098 - RNA, 16 nt, Human
cugagcgacagugaga

SEQ ID NO: 1186099 - RNA, 20 nt, Human
cugagcgacagugagacucu

SEQ ID NO: 1186100 - RNA, 12 nt, Human
cugaggcccaga

SEQ ID NO: 1186101 - RNA, 13 nt, Human
cugaggcccagag

SEQ ID NO: 1186102 - RNA, 14 nt, Human
cugaggcccagagg

SEQ ID NO: 1186103 - RNA, 15 nt, Human
cugaggcccagaggg

SEQ ID NO: 1186104 - RNA, 16 nt, Human
cugaggcccagagggc

SEQ ID NO: 1186105 - RNA, 17 nt, Human
cugaggcccagagggcc

SEQ ID NO: 1186106 - RNA, 18 nt, Human
cugaggcccagagggccu

SEQ ID NO: 1186107 - RNA, 19 nt, Human
cugaggcccagagggccug

SEQ ID NO: 1186108 - RNA, 21 nt, Human
cugaggcccagagggccugca

SEQ ID NO: 1186109 - RNA, 23 nt, Human
cugaggcccagagggccugcaag

SEQ ID NO: 1186110 - RNA, 14 nt, Human
cugaggcccuucuc

SEQ ID NO: 1186111 - RNA, 15 nt, Human
cugaggcccuucucu

SEQ ID NO: 1186112 - RNA, 18 nt, Human
cugaggcccuucucucca

SEQ ID NO: 1186113 - RNA, 19 nt, Human
cugaggcccuucucuccag

SEQ ID NO: 1186114 - RNA, 20 nt, Human
cugaggcccuucucuccagc

SEQ ID NO: 1186115 - RNA, 19 nt, Human
cugaagacucauucuucug

SEQ ID NO: 1186116 - RNA, 22 nt, Human
cugacauuguuggccaaagcca

SEQ ID NO: 1186117 - RNA, 13 nt, Human
cugacccacugcu

SEQ ID NO: 1186118 - RNA, 14 nt, Human
cugacccacugcuu

SEQ ID NO: 1186119 - RNA, 14 nt, Human
cugacccaugcugc

SEQ ID NO: 1186120 - RNA, 15 nt, Human
cugacccaugcugcc

SEQ ID NO: 1186121 - RNA, 16 nt, Human
cugacccaugcugccc

SEQ ID NO: 1186122 - RNA, 17 nt, Human
cugacccaugcugcccu

SEQ ID NO: 1186123 - RNA, 17 nt, Human
cugacucuuaagaagac

SEQ ID NO: 1186124 - RNA, 16 nt, Human
cugacuguuuucucuu

SEQ ID NO: 1186125 - RNA, 18 nt, Human
cugacuguuuucucuuga

SEQ ID NO: 1186126 - RNA, 14 nt, Human
cugagacagcccgg

SEQ ID NO: 1186127 - RNA, 15 nt, Human
cugagacagcccggg

SEQ ID NO: 1186128 - RNA, 16 nt, Human
cugcccaggccccugc

SEQ ID NO: 1186129 - RNA, 18 nt, Human
cugcccaggccccugcca

SEQ ID NO: 1186130 - RNA, 19 nt, Human
cugcccaggccccugccac

SEQ ID NO: 1186131 - RNA, 20 nt, Human
cugcccaggccccugccacc

SEQ ID NO: 1186132 - RNA, 15 nt, Human
cugccauuucugaga

SEQ ID NO: 1186133 - RNA, 16 nt, Human
cugccauuucugagau

SEQ ID NO: 1186134 - RNA, 12 nt, Human
cugcccaccugg

SEQ ID NO: 1186135 - RNA, 13 nt, Human
cugcccaccuggc

SEQ ID NO: 1186136 - RNA, 14 nt, Human
cugcccaggccccu

SEQ ID NO: 1186137 - RNA, 15 nt, Human
cugcccaggccccug

SEQ ID NO: 1186138 - RNA, 18 nt, Human
cugccccuggcagccccu

SEQ ID NO: 1186139 - RNA, 19 nt, Human
cugccccuggcagccccug

SEQ ID NO: 1186140 - RNA, 13 nt, Human
cugcccggcaggg

SEQ ID NO: 1186141 - RNA, 20 nt, Human
cugcccggcaggguccuaga

SEQ ID NO: 1186142 - RNA, 15 nt, Human
cugcauaugaaagga

SEQ ID NO: 1186143 - RNA, 20 nt, Human
cugcaucaagaugugacaug

SEQ ID NO: 1186144 - RNA, 12 nt, Human
cugccacccugg

SEQ ID NO: 1186145 - RNA, 14 nt, Human
cugccacccugggg

SEQ ID NO: 1186146 - RNA, 21 nt, Human
cugccacccuggggagaaagu

SEQ ID NO: 1186147 - RNA, 13 nt, Human
cugccaggaagcc

SEQ ID NO: 1186148 - RNA, 14 nt, Human
cugccaggaagcca

SEQ ID NO: 1186149 - RNA, 20 nt, Human
cugccaggaagccagcaggc

SEQ ID NO: 1186150 - RNA, 21 nt, Human
cugccaggaagccagcaggcu

SEQ ID NO: 1186151 - RNA, 22 nt, Human
cugccaggaagccagcaggcuc

SEQ ID NO: 1186152 - RNA, 21 nt, Human
cugccauccagguucagcuug

SEQ ID NO: 1186153 - RNA, 15 nt, Human
cugccauccucccaa

SEQ ID NO: 1186154 - RNA, 20 nt, Human
cugccaucucaccuccugcu

SEQ ID NO: 1186155 - RNA, 24 nt, Human
cugaggcccuucucuccagccccu

SEQ ID NO: 1186156 - RNA, 14 nt, Human
cugcaccggcuggc

SEQ ID NO: 1186157 - RNA, 22 nt, Human
cugaggcccuucucuccagccc

SEQ ID NO: 1186158 - RNA, 23 nt, Human
cugaggcccuucucuccagcccc

SEQ ID NO: 1186159 - RNA, 15 nt, Human
cugcaccggcuggcc

SEQ ID NO: 1186160 - RNA, 16 nt, Human
cugcaccggcuggccu

SEQ ID NO: 1186161 - RNA, 15 nt, Human
cugcaccgggccaca

SEQ ID NO: 1186162 - RNA, 18 nt, Human
cugcaccgggccacagag

SEQ ID NO: 1186163 - RNA, 20 nt, Human
cugcaccgggccacagagaa

SEQ ID NO: 1186164 - RNA, 20 nt, Human
cugcacuccagccuggguga

SEQ ID NO: 1186165 - RNA, 13 nt, Human
cugcacuccccug

SEQ ID NO: 1186166 - RNA, 14 nt, Human
cugcacuccccugc

SEQ ID NO: 1186167 - RNA, 19 nt, Human
cugcacuccccugcugggu

SEQ ID NO: 1186168 - RNA, 20 nt, Human
cugcacuccccugcugggug

SEQ ID NO: 1186169 - RNA, 21 nt, Human
cugcacuccccugcugggugu

SEQ ID NO: 1186170 - RNA, 10 nt, Human
cugcagaggg

SEQ ID NO: 1186171 - RNA, 13 nt, Human
cugcagagggcac

SEQ ID NO: 1186172 - RNA, 15 nt, Human
cugcagcaauaaagc

SEQ ID NO: 1186173 - RNA, 16 nt, Human
cugcagcaauaaagca

SEQ ID NO: 1186174 - RNA, 17 nt, Human
cugcagcaauaaagcag

SEQ ID NO: 1186175 - RNA, 13 nt, Human
cugcaguugccag

SEQ ID NO: 1186176 - RNA, 16 nt, Human
cugcaguugccaguca

SEQ ID NO: 1186177 - RNA, 17 nt, Human
cugcaguugccagucac

SEQ ID NO: 1186178 - RNA, 19 nt, Human
cugccugaagucacacagu

SEQ ID NO: 1186179 - RNA, 23 nt, Human
cugccugaagucacacagugagu

SEQ ID NO: 1186180 - RNA, 20 nt, Human
cugcccugcccaccuggccu

SEQ ID NO: 1186181 - RNA, 21 nt, Human
cugcccugcccaccuggccuc

SEQ ID NO: 1186182 - RNA, 18 nt, Human
cugccugaagucacacag

SEQ ID NO: 1186183 - RNA, 23 nt, Human
cugcgguccacccaggagccccg

SEQ ID NO: 1186184 - RNA, 18 nt, Human
cugcggugcuaucucccc

SEQ ID NO: 1186185 - RNA, 19 nt, Human
cugcggugcuaucuccccc

SEQ ID NO: 1186186 - RNA, 12 nt, Human
cugcucugguua

SEQ ID NO: 1186187 - RNA, 10 nt, Human
cugcugcagu

SEQ ID NO: 1186188 - RNA, 13 nt, Human
cugcugcaguugc

SEQ ID NO: 1186189 - RNA, 14 nt, Human
cugcugcaguugcc

SEQ ID NO: 1186190 - RNA, 15 nt, Human
cugcugcaguugcca

SEQ ID NO: 1186191 - RNA, 20 nt, Human
cugcggugcuaucuccccca

SEQ ID NO: 1186192 - RNA, 21 nt, Human
cugcggugcuaucucccccag

SEQ ID NO: 1186193 - RNA, 22 nt, Human
cugcggugcuaucucccccagc

SEQ ID NO: 1186194 - RNA, 23 nt, Human
cugcggugcuaucucccccagcc

SEQ ID NO: 1186195 - RNA, 19 nt, Human
cugcuccucuccccagcaa

SEQ ID NO: 1186196 - RNA, 20 nt, Human
cugcuccucuccccagcaag

SEQ ID NO: 1186197 - RNA, 23 nt, Human
cugcuccucuccccagcaaguga

SEQ ID NO: 1186198 - RNA, 15 nt, Human
cugcucuccgaccag

SEQ ID NO: 1186199 - RNA, 19 nt, Human
cugcucuccgaccagacac

SEQ ID NO: 1186200 - RNA, 14 nt, Human
cugcugcuggcugg

SEQ ID NO: 1186201 - RNA, 12 nt, Human
cugcugcuggcu

SEQ ID NO: 1186202 - RNA, 13 nt, Human
cugcugcuggcug

SEQ ID NO: 1186203 - RNA, 14 nt, Human
cugcuggguguggc

SEQ ID NO: 1186204 - RNA, 15 nt, Human
cugcuggguguggcg

SEQ ID NO: 1186205 - RNA, 17 nt, Human
cugcuggguguggcgca

SEQ ID NO: 1186206 - RNA, 13 nt, Human
cugcuugaggcaa

SEQ ID NO: 1186207 - RNA, 20 nt, Human
cugcuugaggcaacucaucu

SEQ ID NO: 1186208 - RNA, 21 nt, Human
cugcuugaggcaacucaucuu

SEQ ID NO: 1186209 - RNA, 15 nt, Human
cugcuuuuggucugu

SEQ ID NO: 1186210 - RNA, 17 nt, Human
cugcuuuuggucugugu

SEQ ID NO: 1186211 - RNA, 19 nt, Human
cugcuuuugucuaugggac

SEQ ID NO: 1186212 - RNA, 22 nt, Human
cugcuugaggcaacucaucuua

SEQ ID NO: 1186213 - RNA, 20 nt, Human
cugcuugcuugcuuuuuaau

SEQ ID NO: 1186214 - RNA, 13 nt, Human
cugcuugggcuuc

SEQ ID NO: 1186215 - RNA, 15 nt, Human
cugcuugggcuucau

SEQ ID NO: 1186216 - RNA, 17 nt, Human
cugcuugggcuucaucc

SEQ ID NO: 1186217 - RNA, 18 nt, Human
cugcuugggcuucauccu

SEQ ID NO: 1186218 - RNA, 19 nt, Human
cugcuugggcuucauccuc

SEQ ID NO: 1186219 - RNA, 19 nt, Human
cugcuugugaaaggaaaga

SEQ ID NO: 1186220 - RNA, 16 nt, Human
cuggcacccggccccu

SEQ ID NO: 1186221 - RNA, 17 nt, Human
cuggcacccggccccug

SEQ ID NO: 1186222 - RNA, 18 nt, Human
cuggcacccggccccugc

SEQ ID NO: 1186223 - RNA, 19 nt, Human
cuggcacccggccccugcu

SEQ ID NO: 1186224 - RNA, 18 nt, Human
cuggaauauauaaccagu

SEQ ID NO: 1186225 - RNA, 14 nt, Human
cuggaaugcagugg

SEQ ID NO: 1186226 - RNA, 14 nt, Human
cuggcaagaaugug

SEQ ID NO: 1186227 - RNA, 15 nt, Human
cuggcacuauaaugu

SEQ ID NO: 1186228 - RNA, 16 nt, Human
cuggcacuauaaugua

SEQ ID NO: 1186229 - RNA, 22 nt, Human
cuggcacuauaauguaagcucu

SEQ ID NO: 1186230 - RNA, 16 nt, Human
cuggcaugggaaugaa

SEQ ID NO: 1186231 - RNA, 18 nt, Human
cuggcaugggaaugaaug

SEQ ID NO: 1186232 - RNA, 19 nt, Human
cuggcaugggaaugaaugu

SEQ ID NO: 1186233 - RNA, 22 nt, Human
cuggcaugggaaugaaugucag

SEQ ID NO: 1186234 - RNA, 24 nt, Human
cuggcaugggaaugaaugucagug

SEQ ID NO: 1186235 - RNA, 23 nt, Human
cuggccucaagugauucuccugc

SEQ ID NO: 1186236 - RNA, 12 nt, Human
cuggccucugca

SEQ ID NO: 1186237 - RNA, 13 nt, Human
cuggccucugcac

SEQ ID NO: 1186238 - RNA, 14 nt, Human
cuggccucugcacu

SEQ ID NO: 1186239 - RNA, 16 nt, Human
cuggccucugcacucc

SEQ ID NO: 1186240 - RNA, 16 nt, Human
cuggccugagcuggga

SEQ ID NO: 1186241 - RNA, 18 nt, Human
cuggccugagcugggaug

SEQ ID NO: 1186242 - RNA, 14 nt, Human
cuggccuggccccu

SEQ ID NO: 1186243 - RNA, 16 nt, Human
cuggccuggccccuca

SEQ ID NO: 1186244 - RNA, 17 nt, Human
cuggccuggccccucag

SEQ ID NO: 1186245 - RNA, 19 nt, Human
cuggccuggccccucaggg

SEQ ID NO: 1186246 - RNA, 15 nt, Human
cuggccuucggccuc

SEQ ID NO: 1186247 - RNA, 16 nt, Human
cuggccuucggccucc

SEQ ID NO: 1186248 - RNA, 17 nt, Human
cuggccuucggccucca

SEQ ID NO: 1186249 - RNA, 18 nt, Human
cuggccuucggccuccau

SEQ ID NO: 1186250 - RNA, 21 nt, Human
cuggccuucggccuccauccu

SEQ ID NO: 1186251 - RNA, 18 nt, Human
cuggcuguuggcuggggg

SEQ ID NO: 1186252 - RNA, 17 nt, Human
cugggagagccuuccag

SEQ ID NO: 1186253 - RNA, 18 nt, Human
cugggagagccuuccagg

SEQ ID NO: 1186254 - RNA, 19 nt, Human
cugggagagccuuccaggg

SEQ ID NO: 1186255 - RNA, 20 nt, Human
cugggagagccuuccagggg

SEQ ID NO: 1186256 - RNA, 21 nt, Human
cugggagagccuuccaggggu

SEQ ID NO: 1186257 - RNA, 20 nt, Human
cuggcugguuagagguuccc

SEQ ID NO: 1186258 - RNA, 13 nt, Human
cuggcugucgaga

SEQ ID NO: 1186259 - RNA, 16 nt, Human
cuggcuguuggcuggg

SEQ ID NO: 1186260 - RNA, 17 nt, Human
cuggcuguuggcugggg

SEQ ID NO: 1186261 - RNA, 19 nt, Human
cugggaggucaaggcugca

SEQ ID NO: 1186262 - RNA, 21 nt, Human
cugggaggucaaggcugcagu

SEQ ID NO: 1186263 - RNA, 20 nt, Human
cugggauuacaggugugaac

SEQ ID NO: 1186264 - RNA, 17 nt, Human
cugggauuacaggugug

SEQ ID NO: 1186265 - RNA, 12 nt, Human
cugggagugagc

SEQ ID NO: 1186266 - RNA, 20 nt, Human
cugggaucccucauccucau

SEQ ID NO: 1186267 - RNA, 18 nt, Human
cugggaugauuggagggg

SEQ ID NO: 1186268 - RNA, 13 nt, Human
cuggucccacuca

SEQ ID NO: 1186269 - RNA, 14 nt, Human
cuggucccacucag

SEQ ID NO: 1186270 - RNA, 23 nt, Human
cuggucucaaacucuugaccuca

SEQ ID NO: 1186271 - RNA, 20 nt, Human
cugggcucccuucccaccuc

SEQ ID NO: 1186272 - RNA, 21 nt, Human
cugggcucccuucccaccucu

SEQ ID NO: 1186273 - RNA, 22 nt, Human
cugggcucccuucccaccucuc

SEQ ID NO: 1186274 - RNA, 16 nt, Human
cuggguacuuguggac

SEQ ID NO: 1186275 - RNA, 18 nt, Human
cuggguacuuguggacac

SEQ ID NO: 1186276 - RNA, 19 nt, Human
cuggguacuuguggacaca

SEQ ID NO: 1186277 - RNA, 12 nt, Human
cugguggcagcu

SEQ ID NO: 1186278 - RNA, 13 nt, Human
cugguggcagcuc

SEQ ID NO: 1186279 - RNA, 14 nt, Human
cugguggcagcuca

SEQ ID NO: 1186280 - RNA, 16 nt, Human
cugguggcagcucacc

SEQ ID NO: 1186281 - RNA, 20 nt, Human
cugguucaggguuggccccu

SEQ ID NO: 1186282 - RNA, 16 nt, Human
cugguuccauggccuc

SEQ ID NO: 1186283 - RNA, 18 nt, Human
cuguaauuugugauacaa

SEQ ID NO: 1186284 - RNA, 21 nt, Human
cuguaauuugugauacaaugc

SEQ ID NO: 1186285 - RNA, 22 nt, Human
cuguaauuugugauacaaugcu

SEQ ID NO: 1186286 - RNA, 23 nt, Human
cuguacagagcccacgcccccac

SEQ ID NO: 1186287 - RNA, 22 nt, Human
cuguacaugaaaacacauuuuu

SEQ ID NO: 1186288 - RNA, 23 nt, Human
cuguacaugaaaacacauuuuuc

SEQ ID NO: 1186289 - RNA, 21 nt, Human
cuguaccucuugagccuugaa

SEQ ID NO: 1186290 - RNA, 22 nt, Human
cugucccagugccgagaaggaa

SEQ ID NO: 1186291 - RNA, 13 nt, Human
cuguauuuuaaaa

SEQ ID NO: 1186292 - RNA, 16 nt, Human
cuguauuuuaaaagaa

SEQ ID NO: 1186293 - RNA, 19 nt, Human
cuguauuuuaaaagaauga

SEQ ID NO: 1186294 - RNA, 22 nt, Human
cuguaccucuugagccuugaac

SEQ ID NO: 1186295 - RNA, 15 nt, Human
cuguaucccaugagc

SEQ ID NO: 1186296 - RNA, 18 nt, Human
cuguaucccaugagccuc

SEQ ID NO: 1186297 - RNA, 15 nt, Human
cuguaugauucccag

SEQ ID NO: 1186298 - RNA, 19 nt, Human
cuguaucccaugagccuca

SEQ ID NO: 1186299 - RNA, 21 nt, Human
cuguccuacucugugucaggu

SEQ ID NO: 1186300 - RNA, 14 nt, Human
cuguccgagcuuug

SEQ ID NO: 1186301 - RNA, 22 nt, Human
cugucucaaaaaaagaaaaaga

SEQ ID NO: 1186302 - RNA, 18 nt, Human
cugucucuacuaaaaaua

SEQ ID NO: 1186303 - RNA, 13 nt, Human
cugucccccugac

SEQ ID NO: 1186304 - RNA, 14 nt, Human
cugucccccugaca

SEQ ID NO: 1186305 - RNA, 17 nt, Human
cuguccccgcacugggc

SEQ ID NO: 1186306 - RNA, 16 nt, Human
cuguccuacucugugu

SEQ ID NO: 1186307 - RNA, 17 nt, Human
cuguccuacucuguguc

SEQ ID NO: 1186308 - RNA, 18 nt, Human
cuguccuacucuguguca

SEQ ID NO: 1186309 - RNA, 20 nt, Human
cuguccuacucugugucagg

SEQ ID NO: 1186310 - RNA, 19 nt, Human
cuugaaauauaggaacuua

SEQ ID NO: 1186311 - RNA, 13 nt, Human
cuucuuuccacag

SEQ ID NO: 1186312 - RNA, 19 nt, Human
cuucuuuccacagaagcuc

SEQ ID NO: 1186313 - RNA, 19 nt, Human
cuugaacccgggaggcaga

SEQ ID NO: 1186314 - RNA, 20 nt, Human
cuugaacccgggaggcagag

SEQ ID NO: 1186315 - RNA, 14 nt, Human
cuugaacuccuggc

SEQ ID NO: 1186316 - RNA, 15 nt, Human
cuugaacuccuggcc

SEQ ID NO: 1186317 - RNA, 17 nt, Human
cuugaacuccuggccuc

SEQ ID NO: 1186318 - RNA, 18 nt, Human
cuugaacuccuggccuca

SEQ ID NO: 1186319 - RNA, 19 nt, Human
cuugaacuccuggccucaa

SEQ ID NO: 1186320 - RNA, 16 nt, Human
cuugaacuggguacuu

SEQ ID NO: 1186321 - RNA, 18 nt, Human
cuugaacuggguacuugu

SEQ ID NO: 1186322 - RNA, 20 nt, Human
cuugaacuggguacuugugg

SEQ ID NO: 1186323 - RNA, 15 nt, Human
cuugaacuuugaccu

SEQ ID NO: 1186324 - RNA, 18 nt, Human
cuugcagacucuacagag

SEQ ID NO: 1186325 - RNA, 20 nt, Human
cuugcagacucuacagaggc

SEQ ID NO: 1186326 - RNA, 21 nt, Human
cuugcaugaggcuaguguggu

SEQ ID NO: 1186327 - RNA, 21 nt, Human
cuugcaugguuuagaaagcuu

SEQ ID NO: 1186328 - RNA, 22 nt, Human
cuugcaaaguaucccuacugua

SEQ ID NO: 1186329 - RNA, 18 nt, Human
cuugaguugauucagcuc

SEQ ID NO: 1186330 - RNA, 14 nt, Human
cuugcaauggcagc

SEQ ID NO: 1186331 - RNA, 15 nt, Human
cuugcaauggcagcc

SEQ ID NO: 1186332 - RNA, 17 nt, Human
cuugaccauucuccacc

SEQ ID NO: 1186333 - RNA, 20 nt, Human
cuugaccauucuccaccugc

SEQ ID NO: 1186334 - RNA, 21 nt, Human
cuugaccauucuccaccugcc

SEQ ID NO: 1186335 - RNA, 19 nt, Human
cuugagccuugaacuuuga

SEQ ID NO: 1186336 - RNA, 20 nt, Human
cuugagccuugaacuuugac

SEQ ID NO: 1186337 - RNA, 22 nt, Human
cuugagccuugaacuuugaccu

SEQ ID NO: 1186338 - RNA, 13 nt, Human
cuugagcucagga

SEQ ID NO: 1186339 - RNA, 20 nt, Human
cuuggggaccagagcugcca

SEQ ID NO: 1186340 - RNA, 18 nt, Human
cuuguaaaggaauuuaaa

SEQ ID NO: 1186341 - RNA, 14 nt, Human
cuuggcugcaggga

SEQ ID NO: 1186342 - RNA, 17 nt, Human
cuuggggaccagagcug

SEQ ID NO: 1186343 - RNA, 18 nt, Human
cuuggggaccagagcugc

SEQ ID NO: 1186344 - RNA, 19 nt, Human
cuuggggaccagagcugcc

SEQ ID NO: 1186345 - RNA, 17 nt, Human
cuuguggacacagcucu

SEQ ID NO: 1186346 - RNA, 18 nt, Human
cuuguggacacagcucuu

SEQ ID NO: 1186347 - RNA, 17 nt, Human
cuugccaaauauaaaua

SEQ ID NO: 1186348 - RNA, 13 nt, Human
cuuggauuguccc

SEQ ID NO: 1186349 - RNA, 14 nt, Human
cuuggauugucccc

SEQ ID NO: 1186350 - RNA, 23 nt, Human
cuuggcucaaguccucuuuucug

SEQ ID NO: 1186351 - RNA, 12 nt, Human
cuuggcugcagg

SEQ ID NO: 1186352 - RNA, 13 nt, Human
cuuggcugcaggg

SEQ ID NO: 1186353 - RNA, 15 nt, Human
cuuuccaggaaggcu

SEQ ID NO: 1186354 - RNA, 19 nt, Human
cuuuccucaaaacuucaga

SEQ ID NO: 1186355 - RNA, 16 nt, Human
cuuuccaaaguacacu

SEQ ID NO: 1186356 - RNA, 22 nt, Human
cuuuccaaaguacacuguuuca

SEQ ID NO: 1186357 - RNA, 16 nt, Human
cuuuccaaaugcccag

SEQ ID NO: 1186358 - RNA, 14 nt, Human
cuuuccaggaaggc

SEQ ID NO: 1186359 - RNA, 21 nt, Human
cuuguggacacagcucuucuc

SEQ ID NO: 1186360 - RNA, 20 nt, Human
cuuguguguuuauugucaaa

SEQ ID NO: 1186361 - RNA, 17 nt, Human
cuuuccugaggcugggc

SEQ ID NO: 1186362 - RNA, 20 nt, Human
cuuuccugaggcugggcucc

SEQ ID NO: 1186363 - RNA, 21 nt, Human
cuuuccugaggcugggcuccc

SEQ ID NO: 1186364 - RNA, 14 nt, Human
cuuugcagacaggc

SEQ ID NO: 1186365 - RNA, 15 nt, Human
cuuugcagacaggca

SEQ ID NO: 1186366 - RNA, 16 nt, Human
cuuugcagacaggcaa

SEQ ID NO: 1186367 - RNA, 23 nt, Human
cuuuggaaagaguaggaagacuu

SEQ ID NO: 1186368 - RNA, 15 nt, Human
cuuuuaauccuggcu

SEQ ID NO: 1186369 - RNA, 22 nt, Human
cuuuucauuuaggugaggaagc

SEQ ID NO: 1186370 - RNA, 13 nt, Human
cuuuuccaacccu

SEQ ID NO: 1186371 - RNA, 23 nt, Human
cuuuuccaacccucaucaccaac

SEQ ID NO: 1186372 - RNA, 20 nt, Human
cuuuucgcaggauucuuccu

SEQ ID NO: 1186373 - RNA, 21 nt, Human
cuuuucgcaggauucuuccuc

SEQ ID NO: 1186374 - RNA, 22 nt, Human
cuuuuuaauauugauaugcuua

SEQ ID NO: 1186375 - RNA, 17 nt, Human
cuuuucuuucagccaag

SEQ ID NO: 1186376 - RNA, 13 nt, Human
cuuuucuuuucuu

SEQ ID NO: 1186377 - RNA, 15 nt, Human
cuuuuuuauacauaa

SEQ ID NO: 1186378 - RNA, 16 nt, Human
cuuuuuuauacauaaa

SEQ ID NO: 1186379 - RNA, 17 nt, Human
cuuuuuuauacauaaac

SEQ ID NO: 1186380 - RNA, 18 nt, Human
cuuuuuuauacauaaaca

SEQ ID NO: 1186381 - RNA, 15 nt, Human
cuuuuuucacuacau

SEQ ID NO: 1186382 - RNA, 11 nt, Human
gaaaaagaaaa

SEQ ID NO: 1186383 - RNA, 16 nt, Human
gaaaaagaaaaaauau

SEQ ID NO: 1186384 - RNA, 16 nt, Human
gaaagaucaaaagguu

SEQ ID NO: 1186385 - RNA, 13 nt, Human
gaaagcagaacag

SEQ ID NO: 1186386 - RNA, 14 nt, Human
gaaagcagaacagu

SEQ ID NO: 1186387 - RNA, 17 nt, Human
gaaagacuguacaaagu

SEQ ID NO: 1186388 - RNA, 11 nt, Human
gaaagagagaa

SEQ ID NO: 1186389 - RNA, 12 nt, Human
gaaagagagaaa

SEQ ID NO: 1186390 - RNA, 13 nt, Human
gaaagagagaaaa

SEQ ID NO: 1186391 - RNA, 14 nt, Human
gaaagagagaaaau

SEQ ID NO: 1186392 - RNA, 15 nt, Human
gaaagagagaaaaua

SEQ ID NO: 1186393 - RNA, 16 nt, Human
gaaagagagaaaauaa

SEQ ID NO: 1186394 - RNA, 17 nt, Human
gaaagagagaaaauaaa

SEQ ID NO: 1186395 - RNA, 18 nt, Human
gaaagagagaaaauaaaa

SEQ ID NO: 1186396 - RNA, 20 nt, Human
gaaagagagaaaauaaaaag

SEQ ID NO: 1186397 - RNA, 21 nt, Human
gaaagagagaaaauaaaaagu

SEQ ID NO: 1186398 - RNA, 22 nt, Human
gaaagagagaaaauaaaaaguu

SEQ ID NO: 1186399 - RNA, 23 nt, Human
gaaagagagaaaauaaaaaguua

SEQ ID NO: 1186400 - RNA, 16 nt, Human
gaaaaaugagccuggc

SEQ ID NO: 1186401 - RNA, 13 nt, Human
gaaaguucaugcu

SEQ ID NO: 1186402 - RNA, 11 nt, Human
gaaaggaaaga

SEQ ID NO: 1186403 - RNA, 16 nt, Human
gaaaggaaagaggcuc

SEQ ID NO: 1186404 - RNA, 18 nt, Human
gaaauaucugaaaaugua

SEQ ID NO: 1186405 - RNA, 19 nt, Human
gaaauaucugaaaauguau

SEQ ID NO: 1186406 - RNA, 20 nt, Human
gaaauaucugaaaauguaug

SEQ ID NO: 1186407 - RNA, 13 nt, Human
gaaauauuuauuu

SEQ ID NO: 1186408 - RNA, 15 nt, Human
gaaauauuuauuuua

SEQ ID NO: 1186409 - RNA, 16 nt, Human
gaaauauuuauuuuaa

SEQ ID NO: 1186410 - RNA, 11 nt, Human
gaaaugagcug

SEQ ID NO: 1186411 - RNA, 18 nt, Human
gaaaugaggucagagccu

SEQ ID NO: 1186412 - RNA, 16 nt, Human
gaaaugggcagagcag

SEQ ID NO: 1186413 - RNA, 17 nt, Human
gaaaugggcagagcaga

SEQ ID NO: 1186414 - RNA, 19 nt, Human
gaaaugggcagagcagaga

SEQ ID NO: 1186415 - RNA, 17 nt, Human
gaaauguacagcaagga

SEQ ID NO: 1186416 - RNA, 15 nt, Human
gaacacuccuucaca

SEQ ID NO: 1186417 - RNA, 16 nt, Human
gaacacuccuucacag

SEQ ID NO: 1186418 - RNA, 17 nt, Human
gaacacuccuucacaga

SEQ ID NO: 1186419 - RNA, 13 nt, Human
gaacacucugaga

SEQ ID NO: 1186420 - RNA, 20 nt, Human
gaacagacuggaagcacagc

SEQ ID NO: 1186421 - RNA, 22 nt, Human
gaacagacuggaagcacagcuu

SEQ ID NO: 1186422 - RNA, 24 nt, Human
gaacaguuaccucugccucagaaa

SEQ ID NO: 1186423 - RNA, 16 nt, Human
gaacucccuuucaaca

SEQ ID NO: 1186424 - RNA, 14 nt, Human
gaaccacaagacug

SEQ ID NO: 1186425 - RNA, 15 nt, Human
gaaccacaagacugc

SEQ ID NO: 1186426 - RNA, 18 nt, Human
gaaccacaucuugcucug

SEQ ID NO: 1186427 - RNA, 20 nt, Human
gaaccacaucuugcucugcu

SEQ ID NO: 1186428 - RNA, 14 nt, Human
gaacuuaaauaaug

SEQ ID NO: 1186429 - RNA, 17 nt, Human
gaacuuaaauaauguga

SEQ ID NO: 1186430 - RNA, 12 nt, Human
gaacuugguucc

SEQ ID NO: 1186431 - RNA, 17 nt, Human
gaacuuuccaggaaggc

SEQ ID NO: 1186432 - RNA, 18 nt, Human
gaacuuggcgcugccccu

SEQ ID NO: 1186433 - RNA, 17 nt, Human
gaacuugggccacugug

SEQ ID NO: 1186434 - RNA, 16 nt, Human
gaacuuugaccucugc

SEQ ID NO: 1186435 - RNA, 22 nt, Human
gaacuuugaccucugcagcaau

SEQ ID NO: 1186436 - RNA, 17 nt, Human
gaagauguagaggagaa

SEQ ID NO: 1186437 - RNA, 23 nt, Human
gaagauuuugaaauuuuuauuaa

SEQ ID NO: 1186438 - RNA, 15 nt, Human
gaagacuucaucccu

SEQ ID NO: 1186439 - RNA, 16 nt, Human
gaagacuucaucccuc

SEQ ID NO: 1186440 - RNA, 17 nt, Human
gaagacuucaucccucu

SEQ ID NO: 1186441 - RNA, 19 nt, Human
gaagacuucaucccucugg

SEQ ID NO: 1186442 - RNA, 12 nt, Human
gaagagccuugc

SEQ ID NO: 1186443 - RNA, 19 nt, Human
gaaggacauugcggacagc

SEQ ID NO: 1186444 - RNA, 20 nt, Human
gaaggacauugcggacagcc

SEQ ID NO: 1186445 - RNA, 21 nt, Human
gaaggacauugcggacagcca

SEQ ID NO: 1186446 - RNA, 21 nt, Human
gaaggaaacccagcucugguc

SEQ ID NO: 1186447 - RNA, 22 nt, Human
gaaggaaacccagcucuggucc

SEQ ID NO: 1186448 - RNA, 15 nt, Human
gaaggaacguccccu

SEQ ID NO: 1186449 - RNA, 19 nt, Human
gaaggaagacuucaucccu

SEQ ID NO: 1186450 - RNA, 14 nt, Human
gaagccgcuggggc

SEQ ID NO: 1186451 - RNA, 18 nt, Human
gaagccgcuggggccagu

SEQ ID NO: 1186452 - RNA, 20 nt, Human
gaagccgcuggggccaguug

SEQ ID NO: 1186453 - RNA, 21 nt, Human
gaagccgcuggggccaguugg

SEQ ID NO: 1186454 - RNA, 20 nt, Human
gaaggaaacccagcucuggu

SEQ ID NO: 1186455 - RNA, 15 nt, Human
gaagggggcugggac

SEQ ID NO: 1186456 - RNA, 13 nt, Human
gaagggggcuggg

SEQ ID NO: 1186457 - RNA, 23 nt, Human
gaaguccaagcauuuagauguau

SEQ ID NO: 1186458 - RNA, 19 nt, Human
gaaguaauaugcacacauu

SEQ ID NO: 1186459 - RNA, 20 nt, Human
gaaguaauaugcacacauuu

SEQ ID NO: 1186460 - RNA, 21 nt, Human
gaaguaauaugcacacauuuu

SEQ ID NO: 1186461 - RNA, 13 nt, Human
gaagucacacagu

SEQ ID NO: 1186462 - RNA, 18 nt, Human
gacacaggcccggcucca

SEQ ID NO: 1186463 - RNA, 12 nt, Human
gacacccuguga

SEQ ID NO: 1186464 - RNA, 13 nt, Human
gacacccugugau

SEQ ID NO: 1186465 - RNA, 22 nt, Human
gacacccugugauggggcccug

SEQ ID NO: 1186466 - RNA, 23 nt, Human
gacacccugugauggggcccugc

SEQ ID NO: 1186467 - RNA, 15 nt, Human
gacaccuugacaggg

SEQ ID NO: 1186468 - RNA, 17 nt, Human
gacaccuugacagggca

SEQ ID NO: 1186469 - RNA, 18 nt, Human
gacaccuugacagggcac

SEQ ID NO: 1186470 - RNA, 20 nt, Human
gacaccuugacagggcacac

SEQ ID NO: 1186471 - RNA, 15 nt, Human
gacacgaauauugcu

SEQ ID NO: 1186472 - RNA, 17 nt, Human
gacacgaauauugcuga

SEQ ID NO: 1186473 - RNA, 18 nt, Human
gacacgaauauugcugau

SEQ ID NO: 1186474 - RNA, 19 nt, Human
gacacgaauauugcugaug

SEQ ID NO: 1186475 - RNA, 15 nt, Human
gacacuaaccacgcu

SEQ ID NO: 1186476 - RNA, 16 nt, Human
gacacuaaccacgcug

SEQ ID NO: 1186477 - RNA, 17 nt, Human
gacacuaaccacgcugg

SEQ ID NO: 1186478 - RNA, 18 nt, Human
gacacuaaccacgcugga

SEQ ID NO: 1186479 - RNA, 14 nt, Human
gaagucuuuguaca

SEQ ID NO: 1186480 - RNA, 16 nt, Human
gaagucuuuguacaga

SEQ ID NO: 1186481 - RNA, 15 nt, Human
gacaagcucacagac

SEQ ID NO: 1186482 - RNA, 22 nt, Human
gacaaggauugcuacuguccua

SEQ ID NO: 1186483 - RNA, 16 nt, Human
gacaaugacccagugg

SEQ ID NO: 1186484 - RNA, 17 nt, Human
gacaaugacuuacugua

SEQ ID NO: 1186485 - RNA, 20 nt, Human
gacaaugacuuacuguacau

SEQ ID NO: 1186486 - RNA, 21 nt, Human
gacaaugacuuacuguacaug

SEQ ID NO: 1186487 - RNA, 12 nt, Human
gacaaugcaaac

SEQ ID NO: 1186488 - RNA, 16 nt, Human
gacaaugcaaaccauc

SEQ ID NO: 1186489 - RNA, 18 nt, Human
gacaaugcaaaccaucau

SEQ ID NO: 1186490 - RNA, 12 nt, Human
gacaauuuauua

SEQ ID NO: 1186491 - RNA, 13 nt, Human
gacaauuuauuau

SEQ ID NO: 1186492 - RNA, 19 nt, Human
gacaauuuauuauggcaca

SEQ ID NO: 1186493 - RNA, 13 nt, Human
gacacacagcucu

SEQ ID NO: 1186494 - RNA, 15 nt, Human
gacacaggcccggcu

SEQ ID NO: 1186495 - RNA, 17 nt, Human
gacacaggcccggcucc

SEQ ID NO: 1186496 - RNA, 17 nt, Human
gacagacacaggcccgg

SEQ ID NO: 1186497 - RNA, 15 nt, Human
gacagacacaggccc

SEQ ID NO: 1186498 - RNA, 16 nt, Human
gacagacacaggcccg

SEQ ID NO: 1186499 - RNA, 20 nt, Human
gacacuaaccacgcuggacc

SEQ ID NO: 1186500 - RNA, 21 nt, Human
gacacuaaccacgcuggaccu

SEQ ID NO: 1186501 - RNA, 14 nt, Human
gacagacacaggcc

SEQ ID NO: 1186502 - RNA, 13 nt, Human
gacagccacggcc

SEQ ID NO: 1186503 - RNA, 13 nt, Human
gacagcugccugg

SEQ ID NO: 1186504 - RNA, 14 nt, Human
gacagcugccuggg

SEQ ID NO: 1186505 - RNA, 15 nt, Human
gacagcugccuggga

SEQ ID NO: 1186506 - RNA, 23 nt, Human
gacaggaugguucccuugaugaa

SEQ ID NO: 1186507 - RNA, 14 nt, Human
gacaggcaaugcug

SEQ ID NO: 1186508 - RNA, 16 nt, Human
gacaggcaaugcuggc

SEQ ID NO: 1186509 - RNA, 17 nt, Human
gacaggcaaugcuggcu

SEQ ID NO: 1186510 - RNA, 18 nt, Human
gacaggcaaugcuggcug

SEQ ID NO: 1186511 - RNA, 18 nt, Human
gacaggcauguucucuga

SEQ ID NO: 1186512 - RNA, 19 nt, Human
gacaggcauguucucugag

SEQ ID NO: 1186513 - RNA, 20 nt, Human
gacaggcauguucucugagg

SEQ ID NO: 1186514 - RNA, 15 nt, Human
gacauacuaaccagc

SEQ ID NO: 1186515 - RNA, 16 nt, Human
gacauacuaaccagca

SEQ ID NO: 1186516 - RNA, 23 nt, Human
gacauacuaaccagcagaaaugc

SEQ ID NO: 1186517 - RNA, 14 nt, Human
gacaucaacagaua

SEQ ID NO: 1186518 - RNA, 22 nt, Human
gacaugggacauuugcucaugg

SEQ ID NO: 1186519 - RNA, 17 nt, Human
gacaugucuuuucuugc

SEQ ID NO: 1186520 - RNA, 21 nt, Human
gacaugucuuuucuugcauga

SEQ ID NO: 1186521 - RNA, 13 nt, Human
gaccccuccaugu

SEQ ID NO: 1186522 - RNA, 19 nt, Human
gacccugaggcccagaggg

SEQ ID NO: 1186523 - RNA, 20 nt, Human
gacccugaggcccagagggc

SEQ ID NO: 1186524 - RNA, 21 nt, Human
gacccugaggcccagagggcc

SEQ ID NO: 1186525 - RNA, 22 nt, Human
gacccugaggcccagagggccu

SEQ ID NO: 1186526 - RNA, 13 nt, Human
gacccugcccugu

SEQ ID NO: 1186527 - RNA, 15 nt, Human
gacccugcccugugg

SEQ ID NO: 1186528 - RNA, 16 nt, Human
gacccugcccuguggg

SEQ ID NO: 1186529 - RNA, 11 nt, Human
gacccacugcu

SEQ ID NO: 1186530 - RNA, 12 nt, Human
gacccacugcuu

SEQ ID NO: 1186531 - RNA, 14 nt, Human
gacccaugcugccc

SEQ ID NO: 1186532 - RNA, 15 nt, Human
gacccaugcugcccu

SEQ ID NO: 1186533 - RNA, 16 nt, Human
gacccaugcugcccug

SEQ ID NO: 1186534 - RNA, 17 nt, Human
gacccaugcugcccugu

SEQ ID NO: 1186535 - RNA, 23 nt, Human
gaccugauuucugagcauuuaau

SEQ ID NO: 1186536 - RNA, 11 nt, Human
gaccucaggcc

SEQ ID NO: 1186537 - RNA, 12 nt, Human
gaccucaggccu

SEQ ID NO: 1186538 - RNA, 13 nt, Human
gaccucaggccug

SEQ ID NO: 1186539 - RNA, 15 nt, Human
gaccugaggcccuuc

SEQ ID NO: 1186540 - RNA, 18 nt, Human
gaccugaggcccuucucu

SEQ ID NO: 1186541 - RNA, 21 nt, Human
gaccugaggcccuucucucca

SEQ ID NO: 1186542 - RNA, 17 nt, Human
gacccugcccugugggc

SEQ ID NO: 1186543 - RNA, 14 nt, Human
gaccgugaggccag

SEQ ID NO: 1186544 - RNA, 15 nt, Human
gaccgugaggccaga

SEQ ID NO: 1186545 - RNA, 22 nt, Human
gaccuuuaagagaaaugagcug

SEQ ID NO: 1186546 - RNA, 21 nt, Human
gaccuuucaauaggaaaaacu

SEQ ID NO: 1186547 - RNA, 21 nt, Human
gacggagucccaccuuggcug

SEQ ID NO: 1186548 - RNA, 23 nt, Human
gacggagucccaccuuggcugca

SEQ ID NO: 1186549 - RNA, 18 nt, Human
gacggagucccaccuugg

SEQ ID NO: 1186550 - RNA, 17 nt, Human
gacguguuaugacucca

SEQ ID NO: 1186551 - RNA, 20 nt, Human
gacguguuaugacuccagaa

SEQ ID NO: 1186552 - RNA, 14 nt, Human
gacucauucuucug

SEQ ID NO: 1186553 - RNA, 15 nt, Human
gacuccugcaggcag

SEQ ID NO: 1186554 - RNA, 16 nt, Human
gacuccugcaggcagc

SEQ ID NO: 1186555 - RNA, 22 nt, Human
gacguguuaugacuccagaauu

SEQ ID NO: 1186556 - RNA, 12 nt, Human
gacuacaggcac

SEQ ID NO: 1186557 - RNA, 17 nt, Human
gacuacucccccaggug

SEQ ID NO: 1186558 - RNA, 14 nt, Human
gagacucugucuca

SEQ ID NO: 1186559 - RNA, 12 nt, Human
gagaccaucccu

SEQ ID NO: 1186560 - RNA, 16 nt, Human
gagacucgcgacaaug

SEQ ID NO: 1186561 - RNA, 18 nt, Human
gagacucgcgacaaugca

SEQ ID NO: 1186562 - RNA, 14 nt, Human
gagacagcccgggc

SEQ ID NO: 1186563 - RNA, 17 nt, Human
gagacagcccgggcucu

SEQ ID NO: 1186564 - RNA, 18 nt, Human
gagacagcccgggcucug

SEQ ID NO: 1186565 - RNA, 19 nt, Human
gagacagcccgggcucugc

SEQ ID NO: 1186566 - RNA, 20 nt, Human
gagacagcccgggcucugcc

SEQ ID NO: 1186567 - RNA, 21 nt, Human
gagacagcccgggcucugccu

SEQ ID NO: 1186568 - RNA, 22 nt, Human
gagacagcccgggcucugccuc

SEQ ID NO: 1186569 - RNA, 23 nt, Human
gagacagcccgggcucugccucc

SEQ ID NO: 1186570 - RNA, 24 nt, Human
gagacagcccgggcucugccuccc

SEQ ID NO: 1186571 - RNA, 13 nt, Human
gagacagcucugc

SEQ ID NO: 1186572 - RNA, 15 nt, Human
gagacagcucugcau

SEQ ID NO: 1186573 - RNA, 18 nt, Human
gagacagcucugcauacu

SEQ ID NO: 1186574 - RNA, 19 nt, Human
gagagugaacaaauuuaca

SEQ ID NO: 1186575 - RNA, 17 nt, Human
gagauacagaauuuuau

SEQ ID NO: 1186576 - RNA, 15 nt, Human
gagagugaacaaauu

SEQ ID NO: 1186577 - RNA, 13 nt, Human
gagagccuuccag

SEQ ID NO: 1186578 - RNA, 14 nt, Human
gagagccuuccagg

SEQ ID NO: 1186579 - RNA, 13 nt, Human
gagaggggaacag

SEQ ID NO: 1186580 - RNA, 18 nt, Human
gagaggggaacagacugg

SEQ ID NO: 1186581 - RNA, 21 nt, Human
gagagggugggagugggccca

SEQ ID NO: 1186582 - RNA, 11 nt, Human
gagagaaaaua

SEQ ID NO: 1186583 - RNA, 12 nt, Human
gagagaaaauaa

SEQ ID NO: 1186584 - RNA, 17 nt, Human
gagagaagagaaugcac

SEQ ID NO: 1186585 - RNA, 14 nt, Human
gagagaaaauaaaa

SEQ ID NO: 1186586 - RNA, 13 nt, Human
gagagaaaauaaa

SEQ ID NO: 1186587 - RNA, 19 nt, Human
gagagacacacugaagaag

SEQ ID NO: 1186588 - RNA, 17 nt, Human
gacuccugcaggcagcc

SEQ ID NO: 1186589 - RNA, 18 nt, Human
gacuccugcaggcagcca

SEQ ID NO: 1186590 - RNA, 19 nt, Human
gacucgcgacaaugcaaac

SEQ ID NO: 1186591 - RNA, 14 nt, Human
gacuuggaagcucc

SEQ ID NO: 1186592 - RNA, 15 nt, Human
gacuuggaagcuccg

SEQ ID NO: 1186593 - RNA, 16 nt, Human
gacuuggaagcuccgc

SEQ ID NO: 1186594 - RNA, 19 nt, Human
gacuugugacgguguaccu

SEQ ID NO: 1186595 - RNA, 18 nt, Human
gagaaaauaaaaaguuaa

SEQ ID NO: 1186596 - RNA, 21 nt, Human
gagaaaauggacguguuauga

SEQ ID NO: 1186597 - RNA, 19 nt, Human
gagaaaauaaaaaguuaaa

SEQ ID NO: 1186598 - RNA, 16 nt, Human
gagaaacagccugugu

SEQ ID NO: 1186599 - RNA, 23 nt, Human
gagaaaguacuucuccacccugc

SEQ ID NO: 1186600 - RNA, 14 nt, Human
gagaagaacugaaa

SEQ ID NO: 1186601 - RNA, 16 nt, Human
gagaagaacugaaauc

SEQ ID NO: 1186602 - RNA, 20 nt, Human
gagaaugcacaaacagaggc

SEQ ID NO: 1186603 - RNA, 21 nt, Human
gagaaugcacaaacagaggcc

SEQ ID NO: 1186604 - RNA, 22 nt, Human
gagaaugcacaaacagaggccg

SEQ ID NO: 1186605 - RNA, 15 nt, Human
gagacacaagccuuc

SEQ ID NO: 1186606 - RNA, 17 nt, Human
gagacacaagccuucgg

SEQ ID NO: 1186607 - RNA, 18 nt, Human
gagacacacugaagaagc

SEQ ID NO: 1186608 - RNA, 19 nt, Human
gagacagaguuuucacucu

SEQ ID NO: 1186609 - RNA, 12 nt, Human
gagacagcccgg

SEQ ID NO: 1186610 - RNA, 19 nt, Human
gagccucagcauccuggca

SEQ ID NO: 1186611 - RNA, 17 nt, Human
gagccucagcauccugg

SEQ ID NO: 1186612 - RNA, 14 nt, Human
gagccucagcaucc

SEQ ID NO: 1186613 - RNA, 15 nt, Human
gagccucagcauccu

SEQ ID NO: 1186614 - RNA, 13 nt, Human
gagccucagcauc

SEQ ID NO: 1186615 - RNA, 13 nt, Human
gagccuccugccc

SEQ ID NO: 1186616 - RNA, 12 nt, Human
gagccugcaguu

SEQ ID NO: 1186617 - RNA, 11 nt, Human
gagcccacgcc

SEQ ID NO: 1186618 - RNA, 14 nt, Human
gagccagggucuca

SEQ ID NO: 1186619 - RNA, 19 nt, Human
gagccgagaucacgccacu

SEQ ID NO: 1186620 - RNA, 20 nt, Human
gagccgagaucacgccacug

SEQ ID NO: 1186621 - RNA, 21 nt, Human
gagccgagaucacgccacugc

SEQ ID NO: 1186622 - RNA, 22 nt, Human
gagccgagaucacgccacugca

SEQ ID NO: 1186623 - RNA, 20 nt, Human
gagauagccaaggccaaagg

SEQ ID NO: 1186624 - RNA, 21 nt, Human
gagauagccaaggccaaagga

SEQ ID NO: 1186625 - RNA, 17 nt, Human
gagcagagaccaucccu

SEQ ID NO: 1186626 - RNA, 18 nt, Human
gagcagagaccaucccug

SEQ ID NO: 1186627 - RNA, 19 nt, Human
gagcagagaccaucccuga

SEQ ID NO: 1186628 - RNA, 21 nt, Human
gagcagagaccaucccugaag

SEQ ID NO: 1186629 - RNA, 23 nt, Human
gagcagagaccaucccugaaggc

SEQ ID NO: 1186630 - RNA, 22 nt, Human
gagcagccacauuccugaugcu

SEQ ID NO: 1186631 - RNA, 18 nt, Human
gagccacugcaccgggcc

SEQ ID NO: 1186632 - RNA, 19 nt, Human
gagccacugcaccgggcca

SEQ ID NO: 1186633 - RNA, 20 nt, Human
gagccacugcaccgggccac

SEQ ID NO: 1186634 - RNA, 15 nt, Human
gagccagauuucacu

SEQ ID NO: 1186635 - RNA, 18 nt, Human
gagccagauuucacucuc

SEQ ID NO: 1186636 - RNA, 19 nt, Human
gagccagauuucacucucc

SEQ ID NO: 1186637 - RNA, 20 nt, Human
gagccagauuucacucuccu

SEQ ID NO: 1186638 - RNA, 13 nt, Human
gagcccaccuugg

SEQ ID NO: 1186639 - RNA, 15 nt, Human
gagcccaccuuggcu

SEQ ID NO: 1186640 - RNA, 17 nt, Human
gagcccaccuuggcuca

SEQ ID NO: 1186641 - RNA, 16 nt, Human
gaggaaagcaaaggag

SEQ ID NO: 1186642 - RNA, 17 nt, Human
gaggaaagcaaaggaga

SEQ ID NO: 1186643 - RNA, 15 nt, Human
gagcugccuguucag

SEQ ID NO: 1186644 - RNA, 22 nt, Human
gagcuuucugcuaucaaagagg

SEQ ID NO: 1186645 - RNA, 20 nt, Human
gagcuuugaaaauucagugg

SEQ ID NO: 1186646 - RNA, 14 nt, Human
gaggaacaaggcaa

SEQ ID NO: 1186647 - RNA, 16 nt, Human
gaggaacaaggcaagg

SEQ ID NO: 1186648 - RNA, 17 nt, Human
gaggaagagaaaaaaua

SEQ ID NO: 1186649 - RNA, 13 nt, Human
gaggaagccgcug

SEQ ID NO: 1186650 - RNA, 14 nt, Human
gaggaagccgcugg

SEQ ID NO: 1186651 - RNA, 17 nt, Human
gaggaagccgcuggggc

SEQ ID NO: 1186652 - RNA, 18 nt, Human
gaggaagccgcuggggcc

SEQ ID NO: 1186653 - RNA, 15 nt, Human
gagccugcaguuauu

SEQ ID NO: 1186654 - RNA, 15 nt, Human
gagcuagcagcaggg

SEQ ID NO: 1186655 - RNA, 17 nt, Human
gagcuagcagcagggag

SEQ ID NO: 1186656 - RNA, 16 nt, Human
gagcucgugggacagu

SEQ ID NO: 1186657 - RNA, 15 nt, Human
gagcugaguggggga

SEQ ID NO: 1186658 - RNA, 18 nt, Human
gauaauacaccacuacau

SEQ ID NO: 1186659 - RNA, 21 nt, Human
gauaauacaccacuacauucu

SEQ ID NO: 1186660 - RNA, 22 nt, Human
gauaauacaccacuacauucug

SEQ ID NO: 1186661 - RNA, 18 nt, Human
gauacaggaaaagcugcu

SEQ ID NO: 1186662 - RNA, 19 nt, Human
gauacaggaaaagcugcug

SEQ ID NO: 1186663 - RNA, 21 nt, Human
gauagcacagacccugcccug

SEQ ID NO: 1186664 - RNA, 22 nt, Human
gauagcacagacccugcccugu

SEQ ID NO: 1186665 - RNA, 13 nt, Human
gaggaaggaaacc

SEQ ID NO: 1186666 - RNA, 19 nt, Human
gaggaaggaaacccagcuc

SEQ ID NO: 1186667 - RNA, 20 nt, Human
gaggaaggaaacccagcucu

SEQ ID NO: 1186668 - RNA, 21 nt, Human
gaggaaggaaacccagcucug

SEQ ID NO: 1186669 - RNA, 22 nt, Human
gauaaauaguuuaugauuccac

SEQ ID NO: 1186670 - RNA, 17 nt, Human
gaucauccacugugcca

SEQ ID NO: 1186671 - RNA, 19 nt, Human
gaucauccacugugccaug

SEQ ID NO: 1186672 - RNA, 21 nt, Human
gaucauccacugugccaugug

SEQ ID NO: 1186673 - RNA, 18 nt, Human
gaucacgccacugcacua

SEQ ID NO: 1186674 - RNA, 12 nt, Human
gaucacggcuca

SEQ ID NO: 1186675 - RNA, 12 nt, Human
gaucagccuggg

SEQ ID NO: 1186676 - RNA, 15 nt, Human
gaucagccugggcaa

SEQ ID NO: 1186677 - RNA, 22 nt, Human
gaucagucugauucccaagcuc

SEQ ID NO: 1186678 - RNA, 18 nt, Human
gaucuuugcagacaggca

SEQ ID NO: 1186679 - RNA, 15 nt, Human
gaucccucauccuca

SEQ ID NO: 1186680 - RNA, 16 nt, Human
gaucccucauccucau

SEQ ID NO: 1186681 - RNA, 22 nt, Human
gauccugagccagauuucacuc

SEQ ID NO: 1186682 - RNA, 13 nt, Human
gauccuggaaauc

SEQ ID NO: 1186683 - RNA, 21 nt, Human
gauggcuaguaucaaaagaaa

SEQ ID NO: 1186684 - RNA, 13 nt, Human
gauggggcccugc

SEQ ID NO: 1186685 - RNA, 14 nt, Human
gauggggcccugcc

SEQ ID NO: 1186686 - RNA, 22 nt, Human
gauggggcccugccuccuuugu

SEQ ID NO: 1186687 - RNA, 18 nt, Human
gaugccugguggcagcug

SEQ ID NO: 1186688 - RNA, 19 nt, Human
gaugccugguggcagcugc

SEQ ID NO: 1186689 - RNA, 20 nt, Human
gaugccugguggcagcugcg

SEQ ID NO: 1186690 - RNA, 22 nt, Human
gauggauuuccagccaaagccu

SEQ ID NO: 1186691 - RNA, 22 nt, Human
gaugcacagaguuguuacauuu

SEQ ID NO: 1186692 - RNA, 13 nt, Human
gaugcaccagccc

SEQ ID NO: 1186693 - RNA, 14 nt, Human
gaugcaccagcccu

SEQ ID NO: 1186694 - RNA, 12 nt, Human
gaugcagccuca

SEQ ID NO: 1186695 - RNA, 14 nt, Human
gaugcagccucaca

SEQ ID NO: 1186696 - RNA, 19 nt, Human
gaugcagccucacaguccu

SEQ ID NO: 1186697 - RNA, 17 nt, Human
gauucauauuuacuucu

SEQ ID NO: 1186698 - RNA, 18 nt, Human
gauucauauuuacuucuu

SEQ ID NO: 1186699 - RNA, 19 nt, Human
gauucauauuuacuucuua

SEQ ID NO: 1186700 - RNA, 24 nt, Human
gauggggcccugccuccuuuguga

SEQ ID NO: 1186701 - RNA, 23 nt, Human
gauggggcugcaccggcuggccu

SEQ ID NO: 1186702 - RNA, 19 nt, Human
gauucagacagcugccugg

SEQ ID NO: 1186703 - RNA, 13 nt, Human
gauucagcucugc

SEQ ID NO: 1186704 - RNA, 15 nt, Human
gauucagcucugcaa

SEQ ID NO: 1186705 - RNA, 19 nt, Human
gauucccaagcucugcucc

SEQ ID NO: 1186706 - RNA, 20 nt, Human
gauucccaagcucugcuccu

SEQ ID NO: 1186707 - RNA, 21 nt, Human
gauucccaagcucugcuccuc

SEQ ID NO: 1186708 - RNA, 16 nt, Human
gauucuuuccugaggc

SEQ ID NO: 1186709 - RNA, 17 nt, Human
gauucuuuccugaggcu

SEQ ID NO: 1186710 - RNA, 18 nt, Human
gauucuuuccugaggcug

SEQ ID NO: 1186711 - RNA, 20 nt, Human
gauugcaacaggcugggcuu

SEQ ID NO: 1186712 - RNA, 21 nt, Human
gauugcaacaggcugggcuuc

SEQ ID NO: 1186713 - RNA, 19 nt, Human
gauucuuuccugaggcugg

SEQ ID NO: 1186714 - RNA, 16 nt, Human
gauugcaccacugcac

SEQ ID NO: 1186715 - RNA, 23 nt, Human
gauugcaccacugcacuccagcc

SEQ ID NO: 1186716 - RNA, 15 nt, Human
gauuuccguuaaaau

SEQ ID NO: 1186717 - RNA, 18 nt, Human
gauuuccguuaaaauacc

SEQ ID NO: 1186718 - RNA, 11 nt, Human
gauuucuguuu

SEQ ID NO: 1186719 - RNA, 19 nt, Human
gauuucuguuuagauaaua

SEQ ID NO: 1186720 - RNA, 21 nt, Human
gauuucuguuuagauaauaca

SEQ ID NO: 1186721 - RNA, 19 nt, Human
gauuuguuaaugauagcua

SEQ ID NO: 1186722 - RNA, 15 nt, Human
gauuuuccugaaaac

SEQ ID NO: 1186723 - RNA, 16 nt, Human
gcaaaguaucccuacu

SEQ ID NO: 1186724 - RNA, 17 nt, Human
gcaagaauugaagcagg

SEQ ID NO: 1186725 - RNA, 14 nt, Human
gcaagacgcugugc

SEQ ID NO: 1186726 - RNA, 20 nt, Human
gcaagacgcugugcugcccu

SEQ ID NO: 1186727 - RNA, 21 nt, Human
gcaagacgcugugcugcccug

SEQ ID NO: 1186728 - RNA, 22 nt, Human
gcaagacgcugugcugcccugc

SEQ ID NO: 1186729 - RNA, 23 nt, Human
gcaagacgcugugcugcccugcc

SEQ ID NO: 1186730 - RNA, 10 nt, Human
gcaagccaga

SEQ ID NO: 1186731 - RNA, 18 nt, Human
gcaaggagauuuacaacu

SEQ ID NO: 1186732 - RNA, 11 nt, Human
gcaaggcuguc

SEQ ID NO: 1186733 - RNA, 13 nt, Human
gcaaggcugucaa

SEQ ID NO: 1186734 - RNA, 14 nt, Human
gcaaggucauuuuu

SEQ ID NO: 1186735 - RNA, 15 nt, Human
gcaaucaaaucugcu

SEQ ID NO: 1186736 - RNA, 17 nt, Human
gcaaucaaaucugcuuu

SEQ ID NO: 1186737 - RNA, 17 nt, Human
gcaaugaccuuucaaua

SEQ ID NO: 1186738 - RNA, 20 nt, Human
gcaaugaccuuucaauagga

SEQ ID NO: 1186739 - RNA, 22 nt, Human
gcaaugaccuuucaauaggaaa

SEQ ID NO: 1186740 - RNA, 23 nt, Human
gcaaugaccuuucaauaggaaaa

SEQ ID NO: 1186741 - RNA, 13 nt, Human
gcaaugcuggcug

SEQ ID NO: 1186742 - RNA, 14 nt, Human
gcaaugcuggcugu

SEQ ID NO: 1186743 - RNA, 22 nt, Human
gcaaugcuggcuguuggcuggg

SEQ ID NO: 1186744 - RNA, 23 nt, Human
gcaaugcuggcuguuggcugggg

SEQ ID NO: 1186745 - RNA, 22 nt, Human
gcacugcuuccagugaggcucu

SEQ ID NO: 1186746 - RNA, 20 nt, Human
gcacugcuuccagugaggcu

SEQ ID NO: 1186747 - RNA, 16 nt, Human
gcacugcuuccaguga

SEQ ID NO: 1186748 - RNA, 18 nt, Human
gcacugcuuccagugagg

SEQ ID NO: 1186749 - RNA, 12 nt, Human
gcagacaggacc

SEQ ID NO: 1186750 - RNA, 13 nt, Human
gcagacaggacca

SEQ ID NO: 1186751 - RNA, 15 nt, Human
gcagacaggaccagg

SEQ ID NO: 1186752 - RNA, 18 nt, Human
gcagacaggaccagggau

SEQ ID NO: 1186753 - RNA, 19 nt, Human
gcagacaggcaagcaccuc

SEQ ID NO: 1186754 - RNA, 23 nt, Human
gcagacaggcaagcaccuccugc

SEQ ID NO: 1186755 - RNA, 12 nt, Human
gcaauggcagcc

SEQ ID NO: 1186756 - RNA, 13 nt, Human
gcaauggcagccu

SEQ ID NO: 1186757 - RNA, 14 nt, Human
gcaauggcagccuu

SEQ ID NO: 1186758 - RNA, 21 nt, Human
gcaccacugcacuccagccug

SEQ ID NO: 1186759 - RNA, 22 nt, Human
gcaccacugcacuccagccugg

SEQ ID NO: 1186760 - RNA, 15 nt, Human
gcaccagcagccugg

SEQ ID NO: 1186761 - RNA, 16 nt, Human
gcaccagcagccugga

SEQ ID NO: 1186762 - RNA, 22 nt, Human
gcacccaccaucaugucuggcu

SEQ ID NO: 1186763 - RNA, 19 nt, Human
gcacccggccccugcuggu

SEQ ID NO: 1186764 - RNA, 15 nt, Human
gcacccucaggcagg

SEQ ID NO: 1186765 - RNA, 16 nt, Human
gcacccucaggcaggu

SEQ ID NO: 1186766 - RNA, 21 nt, Human
gcaccuggaauauauaaccag

SEQ ID NO: 1186767 - RNA, 22 nt, Human
gcaccuggaauauauaaccagu

SEQ ID NO: 1186768 - RNA, 14 nt, Human
gcaccuuagacagu

SEQ ID NO: 1186769 - RNA, 17 nt, Human
gcaccuuagacaguccc

SEQ ID NO: 1186770 - RNA, 18 nt, Human
gcaccuuagacagucccu

SEQ ID NO: 1186771 - RNA, 19 nt, Human
gcaccuuagacagucccug

SEQ ID NO: 1186772 - RNA, 12 nt, Human
gcacgauuucug

SEQ ID NO: 1186773 - RNA, 13 nt, Human
gcacgauuucugu

SEQ ID NO: 1186774 - RNA, 14 nt, Human
gcagcccugcagag

SEQ ID NO: 1186775 - RNA, 15 nt, Human
gcagcccugcagagg

SEQ ID NO: 1186776 - RNA, 16 nt, Human
gcagcccugcagaggg

SEQ ID NO: 1186777 - RNA, 17 nt, Human
gcagcccugcagagggc

SEQ ID NO: 1186778 - RNA, 15 nt, Human
gcagccuuggcaaac

SEQ ID NO: 1186779 - RNA, 14 nt, Human
gcagcucaccucuc

SEQ ID NO: 1186780 - RNA, 15 nt, Human
gcagcucaccucucc

SEQ ID NO: 1186781 - RNA, 23 nt, Human
gcaggaggaucacuugaguccag

SEQ ID NO: 1186782 - RNA, 12 nt, Human
gcaggcagccag

SEQ ID NO: 1186783 - RNA, 13 nt, Human
gcaggcagccagg

SEQ ID NO: 1186784 - RNA, 14 nt, Human
gcaggcagccaggc

SEQ ID NO: 1186785 - RNA, 20 nt, Human
gcagccccgugggguuccuc

SEQ ID NO: 1186786 - RNA, 20 nt, Human
gcagccccuguucuggcaga

SEQ ID NO: 1186787 - RNA, 21 nt, Human
gcagccccuguucuggcagag

SEQ ID NO: 1186788 - RNA, 13 nt, Human
gcagcccugcaga

SEQ ID NO: 1186789 - RNA, 16 nt, Human
gcagcaauaaagcagc

SEQ ID NO: 1186790 - RNA, 23 nt, Human
gcagcaauaaagcagcguuucua

SEQ ID NO: 1186791 - RNA, 18 nt, Human
gcagccccauucugccug

SEQ ID NO: 1186792 - RNA, 19 nt, Human
gcagccccauucugccugc

SEQ ID NO: 1186793 - RNA, 21 nt, Human
gcagccccauucugccugccc

SEQ ID NO: 1186794 - RNA, 24 nt, Human
gcagccccauucugccugcccagg

SEQ ID NO: 1186795 - RNA, 17 nt, Human
gcagacaguuaagagaa

SEQ ID NO: 1186796 - RNA, 21 nt, Human
gcagaguugaagacagagcua

SEQ ID NO: 1186797 - RNA, 18 nt, Human
gcagauaaacaguaguga

SEQ ID NO: 1186798 - RNA, 22 nt, Human
gcagauacaggaaaagcugcug

SEQ ID NO: 1186799 - RNA, 15 nt, Human
gcauguucucugagg

SEQ ID NO: 1186800 - RNA, 21 nt, Human
gcauguucucugaggacacua

SEQ ID NO: 1186801 - RNA, 22 nt, Human
gcauguucucugaggacacuaa

SEQ ID NO: 1186802 - RNA, 13 nt, Human
gcauuauauuuau

SEQ ID NO: 1186803 - RNA, 18 nt, Human
gcaugcgggcuuccuccu

SEQ ID NO: 1186804 - RNA, 18 nt, Human
gcaugaaguaauaugcac

SEQ ID NO: 1186805 - RNA, 19 nt, Human
gcauuaucuagauacugua

SEQ ID NO: 1186806 - RNA, 17 nt, Human
gcauuaucuagauacug

SEQ ID NO: 1186807 - RNA, 13 nt, Human
gcauuugcugaau

SEQ ID NO: 1186808 - RNA, 14 nt, Human
gcauuugcugaaua

SEQ ID NO: 1186809 - RNA, 17 nt, Human
gcauuugcugaauacag

SEQ ID NO: 1186810 - RNA, 16 nt, Human
gcauuuguuugaacug

SEQ ID NO: 1186811 - RNA, 18 nt, Human
gcauuuguuugaacugau

SEQ ID NO: 1186812 - RNA, 14 nt, Human
gccaaacucaccug

SEQ ID NO: 1186813 - RNA, 16 nt, Human
gccaaacucaccugcc

SEQ ID NO: 1186814 - RNA, 19 nt, Human
gccaaacucaccugccccu

SEQ ID NO: 1186815 - RNA, 20 nt, Human
gccaaagccaaagcuaggcc

SEQ ID NO: 1186816 - RNA, 16 nt, Human
gccaaagccuccucca

SEQ ID NO: 1186817 - RNA, 19 nt, Human
gccaaagccuccuccagcc

SEQ ID NO: 1186818 - RNA, 16 nt, Human
gccaaagcuaggccug

SEQ ID NO: 1186819 - RNA, 22 nt, Human
gccaaagcuaggccuggccaga

SEQ ID NO: 1186820 - RNA, 12 nt, Human
gccaaaggaagc

SEQ ID NO: 1186821 - RNA, 17 nt, Human
gcauagguuuaauaauu

SEQ ID NO: 1186822 - RNA, 13 nt, Human
gcauagaaguaaa

SEQ ID NO: 1186823 - RNA, 17 nt, Human
gcaguucugaagaagau

SEQ ID NO: 1186824 - RNA, 17 nt, Human
gcaguuauuaacacuaa

SEQ ID NO: 1186825 - RNA, 15 nt, Human
gcaguucugaagaag

SEQ ID NO: 1186826 - RNA, 13 nt, Human
gcagugggagcug

SEQ ID NO: 1186827 - RNA, 14 nt, Human
gcagugggagcugc

SEQ ID NO: 1186828 - RNA, 15 nt, Human
gcagugggagcugcc

SEQ ID NO: 1186829 - RNA, 23 nt, Human
gcaguggugguuuucuguucuuu

SEQ ID NO: 1186830 - RNA, 15 nt, Human
gcaggcagccaggcc

SEQ ID NO: 1186831 - RNA, 16 nt, Human
gcaggcagccaggcca

SEQ ID NO: 1186832 - RNA, 17 nt, Human
gcaggcagccaggccac

SEQ ID NO: 1186833 - RNA, 19 nt, Human
gcagggcucagcggggaca

SEQ ID NO: 1186834 - RNA, 21 nt, Human
gcagggcucagcggggacagc

SEQ ID NO: 1186835 - RNA, 22 nt, Human
gcagggcucagcggggacagcu

SEQ ID NO: 1186836 - RNA, 18 nt, Human
gcagggucucacucuguc

SEQ ID NO: 1186837 - RNA, 22 nt, Human
gcagguccaggguuugaguuca

SEQ ID NO: 1186838 - RNA, 19 nt, Human
gcaggucuugaacuccugg

SEQ ID NO: 1186839 - RNA, 20 nt, Human
gcaggucuugaacuccuggc

SEQ ID NO: 1186840 - RNA, 15 nt, Human
gcagugcaugcuguc

SEQ ID NO: 1186841 - RNA, 16 nt, Human
gcagugcaugcugucc

SEQ ID NO: 1186842 - RNA, 24 nt, Human
gccaaggccaaaggaagcacaugc

SEQ ID NO: 1186843 - RNA, 20 nt, Human
gccaaggccaaaggaagcac

SEQ ID NO: 1186844 - RNA, 20 nt, Human
gccacugcaccgggccacag

SEQ ID NO: 1186845 - RNA, 21 nt, Human
gccacugcaccgggccacaga

SEQ ID NO: 1186846 - RNA, 22 nt, Human
gccacugcaccgggccacagag

SEQ ID NO: 1186847 - RNA, 21 nt, Human
gccagagacacaagccuucgg

SEQ ID NO: 1186848 - RNA, 22 nt, Human
gccagagacacaagccuucggc

SEQ ID NO: 1186849 - RNA, 17 nt, Human
gccagagggagugacag

SEQ ID NO: 1186850 - RNA, 14 nt, Human
gccagaugcaccag

SEQ ID NO: 1186851 - RNA, 15 nt, Human
gccagaugcaccagc

SEQ ID NO: 1186852 - RNA, 20 nt, Human
gccagauucuuuccugaggc

SEQ ID NO: 1186853 - RNA, 24 nt, Human
gccagauucuuuccugaggcuggg

SEQ ID NO: 1186854 - RNA, 13 nt, Human
gccagauuucacu

SEQ ID NO: 1186855 - RNA, 16 nt, Human
gccagauuucacucuc

SEQ ID NO: 1186856 - RNA, 22 nt, Human
gccagccgagauagccaaggcc

SEQ ID NO: 1186857 - RNA, 17 nt, Human
gccagcugcuugggcuu

SEQ ID NO: 1186858 - RNA, 18 nt, Human
gccagcugcuugggcuuc

SEQ ID NO: 1186859 - RNA, 20 nt, Human
gccagcugcuugggcuucau

SEQ ID NO: 1186860 - RNA, 12 nt, Human
gccaggaagcca

SEQ ID NO: 1186861 - RNA, 13 nt, Human
gccaggaagccag

SEQ ID NO: 1186862 - RNA, 14 nt, Human
gccaggaagccagc

SEQ ID NO: 1186863 - RNA, 15 nt, Human
gccaggaagccagca

SEQ ID NO: 1186864 - RNA, 14 nt, Human
gccaggagccuccu

SEQ ID NO: 1186865 - RNA, 16 nt, Human
gccaggagccuccugc

SEQ ID NO: 1186866 - RNA, 19 nt, Human
gccaggagccuccugcccu

SEQ ID NO: 1186867 - RNA, 20 nt, Human
gccaggagccuccugcccuu

SEQ ID NO: 1186868 - RNA, 24 nt, Human
gccaugcuccuggcccacugcauc

SEQ ID NO: 1186869 - RNA, 15 nt, Human
gccaugggccuccug

SEQ ID NO: 1186870 - RNA, 16 nt, Human
gccaugggccuccugu

SEQ ID NO: 1186871 - RNA, 15 nt, Human
gcccaccuggccucu

SEQ ID NO: 1186872 - RNA, 16 nt, Human
gcccaccuggccucug

SEQ ID NO: 1186873 - RNA, 17 nt, Human
gcccaccuggccucugc

SEQ ID NO: 1186874 - RNA, 20 nt, Human
gcccaccuggccucugcacu

SEQ ID NO: 1186875 - RNA, 21 nt, Human
gcccaccuggccucugcacuc

SEQ ID NO: 1186876 - RNA, 24 nt, Human
gcccaccuggccucugcacucccc

SEQ ID NO: 1186877 - RNA, 13 nt, Human
gcccaccuuggcu

SEQ ID NO: 1186878 - RNA, 15 nt, Human
gcccaccuuggcuca

SEQ ID NO: 1186879 - RNA, 16 nt, Human
gcccaccuuggcucaa

SEQ ID NO: 1186880 - RNA, 17 nt, Human
gcccaccuuggcucaag

SEQ ID NO: 1186881 - RNA, 13 nt, Human
gccaggcuggucu

SEQ ID NO: 1186882 - RNA, 15 nt, Human
gccaggcuggucuca

SEQ ID NO: 1186883 - RNA, 23 nt, Human
gccaguaaaugggggugcauuug

SEQ ID NO: 1186884 - RNA, 14 nt, Human
gccauccagguuca

SEQ ID NO: 1186885 - RNA, 14 nt, Human
gccaugcuccuggc

SEQ ID NO: 1186886 - RNA, 13 nt, Human
gcccaggccuccu

SEQ ID NO: 1186887 - RNA, 21 nt, Human
gcccagagaggguggugaccu

SEQ ID NO: 1186888 - RNA, 23 nt, Human
gcccaggccccugccacccuggg

SEQ ID NO: 1186889 - RNA, 12 nt, Human
gcccaggcuggc

SEQ ID NO: 1186890 - RNA, 18 nt, Human
gccccaucccaaacccuu

SEQ ID NO: 1186891 - RNA, 13 nt, Human
gccccagugccca

SEQ ID NO: 1186892 - RNA, 14 nt, Human
gccccagugcccac

SEQ ID NO: 1186893 - RNA, 15 nt, Human
gccccagugcccaca

SEQ ID NO: 1186894 - RNA, 12 nt, Human
gccccagugccc

SEQ ID NO: 1186895 - RNA, 13 nt, Human
gccccauccucug

SEQ ID NO: 1186896 - RNA, 14 nt, Human
gccccauccucugu

SEQ ID NO: 1186897 - RNA, 22 nt, Human
gccccauccucuguacagagcc

SEQ ID NO: 1186898 - RNA, 14 nt, Human
gccccauucugccu

SEQ ID NO: 1186899 - RNA, 15 nt, Human
gccccauucugccug

SEQ ID NO: 1186900 - RNA, 17 nt, Human
gccccuguucuggcaga

SEQ ID NO: 1186901 - RNA, 16 nt, Human
gccccucagggucccu

SEQ ID NO: 1186902 - RNA, 18 nt, Human
gccccucagggucccugg

SEQ ID NO: 1186903 - RNA, 15 nt, Human
gccccgaggccuucu

SEQ ID NO: 1186904 - RNA, 18 nt, Human
gccccgaggccuucucug

SEQ ID NO: 1186905 - RNA, 22 nt, Human
gccccgaggccuucucugaagg

SEQ ID NO: 1186906 - RNA, 14 nt, Human
gccccucagggucc

SEQ ID NO: 1186907 - RNA, 22 nt, Human
gcccuccaagaccuucuccuuc

SEQ ID NO: 1186908 - RNA, 23 nt, Human
gcccuccaagaccuucuccuuca

SEQ ID NO: 1186909 - RNA, 12 nt, Human
gcccgggcucug

SEQ ID NO: 1186910 - RNA, 19 nt, Human
gcccuccaagaccuucucc

SEQ ID NO: 1186911 - RNA, 21 nt, Human
gcccuccaagaccuucuccuu

SEQ ID NO: 1186912 - RNA, 13 nt, Human
gcccucugcccac

SEQ ID NO: 1186913 - RNA, 16 nt, Human
gcccucugcccacucc

SEQ ID NO: 1186914 - RNA, 18 nt, Human
gcccucugcccacucccu

SEQ ID NO: 1186915 - RNA, 19 nt, Human
gcccucugcccacucccug

SEQ ID NO: 1186916 - RNA, 14 nt, Human
gcccugagcuuucu

SEQ ID NO: 1186917 - RNA, 13 nt, Human
gcccugcagaggg

SEQ ID NO: 1186918 - RNA, 14 nt, Human
gcccugcagagggc

SEQ ID NO: 1186919 - RNA, 15 nt, Human
gcccugcagagggca

SEQ ID NO: 1186920 - RNA, 16 nt, Human
gcccugcagagggcac

SEQ ID NO: 1186921 - RNA, 21 nt, Human
gccgggcgcgguggcucacgc

SEQ ID NO: 1186922 - RNA, 20 nt, Human
gccgggcgugguggugagug

SEQ ID NO: 1186923 - RNA, 20 nt, Human
gccgagaucacgccacugca

SEQ ID NO: 1186924 - RNA, 21 nt, Human
gccgagaucacgccacugcac

SEQ ID NO: 1186925 - RNA, 22 nt, Human
gccgagaucacgccacugcacu

SEQ ID NO: 1186926 - RNA, 17 nt, Human
gccgagauugcaccacu

SEQ ID NO: 1186927 - RNA, 11 nt, Human
gccgcagcccu

SEQ ID NO: 1186928 - RNA, 12 nt, Human
gccgcagcccug

SEQ ID NO: 1186929 - RNA, 13 nt, Human
gccgcagcccugc

SEQ ID NO: 1186930 - RNA, 14 nt, Human
gcccuucucuccag

SEQ ID NO: 1186931 - RNA, 16 nt, Human
gcccuucucuccagcc

SEQ ID NO: 1186932 - RNA, 17 nt, Human
gcccuucucuccagccc

SEQ ID NO: 1186933 - RNA, 18 nt, Human
gcccuucucuccagcccc

SEQ ID NO: 1186934 - RNA, 18 nt, Human
gccgucuaccugaggggc

SEQ ID NO: 1186935 - RNA, 20 nt, Human
gccguguaaccauggaccca

SEQ ID NO: 1186936 - RNA, 15 nt, Human
gccgucuaccugagg

SEQ ID NO: 1186937 - RNA, 16 nt, Human
gccgucuaccugaggg

SEQ ID NO: 1186938 - RNA, 17 nt, Human
gccgucuaccugagggg

SEQ ID NO: 1186939 - RNA, 18 nt, Human
gccucaaccuccugggcu

SEQ ID NO: 1186940 - RNA, 19 nt, Human
gccucaaccuccugggcua

SEQ ID NO: 1186941 - RNA, 13 nt, Human
gccucacaguccu

SEQ ID NO: 1186942 - RNA, 17 nt, Human
gccucacaguccuuacc

SEQ ID NO: 1186943 - RNA, 17 nt, Human
gccucccaucacccgcu

SEQ ID NO: 1186944 - RNA, 18 nt, Human
gccucccgaguagcuggg

SEQ ID NO: 1186945 - RNA, 19 nt, Human
gccucccgaguagcuggga

SEQ ID NO: 1186946 - RNA, 20 nt, Human
gccucccgaguagcugggac

SEQ ID NO: 1186947 - RNA, 18 nt, Human
gccucacaguccuuacca

SEQ ID NO: 1186948 - RNA, 21 nt, Human
gccucacaguccuuaccagca

SEQ ID NO: 1186949 - RNA, 15 nt, Human
gccucagcauccugg

SEQ ID NO: 1186950 - RNA, 16 nt, Human
gccucagcauccuggc

SEQ ID NO: 1186951 - RNA, 17 nt, Human
gccucagcauccuggca

SEQ ID NO: 1186952 - RNA, 19 nt, Human
gccucccaaagugcuggga

SEQ ID NO: 1186953 - RNA, 13 nt, Human
gccucccaacuca

SEQ ID NO: 1186954 - RNA, 16 nt, Human
gccucccaacucaccc

SEQ ID NO: 1186955 - RNA, 17 nt, Human
gccucccaacucacccc

SEQ ID NO: 1186956 - RNA, 18 nt, Human
gccucccaacucacccca

SEQ ID NO: 1186957 - RNA, 19 nt, Human
gccucccaacucaccccag

SEQ ID NO: 1186958 - RNA, 21 nt, Human
gccucccaacucaccccagcc

SEQ ID NO: 1186959 - RNA, 14 nt, Human
gccucccaucaccc

SEQ ID NO: 1186960 - RNA, 16 nt, Human
gccucccaucacccgc

SEQ ID NO: 1186961 - RNA, 13 nt, Human
gccucucucaggc

SEQ ID NO: 1186962 - RNA, 14 nt, Human
gccucucucaggcc

SEQ ID NO: 1186963 - RNA, 16 nt, Human
gccucucucaggccaa

SEQ ID NO: 1186964 - RNA, 17 nt, Human
gccucugacacacagcu

SEQ ID NO: 1186965 - RNA, 18 nt, Human
gccucugacacacagcuc

SEQ ID NO: 1186966 - RNA, 19 nt, Human
gccucugacacacagcucu

SEQ ID NO: 1186967 - RNA, 20 nt, Human
gccucugacacacagcucug

SEQ ID NO: 1186968 - RNA, 21 nt, Human
gccucugacacacagcucugu

SEQ ID NO: 1186969 - RNA, 14 nt, Human
gccucugcacuccc

SEQ ID NO: 1186970 - RNA, 15 nt, Human
gccucugcacucccc

SEQ ID NO: 1186971 - RNA, 12 nt, Human
gccucugccucu

SEQ ID NO: 1186972 - RNA, 13 nt, Human
gccucugccucug

SEQ ID NO: 1186973 - RNA, 18 nt, Human
gccucugccucugacaca

SEQ ID NO: 1186974 - RNA, 13 nt, Human
gccugcaagggag

SEQ ID NO: 1186975 - RNA, 15 nt, Human
gccugcaagggagug

SEQ ID NO: 1186976 - RNA, 12 nt, Human
gccuuccagggg

SEQ ID NO: 1186977 - RNA, 16 nt, Human
gccuuauggaacacuc

SEQ ID NO: 1186978 - RNA, 18 nt, Human
gccuuauggaacacucug

SEQ ID NO: 1186979 - RNA, 19 nt, Human
gccuuauggaacacucuga

SEQ ID NO: 1186980 - RNA, 20 nt, Human
gccuuauggaacacucugag

SEQ ID NO: 1186981 - RNA, 15 nt, Human
gccuuccaggggugg

SEQ ID NO: 1186982 - RNA, 16 nt, Human
gccuuccagggguggg

SEQ ID NO: 1186983 - RNA, 21 nt, Human
gccuuccaggggugggacacc

SEQ ID NO: 1186984 - RNA, 13 nt, Human
gccuuuggcuuca

SEQ ID NO: 1186985 - RNA, 23 nt, Human
gcgacaaugcaaaccaucauuga

SEQ ID NO: 1186986 - RNA, 22 nt, Human
gccugggggcugggcagaggaa

SEQ ID NO: 1186987 - RNA, 13 nt, Human
gccugguggcagc

SEQ ID NO: 1186988 - RNA, 14 nt, Human
gccugguggcagcu

SEQ ID NO: 1186989 - RNA, 19 nt, Human
gccugguggcagcugcggu

SEQ ID NO: 1186990 - RNA, 21 nt, Human
gccugguggcagcugcggucc

SEQ ID NO: 1186991 - RNA, 20 nt, Human
gccuuacacaaugguuuucu

SEQ ID NO: 1186992 - RNA, 21 nt, Human
gccuuacacaaugguuuucuu

SEQ ID NO: 1186993 - RNA, 18 nt, Human
gccuuacccucauguucu

SEQ ID NO: 1186994 - RNA, 17 nt, Human
gccuuagaagucacaca

SEQ ID NO: 1186995 - RNA, 18 nt, Human
gccuuagaagucacacag

SEQ ID NO: 1186996 - RNA, 19 nt, Human
gccuuagaagucacacagu

SEQ ID NO: 1186997 - RNA, 19 nt, Human
gccuuacccucauguucuu

SEQ ID NO: 1186998 - RNA, 20 nt, Human
gccuuagaagucacacagua

SEQ ID NO: 1186999 - RNA, 10 nt, Human
gccuuaugga

SEQ ID NO: 1187000 - RNA, 14 nt, Human
gccuuauggaacac

SEQ ID NO: 1187001 - RNA, 15 nt, Human
gcggacagccacggc

SEQ ID NO: 1187002 - RNA, 16 nt, Human
gcggacagccacggcc

SEQ ID NO: 1187003 - RNA, 19 nt, Human
gcgucucauacucaccuca

SEQ ID NO: 1187004 - RNA, 12 nt, Human
gcgacagugaga

SEQ ID NO: 1187005 - RNA, 22 nt, Human
gcgacagugagacucugucuca

SEQ ID NO: 1187006 - RNA, 15 nt, Human
gcgccuacaggagug

SEQ ID NO: 1187007 - RNA, 18 nt, Human
gcgccuacaggagugagc

SEQ ID NO: 1187008 - RNA, 11 nt, Human
gcggacagcca

SEQ ID NO: 1187009 - RNA, 13 nt, Human
gcggacagccacg

SEQ ID NO: 1187010 - RNA, 15 nt, Human
gcuaggaacacuccu

SEQ ID NO: 1187011 - RNA, 16 nt, Human
gcuaggaacacuccuu

SEQ ID NO: 1187012 - RNA, 16 nt, Human
gcuaccuuuguauucu

SEQ ID NO: 1187013 - RNA, 20 nt, Human
gcuaccuuuguauucucucc

SEQ ID NO: 1187014 - RNA, 19 nt, Human
gcuagaacucccuuucaac

SEQ ID NO: 1187015 - RNA, 13 nt, Human
gcuaagagggagg

SEQ ID NO: 1187016 - RNA, 20 nt, Human
gcuaagagggagggagggcu

SEQ ID NO: 1187017 - RNA, 21 nt, Human
gcuaagagggagggagggcuc

SEQ ID NO: 1187018 - RNA, 13 nt, Human
gcuacacacugca

SEQ ID NO: 1187019 - RNA, 20 nt, Human
gcuacacacugcauguuugu

SEQ ID NO: 1187020 - RNA, 14 nt, Human
gcuacacaggggaa

SEQ ID NO: 1187021 - RNA, 22 nt, Human
gcuacacaggggaaaagaggag

SEQ ID NO: 1187022 - RNA, 16 nt, Human
guaggguuauaauaau

SEQ ID NO: 1187023 - RNA, 14 nt, Human
guagucaggugccu

SEQ ID NO: 1187024 - RNA, 14 nt, Human
guaguguuggagaa

SEQ ID NO: 1187025 - RNA, 15 nt, Human
guaguguuggagaag

SEQ ID NO: 1187026 - RNA, 17 nt, Human
guaguguuggagaagaa

SEQ ID NO: 1187027 - RNA, 16 nt, Human
guagggcgggaggaug

SEQ ID NO: 1187028 - RNA, 21 nt, Human
guagggcgggaggauguucug

SEQ ID NO: 1187029 - RNA, 22 nt, Human
guagggcgggaggauguucugg

SEQ ID NO: 1187030 - RNA, 23 nt, Human
guagggcgggaggauguucuggg

SEQ ID NO: 1187031 - RNA, 22 nt, Human
guauaugucaagccauaauugu

SEQ ID NO: 1187032 - RNA, 12 nt, Human
guaucugagcag

SEQ ID NO: 1187033 - RNA, 12 nt, Human
guaucuggugac

SEQ ID NO: 1187034 - RNA, 19 nt, Human
guaucuggugacuuuccuc

SEQ ID NO: 1187035 - RNA, 13 nt, Human
guaugaggcauuu

SEQ ID NO: 1187036 - RNA, 15 nt, Human
guaugaggcauuugu

SEQ ID NO: 1187037 - RNA, 22 nt, Human
guaugaucacggcucacugcag

SEQ ID NO: 1187038 - RNA, 21 nt, Human
guaugaucacggcucacugca

SEQ ID NO: 1187039 - RNA, 17 nt, Human
guauguuagugcaaauu

SEQ ID NO: 1187040 - RNA, 20 nt, Human
guaugaucacggcucacugc

SEQ ID NO: 1187041 - RNA, 17 nt, Human
guaugaggcauuuguuu

SEQ ID NO: 1187042 - RNA, 20 nt, Human
guaugaggcauuuguuugaa

SEQ ID NO: 1187043 - RNA, 14 nt, Human
gucagagccugcag

SEQ ID NO: 1187044 - RNA, 15 nt, Human
gucagagccugcagu

SEQ ID NO: 1187045 - RNA, 16 nt, Human
gucagagccugcaguu

SEQ ID NO: 1187046 - RNA, 17 nt, Human
gucaccccggccaccug

SEQ ID NO: 1187047 - RNA, 18 nt, Human
gucaccccggccaccugc

SEQ ID NO: 1187048 - RNA, 22 nt, Human
gucaccccggccaccugcggug

SEQ ID NO: 1187049 - RNA, 12 nt, Human
gucacucuggca

SEQ ID NO: 1187050 - RNA, 13 nt, Human
gucacucuggcag

SEQ ID NO: 1187051 - RNA, 14 nt, Human
gucacucuggcagc

SEQ ID NO: 1187052 - RNA, 16 nt, Human
gucacucuggcagcuc

SEQ ID NO: 1187053 - RNA, 17 nt, Human
gucacucuggcagcuca

SEQ ID NO: 1187054 - RNA, 19 nt, Human
gucacucuggcagcucaga

SEQ ID NO: 1187055 - RNA, 22 nt, Human
gucacucuggcagcucagagag

SEQ ID NO: 1187056 - RNA, 19 nt, Human
guauuuuguuuuugucuua

SEQ ID NO: 1187057 - RNA, 15 nt, Human
gucaagugaaaaagg

SEQ ID NO: 1187058 - RNA, 23 nt, Human
gucaauaaaauccauacauuugu

SEQ ID NO: 1187059 - RNA, 15 nt, Human
gucaaugcagccccc

SEQ ID NO: 1187060 - RNA, 20 nt, Human
guauuuuaaaagaaugauua

SEQ ID NO: 1187061 - RNA, 13 nt, Human
guauuuuaaucac

SEQ ID NO: 1187062 - RNA, 14 nt, Human
guauuuuacuaaua

SEQ ID NO: 1187063 - RNA, 23 nt, Human
gucccaccuuggcugcagggagu

SEQ ID NO: 1187064 - RNA, 17 nt, Human
guccccaccgcagacag

SEQ ID NO: 1187065 - RNA, 16 nt, Human
gucccugcacuugcag

SEQ ID NO: 1187066 - RNA, 19 nt, Human
gucccugcacuugcagacu

SEQ ID NO: 1187067 - RNA, 21 nt, Human
gucccugcacuugcagacucu

SEQ ID NO: 1187068 - RNA, 13 nt, Human
gucaggaaagaga

SEQ ID NO: 1187069 - RNA, 12 nt, Human
guccacccagga

SEQ ID NO: 1187070 - RNA, 13 nt, Human
guccacccaggag

SEQ ID NO: 1187071 - RNA, 23 nt, Human
guccacccaggagccccgaggcc

SEQ ID NO: 1187072 - RNA, 21 nt, Human
gucccaccuuggcugcaggga

SEQ ID NO: 1187073 - RNA, 13 nt, Human
gucucuugguccu

SEQ ID NO: 1187074 - RNA, 13 nt, Human
gucucacuguugc

SEQ ID NO: 1187075 - RNA, 22 nt, Human
gucucacucugucgcccagucu

SEQ ID NO: 1187076 - RNA, 15 nt, Human
gucucacucugucgc

SEQ ID NO: 1187077 - RNA, 16 nt, Human
gucucacucugucgcc

SEQ ID NO: 1187078 - RNA, 18 nt, Human
gucucacucugucgccca

SEQ ID NO: 1187079 - RNA, 19 nt, Human
gucucacucugucgcccag

SEQ ID NO: 1187080 - RNA, 18 nt, Human
gucgucaaagcugaaaug

SEQ ID NO: 1187081 - RNA, 18 nt, Human
gucucacuauguugccca

SEQ ID NO: 1187082 - RNA, 19 nt, Human
gucucacuauguugcccag

SEQ ID NO: 1187083 - RNA, 11 nt, Human
gucccugccaa

SEQ ID NO: 1187084 - RNA, 14 nt, Human
gucccugccaaugg

SEQ ID NO: 1187085 - RNA, 15 nt, Human
gucccugccaaugga

SEQ ID NO: 1187086 - RNA, 19 nt, Human
guccuuaccagcagagcac

SEQ ID NO: 1187087 - RNA, 21 nt, Human
guccuuaccagcagagcaccu

SEQ ID NO: 1187088 - RNA, 21 nt, Human
gucggaaaacaugcuacacac

SEQ ID NO: 1187089 - RNA, 16 nt, Human
gucgggcaugacacga

SEQ ID NO: 1187090 - RNA, 14 nt, Human
gucuguucuuucca

SEQ ID NO: 1187091 - RNA, 17 nt, Human
gucuguucuuuccaaag

SEQ ID NO: 1187092 - RNA, 15 nt, Human
gucugugagaugcua

SEQ ID NO: 1187093 - RNA, 16 nt, Human
gucugugagaugcuag

SEQ ID NO: 1187094 - RNA, 17 nt, Human
gucugugagaugcuaga

SEQ ID NO: 1187095 - RNA, 21 nt, Human
gucugugagaugcuagaacuc

SEQ ID NO: 1187096 - RNA, 22 nt, Human
gucugugagaugcuagaacucc

SEQ ID NO: 1187097 - RNA, 23 nt, Human
gucugugagaugcuagaacuccc

SEQ ID NO: 1187098 - RNA, 18 nt, Human
gucugugccauuuuguau

SEQ ID NO: 1187099 - RNA, 21 nt, Human
gucuuaaaaaguggaaaaaua

SEQ ID NO: 1187100 - RNA, 16 nt, Human
gucuugaacuccuggc

SEQ ID NO: 1187101 - RNA, 17 nt, Human
gucuugaacuccuggcc

SEQ ID NO: 1187102 - RNA, 18 nt, Human
gucuugaacuccuggccu

SEQ ID NO: 1187103 - RNA, 20 nt, Human
gucuugaacuccuggccuca

SEQ ID NO: 1187104 - RNA, 21 nt, Human
gucuugaacuccuggccucaa

SEQ ID NO: 1187105 - RNA, 16 nt, Human
gucuugcaauggcagc

SEQ ID NO: 1187106 - RNA, 17 nt, Human
gucuugcaauggcagcc

SEQ ID NO: 1187107 - RNA, 18 nt, Human
gucuugcaauggcagccu

SEQ ID NO: 1187108 - RNA, 19 nt, Human
gucuugcaauggcagccuu

SEQ ID NO: 1187109 - RNA, 20 nt, Human
gucuugcaauggcagccuug

SEQ ID NO: 1187110 - RNA, 21 nt, Human
gucuugcaauggcagccuugg

SEQ ID NO: 1187111 - RNA, 23 nt, Human
gucuugcaauggcagccuuggca

SEQ ID NO: 1187112 - RNA, 23 nt, Human
gugauccacccaccucagccucc

SEQ ID NO: 1187113 - RNA, 24 nt, Human
gugauccacccaccucagccuccc

SEQ ID NO: 1187114 - RNA, 12 nt, Human
gugauuuucauu

SEQ ID NO: 1187115 - RNA, 13 nt, Human
gugauuuuuguaa

SEQ ID NO: 1187116 - RNA, 18 nt, Human
gugauuuuuguaauuuuu

SEQ ID NO: 1187117 - RNA, 22 nt, Human
gugcauaccacuuuuguucuug

SEQ ID NO: 1187118 - RNA, 20 nt, Human
gugcaguggugcgaucuggg

SEQ ID NO: 1187119 - RNA, 23 nt, Human
gugcaguggugcgaucuggguuc

SEQ ID NO: 1187120 - RNA, 20 nt, Human
gugccagguuuuuggucuga

SEQ ID NO: 1187121 - RNA, 14 nt, Human
gugccaugugccag

SEQ ID NO: 1187122 - RNA, 16 nt, Human
gugccaugugccaggu

SEQ ID NO: 1187123 - RNA, 21 nt, Human
gugcgaucuggguucacugca

SEQ ID NO: 1187124 - RNA, 14 nt, Human
gugcgccuacagga

SEQ ID NO: 1187125 - RNA, 14 nt, Human
gugcggccuuuggc

SEQ ID NO: 1187126 - RNA, 14 nt, Human
gugagcuacaaaug

SEQ ID NO: 1187127 - RNA, 19 nt, Human
gugagccgagaucacgcca

SEQ ID NO: 1187128 - RNA, 17 nt, Human
gugaggaugaaaaaaua

SEQ ID NO: 1187129 - RNA, 15 nt, Human
gugagccacugcacc

SEQ ID NO: 1187130 - RNA, 20 nt, Human
gugagccacugcaccgggcc

SEQ ID NO: 1187131 - RNA, 17 nt, Human
gugaguugauagcacag

SEQ ID NO: 1187132 - RNA, 15 nt, Human
gugauacaaugcugu

SEQ ID NO: 1187133 - RNA, 17 nt, Human
gugauacaaugcugugc

SEQ ID NO: 1187134 - RNA, 21 nt, Human
gugaacaaauuuacagagaca

SEQ ID NO: 1187135 - RNA, 21 nt, Human
gugaaugaugauccuaggcau

SEQ ID NO: 1187136 - RNA, 20 nt, Human
gugacaaggauugcuacugu

SEQ ID NO: 1187137 - RNA, 12 nt, Human
gugacagaggca

SEQ ID NO: 1187138 - RNA, 13 nt, Human
gugacagaggcag

SEQ ID NO: 1187139 - RNA, 14 nt, Human
gugacagaggcagc

SEQ ID NO: 1187140 - RNA, 15 nt, Human
gugacagaggcagcc

SEQ ID NO: 1187141 - RNA, 13 nt, Human
gugaccucugccu

SEQ ID NO: 1187142 - RNA, 14 nt, Human
gugaccucugccug

SEQ ID NO: 1187143 - RNA, 15 nt, Human
gugaccucugccuga

SEQ ID NO: 1187144 - RNA, 12 nt, Human
guggcugcuuca

SEQ ID NO: 1187145 - RNA, 14 nt, Human
guggcugcuucaag

SEQ ID NO: 1187146 - RNA, 14 nt, Human
guggcucacgccug

SEQ ID NO: 1187147 - RNA, 22 nt, Human
guggcuuaaaacaacacucaca

SEQ ID NO: 1187148 - RNA, 15 nt, Human
guggcugcuucaagg

SEQ ID NO: 1187149 - RNA, 16 nt, Human
guggcugcuucaagga

SEQ ID NO: 1187150 - RNA, 19 nt, Human
guggcugcuucaaggaucc

SEQ ID NO: 1187151 - RNA, 22 nt, Human
guggcugcuucaaggauccuga

SEQ ID NO: 1187152 - RNA, 23 nt, Human
guggcugcuucaaggauccugag

SEQ ID NO: 1187153 - RNA, 19 nt, Human
guggcuggguuggagggug

SEQ ID NO: 1187154 - RNA, 15 nt, Human
gugggcuaguugggc

SEQ ID NO: 1187155 - RNA, 17 nt, Human
gugggcccaaugcacuu

SEQ ID NO: 1187156 - RNA, 15 nt, Human
guggggaccucaggc

SEQ ID NO: 1187157 - RNA, 18 nt, Human
guggggaccucaggccug

SEQ ID NO: 1187158 - RNA, 23 nt, Human
guggguuucuaaagcugccagcc

SEQ ID NO: 1187159 - RNA, 13 nt, Human
guggggcagcuug

SEQ ID NO: 1187160 - RNA, 17 nt, Human
guggggcagcuugaggg

SEQ ID NO: 1187161 - RNA, 13 nt, Human
gugucccugcacu

SEQ ID NO: 1187162 - RNA, 16 nt, Human
gugucccugcacuugc

SEQ ID NO: 1187163 - RNA, 18 nt, Human
gugucccugcacuugcag

SEQ ID NO: 1187164 - RNA, 17 nt, Human
guguacauggaauaaca

SEQ ID NO: 1187165 - RNA, 22 nt, Human
guguacauggaauaacauguaa

SEQ ID NO: 1187166 - RNA, 14 nt, Human
guggugaccucugc

SEQ ID NO: 1187167 - RNA, 17 nt, Human
guggugaccucugccug

SEQ ID NO: 1187168 - RNA, 21 nt, Human
guggugagaggcauccaguau

SEQ ID NO: 1187169 - RNA, 19 nt, Human
guggugcgaucuggguuca

SEQ ID NO: 1187170 - RNA, 21 nt, Human
guguaaguagauaggccaugg

SEQ ID NO: 1187171 - RNA, 21 nt, Human
guguaaguauucuuauuuaau

SEQ ID NO: 1187172 - RNA, 19 nt, Human
gugguaugaucacggcuca

SEQ ID NO: 1187173 - RNA, 17 nt, Human
gugguagagugugccug

SEQ ID NO: 1187174 - RNA, 14 nt, Human
guggucccacccca

SEQ ID NO: 1187175 - RNA, 15 nt, Human
guggucccaccccac

SEQ ID NO: 1187176 - RNA, 16 nt, Human
guggucccaccccaca

SEQ ID NO: 1187177 - RNA, 17 nt, Human
guggucccaccccacac

SEQ ID NO: 1187178 - RNA, 18 nt, Human
gugguccuaaucuucuga

SEQ ID NO: 1187179 - RNA, 13 nt, Human
guguggagaagcg

SEQ ID NO: 1187180 - RNA, 21 nt, Human
guguggagaagcggcuggcag

SEQ ID NO: 1187181 - RNA, 12 nt, Human
gugugcucugau

SEQ ID NO: 1187182 - RNA, 15 nt, Human
gugugcucugaucau

SEQ ID NO: 1187183 - RNA, 22 nt, Human
gugugcucugaucauccacugu

SEQ ID NO: 1187184 - RNA, 23 nt, Human
gugucccugcacuugcagacucu

SEQ ID NO: 1187185 - RNA, 14 nt, Human
guguccggucccug

SEQ ID NO: 1187186 - RNA, 15 nt, Human
gugucgggcaugaca

SEQ ID NO: 1187187 - RNA, 17 nt, Human
gugucucccuucauccu

SEQ ID NO: 1187188 - RNA, 14 nt, Human
gugucucuuggucc

SEQ ID NO: 1187189 - RNA, 18 nt, Human
gugucucuugguccugcu

SEQ ID NO: 1187190 - RNA, 19 nt, Human
gugucucuugguccugcug

SEQ ID NO: 1187191 - RNA, 20 nt, Human
gugucucuugguccugcugc

SEQ ID NO: 1187192 - RNA, 21 nt, Human
gugucucuugguccugcugca

SEQ ID NO: 1187193 - RNA, 22 nt, Human
gugucucuugguccugcugcag

SEQ ID NO: 1187194 - RNA, 15 nt, Human
guuacacuaaaaggu

SEQ ID NO: 1187195 - RNA, 16 nt, Human
guuacacuaaaaggug

SEQ ID NO: 1187196 - RNA, 13 nt, Human
guuacagacaaag

SEQ ID NO: 1187197 - RNA, 22 nt, Human
guuaaaauaccagccaguaaau

SEQ ID NO: 1187198 - RNA, 12 nt, Human
guguuacuaagu

SEQ ID NO: 1187199 - RNA, 14 nt, Human
guguuacuaaguuu

SEQ ID NO: 1187200 - RNA, 18 nt, Human
guguuaugacuccagaau

SEQ ID NO: 1187201 - RNA, 20 nt, Human
guucaagcgauucuucugcu

SEQ ID NO: 1187202 - RNA, 16 nt, Human
guucaauucucauuug

SEQ ID NO: 1187203 - RNA, 23 nt, Human
guucaauucucauuugucacaca

SEQ ID NO: 1187204 - RNA, 17 nt, Human
guuauuauauuuacaaa

SEQ ID NO: 1187205 - RNA, 19 nt, Human
guucaagcgauucuucugc

SEQ ID NO: 1187206 - RNA, 19 nt, Human
guuauuaaaaaucucaaau

SEQ ID NO: 1187207 - RNA, 21 nt, Human
guuaugacuccagaauuuccc

SEQ ID NO: 1187208 - RNA, 15 nt, Human
guuacucagaauucu

SEQ ID NO: 1187209 - RNA, 22 nt, Human
guuacuaaguuuuuauggcuuu

SEQ ID NO: 1187210 - RNA, 16 nt, Human
guuaguuucuccaagc

SEQ ID NO: 1187211 - RNA, 19 nt, Human
guuaguuucuccaagcagg

SEQ ID NO: 1187212 - RNA, 22 nt, Human
guuaguuucuccaagcaggaca

SEQ ID NO: 1187213 - RNA, 15 nt, Human
guuacagacaaagcg

SEQ ID NO: 1187214 - RNA, 17 nt, Human
guuacagacaaagcgug

SEQ ID NO: 1187215 - RNA, 18 nt, Human
guuacauaagauaaaugu

SEQ ID NO: 1187216 - RNA, 19 nt, Human
guuacauaagauaaaugug

SEQ ID NO: 1187217 - RNA, 21 nt, Human
guuacauuuuuaagugcugca

SEQ ID NO: 1187218 - RNA, 23 nt, Human
guuaccauuuugggguacccacu

SEQ ID NO: 1187219 - RNA, 23 nt, Human
guuaccucugccucagaaaacaa

SEQ ID NO: 1187220 - RNA, 19 nt, Human
guucacugcaaccuccgcc

SEQ ID NO: 1187221 - RNA, 16 nt, Human
guucaucaaugaauga

SEQ ID NO: 1187222 - RNA, 17 nt, Human
guucaucauccuaagcu

SEQ ID NO: 1187223 - RNA, 12 nt, Human
guucaucuugaa

SEQ ID NO: 1187224 - RNA, 13 nt, Human
guucaucuugaau

SEQ ID NO: 1187225 - RNA, 18 nt, Human
guucaucuugaauuguaa

SEQ ID NO: 1187226 - RNA, 17 nt, Human
guuccaccaucaagcca

SEQ ID NO: 1187227 - RNA, 20 nt, Human
guuccaccaucaagccacca

SEQ ID NO: 1187228 - RNA, 14 nt, Human
guuccuaauccucu

SEQ ID NO: 1187229 - RNA, 22 nt, Human
guuccucauuagcauuuugcua

SEQ ID NO: 1187230 - RNA, 19 nt, Human
guucugauccuaguuccac

SEQ ID NO: 1187231 - RNA, 12 nt, Human
guucugaagaag

SEQ ID NO: 1187232 - RNA, 13 nt, Human
guucugaagaaga

SEQ ID NO: 1187233 - RNA, 14 nt, Human
guucugaagaagau

SEQ ID NO: 1187234 - RNA, 15 nt, Human
guucugaagaagaug

SEQ ID NO: 1187235 - RNA, 13 nt, Human
guucuuuccaaag

SEQ ID NO: 1187236 - RNA, 14 nt, Human
guucuuuccaaagu

SEQ ID NO: 1187237 - RNA, 18 nt, Human
guucuuuccaaaguacac

SEQ ID NO: 1187238 - RNA, 20 nt, Human
guucuuuccaaaguacacug

SEQ ID NO: 1187239 - RNA, 17 nt, Human
guugaaaaacagcugag

SEQ ID NO: 1187240 - RNA, 23 nt, Human
guucuggcagaguugaagacaga

SEQ ID NO: 1187241 - RNA, 12 nt, Human
guucuggcucuu

SEQ ID NO: 1187242 - RNA, 16 nt, Human
guucuggcucuuccag

SEQ ID NO: 1187243 - RNA, 20 nt, Human
guucuggcucuuccaggcug

SEQ ID NO: 1187244 - RNA, 11 nt, Human
guucugggaca

SEQ ID NO: 1187245 - RNA, 12 nt, Human
guucugggacac

SEQ ID NO: 1187246 - RNA, 14 nt, Human
guucugggacacag

SEQ ID NO: 1187247 - RNA, 15 nt, Human
guucugggacacagu

SEQ ID NO: 1187248 - RNA, 16 nt, Human
guucugggacacaguu

SEQ ID NO: 1187249 - RNA, 23 nt, Human
guucugggacacaguucaauucu

SEQ ID NO: 1187250 - RNA, 18 nt, Human
guucuuucacccuuuucu

SEQ ID NO: 1187251 - RNA, 20 nt, Human
guugauggugguauguuuuc

SEQ ID NO: 1187252 - RNA, 21 nt, Human
guugauggugguauguuuuca

SEQ ID NO: 1187253 - RNA, 16 nt, Human
guugaagacagagcua

SEQ ID NO: 1187254 - RNA, 15 nt, Human
guugcaggaccucag

SEQ ID NO: 1187255 - RNA, 13 nt, Human
guuggccaggcug

SEQ ID NO: 1187256 - RNA, 14 nt, Human
guuggccaggcugg

SEQ ID NO: 1187257 - RNA, 15 nt, Human
guuggccaggcuggu

SEQ ID NO: 1187258 - RNA, 17 nt, Human
guuggccaggcuggucu

SEQ ID NO: 1187259 - RNA, 19 nt, Human
guuggccaggcuggucuca

SEQ ID NO: 1187260 - RNA, 14 nt, Human
guuggccaguguga

SEQ ID NO: 1187261 - RNA, 14 nt, Human
guuggcaaaaaggc

SEQ ID NO: 1187262 - RNA, 18 nt, Human
guuggcaaaaaggcagga

SEQ ID NO: 1187263 - RNA, 23 nt, Human
guuggccaaagccaaagcuaggc

SEQ ID NO: 1187264 - RNA, 13 nt, Human
guugccagucacc

SEQ ID NO: 1187265 - RNA, 14 nt, Human
guugccagucaccc

SEQ ID NO: 1187266 - RNA, 16 nt, Human
guugccagucaccccg

SEQ ID NO: 1187267 - RNA, 17 nt, Human
guugccagucaccccgg

SEQ ID NO: 1187268 - RNA, 18 nt, Human
guugccagucaccccggc

SEQ ID NO: 1187269 - RNA, 23 nt, Human
guugccagucaccccggccaccu

SEQ ID NO: 1187270 - RNA, 12 nt, Human
guugcccaggca

SEQ ID NO: 1187271 - RNA, 14 nt, Human
guugcccaggcagg

SEQ ID NO: 1187272 - RNA, 15 nt, Human
guugcccaggcaggu

SEQ ID NO: 1187273 - RNA, 22 nt, Human
guuguggauuuaacagaaaugu

SEQ ID NO: 1187274 - RNA, 14 nt, Human
guugugguuaaucu

SEQ ID NO: 1187275 - RNA, 12 nt, Human
guuggcuggggg

SEQ ID NO: 1187276 - RNA, 13 nt, Human
guuggccccugcc

SEQ ID NO: 1187277 - RNA, 14 nt, Human
guuggccccugccc

SEQ ID NO: 1187278 - RNA, 20 nt, Human
guuggccccugcccggcugc

SEQ ID NO: 1187279 - RNA, 19 nt, Human
guuggcugggggccucagu

SEQ ID NO: 1187280 - RNA, 23 nt, Human
guuggcugggggccucagugcca

SEQ ID NO: 1187281 - RNA, 12 nt, Human
guugucagcuga

SEQ ID NO: 1187282 - RNA, 14 nt, Human
guuuagauaauaca

SEQ ID NO: 1187283 - RNA, 15 nt, Human
guuuagauaauacac

SEQ ID NO: 1187284 - RNA, 14 nt, Human
guuguuacauuuuu

SEQ ID NO: 1187285 - RNA, 15 nt, Human
guuguuacauuuuua

SEQ ID NO: 1187286 - RNA, 20 nt, Human
guuguuugauucagacagcu

SEQ ID NO: 1187287 - RNA, 21 nt, Human
guuuagcuggaaaaguauguu

SEQ ID NO: 1187288 - RNA, 20 nt, Human
guuuaggauguugaaaaagu

SEQ ID NO: 1187289 - RNA, 20 nt, Human
guuuauauaagcuuguauuc

SEQ ID NO: 1187290 - RNA, 16 nt, Human
guuugauucagacagc

SEQ ID NO: 1187291 - RNA, 20 nt, Human
guuugauucagacagcugcc

SEQ ID NO: 1187292 - RNA, 21 nt, Human
guuugauucagacagcugccu

SEQ ID NO: 1187293 - RNA, 17 nt, Human
guuugagaucagccugg

SEQ ID NO: 1187294 - RNA, 18 nt, Human
guuugagaucagccuggg

SEQ ID NO: 1187295 - RNA, 19 nt, Human
guuuuccaugaguccccug

SEQ ID NO: 1187296 - RNA, 20 nt, Human
guuuuccaugaguccccugu

SEQ ID NO: 1187297 - RNA, 13 nt, Human
guuuuccugaaga

SEQ ID NO: 1187298 - RNA, 20 nt, Human
guuuguuucugaaagggacg

SEQ ID NO: 1187299 - RNA, 17 nt, Human
guuuucaaaauaaaaau

SEQ ID NO: 1187300 - RNA, 11 nt, Human
guuuucacucu

SEQ ID NO: 1187301 - RNA, 12 nt, Human
guuuucacucuu

SEQ ID NO: 1187302 - RNA, 18 nt, Human
uaaaaaugguuuaaaugg

SEQ ID NO: 1187303 - RNA, 19 nt, Human
uaaaaaugguuuaaauggu

SEQ ID NO: 1187304 - RNA, 17 nt, Human
uaaaacacaacaucuuu

SEQ ID NO: 1187305 - RNA, 22 nt, Human
uaaaacacaacaucuuuuucua

SEQ ID NO: 1187306 - RNA, 23 nt, Human
uaaaacacaacaucuuuuucuac

SEQ ID NO: 1187307 - RNA, 22 nt, Human
uaaaacaagcacuaaacaaaga

SEQ ID NO: 1187308 - RNA, 15 nt, Human
uaaaacaacacucac

SEQ ID NO: 1187309 - RNA, 14 nt, Human
uaaaagauacaguu

SEQ ID NO: 1187310 - RNA, 17 nt, Human
uaaaagauacaguuacu

SEQ ID NO: 1187311 - RNA, 20 nt, Human
uaaaagauacaguuacucag

SEQ ID NO: 1187312 - RNA, 21 nt, Human
uaaaagauacaguuacucaga

SEQ ID NO: 1187313 - RNA, 12 nt, Human
uaaaaggagcca

SEQ ID NO: 1187314 - RNA, 21 nt, Human
uaaaagguaugcaaucaaauc

SEQ ID NO: 1187315 - RNA, 12 nt, Human
uaaaaggugacc

SEQ ID NO: 1187316 - RNA, 19 nt, Human
uaaaaggugaccaaugaug

SEQ ID NO: 1187317 - RNA, 15 nt, Human
uaaaauccauacauu

SEQ ID NO: 1187318 - RNA, 17 nt, Human
uaaaauccauacauuug

SEQ ID NO: 1187319 - RNA, 18 nt, Human
uaaaauccauacauuugu

SEQ ID NO: 1187320 - RNA, 20 nt, Human
uaaacaagaccacguuucua

SEQ ID NO: 1187321 - RNA, 21 nt, Human
uaaacaagaccacguuucuaa

SEQ ID NO: 1187322 - RNA, 22 nt, Human
uaaacaagaccacguuucuaaa

SEQ ID NO: 1187323 - RNA, 23 nt, Human
uaaacaagaccacguuucuaaag

SEQ ID NO: 1187324 - RNA, 19 nt, Human
uaaaccaaggcuagaacca

SEQ ID NO: 1187325 - RNA, 13 nt, Human
uaaacuuaaucua

SEQ ID NO: 1187326 - RNA, 22 nt, Human
uaaacuugguuuuuaaaaaacu

SEQ ID NO: 1187327 - RNA, 14 nt, Human
uaaaguguuugaaa

SEQ ID NO: 1187328 - RNA, 17 nt, Human
uaaaggcuaccuuugua

SEQ ID NO: 1187329 - RNA, 19 nt, Human
uaaaggcuaccuuuguauu

SEQ ID NO: 1187330 - RNA, 14 nt, Human
uaaaggaauuuaaa

SEQ ID NO: 1187331 - RNA, 15 nt, Human
uaaaggcuaccuuug

SEQ ID NO: 1187332 - RNA, 12 nt, Human
uaaagaaaacug

SEQ ID NO: 1187333 - RNA, 12 nt, Human
uaaagaaagaga

SEQ ID NO: 1187334 - RNA, 13 nt, Human
uaaagaaagagag

SEQ ID NO: 1187335 - RNA, 14 nt, Human
uaaagaaagagaga

SEQ ID NO: 1187336 - RNA, 16 nt, Human
uaaagcagcguuucua

SEQ ID NO: 1187337 - RNA, 17 nt, Human
uaaagcagcguuucuau

SEQ ID NO: 1187338 - RNA, 19 nt, Human
uaaagcagcguuucuauga

SEQ ID NO: 1187339 - RNA, 15 nt, Human
uaagugcugcauuua

SEQ ID NO: 1187340 - RNA, 16 nt, Human
uaagugcugcauuuaa

SEQ ID NO: 1187341 - RNA, 18 nt, Human
uaagugcugcauuuaaaa

SEQ ID NO: 1187342 - RNA, 22 nt, Human
uaagugcugcauuuaaaagaua

SEQ ID NO: 1187343 - RNA, 13 nt, Human
uaagugaaauaag

SEQ ID NO: 1187344 - RNA, 12 nt, Human
uaagugagagag

SEQ ID NO: 1187345 - RNA, 23 nt, Human
uaagugaggaugaaaaaauaaca

SEQ ID NO: 1187346 - RNA, 14 nt, Human
uaagugcugcauuu

SEQ ID NO: 1187347 - RNA, 20 nt, Human
uaagguggguacgggagggu

SEQ ID NO: 1187348 - RNA, 15 nt, Human
uaaggugugcucuga

SEQ ID NO: 1187349 - RNA, 17 nt, Human
uaaggguaucuggugac

SEQ ID NO: 1187350 - RNA, 12 nt, Human
uaagaggcaggg

SEQ ID NO: 1187351 - RNA, 15 nt, Human
uaagaggcagggucu

SEQ ID NO: 1187352 - RNA, 22 nt, Human
uaagaggcagggucucacucug

SEQ ID NO: 1187353 - RNA, 14 nt, Human
uaagcuauucagua

SEQ ID NO: 1187354 - RNA, 20 nt, Human
uaauauuaaggaagacaaug

SEQ ID NO: 1187355 - RNA, 20 nt, Human
uaauccucuaggaggucucu

SEQ ID NO: 1187356 - RNA, 13 nt, Human
uaaucuaaaugga

SEQ ID NO: 1187357 - RNA, 14 nt, Human
uaauaauguuucaa

SEQ ID NO: 1187358 - RNA, 15 nt, Human
uaauaugcacacauu

SEQ ID NO: 1187359 - RNA, 16 nt, Human
uaauaugcacacauuu

SEQ ID NO: 1187360 - RNA, 17 nt, Human
uaauaugcacacauuuu

SEQ ID NO: 1187361 - RNA, 18 nt, Human
uaauaugcacacauuuuu

SEQ ID NO: 1187362 - RNA, 19 nt, Human
uaauaugcacacauuuuuu

SEQ ID NO: 1187363 - RNA, 14 nt, Human
uaauuaaguacuau

SEQ ID NO: 1187364 - RNA, 17 nt, Human
uaauuaaguacuaugua

SEQ ID NO: 1187365 - RNA, 20 nt, Human
uaauuaaguacuauguauca

SEQ ID NO: 1187366 - RNA, 17 nt, Human
uaaugauaacuggaaac

SEQ ID NO: 1187367 - RNA, 22 nt, Human
uaaugauaacuggaaacuucag

SEQ ID NO: 1187368 - RNA, 23 nt, Human
uaaugauaacuggaaacuucagc

SEQ ID NO: 1187369 - RNA, 15 nt, Human
uaaugcgugcauacc

SEQ ID NO: 1187370 - RNA, 19 nt, Human
uaaugcgugcauaccacuu

SEQ ID NO: 1187371 - RNA, 22 nt, Human
uaaugcgugcauaccacuuuug

SEQ ID NO: 1187372 - RNA, 23 nt, Human
uaaugcgugcauaccacuuuugu

SEQ ID NO: 1187373 - RNA, 15 nt, Human
uaauggggcggugag

SEQ ID NO: 1187374 - RNA, 11 nt, Human
uaacagaaaug

SEQ ID NO: 1187375 - RNA, 12 nt, Human
uaacagaaaugu

SEQ ID NO: 1187376 - RNA, 16 nt, Human
uaaccacuucagcuga

SEQ ID NO: 1187377 - RNA, 23 nt, Human
uaaccaguguuguggauuuaaca

SEQ ID NO: 1187378 - RNA, 15 nt, Human
uaacuggaaacuuca

SEQ ID NO: 1187379 - RNA, 16 nt, Human
uaagaaaaaggaugca

SEQ ID NO: 1187380 - RNA, 18 nt, Human
uaagaaaaaggaugcaca

SEQ ID NO: 1187381 - RNA, 19 nt, Human
uaagaaaaaggaugcacag

SEQ ID NO: 1187382 - RNA, 23 nt, Human
uaagaaaaaggaugcacagaguu

SEQ ID NO: 1187383 - RNA, 21 nt, Human
uaagaaaauaucacuugucaa

SEQ ID NO: 1187384 - RNA, 24 nt, Human
uaagaaagacuaucuaaauguuga

SEQ ID NO: 1187385 - RNA, 19 nt, Human
uaagaaccuuuugagugcc

SEQ ID NO: 1187386 - RNA, 13 nt, Human
uaagagagaauga

SEQ ID NO: 1187387 - RNA, 14 nt, Human
uaagagagaaugag

SEQ ID NO: 1187388 - RNA, 23 nt, Human
uaagagagaaugagagacacacu

SEQ ID NO: 1187389 - RNA, 22 nt, Human
uaagaaccuuuugagugccuua

SEQ ID NO: 1187390 - RNA, 16 nt, Human
uaaauucuugcaaagu

SEQ ID NO: 1187391 - RNA, 17 nt, Human
uaaauucuugcaaagua

SEQ ID NO: 1187392 - RNA, 18 nt, Human
uaaauucuugcaaaguau

SEQ ID NO: 1187393 - RNA, 22 nt, Human
uaaauucuugcaaaguaucccu

SEQ ID NO: 1187394 - RNA, 20 nt, Human
uaaauugacacuuaaaaaug

SEQ ID NO: 1187395 - RNA, 23 nt, Human
uaaauugacacuuaaaaaugguu

SEQ ID NO: 1187396 - RNA, 18 nt, Human
uaacaccaugauuaacca

SEQ ID NO: 1187397 - RNA, 13 nt, Human
uaaaugcccagcc

SEQ ID NO: 1187398 - RNA, 14 nt, Human
uaaaugcccagccc

SEQ ID NO: 1187399 - RNA, 15 nt, Human
uaaaugcccagcccc

SEQ ID NO: 1187400 - RNA, 16 nt, Human
uaaaugcccagccccu

SEQ ID NO: 1187401 - RNA, 17 nt, Human
uaaaugcccagccccuu

SEQ ID NO: 1187402 - RNA, 17 nt, Human
uaaaugcugcuuuuucu

SEQ ID NO: 1187403 - RNA, 11 nt, Human
uaaaugcugcu

SEQ ID NO: 1187404 - RNA, 16 nt, Human
uaaauggaaccacucu

SEQ ID NO: 1187405 - RNA, 20 nt, Human
uaaauggcuuccuggcaaua

SEQ ID NO: 1187406 - RNA, 14 nt, Human
uaaaugggggugca

SEQ ID NO: 1187407 - RNA, 17 nt, Human
uaaaugggggugcauuu

SEQ ID NO: 1187408 - RNA, 18 nt, Human
uaaaugggggugcauuug

SEQ ID NO: 1187409 - RNA, 19 nt, Human
uaaaugggggugcauuuga

SEQ ID NO: 1187410 - RNA, 20 nt, Human
uaaaugucuaguuguaacac

SEQ ID NO: 1187411 - RNA, 22 nt, Human
uaaaugucucuuuaaugucaca

SEQ ID NO: 1187412 - RNA, 14 nt, Human
uacacuguuucaaa

SEQ ID NO: 1187413 - RNA, 22 nt, Human
uacacuguuucaaacuuuacua

SEQ ID NO: 1187414 - RNA, 16 nt, Human
uacacuuacacuuuau

SEQ ID NO: 1187415 - RNA, 22 nt, Human
uacacugugcugagucugaagg

SEQ ID NO: 1187416 - RNA, 23 nt, Human
uacacugugcugagucugaaggc

SEQ ID NO: 1187417 - RNA, 20 nt, Human
uacacuguuucaaacuuuac

SEQ ID NO: 1187418 - RNA, 20 nt, Human
uacagcuugaccgugaggcc

SEQ ID NO: 1187419 - RNA, 18 nt, Human
uacaggaagguagaaaua

SEQ ID NO: 1187420 - RNA, 13 nt, Human
uacaggaaguacu

SEQ ID NO: 1187421 - RNA, 23 nt, Human
uacaguucggugagcuacaaaug

SEQ ID NO: 1187422 - RNA, 14 nt, Human
uacaggauuugaaa

SEQ ID NO: 1187423 - RNA, 14 nt, Human
uacaggaaguacug

SEQ ID NO: 1187424 - RNA, 15 nt, Human
uacaggaaguacugg

SEQ ID NO: 1187425 - RNA, 22 nt, Human
uacaggaaguacuggagaaaau

SEQ ID NO: 1187426 - RNA, 15 nt, Human
uacaggagugagcac

SEQ ID NO: 1187427 - RNA, 21 nt, Human
uacagcuugaccgugaggcca

SEQ ID NO: 1187428 - RNA, 17 nt, Human
uacaguugaaaaacagc

SEQ ID NO: 1187429 - RNA, 19 nt, Human
uacaguugaaaaacagcug

SEQ ID NO: 1187430 - RNA, 20 nt, Human
uacaguugaaaaacagcuga

SEQ ID NO: 1187431 - RNA, 18 nt, Human
uacaguuuguuaguauga

SEQ ID NO: 1187432 - RNA, 19 nt, Human
uacaguuuguuaguaugag

SEQ ID NO: 1187433 - RNA, 21 nt, Human
uacaguuuguuaguaugaggc

SEQ ID NO: 1187434 - RNA, 16 nt, Human
uacauaaacaaguccu

SEQ ID NO: 1187435 - RNA, 16 nt, Human
uacauaagauaaaugu

SEQ ID NO: 1187436 - RNA, 17 nt, Human
uacauaagauaaaugug

SEQ ID NO: 1187437 - RNA, 16 nt, Human
uacaugaaaacacauu

SEQ ID NO: 1187438 - RNA, 17 nt, Human
uacaugaaaacacauuu

SEQ ID NO: 1187439 - RNA, 18 nt, Human
uacaugaaaacacauuuu

SEQ ID NO: 1187440 - RNA, 19 nt, Human
uacaugaaaacacauuuuu

SEQ ID NO: 1187441 - RNA, 23 nt, Human
uacaugaaaacacauuuuucuua

SEQ ID NO: 1187442 - RNA, 14 nt, Human
uacauggaauaaca

SEQ ID NO: 1187443 - RNA, 18 nt, Human
uacauggaauaacaugua

SEQ ID NO: 1187444 - RNA, 19 nt, Human
uacauggaauaacauguaa

SEQ ID NO: 1187445 - RNA, 22 nt, Human
uacauggaauaacauguaauua

SEQ ID NO: 1187446 - RNA, 14 nt, Human
uacauuuuuaagug

SEQ ID NO: 1187447 - RNA, 19 nt, Human
uacauuuuuaagugcugca

SEQ ID NO: 1187448 - RNA, 22 nt, Human
uacauuuuuaagugcugcauuu

SEQ ID NO: 1187449 - RNA, 18 nt, Human
uaauuuugugaagcaaaa

SEQ ID NO: 1187450 - RNA, 12 nt, Human
uaauuuuuauau

SEQ ID NO: 1187451 - RNA, 16 nt, Human
uaauuuuuauauuuga

SEQ ID NO: 1187452 - RNA, 17 nt, Human
uaauuuuuauauuugaa

SEQ ID NO: 1187453 - RNA, 14 nt, Human
uacaaaguagaagu

SEQ ID NO: 1187454 - RNA, 18 nt, Human
uacaaaguagaagucuua

SEQ ID NO: 1187455 - RNA, 11 nt, Human
uacacacacac

SEQ ID NO: 1187456 - RNA, 12 nt, Human
uacacacacaca

SEQ ID NO: 1187457 - RNA, 13 nt, Human
uacacacacacac

SEQ ID NO: 1187458 - RNA, 14 nt, Human
uacacacacacaca

SEQ ID NO: 1187459 - RNA, 16 nt, Human
uacacacacacacaca

SEQ ID NO: 1187460 - RNA, 17 nt, Human
uacacacacacacacag

SEQ ID NO: 1187461 - RNA, 18 nt, Human
uacacacacacacacagc

SEQ ID NO: 1187462 - RNA, 19 nt, Human
uacacacacacacacagcc

SEQ ID NO: 1187463 - RNA, 20 nt, Human
uacacacacacacacagcca

SEQ ID NO: 1187464 - RNA, 21 nt, Human
uacacacacacacacagccac

SEQ ID NO: 1187465 - RNA, 15 nt, Human
uacacacugcauguu

SEQ ID NO: 1187466 - RNA, 17 nt, Human
uacacacugcauguuug

SEQ ID NO: 1187467 - RNA, 19 nt, Human
uacacauuuuauuuuauua

SEQ ID NO: 1187468 - RNA, 21 nt, Human
uacacugugcugagucugaag

SEQ ID NO: 1187469 - RNA, 16 nt, Human
uacccagcgagcccug

SEQ ID NO: 1187470 - RNA, 22 nt, Human
uaccuaacgaaguauccuucag

SEQ ID NO: 1187471 - RNA, 23 nt, Human
uacauuuuuaagugcugcauuua

SEQ ID NO: 1187472 - RNA, 22 nt, Human
uaccaaaaaucucaauauuuca

SEQ ID NO: 1187473 - RNA, 15 nt, Human
uaccuacauacaauu

SEQ ID NO: 1187474 - RNA, 13 nt, Human
uaccuuuuuuaga

SEQ ID NO: 1187475 - RNA, 19 nt, Human
uaccuuuuuuagaguugau

SEQ ID NO: 1187476 - RNA, 22 nt, Human
uaccuuuuuuagaguugauacu

SEQ ID NO: 1187477 - RNA, 18 nt, Human
uaccucggugccuuccuc

SEQ ID NO: 1187478 - RNA, 21 nt, Human
uaccucuugagccuugaacuu

SEQ ID NO: 1187479 - RNA, 13 nt, Human
uaccuuuuuuaua

SEQ ID NO: 1187480 - RNA, 16 nt, Human
uaccuuuuuuauacau

SEQ ID NO: 1187481 - RNA, 17 nt, Human
uaccuuuuuuauacaua

SEQ ID NO: 1187482 - RNA, 18 nt, Human
uacgaaaagaggggaaga

SEQ ID NO: 1187483 - RNA, 21 nt, Human
uacgaaaagaggggaagagac

SEQ ID NO: 1187484 - RNA, 17 nt, Human
uacuaaccagcagaaau

SEQ ID NO: 1187485 - RNA, 14 nt, Human
uacuaaggaaucuu

SEQ ID NO: 1187486 - RNA, 22 nt, Human
uacuaauaaaauuuaaaagucu

SEQ ID NO: 1187487 - RNA, 21 nt, Human
uacuaauagacaauuuauuau

SEQ ID NO: 1187488 - RNA, 22 nt, Human
uacucgaguuacagacaaagcg

SEQ ID NO: 1187489 - RNA, 12 nt, Human
uacucccaucug

SEQ ID NO: 1187490 - RNA, 22 nt, Human
uacuacaguccucccaucucac

SEQ ID NO: 1187491 - RNA, 13 nt, Human
uacuacaguuugu

SEQ ID NO: 1187492 - RNA, 14 nt, Human
uacuacaguuuguu

SEQ ID NO: 1187493 - RNA, 20 nt, Human
uacuacaguuuguuaguaug

SEQ ID NO: 1187494 - RNA, 16 nt, Human
uacucuacccucuuag

SEQ ID NO: 1187495 - RNA, 13 nt, Human
uacuuguggacac

SEQ ID NO: 1187496 - RNA, 16 nt, Human
uacuguccuacccacc

SEQ ID NO: 1187497 - RNA, 21 nt, Human
uacugucuucaguaagccgug

SEQ ID NO: 1187498 - RNA, 11 nt, Human
uagagacaggg

SEQ ID NO: 1187499 - RNA, 14 nt, Human
uagagguucaaaga

SEQ ID NO: 1187500 - RNA, 15 nt, Human
uagagguucaaagau

SEQ ID NO: 1187501 - RNA, 16 nt, Human
uagagguucaaagaua

SEQ ID NO: 1187502 - RNA, 12 nt, Human
uagagugggagc

SEQ ID NO: 1187503 - RNA, 14 nt, Human
uagaguugauacua

SEQ ID NO: 1187504 - RNA, 17 nt, Human
uagaguugauacuacag

SEQ ID NO: 1187505 - RNA, 15 nt, Human
uagaauuaacacaug

SEQ ID NO: 1187506 - RNA, 16 nt, Human
uagaauuaacacauga

SEQ ID NO: 1187507 - RNA, 18 nt, Human
uagaauuaacacaugauc

SEQ ID NO: 1187508 - RNA, 14 nt, Human
uacuuguggacaca

SEQ ID NO: 1187509 - RNA, 23 nt, Human
uagaauaccacaggaaccacaag

SEQ ID NO: 1187510 - RNA, 22 nt, Human
uagcucauucuccuuguguuac

SEQ ID NO: 1187511 - RNA, 15 nt, Human
uagcugggacuacag

SEQ ID NO: 1187512 - RNA, 17 nt, Human
uagcugggacuacaggc

SEQ ID NO: 1187513 - RNA, 19 nt, Human
uagcugggacuacaggcac

SEQ ID NO: 1187514 - RNA, 18 nt, Human
uagccugugccucuggga

SEQ ID NO: 1187515 - RNA, 20 nt, Human
uagccugugccucugggacu

SEQ ID NO: 1187516 - RNA, 20 nt, Human
uagcucaggugucccugcac

SEQ ID NO: 1187517 - RNA, 21 nt, Human
uagcucaggugucccugcacu

SEQ ID NO: 1187518 - RNA, 12 nt, Human
uagcucauucuc

SEQ ID NO: 1187519 - RNA, 16 nt, Human
uagccuaggugacaga

SEQ ID NO: 1187520 - RNA, 16 nt, Human
uagauacuguaucaug

SEQ ID NO: 1187521 - RNA, 14 nt, Human
uagauaggccaugg

SEQ ID NO: 1187522 - RNA, 17 nt, Human
uagauaggccaugggca

SEQ ID NO: 1187523 - RNA, 11 nt, Human
uagcagggaaa

SEQ ID NO: 1187524 - RNA, 17 nt, Human
uagcauacguacacauu

SEQ ID NO: 1187525 - RNA, 18 nt, Human
uagcauacguacacauuu

SEQ ID NO: 1187526 - RNA, 19 nt, Human
uagcauacguacacauuuu

SEQ ID NO: 1187527 - RNA, 14 nt, Human
uaucaaaagaaaga

SEQ ID NO: 1187528 - RNA, 19 nt, Human
uaucaggugcugccaucca

SEQ ID NO: 1187529 - RNA, 20 nt, Human
uaucaggugcugccauccag

SEQ ID NO: 1187530 - RNA, 21 nt, Human
uauauuuuuuguuaaaugauu

SEQ ID NO: 1187531 - RNA, 16 nt, Human
uauaugcuucuguuuu

SEQ ID NO: 1187532 - RNA, 17 nt, Human
uauauaacaaugcugua

SEQ ID NO: 1187533 - RNA, 19 nt, Human
uauauaacaaugcuguauu

SEQ ID NO: 1187534 - RNA, 20 nt, Human
uaguuguuugauucagacag

SEQ ID NO: 1187535 - RNA, 21 nt, Human
uaguuguuugauucagacagc

SEQ ID NO: 1187536 - RNA, 22 nt, Human
uaguuguuugauucagacagcu

SEQ ID NO: 1187537 - RNA, 16 nt, Human
uaguauuucuaugaaa

SEQ ID NO: 1187538 - RNA, 20 nt, Human
uaguggcuuaaaacaacacu

SEQ ID NO: 1187539 - RNA, 17 nt, Human
uaguauuguccaggucu

SEQ ID NO: 1187540 - RNA, 16 nt, Human
uaguaugguggcuggg

SEQ ID NO: 1187541 - RNA, 15 nt, Human
uaguuugauuaaauu

SEQ ID NO: 1187542 - RNA, 16 nt, Human
uaguuugauuaaauuc

SEQ ID NO: 1187543 - RNA, 21 nt, Human
uaguuugauuaaauucuugca

SEQ ID NO: 1187544 - RNA, 11 nt, Human
uauaaacuuua

SEQ ID NO: 1187545 - RNA, 13 nt, Human
uauaaacuuuacc

SEQ ID NO: 1187546 - RNA, 14 nt, Human
uauaaacuuuaccu

SEQ ID NO: 1187547 - RNA, 15 nt, Human
uauaaacuuuaccuu

SEQ ID NO: 1187548 - RNA, 16 nt, Human
uauaaacuuuaccuuu

SEQ ID NO: 1187549 - RNA, 17 nt, Human
uauaaacuuuaccuuuu

SEQ ID NO: 1187550 - RNA, 18 nt, Human
uauaaacuuuaccuuuuu

SEQ ID NO: 1187551 - RNA, 17 nt, Human
uaguaugaggcauuugu

SEQ ID NO: 1187552 - RNA, 18 nt, Human
uaguaugaggcauuuguu

SEQ ID NO: 1187553 - RNA, 13 nt, Human
uagguguggggga

SEQ ID NO: 1187554 - RNA, 17 nt, Human
uaggugugggggaagca

SEQ ID NO: 1187555 - RNA, 19 nt, Human
uaggugugacugaauuucu

SEQ ID NO: 1187556 - RNA, 21 nt, Human
uaggugugacugaauuucuuu

SEQ ID NO: 1187557 - RNA, 23 nt, Human
uaggugugacugaauuucuuuug

SEQ ID NO: 1187558 - RNA, 11 nt, Human
uagggaaaaac

SEQ ID NO: 1187559 - RNA, 11 nt, Human
uaggugacaga

SEQ ID NO: 1187560 - RNA, 16 nt, Human
uaggugacagagugag

SEQ ID NO: 1187561 - RNA, 15 nt, Human
ucaguccauagcaga

SEQ ID NO: 1187562 - RNA, 18 nt, Human
ucaguccaugaagaugua

SEQ ID NO: 1187563 - RNA, 17 nt, Human
ucagguggggucacucu

SEQ ID NO: 1187564 - RNA, 20 nt, Human
ucagguggggucacucuggc

SEQ ID NO: 1187565 - RNA, 21 nt, Human
ucagguggggucacucuggca

SEQ ID NO: 1187566 - RNA, 18 nt, Human
ucaggugcugccauccag

SEQ ID NO: 1187567 - RNA, 20 nt, Human
ucaggugcugccauccaggu

SEQ ID NO: 1187568 - RNA, 14 nt, Human
ucagguggggcagc

SEQ ID NO: 1187569 - RNA, 15 nt, Human
ucagguggggcagcu

SEQ ID NO: 1187570 - RNA, 16 nt, Human
ucagguggggcagcuu

SEQ ID NO: 1187571 - RNA, 17 nt, Human
ucagguggggcagcuug

SEQ ID NO: 1187572 - RNA, 17 nt, Human
ucagucugauucccaag

SEQ ID NO: 1187573 - RNA, 19 nt, Human
ucagucugauucccaagcu

SEQ ID NO: 1187574 - RNA, 18 nt, Human
ucagugugacugaucucu

SEQ ID NO: 1187575 - RNA, 14 nt, Human
ucaucauccuaagc

SEQ ID NO: 1187576 - RNA, 21 nt, Human
ucauggaauuggagcucgugg

SEQ ID NO: 1187577 - RNA, 15 nt, Human
ucagaucucuaacuu

SEQ ID NO: 1187578 - RNA, 15 nt, Human
ucagcacgauuucug

SEQ ID NO: 1187579 - RNA, 16 nt, Human
ucagcacgauuucugu

SEQ ID NO: 1187580 - RNA, 17 nt, Human
ucagcacgauuucuguu

SEQ ID NO: 1187581 - RNA, 18 nt, Human
ucagcacgauuucuguuu

SEQ ID NO: 1187582 - RNA, 15 nt, Human
ucagcauccuggcac

SEQ ID NO: 1187583 - RNA, 16 nt, Human
ucagcauccuggcacc

SEQ ID NO: 1187584 - RNA, 17 nt, Human
ucagcauccuggcaccc

SEQ ID NO: 1187585 - RNA, 18 nt, Human
ucagcauccuggcacccg

SEQ ID NO: 1187586 - RNA, 12 nt, Human
ucagccucccaa

SEQ ID NO: 1187587 - RNA, 13 nt, Human
ucagccucccaaa

SEQ ID NO: 1187588 - RNA, 22 nt, Human
ucagccucccaaagugcuggga

SEQ ID NO: 1187589 - RNA, 12 nt, Human
ucagccucccga

SEQ ID NO: 1187590 - RNA, 20 nt, Human
ucagccucccgaauagcugg

SEQ ID NO: 1187591 - RNA, 16 nt, Human
ucagccugcuccagcu

SEQ ID NO: 1187592 - RNA, 18 nt, Human
ucagccugcuccagcugu

SEQ ID NO: 1187593 - RNA, 18 nt, Human
ucagcuccagcucaccag

SEQ ID NO: 1187594 - RNA, 21 nt, Human
ucagcuccagcucaccagccc

SEQ ID NO: 1187595 - RNA, 22 nt, Human
ucagcuccagcucaccagcccc

SEQ ID NO: 1187596 - RNA, 15 nt, Human
ucagcugcuacuacu

SEQ ID NO: 1187597 - RNA, 22 nt, Human
uccacugugccaugugccaggu

SEQ ID NO: 1187598 - RNA, 14 nt, Human
uccacccugcucuc

SEQ ID NO: 1187599 - RNA, 21 nt, Human
uccacccugcucuccgaccag

SEQ ID NO: 1187600 - RNA, 19 nt, Human
uccacuuucuagccagagg

SEQ ID NO: 1187601 - RNA, 14 nt, Human
uccacuuucuagcc

SEQ ID NO: 1187602 - RNA, 14 nt, Human
uccaagaagcccag

SEQ ID NO: 1187603 - RNA, 15 nt, Human
uccaagaagcccagg

SEQ ID NO: 1187604 - RNA, 16 nt, Human
uccaagaagcccagga

SEQ ID NO: 1187605 - RNA, 19 nt, Human
uccaagaagcccaggaaag

SEQ ID NO: 1187606 - RNA, 20 nt, Human
uccaagaccuucuccuucac

SEQ ID NO: 1187607 - RNA, 14 nt, Human
uccaagcaggacau

SEQ ID NO: 1187608 - RNA, 22 nt, Human
uccaagcaggacauggacaagg

SEQ ID NO: 1187609 - RNA, 20 nt, Human
uccacaagagcccaggccuc

SEQ ID NO: 1187610 - RNA, 21 nt, Human
uccacaagagcccaggccucc

SEQ ID NO: 1187611 - RNA, 12 nt, Human
uccauacauuug

SEQ ID NO: 1187612 - RNA, 17 nt, Human
uccauagagagcaagac

SEQ ID NO: 1187613 - RNA, 20 nt, Human
uccauagagagcaagacgcu

SEQ ID NO: 1187614 - RNA, 19 nt, Human
ucccaacucaccccagccc

SEQ ID NO: 1187615 - RNA, 21 nt, Human
ucccaacucaccccagcccca

SEQ ID NO: 1187616 - RNA, 13 nt, Human
ucccaacucaccc

SEQ ID NO: 1187617 - RNA, 18 nt, Human
ucccaacucaccccagcc

SEQ ID NO: 1187618 - RNA, 19 nt, Human
ucccaggcauuccccagga

SEQ ID NO: 1187619 - RNA, 15 nt, Human
ucccaugagccucag

SEQ ID NO: 1187620 - RNA, 16 nt, Human
ucccaugagccucagc

SEQ ID NO: 1187621 - RNA, 17 nt, Human
ucccaggcauuccccag

SEQ ID NO: 1187622 - RNA, 18 nt, Human
ucccaggcauuccccagg

SEQ ID NO: 1187623 - RNA, 18 nt, Human
ucccaccucagccucccg

SEQ ID NO: 1187624 - RNA, 14 nt, Human
ucccaccucucuca

SEQ ID NO: 1187625 - RNA, 17 nt, Human
ucccaccucucucacuc

SEQ ID NO: 1187626 - RNA, 18 nt, Human
ucccaccucucucacucc

SEQ ID NO: 1187627 - RNA, 20 nt, Human
ucccaccucucucacuccuu

SEQ ID NO: 1187628 - RNA, 19 nt, Human
ucccaccuuggcugcaggg

SEQ ID NO: 1187629 - RNA, 21 nt, Human
ucccaccuuggcugcagggag

SEQ ID NO: 1187630 - RNA, 14 nt, Human
ucccacucagucca

SEQ ID NO: 1187631 - RNA, 17 nt, Human
ucccaugagccucagca

SEQ ID NO: 1187632 - RNA, 22 nt, Human
ucccaugagccucagcauccug

SEQ ID NO: 1187633 - RNA, 13 nt, Human
ucccucuggggcu

SEQ ID NO: 1187634 - RNA, 17 nt, Human
ucccucuggggcuguuc

SEQ ID NO: 1187635 - RNA, 14 nt, Human
ucccugccaaugga

SEQ ID NO: 1187636 - RNA, 16 nt, Human
ucccugccaauggacu

SEQ ID NO: 1187637 - RNA, 16 nt, Human
ucccuucccaccucuc

SEQ ID NO: 1187638 - RNA, 17 nt, Human
ucccuucccaccucucu

SEQ ID NO: 1187639 - RNA, 21 nt, Human
ucccuucccacuggaggcaug

SEQ ID NO: 1187640 - RNA, 21 nt, Human
uccgaaagggacuuggaagcu

SEQ ID NO: 1187641 - RNA, 22 nt, Human
uccgaaagggacuuggaagcuc

SEQ ID NO: 1187642 - RNA, 21 nt, Human
uccgcuuucuacccagcgagc

SEQ ID NO: 1187643 - RNA, 21 nt, Human
uccuccuuuucacaguucucu

SEQ ID NO: 1187644 - RNA, 21 nt, Human
uccucuaggaggucucuaaga

SEQ ID NO: 1187645 - RNA, 15 nt, Human
uccucuggccugugu

SEQ ID NO: 1187646 - RNA, 13 nt, Human
uccucuguacaga

SEQ ID NO: 1187647 - RNA, 15 nt, Human
uccucuguacagagc

SEQ ID NO: 1187648 - RNA, 17 nt, Human
uccugagccagauuuca

SEQ ID NO: 1187649 - RNA, 23 nt, Human
uccucuguacagagcccacgccc

SEQ ID NO: 1187650 - RNA, 21 nt, Human
uccugagccagauuucacucu

SEQ ID NO: 1187651 - RNA, 15 nt, Human
uccugaggcuccacu

SEQ ID NO: 1187652 - RNA, 18 nt, Human
uccugagccagauuucac

SEQ ID NO: 1187653 - RNA, 19 nt, Human
uccugagccagauuucacu

SEQ ID NO: 1187654 - RNA, 16 nt, Human
uccugaggcuccacuu

SEQ ID NO: 1187655 - RNA, 17 nt, Human
uccugaggcuccacuug

SEQ ID NO: 1187656 - RNA, 12 nt, Human
uccugaggcugg

SEQ ID NO: 1187657 - RNA, 15 nt, Human
uccugaggcugggcu

SEQ ID NO: 1187658 - RNA, 16 nt, Human
uccugaggcugggcuc

SEQ ID NO: 1187659 - RNA, 17 nt, Human
uccugaggcugggcucc

SEQ ID NO: 1187660 - RNA, 19 nt, Human
uccugaggcugggcucccu

SEQ ID NO: 1187661 - RNA, 21 nt, Human
uccuaguuccaccaucaagcc

SEQ ID NO: 1187662 - RNA, 22 nt, Human
uccuaguuccaccaucaagcca

SEQ ID NO: 1187663 - RNA, 16 nt, Human
uccuaagcuauucagu

SEQ ID NO: 1187664 - RNA, 18 nt, Human
uccuaagcuauucaguaa

SEQ ID NO: 1187665 - RNA, 14 nt, Human
uccuaguuccacca

SEQ ID NO: 1187666 - RNA, 17 nt, Human
uccuaguuccaccauca

SEQ ID NO: 1187667 - RNA, 20 nt, Human
uccucaaaacuucagacaua

SEQ ID NO: 1187668 - RNA, 12 nt, Human
uccuccaggugc

SEQ ID NO: 1187669 - RNA, 13 nt, Human
uccuccaggugca

SEQ ID NO: 1187670 - RNA, 14 nt, Human
uccuccaggugcac

SEQ ID NO: 1187671 - RNA, 18 nt, Human
uccuccaggugcacaagc

SEQ ID NO: 1187672 - RNA, 20 nt, Human
uccuccaggugcacaagcuc

SEQ ID NO: 1187673 - RNA, 22 nt, Human
uccuccaggugcacaagcucca

SEQ ID NO: 1187674 - RNA, 12 nt, Human
uccuccucagau

SEQ ID NO: 1187675 - RNA, 22 nt, Human
uccuugaaaacacuguucucug

SEQ ID NO: 1187676 - RNA, 23 nt, Human
uccuugaaaacacuguucucugc

SEQ ID NO: 1187677 - RNA, 21 nt, Human
uccuuaccagcagagcaccuu

SEQ ID NO: 1187678 - RNA, 18 nt, Human
uccuuggugucgggcaug

SEQ ID NO: 1187679 - RNA, 21 nt, Human
uccuuggugucgggcaugaca

SEQ ID NO: 1187680 - RNA, 22 nt, Human
uccuuggugucgggcaugacac

SEQ ID NO: 1187681 - RNA, 17 nt, Human
uccuuugugaggaagcc

SEQ ID NO: 1187682 - RNA, 18 nt, Human
uccuuugugaggaagccg

SEQ ID NO: 1187683 - RNA, 22 nt, Human
uccuuugugaggaagccgcugg

SEQ ID NO: 1187684 - RNA, 22 nt, Human
uccuuuucgcaggauucuuccu

SEQ ID NO: 1187685 - RNA, 17 nt, Human
ucgcaggauucuuccuc

SEQ ID NO: 1187686 - RNA, 21 nt, Human
ucgcaggauucuuccucccuc

SEQ ID NO: 1187687 - RNA, 23 nt, Human
ucgcaggauucuuccucccuccc

SEQ ID NO: 1187688 - RNA, 14 nt, Human
ucgcccagucugga

SEQ ID NO: 1187689 - RNA, 19 nt, Human
ucgcccagucuggaaugca

SEQ ID NO: 1187690 - RNA, 23 nt, Human
ucgcccagucuggaaugcagugg

SEQ ID NO: 1187691 - RNA, 15 nt, Human
ucggaaaacaugcua

SEQ ID NO: 1187692 - RNA, 18 nt, Human
ucggaaaacaugcuacac

SEQ ID NO: 1187693 - RNA, 15 nt, Human
ucggccuccauccug

SEQ ID NO: 1187694 - RNA, 16 nt, Human
ucggccuccauccuga

SEQ ID NO: 1187695 - RNA, 17 nt, Human
ucggccuccauccugag

SEQ ID NO: 1187696 - RNA, 15 nt, Human
ucuacuaaaaauaca

SEQ ID NO: 1187697 - RNA, 19 nt, Human
ucuacuaaaaauacaaaaa

SEQ ID NO: 1187698 - RNA, 12 nt, Human
ucuagggaaaaa

SEQ ID NO: 1187699 - RNA, 19 nt, Human
ucuagggaaaaaccagcgu

SEQ ID NO: 1187700 - RNA, 20 nt, Human
ucuacucgaguuacagacaa

SEQ ID NO: 1187701 - RNA, 21 nt, Human
ucuacucgaguuacagacaaa

SEQ ID NO: 1187702 - RNA, 18 nt, Human
ucuacucuagggaaaaac

SEQ ID NO: 1187703 - RNA, 13 nt, Human
ucucaaauuucua

SEQ ID NO: 1187704 - RNA, 14 nt, Human
ucucaaauuucuaa

SEQ ID NO: 1187705 - RNA, 16 nt, Human
ucucaaauuucuaaau

SEQ ID NO: 1187706 - RNA, 23 nt, Human
ucucacacaugagcaucaggcca

SEQ ID NO: 1187707 - RNA, 20 nt, Human
ucucacugccaugccagcuu

SEQ ID NO: 1187708 - RNA, 21 nt, Human
ucucacacaugagcaucaggc

SEQ ID NO: 1187709 - RNA, 23 nt, Human
ucucacucugucgcccagucugg

SEQ ID NO: 1187710 - RNA, 18 nt, Human
ucucaaauuucuaaaucu

SEQ ID NO: 1187711 - RNA, 13 nt, Human
ucuaugaaauauu

SEQ ID NO: 1187712 - RNA, 16 nt, Human
ucucacacaugagcau

SEQ ID NO: 1187713 - RNA, 14 nt, Human
ucucacuguugccc

SEQ ID NO: 1187714 - RNA, 15 nt, Human
ucucacuguugccca

SEQ ID NO: 1187715 - RNA, 17 nt, Human
ucucacuguugcccagg

SEQ ID NO: 1187716 - RNA, 15 nt, Human
ucugccucugacaca

SEQ ID NO: 1187717 - RNA, 18 nt, Human
ucugccucugacacacag

SEQ ID NO: 1187718 - RNA, 16 nt, Human
ucugccucccaucacc

SEQ ID NO: 1187719 - RNA, 17 nt, Human
ucugccucccaucaccc

SEQ ID NO: 1187720 - RNA, 20 nt, Human
ucugccucccaucacccgcu

SEQ ID NO: 1187721 - RNA, 21 nt, Human
ucugccucccaucacccgcua

SEQ ID NO: 1187722 - RNA, 21 nt, Human
ucugccucugacacacagcuc

SEQ ID NO: 1187723 - RNA, 22 nt, Human
ucugccucugacacacagcucu

SEQ ID NO: 1187724 - RNA, 23 nt, Human
ucugccucugacacacagcucug

SEQ ID NO: 1187725 - RNA, 19 nt, Human
ucugccugaagucacacag

SEQ ID NO: 1187726 - RNA, 20 nt, Human
ucugccugaagucacacagu

SEQ ID NO: 1187727 - RNA, 22 nt, Human
ucugccauauucuguuggccag

SEQ ID NO: 1187728 - RNA, 23 nt, Human
ucugccauauucuguuggccagu

SEQ ID NO: 1187729 - RNA, 12 nt, Human
ucugcccacucc

SEQ ID NO: 1187730 - RNA, 13 nt, Human
ucugcccacuccc

SEQ ID NO: 1187731 - RNA, 14 nt, Human
ucugcccacucccu

SEQ ID NO: 1187732 - RNA, 16 nt, Human
ucugcccacucccugc

SEQ ID NO: 1187733 - RNA, 12 nt, Human
ucugccucccau

SEQ ID NO: 1187734 - RNA, 13 nt, Human
ucugccucccauc

SEQ ID NO: 1187735 - RNA, 15 nt, Human
ucugccucccaucac

SEQ ID NO: 1187736 - RNA, 20 nt, Human
ucugacccaugcugcccugu

SEQ ID NO: 1187737 - RNA, 22 nt, Human
ucugacccaugcugcccuguga

SEQ ID NO: 1187738 - RNA, 23 nt, Human
ucugacccaugcugcccugugag

SEQ ID NO: 1187739 - RNA, 18 nt, Human
ucugagaggacuuuucuu

SEQ ID NO: 1187740 - RNA, 24 nt, Human
ucugagaucaaaacgguuuuacug

SEQ ID NO: 1187741 - RNA, 18 nt, Human
ucugaggaauccagaccc

SEQ ID NO: 1187742 - RNA, 21 nt, Human
ucugaggaauccagacccggc

SEQ ID NO: 1187743 - RNA, 22 nt, Human
ucugaggaauccagacccggcu

SEQ ID NO: 1187744 - RNA, 23 nt, Human
ucugaggaauccagacccggcug

SEQ ID NO: 1187745 - RNA, 13 nt, Human
ucugcacuccccu

SEQ ID NO: 1187746 - RNA, 17 nt, Human
ucugcugacagacacag

SEQ ID NO: 1187747 - RNA, 11 nt, Human
ucugcugcugg

SEQ ID NO: 1187748 - RNA, 13 nt, Human
ucugcugcuggcu

SEQ ID NO: 1187749 - RNA, 13 nt, Human
ucugccugcccag

SEQ ID NO: 1187750 - RNA, 17 nt, Human
ucugccugcccaggccc

SEQ ID NO: 1187751 - RNA, 18 nt, Human
ucugccugcccaggcccc

SEQ ID NO: 1187752 - RNA, 20 nt, Human
ucugccugcccaggccccug

SEQ ID NO: 1187753 - RNA, 21 nt, Human
ucugccugcccaggccccugc

SEQ ID NO: 1187754 - RNA, 14 nt, Human
ucugcugcuggcug

SEQ ID NO: 1187755 - RNA, 15 nt, Human
ucugcugcuggcugg

SEQ ID NO: 1187756 - RNA, 17 nt, Human
ucugcugcuggcugguu

SEQ ID NO: 1187757 - RNA, 16 nt, Human
ucuggugacuuuccuc

SEQ ID NO: 1187758 - RNA, 14 nt, Human
ucuguacagagccc

SEQ ID NO: 1187759 - RNA, 15 nt, Human
ucuguacagagccca

SEQ ID NO: 1187760 - RNA, 23 nt, Human
ucuguacagagcccacgccccca

SEQ ID NO: 1187761 - RNA, 12 nt, Human
ucuguccuggga

SEQ ID NO: 1187762 - RNA, 17 nt, Human
ucugucgcccagucugg

SEQ ID NO: 1187763 - RNA, 21 nt, Human
ucuguccugggagugagcugg

SEQ ID NO: 1187764 - RNA, 13 nt, Human
ucugucuaggaau

SEQ ID NO: 1187765 - RNA, 14 nt, Human
ucugucucagucca

SEQ ID NO: 1187766 - RNA, 15 nt, Human
ucuucagaucucuaa

SEQ ID NO: 1187767 - RNA, 16 nt, Human
ucuuaguggauguucu

SEQ ID NO: 1187768 - RNA, 14 nt, Human
ucuuauacauuuga

SEQ ID NO: 1187769 - RNA, 22 nt, Human
ucuuauccaacaucaacaucuu

SEQ ID NO: 1187770 - RNA, 21 nt, Human
ucuucagagacuccugcaggc

SEQ ID NO: 1187771 - RNA, 14 nt, Human
ucuucagaucucua

SEQ ID NO: 1187772 - RNA, 14 nt, Human
ucuuauaauuuaaa

SEQ ID NO: 1187773 - RNA, 13 nt, Human
ucuuauaauuuaa

SEQ ID NO: 1187774 - RNA, 20 nt, Human
ucuuagguuggcaaaaaggc

SEQ ID NO: 1187775 - RNA, 23 nt, Human
ucuuagguuggcaaaaaggcagg

SEQ ID NO: 1187776 - RNA, 17 nt, Human
ucugugucagguggggc

SEQ ID NO: 1187777 - RNA, 20 nt, Human
ucugugucagguggggcagc

SEQ ID NO: 1187778 - RNA, 22 nt, Human
ucugugucagguggggcagcuu

SEQ ID NO: 1187779 - RNA, 15 nt, Human
ucuuagauguauaua

SEQ ID NO: 1187780 - RNA, 19 nt, Human
ucuugccaaauauaaauaa

SEQ ID NO: 1187781 - RNA, 14 nt, Human
ucuugcucugcuga

SEQ ID NO: 1187782 - RNA, 15 nt, Human
ucuugcucugcugac

SEQ ID NO: 1187783 - RNA, 23 nt, Human
ucuugcucugcugacagacacag

SEQ ID NO: 1187784 - RNA, 16 nt, Human
ucuucuuggucucagu

SEQ ID NO: 1187785 - RNA, 20 nt, Human
ucuugaaauauaggaacuua

SEQ ID NO: 1187786 - RNA, 21 nt, Human
ucuugaaauauaggaacuuaa

SEQ ID NO: 1187787 - RNA, 13 nt, Human
ucuugaagacuuu

SEQ ID NO: 1187788 - RNA, 22 nt, Human
ucuugaagacuuuucuuucagc

SEQ ID NO: 1187789 - RNA, 20 nt, Human
ugaaaagaaaaaugagccug

SEQ ID NO: 1187790 - RNA, 22 nt, Human
ugaaaagaaaaaugagccuggc

SEQ ID NO: 1187791 - RNA, 19 nt, Human
ugaaaagaaaaaugagccu

SEQ ID NO: 1187792 - RNA, 14 nt, Human
ugaaaauucagugg

SEQ ID NO: 1187793 - RNA, 12 nt, Human
ugaaaauuuuga

SEQ ID NO: 1187794 - RNA, 21 nt, Human
ugaaaacacauuuuucuuagg

SEQ ID NO: 1187795 - RNA, 17 nt, Human
ugaaaacacuguucucu

SEQ ID NO: 1187796 - RNA, 20 nt, Human
ugaaaacacuguucucugcc

SEQ ID NO: 1187797 - RNA, 21 nt, Human
ugaaaacacuguucucugccc

SEQ ID NO: 1187798 - RNA, 22 nt, Human
ugaaaacacuguucucugcccu

SEQ ID NO: 1187799 - RNA, 23 nt, Human
ugaaaacacuguucucugcccuc

SEQ ID NO: 1187800 - RNA, 13 nt, Human
ucuuguguguuua

SEQ ID NO: 1187801 - RNA, 23 nt, Human
ucuuuccaaaguacacuguuuca

SEQ ID NO: 1187802 - RNA, 17 nt, Human
ucuuuccacagaagcuc

SEQ ID NO: 1187803 - RNA, 19 nt, Human
ucuuuccacagaagcucca

SEQ ID NO: 1187804 - RNA, 12 nt, Human
ucuuucccuccc

SEQ ID NO: 1187805 - RNA, 13 nt, Human
ucuuucccucccu

SEQ ID NO: 1187806 - RNA, 23 nt, Human
ucuuucccucccuuccucuuucc

SEQ ID NO: 1187807 - RNA, 23 nt, Human
ucuuugagugaagcugggagaac

SEQ ID NO: 1187808 - RNA, 13 nt, Human
ucuuugcagacag

SEQ ID NO: 1187809 - RNA, 14 nt, Human
ucuuugcagacagg

SEQ ID NO: 1187810 - RNA, 17 nt, Human
ucuuugcagacaggcaa

SEQ ID NO: 1187811 - RNA, 13 nt, Human
ucuuuggacccug

SEQ ID NO: 1187812 - RNA, 14 nt, Human
ucuuuggacccuga

SEQ ID NO: 1187813 - RNA, 15 nt, Human
ucuuuggacccugag

SEQ ID NO: 1187814 - RNA, 16 nt, Human
ucuuuggacccugagg

SEQ ID NO: 1187815 - RNA, 15 nt, Human
ugaaugaauggcuaa

SEQ ID NO: 1187816 - RNA, 20 nt, Human
ugaaugaauggcuaagcaaa

SEQ ID NO: 1187817 - RNA, 20 nt, Human
ugaaggcuggguucugaucc

SEQ ID NO: 1187818 - RNA, 21 nt, Human
ugaaggcuggguucugauccu

SEQ ID NO: 1187819 - RNA, 19 nt, Human
ugaagacucauucuucugu

SEQ ID NO: 1187820 - RNA, 20 nt, Human
ugaagacucauucuucugua

SEQ ID NO: 1187821 - RNA, 18 nt, Human
ugaaggccccgcccaggc

SEQ ID NO: 1187822 - RNA, 19 nt, Human
ugaaggccccgcccaggcu

SEQ ID NO: 1187823 - RNA, 20 nt, Human
ugaaggccccgcccaggcuu

SEQ ID NO: 1187824 - RNA, 23 nt, Human
ugacaacacucauugaccugagg

SEQ ID NO: 1187825 - RNA, 13 nt, Human
ugacaacacucau

SEQ ID NO: 1187826 - RNA, 14 nt, Human
ugaauuaaguuuuu

SEQ ID NO: 1187827 - RNA, 13 nt, Human
ugaauuacauuug

SEQ ID NO: 1187828 - RNA, 14 nt, Human
ugaauuacauuugu

SEQ ID NO: 1187829 - RNA, 13 nt, Human
ugaauuguaagga

SEQ ID NO: 1187830 - RNA, 21 nt, Human
ugaauuguaaggaaugauuaa

SEQ ID NO: 1187831 - RNA, 23 nt, Human
ugacaaggauugcuacuguccua

SEQ ID NO: 1187832 - RNA, 14 nt, Human
ugacacacagcucu

SEQ ID NO: 1187833 - RNA, 15 nt, Human
ugacacacagcucug

SEQ ID NO: 1187834 - RNA, 16 nt, Human
ugacacacagcucugu

SEQ ID NO: 1187835 - RNA, 13 nt, Human
ugacagacacagg

SEQ ID NO: 1187836 - RNA, 14 nt, Human
ugacagacacaggc

SEQ ID NO: 1187837 - RNA, 16 nt, Human
ugacagacacaggccc

SEQ ID NO: 1187838 - RNA, 13 nt, Human
ugacagaggcagc

SEQ ID NO: 1187839 - RNA, 17 nt, Human
ugacagacacaggcccg

SEQ ID NO: 1187840 - RNA, 18 nt, Human
ugacagacacaggcccgg

SEQ ID NO: 1187841 - RNA, 20 nt, Human
ugacagacacaggcccggcu

SEQ ID NO: 1187842 - RNA, 22 nt, Human
ugacagagcaagugagacccug

SEQ ID NO: 1187843 - RNA, 23 nt, Human
ugacaucaacugcaucaagaugu

SEQ ID NO: 1187844 - RNA, 16 nt, Human
ugacaugggacauuug

SEQ ID NO: 1187845 - RNA, 16 nt, Human
ugaccacugcagaaga

SEQ ID NO: 1187846 - RNA, 17 nt, Human
ugaccacugcagaagac

SEQ ID NO: 1187847 - RNA, 18 nt, Human
ugaccacugcagaagaca

SEQ ID NO: 1187848 - RNA, 13 nt, Human
ugacauguuuuau

SEQ ID NO: 1187849 - RNA, 14 nt, Human
ugagaccaaccugg

SEQ ID NO: 1187850 - RNA, 14 nt, Human
ugagaggggaacag

SEQ ID NO: 1187851 - RNA, 18 nt, Human
ugagaggggaacagacug

SEQ ID NO: 1187852 - RNA, 19 nt, Human
ugagaggggaacagacugg

SEQ ID NO: 1187853 - RNA, 12 nt, Human
ugagcagggcuc

SEQ ID NO: 1187854 - RNA, 15 nt, Human
ugagaaauaaaguuu

SEQ ID NO: 1187855 - RNA, 22 nt, Human
ugacuuuucuguccgagcuuug

SEQ ID NO: 1187856 - RNA, 13 nt, Human
ugaccauucucca

SEQ ID NO: 1187857 - RNA, 14 nt, Human
ugaccauucuccac

SEQ ID NO: 1187858 - RNA, 14 nt, Human
ugacucuuaagaag

SEQ ID NO: 1187859 - RNA, 15 nt, Human
ugacucuuaagaaga

SEQ ID NO: 1187860 - RNA, 16 nt, Human
ugacucuuaagaagac

SEQ ID NO: 1187861 - RNA, 21 nt, Human
ugacucuuucuauuguuucuu

SEQ ID NO: 1187862 - RNA, 16 nt, Human
ugacuuuccucuuugg

SEQ ID NO: 1187863 - RNA, 11 nt, Human
ugagcucagga

SEQ ID NO: 1187864 - RNA, 19 nt, Human
ugagcucaggaguuugaga

SEQ ID NO: 1187865 - RNA, 20 nt, Human
ugagcagggcucagcgggga

SEQ ID NO: 1187866 - RNA, 22 nt, Human
ugagcagggcucagcggggaca

SEQ ID NO: 1187867 - RNA, 23 nt, Human
ugagcagggcucagcggggacag

SEQ ID NO: 1187868 - RNA, 22 nt, Human
ugagccgagaucacgccacugc

SEQ ID NO: 1187869 - RNA, 23 nt, Human
ugagccgagaucacgccacugca

SEQ ID NO: 1187870 - RNA, 15 nt, Human
ugagcagucaggaaa

SEQ ID NO: 1187871 - RNA, 22 nt, Human
ugaggaugaaaaaauaacacug

SEQ ID NO: 1187872 - RNA, 15 nt, Human
ugaggugcuauguuc

SEQ ID NO: 1187873 - RNA, 21 nt, Human
ugaggcugggcucccuuccca

SEQ ID NO: 1187874 - RNA, 18 nt, Human
ugaggucagagccugcag

SEQ ID NO: 1187875 - RNA, 19 nt, Human
ugaggucagagccugcagu

SEQ ID NO: 1187876 - RNA, 16 nt, Human
ugaggcucugcccuug

SEQ ID NO: 1187877 - RNA, 18 nt, Human
ugaggcucugcccuuggu

SEQ ID NO: 1187878 - RNA, 15 nt, Human
ugaggcugggcuccc

SEQ ID NO: 1187879 - RNA, 16 nt, Human
ugaggcugggcucccu

SEQ ID NO: 1187880 - RNA, 23 nt, Human
ugcagcaauaaagcagcguuucu

SEQ ID NO: 1187881 - RNA, 12 nt, Human
ugcacuuuguuc

SEQ ID NO: 1187882 - RNA, 14 nt, Human
ugcacuuuguucug

SEQ ID NO: 1187883 - RNA, 19 nt, Human
ugaguccccuguuuguuuc

SEQ ID NO: 1187884 - RNA, 23 nt, Human
ugcaccggcuggccuggccccuc

SEQ ID NO: 1187885 - RNA, 14 nt, Human
ugcaccgggccaca

SEQ ID NO: 1187886 - RNA, 15 nt, Human
ugcaccgggccacag

SEQ ID NO: 1187887 - RNA, 17 nt, Human
ugcaccgggccacagag

SEQ ID NO: 1187888 - RNA, 22 nt, Human
ugcaccgggccacagagaaagu

SEQ ID NO: 1187889 - RNA, 20 nt, Human
ugaguccccuguuuguuucu

SEQ ID NO: 1187890 - RNA, 15 nt, Human
ugcaguugccaguca

SEQ ID NO: 1187891 - RNA, 19 nt, Human
ugcaguucugaagaagaug

SEQ ID NO: 1187892 - RNA, 22 nt, Human
ugcaguucugaagaagauggua

SEQ ID NO: 1187893 - RNA, 13 nt, Human
ugcaguugccagu

SEQ ID NO: 1187894 - RNA, 14 nt, Human
ugcaguugccaguc

SEQ ID NO: 1187895 - RNA, 22 nt, Human
ugcagugguaugaucacggcuc

SEQ ID NO: 1187896 - RNA, 20 nt, Human
ugcaguggugcgaucugggu

SEQ ID NO: 1187897 - RNA, 15 nt, Human
ugcaguucugaagaa

SEQ ID NO: 1187898 - RNA, 16 nt, Human
ugcaguucugaagaag

SEQ ID NO: 1187899 - RNA, 17 nt, Human
ugcaguucugaagaaga

SEQ ID NO: 1187900 - RNA, 18 nt, Human
ugcaguucugaagaagau

SEQ ID NO: 1187901 - RNA, 13 nt, Human
ugcaggcagccag

SEQ ID NO: 1187902 - RNA, 14 nt, Human
ugcaggcagccagg

SEQ ID NO: 1187903 - RNA, 15 nt, Human
ugcaggcagccaggc

SEQ ID NO: 1187904 - RNA, 16 nt, Human
ugcagugcuuccaagg

SEQ ID NO: 1187905 - RNA, 23 nt, Human
ugccccucaacucuccuccagag

SEQ ID NO: 1187906 - RNA, 24 nt, Human
ugccagguuuuuggucugacccac

SEQ ID NO: 1187907 - RNA, 21 nt, Human
ugccauccagguucagcuugu

SEQ ID NO: 1187908 - RNA, 13 nt, Human
ugcccaccuggcc

SEQ ID NO: 1187909 - RNA, 14 nt, Human
ugcccaccuggccu

SEQ ID NO: 1187910 - RNA, 14 nt, Human
ugcccacucccugc

SEQ ID NO: 1187911 - RNA, 15 nt, Human
ugcccacucccugca

SEQ ID NO: 1187912 - RNA, 16 nt, Human
ugcccacucccugcaa

SEQ ID NO: 1187913 - RNA, 11 nt, Human
ugcccaggcug

SEQ ID NO: 1187914 - RNA, 21 nt, Human
ugcccacucccugcaaccuga

SEQ ID NO: 1187915 - RNA, 13 nt, Human
ugcccaggcuggc

SEQ ID NO: 1187916 - RNA, 20 nt, Human
ugccacccuggggagaaagu

SEQ ID NO: 1187917 - RNA, 22 nt, Human
ugccacuacggaauaguuggcu

SEQ ID NO: 1187918 - RNA, 19 nt, Human
ugccacccuggggagaaag

SEQ ID NO: 1187919 - RNA, 10 nt, Human
ugccaggcau

SEQ ID NO: 1187920 - RNA, 18 nt, Human
ugccagguuuuuggucug

SEQ ID NO: 1187921 - RNA, 19 nt, Human
ugccagguuuuuggucuga

SEQ ID NO: 1187922 - RNA, 22 nt, Human
ugccagguuuuuggucugaccc

SEQ ID NO: 1187923 - RNA, 22 nt, Human
ugccaaauauaaauaaaaauaa

SEQ ID NO: 1187924 - RNA, 19 nt, Human
ugccaaauauaaauaaaaa

SEQ ID NO: 1187925 - RNA, 14 nt, Human
ugcaucaagaugug

SEQ ID NO: 1187926 - RNA, 19 nt, Human
ugcaucaagaugugacaug

SEQ ID NO: 1187927 - RNA, 18 nt, Human
ugccaaauauaaauaaaa

SEQ ID NO: 1187928 - RNA, 17 nt, Human
ugccaaauauaaauaaa

SEQ ID NO: 1187929 - RNA, 14 nt, Human
ugccugguggcagc

SEQ ID NO: 1187930 - RNA, 15 nt, Human
ugccugguggcagcu

SEQ ID NO: 1187931 - RNA, 16 nt, Human
ugccugguggcagcug

SEQ ID NO: 1187932 - RNA, 18 nt, Human
ugccuguaaucacagcua

SEQ ID NO: 1187933 - RNA, 21 nt, Human
ugccugggaucccucauccuc

SEQ ID NO: 1187934 - RNA, 18 nt, Human
ugccugggcagaaggaag

SEQ ID NO: 1187935 - RNA, 18 nt, Human
ugccccuggcagccccug

SEQ ID NO: 1187936 - RNA, 18 nt, Human
ugccucgaacuggcugca

SEQ ID NO: 1187937 - RNA, 19 nt, Human
ugccucgaacuggcugcaa

SEQ ID NO: 1187938 - RNA, 20 nt, Human
ugccucgaacuggcugcaaa

SEQ ID NO: 1187939 - RNA, 17 nt, Human
ugccugaagucacacag

SEQ ID NO: 1187940 - RNA, 15 nt, Human
ugccuucucaacucc

SEQ ID NO: 1187941 - RNA, 17 nt, Human
ugccuucucaacuccaa

SEQ ID NO: 1187942 - RNA, 14 nt, Human
ugcgaucuggguuc

SEQ ID NO: 1187943 - RNA, 15 nt, Human
ugcgaucuggguuca

SEQ ID NO: 1187944 - RNA, 19 nt, Human
ugcgaucuggguucacugc

SEQ ID NO: 1187945 - RNA, 20 nt, Human
ugcgaucuggguucacugca

SEQ ID NO: 1187946 - RNA, 21 nt, Human
ugcgaucuggguucacugcaa

SEQ ID NO: 1187947 - RNA, 15 nt, Human
ugcuaaaugugaaug

SEQ ID NO: 1187948 - RNA, 14 nt, Human
ugcgccuacaggag

SEQ ID NO: 1187949 - RNA, 16 nt, Human
ugcgccuacaggagug

SEQ ID NO: 1187950 - RNA, 22 nt, Human
ugcgccuacaggagugagcacu

SEQ ID NO: 1187951 - RNA, 15 nt, Human
ugcgugcauaccacu

SEQ ID NO: 1187952 - RNA, 17 nt, Human
ugcuccucuccccagca

SEQ ID NO: 1187953 - RNA, 18 nt, Human
ugcuccucuccccagcaa

SEQ ID NO: 1187954 - RNA, 18 nt, Human
ugcuccuuucuuguuuua

SEQ ID NO: 1187955 - RNA, 15 nt, Human
ugcuaagcauuccaa

SEQ ID NO: 1187956 - RNA, 19 nt, Human
ugcuaagcauuccaacuau

SEQ ID NO: 1187957 - RNA, 15 nt, Human
ugcucacauaucugu

SEQ ID NO: 1187958 - RNA, 16 nt, Human
ugcucacauaucuguc

SEQ ID NO: 1187959 - RNA, 17 nt, Human
ugcucacauaucuguca

SEQ ID NO: 1187960 - RNA, 14 nt, Human
ugcuccucucccca

SEQ ID NO: 1187961 - RNA, 12 nt, Human
ugcugaaggcuc

SEQ ID NO: 1187962 - RNA, 13 nt, Human
ugcugaaggcucg

SEQ ID NO: 1187963 - RNA, 21 nt, Human
ugcugaaggcucgagcaugcc

SEQ ID NO: 1187964 - RNA, 22 nt, Human
ugcugacagacacaggcccggc

SEQ ID NO: 1187965 - RNA, 23 nt, Human
ugcugacagacacaggcccggcu

SEQ ID NO: 1187966 - RNA, 13 nt, Human
ugcugauggugca

SEQ ID NO: 1187967 - RNA, 15 nt, Human
ugcugauggugcaau

SEQ ID NO: 1187968 - RNA, 17 nt, Human
ugcugauggugcaauga

SEQ ID NO: 1187969 - RNA, 18 nt, Human
ugcugauggugcaaugac

SEQ ID NO: 1187970 - RNA, 18 nt, Human
ugcugcaguugccaguca

SEQ ID NO: 1187971 - RNA, 23 nt, Human
ugcugcaguugccagucaccccg

SEQ ID NO: 1187972 - RNA, 14 nt, Human
ugcugcauuuaaaa

SEQ ID NO: 1187973 - RNA, 13 nt, Human
ugcugcuggcugg

SEQ ID NO: 1187974 - RNA, 23 nt, Human
uggaaacuucagcgguuuauaua

SEQ ID NO: 1187975 - RNA, 21 nt, Human
uggaaagacuuuuccaacccu

SEQ ID NO: 1187976 - RNA, 20 nt, Human
uggaaagaguaggaagacuu

SEQ ID NO: 1187977 - RNA, 20 nt, Human
uggaaaaauagccugccucu

SEQ ID NO: 1187978 - RNA, 13 nt, Human
uggacaugcacag

SEQ ID NO: 1187979 - RNA, 19 nt, Human
uggacaugcacagcuaaca

SEQ ID NO: 1187980 - RNA, 22 nt, Human
uggaauaauccuaaacauauga

SEQ ID NO: 1187981 - RNA, 17 nt, Human
uggaauaaggagaauga

SEQ ID NO: 1187982 - RNA, 15 nt, Human
uggaauauauaacca

SEQ ID NO: 1187983 - RNA, 16 nt, Human
uggaauauauaaccag

SEQ ID NO: 1187984 - RNA, 14 nt, Human
uggaauaacaugua

SEQ ID NO: 1187985 - RNA, 15 nt, Human
uggaauaacauguaa

SEQ ID NO: 1187986 - RNA, 19 nt, Human
uggaauaacauguaauuaa

SEQ ID NO: 1187987 - RNA, 12 nt, Human
uggaggaaggaa

SEQ ID NO: 1187988 - RNA, 18 nt, Human
uggaggaaggaaacccag

SEQ ID NO: 1187989 - RNA, 20 nt, Human
uggaggaaggaaacccagcu

SEQ ID NO: 1187990 - RNA, 11 nt, Human
uggagggaagc

SEQ ID NO: 1187991 - RNA, 20 nt, Human
uggauuuaacagaaauguac

SEQ ID NO: 1187992 - RNA, 24 nt, Human
uggauuuaacagaaauguacagca

SEQ ID NO: 1187993 - RNA, 13 nt, Human
uggcagcugcuuu

SEQ ID NO: 1187994 - RNA, 21 nt, Human
uggcacccggccccugcuggu

SEQ ID NO: 1187995 - RNA, 13 nt, Human
uggcagugggagc

SEQ ID NO: 1187996 - RNA, 21 nt, Human
uggccagaugcaccagcccuu

SEQ ID NO: 1187997 - RNA, 15 nt, Human
ugggcagaggaaagc

SEQ ID NO: 1187998 - RNA, 18 nt, Human
ugggauccuccaggugca

SEQ ID NO: 1187999 - RNA, 13 nt, Human
ugggauccuggag

SEQ ID NO: 1188000 - RNA, 16 nt, Human
ugggauuacaggugug

SEQ ID NO: 1188001 - RNA, 17 nt, Human
ugggagcugccuguuca

SEQ ID NO: 1188002 - RNA, 21 nt, Human
ugggagcugccuguucagcuc

SEQ ID NO: 1188003 - RNA, 22 nt, Human
ugggagcugccuguucagcucc

SEQ ID NO: 1188004 - RNA, 23 nt, Human
ugggagcugccuguucagcucca

SEQ ID NO: 1188005 - RNA, 15 nt, Human
ugggagugagcuggu

SEQ ID NO: 1188006 - RNA, 15 nt, Human
ugggauccuccaggu

SEQ ID NO: 1188007 - RNA, 12 nt, Human
ugggacacccug

SEQ ID NO: 1188008 - RNA, 15 nt, Human
uggcuuuugugcauu

SEQ ID NO: 1188009 - RNA, 13 nt, Human
ugggacacccugu

SEQ ID NO: 1188010 - RNA, 13 nt, Human
ugggagcaaaaga

SEQ ID NO: 1188011 - RNA, 12 nt, Human
ugggagcugccu

SEQ ID NO: 1188012 - RNA, 13 nt, Human
ugggagcugccug

SEQ ID NO: 1188013 - RNA, 14 nt, Human
ugggagcugccugu

SEQ ID NO: 1188014 - RNA, 21 nt, Human
uggcuugaguuuaaauuguaa

SEQ ID NO: 1188015 - RNA, 14 nt, Human
uggcuuuugugcau

SEQ ID NO: 1188016 - RNA, 16 nt, Human
uggcuuccuggcaaua

SEQ ID NO: 1188017 - RNA, 21 nt, Human
uggcugggggccucagugcca

SEQ ID NO: 1188018 - RNA, 21 nt, Human
uggcugcuucaaggauccuga

SEQ ID NO: 1188019 - RNA, 22 nt, Human
uggguucuacccaggugcuagg

SEQ ID NO: 1188020 - RNA, 16 nt, Human
uggguucuacccaggu

SEQ ID NO: 1188021 - RNA, 19 nt, Human
ugggguuuaucagaauucu

SEQ ID NO: 1188022 - RNA, 16 nt, Human
uggguaacuagggaag

SEQ ID NO: 1188023 - RNA, 17 nt, Human
uggguuucuaaagcugc

SEQ ID NO: 1188024 - RNA, 18 nt, Human
uggguuucuaaagcugcc

SEQ ID NO: 1188025 - RNA, 21 nt, Human
uggguuucuaaagcugccagc

SEQ ID NO: 1188026 - RNA, 18 nt, Human
ugguaugaucacggcuca

SEQ ID NO: 1188027 - RNA, 23 nt, Human
ugguauuggcuagagguucaaag

SEQ ID NO: 1188028 - RNA, 16 nt, Human
ugggcagaggaaagca

SEQ ID NO: 1188029 - RNA, 22 nt, Human
ugggcuaagugauccucccacc

SEQ ID NO: 1188030 - RNA, 16 nt, Human
ugggcuaguugggcuu

SEQ ID NO: 1188031 - RNA, 17 nt, Human
ugggcuggugucaccug

SEQ ID NO: 1188032 - RNA, 15 nt, Human
ugggcuucaguggca

SEQ ID NO: 1188033 - RNA, 17 nt, Human
ugggcuucaguggcagc

SEQ ID NO: 1188034 - RNA, 21 nt, Human
ugggggaucacagccucugaa

SEQ ID NO: 1188035 - RNA, 17 nt, Human
ugggggcugggcagagg

SEQ ID NO: 1188036 - RNA, 18 nt, Human
ugggggcugggcagagga

SEQ ID NO: 1188037 - RNA, 19 nt, Human
ugggggcugggcagaggaa

SEQ ID NO: 1188038 - RNA, 12 nt, Human
ugggggugcauu

SEQ ID NO: 1188039 - RNA, 15 nt, Human
ugggggugcauuuga

SEQ ID NO: 1188040 - RNA, 17 nt, Human
uguaauuaaguacuaug

SEQ ID NO: 1188041 - RNA, 16 nt, Human
uguacagagcccacgc

SEQ ID NO: 1188042 - RNA, 17 nt, Human
uguacagagcccacgcc

SEQ ID NO: 1188043 - RNA, 18 nt, Human
uguacagagcccacgccc

SEQ ID NO: 1188044 - RNA, 21 nt, Human
uguacagagcccacgccccca

SEQ ID NO: 1188045 - RNA, 16 nt, Human
uguaccgcaaugugac

SEQ ID NO: 1188046 - RNA, 17 nt, Human
uggucacaggaaguaga

SEQ ID NO: 1188047 - RNA, 14 nt, Human
uguaaucacagcua

SEQ ID NO: 1188048 - RNA, 14 nt, Human
uguaccucuugagc

SEQ ID NO: 1188049 - RNA, 15 nt, Human
uguacgucugacagg

SEQ ID NO: 1188050 - RNA, 16 nt, Human
uguacgucugacaggc

SEQ ID NO: 1188051 - RNA, 17 nt, Human
ugucacacacuuuggcu

SEQ ID NO: 1188052 - RNA, 12 nt, Human
ugucacaggcag

SEQ ID NO: 1188053 - RNA, 13 nt, Human
ugucacaggcagg

SEQ ID NO: 1188054 - RNA, 15 nt, Human
uguaugauucccagc

SEQ ID NO: 1188055 - RNA, 22 nt, Human
uguauucucuccuguaccucuu

SEQ ID NO: 1188056 - RNA, 16 nt, Human
uguaugauucccagcc

SEQ ID NO: 1188057 - RNA, 16 nt, Human
ugucauuugagcaggg

SEQ ID NO: 1188058 - RNA, 19 nt, Human
ugucauuugagcagggcuc

SEQ ID NO: 1188059 - RNA, 13 nt, Human
ugucaccugaaga

SEQ ID NO: 1188060 - RNA, 18 nt, Human
uguccccaccgcagacag

SEQ ID NO: 1188061 - RNA, 19 nt, Human
uguccccaccgcagacagg

SEQ ID NO: 1188062 - RNA, 22 nt, Human
uguccccaccgcagacaggacc

SEQ ID NO: 1188063 - RNA, 16 nt, Human
uguccccgacccuugc

SEQ ID NO: 1188064 - RNA, 17 nt, Human
uguccccgacccuugcc

SEQ ID NO: 1188065 - RNA, 20 nt, Human
uguccuacccacccuccuuu

SEQ ID NO: 1188066 - RNA, 12 nt, Human
uguccuacucug

SEQ ID NO: 1188067 - RNA, 17 nt, Human
uguccuacucuguguca

SEQ ID NO: 1188068 - RNA, 16 nt, Human
ugucuuuuuucacuac

SEQ ID NO: 1188069 - RNA, 23 nt, Human
ugucuuuucuugcaugaggcuag

SEQ ID NO: 1188070 - RNA, 17 nt, Human
ugucuuuggacccugag

SEQ ID NO: 1188071 - RNA, 23 nt, Human
ugugaaaagaaaaaugagccugg

SEQ ID NO: 1188072 - RNA, 14 nt, Human
ugucuuuggacccu

SEQ ID NO: 1188073 - RNA, 16 nt, Human
ugucuuuggacccuga

SEQ ID NO: 1188074 - RNA, 13 nt, Human
ugugaggaagccg

SEQ ID NO: 1188075 - RNA, 18 nt, Human
ugugaggaagccgcuggg

SEQ ID NO: 1188076 - RNA, 20 nt, Human
ugugaggaagccgcuggggc

SEQ ID NO: 1188077 - RNA, 17 nt, Human
ugugagucaccaagccc

SEQ ID NO: 1188078 - RNA, 19 nt, Human
ugugagucaccaagcccag

SEQ ID NO: 1188079 - RNA, 21 nt, Human
ugugagucaccaagcccaguu

SEQ ID NO: 1188080 - RNA, 14 nt, Human
ugugcgccuacagg

SEQ ID NO: 1188081 - RNA, 19 nt, Human
ugugcgccuacaggaguga

SEQ ID NO: 1188082 - RNA, 19 nt, Human
ugugcuaguaauuggaaag

SEQ ID NO: 1188083 - RNA, 16 nt, Human
ugugcacaugcacgug

SEQ ID NO: 1188084 - RNA, 14 nt, Human
ugugcauuaucuag

SEQ ID NO: 1188085 - RNA, 16 nt, Human
ugugcauuaucuagau

SEQ ID NO: 1188086 - RNA, 19 nt, Human
ugugcauuaucuagauacu

SEQ ID NO: 1188087 - RNA, 20 nt, Human
ugugcauuaucuagauacug

SEQ ID NO: 1188088 - RNA, 21 nt, Human
ugugcauuaucuagauacugu

SEQ ID NO: 1188089 - RNA, 23 nt, Human
ugugcauuaucuagauacuguau

SEQ ID NO: 1188090 - RNA, 23 nt, Human
ugugcauuuggugguuucagaaa

SEQ ID NO: 1188091 - RNA, 23 nt, Human
uguggcgcagcauauucaggaag

SEQ ID NO: 1188092 - RNA, 18 nt, Human
uguggacacagcucuucu

SEQ ID NO: 1188093 - RNA, 19 nt, Human
uguggacacagcucuucuc

SEQ ID NO: 1188094 - RNA, 13 nt, Human
uguggacacagcu

SEQ ID NO: 1188095 - RNA, 22 nt, Human
ugugggcuaguugggcuuccuc

SEQ ID NO: 1188096 - RNA, 12 nt, Human
uguguagggcgg

SEQ ID NO: 1188097 - RNA, 16 nt, Human
uguguagggcgggagg

SEQ ID NO: 1188098 - RNA, 21 nt, Human
ugugugaaagguacuucaaau

SEQ ID NO: 1188099 - RNA, 22 nt, Human
ugugugaaagguacuucaaauc

SEQ ID NO: 1188100 - RNA, 19 nt, Human
ugugugcacguacacacac

SEQ ID NO: 1188101 - RNA, 16 nt, Human
uguguuuauugucaaa

SEQ ID NO: 1188102 - RNA, 13 nt, Human
uguguuuugcaag

SEQ ID NO: 1188103 - RNA, 19 nt, Human
uguguuuugcaagccagau

SEQ ID NO: 1188104 - RNA, 14 nt, Human
uguuacuaaguuuu

SEQ ID NO: 1188105 - RNA, 14 nt, Human
uguuagugcaaauu

SEQ ID NO: 1188106 - RNA, 17 nt, Human
uguuaguaugaggcauu

SEQ ID NO: 1188107 - RNA, 19 nt, Human
uguuaguaugaggcauuug

SEQ ID NO: 1188108 - RNA, 20 nt, Human
uguuaguaugaggcauuugu

SEQ ID NO: 1188109 - RNA, 20 nt, Human
uguucagcuccagcucacca

SEQ ID NO: 1188110 - RNA, 21 nt, Human
uguucagcuccagcucaccag

SEQ ID NO: 1188111 - RNA, 22 nt, Human
uguucagcuccagcucaccagc

SEQ ID NO: 1188112 - RNA, 14 nt, Human
uguucagcuccagc

SEQ ID NO: 1188113 - RNA, 12 nt, Human
uguucugggaca

SEQ ID NO: 1188114 - RNA, 21 nt, Human
uguucuggcucuuccaggcug

SEQ ID NO: 1188115 - RNA, 17 nt, Human
uguucuggcucuuccag

SEQ ID NO: 1188116 - RNA, 20 nt, Human
uguucuggcucuuccaggcu

SEQ ID NO: 1188117 - RNA, 20 nt, Human
uguugacaugggacauuugc

SEQ ID NO: 1188118 - RNA, 19 nt, Human
uguucaucauccuaagcua

SEQ ID NO: 1188119 - RNA, 15 nt, Human
uguucucucuucucc

SEQ ID NO: 1188120 - RNA, 16 nt, Human
uguucucucuucucca

SEQ ID NO: 1188121 - RNA, 13 nt, Human
uguucucugcccu

SEQ ID NO: 1188122 - RNA, 14 nt, Human
uguucucugcccuc

SEQ ID NO: 1188123 - RNA, 15 nt, Human
uguucucugcccucc

SEQ ID NO: 1188124 - RNA, 16 nt, Human
uguucucugcccucca

SEQ ID NO: 1188125 - RNA, 13 nt, Human
uguucucugagga

SEQ ID NO: 1188126 - RNA, 12 nt, Human
uguucuggcucu

SEQ ID NO: 1188127 - RNA, 13 nt, Human
uguucuggcucuu

SEQ ID NO: 1188128 - RNA, 16 nt, Human
uguucuggcucuucca

SEQ ID NO: 1188129 - RNA, 15 nt, Human
uguuggccaaagcca

SEQ ID NO: 1188130 - RNA, 15 nt, Human
uguuggccaggcugg

SEQ ID NO: 1188131 - RNA, 16 nt, Human
uguuggccaggcuggu

SEQ ID NO: 1188132 - RNA, 19 nt, Human
uguuggagaagaacugaaa

SEQ ID NO: 1188133 - RNA, 20 nt, Human
uguuggagaagaacugaaau

SEQ ID NO: 1188134 - RNA, 14 nt, Human
uguuggagaagaac

SEQ ID NO: 1188135 - RNA, 16 nt, Human
uguuggagaagaacug

SEQ ID NO: 1188136 - RNA, 17 nt, Human
uguuggagaagaacuga

SEQ ID NO: 1188137 - RNA, 17 nt, Human
uguuggcugggggccuc

SEQ ID NO: 1188138 - RNA, 19 nt, Human
uguuggcugggggccucag

SEQ ID NO: 1188139 - RNA, 13 nt, Human
uuacacuuuaugc

SEQ ID NO: 1188140 - RNA, 20 nt, Human
uuacacuuuaugcacaaaau

SEQ ID NO: 1188141 - RNA, 20 nt, Human
uuacagagacagaaagcaga

SEQ ID NO: 1188142 - RNA, 12 nt, Human
uuacauuuuuaa

SEQ ID NO: 1188143 - RNA, 17 nt, Human
uuacauuuuuaagugcu

SEQ ID NO: 1188144 - RNA, 17 nt, Human
uuaaaugcccagccccu

SEQ ID NO: 1188145 - RNA, 12 nt, Human
uuaacuuuuaua

SEQ ID NO: 1188146 - RNA, 13 nt, Human
uuaacuuuuauaa

SEQ ID NO: 1188147 - RNA, 14 nt, Human
uuaacuuuuauaaa

SEQ ID NO: 1188148 - RNA, 16 nt, Human
uuaauaauguuucaaa

SEQ ID NO: 1188149 - RNA, 15 nt, Human
uguuuccuggcacug

SEQ ID NO: 1188150 - RNA, 16 nt, Human
uguuuguugucagcug

SEQ ID NO: 1188151 - RNA, 16 nt, Human
uguuuuaagaggcagg

SEQ ID NO: 1188152 - RNA, 17 nt, Human
uguuuuaagaggcaggg

SEQ ID NO: 1188153 - RNA, 20 nt, Human
uguuuuaagaggcagggucu

SEQ ID NO: 1188154 - RNA, 22 nt, Human
uguuuuaaggaugcuuguacau

SEQ ID NO: 1188155 - RNA, 23 nt, Human
uguuuuaaggaugcuuguacaua

SEQ ID NO: 1188156 - RNA, 13 nt, Human
uguuuuugucuua

SEQ ID NO: 1188157 - RNA, 22 nt, Human
uuaaaaaaaaaccugagcccca

SEQ ID NO: 1188158 - RNA, 11 nt, Human
uuaaaugcacc

SEQ ID NO: 1188159 - RNA, 14 nt, Human
uuaaaugcccagcc

SEQ ID NO: 1188160 - RNA, 15 nt, Human
uuaaaugcccagccc

SEQ ID NO: 1188161 - RNA, 16 nt, Human
uuaaaugcccagcccc

SEQ ID NO: 1188162 - RNA, 16 nt, Human
uuuccugaggcugggc

SEQ ID NO: 1188163 - RNA, 14 nt, Human
uuaccacagacaua

SEQ ID NO: 1188164 - RNA, 17 nt, Human
uuaccacagacauacua

SEQ ID NO: 1188165 - RNA, 20 nt, Human
uuucuaaaggcuaccuuugu

SEQ ID NO: 1188166 - RNA, 21 nt, Human
uuucuaaaggcuaccuuugua

SEQ ID NO: 1188167 - RNA, 20 nt, Human
uuucuguucuuucuggcuau

SEQ ID NO: 1188168 - RNA, 12 nt, Human
uuucuucucccu

SEQ ID NO: 1188169 - RNA, 13 nt, Human
uuucuucucccuc

SEQ ID NO: 1188170 - RNA, 18 nt, Human
uuucuuagggaaggauac

SEQ ID NO: 1188171 - RNA, 23 nt, Human
uuucuuagggaaggauacaaaag

SEQ ID NO: 1188172 - RNA, 18 nt, Human
uuugaaucaucaagucuu

SEQ ID NO: 1188173 - RNA, 22 nt, Human
uuugaagaugccgcauuuggau

SEQ ID NO: 1188174 - RNA, 14 nt, Human
uuugaacucuucaa

SEQ ID NO: 1188175 - RNA, 15 nt, Human
uuugaacugauaaag

SEQ ID NO: 1188176 - RNA, 17 nt, Human
uuugaacugauaaagau

SEQ ID NO: 1188177 - RNA, 19 nt, Human
uuugaacugauaaagauga

SEQ ID NO: 1188178 - RNA, 21 nt, Human
uuuggaauuuugugcccccau

SEQ ID NO: 1188179 - RNA, 19 nt, Human
uuuggugguuucagaaaug

SEQ ID NO: 1188180 - RNA, 13 nt, Human
uuuguauaaaaua

SEQ ID NO: 1188181 - RNA, 14 nt, Human
uuuguauaaaauaa

SEQ ID NO: 1188182 - RNA, 16 nt, Human
uuuguauaaaauaauu

SEQ ID NO: 1188183 - RNA, 15 nt, Human
uuugcuuugugauuu

SEQ ID NO: 1188184 - RNA, 16 nt, Human
uuugcuuugugauuuu

SEQ ID NO: 1188185 - RNA, 12 nt, Human
uuuggaaaauaa

SEQ ID NO: 1188186 - RNA, 14 nt, Human
uuuggaauuuugug

SEQ ID NO: 1188187 - RNA, 21 nt, Human
uuuguucuggcucuuccaggc

SEQ ID NO: 1188188 - RNA, 21 nt, Human
uuuuaaaagaaugauuaugaa

SEQ ID NO: 1188189 - RNA, 17 nt, Human
uuuuaaagaaugcucuu

SEQ ID NO: 1188190 - RNA, 11 nt, Human
uuuuaaaugca

SEQ ID NO: 1188191 - RNA, 12 nt, Human
uuuuaaaugcac

SEQ ID NO: 1188192 - RNA, 21 nt, Human
uuuuaaaugcaccuggaauau

SEQ ID NO: 1188193 - RNA, 19 nt, Human
uuuuuccuucagugccuua

SEQ ID NO: 1188194 - RNA, 19 nt, Human
uuuuucucuaggaaauauu

SEQ ID NO: 1188195 - RNA, 11 nt, Human
uuuuuccuuca

SEQ ID NO: 1188196 - RNA, 11 nt, Human
uuuuuaaaugc

SEQ ID NO: 1188197 - RNA, 15 nt, Human
uuuuugaagcuguau

SEQ ID NO: 1188198 - RNA, 20 nt, Human
uuuugacaaggggcaguggu

SEQ ID NO: 1188199 - RNA, 14 nt, Human
uuuuggcugcugaa

SEQ ID NO: 1188200 - RNA, 18 nt, Human
uuuuggucuggagggaag

SEQ ID NO: 1188201 - RNA, 15 nt, Human
uuuuggucuguguga

SEQ ID NO: 1188202 - RNA, 14 nt, Human
uuuuccugaaaacc

SEQ ID NO: 1188203 - RNA, 19 nt, Human
uuuuguagagccagggucu

SEQ ID NO: 1188204 - RNA, 16 nt, Human
uuuugucauauaagau

SEQ ID NO: 1188205 - RNA, 18 nt, Human
uuuuuaaaaaagaaacau

SEQ ID NO: 1188206 - RNA, 21 nt, Human
cuggacaauugcuucaagcau

SEQ ID NO: 1188207 - RNA, 18 nt, Human
cugacccucaucuuucuu

SEQ ID NO: 1188208 - RNA, 13 nt, Human
cgugucuggcaca

SEQ ID NO: 1188209 - RNA, 15 nt, Human
cuaggcuaggguggg

SEQ ID NO: 1188210 - RNA, 14 nt, Human
cuaguucugccagg

SEQ ID NO: 1188211 - RNA, 15 nt, Human
cuaguucugccagga

SEQ ID NO: 1188212 - RNA, 16 nt, Human
cuaguucugccaggag

SEQ ID NO: 1188213 - RNA, 15 nt, Human
cuaggguggggagag

SEQ ID NO: 1188214 - RNA, 13 nt, Human
cuaguucugccag

SEQ ID NO: 1188215 - RNA, 21 nt, Human
ccugucucccuccucugcccg

SEQ ID NO: 1188216 - RNA, 18 nt, Human
ccuggugguggcucggga

SEQ ID NO: 1188217 - RNA, 21 nt, Human
ccuggugguggcucgggaggc

SEQ ID NO: 1188218 - RNA, 18 nt, Human
ccugacccucaucuuucu

SEQ ID NO: 1188219 - RNA, 19 nt, Human
ccugacccucaucuuucuu

SEQ ID NO: 1188220 - RNA, 22 nt, Human
ccugacccucaucuuucuucca

SEQ ID NO: 1188221 - RNA, 12 nt, Human
ccauucuuuccc

SEQ ID NO: 1188222 - RNA, 14 nt, Human
ccauucuuucccaa

SEQ ID NO: 1188223 - RNA, 20 nt, Human
ccauucuuucccaacaccuc

SEQ ID NO: 1188224 - RNA, 17 nt, Human
caccuaggcuagggugg

SEQ ID NO: 1188225 - RNA, 18 nt, Human
cagucugagagaggccau

SEQ ID NO: 1188226 - RNA, 20 nt, Human
cugugccuugucacgccaga

SEQ ID NO: 1188227 - RNA, 19 nt, Human
cuucuaguucugccaggag

SEQ ID NO: 1188228 - RNA, 16 nt, Human
cuucuaguucugccag

SEQ ID NO: 1188229 - RNA, 17 nt, Human
cuucuaguucugccagg

SEQ ID NO: 1188230 - RNA, 18 nt, Human
cuucuaguucugccagga

SEQ ID NO: 1188231 - RNA, 15 nt, Human
gacccucaucuuucu

SEQ ID NO: 1188232 - RNA, 19 nt, Human
gacccucaucuuucuucca

SEQ ID NO: 1188233 - RNA, 20 nt, Human
gacccucaucuuucuuccaa

SEQ ID NO: 1188234 - RNA, 18 nt, Human
gcauuucccuuccuuccu

SEQ ID NO: 1188235 - RNA, 23 nt, Human
gccuccauccuacccccugugcc

SEQ ID NO: 1188236 - RNA, 16 nt, Human
gcucaggaaccgaggc

SEQ ID NO: 1188237 - RNA, 19 nt, Human
gcucaggaaccgaggcagg

SEQ ID NO: 1188238 - RNA, 20 nt, Human
gcucaggaaccgaggcaggg

SEQ ID NO: 1188239 - RNA, 21 nt, Human
gcucaggaaccgaggcaggga

SEQ ID NO: 1188240 - RNA, 16 nt, Human
gcuucuaguucugcca

SEQ ID NO: 1188241 - RNA, 17 nt, Human
gcuucuaguucugccag

SEQ ID NO: 1188242 - RNA, 15 nt, Human
ggagagacgggcccu

SEQ ID NO: 1188243 - RNA, 20 nt, Human
ggcucagaggguguccugca

SEQ ID NO: 1188244 - RNA, 22 nt, Human
gggacaccuaggcuaggguggg

SEQ ID NO: 1188245 - RNA, 22 nt, Human
ggugcuucuaguucugccagga

SEQ ID NO: 1188246 - RNA, 14 nt, Human
ggguggggagagac

SEQ ID NO: 1188247 - RNA, 18 nt, Human
ggguggggagagacgggc

SEQ ID NO: 1188248 - RNA, 18 nt, Human
gggggcgcggcugggagg

SEQ ID NO: 1188249 - RNA, 17 nt, Human
ggggccgggggcagucu

SEQ ID NO: 1188250 - RNA, 16 nt, Human
auuucccuuccuuccu

SEQ ID NO: 1188251 - RNA, 20 nt, Human
auuucccuuccuuccucucc

SEQ ID NO: 1188252 - RNA, 21 nt, Human
augugacucuuuccaaccggc

SEQ ID NO: 1188253 - RNA, 12 nt, Human
augugacucuuu

SEQ ID NO: 1188254 - RNA, 16 nt, Human
augugacucuuuccaa

SEQ ID NO: 1188255 - RNA, 14 nt, Human
auccuacccccugu

SEQ ID NO: 1188256 - RNA, 16 nt, Human
auccuacccccugugc

SEQ ID NO: 1188257 - RNA, 11 nt, Human
aucccaacacu

SEQ ID NO: 1188258 - RNA, 13 nt, Human
uucugccaggaga

SEQ ID NO: 1188259 - RNA, 21 nt, Human
agugauuuuuaugccaccuga

SEQ ID NO: 1188260 - RNA, 16 nt, Human
agugauuuuuaugcca

SEQ ID NO: 1188261 - RNA, 20 nt, Human
agugauuuuuaugccaccug

SEQ ID NO: 1188262 - RNA, 20 nt, Human
uguagugauuuuuaugccac

SEQ ID NO: 1188263 - RNA, 21 nt, Human
uguagugauuuuuaugccacc

SEQ ID NO: 1188264 - RNA, 17 nt, Human
uggcuguggcauccaga

SEQ ID NO: 1188265 - RNA, 20 nt, Human
uggcuguggccuaaccugcc

SEQ ID NO: 1188266 - RNA, 18 nt, Human
aggcucagaggguguccu

SEQ ID NO: 1188267 - RNA, 19 nt, Human
aggcucagaggguguccug

SEQ ID NO: 1188268 - RNA, 20 nt, Human
aggcucagaggguguccugc

SEQ ID NO: 1188269 - RNA, 18 nt, Human
aggcgaagcguuguccuc

SEQ ID NO: 1188270 - RNA, 20 nt, Human
uggcauccagagucccugcc

SEQ ID NO: 1188271 - RNA, 21 nt, Human
uggcauccagagucccugccu

SEQ ID NO: 1188272 - RNA, 22 nt, Human
uggcauccagagucccugccug

SEQ ID NO: 1188273 - RNA, 14 nt, Human
aggccauucuuucc

SEQ ID NO: 1188274 - RNA, 15 nt, Human
aggccauucuuuccc

SEQ ID NO: 1188275 - RNA, 22 nt, Human
uggcacagccuggcuguggccu

SEQ ID NO: 1188276 - RNA, 19 nt, Human
agccugacccucaucuuuc

SEQ ID NO: 1188277 - RNA, 16 nt, Human
acuggggcaggggccg

SEQ ID NO: 1188278 - RNA, 14 nt, Human
acuggggcaggggc

SEQ ID NO: 1188279 - RNA, 23 nt, Human
ucgagaucccaacacugccagca

SEQ ID NO: 1188280 - RNA, 20 nt, Human
uccugcaccggggccugggc

SEQ ID NO: 1188281 - RNA, 21 nt, Human
uccugcaccggggccugggca

SEQ ID NO: 1188282 - RNA, 11 nt, Human
uccucagcccc

SEQ ID NO: 1188283 - RNA, 15 nt, Human
acucaugugacucuu

SEQ ID NO: 1188284 - RNA, 16 nt, Human
acucaugugacucuuu

SEQ ID NO: 1188285 - RNA, 17 nt, Human
acucaugugacucuuuc

SEQ ID NO: 1188286 - RNA, 18 nt, Human
acucaugugacucuuucc

SEQ ID NO: 1188287 - RNA, 18 nt, Human
accugaauaaagaaugaa

SEQ ID NO: 1188288 - RNA, 18 nt, Human
ucaggaaccgaggcaggg

SEQ ID NO: 1188289 - RNA, 16 nt, Human
ucagccccgcguggaa

SEQ ID NO: 1188290 - RNA, 20 nt, Human
accagagaaaaagggagggg

SEQ ID NO: 1188291 - RNA, 12 nt, Human
acagccuggcug

SEQ ID NO: 1188292 - RNA, 20 nt, Human
acaccuaggcuagggugggg

SEQ ID NO: 1188293 - RNA, 23 nt, Human
acaccuaggcuaggguggggaga

SEQ ID NO: 1188294 - RNA, 13 nt, Human
uaguucugccagg

SEQ ID NO: 1188295 - RNA, 14 nt, Human
uaguucugccagga

SEQ ID NO: 1188296 - RNA, 19 nt, Human
uaccagagaaaaagggagg

SEQ ID NO: 1188297 - RNA, 14 nt, Human
gugguggcucggga

SEQ ID NO: 1188298 - RNA, 17 nt, Human
guggcacuggggcaggg

SEQ ID NO: 1188299 - RNA, 18 nt, Human
guggcacuggggcagggg

SEQ ID NO: 1188300 - RNA, 15 nt, Human
guccugcaccggggc

SEQ ID NO: 1188301 - RNA, 19 nt, Human
guccugcaccggggccugg

SEQ ID NO: 1188302 - RNA, 20 nt, Human
guccugcaccggggccuggg

SEQ ID NO: 1188303 - RNA, 22 nt, Human
gucccgggacaccuaggcuagg

SEQ ID NO: 1188304 - RNA, 19 nt, Human
augagcuccuuaaggcucu

SEQ ID NO: 1188305 - RNA, 14 nt, Human
agccgggagccuga

SEQ ID NO: 1188306 - RNA, 14 nt, Human
agcugcuccccacg

SEQ ID NO: 1188307 - RNA, 17 nt, Human
agcugcuccccacguca

SEQ ID NO: 1188308 - RNA, 22 nt, Human
agcuccuuaaggcucuuuugua

SEQ ID NO: 1188309 - RNA, 13 nt, Human
acccccugugccu

SEQ ID NO: 1188310 - RNA, 11 nt, Human
acacugccagc

SEQ ID NO: 1188311 - RNA, 16 nt, Human
accugccgagagucca

SEQ ID NO: 1188312 - RNA, 23 nt, Human
accugccgagaguccaucagccu

SEQ ID NO: 1188313 - RNA, 12 nt, Human
acugccagcauu

SEQ ID NO: 1188314 - RNA, 13 nt, Human
aagggagggggag

SEQ ID NO: 1188315 - RNA, 16 nt, Human
caccccgacuuuuguu

SEQ ID NO: 1188316 - RNA, 14 nt, Human
uuuaugccaccuga

SEQ ID NO: 1188317 - RNA, 16 nt, Human
uuaugccaccugaaua

SEQ ID NO: 1188318 - RNA, 13 nt, Human
uuaugccaccuga

SEQ ID NO: 1188319 - RNA, 20 nt, Human
uggggaguuuaggguggggg

SEQ ID NO: 1188320 - RNA, 13 nt, Human
ugggcaggaggga

SEQ ID NO: 1188321 - RNA, 15 nt, Human
ugggcaggagggagg

SEQ ID NO: 1188322 - RNA, 16 nt, Human
ugggcaggagggaggu

SEQ ID NO: 1188323 - RNA, 18 nt, Human
ugggcaggagggaggugc

SEQ ID NO: 1188324 - RNA, 15 nt, Human
uggaccagccucucc

SEQ ID NO: 1188325 - RNA, 16 nt, Human
uggaccagccucucca

SEQ ID NO: 1188326 - RNA, 17 nt, Human
ugcccgggagcucagga

SEQ ID NO: 1188327 - RNA, 19 nt, Human
ugagcuccuuaaggcucuu

SEQ ID NO: 1188328 - RNA, 21 nt, Human
ugagcuccuuaaggcucuuuu

SEQ ID NO: 1188329 - RNA, 18 nt, Human
ucucccuccucugcccgg

SEQ ID NO: 1188330 - RNA, 15 nt, Human
uccugucucccuccu

SEQ ID NO: 1188331 - RNA, 23 nt, Human
uccugucucccuccucugcccgg

SEQ ID NO: 1188332 - RNA, 13 nt, Human
uccuacccccugu

SEQ ID NO: 1188333 - RNA, 15 nt, Human
uccuacccccugugc

SEQ ID NO: 1188334 - RNA, 16 nt, Human
uccuacccccugugcc

SEQ ID NO: 1188335 - RNA, 17 nt, Human
uccuacccccugugccu

SEQ ID NO: 1188336 - RNA, 18 nt, Human
uccagagucccugccugg

SEQ ID NO: 1188337 - RNA, 19 nt, Human
uccagagucccugccugga

SEQ ID NO: 1188338 - RNA, 20 nt, Human
uccagagucccugccuggac

SEQ ID NO: 1188339 - RNA, 21 nt, Human
uccagagucccugccuggacc

SEQ ID NO: 1188340 - RNA, 12 nt, Human
ucaucuuucuuc

SEQ ID NO: 1188341 - RNA, 14 nt, Human
uccaaacaggcuca

SEQ ID NO: 1188342 - RNA, 16 nt, Human
uaggcuagggugggga

SEQ ID NO: 1188343 - RNA, 14 nt, Human
guggcauccagagu

SEQ ID NO: 1188344 - RNA, 18 nt, Human
guggcucgggaggcgaag

SEQ ID NO: 1188345 - RNA, 20 nt, Human
gugcuucuaguucugccagg

SEQ ID NO: 1188346 - RNA, 21 nt, Human
gugcuucuaguucugccagga

SEQ ID NO: 1188347 - RNA, 22 nt, Human
gugcuucuaguucugccaggag

SEQ ID NO: 1188348 - RNA, 19 nt, Human
gugccuugucacgccagac

SEQ ID NO: 1188349 - RNA, 16 nt, Human
gugauuuuuaugccac

SEQ ID NO: 1188350 - RNA, 17 nt, Human
gugauuuuuaugccacc

SEQ ID NO: 1188351 - RNA, 19 nt, Human
gugauuuuuaugccaccug

SEQ ID NO: 1188352 - RNA, 20 nt, Human
gugauuuuuaugccaccuga

SEQ ID NO: 1188353 - RNA, 21 nt, Human
gugauuuuuaugccaccugaa

SEQ ID NO: 1188354 - RNA, 12 nt, Human
gugacucuuucc

SEQ ID NO: 1188355 - RNA, 20 nt, Human
gucccugccuggaccagccu

SEQ ID NO: 1188356 - RNA, 21 nt, Human
gucccugccuggaccagccuc

SEQ ID NO: 1188357 - RNA, 22 nt, Human
gucccugccuggaccagccucu

SEQ ID NO: 1188358 - RNA, 23 nt, Human
gucccugccuggaccagccucuc

SEQ ID NO: 1188359 - RNA, 12 nt, Human
guccucagcccc

SEQ ID NO: 1188360 - RNA, 14 nt, Human
gucacgccagacuu

SEQ ID NO: 1188361 - RNA, 18 nt, Human
ggggaguuuagggugggg

SEQ ID NO: 1188362 - RNA, 15 nt, Human
ggggcagucugagag

SEQ ID NO: 1188363 - RNA, 14 nt, Human
gggcgcggcuggga

SEQ ID NO: 1188364 - RNA, 16 nt, Human
ggcgcggcugggagga

SEQ ID NO: 1188365 - RNA, 14 nt, Human
ggccugggcaggag

SEQ ID NO: 1188366 - RNA, 13 nt, Human
ggccugggcagga

SEQ ID NO: 1188367 - RNA, 16 nt, Human
ggcuaggguggggaga

SEQ ID NO: 1188368 - RNA, 22 nt, Human
ggccuaaccugccgagagucca

SEQ ID NO: 1188369 - RNA, 20 nt, Human
ggccauucuuucccaacacc

SEQ ID NO: 1188370 - RNA, 22 nt, Human
ggaaggaucccaugagcuccuu

SEQ ID NO: 1188371 - RNA, 14 nt, Human
gcuuuguggcacug

SEQ ID NO: 1188372 - RNA, 22 nt, Human
gcuuuguggcacuggggcaggg

SEQ ID NO: 1188373 - RNA, 17 nt, Human
gccugacccucaucuuu

SEQ ID NO: 1188374 - RNA, 23 nt, Human
gcccuggugguggcucgggaggc

SEQ ID NO: 1188375 - RNA, 23 nt, Human
gcacuggggcaggggccgggggc

SEQ ID NO: 1188376 - RNA, 15 nt, Human
gcacuggggcagggg

SEQ ID NO: 1188377 - RNA, 18 nt, Human
gcacuggggcaggggccg

SEQ ID NO: 1188378 - RNA, 21 nt, Human
gagucccugccuggaccagcc

SEQ ID NO: 1188379 - RNA, 23 nt, Human
gagucccugccuggaccagccuc

SEQ ID NO: 1188380 - RNA, 13 nt, Human
gaggguguccugc

SEQ ID NO: 1188381 - RNA, 14 nt, Human
gagggggagagggc

SEQ ID NO: 1188382 - RNA, 20 nt, Human
gaggcgaagcguuguccuca

SEQ ID NO: 1188383 - RNA, 21 nt, Human
gaggcgaagcguuguccucag

SEQ ID NO: 1188384 - RNA, 14 nt, Human
gaggcagggaagga

SEQ ID NO: 1188385 - RNA, 18 nt, Human
gagaucccaacacugcca

SEQ ID NO: 1188386 - RNA, 19 nt, Human
gagaucccaacacugccag

SEQ ID NO: 1188387 - RNA, 20 nt, Human
gagaucccaacacugccagc

SEQ ID NO: 1188388 - RNA, 13 nt, Human
gagagacgggccc

SEQ ID NO: 1188389 - RNA, 14 nt, Human
gaccagccucucca

SEQ ID NO: 1188390 - RNA, 14 nt, Human
cuuuguggcacugg

SEQ ID NO: 1188391 - RNA, 13 nt, Human
cuugucacgccag

SEQ ID NO: 1188392 - RNA, 16 nt, Human
cuugucacgccagacu

SEQ ID NO: 1188393 - RNA, 18 nt, Human
cuugucacgccagacuuc

SEQ ID NO: 1188394 - RNA, 13 nt, Human
cuuucccaacacc

SEQ ID NO: 1188395 - RNA, 21 nt, Human
cugucucccuccucugcccgg

SEQ ID NO: 1188396 - RNA, 14 nt, Human
cuggaccagccucu

SEQ ID NO: 1188397 - RNA, 18 nt, Human
cuggaccagccucuccac

SEQ ID NO: 1188398 - RNA, 22 nt, Human
cugccgagaguccaucagccuc

SEQ ID NO: 1188399 - RNA, 23 nt, Human
cugccgagaguccaucagccucc

SEQ ID NO: 1188400 - RNA, 20 nt, Human
cuccccacgucagcugggac

SEQ ID NO: 1188401 - RNA, 16 nt, Human
cuccacucaugugacu

SEQ ID NO: 1188402 - RNA, 22 nt, Human
cuccacucaugugacucuuucc

SEQ ID NO: 1188403 - RNA, 17 nt, Human
cucaggaaccgaggcag

SEQ ID NO: 1188404 - RNA, 18 nt, Human
cucaggaaccgaggcagg

SEQ ID NO: 1188405 - RNA, 19 nt, Human
cucaggaaccgaggcaggg

SEQ ID NO: 1188406 - RNA, 17 nt, Human
cucagccccgcguggaa

SEQ ID NO: 1188407 - RNA, 16 nt, Human
cucagaggguguccug

SEQ ID NO: 1188408 - RNA, 13 nt, Human
cuacccccugugc

SEQ ID NO: 1188409 - RNA, 12 nt, Human
cuaaccugccga

SEQ ID NO: 1188410 - RNA, 18 nt, Human
cgggacaccuaggcuagg

SEQ ID NO: 1188411 - RNA, 19 nt, Human
cgggacaccuaggcuaggg

SEQ ID NO: 1188412 - RNA, 16 nt, Human
cgcggcugggaggagg

SEQ ID NO: 1188413 - RNA, 12 nt, Human
cgcggcugggag

SEQ ID NO: 1188414 - RNA, 15 nt, Human
cgaagcguuguccuc

SEQ ID NO: 1188415 - RNA, 16 nt, Human
cgaagcguuguccuca

SEQ ID NO: 1188416 - RNA, 17 nt, Human
cgaagcguuguccucag

SEQ ID NO: 1188417 - RNA, 21 nt, Human
cgaagcguuguccucagcccc

SEQ ID NO: 1188418 - RNA, 14 nt, Human
ccugccgagagucc

SEQ ID NO: 1188419 - RNA, 22 nt, Human
ccugccgagaguccaucagccu

SEQ ID NO: 1188420 - RNA, 23 nt, Human
ccugccgagaguccaucagccuc

SEQ ID NO: 1188421 - RNA, 15 nt, Human
ccugcaccggggccu

SEQ ID NO: 1188422 - RNA, 17 nt, Human
ccugcaccggggccugg

SEQ ID NO: 1188423 - RNA, 16 nt, Human
ccuaggcuaggguggg

SEQ ID NO: 1188424 - RNA, 12 nt, Human
ccuaaccugccg

SEQ ID NO: 1188425 - RNA, 13 nt, Human
ccuaaccugccga

SEQ ID NO: 1188426 - RNA, 23 nt, Human
ccguggcuguggcauccagaguc

SEQ ID NO: 1188427 - RNA, 20 nt, Human
ccggggccugggcaggaggg

SEQ ID NO: 1188428 - RNA, 21 nt, Human
ccgggggcagucugagagagg

SEQ ID NO: 1188429 - RNA, 21 nt, Human
ccgagaguccaucagccucca

SEQ ID NO: 1188430 - RNA, 20 nt, Human
ccgagaguccaucagccucc

SEQ ID NO: 1188431 - RNA, 14 nt, Human
ccccugugccuugu

SEQ ID NO: 1188432 - RNA, 22 nt, Human
cccccugugccuugucacgcca

SEQ ID NO: 1188433 - RNA, 13 nt, Human
cccaugagcuccu

SEQ ID NO: 1188434 - RNA, 14 nt, Human
cccaugagcuccuu

SEQ ID NO: 1188435 - RNA, 15 nt, Human
cccaugagcuccuua

SEQ ID NO: 1188436 - RNA, 22 nt, Human
cccaugagcuccuuaaggcucu

SEQ ID NO: 1188437 - RNA, 15 nt, Human
cccacggcuccucga

SEQ ID NO: 1188438 - RNA, 15 nt, Human
cccacgucagcuggg

SEQ ID NO: 1188439 - RNA, 14 nt, Human
cccaacacugccag

SEQ ID NO: 1188440 - RNA, 15 nt, Human
cccaacacugccagc

SEQ ID NO: 1188441 - RNA, 16 nt, Human
cccaacacugccagca

SEQ ID NO: 1188442 - RNA, 13 nt, Human
caaccggcuuugu

SEQ ID NO: 1188443 - RNA, 22 nt, Human
caaccggcuuuguggcacuggg

SEQ ID NO: 1188444 - RNA, 12 nt, Human
caacacugccag

SEQ ID NO: 1188445 - RNA, 13 nt, Human
caacacugccagc

SEQ ID NO: 1188446 - RNA, 14 nt, Human
caacacugccagca

SEQ ID NO: 1188447 - RNA, 15 nt, Human
cuuccucuccugucu

SEQ ID NO: 1188448 - RNA, 19 nt, Human
cuuccucuccugucucccu

SEQ ID NO: 1188449 - RNA, 16 nt, Human
gagacgggcccuggug

SEQ ID NO: 1188450 - RNA, 17 nt, Human
gaucccaacacugccag

SEQ ID NO: 1188451 - RNA, 18 nt, Human
gaucccaacacugccagc

SEQ ID NO: 1188452 - RNA, 19 nt, Human
gaucccaacacugccagca

SEQ ID NO: 1188453 - RNA, 15 nt, Human
gaucccaugagcucc

SEQ ID NO: 1188454 - RNA, 21 nt, Human
gcauccagagucccugccugg

SEQ ID NO: 1188455 - RNA, 22 nt, Human
gcauccagagucccugccugga

SEQ ID NO: 1188456 - RNA, 23 nt, Human
gcauccagagucccugccuggac

SEQ ID NO: 1188457 - RNA, 17 nt, Human
gcaucggggagccggga

SEQ ID NO: 1188458 - RNA, 19 nt, Human
gccauucuuucccaacacc

SEQ ID NO: 1188459 - RNA, 18 nt, Human
gcucagaggguguccugc

SEQ ID NO: 1188460 - RNA, 19 nt, Human
gcucagaggguguccugca

SEQ ID NO: 1188461 - RNA, 21 nt, Human
gcucagaggguguccugcacc

SEQ ID NO: 1188462 - RNA, 17 nt, Human
gcuaggguggggagaga

SEQ ID NO: 1188463 - RNA, 18 nt, Human
gcuaggguggggagagac

SEQ ID NO: 1188464 - RNA, 21 nt, Human
gcguggaacucgugucuggca

SEQ ID NO: 1188465 - RNA, 13 nt, Human
gcggcugggagga

SEQ ID NO: 1188466 - RNA, 23 nt, Human
gcugggacaccccgacuuuuguu

SEQ ID NO: 1188467 - RNA, 16 nt, Human
ggacaccccgacuuuu

SEQ ID NO: 1188468 - RNA, 16 nt, Human
ggacaccuaggcuagg

SEQ ID NO: 1188469 - RNA, 14 nt, Human
ggagggggagaggg

SEQ ID NO: 1188470 - RNA, 14 nt, Human
ggcaggagggaggu

SEQ ID NO: 1188471 - RNA, 12 nt, Human
ggcaggggccgg

SEQ ID NO: 1188472 - RNA, 23 nt, Human
ggcaucggggagccgggagccug

SEQ ID NO: 1188473 - RNA, 22 nt, Human
ggcaucggggagccgggagccu

SEQ ID NO: 1188474 - RNA, 16 nt, Human
ggcauccagagucccu

SEQ ID NO: 1188475 - RNA, 18 nt, Human
ggcauccagagucccugc

SEQ ID NO: 1188476 - RNA, 22 nt, Human
gguggggggggggcgcggcugg

SEQ ID NO: 1188477 - RNA, 21 nt, Human
gguggggagagacgggcccug

SEQ ID NO: 1188478 - RNA, 17 nt, Human
ggguguccugcaccggg

SEQ ID NO: 1188479 - RNA, 21 nt, Human
ggguguccugcaccggggccu

SEQ ID NO: 1188480 - RNA, 22 nt, Human
gggggcagucugagagaggcca

SEQ ID NO: 1188481 - RNA, 17 nt, Human
ccauccuacccccugug

SEQ ID NO: 1188482 - RNA, 13 nt, Human
cugagagaggcca

SEQ ID NO: 1188483 - RNA, 14 nt, Human
cugagagaggccau

SEQ ID NO: 1188484 - RNA, 21 nt, Human
cugagagaggccauucuuucc

SEQ ID NO: 1188485 - RNA, 22 nt, Human
cugagagaggccauucuuuccc

SEQ ID NO: 1188486 - RNA, 15 nt, Human
cucgugucuggcaca

SEQ ID NO: 1188487 - RNA, 18 nt, Human
cucaugugacucuuucca

SEQ ID NO: 1188488 - RNA, 17 nt, Human
cagucugagagaggcca

SEQ ID NO: 1188489 - RNA, 17 nt, Human
cagaggguguccugcac

SEQ ID NO: 1188490 - RNA, 18 nt, Human
caacaccucuuggggagu

SEQ ID NO: 1188491 - RNA, 13 nt, Human
cacuggggcaggg

SEQ ID NO: 1188492 - RNA, 15 nt, Human
cacuggggcaggggc

SEQ ID NO: 1188493 - RNA, 19 nt, Human
cacuggggcaggggccggg

SEQ ID NO: 1188494 - RNA, 16 nt, Human
uuuuguuuaccagaga

SEQ ID NO: 1188495 - RNA, 13 nt, Human
uugucacgccaga

SEQ ID NO: 1188496 - RNA, 20 nt, Human
uugucacgccagacuuccca

SEQ ID NO: 1188497 - RNA, 22 nt, Human
uuguccucagccccgcguggaa

SEQ ID NO: 1188498 - RNA, 16 nt, Human
aucggggagccgggag

SEQ ID NO: 1188499 - RNA, 18 nt, Human
aucggggagccgggagcc

SEQ ID NO: 1188500 - RNA, 13 nt, Human
agucccugccugg

SEQ ID NO: 1188501 - RNA, 16 nt, Human
aguccaucagccucca

SEQ ID NO: 1188502 - RNA, 13 nt, Human
aguccaucagccu

SEQ ID NO: 1188503 - RNA, 14 nt, Human
aguccaucagccuc

SEQ ID NO: 1188504 - RNA, 17 nt, Human
aggccauucuuucccaa

SEQ ID NO: 1188505 - RNA, 18 nt, Human
aggccauucuuucccaac

SEQ ID NO: 1188506 - RNA, 19 nt, Human
aggccauucuuucccaaca

SEQ ID NO: 1188507 - RNA, 22 nt, Human
uggaccagccucuccacucaug

SEQ ID NO: 1188508 - RNA, 13 nt, Human
ugcuccccacguc

SEQ ID NO: 1188509 - RNA, 13 nt, Human
ugagagaggccau

SEQ ID NO: 1188510 - RNA, 17 nt, Human
ucuaguucugccaggag

SEQ ID NO: 1188511 - RNA, 15 nt, Human
ucuaguucugccagg

SEQ ID NO: 1188512 - RNA, 16 nt, Human
ucuaguucugccagga

SEQ ID NO: 1188513 - RNA, 18 nt, Human
uccugcaccggggccugg

SEQ ID NO: 1188514 - RNA, 19 nt, Human
uccugcaccggggccuggg

SEQ ID NO: 1188515 - RNA, 12 nt, Human
accuaggcuagg

SEQ ID NO: 1188516 - RNA, 17 nt, Human
accuaggcuaggguggg

SEQ ID NO: 1188517 - RNA, 14 nt, Human
ucaugugacucuuu

SEQ ID NO: 1188518 - RNA, 17 nt, Human
ucaugugacucuuucca

SEQ ID NO: 1188519 - RNA, 18 nt, Human
ucaugugacucuuuccaa

SEQ ID NO: 1188520 - RNA, 19 nt, Human
ucaugugacucuuuccaac

SEQ ID NO: 1188521 - RNA, 13 nt, Human
accgaggcaggga

SEQ ID NO: 1188522 - RNA, 16 nt, Human
acaccucuuggggagu

SEQ ID NO: 1188523 - RNA, 15 nt, Human
guccaucagccucca

SEQ ID NO: 1188524 - RNA, 21 nt, Human
aggugcuucuaguucugccag

SEQ ID NO: 1188525 - RNA, 22 nt, Human
aggugcuucuaguucugccagg

SEQ ID NO: 1188526 - RNA, 23 nt, Human
aggugcuucuaguucugccagga

SEQ ID NO: 1188527 - RNA, 17 nt, Human
aggggccgggggcaguc

SEQ ID NO: 1188528 - RNA, 14 nt, Human
agacgggcccuggu

SEQ ID NO: 1188529 - RNA, 16 nt, Human
agaggguguccugcac

SEQ ID NO: 1188530 - RNA, 16 nt, Human
acgccagacuucccac

SEQ ID NO: 1188531 - RNA, 22 nt, Human
acgccagacuucccacggcucc

SEQ ID NO: 1188532 - RNA, 12 nt, Human
accccgacuuuu

SEQ ID NO: 1188533 - RNA, 15 nt, Human
accccgacuuuuguu

SEQ ID NO: 1188534 - RNA, 15 nt, Human
acagguuagcugcuc

SEQ ID NO: 1188535 - RNA, 19 nt, Human
uuuccaaccggcuuugugg

SEQ ID NO: 1188536 - RNA, 18 nt, Human
uguccugcaccggggccu

SEQ ID NO: 1188537 - RNA, 13 nt, Human
uguccucagcccc

SEQ ID NO: 1188538 - RNA, 21 nt, Human
uguccucagccccgcguggaa

SEQ ID NO: 1188539 - RNA, 14 nt, Human
ugggaggagggcag

SEQ ID NO: 1188540 - RNA, 17 nt, Human
ugggaggagggcaggca

SEQ ID NO: 1188541 - RNA, 18 nt, Human
ugggaggagggcaggcau

SEQ ID NO: 1188542 - RNA, 23 nt, Human
uggccuaaccugccgagagucca

SEQ ID NO: 1188543 - RNA, 18 nt, Human
ugcccgggagcucaggaa

SEQ ID NO: 1188544 - RNA, 18 nt, Human
ugauuuuuaugccaccug

SEQ ID NO: 1188545 - RNA, 15 nt, Human
ucugccaggagacag

SEQ ID NO: 1188546 - RNA, 14 nt, Human
ucgugucuggcaca

SEQ ID NO: 1188547 - RNA, 21 nt, Human
ucgugucuggcacagccuggc

SEQ ID NO: 1188548 - RNA, 16 nt, Human
ucccuccucugcccgg

SEQ ID NO: 1188549 - RNA, 16 nt, Human
ucccuuccuuccucuc

SEQ ID NO: 1188550 - RNA, 19 nt, Human
ucccuuccuuccucuccug

SEQ ID NO: 1188551 - RNA, 13 nt, Human
ucccugccuggac

SEQ ID NO: 1188552 - RNA, 19 nt, Human
ucagaggguguccugcacc

SEQ ID NO: 1188553 - RNA, 16 nt, Human
gggaggagggcaggca

SEQ ID NO: 1188554 - RNA, 12 nt, Human
gggaggagggca

SEQ ID NO: 1188555 - RNA, 13 nt, Human
gggagccgggagc

SEQ ID NO: 1188556 - RNA, 23 nt, Human
gggagcucaggaaccgaggcagg

SEQ ID NO: 1188557 - RNA, 12 nt, Human
gggagcucagga

SEQ ID NO: 1188558 - RNA, 22 nt, Human
gggagcucaggaaccgaggcag

SEQ ID NO: 1188559 - RNA, 14 nt, Human
gggacaccuaggcu

SEQ ID NO: 1188560 - RNA, 21 nt, Human
ggcuguggcauccagaguccc

SEQ ID NO: 1188561 - RNA, 23 nt, Human
ggcuguggcauccagagucccug

SEQ ID NO: 1188562 - RNA, 13 nt, Human
ggcugggaggagg

SEQ ID NO: 1188563 - RNA, 20 nt, Human
ggcugggaggagggcaggca

SEQ ID NO: 1188564 - RNA, 21 nt, Human
ggcugggaggagggcaggcau

SEQ ID NO: 1188565 - RNA, 15 nt, Human
ggccugggcaggagg

SEQ ID NO: 1188566 - RNA, 17 nt, Human
ggccugggcaggaggga

SEQ ID NO: 1188567 - RNA, 19 nt, Human
ggccugggcaggagggagg

SEQ ID NO: 1188568 - RNA, 15 nt, Human
ggccuaaccugccga

SEQ ID NO: 1188569 - RNA, 16 nt, Human
ggccuaaccugccgag

SEQ ID NO: 1188570 - RNA, 21 nt, Human
ggccuaaccugccgagagucc

SEQ ID NO: 1188571 - RNA, 21 nt, Human
ggagcucaggaaccgaggcag

SEQ ID NO: 1188572 - RNA, 19 nt, Human
ggagacagguuagcugcuc

SEQ ID NO: 1188573 - RNA, 12 nt, Human
ggaccagccucu

SEQ ID NO: 1188574 - RNA, 19 nt, Human
gcuguggccuaaccugccg

SEQ ID NO: 1188575 - RNA, 20 nt, Human
gcuguggccuaaccugccga

SEQ ID NO: 1188576 - RNA, 21 nt, Human
gcugggaggagggcaggcauc

SEQ ID NO: 1188577 - RNA, 15 nt, Human
gcuccuuaaggcucu

SEQ ID NO: 1188578 - RNA, 17 nt, Human
gcuccuuaaggcucuuu

SEQ ID NO: 1188579 - RNA, 21 nt, Human
gcuccuuaaggcucuuuugua

SEQ ID NO: 1188580 - RNA, 15 nt, Human
gccuugucacgccag

SEQ ID NO: 1188581 - RNA, 16 nt, Human
gccuugucacgccaga

SEQ ID NO: 1188582 - RNA, 17 nt, Human
gccuugucacgccagac

SEQ ID NO: 1188583 - RNA, 17 nt, Human
gcgaagcguuguccuca

SEQ ID NO: 1188584 - RNA, 16 nt, Human
gccugggcaggaggga

SEQ ID NO: 1188585 - RNA, 16 nt, Human
gccuggaccagccucu

SEQ ID NO: 1188586 - RNA, 17 nt, Human
gccuggaccagccucuc

SEQ ID NO: 1188587 - RNA, 21 nt, Human
gccagacuucccacggcuccu

SEQ ID NO: 1188588 - RNA, 16 nt, Human
gccaccugaauaaaga

SEQ ID NO: 1188589 - RNA, 21 nt, Human
gcaggcaucggggagccggga

SEQ ID NO: 1188590 - RNA, 22 nt, Human
gcaggcaucggggagccgggag

SEQ ID NO: 1188591 - RNA, 23 nt, Human
gcaggcaucggggagccgggagc

SEQ ID NO: 1188592 - RNA, 16 nt, Human
gagucccugccuggac

SEQ ID NO: 1188593 - RNA, 19 nt, Human
gagucccugccuggaccag

SEQ ID NO: 1188594 - RNA, 14 nt, Human
gagucccugccugg

SEQ ID NO: 1188595 - RNA, 15 nt, Human
gagucccugccugga

SEQ ID NO: 1188596 - RNA, 13 nt, Human
gaggagggcaggc

SEQ ID NO: 1188597 - RNA, 14 nt, Human
gaggagggcaggca

SEQ ID NO: 1188598 - RNA, 15 nt, Human
gaggagggcaggcau

SEQ ID NO: 1188599 - RNA, 23 nt, Human
gagcucaggaaccgaggcaggga

SEQ ID NO: 1188600 - RNA, 20 nt, Human
gagcuccuuaaggcucuuuu

SEQ ID NO: 1188601 - RNA, 17 nt, Human
gaauaaagaaugaaugg

SEQ ID NO: 1188602 - RNA, 19 nt, Human
gaaggaucccaugagcucc

SEQ ID NO: 1188603 - RNA, 17 nt, Human
cuuucccaacaccucuu

SEQ ID NO: 1188604 - RNA, 19 nt, Human
cuuccaaacaggcucagag

SEQ ID NO: 1188605 - RNA, 15 nt, Human
cuuaaggcucuuuug

SEQ ID NO: 1188606 - RNA, 18 nt, Human
cuguggccuaaccugccg

SEQ ID NO: 1188607 - RNA, 14 nt, Human
cuggugguggcucg

SEQ ID NO: 1188608 - RNA, 22 nt, Human
cuggugguggcucgggaggcga

SEQ ID NO: 1188609 - RNA, 17 nt, Human
cugccuggaccagccuc

SEQ ID NO: 1188610 - RNA, 14 nt, Human
cucugcccgggagc

SEQ ID NO: 1188611 - RNA, 20 nt, Human
cucugcccgggagcucagga

SEQ ID NO: 1188612 - RNA, 13 nt, Human
cucgagaucccaa

SEQ ID NO: 1188613 - RNA, 21 nt, Human
cucgagaucccaacacugcca

SEQ ID NO: 1188614 - RNA, 22 nt, Human
cucgagaucccaacacugccag

SEQ ID NO: 1188615 - RNA, 23 nt, Human
cucgagaucccaacacugccagc

SEQ ID NO: 1188616 - RNA, 22 nt, Human
cgagaucccaacacugccagca

SEQ ID NO: 1188617 - RNA, 13 nt, Human
cgagaucccaaca

SEQ ID NO: 1188618 - RNA, 15 nt, Human
cgagaucccaacacu

SEQ ID NO: 1188619 - RNA, 21 nt, Human
cgagaucccaacacugccagc

SEQ ID NO: 1188620 - RNA, 15 nt, Human
ccuugucacgccaga

SEQ ID NO: 1188621 - RNA, 18 nt, Human
ccuugucacgccagacuu

SEQ ID NO: 1188622 - RNA, 13 nt, Human
ccuuaaggcucuu

SEQ ID NO: 1188623 - RNA, 16 nt, Human
ccuuaaggcucuuuug

SEQ ID NO: 1188624 - RNA, 18 nt, Human
ccuuaaggcucuuuugua

SEQ ID NO: 1188625 - RNA, 12 nt, Human
ccugggcaggag

SEQ ID NO: 1188626 - RNA, 14 nt, Human
ccugggcaggaggg

SEQ ID NO: 1188627 - RNA, 18 nt, Human
ccucuccacucaugugac

SEQ ID NO: 1188628 - RNA, 20 nt, Human
ccgggacaccuaggcuaggg

SEQ ID NO: 1188629 - RNA, 19 nt, Human
ccgggacaccuaggcuagg

SEQ ID NO: 1188630 - RNA, 16 nt, Human
ccggcuuuguggcacu

SEQ ID NO: 1188631 - RNA, 15 nt, Human
ccgaggcagggaagg

SEQ ID NO: 1188632 - RNA, 18 nt, Human
ccauccuacccccugugc

SEQ ID NO: 1188633 - RNA, 13 nt, Human
ccaggagacaggu

SEQ ID NO: 1188634 - RNA, 16 nt, Human
ccagcauuucccuucc

SEQ ID NO: 1188635 - RNA, 21 nt, Human
ccagcauuucccuuccuuccu

SEQ ID NO: 1188636 - RNA, 19 nt, Human
ccacucaugugacucuuuc

SEQ ID NO: 1188637 - RNA, 22 nt, Human
ccacucaugugacucuuuccaa

SEQ ID NO: 1188638 - RNA, 20 nt, Human
ccaccugaauaaagaaugaa

SEQ ID NO: 1188639 - RNA, 12 nt, Human
cauucuuuccca

SEQ ID NO: 1188640 - RNA, 14 nt, Human
cauucuuucccaac

SEQ ID NO: 1188641 - RNA, 14 nt, Human
caugugacucuuuc

SEQ ID NO: 1188642 - RNA, 16 nt, Human
caugugacucuuucca

SEQ ID NO: 1188643 - RNA, 17 nt, Human
caugugacucuuuccaa

SEQ ID NO: 1188644 - RNA, 23 nt, Human
caugagcuccuuaaggcucuuuu

SEQ ID NO: 1188645 - RNA, 18 nt, Human
cauccuacccccugugcc

SEQ ID NO: 1188646 - RNA, 19 nt, Human
cauccuacccccugugccu

SEQ ID NO: 1188647 - RNA, 15 nt, Human
cauccuacccccugu

SEQ ID NO: 1188648 - RNA, 21 nt, Human
cauccagagucccugccugga

SEQ ID NO: 1188649 - RNA, 13 nt, Human
cauccagaguccc

SEQ ID NO: 1188650 - RNA, 17 nt, Human
cauccagagucccugcc

SEQ ID NO: 1188651 - RNA, 18 nt, Human
cauccagagucccugccu

SEQ ID NO: 1188652 - RNA, 20 nt, Human
cauccagagucccugccugg

SEQ ID NO: 1188653 - RNA, 13 nt, Human
cagggaaggaucc

SEQ ID NO: 1188654 - RNA, 18 nt, Human
cagggaaggaucccauga

SEQ ID NO: 1188655 - RNA, 11 nt, Human
caggcucagag

SEQ ID NO: 1188656 - RNA, 15 nt, Human
caggcucagagggug

SEQ ID NO: 1188657 - RNA, 20 nt, Human
caggcaucggggagccggga

SEQ ID NO: 1188658 - RNA, 21 nt, Human
caggcaucggggagccgggag

SEQ ID NO: 1188659 - RNA, 23 nt, Human
caggagacagguuagcugcuccc

SEQ ID NO: 1188660 - RNA, 15 nt, Human
caggaaccgaggcag

SEQ ID NO: 1188661 - RNA, 17 nt, Human
caggaaccgaggcaggg

SEQ ID NO: 1188662 - RNA, 18 nt, Human
caggaaccgaggcaggga

SEQ ID NO: 1188663 - RNA, 23 nt, Human
cagccucuccacucaugugacuc

SEQ ID NO: 1188664 - RNA, 23 nt, Human
cagccuggcuguggccuaaccug

SEQ ID NO: 1188665 - RNA, 21 nt, Human
cagccuccauccuacccccug

SEQ ID NO: 1188666 - RNA, 18 nt, Human
cagccuccauccuacccc

SEQ ID NO: 1188667 - RNA, 15 nt, Human
cagcauuucccuucc

SEQ ID NO: 1188668 - RNA, 18 nt, Human
cagagucccugccuggac

SEQ ID NO: 1188669 - RNA, 14 nt, Human
cagagucccugccu

SEQ ID NO: 1188670 - RNA, 12 nt, Human
cagagaaaaagg

SEQ ID NO: 1188671 - RNA, 17 nt, Human
cagagaaaaagggaggg

SEQ ID NO: 1188672 - RNA, 18 nt, Human
cagagaaaaagggagggg

SEQ ID NO: 1188673 - RNA, 12 nt, Human
cagacuucccac

SEQ ID NO: 1188674 - RNA, 22 nt, Human
cagacuucccacggcuccucga

SEQ ID NO: 1188675 - RNA, 22 nt, Human
cacucaugugacucuuuccaac

SEQ ID NO: 1188676 - RNA, 16 nt, Human
cacucaugugacucuu

SEQ ID NO: 1188677 - RNA, 20 nt, Human
cacggcuccucgagauccca

SEQ ID NO: 1188678 - RNA, 22 nt, Human
cacggcuccucgagaucccaac

SEQ ID NO: 1188679 - RNA, 14 nt, Human
caccggggccuggg

SEQ ID NO: 1188680 - RNA, 21 nt, Human
caccggggccugggcaggagg

SEQ ID NO: 1188681 - RNA, 22 nt, Human
caccggggccugggcaggaggg

SEQ ID NO: 1188682 - RNA, 10 nt, Human
agagggcugc

SEQ ID NO: 1188683 - RNA, 16 nt, Human
aggaaccgaggcaggg

SEQ ID NO: 1188684 - RNA, 16 nt, Human
agcuccuuaaggcucu

SEQ ID NO: 1188685 - RNA, 17 nt, Human
agcuccuuaaggcucuu

SEQ ID NO: 1188686 - RNA, 18 nt, Human
agcuccuuaaggcucuuu

SEQ ID NO: 1188687 - RNA, 19 nt, Human
auccagagucccugccugg

SEQ ID NO: 1188688 - RNA, 20 nt, Human
auccagagucccugccugga

SEQ ID NO: 1188689 - RNA, 21 nt, Human
auccagagucccugccuggac

SEQ ID NO: 1188690 - RNA, 16 nt, Human
agucugagagaggcca

SEQ ID NO: 1188691 - RNA, 23 nt, Human
agucugagagaggccauucuuuc

SEQ ID NO: 1188692 - RNA, 14 nt, Human
gcggcugggaggag

SEQ ID NO: 1188693 - RNA, 17 nt, Human
gcggcugggaggagggc

SEQ ID NO: 1188694 - RNA, 18 nt, Human
gcggcugggaggagggca

SEQ ID NO: 1188695 - RNA, 19 nt, Human
gcggcugggaggagggcag

SEQ ID NO: 1188696 - RNA, 22 nt, Human
gcggcugggaggagggcaggca

SEQ ID NO: 1188697 - RNA, 18 nt, Human
gcuccucgagaucccaac

SEQ ID NO: 1188698 - RNA, 13 nt, Human
gcugcuccccacg

SEQ ID NO: 1188699 - RNA, 22 nt, Human
gcugcuccccacgucagcuggg

SEQ ID NO: 1188700 - RNA, 12 nt, Human
ggcacagccugg

SEQ ID NO: 1188701 - RNA, 13 nt, Human
ggcacagccuggc

SEQ ID NO: 1188702 - RNA, 22 nt, Human
ggcauccagagucccugccugg

SEQ ID NO: 1188703 - RNA, 15 nt, Human
ggcacuggggcaggg

SEQ ID NO: 1188704 - RNA, 22 nt, Human
ggcgaagcguuguccucagccc

SEQ ID NO: 1188705 - RNA, 21 nt, Human
ggugcuucuaguucugccagg

SEQ ID NO: 1188706 - RNA, 23 nt, Human
ggguguccugcaccggggccugg

SEQ ID NO: 1188707 - RNA, 13 nt, Human
ggguggggagaga

SEQ ID NO: 1188708 - RNA, 22 nt, Human
gggcccuggugguggcucggga

SEQ ID NO: 1188709 - RNA, 14 nt, Human
aaaagggaggggga

SEQ ID NO: 1188710 - RNA, 16 nt, Human
gacagguuagcugcuc

SEQ ID NO: 1188711 - RNA, 14 nt, Human
gaguuuaggguggg

SEQ ID NO: 1188712 - RNA, 15 nt, Human
gaguuuagggugggg

SEQ ID NO: 1188713 - RNA, 13 nt, Human
gaguccaucagcc

SEQ ID NO: 1188714 - RNA, 14 nt, Human
gaguccaucagccu

SEQ ID NO: 1188715 - RNA, 15 nt, Human
gaguccaucagccuc

SEQ ID NO: 1188716 - RNA, 16 nt, Human
gaguccaucagccucc

SEQ ID NO: 1188717 - RNA, 12 nt, Human
gaucccaacacu

SEQ ID NO: 1188718 - RNA, 16 nt, Human
gaucccaacacugcca

SEQ ID NO: 1188719 - RNA, 20 nt, Human
gcaccggggccugggcagga

SEQ ID NO: 1188720 - RNA, 16 nt, Human
cucaucuuucuuccaa

SEQ ID NO: 1188721 - RNA, 13 nt, Human
cucccuccucugc

SEQ ID NO: 1188722 - RNA, 14 nt, Human
cucccuccucugcc

SEQ ID NO: 1188723 - RNA, 19 nt, Human
cuaaccugccgagagucca

SEQ ID NO: 1188724 - RNA, 21 nt, Human
cuaaccugccgagaguccauc

SEQ ID NO: 1188725 - RNA, 14 nt, Human
cgugucuggcacag

SEQ ID NO: 1188726 - RNA, 21 nt, Human
cgugucuggcacagccuggcu

SEQ ID NO: 1188727 - RNA, 23 nt, Human
cggcuccucgagaucccaacacu

SEQ ID NO: 1188728 - RNA, 16 nt, Human
ccagagucccugccug

SEQ ID NO: 1188729 - RNA, 17 nt, Human
ccagagucccugccugg

SEQ ID NO: 1188730 - RNA, 18 nt, Human
ccagagucccugccugga

SEQ ID NO: 1188731 - RNA, 19 nt, Human
ccagagucccugccuggac

SEQ ID NO: 1188732 - RNA, 22 nt, Human
ccagagucccugccuggaccag

SEQ ID NO: 1188733 - RNA, 12 nt, Human
ccaugagcuccu

SEQ ID NO: 1188734 - RNA, 14 nt, Human
ccccgacuuuuguu

SEQ ID NO: 1188735 - RNA, 14 nt, Human
cccgggagcucagg

SEQ ID NO: 1188736 - RNA, 15 nt, Human
cccugugccuuguca

SEQ ID NO: 1188737 - RNA, 20 nt, Human
cccugugccuugucacgcca

SEQ ID NO: 1188738 - RNA, 22 nt, Human
cccugugccuugucacgccaga

SEQ ID NO: 1188739 - RNA, 16 nt, Human
auucuuucccaacacc

SEQ ID NO: 1188740 - RNA, 19 nt, Human
auucuuucccaacaccucu

SEQ ID NO: 1188741 - RNA, 14 nt, Human
caaacaggcucaga

SEQ ID NO: 1188742 - RNA, 15 nt, Human
caaacaggcucagag

SEQ ID NO: 1188743 - RNA, 18 nt, Human
cacugccagcauuucccu

SEQ ID NO: 1188744 - RNA, 22 nt, Human
cacugccagcauuucccuuccu

SEQ ID NO: 1188745 - RNA, 24 nt, Human
cagccucuccacucaugugacucu

SEQ ID NO: 1188746 - RNA, 24 nt, Human
cagccccgcguggaacucgugucu

SEQ ID NO: 1188747 - RNA, 15 nt, Human
uucuaguucugccag

SEQ ID NO: 1188748 - RNA, 16 nt, Human
uucuaguucugccagg

SEQ ID NO: 1188749 - RNA, 19 nt, Human
uguggcacuggggcagggg

SEQ ID NO: 1188750 - RNA, 14 nt, Human
agucccugccugga

SEQ ID NO: 1188751 - RNA, 15 nt, Human
agucccugccuggac

SEQ ID NO: 1188752 - RNA, 21 nt, Human
agucccugccuggaccagccu

SEQ ID NO: 1188753 - RNA, 22 nt, Human
agucccugccuggaccagccuc

SEQ ID NO: 1188754 - RNA, 23 nt, Human
agucccugccuggaccagccucu

SEQ ID NO: 1188755 - RNA, 15 nt, Human
agggggagagggcug

SEQ ID NO: 1188756 - RNA, 16 nt, Human
agggggagagggcugc

SEQ ID NO: 1188757 - RNA, 18 nt, Human
uggggaguuuaggguggg

SEQ ID NO: 1188758 - RNA, 19 nt, Human
uggggaguuuagggugggg

SEQ ID NO: 1188759 - RNA, 16 nt, Human
uggccuaaccugccga

SEQ ID NO: 1188760 - RNA, 21 nt, Human
agcugggacaccccgacuuuu

SEQ ID NO: 1188761 - RNA, 20 nt, Human
agcucaggaaccgaggcagg

SEQ ID NO: 1188762 - RNA, 21 nt, Human
agcucaggaaccgaggcaggg

SEQ ID NO: 1188763 - RNA, 22 nt, Human
agcucaggaaccgaggcaggga

SEQ ID NO: 1188764 - RNA, 18 nt, Human
agccugacccucaucuuu

SEQ ID NO: 1188765 - RNA, 17 nt, Human
agcauuucccuuccuuc

SEQ ID NO: 1188766 - RNA, 21 nt, Human
ugacccucaucuuucuuccaa

SEQ ID NO: 1188767 - RNA, 17 nt, Human
agagacgggcccuggug

SEQ ID NO: 1188768 - RNA, 22 nt, Human
ucuuggggaguuuagggugggg

SEQ ID NO: 1188769 - RNA, 23 nt, Human
ucuuggggaguuuaggguggggg

SEQ ID NO: 1188770 - RNA, 22 nt, Human
ucuggcacagccuggcuguggc

SEQ ID NO: 1188771 - RNA, 14 nt, Human
ucuaguucugccag

SEQ ID NO: 1188772 - RNA, 20 nt, Human
ucggggagccgggagccuga

SEQ ID NO: 1188773 - RNA, 16 nt, Human
uccucugcccgggagc

SEQ ID NO: 1188774 - RNA, 22 nt, Human
uccucugcccgggagcucagga

SEQ ID NO: 1188775 - RNA, 13 nt, Human
uccucuccugucu

SEQ ID NO: 1188776 - RNA, 22 nt, Human
acucgugucuggcacagccugg

SEQ ID NO: 1188777 - RNA, 23 nt, Human
acucgugucuggcacagccuggc

SEQ ID NO: 1188778 - RNA, 16 nt, Human
uccauccuacccccug

SEQ ID NO: 1188779 - RNA, 20 nt, Human
uccauccuacccccugugcc

SEQ ID NO: 1188780 - RNA, 20 nt, Human
uaugccaccugaauaaagaa

SEQ ID NO: 1188781 - RNA, 15 nt, Human
uacccccugugccuu

SEQ ID NO: 1188782 - RNA, 14 nt, Human
aaggcucuuuugua

SEQ ID NO: 1188783 - RNA, 21 nt, Human
guggccuaaccugccgagagu

SEQ ID NO: 1188784 - RNA, 22 nt, Human
guggccuaaccugccgagaguc

SEQ ID NO: 1188785 - RNA, 17 nt, Human
gucuggcacagccuggc

SEQ ID NO: 1188786 - RNA, 19 nt, Human
gucuggcacagccuggcug

SEQ ID NO: 1188787 - RNA, 19 nt, Human
aacucgugucuggcacagc

SEQ ID NO: 1188788 - RNA, 19 nt, Human
gucucccuccucugcccgg

SEQ ID NO: 1188789 - RNA, 15 nt, Human
uguggccuaaccugc

SEQ ID NO: 1188790 - RNA, 17 nt, Human
ugugccuugucacgcca

SEQ ID NO: 1188791 - RNA, 19 nt, Human
ugugccuugucacgccaga

SEQ ID NO: 1188792 - RNA, 20 nt, Human
ugugccuugucacgccagac

SEQ ID NO: 1188793 - RNA, 17 nt, Human
ugucuggcacagccugg

SEQ ID NO: 1188794 - RNA, 14 nt, Human
ugucacgccagacu

SEQ ID NO: 1188795 - RNA, 21 nt, Human
ugggacaccccgacuuuuguu

SEQ ID NO: 1188796 - RNA, 18 nt, Human
uggaacucgugucuggca

SEQ ID NO: 1188797 - RNA, 12 nt, Human
ugcaccggggcc

SEQ ID NO: 1188798 - RNA, 16 nt, Human
ugcaccggggccuggg

SEQ ID NO: 1188799 - RNA, 22 nt, Human
ugcaccggggccugggcaggag

SEQ ID NO: 1188800 - RNA, 14 nt, Human
ugacucuuuccaac

SEQ ID NO: 1188801 - RNA, 16 nt, Human
ugacucuuuccaaccg

SEQ ID NO: 1188802 - RNA, 13 nt, Human
ugacucuuuccaa

SEQ ID NO: 1188803 - RNA, 19 nt, Human
ugacucuuuccaaccggcu

SEQ ID NO: 1188804 - RNA, 19 nt, Human
ucuuuccaaccggcuuugu

SEQ ID NO: 1188805 - RNA, 16 nt, Human
uccucgagaucccaac

SEQ ID NO: 1188806 - RNA, 23 nt, Human
uccucgagaucccaacacugcca

SEQ ID NO: 1188807 - RNA, 23 nt, Human
ucccaugagcuccuuaaggcucu

SEQ ID NO: 1188808 - RNA, 16 nt, Human
ucccaacacugccagc

SEQ ID NO: 1188809 - RNA, 14 nt, Human
ucccaacacugcca

SEQ ID NO: 1188810 - RNA, 15 nt, Human
ucccaacacugccag

SEQ ID NO: 1188811 - RNA, 15 nt, Human
uccagagucccugcc

SEQ ID NO: 1188812 - RNA, 23 nt, Human
ucagccuccauccuacccccugu

SEQ ID NO: 1188813 - RNA, 14 nt, Human
ucaucuuucuucca

SEQ ID NO: 1188814 - RNA, 17 nt, Human
ucaucuuucuuccaaac

SEQ ID NO: 1188815 - RNA, 17 nt, Human
guuguccucagccccgc

SEQ ID NO: 1188816 - RNA, 23 nt, Human
guuguccucagccccgcguggaa

SEQ ID NO: 1188817 - RNA, 12 nt, Human
guucugccagga

SEQ ID NO: 1188818 - RNA, 13 nt, Human
guucugccaggag

SEQ ID NO: 1188819 - RNA, 14 nt, Human
guucugccaggaga

SEQ ID NO: 1188820 - RNA, 17 nt, Human
gugucuggcacagccug

SEQ ID NO: 1188821 - RNA, 21 nt, Human
guguccugcaccggggccugg

SEQ ID NO: 1188822 - RNA, 21 nt, Human
guggggagagacgggcccugg

SEQ ID NO: 1188823 - RNA, 16 nt, Human
guggcucgggaggcga

SEQ ID NO: 1188824 - RNA, 13 nt, Human
gucugagagaggc

SEQ ID NO: 1188825 - RNA, 14 nt, Human
gucugagagaggcc

SEQ ID NO: 1188826 - RNA, 15 nt, Human
gucugagagaggcca

SEQ ID NO: 1188827 - RNA, 18 nt, Human
gucugagagaggccauuc

SEQ ID NO: 1188828 - RNA, 14 nt, Human
gucccugccuggac

SEQ ID NO: 1188829 - RNA, 13 nt, Human
gucccugccugga

SEQ ID NO: 1188830 - RNA, 22 nt, Human
gucagcugggacaccccgacuu

SEQ ID NO: 1188831 - RNA, 19 nt, Human
guagugauuuuuaugccac

SEQ ID NO: 1188832 - RNA, 12 nt, Human
gcgcggcuggga

SEQ ID NO: 1188833 - RNA, 18 nt, Human
gcgcggcugggaggaggg

SEQ ID NO: 1188834 - RNA, 18 nt, Human
gccuuuggacuugucccg

SEQ ID NO: 1188835 - RNA, 21 nt, Human
gccucuccacucaugugacuc

SEQ ID NO: 1188836 - RNA, 24 nt, Human
gccucuccacucaugugacucuuu

SEQ ID NO: 1188837 - RNA, 17 nt, Human
gccuaaccugccgagag

SEQ ID NO: 1188838 - RNA, 15 nt, Human
gcccgggagcucagg

SEQ ID NO: 1188839 - RNA, 17 nt, Human
gcccgggagcucaggaa

SEQ ID NO: 1188840 - RNA, 19 nt, Human
gcccgggagcucaggaacc

SEQ ID NO: 1188841 - RNA, 19 nt, Human
gcaggggccgggggcaguc

SEQ ID NO: 1188842 - RNA, 20 nt, Human
gcaggggccgggggcagucu

SEQ ID NO: 1188843 - RNA, 17 nt, Human
gaucccaugagcuccuu

SEQ ID NO: 1188844 - RNA, 20 nt, Human
gagcucaggaaccgaggcag

SEQ ID NO: 1188845 - RNA, 21 nt, Human
gagcucaggaaccgaggcagg

SEQ ID NO: 1188846 - RNA, 22 nt, Human
gagcucaggaaccgaggcaggg

SEQ ID NO: 1188847 - RNA, 21 nt, Human
gagccugacccucaucuuucu

SEQ ID NO: 1188848 - RNA, 18 nt, Human
gacuugucccgggacacc

SEQ ID NO: 1188849 - RNA, 13 nt, Human
gagagaggccauu

SEQ ID NO: 1188850 - RNA, 21 nt, Human
gagagaggccauucuuuccca

SEQ ID NO: 1188851 - RNA, 15 nt, Human
gacaccuaggcuagg

SEQ ID NO: 1188852 - RNA, 16 nt, Human
gacaccuaggcuaggg

SEQ ID NO: 1188853 - RNA, 20 nt, Human
gacaccuaggcuaggguggg

SEQ ID NO: 1188854 - RNA, 21 nt, Human
gaaggaucccaugagcuccuu

SEQ ID NO: 1188855 - RNA, 12 nt, Human
cuuuggacuugu

SEQ ID NO: 1188856 - RNA, 13 nt, Human
cuuucuuccaaac

SEQ ID NO: 1188857 - RNA, 19 nt, Human
cuuucuuccaaacaggcuc

SEQ ID NO: 1188858 - RNA, 22 nt, Human
cuuucuuccaaacaggcucaga

SEQ ID NO: 1188859 - RNA, 23 nt, Human
cuugucacgccagacuucccacg

SEQ ID NO: 1188860 - RNA, 20 nt, Human
cuuggggaguuuaggguggg

SEQ ID NO: 1188861 - RNA, 21 nt, Human
cuuggggaguuuagggugggg

SEQ ID NO: 1188862 - RNA, 19 nt, Human
cugggaggagggcaggcau

SEQ ID NO: 1188863 - RNA, 18 nt, Human
cuggcuguggccuaaccu

SEQ ID NO: 1188864 - RNA, 23 nt, Human
cuggcacagccuggcuguggccu

SEQ ID NO: 1188865 - RNA, 16 nt, Human
cuggcacagccuggcu

SEQ ID NO: 1188866 - RNA, 21 nt, Human
cuggcacagccuggcuguggc

SEQ ID NO: 1188867 - RNA, 11 nt, Human
cugccaggaga

SEQ ID NO: 1188868 - RNA, 19 nt, Human
cugcccgggagcucaggaa

SEQ ID NO: 1188869 - RNA, 23 nt, Human
cucuuggggaguuuagggugggg

SEQ ID NO: 1188870 - RNA, 15 nt, Human
cucuccugucucccu

SEQ ID NO: 1188871 - RNA, 17 nt, Human
cucuccugucucccucc

SEQ ID NO: 1188872 - RNA, 18 nt, Human
cucuccugucucccuccu

SEQ ID NO: 1188873 - RNA, 22 nt, Human
cucuccacucaugugacucuuu

SEQ ID NO: 1188874 - RNA, 21 nt, Human
cucuccacucaugugacucuu

SEQ ID NO: 1188875 - RNA, 17 nt, Human
cuccucgagaucccaac

SEQ ID NO: 1188876 - RNA, 21 nt, Human
cuccucgagaucccaacacug

SEQ ID NO: 1188877 - RNA, 24 nt, Human
cuccucgagaucccaacacugcca

SEQ ID NO: 1188878 - RNA, 23 nt, Human
cuccauccuacccccugugccuu

SEQ ID NO: 1188879 - RNA, 20 nt, Human
cuccauccuacccccugugc

SEQ ID NO: 1188880 - RNA, 22 nt, Human
cuccauccuacccccugugccu

SEQ ID NO: 1188881 - RNA, 18 nt, Human
cuccauccuacccccugu

SEQ ID NO: 1188882 - RNA, 14 nt, Human
cuacccccugugcc

SEQ ID NO: 1188883 - RNA, 16 nt, Human
cguuguccucagcccc

SEQ ID NO: 1188884 - RNA, 23 nt, Human
cguggcuguggcauccagagucc

SEQ ID NO: 1188885 - RNA, 17 nt, Human
cgggggcagucugagag

SEQ ID NO: 1188886 - RNA, 18 nt, Human
cgggggcagucugagaga

SEQ ID NO: 1188887 - RNA, 21 nt, Human
cgggggcagucugagagaggc

SEQ ID NO: 1188888 - RNA, 17 nt, Human
cggggccugggcaggag

SEQ ID NO: 1188889 - RNA, 19 nt, Human
cggggccugggcaggaggg

SEQ ID NO: 1188890 - RNA, 12 nt, Human
cggcugggagga

SEQ ID NO: 1188891 - RNA, 17 nt, Human
cgggagccugacccuca

SEQ ID NO: 1188892 - RNA, 18 nt, Human
cggcugggaggagggcag

SEQ ID NO: 1188893 - RNA, 11 nt, Human
cgcggcuggga

SEQ ID NO: 1188894 - RNA, 17 nt, Human
ccuccauccuacccccu

SEQ ID NO: 1188895 - RNA, 22 nt, Human
ccuccauccuacccccugugcc

SEQ ID NO: 1188896 - RNA, 23 nt, Human
ccuccauccuacccccugugccu

SEQ ID NO: 1188897 - RNA, 18 nt, Human
ccucagccccgcguggaa

SEQ ID NO: 1188898 - RNA, 13 nt, Human
ccgggagcucagg

SEQ ID NO: 1188899 - RNA, 15 nt, Human
ccgggagcucaggaa

SEQ ID NO: 1188900 - RNA, 15 nt, Human
ccggggccugggcag

SEQ ID NO: 1188901 - RNA, 19 nt, Human
ccggggccugggcaggagg

SEQ ID NO: 1188902 - RNA, 17 nt, Human
ccggcuuuguggcacug

SEQ ID NO: 1188903 - RNA, 19 nt, Human
ccggcuuuguggcacuggg

SEQ ID NO: 1188904 - RNA, 12 nt, Human
cccugccuggac

SEQ ID NO: 1188905 - RNA, 13 nt, Human
cccugccuggacc

SEQ ID NO: 1188906 - RNA, 18 nt, Human
cccugccuggaccagccu

SEQ ID NO: 1188907 - RNA, 14 nt, Human
cccucaucuuucuu

SEQ ID NO: 1188908 - RNA, 14 nt, Human
cugcaccggggccu

SEQ ID NO: 1188909 - RNA, 16 nt, Human
cugcaccggggccugg

SEQ ID NO: 1188910 - RNA, 18 nt, Human
cugcaccggggccugggc

SEQ ID NO: 1188911 - RNA, 19 nt, Human
cugcaccggggccugggca

SEQ ID NO: 1188912 - RNA, 13 nt, Human
cugggcaggaggg

SEQ ID NO: 1188913 - RNA, 12 nt, Human
gaaccgaggcag

SEQ ID NO: 1188914 - RNA, 15 nt, Human
gaaccgaggcaggga

SEQ ID NO: 1188915 - RNA, 17 nt, Human
gaguccaucagccucca

SEQ ID NO: 1188916 - RNA, 22 nt, Human
gaggugcuucuaguucugccag

SEQ ID NO: 1188917 - RNA, 23 nt, Human
gaggugcuucuaguucugccagg

SEQ ID NO: 1188918 - RNA, 9 nt, Human
gagggcugc

SEQ ID NO: 1188919 - RNA, 16 nt, Human
gagggcugccuuugga

SEQ ID NO: 1188920 - RNA, 14 nt, Human
gcaccggggccugg

SEQ ID NO: 1188921 - RNA, 16 nt, Human
gcaccggggccugggc

SEQ ID NO: 1188922 - RNA, 19 nt, Human
gcaccggggccugggcagg

SEQ ID NO: 1188923 - RNA, 12 nt, Human
gccauucuuucc

SEQ ID NO: 1188924 - RNA, 17 nt, Human
ggagagacgggcccugg

SEQ ID NO: 1188925 - RNA, 23 nt, Human
ggcaggcaucggggagccgggag

SEQ ID NO: 1188926 - RNA, 20 nt, Human
ggcuccucgagaucccaaca

SEQ ID NO: 1188927 - RNA, 15 nt, Human
aaaaagggaggggga

SEQ ID NO: 1188928 - RNA, 14 nt, Human
gggagggggagagg

SEQ ID NO: 1188929 - RNA, 12 nt, Human
ggggccugggca

SEQ ID NO: 1188930 - RNA, 15 nt, Human
ggggccugggcagga

SEQ ID NO: 1188931 - RNA, 15 nt, Human
ggggcgcggcuggga

SEQ ID NO: 1188932 - RNA, 18 nt, Human
caccuaggcuaggguggg

SEQ ID NO: 1188933 - RNA, 19 nt, Human
caccuaggcuagggugggg

SEQ ID NO: 1188934 - RNA, 17 nt, Human
auuuuuaugccaccuga

SEQ ID NO: 1188935 - RNA, 13 nt, Human
auucuuucccaac

SEQ ID NO: 1188936 - RNA, 23 nt, Human
ccagacuucccacggcuccucga

SEQ ID NO: 1188937 - RNA, 18 nt, Human
ccagagaaaaagggaggg

SEQ ID NO: 1188938 - RNA, 21 nt, Human
ccccgcguggaacucgugucu

SEQ ID NO: 1188939 - RNA, 21 nt, Human
ccaugagcuccuuaaggcucu

SEQ ID NO: 1188940 - RNA, 12 nt, Human
ccugccuggacc

SEQ ID NO: 1188941 - RNA, 19 nt, Human
ccugccuggaccagccucu

SEQ ID NO: 1188942 - RNA, 23 nt, Human
ccucuuggggaguuuaggguggg

SEQ ID NO: 1188943 - RNA, 22 nt, Human
ccucuuggggaguuuagggugg

SEQ ID NO: 1188944 - RNA, 21 nt, Human
ccucugcccgggagcucagga

SEQ ID NO: 1188945 - RNA, 22 nt, Human
ccucugcccgggagcucaggaa

SEQ ID NO: 1188946 - RNA, 16 nt, Human
cuccugucucccuccu

SEQ ID NO: 1188947 - RNA, 22 nt, Human
cuccucugcccgggagcucagg

SEQ ID NO: 1188948 - RNA, 24 nt, Human
cuccucugcccgggagcucaggaa

SEQ ID NO: 1188949 - RNA, 14 nt, Human
cucaugugacucuu

SEQ ID NO: 1188950 - RNA, 22 nt, Human
uuuguagugauuuuuaugccac

SEQ ID NO: 1188951 - RNA, 15 nt, Human
uuuguagugauuuuu

SEQ ID NO: 1188952 - RNA, 18 nt, Human
uuuguaagguuuuuguag

SEQ ID NO: 1188953 - RNA, 19 nt, Human
uuucccuuccuuccucucc

SEQ ID NO: 1188954 - RNA, 16 nt, Human
uuggacuugucccggg

SEQ ID NO: 1188955 - RNA, 17 nt, Human
uucuaguucugccagga

SEQ ID NO: 1188956 - RNA, 12 nt, Human
uucugccaggag

SEQ ID NO: 1188957 - RNA, 15 nt, Human
aucccaacacugcca

SEQ ID NO: 1188958 - RNA, 16 nt, Human
aucccaacacugccag

SEQ ID NO: 1188959 - RNA, 17 nt, Human
aucccaacacugccagc

SEQ ID NO: 1188960 - RNA, 12 nt, Human
aguuuagggugg

SEQ ID NO: 1188961 - RNA, 13 nt, Human
aguuuaggguggg

SEQ ID NO: 1188962 - RNA, 14 nt, Human
aguuuagggugggg

SEQ ID NO: 1188963 - RNA, 13 nt, Human
aguucugccagga

SEQ ID NO: 1188964 - RNA, 14 nt, Human
aguucugccaggag

SEQ ID NO: 1188965 - RNA, 20 nt, Human
aguucugccaggagacaggu

SEQ ID NO: 1188966 - RNA, 12 nt, Human
aguucugccagg

SEQ ID NO: 1188967 - RNA, 16 nt, Human
uguggcauccagaguc

SEQ ID NO: 1188968 - RNA, 19 nt, Human
uguggcauccagagucccu

SEQ ID NO: 1188969 - RNA, 21 nt, Human
uguggcauccagagucccugc

SEQ ID NO: 1188970 - RNA, 12 nt, Human
ugugacucuuuc

SEQ ID NO: 1188971 - RNA, 14 nt, Human
ugugacucuuucca

SEQ ID NO: 1188972 - RNA, 15 nt, Human
ugugacucuuuccaa

SEQ ID NO: 1188973 - RNA, 17 nt, Human
ugugacucuuuccaacc

SEQ ID NO: 1188974 - RNA, 19 nt, Human
agguuuuuguagugauuuu

SEQ ID NO: 1188975 - RNA, 21 nt, Human
aggguggggggggggcgcggc

SEQ ID NO: 1188976 - RNA, 13 nt, Human
uggggagagacgg

SEQ ID NO: 1188977 - RNA, 15 nt, Human
agggaaggaucccau

SEQ ID NO: 1188978 - RNA, 22 nt, Human
agggaaggaucccaugagcucc

SEQ ID NO: 1188979 - RNA, 23 nt, Human
agggaaggaucccaugagcuccu

SEQ ID NO: 1188980 - RNA, 19 nt, Human
aggaucccaugagcuccuu

SEQ ID NO: 1188981 - RNA, 15 nt, Human
ugccuugucacgcca

SEQ ID NO: 1188982 - RNA, 17 nt, Human
ugccuugucacgccaga

SEQ ID NO: 1188983 - RNA, 22 nt, Human
ugccgagaguccaucagccucc

SEQ ID NO: 1188984 - RNA, 16 nt, Human
agccucuccacucaug

SEQ ID NO: 1188985 - RNA, 23 nt, Human
agccccgcguggaacucgugucu

SEQ ID NO: 1188986 - RNA, 18 nt, Human
agaucccaacacugccag

SEQ ID NO: 1188987 - RNA, 19 nt, Human
agaucccaacacugccagc

SEQ ID NO: 1188988 - RNA, 20 nt, Human
agaucccaacacugccagca

SEQ ID NO: 1188989 - RNA, 23 nt, Human
agaguccaucagccuccauccua

SEQ ID NO: 1188990 - RNA, 14 nt, Human
agagucccugccug

SEQ ID NO: 1188991 - RNA, 17 nt, Human
agagucccugccuggac

SEQ ID NO: 1188992 - RNA, 21 nt, Human
agaggccauucuuucccaaca

SEQ ID NO: 1188993 - RNA, 19 nt, Human
agacuucccacggcuccuc

SEQ ID NO: 1188994 - RNA, 13 nt, Human
ucuuucuuccaaa

SEQ ID NO: 1188995 - RNA, 14 nt, Human
ucugagagaggcca

SEQ ID NO: 1188996 - RNA, 20 nt, Human
ucugagagaggccauucuuu

SEQ ID NO: 1188997 - RNA, 23 nt, Human
acuugucccgggacaccuaggcu

SEQ ID NO: 1188998 - RNA, 17 nt, Human
ucgagaucccaacacug

SEQ ID NO: 1188999 - RNA, 22 nt, Human
ucgagaucccaacacugccagc

SEQ ID NO: 1189000 - RNA, 18 nt, Human
ucgagaucccaacacugc

SEQ ID NO: 1189001 - RNA, 21 nt, Human
ucgagaucccaacacugccag

SEQ ID NO: 1189002 - RNA, 19 nt, Human
acucaugugacucuuucca

SEQ ID NO: 1189003 - RNA, 21 nt, Human
ucccgggacaccuaggcuagg

SEQ ID NO: 1189004 - RNA, 14 nt, Human
uccacucaugugac

SEQ ID NO: 1189005 - RNA, 21 nt, Human
uccacucaugugacucuuucc

SEQ ID NO: 1189006 - RNA, 21 nt, Human
uccaaccggcuuuguggcacu

SEQ ID NO: 1189007 - RNA, 17 nt, Human
ucaggaaccgaggcagg

SEQ ID NO: 1189008 - RNA, 18 nt, Human
accagagaaaaagggagg

SEQ ID NO: 1189009 - RNA, 17 nt, Human
acaccccgacuuuuguu

SEQ ID NO: 1189010 - RNA, 23 nt, Human
guggggggggggcgcggcuggga

SEQ ID NO: 1189011 - RNA, 14 nt, Human
guggcacuggggca

SEQ ID NO: 1189012 - RNA, 12 nt, Human
gucucccuccuc

SEQ ID NO: 1189013 - RNA, 16 nt, Human
gucucccuccucugcc

SEQ ID NO: 1189014 - RNA, 12 nt, Human
aacacugccagc

SEQ ID NO: 1189015 - RNA, 22 nt, Human
aacacugccagcauuucccuuc

SEQ ID NO: 1189016 - RNA, 15 nt, Human
aggagggcaggcauc

SEQ ID NO: 1189017 - RNA, 15 nt, Human
aggagggaggugcuu

SEQ ID NO: 1189018 - RNA, 13 nt, Human
aggagggcaggca

SEQ ID NO: 1189019 - RNA, 20 nt, Human
aggagacagguuagcugcuc

SEQ ID NO: 1189020 - RNA, 19 nt, Human
aggcaucggggagccggga

SEQ ID NO: 1189021 - RNA, 14 nt, Human
aggcuagggugggg

SEQ ID NO: 1189022 - RNA, 15 nt, Human
aggcuagggugggga

SEQ ID NO: 1189023 - RNA, 16 nt, Human
aggcuaggguggggag

SEQ ID NO: 1189024 - RNA, 19 nt, Human
aggcuaggguggggagaga

SEQ ID NO: 1189025 - RNA, 22 nt, Human
agagaggccauucuuucccaac

SEQ ID NO: 1189026 - RNA, 23 nt, Human
agagaggccauucuuucccaaca

SEQ ID NO: 1189027 - RNA, 12 nt, Human
agagaggccauu

SEQ ID NO: 1189028 - RNA, 13 nt, Human
acccucaucuuuc

SEQ ID NO: 1189029 - RNA, 14 nt, Human
acccucaucuuucu

SEQ ID NO: 1189030 - RNA, 16 nt, Human
acccucaucuuucuuc

SEQ ID NO: 1189031 - RNA, 19 nt, Human
acccucaucuuucuuccaa

SEQ ID NO: 1189032 - RNA, 19 nt, Human
accggggccugggcaggag

SEQ ID NO: 1189033 - RNA, 13 nt, Human
accggggccuggg

SEQ ID NO: 1189034 - RNA, 14 nt, Human
aacaggcucagagg

SEQ ID NO: 1189035 - RNA, 16 nt, Human
uggggcaggggccggg

SEQ ID NO: 1189036 - RNA, 18 nt, Human
uggggcaggggccggggg

SEQ ID NO: 1189037 - RNA, 20 nt, Human
ugcuucuaguucugccagga

SEQ ID NO: 1189038 - RNA, 18 nt, Human
ugcuucuaguucugccag

SEQ ID NO: 1189039 - RNA, 19 nt, Human
ugcuucuaguucugccagg

SEQ ID NO: 1189040 - RNA, 19 nt, Human
ucuuuuguaagguuuuugu

SEQ ID NO: 1189041 - RNA, 16 nt, Human
uccuuaaggcucuuuu

SEQ ID NO: 1189042 - RNA, 19 nt, Human
uccuuaaggcucuuuugua

SEQ ID NO: 1189043 - RNA, 18 nt, Human
ucacgccagacuucccac

SEQ ID NO: 1189044 - RNA, 15 nt, Human
uaggcuagggugggg

SEQ ID NO: 1189045 - RNA, 13 nt, Human
uaggcuagggugg

SEQ ID NO: 1189046 - RNA, 20 nt, Human
uagugauuuuuaugccaccu

SEQ ID NO: 1189047 - RNA, 21 nt, Human
uagugauuuuuaugccaccug

SEQ ID NO: 1189048 - RNA, 22 nt, Human
uagugauuuuuaugccaccuga

SEQ ID NO: 1189049 - RNA, 15 nt, Human
ggugguggcucggga

SEQ ID NO: 1189050 - RNA, 21 nt, Human
gguguccugcaccggggccug

SEQ ID NO: 1189051 - RNA, 15 nt, Human
gggggagagggcugc

SEQ ID NO: 1189052 - RNA, 18 nt, Human
ggggcagucugagagagg

SEQ ID NO: 1189053 - RNA, 19 nt, Human
ggggcagucugagagaggc

SEQ ID NO: 1189054 - RNA, 16 nt, Human
ggggcgcggcugggag

SEQ ID NO: 1189055 - RNA, 16 nt, Human
gggccugggcaggagg

SEQ ID NO: 1189056 - RNA, 17 nt, Human
gggccugggcaggaggg

SEQ ID NO: 1189057 - RNA, 12 nt, Human
gggccugggcag

SEQ ID NO: 1189058 - RNA, 13 nt, Human
gggccugggcagg

SEQ ID NO: 1189059 - RNA, 15 nt, Human
gggccugggcaggag

SEQ ID NO: 1189060 - RNA, 20 nt, Human
gggcagucugagagaggcca

SEQ ID NO: 1189061 - RNA, 21 nt, Human
gggcagucugagagaggccau

SEQ ID NO: 1189062 - RNA, 16 nt, Human
gggaguuuaggguggg

SEQ ID NO: 1189063 - RNA, 23 nt, Human
gggaggugcuucuaguucugcca

SEQ ID NO: 1189064 - RNA, 17 nt, Human
gggcagucugagagagg

SEQ ID NO: 1189065 - RNA, 18 nt, Human
gggcagucugagagaggc

SEQ ID NO: 1189066 - RNA, 19 nt, Human
gggcagucugagagaggcc

SEQ ID NO: 1189067 - RNA, 15 nt, Human
gggaaggaucccaug

SEQ ID NO: 1189068 - RNA, 20 nt, Human
ggcagucugagagaggccau

SEQ ID NO: 1189069 - RNA, 17 nt, Human
ggaucccaugagcuccu

SEQ ID NO: 1189070 - RNA, 20 nt, Human
ggaucccaugagcuccuuaa

SEQ ID NO: 1189071 - RNA, 13 nt, Human
ggagggcaggcau

SEQ ID NO: 1189072 - RNA, 14 nt, Human
ggagggcaggcauc

SEQ ID NO: 1189073 - RNA, 16 nt, Human
ggagccgggagccuga

SEQ ID NO: 1189074 - RNA, 14 nt, Human
ggaggagggcaggc

SEQ ID NO: 1189075 - RNA, 15 nt, Human
ggaggagggcaggca

SEQ ID NO: 1189076 - RNA, 20 nt, Human
ggaggagggcaggcaucggg

SEQ ID NO: 1189077 - RNA, 17 nt, Human
ggaaggaucccaugagc

SEQ ID NO: 1189078 - RNA, 17 nt, Human
ggaacucgugucuggca

SEQ ID NO: 1189079 - RNA, 15 nt, Human
ggaaccgaggcaggg

SEQ ID NO: 1189080 - RNA, 16 nt, Human
ggaaccgaggcaggga

SEQ ID NO: 1189081 - RNA, 20 nt, Human
ggaaccgaggcagggaagga

SEQ ID NO: 1189082 - RNA, 21 nt, Human
gcuucuaguucugccaggaga

SEQ ID NO: 1189083 - RNA, 19 nt, Human
gcuucuaguucugccagga

SEQ ID NO: 1189084 - RNA, 20 nt, Human
gcuucuaguucugccaggag

SEQ ID NO: 1189085 - RNA, 18 nt, Human
gcuucuaguucugccagg

SEQ ID NO: 1189086 - RNA, 17 nt, Human
gcugggaggagggcagg

SEQ ID NO: 1189087 - RNA, 19 nt, Human
gcugggaggagggcaggca

SEQ ID NO: 1189088 - RNA, 15 nt, Human
gcugccuuuggacuu

SEQ ID NO: 1189089 - RNA, 20 nt, Human
gcugccuuuggacuuguccc

SEQ ID NO: 1189090 - RNA, 13 nt, Human
gccgggagccuga

SEQ ID NO: 1189091 - RNA, 14 nt, Human
gccgggagccugac

SEQ ID NO: 1189092 - RNA, 19 nt, Human
gccgggagccugacccuca

SEQ ID NO: 1189093 - RNA, 21 nt, Human
gccgagaguccaucagccucc

SEQ ID NO: 1189094 - RNA, 13 nt, Human
gccccgcguggaa

SEQ ID NO: 1189095 - RNA, 15 nt, Human
gcaggagggaggugc

SEQ ID NO: 1189096 - RNA, 12 nt, Human
gcacagccuggc

SEQ ID NO: 1189097 - RNA, 19 nt, Human
gcacagccuggcuguggcc

SEQ ID NO: 1189098 - RNA, 18 nt, Human
gacuucccacggcuccuc

SEQ ID NO: 1189099 - RNA, 13 nt, Human
gaagcguuguccu

SEQ ID NO: 1189100 - RNA, 19 nt, Human
gaagcguuguccucagccc

SEQ ID NO: 1189101 - RNA, 20 nt, Human
gaagcguuguccucagcccc

SEQ ID NO: 1189102 - RNA, 14 nt, Human
cuuccuuccucucc

SEQ ID NO: 1189103 - RNA, 14 nt, Human
cuggcacagccugg

SEQ ID NO: 1189104 - RNA, 15 nt, Human
cuggcacagccuggc

SEQ ID NO: 1189105 - RNA, 12 nt, Human
cuggaccagccu

SEQ ID NO: 1189106 - RNA, 18 nt, Human
cugcccgggagcucagga

SEQ ID NO: 1189107 - RNA, 16 nt, Human
cugccaggagacaggu

SEQ ID NO: 1189108 - RNA, 20 nt, Human
cugccagcauuucccuuccu

SEQ ID NO: 1189109 - RNA, 21 nt, Human
cucuuggggaguuuagggugg

SEQ ID NO: 1189110 - RNA, 19 nt, Human
cucuccacucaugugacuc

SEQ ID NO: 1189111 - RNA, 13 nt, Human
cuccuuaaggcuc

SEQ ID NO: 1189112 - RNA, 22 nt, Human
cuccuuaaggcucuuuuguaag

SEQ ID NO: 1189113 - RNA, 19 nt, Human
cgucagcugggacaccccg

SEQ ID NO: 1189114 - RNA, 16 nt, Human
cgggagcucaggaacc

SEQ ID NO: 1189115 - RNA, 22 nt, Human
cggcugggaggagggcaggcau

SEQ ID NO: 1189116 - RNA, 23 nt, Human
cggcugggaggagggcaggcauc

SEQ ID NO: 1189117 - RNA, 14 nt, Human
ccuggaccagccuc

SEQ ID NO: 1189118 - RNA, 15 nt, Human
ccuggaccagccucu

SEQ ID NO: 1189119 - RNA, 16 nt, Human
ccuggaccagccucuc

SEQ ID NO: 1189120 - RNA, 23 nt, Human
ccucuccacucaugugacucuuu

SEQ ID NO: 1189121 - RNA, 14 nt, Human
ccuccucugcccgg

SEQ ID NO: 1189122 - RNA, 15 nt, Human
ccuccucugcccggg

SEQ ID NO: 1189123 - RNA, 22 nt, Human
ccgacuuuuguuuaccagagaa

SEQ ID NO: 1189124 - RNA, 13 nt, Human
cccaacaccucuu

SEQ ID NO: 1189125 - RNA, 13 nt, Human
ccaucagccucca

SEQ ID NO: 1189126 - RNA, 21 nt, Human
ccacgucagcugggacacccc

SEQ ID NO: 1189127 - RNA, 13 nt, Human
ccaacacugccag

SEQ ID NO: 1189128 - RNA, 14 nt, Human
ccaacacugccagc

SEQ ID NO: 1189129 - RNA, 15 nt, Human
ccaacacugccagca

SEQ ID NO: 1189130 - RNA, 16 nt, Human
ccaacacugccagcau

SEQ ID NO: 1189131 - RNA, 16 nt, Human
ccaaacaggcucagag

SEQ ID NO: 1189132 - RNA, 15 nt, Colorado tick fever virus
gggcugcgcagugug

SEQ ID NO: 1189133 - RNA, 15 nt, Colorado tick fever virus
ucagguggaggcugc

SEQ ID NO: 1189134 - RNA, 18 nt, Colorado tick fever virus
acugcuugcuuaaaggug

SEQ ID NO: 1189135 - RNA, 17 nt, Colorado tick fever virus
gcuuacggaaugaugac

SEQ ID NO: 1189136 - RNA, 13 nt, Colorado tick fever virus
acggguaauugca

SEQ ID NO: 1189137 - RNA, 14 nt, Colorado tick fever virus
ugaguggggcugcg

SEQ ID NO: 1189138 - RNA, 16 nt, Colorado tick fever virus
ugaguugaaggucggg

SEQ ID NO: 1189139 - RNA, 24 nt, Colorado tick fever virus
cccucauauagggaauccuugcag

SEQ ID NO: 1189140 - RNA, 20 nt, Colorado tick fever virus
cugcggcuuaccaggcgggc

SEQ ID NO: 1189141 - RNA, 14 nt, Colorado tick fever virus
ucgagagugcaggc

SEQ ID NO: 1189142 - RNA, 20 nt, Colorado tick fever virus
gcacgcuugauuaccagggu

SEQ ID NO: 1189143 - RNA, 14 nt, Colorado tick fever virus
aucucccuugcagu

SEQ ID NO: 1189144 - RNA, 19 nt, Colorado tick fever virus
cgccauacacaauugcagu

SEQ ID NO: 1189145 - RNA, 15 nt, Colorado tick fever virus
auucuugaugugaag

SEQ ID NO: 1189146 - RNA, 20 nt, Colorado tick fever virus
ugaugugaagacaaugcagu

SEQ ID NO: 1189147 - RNA, 23 nt, Colorado tick fever virus
ggaugcugaucucccuugcaguc

SEQ ID NO: 1189148 - RNA, 16 nt, Colorado tick fever virus
cggggaauuugcaguc

SEQ ID NO: 1189149 - RNA, 14 nt, Colorado tick fever virus
acugcuugcuuaaa

SEQ ID NO: 1189150 - RNA, 18 nt, Colorado tick fever virus
ugugaaaaucaauugucg

SEQ ID NO: 1189151 - RNA, 15 nt, Colorado tick fever virus
cacgagugacugaug

SEQ ID NO: 1189152 - RNA, 20 nt, Colorado tick fever virus
uggguagaacgguugcaguc

SEQ ID NO: 1189153 - RNA, 17 nt, Colorado tick fever virus
ggacaucguuguugaug

SEQ ID NO: 1189154 - RNA, 14 nt, Colorado tick fever virus
uacacaauugcagu

SEQ ID NO: 1189155 - RNA, 12 nt, Colorado tick fever virus
aagacugcuugc

SEQ ID NO: 1189156 - RNA, 13 nt, Colorado tick fever virus
gcgaguugcaguc

SEQ ID NO: 1189157 - RNA, 22 nt, Colorado tick fever virus
uugaugugaagacaaugcaguc

SEQ ID NO: 1189158 - RNA, 19 nt, Colorado tick fever virus
cuguguucggaugcaugca

SEQ ID NO: 1189159 - RNA, 17 nt, Colorado tick fever virus
uucccagggugcauucu

SEQ ID NO: 1189160 - RNA, 16 nt, Colorado tick fever virus
agcucuccaucgcuuu

SEQ ID NO: 1189161 - RNA, 23 nt, Colorado tick fever virus
agggugcauucuugaugugaaga

SEQ ID NO: 1189162 - RNA, 16 nt, Colorado tick fever virus
gaguggggcugcgcag

SEQ ID NO: 1189163 - RNA, 15 nt, Colorado tick fever virus
ucagcagcagaggcg

SEQ ID NO: 1189164 - RNA, 23 nt, Colorado tick fever virus
ggugcaggaugcugaucucccuu

SEQ ID NO: 1189165 - RNA, 17 nt, Colorado tick fever virus
auugagagcggagccuu

SEQ ID NO: 1189166 - RNA, 14 nt, Colorado tick fever virus
cggaugcaugcagu

SEQ ID NO: 1189167 - RNA, 19 nt, Colorado tick fever virus
gugcacacgauugagcaca

SEQ ID NO: 1189168 - RNA, 18 nt, Colorado tick fever virus
uugcuuaaaggugugaaa

SEQ ID NO: 1189169 - RNA, 16 nt, Colorado tick fever virus
gcuugcuuaaaggugu

SEQ ID NO: 1189170 - RNA, 21 nt, Colorado tick fever virus
ccaauggugucuaugguuaua

SEQ ID NO: 1189171 - RNA, 20 nt, Colorado tick fever virus
cgccuuuggugaaggaugca

SEQ ID NO: 1189172 - RNA, 22 nt, Colorado tick fever virus
ugggauuggugaccggugcagg

SEQ ID NO: 1189173 - RNA, 15 nt, Colorado tick fever virus
cggggaauuugcagu

SEQ ID NO: 1189174 - RNA, 13 nt, Colorado tick fever virus
ugaugugacacac

SEQ ID NO: 1189175 - RNA, 15 nt, Colorado tick fever virus
cuugaugugaagaca

SEQ ID NO: 1189176 - RNA, 20 nt, Colorado tick fever virus
uucauucccagggugcauuc

SEQ ID NO: 1189177 - RNA, 12 nt, Colorado tick fever virus
gcgaguugcagu

SEQ ID NO: 1189178 - RNA, 11 nt, Colorado tick fever virus
gagagugcagg

SEQ ID NO: 1189179 - RNA, 19 nt, Colorado tick fever virus
gucgcugaggaccucgccg

SEQ ID NO: 1189180 - RNA, 18 nt, Colorado tick fever virus
ggccuggauacaaaugca

SEQ ID NO: 1189181 - RNA, 14 nt, Colorado tick fever virus
cgcagggguucagu

SEQ ID NO: 1189182 - RNA, 22 nt, Colorado tick fever virus
ucuugaugugaagacaaugcag

SEQ ID NO: 1189183 - RNA, 14 nt, Colorado tick fever virus
cccgggacggguaa

SEQ ID NO: 1189184 - RNA, 15 nt, Colorado tick fever virus
cacggggaauuugca

SEQ ID NO: 1189185 - RNA, 16 nt, Colorado tick fever virus
guguucggaugcaugc

SEQ ID NO: 1189186 - RNA, 15 nt, Colorado tick fever virus
ggcgcgugagcaggu

SEQ ID NO: 1189187 - RNA, 15 nt, Colorado tick fever virus
ggugcaggaugcuga

SEQ ID NO: 1189188 - RNA, 23 nt, Colorado tick fever virus
guguuggccuggugagcuguacc

SEQ ID NO: 1189189 - RNA, 22 nt, Colorado tick fever virus
ucccgggacggguaauugcagu

SEQ ID NO: 1189190 - RNA, 15 nt, Colorado tick fever virus
ucuguuuggauguca

SEQ ID NO: 1189191 - RNA, 16 nt, Colorado tick fever virus
uucuugaugugaagac

SEQ ID NO: 1189192 - RNA, 14 nt, Colorado tick fever virus
uuguugcaggcuuu

SEQ ID NO: 1189193 - RNA, 17 nt, Colorado tick fever virus
ggauauuuucuaagacu

SEQ ID NO: 1189194 - RNA, 11 nt, Colorado tick fever virus
aucuucaauuu

SEQ ID NO: 1189195 - RNA, 17 nt, Colorado tick fever virus
augugaagacaaugcag

SEQ ID NO: 1189196 - RNA, 22 nt, Colorado tick fever virus
auauuuucuaagacugcuugcu

SEQ ID NO: 1189197 - RNA, 13 nt, Colorado tick fever virus
ggcugcgcagugu

SEQ ID NO: 1189198 - RNA, 13 nt, Colorado tick fever virus
gugggagugcuca

SEQ ID NO: 1189199 - RNA, 16 nt, Colorado tick fever virus
gagguacuggcagaug

SEQ ID NO: 1189200 - RNA, 19 nt, Colorado tick fever virus
augcugaucucccuugcag

SEQ ID NO: 1189201 - RNA, 22 nt, Colorado tick fever virus
uugacacagucugucaaagacg

SEQ ID NO: 1189202 - RNA, 18 nt, Colorado tick fever virus
cggugggagugcucaagu

SEQ ID NO: 1189203 - RNA, 22 nt, Colorado tick fever virus
caguauuacguugacacagucu

SEQ ID NO: 1189204 - RNA, 13 nt, Colorado tick fever virus
augacguccuagc

SEQ ID NO: 1189205 - RNA, 14 nt, Colorado tick fever virus
gugcauucuugaug

SEQ ID NO: 1189206 - RNA, 22 nt, Colorado tick fever virus
cugugcacacgauugagcacaa

SEQ ID NO: 1189207 - RNA, 19 nt, Colorado tick fever virus
gcaccacgccauacacaau

SEQ ID NO: 1189208 - RNA, 21 nt, Colorado tick fever virus
caccacgccauacacaauugc

SEQ ID NO: 1189209 - RNA, 13 nt, Colorado tick fever virus
gcagggguucagu

SEQ ID NO: 1189210 - RNA, 20 nt, Colorado tick fever virus
guagugaaugggcuggagaa

SEQ ID NO: 1189211 - RNA, 14 nt, Colorado tick fever virus
agcaucauucuccc

SEQ ID NO: 1189212 - RNA, 13 nt, Colorado tick fever virus
gaauccuugcagu

SEQ ID NO: 1189213 - RNA, 14 nt, Colorado tick fever virus
ggaugcaugcaguc

SEQ ID NO: 1189214 - RNA, 12 nt, Colorado tick fever virus
cgaguugcaguc

SEQ ID NO: 1189215 - RNA, 14 nt, Colorado tick fever virus
cauucauucccagg

SEQ ID NO: 1189216 - RNA, 11 nt, Colorado tick fever virus
ccaaacuccaa

SEQ ID NO: 1189217 - RNA, 22 nt, Colorado tick fever virus
ugaccggugcaggaugcugauc

SEQ ID NO: 1189218 - RNA, 15 nt, Colorado tick fever virus
ugcuuaaagguguga

SEQ ID NO: 1189219 - RNA, 16 nt, Colorado tick fever virus
acggguaauugcaguc

SEQ ID NO: 1189220 - RNA, 11 nt, Colorado tick fever virus
accggugcagg

SEQ ID NO: 1189221 - RNA, 23 nt, Colorado tick fever virus
gagcucuccaucgcuuugcaguc

SEQ ID NO: 1189222 - RNA, 19 nt, Colorado tick fever virus
ucuaagacugcuugcuuaa

SEQ ID NO: 1189223 - RNA, 23 nt, Colorado tick fever virus
auugagagcggagccuuuaaggu

SEQ ID NO: 1189224 - RNA, 22 nt, Colorado tick fever virus
gacguccuagcaucauucuccc

SEQ ID NO: 1189225 - RNA, 22 nt, Colorado tick fever virus
gcggagccuuuaagguguagug

SEQ ID NO: 1189226 - RNA, 21 nt, Colorado tick fever virus
acgccauacacaauugcaguc

SEQ ID NO: 1189227 - RNA, 21 nt, Colorado tick fever virus
ccucgccggcuuacggaauga

SEQ ID NO: 1189228 - RNA, 19 nt, Colorado tick fever virus
caggcgggcuuuuugcgug

SEQ ID NO: 1189229 - RNA, 14 nt, Colorado tick fever virus
gguuguugcaggcu

SEQ ID NO: 1189230 - RNA, 15 nt, Colorado tick fever virus
gcaggaugcugaucu

SEQ ID NO: 1189231 - RNA, 22 nt, Colorado tick fever virus
augcaaguggucgaccacgagu

SEQ ID NO: 1189232 - RNA, 19 nt, Colorado tick fever virus
gcaucuucaauuuguuaac

SEQ ID NO: 1189233 - RNA, 23 nt, Colorado tick fever virus
ucucgcgcacggggaauuugcag

SEQ ID NO: 1189234 - RNA, 20 nt, Colorado tick fever virus
cuagcaucauucucccggga

SEQ ID NO: 1189235 - RNA, 23 nt, Colorado tick fever virus
gaccucgccggcuuacggaauga

SEQ ID NO: 1189236 - RNA, 21 nt, Colorado tick fever virus
cacgccauacacaauugcagu

SEQ ID NO: 1189237 - RNA, 12 nt, Colorado tick fever virus
aaggagcuucag

SEQ ID NO: 1189238 - RNA, 17 nt, Colorado tick fever virus
gaccagacguaugaggc

SEQ ID NO: 1189239 - RNA, 18 nt, Colorado tick fever virus
ucauucucccgggacggg

SEQ ID NO: 1189240 - RNA, 12 nt, Colorado tick fever virus
gucacuaugggg

SEQ ID NO: 1189241 - RNA, 16 nt, Colorado tick fever virus
ucuccgcgaguugcag

SEQ ID NO: 1189242 - RNA, 17 nt, Colorado tick fever virus
uggaugaguggggcugc

SEQ ID NO: 1189243 - RNA, 14 nt, Colorado tick fever virus
cuuuggugaaggau

SEQ ID NO: 1189244 - RNA, 16 nt, Colorado tick fever virus
gcugaggaccucgccg

SEQ ID NO: 1189245 - RNA, 19 nt, Colorado tick fever virus
aaaggugugaaaaucaauu

SEQ ID NO: 1189246 - RNA, 16 nt, Colorado tick fever virus
cucaguuaggcggugc

SEQ ID NO: 1189247 - RNA, 15 nt, Colorado tick fever virus
aaguaugauugaguc

SEQ ID NO: 1189248 - RNA, 18 nt, Colorado tick fever virus
cucauauagggaauccuu

SEQ ID NO: 1189249 - RNA, 18 nt, Colorado tick fever virus
uggggcugcgcagugugu

SEQ ID NO: 1189250 - RNA, 22 nt, Colorado tick fever virus
gugggauuggugaccggugcag

SEQ ID NO: 1189251 - RNA, 17 nt, Colorado tick fever virus
ucaauugucgguguaau

SEQ ID NO: 1189252 - RNA, 17 nt, Colorado tick fever virus
caucguuguugaugcug

SEQ ID NO: 1189253 - RNA, 17 nt, Colorado tick fever virus
cgccggcuuacggaaug

SEQ ID NO: 1189254 - RNA, 12 nt, Colorado tick fever virus
ucuucaauuugu

SEQ ID NO: 1189255 - RNA, 12 nt, Colorado tick fever virus
gacgggcagggu

SEQ ID NO: 1189256 - RNA, 14 nt, Colorado tick fever virus
ucggaugcaugcag

SEQ ID NO: 1189257 - RNA, 11 nt, Colorado tick fever virus
ugaugugaaga

SEQ ID NO: 1189258 - RNA, 22 nt, Colorado tick fever virus
auuggauauuuucuaagacugc

SEQ ID NO: 1189259 - RNA, 18 nt, Colorado tick fever virus
cgccggcuuacggaauga

SEQ ID NO: 1189260 - RNA, 21 nt, Colorado tick fever virus
gugacgggcaggguagucgcu

SEQ ID NO: 1189261 - RNA, 20 nt, Colorado tick fever virus
aguggggcugcgcagugugu

SEQ ID NO: 1189262 - RNA, 24 nt, Colorado tick fever virus
auaguauccacaugaugugacaca

SEQ ID NO: 1189263 - RNA, 22 nt, Colorado tick fever virus
cauauagggaauccuugcaguc

SEQ ID NO: 1189264 - RNA, 19 nt, Colorado tick fever virus
gcagugugugacgaguggg

SEQ ID NO: 1189265 - RNA, 17 nt, Colorado tick fever virus
uucggaugcaugcaguc

SEQ ID NO: 1189266 - RNA, 20 nt, Colorado tick fever virus
ugaacggggcuaaggccugg

SEQ ID NO: 1189267 - RNA, 14 nt, Colorado tick fever virus
augagaguugcagu

SEQ ID NO: 1189268 - RNA, 19 nt, Colorado tick fever virus
gcacgcuugauuaccaggg

SEQ ID NO: 1189269 - RNA, 13 nt, Colorado tick fever virus
ugccgcaucuuca

SEQ ID NO: 1189270 - RNA, 17 nt, Colorado tick fever virus
ccacaugaugugacaca

SEQ ID NO: 1189271 - RNA, 18 nt, Colorado tick fever virus
gaugcugaucucccuugc

SEQ ID NO: 1189272 - RNA, 20 nt, Colorado tick fever virus
ucauucccagggugcauucu

SEQ ID NO: 1189273 - RNA, 17 nt, Colorado tick fever virus
cccgggacggguaauug

SEQ ID NO: 1189274 - RNA, 20 nt, Colorado tick fever virus
agugcaggcuuucgugaagg

SEQ ID NO: 1189275 - RNA, 19 nt, Colorado tick fever virus
agacugcuugcuuaaaggu

SEQ ID NO: 1189276 - RNA, 13 nt, Colorado tick fever virus
ggagggcagaugg

SEQ ID NO: 1189277 - RNA, 14 nt, Colorado tick fever virus
uagaaguaugauug

SEQ ID NO: 1189278 - RNA, 19 nt, Colorado tick fever virus
agcuucagcggcugcggcu

SEQ ID NO: 1189279 - RNA, 17 nt, Colorado tick fever virus
ucuccaucgcuuugcag

SEQ ID NO: 1189280 - RNA, 21 nt, Colorado tick fever virus
aagcgagugcgggagcuugag

SEQ ID NO: 1189281 - RNA, 22 nt, Colorado tick fever virus
gggauuggugaccggugcagga

SEQ ID NO: 1189282 - RNA, 11 nt, Colorado tick fever virus
ugucugaauac

SEQ ID NO: 1189283 - RNA, 18 nt, Colorado tick fever virus
cucggagggugagguacu

SEQ ID NO: 1189284 - RNA, 18 nt, Colorado tick fever virus
auucauucccagggugca

SEQ ID NO: 1189285 - RNA, 17 nt, Colorado tick fever virus
uggugaccggugcagga

SEQ ID NO: 1189286 - RNA, 17 nt, Colorado tick fever virus
augaugacguccuagca

SEQ ID NO: 1189287 - RNA, 21 nt, Colorado tick fever virus
agcggcugcggcuuaccaggc

SEQ ID NO: 1189288 - RNA, 14 nt, Colorado tick fever virus
cauucccagggugc

SEQ ID NO: 1189289 - RNA, 13 nt, Colorado tick fever virus
ggaugcaugcagu

SEQ ID NO: 1189290 - RNA, 21 nt, Colorado tick fever virus
cugagagcgggguuguuuauc

SEQ ID NO: 1189291 - RNA, 22 nt, Colorado tick fever virus
uggaugaguggggcugcgcagu

SEQ ID NO: 1189292 - RNA, 23 nt, Colorado tick fever virus
cugagcucuccaucgcuuugcag

SEQ ID NO: 1189293 - RNA, 16 nt, Colorado tick fever virus
uggugaccggugcagg

SEQ ID NO: 1189294 - RNA, 19 nt, Colorado tick fever virus
cugaggaccucgccggcuu

SEQ ID NO: 1189295 - RNA, 18 nt, Colorado tick fever virus
ucaauuuguuaacaauga

SEQ ID NO: 1189296 - RNA, 19 nt, Colorado tick fever virus
caggaugcugaucucccuu

SEQ ID NO: 1189297 - RNA, 18 nt, Colorado tick fever virus
gugucuuaugugccagag

SEQ ID NO: 1189298 - RNA, 15 nt, Colorado tick fever virus
cgggcuuuuugcgug

SEQ ID NO: 1189299 - RNA, 19 nt, Colorado tick fever virus
ggugaccggugcaggaugc

SEQ ID NO: 1189300 - RNA, 16 nt, Colorado tick fever virus
acggggaauuugcagu

SEQ ID NO: 1189301 - RNA, 18 nt, Colorado tick fever virus
augacguccuagcaucau

SEQ ID NO: 1189302 - RNA, 17 nt, Colorado tick fever virus
ucgagagugcaggcuuu

SEQ ID NO: 1189303 - RNA, 21 nt, Colorado tick fever virus
ugccagaggagguuguugcag

SEQ ID NO: 1189304 - RNA, 13 nt, Colorado tick fever virus
ggaauuugcaguc

SEQ ID NO: 1189305 - RNA, 15 nt, Colorado tick fever virus
caggguagucgcuga

SEQ ID NO: 1189306 - RNA, 20 nt, Colorado tick fever virus
agcgagugcgggagcuugag

SEQ ID NO: 1189307 - RNA, 19 nt, Colorado tick fever virus
cgauugagagcggagccuu

SEQ ID NO: 1189308 - RNA, 19 nt, Colorado tick fever virus
gacugcuugcuuaaaggug

SEQ ID NO: 1189309 - RNA, 15 nt, Colorado tick fever virus
uacacaauugcaguc

SEQ ID NO: 1189310 - RNA, 23 nt, Colorado tick fever virus
gaccuacccccaauggugucuau

SEQ ID NO: 1189311 - RNA, 16 nt, Colorado tick fever virus
gggaauccuugcaguc

SEQ ID NO: 1189312 - RNA, 13 nt, Colorado tick fever virus
cuaaggccuggau

SEQ ID NO: 1189313 - RNA, 21 nt, Colorado tick fever virus
cuugaugugaagacaaugcag

SEQ ID NO: 1189314 - RNA, 20 nt, Colorado tick fever virus
gcugaccagacguaugaggc

SEQ ID NO: 1189315 - RNA, 22 nt, Colorado tick fever virus
guaugugacauucauucccagg

SEQ ID NO: 1189316 - RNA, 19 nt, Colorado tick fever virus
auuuucuaagacugcuugc

SEQ ID NO: 1189317 - RNA, 14 nt, Colorado tick fever virus
uucccagggugcau

SEQ ID NO: 1189318 - RNA, 14 nt, Colorado tick fever virus
gcaucauucucccg

SEQ ID NO: 1189319 - RNA, 15 nt, Colorado tick fever virus
aggaugcugaucucc

SEQ ID NO: 1189320 - RNA, 19 nt, Colorado tick fever virus
gacauucauucccagggug

SEQ ID NO: 1189321 - RNA, 15 nt, Colorado tick fever virus
ugggcuggagaacca

SEQ ID NO: 1189322 - RNA, 18 nt, Colorado tick fever virus
auauagggaauccuugca

SEQ ID NO: 1189323 - RNA, 16 nt, Colorado tick fever virus
accggugcaggaugcu

SEQ ID NO: 1189324 - RNA, 20 nt, Colorado tick fever virus
cgggacggguaauugcaguc

SEQ ID NO: 1189325 - RNA, 12 nt, Colorado tick fever virus
ugaugugaagac

SEQ ID NO: 1189326 - RNA, 20 nt, Colorado tick fever virus
ccggugcaggaugcugaucu

SEQ ID NO: 1189327 - RNA, 14 nt, Colorado tick fever virus
gguggaggcugcuc

SEQ ID NO: 1189328 - RNA, 19 nt, Colorado tick fever virus
acgcagggguucagucugu

SEQ ID NO: 1189329 - RNA, 17 nt, Colorado tick fever virus
gagguacuggcagaugg

SEQ ID NO: 1189330 - RNA, 19 nt, Colorado tick fever virus
cuagcaucauucucccggg

SEQ ID NO: 1189331 - RNA, 15 nt, Colorado tick fever virus
gugaccggugcagga

SEQ ID NO: 1189332 - RNA, 12 nt, Colorado tick fever virus
cggaaugaugac

SEQ ID NO: 1189333 - RNA, 22 nt, Colorado tick fever virus
cacgauugagcacaaaauccau

SEQ ID NO: 1189334 - RNA, 22 nt, Colorado tick fever virus
aggcuuuaagcgagugcgggag

SEQ ID NO: 1189335 - RNA, 16 nt, Colorado tick fever virus
gcugcgcaguguguga

SEQ ID NO: 1189336 - RNA, 20 nt, Colorado tick fever virus
augaugacguccuagcauca

SEQ ID NO: 1189337 - RNA, 15 nt, Colorado tick fever virus
cauacacaauugcag

SEQ ID NO: 1189338 - RNA, 15 nt, Colorado tick fever virus
gguucagucuguguu

SEQ ID NO: 1189339 - RNA, 22 nt, Colorado tick fever virus
gcaggguagucgcugaggaccu

SEQ ID NO: 1189340 - RNA, 12 nt, Colorado tick fever virus
cggaugcaugca

SEQ ID NO: 1189341 - RNA, 15 nt, Colorado tick fever virus
aaaggugugaaaauc

SEQ ID NO: 1189342 - RNA, 17 nt, Colorado tick fever virus
ggugaccggugcaggau

SEQ ID NO: 1189343 - RNA, 14 nt, Colorado tick fever virus
aggaccucgccggc

SEQ ID NO: 1189344 - RNA, 14 nt, Colorado tick fever virus
ucuaagacugcuug

SEQ ID NO: 1189345 - RNA, 23 nt, Colorado tick fever virus
ucuugaugugaagacaaugcagu

SEQ ID NO: 1189346 - RNA, 18 nt, Colorado tick fever virus
acaucgagagugcaggcu

SEQ ID NO: 1189347 - RNA, 20 nt, Colorado tick fever virus
gcagggguucagucuguguu

SEQ ID NO: 1189348 - RNA, 24 nt, Colorado tick fever virus
agagcgggguuguuuaucaggugg

SEQ ID NO: 1189349 - RNA, 16 nt, Colorado tick fever virus
ugaucucccuugcagu

SEQ ID NO: 1189350 - RNA, 14 nt, Colorado tick fever virus
cagggugcauucuu

SEQ ID NO: 1189351 - RNA, 17 nt, Colorado tick fever virus
auuuguuaacaaugagu

SEQ ID NO: 1189352 - RNA, 11 nt, Colorado tick fever virus
acgggcagggu

SEQ ID NO: 1189353 - RNA, 15 nt, Colorado tick fever virus
accggugcaggaugc

SEQ ID NO: 1189354 - RNA, 23 nt, Colorado tick fever virus
cguggaugaguggggcugcgcag

SEQ ID NO: 1189355 - RNA, 14 nt, Colorado tick fever virus
uccgcgaguugcag

SEQ ID NO: 1189356 - RNA, 12 nt, Colorado tick fever virus
acauucauuccc

SEQ ID NO: 1189357 - RNA, 20 nt, Colorado tick fever virus
gaguggggcugcgcagugug

SEQ ID NO: 1189358 - RNA, 21 nt, Colorado tick fever virus
uugaugugaagacaaugcagu

SEQ ID NO: 1189359 - RNA, 18 nt, Colorado tick fever virus
uucuugaugugaagacaa

SEQ ID NO: 1189360 - RNA, 14 nt, Colorado tick fever virus
aggcgcgugagcag

SEQ ID NO: 1189361 - RNA, 16 nt, Colorado tick fever virus
gggucacuauggggcu

SEQ ID NO: 1189362 - RNA, 19 nt, Colorado tick fever virus
gccauacacaauugcaguc

SEQ ID NO: 1189363 - RNA, 23 nt, Colorado tick fever virus
gcccugucgggaaaaaucggugg

SEQ ID NO: 1189364 - RNA, 20 nt, Colorado tick fever virus
gaacggggcuaaggccugga

SEQ ID NO: 1189365 - RNA, 21 nt, Colorado tick fever virus
gcaggcuuuaagcgagugcgg

SEQ ID NO: 1189366 - RNA, 16 nt, Colorado tick fever virus
ugacauucauucccag

SEQ ID NO: 1189367 - RNA, 19 nt, Colorado tick fever virus
uggugaccggugcaggaug

SEQ ID NO: 1189368 - RNA, 17 nt, Colorado tick fever virus
gaggagguuguugcagg

SEQ ID NO: 1189369 - RNA, 21 nt, Colorado tick fever virus
ugucgguguaaucugacgcag

SEQ ID NO: 1189370 - RNA, 23 nt, Colorado tick fever virus
ucagcggcugcggcuuaccaggc

SEQ ID NO: 1189371 - RNA, 17 nt, Colorado tick fever virus
ugugaagacaaugcagu

SEQ ID NO: 1189372 - RNA, 11 nt, Colorado tick fever virus
gauaugcucag

SEQ ID NO: 1189373 - RNA, 16 nt, Colorado tick fever virus
gucgcugaggaccucg

SEQ ID NO: 1189374 - RNA, 23 nt, Colorado tick fever virus
gcaggaugcugaucucccuugca

SEQ ID NO: 1189375 - RNA, 21 nt, Colorado tick fever virus
cgcagggguucagucuguguu

SEQ ID NO: 1189376 - RNA, 19 nt, Colorado tick fever virus
ugaugugaagacaaugcag

SEQ ID NO: 1189377 - RNA, 21 nt, Colorado tick fever virus
ggauuggugaccggugcagga

SEQ ID NO: 1189378 - RNA, 23 nt, Colorado tick fever virus
ugcaggaugcugaucucccuugc

SEQ ID NO: 1189379 - RNA, 18 nt, Colorado tick fever virus
cguugacacagucuguca

SEQ ID NO: 1189380 - RNA, 13 nt, Colorado tick fever virus
acggaaugaugac

SEQ ID NO: 1189381 - RNA, 15 nt, Colorado tick fever virus
ggagguuguugcagg

SEQ ID NO: 1189382 - RNA, 16 nt, Colorado tick fever virus
gucuuuggaugauggg

SEQ ID NO: 1189383 - RNA, 15 nt, Colorado tick fever virus
uauccacaugaugug

SEQ ID NO: 1189384 - RNA, 14 nt, Colorado tick fever virus
ugaugaaaauggcg

SEQ ID NO: 1189385 - RNA, 16 nt, Colorado tick fever virus
ccggcuuacggaauga

SEQ ID NO: 1189386 - RNA, 18 nt, Colorado tick fever virus
ccggcuuacggaaugaug

SEQ ID NO: 1189387 - RNA, 23 nt, Colorado tick fever virus
auggguugagguggcugugcaca

SEQ ID NO: 1189388 - RNA, 18 nt, Colorado tick fever virus
cauucccagggugcauuc

SEQ ID NO: 1189389 - RNA, 18 nt, Colorado tick fever virus
uccgccuuuggugaagga

SEQ ID NO: 1189390 - RNA, 13 nt, Colorado tick fever virus
uccauuggcgcaa

SEQ ID NO: 1189391 - RNA, 21 nt, Colorado tick fever virus
gcaggcuuucgugaaggagcu

SEQ ID NO: 1189392 - RNA, 17 nt, Colorado tick fever virus
guagucgcugaggaccu

SEQ ID NO: 1189393 - RNA, 20 nt, Colorado tick fever virus
agcgggguuguuuaucaggu

SEQ ID NO: 1189394 - RNA, 21 nt, Colorado tick fever virus
cgcagugugugacgagugggu

SEQ ID NO: 1189395 - RNA, 17 nt, Colorado tick fever virus
ggacggguaauugcagu

SEQ ID NO: 1189396 - RNA, 11 nt, Colorado tick fever virus
caauugcaguc

SEQ ID NO: 1189397 - RNA, 13 nt, Colorado tick fever virus
ccacgccauacac

SEQ ID NO: 1189398 - RNA, 23 nt, Colorado tick fever virus
ugacacacccucauauagggaau

SEQ ID NO: 1189399 - RNA, 16 nt, Colorado tick fever virus
gaucucccuugcaguc

SEQ ID NO: 1189400 - RNA, 17 nt, Colorado tick fever virus
ggugggauuggugaccg

SEQ ID NO: 1189401 - RNA, 16 nt, Colorado tick fever virus
ugaaugggcuggagaa

SEQ ID NO: 1189402 - RNA, 13 nt, Colorado tick fever virus
aucgcuuugcagu

SEQ ID NO: 1189403 - RNA, 17 nt, Colorado tick fever virus
cugcuugcuuaaaggug

SEQ ID NO: 1189404 - RNA, 13 nt, Colorado tick fever virus
ugaggaccucgcc

SEQ ID NO: 1189405 - RNA, 14 nt, Colorado tick fever virus
ggcuauggugucuu

SEQ ID NO: 1189406 - RNA, 15 nt, Colorado tick fever virus
gugacgggcagggua

SEQ ID NO: 1189407 - RNA, 19 nt, Colorado tick fever virus
gcugaucucccuugcaguc

SEQ ID NO: 1189408 - RNA, 17 nt, Colorado tick fever virus
gcugaucucccuugcag

SEQ ID NO: 1189409 - RNA, 23 nt, Colorado tick fever virus
gauauuuucuaagacugcuugcu

SEQ ID NO: 1189410 - RNA, 13 nt, Colorado tick fever virus
cuugaugugaaga

SEQ ID NO: 1189411 - RNA, 16 nt, Colorado tick fever virus
gacguccuagcaucau

SEQ ID NO: 1189412 - RNA, 23 nt, Colorado tick fever virus
ugacgggcaggguagucgcugag

SEQ ID NO: 1189413 - RNA, 18 nt, Colorado tick fever virus
aaugaugacguccuagca

SEQ ID NO: 1189414 - RNA, 21 nt, Colorado tick fever virus
ugcauucuugaugugaagaca

SEQ ID NO: 1189415 - RNA, 13 nt, Colorado tick fever virus
ccagggugcauuc

SEQ ID NO: 1189416 - RNA, 18 nt, Colorado tick fever virus
auucagcagcagaggcgc

SEQ ID NO: 1189417 - RNA, 13 nt, Colorado tick fever virus
guaugaggcucuu

SEQ ID NO: 1189418 - RNA, 22 nt, Colorado tick fever virus
ggcaggguagucgcugaggacc

SEQ ID NO: 1189419 - RNA, 18 nt, Colorado tick fever virus
caaagacggcugcuggcu

SEQ ID NO: 1189420 - RNA, 15 nt, Colorado tick fever virus
ucauucccagggugc

SEQ ID NO: 1189421 - RNA, 17 nt, Colorado tick fever virus
uaugugccagaggaggu

SEQ ID NO: 1189422 - RNA, 14 nt, Colorado tick fever virus
gggaauuugcaguc

SEQ ID NO: 1189423 - RNA, 14 nt, Colorado tick fever virus
acacaauugcaguc

SEQ ID NO: 1189424 - RNA, 18 nt, Colorado tick fever virus
cuugcuuaaaggugugaa

SEQ ID NO: 1189425 - RNA, 15 nt, Colorado tick fever virus
acggguaauugcagu

SEQ ID NO: 1189426 - RNA, 23 nt, Colorado tick fever virus
aggaugcugaucucccuugcagu

SEQ ID NO: 1189427 - RNA, 14 nt, Colorado tick fever virus
agaacgguugcagu

SEQ ID NO: 1189428 - RNA, 22 nt, Colorado tick fever virus
aguuaggcggugcuuuuacgau

SEQ ID NO: 1189429 - RNA, 20 nt, Colorado tick fever virus
uguguucggaugcaugcagu

SEQ ID NO: 1189430 - RNA, 19 nt, Colorado tick fever virus
cgggacggguaauugcagu

SEQ ID NO: 1189431 - RNA, 17 nt, Colorado tick fever virus
ggcgggcuuuuugcgug

SEQ ID NO: 1189432 - RNA, 19 nt, Colorado tick fever virus
aggguagucgcugaggacc

SEQ ID NO: 1189433 - RNA, 20 nt, Colorado tick fever virus
ugaaaauggcguaguaguga

SEQ ID NO: 1189434 - RNA, 18 nt, Colorado tick fever virus
cuccaucgcuuugcaguc

SEQ ID NO: 1189435 - RNA, 21 nt, Colorado tick fever virus
ggagcuucagcggcugcggcu

SEQ ID NO: 1189436 - RNA, 20 nt, Colorado tick fever virus
gugcuuuuuaugggugucug

SEQ ID NO: 1189437 - RNA, 22 nt, Colorado tick fever virus
ucugacgcagggguucagucug

SEQ ID NO: 1189438 - RNA, 11 nt, Colorado tick fever virus
cuaagacugcu

SEQ ID NO: 1189439 - RNA, 13 nt, Colorado tick fever virus
ucggagggugagg

SEQ ID NO: 1189440 - RNA, 14 nt, Colorado tick fever virus
ggguaauugcaguc

SEQ ID NO: 1189441 - RNA, 15 nt, Colorado tick fever virus
gcgagugcgggagcu

SEQ ID NO: 1189442 - RNA, 19 nt, Colorado tick fever virus
gugaggagggcagauggca

SEQ ID NO: 1189443 - RNA, 15 nt, Colorado tick fever virus
cugaucucccuugca

SEQ ID NO: 1189444 - RNA, 17 nt, Colorado tick fever virus
ugacauucauucccagg

SEQ ID NO: 1189445 - RNA, 14 nt, Colorado tick fever virus
uucggaugcaugca

SEQ ID NO: 1189446 - RNA, 12 nt, Colorado tick fever virus
gacggcugcugg

SEQ ID NO: 1189447 - RNA, 23 nt, Colorado tick fever virus
cucccgggacggguaauugcagu

SEQ ID NO: 1189448 - RNA, 20 nt, Colorado tick fever virus
cuugaugugaagacaaugca

SEQ ID NO: 1189449 - RNA, 18 nt, Colorado tick fever virus
ccagacguaugaggcucu

SEQ ID NO: 1189450 - RNA, 18 nt, Colorado tick fever virus
auagggaauccuugcagu

SEQ ID NO: 1189451 - RNA, 17 nt, Colorado tick fever virus
gggguucagucuguguu

SEQ ID NO: 1189452 - RNA, 23 nt, Colorado tick fever virus
auuggugaccggugcaggaugcu

SEQ ID NO: 1189453 - RNA, 13 nt, Colorado tick fever virus
ugagaguugcagu

SEQ ID NO: 1189454 - RNA, 17 nt, Colorado tick fever virus
gaacgacgcgagugagg

SEQ ID NO: 1189455 - RNA, 23 nt, Colorado tick fever virus
auuuucuaagacugcuugcuuaa

SEQ ID NO: 1189456 - RNA, 17 nt, Colorado tick fever virus
guuggccuggugagcug

SEQ ID NO: 1189457 - RNA, 16 nt, Colorado tick fever virus
gggugagguacuggca

SEQ ID NO: 1189458 - RNA, 16 nt, Colorado tick fever virus
uucggaugcaugcagu

SEQ ID NO: 1189459 - RNA, 18 nt, Colorado tick fever virus
ucuuaugugccagaggag

SEQ ID NO: 1189460 - RNA, 16 nt, Colorado tick fever virus
uagaacgguugcaguc

SEQ ID NO: 1189461 - RNA, 11 nt, Colorado tick fever virus
uccuugcaguc

SEQ ID NO: 1189462 - RNA, 18 nt, Colorado tick fever virus
aaguaugauugagucuau

SEQ ID NO: 1189463 - RNA, 18 nt, Colorado tick fever virus
gaccuaagauaugcucag

SEQ ID NO: 1189464 - RNA, 22 nt, Colorado tick fever virus
guagucuccgcgaguugcaguc

SEQ ID NO: 1189465 - RNA, 22 nt, Colorado tick fever virus
guggaugaguggggcugcgcag

SEQ ID NO: 1189466 - RNA, 13 nt, Colorado tick fever virus
auggggcugacca

SEQ ID NO: 1189467 - RNA, 23 nt, Colorado tick fever virus
cguagucuccgcgaguugcaguc

SEQ ID NO: 1189468 - RNA, 17 nt, Colorado tick fever virus
aggugugaaaaucaauu

SEQ ID NO: 1189469 - RNA, 20 nt, Colorado tick fever virus
agugacccuggagccgugcc

SEQ ID NO: 1189470 - RNA, 18 nt, Colorado tick fever virus
cgcagggguucagucugu

SEQ ID NO: 1189471 - RNA, 21 nt, Colorado tick fever virus
cugucaaagacggcugcuggc

SEQ ID NO: 1189472 - RNA, 20 nt, Colorado tick fever virus
gugcauucuugaugugaaga

SEQ ID NO: 1189473 - RNA, 23 nt, Colorado tick fever virus
gaaguaugauugagucuaugggg

SEQ ID NO: 1189474 - RNA, 23 nt, Colorado tick fever virus
acacgauugagcacaaaauccau

SEQ ID NO: 1189475 - RNA, 21 nt, Colorado tick fever virus
gcugaccagacguaugaggcu

SEQ ID NO: 1189476 - RNA, 17 nt, Colorado tick fever virus
aauuuguuaacaaugag

SEQ ID NO: 1189477 - RNA, 24 nt, Colorado tick fever virus
gauauuuucuaagacugcuugcuu

SEQ ID NO: 1189478 - RNA, 18 nt, Colorado tick fever virus
uuaaaggugugaaaauca

SEQ ID NO: 1189479 - RNA, 13 nt, Colorado tick fever virus
cucccuugcaguc

SEQ ID NO: 1189480 - RNA, 16 nt, Colorado tick fever virus
aggagguuguugcagg

SEQ ID NO: 1189481 - RNA, 21 nt, Colorado tick fever virus
gugacauucauucccagggug

SEQ ID NO: 1189482 - RNA, 15 nt, Colorado tick fever virus
ggggaauuugcaguc

SEQ ID NO: 1189483 - RNA, 17 nt, Colorado tick fever virus
cuaagacugcuugcuua

SEQ ID NO: 1189484 - RNA, 19 nt, Colorado tick fever virus
gcuuuuuaugggugucuga

SEQ ID NO: 1189485 - RNA, 18 nt, Colorado tick fever virus
ugaggagggcagauggca

SEQ ID NO: 1189486 - RNA, 22 nt, Colorado tick fever virus
agggugcauucuugaugugaag

SEQ ID NO: 1189487 - RNA, 14 nt, Colorado tick fever virus
uaaucugacgcagg

SEQ ID NO: 1189488 - RNA, 20 nt, Colorado tick fever virus
gcuugcuuaaaggugugaaa

SEQ ID NO: 1189489 - RNA, 13 nt, Colorado tick fever virus
agaggcgcgugag

SEQ ID NO: 1189490 - RNA, 24 nt, Colorado tick fever virus
cgcguagucuccgcgaguugcagu

SEQ ID NO: 1189491 - RNA, 18 nt, Colorado tick fever virus
gcaggguagucgcugagg

SEQ ID NO: 1189492 - RNA, 12 nt, Colorado tick fever virus
guacuggcagau

SEQ ID NO: 1189493 - RNA, 14 nt, Colorado tick fever virus
agggugcauucuug

SEQ ID NO: 1189494 - RNA, 14 nt, Colorado tick fever virus
aguccaaacuccaa

SEQ ID NO: 1189495 - RNA, 12 nt, Colorado tick fever virus
cagggguucagu

SEQ ID NO: 1189496 - RNA, 14 nt, Colorado tick fever virus
uagucgcugaggac

SEQ ID NO: 1189497 - RNA, 14 nt, Colorado tick fever virus
cagguggaggcugc

SEQ ID NO: 1189498 - RNA, 23 nt, Colorado tick fever virus
caggaugcugaucucccuugcag

SEQ ID NO: 1189499 - RNA, 14 nt, Colorado tick fever virus
gacgcagggguuca

SEQ ID NO: 1189500 - RNA, 18 nt, Colorado tick fever virus
uguucggaugcaugcagu

SEQ ID NO: 1189501 - RNA, 14 nt, Colorado tick fever virus
augacguccuagca

SEQ ID NO: 1189502 - RNA, 11 nt, Colorado tick fever virus
uucagcagcag

SEQ ID NO: 1189503 - RNA, 18 nt, Colorado tick fever virus
gguagaacgguugcaguc

SEQ ID NO: 1189504 - RNA, 12 nt, Colorado tick fever virus
acaauugcaguc

SEQ ID NO: 1189505 - RNA, 15 nt, Colorado tick fever virus
ccggugcaggaugcu

SEQ ID NO: 1189506 - RNA, 13 nt, Colorado tick fever virus
cggagggugaggu

SEQ ID NO: 1189507 - RNA, 16 nt, Colorado tick fever virus
ugaugacguccuagca

SEQ ID NO: 1189508 - RNA, 13 nt, Colorado tick fever virus
uagucgcugagga

SEQ ID NO: 1189509 - RNA, 14 nt, Colorado tick fever virus
gaggagggcagaug

SEQ ID NO: 1189510 - RNA, 20 nt, Colorado tick fever virus
gugcaggcuuucgugaagga

SEQ ID NO: 1189511 - RNA, 17 nt, Colorado tick fever virus
ucuccgcgaguugcagu

SEQ ID NO: 1189512 - RNA, 21 nt, Colorado tick fever virus
uguuggcgugcgcgacgcauc

SEQ ID NO: 1189513 - RNA, 16 nt, Colorado tick fever virus
uaagacugcuugcuua

SEQ ID NO: 1189514 - RNA, 14 nt, Colorado tick fever virus
gugcaggaugcuga

SEQ ID NO: 1189515 - RNA, 18 nt, Colorado tick fever virus
agcaucauucucccggga

SEQ ID NO: 1189516 - RNA, 17 nt, Colorado tick fever virus
agggaauccuugcaguc

SEQ ID NO: 1189517 - RNA, 16 nt, Colorado tick fever virus
caucauucucccggga

SEQ ID NO: 1189518 - RNA, 20 nt, Colorado tick fever virus
agcagaggcgcgugagcagg

SEQ ID NO: 1189519 - RNA, 16 nt, Colorado tick fever virus
aucagguggaggcugc

SEQ ID NO: 1189520 - RNA, 17 nt, Colorado tick fever virus
cuccgcgaguugcaguc

SEQ ID NO: 1189521 - RNA, 14 nt, Colorado tick fever virus
augggcuggagaac

SEQ ID NO: 1189522 - RNA, 14 nt, Colorado tick fever virus
gcugaucucccuug

SEQ ID NO: 1189523 - RNA, 18 nt, Colorado tick fever virus
gggcgaaacuacuccauu

SEQ ID NO: 1189524 - RNA, 19 nt, Colorado tick fever virus
aaggugugaaaaucaauug

SEQ ID NO: 1189525 - RNA, 20 nt, Colorado tick fever virus
uugggucacuauggggcuga

SEQ ID NO: 1189526 - RNA, 13 nt, Colorado tick fever virus
gguggcugugcac

SEQ ID NO: 1189527 - RNA, 21 nt, Colorado tick fever virus
gccggcuuacggaaugaugac

SEQ ID NO: 1189528 - RNA, 17 nt, Colorado tick fever virus
uggugaaggaugcaagu

SEQ ID NO: 1189529 - RNA, 22 nt, Colorado tick fever virus
auuggugaccggugcaggaugc

SEQ ID NO: 1189530 - RNA, 23 nt, Colorado tick fever virus
ugcaaguggucgaccacgaguga

SEQ ID NO: 1189531 - RNA, 15 nt, Colorado tick fever virus
caucgcuuugcaguc

SEQ ID NO: 1189532 - RNA, 14 nt, Colorado tick fever virus
gaaguaugauugag

SEQ ID NO: 1189533 - RNA, 16 nt, Colorado tick fever virus
cauauagggaauccuu

SEQ ID NO: 1189534 - RNA, 20 nt, Colorado tick fever virus
gccuggauacaaaugcagug

SEQ ID NO: 1189535 - RNA, 14 nt, Colorado tick fever virus
ugcugccugaauug

SEQ ID NO: 1189536 - RNA, 23 nt, Colorado tick fever virus
ucccgggacggguaauugcaguc

SEQ ID NO: 1189537 - RNA, 18 nt, Colorado tick fever virus
gggauuggugaccggugc

SEQ ID NO: 1189538 - RNA, 15 nt, Colorado tick fever virus
ucagucuguguucgg

SEQ ID NO: 1189539 - RNA, 17 nt, Colorado tick fever virus
gugaccggugcaggaug

SEQ ID NO: 1189540 - RNA, 16 nt, Colorado tick fever virus
gcaucauucucccggg

SEQ ID NO: 1189541 - RNA, 19 nt, Colorado tick fever virus
gggacggguaauugcaguc

SEQ ID NO: 1189542 - RNA, 13 nt, Colorado tick fever virus
augugaagacaau

SEQ ID NO: 1189543 - RNA, 15 nt, Colorado tick fever virus
acacagucugucaaa

SEQ ID NO: 1189544 - RNA, 18 nt, Colorado tick fever virus
gugacauucauucccagg

SEQ ID NO: 1189545 - RNA, 21 nt, Colorado tick fever virus
gcaucuccguuaacugagagc

SEQ ID NO: 1189546 - RNA, 18 nt, Colorado tick fever virus
aggcgggcuuuuugcgug

SEQ ID NO: 1189547 - RNA, 20 nt, Colorado tick fever virus
accggugcaggaugcugauc

SEQ ID NO: 1189548 - RNA, 13 nt, Colorado tick fever virus
gcacggggaauuu

SEQ ID NO: 1189549 - RNA, 16 nt, Colorado tick fever virus
ggggcugcgcagugug

SEQ ID NO: 1189550 - RNA, 20 nt, Colorado tick fever virus
gugcaccacgccauacacaa

SEQ ID NO: 1189551 - RNA, 20 nt, Colorado tick fever virus
aucggugggagugcucaagu

SEQ ID NO: 1189552 - RNA, 16 nt, Colorado tick fever virus
ggaugcugaucucccu

SEQ ID NO: 1189553 - RNA, 20 nt, Colorado tick fever virus
gggaaaaaucggugggagug

SEQ ID NO: 1189554 - RNA, 13 nt, Colorado tick fever virus
cuagcaucauucu

SEQ ID NO: 1189555 - RNA, 18 nt, Colorado tick fever virus
cgguguaaucugacgcag

SEQ ID NO: 1189556 - RNA, 15 nt, Colorado tick fever virus
cggggcuaaggccug

SEQ ID NO: 1189557 - RNA, 18 nt, Colorado tick fever virus
cugaucucccuugcaguc

SEQ ID NO: 1189558 - RNA, 16 nt, Colorado tick fever virus
cggcugcuggcugucc

SEQ ID NO: 1189559 - RNA, 16 nt, Colorado tick fever virus
guggggcugcgcagug

SEQ ID NO: 1189560 - RNA, 21 nt, Colorado tick fever virus
ggugcauucuugaugugaaga

SEQ ID NO: 1189561 - RNA, 20 nt, Colorado tick fever virus
aaugaugacguccuagcauc

SEQ ID NO: 1189562 - RNA, 14 nt, Colorado tick fever virus
auuuucuaagacug

SEQ ID NO: 1189563 - RNA, 22 nt, Colorado tick fever virus
cgcgcacggggaauuugcaguc

SEQ ID NO: 1189564 - RNA, 17 nt, Colorado tick fever virus
cuguguucggaugcaug

SEQ ID NO: 1189565 - RNA, 15 nt, Colorado tick fever virus
uccuagcaucauucu

SEQ ID NO: 1189566 - RNA, 12 nt, Colorado tick fever virus
ggguaauugcag

SEQ ID NO: 1189567 - RNA, 17 nt, Colorado tick fever virus
aggcuuucgugaaggag

SEQ ID NO: 1189568 - RNA, 17 nt, Colorado tick fever virus
gacggguaauugcaguc

SEQ ID NO: 1189569 - RNA, 19 nt, Colorado tick fever virus
cagguggaggcugcucagu

SEQ ID NO: 1189570 - RNA, 15 nt, Colorado tick fever virus
uagaacgguugcagu

SEQ ID NO: 1189571 - RNA, 19 nt, Colorado tick fever virus
ucugacgcagggguucagu

SEQ ID NO: 1189572 - RNA, 19 nt, Colorado tick fever virus
cagaggagguuguugcagg

SEQ ID NO: 1189573 - RNA, 14 nt, Colorado tick fever virus
ccagaggagguugu

SEQ ID NO: 1189574 - RNA, 12 nt, Colorado tick fever virus
aauggugucuau

SEQ ID NO: 1189575 - RNA, 23 nt, Colorado tick fever virus
uugcuuaaaggugugaaaaucaa

SEQ ID NO: 1189576 - RNA, 18 nt, Colorado tick fever virus
gcucaagugauuguugug

SEQ ID NO: 1189577 - RNA, 12 nt, Colorado tick fever virus
ccgcgaguugca

SEQ ID NO: 1189578 - RNA, 22 nt, Colorado tick fever virus
gugaaaaucaauugucggugua

SEQ ID NO: 1189579 - RNA, 18 nt, Colorado tick fever virus
ccuggauacaaaugcagu

SEQ ID NO: 1189580 - RNA, 13 nt, Colorado tick fever virus
ucauucucccggg

SEQ ID NO: 1189581 - RNA, 21 nt, Colorado tick fever virus
gaggagguuguugcaggcuuu

SEQ ID NO: 1189582 - RNA, 15 nt, Colorado tick fever virus
cagggugcauucuug

SEQ ID NO: 1189583 - RNA, 19 nt, Colorado tick fever virus
uuaaaggugugaaaaucaa

SEQ ID NO: 1189584 - RNA, 19 nt, Colorado tick fever virus
auauagggaauccuugcag

SEQ ID NO: 1189585 - RNA, 18 nt, Colorado tick fever virus
gacugcuugcuuaaaggu

SEQ ID NO: 1189586 - RNA, 21 nt, Colorado tick fever virus
gugggagugcucaagugauug

SEQ ID NO: 1189587 - RNA, 23 nt, Colorado tick fever virus
ccaaacuccaaagguugcugccu

SEQ ID NO: 1189588 - RNA, 18 nt, Colorado tick fever virus
cugcauaguauccacaug

SEQ ID NO: 1189589 - RNA, 15 nt, Colorado tick fever virus
uguguaucauuuuga

SEQ ID NO: 1189590 - RNA, 17 nt, Colorado tick fever virus
ggguugagguggcugug

SEQ ID NO: 1189591 - RNA, 19 nt, Colorado tick fever virus
aggaugcugaucucccuug

SEQ ID NO: 1189592 - RNA, 13 nt, Colorado tick fever virus
cucguaauccuca

SEQ ID NO: 1189593 - RNA, 22 nt, Colorado tick fever virus
ucauucccagggugcauucuug

SEQ ID NO: 1189594 - RNA, 22 nt, Colorado tick fever virus
ccacgccauacacaauugcagu

SEQ ID NO: 1189595 - RNA, 21 nt, Colorado tick fever virus
gcgcacggggaauuugcaguc

SEQ ID NO: 1189596 - RNA, 16 nt, Colorado tick fever virus
cuaagauaugcucagu

SEQ ID NO: 1189597 - RNA, 22 nt, Colorado tick fever virus
caggguagucgcugaggaccuc

SEQ ID NO: 1189598 - RNA, 18 nt, Colorado tick fever virus
augugacauucauuccca

SEQ ID NO: 1189599 - RNA, 20 nt, Colorado tick fever virus
gggguauugauguuggcgug

SEQ ID NO: 1189600 - RNA, 12 nt, Colorado tick fever virus
cgcaucuucaau

SEQ ID NO: 1189601 - RNA, 14 nt, Colorado tick fever virus
auucauucccaggg

SEQ ID NO: 1189602 - RNA, 19 nt, Colorado tick fever virus
cuacccccaauggugucua

SEQ ID NO: 1189603 - RNA, 19 nt, Colorado tick fever virus
agucuguguucggaugcau

SEQ ID NO: 1189604 - RNA, 13 nt, Colorado tick fever virus
agacggcugcugg

SEQ ID NO: 1189605 - RNA, 21 nt, Colorado tick fever virus
gcugugcacacgauugagcac

SEQ ID NO: 1189606 - RNA, 15 nt, Colorado tick fever virus
gagagugcaggcuuu

SEQ ID NO: 1189607 - RNA, 15 nt, Colorado tick fever virus
uuguuaacaaugagu

SEQ ID NO: 1189608 - RNA, 17 nt, Colorado tick fever virus
cauacacaauugcaguc

SEQ ID NO: 1189609 - RNA, 20 nt, Colorado tick fever virus
cagcagaggcgcgugagcag

SEQ ID NO: 1189610 - RNA, 20 nt, Colorado tick fever virus
uggauucggaaaaacauauu

SEQ ID NO: 1189611 - RNA, 15 nt, Colorado tick fever virus
agggaauccuugcag

SEQ ID NO: 1189612 - RNA, 13 nt, Colorado tick fever virus
cauccgugcucgu

SEQ ID NO: 1189613 - RNA, 22 nt, Colorado tick fever virus
cugacgcagggguucagucugu

SEQ ID NO: 1189614 - RNA, 17 nt, Colorado tick fever virus
agguggaggcugcucag

SEQ ID NO: 1189615 - RNA, 13 nt, Colorado tick fever virus
gagguacuggcag

SEQ ID NO: 1189616 - RNA, 15 nt, Colorado tick fever virus
agaacgguugcaguc

SEQ ID NO: 1189617 - RNA, 18 nt, Colorado tick fever virus
aucugacgcagggguuca

SEQ ID NO: 1189618 - RNA, 17 nt, Colorado tick fever virus
uugcuuaaaggugugaa

SEQ ID NO: 1189619 - RNA, 16 nt, Colorado tick fever virus
gugaccggugcaggau

SEQ ID NO: 1189620 - RNA, 23 nt, Colorado tick fever virus
uucuaagacugcuugcuuaaagg

SEQ ID NO: 1189621 - RNA, 17 nt, Colorado tick fever virus
ugaccggugcaggaugc

SEQ ID NO: 1189622 - RNA, 12 nt, Colorado tick fever virus
cccagggugcau

SEQ ID NO: 1189623 - RNA, 20 nt, Colorado tick fever virus
gcaggaugcugaucucccuu

SEQ ID NO: 1189624 - RNA, 20 nt, Colorado tick fever virus
cucuucgcgucaguuccaug

SEQ ID NO: 1189625 - RNA, 15 nt, Colorado tick fever virus
cggguaauugcaguc

SEQ ID NO: 1189626 - RNA, 21 nt, Colorado tick fever virus
ucaaagacggcugcuggcugu

SEQ ID NO: 1189627 - RNA, 22 nt, Colorado tick fever virus
augugacauucauucccagggu

SEQ ID NO: 1189628 - RNA, 16 nt, Colorado tick fever virus
ccgggacggguaauug

SEQ ID NO: 1189629 - RNA, 15 nt, Colorado tick fever virus
acugagagcgggguu

SEQ ID NO: 1189630 - RNA, 14 nt, Colorado tick fever virus
uugaugugaagaca

SEQ ID NO: 1189631 - RNA, 15 nt, Colorado tick fever virus
ugcucguaauccuca

SEQ ID NO: 1189632 - RNA, 16 nt, Colorado tick fever virus
acauucauucccaggg

SEQ ID NO: 1189633 - RNA, 11 nt, Colorado tick fever virus
agugaggaggg

SEQ ID NO: 1189634 - RNA, 16 nt, Colorado tick fever virus
gcgggcuuuuugcgug

SEQ ID NO: 1189635 - RNA, 10 nt, Colorado tick fever virus
accggugcag

SEQ ID NO: 1189636 - RNA, 19 nt, Colorado tick fever virus
gucaaagacggcugcuggc

SEQ ID NO: 1189637 - RNA, 16 nt, Colorado tick fever virus
gcgcacggggaauuug

SEQ ID NO: 1189638 - RNA, 21 nt, Colorado tick fever virus
auuggugaccggugcaggaug

SEQ ID NO: 1189639 - RNA, 17 nt, Colorado tick fever virus
aggguagucgcugagga

SEQ ID NO: 1189640 - RNA, 19 nt, Colorado tick fever virus
ugaguggggcugcgcagug

SEQ ID NO: 1189641 - RNA, 22 nt, Colorado tick fever virus
acugcuugcuuaaaggugugaa

SEQ ID NO: 1189642 - RNA, 21 nt, Colorado tick fever virus
cucaaugcucguaauccucag

SEQ ID NO: 1189643 - RNA, 14 nt, Colorado tick fever virus
gugaccggugcagg

SEQ ID NO: 1189644 - RNA, 21 nt, Colorado tick fever virus
ggauauuuucuaagacugcuu

SEQ ID NO: 1189645 - RNA, 13 nt, Colorado tick fever virus
gcuuaaaggugug

SEQ ID NO: 1189646 - RNA, 22 nt, Colorado tick fever virus
cguagucuccgcgaguugcagu

SEQ ID NO: 1189647 - RNA, 18 nt, Colorado tick fever virus
gucuccgcgaguugcagu

SEQ ID NO: 1189648 - RNA, 15 nt, Colorado tick fever virus
uucuaagacugcuug

SEQ ID NO: 1189649 - RNA, 20 nt, Colorado tick fever virus
ugcugaucucccuugcaguc

SEQ ID NO: 1189650 - RNA, 23 nt, Colorado tick fever virus
auguucauccgugcucgugaagu

SEQ ID NO: 1189651 - RNA, 17 nt, Colorado tick fever virus
ucaaagacggcugcugg

SEQ ID NO: 1189652 - RNA, 14 nt, Colorado tick fever virus
gacggguaauugca

SEQ ID NO: 1189653 - RNA, 13 nt, Colorado tick fever virus
accaggcgggcuu

SEQ ID NO: 1189654 - RNA, 14 nt, Colorado tick fever virus
gaagacaaugcagu

SEQ ID NO: 1189655 - RNA, 17 nt, Colorado tick fever virus
acggggaauuugcaguc

SEQ ID NO: 1189656 - RNA, 21 nt, Colorado tick fever virus
augaugacguccuagcaucau

SEQ ID NO: 1189657 - RNA, 18 nt, Colorado tick fever virus
acgcagggguucagucug

SEQ ID NO: 1189658 - RNA, 14 nt, Colorado tick fever virus
gaauccuugcaguc

SEQ ID NO: 1189659 - RNA, 13 nt, Colorado tick fever virus
gugccagaggagg

SEQ ID NO: 1189660 - RNA, 14 nt, Colorado tick fever virus
cgugacgggcaggg

SEQ ID NO: 1189661 - RNA, 17 nt, Colorado tick fever virus
uggggcugcgcagugug

SEQ ID NO: 1189662 - RNA, 16 nt, Colorado tick fever virus
uggauacaaaugcagu

SEQ ID NO: 1189663 - RNA, 21 nt, Colorado tick fever virus
uccuagcaucauucucccggg

SEQ ID NO: 1189664 - RNA, 13 nt, Colorado tick fever virus
ugacgagugggua

SEQ ID NO: 1189665 - RNA, 22 nt, Colorado tick fever virus
cucgugaagucggcuggcgcaa

SEQ ID NO: 1189666 - RNA, 15 nt, Colorado tick fever virus
uccaucgcuuugcag

SEQ ID NO: 1189667 - RNA, 17 nt, Colorado tick fever virus
auucccagggugcauuc

SEQ ID NO: 1189668 - RNA, 15 nt, Colorado tick fever virus
ggaauccuugcaguc

SEQ ID NO: 1189669 - RNA, 17 nt, Colorado tick fever virus
uggagaaccaucccuac

SEQ ID NO: 1189670 - RNA, 19 nt, Colorado tick fever virus
augcgugacgggcagggua

SEQ ID NO: 1189671 - RNA, 22 nt, Colorado tick fever virus
ggggguauugauguuggcgugc

SEQ ID NO: 1189672 - RNA, 22 nt, Colorado tick fever virus
uguguaucauuuugauccuacc

SEQ ID NO: 1189673 - RNA, 13 nt, Colorado tick fever virus
cgcugaggaccuc

SEQ ID NO: 1189674 - RNA, 21 nt, Colorado tick fever virus
auauagggaauccuugcaguc

SEQ ID NO: 1189675 - RNA, 15 nt, Colorado tick fever virus
gguggaggcugcuca

SEQ ID NO: 1189676 - RNA, 14 nt, Colorado tick fever virus
guacuggcagaugg

SEQ ID NO: 1189677 - RNA, 16 nt, Colorado tick fever virus
gaacgacgcgagugag

SEQ ID NO: 1189678 - RNA, 18 nt, Colorado tick fever virus
ucagguggaggcugcuca

SEQ ID NO: 1189679 - RNA, 20 nt, Colorado tick fever virus
gauuggugaccggugcagga

SEQ ID NO: 1189680 - RNA, 13 nt, Colorado tick fever virus
cccaauggugucu

SEQ ID NO: 1189681 - RNA, 18 nt, Colorado tick fever virus
agggugagguacuggcag

SEQ ID NO: 1189682 - RNA, 20 nt, Colorado tick fever virus
guggaugaguggggcugcgc

SEQ ID NO: 1189683 - RNA, 19 nt, Colorado tick fever virus
ucaauugucgguguaaucu

SEQ ID NO: 1189684 - RNA, 23 nt, Colorado tick fever virus
cgggcaggguagucgcugaggac

SEQ ID NO: 1189685 - RNA, 19 nt, Colorado tick fever virus
ggguagaacgguugcaguc

SEQ ID NO: 1189686 - RNA, 14 nt, Colorado tick fever virus
cacgauugagcaca

SEQ ID NO: 1189687 - RNA, 18 nt, Colorado tick fever virus
caauugucgguguaaucu

SEQ ID NO: 1189688 - RNA, 16 nt, Colorado tick fever virus
agguggaggcugcuca

SEQ ID NO: 1189689 - RNA, 18 nt, Colorado tick fever virus
gguugagguggcugugca

SEQ ID NO: 1189690 - RNA, 14 nt, Colorado tick fever virus
ugaucucccuugca

SEQ ID NO: 1189691 - RNA, 19 nt, Colorado tick fever virus
uaaggccuggauacaaaug

SEQ ID NO: 1189692 - RNA, 22 nt, Human
cugagagaggccauucuuuccc

SEQ ID NO: 1189693 - RNA, 21 nt, Human
cugagagaggccauucuuucc

SEQ ID NO: 1189694 - RNA, 14 nt, Human
cugagagaggccau

SEQ ID NO: 1189695 - RNA, 13 nt, Human
cugagagaggcca

SEQ ID NO: 1189696 - RNA, 12 nt, Human
cugagaggccac

SEQ ID NO: 1189697 - RNA, 18 nt, Human
cucaugugacucuuucca

SEQ ID NO: 1189698 - RNA, 15 nt, Human
cucgugucuggcaca

SEQ ID NO: 1189699 - RNA, 21 nt, Human
cuaauucuuugaccuguuggg

SEQ ID NO: 1189700 - RNA, 22 nt, Human
cuaauucuuugaccuguuggga

SEQ ID NO: 1189701 - RNA, 17 nt, Human
ccauccuacccccugug

SEQ ID NO: 1189702 - RNA, 19 nt, Human
cacuggggcaggggccggg

SEQ ID NO: 1189703 - RNA, 15 nt, Human
cacuggggcaggggc

SEQ ID NO: 1189704 - RNA, 13 nt, Human
cacuggggcaggg

SEQ ID NO: 1189705 - RNA, 18 nt, Human
caacaccucuuggggagu

SEQ ID NO: 1189706 - RNA, 19 nt, Human
auucuuugaccuguuggga

SEQ ID NO: 1189707 - RNA, 17 nt, Human
auucauggccuggggga

SEQ ID NO: 1189708 - RNA, 17 nt, Human
cagaggguguccugcac

SEQ ID NO: 1189709 - RNA, 23 nt, Human
cagaucauuaucagccugugcca

SEQ ID NO: 1189710 - RNA, 17 nt, Human
cagucugagagaggcca

SEQ ID NO: 1189711 - RNA, 16 nt, Human
cagggcugaggccucu

SEQ ID NO: 1189712 - RNA, 18 nt, Human
cagggcugaggccucuca

SEQ ID NO: 1189713 - RNA, 23 nt, Human
cuggcccuaugcuuccggccucc

SEQ ID NO: 1189714 - RNA, 14 nt, Human
cuuuugucccagaa

SEQ ID NO: 1189715 - RNA, 19 nt, Human
cuuccucuccugucucccu

SEQ ID NO: 1189716 - RNA, 15 nt, Human
cuuccucuccugucu

SEQ ID NO: 1189717 - RNA, 17 nt, Human
cuucuaccucuuggcug

SEQ ID NO: 1189718 - RNA, 22 nt, Human
gaggacaguauuuguggggagg

SEQ ID NO: 1189719 - RNA, 16 nt, Human
gagacgggcccuggug

SEQ ID NO: 1189720 - RNA, 13 nt, Human
gauggaaugaugg

SEQ ID NO: 1189721 - RNA, 15 nt, Human
gaucccaugagcucc

SEQ ID NO: 1189722 - RNA, 19 nt, Human
gaucccaacacugccagca

SEQ ID NO: 1189723 - RNA, 18 nt, Human
gaucccaacacugccagc

SEQ ID NO: 1189724 - RNA, 17 nt, Human
gaucccaacacugccag

SEQ ID NO: 1189725 - RNA, 21 nt, Human
gcauccagagucccugccugg

SEQ ID NO: 1189726 - RNA, 23 nt, Human
gcauccagagucccugccuggac

SEQ ID NO: 1189727 - RNA, 22 nt, Human
gcauccagagucccugccugga

SEQ ID NO: 1189728 - RNA, 17 nt, Human
gcaucggggagccggga

SEQ ID NO: 1189729 - RNA, 19 nt, Human
gccauucuuucccaacacc

SEQ ID NO: 1189730 - RNA, 21 nt, Human
gcucagaggguguccugcacc

SEQ ID NO: 1189731 - RNA, 19 nt, Human
gcucagaggguguccugca

SEQ ID NO: 1189732 - RNA, 18 nt, Human
gcucagaggguguccugc

SEQ ID NO: 1189733 - RNA, 18 nt, Human
gcuaggguggggagagac

SEQ ID NO: 1189734 - RNA, 17 nt, Human
gcuaggguggggagaga

SEQ ID NO: 1189735 - RNA, 13 nt, Human
gcggcugggagga

SEQ ID NO: 1189736 - RNA, 21 nt, Human
gcguggaacucgugucuggca

SEQ ID NO: 1189737 - RNA, 23 nt, Human
gcugggacaccccgacuuuuguu

SEQ ID NO: 1189738 - RNA, 20 nt, Human
gcugggaauaagugccagga

SEQ ID NO: 1189739 - RNA, 22 nt, Human
gcuuuuccucaaagggagagag

SEQ ID NO: 1189740 - RNA, 16 nt, Human
ggacaccuaggcuagg

SEQ ID NO: 1189741 - RNA, 19 nt, Human
ggacaguauuuguggggag

SEQ ID NO: 1189742 - RNA, 18 nt, Human
ggacaguauuugugggga

SEQ ID NO: 1189743 - RNA, 16 nt, Human
ggacaccccgacuuuu

SEQ ID NO: 1189744 - RNA, 11 nt, Human
ggaguguguaa

SEQ ID NO: 1189745 - RNA, 22 nt, Human
ggaguguguaauuuaaaauugu

SEQ ID NO: 1189746 - RNA, 14 nt, Human
ggagggggagaggg

SEQ ID NO: 1189747 - RNA, 12 nt, Human
ggcaggggccgg

SEQ ID NO: 1189748 - RNA, 14 nt, Human
ggcaggagggaggu

SEQ ID NO: 1189749 - RNA, 18 nt, Human
ggcauccagagucccugc

SEQ ID NO: 1189750 - RNA, 16 nt, Human
ggcauccagagucccu

SEQ ID NO: 1189751 - RNA, 22 nt, Human
ggcaucggggagccgggagccu

SEQ ID NO: 1189752 - RNA, 23 nt, Human
ggcaucggggagccgggagccug

SEQ ID NO: 1189753 - RNA, 22 nt, Human
gggggcagucugagagaggcca

SEQ ID NO: 1189754 - RNA, 21 nt, Human
gggucaucuguaccucugccu

SEQ ID NO: 1189755 - RNA, 18 nt, Human
gggucauucauggccugg

SEQ ID NO: 1189756 - RNA, 21 nt, Human
ggguguccugcaccggggccu

SEQ ID NO: 1189757 - RNA, 17 nt, Human
ggguguccugcaccggg

SEQ ID NO: 1189758 - RNA, 18 nt, Human
gguaggaacugcugggcu

SEQ ID NO: 1189759 - RNA, 21 nt, Human
gguggggagagacgggcccug

SEQ ID NO: 1189760 - RNA, 22 nt, Human
gguggggggggggcgcggcugg

SEQ ID NO: 1189761 - RNA, 22 nt, Human
gguuuguuuagaagaagugugu

SEQ ID NO: 1189762 - RNA, 15 nt, Human
guccaucagccucca

SEQ ID NO: 1189763 - RNA, 10 nt, Human
gugauguguc

SEQ ID NO: 1189764 - RNA, 15 nt, Human
uaaaauugugaugug

SEQ ID NO: 1189765 - RNA, 16 nt, Human
uaaaauugugaugugu

SEQ ID NO: 1189766 - RNA, 20 nt, Human
aagugugggucugugugugu

SEQ ID NO: 1189767 - RNA, 10 nt, Human
aagugugggu

SEQ ID NO: 1189768 - RNA, 17 nt, Human
aagugugggucugugug

SEQ ID NO: 1189769 - RNA, 18 nt, Human
aagugugggucugugugu

SEQ ID NO: 1189770 - RNA, 21 nt, Human
aagucacuggccaguggcugg

SEQ ID NO: 1189771 - RNA, 13 nt, Human
guguauguggggg

SEQ ID NO: 1189772 - RNA, 21 nt, Human
guguaugugggggucugugug

SEQ ID NO: 1189773 - RNA, 16 nt, Human
acaccucuuggggagu

SEQ ID NO: 1189774 - RNA, 12 nt, Human
uauguggaagug

SEQ ID NO: 1189775 - RNA, 16 nt, Human
uauguggaaguguggg

SEQ ID NO: 1189776 - RNA, 20 nt, Human
uauggggauagaugugugga

SEQ ID NO: 1189777 - RNA, 22 nt, Human
uaacuuaaaagaacauguauau

SEQ ID NO: 1189778 - RNA, 13 nt, Human
accgaggcaggga

SEQ ID NO: 1189779 - RNA, 16 nt, Human
ucauaaauuuaugguu

SEQ ID NO: 1189780 - RNA, 12 nt, Human
ucaguaugugga

SEQ ID NO: 1189781 - RNA, 14 nt, Human
ucaguauguggaag

SEQ ID NO: 1189782 - RNA, 16 nt, Human
ucaguauguggaagug

SEQ ID NO: 1189783 - RNA, 19 nt, Human
ucaugugacucuuuccaac

SEQ ID NO: 1189784 - RNA, 18 nt, Human
ucaugugacucuuuccaa

SEQ ID NO: 1189785 - RNA, 17 nt, Human
ucauguuuacagaggac

SEQ ID NO: 1189786 - RNA, 17 nt, Human
ucaugugacucuuucca

SEQ ID NO: 1189787 - RNA, 14 nt, Human
ucaugugacucuuu

SEQ ID NO: 1189788 - RNA, 17 nt, Human
accuaggcuaggguggg

SEQ ID NO: 1189789 - RNA, 12 nt, Human
accuaggcuagg

SEQ ID NO: 1189790 - RNA, 17 nt, Human
ucagauuugccuuauug

SEQ ID NO: 1189791 - RNA, 22 nt, Human
ucagauuugccuuauuggcagc

SEQ ID NO: 1189792 - RNA, 23 nt, Human
ucacagcaagucacuggccagug

SEQ ID NO: 1189793 - RNA, 19 nt, Human
uccugcaccggggccuggg

SEQ ID NO: 1189794 - RNA, 18 nt, Human
uccugcaccggggccugg

SEQ ID NO: 1189795 - RNA, 16 nt, Human
ucuaguucugccagga

SEQ ID NO: 1189796 - RNA, 15 nt, Human
ucuaguucugccagg

SEQ ID NO: 1189797 - RNA, 17 nt, Human
ucuaguucugccaggag

SEQ ID NO: 1189798 - RNA, 13 nt, Human
agaaugucaguau

SEQ ID NO: 1189799 - RNA, 13 nt, Human
ugagagaggccau

SEQ ID NO: 1189800 - RNA, 13 nt, Human
ugcuccccacguc

SEQ ID NO: 1189801 - RNA, 22 nt, Human
ugcuauuguagagccagagguc

SEQ ID NO: 1189802 - RNA, 15 nt, Human
ugcuguagacauuug

SEQ ID NO: 1189803 - RNA, 22 nt, Human
uggaccagccucuccacucaug

SEQ ID NO: 1189804 - RNA, 16 nt, Human
uggaccagccucucca

SEQ ID NO: 1189805 - RNA, 19 nt, Human
aggccauucuuucccaaca

SEQ ID NO: 1189806 - RNA, 18 nt, Human
aggccauucuuucccaac

SEQ ID NO: 1189807 - RNA, 17 nt, Human
aggccauucuuucccaa

SEQ ID NO: 1189808 - RNA, 21 nt, Human
aggccucucauuccagaggaa

SEQ ID NO: 1189809 - RNA, 14 nt, Human
uggccaguggcugg

SEQ ID NO: 1189810 - RNA, 15 nt, Human
uggccaguggcugga

SEQ ID NO: 1189811 - RNA, 16 nt, Human
uggccaguggcuggau

SEQ ID NO: 1189812 - RNA, 23 nt, Human
uggccaguggcuggaucugugag

SEQ ID NO: 1189813 - RNA, 22 nt, Human
uggaccuuuccugaggaagagg

SEQ ID NO: 1189814 - RNA, 22 nt, Human
uggcugccuugugaaggaauua

SEQ ID NO: 1189815 - RNA, 14 nt, Human
agcugccugugccu

SEQ ID NO: 1189816 - RNA, 14 nt, Human
aguccaucagccuc

SEQ ID NO: 1189817 - RNA, 13 nt, Human
aguccaucagccu

SEQ ID NO: 1189818 - RNA, 16 nt, Human
aguccaucagccucca

SEQ ID NO: 1189819 - RNA, 21 nt, Human
uguaugugggggucugugugu

SEQ ID NO: 1189820 - RNA, 22 nt, Human
uguaugugggggucuguguguu

SEQ ID NO: 1189821 - RNA, 22 nt, Human
uguauccauccauggggcugau

SEQ ID NO: 1189822 - RNA, 13 nt, Human
agucccugccugg

SEQ ID NO: 1189823 - RNA, 11 nt, Human
ugugauguguc

SEQ ID NO: 1189824 - RNA, 15 nt, Human
ugggucugugugugu

SEQ ID NO: 1189825 - RNA, 23 nt, Human
ugggaauaagugccaggauggaa

SEQ ID NO: 1189826 - RNA, 14 nt, Human
uuaucaacauuugu

SEQ ID NO: 1189827 - RNA, 18 nt, Human
uguugggagugaggaugu

SEQ ID NO: 1189828 - RNA, 18 nt, Human
aucggggagccgggagcc

SEQ ID NO: 1189829 - RNA, 16 nt, Human
aucggggagccgggag

SEQ ID NO: 1189830 - RNA, 20 nt, Human
auccauggggcugauuguau

SEQ ID NO: 1189831 - RNA, 20 nt, Human
aucauuaucagccugugcca

SEQ ID NO: 1189832 - RNA, 16 nt, Human
uucagauuugccuuau

SEQ ID NO: 1189833 - RNA, 22 nt, Human
uuguccucagccccgcguggaa

SEQ ID NO: 1189834 - RNA, 18 nt, Human
uugucccugaagagaagg

SEQ ID NO: 1189835 - RNA, 20 nt, Human
uugucacgccagacuuccca

SEQ ID NO: 1189836 - RNA, 13 nt, Human
uugucacgccaga

SEQ ID NO: 1189837 - RNA, 10 nt, Human
uugugugugg

SEQ ID NO: 1189838 - RNA, 13 nt, Human
uugugugugggag

SEQ ID NO: 1189839 - RNA, 16 nt, Human
uugugugugggagugu

SEQ ID NO: 1189840 - RNA, 20 nt, Human
uugcuaugagcuggggaugu

SEQ ID NO: 1189841 - RNA, 16 nt, Human
uuuuguuuaccagaga

SEQ ID NO: 1189842 - RNA, 13 nt, Human
auguggaagugug

SEQ ID NO: 1189843 - RNA, 15 nt, Human
auguggaaguguggg

SEQ ID NO: 1189844 - RNA, 16 nt, Human
auguggaagugugggu

SEQ ID NO: 1189845 - RNA, 22 nt, Human
auguggaagugugggucugugu

SEQ ID NO: 1189846 - RNA, 23 nt, Human
auguggaagugugggucugugug

SEQ ID NO: 1189847 - RNA, 10 nt, Human
augugugugu

SEQ ID NO: 1189848 - RNA, 18 nt, Human
auguguguguguugugug

SEQ ID NO: 1189849 - RNA, 13 nt, Human
auugugauguguc

SEQ ID NO: 1189850 - RNA, 14 nt, Human
auugugaugugucc

SEQ ID NO: 1189851 - RNA, 15 nt, Human
auugugauguguccu

SEQ ID NO: 1189852 - RNA, 12 nt, Human
auugguguugac

SEQ ID NO: 1189853 - RNA, 15 nt, Human
acagguuagcugcuc

SEQ ID NO: 1189854 - RNA, 15 nt, Human
accccgacuuuuguu

SEQ ID NO: 1189855 - RNA, 12 nt, Human
accccgacuuuu

SEQ ID NO: 1189856 - RNA, 22 nt, Human
acgccagacuucccacggcucc

SEQ ID NO: 1189857 - RNA, 16 nt, Human
acgccagacuucccac

SEQ ID NO: 1189858 - RNA, 13 nt, Human
acucagucuuuaa

SEQ ID NO: 1189859 - RNA, 16 nt, Human
aaugucaguaugugga

SEQ ID NO: 1189860 - RNA, 22 nt, Human
aaugucaguauguggaagugug

SEQ ID NO: 1189861 - RNA, 16 nt, Human
agaggguguccugcac

SEQ ID NO: 1189862 - RNA, 14 nt, Human
agacgggcccuggu

SEQ ID NO: 1189863 - RNA, 13 nt, Human
agccagaggucug

SEQ ID NO: 1189864 - RNA, 17 nt, Human
aggggccgggggcaguc

SEQ ID NO: 1189865 - RNA, 23 nt, Human
aggugcuucuaguucugccagga

SEQ ID NO: 1189866 - RNA, 22 nt, Human
aggugcuucuaguucugccagg

SEQ ID NO: 1189867 - RNA, 21 nt, Human
aggugcuucuaguucugccag

SEQ ID NO: 1189868 - RNA, 19 nt, Human
aggcuauggggauagaugu

SEQ ID NO: 1189869 - RNA, 21 nt, Human
aggcuauggggauagaugugu

SEQ ID NO: 1189870 - RNA, 22 nt, Human
aggcuauggggauagaugugug

SEQ ID NO: 1189871 - RNA, 16 nt, Human
aggaacugcugggcuu

SEQ ID NO: 1189872 - RNA, 17 nt, Human
augugggggucugugug

SEQ ID NO: 1189873 - RNA, 18 nt, Human
augugggggucugugugu

SEQ ID NO: 1189874 - RNA, 16 nt, Human
augugggggucugugu

SEQ ID NO: 1189875 - RNA, 20 nt, Human
aguuguaucagcacgugugg

SEQ ID NO: 1189876 - RNA, 23 nt, Human
aguuguaucagcacguguggccu

SEQ ID NO: 1189877 - RNA, 14 nt, Human
caacacugccagca

SEQ ID NO: 1189878 - RNA, 13 nt, Human
caacacugccagc

SEQ ID NO: 1189879 - RNA, 12 nt, Human
caacacugccag

SEQ ID NO: 1189880 - RNA, 22 nt, Human
caaccggcuuuguggcacuggg

SEQ ID NO: 1189881 - RNA, 13 nt, Human
caaccggcuuugu

SEQ ID NO: 1189882 - RNA, 22 nt, Human
caccggggccugggcaggaggg

SEQ ID NO: 1189883 - RNA, 21 nt, Human
caccggggccugggcaggagg

SEQ ID NO: 1189884 - RNA, 14 nt, Human
caccggggccuggg

SEQ ID NO: 1189885 - RNA, 22 nt, Human
cacggcuccucgagaucccaac

SEQ ID NO: 1189886 - RNA, 20 nt, Human
cacggcuccucgagauccca

SEQ ID NO: 1189887 - RNA, 19 nt, Human
cacguguggccuguucuuc

SEQ ID NO: 1189888 - RNA, 16 nt, Human
cacucaugugacucuu

SEQ ID NO: 1189889 - RNA, 22 nt, Human
cacucaugugacucuuuccaac

SEQ ID NO: 1189890 - RNA, 22 nt, Human
cagacuucccacggcuccucga

SEQ ID NO: 1189891 - RNA, 12 nt, Human
cagacuucccac

SEQ ID NO: 1189892 - RNA, 18 nt, Human
cagagaaaaagggagggg

SEQ ID NO: 1189893 - RNA, 17 nt, Human
cagagaaaaagggaggg

SEQ ID NO: 1189894 - RNA, 12 nt, Human
cagagaaaaagg

SEQ ID NO: 1189895 - RNA, 14 nt, Human
cagagucccugccu

SEQ ID NO: 1189896 - RNA, 18 nt, Human
cagagucccugccuggac

SEQ ID NO: 1189897 - RNA, 22 nt, Human
cagaggacaguauuugugggga

SEQ ID NO: 1189898 - RNA, 15 nt, Human
cagcauuucccuucc

SEQ ID NO: 1189899 - RNA, 18 nt, Human
cagccuccauccuacccc

SEQ ID NO: 1189900 - RNA, 21 nt, Human
cagccuccauccuacccccug

SEQ ID NO: 1189901 - RNA, 23 nt, Human
cagccuggcuguggccuaaccug

SEQ ID NO: 1189902 - RNA, 23 nt, Human
cagccucuccacucaugugacuc

SEQ ID NO: 1189903 - RNA, 18 nt, Human
caggaaccgaggcaggga

SEQ ID NO: 1189904 - RNA, 17 nt, Human
caggaaccgaggcaggg

SEQ ID NO: 1189905 - RNA, 15 nt, Human
caggaaccgaggcag

SEQ ID NO: 1189906 - RNA, 23 nt, Human
caggagacagguuagcugcuccc

SEQ ID NO: 1189907 - RNA, 14 nt, Human
caggagucccugcc

SEQ ID NO: 1189908 - RNA, 15 nt, Human
caggagucccugcca

SEQ ID NO: 1189909 - RNA, 21 nt, Human
caggagucccugccaucaugu

SEQ ID NO: 1189910 - RNA, 21 nt, Human
caggcaucggggagccgggag

SEQ ID NO: 1189911 - RNA, 20 nt, Human
caggcaucggggagccggga

SEQ ID NO: 1189912 - RNA, 15 nt, Human
caggcucagagggug

SEQ ID NO: 1189913 - RNA, 11 nt, Human
caggcucagag

SEQ ID NO: 1189914 - RNA, 18 nt, Human
cagggaaggaucccauga

SEQ ID NO: 1189915 - RNA, 13 nt, Human
cagggaaggaucc

SEQ ID NO: 1189916 - RNA, 22 nt, Human
cagucuuuaaucugagaggcca

SEQ ID NO: 1189917 - RNA, 12 nt, Human
caguauguggaa

SEQ ID NO: 1189918 - RNA, 12 nt, Human
cagguguucuuc

SEQ ID NO: 1189919 - RNA, 20 nt, Human
cauccagagucccugccugg

SEQ ID NO: 1189920 - RNA, 18 nt, Human
cauccagagucccugccu

SEQ ID NO: 1189921 - RNA, 17 nt, Human
cauccagagucccugcc

SEQ ID NO: 1189922 - RNA, 13 nt, Human
cauccagaguccc

SEQ ID NO: 1189923 - RNA, 21 nt, Human
cauccagagucccugccugga

SEQ ID NO: 1189924 - RNA, 13 nt, Human
caucauguuuaca

SEQ ID NO: 1189925 - RNA, 19 nt, Human
caucauguuuacagaggac

SEQ ID NO: 1189926 - RNA, 21 nt, Human
caucauguuuacagaggacag

SEQ ID NO: 1189927 - RNA, 15 nt, Human
cauccuacccccugu

SEQ ID NO: 1189928 - RNA, 19 nt, Human
cauccuacccccugugccu

SEQ ID NO: 1189929 - RNA, 18 nt, Human
cauccuacccccugugcc

SEQ ID NO: 1189930 - RNA, 23 nt, Human
caugagcuccuuaaggcucuuuu

SEQ ID NO: 1189931 - RNA, 19 nt, Human
caugaguuggcugggaaua

SEQ ID NO: 1189932 - RNA, 17 nt, Human
caugugacucuuuccaa

SEQ ID NO: 1189933 - RNA, 16 nt, Human
caugugacucuuucca

SEQ ID NO: 1189934 - RNA, 14 nt, Human
caugugacucuuuc

SEQ ID NO: 1189935 - RNA, 14 nt, Human
cauucuuucccaac

SEQ ID NO: 1189936 - RNA, 12 nt, Human
cauucuuuccca

SEQ ID NO: 1189937 - RNA, 14 nt, Human
cauuccagaggaag

SEQ ID NO: 1189938 - RNA, 13 nt, Human
cauuccagaggaa

SEQ ID NO: 1189939 - RNA, 20 nt, Human
ccaccugaauaaagaaugaa

SEQ ID NO: 1189940 - RNA, 22 nt, Human
ccacucaugugacucuuuccaa

SEQ ID NO: 1189941 - RNA, 19 nt, Human
ccacucaugugacucuuuc

SEQ ID NO: 1189942 - RNA, 21 nt, Human
ccagcauuucccuuccuuccu

SEQ ID NO: 1189943 - RNA, 16 nt, Human
ccagcauuucccuucc

SEQ ID NO: 1189944 - RNA, 13 nt, Human
ccaggagacaggu

SEQ ID NO: 1189945 - RNA, 18 nt, Human
ccauccuacccccugugc

SEQ ID NO: 1189946 - RNA, 15 nt, Human
ccgaggcagggaagg

SEQ ID NO: 1189947 - RNA, 16 nt, Human
ccggcuuuguggcacu

SEQ ID NO: 1189948 - RNA, 19 nt, Human
ccgggacaccuaggcuagg

SEQ ID NO: 1189949 - RNA, 20 nt, Human
ccgggacaccuaggcuaggg

SEQ ID NO: 1189950 - RNA, 18 nt, Human
ccucuccacucaugugac

SEQ ID NO: 1189951 - RNA, 18 nt, Human
ccucucauuccagaggaa

SEQ ID NO: 1189952 - RNA, 14 nt, Human
ccugggcaggaggg

SEQ ID NO: 1189953 - RNA, 12 nt, Human
ccugggcaggag

SEQ ID NO: 1189954 - RNA, 19 nt, Human
ccugaggaagagggacugu

SEQ ID NO: 1189955 - RNA, 18 nt, Human
ccuuaaggcucuuuugua

SEQ ID NO: 1189956 - RNA, 16 nt, Human
ccuuaaggcucuuuug

SEQ ID NO: 1189957 - RNA, 13 nt, Human
ccuuaaggcucuu

SEQ ID NO: 1189958 - RNA, 18 nt, Human
ccuugucacgccagacuu

SEQ ID NO: 1189959 - RNA, 15 nt, Human
ccuugucacgccaga

SEQ ID NO: 1189960 - RNA, 21 nt, Human
cgagaucccaacacugccagc

SEQ ID NO: 1189961 - RNA, 15 nt, Human
cgagaucccaacacu

SEQ ID NO: 1189962 - RNA, 13 nt, Human
cgagaucccaaca

SEQ ID NO: 1189963 - RNA, 22 nt, Human
cgagaucccaacacugccagca

SEQ ID NO: 1189964 - RNA, 23 nt, Human
cucgagaucccaacacugccagc

SEQ ID NO: 1189965 - RNA, 22 nt, Human
cucgagaucccaacacugccag

SEQ ID NO: 1189966 - RNA, 21 nt, Human
cucgagaucccaacacugcca

SEQ ID NO: 1189967 - RNA, 13 nt, Human
cucgagaucccaa

SEQ ID NO: 1189968 - RNA, 14 nt, Human
cuauuguagagcca

SEQ ID NO: 1189969 - RNA, 20 nt, Human
cucugcccgggagcucagga

SEQ ID NO: 1189970 - RNA, 14 nt, Human
cucugcccgggagc

SEQ ID NO: 1189971 - RNA, 12 nt, Human
cugagcaggugu

SEQ ID NO: 1189972 - RNA, 17 nt, Human
cugccuggaccagccuc

SEQ ID NO: 1189973 - RNA, 13 nt, Human
cugauuguauuua

SEQ ID NO: 1189974 - RNA, 22 nt, Human
cuggugguggcucgggaggcga

SEQ ID NO: 1189975 - RNA, 14 nt, Human
cuggugguggcucg

SEQ ID NO: 1189976 - RNA, 18 nt, Human
cuguggccuaaccugccg

SEQ ID NO: 1189977 - RNA, 14 nt, Human
cuguguguguguau

SEQ ID NO: 1189978 - RNA, 15 nt, Human
cuguguguguguaug

SEQ ID NO: 1189979 - RNA, 16 nt, Human
cuguguguguguaugu

SEQ ID NO: 1189980 - RNA, 18 nt, Human
cuguguguguguaugugg

SEQ ID NO: 1189981 - RNA, 20 nt, Human
cuguguguguguaugugggg

SEQ ID NO: 1189982 - RNA, 20 nt, Human
cuguguguuuaugugugugu

SEQ ID NO: 1189983 - RNA, 21 nt, Human
cuguguguguguauguggggg

SEQ ID NO: 1189984 - RNA, 15 nt, Human
cuuaaggcucuuuug

SEQ ID NO: 1189985 - RNA, 19 nt, Human
cuuccaaacaggcucagag

SEQ ID NO: 1189986 - RNA, 17 nt, Human
cuuucccaacaccucuu

SEQ ID NO: 1189987 - RNA, 19 nt, Human
gaaggaucccaugagcucc

SEQ ID NO: 1189988 - RNA, 17 nt, Human
gaauaaagaaugaaugg

SEQ ID NO: 1189989 - RNA, 20 nt, Human
gaauaagugccaggauggaa

SEQ ID NO: 1189990 - RNA, 14 nt, Human
gaaugccuccugca

SEQ ID NO: 1189991 - RNA, 13 nt, Human
gaacuauuagagc

SEQ ID NO: 1189992 - RNA, 20 nt, Human
gagcuccuuaaggcucuuuu

SEQ ID NO: 1189993 - RNA, 23 nt, Human
gagcucaggaaccgaggcaggga

SEQ ID NO: 1189994 - RNA, 15 nt, Human
gaggagggcaggcau

SEQ ID NO: 1189995 - RNA, 14 nt, Human
gaggagggcaggca

SEQ ID NO: 1189996 - RNA, 13 nt, Human
gaggagggcaggc

SEQ ID NO: 1189997 - RNA, 15 nt, Human
gaggaugucugggcc

SEQ ID NO: 1189998 - RNA, 15 nt, Human
gagucccugccugga

SEQ ID NO: 1189999 - RNA, 14 nt, Human
gagucccugccugg

SEQ ID NO: 1190000 - RNA, 14 nt, Human
gagucccugccauc

SEQ ID NO: 1190001 - RNA, 19 nt, Human
gagucccugccuggaccag

SEQ ID NO: 1190002 - RNA, 16 nt, Human
gagucccugccuggac

SEQ ID NO: 1190003 - RNA, 22 nt, Human
gagguuuguuuagaagaagugu

SEQ ID NO: 1190004 - RNA, 21 nt, Human
gauguguccugauaagcugag

SEQ ID NO: 1190005 - RNA, 23 nt, Human
gcaggcaucggggagccgggagc

SEQ ID NO: 1190006 - RNA, 22 nt, Human
gcaggcaucggggagccgggag

SEQ ID NO: 1190007 - RNA, 21 nt, Human
gcaggcaucggggagccggga

SEQ ID NO: 1190008 - RNA, 16 nt, Human
gccaccugaauaaaga

SEQ ID NO: 1190009 - RNA, 15 nt, Human
gccacgauugcagga

SEQ ID NO: 1190010 - RNA, 21 nt, Human
gccagacuucccacggcuccu

SEQ ID NO: 1190011 - RNA, 17 nt, Human
gccuggaccagccucuc

SEQ ID NO: 1190012 - RNA, 16 nt, Human
gccuggaccagccucu

SEQ ID NO: 1190013 - RNA, 16 nt, Human
gccugggcaggaggga

SEQ ID NO: 1190014 - RNA, 17 nt, Human
gcgaagcguuguccuca

SEQ ID NO: 1190015 - RNA, 17 nt, Human
gccuugucacgccagac

SEQ ID NO: 1190016 - RNA, 16 nt, Human
gccuugucacgccaga

SEQ ID NO: 1190017 - RNA, 15 nt, Human
gccuugucacgccag

SEQ ID NO: 1190018 - RNA, 21 nt, Human
gcuccuuaaggcucuuuugua

SEQ ID NO: 1190019 - RNA, 17 nt, Human
gcuccuuaaggcucuuu

SEQ ID NO: 1190020 - RNA, 15 nt, Human
gcuccuuaaggcucu

SEQ ID NO: 1190021 - RNA, 21 nt, Human
gcugggaggagggcaggcauc

SEQ ID NO: 1190022 - RNA, 22 nt, Human
gcugggcuuggcagcccggguc

SEQ ID NO: 1190023 - RNA, 14 nt, Human
gcuggggaugucuc

SEQ ID NO: 1190024 - RNA, 20 nt, Human
gcuguggccuaaccugccga

SEQ ID NO: 1190025 - RNA, 19 nt, Human
gcuguggccuaaccugccg

SEQ ID NO: 1190026 - RNA, 14 nt, Human
gcugauuguauuua

SEQ ID NO: 1190027 - RNA, 12 nt, Human
ggaccagccucu

SEQ ID NO: 1190028 - RNA, 19 nt, Human
ggagacagguuagcugcuc

SEQ ID NO: 1190029 - RNA, 21 nt, Human
ggagcucaggaaccgaggcag

SEQ ID NO: 1190030 - RNA, 21 nt, Human
ggccuaaccugccgagagucc

SEQ ID NO: 1190031 - RNA, 16 nt, Human
ggccuaaccugccgag

SEQ ID NO: 1190032 - RNA, 15 nt, Human
ggccuaaccugccga

SEQ ID NO: 1190033 - RNA, 20 nt, Human
ggccucucauuccagaggaa

SEQ ID NO: 1190034 - RNA, 19 nt, Human
ggccugggcaggagggagg

SEQ ID NO: 1190035 - RNA, 17 nt, Human
ggccugggcaggaggga

SEQ ID NO: 1190036 - RNA, 15 nt, Human
ggccugggcaggagg

SEQ ID NO: 1190037 - RNA, 16 nt, Human
ggccugacucucagca

SEQ ID NO: 1190038 - RNA, 21 nt, Human
ggcugggaggagggcaggcau

SEQ ID NO: 1190039 - RNA, 20 nt, Human
ggcugggaggagggcaggca

SEQ ID NO: 1190040 - RNA, 13 nt, Human
ggcugggaggagg

SEQ ID NO: 1190041 - RNA, 23 nt, Human
ggcuguggcauccagagucccug

SEQ ID NO: 1190042 - RNA, 21 nt, Human
ggcuguggcauccagaguccc

SEQ ID NO: 1190043 - RNA, 14 nt, Human
gggacaccuaggcu

SEQ ID NO: 1190044 - RNA, 20 nt, Human
gggacaccaagccuuggcuc

SEQ ID NO: 1190045 - RNA, 22 nt, Human
gggagcucaggaaccgaggcag

SEQ ID NO: 1190046 - RNA, 12 nt, Human
gggagcucagga

SEQ ID NO: 1190047 - RNA, 23 nt, Human
gggagcucaggaaccgaggcagg

SEQ ID NO: 1190048 - RNA, 13 nt, Human
gggagccgggagc

SEQ ID NO: 1190049 - RNA, 12 nt, Human
gggaggagggca

SEQ ID NO: 1190050 - RNA, 16 nt, Human
gggaggagggcaggca

SEQ ID NO: 1190051 - RNA, 19 nt, Human
ucagaggguguccugcacc

SEQ ID NO: 1190052 - RNA, 14 nt, Human
ucauuccagaggaa

SEQ ID NO: 1190053 - RNA, 12 nt, Human
uauucccaugag

SEQ ID NO: 1190054 - RNA, 13 nt, Human
ucccugccuggac

SEQ ID NO: 1190055 - RNA, 19 nt, Human
ucccuuccuuccucuccug

SEQ ID NO: 1190056 - RNA, 16 nt, Human
ucccuuccuuccucuc

SEQ ID NO: 1190057 - RNA, 16 nt, Human
ucccuccucugcccgg

SEQ ID NO: 1190058 - RNA, 21 nt, Human
ucgugucuggcacagccuggc

SEQ ID NO: 1190059 - RNA, 14 nt, Human
ucgugucuggcaca

SEQ ID NO: 1190060 - RNA, 15 nt, Human
ucugccaggagacag

SEQ ID NO: 1190061 - RNA, 18 nt, Human
ugauuuuuaugccaccug

SEQ ID NO: 1190062 - RNA, 18 nt, Human
ugcccgggagcucaggaa

SEQ ID NO: 1190063 - RNA, 22 nt, Human
ugccaucauguuuacagaggac

SEQ ID NO: 1190064 - RNA, 21 nt, Human
ugcauuauauuuguaaauuua

SEQ ID NO: 1190065 - RNA, 14 nt, Human
ugaguuggcuggga

SEQ ID NO: 1190066 - RNA, 16 nt, Human
ugaguuggcugggaau

SEQ ID NO: 1190067 - RNA, 17 nt, Human
ugaguuggcugggaaua

SEQ ID NO: 1190068 - RNA, 23 nt, Human
uggccuaaccugccgagagucca

SEQ ID NO: 1190069 - RNA, 20 nt, Human
uggcuccauugguguugaca

SEQ ID NO: 1190070 - RNA, 18 nt, Human
ugggaggagggcaggcau

SEQ ID NO: 1190071 - RNA, 17 nt, Human
ugggaggagggcaggca

SEQ ID NO: 1190072 - RNA, 14 nt, Human
ugggaggagggcag

SEQ ID NO: 1190073 - RNA, 21 nt, Human
uguccucagccccgcguggaa

SEQ ID NO: 1190074 - RNA, 13 nt, Human
uguccucagcccc

SEQ ID NO: 1190075 - RNA, 18 nt, Human
uguccugcaccggggccu

SEQ ID NO: 1190076 - RNA, 17 nt, Human
uguaaauuuaugugaug

SEQ ID NO: 1190077 - RNA, 19 nt, Human
uuuccaaccggcuuugugg

SEQ ID NO: 1190078 - RNA, 21 nt, Human
uuccugaggaagagggacugu

SEQ ID NO: 1190079 - RNA, 21 nt, Human
uuuuauuuuucucaugaugag

SEQ ID NO: 1190080 - RNA, 18 nt, Human
cugacccucaucuuucuu

SEQ ID NO: 1190081 - RNA, 18 nt, Human
cugaggaagagggacugu

SEQ ID NO: 1190082 - RNA, 23 nt, Human
cugaggaagagggacuguucuuu

SEQ ID NO: 1190083 - RNA, 13 nt, Human
cuaguucugccag

SEQ ID NO: 1190084 - RNA, 15 nt, Human
cuaggguggggagag

SEQ ID NO: 1190085 - RNA, 16 nt, Human
cuaguucugccaggag

SEQ ID NO: 1190086 - RNA, 15 nt, Human
cuaguucugccagga

SEQ ID NO: 1190087 - RNA, 14 nt, Human
cuaguucugccagg

SEQ ID NO: 1190088 - RNA, 15 nt, Human
cuaggcuaggguggg

SEQ ID NO: 1190089 - RNA, 13 nt, Human
cgugucuggcaca

SEQ ID NO: 1190090 - RNA, 20 nt, Human
ccauucuuucccaacaccuc

SEQ ID NO: 1190091 - RNA, 14 nt, Human
ccauucuuucccaa

SEQ ID NO: 1190092 - RNA, 12 nt, Human
ccauucuuuccc

SEQ ID NO: 1190093 - RNA, 22 nt, Human
ccugacccucaucuuucuucca

SEQ ID NO: 1190094 - RNA, 19 nt, Human
ccugacccucaucuuucuu

SEQ ID NO: 1190095 - RNA, 18 nt, Human
ccugacccucaucuuucu

SEQ ID NO: 1190096 - RNA, 18 nt, Human
ccugccaucauguuuaca

SEQ ID NO: 1190097 - RNA, 20 nt, Human
ccugccaucauguuuacaga

SEQ ID NO: 1190098 - RNA, 21 nt, Human
ccuggugguggcucgggaggc

SEQ ID NO: 1190099 - RNA, 18 nt, Human
ccuggugguggcucggga

SEQ ID NO: 1190100 - RNA, 21 nt, Human
ccugucucccuccucugcccg

SEQ ID NO: 1190101 - RNA, 18 nt, Human
cagucugagagaggccau

SEQ ID NO: 1190102 - RNA, 15 nt, Human
caggccugacucuca

SEQ ID NO: 1190103 - RNA, 19 nt, Human
cauccauggggcugauugu

SEQ ID NO: 1190104 - RNA, 17 nt, Human
caccuaggcuagggugg

SEQ ID NO: 1190105 - RNA, 16 nt, Human
cuggggaugucucuca

SEQ ID NO: 1190106 - RNA, 17 nt, Human
cuggggaugucucucau

SEQ ID NO: 1190107 - RNA, 18 nt, Human
cugggaauaagugccagg

SEQ ID NO: 1190108 - RNA, 15 nt, Human
cuuaggccagcacca

SEQ ID NO: 1190109 - RNA, 20 nt, Human
cugugccuugucacgccaga

SEQ ID NO: 1190110 - RNA, 16 nt, Human
cugugccuuuugccau

SEQ ID NO: 1190111 - RNA, 14 nt, Human
cuuugaccuguugg

SEQ ID NO: 1190112 - RNA, 18 nt, Human
cuucuaguucugccagga

SEQ ID NO: 1190113 - RNA, 17 nt, Human
cuucuaguucugccagg

SEQ ID NO: 1190114 - RNA, 16 nt, Human
cuucuaguucugccag

SEQ ID NO: 1190115 - RNA, 19 nt, Human
cuucuaguucugccaggag

SEQ ID NO: 1190116 - RNA, 15 nt, Human
gacuauggagcugag

SEQ ID NO: 1190117 - RNA, 20 nt, Human
gacccucaucuuucuuccaa

SEQ ID NO: 1190118 - RNA, 19 nt, Human
gacccucaucuuucuucca

SEQ ID NO: 1190119 - RNA, 15 nt, Human
gacccucaucuuucu

SEQ ID NO: 1190120 - RNA, 18 nt, Human
gcauuucccuuccuuccu

SEQ ID NO: 1190121 - RNA, 23 nt, Human
gccuccauccuacccccugugcc

SEQ ID NO: 1190122 - RNA, 22 nt, Human
gcuaauucuuugaccuguuggg

SEQ ID NO: 1190123 - RNA, 21 nt, Human
gcucaggaaccgaggcaggga

SEQ ID NO: 1190124 - RNA, 20 nt, Human
gcucaggaaccgaggcaggg

SEQ ID NO: 1190125 - RNA, 19 nt, Human
gcucaggaaccgaggcagg

SEQ ID NO: 1190126 - RNA, 16 nt, Human
gcucaggaaccgaggc

SEQ ID NO: 1190127 - RNA, 20 nt, Human
ggaacugcugggcuuggcag

SEQ ID NO: 1190128 - RNA, 12 nt, Human
ggaagugugggu

SEQ ID NO: 1190129 - RNA, 21 nt, Human
ggaagugugggucugugugug

SEQ ID NO: 1190130 - RNA, 22 nt, Human
ggaagugugggucugugugugu

SEQ ID NO: 1190131 - RNA, 17 nt, Human
gcuucuaguucugccag

SEQ ID NO: 1190132 - RNA, 16 nt, Human
gcuucuaguucugcca

SEQ ID NO: 1190133 - RNA, 15 nt, Human
ggcagggcugaggcc

SEQ ID NO: 1190134 - RNA, 20 nt, Human
ggcucagaggguguccugca

SEQ ID NO: 1190135 - RNA, 14 nt, Human
ggcucagagugggg

SEQ ID NO: 1190136 - RNA, 22 nt, Human
gggacaccuaggcuaggguggg

SEQ ID NO: 1190137 - RNA, 17 nt, Human
ggggccgggggcagucu

SEQ ID NO: 1190138 - RNA, 18 nt, Human
gggggcgcggcugggagg

SEQ ID NO: 1190139 - RNA, 18 nt, Human
ggguggggagagacgggc

SEQ ID NO: 1190140 - RNA, 14 nt, Human
ggguggggagagac

SEQ ID NO: 1190141 - RNA, 22 nt, Human
ggugcuucuaguucugccagga

SEQ ID NO: 1190142 - RNA, 23 nt, Human
guaauuuaaaauugugauguguc

SEQ ID NO: 1190143 - RNA, 19 nt, Human
guaauuuaaaauugugaug

SEQ ID NO: 1190144 - RNA, 20 nt, Human
guaauuuaaaauugugaugu

SEQ ID NO: 1190145 - RNA, 15 nt, Human
guagagccagagguc

SEQ ID NO: 1190146 - RNA, 22 nt, Human
gucccgggacaccuaggcuagg

SEQ ID NO: 1190147 - RNA, 20 nt, Human
guccugcaccggggccuggg

SEQ ID NO: 1190148 - RNA, 19 nt, Human
guccugcaccggggccugg

SEQ ID NO: 1190149 - RNA, 15 nt, Human
guccugcaccggggc

SEQ ID NO: 1190150 - RNA, 18 nt, Human
guggcacuggggcagggg

SEQ ID NO: 1190151 - RNA, 17 nt, Human
guggcacuggggcaggg

SEQ ID NO: 1190152 - RNA, 14 nt, Human
gugguggcucggga

SEQ ID NO: 1190153 - RNA, 14 nt, Human
gugggggucugugu

SEQ ID NO: 1190154 - RNA, 15 nt, Human
gugggggucugugug

SEQ ID NO: 1190155 - RNA, 16 nt, Human
gugggggucugugugu

SEQ ID NO: 1190156 - RNA, 13 nt, Human
guguguguaugug

SEQ ID NO: 1190157 - RNA, 14 nt, Human
guguguguaugugg

SEQ ID NO: 1190158 - RNA, 17 nt, Human
guguguguugugugugg

SEQ ID NO: 1190159 - RNA, 17 nt, Human
aauaagugccaggaugg

SEQ ID NO: 1190160 - RNA, 14 nt, Human
guugggagaauguc

SEQ ID NO: 1190161 - RNA, 21 nt, Human
guugggagaaugucaguaugu

SEQ ID NO: 1190162 - RNA, 12 nt, Human
guguuuaugugu

SEQ ID NO: 1190163 - RNA, 16 nt, Human
guguuuaugugugugu

SEQ ID NO: 1190164 - RNA, 19 nt, Human
uaccagagaaaaagggagg

SEQ ID NO: 1190165 - RNA, 14 nt, Human
aauuuaugugaugg

SEQ ID NO: 1190166 - RNA, 18 nt, Human
aauucuuugaccuguugg

SEQ ID NO: 1190167 - RNA, 22 nt, Human
aauucuuugaccuguugggagu

SEQ ID NO: 1190168 - RNA, 14 nt, Human
uaguucugccagga

SEQ ID NO: 1190169 - RNA, 13 nt, Human
uaguucugccagg

SEQ ID NO: 1190170 - RNA, 23 nt, Human
acaccuaggcuaggguggggaga

SEQ ID NO: 1190171 - RNA, 20 nt, Human
acaccuaggcuagggugggg

SEQ ID NO: 1190172 - RNA, 12 nt, Human
acagccuggcug

SEQ ID NO: 1190173 - RNA, 19 nt, Human
uauggggauagaugugugg

SEQ ID NO: 1190174 - RNA, 17 nt, Human
uauggggauagaugugu

SEQ ID NO: 1190175 - RNA, 18 nt, Human
uauggggauagaugugug

SEQ ID NO: 1190176 - RNA, 21 nt, Human
acagacacucccacuuggcau

SEQ ID NO: 1190177 - RNA, 23 nt, Human
uauguguguguguuguguguggg

SEQ ID NO: 1190178 - RNA, 11 nt, Human
uaugugugugu

SEQ ID NO: 1190179 - RNA, 14 nt, Human
uauguguguguguu

SEQ ID NO: 1190180 - RNA, 22 nt, Human
uauguguguguguugugugugg

SEQ ID NO: 1190181 - RNA, 20 nt, Human
accagagaaaaagggagggg

SEQ ID NO: 1190182 - RNA, 16 nt, Human
ucagccccgcguggaa

SEQ ID NO: 1190183 - RNA, 22 nt, Human
acccagcuaugguucucucgca

SEQ ID NO: 1190184 - RNA, 18 nt, Human
ucaggaaccgaggcaggg

SEQ ID NO: 1190185 - RNA, 15 nt, Human
ucaggccgaaggagg

SEQ ID NO: 1190186 - RNA, 18 nt, Human
accugaauaaagaaugaa

SEQ ID NO: 1190187 - RNA, 22 nt, Human
ucaugauagaaggcuaugggga

SEQ ID NO: 1190188 - RNA, 18 nt, Human
acucaugugacucuuucc

SEQ ID NO: 1190189 - RNA, 17 nt, Human
acucaugugacucuuuc

SEQ ID NO: 1190190 - RNA, 16 nt, Human
acucaugugacucuuu

SEQ ID NO: 1190191 - RNA, 15 nt, Human
acucaugugacucuu

SEQ ID NO: 1190192 - RNA, 11 nt, Human
uccucagcccc

SEQ ID NO: 1190193 - RNA, 21 nt, Human
acucuggagguuuguuuagaa

SEQ ID NO: 1190194 - RNA, 21 nt, Human
uccugcaccggggccugggca

SEQ ID NO: 1190195 - RNA, 20 nt, Human
uccugcaccggggccugggc

SEQ ID NO: 1190196 - RNA, 23 nt, Human
ucgagaucccaacacugccagca

SEQ ID NO: 1190197 - RNA, 14 nt, Human
acuggggcaggggc

SEQ ID NO: 1190198 - RNA, 16 nt, Human
acuggggcaggggccg

SEQ ID NO: 1190199 - RNA, 17 nt, Human
ugaggaagagggacugu

SEQ ID NO: 1190200 - RNA, 22 nt, Human
ugagggugacuauggagcugag

SEQ ID NO: 1190201 - RNA, 22 nt, Human
agagggacuguucuuuuguccc

SEQ ID NO: 1190202 - RNA, 14 nt, Human
agaagaaguguguc

SEQ ID NO: 1190203 - RNA, 11 nt, Human
ucuggcccuau

SEQ ID NO: 1190204 - RNA, 19 nt, Human
agccugacccucaucuuuc

SEQ ID NO: 1190205 - RNA, 19 nt, Human
ugccuugugaaggaauuau

SEQ ID NO: 1190206 - RNA, 15 nt, Human
agcuggggaugucuc

SEQ ID NO: 1190207 - RNA, 22 nt, Human
uggcacagccuggcuguggccu

SEQ ID NO: 1190208 - RNA, 15 nt, Human
aggccauucuuuccc

SEQ ID NO: 1190209 - RNA, 14 nt, Human
aggccauucuuucc

SEQ ID NO: 1190210 - RNA, 22 nt, Human
uggcauccagagucccugccug

SEQ ID NO: 1190211 - RNA, 21 nt, Human
uggcauccagagucccugccu

SEQ ID NO: 1190212 - RNA, 20 nt, Human
uggcauccagagucccugcc

SEQ ID NO: 1190213 - RNA, 16 nt, Human
aggccugacucucagc

SEQ ID NO: 1190214 - RNA, 18 nt, Human
aggcgaagcguuguccuc

SEQ ID NO: 1190215 - RNA, 20 nt, Human
aggcucagaggguguccugc

SEQ ID NO: 1190216 - RNA, 19 nt, Human
aggcucagaggguguccug

SEQ ID NO: 1190217 - RNA, 18 nt, Human
aggcucagaggguguccu

SEQ ID NO: 1190218 - RNA, 20 nt, Human
uggaagugugggucugugug

SEQ ID NO: 1190219 - RNA, 13 nt, Human
uggaagugugggu

SEQ ID NO: 1190220 - RNA, 14 nt, Human
uggaaguguggguc

SEQ ID NO: 1190221 - RNA, 20 nt, Human
uggcuguggccuaaccugcc

SEQ ID NO: 1190222 - RNA, 17 nt, Human
uggcuguggcauccaga

SEQ ID NO: 1190223 - RNA, 21 nt, Human
uguagugauuuuuaugccacc

SEQ ID NO: 1190224 - RNA, 20 nt, Human
uguagugauuuuuaugccac

SEQ ID NO: 1190225 - RNA, 14 nt, Human
aguauuugugggga

SEQ ID NO: 1190226 - RNA, 20 nt, Human
agugauuuuuaugccaccug

SEQ ID NO: 1190227 - RNA, 16 nt, Human
agugauuuuuaugcca

SEQ ID NO: 1190228 - RNA, 21 nt, Human
agugauuuuuaugccaccuga

SEQ ID NO: 1190229 - RNA, 14 nt, Human
agugaggaugucug

SEQ ID NO: 1190230 - RNA, 18 nt, Human
agugccaggauggaauga

SEQ ID NO: 1190231 - RNA, 9 nt, Human
aguguguaa

SEQ ID NO: 1190232 - RNA, 16 nt, Human
agugggguagguuggg

SEQ ID NO: 1190233 - RNA, 18 nt, Human
uguguguuguguguggga

SEQ ID NO: 1190234 - RNA, 10 nt, Human
uuaugugugu

SEQ ID NO: 1190235 - RNA, 12 nt, Human
uuaugugugugu

SEQ ID NO: 1190236 - RNA, 14 nt, Human
uuaugugugugugu

SEQ ID NO: 1190237 - RNA, 19 nt, Human
auagaaggcuauggggaua

SEQ ID NO: 1190238 - RNA, 11 nt, Human
auagaugugug

SEQ ID NO: 1190239 - RNA, 12 nt, Human
auagaugugugg

SEQ ID NO: 1190240 - RNA, 13 nt, Human
auagaugugugga

SEQ ID NO: 1190241 - RNA, 14 nt, Human
auagauguguggac

SEQ ID NO: 1190242 - RNA, 18 nt, Human
auaaucacaacccuucag

SEQ ID NO: 1190243 - RNA, 13 nt, Human
uucugccaggaga

SEQ ID NO: 1190244 - RNA, 19 nt, Human
auccauagcaccuccacau

SEQ ID NO: 1190245 - RNA, 16 nt, Human
auccuacccccugugc

SEQ ID NO: 1190246 - RNA, 14 nt, Human
auccuacccccugu

SEQ ID NO: 1190247 - RNA, 16 nt, Human
aucaggccauuguccc

SEQ ID NO: 1190248 - RNA, 16 nt, Human
augugacucuuuccaa

SEQ ID NO: 1190249 - RNA, 12 nt, Human
augugacucuuu

SEQ ID NO: 1190250 - RNA, 21 nt, Human
augugacucuuuccaaccggc

SEQ ID NO: 1190251 - RNA, 16 nt, Human
augguucucaggccug

SEQ ID NO: 1190252 - RNA, 20 nt, Human
auggggauagauguguggac

SEQ ID NO: 1190253 - RNA, 20 nt, Human
auuucccuuccuuccucucc

SEQ ID NO: 1190254 - RNA, 16 nt, Human
auuucccuuccuuccu

SEQ ID NO: 1190255 - RNA, 18 nt, Human
auuuguaaauuuauguga

SEQ ID NO: 1190256 - RNA, 19 nt, Human
auuuguaaauuuaugugau

SEQ ID NO: 1190257 - RNA, 12 nt, Human
auuuuucucaug

SEQ ID NO: 1190258 - RNA, 12 nt, Human
auuccagaggaa

SEQ ID NO: 1190259 - RNA, 13 nt, Human
aagggagggggag

SEQ ID NO: 1190260 - RNA, 13 nt, Human
aaugucaguaugu

SEQ ID NO: 1190261 - RNA, 15 nt, Human
aaugucaguaugugg

SEQ ID NO: 1190262 - RNA, 12 nt, Human
acugccagcauu

SEQ ID NO: 1190263 - RNA, 23 nt, Human
accugccgagaguccaucagccu

SEQ ID NO: 1190264 - RNA, 16 nt, Human
accugccgagagucca

SEQ ID NO: 1190265 - RNA, 11 nt, Human
acacugccagc

SEQ ID NO: 1190266 - RNA, 13 nt, Human
acccccugugccu

SEQ ID NO: 1190267 - RNA, 22 nt, Human
agcuccuuaaggcucuuuugua

SEQ ID NO: 1190268 - RNA, 14 nt, Human
agcugagcaggugu

SEQ ID NO: 1190269 - RNA, 17 nt, Human
agcugcuccccacguca

SEQ ID NO: 1190270 - RNA, 14 nt, Human
agcugcuccccacg

SEQ ID NO: 1190271 - RNA, 21 nt, Human
aggagucccugccaucauguu

SEQ ID NO: 1190272 - RNA, 14 nt, Human
agccgggagccuga

SEQ ID NO: 1190273 - RNA, 20 nt, Human
agaggacaguauuugugggg

SEQ ID NO: 1190274 - RNA, 19 nt, Human
augagcuccuuaaggcucu

SEQ ID NO: 1190275 - RNA, 14 nt, Human
aucagccugugcca

SEQ ID NO: 1190276 - RNA, 18 nt, Human
aguucauaaauuuauggu

SEQ ID NO: 1190277 - RNA, 16 nt, Human
aguggcuggaucugug

SEQ ID NO: 1190278 - RNA, 16 nt, Human
caccccgacuuuuguu

SEQ ID NO: 1190279 - RNA, 16 nt, Human
cccaacacugccagca

SEQ ID NO: 1190280 - RNA, 15 nt, Human
cccaacacugccagc

SEQ ID NO: 1190281 - RNA, 14 nt, Human
cccaacacugccag

SEQ ID NO: 1190282 - RNA, 15 nt, Human
cccacgucagcuggg

SEQ ID NO: 1190283 - RNA, 15 nt, Human
cccacggcuccucga

SEQ ID NO: 1190284 - RNA, 22 nt, Human
cccaugagcuccuuaaggcucu

SEQ ID NO: 1190285 - RNA, 15 nt, Human
cccaugagcuccuua

SEQ ID NO: 1190286 - RNA, 14 nt, Human
cccaugagcuccuu

SEQ ID NO: 1190287 - RNA, 13 nt, Human
cccaugagcuccu

SEQ ID NO: 1190288 - RNA, 18 nt, Human
cccagaaugccuccugca

SEQ ID NO: 1190289 - RNA, 22 nt, Human
cccccugugccuugucacgcca

SEQ ID NO: 1190290 - RNA, 14 nt, Human
ccccugugccuugu

SEQ ID NO: 1190291 - RNA, 20 nt, Human
ccgagaguccaucagccucc

SEQ ID NO: 1190292 - RNA, 21 nt, Human
ccgagaguccaucagccucca

SEQ ID NO: 1190293 - RNA, 21 nt, Human
ccgggggcagucugagagagg

SEQ ID NO: 1190294 - RNA, 20 nt, Human
ccggggccugggcaggaggg

SEQ ID NO: 1190295 - RNA, 23 nt, Human
ccguggcuguggcauccagaguc

SEQ ID NO: 1190296 - RNA, 22 nt, Human
ccgggucaucuguaccucugcc

SEQ ID NO: 1190297 - RNA, 13 nt, Human
ccuaaccugccga

SEQ ID NO: 1190298 - RNA, 12 nt, Human
ccuaaccugccg

SEQ ID NO: 1190299 - RNA, 16 nt, Human
ccuaggcuaggguggg

SEQ ID NO: 1190300 - RNA, 17 nt, Human
ccugcaccggggccugg

SEQ ID NO: 1190301 - RNA, 15 nt, Human
ccugcaccggggccu

SEQ ID NO: 1190302 - RNA, 19 nt, Human
ccugaagagaagggcaggg

SEQ ID NO: 1190303 - RNA, 23 nt, Human
ccugccgagaguccaucagccuc

SEQ ID NO: 1190304 - RNA, 22 nt, Human
ccugccgagaguccaucagccu

SEQ ID NO: 1190305 - RNA, 14 nt, Human
ccugccgagagucc

SEQ ID NO: 1190306 - RNA, 21 nt, Human
cgaagcguuguccucagcccc

SEQ ID NO: 1190307 - RNA, 17 nt, Human
cgaagcguuguccucag

SEQ ID NO: 1190308 - RNA, 16 nt, Human
cgaagcguuguccuca

SEQ ID NO: 1190309 - RNA, 15 nt, Human
cgaagcguuguccuc

SEQ ID NO: 1190310 - RNA, 14 nt, Human
ccuuugucccagaa

SEQ ID NO: 1190311 - RNA, 17 nt, Human
ccugugccuuuugccau

SEQ ID NO: 1190312 - RNA, 12 nt, Human
cgcggcugggag

SEQ ID NO: 1190313 - RNA, 11 nt, Human
cgcggcuggga

SEQ ID NO: 1190314 - RNA, 16 nt, Human
cgcggcugggaggagg

SEQ ID NO: 1190315 - RNA, 19 nt, Human
cgggacaccuaggcuaggg

SEQ ID NO: 1190316 - RNA, 18 nt, Human
cgggacaccuaggcuagg

SEQ ID NO: 1190317 - RNA, 12 nt, Human
cuaaccugccga

SEQ ID NO: 1190318 - RNA, 13 nt, Human
cuacccccugugc

SEQ ID NO: 1190319 - RNA, 16 nt, Human
cucagaggguguccug

SEQ ID NO: 1190320 - RNA, 17 nt, Human
cucagccccgcguggaa

SEQ ID NO: 1190321 - RNA, 19 nt, Human
cucaggaaccgaggcaggg

SEQ ID NO: 1190322 - RNA, 18 nt, Human
cucaggaaccgaggcagg

SEQ ID NO: 1190323 - RNA, 17 nt, Human
cucaggaaccgaggcag

SEQ ID NO: 1190324 - RNA, 22 nt, Human
cuccacucaugugacucuuucc

SEQ ID NO: 1190325 - RNA, 16 nt, Human
cuccacucaugugacu

SEQ ID NO: 1190326 - RNA, 20 nt, Human
cuccccacgucagcugggac

SEQ ID NO: 1190327 - RNA, 21 nt, Human
cuauggggauagaugugugga

SEQ ID NO: 1190328 - RNA, 19 nt, Human
cuauggggauagaugugug

SEQ ID NO: 1190329 - RNA, 20 nt, Human
cuauggggauagaugugugg

SEQ ID NO: 1190330 - RNA, 22 nt, Human
cuacucuggagguuuguuuaga

SEQ ID NO: 1190331 - RNA, 23 nt, Human
cugccgagaguccaucagccucc

SEQ ID NO: 1190332 - RNA, 22 nt, Human
cugccgagaguccaucagccuc

SEQ ID NO: 1190333 - RNA, 11 nt, Human
cugcugggcuu

SEQ ID NO: 1190334 - RNA, 18 nt, Human
cuggaccagccucuccac

SEQ ID NO: 1190335 - RNA, 14 nt, Human
cuggaccagccucu

SEQ ID NO: 1190336 - RNA, 12 nt, Human
cuggagguuugu

SEQ ID NO: 1190337 - RNA, 17 nt, Human
cuggagguuuguuuaga

SEQ ID NO: 1190338 - RNA, 21 nt, Human
cuggccaguggcuggaucugu

SEQ ID NO: 1190339 - RNA, 21 nt, Human
cugucucccuccucugcccgg

SEQ ID NO: 1190340 - RNA, 19 nt, Human
cugugaggggcucucucau

SEQ ID NO: 1190341 - RNA, 16 nt, Human
cuguguguuuaugugu

SEQ ID NO: 1190342 - RNA, 17 nt, Human
cuguguguuuaugugug

SEQ ID NO: 1190343 - RNA, 18 nt, Human
cuguguguuuaugugugu

SEQ ID NO: 1190344 - RNA, 13 nt, Human
cuuucccaacacc

SEQ ID NO: 1190345 - RNA, 18 nt, Human
cuugucacgccagacuuc

SEQ ID NO: 1190346 - RNA, 16 nt, Human
cuugucacgccagacu

SEQ ID NO: 1190347 - RNA, 13 nt, Human
cuugucacgccag

SEQ ID NO: 1190348 - RNA, 14 nt, Human
cuuuguggcacugg

SEQ ID NO: 1190349 - RNA, 14 nt, Human
gaccagccucucca

SEQ ID NO: 1190350 - RNA, 19 nt, Human
gaaugucaguauguggaag

SEQ ID NO: 1190351 - RNA, 13 nt, Human
gaaugucaguaug

SEQ ID NO: 1190352 - RNA, 16 nt, Human
gaaugucaguaugugg

SEQ ID NO: 1190353 - RNA, 18 nt, Human
gaaugucaguauguggaa

SEQ ID NO: 1190354 - RNA, 13 nt, Human
gagagacgggccc

SEQ ID NO: 1190355 - RNA, 17 nt, Human
gagaaugucaguaugug

SEQ ID NO: 1190356 - RNA, 20 nt, Human
gagaucccaacacugccagc

SEQ ID NO: 1190357 - RNA, 19 nt, Human
gagaucccaacacugccag

SEQ ID NO: 1190358 - RNA, 18 nt, Human
gagaucccaacacugcca

SEQ ID NO: 1190359 - RNA, 14 nt, Human
gaggcagggaagga

SEQ ID NO: 1190360 - RNA, 21 nt, Human
gaggcgaagcguuguccucag

SEQ ID NO: 1190361 - RNA, 20 nt, Human
gaggcgaagcguuguccuca

SEQ ID NO: 1190362 - RNA, 22 nt, Human
gaggccucucauuccagaggaa

SEQ ID NO: 1190363 - RNA, 14 nt, Human
gagggggagagggc

SEQ ID NO: 1190364 - RNA, 13 nt, Human
gaggguguccugc

SEQ ID NO: 1190365 - RNA, 23 nt, Human
gagucccugccuggaccagccuc

SEQ ID NO: 1190366 - RNA, 21 nt, Human
gagucccugccuggaccagcc

SEQ ID NO: 1190367 - RNA, 14 nt, Human
gauagaugugugga

SEQ ID NO: 1190368 - RNA, 22 nt, Human
gauagauguguggacacauugg

SEQ ID NO: 1190369 - RNA, 13 nt, Human
gaguguguaauuu

SEQ ID NO: 1190370 - RNA, 18 nt, Human
gcacuggggcaggggccg

SEQ ID NO: 1190371 - RNA, 15 nt, Human
gcacuggggcagggg

SEQ ID NO: 1190372 - RNA, 23 nt, Human
gcacuggggcaggggccgggggc

SEQ ID NO: 1190373 - RNA, 15 nt, Human
gaugggucaguugua

SEQ ID NO: 1190374 - RNA, 21 nt, Human
gaugggucaguuguaucagca

SEQ ID NO: 1190375 - RNA, 23 nt, Human
gcccuggugguggcucgggaggc

SEQ ID NO: 1190376 - RNA, 17 nt, Human
gccugacccucaucuuu

SEQ ID NO: 1190377 - RNA, 17 nt, Human
gcuaugagcuggggaug

SEQ ID NO: 1190378 - RNA, 22 nt, Human
gcuuuguggcacuggggcaggg

SEQ ID NO: 1190379 - RNA, 14 nt, Human
gcuuuguggcacug

SEQ ID NO: 1190380 - RNA, 22 nt, Human
ggaaggaucccaugagcuccuu

SEQ ID NO: 1190381 - RNA, 23 nt, Human
ggaagggacaccaagccuuggcu

SEQ ID NO: 1190382 - RNA, 22 nt, Human
ggagaaugucaguauguggaag

SEQ ID NO: 1190383 - RNA, 20 nt, Human
ggccauucuuucccaacacc

SEQ ID NO: 1190384 - RNA, 17 nt, Human
ggauggaaugauggguc

SEQ ID NO: 1190385 - RNA, 22 nt, Human
ggccuaaccugccgagagucca

SEQ ID NO: 1190386 - RNA, 12 nt, Human
ggcccugugccu

SEQ ID NO: 1190387 - RNA, 16 nt, Human
ggcuaggguggggaga

SEQ ID NO: 1190388 - RNA, 21 nt, Human
ggcuauggggauagaugugug

SEQ ID NO: 1190389 - RNA, 13 nt, Human
ggccugggcagga

SEQ ID NO: 1190390 - RNA, 14 nt, Human
ggccugggcaggag

SEQ ID NO: 1190391 - RNA, 16 nt, Human
ggcgcggcugggagga

SEQ ID NO: 1190392 - RNA, 14 nt, Human
gggcgcggcuggga

SEQ ID NO: 1190393 - RNA, 15 nt, Human
ggggcagucugagag

SEQ ID NO: 1190394 - RNA, 18 nt, Human
ggggaguuuagggugggg

SEQ ID NO: 1190395 - RNA, 13 nt, Human
ggggauagaugug

SEQ ID NO: 1190396 - RNA, 14 nt, Human
gucacgccagacuu

SEQ ID NO: 1190397 - RNA, 20 nt, Human
gucccagaaugccuccugca

SEQ ID NO: 1190398 - RNA, 12 nt, Human
guccucagcccc

SEQ ID NO: 1190399 - RNA, 23 nt, Human
gucccugccuggaccagccucuc

SEQ ID NO: 1190400 - RNA, 22 nt, Human
gucccugccuggaccagccucu

SEQ ID NO: 1190401 - RNA, 21 nt, Human
gucccugccuggaccagccuc

SEQ ID NO: 1190402 - RNA, 20 nt, Human
gucccugccuggaccagccu

SEQ ID NO: 1190403 - RNA, 12 nt, Human
gugacucuuucc

SEQ ID NO: 1190404 - RNA, 21 nt, Human
gugauuuuuaugccaccugaa

SEQ ID NO: 1190405 - RNA, 20 nt, Human
gugauuuuuaugccaccuga

SEQ ID NO: 1190406 - RNA, 19 nt, Human
gugauuuuuaugccaccug

SEQ ID NO: 1190407 - RNA, 17 nt, Human
gugauuuuuaugccacc

SEQ ID NO: 1190408 - RNA, 16 nt, Human
gugauuuuuaugccac

SEQ ID NO: 1190409 - RNA, 19 nt, Human
gugccuugucacgccagac

SEQ ID NO: 1190410 - RNA, 22 nt, Human
gugcuucuaguucugccaggag

SEQ ID NO: 1190411 - RNA, 21 nt, Human
gugcuucuaguucugccagga

SEQ ID NO: 1190412 - RNA, 20 nt, Human
gugcuucuaguucugccagg

SEQ ID NO: 1190413 - RNA, 18 nt, Human
guggcucgggaggcgaag

SEQ ID NO: 1190414 - RNA, 14 nt, Human
guggcauccagagu

SEQ ID NO: 1190415 - RNA, 16 nt, Human
uaggcuagggugggga

SEQ ID NO: 1190416 - RNA, 23 nt, Human
uaugagcuggggaugucucucau

SEQ ID NO: 1190417 - RNA, 14 nt, Human
uccaaacaggcuca

SEQ ID NO: 1190418 - RNA, 12 nt, Human
ucaucuuucuuc

SEQ ID NO: 1190419 - RNA, 21 nt, Human
uccagagucccugccuggacc

SEQ ID NO: 1190420 - RNA, 20 nt, Human
uccagagucccugccuggac

SEQ ID NO: 1190421 - RNA, 19 nt, Human
uccagagucccugccugga

SEQ ID NO: 1190422 - RNA, 18 nt, Human
uccagagucccugccugg

SEQ ID NO: 1190423 - RNA, 17 nt, Human
uccuacccccugugccu

SEQ ID NO: 1190424 - RNA, 16 nt, Human
uccuacccccugugcc

SEQ ID NO: 1190425 - RNA, 15 nt, Human
uccuacccccugugc

SEQ ID NO: 1190426 - RNA, 13 nt, Human
uccuacccccugu

SEQ ID NO: 1190427 - RNA, 23 nt, Human
uccugucucccuccucugcccgg

SEQ ID NO: 1190428 - RNA, 15 nt, Human
uccugucucccuccu

SEQ ID NO: 1190429 - RNA, 18 nt, Human
ucucccuccucugcccgg

SEQ ID NO: 1190430 - RNA, 21 nt, Human
ugagcuccuuaaggcucuuuu

SEQ ID NO: 1190431 - RNA, 19 nt, Human
ugagcuccuuaaggcucuu

SEQ ID NO: 1190432 - RNA, 20 nt, Human
ugagcuggggaugucucuca

SEQ ID NO: 1190433 - RNA, 17 nt, Human
ugacauacauccaacau

SEQ ID NO: 1190434 - RNA, 17 nt, Human
ugcccgggagcucagga

SEQ ID NO: 1190435 - RNA, 15 nt, Human
uggaccagccucucc

SEQ ID NO: 1190436 - RNA, 19 nt, Human
uggaucugugaggggcucu

SEQ ID NO: 1190437 - RNA, 15 nt, Human
uggaucugugagggg

SEQ ID NO: 1190438 - RNA, 18 nt, Human
ugggcaggagggaggugc

SEQ ID NO: 1190439 - RNA, 16 nt, Human
ugggcaggagggaggu

SEQ ID NO: 1190440 - RNA, 15 nt, Human
ugggcaggagggagg

SEQ ID NO: 1190441 - RNA, 13 nt, Human
ugggcaggaggga

SEQ ID NO: 1190442 - RNA, 11 nt, Human
ugggagugugu

SEQ ID NO: 1190443 - RNA, 13 nt, Human
ugggaguguguaa

SEQ ID NO: 1190444 - RNA, 20 nt, Human
uggggaguuuaggguggggg

SEQ ID NO: 1190445 - RNA, 16 nt, Human
uggggauagaugugug

SEQ ID NO: 1190446 - RNA, 17 nt, Human
uggggauagaugugugg

SEQ ID NO: 1190447 - RNA, 18 nt, Human
uggggauagaugugugga

SEQ ID NO: 1190448 - RNA, 20 nt, Human
uggggauagauguguggaca

SEQ ID NO: 1190449 - RNA, 14 nt, Human
ugggggucugugug

SEQ ID NO: 1190450 - RNA, 15 nt, Human
ugggggucugugugu

SEQ ID NO: 1190451 - RNA, 13 nt, Human
uuaugccaccuga

SEQ ID NO: 1190452 - RNA, 16 nt, Human
uuaugccaccugaaua

SEQ ID NO: 1190453 - RNA, 12 nt, Human
uuaacucagucu

SEQ ID NO: 1190454 - RNA, 19 nt, Human
uguuuagaagaaguguguc

SEQ ID NO: 1190455 - RNA, 14 nt, Human
uuuaugccaccuga

SEQ ID NO: 1190456 - RNA, 20 nt, Human
uuuacagaggacaguauuug

SEQ ID NO: 1190457 - RNA, 16 nt, Human
uuuaaaauugugaugu

SEQ ID NO: 1190458 - RNA, 15 nt, Human
uuguuuagaagaagu

SEQ ID NO: 1190459 - RNA, 18 nt, Human
uuguuuagaagaagugug

SEQ ID NO: 1190460 - RNA, 16 nt, Human
uuggcagcucuacucu

SEQ ID NO: 1190461 - RNA, 11 nt, Human
uuuguggggag

SEQ ID NO: 1190462 - RNA, 23 nt, Human
agucugagagaggccauucuuuc

SEQ ID NO: 1190463 - RNA, 16 nt, Human
agucugagagaggcca

SEQ ID NO: 1190464 - RNA, 21 nt, Human
auccagagucccugccuggac

SEQ ID NO: 1190465 - RNA, 20 nt, Human
auccagagucccugccugga

SEQ ID NO: 1190466 - RNA, 19 nt, Human
auccagagucccugccugg

SEQ ID NO: 1190467 - RNA, 16 nt, Human
augaugggucaguugu

SEQ ID NO: 1190468 - RNA, 18 nt, Human
agcuccuuaaggcucuuu

SEQ ID NO: 1190469 - RNA, 17 nt, Human
agcuccuuaaggcucuu

SEQ ID NO: 1190470 - RNA, 16 nt, Human
agcuccuuaaggcucu

SEQ ID NO: 1190471 - RNA, 19 nt, Human
agcuaauucuuugaccugu

SEQ ID NO: 1190472 - RNA, 16 nt, Human
aggaaccgaggcaggg

SEQ ID NO: 1190473 - RNA, 22 nt, Human
aggaacugcugggcuuggcagc

SEQ ID NO: 1190474 - RNA, 10 nt, Human
agagggcugc

SEQ ID NO: 1190475 - RNA, 18 nt, Human
aagagaagggcagggcug

SEQ ID NO: 1190476 - RNA, 23 nt, Human
acagaggacaguauuugugggga

SEQ ID NO: 1190477 - RNA, 11 nt, Human
aauugugaugu

SEQ ID NO: 1190478 - RNA, 14 nt, Human
aauugugauguguc

SEQ ID NO: 1190479 - RNA, 15 nt, Human
aauugugaugugucc

SEQ ID NO: 1190480 - RNA, 14 nt, Human
accaucucuuuacc

SEQ ID NO: 1190481 - RNA, 14 nt, Human
gccaggauggaaug

SEQ ID NO: 1190482 - RNA, 14 nt, Human
gccaguggcuggau

SEQ ID NO: 1190483 - RNA, 23 nt, Human
gccaguggcuggaucugugaggg

SEQ ID NO: 1190484 - RNA, 22 nt, Human
gcggcugggaggagggcaggca

SEQ ID NO: 1190485 - RNA, 19 nt, Human
gcggcugggaggagggcag

SEQ ID NO: 1190486 - RNA, 18 nt, Human
gcggcugggaggagggca

SEQ ID NO: 1190487 - RNA, 17 nt, Human
gcggcugggaggagggc

SEQ ID NO: 1190488 - RNA, 14 nt, Human
gcggcugggaggag

SEQ ID NO: 1190489 - RNA, 14 nt, Human
ggaacugcugggcu

SEQ ID NO: 1190490 - RNA, 15 nt, Human
ggaacugcugggcuu

SEQ ID NO: 1190491 - RNA, 20 nt, Human
gcuguagacauuugcuauga

SEQ ID NO: 1190492 - RNA, 13 nt, Human
gcuggaucuguga

SEQ ID NO: 1190493 - RNA, 19 nt, Human
gcuuuccucaucaggccau

SEQ ID NO: 1190494 - RNA, 14 nt, Human
gcugaggccucuca

SEQ ID NO: 1190495 - RNA, 18 nt, Human
gcuccucgagaucccaac

SEQ ID NO: 1190496 - RNA, 22 nt, Human
gcugcuccccacgucagcuggg

SEQ ID NO: 1190497 - RNA, 13 nt, Human
gcugcuccccacg

SEQ ID NO: 1190498 - RNA, 13 nt, Human
ggaugucugggcc

SEQ ID NO: 1190499 - RNA, 13 nt, Human
ggcacagccuggc

SEQ ID NO: 1190500 - RNA, 12 nt, Human
ggcacagccugg

SEQ ID NO: 1190501 - RNA, 17 nt, Human
ggcccugugccuuggug

SEQ ID NO: 1190502 - RNA, 15 nt, Human
ggcacuggggcaggg

SEQ ID NO: 1190503 - RNA, 22 nt, Human
ggcauccagagucccugccugg

SEQ ID NO: 1190504 - RNA, 19 nt, Human
ggccaguggcuggaucugu

SEQ ID NO: 1190505 - RNA, 22 nt, Human
ggcgaagcguuguccucagccc

SEQ ID NO: 1190506 - RNA, 14 nt, Human
aaaagggaggggga

SEQ ID NO: 1190507 - RNA, 14 nt, Human
gggaugucucucau

SEQ ID NO: 1190508 - RNA, 19 nt, Human
gggagaaugucaguaugug

SEQ ID NO: 1190509 - RNA, 22 nt, Human
gggagaaugucaguauguggaa

SEQ ID NO: 1190510 - RNA, 22 nt, Human
gggcccuggugguggcucggga

SEQ ID NO: 1190511 - RNA, 18 nt, Human
gggcucagagugggguag

SEQ ID NO: 1190512 - RNA, 13 nt, Human
ggguggggagaga

SEQ ID NO: 1190513 - RNA, 23 nt, Human
ggguguccugcaccggggccugg

SEQ ID NO: 1190514 - RNA, 16 nt, Human
gguaggaacugcuggg

SEQ ID NO: 1190515 - RNA, 21 nt, Human
ggugcuucuaguucugccagg

SEQ ID NO: 1190516 - RNA, 20 nt, Human
ggucuguguguguguaugug

SEQ ID NO: 1190517 - RNA, 21 nt, Human
ggucuguguguguguaugugg

SEQ ID NO: 1190518 - RNA, 11 nt, Human
ggucugugugu

SEQ ID NO: 1190519 - RNA, 17 nt, Human
ggucuguguguguguau

SEQ ID NO: 1190520 - RNA, 16 nt, Human
guaaauuuaugugaug

SEQ ID NO: 1190521 - RNA, 17 nt, Human
guaaauuuaugugaugg

SEQ ID NO: 1190522 - RNA, 17 nt, Human
cugccaucauguuuaca

SEQ ID NO: 1190523 - RNA, 22 nt, Human
cugccaucauguuuacagagga

SEQ ID NO: 1190524 - RNA, 23 nt, Human
cugccaucauguuuacagaggac

SEQ ID NO: 1190525 - RNA, 22 nt, Human
cuggggaugucucucaugacca

SEQ ID NO: 1190526 - RNA, 18 nt, Human
cuuauuggcagcucuacu

SEQ ID NO: 1190527 - RNA, 19 nt, Human
gagcuggggaugucucuca

SEQ ID NO: 1190528 - RNA, 19 nt, Human
gaagugugggucugugugu

SEQ ID NO: 1190529 - RNA, 17 nt, Human
gaagugugggucugugu

SEQ ID NO: 1190530 - RNA, 18 nt, Human
gaagugugggucugugug

SEQ ID NO: 1190531 - RNA, 15 nt, Human
gaaggcuauggggau

SEQ ID NO: 1190532 - RNA, 19 nt, Human
gaagggcagggcugaggcc

SEQ ID NO: 1190533 - RNA, 16 nt, Human
gacagguuagcugcuc

SEQ ID NO: 1190534 - RNA, 15 nt, Human
gacaguauuuguggg

SEQ ID NO: 1190535 - RNA, 16 nt, Human
gaguccaucagccucc

SEQ ID NO: 1190536 - RNA, 15 nt, Human
gaguccaucagccuc

SEQ ID NO: 1190537 - RNA, 14 nt, Human
gaguccaucagccu

SEQ ID NO: 1190538 - RNA, 13 nt, Human
gaguccaucagcc

SEQ ID NO: 1190539 - RNA, 18 nt, Human
gagugaggaugucugggc

SEQ ID NO: 1190540 - RNA, 15 nt, Human
gaguuuagggugggg

SEQ ID NO: 1190541 - RNA, 14 nt, Human
gaguuuaggguggg

SEQ ID NO: 1190542 - RNA, 16 nt, Human
gaucccaacacugcca

SEQ ID NO: 1190543 - RNA, 12 nt, Human
gaucccaacacu

SEQ ID NO: 1190544 - RNA, 20 nt, Human
gcaccggggccugggcagga

SEQ ID NO: 1190545 - RNA, 24 nt, Human
cagccccgcguggaacucgugucu

SEQ ID NO: 1190546 - RNA, 24 nt, Human
cagccucuccacucaugugacucu

SEQ ID NO: 1190547 - RNA, 15 nt, Human
caguauuugugggga

SEQ ID NO: 1190548 - RNA, 22 nt, Human
cacugccagcauuucccuuccu

SEQ ID NO: 1190549 - RNA, 18 nt, Human
cacugccagcauuucccu

SEQ ID NO: 1190550 - RNA, 15 nt, Human
caaacaggcucagag

SEQ ID NO: 1190551 - RNA, 14 nt, Human
caaacaggcucaga

SEQ ID NO: 1190552 - RNA, 22 nt, Human
auuuguggggagggauuugggg

SEQ ID NO: 1190553 - RNA, 16 nt, Human
auuugcuaugagcugg

SEQ ID NO: 1190554 - RNA, 20 nt, Human
auuugcuaugagcuggggau

SEQ ID NO: 1190555 - RNA, 19 nt, Human
auucuuucccaacaccucu

SEQ ID NO: 1190556 - RNA, 16 nt, Human
auucuuucccaacacc

SEQ ID NO: 1190557 - RNA, 22 nt, Human
cccugugccuugucacgccaga

SEQ ID NO: 1190558 - RNA, 20 nt, Human
cccugugccuugucacgcca

SEQ ID NO: 1190559 - RNA, 15 nt, Human
cccugugccuuguca

SEQ ID NO: 1190560 - RNA, 24 nt, Human
cccugugccuuggugugcuguauc

SEQ ID NO: 1190561 - RNA, 14 nt, Human
ccugacucucagca

SEQ ID NO: 1190562 - RNA, 14 nt, Human
cccgggagcucagg

SEQ ID NO: 1190563 - RNA, 14 nt, Human
ccccgacuuuuguu

SEQ ID NO: 1190564 - RNA, 12 nt, Human
ccaugagcuccu

SEQ ID NO: 1190565 - RNA, 22 nt, Human
ccagagucccugccuggaccag

SEQ ID NO: 1190566 - RNA, 19 nt, Human
ccagagucccugccuggac

SEQ ID NO: 1190567 - RNA, 18 nt, Human
ccagagucccugccugga

SEQ ID NO: 1190568 - RNA, 17 nt, Human
ccagagucccugccugg

SEQ ID NO: 1190569 - RNA, 16 nt, Human
ccagagucccugccug

SEQ ID NO: 1190570 - RNA, 23 nt, Human
cggcuccucgagaucccaacacu

SEQ ID NO: 1190571 - RNA, 21 nt, Human
cgugucuggcacagccuggcu

SEQ ID NO: 1190572 - RNA, 14 nt, Human
cgugucuggcacag

SEQ ID NO: 1190573 - RNA, 21 nt, Human
cuaaccugccgagaguccauc

SEQ ID NO: 1190574 - RNA, 19 nt, Human
cuaaccugccgagagucca

SEQ ID NO: 1190575 - RNA, 14 nt, Human
cucccuccucugcc

SEQ ID NO: 1190576 - RNA, 13 nt, Human
cucccuccucugc

SEQ ID NO: 1190577 - RNA, 16 nt, Human
cucaucuuucuuccaa

SEQ ID NO: 1190578 - RNA, 19 nt, Human
gucucccuccucugcccgg

SEQ ID NO: 1190579 - RNA, 19 nt, Human
aacucgugucuggcacagc

SEQ ID NO: 1190580 - RNA, 19 nt, Human
gucuggcacagccuggcug

SEQ ID NO: 1190581 - RNA, 17 nt, Human
gucuggcacagccuggc

SEQ ID NO: 1190582 - RNA, 17 nt, Human
gucaguauguggaagug

SEQ ID NO: 1190583 - RNA, 21 nt, Human
gucaguauguggaaguguggg

SEQ ID NO: 1190584 - RNA, 13 nt, Human
gucaguuguauca

SEQ ID NO: 1190585 - RNA, 12 nt, Human
aaauugugaugu

SEQ ID NO: 1190586 - RNA, 15 nt, Human
aaauugugauguguc

SEQ ID NO: 1190587 - RNA, 12 nt, Human
aaauuuauguga

SEQ ID NO: 1190588 - RNA, 15 nt, Human
aaauuuaugugaugg

SEQ ID NO: 1190589 - RNA, 22 nt, Human
guggccuaaccugccgagaguc

SEQ ID NO: 1190590 - RNA, 21 nt, Human
guggccuaaccugccgagagu

SEQ ID NO: 1190591 - RNA, 14 nt, Human
gugugggucugugu

SEQ ID NO: 1190592 - RNA, 20 nt, Human
gugugucacccuuaggccag

SEQ ID NO: 1190593 - RNA, 13 nt, Human
guguguauguggg

SEQ ID NO: 1190594 - RNA, 15 nt, Human
guguguauguggggg

SEQ ID NO: 1190595 - RNA, 19 nt, Human
gugggguagguugggagaa

SEQ ID NO: 1190596 - RNA, 16 nt, Human
gugugugggagugugu

SEQ ID NO: 1190597 - RNA, 14 nt, Human
aaggcucuuuugua

SEQ ID NO: 1190598 - RNA, 15 nt, Human
uacccccugugccuu

SEQ ID NO: 1190599 - RNA, 13 nt, Human
uaccucuuggcug

SEQ ID NO: 1190600 - RNA, 19 nt, Human
uaauuuaaaauugugaugu

SEQ ID NO: 1190601 - RNA, 20 nt, Human
uaauuuaaaauugugaugug

SEQ ID NO: 1190602 - RNA, 20 nt, Human
uaugccaccugaauaaagaa

SEQ ID NO: 1190603 - RNA, 21 nt, Human
uaugguaggaacugcugggcu

SEQ ID NO: 1190604 - RNA, 15 nt, Human
uaucagcacgugugg

SEQ ID NO: 1190605 - RNA, 14 nt, Human
uaucagcacgugug

SEQ ID NO: 1190606 - RNA, 21 nt, Human
uagacauuugcuaugagcugg

SEQ ID NO: 1190607 - RNA, 14 nt, Human
uagaagaagugugu

SEQ ID NO: 1190608 - RNA, 16 nt, Human
aauuccacacccucac

SEQ ID NO: 1190609 - RNA, 20 nt, Human
uccauccuacccccugugcc

SEQ ID NO: 1190610 - RNA, 16 nt, Human
uccauccuacccccug

SEQ ID NO: 1190611 - RNA, 23 nt, Human
acucgugucuggcacagccuggc

SEQ ID NO: 1190612 - RNA, 22 nt, Human
acucgugucuggcacagccugg

SEQ ID NO: 1190613 - RNA, 13 nt, Human
uccucuccugucu

SEQ ID NO: 1190614 - RNA, 22 nt, Human
uccucugcccgggagcucagga

SEQ ID NO: 1190615 - RNA, 16 nt, Human
uccucugcccgggagc

SEQ ID NO: 1190616 - RNA, 18 nt, Human
uaugugggggucugugug

SEQ ID NO: 1190617 - RNA, 19 nt, Human
uaugugggggucugugugu

SEQ ID NO: 1190618 - RNA, 20 nt, Human
uaugugggggucuguguguu

SEQ ID NO: 1190619 - RNA, 20 nt, Human
ucggggagccgggagccuga

SEQ ID NO: 1190620 - RNA, 14 nt, Human
ucuaguucugccag

SEQ ID NO: 1190621 - RNA, 15 nt, Human
ucuaccucuuggcug

SEQ ID NO: 1190622 - RNA, 22 nt, Human
ucuggcacagccuggcuguggc

SEQ ID NO: 1190623 - RNA, 23 nt, Human
ucuuggggaguuuaggguggggg

SEQ ID NO: 1190624 - RNA, 22 nt, Human
ucuuggggaguuuagggugggg

SEQ ID NO: 1190625 - RNA, 17 nt, Human
agagacgggcccuggug

SEQ ID NO: 1190626 - RNA, 21 nt, Human
ugacccucaucuuucuuccaa

SEQ ID NO: 1190627 - RNA, 17 nt, Human
agcauuucccuuccuuc

SEQ ID NO: 1190628 - RNA, 21 nt, Human
ugauagaaggcuauggggaua

SEQ ID NO: 1190629 - RNA, 24 nt, Human
ugauaagcagucauccucagauca

SEQ ID NO: 1190630 - RNA, 18 nt, Human
ugaguucauaaauuuaug

SEQ ID NO: 1190631 - RNA, 18 nt, Human
agccugacccucaucuuu

SEQ ID NO: 1190632 - RNA, 22 nt, Human
agcucaggaaccgaggcaggga

SEQ ID NO: 1190633 - RNA, 21 nt, Human
agcucaggaaccgaggcaggg

SEQ ID NO: 1190634 - RNA, 20 nt, Human
agcucaggaaccgaggcagg

SEQ ID NO: 1190635 - RNA, 21 nt, Human
agcugggacaccccgacuuuu

SEQ ID NO: 1190636 - RNA, 23 nt, Human
ugcuguauccauccauggggcug

SEQ ID NO: 1190637 - RNA, 18 nt, Human
ugcuauuguagagccaga

SEQ ID NO: 1190638 - RNA, 16 nt, Human
uggccuaaccugccga

SEQ ID NO: 1190639 - RNA, 21 nt, Human
uggccuguucuucuauggguu

SEQ ID NO: 1190640 - RNA, 12 nt, Human
aggacaguauuu

SEQ ID NO: 1190641 - RNA, 19 nt, Human
aggacaguauuugugggga

SEQ ID NO: 1190642 - RNA, 19 nt, Human
uggggaguuuagggugggg

SEQ ID NO: 1190643 - RNA, 18 nt, Human
uggggaguuuaggguggg

SEQ ID NO: 1190644 - RNA, 21 nt, Human
ugggguagguugggagaaugu

SEQ ID NO: 1190645 - RNA, 15 nt, Human
ugggguagguuggga

SEQ ID NO: 1190646 - RNA, 14 nt, Human
uggggcugauugua

SEQ ID NO: 1190647 - RNA, 16 nt, Human
agggggagagggcugc

SEQ ID NO: 1190648 - RNA, 15 nt, Human
agggggagagggcug

SEQ ID NO: 1190649 - RNA, 13 nt, Human
ugggucugugugu

SEQ ID NO: 1190650 - RNA, 12 nt, Human
ugggucugugug

SEQ ID NO: 1190651 - RNA, 13 nt, Human
ugguaggaacugc

SEQ ID NO: 1190652 - RNA, 20 nt, Human
ugguaggaacugcugggcuu

SEQ ID NO: 1190653 - RNA, 23 nt, Human
agucccugccuggaccagccucu

SEQ ID NO: 1190654 - RNA, 22 nt, Human
agucccugccuggaccagccuc

SEQ ID NO: 1190655 - RNA, 21 nt, Human
agucccugccuggaccagccu

SEQ ID NO: 1190656 - RNA, 15 nt, Human
agucccugccuggac

SEQ ID NO: 1190657 - RNA, 14 nt, Human
agucccugccugga

SEQ ID NO: 1190658 - RNA, 19 nt, Human
aguauguggaagugugggu

SEQ ID NO: 1190659 - RNA, 15 nt, Human
aguauguggaagugu

SEQ ID NO: 1190660 - RNA, 17 nt, Human
aguauguggaagugugg

SEQ ID NO: 1190661 - RNA, 18 nt, Human
ugucaguauguggaagug

SEQ ID NO: 1190662 - RNA, 19 nt, Human
ugucaguauguggaagugu

SEQ ID NO: 1190663 - RNA, 20 nt, Human
ugucaguauguggaagugug

SEQ ID NO: 1190664 - RNA, 22 nt, Human
ugucaguauguggaaguguggg

SEQ ID NO: 1190665 - RNA, 21 nt, Human
uguaauuuaaaauugugaugu

SEQ ID NO: 1190666 - RNA, 22 nt, Human
uguaauuuaaaauugugaugug

SEQ ID NO: 1190667 - RNA, 17 nt, Human
uguaauuuaaaauugug

SEQ ID NO: 1190668 - RNA, 18 nt, Human
uguaauuuaaaauuguga

SEQ ID NO: 1190669 - RNA, 20 nt, Human
uguaauuuaaaauugugaug

SEQ ID NO: 1190670 - RNA, 23 nt, Human
agguugggagaaugucaguaugu

SEQ ID NO: 1190671 - RNA, 19 nt, Human
uguggcacuggggcagggg

SEQ ID NO: 1190672 - RNA, 13 nt, Human
uguguguguguau

SEQ ID NO: 1190673 - RNA, 16 nt, Human
uguguguguguaugug

SEQ ID NO: 1190674 - RNA, 16 nt, Human
uguugugugugggagu

SEQ ID NO: 1190675 - RNA, 14 nt, Human
uguuguguguggga

SEQ ID NO: 1190676 - RNA, 15 nt, Human
uguugugugugggag

SEQ ID NO: 1190677 - RNA, 19 nt, Human
agugugggucugugugugu

SEQ ID NO: 1190678 - RNA, 23 nt, Human
agugugggucuguguguguguau

SEQ ID NO: 1190679 - RNA, 15 nt, Human
agugugggucugugu

SEQ ID NO: 1190680 - RNA, 16 nt, Human
agugugggucugugug

SEQ ID NO: 1190681 - RNA, 17 nt, Human
agugugggucugugugu

SEQ ID NO: 1190682 - RNA, 16 nt, Human
uuagccuuugucccag

SEQ ID NO: 1190683 - RNA, 16 nt, Human
uucuaguucugccagg

SEQ ID NO: 1190684 - RNA, 15 nt, Human
uucuaguucugccag

SEQ ID NO: 1190685 - RNA, 13 nt, Human
aucaggccauugu

SEQ ID NO: 1190686 - RNA, 16 nt, Human
auggccugggggaugu

SEQ ID NO: 1190687 - RNA, 21 nt, Human
auggaaugaugggucaguugu

SEQ ID NO: 1190688 - RNA, 12 nt, Human
uuuaugugaugg

SEQ ID NO: 1190689 - RNA, 11 nt, Human
uuuaugugugu

SEQ ID NO: 1190690 - RNA, 13 nt, Human
uuuaugugugugu

SEQ ID NO: 1190691 - RNA, 16 nt, Human
aucuguaccucugccu

SEQ ID NO: 1190692 - RNA, 20 nt, Human
auuuaaaauugugauguguc

SEQ ID NO: 1190693 - RNA, 23 nt, Human
auugcaggagucccugccaucau

SEQ ID NO: 1190694 - RNA, 15 nt, Human
auguuuacagaggac

SEQ ID NO: 1190695 - RNA, 17 nt, Human
auguuuacagaggacag

SEQ ID NO: 1190696 - RNA, 19 nt, Human
auguuuacagaggacagua

SEQ ID NO: 1190697 - RNA, 17 nt, Human
uuuguaaauuuauguga

SEQ ID NO: 1190698 - RNA, 19 nt, Human
uuugcuaugagcuggggau

SEQ ID NO: 1190699 - RNA, 13 nt, Human
augucaguaugug

SEQ ID NO: 1190700 - RNA, 14 nt, Human
augucaguaugugg

SEQ ID NO: 1190701 - RNA, 16 nt, Human
augucaguauguggaa

SEQ ID NO: 1190702 - RNA, 17 nt, Human
caagccuuggcucuacc

SEQ ID NO: 1190703 - RNA, 14 nt, Human
cccucaucuuucuu

SEQ ID NO: 1190704 - RNA, 18 nt, Human
cccugccuggaccagccu

SEQ ID NO: 1190705 - RNA, 13 nt, Human
cccugccuggacc

SEQ ID NO: 1190706 - RNA, 12 nt, Human
cccugccuggac

SEQ ID NO: 1190707 - RNA, 20 nt, Human
cccugccaucauguuuacag

SEQ ID NO: 1190708 - RNA, 19 nt, Human
ccggcuuuguggcacuggg

SEQ ID NO: 1190709 - RNA, 17 nt, Human
ccggcuuuguggcacug

SEQ ID NO: 1190710 - RNA, 19 nt, Human
ccggggccugggcaggagg

SEQ ID NO: 1190711 - RNA, 15 nt, Human
ccggggccugggcag

SEQ ID NO: 1190712 - RNA, 15 nt, Human
ccgggagcucaggaa

SEQ ID NO: 1190713 - RNA, 13 nt, Human
ccgggagcucagg

SEQ ID NO: 1190714 - RNA, 18 nt, Human
ccucagccccgcguggaa

SEQ ID NO: 1190715 - RNA, 23 nt, Human
ccuccauccuacccccugugccu

SEQ ID NO: 1190716 - RNA, 22 nt, Human
ccuccauccuacccccugugcc

SEQ ID NO: 1190717 - RNA, 17 nt, Human
ccuccauccuacccccu

SEQ ID NO: 1190718 - RNA, 21 nt, Human
cccagcuaugguucucucgca

SEQ ID NO: 1190719 - RNA, 20 nt, Human
ccaucauguuuacagaggac

SEQ ID NO: 1190720 - RNA, 22 nt, Human
ccaucauguuuacagaggacag

SEQ ID NO: 1190721 - RNA, 19 nt, Human
cauggggcugauuguauuu

SEQ ID NO: 1190722 - RNA, 21 nt, Human
cauuaccucagugagaagcca

SEQ ID NO: 1190723 - RNA, 22 nt, Human
cauuaccucagugagaagccag

SEQ ID NO: 1190724 - RNA, 15 nt, Human
cauaccuggcccugu

SEQ ID NO: 1190725 - RNA, 18 nt, Human
cauaaucacaacccuuca

SEQ ID NO: 1190726 - RNA, 16 nt, Human
caguggcuggaucugu

SEQ ID NO: 1190727 - RNA, 18 nt, Human
caguggcuggaucuguga

SEQ ID NO: 1190728 - RNA, 20 nt, Human
caguggcuggaucugugagg

SEQ ID NO: 1190729 - RNA, 18 nt, Human
cggcugggaggagggcag

SEQ ID NO: 1190730 - RNA, 17 nt, Human
cgggagccugacccuca

SEQ ID NO: 1190731 - RNA, 12 nt, Human
cggcugggagga

SEQ ID NO: 1190732 - RNA, 19 nt, Human
cggggccugggcaggaggg

SEQ ID NO: 1190733 - RNA, 17 nt, Human
cggggccugggcaggag

SEQ ID NO: 1190734 - RNA, 21 nt, Human
cgggggcagucugagagaggc

SEQ ID NO: 1190735 - RNA, 18 nt, Human
cgggggcagucugagaga

SEQ ID NO: 1190736 - RNA, 17 nt, Human
cgggggcagucugagag

SEQ ID NO: 1190737 - RNA, 15 nt, Human
cgggucaucuguacc

SEQ ID NO: 1190738 - RNA, 22 nt, Human
cgggucaucuguaccucugccu

SEQ ID NO: 1190739 - RNA, 23 nt, Human
cguggcuguggcauccagagucc

SEQ ID NO: 1190740 - RNA, 16 nt, Human
cguuguccucagcccc

SEQ ID NO: 1190741 - RNA, 14 nt, Human
cuacccccugugcc

SEQ ID NO: 1190742 - RNA, 18 nt, Human
cuccauccuacccccugu

SEQ ID NO: 1190743 - RNA, 22 nt, Human
cuccauccuacccccugugccu

SEQ ID NO: 1190744 - RNA, 20 nt, Human
cuccauccuacccccugugc

SEQ ID NO: 1190745 - RNA, 23 nt, Human
cuccauccuacccccugugccuu

SEQ ID NO: 1190746 - RNA, 24 nt, Human
cuccucgagaucccaacacugcca

SEQ ID NO: 1190747 - RNA, 21 nt, Human
cuccucgagaucccaacacug

SEQ ID NO: 1190748 - RNA, 17 nt, Human
cuccucgagaucccaac

SEQ ID NO: 1190749 - RNA, 21 nt, Human
cucuccacucaugugacucuu

SEQ ID NO: 1190750 - RNA, 22 nt, Human
cucuccacucaugugacucuuu

SEQ ID NO: 1190751 - RNA, 18 nt, Human
cucuccugucucccuccu

SEQ ID NO: 1190752 - RNA, 17 nt, Human
cucuccugucucccucc

SEQ ID NO: 1190753 - RNA, 15 nt, Human
cucuccugucucccu

SEQ ID NO: 1190754 - RNA, 23 nt, Human
cucuuggggaguuuagggugggg

SEQ ID NO: 1190755 - RNA, 19 nt, Human
cugcccgggagcucaggaa

SEQ ID NO: 1190756 - RNA, 11 nt, Human
cugccaggaga

SEQ ID NO: 1190757 - RNA, 21 nt, Human
cuggcacagccuggcuguggc

SEQ ID NO: 1190758 - RNA, 16 nt, Human
cuggcacagccuggcu

SEQ ID NO: 1190759 - RNA, 23 nt, Human
cuggcacagccuggcuguggccu

SEQ ID NO: 1190760 - RNA, 18 nt, Human
cuggcuguggccuaaccu

SEQ ID NO: 1190761 - RNA, 19 nt, Human
cugggaggagggcaggcau

SEQ ID NO: 1190762 - RNA, 14 nt, Human
cuguaccucugccu

SEQ ID NO: 1190763 - RNA, 21 nt, Human
cuuggggaguuuagggugggg

SEQ ID NO: 1190764 - RNA, 20 nt, Human
cuuggggaguuuaggguggg

SEQ ID NO: 1190765 - RNA, 23 nt, Human
cuugucacgccagacuucccacg

SEQ ID NO: 1190766 - RNA, 22 nt, Human
cuuucuuccaaacaggcucaga

SEQ ID NO: 1190767 - RNA, 19 nt, Human
cuuucuuccaaacaggcuc

SEQ ID NO: 1190768 - RNA, 13 nt, Human
cuuucuuccaaac

SEQ ID NO: 1190769 - RNA, 12 nt, Human
cuuuggacuugu

SEQ ID NO: 1190770 - RNA, 21 nt, Human
gaaggaucccaugagcuccuu

SEQ ID NO: 1190771 - RNA, 13 nt, Human
gaagaaguguguc

SEQ ID NO: 1190772 - RNA, 20 nt, Human
gacaccuaggcuaggguggg

SEQ ID NO: 1190773 - RNA, 16 nt, Human
gacaccuaggcuaggg

SEQ ID NO: 1190774 - RNA, 15 nt, Human
gacaccuaggcuagg

SEQ ID NO: 1190775 - RNA, 17 nt, Human
gaccuuuccugaggaag

SEQ ID NO: 1190776 - RNA, 21 nt, Human
gagagaggccauucuuuccca

SEQ ID NO: 1190777 - RNA, 13 nt, Human
gagagaggccauu

SEQ ID NO: 1190778 - RNA, 18 nt, Human
gacuugucccgggacacc

SEQ ID NO: 1190779 - RNA, 22 nt, Human
gagaagccagcuuuccucauca

SEQ ID NO: 1190780 - RNA, 21 nt, Human
gagccugacccucaucuuucu

SEQ ID NO: 1190781 - RNA, 22 nt, Human
gagcucaggaaccgaggcaggg

SEQ ID NO: 1190782 - RNA, 21 nt, Human
gagcucaggaaccgaggcagg

SEQ ID NO: 1190783 - RNA, 20 nt, Human
gagcucaggaaccgaggcag

SEQ ID NO: 1190784 - RNA, 17 nt, Human
gaucccaugagcuccuu

SEQ ID NO: 1190785 - RNA, 14 nt, Human
gaucauuaucagcc

SEQ ID NO: 1190786 - RNA, 13 nt, Human
gauagaugugugg

SEQ ID NO: 1190787 - RNA, 20 nt, Human
gauggcaaagaaggagagca

SEQ ID NO: 1190788 - RNA, 21 nt, Human
gaucugugaggggcucucuca

SEQ ID NO: 1190789 - RNA, 20 nt, Human
gauuuggggcucagaguggg

SEQ ID NO: 1190790 - RNA, 23 nt, Human
gauugcaggagucccugccauca

SEQ ID NO: 1190791 - RNA, 20 nt, Human
gcaggggccgggggcagucu

SEQ ID NO: 1190792 - RNA, 19 nt, Human
gcaggggccgggggcaguc

SEQ ID NO: 1190793 - RNA, 18 nt, Human
gcauuauauuuguaaauu

SEQ ID NO: 1190794 - RNA, 19 nt, Human
gcccgggagcucaggaacc

SEQ ID NO: 1190795 - RNA, 17 nt, Human
gcccgggagcucaggaa

SEQ ID NO: 1190796 - RNA, 15 nt, Human
gcccgggagcucagg

SEQ ID NO: 1190797 - RNA, 17 nt, Human
gccaucauguuuacaga

SEQ ID NO: 1190798 - RNA, 21 nt, Human
gccaucauguuuacagaggac

SEQ ID NO: 1190799 - RNA, 17 nt, Human
gccuaaccugccgagag

SEQ ID NO: 1190800 - RNA, 24 nt, Human
gccucuccacucaugugacucuuu

SEQ ID NO: 1190801 - RNA, 21 nt, Human
gccucuccacucaugugacuc

SEQ ID NO: 1190802 - RNA, 20 nt, Human
gccucucauuccagaggaag

SEQ ID NO: 1190803 - RNA, 19 nt, Human
gccucucauuccagaggaa

SEQ ID NO: 1190804 - RNA, 18 nt, Human
gccuuuggacuugucccg

SEQ ID NO: 1190805 - RNA, 18 nt, Human
gcgcggcugggaggaggg

SEQ ID NO: 1190806 - RNA, 12 nt, Human
gcgcggcuggga

SEQ ID NO: 1190807 - RNA, 19 nt, Human
guagugauuuuuaugccac

SEQ ID NO: 1190808 - RNA, 14 nt, Human
guagguugggagaa

SEQ ID NO: 1190809 - RNA, 22 nt, Human
gucagcugggacaccccgacuu

SEQ ID NO: 1190810 - RNA, 16 nt, Human
gucccugaagagaagg

SEQ ID NO: 1190811 - RNA, 13 nt, Human
gucccugccugga

SEQ ID NO: 1190812 - RNA, 14 nt, Human
gucccugccuggac

SEQ ID NO: 1190813 - RNA, 18 nt, Human
gucugagagaggccauuc

SEQ ID NO: 1190814 - RNA, 15 nt, Human
gucugagagaggcca

SEQ ID NO: 1190815 - RNA, 14 nt, Human
gucugagagaggcc

SEQ ID NO: 1190816 - RNA, 13 nt, Human
gucugagagaggc

SEQ ID NO: 1190817 - RNA, 11 nt, Human
gucugugugug

SEQ ID NO: 1190818 - RNA, 12 nt, Human
gucugugugugu

SEQ ID NO: 1190819 - RNA, 16 nt, Human
gucuguguguguguau

SEQ ID NO: 1190820 - RNA, 20 nt, Human
gucuguguguguguaugugg

SEQ ID NO: 1190821 - RNA, 11 nt, Human
gucuguguguu

SEQ ID NO: 1190822 - RNA, 21 nt, Human
gucuguguguuuaugugugug

SEQ ID NO: 1190823 - RNA, 22 nt, Human
gucuguguguuuaugugugugu

SEQ ID NO: 1190824 - RNA, 21 nt, Human
gugacuauggagcugagcagg

SEQ ID NO: 1190825 - RNA, 15 nt, Human
gugaggaugucuggg

SEQ ID NO: 1190826 - RNA, 14 nt, Human
gugccuuuugccau

SEQ ID NO: 1190827 - RNA, 21 nt, Human
gugccaggauggaaugauggg

SEQ ID NO: 1190828 - RNA, 16 nt, Human
guggcucgggaggcga

SEQ ID NO: 1190829 - RNA, 17 nt, Human
guggcuggaucugugag

SEQ ID NO: 1190830 - RNA, 21 nt, Human
guggggagagacgggcccugg

SEQ ID NO: 1190831 - RNA, 20 nt, Human
guguaauuuaaaauugugau

SEQ ID NO: 1190832 - RNA, 22 nt, Human
guguaauuuaaaauugugaugu

SEQ ID NO: 1190833 - RNA, 23 nt, Human
guguaauuuaaaauugugaugug

SEQ ID NO: 1190834 - RNA, 21 nt, Human
guguccugcaccggggccugg

SEQ ID NO: 1190835 - RNA, 17 nt, Human
gugucuggcacagccug

SEQ ID NO: 1190836 - RNA, 17 nt, Human
gugugggaguguguaau

SEQ ID NO: 1190837 - RNA, 14 nt, Human
guguguuuaugugu

SEQ ID NO: 1190838 - RNA, 15 nt, Human
guguguuuaugugug

SEQ ID NO: 1190839 - RNA, 16 nt, Human
guguguuuaugugugu

SEQ ID NO: 1190840 - RNA, 12 nt, Human
guguguugugug

SEQ ID NO: 1190841 - RNA, 14 nt, Human
guguguugugugug

SEQ ID NO: 1190842 - RNA, 17 nt, Human
guguguuguguguggga

SEQ ID NO: 1190843 - RNA, 14 nt, Human
guucugccaggaga

SEQ ID NO: 1190844 - RNA, 13 nt, Human
guucugccaggag

SEQ ID NO: 1190845 - RNA, 12 nt, Human
guucugccagga

SEQ ID NO: 1190846 - RNA, 23 nt, Human
guuguccucagccccgcguggaa

SEQ ID NO: 1190847 - RNA, 17 nt, Human
guuguccucagccccgc

SEQ ID NO: 1190848 - RNA, 12 nt, Human
guuguguguggg

SEQ ID NO: 1190849 - RNA, 13 nt, Human
guuguguguggga

SEQ ID NO: 1190850 - RNA, 14 nt, Human
guugugugugggag

SEQ ID NO: 1190851 - RNA, 16 nt, Human
guugugugugggagug

SEQ ID NO: 1190852 - RNA, 22 nt, Human
guugugugugggaguguguaau

SEQ ID NO: 1190853 - RNA, 16 nt, Human
guuuagaagaagugug

SEQ ID NO: 1190854 - RNA, 13 nt, Human
uaaauuuauguga

SEQ ID NO: 1190855 - RNA, 22 nt, Human
uaagugccaggauggaaugaug

SEQ ID NO: 1190856 - RNA, 22 nt, Human
uauaaacaugcuugcauuauau

SEQ ID NO: 1190857 - RNA, 20 nt, Human
uauauuuguaaauuuaugug

SEQ ID NO: 1190858 - RNA, 17 nt, Human
ucaucuuucuuccaaac

SEQ ID NO: 1190859 - RNA, 14 nt, Human
ucaucuuucuucca

SEQ ID NO: 1190860 - RNA, 23 nt, Human
ucagccuccauccuacccccugu

SEQ ID NO: 1190861 - RNA, 20 nt, Human
ucagaucauuaucagccugu

SEQ ID NO: 1190862 - RNA, 15 nt, Human
uccagagucccugcc

SEQ ID NO: 1190863 - RNA, 15 nt, Human
ucccaacacugccag

SEQ ID NO: 1190864 - RNA, 14 nt, Human
ucccaacacugcca

SEQ ID NO: 1190865 - RNA, 16 nt, Human
ucccaacacugccagc

SEQ ID NO: 1190866 - RNA, 23 nt, Human
ucccaugagcuccuuaaggcucu

SEQ ID NO: 1190867 - RNA, 23 nt, Human
uccucgagaucccaacacugcca

SEQ ID NO: 1190868 - RNA, 16 nt, Human
uccucgagaucccaac

SEQ ID NO: 1190869 - RNA, 19 nt, Human
uccugucccucauccauag

SEQ ID NO: 1190870 - RNA, 19 nt, Human
ucuuuccaaccggcuuugu

SEQ ID NO: 1190871 - RNA, 11 nt, Human
ucugugugugu

SEQ ID NO: 1190872 - RNA, 13 nt, Human
ucugugugugugu

SEQ ID NO: 1190873 - RNA, 22 nt, Human
ucuucauuaccucagugagaag

SEQ ID NO: 1190874 - RNA, 19 nt, Human
ugacucuuuccaaccggcu

SEQ ID NO: 1190875 - RNA, 13 nt, Human
ugacucuuuccaa

SEQ ID NO: 1190876 - RNA, 16 nt, Human
ugacucuuuccaaccg

SEQ ID NO: 1190877 - RNA, 14 nt, Human
ugacucuuuccaac

SEQ ID NO: 1190878 - RNA, 20 nt, Human
ugaagagaagggcagggcug

SEQ ID NO: 1190879 - RNA, 22 nt, Human
ugaagagaagggcagggcugag

SEQ ID NO: 1190880 - RNA, 22 nt, Human
ugcaccggggccugggcaggag

SEQ ID NO: 1190881 - RNA, 16 nt, Human
ugcaccggggccuggg

SEQ ID NO: 1190882 - RNA, 12 nt, Human
ugcaccggggcc

SEQ ID NO: 1190883 - RNA, 18 nt, Human
ugccaggauggaaugaug

SEQ ID NO: 1190884 - RNA, 18 nt, Human
uggaacucgugucuggca

SEQ ID NO: 1190885 - RNA, 20 nt, Human
uggaaugaugggucaguugu

SEQ ID NO: 1190886 - RNA, 21 nt, Human
ugggacaccccgacuuuuguu

SEQ ID NO: 1190887 - RNA, 21 nt, Human
ugggagugaggaugucugggc

SEQ ID NO: 1190888 - RNA, 22 nt, Human
ugggagugaggaugucugggcc

SEQ ID NO: 1190889 - RNA, 18 nt, Human
ugggggucuguguguuua

SEQ ID NO: 1190890 - RNA, 11 nt, Human
ugggggaugua

SEQ ID NO: 1190891 - RNA, 14 nt, Human
ugucacgccagacu

SEQ ID NO: 1190892 - RNA, 22 nt, Human
ugucacccuuaggccagcacca

SEQ ID NO: 1190893 - RNA, 14 nt, Human
uguaccucugccuc

SEQ ID NO: 1190894 - RNA, 17 nt, Human
ugucuggcacagccugg

SEQ ID NO: 1190895 - RNA, 20 nt, Human
ugugccuugucacgccagac

SEQ ID NO: 1190896 - RNA, 19 nt, Human
ugugccuugucacgccaga

SEQ ID NO: 1190897 - RNA, 17 nt, Human
ugugccuugucacgcca

SEQ ID NO: 1190898 - RNA, 17 nt, Human
ugugccuuggugugcug

SEQ ID NO: 1190899 - RNA, 16 nt, Human
ugugccuuuugccauc

SEQ ID NO: 1190900 - RNA, 15 nt, Human
uguggccuaaccugc

SEQ ID NO: 1190901 - RNA, 15 nt, Human
uguggaagugugggu

SEQ ID NO: 1190902 - RNA, 14 nt, Human
ugugggagugugua

SEQ ID NO: 1190903 - RNA, 15 nt, Human
ugugggaguguguaa

SEQ ID NO: 1190904 - RNA, 19 nt, Human
uguguaauuuaaaauugug

SEQ ID NO: 1190905 - RNA, 22 nt, Human
uguguaauuuaaaauugugaug

SEQ ID NO: 1190906 - RNA, 23 nt, Human
uguguaauuuaaaauugugaugu

SEQ ID NO: 1190907 - RNA, 11 nt, Human
uguguaauuua

SEQ ID NO: 1190908 - RNA, 18 nt, Human
uguguaauuuaaaauugu

SEQ ID NO: 1190909 - RNA, 16 nt, Human
uguuuagaagaagugu

SEQ ID NO: 1190910 - RNA, 16 nt, Human
uguucuuuugucccag

SEQ ID NO: 1190911 - RNA, 16 nt, Human
ugugugggagugugua

SEQ ID NO: 1190912 - RNA, 14 nt, Human
ugugugggagugug

SEQ ID NO: 1190913 - RNA, 15 nt, Human
ugugugggagugugu

SEQ ID NO: 1190914 - RNA, 11 nt, Human
uguguaugugg

SEQ ID NO: 1190915 - RNA, 12 nt, Human
uguguauguggg

SEQ ID NO: 1190916 - RNA, 13 nt, Human
uguguaugugggg

SEQ ID NO: 1190917 - RNA, 19 nt, Human
cugcaccggggccugggca

SEQ ID NO: 1190918 - RNA, 18 nt, Human
cugcaccggggccugggc

SEQ ID NO: 1190919 - RNA, 16 nt, Human
cugcaccggggccugg

SEQ ID NO: 1190920 - RNA, 14 nt, Human
cugcaccggggccu

SEQ ID NO: 1190921 - RNA, 14 nt, Human
cuggaucugugagg

SEQ ID NO: 1190922 - RNA, 13 nt, Human
cugggcaggaggg

SEQ ID NO: 1190923 - RNA, 13 nt, Human
cuggcccugugcc

SEQ ID NO: 1190924 - RNA, 21 nt, Human
gaagugugggucugugugugu

SEQ ID NO: 1190925 - RNA, 24 nt, Human
gaagugugggucugugugugugua

SEQ ID NO: 1190926 - RNA, 15 nt, Human
gaaccgaggcaggga

SEQ ID NO: 1190927 - RNA, 12 nt, Human
gaaccgaggcag

SEQ ID NO: 1190928 - RNA, 17 nt, Human
gaacugcugggcuuggc

SEQ ID NO: 1190929 - RNA, 20 nt, Human
gaacugcugggcuuggcagc

SEQ ID NO: 1190930 - RNA, 13 nt, Human
gaguuggcuggga

SEQ ID NO: 1190931 - RNA, 23 nt, Human
gaggugcuucuaguucugccagg

SEQ ID NO: 1190932 - RNA, 22 nt, Human
gaggugcuucuaguucugccag

SEQ ID NO: 1190933 - RNA, 17 nt, Human
gaguccaucagccucca

SEQ ID NO: 1190934 - RNA, 18 nt, Human
gagucagggagagcugaa

SEQ ID NO: 1190935 - RNA, 16 nt, Human
gagggcugccuuugga

SEQ ID NO: 1190936 - RNA, 9 nt, Human
gagggcugc

SEQ ID NO: 1190937 - RNA, 19 nt, Human
gcaccggggccugggcagg

SEQ ID NO: 1190938 - RNA, 16 nt, Human
gcaccggggccugggc

SEQ ID NO: 1190939 - RNA, 14 nt, Human
gcaccggggccugg

SEQ ID NO: 1190940 - RNA, 19 nt, Human
gcuauggggauagaugugu

SEQ ID NO: 1190941 - RNA, 21 nt, Human
gcuauggggauagaugugugg

SEQ ID NO: 1190942 - RNA, 12 nt, Human
gccauucuuucc

SEQ ID NO: 1190943 - RNA, 17 nt, Human
ggagagacgggcccugg

SEQ ID NO: 1190944 - RNA, 15 nt, Human
ggagagacgggcccu

SEQ ID NO: 1190945 - RNA, 18 nt, Human
ggccagcaccaucucuuu

SEQ ID NO: 1190946 - RNA, 23 nt, Human
ggcaggcaucggggagccgggag

SEQ ID NO: 1190947 - RNA, 15 nt, Human
aaaaagggaggggga

SEQ ID NO: 1190948 - RNA, 20 nt, Human
ggcuccucgagaucccaaca

SEQ ID NO: 1190949 - RNA, 17 nt, Human
ggcuggaucugugaggg

SEQ ID NO: 1190950 - RNA, 14 nt, Human
gggagggggagagg

SEQ ID NO: 1190951 - RNA, 15 nt, Human
ggggccugggcagga

SEQ ID NO: 1190952 - RNA, 12 nt, Human
ggggccugggca

SEQ ID NO: 1190953 - RNA, 23 nt, Human
ggggucuguguguuuaugugugu

SEQ ID NO: 1190954 - RNA, 16 nt, Human
aaaauugugauguguc

SEQ ID NO: 1190955 - RNA, 14 nt, Human
cucaugugacucuu

SEQ ID NO: 1190956 - RNA, 24 nt, Human
cuccucugcccgggagcucaggaa

SEQ ID NO: 1190957 - RNA, 22 nt, Human
cuccucugcccgggagcucagg

SEQ ID NO: 1190958 - RNA, 16 nt, Human
cuccugucucccuccu

SEQ ID NO: 1190959 - RNA, 20 nt, Human
cucaggccugacucucagca

SEQ ID NO: 1190960 - RNA, 23 nt, Human
cucaggccgaaggaggagucagg

SEQ ID NO: 1190961 - RNA, 23 nt, Human
cucaugauagaaggcuaugggga

SEQ ID NO: 1190962 - RNA, 22 nt, Human
ccucugcccgggagcucaggaa

SEQ ID NO: 1190963 - RNA, 21 nt, Human
ccucugcccgggagcucagga

SEQ ID NO: 1190964 - RNA, 22 nt, Human
ccucuuggggaguuuagggugg

SEQ ID NO: 1190965 - RNA, 15 nt, Human
ccucuuggcugccuu

SEQ ID NO: 1190966 - RNA, 23 nt, Human
ccucuuggggaguuuaggguggg

SEQ ID NO: 1190967 - RNA, 19 nt, Human
ccugccuggaccagccucu

SEQ ID NO: 1190968 - RNA, 12 nt, Human
ccugccuggacc

SEQ ID NO: 1190969 - RNA, 21 nt, Human
ccaugagcuccuuaaggcucu

SEQ ID NO: 1190970 - RNA, 13 nt, Human
ccauugguguuga

SEQ ID NO: 1190971 - RNA, 21 nt, Human
ccccgcguggaacucgugucu

SEQ ID NO: 1190972 - RNA, 18 nt, Human
ccagagaaaaagggaggg

SEQ ID NO: 1190973 - RNA, 23 nt, Human
ccagacuucccacggcuccucga

SEQ ID NO: 1190974 - RNA, 13 nt, Human
auucuuucccaac

SEQ ID NO: 1190975 - RNA, 17 nt, Human
auuuuuaugccaccuga

SEQ ID NO: 1190976 - RNA, 19 nt, Human
caccuaggcuagggugggg

SEQ ID NO: 1190977 - RNA, 18 nt, Human
caccuaggcuaggguggg

SEQ ID NO: 1190978 - RNA, 17 nt, Human
cagcacguguggccugu

SEQ ID NO: 1190979 - RNA, 17 nt, Human
caucuguaccucugccu

SEQ ID NO: 1190980 - RNA, 22 nt, Human
aacacugccagcauuucccuuc

SEQ ID NO: 1190981 - RNA, 12 nt, Human
aacacugccagc

SEQ ID NO: 1190982 - RNA, 16 nt, Human
gucucccuccucugcc

SEQ ID NO: 1190983 - RNA, 12 nt, Human
gucucccuccuc

SEQ ID NO: 1190984 - RNA, 15 nt, Human
guauguggaagugug

SEQ ID NO: 1190985 - RNA, 16 nt, Human
guauguggaagugugg

SEQ ID NO: 1190986 - RNA, 17 nt, Human
guauguggaaguguggg

SEQ ID NO: 1190987 - RNA, 18 nt, Human
guauguggaagugugggu

SEQ ID NO: 1190988 - RNA, 21 nt, Human
guauguggaagugugggucug

SEQ ID NO: 1190989 - RNA, 19 nt, Human
guaugugggggucugugug

SEQ ID NO: 1190990 - RNA, 20 nt, Human
guaugugggggucugugugu

SEQ ID NO: 1190991 - RNA, 16 nt, Human
guaggaacugcugggc

SEQ ID NO: 1190992 - RNA, 14 nt, Human
guggcacuggggca

SEQ ID NO: 1190993 - RNA, 21 nt, Human
guggaagugugggucugugug

SEQ ID NO: 1190994 - RNA, 22 nt, Human
guggaagugugggucugugugu

SEQ ID NO: 1190995 - RNA, 23 nt, Human
gugcuauuguagagccagagguc

SEQ ID NO: 1190996 - RNA, 14 nt, Human
guggaagugugggu

SEQ ID NO: 1190997 - RNA, 15 nt, Human
guggaaguguggguc

SEQ ID NO: 1190998 - RNA, 19 nt, Human
guggaagugugggucugug

SEQ ID NO: 1190999 - RNA, 20 nt, Human
guggaagugugggucugugu

SEQ ID NO: 1191000 - RNA, 19 nt, Human
aagaagugugucacccuua

SEQ ID NO: 1191001 - RNA, 23 nt, Human
guggggggggggcgcggcuggga

SEQ ID NO: 1191002 - RNA, 13 nt, Human
gugggucugugug

SEQ ID NO: 1191003 - RNA, 16 nt, Human
gugggucugugugugu

SEQ ID NO: 1191004 - RNA, 13 nt, Human
gugggagugugua

SEQ ID NO: 1191005 - RNA, 14 nt, Human
gugggaguguguaa

SEQ ID NO: 1191006 - RNA, 15 nt, Human
guguuguguguggga

SEQ ID NO: 1191007 - RNA, 12 nt, Human
guguguaugugg

SEQ ID NO: 1191008 - RNA, 14 nt, Human
guguguaauuuaaa

SEQ ID NO: 1191009 - RNA, 16 nt, Human
guuuucuuaacuuaaa

SEQ ID NO: 1191010 - RNA, 18 nt, Human
guuguaucagcacgugug

SEQ ID NO: 1191011 - RNA, 13 nt, Human
guuuaugugugug

SEQ ID NO: 1191012 - RNA, 16 nt, Human
guuuaugugugugugu

SEQ ID NO: 1191013 - RNA, 23 nt, Human
aaggcuauggggauagaugugug

SEQ ID NO: 1191014 - RNA, 17 nt, Human
acaccccgacuuuuguu

SEQ ID NO: 1191015 - RNA, 18 nt, Human
uacagaggacaguauuug

SEQ ID NO: 1191016 - RNA, 14 nt, Human
uacagaggacagua

SEQ ID NO: 1191017 - RNA, 15 nt, Human
uaauuuaaaauugug

SEQ ID NO: 1191018 - RNA, 16 nt, Human
uaauuuaaaauuguga

SEQ ID NO: 1191019 - RNA, 18 nt, Human
accagagaaaaagggagg

SEQ ID NO: 1191020 - RNA, 16 nt, Human
uauuuguaaauuuaug

SEQ ID NO: 1191021 - RNA, 17 nt, Human
uauuuguaaauuuaugu

SEQ ID NO: 1191022 - RNA, 22 nt, Human
uauuuguaaauuuaugugaugg

SEQ ID NO: 1191023 - RNA, 17 nt, Human
ucaggaaccgaggcagg

SEQ ID NO: 1191024 - RNA, 21 nt, Human
uccaaccggcuuuguggcacu

SEQ ID NO: 1191025 - RNA, 21 nt, Human
uccacucaugugacucuuucc

SEQ ID NO: 1191026 - RNA, 14 nt, Human
uccacucaugugac

SEQ ID NO: 1191027 - RNA, 21 nt, Human
ucccgggacaccuaggcuagg

SEQ ID NO: 1191028 - RNA, 19 nt, Human
acucaugugacucuuucca

SEQ ID NO: 1191029 - RNA, 21 nt, Human
ucgagaucccaacacugccag

SEQ ID NO: 1191030 - RNA, 18 nt, Human
ucgagaucccaacacugc

SEQ ID NO: 1191031 - RNA, 22 nt, Human
ucgagaucccaacacugccagc

SEQ ID NO: 1191032 - RNA, 17 nt, Human
ucgagaucccaacacug

SEQ ID NO: 1191033 - RNA, 23 nt, Human
acuggccaguggcuggaucugug

SEQ ID NO: 1191034 - RNA, 23 nt, Human
acuugucccgggacaccuaggcu

SEQ ID NO: 1191035 - RNA, 16 nt, Human
ucucauuccagaggaa

SEQ ID NO: 1191036 - RNA, 20 nt, Human
ucugagagaggccauucuuu

SEQ ID NO: 1191037 - RNA, 14 nt, Human
ucugagagaggcca

SEQ ID NO: 1191038 - RNA, 13 nt, Human
ucuuucuuccaaa

SEQ ID NO: 1191039 - RNA, 19 nt, Human
agacuucccacggcuccuc

SEQ ID NO: 1191040 - RNA, 14 nt, Human
agacuuaucaacau

SEQ ID NO: 1191041 - RNA, 21 nt, Human
agacauuugcuaugagcuggg

SEQ ID NO: 1191042 - RNA, 17 nt, Human
agaaugucaguaugugg

SEQ ID NO: 1191043 - RNA, 19 nt, Human
agaaugucaguauguggaa

SEQ ID NO: 1191044 - RNA, 15 nt, Human
agaaugucaguaugu

SEQ ID NO: 1191045 - RNA, 16 nt, Human
agaaugucaguaugug

SEQ ID NO: 1191046 - RNA, 21 nt, Human
agaggccauucuuucccaaca

SEQ ID NO: 1191047 - RNA, 17 nt, Human
agagucccugccuggac

SEQ ID NO: 1191048 - RNA, 14 nt, Human
agagucccugccug

SEQ ID NO: 1191049 - RNA, 23 nt, Human
agaguccaucagccuccauccua

SEQ ID NO: 1191050 - RNA, 20 nt, Human
agaucccaacacugccagca

SEQ ID NO: 1191051 - RNA, 19 nt, Human
agaucccaacacugccagc

SEQ ID NO: 1191052 - RNA, 18 nt, Human
agaucccaacacugccag

SEQ ID NO: 1191053 - RNA, 23 nt, Human
agccccgcguggaacucgugucu

SEQ ID NO: 1191054 - RNA, 16 nt, Human
agccucuccacucaug

SEQ ID NO: 1191055 - RNA, 15 nt, Human
ugaugggucaguugu

SEQ ID NO: 1191056 - RNA, 22 nt, Human
ugccgagaguccaucagccucc

SEQ ID NO: 1191057 - RNA, 16 nt, Human
ugccaucauguuuaca

SEQ ID NO: 1191058 - RNA, 17 nt, Human
ugccuugucacgccaga

SEQ ID NO: 1191059 - RNA, 16 nt, Human
ugccuuggugugcugu

SEQ ID NO: 1191060 - RNA, 15 nt, Human
ugccuugucacgcca

SEQ ID NO: 1191061 - RNA, 16 nt, Human
ugcuaugagcugggga

SEQ ID NO: 1191062 - RNA, 19 nt, Human
ugcuaugagcuggggaugu

SEQ ID NO: 1191063 - RNA, 20 nt, Human
ugcuaugagcuggggauguc

SEQ ID NO: 1191064 - RNA, 22 nt, Human
ugcuaugagcuggggaugucuc

SEQ ID NO: 1191065 - RNA, 19 nt, Human
aggaucccaugagcuccuu

SEQ ID NO: 1191066 - RNA, 23 nt, Human
agggaaggaucccaugagcuccu

SEQ ID NO: 1191067 - RNA, 22 nt, Human
agggaaggaucccaugagcucc

SEQ ID NO: 1191068 - RNA, 15 nt, Human
agggaaggaucccau

SEQ ID NO: 1191069 - RNA, 19 nt, Human
ugggagaaugucaguaugu

SEQ ID NO: 1191070 - RNA, 20 nt, Human
ugggagaaugucaguaugug

SEQ ID NO: 1191071 - RNA, 22 nt, Human
ugggagaaugucaguaugugga

SEQ ID NO: 1191072 - RNA, 13 nt, Human
uggggagagacgg

SEQ ID NO: 1191073 - RNA, 14 nt, Human
uggggagggauuug

SEQ ID NO: 1191074 - RNA, 15 nt, Human
uggggcucagagugg

SEQ ID NO: 1191075 - RNA, 22 nt, Human
uggggagggauuuggggcucag

SEQ ID NO: 1191076 - RNA, 21 nt, Human
aggguggggggggggcgcggc

SEQ ID NO: 1191077 - RNA, 19 nt, Human
agguuuuuguagugauuuu

SEQ ID NO: 1191078 - RNA, 23 nt, Human
agguuuguuuagaagaagugugu

SEQ ID NO: 1191079 - RNA, 12 nt, Human
uguauguggggg

SEQ ID NO: 1191080 - RNA, 20 nt, Human
uguaugugggggucugugug

SEQ ID NO: 1191081 - RNA, 17 nt, Human
ugugacucuuuccaacc

SEQ ID NO: 1191082 - RNA, 15 nt, Human
ugugacucuuuccaa

SEQ ID NO: 1191083 - RNA, 14 nt, Human
ugugacucuuucca

SEQ ID NO: 1191084 - RNA, 12 nt, Human
ugugacucuuuc

SEQ ID NO: 1191085 - RNA, 21 nt, Human
uguggcauccagagucccugc

SEQ ID NO: 1191086 - RNA, 19 nt, Human
uguggcauccagagucccu

SEQ ID NO: 1191087 - RNA, 16 nt, Human
uguggcauccagaguc

SEQ ID NO: 1191088 - RNA, 12 nt, Human
ugugugugggag

SEQ ID NO: 1191089 - RNA, 20 nt, Human
ugugugugggaguguguaau

SEQ ID NO: 1191090 - RNA, 14 nt, Human
uguguguguaugug

SEQ ID NO: 1191091 - RNA, 12 nt, Human
aguucugccagg

SEQ ID NO: 1191092 - RNA, 20 nt, Human
aguucugccaggagacaggu

SEQ ID NO: 1191093 - RNA, 14 nt, Human
aguucugccaggag

SEQ ID NO: 1191094 - RNA, 13 nt, Human
aguucugccagga

SEQ ID NO: 1191095 - RNA, 13 nt, Human
uguuuaugugugu

SEQ ID NO: 1191096 - RNA, 16 nt, Human
uguuuaugugugugug

SEQ ID NO: 1191097 - RNA, 14 nt, Human
aguuuagggugggg

SEQ ID NO: 1191098 - RNA, 13 nt, Human
aguuuaggguggg

SEQ ID NO: 1191099 - RNA, 12 nt, Human
aguuuagggugg

SEQ ID NO: 1191100 - RNA, 13 nt, Human
uuaaaauugugau

SEQ ID NO: 1191101 - RNA, 18 nt, Human
uuaaaauugugauguguc

SEQ ID NO: 1191102 - RNA, 14 nt, Human
uuagaagaagugug

SEQ ID NO: 1191103 - RNA, 15 nt, Human
uuagaagaagugugu

SEQ ID NO: 1191104 - RNA, 16 nt, Human
uuagaagaaguguguc

SEQ ID NO: 1191105 - RNA, 17 nt, Human
aucccaacacugccagc

SEQ ID NO: 1191106 - RNA, 16 nt, Human
aucccaacacugccag

SEQ ID NO: 1191107 - RNA, 15 nt, Human
aucccaacacugcca

SEQ ID NO: 1191108 - RNA, 11 nt, Human
aucccaacacu

SEQ ID NO: 1191109 - RNA, 12 nt, Human
uucugccaggag

SEQ ID NO: 1191110 - RNA, 17 nt, Human
uucuaguucugccagga

SEQ ID NO: 1191111 - RNA, 18 nt, Human
aucauguuuacagaggac

SEQ ID NO: 1191112 - RNA, 23 nt, Human
aucauguuuacagaggacaguau

SEQ ID NO: 1191113 - RNA, 20 nt, Human
auauuuguaaauuuauguga

SEQ ID NO: 1191114 - RNA, 16 nt, Human
uuggacuugucccggg

SEQ ID NO: 1191115 - RNA, 21 nt, Human
aucugugaggggcucucucau

SEQ ID NO: 1191116 - RNA, 22 nt, Human
aucugugaggggcucucucaug

SEQ ID NO: 1191117 - RNA, 19 nt, Human
uuguaaauuuaugugaugg

SEQ ID NO: 1191118 - RNA, 20 nt, Human
aucugagaggccacagugca

SEQ ID NO: 1191119 - RNA, 12 nt, Human
uugugauguguc

SEQ ID NO: 1191120 - RNA, 18 nt, Human
augaguuggcugggaaua

SEQ ID NO: 1191121 - RNA, 19 nt, Human
uuucccuuccuuccucucc

SEQ ID NO: 1191122 - RNA, 23 nt, Human
uuugaccuguugggagugaggau

SEQ ID NO: 1191123 - RNA, 17 nt, Human
auguauauaaacaugcu

SEQ ID NO: 1191124 - RNA, 18 nt, Human
uuuguaagguuuuuguag

SEQ ID NO: 1191125 - RNA, 15 nt, Human
uuuguagugauuuuu

SEQ ID NO: 1191126 - RNA, 22 nt, Human
uuuguagugauuuuuaugccac

SEQ ID NO: 1191127 - RNA, 22 nt, Human
auguguguguguuguguguggg

SEQ ID NO: 1191128 - RNA, 23 nt, Human
auguguguguguuguguguggga

SEQ ID NO: 1191129 - RNA, 15 nt, Human
auuuaaaauugugau

SEQ ID NO: 1191130 - RNA, 17 nt, Human
auuguagagccagaggu

SEQ ID NO: 1191131 - RNA, 18 nt, Human
auuguagagccagagguc

SEQ ID NO: 1191132 - RNA, 19 nt, Human
auuuaaaauugugaugugu

SEQ ID NO: 1191133 - RNA, 14 nt, Human
aacaggcucagagg

SEQ ID NO: 1191134 - RNA, 13 nt, Human
accggggccuggg

SEQ ID NO: 1191135 - RNA, 19 nt, Human
accggggccugggcaggag

SEQ ID NO: 1191136 - RNA, 19 nt, Human
acccucaucuuucuuccaa

SEQ ID NO: 1191137 - RNA, 16 nt, Human
acccucaucuuucuuc

SEQ ID NO: 1191138 - RNA, 14 nt, Human
acccucaucuuucu

SEQ ID NO: 1191139 - RNA, 13 nt, Human
acccucaucuuuc

SEQ ID NO: 1191140 - RNA, 12 nt, Human
agagaggccauu

SEQ ID NO: 1191141 - RNA, 23 nt, Human
agagaggccauucuuucccaaca

SEQ ID NO: 1191142 - RNA, 22 nt, Human
agagaggccauucuuucccaac

SEQ ID NO: 1191143 - RNA, 13 nt, Human
agcaucucccagu

SEQ ID NO: 1191144 - RNA, 19 nt, Human
agagugggguagguuggga

SEQ ID NO: 1191145 - RNA, 19 nt, Human
aggcuaggguggggagaga

SEQ ID NO: 1191146 - RNA, 16 nt, Human
aggcuaggguggggag

SEQ ID NO: 1191147 - RNA, 15 nt, Human
aggcuagggugggga

SEQ ID NO: 1191148 - RNA, 14 nt, Human
aggcuagggugggg

SEQ ID NO: 1191149 - RNA, 22 nt, Human
agggauuuggggcucagagugg

SEQ ID NO: 1191150 - RNA, 19 nt, Human
aggcaucggggagccggga

SEQ ID NO: 1191151 - RNA, 20 nt, Human
aggagacagguuagcugcuc

SEQ ID NO: 1191152 - RNA, 13 nt, Human
aggagggcaggca

SEQ ID NO: 1191153 - RNA, 15 nt, Human
aggagggaggugcuu

SEQ ID NO: 1191154 - RNA, 15 nt, Human
aggagggcaggcauc

SEQ ID NO: 1191155 - RNA, 13 nt, Human
aggaugucugggc

SEQ ID NO: 1191156 - RNA, 16 nt, Human
ccaaacaggcucagag

SEQ ID NO: 1191157 - RNA, 19 nt, Human
cauugucccugaagagaag

SEQ ID NO: 1191158 - RNA, 16 nt, Human
ccaacacugccagcau

SEQ ID NO: 1191159 - RNA, 15 nt, Human
ccaacacugccagca

SEQ ID NO: 1191160 - RNA, 14 nt, Human
ccaacacugccagc

SEQ ID NO: 1191161 - RNA, 13 nt, Human
ccaacacugccag

SEQ ID NO: 1191162 - RNA, 19 nt, Human
ccaagccuuggcucuaccc

SEQ ID NO: 1191163 - RNA, 21 nt, Human
ccacgucagcugggacacccc

SEQ ID NO: 1191164 - RNA, 16 nt, Human
ccacacccucacugcu

SEQ ID NO: 1191165 - RNA, 20 nt, Human
ccacacagacuugggcaggg

SEQ ID NO: 1191166 - RNA, 13 nt, Human
ccaucagccucca

SEQ ID NO: 1191167 - RNA, 13 nt, Human
cccaacaccucuu

SEQ ID NO: 1191168 - RNA, 22 nt, Human
ccgacuuuuguuuaccagagaa

SEQ ID NO: 1191169 - RNA, 15 nt, Human
ccuccucugcccggg

SEQ ID NO: 1191170 - RNA, 14 nt, Human
ccuccucugcccgg

SEQ ID NO: 1191171 - RNA, 23 nt, Human
ccucuccacucaugugacucuuu

SEQ ID NO: 1191172 - RNA, 16 nt, Human
ccuggaccagccucuc

SEQ ID NO: 1191173 - RNA, 15 nt, Human
ccuggaccagccucu

SEQ ID NO: 1191174 - RNA, 14 nt, Human
ccuggaccagccuc

SEQ ID NO: 1191175 - RNA, 23 nt, Human
cggcugggaggagggcaggcauc

SEQ ID NO: 1191176 - RNA, 22 nt, Human
cggcugggaggagggcaggcau

SEQ ID NO: 1191177 - RNA, 16 nt, Human
cgggagcucaggaacc

SEQ ID NO: 1191178 - RNA, 23 nt, Human
cgauugcaggagucccugccauc

SEQ ID NO: 1191179 - RNA, 21 nt, Human
cgauugcaggagucccugcca

SEQ ID NO: 1191180 - RNA, 19 nt, Human
cgucagcugggacaccccg

SEQ ID NO: 1191181 - RNA, 22 nt, Human
cuccuuaaggcucuuuuguaag

SEQ ID NO: 1191182 - RNA, 13 nt, Human
cuccuuaaggcuc

SEQ ID NO: 1191183 - RNA, 17 nt, Human
cuccauugguguugaca

SEQ ID NO: 1191184 - RNA, 15 nt, Human
cucauuccagaggaa

SEQ ID NO: 1191185 - RNA, 17 nt, Human
cucauuccagaggaagg

SEQ ID NO: 1191186 - RNA, 19 nt, Human
cucuccacucaugugacuc

SEQ ID NO: 1191187 - RNA, 21 nt, Human
cucuuggggaguuuagggugg

SEQ ID NO: 1191188 - RNA, 21 nt, Human
cugaagagaagggcagggcug

SEQ ID NO: 1191189 - RNA, 20 nt, Human
cugccagcauuucccuuccu

SEQ ID NO: 1191190 - RNA, 16 nt, Human
cugccaggagacaggu

SEQ ID NO: 1191191 - RNA, 18 nt, Human
cugcccgggagcucagga

SEQ ID NO: 1191192 - RNA, 12 nt, Human
cuggaccagccu

SEQ ID NO: 1191193 - RNA, 15 nt, Human
cuggcacagccuggc

SEQ ID NO: 1191194 - RNA, 14 nt, Human
cuggcacagccugg

SEQ ID NO: 1191195 - RNA, 14 nt, Human
cuuccuuccucucc

SEQ ID NO: 1191196 - RNA, 20 nt, Human
gaagcguuguccucagcccc

SEQ ID NO: 1191197 - RNA, 19 nt, Human
gaagcguuguccucagccc

SEQ ID NO: 1191198 - RNA, 13 nt, Human
gaagcguuguccu

SEQ ID NO: 1191199 - RNA, 17 nt, Human
gaagagaagggcagggc

SEQ ID NO: 1191200 - RNA, 18 nt, Human
gacuucccacggcuccuc

SEQ ID NO: 1191201 - RNA, 21 nt, Human
gaguguguaauuuaaaauugu

SEQ ID NO: 1191202 - RNA, 22 nt, Human
gaguguguaauuuaaaauugug

SEQ ID NO: 1191203 - RNA, 19 nt, Human
gcacagccuggcuguggcc

SEQ ID NO: 1191204 - RNA, 12 nt, Human
gcacagccuggc

SEQ ID NO: 1191205 - RNA, 15 nt, Human
gcaggagggaggugc

SEQ ID NO: 1191206 - RNA, 13 nt, Human
gccccgcguggaa

SEQ ID NO: 1191207 - RNA, 21 nt, Human
gccgagaguccaucagccucc

SEQ ID NO: 1191208 - RNA, 19 nt, Human
gccgggagccugacccuca

SEQ ID NO: 1191209 - RNA, 14 nt, Human
gccgggagccugac

SEQ ID NO: 1191210 - RNA, 13 nt, Human
gccgggagccuga

SEQ ID NO: 1191211 - RNA, 20 nt, Human
gcugccuuuggacuuguccc

SEQ ID NO: 1191212 - RNA, 15 nt, Human
gcugccuuuggacuu

SEQ ID NO: 1191213 - RNA, 19 nt, Human
gcugggaggagggcaggca

SEQ ID NO: 1191214 - RNA, 17 nt, Human
gcugggaggagggcagg

SEQ ID NO: 1191215 - RNA, 18 nt, Human
gcuucuaguucugccagg

SEQ ID NO: 1191216 - RNA, 20 nt, Human
gcuucuaguucugccaggag

SEQ ID NO: 1191217 - RNA, 19 nt, Human
gcuucuaguucugccagga

SEQ ID NO: 1191218 - RNA, 21 nt, Human
gcuucuaguucugccaggaga

SEQ ID NO: 1191219 - RNA, 20 nt, Human
ggaaccgaggcagggaagga

SEQ ID NO: 1191220 - RNA, 16 nt, Human
ggaaccgaggcaggga

SEQ ID NO: 1191221 - RNA, 15 nt, Human
ggaaccgaggcaggg

SEQ ID NO: 1191222 - RNA, 17 nt, Human
ggaacucgugucuggca

SEQ ID NO: 1191223 - RNA, 17 nt, Human
ggaaggaucccaugagc

SEQ ID NO: 1191224 - RNA, 20 nt, Human
ggaggagggcaggcaucggg

SEQ ID NO: 1191225 - RNA, 15 nt, Human
ggaggagggcaggca

SEQ ID NO: 1191226 - RNA, 14 nt, Human
ggaggagggcaggc

SEQ ID NO: 1191227 - RNA, 16 nt, Human
ggagccgggagccuga

SEQ ID NO: 1191228 - RNA, 14 nt, Human
ggagggcaggcauc

SEQ ID NO: 1191229 - RNA, 13 nt, Human
ggagggcaggcau

SEQ ID NO: 1191230 - RNA, 12 nt, Human
ggagggauuugg

SEQ ID NO: 1191231 - RNA, 13 nt, Human
ggauagaugugug

SEQ ID NO: 1191232 - RNA, 14 nt, Human
ggauagaugugugg

SEQ ID NO: 1191233 - RNA, 15 nt, Human
ggauagaugugugga

SEQ ID NO: 1191234 - RNA, 20 nt, Human
ggaucccaugagcuccuuaa

SEQ ID NO: 1191235 - RNA, 17 nt, Human
ggaucccaugagcuccu

SEQ ID NO: 1191236 - RNA, 20 nt, Human
ggcagucugagagaggccau

SEQ ID NO: 1191237 - RNA, 15 nt, Human
gggaaggaucccaug

SEQ ID NO: 1191238 - RNA, 19 nt, Human
gggcagucugagagaggcc

SEQ ID NO: 1191239 - RNA, 18 nt, Human
gggcagucugagagaggc

SEQ ID NO: 1191240 - RNA, 17 nt, Human
gggcagucugagagagg

SEQ ID NO: 1191241 - RNA, 23 nt, Human
gggaggugcuucuaguucugcca

SEQ ID NO: 1191242 - RNA, 16 nt, Human
gggaguuuaggguggg

SEQ ID NO: 1191243 - RNA, 11 nt, Human
gggagugugua

SEQ ID NO: 1191244 - RNA, 14 nt, Human
gggauagaugugug

SEQ ID NO: 1191245 - RNA, 13 nt, Human
gggauagaugugu

SEQ ID NO: 1191246 - RNA, 21 nt, Human
gggcagucugagagaggccau

SEQ ID NO: 1191247 - RNA, 20 nt, Human
gggcagucugagagaggcca

SEQ ID NO: 1191248 - RNA, 15 nt, Human
gggccugggcaggag

SEQ ID NO: 1191249 - RNA, 13 nt, Human
gggccugggcagg

SEQ ID NO: 1191250 - RNA, 12 nt, Human
gggccugggcag

SEQ ID NO: 1191251 - RNA, 17 nt, Human
gggccugggcaggaggg

SEQ ID NO: 1191252 - RNA, 16 nt, Human
gggccugggcaggagg

SEQ ID NO: 1191253 - RNA, 16 nt, Human
ggggcgcggcugggag

SEQ ID NO: 1191254 - RNA, 15 nt, Human
ggggcgcggcuggga

SEQ ID NO: 1191255 - RNA, 19 nt, Human
ggggcagucugagagaggc

SEQ ID NO: 1191256 - RNA, 18 nt, Human
ggggcagucugagagagg

SEQ ID NO: 1191257 - RNA, 15 nt, Human
gggggagagggcugc

SEQ ID NO: 1191258 - RNA, 21 nt, Human
gguguccugcaccggggccug

SEQ ID NO: 1191259 - RNA, 15 nt, Human
ggugguggcucggga

SEQ ID NO: 1191260 - RNA, 22 nt, Human
uagugauuuuuaugccaccuga

SEQ ID NO: 1191261 - RNA, 21 nt, Human
uagugauuuuuaugccaccug

SEQ ID NO: 1191262 - RNA, 20 nt, Human
uagugauuuuuaugccaccu

SEQ ID NO: 1191263 - RNA, 13 nt, Human
uaggcuagggugg

SEQ ID NO: 1191264 - RNA, 15 nt, Human
uaggcuagggugggg

SEQ ID NO: 1191265 - RNA, 15 nt, Human
uaggaacugcugggc

SEQ ID NO: 1191266 - RNA, 18 nt, Human
uaggaacugcugggcuug

SEQ ID NO: 1191267 - RNA, 11 nt, Human
uagaugugugg

SEQ ID NO: 1191268 - RNA, 19 nt, Human
uaauucuuugaccuguugg

SEQ ID NO: 1191269 - RNA, 19 nt, Human
gguugggagaaugucagua

SEQ ID NO: 1191270 - RNA, 18 nt, Human
ucacgccagacuucccac

SEQ ID NO: 1191271 - RNA, 22 nt, Human
ucagucuuuaaucugagaggcc

SEQ ID NO: 1191272 - RNA, 19 nt, Human
uccuuaaggcucuuuugua

SEQ ID NO: 1191273 - RNA, 16 nt, Human
uccuuaaggcucuuuu

SEQ ID NO: 1191274 - RNA, 19 nt, Human
ucuuuuguaagguuuuugu

SEQ ID NO: 1191275 - RNA, 22 nt, Human
ucuguguguguguauguggggg

SEQ ID NO: 1191276 - RNA, 15 nt, Human
ucuguguguuuaugu

SEQ ID NO: 1191277 - RNA, 16 nt, Human
ucuguguguuuaugug

SEQ ID NO: 1191278 - RNA, 19 nt, Human
ucuguguguuuaugugugu

SEQ ID NO: 1191279 - RNA, 20 nt, Human
ucuguguguuuaugugugug

SEQ ID NO: 1191280 - RNA, 15 nt, Human
ucuguguguguguau

SEQ ID NO: 1191281 - RNA, 18 nt, Human
ucuguguguguguaugug

SEQ ID NO: 1191282 - RNA, 19 nt, Human
ucuguguguguguaugugg

SEQ ID NO: 1191283 - RNA, 21 nt, Human
ucuguguguguguaugugggg

SEQ ID NO: 1191284 - RNA, 19 nt, Human
ugcuucuaguucugccagg

SEQ ID NO: 1191285 - RNA, 18 nt, Human
ugcuucuaguucugccag

SEQ ID NO: 1191286 - RNA, 20 nt, Human
ugcuucuaguucugccagga

SEQ ID NO: 1191287 - RNA, 21 nt, Human
uggaagugugggucugugugu

SEQ ID NO: 1191288 - RNA, 23 nt, Human
uggaagugugggucugugugugu

SEQ ID NO: 1191289 - RNA, 18 nt, Human
uggggcaggggccggggg

SEQ ID NO: 1191290 - RNA, 16 nt, Human
uggggcaggggccggg

SEQ ID NO: 1191291 - RNA, 15 nt, Human
uuacagaggacagua

SEQ ID NO: 1191292 - RNA, 14 nt, Human
uguguauguggggg

SEQ ID NO: 1191293 - RNA, 23 nt, Human
uguguaugugggggucugugugu

SEQ ID NO: 1191294 - RNA, 15 nt, Human
uguguuuaugugugu

SEQ ID NO: 1191295 - RNA, 13 nt, Human
uguguuuaugugu

SEQ ID NO: 1191296 - RNA, 14 nt, Human
uguguugugugugg

SEQ ID NO: 1191297 - RNA, 23 nt, Human
uguguugugugugggagugugua

SEQ ID NO: 1191298 - RNA, 11 nt, Human
uguguguaugu

SEQ ID NO: 1191299 - RNA, 21 nt, Human
uguuuacagaggacaguauuu

SEQ ID NO: 1191300 - RNA, 14 nt, Human
uguuuacagaggac

SEQ ID NO: 1191301 - RNA, 16 nt, Human
ugugggggucugugug

SEQ ID NO: 1191302 - RNA, 14 nt, Human
ugugggucugugug

SEQ ID NO: 1191303 - RNA, 16 nt, Human
ugugggucugugugug

SEQ ID NO: 1191304 - RNA, 20 nt, Human
ugugggucugugugugugua

SEQ ID NO: 1191305 - RNA, 18 nt, Human
ugugaggggcucucucau

SEQ ID NO: 1191306 - RNA, 15 nt, Human
uguaaauuuauguga

SEQ ID NO: 1191307 - RNA, 16 nt, Human
uguaaauuuaugugau

SEQ ID NO: 1191308 - RNA, 17 nt, Human
uuuagaagaaguguguc

SEQ ID NO: 1191309 - RNA, 19 nt, Human
uuuagaagaagugugucac

SEQ ID NO: 1191310 - RNA, 13 nt, Human
aggaugucugggc

SEQ ID NO: 1191311 - RNA, 15 nt, Human
aggagggcaggcauc

SEQ ID NO: 1191312 - RNA, 15 nt, Human
aggagggaggugcuu

SEQ ID NO: 1191313 - RNA, 13 nt, Human
aggagggcaggca

SEQ ID NO: 1191314 - RNA, 20 nt, Human
aggagacagguuagcugcuc

SEQ ID NO: 1191315 - RNA, 19 nt, Human
aggcaucggggagccggga

SEQ ID NO: 1191316 - RNA, 19 nt, Human
aggccagggggccaguccc

SEQ ID NO: 1191317 - RNA, 23 nt, Human
aggccagggggccagucccugag

SEQ ID NO: 1191318 - RNA, 22 nt, Human
agggauuuggggcucagagugg

SEQ ID NO: 1191319 - RNA, 15 nt, Human
agggaugcauggaga

SEQ ID NO: 1191320 - RNA, 14 nt, Human
agggaugguguuca

SEQ ID NO: 1191321 - RNA, 14 nt, Human
aggcuagggugggg

SEQ ID NO: 1191322 - RNA, 15 nt, Human
aggcuagggugggga

SEQ ID NO: 1191323 - RNA, 16 nt, Human
aggcuaggguggggag

SEQ ID NO: 1191324 - RNA, 19 nt, Human
aggcuaggguggggagaga

SEQ ID NO: 1191325 - RNA, 13 nt, Human
agcgaauuuuaaa

SEQ ID NO: 1191326 - RNA, 15 nt, Human
agcgaauuuuaaaag

SEQ ID NO: 1191327 - RNA, 16 nt, Human
agcgaauuuuaaaaga

SEQ ID NO: 1191328 - RNA, 15 nt, Human
agcugcgggcugggu

SEQ ID NO: 1191329 - RNA, 19 nt, Human
agcuuuuuucucugauaca

SEQ ID NO: 1191330 - RNA, 20 nt, Human
agcuuuuuucucugauacag

SEQ ID NO: 1191331 - RNA, 22 nt, Human
agcuuuuuucucugauacagaa

SEQ ID NO: 1191332 - RNA, 23 nt, Human
agcuuuuuucucugauacagaaa

SEQ ID NO: 1191333 - RNA, 19 nt, Human
agagugggguagguuggga

SEQ ID NO: 1191334 - RNA, 19 nt, Human
agauagccccacaggaggu

SEQ ID NO: 1191335 - RNA, 14 nt, Human
agauaugauucaaa

SEQ ID NO: 1191336 - RNA, 15 nt, Human
agauaugauucaaau

SEQ ID NO: 1191337 - RNA, 16 nt, Human
agauaugauucaaaug

SEQ ID NO: 1191338 - RNA, 13 nt, Human
agcaucucccagu

SEQ ID NO: 1191339 - RNA, 14 nt, Human
agccaagaggcugc

SEQ ID NO: 1191340 - RNA, 15 nt, Human
agccaagaggcugca

SEQ ID NO: 1191341 - RNA, 17 nt, Human
agcccaaaccaccagaa

SEQ ID NO: 1191342 - RNA, 19 nt, Human
agcccaaaccaccagaagc

SEQ ID NO: 1191343 - RNA, 20 nt, Human
agcccaaaccaccagaagcc

SEQ ID NO: 1191344 - RNA, 22 nt, Human
agcccaaaccaccagaagccca

SEQ ID NO: 1191345 - RNA, 14 nt, Human
agcagugggccugg

SEQ ID NO: 1191346 - RNA, 22 nt, Human
agagaggccauucuuucccaac

SEQ ID NO: 1191347 - RNA, 23 nt, Human
agagaggccauucuuucccaaca

SEQ ID NO: 1191348 - RNA, 12 nt, Human
agagaggccauu

SEQ ID NO: 1191349 - RNA, 12 nt, Human
agaaugaggcug

SEQ ID NO: 1191350 - RNA, 13 nt, Human
agaaugaggcugc

SEQ ID NO: 1191351 - RNA, 14 nt, Human
agaaugaggcugcu

SEQ ID NO: 1191352 - RNA, 20 nt, Human
agaaugaggcugcuuuccaa

SEQ ID NO: 1191353 - RNA, 18 nt, Human
agaagucacauuccugaa

SEQ ID NO: 1191354 - RNA, 23 nt, Human
auggagauagccccacaggaggu

SEQ ID NO: 1191355 - RNA, 22 nt, Human
augaggcugcuuuccaaagcca

SEQ ID NO: 1191356 - RNA, 16 nt, Human
augaaacuuuuggaag

SEQ ID NO: 1191357 - RNA, 13 nt, Human
augaaacuuggau

SEQ ID NO: 1191358 - RNA, 16 nt, Human
auauuuuuuucugaaa

SEQ ID NO: 1191359 - RNA, 18 nt, Human
auauuuuuuucugaaauu

SEQ ID NO: 1191360 - RNA, 14 nt, Human
auauuuuuuucuga

SEQ ID NO: 1191361 - RNA, 19 nt, Human
auauuuuuuucugaaauuu

SEQ ID NO: 1191362 - RNA, 21 nt, Human
auccagcccugaguuccuagc

SEQ ID NO: 1191363 - RNA, 13 nt, Human
acccucaucuuuc

SEQ ID NO: 1191364 - RNA, 14 nt, Human
acccucaucuuucu

SEQ ID NO: 1191365 - RNA, 16 nt, Human
acccucaucuuucuuc

SEQ ID NO: 1191366 - RNA, 19 nt, Human
acccucaucuuucuuccaa

SEQ ID NO: 1191367 - RNA, 19 nt, Human
accggggccugggcaggag

SEQ ID NO: 1191368 - RNA, 13 nt, Human
accggggccuggg

SEQ ID NO: 1191369 - RNA, 20 nt, Human
acuaauguguaagacaaaaa

SEQ ID NO: 1191370 - RNA, 13 nt, Human
acgucuuaaauau

SEQ ID NO: 1191371 - RNA, 14 nt, Human
acgucuuaaauauu

SEQ ID NO: 1191372 - RNA, 16 nt, Human
acugauccagcccuga

SEQ ID NO: 1191373 - RNA, 17 nt, Human
acugauccagcccugag

SEQ ID NO: 1191374 - RNA, 20 nt, Human
acugaauuaugaaacuuuug

SEQ ID NO: 1191375 - RNA, 13 nt, Human
acugaauuaugaa

SEQ ID NO: 1191376 - RNA, 14 nt, Human
acugaauuaugaaa

SEQ ID NO: 1191377 - RNA, 15 nt, Human
acugaauuaugaaac

SEQ ID NO: 1191378 - RNA, 17 nt, Human
aauuuccugggagcuuu

SEQ ID NO: 1191379 - RNA, 12 nt, Human
aauuuccuggga

SEQ ID NO: 1191380 - RNA, 15 nt, Human
aauuuccugggagcu

SEQ ID NO: 1191381 - RNA, 18 nt, Human
aauuaugaaacuuuugga

SEQ ID NO: 1191382 - RNA, 12 nt, Human
aauuaugaaacu

SEQ ID NO: 1191383 - RNA, 13 nt, Human
aauuaugaaacuu

SEQ ID NO: 1191384 - RNA, 15 nt, Human
aauuaugaaacuuuu

SEQ ID NO: 1191385 - RNA, 18 nt, Human
accaagccuggucagccc

SEQ ID NO: 1191386 - RNA, 15 nt, Human
accaccagaagccca

SEQ ID NO: 1191387 - RNA, 16 nt, Human
accaccagaagcccag

SEQ ID NO: 1191388 - RNA, 17 nt, Human
accaccagaagcccaga

SEQ ID NO: 1191389 - RNA, 23 nt, Human
acagugaucaaguuauuuuuaau

SEQ ID NO: 1191390 - RNA, 14 nt, Human
aacaggcucagagg

SEQ ID NO: 1191391 - RNA, 22 nt, Human
aaaccgaacugauguaaguaaa

SEQ ID NO: 1191392 - RNA, 18 nt, Human
aaaaguugaauuuuacau

SEQ ID NO: 1191393 - RNA, 17 nt, Human
aaaagauaaauauuaua

SEQ ID NO: 1191394 - RNA, 16 nt, Human
aaaagagaugaugaaa

SEQ ID NO: 1191395 - RNA, 19 nt, Human
aaaagagaugaugaaaaua

SEQ ID NO: 1191396 - RNA, 14 nt, Human
aaaagauaaauauu

SEQ ID NO: 1191397 - RNA, 12 nt, Human
aaguugaauuuu

SEQ ID NO: 1191398 - RNA, 13 nt, Human
aagcuacuuauug

SEQ ID NO: 1191399 - RNA, 19 nt, Human
auuuaaaauugugaugugu

SEQ ID NO: 1191400 - RNA, 14 nt, Human
auuggaaacaaguc

SEQ ID NO: 1191401 - RNA, 18 nt, Human
auuguagagccagagguc

SEQ ID NO: 1191402 - RNA, 17 nt, Human
auuguagcauccuggaa

SEQ ID NO: 1191403 - RNA, 17 nt, Human
auuguagagccagaggu

SEQ ID NO: 1191404 - RNA, 20 nt, Human
auuguagcauccuggaauau

SEQ ID NO: 1191405 - RNA, 15 nt, Human
auuuaaaauugugau

SEQ ID NO: 1191406 - RNA, 16 nt, Human
auuuaaauagcuuuuu

SEQ ID NO: 1191407 - RNA, 22 nt, Human
auuuccugggagcuuuuguaga

SEQ ID NO: 1191408 - RNA, 23 nt, Human
auuugaauguaugcuucauacag

SEQ ID NO: 1191409 - RNA, 18 nt, Human
auuugauaugugaacagu

SEQ ID NO: 1191410 - RNA, 19 nt, Human
auuugauaugugaacaguu

SEQ ID NO: 1191411 - RNA, 12 nt, Human
auuugguuuuca

SEQ ID NO: 1191412 - RNA, 14 nt, Human
auuugguuuucaca

SEQ ID NO: 1191413 - RNA, 15 nt, Human
auuugguuuucacau

SEQ ID NO: 1191414 - RNA, 23 nt, Human
auguguguguguuguguguggga

SEQ ID NO: 1191415 - RNA, 22 nt, Human
auguguguguguuguguguggg

SEQ ID NO: 1191416 - RNA, 23 nt, Human
auguggaaaagccaagaggcugc

SEQ ID NO: 1191417 - RNA, 17 nt, Human
uuuucucugauacagaa

SEQ ID NO: 1191418 - RNA, 22 nt, Human
uuuguagugauuuuuaugccac

SEQ ID NO: 1191419 - RNA, 15 nt, Human
uuuguagugauuuuu

SEQ ID NO: 1191420 - RNA, 18 nt, Human
uuuguaagguuuuuguag

SEQ ID NO: 1191421 - RNA, 17 nt, Human
auguauauaaacaugcu

SEQ ID NO: 1191422 - RNA, 18 nt, Human
uuuggcaaacucuccacc

SEQ ID NO: 1191423 - RNA, 23 nt, Human
uuuggcaaacucuccaccacacg

SEQ ID NO: 1191424 - RNA, 23 nt, Human
uuugaccuguugggagugaggau

SEQ ID NO: 1191425 - RNA, 19 nt, Human
uuucccuuccuuccucucc

SEQ ID NO: 1191426 - RNA, 18 nt, Human
augaguuggcugggaaua

SEQ ID NO: 1191427 - RNA, 18 nt, Human
uuguagcauccuggaaua

SEQ ID NO: 1191428 - RNA, 12 nt, Human
uugugauguguc

SEQ ID NO: 1191429 - RNA, 21 nt, Human
uuucaugcuguucaugaaaga

SEQ ID NO: 1191430 - RNA, 13 nt, Human
uuucacauuggaa

SEQ ID NO: 1191431 - RNA, 14 nt, Human
uuucacauuggaaa

SEQ ID NO: 1191432 - RNA, 19 nt, Human
uuucacauuggaaacaagu

SEQ ID NO: 1191433 - RNA, 17 nt, Human
uuuagggguagcauuug

SEQ ID NO: 1191434 - RNA, 15 nt, Human
augccccugaauuua

SEQ ID NO: 1191435 - RNA, 20 nt, Human
augccccugaauuuaaauag

SEQ ID NO: 1191436 - RNA, 19 nt, Human
uuguaaauuuaugugaugg

SEQ ID NO: 1191437 - RNA, 20 nt, Human
uugguuuucacauuggaaac

SEQ ID NO: 1191438 - RNA, 18 nt, Human
uuggagccugcagagcug

SEQ ID NO: 1191439 - RNA, 22 nt, Human
aucugugaggggcucucucaug

SEQ ID NO: 1191440 - RNA, 21 nt, Human
aucugugaggggcucucucau

SEQ ID NO: 1191441 - RNA, 16 nt, Human
uuggacuugucccggg

SEQ ID NO: 1191442 - RNA, 11 nt, Human
uuggagccugc

SEQ ID NO: 1191443 - RNA, 15 nt, Human
uuggagccugcagag

SEQ ID NO: 1191444 - RNA, 20 nt, Human
auauuuguaaauuuauguga

SEQ ID NO: 1191445 - RNA, 22 nt, Human
auauuuaaaggcccuaucuguu

SEQ ID NO: 1191446 - RNA, 22 nt, Human
auauucucacagcuccaagaau

SEQ ID NO: 1191447 - RNA, 23 nt, Human
auauucucacagcuccaagaauu

SEQ ID NO: 1191448 - RNA, 15 nt, Human
uuccugggagcuuuu

SEQ ID NO: 1191449 - RNA, 16 nt, Human
uuccugggagcuuuug

SEQ ID NO: 1191450 - RNA, 18 nt, Human
auauuuucaugcuguuca

SEQ ID NO: 1191451 - RNA, 21 nt, Human
auauuuucaugcuguucauga

SEQ ID NO: 1191452 - RNA, 23 nt, Human
aucauguuuacagaggacaguau

SEQ ID NO: 1191453 - RNA, 18 nt, Human
aucauguuuacagaggac

SEQ ID NO: 1191454 - RNA, 16 nt, Human
aucagugucuuuccac

SEQ ID NO: 1191455 - RNA, 17 nt, Human
uucuaguucugccagga

SEQ ID NO: 1191456 - RNA, 20 nt, Human
uucucacagcuccaagaauu

SEQ ID NO: 1191457 - RNA, 12 nt, Human
uucugccaggag

SEQ ID NO: 1191458 - RNA, 13 nt, Human
uucucuucacuca

SEQ ID NO: 1191459 - RNA, 21 nt, Human
uucugaaauuuccugggagcu

SEQ ID NO: 1191460 - RNA, 11 nt, Human
aucccaacacu

SEQ ID NO: 1191461 - RNA, 15 nt, Human
aucccaacacugcca

SEQ ID NO: 1191462 - RNA, 16 nt, Human
aucccaacacugccag

SEQ ID NO: 1191463 - RNA, 17 nt, Human
aucccaacacugccagc

SEQ ID NO: 1191464 - RNA, 13 nt, Human
auaugugaacagu

SEQ ID NO: 1191465 - RNA, 13 nt, Human
auaugauucaaau

SEQ ID NO: 1191466 - RNA, 22 nt, Human
auaugauucaaaugucuauaaa

SEQ ID NO: 1191467 - RNA, 17 nt, Human
auaucuauauuuuacau

SEQ ID NO: 1191468 - RNA, 20 nt, Human
auaucuauauuuuacauaaa

SEQ ID NO: 1191469 - RNA, 22 nt, Human
auaucuauauuuuacauaaauu

SEQ ID NO: 1191470 - RNA, 14 nt, Human
uucacauuggaaac

SEQ ID NO: 1191471 - RNA, 16 nt, Human
uucaaaaaacuuguaa

SEQ ID NO: 1191472 - RNA, 16 nt, Human
uuagaagaaguguguc

SEQ ID NO: 1191473 - RNA, 15 nt, Human
uuagaagaagugugu

SEQ ID NO: 1191474 - RNA, 14 nt, Human
uuagaagaagugug

SEQ ID NO: 1191475 - RNA, 12 nt, Human
auaaauauuaua

SEQ ID NO: 1191476 - RNA, 22 nt, Human
auaaauauuauauuauauauau

SEQ ID NO: 1191477 - RNA, 18 nt, Human
uuaaaauugugauguguc

SEQ ID NO: 1191478 - RNA, 13 nt, Human
uuaaaauugugau

SEQ ID NO: 1191479 - RNA, 12 nt, Human
aguuuagggugg

SEQ ID NO: 1191480 - RNA, 13 nt, Human
aguuuaggguggg

SEQ ID NO: 1191481 - RNA, 14 nt, Human
aguuuagggugggg

SEQ ID NO: 1191482 - RNA, 16 nt, Human
uguuuaugugugugug

SEQ ID NO: 1191483 - RNA, 13 nt, Human
uguuuaugugugu

SEQ ID NO: 1191484 - RNA, 13 nt, Human
aguucugccagga

SEQ ID NO: 1191485 - RNA, 14 nt, Human
aguucugccaggag

SEQ ID NO: 1191486 - RNA, 20 nt, Human
aguucugccaggagacaggu

SEQ ID NO: 1191487 - RNA, 12 nt, Human
aguucugccagg

SEQ ID NO: 1191488 - RNA, 21 nt, Human
uguuuuauuuaaccucuaaau

SEQ ID NO: 1191489 - RNA, 14 nt, Human
uguguguguaugug

SEQ ID NO: 1191490 - RNA, 20 nt, Human
ugugugugggaguguguaau

SEQ ID NO: 1191491 - RNA, 12 nt, Human
ugugugugggag

SEQ ID NO: 1191492 - RNA, 13 nt, Human
uguguugaagagg

SEQ ID NO: 1191493 - RNA, 18 nt, Human
uguguaagacaaaaagcu

SEQ ID NO: 1191494 - RNA, 21 nt, Human
uguuccgugguuaaacucgcu

SEQ ID NO: 1191495 - RNA, 16 nt, Human
uguggcauccagaguc

SEQ ID NO: 1191496 - RNA, 23 nt, Human
uguggcaguuuggcaaacucucc

SEQ ID NO: 1191497 - RNA, 19 nt, Human
uguggcauccagagucccu

SEQ ID NO: 1191498 - RNA, 21 nt, Human
uguggcauccagagucccugc

SEQ ID NO: 1191499 - RNA, 14 nt, Human
ugugcccacccucc

SEQ ID NO: 1191500 - RNA, 23 nt, Human
ugugcccacccuccacucuccuc

SEQ ID NO: 1191501 - RNA, 12 nt, Human
ugugacucuuuc

SEQ ID NO: 1191502 - RNA, 14 nt, Human
ugugacucuuucca

SEQ ID NO: 1191503 - RNA, 15 nt, Human
ugugaacagcggcug

SEQ ID NO: 1191504 - RNA, 20 nt, Human
ugugaacaguuguguuugaa

SEQ ID NO: 1191505 - RNA, 22 nt, Human
ugugaacaguuguguuugaagc

SEQ ID NO: 1191506 - RNA, 15 nt, Human
ugugacucuuuccaa

SEQ ID NO: 1191507 - RNA, 17 nt, Human
ugugacucuuuccaacc

SEQ ID NO: 1191508 - RNA, 20 nt, Human
uguaugugggggucugugug

SEQ ID NO: 1191509 - RNA, 12 nt, Human
uguauguggggg

SEQ ID NO: 1191510 - RNA, 23 nt, Human
agguuuguuuagaagaagugugu

SEQ ID NO: 1191511 - RNA, 19 nt, Human
agguuuuuguagugauuuu

SEQ ID NO: 1191512 - RNA, 18 nt, Human
aggugcccagaaugaggc

SEQ ID NO: 1191513 - RNA, 22 nt, Human
aggugcccagaaugaggcugcu

SEQ ID NO: 1191514 - RNA, 17 nt, Human
uguaaauaaaggaacca

SEQ ID NO: 1191515 - RNA, 21 nt, Human
aggguggggggggggcgcggc

SEQ ID NO: 1191516 - RNA, 21 nt, Human
agggucuugguuccagccugc

SEQ ID NO: 1191517 - RNA, 22 nt, Human
uggggagggauuuggggcucag

SEQ ID NO: 1191518 - RNA, 15 nt, Human
uggggcucagagugg

SEQ ID NO: 1191519 - RNA, 14 nt, Human
uggggagggauuug

SEQ ID NO: 1191520 - RNA, 13 nt, Human
uggggagagacgg

SEQ ID NO: 1191521 - RNA, 22 nt, Human
ugggagaaugucaguaugugga

SEQ ID NO: 1191522 - RNA, 20 nt, Human
ugggagaaugucaguaugug

SEQ ID NO: 1191523 - RNA, 19 nt, Human
ugggagaaugucaguaugu

SEQ ID NO: 1191524 - RNA, 15 nt, Human
agggaaggaucccau

SEQ ID NO: 1191525 - RNA, 22 nt, Human
agggaaggaucccaugagcucc

SEQ ID NO: 1191526 - RNA, 23 nt, Human
agggaaggaucccaugagcuccu

SEQ ID NO: 1191527 - RNA, 22 nt, Human
aggcccuaucuguuuacagugu

SEQ ID NO: 1191528 - RNA, 15 nt, Human
ugggccccugccaga

SEQ ID NO: 1191529 - RNA, 15 nt, Human
uggaagagggcugca

SEQ ID NO: 1191530 - RNA, 16 nt, Human
uggauucugagagcug

SEQ ID NO: 1191531 - RNA, 17 nt, Human
uggauucugagagcugu

SEQ ID NO: 1191532 - RNA, 16 nt, Human
uggacuguucccugag

SEQ ID NO: 1191533 - RNA, 17 nt, Human
uggacuguucccugagg

SEQ ID NO: 1191534 - RNA, 22 nt, Human
ugcuaugagcuggggaugucuc

SEQ ID NO: 1191535 - RNA, 20 nt, Human
ugcuaugagcuggggauguc

SEQ ID NO: 1191536 - RNA, 19 nt, Human
ugcuaugagcuggggaugu

SEQ ID NO: 1191537 - RNA, 16 nt, Human
ugcuaugagcugggga

SEQ ID NO: 1191538 - RNA, 15 nt, Human
ugccuugucacgcca

SEQ ID NO: 1191539 - RNA, 16 nt, Human
ugccuuggugugcugu

SEQ ID NO: 1191540 - RNA, 17 nt, Human
ugccuugucacgccaga

SEQ ID NO: 1191541 - RNA, 21 nt, Human
agcuuuggcuaugagggccuu

SEQ ID NO: 1191542 - RNA, 20 nt, Human
agcuuuggcuaugagggccu

SEQ ID NO: 1191543 - RNA, 22 nt, Human
agcuuugagguggaagagggcu

SEQ ID NO: 1191544 - RNA, 16 nt, Human
ugccaucauguuuaca

SEQ ID NO: 1191545 - RNA, 22 nt, Human
ugccgagaguccaucagccucc

SEQ ID NO: 1191546 - RNA, 18 nt, Human
agcugugugcucuccaag

SEQ ID NO: 1191547 - RNA, 15 nt, Human
ugaugggucaguugu

SEQ ID NO: 1191548 - RNA, 18 nt, Human
ugaugaaaauauuuaaag

SEQ ID NO: 1191549 - RNA, 17 nt, Human
agcauuuguguugaaga

SEQ ID NO: 1191550 - RNA, 18 nt, Human
agcauuuguguugaagag

SEQ ID NO: 1191551 - RNA, 14 nt, Human
agcauccuggaaua

SEQ ID NO: 1191552 - RNA, 15 nt, Human
agcauccuggaauau

SEQ ID NO: 1191553 - RNA, 13 nt, Human
agcauccuggaau

SEQ ID NO: 1191554 - RNA, 24 nt, Human
ugaguuacuugcugcccugugcuc

SEQ ID NO: 1191555 - RNA, 14 nt, Human
ugaguuccuagcca

SEQ ID NO: 1191556 - RNA, 18 nt, Human
ugaguuccuagccaccgc

SEQ ID NO: 1191557 - RNA, 20 nt, Human
agcagguccccagcuuuggc

SEQ ID NO: 1191558 - RNA, 21 nt, Human
agcagguccccagcuuuggcu

SEQ ID NO: 1191559 - RNA, 16 nt, Human
agccucuccacucaug

SEQ ID NO: 1191560 - RNA, 17 nt, Human
agccucgacacagagug

SEQ ID NO: 1191561 - RNA, 18 nt, Human
agccucgacacagagugg

SEQ ID NO: 1191562 - RNA, 23 nt, Human
agccccgcguggaacucgugucu

SEQ ID NO: 1191563 - RNA, 20 nt, Human
agcccugaguuccuagccac

SEQ ID NO: 1191564 - RNA, 23 nt, Human
agcccugaguuccuagccaccgc

SEQ ID NO: 1191565 - RNA, 18 nt, Human
agcccugaguuccuagcc

SEQ ID NO: 1191566 - RNA, 18 nt, Human
agaucccaacacugccag

SEQ ID NO: 1191567 - RNA, 19 nt, Human
agaucccaacacugccagc

SEQ ID NO: 1191568 - RNA, 20 nt, Human
agaucccaacacugccagca

SEQ ID NO: 1191569 - RNA, 17 nt, Human
agauguggaaaagccaa

SEQ ID NO: 1191570 - RNA, 22 nt, Human
agauguggaaaagccaagaggc

SEQ ID NO: 1191571 - RNA, 23 nt, Human
agaguccaucagccuccauccua

SEQ ID NO: 1191572 - RNA, 14 nt, Human
agagucccugccug

SEQ ID NO: 1191573 - RNA, 17 nt, Human
agagucccugccuggac

SEQ ID NO: 1191574 - RNA, 16 nt, Human
ugaauuuuacauggcu

SEQ ID NO: 1191575 - RNA, 14 nt, Human
agauaaauauuaua

SEQ ID NO: 1191576 - RNA, 12 nt, Human
agauaaauauua

SEQ ID NO: 1191577 - RNA, 12 nt, Human
agauacugaaau

SEQ ID NO: 1191578 - RNA, 13 nt, Human
agauacugaaaua

SEQ ID NO: 1191579 - RNA, 15 nt, Human
agauacugaaauaaa

SEQ ID NO: 1191580 - RNA, 21 nt, Human
agaggccauucuuucccaaca

SEQ ID NO: 1191581 - RNA, 12 nt, Human
agagguuuuaaa

SEQ ID NO: 1191582 - RNA, 22 nt, Human
ugaagcacagugaucaaguuau

SEQ ID NO: 1191583 - RNA, 14 nt, Human
agagcugcgggcug

SEQ ID NO: 1191584 - RNA, 16 nt, Human
agagcagugggccugg

SEQ ID NO: 1191585 - RNA, 16 nt, Human
agaaugucaguaugug

SEQ ID NO: 1191586 - RNA, 15 nt, Human
agaaugucaguaugu

SEQ ID NO: 1191587 - RNA, 22 nt, Human
agaaccccuggcuccaggccag

SEQ ID NO: 1191588 - RNA, 19 nt, Human
agaaugucaguauguggaa

SEQ ID NO: 1191589 - RNA, 17 nt, Human
agaaugucaguaugugg

SEQ ID NO: 1191590 - RNA, 21 nt, Human
agacauuugcuaugagcuggg

SEQ ID NO: 1191591 - RNA, 14 nt, Human
agacuuaucaacau

SEQ ID NO: 1191592 - RNA, 19 nt, Human
agacuucccacggcuccuc

SEQ ID NO: 1191593 - RNA, 13 nt, Human
ucuuucuuccaaa

SEQ ID NO: 1191594 - RNA, 17 nt, Human
ucuugguuccagccugc

SEQ ID NO: 1191595 - RNA, 18 nt, Human
ucuugguuccagccugcc

SEQ ID NO: 1191596 - RNA, 19 nt, Human
ucuugguuccagccugcca

SEQ ID NO: 1191597 - RNA, 13 nt, Human
ucuugguuccagc

SEQ ID NO: 1191598 - RNA, 14 nt, Human
ucugagagaggcca

SEQ ID NO: 1191599 - RNA, 20 nt, Human
ucugagagaggccauucuuu

SEQ ID NO: 1191600 - RNA, 12 nt, Human
ucugagagcugu

SEQ ID NO: 1191601 - RNA, 13 nt, Human
ucugauacagaaa

SEQ ID NO: 1191602 - RNA, 17 nt, Human
ucucucacuuguuuuau

SEQ ID NO: 1191603 - RNA, 21 nt, Human
ucucucacuuguuuuauuuaa

SEQ ID NO: 1191604 - RNA, 16 nt, Human
ucucauuccagaggaa

SEQ ID NO: 1191605 - RNA, 23 nt, Human
acuugucccgggacaccuaggcu

SEQ ID NO: 1191606 - RNA, 21 nt, Human
ucucacagcuccaagaauuuc

SEQ ID NO: 1191607 - RNA, 23 nt, Human
acuggccaguggcuggaucugug

SEQ ID NO: 1191608 - RNA, 17 nt, Human
ucgagaucccaacacug

SEQ ID NO: 1191609 - RNA, 22 nt, Human
ucgagaucccaacacugccagc

SEQ ID NO: 1191610 - RNA, 18 nt, Human
ucgagaucccaacacugc

SEQ ID NO: 1191611 - RNA, 21 nt, Human
ucgagaucccaacacugccag

SEQ ID NO: 1191612 - RNA, 16 nt, Human
acugcuaagaauauuu

SEQ ID NO: 1191613 - RNA, 18 nt, Human
acugcuaagaauauuuga

SEQ ID NO: 1191614 - RNA, 16 nt, Human
acuguucccugaggug

SEQ ID NO: 1191615 - RNA, 19 nt, Human
acuguucccugagguggga

SEQ ID NO: 1191616 - RNA, 19 nt, Human
acucaugugacucuuucca

SEQ ID NO: 1191617 - RNA, 14 nt, Human
acuccuccuagcca

SEQ ID NO: 1191618 - RNA, 15 nt, Human
acuccuccuagccac

SEQ ID NO: 1191619 - RNA, 16 nt, Human
acuccuccuagccacc

SEQ ID NO: 1191620 - RNA, 18 nt, Human
acuccuccuagccaccca

SEQ ID NO: 1191621 - RNA, 21 nt, Human
ucccgggacaccuaggcuagg

SEQ ID NO: 1191622 - RNA, 20 nt, Human
ucccugaaggaaccaaagcg

SEQ ID NO: 1191623 - RNA, 11 nt, Human
ucccugaggca

SEQ ID NO: 1191624 - RNA, 20 nt, Human
ucccugaggcagguccccag

SEQ ID NO: 1191625 - RNA, 21 nt, Human
ucccugaggcagguccccaga

SEQ ID NO: 1191626 - RNA, 22 nt, Human
ucccugaggcagguccccagac

SEQ ID NO: 1191627 - RNA, 17 nt, Human
acgugggcauucaaaug

SEQ ID NO: 1191628 - RNA, 20 nt, Human
acgugggcauucaaauguau

SEQ ID NO: 1191629 - RNA, 14 nt, Human
uccacucaugugac

SEQ ID NO: 1191630 - RNA, 21 nt, Human
uccacucaugugacucuuucc

SEQ ID NO: 1191631 - RNA, 15 nt, Human
uccacuccuccuagc

SEQ ID NO: 1191632 - RNA, 18 nt, Human
uccacuccuccuagccac

SEQ ID NO: 1191633 - RNA, 18 nt, Human
uccacuggggauugggcc

SEQ ID NO: 1191634 - RNA, 21 nt, Human
uccacuccuccuagccaccca

SEQ ID NO: 1191635 - RNA, 16 nt, Human
uccaggccagggggcc

SEQ ID NO: 1191636 - RNA, 18 nt, Human
uccaggccagggggccag

SEQ ID NO: 1191637 - RNA, 21 nt, Human
uccaaccggcuuuguggcacu

SEQ ID NO: 1191638 - RNA, 17 nt, Human
ucaggaaccgaggcagg

SEQ ID NO: 1191639 - RNA, 14 nt, Human
accucuaaauucuu

SEQ ID NO: 1191640 - RNA, 22 nt, Human
uauuuguaaauuuaugugaugg

SEQ ID NO: 1191641 - RNA, 17 nt, Human
uauuuguaaauuuaugu

SEQ ID NO: 1191642 - RNA, 16 nt, Human
uauuuguaaauuuaug

SEQ ID NO: 1191643 - RNA, 20 nt, Human
ucaaauacgugggcauucaa

SEQ ID NO: 1191644 - RNA, 22 nt, Human
uauuucccugaaggaaccaaag

SEQ ID NO: 1191645 - RNA, 18 nt, Human
accagagaaaaagggagg

SEQ ID NO: 1191646 - RNA, 13 nt, Human
accagaagcccag

SEQ ID NO: 1191647 - RNA, 14 nt, Human
accagaagcccaga

SEQ ID NO: 1191648 - RNA, 16 nt, Human
accagaagcccagaau

SEQ ID NO: 1191649 - RNA, 22 nt, Human
accacacguaaugaaacuugga

SEQ ID NO: 1191650 - RNA, 21 nt, Human
ucagcccaaaccaccagaagc

SEQ ID NO: 1191651 - RNA, 22 nt, Human
ucagcccaaaccaccagaagcc

SEQ ID NO: 1191652 - RNA, 13 nt, Human
ucacucuuggagc

SEQ ID NO: 1191653 - RNA, 16 nt, Human
uaauuuaaaauuguga

SEQ ID NO: 1191654 - RNA, 15 nt, Human
uaauuuaaaauugug

SEQ ID NO: 1191655 - RNA, 21 nt, Human
aaugccccugaauuuaaauag

SEQ ID NO: 1191656 - RNA, 14 nt, Human
uacagaggacagua

SEQ ID NO: 1191657 - RNA, 18 nt, Human
uacagaggacaguauuug

SEQ ID NO: 1191658 - RNA, 18 nt, Human
aauguaugcuucauacag

SEQ ID NO: 1191659 - RNA, 21 nt, Human
aauguaugcuucauacaggga

SEQ ID NO: 1191660 - RNA, 22 nt, Human
aaugacagguuugggaccccug

SEQ ID NO: 1191661 - RNA, 19 nt, Human
uaauagguuuggacaaaau

SEQ ID NO: 1191662 - RNA, 14 nt, Human
uaauagguuuggac

SEQ ID NO: 1191663 - RNA, 15 nt, Human
uaaugaaacuuggau

SEQ ID NO: 1191664 - RNA, 14 nt, Human
uaaugaaacuugga

SEQ ID NO: 1191665 - RNA, 16 nt, Human
aauaucuccgucaacu

SEQ ID NO: 1191666 - RNA, 21 nt, Human
aauaucuccgucaacucauau

SEQ ID NO: 1191667 - RNA, 18 nt, Human
uaagaauauuugaaugua

SEQ ID NO: 1191668 - RNA, 16 nt, Human
uaaccucuaaauucuu

SEQ ID NO: 1191669 - RNA, 24 nt, Human
aauagcuuuuuucucugauacaga

SEQ ID NO: 1191670 - RNA, 17 nt, Human
acaccccgacuuuuguu

SEQ ID NO: 1191671 - RNA, 22 nt, Human
uagguuuggacaaaauggaaua

SEQ ID NO: 1191672 - RNA, 16 nt, Human
acacucacccaacaau

SEQ ID NO: 1191673 - RNA, 15 nt, Human
aauuugguuuucaca

SEQ ID NO: 1191674 - RNA, 21 nt, Human
aauuugguuuucacauuggaa

SEQ ID NO: 1191675 - RNA, 13 nt, Human
aauuugguuuuca

SEQ ID NO: 1191676 - RNA, 13 nt, Human
aauuuaguauuuu

SEQ ID NO: 1191677 - RNA, 17 nt, Human
aauuucuaggacugaau

SEQ ID NO: 1191678 - RNA, 18 nt, Human
aauuucuaggacugaauu

SEQ ID NO: 1191679 - RNA, 22 nt, Human
aauuucuaggacugaauuauga

SEQ ID NO: 1191680 - RNA, 23 nt, Human
aauuucuaggacugaauuaugaa

SEQ ID NO: 1191681 - RNA, 16 nt, Human
uacugggagccuaccc

SEQ ID NO: 1191682 - RNA, 19 nt, Human
uacugaaauaaacgucuua

SEQ ID NO: 1191683 - RNA, 22 nt, Human
uacugaaauaaacgucuuaaau

SEQ ID NO: 1191684 - RNA, 23 nt, Human
aaggcuauggggauagaugugug

SEQ ID NO: 1191685 - RNA, 16 nt, Human
guuuaugugugugugu

SEQ ID NO: 1191686 - RNA, 13 nt, Human
guuuaugugugug

SEQ ID NO: 1191687 - RNA, 18 nt, Human
guuguaucagcacgugug

SEQ ID NO: 1191688 - RNA, 16 nt, Human
guuuucuuaacuuaaa

SEQ ID NO: 1191689 - RNA, 16 nt, Human
guuugggaccccuggu

SEQ ID NO: 1191690 - RNA, 22 nt, Human
guuugggaccccuggugguuca

SEQ ID NO: 1191691 - RNA, 17 nt, Human
aagccuggucagcccaa

SEQ ID NO: 1191692 - RNA, 15 nt, Human
aagccuggucagccc

SEQ ID NO: 1191693 - RNA, 15 nt, Human
aagccucgacacaga

SEQ ID NO: 1191694 - RNA, 14 nt, Human
guguguaauuuaaa

SEQ ID NO: 1191695 - RNA, 17 nt, Human
gugucuuuccacuccuc

SEQ ID NO: 1191696 - RNA, 12 nt, Human
guguguaugugg

SEQ ID NO: 1191697 - RNA, 15 nt, Human
guguuguguguggga

SEQ ID NO: 1191698 - RNA, 14 nt, Human
aagagguuuuaaag

SEQ ID NO: 1191699 - RNA, 18 nt, Human
aagagguuuuaaagcuuc

SEQ ID NO: 1191700 - RNA, 14 nt, Human
gugggaguguguaa

SEQ ID NO: 1191701 - RNA, 13 nt, Human
gugggagugugua

SEQ ID NO: 1191702 - RNA, 16 nt, Human
gugggucugugugugu

SEQ ID NO: 1191703 - RNA, 13 nt, Human
gugggucugugug

SEQ ID NO: 1191704 - RNA, 23 nt, Human
guggggggggggcgcggcuggga

SEQ ID NO: 1191705 - RNA, 16 nt, Human
guggggggcuucauac

SEQ ID NO: 1191706 - RNA, 15 nt, Human
guggggggcuucaua

SEQ ID NO: 1191707 - RNA, 19 nt, Human
aagaagugugucacccuua

SEQ ID NO: 1191708 - RNA, 20 nt, Human
guggaagugugggucugugu

SEQ ID NO: 1191709 - RNA, 19 nt, Human
guggaagugugggucugug

SEQ ID NO: 1191710 - RNA, 15 nt, Human
guggaaguguggguc

SEQ ID NO: 1191711 - RNA, 14 nt, Human
guggaagugugggu

SEQ ID NO: 1191712 - RNA, 23 nt, Human
gugcuauuguagagccagagguc

SEQ ID NO: 1191713 - RNA, 22 nt, Human
guggaagugugggucugugugu

SEQ ID NO: 1191714 - RNA, 21 nt, Human
guggaagugugggucugugug

SEQ ID NO: 1191715 - RNA, 15 nt, Human
guggaauuauuuuaa

SEQ ID NO: 1191716 - RNA, 16 nt, Human
guggaauuauuuuaaa

SEQ ID NO: 1191717 - RNA, 18 nt, Human
guggaauuauuuuaaaag

SEQ ID NO: 1191718 - RNA, 19 nt, Human
guggaauuauuuuaaaaga

SEQ ID NO: 1191719 - RNA, 14 nt, Human
guggcacuggggca

SEQ ID NO: 1191720 - RNA, 24 nt, Human
aagaauuucuaggacugaauuaug

SEQ ID NO: 1191721 - RNA, 20 nt, Human
aagaauugucuuucugucuc

SEQ ID NO: 1191722 - RNA, 20 nt, Human
aagacaaaaagcuacuuauu

SEQ ID NO: 1191723 - RNA, 23 nt, Human
aagacaaaaagcuacuuauugua

SEQ ID NO: 1191724 - RNA, 16 nt, Human
guaggaacugcugggc

SEQ ID NO: 1191725 - RNA, 13 nt, Human
guaggauuacuag

SEQ ID NO: 1191726 - RNA, 14 nt, Human
aaaucuaugauucc

SEQ ID NO: 1191727 - RNA, 16 nt, Human
aaaucuaugauuccag

SEQ ID NO: 1191728 - RNA, 9 nt, Human
aaaugaggg

SEQ ID NO: 1191729 - RNA, 20 nt, Human
guaugugggggucugugugu

SEQ ID NO: 1191730 - RNA, 19 nt, Human
guaugugggggucugugug

SEQ ID NO: 1191731 - RNA, 21 nt, Human
guauguggaagugugggucug

SEQ ID NO: 1191732 - RNA, 18 nt, Human
guauguggaagugugggu

SEQ ID NO: 1191733 - RNA, 17 nt, Human
guauguggaaguguggg

SEQ ID NO: 1191734 - RNA, 16 nt, Human
guauguggaagugugg

SEQ ID NO: 1191735 - RNA, 15 nt, Human
guauguggaagugug

SEQ ID NO: 1191736 - RNA, 19 nt, Human
gucaacucauauuuucaug

SEQ ID NO: 1191737 - RNA, 22 nt, Human
aaauuuccugggagcuuuugua

SEQ ID NO: 1191738 - RNA, 20 nt, Human
aaauuuaguauuuuguuuca

SEQ ID NO: 1191739 - RNA, 20 nt, Human
guauuuaauagguuuggaca

SEQ ID NO: 1191740 - RNA, 12 nt, Human
gucucccuccuc

SEQ ID NO: 1191741 - RNA, 16 nt, Human
gucucccuccucugcc

SEQ ID NO: 1191742 - RNA, 19 nt, Human
aaccaaagcgaauuuuaaa

SEQ ID NO: 1191743 - RNA, 19 nt, Human
aacucgugucuggcacagc

SEQ ID NO: 1191744 - RNA, 12 nt, Human
gucuggcugcag

SEQ ID NO: 1191745 - RNA, 13 nt, Human
gucuggcugcaga

SEQ ID NO: 1191746 - RNA, 14 nt, Human
gucuggcugcagag

SEQ ID NO: 1191747 - RNA, 12 nt, Human
aacacugccagc

SEQ ID NO: 1191748 - RNA, 22 nt, Human
aacacugccagcauuucccuuc

SEQ ID NO: 1191749 - RNA, 15 nt, Human
aacaagucagucauu

SEQ ID NO: 1191750 - RNA, 18 nt, Human
aacaagucagucauucag

SEQ ID NO: 1191751 - RNA, 19 nt, Human
aacaguuguguuugaagca

SEQ ID NO: 1191752 - RNA, 17 nt, Human
caucuguaccucugccu

SEQ ID NO: 1191753 - RNA, 16 nt, Human
cauacagggauggugu

SEQ ID NO: 1191754 - RNA, 19 nt, Human
cauacagggaugguguuca

SEQ ID NO: 1191755 - RNA, 14 nt, Human
caguucagcuuggg

SEQ ID NO: 1191756 - RNA, 15 nt, Human
caguucagcuugggg

SEQ ID NO: 1191757 - RNA, 15 nt, Human
cauuggauucugaga

SEQ ID NO: 1191758 - RNA, 20 nt, Human
cauuggauucugagagcugu

SEQ ID NO: 1191759 - RNA, 19 nt, Human
ccaauucgaacuuuuucca

SEQ ID NO: 1191760 - RNA, 17 nt, Human
cagcacguguggccugu

SEQ ID NO: 1191761 - RNA, 18 nt, Human
cagccaggccacuggccc

SEQ ID NO: 1191762 - RNA, 14 nt, Human
cagauaugauucaa

SEQ ID NO: 1191763 - RNA, 15 nt, Human
cagauaugauucaaa

SEQ ID NO: 1191764 - RNA, 18 nt, Human
caccuaggcuaggguggg

SEQ ID NO: 1191765 - RNA, 19 nt, Human
caccuaggcuagggugggg

SEQ ID NO: 1191766 - RNA, 20 nt, Human
caaguuauuuuuaauuuggu

SEQ ID NO: 1191767 - RNA, 17 nt, Human
auuuuuaugccaccuga

SEQ ID NO: 1191768 - RNA, 16 nt, Human
auuuuuuucugaaauu

SEQ ID NO: 1191769 - RNA, 17 nt, Human
auuuuuuucugaaauuu

SEQ ID NO: 1191770 - RNA, 18 nt, Human
auuuguguugaagagguu

SEQ ID NO: 1191771 - RNA, 22 nt, Human
auuuguguugaagagguuuuaa

SEQ ID NO: 1191772 - RNA, 14 nt, Human
auuuguguugaaga

SEQ ID NO: 1191773 - RNA, 15 nt, Human
auuuguguugaagag

SEQ ID NO: 1191774 - RNA, 22 nt, Human
auuuaauagguuuggacaaaau

SEQ ID NO: 1191775 - RNA, 13 nt, Human
auucuuucccaac

SEQ ID NO: 1191776 - RNA, 17 nt, Human
auucauggccuggggga

SEQ ID NO: 1191777 - RNA, 23 nt, Human
ccagacuucccacggcuccucga

SEQ ID NO: 1191778 - RNA, 18 nt, Human
ccagagaaaaagggaggg

SEQ ID NO: 1191779 - RNA, 14 nt, Human
ccagacuccaccaa

SEQ ID NO: 1191780 - RNA, 18 nt, Human
ccagacuccaccaagccu

SEQ ID NO: 1191781 - RNA, 21 nt, Human
ccccgcguggaacucgugucu

SEQ ID NO: 1191782 - RNA, 13 nt, Human
ccauugguguuga

SEQ ID NO: 1191783 - RNA, 21 nt, Human
ccaugagcuccuuaaggcucu

SEQ ID NO: 1191784 - RNA, 12 nt, Human
ccugccuggacc

SEQ ID NO: 1191785 - RNA, 19 nt, Human
ccugccuggaccagccucu

SEQ ID NO: 1191786 - RNA, 23 nt, Human
ccucuuggggaguuuaggguggg

SEQ ID NO: 1191787 - RNA, 15 nt, Human
ccucuuggcugccuu

SEQ ID NO: 1191788 - RNA, 22 nt, Human
ccucuuggggaguuuagggugg

SEQ ID NO: 1191789 - RNA, 14 nt, Human
ccugaguuccuagc

SEQ ID NO: 1191790 - RNA, 18 nt, Human
ccugaguuccuagccacc

SEQ ID NO: 1191791 - RNA, 12 nt, Human
ccugcagagcug

SEQ ID NO: 1191792 - RNA, 13 nt, Human
ccugcagagcugc

SEQ ID NO: 1191793 - RNA, 14 nt, Human
ccugcagagcugcg

SEQ ID NO: 1191794 - RNA, 17 nt, Human
ccugcagagcugcgggc

SEQ ID NO: 1191795 - RNA, 21 nt, Human
ccucugcccgggagcucagga

SEQ ID NO: 1191796 - RNA, 22 nt, Human
ccucugcccgggagcucaggaa

SEQ ID NO: 1191797 - RNA, 20 nt, Human
cccugaauuuaaauagcuuu

SEQ ID NO: 1191798 - RNA, 14 nt, Human
cccugaaggaacca

SEQ ID NO: 1191799 - RNA, 18 nt, Human
cccugagaucucugcagg

SEQ ID NO: 1191800 - RNA, 23 nt, Human
cucaugauagaaggcuaugggga

SEQ ID NO: 1191801 - RNA, 23 nt, Human
cucaggccgaaggaggagucagg

SEQ ID NO: 1191802 - RNA, 20 nt, Human
cucaggccugacucucagca

SEQ ID NO: 1191803 - RNA, 16 nt, Human
cuccugucucccuccu

SEQ ID NO: 1191804 - RNA, 22 nt, Human
cuccucugcccgggagcucagg

SEQ ID NO: 1191805 - RNA, 24 nt, Human
cuccucugcccgggagcucaggaa

SEQ ID NO: 1191806 - RNA, 14 nt, Human
cucaugugacucuu

SEQ ID NO: 1191807 - RNA, 13 nt, Human
cucccucuacugg

SEQ ID NO: 1191808 - RNA, 19 nt, Human
cucccucuacugggagccu

SEQ ID NO: 1191809 - RNA, 20 nt, Human
cucccucuacugggagccua

SEQ ID NO: 1191810 - RNA, 20 nt, Human
cucugcaggaaauggcugug

SEQ ID NO: 1191811 - RNA, 16 nt, Human
aaaauugugauguguc

SEQ ID NO: 1191812 - RNA, 12 nt, Human
aaaauggaauac

SEQ ID NO: 1191813 - RNA, 19 nt, Human
aaacaagucagucauucag

SEQ ID NO: 1191814 - RNA, 23 nt, Human
ggggucuguguguuuaugugugu

SEQ ID NO: 1191815 - RNA, 12 nt, Human
ggggccugggca

SEQ ID NO: 1191816 - RNA, 15 nt, Human
ggggccugggcagga

SEQ ID NO: 1191817 - RNA, 14 nt, Human
aaaccaccagaagc

SEQ ID NO: 1191818 - RNA, 16 nt, Human
aaagcuacuuauugua

SEQ ID NO: 1191819 - RNA, 17 nt, Human
aaagcuacuuauuguag

SEQ ID NO: 1191820 - RNA, 20 nt, Human
ggugcccagaaugaggcugc

SEQ ID NO: 1191821 - RNA, 20 nt, Human
ggucuugguuccagccugcc

SEQ ID NO: 1191822 - RNA, 21 nt, Human
ggucuugguuccagccugcca

SEQ ID NO: 1191823 - RNA, 14 nt, Human
aaagaugcaaugua

SEQ ID NO: 1191824 - RNA, 14 nt, Human
gggagggggagagg

SEQ ID NO: 1191825 - RNA, 17 nt, Human
ggcuggaucugugaggg

SEQ ID NO: 1191826 - RNA, 20 nt, Human
ggcuccucgagaucccaaca

SEQ ID NO: 1191827 - RNA, 15 nt, Human
aaaaagggaggggga

SEQ ID NO: 1191828 - RNA, 23 nt, Human
ggcaggcaucggggagccgggag

SEQ ID NO: 1191829 - RNA, 18 nt, Human
ggccagcaccaucucuuu

SEQ ID NO: 1191830 - RNA, 15 nt, Human
ggagagacgggcccu

SEQ ID NO: 1191831 - RNA, 17 nt, Human
ggagagacgggcccugg

SEQ ID NO: 1191832 - RNA, 16 nt, Human
ggacuuggagguagcu

SEQ ID NO: 1191833 - RNA, 18 nt, Human
ggaccccuggugguucac

SEQ ID NO: 1191834 - RNA, 12 nt, Human
gccauucuuucc

SEQ ID NO: 1191835 - RNA, 19 nt, Human
gccaggccacuggccccug

SEQ ID NO: 1191836 - RNA, 17 nt, Human
gccagacccccuggaga

SEQ ID NO: 1191837 - RNA, 19 nt, Human
gccaccgccuccuacagcc

SEQ ID NO: 1191838 - RNA, 16 nt, Human
gccaccgccuccuaca

SEQ ID NO: 1191839 - RNA, 16 nt, Human
gccuacccacccccag

SEQ ID NO: 1191840 - RNA, 17 nt, Human
gccuacccacccccagg

SEQ ID NO: 1191841 - RNA, 21 nt, Human
gcuauggggauagaugugugg

SEQ ID NO: 1191842 - RNA, 19 nt, Human
gcuauggggauagaugugu

SEQ ID NO: 1191843 - RNA, 14 nt, Human
gcaccggggccugg

SEQ ID NO: 1191844 - RNA, 16 nt, Human
gcaccggggccugggc

SEQ ID NO: 1191845 - RNA, 19 nt, Human
gcaccggggccugggcagg

SEQ ID NO: 1191846 - RNA, 9 nt, Human
gagggcugc

SEQ ID NO: 1191847 - RNA, 16 nt, Human
gagggcugccuuugga

SEQ ID NO: 1191848 - RNA, 18 nt, Human
gaggcugcagccaggcca

SEQ ID NO: 1191849 - RNA, 19 nt, Human
gaggcugcagccaggccac

SEQ ID NO: 1191850 - RNA, 12 nt, Human
gaggcagguccc

SEQ ID NO: 1191851 - RNA, 13 nt, Human
gaggcaggucccc

SEQ ID NO: 1191852 - RNA, 16 nt, Human
gaggcagguccccaga

SEQ ID NO: 1191853 - RNA, 18 nt, Human
gagucagggagagcugaa

SEQ ID NO: 1191854 - RNA, 17 nt, Human
gaguccaucagccucca

SEQ ID NO: 1191855 - RNA, 22 nt, Human
gaggugcuucuaguucugccag

SEQ ID NO: 1191856 - RNA, 23 nt, Human
gaggugcuucuaguucugccagg

SEQ ID NO: 1191857 - RNA, 17 nt, Human
gagguggaagagggcug

SEQ ID NO: 1191858 - RNA, 20 nt, Human
gagguggaagagggcugcaa

SEQ ID NO: 1191859 - RNA, 18 nt, Human
gagguggaauuauuuuaa

SEQ ID NO: 1191860 - RNA, 13 nt, Human
gaguuggcuggga

SEQ ID NO: 1191861 - RNA, 20 nt, Human
gaacugcugggcuuggcagc

SEQ ID NO: 1191862 - RNA, 17 nt, Human
gaacugcugggcuuggc

SEQ ID NO: 1191863 - RNA, 12 nt, Human
gaaccgaggcag

SEQ ID NO: 1191864 - RNA, 15 nt, Human
gaaccgaggcaggga

SEQ ID NO: 1191865 - RNA, 24 nt, Human
gaagugugggucugugugugugua

SEQ ID NO: 1191866 - RNA, 21 nt, Human
gaagugugggucugugugugu

SEQ ID NO: 1191867 - RNA, 14 nt, Human
gacugaauuaugaa

SEQ ID NO: 1191868 - RNA, 20 nt, Human
gacugaauuaugaaacuuuu

SEQ ID NO: 1191869 - RNA, 13 nt, Human
cuggcccugugcc

SEQ ID NO: 1191870 - RNA, 13 nt, Human
cugggcaggaggg

SEQ ID NO: 1191871 - RNA, 14 nt, Human
cuggaucugugagg

SEQ ID NO: 1191872 - RNA, 14 nt, Human
cugcaccggggccu

SEQ ID NO: 1191873 - RNA, 16 nt, Human
cugcaccggggccugg

SEQ ID NO: 1191874 - RNA, 18 nt, Human
cugcaccggggccugggc

SEQ ID NO: 1191875 - RNA, 19 nt, Human
cugcaccggggccugggca

SEQ ID NO: 1191876 - RNA, 16 nt, Human
cugcaaauccuugugg

SEQ ID NO: 1191877 - RNA, 19 nt, Human
cugcaaauccuugugggaa

SEQ ID NO: 1191878 - RNA, 15 nt, Human
cucuuauaucuauau

SEQ ID NO: 1191879 - RNA, 18 nt, Human
cucuuauaucuauauuuu

SEQ ID NO: 1191880 - RNA, 17 nt, Human
cugcaggaaauggcugu

SEQ ID NO: 1191881 - RNA, 14 nt, Human
cuuugagguggaag

SEQ ID NO: 1191882 - RNA, 16 nt, Human
cuuugagguggaagag

SEQ ID NO: 1191883 - RNA, 17 nt, Human
cuuugagguggaagagg

SEQ ID NO: 1191884 - RNA, 22 nt, Human
cuuugagguggaagagggcugc

SEQ ID NO: 1191885 - RNA, 14 nt, Human
caccacacucagcc

SEQ ID NO: 1191886 - RNA, 15 nt, Human
caccacacucagccc

SEQ ID NO: 1191887 - RNA, 19 nt, Human
caccacacugauccagccc

SEQ ID NO: 1191888 - RNA, 16 nt, Human
cacaugagauaauaug

SEQ ID NO: 1191889 - RNA, 15 nt, Human
cacaugagauaauau

SEQ ID NO: 1191890 - RNA, 19 nt, Human
cacacguaaugaaacuugg

SEQ ID NO: 1191891 - RNA, 20 nt, Human
cacacguaaugaaacuugga

SEQ ID NO: 1191892 - RNA, 20 nt, Human
caagcccaguucagcuuggg

SEQ ID NO: 1191893 - RNA, 23 nt, Human
caagagccugagagugaggugga

SEQ ID NO: 1191894 - RNA, 11 nt, Human
caagagccuga

SEQ ID NO: 1191895 - RNA, 13 nt, Human
caagagccugaga

SEQ ID NO: 1191896 - RNA, 19 nt, Human
uuuagaagaagugugucac

SEQ ID NO: 1191897 - RNA, 17 nt, Human
uuuagaagaaguguguc

SEQ ID NO: 1191898 - RNA, 22 nt, Human
uuuacauggcuggagcuagaau

SEQ ID NO: 1191899 - RNA, 17 nt, Human
uuuacauggcuggagcu

SEQ ID NO: 1191900 - RNA, 16 nt, Human
uuucuaggacugaauu

SEQ ID NO: 1191901 - RNA, 17 nt, Human
uuucuaggacugaauua

SEQ ID NO: 1191902 - RNA, 22 nt, Human
uuuuacauaaauuuaguauuuu

SEQ ID NO: 1191903 - RNA, 17 nt, Human
uuuuaauuugguuuuca

SEQ ID NO: 1191904 - RNA, 21 nt, Human
uuuuaauuugguuuucacauu

SEQ ID NO: 1191905 - RNA, 16 nt, Human
uuugagguggaagagg

SEQ ID NO: 1191906 - RNA, 12 nt, Human
uuuuuucugaaa

SEQ ID NO: 1191907 - RNA, 18 nt, Human
uuguaaauaaaggaacca

SEQ ID NO: 1191908 - RNA, 17 nt, Human
uuggguggggggcuuca

SEQ ID NO: 1191909 - RNA, 19 nt, Human
uuggguggggggcuucaua

SEQ ID NO: 1191910 - RNA, 20 nt, Human
uuggguggggggcuucauac

SEQ ID NO: 1191911 - RNA, 21 nt, Human
uuggguggggggcuucauaca

SEQ ID NO: 1191912 - RNA, 22 nt, Human
uuggguggggggcuucauacac

SEQ ID NO: 1191913 - RNA, 23 nt, Human
uuggcaaacucuccaccacacgu

SEQ ID NO: 1191914 - RNA, 16 nt, Human
uuggcaaacucuccac

SEQ ID NO: 1191915 - RNA, 20 nt, Human
uuggcaaacucuccaccaca

SEQ ID NO: 1191916 - RNA, 15 nt, Human
uuggauucugagagc

SEQ ID NO: 1191917 - RNA, 17 nt, Human
uuggauucugagagcug

SEQ ID NO: 1191918 - RNA, 18 nt, Human
uugaauguaugcuucaua

SEQ ID NO: 1191919 - RNA, 15 nt, Human
uugaacugagcuugg

SEQ ID NO: 1191920 - RNA, 16 nt, Human
uugaacugagcuugga

SEQ ID NO: 1191921 - RNA, 14 nt, Human
uucucugauacaga

SEQ ID NO: 1191922 - RNA, 15 nt, Human
uucucugauacagaa

SEQ ID NO: 1191923 - RNA, 16 nt, Human
uucucugauacagaaa

SEQ ID NO: 1191924 - RNA, 17 nt, Human
uucucugauacagaaaa

SEQ ID NO: 1191925 - RNA, 22 nt, Human
uuccuagccaccgccuccuaca

SEQ ID NO: 1191926 - RNA, 14 nt, Human
uuccuagccaccgc

SEQ ID NO: 1191927 - RNA, 15 nt, Human
uuccuagccaccgcc

SEQ ID NO: 1191928 - RNA, 21 nt, Human
uuccuagccaccgccuccuac

SEQ ID NO: 1191929 - RNA, 12 nt, Human
uuccagccugcc

SEQ ID NO: 1191930 - RNA, 14 nt, Human
uuccagccugccac

SEQ ID NO: 1191931 - RNA, 16 nt, Human
uuccagccugccacuc

SEQ ID NO: 1191932 - RNA, 14 nt, Human
uucacucuuggagc

SEQ ID NO: 1191933 - RNA, 18 nt, Human
uucacucuuggagccugc

SEQ ID NO: 1191934 - RNA, 19 nt, Human
uucacucuuggagccugca

SEQ ID NO: 1191935 - RNA, 19 nt, Human
uucaaugccccugaauuua

SEQ ID NO: 1191936 - RNA, 16 nt, Human
uguaaauuuaugugau

SEQ ID NO: 1191937 - RNA, 15 nt, Human
uguaaauuuauguga

SEQ ID NO: 1191938 - RNA, 18 nt, Human
ugugaggggcucucucau

SEQ ID NO: 1191939 - RNA, 14 nt, Human
ugucuggcugcaga

SEQ ID NO: 1191940 - RNA, 16 nt, Human
ugucuggcugcagagc

SEQ ID NO: 1191941 - RNA, 17 nt, Human
ugucuggcugcagagca

SEQ ID NO: 1191942 - RNA, 20 nt, Human
ugugggucugugugugugua

SEQ ID NO: 1191943 - RNA, 16 nt, Human
ugugggucugugugug

SEQ ID NO: 1191944 - RNA, 14 nt, Human
ugugggucugugug

SEQ ID NO: 1191945 - RNA, 16 nt, Human
ugugggggucugugug

SEQ ID NO: 1191946 - RNA, 21 nt, Human
uguggaaaagccaagaggcug

SEQ ID NO: 1191947 - RNA, 23 nt, Human
uguggaaaagccaagaggcugca

SEQ ID NO: 1191948 - RNA, 19 nt, Human
uguggaaaagccaagaggc

SEQ ID NO: 1191949 - RNA, 14 nt, Human
uguuuacagaggac

SEQ ID NO: 1191950 - RNA, 21 nt, Human
uguuuacagaggacaguauuu

SEQ ID NO: 1191951 - RNA, 19 nt, Human
uguugaagagguuuuaaag

SEQ ID NO: 1191952 - RNA, 11 nt, Human
uguguguaugu

SEQ ID NO: 1191953 - RNA, 23 nt, Human
uguguugugugugggagugugua

SEQ ID NO: 1191954 - RNA, 14 nt, Human
uguguugugugugg

SEQ ID NO: 1191955 - RNA, 13 nt, Human
uguguuuaugugu

SEQ ID NO: 1191956 - RNA, 15 nt, Human
uguguuuaugugugu

SEQ ID NO: 1191957 - RNA, 23 nt, Human
uguguaugugggggucugugugu

SEQ ID NO: 1191958 - RNA, 14 nt, Human
uguguauguggggg

SEQ ID NO: 1191959 - RNA, 15 nt, Human
uuacagaggacagua

SEQ ID NO: 1191960 - RNA, 22 nt, Human
uuacauggcuggagcuagaauu

SEQ ID NO: 1191961 - RNA, 23 nt, Human
uuacauggcuggagcuagaauuu

SEQ ID NO: 1191962 - RNA, 16 nt, Human
uuacggaacucaaaua

SEQ ID NO: 1191963 - RNA, 16 nt, Human
uuaauagguuuggaca

SEQ ID NO: 1191964 - RNA, 21 nt, Human
uuaauagguuuggacaaaaug

SEQ ID NO: 1191965 - RNA, 18 nt, Human
uuaaaagauaaauauuau

SEQ ID NO: 1191966 - RNA, 15 nt, Human
uuaaagcuuccauug

SEQ ID NO: 1191967 - RNA, 20 nt, Human
uuaaagcuuccauuguuguc

SEQ ID NO: 1191968 - RNA, 19 nt, Human
uuaaauagcuuuuuucucu

SEQ ID NO: 1191969 - RNA, 16 nt, Human
uggggcaggggccggg

SEQ ID NO: 1191970 - RNA, 18 nt, Human
uggggcaggggccggggg

SEQ ID NO: 1191971 - RNA, 16 nt, Human
ugggagcuuuuguaga

SEQ ID NO: 1191972 - RNA, 13 nt, Human
ugggcauucaaau

SEQ ID NO: 1191973 - RNA, 23 nt, Human
uggaagugugggucugugugugu

SEQ ID NO: 1191974 - RNA, 21 nt, Human
uggaagugugggucugugugu

SEQ ID NO: 1191975 - RNA, 16 nt, Human
uggaauacucuuauau

SEQ ID NO: 1191976 - RNA, 15 nt, Human
uggaauuauuuuaaa

SEQ ID NO: 1191977 - RNA, 20 nt, Human
ugcuucuaguucugccagga

SEQ ID NO: 1191978 - RNA, 18 nt, Human
ugcuucuaguucugccag

SEQ ID NO: 1191979 - RNA, 19 nt, Human
ugcuucuaguucugccagg

SEQ ID NO: 1191980 - RNA, 14 nt, Human
ugcuuuccaaagcc

SEQ ID NO: 1191981 - RNA, 17 nt, Human
uggaauuauuuuaaaag

SEQ ID NO: 1191982 - RNA, 19 nt, Human
uggaauuauuuuaaaagau

SEQ ID NO: 1191983 - RNA, 17 nt, Human
ugcaggaaauggcugug

SEQ ID NO: 1191984 - RNA, 21 nt, Human
ucuguguguguguaugugggg

SEQ ID NO: 1191985 - RNA, 19 nt, Human
ucuguguguguguaugugg

SEQ ID NO: 1191986 - RNA, 18 nt, Human
ucuguguguguguaugug

SEQ ID NO: 1191987 - RNA, 15 nt, Human
ucuguguguguguau

SEQ ID NO: 1191988 - RNA, 20 nt, Human
ucuguguguuuaugugugug

SEQ ID NO: 1191989 - RNA, 19 nt, Human
ucuguguguuuaugugugu

SEQ ID NO: 1191990 - RNA, 16 nt, Human
ucuguguguuuaugug

SEQ ID NO: 1191991 - RNA, 15 nt, Human
ucuguguguuuaugu

SEQ ID NO: 1191992 - RNA, 22 nt, Human
ucuguguguguguauguggggg

SEQ ID NO: 1191993 - RNA, 15 nt, Human
ucuugaacugagcuu

SEQ ID NO: 1191994 - RNA, 19 nt, Human
ucuuuuguaagguuuuugu

SEQ ID NO: 1191995 - RNA, 13 nt, Human
ugaaagauucaau

SEQ ID NO: 1191996 - RNA, 13 nt, Human
ugaaaagaggugu

SEQ ID NO: 1191997 - RNA, 22 nt, Human
ugaaaagaggugugcaagagag

SEQ ID NO: 1191998 - RNA, 19 nt, Human
ugaagagguuuuaaagcuu

SEQ ID NO: 1191999 - RNA, 16 nt, Human
ugaacugagcuuggaa

SEQ ID NO: 1192000 - RNA, 12 nt, Human
ugaacugagcuu

SEQ ID NO: 1192001 - RNA, 15 nt, Human
ugaacugagcuugga

SEQ ID NO: 1192002 - RNA, 16 nt, Human
uccuuaaggcucuuuu

SEQ ID NO: 1192003 - RNA, 19 nt, Human
uccuuaaggcucuuuugua

SEQ ID NO: 1192004 - RNA, 16 nt, Human
ucuaaauucuuucauu

SEQ ID NO: 1192005 - RNA, 14 nt, Human
ucugaaauuuccug

SEQ ID NO: 1192006 - RNA, 17 nt, Human
ucugaaauuuccuggga

SEQ ID NO: 1192007 - RNA, 22 nt, Human
ucucagugguuaagauuccuaa

SEQ ID NO: 1192008 - RNA, 22 nt, Human
ucagucuuuaaucugagaggcc

SEQ ID NO: 1192009 - RNA, 14 nt, Human
uccaagaauuucua

SEQ ID NO: 1192010 - RNA, 17 nt, Human
uccaaagccaaugugaa

SEQ ID NO: 1192011 - RNA, 22 nt, Human
ucauucagauaugauucaaaug

SEQ ID NO: 1192012 - RNA, 16 nt, Human
ucccccuccaccugcu

SEQ ID NO: 1192013 - RNA, 22 nt, Human
uccccagacuccaccaagccug

SEQ ID NO: 1192014 - RNA, 18 nt, Human
ucacgccagacuucccac

SEQ ID NO: 1192015 - RNA, 16 nt, Human
uauuuuuuucugaaau

SEQ ID NO: 1192016 - RNA, 17 nt, Human
uauuuuuuucugaaauu

SEQ ID NO: 1192017 - RNA, 19 nt, Human
gguugggagaaugucagua

SEQ ID NO: 1192018 - RNA, 15 nt, Human
uaaaaaagcugugug

SEQ ID NO: 1192019 - RNA, 16 nt, Human
uaaaagaugcaaugua

SEQ ID NO: 1192020 - RNA, 19 nt, Human
uaauucuuugaccuguugg

SEQ ID NO: 1192021 - RNA, 18 nt, Human
uaauuugguuuucacauu

SEQ ID NO: 1192022 - RNA, 15 nt, Human
uaauuugguuuucac

SEQ ID NO: 1192023 - RNA, 17 nt, Human
uaauuugguuuucacau

SEQ ID NO: 1192024 - RNA, 17 nt, Human
uaagagagucuauuuac

SEQ ID NO: 1192025 - RNA, 13 nt, Human
uaagaucucagug

SEQ ID NO: 1192026 - RNA, 19 nt, Human
uaagaucucagugguuaag

SEQ ID NO: 1192027 - RNA, 14 nt, Human
uaaauuuaguauuu

SEQ ID NO: 1192028 - RNA, 22 nt, Human
uaaauuuaguauuuuguuucag

SEQ ID NO: 1192029 - RNA, 11 nt, Human
uagaugugugg

SEQ ID NO: 1192030 - RNA, 18 nt, Human
uaggaacugcugggcuug

SEQ ID NO: 1192031 - RNA, 15 nt, Human
uaggaacugcugggc

SEQ ID NO: 1192032 - RNA, 16 nt, Human
uagccccacaggaggu

SEQ ID NO: 1192033 - RNA, 15 nt, Human
uaggcuagggugggg

SEQ ID NO: 1192034 - RNA, 13 nt, Human
uaggcuagggugg

SEQ ID NO: 1192035 - RNA, 20 nt, Human
uagugauuuuuaugccaccu

SEQ ID NO: 1192036 - RNA, 21 nt, Human
uagugauuuuuaugccaccug

SEQ ID NO: 1192037 - RNA, 22 nt, Human
uagugauuuuuaugccaccuga

SEQ ID NO: 1192038 - RNA, 21 nt, Human
uauauuucccugaaggaacca

SEQ ID NO: 1192039 - RNA, 15 nt, Human
uacccaaauuaagag

SEQ ID NO: 1192040 - RNA, 18 nt, Human
uacagaaaaguugaauuu

SEQ ID NO: 1192041 - RNA, 22 nt, Human
uacagaaaaguugaauuuuaca

SEQ ID NO: 1192042 - RNA, 17 nt, Human
uacagcccaccuggcuu

SEQ ID NO: 1192043 - RNA, 15 nt, Human
ggugguggcucggga

SEQ ID NO: 1192044 - RNA, 22 nt, Human
ggugguucacucuuggagccug

SEQ ID NO: 1192045 - RNA, 23 nt, Human
ggugguucacucuuggagccugc

SEQ ID NO: 1192046 - RNA, 21 nt, Human
gguguccugcaccggggccug

SEQ ID NO: 1192047 - RNA, 19 nt, Human
gguucacucuuggagccug

SEQ ID NO: 1192048 - RNA, 20 nt, Human
gguucacucuuggagccugc

SEQ ID NO: 1192049 - RNA, 21 nt, Human
gguucacucuuggagccugca

SEQ ID NO: 1192050 - RNA, 23 nt, Human
gguucacucuuggagccugcaga

SEQ ID NO: 1192051 - RNA, 19 nt, Human
ggugaccuuccaagagccu

SEQ ID NO: 1192052 - RNA, 20 nt, Human
ggugaccuuccaagagccug

SEQ ID NO: 1192053 - RNA, 21 nt, Human
ggugaccuuccaagagccuga

SEQ ID NO: 1192054 - RNA, 15 nt, Human
gggggagagggcugc

SEQ ID NO: 1192055 - RNA, 18 nt, Human
ggggcagucugagagagg

SEQ ID NO: 1192056 - RNA, 15 nt, Human
ggggcagucugagag

SEQ ID NO: 1192057 - RNA, 19 nt, Human
ggggcagucugagagaggc

SEQ ID NO: 1192058 - RNA, 15 nt, Human
ggggcgcggcuggga

SEQ ID NO: 1192059 - RNA, 16 nt, Human
ggggcgcggcugggag

SEQ ID NO: 1192060 - RNA, 16 nt, Human
gggccugggcaggagg

SEQ ID NO: 1192061 - RNA, 17 nt, Human
gggccugggcaggaggg

SEQ ID NO: 1192062 - RNA, 15 nt, Human
ggggaaaagagauga

SEQ ID NO: 1192063 - RNA, 18 nt, Human
gguagcauuuguguugaa

SEQ ID NO: 1192064 - RNA, 20 nt, Human
gggucuugguuccagccugc

SEQ ID NO: 1192065 - RNA, 12 nt, Human
gggccugggcag

SEQ ID NO: 1192066 - RNA, 13 nt, Human
gggccugggcagg

SEQ ID NO: 1192067 - RNA, 15 nt, Human
gggccugggcaggag

SEQ ID NO: 1192068 - RNA, 13 nt, Human
gggccccugccag

SEQ ID NO: 1192069 - RNA, 20 nt, Human
gggcagucugagagaggcca

SEQ ID NO: 1192070 - RNA, 21 nt, Human
gggcagucugagagaggccau

SEQ ID NO: 1192071 - RNA, 13 nt, Human
gggauagaugugu

SEQ ID NO: 1192072 - RNA, 14 nt, Human
gggauagaugugug

SEQ ID NO: 1192073 - RNA, 11 nt, Human
gggagugugua

SEQ ID NO: 1192074 - RNA, 16 nt, Human
gggaguuuaggguggg

SEQ ID NO: 1192075 - RNA, 23 nt, Human
gggaggugcuucuaguucugcca

SEQ ID NO: 1192076 - RNA, 17 nt, Human
gggcagucugagagagg

SEQ ID NO: 1192077 - RNA, 18 nt, Human
gggcagucugagagaggc

SEQ ID NO: 1192078 - RNA, 19 nt, Human
gggcagucugagagaggcc

SEQ ID NO: 1192079 - RNA, 15 nt, Human
gggaaggaucccaug

SEQ ID NO: 1192080 - RNA, 13 nt, Human
gggaaugaagaua

SEQ ID NO: 1192081 - RNA, 20 nt, Human
gggaccccuggugguucacu

SEQ ID NO: 1192082 - RNA, 16 nt, Human
ggcugcagccaggcca

SEQ ID NO: 1192083 - RNA, 22 nt, Human
ggcugcagccaggccacuggcc

SEQ ID NO: 1192084 - RNA, 20 nt, Human
ggccccugccagacccccug

SEQ ID NO: 1192085 - RNA, 15 nt, Human
ggcugcuuuccaaag

SEQ ID NO: 1192086 - RNA, 20 nt, Human
ggcagucugagagaggccau

SEQ ID NO: 1192087 - RNA, 17 nt, Human
ggccccugccagacccc

SEQ ID NO: 1192088 - RNA, 19 nt, Human
ggccccugccagacccccu

SEQ ID NO: 1192089 - RNA, 17 nt, Human
ggccccugagaucucug

SEQ ID NO: 1192090 - RNA, 21 nt, Human
ggccccugagaucucugcagg

SEQ ID NO: 1192091 - RNA, 17 nt, Human
ggaucccaugagcuccu

SEQ ID NO: 1192092 - RNA, 20 nt, Human
ggaucccaugagcuccuuaa

SEQ ID NO: 1192093 - RNA, 14 nt, Human
ggcagguccccaga

SEQ ID NO: 1192094 - RNA, 19 nt, Human
ggcagguccccagacucca

SEQ ID NO: 1192095 - RNA, 15 nt, Human
ggauagaugugugga

SEQ ID NO: 1192096 - RNA, 14 nt, Human
ggauagaugugugg

SEQ ID NO: 1192097 - RNA, 13 nt, Human
ggauagaugugug

SEQ ID NO: 1192098 - RNA, 12 nt, Human
ggagggauuugg

SEQ ID NO: 1192099 - RNA, 13 nt, Human
ggagggcaggcau

SEQ ID NO: 1192100 - RNA, 14 nt, Human
ggagggcaggcauc

SEQ ID NO: 1192101 - RNA, 16 nt, Human
ggagccgggagccuga

SEQ ID NO: 1192102 - RNA, 14 nt, Human
ggaggagggcaggc

SEQ ID NO: 1192103 - RNA, 15 nt, Human
ggaggagggcaggca

SEQ ID NO: 1192104 - RNA, 20 nt, Human
ggaggagggcaggcaucggg

SEQ ID NO: 1192105 - RNA, 17 nt, Human
ggaaggaucccaugagc

SEQ ID NO: 1192106 - RNA, 17 nt, Human
ggaacucgugucuggca

SEQ ID NO: 1192107 - RNA, 15 nt, Human
ggaaccgaggcaggg

SEQ ID NO: 1192108 - RNA, 16 nt, Human
ggaaccgaggcaggga

SEQ ID NO: 1192109 - RNA, 20 nt, Human
ggaaccgaggcagggaagga

SEQ ID NO: 1192110 - RNA, 21 nt, Human
gcuucuaguucugccaggaga

SEQ ID NO: 1192111 - RNA, 19 nt, Human
gcuucuaguucugccagga

SEQ ID NO: 1192112 - RNA, 20 nt, Human
gcuucuaguucugccaggag

SEQ ID NO: 1192113 - RNA, 18 nt, Human
gcuucuaguucugccagg

SEQ ID NO: 1192114 - RNA, 19 nt, Human
gcuucuggugaccuuccaa

SEQ ID NO: 1192115 - RNA, 17 nt, Human
gcugggaggagggcagg

SEQ ID NO: 1192116 - RNA, 19 nt, Human
gcugggaggagggcaggca

SEQ ID NO: 1192117 - RNA, 15 nt, Human
gcugccuuuggacuu

SEQ ID NO: 1192118 - RNA, 20 nt, Human
gcugccuuuggacuuguccc

SEQ ID NO: 1192119 - RNA, 13 nt, Human
gccgggagccuga

SEQ ID NO: 1192120 - RNA, 14 nt, Human
gccgggagccugac

SEQ ID NO: 1192121 - RNA, 19 nt, Human
gccgggagccugacccuca

SEQ ID NO: 1192122 - RNA, 21 nt, Human
gccgagaguccaucagccucc

SEQ ID NO: 1192123 - RNA, 20 nt, Human
gccugcagagcugcgggcug

SEQ ID NO: 1192124 - RNA, 14 nt, Human
gcuaagaauauuug

SEQ ID NO: 1192125 - RNA, 16 nt, Human
gcuaagaauauuugaa

SEQ ID NO: 1192126 - RNA, 13 nt, Human
gccccgcguggaa

SEQ ID NO: 1192127 - RNA, 14 nt, Human
gccacucaggccca

SEQ ID NO: 1192128 - RNA, 22 nt, Human
gccacucaggcccaaagccucg

SEQ ID NO: 1192129 - RNA, 15 nt, Human
gcaggagggaggugc

SEQ ID NO: 1192130 - RNA, 11 nt, Human
gcaggaggaag

SEQ ID NO: 1192131 - RNA, 19 nt, Human
gcagauuuugcccuugaca

SEQ ID NO: 1192132 - RNA, 12 nt, Human
gcacagccuggc

SEQ ID NO: 1192133 - RNA, 19 nt, Human
gcacagccuggcuguggcc

SEQ ID NO: 1192134 - RNA, 18 nt, Human
gcauggagauagccccac

SEQ ID NO: 1192135 - RNA, 15 nt, Human
gcagugggccuggcc

SEQ ID NO: 1192136 - RNA, 23 nt, Human
gcagguccccagacuccaccaag

SEQ ID NO: 1192137 - RNA, 22 nt, Human
gaguguguaauuuaaaauugug

SEQ ID NO: 1192138 - RNA, 21 nt, Human
gaguguguaauuuaaaauugu

SEQ ID NO: 1192139 - RNA, 18 nt, Human
gacuucccacggcuccuc

SEQ ID NO: 1192140 - RNA, 15 nt, Human
gauugggccccugcc

SEQ ID NO: 1192141 - RNA, 17 nt, Human
gaagagaagggcagggc

SEQ ID NO: 1192142 - RNA, 15 nt, Human
gaagauacugaaaua

SEQ ID NO: 1192143 - RNA, 20 nt, Human
gaagagguuuuaaagcuucc

SEQ ID NO: 1192144 - RNA, 12 nt, Human
gaagagggcugc

SEQ ID NO: 1192145 - RNA, 11 nt, Human
gaaccaaagcg

SEQ ID NO: 1192146 - RNA, 21 nt, Human
gaacagcggcuggacuuggag

SEQ ID NO: 1192147 - RNA, 13 nt, Human
gaagcguuguccu

SEQ ID NO: 1192148 - RNA, 19 nt, Human
gaagcguuguccucagccc

SEQ ID NO: 1192149 - RNA, 20 nt, Human
gaagcguuguccucagcccc

SEQ ID NO: 1192150 - RNA, 22 nt, Human
gaagggguaggauuacuaggug

SEQ ID NO: 1192151 - RNA, 20 nt, Human
gaauacucuuauaucuauau

SEQ ID NO: 1192152 - RNA, 17 nt, Human
gaauauuugaauguaug

SEQ ID NO: 1192153 - RNA, 22 nt, Human
gaauuuaaauagcuuuuuucuc

SEQ ID NO: 1192154 - RNA, 21 nt, Human
gaauguaugcuucauacaggg

SEQ ID NO: 1192155 - RNA, 16 nt, Human
gaauguaugcuucaua

SEQ ID NO: 1192156 - RNA, 18 nt, Human
gaauguaugcuucauaca

SEQ ID NO: 1192157 - RNA, 17 nt, Human
gaaugaagauacugaaa

SEQ ID NO: 1192158 - RNA, 18 nt, Human
gaaugaagauacugaaau

SEQ ID NO: 1192159 - RNA, 21 nt, Human
gaaugaagauacugaaauaaa

SEQ ID NO: 1192160 - RNA, 19 nt, Human
gaaugaagauacugaaaua

SEQ ID NO: 1192161 - RNA, 16 nt, Human
gaccuuccaagagccu

SEQ ID NO: 1192162 - RNA, 17 nt, Human
gaccuuccaagagccug

SEQ ID NO: 1192163 - RNA, 18 nt, Human
gaccuuccaagagccuga

SEQ ID NO: 1192164 - RNA, 18 nt, Human
gacuaaccccaccacacc

SEQ ID NO: 1192165 - RNA, 12 nt, Human
gacccccuggag

SEQ ID NO: 1192166 - RNA, 14 nt, Human
cuuccuuccucucc

SEQ ID NO: 1192167 - RNA, 15 nt, Human
cuuccaagagccuga

SEQ ID NO: 1192168 - RNA, 14 nt, Human
cuuccaagagccug

SEQ ID NO: 1192169 - RNA, 13 nt, Human
cuguuuacagugu

SEQ ID NO: 1192170 - RNA, 15 nt, Human
cuguuuacaguguuc

SEQ ID NO: 1192171 - RNA, 14 nt, Human
cuuucugucucucu

SEQ ID NO: 1192172 - RNA, 15 nt, Human
cuuggaagcuucugg

SEQ ID NO: 1192173 - RNA, 20 nt, Human
cuugcugcccugugcuccuc

SEQ ID NO: 1192174 - RNA, 14 nt, Human
cuggcacagccugg

SEQ ID NO: 1192175 - RNA, 15 nt, Human
cuggcacagccuggc

SEQ ID NO: 1192176 - RNA, 12 nt, Human
cuggaccagccu

SEQ ID NO: 1192177 - RNA, 16 nt, Human
cuggagcuagaauuug

SEQ ID NO: 1192178 - RNA, 17 nt, Human
cuggagcuagaauuuga

SEQ ID NO: 1192179 - RNA, 22 nt, Human
cuggagcuagaauuugauaugu

SEQ ID NO: 1192180 - RNA, 15 nt, Human
cugcuuuccaaagcc

SEQ ID NO: 1192181 - RNA, 17 nt, Human
cugcuuuccaaagccaa

SEQ ID NO: 1192182 - RNA, 16 nt, Human
cugggagcuuuuguag

SEQ ID NO: 1192183 - RNA, 18 nt, Human
cugcccgggagcucagga

SEQ ID NO: 1192184 - RNA, 16 nt, Human
cugccaggagacaggu

SEQ ID NO: 1192185 - RNA, 20 nt, Human
cugccagcauuucccuuccu

SEQ ID NO: 1192186 - RNA, 16 nt, Human
cugcagccaggccacu

SEQ ID NO: 1192187 - RNA, 17 nt, Human
cugcagccaggccacug

SEQ ID NO: 1192188 - RNA, 22 nt, Human
cugcagccaggccacuggcccc

SEQ ID NO: 1192189 - RNA, 23 nt, Human
cugcagccaggccacuggccccu

SEQ ID NO: 1192190 - RNA, 15 nt, Human
cugcagccaggccac

SEQ ID NO: 1192191 - RNA, 18 nt, Human
cugcagagcagugggccu

SEQ ID NO: 1192192 - RNA, 21 nt, Human
cugcagagcagugggccuggc

SEQ ID NO: 1192193 - RNA, 23 nt, Human
cugcagagcagugggccuggcca

SEQ ID NO: 1192194 - RNA, 12 nt, Human
cugcagagcugc

SEQ ID NO: 1192195 - RNA, 21 nt, Human
cugcagagcugcgggcugggu

SEQ ID NO: 1192196 - RNA, 23 nt, Human
cugcagagcugcgggcugggugu

SEQ ID NO: 1192197 - RNA, 20 nt, Human
cugauccagcccugaguucc

SEQ ID NO: 1192198 - RNA, 21 nt, Human
cugaagagaagggcagggcug

SEQ ID NO: 1192199 - RNA, 14 nt, Human
cugaauuuaaauag

SEQ ID NO: 1192200 - RNA, 18 nt, Human
cugaauuuaaauagcuuu

SEQ ID NO: 1192201 - RNA, 23 nt, Human
cugaauuuaaauagcuuuuuucu

SEQ ID NO: 1192202 - RNA, 21 nt, Human
cucuuggggaguuuagggugg

SEQ ID NO: 1192203 - RNA, 22 nt, Human
cucuuggagccugcagagcugc

SEQ ID NO: 1192204 - RNA, 16 nt, Human
cucuugaacugagcuu

SEQ ID NO: 1192205 - RNA, 17 nt, Human
cucuugaacugagcuug

SEQ ID NO: 1192206 - RNA, 19 nt, Human
cucuugaacugagcuugga

SEQ ID NO: 1192207 - RNA, 19 nt, Human
cucuccacucaugugacuc

SEQ ID NO: 1192208 - RNA, 17 nt, Human
cucauuccagaggaagg

SEQ ID NO: 1192209 - RNA, 15 nt, Human
cucauuccagaggaa

SEQ ID NO: 1192210 - RNA, 14 nt, Human
cucauauuuucaug

SEQ ID NO: 1192211 - RNA, 21 nt, Human
cucagugucuggcugcagagc

SEQ ID NO: 1192212 - RNA, 22 nt, Human
cucagugucuggcugcagagca

SEQ ID NO: 1192213 - RNA, 17 nt, Human
cuccauugguguugaca

SEQ ID NO: 1192214 - RNA, 13 nt, Human
cuccuuaaggcuc

SEQ ID NO: 1192215 - RNA, 22 nt, Human
cuccuuaaggcucuuuuguaag

SEQ ID NO: 1192216 - RNA, 13 nt, Human
cucuaaauucuuu

SEQ ID NO: 1192217 - RNA, 17 nt, Human
cucuaaauucuuucauu

SEQ ID NO: 1192218 - RNA, 19 nt, Human
cgucagcugggacaccccg

SEQ ID NO: 1192219 - RNA, 16 nt, Human
cgucaacucauauuuu

SEQ ID NO: 1192220 - RNA, 20 nt, Human
cgucaacucauauuuucaug

SEQ ID NO: 1192221 - RNA, 21 nt, Human
cgauugcaggagucccugcca

SEQ ID NO: 1192222 - RNA, 23 nt, Human
cgauugcaggagucccugccauc

SEQ ID NO: 1192223 - RNA, 16 nt, Human
cgggagcucaggaacc

SEQ ID NO: 1192224 - RNA, 22 nt, Human
cggcugggaggagggcaggcau

SEQ ID NO: 1192225 - RNA, 23 nt, Human
cggcugggaggagggcaggcauc

SEQ ID NO: 1192226 - RNA, 14 nt, Human
ccuggaccagccuc

SEQ ID NO: 1192227 - RNA, 15 nt, Human
ccuggaccagccucu

SEQ ID NO: 1192228 - RNA, 16 nt, Human
ccuggaccagccucuc

SEQ ID NO: 1192229 - RNA, 21 nt, Human
ccuugacaaagucaagccaca

SEQ ID NO: 1192230 - RNA, 23 nt, Human
ccuugacaaagucaagccacaug

SEQ ID NO: 1192231 - RNA, 23 nt, Human
ccucuccacucaugugacucuuu

SEQ ID NO: 1192232 - RNA, 14 nt, Human
ccuccucugcccgg

SEQ ID NO: 1192233 - RNA, 15 nt, Human
ccuccucugcccggg

SEQ ID NO: 1192234 - RNA, 19 nt, Human
ccugaggcagguccccaga

SEQ ID NO: 1192235 - RNA, 18 nt, Human
ccugaggcagguccccag

SEQ ID NO: 1192236 - RNA, 20 nt, Human
ccugaacaggauauucucac

SEQ ID NO: 1192237 - RNA, 22 nt, Human
ccgacuuuuguuuaccagagaa

SEQ ID NO: 1192238 - RNA, 13 nt, Human
cccaacaccucuu

SEQ ID NO: 1192239 - RNA, 13 nt, Human
ccaucagccucca

SEQ ID NO: 1192240 - RNA, 17 nt, Human
cccaaaccaccagaagc

SEQ ID NO: 1192241 - RNA, 18 nt, Human
cccaaaccaccagaagcc

SEQ ID NO: 1192242 - RNA, 22 nt, Human
cccaaaccaccagaagcccaga

SEQ ID NO: 1192243 - RNA, 20 nt, Human
ccacacagacuugggcaggg

SEQ ID NO: 1192244 - RNA, 16 nt, Human
ccacacccucacugcu

SEQ ID NO: 1192245 - RNA, 22 nt, Human
ccacacguaaugaaacuuggau

SEQ ID NO: 1192246 - RNA, 21 nt, Human
ccaccaagccuggucagccca

SEQ ID NO: 1192247 - RNA, 21 nt, Human
ccacgucagcugggacacccc

SEQ ID NO: 1192248 - RNA, 22 nt, Human
ccagaauaaacuggcagcucag

SEQ ID NO: 1192249 - RNA, 14 nt, Human
ccagaagcccagaa

SEQ ID NO: 1192250 - RNA, 15 nt, Human
ccagaagcccagaau

SEQ ID NO: 1192251 - RNA, 12 nt, Human
ccagaagcccag

SEQ ID NO: 1192252 - RNA, 13 nt, Human
ccagaagcccaga

SEQ ID NO: 1192253 - RNA, 19 nt, Human
ccaagccuuggcucuaccc

SEQ ID NO: 1192254 - RNA, 19 nt, Human
ccaagccuggucagcccaa

SEQ ID NO: 1192255 - RNA, 20 nt, Human
ccaagccuggucagcccaaa

SEQ ID NO: 1192256 - RNA, 13 nt, Human
ccaacacugccag

SEQ ID NO: 1192257 - RNA, 14 nt, Human
ccaacacugccagc

SEQ ID NO: 1192258 - RNA, 15 nt, Human
ccaacacugccagca

SEQ ID NO: 1192259 - RNA, 16 nt, Human
ccaacacugccagcau

SEQ ID NO: 1192260 - RNA, 17 nt, Human
ccaaagcgaauuuuaaa

SEQ ID NO: 1192261 - RNA, 14 nt, Human
ccaaagccaaugug

SEQ ID NO: 1192262 - RNA, 15 nt, Human
ccaagaggcugcagc

SEQ ID NO: 1192263 - RNA, 16 nt, Human
ccaagaggcugcagcc

SEQ ID NO: 1192264 - RNA, 19 nt, Human
cauugucccugaagagaag

SEQ ID NO: 1192265 - RNA, 16 nt, Human
ccaaacaggcucagag

SEQ ID NO: 1192266 - RNA, 19 nt, Human
cauuuuagggguagcauuu

SEQ ID NO: 1192267 - RNA, 17 nt, Human
caagccuuggcucuacc

SEQ ID NO: 1192268 - RNA, 15 nt, Human
caagccuggucagcc

SEQ ID NO: 1192269 - RNA, 16 nt, Human
caagccuggucagccc

SEQ ID NO: 1192270 - RNA, 17 nt, Human
caagccuggucagccca

SEQ ID NO: 1192271 - RNA, 18 nt, Human
caagccuggucagcccaa

SEQ ID NO: 1192272 - RNA, 14 nt, Human
caagaggcugcagc

SEQ ID NO: 1192273 - RNA, 16 nt, Human
augucaguauguggaa

SEQ ID NO: 1192274 - RNA, 14 nt, Human
augucaguaugugg

SEQ ID NO: 1192275 - RNA, 22 nt, Human
augucuauaaaccgaacugaug

SEQ ID NO: 1192276 - RNA, 13 nt, Human
augucaguaugug

SEQ ID NO: 1192277 - RNA, 17 nt, Human
auguaugcuucauacag

SEQ ID NO: 1192278 - RNA, 20 nt, Human
auguaugcuucauacaggga

SEQ ID NO: 1192279 - RNA, 19 nt, Human
uuugcuaugagcuggggau

SEQ ID NO: 1192280 - RNA, 23 nt, Human
uuugcucagugucuggcugcaga

SEQ ID NO: 1192281 - RNA, 17 nt, Human
uuuguaaauuuauguga

SEQ ID NO: 1192282 - RNA, 17 nt, Human
uuuguagaagucacauu

SEQ ID NO: 1192283 - RNA, 19 nt, Human
auguuuacagaggacagua

SEQ ID NO: 1192284 - RNA, 17 nt, Human
auguuuacagaggacag

SEQ ID NO: 1192285 - RNA, 15 nt, Human
auguuuacagaggac

SEQ ID NO: 1192286 - RNA, 16 nt, Human
auuaagaucucagugg

SEQ ID NO: 1192287 - RNA, 20 nt, Human
auuaagagagucuauuuacg

SEQ ID NO: 1192288 - RNA, 13 nt, Human
auuauuuuaaaag

SEQ ID NO: 1192289 - RNA, 14 nt, Human
auuauuuuaaaaga

SEQ ID NO: 1192290 - RNA, 23 nt, Human
auugcaggagucccugccaucau

SEQ ID NO: 1192291 - RNA, 19 nt, Human
auucucacagcuccaagaa

SEQ ID NO: 1192292 - RNA, 21 nt, Human
auucucacagcuccaagaauu

SEQ ID NO: 1192293 - RNA, 22 nt, Human
auucucacagcuccaagaauuu

SEQ ID NO: 1192294 - RNA, 20 nt, Human
auuuaaaauugugauguguc

SEQ ID NO: 1192295 - RNA, 18 nt, Human
auuuaaaggcccuaucug

SEQ ID NO: 1192296 - RNA, 20 nt, Human
auuuaaaggcccuaucuguu

SEQ ID NO: 1192297 - RNA, 21 nt, Human
auuuaaaggcccuaucuguuu

SEQ ID NO: 1192298 - RNA, 16 nt, Human
auuuaaccucuaaauu

SEQ ID NO: 1192299 - RNA, 18 nt, Human
auuuaaccucuaaauucu

SEQ ID NO: 1192300 - RNA, 21 nt, Human
auuggcucuugaacugagcuu

SEQ ID NO: 1192301 - RNA, 13 nt, Human
auuuuacauaaau

SEQ ID NO: 1192302 - RNA, 17 nt, Human
auuugguuuucacauug

SEQ ID NO: 1192303 - RNA, 21 nt, Human
auuugguuuucacauuggaaa

SEQ ID NO: 1192304 - RNA, 22 nt, Human
auuugguuuucacauuggaaac

SEQ ID NO: 1192305 - RNA, 17 nt, Human
auuugaauguaugcuuc

SEQ ID NO: 1192306 - RNA, 18 nt, Human
auuugaauguaugcuuca

SEQ ID NO: 1192307 - RNA, 20 nt, Human
auuugaauguaugcuucaua

SEQ ID NO: 1192308 - RNA, 21 nt, Human
auuugaauguaugcuucauac

SEQ ID NO: 1192309 - RNA, 22 nt, Human
auuugaauguaugcuucauaca

SEQ ID NO: 1192310 - RNA, 23 nt, Human
auuuccugggagcuuuuguagaa

SEQ ID NO: 1192311 - RNA, 16 nt, Human
aucuguaccucugccu

SEQ ID NO: 1192312 - RNA, 12 nt, Human
aucuguuuacag

SEQ ID NO: 1192313 - RNA, 20 nt, Human
aucugagaggccacagugca

SEQ ID NO: 1192314 - RNA, 23 nt, Human
aucucagugguuaagauuccuaa

SEQ ID NO: 1192315 - RNA, 16 nt, Human
augaagauacugaaau

SEQ ID NO: 1192316 - RNA, 17 nt, Human
augaagauacugaaaua

SEQ ID NO: 1192317 - RNA, 13 nt, Human
uuuaugugugugu

SEQ ID NO: 1192318 - RNA, 11 nt, Human
uuuaugugugu

SEQ ID NO: 1192319 - RNA, 12 nt, Human
uuuaugugaugg

SEQ ID NO: 1192320 - RNA, 23 nt, Human
augcuucauacagggaugguguu

SEQ ID NO: 1192321 - RNA, 10 nt, Human
augcuucaua

SEQ ID NO: 1192322 - RNA, 11 nt, Human
augcuucauac

SEQ ID NO: 1192323 - RNA, 12 nt, Human
augcuucauaca

SEQ ID NO: 1192324 - RNA, 13 nt, Human
augcuucauacag

SEQ ID NO: 1192325 - RNA, 15 nt, Human
augcuucauacaggg

SEQ ID NO: 1192326 - RNA, 16 nt, Human
augcuucauacaggga

SEQ ID NO: 1192327 - RNA, 19 nt, Human
augcuucauacagggaugg

SEQ ID NO: 1192328 - RNA, 21 nt, Human
auggaaugaugggucaguugu

SEQ ID NO: 1192329 - RNA, 17 nt, Human
auggaauacucuuauau

SEQ ID NO: 1192330 - RNA, 16 nt, Human
auggaauacucuuaua

SEQ ID NO: 1192331 - RNA, 19 nt, Human
uuucaugcuguucaugaaa

SEQ ID NO: 1192332 - RNA, 16 nt, Human
auggccugggggaugu

SEQ ID NO: 1192333 - RNA, 15 nt, Human
uuguugucugcaacu

SEQ ID NO: 1192334 - RNA, 21 nt, Human
augauucaaaugucuauaaac

SEQ ID NO: 1192335 - RNA, 15 nt, Human
augauuccagguggc

SEQ ID NO: 1192336 - RNA, 16 nt, Human
augauuccagguggca

SEQ ID NO: 1192337 - RNA, 21 nt, Human
aucauuggauucugagagcug

SEQ ID NO: 1192338 - RNA, 22 nt, Human
aucauuggauucugagagcugu

SEQ ID NO: 1192339 - RNA, 15 nt, Human
uucuaguucugccag

SEQ ID NO: 1192340 - RNA, 16 nt, Human
uucuaguucugccagg

SEQ ID NO: 1192341 - RNA, 14 nt, Human
aucaaguuauuuuu

SEQ ID NO: 1192342 - RNA, 15 nt, Human
auauuuuacauaaau

SEQ ID NO: 1192343 - RNA, 16 nt, Human
auauuuuacauaaauu

SEQ ID NO: 1192344 - RNA, 20 nt, Human
auauuuuacauaaauuuagu

SEQ ID NO: 1192345 - RNA, 21 nt, Human
uucauacagggaugguguuca

SEQ ID NO: 1192346 - RNA, 12 nt, Human
auaugauucaaa

SEQ ID NO: 1192347 - RNA, 16 nt, Human
auaucuauauuuuaca

SEQ ID NO: 1192348 - RNA, 19 nt, Human
auaucuccgucaacucaua

SEQ ID NO: 1192349 - RNA, 20 nt, Human
auaucuccgucaacucauau

SEQ ID NO: 1192350 - RNA, 21 nt, Human
auaucuccgucaacucauauu

SEQ ID NO: 1192351 - RNA, 14 nt, Human
uuccaagagccuga

SEQ ID NO: 1192352 - RNA, 22 nt, Human
uuccaagagccugagagugagg

SEQ ID NO: 1192353 - RNA, 13 nt, Human
uuccaagagccug

SEQ ID NO: 1192354 - RNA, 15 nt, Human
auauauauauauauu

SEQ ID NO: 1192355 - RNA, 21 nt, Human
auauauauuuuuuucugaaau

SEQ ID NO: 1192356 - RNA, 13 nt, Human
uucacauuggaaa

SEQ ID NO: 1192357 - RNA, 15 nt, Human
auagcuuuuuucucu

SEQ ID NO: 1192358 - RNA, 16 nt, Human
uuagccuuugucccag

SEQ ID NO: 1192359 - RNA, 17 nt, Human
agugugggucugugugu

SEQ ID NO: 1192360 - RNA, 16 nt, Human
agugugggucugugug

SEQ ID NO: 1192361 - RNA, 15 nt, Human
agugugggucugugu

SEQ ID NO: 1192362 - RNA, 23 nt, Human
agugugggucuguguguguguau

SEQ ID NO: 1192363 - RNA, 19 nt, Human
agugugggucugugugugu

SEQ ID NO: 1192364 - RNA, 15 nt, Human
uguugugugugggag

SEQ ID NO: 1192365 - RNA, 14 nt, Human
uguuguguguggga

SEQ ID NO: 1192366 - RNA, 16 nt, Human
uguugugugugggagu

SEQ ID NO: 1192367 - RNA, 13 nt, Human
uguugucugcaac

SEQ ID NO: 1192368 - RNA, 16 nt, Human
uguugucugcaacucu

SEQ ID NO: 1192369 - RNA, 16 nt, Human
uguguguguguaugug

SEQ ID NO: 1192370 - RNA, 13 nt, Human
uguguguguguau

SEQ ID NO: 1192371 - RNA, 13 nt, Human
uguggucuccacu

SEQ ID NO: 1192372 - RNA, 19 nt, Human
uguggcacuggggcagggg

SEQ ID NO: 1192373 - RNA, 14 nt, Human
agugcacuaaugug

SEQ ID NO: 1192374 - RNA, 23 nt, Human
agguugggagaaugucaguaugu

SEQ ID NO: 1192375 - RNA, 20 nt, Human
uguaauuuaaaauugugaug

SEQ ID NO: 1192376 - RNA, 18 nt, Human
uguaauuuaaaauuguga

SEQ ID NO: 1192377 - RNA, 17 nt, Human
uguaauuuaaaauugug

SEQ ID NO: 1192378 - RNA, 15 nt, Human
uguaaguaaacgguc

SEQ ID NO: 1192379 - RNA, 18 nt, Human
agguccccagcuuuggcu

SEQ ID NO: 1192380 - RNA, 11 nt, Human
agguccccaga

SEQ ID NO: 1192381 - RNA, 17 nt, Human
agguccccagcuuuggc

SEQ ID NO: 1192382 - RNA, 22 nt, Human
uguaauuuaaaauugugaugug

SEQ ID NO: 1192383 - RNA, 21 nt, Human
uguaauuuaaaauugugaugu

SEQ ID NO: 1192384 - RNA, 22 nt, Human
ugucaguauguggaaguguggg

SEQ ID NO: 1192385 - RNA, 20 nt, Human
ugucaguauguggaagugug

SEQ ID NO: 1192386 - RNA, 19 nt, Human
ugucaguauguggaagugu

SEQ ID NO: 1192387 - RNA, 18 nt, Human
ugucaguauguggaagug

SEQ ID NO: 1192388 - RNA, 17 nt, Human
aguauguggaagugugg

SEQ ID NO: 1192389 - RNA, 15 nt, Human
aguauguggaagugu

SEQ ID NO: 1192390 - RNA, 19 nt, Human
aguauguggaagugugggu

SEQ ID NO: 1192391 - RNA, 19 nt, Human
agucacauuccugaacagg

SEQ ID NO: 1192392 - RNA, 20 nt, Human
agucacauuccugaacagga

SEQ ID NO: 1192393 - RNA, 14 nt, Human
agucccugccugga

SEQ ID NO: 1192394 - RNA, 15 nt, Human
agucccugccuggac

SEQ ID NO: 1192395 - RNA, 21 nt, Human
agucccugccuggaccagccu

SEQ ID NO: 1192396 - RNA, 22 nt, Human
agucccugaggcagguccccag

SEQ ID NO: 1192397 - RNA, 23 nt, Human
agucccugaggcagguccccaga

SEQ ID NO: 1192398 - RNA, 22 nt, Human
agucccugccuggaccagccuc

SEQ ID NO: 1192399 - RNA, 23 nt, Human
agucccugccuggaccagccucu

SEQ ID NO: 1192400 - RNA, 19 nt, Human
agucccugaggcagguccc

SEQ ID NO: 1192401 - RNA, 20 nt, Human
agucccugaggcaggucccc

SEQ ID NO: 1192402 - RNA, 20 nt, Human
ugguaggaacugcugggcuu

SEQ ID NO: 1192403 - RNA, 13 nt, Human
ugguaggaacugc

SEQ ID NO: 1192404 - RNA, 16 nt, Human
uggguggggggcuuca

SEQ ID NO: 1192405 - RNA, 18 nt, Human
uggguggggggcuucaua

SEQ ID NO: 1192406 - RNA, 12 nt, Human
ugggucugugug

SEQ ID NO: 1192407 - RNA, 15 nt, Human
agggggagagggcug

SEQ ID NO: 1192408 - RNA, 16 nt, Human
agggggagagggcugc

SEQ ID NO: 1192409 - RNA, 10 nt, Human
uggucagccc

SEQ ID NO: 1192410 - RNA, 11 nt, Human
uggucagccca

SEQ ID NO: 1192411 - RNA, 12 nt, Human
uggucagcccaa

SEQ ID NO: 1192412 - RNA, 14 nt, Human
uggucuccacuggg

SEQ ID NO: 1192413 - RNA, 14 nt, Human
uggggcugauugua

SEQ ID NO: 1192414 - RNA, 15 nt, Human
ugggguagguuggga

SEQ ID NO: 1192415 - RNA, 21 nt, Human
ugggguagguugggagaaugu

SEQ ID NO: 1192416 - RNA, 18 nt, Human
uggggaguuuaggguggg

SEQ ID NO: 1192417 - RNA, 19 nt, Human
uggggaguuuagggugggg

SEQ ID NO: 1192418 - RNA, 14 nt, Human
uggggaaugaagau

SEQ ID NO: 1192419 - RNA, 15 nt, Human
uggggaaugaagaua

SEQ ID NO: 1192420 - RNA, 20 nt, Human
uggggacaggggcaggagga

SEQ ID NO: 1192421 - RNA, 22 nt, Human
uggggacaggggcaggaggaag

SEQ ID NO: 1192422 - RNA, 19 nt, Human
aggacaguauuugugggga

SEQ ID NO: 1192423 - RNA, 12 nt, Human
aggacaguauuu

SEQ ID NO: 1192424 - RNA, 19 nt, Human
aggaucccaugagcuccuu

SEQ ID NO: 1192425 - RNA, 13 nt, Human
uggaagguauuua

SEQ ID NO: 1192426 - RNA, 17 nt, Human
uggaagguauuuaauag

SEQ ID NO: 1192427 - RNA, 20 nt, Human
uggaagcuucuggugaccuu

SEQ ID NO: 1192428 - RNA, 20 nt, Human
uggaauuauuuuaaaagaua

SEQ ID NO: 1192429 - RNA, 21 nt, Human
uggccuguucuucuauggguu

SEQ ID NO: 1192430 - RNA, 16 nt, Human
uggccuaaccugccga

SEQ ID NO: 1192431 - RNA, 18 nt, Human
ugcuauuguagagccaga

SEQ ID NO: 1192432 - RNA, 23 nt, Human
ugcuguauccauccauggggcug

SEQ ID NO: 1192433 - RNA, 21 nt, Human
agcugggacaccccgacuuuu

SEQ ID NO: 1192434 - RNA, 20 nt, Human
agcugugugcucuccaagcc

SEQ ID NO: 1192435 - RNA, 23 nt, Human
agcuuggggacaggggcaggagg

SEQ ID NO: 1192436 - RNA, 20 nt, Human
agcucaggaaccgaggcagg

SEQ ID NO: 1192437 - RNA, 21 nt, Human
agcucaggaaccgaggcaggg

SEQ ID NO: 1192438 - RNA, 22 nt, Human
agcucaggaaccgaggcaggga

SEQ ID NO: 1192439 - RNA, 13 nt, Human
agcuagaauuuga

SEQ ID NO: 1192440 - RNA, 16 nt, Human
agcuagaauuugauau

SEQ ID NO: 1192441 - RNA, 17 nt, Human
ugccagacccccuggag

SEQ ID NO: 1192442 - RNA, 20 nt, Human
agccuggucagcccaaacca

SEQ ID NO: 1192443 - RNA, 15 nt, Human
agccuggucagccca

SEQ ID NO: 1192444 - RNA, 16 nt, Human
agccuggucagcccaa

SEQ ID NO: 1192445 - RNA, 18 nt, Human
agccugacccucaucuuu

SEQ ID NO: 1192446 - RNA, 18 nt, Human
agcccaguucagcuuggg

SEQ ID NO: 1192447 - RNA, 18 nt, Human
ugaguucauaaauuuaug

SEQ ID NO: 1192448 - RNA, 24 nt, Human
ugauaagcagucauccucagauca

SEQ ID NO: 1192449 - RNA, 12 nt, Human
ugauacagaaaa

SEQ ID NO: 1192450 - RNA, 21 nt, Human
ugauacagaaaaguugaauuu

SEQ ID NO: 1192451 - RNA, 21 nt, Human
ugauagaaggcuauggggaua

SEQ ID NO: 1192452 - RNA, 15 nt, Human
ugauaugugaacagu

SEQ ID NO: 1192453 - RNA, 16 nt, Human
ugauaugugaacaguu

SEQ ID NO: 1192454 - RNA, 17 nt, Human
agcauuucccuuccuuc

SEQ ID NO: 1192455 - RNA, 15 nt, Human
agccaggccacuggc

SEQ ID NO: 1192456 - RNA, 15 nt, Human
ugauccagcccugag

SEQ ID NO: 1192457 - RNA, 17 nt, Human
ugauccagcccugaguu

SEQ ID NO: 1192458 - RNA, 18 nt, Human
ugauccagcccugaguuc

SEQ ID NO: 1192459 - RNA, 21 nt, Human
ugacccucaucuuucuuccaa

SEQ ID NO: 1192460 - RNA, 18 nt, Human
ugaccuuccaagagccug

SEQ ID NO: 1192461 - RNA, 19 nt, Human
ugaccuuccaagagccuga

SEQ ID NO: 1192462 - RNA, 20 nt, Human
ugaccuuccaagagccugag

SEQ ID NO: 1192463 - RNA, 22 nt, Human
ugaaggguaauuauauaguuac

SEQ ID NO: 1192464 - RNA, 14 nt, Human
ugaauguaugcuuc

SEQ ID NO: 1192465 - RNA, 19 nt, Human
ugaauguaugcuucauaca

SEQ ID NO: 1192466 - RNA, 20 nt, Human
ugaauguaugcuucauacag

SEQ ID NO: 1192467 - RNA, 23 nt, Human
ugaauguaugcuucauacaggga

SEQ ID NO: 1192468 - RNA, 22 nt, Human
agaggugugcaagagagggaug

SEQ ID NO: 1192469 - RNA, 23 nt, Human
agaggugugcaagagagggaugc

SEQ ID NO: 1192470 - RNA, 17 nt, Human
agagacgggcccuggug

SEQ ID NO: 1192471 - RNA, 12 nt, Human
ugaaacuuuugg

SEQ ID NO: 1192472 - RNA, 11 nt, Human
ugaaaauauuu

SEQ ID NO: 1192473 - RNA, 12 nt, Human
ugaaaauauuua

SEQ ID NO: 1192474 - RNA, 13 nt, Human
ugaaaauauuuaa

SEQ ID NO: 1192475 - RNA, 14 nt, Human
ugaaaauauuuaaa

SEQ ID NO: 1192476 - RNA, 12 nt, Human
ugaaacuuggau

SEQ ID NO: 1192477 - RNA, 22 nt, Human
ucuuggggaguuuagggugggg

SEQ ID NO: 1192478 - RNA, 23 nt, Human
ucuuggggaguuuaggguggggg

SEQ ID NO: 1192479 - RNA, 13 nt, Human
agacccccuggag

SEQ ID NO: 1192480 - RNA, 14 nt, Human
agacccccuggaga

SEQ ID NO: 1192481 - RNA, 15 nt, Human
agacccccuggagac

SEQ ID NO: 1192482 - RNA, 19 nt, Human
agacccccuggagacuaac

SEQ ID NO: 1192483 - RNA, 22 nt, Human
ucuggcacagccuggcuguggc

SEQ ID NO: 1192484 - RNA, 13 nt, Human
agaauaaacuggc

SEQ ID NO: 1192485 - RNA, 20 nt, Human
ucugaaggguaauuauauag

SEQ ID NO: 1192486 - RNA, 22 nt, Human
ucucucacuuguuuuauuuaac

SEQ ID NO: 1192487 - RNA, 15 nt, Human
ucuaccucuuggcug

SEQ ID NO: 1192488 - RNA, 14 nt, Human
ucuaguucugccag

SEQ ID NO: 1192489 - RNA, 13 nt, Human
ucuauaaaccgaa

SEQ ID NO: 1192490 - RNA, 20 nt, Human
ucggggagccgggagccuga

SEQ ID NO: 1192491 - RNA, 20 nt, Human
uaugugggggucuguguguu

SEQ ID NO: 1192492 - RNA, 19 nt, Human
uaugugggggucugugugu

SEQ ID NO: 1192493 - RNA, 18 nt, Human
uaugugggggucugugug

SEQ ID NO: 1192494 - RNA, 21 nt, Human
uauuuuaaaagauaaauauua

SEQ ID NO: 1192495 - RNA, 13 nt, Human
uauuuuacauaaa

SEQ ID NO: 1192496 - RNA, 22 nt, Human
acauggcuggagcuagaauuug

SEQ ID NO: 1192497 - RNA, 21 nt, Human
ucaaauacgugggcauucaaa

SEQ ID NO: 1192498 - RNA, 22 nt, Human
ucaaauacgugggcauucaaau

SEQ ID NO: 1192499 - RNA, 23 nt, Human
ucaaauacgugggcauucaaaug

SEQ ID NO: 1192500 - RNA, 20 nt, Human
ucacauuccugaacaggaua

SEQ ID NO: 1192501 - RNA, 13 nt, Human
ucacauuccugaa

SEQ ID NO: 1192502 - RNA, 17 nt, Human
ucacauuccugaacagg

SEQ ID NO: 1192503 - RNA, 19 nt, Human
ucacagcuccaagaauuuc

SEQ ID NO: 1192504 - RNA, 16 nt, Human
acauuggaaacaaguc

SEQ ID NO: 1192505 - RNA, 21 nt, Human
accgaacugauguaaguaaac

SEQ ID NO: 1192506 - RNA, 23 nt, Human
acccucccucuacugggagccua

SEQ ID NO: 1192507 - RNA, 19 nt, Human
ucacauuccugaacaggau

SEQ ID NO: 1192508 - RNA, 14 nt, Human
ucacucuuggagcc

SEQ ID NO: 1192509 - RNA, 16 nt, Human
ucacucuuggagccug

SEQ ID NO: 1192510 - RNA, 17 nt, Human
ucacucuuggagccugc

SEQ ID NO: 1192511 - RNA, 18 nt, Human
ucacucuuggagccugca

SEQ ID NO: 1192512 - RNA, 16 nt, Human
uccucugcccgggagc

SEQ ID NO: 1192513 - RNA, 22 nt, Human
uccucugcccgggagcucagga

SEQ ID NO: 1192514 - RNA, 13 nt, Human
uccucuccugucu

SEQ ID NO: 1192515 - RNA, 22 nt, Human
acucgugucuggcacagccugg

SEQ ID NO: 1192516 - RNA, 23 nt, Human
acucgugucuggcacagccuggc

SEQ ID NO: 1192517 - RNA, 21 nt, Human
uccuagccaccgccuccuaca

SEQ ID NO: 1192518 - RNA, 20 nt, Human
uccuagccacccaccacacu

SEQ ID NO: 1192519 - RNA, 14 nt, Human
acuccaccaagccu

SEQ ID NO: 1192520 - RNA, 16 nt, Human
uccauccuacccccug

SEQ ID NO: 1192521 - RNA, 20 nt, Human
uccauccuacccccugugcc

SEQ ID NO: 1192522 - RNA, 15 nt, Human
accuuccaagagccu

SEQ ID NO: 1192523 - RNA, 16 nt, Human
accuuccaagagccug

SEQ ID NO: 1192524 - RNA, 20 nt, Human
accuggcuuuucuuucuacc

SEQ ID NO: 1192525 - RNA, 16 nt, Human
aauuccacacccucac

SEQ ID NO: 1192526 - RNA, 14 nt, Human
uagaagaagugugu

SEQ ID NO: 1192527 - RNA, 21 nt, Human
uagacauuugcuaugagcugg

SEQ ID NO: 1192528 - RNA, 20 nt, Human
uagaauuugauaugugaaca

SEQ ID NO: 1192529 - RNA, 22 nt, Human
uagaauuugauaugugaacagu

SEQ ID NO: 1192530 - RNA, 18 nt, Human
uagccacccaccacacug

SEQ ID NO: 1192531 - RNA, 18 nt, Human
uagccaccgccuccuaca

SEQ ID NO: 1192532 - RNA, 19 nt, Human
uagccaccgccuccuacag

SEQ ID NO: 1192533 - RNA, 24 nt, Human
uagaggggaaaagagaugaugaaa

SEQ ID NO: 1192534 - RNA, 20 nt, Human
aauuuuacauggcuggagcu

SEQ ID NO: 1192535 - RNA, 16 nt, Human
acaaaaagcuacuuau

SEQ ID NO: 1192536 - RNA, 19 nt, Human
acaaaaauucucaguucuc

SEQ ID NO: 1192537 - RNA, 13 nt, Human
uagcuuuuuucuc

SEQ ID NO: 1192538 - RNA, 23 nt, Human
uagcuuuuuucucugauacagaa

SEQ ID NO: 1192539 - RNA, 14 nt, Human
uaucagcacgugug

SEQ ID NO: 1192540 - RNA, 15 nt, Human
uaucagcacgugugg

SEQ ID NO: 1192541 - RNA, 21 nt, Human
uauaucuauauuuuacauaaa

SEQ ID NO: 1192542 - RNA, 11 nt, Human
uauauauuucc

SEQ ID NO: 1192543 - RNA, 19 nt, Human
uauauauuuuuuucugaaa

SEQ ID NO: 1192544 - RNA, 20 nt, Human
uauauauuuuuuucugaaau

SEQ ID NO: 1192545 - RNA, 21 nt, Human
uaugguaggaacugcugggcu

SEQ ID NO: 1192546 - RNA, 18 nt, Human
acagcggcuggacuugga

SEQ ID NO: 1192547 - RNA, 19 nt, Human
acagcggcuggacuuggag

SEQ ID NO: 1192548 - RNA, 20 nt, Human
uaugccaccugaauaaagaa

SEQ ID NO: 1192549 - RNA, 15 nt, Human
uaucuauauuuuaca

SEQ ID NO: 1192550 - RNA, 20 nt, Human
uaauuuaaaauugugaugug

SEQ ID NO: 1192551 - RNA, 19 nt, Human
uaauuuaaaauugugaugu

SEQ ID NO: 1192552 - RNA, 13 nt, Human
uaccucuuggcug

SEQ ID NO: 1192553 - RNA, 15 nt, Human
uacccccugugccuu

SEQ ID NO: 1192554 - RNA, 12 nt, Human
aauuauuuuaaa

SEQ ID NO: 1192555 - RNA, 15 nt, Human
aauuauuuuaaaaga

SEQ ID NO: 1192556 - RNA, 17 nt, Human
uacagggaugguguuca

SEQ ID NO: 1192557 - RNA, 15 nt, Human
aaucuaugauuccag

SEQ ID NO: 1192558 - RNA, 18 nt, Human
aaucuaugauuccaggug

SEQ ID NO: 1192559 - RNA, 23 nt, Human
uaagacaaaaagcuacuuauugu

SEQ ID NO: 1192560 - RNA, 14 nt, Human
aaggcucuuuugua

SEQ ID NO: 1192561 - RNA, 18 nt, Human
aagguauuuaauagguuu

SEQ ID NO: 1192562 - RNA, 13 nt, Human
guuuacaguguuc

SEQ ID NO: 1192563 - RNA, 15 nt, Human
guuuacaguguuccg

SEQ ID NO: 1192564 - RNA, 22 nt, Human
aaggcccuaucuguuuacagug

SEQ ID NO: 1192565 - RNA, 22 nt, Human
aaggaaccaaagcgaauuuuaa

SEQ ID NO: 1192566 - RNA, 23 nt, Human
aaggaaccaaagcgaauuuuaaa

SEQ ID NO: 1192567 - RNA, 12 nt, Human
uaaaagaauugu

SEQ ID NO: 1192568 - RNA, 16 nt, Human
gugugugggagugugu

SEQ ID NO: 1192569 - RNA, 18 nt, Human
aagcccaguucagcuugg

SEQ ID NO: 1192570 - RNA, 19 nt, Human
aagcccaguucagcuuggg

SEQ ID NO: 1192571 - RNA, 18 nt, Human
aagccaagaggcugcagc

SEQ ID NO: 1192572 - RNA, 22 nt, Human
aagccaagaggcugcagccagg

SEQ ID NO: 1192573 - RNA, 14 nt, Human
guuaagauuccuaa

SEQ ID NO: 1192574 - RNA, 19 nt, Human
gugggguagguugggagaa

SEQ ID NO: 1192575 - RNA, 14 nt, Human
aagaggcugcagcc

SEQ ID NO: 1192576 - RNA, 18 nt, Human
aagaucucagugguuaag

SEQ ID NO: 1192577 - RNA, 15 nt, Human
guguguauguggggg

SEQ ID NO: 1192578 - RNA, 13 nt, Human
guguguauguggg

SEQ ID NO: 1192579 - RNA, 20 nt, Human
gugugucacccuuaggccag

SEQ ID NO: 1192580 - RNA, 14 nt, Human
gugugggucugugu

SEQ ID NO: 1192581 - RNA, 21 nt, Human
guggccuaaccugccgagagu

SEQ ID NO: 1192582 - RNA, 22 nt, Human
guggccuaaccugccgagaguc

SEQ ID NO: 1192583 - RNA, 15 nt, Human
aaauuuaugugaugg

SEQ ID NO: 1192584 - RNA, 12 nt, Human
aaauuuauguga

SEQ ID NO: 1192585 - RNA, 15 nt, Human
aaauugugauguguc

SEQ ID NO: 1192586 - RNA, 12 nt, Human
aaauugugaugu

SEQ ID NO: 1192587 - RNA, 15 nt, Human
aaauguauuacagug

SEQ ID NO: 1192588 - RNA, 21 nt, Human
guaugcuucauacagggaugg

SEQ ID NO: 1192589 - RNA, 12 nt, Human
guaugcuucaua

SEQ ID NO: 1192590 - RNA, 13 nt, Human
guaugcuucauac

SEQ ID NO: 1192591 - RNA, 14 nt, Human
guaugcuucauaca

SEQ ID NO: 1192592 - RNA, 15 nt, Human
guaugcuucauacag

SEQ ID NO: 1192593 - RNA, 13 nt, Human
gucaguuguauca

SEQ ID NO: 1192594 - RNA, 21 nt, Human
gucaguauguggaaguguggg

SEQ ID NO: 1192595 - RNA, 17 nt, Human
gucaguauguggaagug

SEQ ID NO: 1192596 - RNA, 17 nt, Human
gucuggcacagccuggc

SEQ ID NO: 1192597 - RNA, 19 nt, Human
gucuggcacagccuggcug

SEQ ID NO: 1192598 - RNA, 19 nt, Human
gucucccuccucugcccgg

SEQ ID NO: 1192599 - RNA, 14 nt, Human
aaccaccagaagcc

SEQ ID NO: 1192600 - RNA, 17 nt, Human
aaccaccagaagcccag

SEQ ID NO: 1192601 - RNA, 17 nt, Human
aaccccccauuucuucc

SEQ ID NO: 1192602 - RNA, 20 nt, Human
aaccccuggcuccaggccag

SEQ ID NO: 1192603 - RNA, 12 nt, Human
aaccucuaaauu

SEQ ID NO: 1192604 - RNA, 24 nt, Human
aaccucuaaauucuuucauuuuag

SEQ ID NO: 1192605 - RNA, 12 nt, Human
gugcaagagagg

SEQ ID NO: 1192606 - RNA, 21 nt, Human
gugagguggaauuauuuuaaa

SEQ ID NO: 1192607 - RNA, 16 nt, Human
cucaucuuucuuccaa

SEQ ID NO: 1192608 - RNA, 20 nt, Human
cucagugucuggcugcagag

SEQ ID NO: 1192609 - RNA, 16 nt, Human
cucaggcccaaagccu

SEQ ID NO: 1192610 - RNA, 13 nt, Human
cucccuccucugc

SEQ ID NO: 1192611 - RNA, 14 nt, Human
cucccuccucugcc

SEQ ID NO: 1192612 - RNA, 14 nt, Human
cucuuggagccugc

SEQ ID NO: 1192613 - RNA, 15 nt, Human
cucuuggagccugca

SEQ ID NO: 1192614 - RNA, 21 nt, Human
cucucacuuguuuuauuuaac

SEQ ID NO: 1192615 - RNA, 19 nt, Human
cuaaccugccgagagucca

SEQ ID NO: 1192616 - RNA, 21 nt, Human
cuaaccugccgagaguccauc

SEQ ID NO: 1192617 - RNA, 14 nt, Human
cgugucuggcacag

SEQ ID NO: 1192618 - RNA, 21 nt, Human
cgugucuggcacagccuggcu

SEQ ID NO: 1192619 - RNA, 18 nt, Human
cuagccaccgccuccuac

SEQ ID NO: 1192620 - RNA, 19 nt, Human
cuagccaccgccuccuaca

SEQ ID NO: 1192621 - RNA, 23 nt, Human
cggcuccucgagaucccaacacu

SEQ ID NO: 1192622 - RNA, 16 nt, Human
ccagagucccugccug

SEQ ID NO: 1192623 - RNA, 17 nt, Human
ccagagucccugccugg

SEQ ID NO: 1192624 - RNA, 18 nt, Human
ccagagucccugccugga

SEQ ID NO: 1192625 - RNA, 19 nt, Human
ccagagucccugccuggac

SEQ ID NO: 1192626 - RNA, 22 nt, Human
ccagagucccugccuggaccag

SEQ ID NO: 1192627 - RNA, 12 nt, Human
ccaugagcuccu

SEQ ID NO: 1192628 - RNA, 15 nt, Human
ccaguucagcuuggg

SEQ ID NO: 1192629 - RNA, 14 nt, Human
ccccgacuuuuguu

SEQ ID NO: 1192630 - RNA, 21 nt, Human
ccccagacuccaccaagccug

SEQ ID NO: 1192631 - RNA, 14 nt, Human
cccgggagcucagg

SEQ ID NO: 1192632 - RNA, 14 nt, Human
ccugacucucagca

SEQ ID NO: 1192633 - RNA, 17 nt, Human
ccugagaucucugcagg

SEQ ID NO: 1192634 - RNA, 22 nt, Human
ccugaguaaaaaagcugugugc

SEQ ID NO: 1192635 - RNA, 24 nt, Human
cccugugccuuggugugcuguauc

SEQ ID NO: 1192636 - RNA, 15 nt, Human
cccugugccuuguca

SEQ ID NO: 1192637 - RNA, 20 nt, Human
cccugugccuugucacgcca

SEQ ID NO: 1192638 - RNA, 22 nt, Human
cccugugccuugucacgccaga

SEQ ID NO: 1192639 - RNA, 13 nt, Human
cccuggcuccagg

SEQ ID NO: 1192640 - RNA, 16 nt, Human
cccuggcuccaggcca

SEQ ID NO: 1192641 - RNA, 16 nt, Human
auucuuucccaacacc

SEQ ID NO: 1192642 - RNA, 19 nt, Human
auucuuucccaacaccucu

SEQ ID NO: 1192643 - RNA, 16 nt, Human
auuguugucugcaacu

SEQ ID NO: 1192644 - RNA, 18 nt, Human
auuaugaaacuuuuggaa

SEQ ID NO: 1192645 - RNA, 16 nt, Human
auucaaauguauuaca

SEQ ID NO: 1192646 - RNA, 18 nt, Human
auucaaauguauuacagu

SEQ ID NO: 1192647 - RNA, 18 nt, Human
auucaaugccccugaauu

SEQ ID NO: 1192648 - RNA, 20 nt, Human
auucaaugccccugaauuua

SEQ ID NO: 1192649 - RNA, 19 nt, Human
auuacaguggggaaugaag

SEQ ID NO: 1192650 - RNA, 20 nt, Human
auuugcuaugagcuggggau

SEQ ID NO: 1192651 - RNA, 16 nt, Human
auuugcuaugagcugg

SEQ ID NO: 1192652 - RNA, 22 nt, Human
auuuguggggagggauuugggg

SEQ ID NO: 1192653 - RNA, 14 nt, Human
caaacaggcucaga

SEQ ID NO: 1192654 - RNA, 15 nt, Human
caaacaggcucagag

SEQ ID NO: 1192655 - RNA, 17 nt, Human
caacaaucccaaggccc

SEQ ID NO: 1192656 - RNA, 18 nt, Human
cacugccagcauuucccu

SEQ ID NO: 1192657 - RNA, 22 nt, Human
cacugccagcauuucccuuccu

SEQ ID NO: 1192658 - RNA, 22 nt, Human
cacucuuggagccugcagagcu

SEQ ID NO: 1192659 - RNA, 23 nt, Human
cacucuuggagccugcagagcug

SEQ ID NO: 1192660 - RNA, 15 nt, Human
caguauuugugggga

SEQ ID NO: 1192661 - RNA, 24 nt, Human
cagccucuccacucaugugacucu

SEQ ID NO: 1192662 - RNA, 17 nt, Human
cagcggcuggaauuggg

SEQ ID NO: 1192663 - RNA, 16 nt, Human
cagcggcuggacuugg

SEQ ID NO: 1192664 - RNA, 18 nt, Human
cagcggcuggacuuggag

SEQ ID NO: 1192665 - RNA, 11 nt, Human
cagccugccac

SEQ ID NO: 1192666 - RNA, 12 nt, Human
cagccugccacu

SEQ ID NO: 1192667 - RNA, 16 nt, Human
cagccugccacucagg

SEQ ID NO: 1192668 - RNA, 17 nt, Human
cagccugccacucaggc

SEQ ID NO: 1192669 - RNA, 24 nt, Human
cagccccgcguggaacucgugucu

SEQ ID NO: 1192670 - RNA, 16 nt, Human
cagagcugcgggcugg

SEQ ID NO: 1192671 - RNA, 14 nt, Human
ccaccagaagccca

SEQ ID NO: 1192672 - RNA, 15 nt, Human
ccaccagaagcccag

SEQ ID NO: 1192673 - RNA, 16 nt, Human
ccaccagaagcccaga

SEQ ID NO: 1192674 - RNA, 18 nt, Human
ccaccagaagcccagaau

SEQ ID NO: 1192675 - RNA, 11 nt, Human
ccaccagaagc

SEQ ID NO: 1192676 - RNA, 12 nt, Human
ccaccagaagcc

SEQ ID NO: 1192677 - RNA, 13 nt, Human
ccaccagaagccc

SEQ ID NO: 1192678 - RNA, 22 nt, Human
ccaaaugagggucuugguucca

SEQ ID NO: 1192679 - RNA, 12 nt, Human
ccaaauuaagag

SEQ ID NO: 1192680 - RNA, 22 nt, Human
cauggcuggagcuagaauuuga

SEQ ID NO: 1192681 - RNA, 22 nt, Human
cauuggcucuugaacugagcuu

SEQ ID NO: 1192682 - RNA, 17 nt, Human
caguuuggcaaacucuc

SEQ ID NO: 1192683 - RNA, 20 nt, Human
gcaccggggccugggcagga

SEQ ID NO: 1192684 - RNA, 13 nt, Human
gauucugagagcu

SEQ ID NO: 1192685 - RNA, 14 nt, Human
gauucugagagcug

SEQ ID NO: 1192686 - RNA, 21 nt, Human
gcagagcagugggccuggcca

SEQ ID NO: 1192687 - RNA, 12 nt, Human
gaucccaacacu

SEQ ID NO: 1192688 - RNA, 16 nt, Human
gaucccaacacugcca

SEQ ID NO: 1192689 - RNA, 14 nt, Human
gaguuuaggguggg

SEQ ID NO: 1192690 - RNA, 15 nt, Human
gaguuuagggugggg

SEQ ID NO: 1192691 - RNA, 19 nt, Human
gaguggacuguucccugag

SEQ ID NO: 1192692 - RNA, 18 nt, Human
gagugaggaugucugggc

SEQ ID NO: 1192693 - RNA, 13 nt, Human
gaguccaucagcc

SEQ ID NO: 1192694 - RNA, 14 nt, Human
gaguccaucagccu

SEQ ID NO: 1192695 - RNA, 15 nt, Human
gaguccaucagccuc

SEQ ID NO: 1192696 - RNA, 16 nt, Human
gaguccaucagccucc

SEQ ID NO: 1192697 - RNA, 13 nt, Human
gauaugugaacag

SEQ ID NO: 1192698 - RNA, 14 nt, Human
gauaugugaacagu

SEQ ID NO: 1192699 - RNA, 15 nt, Human
gacaguauuuguggg

SEQ ID NO: 1192700 - RNA, 19 nt, Human
gacagguuugggaccccug

SEQ ID NO: 1192701 - RNA, 16 nt, Human
gacagguuagcugcuc

SEQ ID NO: 1192702 - RNA, 15 nt, Human
gacaaaauggaauac

SEQ ID NO: 1192703 - RNA, 12 nt, Human
gaauuaugaaac

SEQ ID NO: 1192704 - RNA, 14 nt, Human
gaauuaugaaacuu

SEQ ID NO: 1192705 - RNA, 12 nt, Human
gaauuuuaaaag

SEQ ID NO: 1192706 - RNA, 15 nt, Human
gaauuuuaaaagaug

SEQ ID NO: 1192707 - RNA, 21 nt, Human
gaauuuuaaaagaugcaaugu

SEQ ID NO: 1192708 - RNA, 23 nt, Human
gaauuuuaaaagaugcaauguag

SEQ ID NO: 1192709 - RNA, 19 nt, Human
gaagggcagggcugaggcc

SEQ ID NO: 1192710 - RNA, 15 nt, Human
gaaggcuauggggau

SEQ ID NO: 1192711 - RNA, 18 nt, Human
gaagugugggucugugug

SEQ ID NO: 1192712 - RNA, 17 nt, Human
gaagugugggucugugu

SEQ ID NO: 1192713 - RNA, 19 nt, Human
gaagugugggucugugugu

SEQ ID NO: 1192714 - RNA, 19 nt, Human
gagcuggggaugucucuca

SEQ ID NO: 1192715 - RNA, 20 nt, Human
gagaugaugaaaauauuuaa

SEQ ID NO: 1192716 - RNA, 18 nt, Human
gacuuuugaaaagaggug

SEQ ID NO: 1192717 - RNA, 23 nt, Human
gagacuaaccccaccacacccuc

SEQ ID NO: 1192718 - RNA, 18 nt, Human
cuuauuggcagcucuacu

SEQ ID NO: 1192719 - RNA, 23 nt, Human
cuuauuguagcauccuggaauau

SEQ ID NO: 1192720 - RNA, 20 nt, Human
cuuauuguagcauccuggaa

SEQ ID NO: 1192721 - RNA, 12 nt, Human
cuucauacaggg

SEQ ID NO: 1192722 - RNA, 13 nt, Human
cuucauacaggga

SEQ ID NO: 1192723 - RNA, 22 nt, Human
cuucauacagggaugguguuca

SEQ ID NO: 1192724 - RNA, 9 nt, Human
cuucauaca

SEQ ID NO: 1192725 - RNA, 10 nt, Human
cuucauacac

SEQ ID NO: 1192726 - RNA, 22 nt, Human
cuugacaaagucaagccacaug

SEQ ID NO: 1192727 - RNA, 16 nt, Human
cuugacaaagucaagc

SEQ ID NO: 1192728 - RNA, 19 nt, Human
cuugacaaagucaagccac

SEQ ID NO: 1192729 - RNA, 13 nt, Human
gaaacuuuuggaa

SEQ ID NO: 1192730 - RNA, 15 nt, Human
gaaacuuuuggaagg

SEQ ID NO: 1192731 - RNA, 19 nt, Human
cuuuuguagaagucacauu

SEQ ID NO: 1192732 - RNA, 22 nt, Human
cuggggaugucucucaugacca

SEQ ID NO: 1192733 - RNA, 16 nt, Human
cuggggauugggcccc

SEQ ID NO: 1192734 - RNA, 18 nt, Human
cuggggauugggccccug

SEQ ID NO: 1192735 - RNA, 22 nt, Human
cuggggauugggccccugccag

SEQ ID NO: 1192736 - RNA, 17 nt, Human
cuggagacuaaccccac

SEQ ID NO: 1192737 - RNA, 16 nt, Human
cuggcuccaggccagg

SEQ ID NO: 1192738 - RNA, 23 nt, Human
cugccaucauguuuacagaggac

SEQ ID NO: 1192739 - RNA, 22 nt, Human
cugccaucauguuuacagagga

SEQ ID NO: 1192740 - RNA, 17 nt, Human
cugccaucauguuuaca

SEQ ID NO: 1192741 - RNA, 16 nt, Human
cugccugguccucaca

SEQ ID NO: 1192742 - RNA, 17 nt, Human
guaaauuuaugugaugg

SEQ ID NO: 1192743 - RNA, 16 nt, Human
guaaauuuaugugaug

SEQ ID NO: 1192744 - RNA, 16 nt, Human
aaaguugaauuuuaca

SEQ ID NO: 1192745 - RNA, 20 nt, Human
gguuuggacaaaauggaaua

SEQ ID NO: 1192746 - RNA, 14 nt, Human
gguuugggaccccu

SEQ ID NO: 1192747 - RNA, 14 nt, Human
aaagcgaauuuuaa

SEQ ID NO: 1192748 - RNA, 14 nt, Human
gguuccagccugcc

SEQ ID NO: 1192749 - RNA, 17 nt, Human
ggucuguguguguguau

SEQ ID NO: 1192750 - RNA, 11 nt, Human
ggucugugugu

SEQ ID NO: 1192751 - RNA, 21 nt, Human
ggucuguguguguguaugugg

SEQ ID NO: 1192752 - RNA, 20 nt, Human
ggucuguguguguguaugug

SEQ ID NO: 1192753 - RNA, 21 nt, Human
ggugcuucuaguucugccagg

SEQ ID NO: 1192754 - RNA, 16 nt, Human
gguaggaacugcuggg

SEQ ID NO: 1192755 - RNA, 17 nt, Human
gguagcuuugaggugga

SEQ ID NO: 1192756 - RNA, 23 nt, Human
ggguguccugcaccggggccugg

SEQ ID NO: 1192757 - RNA, 13 nt, Human
ggguggggagaga

SEQ ID NO: 1192758 - RNA, 18 nt, Human
gggcucagagugggguag

SEQ ID NO: 1192759 - RNA, 17 nt, Human
aaacaccggguuccagc

SEQ ID NO: 1192760 - RNA, 22 nt, Human
gggcccuggugguggcucggga

SEQ ID NO: 1192761 - RNA, 18 nt, Human
gggccagucccugaggca

SEQ ID NO: 1192762 - RNA, 21 nt, Human
gggccagucccugaggcaggu

SEQ ID NO: 1192763 - RNA, 22 nt, Human
gggagaaugucaguauguggaa

SEQ ID NO: 1192764 - RNA, 19 nt, Human
gggagaaugucaguaugug

SEQ ID NO: 1192765 - RNA, 15 nt, Human
aaaagaugcaaugua

SEQ ID NO: 1192766 - RNA, 14 nt, Human
gggaugucucucau

SEQ ID NO: 1192767 - RNA, 16 nt, Human
gggaugguguucaaaa

SEQ ID NO: 1192768 - RNA, 14 nt, Human
aaaagggaggggga

SEQ ID NO: 1192769 - RNA, 15 nt, Human
gggauugggccccug

SEQ ID NO: 1192770 - RNA, 22 nt, Human
ggcgaagcguuguccucagccc

SEQ ID NO: 1192771 - RNA, 16 nt, Human
ggccuugaguccccca

SEQ ID NO: 1192772 - RNA, 19 nt, Human
ggccaguggcuggaucugu

SEQ ID NO: 1192773 - RNA, 22 nt, Human
ggcauccagagucccugccugg

SEQ ID NO: 1192774 - RNA, 15 nt, Human
ggcacuggggcaggg

SEQ ID NO: 1192775 - RNA, 17 nt, Human
ggcccugugccuuggug

SEQ ID NO: 1192776 - RNA, 12 nt, Human
ggcacagccugg

SEQ ID NO: 1192777 - RNA, 13 nt, Human
ggcacagccuggc

SEQ ID NO: 1192778 - RNA, 13 nt, Human
ggaugucugggcc

SEQ ID NO: 1192779 - RNA, 21 nt, Human
ggagguagcuuugagguggaa

SEQ ID NO: 1192780 - RNA, 13 nt, Human
gcugcuccccacg

SEQ ID NO: 1192781 - RNA, 22 nt, Human
gcugcuccccacgucagcuggg

SEQ ID NO: 1192782 - RNA, 20 nt, Human
gcugcagagcagugggccug

SEQ ID NO: 1192783 - RNA, 21 nt, Human
gcugcagagcagugggccugg

SEQ ID NO: 1192784 - RNA, 18 nt, Human
gcuccucgagaucccaac

SEQ ID NO: 1192785 - RNA, 14 nt, Human
gcugaggccucuca

SEQ ID NO: 1192786 - RNA, 17 nt, Human
gcucugugcccacccuc

SEQ ID NO: 1192787 - RNA, 19 nt, Human
gcuuuccucaucaggccau

SEQ ID NO: 1192788 - RNA, 19 nt, Human
gcuuugagguggaagaggg

SEQ ID NO: 1192789 - RNA, 22 nt, Human
gcuuugagguggaagagggcug

SEQ ID NO: 1192790 - RNA, 13 nt, Human
gcuggaucuguga

SEQ ID NO: 1192791 - RNA, 20 nt, Human
gcuguagacauuugcuauga

SEQ ID NO: 1192792 - RNA, 15 nt, Human
ggaacugcugggcuu

SEQ ID NO: 1192793 - RNA, 14 nt, Human
ggaacugcugggcu

SEQ ID NO: 1192794 - RNA, 22 nt, Human
gcuuuuuucucugauacagaaa

SEQ ID NO: 1192795 - RNA, 14 nt, Human
gcggcugggaggag

SEQ ID NO: 1192796 - RNA, 17 nt, Human
gcggcugggaggagggc

SEQ ID NO: 1192797 - RNA, 18 nt, Human
gcggcugggaggagggca

SEQ ID NO: 1192798 - RNA, 19 nt, Human
gcggcugggaggagggcag

SEQ ID NO: 1192799 - RNA, 22 nt, Human
gcggcugggaggagggcaggca

SEQ ID NO: 1192800 - RNA, 23 nt, Human
gccaguggcuggaucugugaggg

SEQ ID NO: 1192801 - RNA, 14 nt, Human
gccaguggcuggau

SEQ ID NO: 1192802 - RNA, 14 nt, Human
gccaggauggaaug

SEQ ID NO: 1192803 - RNA, 11 nt, Human
gcccuaucugu

SEQ ID NO: 1192804 - RNA, 14 nt, Human
accaucucuuuacc

SEQ ID NO: 1192805 - RNA, 15 nt, Human
acaguggggaaugaa

SEQ ID NO: 1192806 - RNA, 19 nt, Human
acaguggggaaugaagaua

SEQ ID NO: 1192807 - RNA, 15 nt, Human
aauugugaugugucc

SEQ ID NO: 1192808 - RNA, 14 nt, Human
aauugugauguguc

SEQ ID NO: 1192809 - RNA, 11 nt, Human
aauugugaugu

SEQ ID NO: 1192810 - RNA, 21 nt, Human
aauuggguggggggcuucaua

SEQ ID NO: 1192811 - RNA, 22 nt, Human
aauuggguggggggcuucauac

SEQ ID NO: 1192812 - RNA, 23 nt, Human
aauuggguggggggcuucauaca

SEQ ID NO: 1192813 - RNA, 18 nt, Human
aauuuccugggagcuuuu

SEQ ID NO: 1192814 - RNA, 21 nt, Human
aauuuccugggagcuuuugua

SEQ ID NO: 1192815 - RNA, 13 nt, Human
acaaaauggaaua

SEQ ID NO: 1192816 - RNA, 14 nt, Human
acaaaauggaauac

SEQ ID NO: 1192817 - RNA, 15 nt, Human
acaaaauggaauacu

SEQ ID NO: 1192818 - RNA, 23 nt, Human
acagaggacaguauuugugggga

SEQ ID NO: 1192819 - RNA, 20 nt, Human
acacguaaugaaacuuggau

SEQ ID NO: 1192820 - RNA, 22 nt, Human
acuaggugcccagaaugaggcu

SEQ ID NO: 1192821 - RNA, 18 nt, Human
aagagaagggcagggcug

SEQ ID NO: 1192822 - RNA, 20 nt, Human
aagauucaaugccccugaau

SEQ ID NO: 1192823 - RNA, 21 nt, Human
aagauucaaugccccugaauu

SEQ ID NO: 1192824 - RNA, 16 nt, Human
aagauacugaaauaaa

SEQ ID NO: 1192825 - RNA, 20 nt, Human
aagauacugaaauaaacguc

SEQ ID NO: 1192826 - RNA, 19 nt, Human
aauacgugggcauucaaau

SEQ ID NO: 1192827 - RNA, 20 nt, Human
aauacgugggcauucaaaug

SEQ ID NO: 1192828 - RNA, 15 nt, Human
aauaaacgucuuaaa

SEQ ID NO: 1192829 - RNA, 16 nt, Human
aauaaacgucuuaaau

SEQ ID NO: 1192830 - RNA, 15 nt, Human
aacucauauuuucau

SEQ ID NO: 1192831 - RNA, 16 nt, Human
aacucauauuuucaug

SEQ ID NO: 1192832 - RNA, 18 nt, Human
aacucauauuuucaugcu

SEQ ID NO: 1192833 - RNA, 13 nt, Human
aacugagcuugga

SEQ ID NO: 1192834 - RNA, 17 nt, Human
aacugagcuuggaagcu

SEQ ID NO: 1192835 - RNA, 21 nt, Human
aacugagcuuggaagcuucug

SEQ ID NO: 1192836 - RNA, 20 nt, Human
aacagcggcuggacuuggag

SEQ ID NO: 1192837 - RNA, 14 nt, Human
aaagauaaauauua

SEQ ID NO: 1192838 - RNA, 15 nt, Human
aaagauaaauauuau

SEQ ID NO: 1192839 - RNA, 13 nt, Human
aaagaggugugca

SEQ ID NO: 1192840 - RNA, 16 nt, Human
aaagauaaauauuaua

SEQ ID NO: 1192841 - RNA, 15 nt, Human
aaagccaagaggcug

SEQ ID NO: 1192842 - RNA, 17 nt, Human
aaauaaacgucuuaaau

SEQ ID NO: 1192843 - RNA, 15 nt, Human
aaauaaacgucuuaa

SEQ ID NO: 1192844 - RNA, 16 nt, Human
aaauaaacgucuuaaa

SEQ ID NO: 1192845 - RNA, 10 nt, Human
agagggcugc

SEQ ID NO: 1192846 - RNA, 15 nt, Human
agagccugagaguga

SEQ ID NO: 1192847 - RNA, 22 nt, Human
agaagucacauuccugaacagg

SEQ ID NO: 1192848 - RNA, 20 nt, Human
agaagucacauuccugaaca

SEQ ID NO: 1192849 - RNA, 21 nt, Human
agaagucacauuccugaacag

SEQ ID NO: 1192850 - RNA, 18 nt, Human
agaugaugaaaauauuua

SEQ ID NO: 1192851 - RNA, 23 nt, Human
agaugaugaaaauauuuaaaggc

SEQ ID NO: 1192852 - RNA, 22 nt, Human
aggaacugcugggcuuggcagc

SEQ ID NO: 1192853 - RNA, 16 nt, Human
aggaaccgaggcaggg

SEQ ID NO: 1192854 - RNA, 13 nt, Human
aggaaccaaagcg

SEQ ID NO: 1192855 - RNA, 15 nt, Human
aggaaccaaagcgaa

SEQ ID NO: 1192856 - RNA, 16 nt, Human
aggaaccauaaucaau

SEQ ID NO: 1192857 - RNA, 19 nt, Human
agcuaauucuuugaccugu

SEQ ID NO: 1192858 - RNA, 16 nt, Human
agcuccuuaaggcucu

SEQ ID NO: 1192859 - RNA, 17 nt, Human
agcuccuuaaggcucuu

SEQ ID NO: 1192860 - RNA, 18 nt, Human
agcuccuuaaggcucuuu

SEQ ID NO: 1192861 - RNA, 16 nt, Human
agggaugguguucaaa

SEQ ID NO: 1192862 - RNA, 12 nt, Human
aggggcaggagg

SEQ ID NO: 1192863 - RNA, 13 nt, Human
aggggcaggagga

SEQ ID NO: 1192864 - RNA, 18 nt, Human
aggggcaggaggaagggg

SEQ ID NO: 1192865 - RNA, 16 nt, Human
augaugggucaguugu

SEQ ID NO: 1192866 - RNA, 19 nt, Human
augaugaaaauauuuaaag

SEQ ID NO: 1192867 - RNA, 13 nt, Human
augaugaaaauau

SEQ ID NO: 1192868 - RNA, 15 nt, Human
augaugaaaauauuu

SEQ ID NO: 1192869 - RNA, 16 nt, Human
augugaacagcggcug

SEQ ID NO: 1192870 - RNA, 11 nt, Human
augugaacagu

SEQ ID NO: 1192871 - RNA, 17 nt, Human
auguguaagacaaaaag

SEQ ID NO: 1192872 - RNA, 19 nt, Human
auguguaagacaaaaagcu

SEQ ID NO: 1192873 - RNA, 19 nt, Human
auccagagucccugccugg

SEQ ID NO: 1192874 - RNA, 20 nt, Human
auccagagucccugccugga

SEQ ID NO: 1192875 - RNA, 21 nt, Human
auccagagucccugccuggac

SEQ ID NO: 1192876 - RNA, 21 nt, Human
auauuucccugaaggaaccaa

SEQ ID NO: 1192877 - RNA, 13 nt, Human
augaaaauauuua

SEQ ID NO: 1192878 - RNA, 14 nt, Human
augaaaauauuuaa

SEQ ID NO: 1192879 - RNA, 16 nt, Human
augaaaauauuuaaag

SEQ ID NO: 1192880 - RNA, 20 nt, Human
augagggucuugguuccagc

SEQ ID NO: 1192881 - RNA, 13 nt, Human
augagggucuugg

SEQ ID NO: 1192882 - RNA, 22 nt, Human
aucucugcaggaaauggcugug

SEQ ID NO: 1192883 - RNA, 14 nt, Human
aucuauauuuuaca

SEQ ID NO: 1192884 - RNA, 20 nt, Human
aucuccgucaacucauauuu

SEQ ID NO: 1192885 - RNA, 16 nt, Human
agucugagagaggcca

SEQ ID NO: 1192886 - RNA, 23 nt, Human
agucugagagaggccauucuuuc

SEQ ID NO: 1192887 - RNA, 14 nt, Human
aguauuuuguuuca

SEQ ID NO: 1192888 - RNA, 17 nt, Human
aguauuuuguuucagug

SEQ ID NO: 1192889 - RNA, 13 nt, Human
aguucagcuuggg

SEQ ID NO: 1192890 - RNA, 14 nt, Human
aguucagcuugggg

SEQ ID NO: 1192891 - RNA, 12 nt, Human
agugucuggcug

SEQ ID NO: 1192892 - RNA, 13 nt, Human
agugucuggcugc

SEQ ID NO: 1192893 - RNA, 14 nt, Human
agugucuggcugca

SEQ ID NO: 1192894 - RNA, 16 nt, Human
aguuuggcaaacucuc

SEQ ID NO: 1192895 - RNA, 18 nt, Human
aguuuggcaaacucucca

SEQ ID NO: 1192896 - RNA, 13 nt, Human
auacagaaaaguu

SEQ ID NO: 1192897 - RNA, 17 nt, Human
auaugcagauuuugccc

SEQ ID NO: 1192898 - RNA, 19 nt, Human
auauuucccugaaggaacc

SEQ ID NO: 1192899 - RNA, 18 nt, Human
auauauuuuuuucugaaa

SEQ ID NO: 1192900 - RNA, 19 nt, Human
auauauuuuuuucugaaau

SEQ ID NO: 1192901 - RNA, 24 nt, Human
auagguuuggacaaaauggaauac

SEQ ID NO: 1192902 - RNA, 13 nt, Human
uguguaugugggg

SEQ ID NO: 1192903 - RNA, 12 nt, Human
uguguauguggg

SEQ ID NO: 1192904 - RNA, 11 nt, Human
uguguaugugg

SEQ ID NO: 1192905 - RNA, 15 nt, Human
ugugugggagugugu

SEQ ID NO: 1192906 - RNA, 14 nt, Human
ugugugggagugug

SEQ ID NO: 1192907 - RNA, 13 nt, Human
ugugugcucucca

SEQ ID NO: 1192908 - RNA, 16 nt, Human
ugugugggagugugua

SEQ ID NO: 1192909 - RNA, 13 nt, Human
uguguuugaagca

SEQ ID NO: 1192910 - RNA, 16 nt, Human
uguucuuuugucccag

SEQ ID NO: 1192911 - RNA, 20 nt, Human
uguucaugaaagauucaaug

SEQ ID NO: 1192912 - RNA, 13 nt, Human
uguucaugaaaga

SEQ ID NO: 1192913 - RNA, 14 nt, Human
uguucaugaaagau

SEQ ID NO: 1192914 - RNA, 12 nt, Human
uguuuacagugu

SEQ ID NO: 1192915 - RNA, 16 nt, Human
uguuuagaagaagugu

SEQ ID NO: 1192916 - RNA, 18 nt, Human
uguguaauuuaaaauugu

SEQ ID NO: 1192917 - RNA, 11 nt, Human
uguguaauuua

SEQ ID NO: 1192918 - RNA, 23 nt, Human
uguguaauuuaaaauugugaugu

SEQ ID NO: 1192919 - RNA, 22 nt, Human
uguguaauuuaaaauugugaug

SEQ ID NO: 1192920 - RNA, 19 nt, Human
uguguaauuuaaaauugug

SEQ ID NO: 1192921 - RNA, 15 nt, Human
ugugggaguguguaa

SEQ ID NO: 1192922 - RNA, 14 nt, Human
ugugggagugugua

SEQ ID NO: 1192923 - RNA, 15 nt, Human
uguggaagugugggu

SEQ ID NO: 1192924 - RNA, 15 nt, Human
uguggccuaaccugc

SEQ ID NO: 1192925 - RNA, 16 nt, Human
ugugccuuuugccauc

SEQ ID NO: 1192926 - RNA, 17 nt, Human
ugugccuuggugugcug

SEQ ID NO: 1192927 - RNA, 17 nt, Human
ugugccuugucacgcca

SEQ ID NO: 1192928 - RNA, 19 nt, Human
ugugccuugucacgccaga

SEQ ID NO: 1192929 - RNA, 20 nt, Human
ugugccuugucacgccagac

SEQ ID NO: 1192930 - RNA, 17 nt, Human
ugucuggcacagccugg

SEQ ID NO: 1192931 - RNA, 14 nt, Human
uguaccucugccuc

SEQ ID NO: 1192932 - RNA, 14 nt, Human
uguagcauccugga

SEQ ID NO: 1192933 - RNA, 16 nt, Human
uguagcauccuggaau

SEQ ID NO: 1192934 - RNA, 17 nt, Human
uguagcauccuggaaua

SEQ ID NO: 1192935 - RNA, 18 nt, Human
uguagcauccuggaauau

SEQ ID NO: 1192936 - RNA, 22 nt, Human
ugucacccuuaggccagcacca

SEQ ID NO: 1192937 - RNA, 14 nt, Human
ugucacgccagacu

SEQ ID NO: 1192938 - RNA, 21 nt, Human
uguccucagccccgcguggaa

SEQ ID NO: 1192939 - RNA, 11 nt, Human
ugggggaugua

SEQ ID NO: 1192940 - RNA, 18 nt, Human
ugggggucuguguguuua

SEQ ID NO: 1192941 - RNA, 20 nt, Human
uggggauugggccccugcca

SEQ ID NO: 1192942 - RNA, 20 nt, Human
uggguggggggcuucauaca

SEQ ID NO: 1192943 - RNA, 21 nt, Human
uggguggggggcuucauacac

SEQ ID NO: 1192944 - RNA, 21 nt, Human
ugggagugaggaugucugggc

SEQ ID NO: 1192945 - RNA, 21 nt, Human
ugggacaccccgacuuuuguu

SEQ ID NO: 1192946 - RNA, 14 nt, Human
ugggagauguggaa

SEQ ID NO: 1192947 - RNA, 20 nt, Human
uggaaugaugggucaguugu

SEQ ID NO: 1192948 - RNA, 18 nt, Human
uggaacucgugucuggca

SEQ ID NO: 1192949 - RNA, 16 nt, Human
uggaauaucuccguca

SEQ ID NO: 1192950 - RNA, 17 nt, Human
uggaaacaagucaguca

SEQ ID NO: 1192951 - RNA, 18 nt, Human
ugccaggauggaaugaug

SEQ ID NO: 1192952 - RNA, 17 nt, Human
ugcccacccuccacucu

SEQ ID NO: 1192953 - RNA, 12 nt, Human
ugcaccggggcc

SEQ ID NO: 1192954 - RNA, 16 nt, Human
ugcaccggggccuggg

SEQ ID NO: 1192955 - RNA, 22 nt, Human
ugcaccggggccugggcaggag

SEQ ID NO: 1192956 - RNA, 22 nt, Human
ugcagagcagugggccuggcca

SEQ ID NO: 1192957 - RNA, 11 nt, Human
ugcagagcugc

SEQ ID NO: 1192958 - RNA, 19 nt, Human
ugcucagugucuggcugca

SEQ ID NO: 1192959 - RNA, 17 nt, Human
ugcucuccaagcccagu

SEQ ID NO: 1192960 - RNA, 22 nt, Human
ugaagagaagggcagggcugag

SEQ ID NO: 1192961 - RNA, 20 nt, Human
ugaagagaagggcagggcug

SEQ ID NO: 1192962 - RNA, 20 nt, Human
ugaagagguuuuaaagcuuc

SEQ ID NO: 1192963 - RNA, 21 nt, Human
ugaagagguuuuaaagcuucc

SEQ ID NO: 1192964 - RNA, 16 nt, Human
ugaaggaaccaaagcg

SEQ ID NO: 1192965 - RNA, 16 nt, Human
ugaauuuaaauagcuu

SEQ ID NO: 1192966 - RNA, 14 nt, Human
ugacucuuuccaac

SEQ ID NO: 1192967 - RNA, 16 nt, Human
ugacucuuuccaaccg

SEQ ID NO: 1192968 - RNA, 13 nt, Human
ugacucuuuccaa

SEQ ID NO: 1192969 - RNA, 19 nt, Human
ugacucuuuccaaccggcu

SEQ ID NO: 1192970 - RNA, 13 nt, Human
ugaggcagguccc

SEQ ID NO: 1192971 - RNA, 22 nt, Human
ucuucauuaccucagugagaag

SEQ ID NO: 1192972 - RNA, 13 nt, Human
ucugugugugugu

SEQ ID NO: 1192973 - RNA, 11 nt, Human
ucugugugugu

SEQ ID NO: 1192974 - RNA, 18 nt, Human
ucuugaacugagcuugga

SEQ ID NO: 1192975 - RNA, 17 nt, Human
ucuugaacugagcuugg

SEQ ID NO: 1192976 - RNA, 19 nt, Human
ucuuuccaaccggcuuugu

SEQ ID NO: 1192977 - RNA, 18 nt, Human
ucuggugaccuuccaaga

SEQ ID NO: 1192978 - RNA, 23 nt, Human
ucuggugaccuuccaagagccug

SEQ ID NO: 1192979 - RNA, 16 nt, Human
ucuggugaccuuccaa

SEQ ID NO: 1192980 - RNA, 15 nt, Human
ucuggcugcagagca

SEQ ID NO: 1192981 - RNA, 19 nt, Human
uccugucccucauccauag

SEQ ID NO: 1192982 - RNA, 13 nt, Human
ucuauauuuuaca

SEQ ID NO: 1192983 - RNA, 16 nt, Human
uccucgagaucccaac

SEQ ID NO: 1192984 - RNA, 23 nt, Human
uccucgagaucccaacacugcca

SEQ ID NO: 1192985 - RNA, 23 nt, Human
ucccaugagcuccuuaaggcucu

SEQ ID NO: 1192986 - RNA, 18 nt, Human
ucccucuacugggagccu

SEQ ID NO: 1192987 - RNA, 22 nt, Human
ucccucuacugggagccuaccc

SEQ ID NO: 1192988 - RNA, 23 nt, Human
ucccucuacugggagccuaccca

SEQ ID NO: 1192989 - RNA, 16 nt, Human
ucccaacacugccagc

SEQ ID NO: 1192990 - RNA, 14 nt, Human
ucccaacacugcca

SEQ ID NO: 1192991 - RNA, 15 nt, Human
ucccaacacugccag

SEQ ID NO: 1192992 - RNA, 15 nt, Human
uccagagucccugcc

SEQ ID NO: 1192993 - RNA, 22 nt, Human
uccaagcccaguucagcuuggg

SEQ ID NO: 1192994 - RNA, 13 nt, Human
uccaagagccuga

SEQ ID NO: 1192995 - RNA, 14 nt, Human
uccaagagccugag

SEQ ID NO: 1192996 - RNA, 20 nt, Human
ucagaucauuaucagccugu

SEQ ID NO: 1192997 - RNA, 17 nt, Human
ucagauaugauucaaau

SEQ ID NO: 1192998 - RNA, 18 nt, Human
ucagauaugauucaaaug

SEQ ID NO: 1192999 - RNA, 23 nt, Human
ucagccuccauccuacccccugu

SEQ ID NO: 1193000 - RNA, 14 nt, Human
ucaucuuucuucca

SEQ ID NO: 1193001 - RNA, 17 nt, Human
ucaucuuucuuccaaac

SEQ ID NO: 1193002 - RNA, 15 nt, Human
ucaugaaagauucaa

SEQ ID NO: 1193003 - RNA, 13 nt, Human
ucaugaaagauuc

SEQ ID NO: 1193004 - RNA, 14 nt, Human
ucaguucucuucac

SEQ ID NO: 1193005 - RNA, 17 nt, Human
ucaguucucuucacuca

SEQ ID NO: 1193006 - RNA, 20 nt, Human
uauauuuguaaauuuaugug

SEQ ID NO: 1193007 - RNA, 16 nt, Human
uauauuuuuuucugaa

SEQ ID NO: 1193008 - RNA, 19 nt, Human
uauauuuuuuucugaaauu

SEQ ID NO: 1193009 - RNA, 20 nt, Human
uauauuuuuuucugaaauuu

SEQ ID NO: 1193010 - RNA, 22 nt, Human
uauaaacaugcuugcauuauau

SEQ ID NO: 1193011 - RNA, 18 nt, Human
uauaaaccgaacugaugu

SEQ ID NO: 1193012 - RNA, 13 nt, Human
uagcauccuggaa

SEQ ID NO: 1193013 - RNA, 15 nt, Human
uagcauccuggaaua

SEQ ID NO: 1193014 - RNA, 16 nt, Human
uagcauccuggaauau

SEQ ID NO: 1193015 - RNA, 18 nt, Human
uagcauccuggaauaucu

SEQ ID NO: 1193016 - RNA, 23 nt, Human
uacauggcuggagcuagaauuug

SEQ ID NO: 1193017 - RNA, 21 nt, Human
uacauggcuggagcuagaauu

SEQ ID NO: 1193018 - RNA, 22 nt, Human
uaagugccaggauggaaugaug

SEQ ID NO: 1193019 - RNA, 23 nt, Human
uaauaaucauuggauucugagag

SEQ ID NO: 1193020 - RNA, 13 nt, Human
uaaauuuauguga

SEQ ID NO: 1193021 - RNA, 13 nt, Human
uaaauucuuucau

SEQ ID NO: 1193022 - RNA, 16 nt, Human
guuuagaagaagugug

SEQ ID NO: 1193023 - RNA, 22 nt, Human
guugugugugggaguguguaau

SEQ ID NO: 1193024 - RNA, 16 nt, Human
guugugugugggagug

SEQ ID NO: 1193025 - RNA, 14 nt, Human
guugugugugggag

SEQ ID NO: 1193026 - RNA, 13 nt, Human
guuguguguggga

SEQ ID NO: 1193027 - RNA, 12 nt, Human
guuguguguggg

SEQ ID NO: 1193028 - RNA, 19 nt, Human
guugucugcaacucugaag

SEQ ID NO: 1193029 - RNA, 17 nt, Human
guuguccucagccccgc

SEQ ID NO: 1193030 - RNA, 23 nt, Human
guuguccucagccccgcguggaa

SEQ ID NO: 1193031 - RNA, 21 nt, Human
uaaaggcccuaucuguuuaca

SEQ ID NO: 1193032 - RNA, 17 nt, Human
uaaaagauaaauauuau

SEQ ID NO: 1193033 - RNA, 12 nt, Human
guucugccagga

SEQ ID NO: 1193034 - RNA, 13 nt, Human
guucugccaggag

SEQ ID NO: 1193035 - RNA, 14 nt, Human
guucugccaggaga

SEQ ID NO: 1193036 - RNA, 18 nt, Human
guugaagagguuuuaaag

SEQ ID NO: 1193037 - RNA, 16 nt, Human
guuccuagccaccgcc

SEQ ID NO: 1193038 - RNA, 15 nt, Human
guuccagccugccac

SEQ ID NO: 1193039 - RNA, 14 nt, Human
guuccagcaccaca

SEQ ID NO: 1193040 - RNA, 13 nt, Human
guuccagccugcc

SEQ ID NO: 1193041 - RNA, 14 nt, Human
guuccagccugcca

SEQ ID NO: 1193042 - RNA, 12 nt, Human
guucaugaaaga

SEQ ID NO: 1193043 - RNA, 20 nt, Human
guucacucuuggagccugca

SEQ ID NO: 1193044 - RNA, 24 nt, Human
guucacucuuggagccugcagagc

SEQ ID NO: 1193045 - RNA, 17 nt, Human
guucacucuuggagccu

SEQ ID NO: 1193046 - RNA, 18 nt, Human
guucacucuuggagccug

SEQ ID NO: 1193047 - RNA, 19 nt, Human
guucacucuuggagccugc

SEQ ID NO: 1193048 - RNA, 16 nt, Human
guuacccaaauuaaga

SEQ ID NO: 1193049 - RNA, 17 nt, Human
guguguuguguguggga

SEQ ID NO: 1193050 - RNA, 14 nt, Human
guguguugugugug

SEQ ID NO: 1193051 - RNA, 12 nt, Human
guguguugugug

SEQ ID NO: 1193052 - RNA, 16 nt, Human
guguguuuaugugugu

SEQ ID NO: 1193053 - RNA, 15 nt, Human
guguguuuaugugug

SEQ ID NO: 1193054 - RNA, 14 nt, Human
guguguuuaugugu

SEQ ID NO: 1193055 - RNA, 17 nt, Human
gugugggaguguguaau

SEQ ID NO: 1193056 - RNA, 17 nt, Human
gugucuggcacagccug

SEQ ID NO: 1193057 - RNA, 14 nt, Human
gugucuggcugcag

SEQ ID NO: 1193058 - RNA, 21 nt, Human
guguccugcaccggggccugg

SEQ ID NO: 1193059 - RNA, 17 nt, Human
guuaaacucgcucacug

SEQ ID NO: 1193060 - RNA, 23 nt, Human
guguaauuuaaaauugugaugug

SEQ ID NO: 1193061 - RNA, 22 nt, Human
guguaauuuaaaauugugaugu

SEQ ID NO: 1193062 - RNA, 20 nt, Human
guguaauuuaaaauugugau

SEQ ID NO: 1193063 - RNA, 18 nt, Human
guggucuccacuggggau

SEQ ID NO: 1193064 - RNA, 17 nt, Human
guguaagacaaaaagcu

SEQ ID NO: 1193065 - RNA, 21 nt, Human
guggggagagacgggcccugg

SEQ ID NO: 1193066 - RNA, 15 nt, Human
gugggcauucaaaug

SEQ ID NO: 1193067 - RNA, 13 nt, Human
gugggccuggcca

SEQ ID NO: 1193068 - RNA, 17 nt, Human
guggcuggaucugugag

SEQ ID NO: 1193069 - RNA, 16 nt, Human
guggcucgggaggcga

SEQ ID NO: 1193070 - RNA, 21 nt, Human
gugccaggauggaaugauggg

SEQ ID NO: 1193071 - RNA, 14 nt, Human
gugccuuuugccau

SEQ ID NO: 1193072 - RNA, 15 nt, Human
gugaggaugucuggg

SEQ ID NO: 1193073 - RNA, 21 nt, Human
gugacuauggagcugagcagg

SEQ ID NO: 1193074 - RNA, 21 nt, Human
gugaccuuccaagagccugag

SEQ ID NO: 1193075 - RNA, 22 nt, Human
gugaccuuccaagagccugaga

SEQ ID NO: 1193076 - RNA, 22 nt, Human
gucuguguguuuaugugugugu

SEQ ID NO: 1193077 - RNA, 21 nt, Human
gucuguguguuuaugugugug

SEQ ID NO: 1193078 - RNA, 11 nt, Human
gucuguguguu

SEQ ID NO: 1193079 - RNA, 20 nt, Human
gucuguguguguguaugugg

SEQ ID NO: 1193080 - RNA, 16 nt, Human
gucuguguguguguau

SEQ ID NO: 1193081 - RNA, 12 nt, Human
gucugugugugu

SEQ ID NO: 1193082 - RNA, 11 nt, Human
gucugugugug

SEQ ID NO: 1193083 - RNA, 13 nt, Human
gucugagagaggc

SEQ ID NO: 1193084 - RNA, 14 nt, Human
gucugagagaggcc

SEQ ID NO: 1193085 - RNA, 15 nt, Human
gucugagagaggcca

SEQ ID NO: 1193086 - RNA, 18 nt, Human
gucugagagaggccauuc

SEQ ID NO: 1193087 - RNA, 16 nt, Human
gucuugguuccagccu

SEQ ID NO: 1193088 - RNA, 17 nt, Human
gucuugguuccagccug

SEQ ID NO: 1193089 - RNA, 19 nt, Human
gucuugguuccagccugcc

SEQ ID NO: 1193090 - RNA, 14 nt, Human
gucccugccuggac

SEQ ID NO: 1193091 - RNA, 13 nt, Human
gucccugccugga

SEQ ID NO: 1193092 - RNA, 16 nt, Human
gucccugaagagaagg

SEQ ID NO: 1193093 - RNA, 18 nt, Human
gucccugaggcagguccc

SEQ ID NO: 1193094 - RNA, 22 nt, Human
gucccugaggcagguccccaga

SEQ ID NO: 1193095 - RNA, 22 nt, Human
gucagcugggacaccccgacuu

SEQ ID NO: 1193096 - RNA, 21 nt, Human
gucauucagauaugauucaaa

SEQ ID NO: 1193097 - RNA, 14 nt, Human
guagguugggagaa

SEQ ID NO: 1193098 - RNA, 19 nt, Human
guagugauuuuuaugccac

SEQ ID NO: 1193099 - RNA, 21 nt, Human
guagcauuuguguugaagagg

SEQ ID NO: 1193100 - RNA, 16 nt, Human
guagcauccuggaaua

SEQ ID NO: 1193101 - RNA, 23 nt, Human
uuuuucucugauacagaaaaguu

SEQ ID NO: 1193102 - RNA, 20 nt, Human
uuuuaaaagaugcaauguag

SEQ ID NO: 1193103 - RNA, 17 nt, Human
uuugaauguaugcuuca

SEQ ID NO: 1193104 - RNA, 22 nt, Human
uuugaauguaugcuucauacag

SEQ ID NO: 1193105 - RNA, 19 nt, Human
uuugguuuucacauuggaa

SEQ ID NO: 1193106 - RNA, 19 nt, Human
uuuggacaaaauggaauac

SEQ ID NO: 1193107 - RNA, 18 nt, Human
uuugaagcacagugauca

SEQ ID NO: 1193108 - RNA, 15 nt, Human
uuucucugauacaga

SEQ ID NO: 1193109 - RNA, 16 nt, Human
uuucucugauacagaa

SEQ ID NO: 1193110 - RNA, 17 nt, Human
uuucucugauacagaaa

SEQ ID NO: 1193111 - RNA, 18 nt, Human
uuucucugauacagaaaa

SEQ ID NO: 1193112 - RNA, 21 nt, Human
uuucugaaauuuccugggagc

SEQ ID NO: 1193113 - RNA, 12 nt, Human
gcgcggcuggga

SEQ ID NO: 1193114 - RNA, 18 nt, Human
gcgcggcugggaggaggg

SEQ ID NO: 1193115 - RNA, 17 nt, Human
gcuaagaauauuugaau

SEQ ID NO: 1193116 - RNA, 18 nt, Human
gccuuuggacuugucccg

SEQ ID NO: 1193117 - RNA, 15 nt, Human
gccugccacucaggc

SEQ ID NO: 1193118 - RNA, 23 nt, Human
gccugccacucaggcccaaagcc

SEQ ID NO: 1193119 - RNA, 19 nt, Human
gccucucauuccagaggaa

SEQ ID NO: 1193120 - RNA, 20 nt, Human
gccuccuacagcccaccugg

SEQ ID NO: 1193121 - RNA, 20 nt, Human
gccucucauuccagaggaag

SEQ ID NO: 1193122 - RNA, 21 nt, Human
gccucuccacucaugugacuc

SEQ ID NO: 1193123 - RNA, 24 nt, Human
gccucuccacucaugugacucuuu

SEQ ID NO: 1193124 - RNA, 17 nt, Human
gccuaaccugccgagag

SEQ ID NO: 1193125 - RNA, 21 nt, Human
gccaucauguuuacagaggac

SEQ ID NO: 1193126 - RNA, 17 nt, Human
gccaucauguuuacaga

SEQ ID NO: 1193127 - RNA, 16 nt, Human
gccagucccugaggca

SEQ ID NO: 1193128 - RNA, 22 nt, Human
gccagucccugaggcagguccc

SEQ ID NO: 1193129 - RNA, 16 nt, Human
gcccagaaugaggcug

SEQ ID NO: 1193130 - RNA, 17 nt, Human
gcccagaaugaggcugc

SEQ ID NO: 1193131 - RNA, 15 nt, Human
gcccgggagcucagg

SEQ ID NO: 1193132 - RNA, 17 nt, Human
gcccgggagcucaggaa

SEQ ID NO: 1193133 - RNA, 19 nt, Human
gcccgggagcucaggaacc

SEQ ID NO: 1193134 - RNA, 16 nt, Human
gccccugagaucucug

SEQ ID NO: 1193135 - RNA, 20 nt, Human
gccccugagaucucugcagg

SEQ ID NO: 1193136 - RNA, 18 nt, Human
gcauuauauuuguaaauu

SEQ ID NO: 1193137 - RNA, 19 nt, Human
gcauucaaauguauuacag

SEQ ID NO: 1193138 - RNA, 16 nt, Human
gcauuuguguugaaga

SEQ ID NO: 1193139 - RNA, 19 nt, Human
gcaggggccgggggcaguc

SEQ ID NO: 1193140 - RNA, 20 nt, Human
gcaggggccgggggcagucu

SEQ ID NO: 1193141 - RNA, 13 nt, Human
gcagguccccaga

SEQ ID NO: 1193142 - RNA, 14 nt, Human
gcagguccccagac

SEQ ID NO: 1193143 - RNA, 23 nt, Human
gauugcaggagucccugccauca

SEQ ID NO: 1193144 - RNA, 20 nt, Human
gauuuggggcucagaguggg

SEQ ID NO: 1193145 - RNA, 23 nt, Human
gauuugcucagugucuggcugca

SEQ ID NO: 1193146 - RNA, 17 nt, Human
gauuccagguggcauca

SEQ ID NO: 1193147 - RNA, 22 nt, Human
gcaaauccuugugggaaaagaa

SEQ ID NO: 1193148 - RNA, 20 nt, Human
gcaaauccuugugggaaaag

SEQ ID NO: 1193149 - RNA, 21 nt, Human
gaucugugaggggcucucuca

SEQ ID NO: 1193150 - RNA, 23 nt, Human
gaucucagugguuaagauuccua

SEQ ID NO: 1193151 - RNA, 14 nt, Human
gaugaaaauauuua

SEQ ID NO: 1193152 - RNA, 15 nt, Human
gaugaaaauauuuaa

SEQ ID NO: 1193153 - RNA, 16 nt, Human
gaugaaaauauuuaaa

SEQ ID NO: 1193154 - RNA, 17 nt, Human
gaugaaaauauuuaaag

SEQ ID NO: 1193155 - RNA, 20 nt, Human
gauggcaaagaaggagagca

SEQ ID NO: 1193156 - RNA, 13 nt, Human
gauagaugugugg

SEQ ID NO: 1193157 - RNA, 11 nt, Human
gauacagaaaa

SEQ ID NO: 1193158 - RNA, 15 nt, Human
gauaaauauuauauu

SEQ ID NO: 1193159 - RNA, 22 nt, Human
gauaaauauuauauuauauaua

SEQ ID NO: 1193160 - RNA, 14 nt, Human
gaucauuaucagcc

SEQ ID NO: 1193161 - RNA, 17 nt, Human
gaucccaugagcuccuu

SEQ ID NO: 1193162 - RNA, 21 nt, Human
gaucaaguuauuuuuaauuug

SEQ ID NO: 1193163 - RNA, 20 nt, Human
gagcucaggaaccgaggcag

SEQ ID NO: 1193164 - RNA, 21 nt, Human
gagcucaggaaccgaggcagg

SEQ ID NO: 1193165 - RNA, 22 nt, Human
gagcucaggaaccgaggcaggg

SEQ ID NO: 1193166 - RNA, 14 nt, Human
gagcuuuuguagaa

SEQ ID NO: 1193167 - RNA, 21 nt, Human
gagccugacccucaucuuucu

SEQ ID NO: 1193168 - RNA, 15 nt, Human
gagccuacccacccc

SEQ ID NO: 1193169 - RNA, 17 nt, Human
gagccuacccaccccca

SEQ ID NO: 1193170 - RNA, 22 nt, Human
gagaagccagcuuuccucauca

SEQ ID NO: 1193171 - RNA, 18 nt, Human
gacuugucccgggacacc

SEQ ID NO: 1193172 - RNA, 13 nt, Human
gagagaggccauu

SEQ ID NO: 1193173 - RNA, 21 nt, Human
gagagaggccauucuuuccca

SEQ ID NO: 1193174 - RNA, 15 nt, Human
gagagugagguggaa

SEQ ID NO: 1193175 - RNA, 17 nt, Human
gaccuuuccugaggaag

SEQ ID NO: 1193176 - RNA, 15 nt, Human
gacaccuaggcuagg

SEQ ID NO: 1193177 - RNA, 16 nt, Human
gacaccuaggcuaggg

SEQ ID NO: 1193178 - RNA, 20 nt, Human
gacaccuaggcuaggguggg

SEQ ID NO: 1193179 - RNA, 13 nt, Human
gaagaaguguguc

SEQ ID NO: 1193180 - RNA, 21 nt, Human
gaaggaucccaugagcuccuu

SEQ ID NO: 1193181 - RNA, 21 nt, Human
gaagucacauuccugaacagg

SEQ ID NO: 1193182 - RNA, 16 nt, Human
gaagucacauuccuga

SEQ ID NO: 1193183 - RNA, 20 nt, Human
gaagucacauuccugaacag

SEQ ID NO: 1193184 - RNA, 23 nt, Human
gaaggaaccaaagcgaauuuuaa

SEQ ID NO: 1193185 - RNA, 22 nt, Human
gaagcuucuggugaccuuccaa

SEQ ID NO: 1193186 - RNA, 20 nt, Human
gaacaguuguguuugaagca

SEQ ID NO: 1193187 - RNA, 17 nt, Human
gaacaggauauucucac

SEQ ID NO: 1193188 - RNA, 22 nt, Human
gaacaguuguguuugaagcaca

SEQ ID NO: 1193189 - RNA, 20 nt, Human
gaaccaaagcgaauuuuaaa

SEQ ID NO: 1193190 - RNA, 23 nt, Human
gaaccaaagcgaauuuuaaaaga

SEQ ID NO: 1193191 - RNA, 21 nt, Human
gaaauuuccugggagcuuuug

SEQ ID NO: 1193192 - RNA, 14 nt, Human
gaaauaaacgucuu

SEQ ID NO: 1193193 - RNA, 16 nt, Human
gaaauaaacgucuuaa

SEQ ID NO: 1193194 - RNA, 17 nt, Human
gaaauaaacgucuuaaa

SEQ ID NO: 1193195 - RNA, 18 nt, Human
gaaauaaacgucuuaaau

SEQ ID NO: 1193196 - RNA, 21 nt, Human
gaaauaaacgucuuaaauauu

SEQ ID NO: 1193197 - RNA, 12 nt, Human
cuuuggacuugu

SEQ ID NO: 1193198 - RNA, 16 nt, Human
cuuuucuuucuaccaa

SEQ ID NO: 1193199 - RNA, 13 nt, Human
cuuucuuccaaac

SEQ ID NO: 1193200 - RNA, 19 nt, Human
cuuucuuccaaacaggcuc

SEQ ID NO: 1193201 - RNA, 22 nt, Human
cuuucuuccaaacaggcucaga

SEQ ID NO: 1193202 - RNA, 21 nt, Human
cuuuccacuccuccuagccac

SEQ ID NO: 1193203 - RNA, 23 nt, Human
cuuuccaaagccaaugugaacag

SEQ ID NO: 1193204 - RNA, 18 nt, Human
cuuuccacuccuccuagc

SEQ ID NO: 1193205 - RNA, 23 nt, Human
cuugucacgccagacuucccacg

SEQ ID NO: 1193206 - RNA, 20 nt, Human
cuuggggaguuuaggguggg

SEQ ID NO: 1193207 - RNA, 21 nt, Human
cuuggggaguuuagggugggg

SEQ ID NO: 1193208 - RNA, 13 nt, Human
cuuggagccugca

SEQ ID NO: 1193209 - RNA, 15 nt, Human
cuuggagccugcaga

SEQ ID NO: 1193210 - RNA, 16 nt, Human
cuuggagccugcagag

SEQ ID NO: 1193211 - RNA, 17 nt, Human
cuuggagccugcagagc

SEQ ID NO: 1193212 - RNA, 18 nt, Human
cuuggagccugcagagcu

SEQ ID NO: 1193213 - RNA, 19 nt, Human
cuuggagccugcagagcug

SEQ ID NO: 1193214 - RNA, 20 nt, Human
cuuggagccugcagagcugc

SEQ ID NO: 1193215 - RNA, 17 nt, Human
cuugaacugagcuugga

SEQ ID NO: 1193216 - RNA, 19 nt, Human
cuugaacugagcuuggaag

SEQ ID NO: 1193217 - RNA, 14 nt, Human
cuguaccucugccu

SEQ ID NO: 1193218 - RNA, 12 nt, Human
cuggucagccca

SEQ ID NO: 1193219 - RNA, 13 nt, Human
cuggucagcccaa

SEQ ID NO: 1193220 - RNA, 19 nt, Human
cugggaggagggcaggcau

SEQ ID NO: 1193221 - RNA, 16 nt, Human
cugggagccuacccac

SEQ ID NO: 1193222 - RNA, 19 nt, Human
cugggagccuacccacccc

SEQ ID NO: 1193223 - RNA, 22 nt, Human
cugggagccuacccacccccag

SEQ ID NO: 1193224 - RNA, 18 nt, Human
cuggcuguggccuaaccu

SEQ ID NO: 1193225 - RNA, 23 nt, Human
cuggcacagccuggcuguggccu

SEQ ID NO: 1193226 - RNA, 16 nt, Human
cuggcacagccuggcu

SEQ ID NO: 1193227 - RNA, 21 nt, Human
cuggcacagccuggcuguggc

SEQ ID NO: 1193228 - RNA, 11 nt, Human
cugccaggaga

SEQ ID NO: 1193229 - RNA, 17 nt, Human
cugccagacccccugga

SEQ ID NO: 1193230 - RNA, 19 nt, Human
cugccagacccccuggaga

SEQ ID NO: 1193231 - RNA, 19 nt, Human
cugcccgggagcucaggaa

SEQ ID NO: 1193232 - RNA, 15 nt, Human
cugcucugugcccac

SEQ ID NO: 1193233 - RNA, 23 nt, Human
cucuuggggaguuuagggugggg

SEQ ID NO: 1193234 - RNA, 13 nt, Human
cugaaauuuccug

SEQ ID NO: 1193235 - RNA, 23 nt, Human
cugaaauuuccugggagcuuuug

SEQ ID NO: 1193236 - RNA, 16 nt, Human
cugaaauuuccuggga

SEQ ID NO: 1193237 - RNA, 21 nt, Human
cugaaauaaacgucuuaaaua

SEQ ID NO: 1193238 - RNA, 22 nt, Human
cucugugcccacccuccacucu

SEQ ID NO: 1193239 - RNA, 14 nt, Human
cugaggcagguccc

SEQ ID NO: 1193240 - RNA, 17 nt, Human
cugaggcagguccccag

SEQ ID NO: 1193241 - RNA, 18 nt, Human
cugaggcagguccccaga

SEQ ID NO: 1193242 - RNA, 19 nt, Human
cugaggcagguccccagac

SEQ ID NO: 1193243 - RNA, 15 nt, Human
cucuccugucucccu

SEQ ID NO: 1193244 - RNA, 17 nt, Human
cucuccugucucccucc

SEQ ID NO: 1193245 - RNA, 18 nt, Human
cucuccugucucccuccu

SEQ ID NO: 1193246 - RNA, 22 nt, Human
cucuccacucaugugacucuuu

SEQ ID NO: 1193247 - RNA, 21 nt, Human
cucuccacucaugugacucuu

SEQ ID NO: 1193248 - RNA, 18 nt, Human
cucuacugggagccuacc

SEQ ID NO: 1193249 - RNA, 21 nt, Human
cucuacugggagccuacccac

SEQ ID NO: 1193250 - RNA, 17 nt, Human
cuccucgagaucccaac

SEQ ID NO: 1193251 - RNA, 21 nt, Human
cuccucgagaucccaacacug

SEQ ID NO: 1193252 - RNA, 24 nt, Human
cuccucgagaucccaacacugcca

SEQ ID NO: 1193253 - RNA, 23 nt, Human
cuccauccuacccccugugccuu

SEQ ID NO: 1193254 - RNA, 20 nt, Human
cuccauccuacccccugugc

SEQ ID NO: 1193255 - RNA, 22 nt, Human
cuccauccuacccccugugccu

SEQ ID NO: 1193256 - RNA, 18 nt, Human
cuccauccuacccccugu

SEQ ID NO: 1193257 - RNA, 14 nt, Human
cuacccccugugcc

SEQ ID NO: 1193258 - RNA, 22 nt, Human
cuacuuauuguagcauccugga

SEQ ID NO: 1193259 - RNA, 20 nt, Human
cuaucuguuuacaguguucc

SEQ ID NO: 1193260 - RNA, 21 nt, Human
cuaucuguuuacaguguuccg

SEQ ID NO: 1193261 - RNA, 22 nt, Human
cuaggacugaauuaugaaacuu

SEQ ID NO: 1193262 - RNA, 16 nt, Human
cguuguccucagcccc

SEQ ID NO: 1193263 - RNA, 23 nt, Human
cguggcuguggcauccagagucc

SEQ ID NO: 1193264 - RNA, 22 nt, Human
cgggucaucuguaccucugccu

SEQ ID NO: 1193265 - RNA, 15 nt, Human
cgggucaucuguacc

SEQ ID NO: 1193266 - RNA, 17 nt, Human
cgggggcagucugagag

SEQ ID NO: 1193267 - RNA, 18 nt, Human
cgggggcagucugagaga

SEQ ID NO: 1193268 - RNA, 21 nt, Human
cgggggcagucugagagaggc

SEQ ID NO: 1193269 - RNA, 17 nt, Human
cggggccugggcaggag

SEQ ID NO: 1193270 - RNA, 19 nt, Human
cggggccugggcaggaggg

SEQ ID NO: 1193271 - RNA, 12 nt, Human
cggcugggagga

SEQ ID NO: 1193272 - RNA, 17 nt, Human
cgggagccugacccuca

SEQ ID NO: 1193273 - RNA, 18 nt, Human
cggcugggaggagggcag

SEQ ID NO: 1193274 - RNA, 15 nt, Human
cggcuggacuuggag

SEQ ID NO: 1193275 - RNA, 20 nt, Human
caguggcuggaucugugagg

SEQ ID NO: 1193276 - RNA, 18 nt, Human
caguggcuggaucuguga

SEQ ID NO: 1193277 - RNA, 16 nt, Human
caguggcuggaucugu

SEQ ID NO: 1193278 - RNA, 11 nt, Human
cagugguuaag

SEQ ID NO: 1193279 - RNA, 17 nt, Human
cagugucuggcugcaga

SEQ ID NO: 1193280 - RNA, 19 nt, Human
cagugucuggcugcagagc

SEQ ID NO: 1193281 - RNA, 16 nt, Human
caguucucuucacuca

SEQ ID NO: 1193282 - RNA, 18 nt, Human
caguguuccgugguuaaa

SEQ ID NO: 1193283 - RNA, 18 nt, Human
cauaaucacaacccuuca

SEQ ID NO: 1193284 - RNA, 19 nt, Human
cauaaauuuaguauuuugu

SEQ ID NO: 1193285 - RNA, 20 nt, Human
cauaaauuuaguauuuuguu

SEQ ID NO: 1193286 - RNA, 15 nt, Human
cauaccuggcccugu

SEQ ID NO: 1193287 - RNA, 12 nt, Human
cauauuuucaug

SEQ ID NO: 1193288 - RNA, 22 nt, Human
cauuaccucagugagaagccag

SEQ ID NO: 1193289 - RNA, 21 nt, Human
cauuaccucagugagaagcca

SEQ ID NO: 1193290 - RNA, 20 nt, Human
cauggugacuuuugaaaaga

SEQ ID NO: 1193291 - RNA, 19 nt, Human
cauggggcugauuguauuu

SEQ ID NO: 1193292 - RNA, 21 nt, Human
cauggagauagccccacagga

SEQ ID NO: 1193293 - RNA, 16 nt, Human
ccaagagccugagagu

SEQ ID NO: 1193294 - RNA, 12 nt, Human
ccaagaggcugc

SEQ ID NO: 1193295 - RNA, 13 nt, Human
ccaagaggcugca

SEQ ID NO: 1193296 - RNA, 14 nt, Human
ccaagaggcugcag

SEQ ID NO: 1193297 - RNA, 12 nt, Human
ccaagagccuga

SEQ ID NO: 1193298 - RNA, 22 nt, Human
ccaucauguuuacagaggacag

SEQ ID NO: 1193299 - RNA, 20 nt, Human
ccaucauguuuacagaggac

SEQ ID NO: 1193300 - RNA, 21 nt, Human
cccagcuaugguucucucgca

SEQ ID NO: 1193301 - RNA, 16 nt, Human
cccaggaccccugagu

SEQ ID NO: 1193302 - RNA, 17 nt, Human
ccuccauccuacccccu

SEQ ID NO: 1193303 - RNA, 22 nt, Human
ccuccauccuacccccugugcc

SEQ ID NO: 1193304 - RNA, 23 nt, Human
ccuccauccuacccccugugccu

SEQ ID NO: 1193305 - RNA, 13 nt, Human
ccuccacucuccu

SEQ ID NO: 1193306 - RNA, 14 nt, Human
ccucuacugggagc

SEQ ID NO: 1193307 - RNA, 18 nt, Human
ccucagccccgcguggaa

SEQ ID NO: 1193308 - RNA, 14 nt, Human
ccucacacucaccc

SEQ ID NO: 1193309 - RNA, 22 nt, Human
ccuaucuguuuacaguguuccg

SEQ ID NO: 1193310 - RNA, 13 nt, Human
ccgggagcucagg

SEQ ID NO: 1193311 - RNA, 15 nt, Human
ccgggagcucaggaa

SEQ ID NO: 1193312 - RNA, 15 nt, Human
ccggggccugggcag

SEQ ID NO: 1193313 - RNA, 19 nt, Human
ccggggccugggcaggagg

SEQ ID NO: 1193314 - RNA, 17 nt, Human
ccggcuuuguggcacug

SEQ ID NO: 1193315 - RNA, 19 nt, Human
ccggcuuuguggcacuggg

SEQ ID NO: 1193316 - RNA, 13 nt, Human
cccuggugguuca

SEQ ID NO: 1193317 - RNA, 15 nt, Human
ccuacagcccaccug

SEQ ID NO: 1193318 - RNA, 20 nt, Human
cccugccaucauguuuacag

SEQ ID NO: 1193319 - RNA, 17 nt, Human
cccucuacugggagccu

SEQ ID NO: 1193320 - RNA, 20 nt, Human
cccucuacugggagccuacc

SEQ ID NO: 1193321 - RNA, 12 nt, Human
cccugccuggac

SEQ ID NO: 1193322 - RNA, 13 nt, Human
cccugccuggacc

SEQ ID NO: 1193323 - RNA, 18 nt, Human
cccugccuggaccagccu

SEQ ID NO: 1193324 - RNA, 14 nt, Human
cccucaucuuucuu

SEQ ID NO: 1193325 - RNA, 19 nt, Human
cccucauuggcucuugaac

SEQ ID NO: 1193326 - RNA, 23 nt, Human
cccucccucuacugggagccuac

SEQ ID NO: 1193327 - RNA, 23 nt, Human
ccccacaggagguggucugggac

SEQ ID NO: 1193328 - RNA, 16 nt, Human
caccccgacuuuuguu

SEQ ID NO: 1193329 - RNA, 16 nt, Human
caccagaagcccagaa

SEQ ID NO: 1193330 - RNA, 17 nt, Human
caccagaagcccagaau

SEQ ID NO: 1193331 - RNA, 13 nt, Human
caccagaagccca

SEQ ID NO: 1193332 - RNA, 14 nt, Human
caccagaagcccag

SEQ ID NO: 1193333 - RNA, 15 nt, Human
caccagaagcccaga

SEQ ID NO: 1193334 - RNA, 22 nt, Human
caccaagccuggucagcccaaa

SEQ ID NO: 1193335 - RNA, 17 nt, Human
cacauuggaaacaaguc

SEQ ID NO: 1193336 - RNA, 19 nt, Human
caccaagccuggucagccc

SEQ ID NO: 1193337 - RNA, 20 nt, Human
caccaagccuggucagccca

SEQ ID NO: 1193338 - RNA, 21 nt, Human
caccaagccuggucagcccaa

SEQ ID NO: 1193339 - RNA, 22 nt, Human
cacauggugacuuuugaaaaga

SEQ ID NO: 1193340 - RNA, 16 nt, Human
cacauuccugaacagg

SEQ ID NO: 1193341 - RNA, 21 nt, Human
caacucugaaggguaauuaua

SEQ ID NO: 1193342 - RNA, 20 nt, Human
caaauacgugggcauucaaa

SEQ ID NO: 1193343 - RNA, 16 nt, Human
aguggcuggaucugug

SEQ ID NO: 1193344 - RNA, 18 nt, Human
aguucauaaauuuauggu

SEQ ID NO: 1193345 - RNA, 16 nt, Human
aguuguguuugaagca

SEQ ID NO: 1193346 - RNA, 14 nt, Human
auagguuuggacaa

SEQ ID NO: 1193347 - RNA, 18 nt, Human
auagguuuggacaaaaug

SEQ ID NO: 1193348 - RNA, 14 nt, Human
aucagccugugcca

SEQ ID NO: 1193349 - RNA, 19 nt, Human
augagcuccuuaaggcucu

SEQ ID NO: 1193350 - RNA, 17 nt, Human
aucuauauuuuacauaa

SEQ ID NO: 1193351 - RNA, 21 nt, Human
aucuauauuuuacauaaauuu

SEQ ID NO: 1193352 - RNA, 16 nt, Human
auggcuguggagugug

SEQ ID NO: 1193353 - RNA, 21 nt, Human
augugaacaguuguguuugaa

SEQ ID NO: 1193354 - RNA, 23 nt, Human
augugaacaguuguguuugaagc

SEQ ID NO: 1193355 - RNA, 20 nt, Human
agaggacaguauuugugggg

SEQ ID NO: 1193356 - RNA, 17 nt, Human
agagggaugcauggaga

SEQ ID NO: 1193357 - RNA, 14 nt, Human
agccgggagccuga

SEQ ID NO: 1193358 - RNA, 18 nt, Human
agcagugggccuggccag

SEQ ID NO: 1193359 - RNA, 21 nt, Human
aggagucccugccaucauguu

SEQ ID NO: 1193360 - RNA, 14 nt, Human
agcugcuccccacg

SEQ ID NO: 1193361 - RNA, 17 nt, Human
agcugcuccccacguca

SEQ ID NO: 1193362 - RNA, 21 nt, Human
agcuucuggugaccuuccaag

SEQ ID NO: 1193363 - RNA, 22 nt, Human
agcuucuggugaccuuccaaga

SEQ ID NO: 1193364 - RNA, 14 nt, Human
agcugagcaggugu

SEQ ID NO: 1193365 - RNA, 22 nt, Human
agcuccuuaaggcucuuuugua

SEQ ID NO: 1193366 - RNA, 17 nt, Human
agguggaauuauuuuaa

SEQ ID NO: 1193367 - RNA, 21 nt, Human
agguggaauuauuuuaaaaga

SEQ ID NO: 1193368 - RNA, 13 nt, Human
acccccugugccu

SEQ ID NO: 1193369 - RNA, 11 nt, Human
acacugccagc

SEQ ID NO: 1193370 - RNA, 16 nt, Human
accugccgagagucca

SEQ ID NO: 1193371 - RNA, 23 nt, Human
accugccgagaguccaucagccu

SEQ ID NO: 1193372 - RNA, 14 nt, Human
acggaacucaaaua

SEQ ID NO: 1193373 - RNA, 15 nt, Human
acucauauuuucaug

SEQ ID NO: 1193374 - RNA, 16 nt, Human
acucaggcccaaagcc

SEQ ID NO: 1193375 - RNA, 17 nt, Human
acucagcccucauuggc

SEQ ID NO: 1193376 - RNA, 21 nt, Human
acucagcccucauuggcucuu

SEQ ID NO: 1193377 - RNA, 12 nt, Human
acugccagcauu

SEQ ID NO: 1193378 - RNA, 14 nt, Human
acuuuuggaaggua

SEQ ID NO: 1193379 - RNA, 15 nt, Human
aaugucaguaugugg

SEQ ID NO: 1193380 - RNA, 13 nt, Human
aaugucaguaugu

SEQ ID NO: 1193381 - RNA, 13 nt, Human
aauacucuuauau

SEQ ID NO: 1193382 - RNA, 13 nt, Human
aagggagggggag

SEQ ID NO: 1193383 - RNA, 13 nt, Human
aagauacugaaau

SEQ ID NO: 1193384 - RNA, 14 nt, Human
aagauacugaaaua

SEQ ID NO: 1193385 - RNA, 21 nt, Human
aagcugugugcucuccaagcc

SEQ ID NO: 1193386 - RNA, 13 nt, Human
aaauucuuucauu

SEQ ID NO: 1193387 - RNA, 18 nt, Human
aaccaccagaagcccaga

SEQ ID NO: 1193388 - RNA, 19 nt, Human
aaccaccagaagcccagaa

SEQ ID NO: 1193389 - RNA, 21 nt, Human
aaccgaacugauguaaguaaa

SEQ ID NO: 1193390 - RNA, 13 nt, Human
aaagauaaauauu

SEQ ID NO: 1193391 - RNA, 13 nt, Human
aaaaguugaauuu

SEQ ID NO: 1193392 - RNA, 15 nt, Human
aaagccaaugugaac

SEQ ID NO: 1193393 - RNA, 17 nt, Human
aaagccaaugugaacag

SEQ ID NO: 1193394 - RNA, 17 nt, Human
aaauagcuuuuuucucu

SEQ ID NO: 1193395 - RNA, 20 nt, Human
aaauagcuuuuuucucugau

SEQ ID NO: 1193396 - RNA, 12 nt, Human
auuccagaggaa

SEQ ID NO: 1193397 - RNA, 12 nt, Human
auuuuucucaug

SEQ ID NO: 1193398 - RNA, 16 nt, Human
auuuuguuucagugca

SEQ ID NO: 1193399 - RNA, 15 nt, Human
auuuugcccuugaca

SEQ ID NO: 1193400 - RNA, 23 nt, Human
auuuugcccuugacaaagucaag

SEQ ID NO: 1193401 - RNA, 19 nt, Human
auuuguaaauuuaugugau

SEQ ID NO: 1193402 - RNA, 18 nt, Human
auuuguaaauuuauguga

SEQ ID NO: 1193403 - RNA, 20 nt, Human
auuuuaaaagauaaauauua

SEQ ID NO: 1193404 - RNA, 20 nt, Human
auuuuaaaagaugcaaugua

SEQ ID NO: 1193405 - RNA, 16 nt, Human
auuucccuuccuuccu

SEQ ID NO: 1193406 - RNA, 20 nt, Human
auuucccuuccuuccucucc

SEQ ID NO: 1193407 - RNA, 18 nt, Human
auuucuaggacugaauua

SEQ ID NO: 1193408 - RNA, 17 nt, Human
auuucccugaaggaacc

SEQ ID NO: 1193409 - RNA, 23 nt, Human
auuucccugaaggaaccaaagcg

SEQ ID NO: 1193410 - RNA, 20 nt, Human
auuucuaggacugaauuaug

SEQ ID NO: 1193411 - RNA, 23 nt, Human
auuucuaggacugaauuaugaaa

SEQ ID NO: 1193412 - RNA, 13 nt, Human
auuggaaacaagu

SEQ ID NO: 1193413 - RNA, 23 nt, Human
auuggguggggggcuucauacac

SEQ ID NO: 1193414 - RNA, 19 nt, Human
auuggauucugagagcugu

SEQ ID NO: 1193415 - RNA, 22 nt, Human
auuggauucugagagcugugca

SEQ ID NO: 1193416 - RNA, 20 nt, Human
auggggauagauguguggac

SEQ ID NO: 1193417 - RNA, 16 nt, Human
augguucucaggccug

SEQ ID NO: 1193418 - RNA, 19 nt, Human
augguguucaaaaaacuug

SEQ ID NO: 1193419 - RNA, 21 nt, Human
augugacucuuuccaaccggc

SEQ ID NO: 1193420 - RNA, 12 nt, Human
augugacucuuu

SEQ ID NO: 1193421 - RNA, 16 nt, Human
augugacucuuuccaa

SEQ ID NO: 1193422 - RNA, 22 nt, Human
auguauuacaguggggaaugaa

SEQ ID NO: 1193423 - RNA, 14 nt, Human
auguaugcuucaua

SEQ ID NO: 1193424 - RNA, 15 nt, Human
auguaugcuucauac

SEQ ID NO: 1193425 - RNA, 16 nt, Human
auguaugcuucauaca

SEQ ID NO: 1193426 - RNA, 19 nt, Human
auguagaggggaaaagaga

SEQ ID NO: 1193427 - RNA, 23 nt, Human
augcuguucaugaaagauucaau

SEQ ID NO: 1193428 - RNA, 19 nt, Human
augcuguucaugaaagauu

SEQ ID NO: 1193429 - RNA, 17 nt, Human
augcuguucaugaaaga

SEQ ID NO: 1193430 - RNA, 22 nt, Human
augcagauuuugcccuugacaa

SEQ ID NO: 1193431 - RNA, 16 nt, Human
aucaggccauuguccc

SEQ ID NO: 1193432 - RNA, 13 nt, Human
aucaggccauugu

SEQ ID NO: 1193433 - RNA, 13 nt, Human
uucuaggacugaa

SEQ ID NO: 1193434 - RNA, 14 nt, Human
uucuaggacugaau

SEQ ID NO: 1193435 - RNA, 16 nt, Human
uucuaggacugaauua

SEQ ID NO: 1193436 - RNA, 23 nt, Human
uucuaggacugaauuaugaaacu

SEQ ID NO: 1193437 - RNA, 15 nt, Human
uuccugaacaggaua

SEQ ID NO: 1193438 - RNA, 14 nt, Human
auccuacccccugu

SEQ ID NO: 1193439 - RNA, 16 nt, Human
auccuacccccugugc

SEQ ID NO: 1193440 - RNA, 19 nt, Human
auccauagcaccuccacau

SEQ ID NO: 1193441 - RNA, 13 nt, Human
uucugccaggaga

SEQ ID NO: 1193442 - RNA, 23 nt, Human
uuggggacaggggcaggaggaag

SEQ ID NO: 1193443 - RNA, 15 nt, Human
augaagauacugaaa

SEQ ID NO: 1193444 - RNA, 15 nt, Human
aucuguuuacagugu

SEQ ID NO: 1193445 - RNA, 17 nt, Human
aucuguuuacaguguuc

SEQ ID NO: 1193446 - RNA, 22 nt, Human
uugauuaagaucucagugguua

SEQ ID NO: 1193447 - RNA, 18 nt, Human
auaaucacaacccuucag

SEQ ID NO: 1193448 - RNA, 17 nt, Human
uuacaguggggaaugaa

SEQ ID NO: 1193449 - RNA, 13 nt, Human
uuacaguguuccg

SEQ ID NO: 1193450 - RNA, 22 nt, Human
uuaagagagucuauuuacggaa

SEQ ID NO: 1193451 - RNA, 16 nt, Human
uuaauuugguuuucac

SEQ ID NO: 1193452 - RNA, 14 nt, Human
auagauguguggac

SEQ ID NO: 1193453 - RNA, 13 nt, Human
auagaugugugga

SEQ ID NO: 1193454 - RNA, 12 nt, Human
auagaugugugg

SEQ ID NO: 1193455 - RNA, 11 nt, Human
auagaugugug

SEQ ID NO: 1193456 - RNA, 19 nt, Human
auagaaggcuauggggaua

SEQ ID NO: 1193457 - RNA, 14 nt, Human
auacucuuauaucu

SEQ ID NO: 1193458 - RNA, 18 nt, Human
auacucuuauaucuauau

SEQ ID NO: 1193459 - RNA, 14 nt, Human
uuaugugugugugu

SEQ ID NO: 1193460 - RNA, 12 nt, Human
uuaugugugugu

SEQ ID NO: 1193461 - RNA, 10 nt, Human
uuaugugugu

SEQ ID NO: 1193462 - RNA, 14 nt, Human
uuaugaaacuuuug

SEQ ID NO: 1193463 - RNA, 17 nt, Human
uuaugaaacuuuuggaa

SEQ ID NO: 1193464 - RNA, 18 nt, Human
uuaugaaacuuuuggaag

SEQ ID NO: 1193465 - RNA, 19 nt, Human
uuaugaaacuuuuggaagg

SEQ ID NO: 1193466 - RNA, 18 nt, Human
auacgugggcauucaaau

SEQ ID NO: 1193467 - RNA, 19 nt, Human
auacgugggcauucaaaug

SEQ ID NO: 1193468 - RNA, 16 nt, Human
auacagggaugguguu

SEQ ID NO: 1193469 - RNA, 18 nt, Human
uguguguuguguguggga

SEQ ID NO: 1193470 - RNA, 16 nt, Human
agugggguagguuggg

SEQ ID NO: 1193471 - RNA, 16 nt, Human
aguggggaaugaagau

SEQ ID NO: 1193472 - RNA, 21 nt, Human
aguggacuguucccugaggug

SEQ ID NO: 1193473 - RNA, 9 nt, Human
aguguguaa

SEQ ID NO: 1193474 - RNA, 16 nt, Human
aguguggcaguuuggc

SEQ ID NO: 1193475 - RNA, 17 nt, Human
aguguggcaguuuggca

SEQ ID NO: 1193476 - RNA, 21 nt, Human
aguguuccgugguuaaacucg

SEQ ID NO: 1193477 - RNA, 18 nt, Human
agugccaggauggaauga

SEQ ID NO: 1193478 - RNA, 17 nt, Human
agugcacuaauguguaa

SEQ ID NO: 1193479 - RNA, 21 nt, Human
agugcacuaauguguaagaca

SEQ ID NO: 1193480 - RNA, 14 nt, Human
agugaggaugucug

SEQ ID NO: 1193481 - RNA, 21 nt, Human
agugauuuuuaugccaccuga

SEQ ID NO: 1193482 - RNA, 16 nt, Human
agugauuuuuaugcca

SEQ ID NO: 1193483 - RNA, 20 nt, Human
agugauuuuuaugccaccug

SEQ ID NO: 1193484 - RNA, 19 nt, Human
ugugcucuccaagcccagu

SEQ ID NO: 1193485 - RNA, 14 nt, Human
ugugcucuccaagc

SEQ ID NO: 1193486 - RNA, 14 nt, Human
aguauuugugggga

SEQ ID NO: 1193487 - RNA, 15 nt, Human
agucuauuuacggaa

SEQ ID NO: 1193488 - RNA, 20 nt, Human
agucuauuuacggaacucaa

SEQ ID NO: 1193489 - RNA, 20 nt, Human
uguagugauuuuuaugccac

SEQ ID NO: 1193490 - RNA, 21 nt, Human
uguagugauuuuuaugccacc

SEQ ID NO: 1193491 - RNA, 14 nt, Human
aggugugcaagaga

SEQ ID NO: 1193492 - RNA, 17 nt, Human
uggcuguggcauccaga

SEQ ID NO: 1193493 - RNA, 20 nt, Human
uggcuguggccuaaccugcc

SEQ ID NO: 1193494 - RNA, 16 nt, Human
uggcuguggagugugg

SEQ ID NO: 1193495 - RNA, 15 nt, Human
uggcugcagagcagu

SEQ ID NO: 1193496 - RNA, 18 nt, Human
uggcugcagagcaguggg

SEQ ID NO: 1193497 - RNA, 22 nt, Human
uggcugcagagcagugggccug

SEQ ID NO: 1193498 - RNA, 16 nt, Human
uggcuaugagggccuu

SEQ ID NO: 1193499 - RNA, 14 nt, Human
ugggcauucaaaug

SEQ ID NO: 1193500 - RNA, 14 nt, Human
uggaaguguggguc

SEQ ID NO: 1193501 - RNA, 13 nt, Human
uggaagugugggu

SEQ ID NO: 1193502 - RNA, 20 nt, Human
uggaagugugggucugugug

SEQ ID NO: 1193503 - RNA, 17 nt, Human
uggacaaaauggaauac

SEQ ID NO: 1193504 - RNA, 14 nt, Human
uggacaaaauggaa

SEQ ID NO: 1193505 - RNA, 16 nt, Human
aggcagguccccagac

SEQ ID NO: 1193506 - RNA, 12 nt, Human
aggcaggucccc

SEQ ID NO: 1193507 - RNA, 13 nt, Human
aggcaggucccca

SEQ ID NO: 1193508 - RNA, 14 nt, Human
aggcagguccccag

SEQ ID NO: 1193509 - RNA, 15 nt, Human
aggcagguccccaga

SEQ ID NO: 1193510 - RNA, 11 nt, Human
aggcagguccc

SEQ ID NO: 1193511 - RNA, 11 nt, Human
uggagccugca

SEQ ID NO: 1193512 - RNA, 16 nt, Human
uggagccugcagagcu

SEQ ID NO: 1193513 - RNA, 18 nt, Human
aggcucagaggguguccu

SEQ ID NO: 1193514 - RNA, 19 nt, Human
aggcucagaggguguccug

SEQ ID NO: 1193515 - RNA, 20 nt, Human
aggcucagaggguguccugc

SEQ ID NO: 1193516 - RNA, 18 nt, Human
aggcgaagcguuguccuc

SEQ ID NO: 1193517 - RNA, 16 nt, Human
aggccugacucucagc

SEQ ID NO: 1193518 - RNA, 20 nt, Human
uggcauccagagucccugcc

SEQ ID NO: 1193519 - RNA, 21 nt, Human
uggcauccagagucccugccu

SEQ ID NO: 1193520 - RNA, 22 nt, Human
uggcauccagagucccugccug

SEQ ID NO: 1193521 - RNA, 14 nt, Human
aggccauucuuucc

SEQ ID NO: 1193522 - RNA, 15 nt, Human
aggccauucuuuccc

SEQ ID NO: 1193523 - RNA, 22 nt, Human
uggcacagccuggcuguggccu

SEQ ID NO: 1193524 - RNA, 15 nt, Human
agcuggggaugucuc

SEQ ID NO: 1193525 - RNA, 19 nt, Human
ugccuugugaaggaauuau

SEQ ID NO: 1193526 - RNA, 19 nt, Human
ugcucugugcccacccucc

SEQ ID NO: 1193527 - RNA, 19 nt, Human
agccugacccucaucuuuc

SEQ ID NO: 1193528 - RNA, 18 nt, Human
agccugccacucaggccc

SEQ ID NO: 1193529 - RNA, 12 nt, Human
agccugcagagc

SEQ ID NO: 1193530 - RNA, 13 nt, Human
agccugcagagcu

SEQ ID NO: 1193531 - RNA, 14 nt, Human
agccugcagagcug

SEQ ID NO: 1193532 - RNA, 15 nt, Human
agccugcagagcugc

SEQ ID NO: 1193533 - RNA, 20 nt, Human
agcggcuggaauuggguggg

SEQ ID NO: 1193534 - RNA, 17 nt, Human
agcggcuggacuuggag

SEQ ID NO: 1193535 - RNA, 11 nt, Human
ucuggcccuau

SEQ ID NO: 1193536 - RNA, 16 nt, Human
ucugauacagaaaagu

SEQ ID NO: 1193537 - RNA, 17 nt, Human
ucugauacagaaaaguu

SEQ ID NO: 1193538 - RNA, 22 nt, Human
acuuguuuuauuuaaccucuaa

SEQ ID NO: 1193539 - RNA, 15 nt, Human
ucuuggagccugcag

SEQ ID NO: 1193540 - RNA, 18 nt, Human
ucuuggagccugcagagc

SEQ ID NO: 1193541 - RNA, 19 nt, Human
ucuuggagccugcagagcu

SEQ ID NO: 1193542 - RNA, 12 nt, Human
ucuuggagccug

SEQ ID NO: 1193543 - RNA, 13 nt, Human
ucuuggagccugc

SEQ ID NO: 1193544 - RNA, 14 nt, Human
ucuuggagccugca

SEQ ID NO: 1193545 - RNA, 17 nt, Human
agaauuugauaugugaa

SEQ ID NO: 1193546 - RNA, 18 nt, Human
agaauuugauaugugaac

SEQ ID NO: 1193547 - RNA, 19 nt, Human
agaauuugauaugugaaca

SEQ ID NO: 1193548 - RNA, 20 nt, Human
agaauuugauaugugaacag

SEQ ID NO: 1193549 - RNA, 21 nt, Human
agaauuugauaugugaacagu

SEQ ID NO: 1193550 - RNA, 13 nt, Human
agaauuucuagga

SEQ ID NO: 1193551 - RNA, 21 nt, Human
agaauuucuaggacugaauua

SEQ ID NO: 1193552 - RNA, 20 nt, Human
agaauugucuuucugucucu

SEQ ID NO: 1193553 - RNA, 22 nt, Human
agagggacuguucuuuuguccc

SEQ ID NO: 1193554 - RNA, 18 nt, Human
agagucuauuuacggaac

SEQ ID NO: 1193555 - RNA, 23 nt, Human
agauuauauauauuuuuuucuga

SEQ ID NO: 1193556 - RNA, 21 nt, Human
agauucaaugccccugaauuu

SEQ ID NO: 1193557 - RNA, 22 nt, Human
agauucaaugccccugaauuua

SEQ ID NO: 1193558 - RNA, 17 nt, Human
ugacagguuugggaccc

SEQ ID NO: 1193559 - RNA, 22 nt, Human
ugagggugacuauggagcugag

SEQ ID NO: 1193560 - RNA, 17 nt, Human
ugaggaagagggacugu

SEQ ID NO: 1193561 - RNA, 15 nt, Human
agcacagugaucaag

SEQ ID NO: 1193562 - RNA, 16 nt, Human
acuggggcaggggccg

SEQ ID NO: 1193563 - RNA, 14 nt, Human
acuggggcaggggc

SEQ ID NO: 1193564 - RNA, 12 nt, Human
acugggagccua

SEQ ID NO: 1193565 - RNA, 23 nt, Human
acugggagccuacccacccccag

SEQ ID NO: 1193566 - RNA, 23 nt, Human
ucgagaucccaacacugccagca

SEQ ID NO: 1193567 - RNA, 12 nt, Human
ucgacacagagu

SEQ ID NO: 1193568 - RNA, 20 nt, Human
uccugcaccggggccugggc

SEQ ID NO: 1193569 - RNA, 21 nt, Human
uccugcaccggggccugggca

SEQ ID NO: 1193570 - RNA, 12 nt, Human
acugagcuugga

SEQ ID NO: 1193571 - RNA, 13 nt, Human
acugagcuuggaa

SEQ ID NO: 1193572 - RNA, 16 nt, Human
acugagcuuggaagcu

SEQ ID NO: 1193573 - RNA, 17 nt, Human
acugagcuuggaagcuu

SEQ ID NO: 1193574 - RNA, 21 nt, Human
acucuggagguuuguuuagaa

SEQ ID NO: 1193575 - RNA, 23 nt, Human
acucuuauaucuauauuuuacau

SEQ ID NO: 1193576 - RNA, 11 nt, Human
uccucagcccc

SEQ ID NO: 1193577 - RNA, 15 nt, Human
acucaugugacucuu

SEQ ID NO: 1193578 - RNA, 16 nt, Human
acucaugugacucuuu

SEQ ID NO: 1193579 - RNA, 17 nt, Human
acucaugugacucuuuc

SEQ ID NO: 1193580 - RNA, 18 nt, Human
acucaugugacucuuucc

SEQ ID NO: 1193581 - RNA, 22 nt, Human
ucaugauagaaggcuaugggga

SEQ ID NO: 1193582 - RNA, 18 nt, Human
accucuaaauucuuucau

SEQ ID NO: 1193583 - RNA, 21 nt, Human
ucauuggauucugagagcugu

SEQ ID NO: 1193584 - RNA, 21 nt, Human
accucuaaauucuuucauuuu

SEQ ID NO: 1193585 - RNA, 16 nt, Human
accgccuccuacagcc

SEQ ID NO: 1193586 - RNA, 18 nt, Human
accugaauaaagaaugaa

SEQ ID NO: 1193587 - RNA, 20 nt, Human
ucauuuuagggguagcauuu

SEQ ID NO: 1193588 - RNA, 18 nt, Human
uccaccaagccuggucag

SEQ ID NO: 1193589 - RNA, 22 nt, Human
uccaccaagccuggucagccca

SEQ ID NO: 1193590 - RNA, 23 nt, Human
uccaccaagccuggucagcccaa

SEQ ID NO: 1193591 - RNA, 11 nt, Human
uccagccugcc

SEQ ID NO: 1193592 - RNA, 17 nt, Human
accuuccaagagccuga

SEQ ID NO: 1193593 - RNA, 15 nt, Human
ucaggccgaaggagg

SEQ ID NO: 1193594 - RNA, 14 nt, Human
ucaggcccaaagcc

SEQ ID NO: 1193595 - RNA, 18 nt, Human
ucaggaaccgaggcaggg

SEQ ID NO: 1193596 - RNA, 15 nt, Human
acccuccacucuccu

SEQ ID NO: 1193597 - RNA, 22 nt, Human
acccagcuaugguucucucgca

SEQ ID NO: 1193598 - RNA, 16 nt, Human
ucagccccgcguggaa

SEQ ID NO: 1193599 - RNA, 16 nt, Human
acccccaggaccccug

SEQ ID NO: 1193600 - RNA, 22 nt, Human
accccuggcuccaggccagggg

SEQ ID NO: 1193601 - RNA, 19 nt, Human
accccuggcuccaggccag

SEQ ID NO: 1193602 - RNA, 20 nt, Human
accccuggcuccaggccagg

SEQ ID NO: 1193603 - RNA, 20 nt, Human
accagagaaaaagggagggg

SEQ ID NO: 1193604 - RNA, 22 nt, Human
uauguguguguguugugugugg

SEQ ID NO: 1193605 - RNA, 14 nt, Human
uauguguguguguu

SEQ ID NO: 1193606 - RNA, 11 nt, Human
uaugugugugu

SEQ ID NO: 1193607 - RNA, 23 nt, Human
uauguguguguguuguguguggg

SEQ ID NO: 1193608 - RNA, 23 nt, Human
uauuacaguggggaaugaagaua

SEQ ID NO: 1193609 - RNA, 11 nt, Human
acaguguuccg

SEQ ID NO: 1193610 - RNA, 14 nt, Human
uauuuaauagguuu

SEQ ID NO: 1193611 - RNA, 17 nt, Human
uauuuaaccucuaaauu

SEQ ID NO: 1193612 - RNA, 18 nt, Human
uauuuaaccucuaaauuc

SEQ ID NO: 1193613 - RNA, 17 nt, Human
uauuguagcauccugga

SEQ ID NO: 1193614 - RNA, 18 nt, Human
uauuguagcauccuggaa

SEQ ID NO: 1193615 - RNA, 20 nt, Human
uauuguagcauccuggaaua

SEQ ID NO: 1193616 - RNA, 21 nt, Human
uauuguagcauccuggaauau

SEQ ID NO: 1193617 - RNA, 21 nt, Human
acagacacucccacuuggcau

SEQ ID NO: 1193618 - RNA, 22 nt, Human
acagaguggacuguucccugag

SEQ ID NO: 1193619 - RNA, 18 nt, Human
uauggggauagaugugug

SEQ ID NO: 1193620 - RNA, 17 nt, Human
uauggggauagaugugu

SEQ ID NO: 1193621 - RNA, 19 nt, Human
uauggggauagaugugugg

SEQ ID NO: 1193622 - RNA, 12 nt, Human
acagccuggcug

SEQ ID NO: 1193623 - RNA, 15 nt, Human
acagcuccaagaauu

SEQ ID NO: 1193624 - RNA, 13 nt, Human
acagcccaccugg

SEQ ID NO: 1193625 - RNA, 20 nt, Human
acaccuaggcuagggugggg

SEQ ID NO: 1193626 - RNA, 23 nt, Human
acaccuaggcuaggguggggaga

SEQ ID NO: 1193627 - RNA, 21 nt, Human
uauauauuuuuuucugaaauu

SEQ ID NO: 1193628 - RNA, 22 nt, Human
uauauauuuuuuucugaaauuu

SEQ ID NO: 1193629 - RNA, 23 nt, Human
uauauauuuuuuucugaaauuuc

SEQ ID NO: 1193630 - RNA, 13 nt, Human
uaguucugccagg

SEQ ID NO: 1193631 - RNA, 14 nt, Human
uaguucugccagga

SEQ ID NO: 1193632 - RNA, 22 nt, Human
aauucuuugaccuguugggagu

SEQ ID NO: 1193633 - RNA, 18 nt, Human
aauucuuugaccuguugg

SEQ ID NO: 1193634 - RNA, 14 nt, Human
aauucuuucauuuu

SEQ ID NO: 1193635 - RNA, 20 nt, Human
uacucuuauaucuauauuuu

SEQ ID NO: 1193636 - RNA, 22 nt, Human
uacucuuauaucuauauuuuac

SEQ ID NO: 1193637 - RNA, 14 nt, Human
aauuuaugugaugg

SEQ ID NO: 1193638 - RNA, 19 nt, Human
aauuugauaugugaacagu

SEQ ID NO: 1193639 - RNA, 15 nt, Human
aauuugauaugugaa

SEQ ID NO: 1193640 - RNA, 16 nt, Human
aauuugauaugugaac

SEQ ID NO: 1193641 - RNA, 18 nt, Human
aauuugauaugugaacag

SEQ ID NO: 1193642 - RNA, 15 nt, Human
aauuuaaauagcuuu

SEQ ID NO: 1193643 - RNA, 16 nt, Human
aauuuaaauagcuuuu

SEQ ID NO: 1193644 - RNA, 19 nt, Human
uagcauuuguguugaagag

SEQ ID NO: 1193645 - RNA, 19 nt, Human
uagaauuugauaugugaac

SEQ ID NO: 1193646 - RNA, 23 nt, Human
uagaagucacauuccugaacagg

SEQ ID NO: 1193647 - RNA, 19 nt, Human
uaccagagaaaaagggagg

SEQ ID NO: 1193648 - RNA, 19 nt, Human
aaugugaacagcggcugga

SEQ ID NO: 1193649 - RNA, 15 nt, Human
aauguaugcuucaua

SEQ ID NO: 1193650 - RNA, 16 nt, Human
aauguaugcuucauac

SEQ ID NO: 1193651 - RNA, 17 nt, Human
aauguaugcuucauaca

SEQ ID NO: 1193652 - RNA, 12 nt, Human
aauguagagggg

SEQ ID NO: 1193653 - RNA, 20 nt, Human
uacaguggggaaugaagaua

SEQ ID NO: 1193654 - RNA, 16 nt, Human
guguuuaugugugugu

SEQ ID NO: 1193655 - RNA, 12 nt, Human
guguuuaugugu

SEQ ID NO: 1193656 - RNA, 13 nt, Human
guugaauuuuaca

SEQ ID NO: 1193657 - RNA, 21 nt, Human
guugggagaaugucaguaugu

SEQ ID NO: 1193658 - RNA, 14 nt, Human
guugggagaauguc

SEQ ID NO: 1193659 - RNA, 20 nt, Human
aagucacauuccugaacagg

SEQ ID NO: 1193660 - RNA, 17 nt, Human
aauaagugccaggaugg

SEQ ID NO: 1193661 - RNA, 12 nt, Human
uaaauagcuuuu

SEQ ID NO: 1193662 - RNA, 13 nt, Human
uaaacgucuuaaa

SEQ ID NO: 1193663 - RNA, 17 nt, Human
uaaacgucuuaaauauu

SEQ ID NO: 1193664 - RNA, 17 nt, Human
guguguguugugugugg

SEQ ID NO: 1193665 - RNA, 14 nt, Human
guguguguaugugg

SEQ ID NO: 1193666 - RNA, 13 nt, Human
guguguguaugug

SEQ ID NO: 1193667 - RNA, 20 nt, Human
gugguucacucuuggagccu

SEQ ID NO: 1193668 - RNA, 21 nt, Human
gugguucacucuuggagccug

SEQ ID NO: 1193669 - RNA, 15 nt, Human
aagaugcaauguaga

SEQ ID NO: 1193670 - RNA, 16 nt, Human
gugggggucugugugu

SEQ ID NO: 1193671 - RNA, 15 nt, Human
gugggggucugugug

SEQ ID NO: 1193672 - RNA, 14 nt, Human
gugggggucugugu

SEQ ID NO: 1193673 - RNA, 14 nt, Human
gugguggcucggga

SEQ ID NO: 1193674 - RNA, 20 nt, Human
aagagaugaugaaaauauuu

SEQ ID NO: 1193675 - RNA, 17 nt, Human
guggcacuggggcaggg

SEQ ID NO: 1193676 - RNA, 18 nt, Human
guggcacuggggcagggg

SEQ ID NO: 1193677 - RNA, 11 nt, Human
aagaauauuug

SEQ ID NO: 1193678 - RNA, 15 nt, Human
aagaauauuugaaug

SEQ ID NO: 1193679 - RNA, 16 nt, Human
aagacaaaaagcuacu

SEQ ID NO: 1193680 - RNA, 14 nt, Human
guggaagagggcug

SEQ ID NO: 1193681 - RNA, 17 nt, Human
guggaagagggcugcaa

SEQ ID NO: 1193682 - RNA, 20 nt, Human
guggaauuauuuuaaaagau

SEQ ID NO: 1193683 - RNA, 20 nt, Human
gugcacuaauguguaagaca

SEQ ID NO: 1193684 - RNA, 22 nt, Human
gugcacuaauguguaagacaaa

SEQ ID NO: 1193685 - RNA, 15 nt, Human
guccugcaccggggc

SEQ ID NO: 1193686 - RNA, 19 nt, Human
guccugcaccggggccugg

SEQ ID NO: 1193687 - RNA, 20 nt, Human
guccugcaccggggccuggg

SEQ ID NO: 1193688 - RNA, 15 nt, Human
guagagccagagguc

SEQ ID NO: 1193689 - RNA, 20 nt, Human
guaauuuaaaauugugaugu

SEQ ID NO: 1193690 - RNA, 19 nt, Human
guaauuuaaaauugugaug

SEQ ID NO: 1193691 - RNA, 23 nt, Human
guaauuuaaaauugugauguguc

SEQ ID NO: 1193692 - RNA, 22 nt, Human
ggugcuucuaguucugccagga

SEQ ID NO: 1193693 - RNA, 15 nt, Human
gguggaauuauuuua

SEQ ID NO: 1193694 - RNA, 14 nt, Human
ggguggggagagac

SEQ ID NO: 1193695 - RNA, 18 nt, Human
ggguggggagagacgggc

SEQ ID NO: 1193696 - RNA, 17 nt, Human
ggguggggggcuucaua

SEQ ID NO: 1193697 - RNA, 19 nt, Human
ggguggggggcuucauaca

SEQ ID NO: 1193698 - RNA, 19 nt, Human
aaacuuguaaauaaaggaa

SEQ ID NO: 1193699 - RNA, 19 nt, Human
aaagagaugaugaaaauau

SEQ ID NO: 1193700 - RNA, 20 nt, Human
aaagagaugaugaaaauauu

SEQ ID NO: 1193701 - RNA, 22 nt, Human
aaagagaugaugaaaauauuua

SEQ ID NO: 1193702 - RNA, 18 nt, Human
gggggcgcggcugggagg

SEQ ID NO: 1193703 - RNA, 13 nt, Human
aaacgucuuaaau

SEQ ID NO: 1193704 - RNA, 14 nt, Human
aaacgucuuaaaua

SEQ ID NO: 1193705 - RNA, 15 nt, Human
aaacgucuuaaauau

SEQ ID NO: 1193706 - RNA, 17 nt, Human
ggggccgggggcagucu

SEQ ID NO: 1193707 - RNA, 22 nt, Human
gggacaccuaggcuaggguggg

SEQ ID NO: 1193708 - RNA, 17 nt, Human
gggacaggggcaggagg

SEQ ID NO: 1193709 - RNA, 18 nt, Human
gggacaggggcaggagga

SEQ ID NO: 1193710 - RNA, 9 nt, Human
ggcuucaua

SEQ ID NO: 1193711 - RNA, 11 nt, Human
ggcuucauaca

SEQ ID NO: 1193712 - RNA, 12 nt, Human
ggcuucauacac

SEQ ID NO: 1193713 - RNA, 18 nt, Human
aaaagccaagaggcugca

SEQ ID NO: 1193714 - RNA, 14 nt, Human
ggcucagagugggg

SEQ ID NO: 1193715 - RNA, 20 nt, Human
ggcucagaggguguccugca

SEQ ID NO: 1193716 - RNA, 15 nt, Human
ggcagggcugaggcc

SEQ ID NO: 1193717 - RNA, 17 nt, Human
ggccagucccugaggca

SEQ ID NO: 1193718 - RNA, 23 nt, Human
ggccagucccugaggcagguccc

SEQ ID NO: 1193719 - RNA, 16 nt, Human
gcuucuaguucugcca

SEQ ID NO: 1193720 - RNA, 17 nt, Human
gcuucuaguucugccag

SEQ ID NO: 1193721 - RNA, 22 nt, Human
ggaagugugggucugugugugu

SEQ ID NO: 1193722 - RNA, 21 nt, Human
ggaagugugggucugugugug

SEQ ID NO: 1193723 - RNA, 12 nt, Human
ggaagugugggu

SEQ ID NO: 1193724 - RNA, 19 nt, Human
ggaaugaagauacugaaau

SEQ ID NO: 1193725 - RNA, 20 nt, Human
ggaacugcugggcuuggcag

SEQ ID NO: 1193726 - RNA, 16 nt, Human
gcucaggaaccgaggc

SEQ ID NO: 1193727 - RNA, 19 nt, Human
gcucaggaaccgaggcagg

SEQ ID NO: 1193728 - RNA, 20 nt, Human
gcucaggaaccgaggcaggg

SEQ ID NO: 1193729 - RNA, 21 nt, Human
gcucaggaaccgaggcaggga

SEQ ID NO: 1193730 - RNA, 14 nt, Human
gcuaugagggccuu

SEQ ID NO: 1193731 - RNA, 22 nt, Human
gcuaauucuuugaccuguuggg

SEQ ID NO: 1193732 - RNA, 17 nt, Human
gcucccccuccaccugc

SEQ ID NO: 1193733 - RNA, 18 nt, Human
gcucccccuccaccugcu

SEQ ID NO: 1193734 - RNA, 23 nt, Human
gccuccauccuacccccugugcc

SEQ ID NO: 1193735 - RNA, 17 nt, Human
gccucgacacagagugg

SEQ ID NO: 1193736 - RNA, 11 nt, Human
gccccugccag

SEQ ID NO: 1193737 - RNA, 16 nt, Human
gccccugccagacccc

SEQ ID NO: 1193738 - RNA, 18 nt, Human
gcauuucccuuccuuccu

SEQ ID NO: 1193739 - RNA, 12 nt, Human
gccaagaggcug

SEQ ID NO: 1193740 - RNA, 13 nt, Human
gccaagaggcugc

SEQ ID NO: 1193741 - RNA, 14 nt, Human
gccaagaggcugca

SEQ ID NO: 1193742 - RNA, 17 nt, Human
gccaagaggcugcagcc

SEQ ID NO: 1193743 - RNA, 15 nt, Human
gacccucaucuuucu

SEQ ID NO: 1193744 - RNA, 19 nt, Human
gacccucaucuuucuucca

SEQ ID NO: 1193745 - RNA, 20 nt, Human
gacccucaucuuucuuccaa

SEQ ID NO: 1193746 - RNA, 15 nt, Human
gacuauggagcugag

SEQ ID NO: 1193747 - RNA, 22 nt, Human
gacagguuugggaccccuggug

SEQ ID NO: 1193748 - RNA, 18 nt, Human
gacaggggcaggaggaag

SEQ ID NO: 1193749 - RNA, 20 nt, Human
gacaggggcaggaggaaggg

SEQ ID NO: 1193750 - RNA, 15 nt, Human
gagcagugggccugg

SEQ ID NO: 1193751 - RNA, 17 nt, Human
gagcagugggccuggcc

SEQ ID NO: 1193752 - RNA, 18 nt, Human
gagcagugggccuggcca

SEQ ID NO: 1193753 - RNA, 20 nt, Human
gagcugugcaucagcuagaa

SEQ ID NO: 1193754 - RNA, 19 nt, Human
cuucuaguucugccaggag

SEQ ID NO: 1193755 - RNA, 16 nt, Human
cuucuaguucugccag

SEQ ID NO: 1193756 - RNA, 17 nt, Human
cuucuaguucugccagg

SEQ ID NO: 1193757 - RNA, 18 nt, Human
cuucuaguucugccagga

SEQ ID NO: 1193758 - RNA, 20 nt, Human
cuugauuaagaucucagugg

SEQ ID NO: 1193759 - RNA, 14 nt, Human
cuuugaccuguugg

SEQ ID NO: 1193760 - RNA, 14 nt, Human
gaacugagcuugga

SEQ ID NO: 1193761 - RNA, 15 nt, Human
gaacugagcuuggaa

SEQ ID NO: 1193762 - RNA, 16 nt, Human
gaacugagcuuggaag

SEQ ID NO: 1193763 - RNA, 21 nt, Human
gaacugagcuuggaagcuucu

SEQ ID NO: 1193764 - RNA, 22 nt, Human
gaacugagcuuggaagcuucug

SEQ ID NO: 1193765 - RNA, 17 nt, Human
gaacugauguaaguaaa

SEQ ID NO: 1193766 - RNA, 18 nt, Human
gaaccccuggcuccaggc

SEQ ID NO: 1193767 - RNA, 22 nt, Human
gaaccccuggcuccaggccagg

SEQ ID NO: 1193768 - RNA, 17 nt, Human
gaagcacagugaucaag

SEQ ID NO: 1193769 - RNA, 18 nt, Human
gaaaucuaugauuccagg

SEQ ID NO: 1193770 - RNA, 20 nt, Human
gaaaucuaugauuccaggug

SEQ ID NO: 1193771 - RNA, 21 nt, Human
gaaacaagucagucauucaga

SEQ ID NO: 1193772 - RNA, 22 nt, Human
gaaaagaaaucuaugauuccag

SEQ ID NO: 1193773 - RNA, 16 nt, Human
cugugccuuuugccau

SEQ ID NO: 1193774 - RNA, 20 nt, Human
cugugccuugucacgccaga

SEQ ID NO: 1193775 - RNA, 15 nt, Human
cuuaggccagcacca

SEQ ID NO: 1193776 - RNA, 18 nt, Human
cugggaauaagugccagg

SEQ ID NO: 1193777 - RNA, 18 nt, Human
cuggccccugagaucucu

SEQ ID NO: 1193778 - RNA, 22 nt, Human
cuggccccugagaucucugcag

SEQ ID NO: 1193779 - RNA, 23 nt, Human
cuggccccugagaucucugcagg

SEQ ID NO: 1193780 - RNA, 17 nt, Human
cuggggaugucucucau

SEQ ID NO: 1193781 - RNA, 16 nt, Human
cuggggaugucucuca

SEQ ID NO: 1193782 - RNA, 17 nt, Human
cugccugguccucacac

SEQ ID NO: 1193783 - RNA, 19 nt, Human
cugccugguccucacacuc

SEQ ID NO: 1193784 - RNA, 23 nt, Human
cugccugguccucacacucaccc

SEQ ID NO: 1193785 - RNA, 13 nt, Human
cuggacuuggagg

SEQ ID NO: 1193786 - RNA, 17 nt, Human
caccuaggcuagggugg

SEQ ID NO: 1193787 - RNA, 21 nt, Human
caagucagucauucagauaug

SEQ ID NO: 1193788 - RNA, 19 nt, Human
auuuuagggguagcauuug

SEQ ID NO: 1193789 - RNA, 20 nt, Human
caagaauuucuaggacugaa

SEQ ID NO: 1193790 - RNA, 17 nt, Human
caacucauauuuucaug

SEQ ID NO: 1193791 - RNA, 16 nt, Human
auucaaaugucuauaa

SEQ ID NO: 1193792 - RNA, 19 nt, Human
cauccauggggcugauugu

SEQ ID NO: 1193793 - RNA, 15 nt, Human
caggccugacucuca

SEQ ID NO: 1193794 - RNA, 13 nt, Human
caggaggaagggg

SEQ ID NO: 1193795 - RNA, 12 nt, Human
caggaccccuga

SEQ ID NO: 1193796 - RNA, 14 nt, Human
caggaccccugagu

SEQ ID NO: 1193797 - RNA, 15 nt, Human
caggagguggucugg

SEQ ID NO: 1193798 - RNA, 18 nt, Human
cagucugagagaggccau

SEQ ID NO: 1193799 - RNA, 22 nt, Human
cagugcacuaauguguaagaca

SEQ ID NO: 1193800 - RNA, 15 nt, Human
cagguuugggacccc

SEQ ID NO: 1193801 - RNA, 18 nt, Human
cagguuugggaccccugg

SEQ ID NO: 1193802 - RNA, 23 nt, Human
cagguuugggaccccuggugguu

SEQ ID NO: 1193803 - RNA, 16 nt, Human
cagauaugauucaaau

SEQ ID NO: 1193804 - RNA, 17 nt, Human
cagauaugauucaaaug

SEQ ID NO: 1193805 - RNA, 19 nt, Human
cagauaugauucaaauguc

SEQ ID NO: 1193806 - RNA, 21 nt, Human
cagcagguccccagcuuuggc

SEQ ID NO: 1193807 - RNA, 19 nt, Human
cagcuccaagaauuucuag

SEQ ID NO: 1193808 - RNA, 16 nt, Human
cagcuccaagaauuuc

SEQ ID NO: 1193809 - RNA, 21 nt, Human
ccugucucccuccucugcccg

SEQ ID NO: 1193810 - RNA, 18 nt, Human
ccuggugguggcucggga

SEQ ID NO: 1193811 - RNA, 21 nt, Human
ccuggugguggcucgggaggc

SEQ ID NO: 1193812 - RNA, 12 nt, Human
ccuggugguuca

SEQ ID NO: 1193813 - RNA, 13 nt, Human
ccuggugguucac

SEQ ID NO: 1193814 - RNA, 22 nt, Human
ccuggugguucacucuuggagc

SEQ ID NO: 1193815 - RNA, 20 nt, Human
ccugccaucauguuuacaga

SEQ ID NO: 1193816 - RNA, 18 nt, Human
ccugccaucauguuuaca

SEQ ID NO: 1193817 - RNA, 18 nt, Human
ccugacccucaucuuucu

SEQ ID NO: 1193818 - RNA, 19 nt, Human
ccugacccucaucuuucuu

SEQ ID NO: 1193819 - RNA, 22 nt, Human
ccugacccucaucuuucuucca

SEQ ID NO: 1193820 - RNA, 18 nt, Human
ccugagaucucugcagga

SEQ ID NO: 1193821 - RNA, 19 nt, Human
ccugaguuccuagccaccg

SEQ ID NO: 1193822 - RNA, 20 nt, Human
ccugaguuccuagccaccgc

SEQ ID NO: 1193823 - RNA, 21 nt, Human
ccugaguuccuagccaccgcc

SEQ ID NO: 1193824 - RNA, 12 nt, Human
ccuagccaccca

SEQ ID NO: 1193825 - RNA, 16 nt, Human
ccuagccacccaccac

SEQ ID NO: 1193826 - RNA, 15 nt, Human
ccuccuagccaccca

SEQ ID NO: 1193827 - RNA, 12 nt, Human
ccauucuuuccc

SEQ ID NO: 1193828 - RNA, 14 nt, Human
ccauucuuucccaa

SEQ ID NO: 1193829 - RNA, 20 nt, Human
ccauucuuucccaacaccuc

SEQ ID NO: 1193830 - RNA, 15 nt, Human
ccagucccugaggca

SEQ ID NO: 1193831 - RNA, 23 nt, Human
ccagggggccagucccugaggca

SEQ ID NO: 1193832 - RNA, 10 nt, Human
ccccugccag

SEQ ID NO: 1193833 - RNA, 17 nt, Human
ccccugaauuuaaauag

SEQ ID NO: 1193834 - RNA, 13 nt, Human
ccccugaauuuaa

SEQ ID NO: 1193835 - RNA, 13 nt, Human
cgugucuggcaca

SEQ ID NO: 1193836 - RNA, 15 nt, Human
cuaggcuaggguggg

SEQ ID NO: 1193837 - RNA, 14 nt, Human
cuaguucugccagg

SEQ ID NO: 1193838 - RNA, 15 nt, Human
cuaguucugccagga

SEQ ID NO: 1193839 - RNA, 16 nt, Human
cuaguucugccaggag

SEQ ID NO: 1193840 - RNA, 15 nt, Human
cuaggguggggagag

SEQ ID NO: 1193841 - RNA, 13 nt, Human
cuaguucugccag

SEQ ID NO: 1193842 - RNA, 23 nt, Human
cucaaauacgugggcauucaaau

SEQ ID NO: 1193843 - RNA, 18 nt, Human
cucacuuguuuuauuuaa

SEQ ID NO: 1193844 - RNA, 23 nt, Human
cugaggaagagggacuguucuuu

SEQ ID NO: 1193845 - RNA, 18 nt, Human
cugaggaagagggacugu

SEQ ID NO: 1193846 - RNA, 12 nt, Human
cugagcuuggaa

SEQ ID NO: 1193847 - RNA, 14 nt, Human
cugagcuuggaagc

SEQ ID NO: 1193848 - RNA, 20 nt, Human
cugagcuuggaagcuucugg

SEQ ID NO: 1193849 - RNA, 21 nt, Human
cugagcuuggaagcuucuggu

SEQ ID NO: 1193850 - RNA, 18 nt, Human
cugacccucaucuuucuu

SEQ ID NO: 1193851 - RNA, 21 nt, Human
cugaggugggagauguggaaa

SEQ ID NO: 1193852 - RNA, 21 nt, Human
cugaguaaaaaagcugugugc

SEQ ID NO: 1193853 - RNA, 14 nt, Human
cuccgucaacucau

SEQ ID NO: 1193854 - RNA, 20 nt, Human
cucucuugauuaagaucuca

SEQ ID NO: 1193855 - RNA, 16 nt, Human
cuccuagccacccacc

SEQ ID NO: 1193856 - RNA, 11 nt, Human
uuuguggggag

SEQ ID NO: 1193857 - RNA, 16 nt, Human
uuggcagcucuacucu

SEQ ID NO: 1193858 - RNA, 18 nt, Human
uuggacaaaauggaauac

SEQ ID NO: 1193859 - RNA, 14 nt, Human
uugggaccccuggu

SEQ ID NO: 1193860 - RNA, 15 nt, Human
uugggaccccuggug

SEQ ID NO: 1193861 - RNA, 16 nt, Human
uugggaccccuggugg

SEQ ID NO: 1193862 - RNA, 20 nt, Human
uugggaccccuggugguuca

SEQ ID NO: 1193863 - RNA, 17 nt, Human
uuguagaagucacauuc

SEQ ID NO: 1193864 - RNA, 22 nt, Human
uuguagaagucacauuccugaa

SEQ ID NO: 1193865 - RNA, 15 nt, Human
uuguagcauccugga

SEQ ID NO: 1193866 - RNA, 16 nt, Human
uuguagcauccuggaa

SEQ ID NO: 1193867 - RNA, 16 nt, Human
uugauaugugaacagu

SEQ ID NO: 1193868 - RNA, 16 nt, Human
uugaagagguuuuaaa

SEQ ID NO: 1193869 - RNA, 21 nt, Human
uugaagagguuuuaaagcuuc

SEQ ID NO: 1193870 - RNA, 20 nt, Human
uugaagcacagugaucaagu

SEQ ID NO: 1193871 - RNA, 18 nt, Human
uuguuuagaagaagugug

SEQ ID NO: 1193872 - RNA, 15 nt, Human
uuguuuagaagaagu

SEQ ID NO: 1193873 - RNA, 16 nt, Human
uuuaaaauugugaugu

SEQ ID NO: 1193874 - RNA, 20 nt, Human
uuuaaaagauaaauauuaua

SEQ ID NO: 1193875 - RNA, 18 nt, Human
uuuaaaagaugcaaugua

SEQ ID NO: 1193876 - RNA, 20 nt, Human
uuuacagaggacaguauuug

SEQ ID NO: 1193877 - RNA, 16 nt, Human
uuuacauggcuggagc

SEQ ID NO: 1193878 - RNA, 14 nt, Human
uuuaaccucuaaau

SEQ ID NO: 1193879 - RNA, 14 nt, Human
uuuaugccaccuga

SEQ ID NO: 1193880 - RNA, 19 nt, Human
uuuccacuccuccuagcca

SEQ ID NO: 1193881 - RNA, 18 nt, Human
uuuccacuccuccuagcc

SEQ ID NO: 1193882 - RNA, 12 nt, Human
uuucugaaauuu

SEQ ID NO: 1193883 - RNA, 19 nt, Human
uuucugaaauuuccuggga

SEQ ID NO: 1193884 - RNA, 15 nt, Human
uuugauaugugaaca

SEQ ID NO: 1193885 - RNA, 17 nt, Human
uuugauaugugaacagu

SEQ ID NO: 1193886 - RNA, 14 nt, Human
uuugauaugugaac

SEQ ID NO: 1193887 - RNA, 19 nt, Human
uguuuagaagaaguguguc

SEQ ID NO: 1193888 - RNA, 21 nt, Human
uuaaaagaugcaauguagagg

SEQ ID NO: 1193889 - RNA, 12 nt, Human
uuaacucagucu

SEQ ID NO: 1193890 - RNA, 21 nt, Human
uuacuaggugcccagaaugag

SEQ ID NO: 1193891 - RNA, 16 nt, Human
uuaugccaccugaaua

SEQ ID NO: 1193892 - RNA, 13 nt, Human
uuaugccaccuga

SEQ ID NO: 1193893 - RNA, 16 nt, Human
uucccugaaggaacca

SEQ ID NO: 1193894 - RNA, 12 nt, Human
uucccugaggug

SEQ ID NO: 1193895 - RNA, 15 nt, Human
uucaugaaagauuca

SEQ ID NO: 1193896 - RNA, 17 nt, Human
uucaugaaagauucaau

SEQ ID NO: 1193897 - RNA, 18 nt, Human
uucaugaaagauucaaug

SEQ ID NO: 1193898 - RNA, 16 nt, Human
uuccacuccuccuagc

SEQ ID NO: 1193899 - RNA, 18 nt, Human
uuccacuccuccuagcca

SEQ ID NO: 1193900 - RNA, 21 nt, Human
uuccacuccuccuagccaccc

SEQ ID NO: 1193901 - RNA, 15 nt, Human
ugggggucugugugu

SEQ ID NO: 1193902 - RNA, 14 nt, Human
ugggggucugugug

SEQ ID NO: 1193903 - RNA, 20 nt, Human
uggggauagauguguggaca

SEQ ID NO: 1193904 - RNA, 18 nt, Human
uggggauagaugugugga

SEQ ID NO: 1193905 - RNA, 17 nt, Human
uggggauagaugugugg

SEQ ID NO: 1193906 - RNA, 16 nt, Human
uggggauagaugugug

SEQ ID NO: 1193907 - RNA, 20 nt, Human
uggggaguuuaggguggggg

SEQ ID NO: 1193908 - RNA, 13 nt, Human
ugggaguguguaa

SEQ ID NO: 1193909 - RNA, 11 nt, Human
ugggagugugu

SEQ ID NO: 1193910 - RNA, 22 nt, Human
ugggagugaggaugucugggcc

SEQ ID NO: 1193911 - RNA, 13 nt, Human
ugggcaggaggga

SEQ ID NO: 1193912 - RNA, 15 nt, Human
ugggcaggagggagg

SEQ ID NO: 1193913 - RNA, 16 nt, Human
ugggcaggagggaggu

SEQ ID NO: 1193914 - RNA, 18 nt, Human
ugggcaggagggaggugc

SEQ ID NO: 1193915 - RNA, 21 nt, Human
uggugaccuuccaagagccug

SEQ ID NO: 1193916 - RNA, 22 nt, Human
uggugaccuuccaagagccuga

SEQ ID NO: 1193917 - RNA, 14 nt, Human
ugguccucacacuc

SEQ ID NO: 1193918 - RNA, 15 nt, Human
uggaucugugagggg

SEQ ID NO: 1193919 - RNA, 19 nt, Human
uggaucugugaggggcucu

SEQ ID NO: 1193920 - RNA, 19 nt, Human
uggcaaacucuccaccaca

SEQ ID NO: 1193921 - RNA, 15 nt, Human
uggaccagccucucc

SEQ ID NO: 1193922 - RNA, 17 nt, Human
ugcccgggagcucagga

SEQ ID NO: 1193923 - RNA, 16 nt, Human
ugcuguuaucccugcc

SEQ ID NO: 1193924 - RNA, 16 nt, Human
ugcuguucaugaaaga

SEQ ID NO: 1193925 - RNA, 17 nt, Human
ugcuguucaugaaagau

SEQ ID NO: 1193926 - RNA, 22 nt, Human
ugcuaagaauauuugaauguau

SEQ ID NO: 1193927 - RNA, 17 nt, Human
ugcuaagaauauuugaa

SEQ ID NO: 1193928 - RNA, 21 nt, Human
ugcuaagaauauuugaaugua

SEQ ID NO: 1193929 - RNA, 17 nt, Human
ugacauacauccaacau

SEQ ID NO: 1193930 - RNA, 13 nt, Human
ugaauuaugaaac

SEQ ID NO: 1193931 - RNA, 15 nt, Human
ugaauuaugaaacuu

SEQ ID NO: 1193932 - RNA, 17 nt, Human
ugaauuaugaaacuuuu

SEQ ID NO: 1193933 - RNA, 14 nt, Human
ugaagauacugaaa

SEQ ID NO: 1193934 - RNA, 15 nt, Human
ugaagauacugaaau

SEQ ID NO: 1193935 - RNA, 16 nt, Human
ugaagauacugaaaua

SEQ ID NO: 1193936 - RNA, 18 nt, Human
ugaagauacugaaauaaa

SEQ ID NO: 1193937 - RNA, 15 nt, Human
ugaacagcggcugga

SEQ ID NO: 1193938 - RNA, 21 nt, Human
ugaacagcggcuggacuugga

SEQ ID NO: 1193939 - RNA, 22 nt, Human
ugaacagcggcuggacuuggag

SEQ ID NO: 1193940 - RNA, 19 nt, Human
ugaacaguuguguuugaag

SEQ ID NO: 1193941 - RNA, 21 nt, Human
ucuuuccacuccuccuagcca

SEQ ID NO: 1193942 - RNA, 22 nt, Human
ucuuuccacuccuccuagccac

SEQ ID NO: 1193943 - RNA, 20 nt, Human
ugagcuggggaugucucuca

SEQ ID NO: 1193944 - RNA, 14 nt, Human
ugaggcaggucccc

SEQ ID NO: 1193945 - RNA, 16 nt, Human
ugaggcagguccccag

SEQ ID NO: 1193946 - RNA, 17 nt, Human
ugaggcagguccccaga

SEQ ID NO: 1193947 - RNA, 14 nt, Human
ugaggugggagaug

SEQ ID NO: 1193948 - RNA, 19 nt, Human
ugagcuccuuaaggcucuu

SEQ ID NO: 1193949 - RNA, 21 nt, Human
ugagcuccuuaaggcucuuuu

SEQ ID NO: 1193950 - RNA, 18 nt, Human
ucucccuccucugcccgg

SEQ ID NO: 1193951 - RNA, 16 nt, Human
ucuacugggagccuac

SEQ ID NO: 1193952 - RNA, 19 nt, Human
ucuacugggagccuaccca

SEQ ID NO: 1193953 - RNA, 15 nt, Human
uccugucucccuccu

SEQ ID NO: 1193954 - RNA, 23 nt, Human
uccugucucccuccucugcccgg

SEQ ID NO: 1193955 - RNA, 13 nt, Human
uccuacccccugu

SEQ ID NO: 1193956 - RNA, 15 nt, Human
uccuacccccugugc

SEQ ID NO: 1193957 - RNA, 16 nt, Human
uccuacccccugugcc

SEQ ID NO: 1193958 - RNA, 17 nt, Human
uccuacccccugugccu

SEQ ID NO: 1193959 - RNA, 18 nt, Human
uccagagucccugccugg

SEQ ID NO: 1193960 - RNA, 19 nt, Human
uccagagucccugccugga

SEQ ID NO: 1193961 - RNA, 20 nt, Human
uccagagucccugccuggac

SEQ ID NO: 1193962 - RNA, 21 nt, Human
uccagagucccugccuggacc

SEQ ID NO: 1193963 - RNA, 14 nt, Human
uccagcaccacacu

SEQ ID NO: 1193964 - RNA, 12 nt, Human
ucaucuuucuuc

SEQ ID NO: 1193965 - RNA, 17 nt, Human
ucaugcuguucaugaaa

SEQ ID NO: 1193966 - RNA, 14 nt, Human
uccaaacaggcuca

SEQ ID NO: 1193967 - RNA, 23 nt, Human
uaugagcuggggaugucucucau

SEQ ID NO: 1193968 - RNA, 16 nt, Human
uaugauucaaaugucu

SEQ ID NO: 1193969 - RNA, 21 nt, Human
uaugauucaaaugucuauaaa

SEQ ID NO: 1193970 - RNA, 17 nt, Human
uaugcuucauacaggga

SEQ ID NO: 1193971 - RNA, 12 nt, Human
uaugcuucauac

SEQ ID NO: 1193972 - RNA, 13 nt, Human
uaugcuucauaca

SEQ ID NO: 1193973 - RNA, 14 nt, Human
uaugcuucauacag

SEQ ID NO: 1193974 - RNA, 16 nt, Human
uaugcuucauacaggg

SEQ ID NO: 1193975 - RNA, 16 nt, Human
uaucuguuuacagugu

SEQ ID NO: 1193976 - RNA, 17 nt, Human
uaucuguuuacaguguu

SEQ ID NO: 1193977 - RNA, 16 nt, Human
uaggcuagggugggga

SEQ ID NO: 1193978 - RNA, 17 nt, Human
ucacauuggaaacaagu

SEQ ID NO: 1193979 - RNA, 14 nt, Human
ucacauuggaaaca

SEQ ID NO: 1193980 - RNA, 22 nt, Human
uauuugaauguaugcuucauac

SEQ ID NO: 1193981 - RNA, 23 nt, Human
uauuugaauguaugcuucauaca

SEQ ID NO: 1193982 - RNA, 21 nt, Human
uauuugaauguaugcuucaua

SEQ ID NO: 1193983 - RNA, 14 nt, Human
guggcauccagagu

SEQ ID NO: 1193984 - RNA, 15 nt, Human
guggcaguuuggcaa

SEQ ID NO: 1193985 - RNA, 18 nt, Human
guggcucgggaggcgaag

SEQ ID NO: 1193986 - RNA, 20 nt, Human
gugcuucuaguucugccagg

SEQ ID NO: 1193987 - RNA, 21 nt, Human
gugcuucuaguucugccagga

SEQ ID NO: 1193988 - RNA, 22 nt, Human
gugcuucuaguucugccaggag

SEQ ID NO: 1193989 - RNA, 23 nt, Human
guggaaaagccaagaggcugcag

SEQ ID NO: 1193990 - RNA, 19 nt, Human
gugccuugucacgccagac

SEQ ID NO: 1193991 - RNA, 16 nt, Human
gugauuuuuaugccac

SEQ ID NO: 1193992 - RNA, 17 nt, Human
gugauuuuuaugccacc

SEQ ID NO: 1193993 - RNA, 19 nt, Human
gugauuuuuaugccaccug

SEQ ID NO: 1193994 - RNA, 20 nt, Human
gugauuuuuaugccaccuga

SEQ ID NO: 1193995 - RNA, 21 nt, Human
gugauuuuuaugccaccugaa

SEQ ID NO: 1193996 - RNA, 12 nt, Human
gugacucuuucc

SEQ ID NO: 1193997 - RNA, 19 nt, Human
gugaccuuccaagagccug

SEQ ID NO: 1193998 - RNA, 20 nt, Human
gugaccuuccaagagccuga

SEQ ID NO: 1193999 - RNA, 20 nt, Human
gucccugccuggaccagccu

SEQ ID NO: 1194000 - RNA, 21 nt, Human
gucccugccuggaccagccuc

SEQ ID NO: 1194001 - RNA, 22 nt, Human
gucccugccuggaccagccucu

SEQ ID NO: 1194002 - RNA, 23 nt, Human
gucccugccuggaccagccucuc

SEQ ID NO: 1194003 - RNA, 12 nt, Human
guccucagcccc

SEQ ID NO: 1194004 - RNA, 13 nt, Human
guccucacacuca

SEQ ID NO: 1194005 - RNA, 20 nt, Human
gucccagaaugccuccugca

SEQ ID NO: 1194006 - RNA, 14 nt, Human
gucacgccagacuu

SEQ ID NO: 1194007 - RNA, 22 nt, Human
gucagcccaaaccaccagaagc

SEQ ID NO: 1194008 - RNA, 23 nt, Human
gucagcccaaaccaccagaagcc

SEQ ID NO: 1194009 - RNA, 22 nt, Human
guauuacaguggggaaugaaga

SEQ ID NO: 1194010 - RNA, 20 nt, Human
guauuacaguggggaaugaa

SEQ ID NO: 1194011 - RNA, 13 nt, Human
ggggauagaugug

SEQ ID NO: 1194012 - RNA, 18 nt, Human
ggggaguuuagggugggg

SEQ ID NO: 1194013 - RNA, 19 nt, Human
gggcuucauacacaugaga

SEQ ID NO: 1194014 - RNA, 13 nt, Human
gggcuucauacac

SEQ ID NO: 1194015 - RNA, 14 nt, Human
gggcgcggcuggga

SEQ ID NO: 1194016 - RNA, 23 nt, Human
ggucagcccaaaccaccagaagc

SEQ ID NO: 1194017 - RNA, 19 nt, Human
ggguuccagcaccacacuc

SEQ ID NO: 1194018 - RNA, 15 nt, Human
guaaugaaacuugga

SEQ ID NO: 1194019 - RNA, 16 nt, Human
guaaugaaacuuggau

SEQ ID NO: 1194020 - RNA, 16 nt, Human
guaaauaaaggaacca

SEQ ID NO: 1194021 - RNA, 16 nt, Human
ggcgcggcugggagga

SEQ ID NO: 1194022 - RNA, 14 nt, Human
ggccugggcaggag

SEQ ID NO: 1194023 - RNA, 13 nt, Human
ggccugggcagga

SEQ ID NO: 1194024 - RNA, 21 nt, Human
ggcuauggggauagaugugug

SEQ ID NO: 1194025 - RNA, 16 nt, Human
ggcuaggguggggaga

SEQ ID NO: 1194026 - RNA, 18 nt, Human
ggcuccaggccagggggc

SEQ ID NO: 1194027 - RNA, 14 nt, Human
ggcuccaggccagg

SEQ ID NO: 1194028 - RNA, 16 nt, Human
ggcuccaggccagggg

SEQ ID NO: 1194029 - RNA, 12 nt, Human
ggcccugugccu

SEQ ID NO: 1194030 - RNA, 22 nt, Human
ggccuaaccugccgagagucca

SEQ ID NO: 1194031 - RNA, 17 nt, Human
ggauggaaugauggguc

SEQ ID NO: 1194032 - RNA, 16 nt, Human
ggaugcauggagauag

SEQ ID NO: 1194033 - RNA, 17 nt, Human
ggauugggccccugcca

SEQ ID NO: 1194034 - RNA, 18 nt, Human
ggauugggccccugccag

SEQ ID NO: 1194035 - RNA, 20 nt, Human
ggccauucuuucccaacacc

SEQ ID NO: 1194036 - RNA, 12 nt, Human
ggcagcucagcu

SEQ ID NO: 1194037 - RNA, 22 nt, Human
ggagaaugucaguauguggaag

SEQ ID NO: 1194038 - RNA, 20 nt, Human
ggagauagccccacaggagg

SEQ ID NO: 1194039 - RNA, 21 nt, Human
ggagauagccccacaggaggu

SEQ ID NO: 1194040 - RNA, 23 nt, Human
ggaagggacaccaagccuuggcu

SEQ ID NO: 1194041 - RNA, 22 nt, Human
ggaaggaucccaugagcuccuu

SEQ ID NO: 1194042 - RNA, 14 nt, Human
ggaauuauuuuaaa

SEQ ID NO: 1194043 - RNA, 15 nt, Human
ggaauuauuuuaaaa

SEQ ID NO: 1194044 - RNA, 16 nt, Human
ggaauuauuuuaaaag

SEQ ID NO: 1194045 - RNA, 17 nt, Human
ggaauuauuuuaaaaga

SEQ ID NO: 1194046 - RNA, 23 nt, Human
ggaauuggguggggggcuucaua

SEQ ID NO: 1194047 - RNA, 16 nt, Human
ggacaaaauggaauac

SEQ ID NO: 1194048 - RNA, 17 nt, Human
ggacaaaauggaauacu

SEQ ID NO: 1194049 - RNA, 14 nt, Human
gcuuuguggcacug

SEQ ID NO: 1194050 - RNA, 22 nt, Human
gcuuuguggcacuggggcaggg

SEQ ID NO: 1194051 - RNA, 20 nt, Human
ggaaaagccaagaggcugca

SEQ ID NO: 1194052 - RNA, 21 nt, Human
ggaaccaaagcgaauuuuaaa

SEQ ID NO: 1194053 - RNA, 22 nt, Human
ggaaccaaagcgaauuuuaaaa

SEQ ID NO: 1194054 - RNA, 11 nt, Human
gcuucauacag

SEQ ID NO: 1194055 - RNA, 22 nt, Human
gcuucauacagggaugguguuc

SEQ ID NO: 1194056 - RNA, 12 nt, Human
gcuguucaugaa

SEQ ID NO: 1194057 - RNA, 21 nt, Human
gcuguucaugaaagauucaau

SEQ ID NO: 1194058 - RNA, 17 nt, Human
gcuaugagcuggggaug

SEQ ID NO: 1194059 - RNA, 22 nt, Human
gcucagugucuggcugcagagc

SEQ ID NO: 1194060 - RNA, 14 nt, Human
gcuccaagaauuuc

SEQ ID NO: 1194061 - RNA, 17 nt, Human
gccugacccucaucuuu

SEQ ID NO: 1194062 - RNA, 12 nt, Human
gccugcagagcu

SEQ ID NO: 1194063 - RNA, 15 nt, Human
gccugcagagcugcg

SEQ ID NO: 1194064 - RNA, 23 nt, Human
gccuggccagcagguccccagcu

SEQ ID NO: 1194065 - RNA, 23 nt, Human
gcccuggugguggcucgggaggc

SEQ ID NO: 1194066 - RNA, 16 nt, Human
gcccugaguuccuagc

SEQ ID NO: 1194067 - RNA, 18 nt, Human
gcccugaguuccuagcca

SEQ ID NO: 1194068 - RNA, 21 nt, Human
gaugggucaguuguaucagca

SEQ ID NO: 1194069 - RNA, 15 nt, Human
gaugggucaguugua

SEQ ID NO: 1194070 - RNA, 24 nt, Human
gaugguguucaaaaaacuuguaaa

SEQ ID NO: 1194071 - RNA, 17 nt, Human
gauugggccccugccag

SEQ ID NO: 1194072 - RNA, 19 nt, Human
gauucaaugccccugaauu

SEQ ID NO: 1194073 - RNA, 20 nt, Human
gauucaaugccccugaauuu

SEQ ID NO: 1194074 - RNA, 21 nt, Human
gauucaaugccccugaauuua

SEQ ID NO: 1194075 - RNA, 23 nt, Human
gcacuggggcaggggccgggggc

SEQ ID NO: 1194076 - RNA, 15 nt, Human
gcacuggggcagggg

SEQ ID NO: 1194077 - RNA, 18 nt, Human
gcacuggggcaggggccg

SEQ ID NO: 1194078 - RNA, 22 nt, Human
gcaauguagaggggaaaagaga

SEQ ID NO: 1194079 - RNA, 13 nt, Human
gcaacucugaagg

SEQ ID NO: 1194080 - RNA, 13 nt, Human
gaguguguaauuu

SEQ ID NO: 1194081 - RNA, 22 nt, Human
gauagauguguggacacauugg

SEQ ID NO: 1194082 - RNA, 14 nt, Human
gauagaugugugga

SEQ ID NO: 1194083 - RNA, 14 nt, Human
gauaugauucaaau

SEQ ID NO: 1194084 - RNA, 22 nt, Human
gauaugauucaaaugucuauaa

SEQ ID NO: 1194085 - RNA, 24 nt, Human
gauaugauucaaaugucuauaaac

SEQ ID NO: 1194086 - RNA, 21 nt, Human
gagucccugccuggaccagcc

SEQ ID NO: 1194087 - RNA, 23 nt, Human
gagucccugccuggaccagccuc

SEQ ID NO: 1194088 - RNA, 21 nt, Human
gagucuauuuacggaacucaa

SEQ ID NO: 1194089 - RNA, 13 nt, Human
gaggguguccugc

SEQ ID NO: 1194090 - RNA, 21 nt, Human
gagguagcuuugagguggaag

SEQ ID NO: 1194091 - RNA, 23 nt, Human
gagggucuugguuccagccugcc

SEQ ID NO: 1194092 - RNA, 14 nt, Human
gagggggagagggc

SEQ ID NO: 1194093 - RNA, 22 nt, Human
gaggccucucauuccagaggaa

SEQ ID NO: 1194094 - RNA, 20 nt, Human
gaggcgaagcguuguccuca

SEQ ID NO: 1194095 - RNA, 21 nt, Human
gaggcgaagcguuguccucag

SEQ ID NO: 1194096 - RNA, 14 nt, Human
gaggcagggaagga

SEQ ID NO: 1194097 - RNA, 18 nt, Human
gagaucccaacacugcca

SEQ ID NO: 1194098 - RNA, 19 nt, Human
gagaucccaacacugccag

SEQ ID NO: 1194099 - RNA, 20 nt, Human
gagaucccaacacugccagc

SEQ ID NO: 1194100 - RNA, 18 nt, Human
gagaugaugaaaauauuu

SEQ ID NO: 1194101 - RNA, 19 nt, Human
gagaugaugaaaauauuua

SEQ ID NO: 1194102 - RNA, 17 nt, Human
gagaaugucaguaugug

SEQ ID NO: 1194103 - RNA, 13 nt, Human
gagagacgggccc

SEQ ID NO: 1194104 - RNA, 18 nt, Human
gaaugucaguauguggaa

SEQ ID NO: 1194105 - RNA, 16 nt, Human
gaaugucaguaugugg

SEQ ID NO: 1194106 - RNA, 13 nt, Human
gaaugucaguaug

SEQ ID NO: 1194107 - RNA, 19 nt, Human
gaaugucaguauguggaag

SEQ ID NO: 1194108 - RNA, 22 nt, Human
gaauuggguggggggcuucaua

SEQ ID NO: 1194109 - RNA, 23 nt, Human
gaauuggguggggggcuucauac

SEQ ID NO: 1194110 - RNA, 20 nt, Human
gaauuggguggggggcuuca

SEQ ID NO: 1194111 - RNA, 19 nt, Human
gaauuucuaggacugaauu

SEQ ID NO: 1194112 - RNA, 20 nt, Human
gaauuucuaggacugaauua

SEQ ID NO: 1194113 - RNA, 20 nt, Human
gaauuugauaugugaacagu

SEQ ID NO: 1194114 - RNA, 14 nt, Human
gaccagccucucca

SEQ ID NO: 1194115 - RNA, 14 nt, Human
cuuuguggcacugg

SEQ ID NO: 1194116 - RNA, 14 nt, Human
gaaaaguugaauuu

SEQ ID NO: 1194117 - RNA, 15 nt, Human
gaaaaguugaauuuu

SEQ ID NO: 1194118 - RNA, 13 nt, Human
gaaaauauuuaaa

SEQ ID NO: 1194119 - RNA, 13 nt, Human
cuugucacgccag

SEQ ID NO: 1194120 - RNA, 16 nt, Human
cuugucacgccagacu

SEQ ID NO: 1194121 - RNA, 18 nt, Human
cuugucacgccagacuuc

SEQ ID NO: 1194122 - RNA, 13 nt, Human
cuuucccaacacc

SEQ ID NO: 1194123 - RNA, 19 nt, Human
cuuuggcuaugagggccuu

SEQ ID NO: 1194124 - RNA, 21 nt, Human
cuucuggugaccuuccaagag

SEQ ID NO: 1194125 - RNA, 18 nt, Human
cuucuggugaccuuccaa

SEQ ID NO: 1194126 - RNA, 20 nt, Human
cuucuggugaccuuccaaga

SEQ ID NO: 1194127 - RNA, 19 nt, Human
cuuauaucuauauuuuaca

SEQ ID NO: 1194128 - RNA, 17 nt, Human
cuguguguuuaugugug

SEQ ID NO: 1194129 - RNA, 16 nt, Human
cuguguguuuaugugu

SEQ ID NO: 1194130 - RNA, 17 nt, Human
cuguucaugaaagauuc

SEQ ID NO: 1194131 - RNA, 18 nt, Human
cuguucaugaaagauuca

SEQ ID NO: 1194132 - RNA, 23 nt, Human
cuguucaugaaagauucaaugcc

SEQ ID NO: 1194133 - RNA, 19 nt, Human
cugugaggggcucucucau

SEQ ID NO: 1194134 - RNA, 21 nt, Human
cugucucccuccucugcccgg

SEQ ID NO: 1194135 - RNA, 21 nt, Human
cuggccaguggcuggaucugu

SEQ ID NO: 1194136 - RNA, 23 nt, Human
cuggcugcagagcagugggccug

SEQ ID NO: 1194137 - RNA, 17 nt, Human
cuggagguuuguuuaga

SEQ ID NO: 1194138 - RNA, 12 nt, Human
cuggagguuugu

SEQ ID NO: 1194139 - RNA, 14 nt, Human
cuggaccagccucu

SEQ ID NO: 1194140 - RNA, 18 nt, Human
cuggaccagccucuccac

SEQ ID NO: 1194141 - RNA, 11 nt, Human
cugcugggcuu

SEQ ID NO: 1194142 - RNA, 22 nt, Human
cugccgagaguccaucagccuc

SEQ ID NO: 1194143 - RNA, 23 nt, Human
cugccgagaguccaucagccucc

SEQ ID NO: 1194144 - RNA, 22 nt, Human
cuacucuggagguuuguuuaga

SEQ ID NO: 1194145 - RNA, 18 nt, Human
cuacugggagccuaccca

SEQ ID NO: 1194146 - RNA, 14 nt, Human
cuacugggagccua

SEQ ID NO: 1194147 - RNA, 15 nt, Human
cuacugggagccuac

SEQ ID NO: 1194148 - RNA, 20 nt, Human
cuauggggauagaugugugg

SEQ ID NO: 1194149 - RNA, 19 nt, Human
cuauggggauagaugugug

SEQ ID NO: 1194150 - RNA, 21 nt, Human
cuauggggauagaugugugga

SEQ ID NO: 1194151 - RNA, 13 nt, Human
cucacacucaccc

SEQ ID NO: 1194152 - RNA, 20 nt, Human
cuccccacgucagcugggac

SEQ ID NO: 1194153 - RNA, 16 nt, Human
cuccacucaugugacu

SEQ ID NO: 1194154 - RNA, 22 nt, Human
cuccacucaugugacucuuucc

SEQ ID NO: 1194155 - RNA, 14 nt, Human
cuccacucuccucu

SEQ ID NO: 1194156 - RNA, 21 nt, Human
cuccacucuccucuuccaggc

SEQ ID NO: 1194157 - RNA, 16 nt, Human
cucaguucucuucacu

SEQ ID NO: 1194158 - RNA, 17 nt, Human
cucaguucucuucacuc

SEQ ID NO: 1194159 - RNA, 17 nt, Human
cucaggaaccgaggcag

SEQ ID NO: 1194160 - RNA, 18 nt, Human
cucaggaaccgaggcagg

SEQ ID NO: 1194161 - RNA, 19 nt, Human
cucaggaaccgaggcaggg

SEQ ID NO: 1194162 - RNA, 17 nt, Human
cucagccccgcguggaa

SEQ ID NO: 1194163 - RNA, 16 nt, Human
cucagaggguguccug

SEQ ID NO: 1194164 - RNA, 20 nt, Human
cucacugcuaagaauauuug

SEQ ID NO: 1194165 - RNA, 21 nt, Human
cucacugcuaagaauauuuga

SEQ ID NO: 1194166 - RNA, 22 nt, Human
cucacugcuaagaauauuugaa

SEQ ID NO: 1194167 - RNA, 23 nt, Human
cucacugcuaagaauauuugaau

SEQ ID NO: 1194168 - RNA, 13 nt, Human
cuacccccugugc

SEQ ID NO: 1194169 - RNA, 12 nt, Human
cuaaccugccga

SEQ ID NO: 1194170 - RNA, 19 nt, Human
cuaaauucuuucauuuuag

SEQ ID NO: 1194171 - RNA, 18 nt, Human
cuaauaaucauuggauuc

SEQ ID NO: 1194172 - RNA, 18 nt, Human
cgggacaccuaggcuagg

SEQ ID NO: 1194173 - RNA, 19 nt, Human
cgggacaccuaggcuaggg

SEQ ID NO: 1194174 - RNA, 16 nt, Human
cgcggcugggaggagg

SEQ ID NO: 1194175 - RNA, 11 nt, Human
cgcggcuggga

SEQ ID NO: 1194176 - RNA, 12 nt, Human
cgcggcugggag

SEQ ID NO: 1194177 - RNA, 17 nt, Human
ccugugccuuuugccau

SEQ ID NO: 1194178 - RNA, 14 nt, Human
ccuuugucccagaa

SEQ ID NO: 1194179 - RNA, 15 nt, Human
cgaagcguuguccuc

SEQ ID NO: 1194180 - RNA, 16 nt, Human
cgaagcguuguccuca

SEQ ID NO: 1194181 - RNA, 17 nt, Human
cgaagcguuguccucag

SEQ ID NO: 1194182 - RNA, 21 nt, Human
cgaagcguuguccucagcccc

SEQ ID NO: 1194183 - RNA, 14 nt, Human
ccugccgagagucc

SEQ ID NO: 1194184 - RNA, 22 nt, Human
ccugccgagaguccaucagccu

SEQ ID NO: 1194185 - RNA, 23 nt, Human
ccugccgagaguccaucagccuc

SEQ ID NO: 1194186 - RNA, 19 nt, Human
ccugaagagaagggcaggg

SEQ ID NO: 1194187 - RNA, 15 nt, Human
ccucuuccaggcccc

SEQ ID NO: 1194188 - RNA, 15 nt, Human
ccugcaccggggccu

SEQ ID NO: 1194189 - RNA, 17 nt, Human
ccugcaccggggccugg

SEQ ID NO: 1194190 - RNA, 20 nt, Human
ccugguccucacacucaccc

SEQ ID NO: 1194191 - RNA, 19 nt, Human
ccuggagacuaaccccacc

SEQ ID NO: 1194192 - RNA, 16 nt, Human
ccuaggcuaggguggg

SEQ ID NO: 1194193 - RNA, 12 nt, Human
ccuaaccugccg

SEQ ID NO: 1194194 - RNA, 13 nt, Human
ccuaaccugccga

SEQ ID NO: 1194195 - RNA, 22 nt, Human
ccgggucaucuguaccucugcc

SEQ ID NO: 1194196 - RNA, 23 nt, Human
ccguggcuguggcauccagaguc

SEQ ID NO: 1194197 - RNA, 20 nt, Human
ccggggccugggcaggaggg

SEQ ID NO: 1194198 - RNA, 21 nt, Human
ccgggggcagucugagagagg

SEQ ID NO: 1194199 - RNA, 17 nt, Human
ccgccuccuacagccca

SEQ ID NO: 1194200 - RNA, 21 nt, Human
ccgagaguccaucagccucca

SEQ ID NO: 1194201 - RNA, 20 nt, Human
ccgagaguccaucagccucc

SEQ ID NO: 1194202 - RNA, 18 nt, Human
cccugaggcaggucccca

SEQ ID NO: 1194203 - RNA, 20 nt, Human
cccugaggcagguccccaga

SEQ ID NO: 1194204 - RNA, 17 nt, Human
cccugaggcaggucccc

SEQ ID NO: 1194205 - RNA, 21 nt, Human
cccugaggcagguccccagac

SEQ ID NO: 1194206 - RNA, 14 nt, Human
ccccugugccuugu

SEQ ID NO: 1194207 - RNA, 20 nt, Human
ccccuggcuccaggccaggg

SEQ ID NO: 1194208 - RNA, 12 nt, Human
ccccuggugguu

SEQ ID NO: 1194209 - RNA, 23 nt, Human
ccccuggugguucacucuuggag

SEQ ID NO: 1194210 - RNA, 22 nt, Human
cccccugugccuugucacgcca

SEQ ID NO: 1194211 - RNA, 13 nt, Human
ccccuccaccugc

SEQ ID NO: 1194212 - RNA, 20 nt, Human
ccccagacuccaccaagccu

SEQ ID NO: 1194213 - RNA, 18 nt, Human
cccagaaugccuccugca

SEQ ID NO: 1194214 - RNA, 17 nt, Human
cccagaaugaggcugcu

SEQ ID NO: 1194215 - RNA, 13 nt, Human
cccaugagcuccu

SEQ ID NO: 1194216 - RNA, 14 nt, Human
cccaugagcuccuu

SEQ ID NO: 1194217 - RNA, 15 nt, Human
cccaugagcuccuua

SEQ ID NO: 1194218 - RNA, 22 nt, Human
cccaugagcuccuuaaggcucu

SEQ ID NO: 1194219 - RNA, 15 nt, Human
cccacggcuccucga

SEQ ID NO: 1194220 - RNA, 15 nt, Human
cccacgucagcuggg

SEQ ID NO: 1194221 - RNA, 22 nt, Human
cccagaauaaacuggcagcuca

SEQ ID NO: 1194222 - RNA, 24 nt, Human
cccagaauaaacuggcagcucagc

SEQ ID NO: 1194223 - RNA, 16 nt, Human
cccagaaugaggcugc

SEQ ID NO: 1194224 - RNA, 14 nt, Human
cccaacacugccag

SEQ ID NO: 1194225 - RNA, 19 nt, Human
cccaaaacaccggguucca

SEQ ID NO: 1194226 - RNA, 15 nt, Human
cccaacacugccagc

SEQ ID NO: 1194227 - RNA, 16 nt, Human
cccaacacugccagca

SEQ ID NO: 1194228 - RNA, 23 nt, Human
ccaggccacuggccccugagauc

SEQ ID NO: 1194229 - RNA, 16 nt, Human
ccaggccacuggcccc

SEQ ID NO: 1194230 - RNA, 10 nt, Human
ccagccugcc

SEQ ID NO: 1194231 - RNA, 14 nt, Human
ccagcccugaguuc

SEQ ID NO: 1194232 - RNA, 18 nt, Human
ccagcccugaguuccuag

SEQ ID NO: 1194233 - RNA, 16 nt, Human
ccacccccaggacccc

SEQ ID NO: 1194234 - RNA, 18 nt, Human
ccacccccaggaccccug

SEQ ID NO: 1194235 - RNA, 19 nt, Human
ccacccccaggaccccuga

SEQ ID NO: 1194236 - RNA, 15 nt, Human
ccagaaugaggcugc

SEQ ID NO: 1194237 - RNA, 13 nt, Human
caaccggcuuugu

SEQ ID NO: 1194238 - RNA, 22 nt, Human
caaccggcuuuguggcacuggg

SEQ ID NO: 1194239 - RNA, 12 nt, Human
caacacugccag

SEQ ID NO: 1194240 - RNA, 13 nt, Human
caacacugccagc

SEQ ID NO: 1194241 - RNA, 14 nt, Human
caacacugccagca

SEQ ID NO: 1194242 - RNA, 16 nt, Human
caagaggcugcagcca

SEQ ID NO: 1194243 - RNA, 12 nt, Human
caagccugguca

SEQ ID NO: 1194244 - RNA, 19 nt, Human
caauguagaggggaaaaga

SEQ ID NO: 1194245 - RNA, 16 nt, Human
caaaaauucucaguuc

SEQ ID NO: 1194246 - RNA, 20 nt, Human
caaagcgaauuuuaaaagau

SEQ ID NO: 1194247 - RNA, 14 nt, Human
caaagcgaauuuua

SEQ ID NO: 1194248 - RNA, 19 nt, Human
caaagcgaauuuuaaaaga

SEQ ID NO: 1194249 - RNA, 15 nt, Human
caaaugucuauaaac

SEQ ID NO: 1194250 - RNA, 14 nt, Human
caaaugucuauaaa

SEQ ID NO: 1194251 - RNA, 21 nt, Human
caaauacgugggcauucaaau

SEQ ID NO: 1194252 - RNA, 22 nt, Human
caaauacgugggcauucaaaug

SEQ ID NO: 1194253 - RNA, 19 nt, Human
cacagugaucaaguuauuu

SEQ ID NO: 1194254 - RNA, 23 nt, Human
aguuguaucagcacguguggccu

SEQ ID NO: 1194255 - RNA, 20 nt, Human
aguuguaucagcacgugugg

SEQ ID NO: 1194256 - RNA, 15 nt, Human
aguugaauuuuacau

SEQ ID NO: 1194257 - RNA, 16 nt, Human
agugucuuuccacucc

SEQ ID NO: 1194258 - RNA, 15 nt, Human
agucauucagauaug

SEQ ID NO: 1194259 - RNA, 20 nt, Human
agucauucagauaugauuca

SEQ ID NO: 1194260 - RNA, 23 nt, Human
agucauucagauaugauucaaau

SEQ ID NO: 1194261 - RNA, 16 nt, Human
augugggggucugugu

SEQ ID NO: 1194262 - RNA, 18 nt, Human
augugggggucugugugu

SEQ ID NO: 1194263 - RNA, 17 nt, Human
augugggggucugugug

SEQ ID NO: 1194264 - RNA, 16 nt, Human
auguaaguaaacgguc

SEQ ID NO: 1194265 - RNA, 23 nt, Human
auggugacuuuugaaaagaggug

SEQ ID NO: 1194266 - RNA, 18 nt, Human
auggcuggagcuagaauu

SEQ ID NO: 1194267 - RNA, 12 nt, Human
augaaaauauuu

SEQ ID NO: 1194268 - RNA, 16 nt, Human
aggaacugcugggcuu

SEQ ID NO: 1194269 - RNA, 20 nt, Human
aggaaauggcuguggagugu

SEQ ID NO: 1194270 - RNA, 22 nt, Human
aggcuauggggauagaugugug

SEQ ID NO: 1194271 - RNA, 21 nt, Human
aggcuauggggauagaugugu

SEQ ID NO: 1194272 - RNA, 19 nt, Human
aggcuauggggauagaugu

SEQ ID NO: 1194273 - RNA, 18 nt, Human
aggcugcagccaggccac

SEQ ID NO: 1194274 - RNA, 21 nt, Human
aggugcuucuaguucugccag

SEQ ID NO: 1194275 - RNA, 22 nt, Human
aggugcuucuaguucugccagg

SEQ ID NO: 1194276 - RNA, 23 nt, Human
aggugcuucuaguucugccagga

SEQ ID NO: 1194277 - RNA, 16 nt, Human
agguggaagagggcug

SEQ ID NO: 1194278 - RNA, 22 nt, Human
agguggcaucagugucuuucca

SEQ ID NO: 1194279 - RNA, 23 nt, Human
agguggcaucagugucuuuccac

SEQ ID NO: 1194280 - RNA, 17 nt, Human
aggggccgggggcaguc

SEQ ID NO: 1194281 - RNA, 13 nt, Human
agccagaggucug

SEQ ID NO: 1194282 - RNA, 14 nt, Human
agcccugaguuccu

SEQ ID NO: 1194283 - RNA, 14 nt, Human
agacgggcccuggu

SEQ ID NO: 1194284 - RNA, 16 nt, Human
agaggguguccugcac

SEQ ID NO: 1194285 - RNA, 18 nt, Human
agaggggaaaagagauga

SEQ ID NO: 1194286 - RNA, 16 nt, Human
agaggggaaaagagau

SEQ ID NO: 1194287 - RNA, 22 nt, Human
aaugucaguauguggaagugug

SEQ ID NO: 1194288 - RNA, 16 nt, Human
aaugucaguaugugga

SEQ ID NO: 1194289 - RNA, 17 nt, Human
aaugaagauacugaaau

SEQ ID NO: 1194290 - RNA, 12 nt, Human
aaugaagauacu

SEQ ID NO: 1194291 - RNA, 20 nt, Human
aaugaagauacugaaauaaa

SEQ ID NO: 1194292 - RNA, 13 nt, Human
aauaaucauugga

SEQ ID NO: 1194293 - RNA, 17 nt, Human
aauaaacgucuuaaaua

SEQ ID NO: 1194294 - RNA, 18 nt, Human
aauaaacuggcagcucag

SEQ ID NO: 1194295 - RNA, 17 nt, Human
aaauggaauacucuuau

SEQ ID NO: 1194296 - RNA, 13 nt, Human
aaauaaaggaacc

SEQ ID NO: 1194297 - RNA, 13 nt, Human
acucagucuuuaa

SEQ ID NO: 1194298 - RNA, 17 nt, Human
acucaggcccaaagccu

SEQ ID NO: 1194299 - RNA, 16 nt, Human
acgccagacuucccac

SEQ ID NO: 1194300 - RNA, 22 nt, Human
acgccagacuucccacggcucc

SEQ ID NO: 1194301 - RNA, 18 nt, Human
agaaaaguugaauuuuac

SEQ ID NO: 1194302 - RNA, 21 nt, Human
agaaaaguugaauuuuacaug

SEQ ID NO: 1194303 - RNA, 20 nt, Human
acuuauuguagcauccugga

SEQ ID NO: 1194304 - RNA, 23 nt, Human
acuuauuguagcauccuggaaua

SEQ ID NO: 1194305 - RNA, 12 nt, Human
accccgacuuuu

SEQ ID NO: 1194306 - RNA, 15 nt, Human
accccgacuuuuguu

SEQ ID NO: 1194307 - RNA, 15 nt, Human
acagguuagcugcuc

SEQ ID NO: 1194308 - RNA, 15 nt, Human
acagguuugggaccc

SEQ ID NO: 1194309 - RNA, 18 nt, Human
acagguuugggaccccug

SEQ ID NO: 1194310 - RNA, 20 nt, Human
acauaaauuuaguauuuugu

SEQ ID NO: 1194311 - RNA, 19 nt, Human
accaagccuggucagccca

SEQ ID NO: 1194312 - RNA, 20 nt, Human
accaagccuggucagcccaa

SEQ ID NO: 1194313 - RNA, 15 nt, Human
acaggggcaggagga

SEQ ID NO: 1194314 - RNA, 15 nt, Human
acacugauccagccc

SEQ ID NO: 1194315 - RNA, 20 nt, Human
acaaaauggaauacucuuau

SEQ ID NO: 1194316 - RNA, 19 nt, Human
acaaaauggaauacucuua

SEQ ID NO: 1194317 - RNA, 20 nt, Human
acaagucagucauucagaua

SEQ ID NO: 1194318 - RNA, 12 nt, Human
auugguguugac

SEQ ID NO: 1194319 - RNA, 15 nt, Human
auugugauguguccu

SEQ ID NO: 1194320 - RNA, 14 nt, Human
auugugaugugucc

SEQ ID NO: 1194321 - RNA, 13 nt, Human
auugugauguguc

SEQ ID NO: 1194322 - RNA, 15 nt, Human
auugggccccugcca

SEQ ID NO: 1194323 - RNA, 16 nt, Human
auugggccccugccag

SEQ ID NO: 1194324 - RNA, 20 nt, Human
auuggguggggggcuucaua

SEQ ID NO: 1194325 - RNA, 21 nt, Human
auuggguggggggcuucauac

SEQ ID NO: 1194326 - RNA, 22 nt, Human
auuggguggggggcuucauaca

SEQ ID NO: 1194327 - RNA, 18 nt, Human
auuuaguauuuuguuuca

SEQ ID NO: 1194328 - RNA, 17 nt, Human
auuucuaggacugaauu

SEQ ID NO: 1194329 - RNA, 16 nt, Human
auuuuacauaaauuua

SEQ ID NO: 1194330 - RNA, 17 nt, Human
auuuuacauaaauuuag

SEQ ID NO: 1194331 - RNA, 18 nt, Human
auguguguguguugugug

SEQ ID NO: 1194332 - RNA, 10 nt, Human
augugugugu

SEQ ID NO: 1194333 - RNA, 23 nt, Human
auguggaagugugggucugugug

SEQ ID NO: 1194334 - RNA, 22 nt, Human
auguggaagugugggucugugu

SEQ ID NO: 1194335 - RNA, 16 nt, Human
auguggaagugugggu

SEQ ID NO: 1194336 - RNA, 15 nt, Human
auguggaaguguggg

SEQ ID NO: 1194337 - RNA, 13 nt, Human
auguggaagugug

SEQ ID NO: 1194338 - RNA, 16 nt, Human
uuuuguuuaccagaga

SEQ ID NO: 1194339 - RNA, 21 nt, Human
auuacaguggggaaugaagau

SEQ ID NO: 1194340 - RNA, 18 nt, Human
auucagauaugauucaaa

SEQ ID NO: 1194341 - RNA, 20 nt, Human
auucagauaugauucaaaug

SEQ ID NO: 1194342 - RNA, 20 nt, Human
uugcuaugagcuggggaugu

SEQ ID NO: 1194343 - RNA, 12 nt, Human
augaaagauuca

SEQ ID NO: 1194344 - RNA, 16 nt, Human
uugugugugggagugu

SEQ ID NO: 1194345 - RNA, 13 nt, Human
uugugugugggag

SEQ ID NO: 1194346 - RNA, 10 nt, Human
uugugugugg

SEQ ID NO: 1194347 - RNA, 13 nt, Human
uugucacgccaga

SEQ ID NO: 1194348 - RNA, 20 nt, Human
uugucacgccagacuuccca

SEQ ID NO: 1194349 - RNA, 18 nt, Human
uugucccugaagagaagg

SEQ ID NO: 1194350 - RNA, 22 nt, Human
uuguccucagccccgcguggaa

SEQ ID NO: 1194351 - RNA, 22 nt, Human
uuucuaggacugaauuaugaaa

SEQ ID NO: 1194352 - RNA, 21 nt, Human
uuucuaggacugaauuaugaa

SEQ ID NO: 1194353 - RNA, 16 nt, Human
uuuaaagcuuccauug

SEQ ID NO: 1194354 - RNA, 17 nt, Human
uuuaaaggcccuaucug

SEQ ID NO: 1194355 - RNA, 16 nt, Human
uucagauuugccuuau

SEQ ID NO: 1194356 - RNA, 19 nt, Human
uucagauaugauucaaaug

SEQ ID NO: 1194357 - RNA, 16 nt, Human
uucagauaugauucaa

SEQ ID NO: 1194358 - RNA, 17 nt, Human
uucagauaugauucaaa

SEQ ID NO: 1194359 - RNA, 18 nt, Human
uucagauaugauucaaau

SEQ ID NO: 1194360 - RNA, 9 nt, Human
auauauuuc

SEQ ID NO: 1194361 - RNA, 22 nt, Human
uucaugcuguucaugaaagauu

SEQ ID NO: 1194362 - RNA, 12 nt, Human
uuccugaacagg

SEQ ID NO: 1194363 - RNA, 14 nt, Human
uuccugaacaggau

SEQ ID NO: 1194364 - RNA, 21 nt, Human
auauuugaauguaugcuucau

SEQ ID NO: 1194365 - RNA, 21 nt, Human
auauucucacagcuccaagaa

SEQ ID NO: 1194366 - RNA, 18 nt, Human
auauucucacagcuccaa

SEQ ID NO: 1194367 - RNA, 20 nt, Human
aucauuaucagccugugcca

SEQ ID NO: 1194368 - RNA, 20 nt, Human
auccauggggcugauuguau

SEQ ID NO: 1194369 - RNA, 16 nt, Human
aucggggagccgggag

SEQ ID NO: 1194370 - RNA, 18 nt, Human
aucggggagccgggagcc

SEQ ID NO: 1194371 - RNA, 18 nt, Human
uguugggagugaggaugu

SEQ ID NO: 1194372 - RNA, 17 nt, Human
aguuccuagccaccgcc

SEQ ID NO: 1194373 - RNA, 17 nt, Human
aguuacccaaauuaaga

SEQ ID NO: 1194374 - RNA, 18 nt, Human
aguuacccaaauuaagag

SEQ ID NO: 1194375 - RNA, 14 nt, Human
ugugcaagagaggg

SEQ ID NO: 1194376 - RNA, 20 nt, Human
aguucucuucacucaaggau

SEQ ID NO: 1194377 - RNA, 14 nt, Human
uuaucaacauuugu

SEQ ID NO: 1194378 - RNA, 19 nt, Human
uuauauauauauauauuuc

SEQ ID NO: 1194379 - RNA, 22 nt, Human
uuauauauauuuuuuucugaaa

SEQ ID NO: 1194380 - RNA, 15 nt, Human
auaaacgucuuaaau

SEQ ID NO: 1194381 - RNA, 16 nt, Human
auaaacgucuuaaaua

SEQ ID NO: 1194382 - RNA, 18 nt, Human
auaaacgucuuaaauauu

SEQ ID NO: 1194383 - RNA, 18 nt, Human
auaaacuggcagcucagc

SEQ ID NO: 1194384 - RNA, 16 nt, Human
auaaaccgaacugaug

SEQ ID NO: 1194385 - RNA, 23 nt, Human
ugggaauaagugccaggauggaa

SEQ ID NO: 1194386 - RNA, 22 nt, Human
agggucuugguuccagccugcc

SEQ ID NO: 1194387 - RNA, 15 nt, Human
ugggucugugugugu

SEQ ID NO: 1194388 - RNA, 13 nt, Human
ugggucugugugu

SEQ ID NO: 1194389 - RNA, 23 nt, Human
agguagcuuugagguggaagagg

SEQ ID NO: 1194390 - RNA, 16 nt, Human
uggucugggacucucu

SEQ ID NO: 1194391 - RNA, 21 nt, Human
uguagaagucacauuccugaa

SEQ ID NO: 1194392 - RNA, 20 nt, Human
ugguucacucuuggagccug

SEQ ID NO: 1194393 - RNA, 21 nt, Human
ugguucacucuuggagccugc

SEQ ID NO: 1194394 - RNA, 22 nt, Human
ugguucacucuuggagccugca

SEQ ID NO: 1194395 - RNA, 17 nt, Human
ugguucacucuuggagc

SEQ ID NO: 1194396 - RNA, 21 nt, Human
ugguguucaaaaaacuuguaa

SEQ ID NO: 1194397 - RNA, 22 nt, Human
ugguguucaaaaaacuuguaaa

SEQ ID NO: 1194398 - RNA, 11 nt, Human
ugugauguguc

SEQ ID NO: 1194399 - RNA, 13 nt, Human
agucccugccugg

SEQ ID NO: 1194400 - RNA, 21 nt, Human
ugucuuuccacuccuccuagc

SEQ ID NO: 1194401 - RNA, 22 nt, Human
uguauccauccauggggcugau

SEQ ID NO: 1194402 - RNA, 16 nt, Human
agguuugggaccccug

SEQ ID NO: 1194403 - RNA, 21 nt, Human
agguuugggaccccugguggu

SEQ ID NO: 1194404 - RNA, 23 nt, Human
agguuuggacaaaauggaauacu

SEQ ID NO: 1194405 - RNA, 22 nt, Human
uguaugugggggucuguguguu

SEQ ID NO: 1194406 - RNA, 21 nt, Human
uguaugugggggucugugugu

SEQ ID NO: 1194407 - RNA, 18 nt, Human
agucacauuccugaacag

SEQ ID NO: 1194408 - RNA, 16 nt, Human
aguccaucagccucca

SEQ ID NO: 1194409 - RNA, 13 nt, Human
aguccaucagccu

SEQ ID NO: 1194410 - RNA, 14 nt, Human
aguccaucagccuc

SEQ ID NO: 1194411 - RNA, 15 nt, Human
agucagucauucaga

SEQ ID NO: 1194412 - RNA, 21 nt, Human
agucagucauucagauaugau

SEQ ID NO: 1194413 - RNA, 14 nt, Human
agcugccugugccu

SEQ ID NO: 1194414 - RNA, 18 nt, Human
agcuccaagaauuucuag

SEQ ID NO: 1194415 - RNA, 15 nt, Human
agcuccaagaauuuc

SEQ ID NO: 1194416 - RNA, 21 nt, Human
agcggcuggacuuggagguag

SEQ ID NO: 1194417 - RNA, 22 nt, Human
uggcugccuugugaaggaauua

SEQ ID NO: 1194418 - RNA, 16 nt, Human
uggcucuugaacugag

SEQ ID NO: 1194419 - RNA, 22 nt, Human
uggcucuugaacugagcuugga

SEQ ID NO: 1194420 - RNA, 13 nt, Human
aggcugcuuucca

SEQ ID NO: 1194421 - RNA, 14 nt, Human
aggcugcuuuccaa

SEQ ID NO: 1194422 - RNA, 15 nt, Human
aggcugcuuuccaaa

SEQ ID NO: 1194423 - RNA, 17 nt, Human
aggcugcuuuccaaagc

SEQ ID NO: 1194424 - RNA, 18 nt, Human
aggcugcuuuccaaagcc

SEQ ID NO: 1194425 - RNA, 19 nt, Human
aggcugcuuuccaaagcca

SEQ ID NO: 1194426 - RNA, 21 nt, Human
aggcugcuuuccaaagccaau

SEQ ID NO: 1194427 - RNA, 22 nt, Human
uggaccuuuccugaggaagagg

SEQ ID NO: 1194428 - RNA, 23 nt, Human
uggccaguggcuggaucugugag

SEQ ID NO: 1194429 - RNA, 16 nt, Human
uggccaguggcuggau

SEQ ID NO: 1194430 - RNA, 15 nt, Human
uggccaguggcugga

SEQ ID NO: 1194431 - RNA, 14 nt, Human
uggccaguggcugg

SEQ ID NO: 1194432 - RNA, 21 nt, Human
aggccucucauuccagaggaa

SEQ ID NO: 1194433 - RNA, 17 nt, Human
aggccauucuuucccaa

SEQ ID NO: 1194434 - RNA, 18 nt, Human
aggccauucuuucccaac

SEQ ID NO: 1194435 - RNA, 19 nt, Human
aggccauucuuucccaaca

SEQ ID NO: 1194436 - RNA, 12 nt, Human
aggcccaaagcc

SEQ ID NO: 1194437 - RNA, 13 nt, Human
aggcccaaagccu

SEQ ID NO: 1194438 - RNA, 15 nt, Human
aggcccaaagccucg

SEQ ID NO: 1194439 - RNA, 16 nt, Human
uggaccagccucucca

SEQ ID NO: 1194440 - RNA, 22 nt, Human
uggaccagccucuccacucaug

SEQ ID NO: 1194441 - RNA, 22 nt, Human
uggaauuggguggggggcuuca

SEQ ID NO: 1194442 - RNA, 19 nt, Human
aggacugaauuaugaaacu

SEQ ID NO: 1194443 - RNA, 20 nt, Human
aggacugaauuaugaaacuu

SEQ ID NO: 1194444 - RNA, 15 nt, Human
ugcuguagacauuug

SEQ ID NO: 1194445 - RNA, 11 nt, Human
ugcuucauaca

SEQ ID NO: 1194446 - RNA, 14 nt, Human
ugcuucauacaggg

SEQ ID NO: 1194447 - RNA, 15 nt, Human
ugcuucauacaggga

SEQ ID NO: 1194448 - RNA, 16 nt, Human
ugcuucauacagggau

SEQ ID NO: 1194449 - RNA, 22 nt, Human
ugcuauuguagagccagagguc

SEQ ID NO: 1194450 - RNA, 13 nt, Human
ugcuccccacguc

SEQ ID NO: 1194451 - RNA, 13 nt, Human
ugagagaggccau

SEQ ID NO: 1194452 - RNA, 17 nt, Human
ugagagcugugcaucag

SEQ ID NO: 1194453 - RNA, 15 nt, Human
ugacagguuugggac

SEQ ID NO: 1194454 - RNA, 16 nt, Human
agaggcugcagccagg

SEQ ID NO: 1194455 - RNA, 13 nt, Human
ugaaauaaacguc

SEQ ID NO: 1194456 - RNA, 18 nt, Human
ugaaauaaacgucuuaaa

SEQ ID NO: 1194457 - RNA, 22 nt, Human
ugaaauaaacgucuuaaauauu

SEQ ID NO: 1194458 - RNA, 23 nt, Human
ugaaauaaacgucuuaaauauuc

SEQ ID NO: 1194459 - RNA, 21 nt, Human
ugaaauuuccugggagcuuuu

SEQ ID NO: 1194460 - RNA, 23 nt, Human
ugaaauuuccugggagcuuuugu

SEQ ID NO: 1194461 - RNA, 15 nt, Human
ugaaauuuccuggga

SEQ ID NO: 1194462 - RNA, 12 nt, Human
agacuccaccaa

SEQ ID NO: 1194463 - RNA, 16 nt, Human
agacuccaccaagccu

SEQ ID NO: 1194464 - RNA, 13 nt, Human
agaaugucaguau

SEQ ID NO: 1194465 - RNA, 22 nt, Human
agaauuugauaugugaacaguu

SEQ ID NO: 1194466 - RNA, 14 nt, Human
ucuguuuacagugu

SEQ ID NO: 1194467 - RNA, 11 nt, Human
agaagcccaga

SEQ ID NO: 1194468 - RNA, 12 nt, Human
agaagcccagaa

SEQ ID NO: 1194469 - RNA, 13 nt, Human
agaagcccagaau

SEQ ID NO: 1194470 - RNA, 14 nt, Human
agaagaaguguguc

SEQ ID NO: 1194471 - RNA, 17 nt, Human
ucuaguucugccaggag

SEQ ID NO: 1194472 - RNA, 15 nt, Human
ucuaguucugccagg

SEQ ID NO: 1194473 - RNA, 16 nt, Human
ucuaguucugccagga

SEQ ID NO: 1194474 - RNA, 18 nt, Human
uccugcaccggggccugg

SEQ ID NO: 1194475 - RNA, 19 nt, Human
uccugcaccggggccuggg

SEQ ID NO: 1194476 - RNA, 15 nt, Human
uccugggagcuuuug

SEQ ID NO: 1194477 - RNA, 22 nt, Human
uccuggaauaucuccgucaacu

SEQ ID NO: 1194478 - RNA, 19 nt, Human
acucuuauaucuauauuuu

SEQ ID NO: 1194479 - RNA, 14 nt, Human
acucuuggagccug

SEQ ID NO: 1194480 - RNA, 15 nt, Human
acucuuggagccugc

SEQ ID NO: 1194481 - RNA, 16 nt, Human
acucuuggagccugca

SEQ ID NO: 1194482 - RNA, 22 nt, Human
acucuuggagccugcagagcug

SEQ ID NO: 1194483 - RNA, 23 nt, Human
acucuuggagccugcagagcugc

SEQ ID NO: 1194484 - RNA, 22 nt, Human
acucuuauaucuauauuuuaca

SEQ ID NO: 1194485 - RNA, 16 nt, Human
acucuuauaucuauau

SEQ ID NO: 1194486 - RNA, 17 nt, Human
acucuuauaucuauauu

SEQ ID NO: 1194487 - RNA, 18 nt, Human
acucuuauaucuauauuu

SEQ ID NO: 1194488 - RNA, 13 nt, Human
acuccuccuagcc

SEQ ID NO: 1194489 - RNA, 18 nt, Human
acguaaugaaacuuggau

SEQ ID NO: 1194490 - RNA, 13 nt, Human
uccagccugccac

SEQ ID NO: 1194491 - RNA, 20 nt, Human
uccagcccugaguuccuagc

SEQ ID NO: 1194492 - RNA, 22 nt, Human
uccagcccugaguuccuagcca

SEQ ID NO: 1194493 - RNA, 23 nt, Human
ucacagcaagucacuggccagug

SEQ ID NO: 1194494 - RNA, 16 nt, Human
accaaagcgaauuuua

SEQ ID NO: 1194495 - RNA, 13 nt, Human
accaccagaagcc

SEQ ID NO: 1194496 - RNA, 14 nt, Human
acauuccugaacag

SEQ ID NO: 1194497 - RNA, 15 nt, Human
acauuccugaacagg

SEQ ID NO: 1194498 - RNA, 22 nt, Human
ucagauuugccuuauuggcagc

SEQ ID NO: 1194499 - RNA, 17 nt, Human
ucagauuugccuuauug

SEQ ID NO: 1194500 - RNA, 16 nt, Human
accccuggugguucac

SEQ ID NO: 1194501 - RNA, 12 nt, Human
accuaggcuagg

SEQ ID NO: 1194502 - RNA, 17 nt, Human
accuaggcuaggguggg

SEQ ID NO: 1194503 - RNA, 14 nt, Human
ucaugugacucuuu

SEQ ID NO: 1194504 - RNA, 17 nt, Human
ucaugugacucuuucca

SEQ ID NO: 1194505 - RNA, 17 nt, Human
ucauguuuacagaggac

SEQ ID NO: 1194506 - RNA, 18 nt, Human
ucaugugacucuuuccaa

SEQ ID NO: 1194507 - RNA, 19 nt, Human
ucaugugacucuuuccaac

SEQ ID NO: 1194508 - RNA, 16 nt, Human
ucaugaaagauucaau

SEQ ID NO: 1194509 - RNA, 17 nt, Human
ucaugaaagauucaaug

SEQ ID NO: 1194510 - RNA, 16 nt, Human
ucaguauguggaagug

SEQ ID NO: 1194511 - RNA, 14 nt, Human
ucaguauguggaag

SEQ ID NO: 1194512 - RNA, 12 nt, Human
ucaguaugugga

SEQ ID NO: 1194513 - RNA, 16 nt, Human
ucauaaauuuaugguu

SEQ ID NO: 1194514 - RNA, 13 nt, Human
accgaggcaggga

SEQ ID NO: 1194515 - RNA, 15 nt, Human
ucauauuuucaugcu

SEQ ID NO: 1194516 - RNA, 22 nt, Human
uaacuuaaaagaacauguauau

SEQ ID NO: 1194517 - RNA, 13 nt, Human
uaagaauauuuga

SEQ ID NO: 1194518 - RNA, 14 nt, Human
uaagaauauuugaa

SEQ ID NO: 1194519 - RNA, 15 nt, Human
uaagaauauuugaau

SEQ ID NO: 1194520 - RNA, 14 nt, Human
aauauuugaaugua

SEQ ID NO: 1194521 - RNA, 21 nt, Human
aauauuugaauguaugcuuca

SEQ ID NO: 1194522 - RNA, 23 nt, Human
aauauuugaauguaugcuucaua

SEQ ID NO: 1194523 - RNA, 14 nt, Human
aaugaaacuuggau

SEQ ID NO: 1194524 - RNA, 15 nt, Human
aauuaagagagucua

SEQ ID NO: 1194525 - RNA, 22 nt, Human
aauguauuacaguggggaauga

SEQ ID NO: 1194526 - RNA, 20 nt, Human
uauggggauagaugugugga

SEQ ID NO: 1194527 - RNA, 23 nt, Human
uaucuauauuuuacauaaauuua

SEQ ID NO: 1194528 - RNA, 16 nt, Human
uauguggaaguguggg

SEQ ID NO: 1194529 - RNA, 12 nt, Human
uauguggaagug

SEQ ID NO: 1194530 - RNA, 12 nt, Human
uaugugaacagu

SEQ ID NO: 1194531 - RNA, 22 nt, Human
uaugugaacaguuguguuugaa

SEQ ID NO: 1194532 - RNA, 21 nt, Human
acagcggcuggacuuggaggu

SEQ ID NO: 1194533 - RNA, 22 nt, Human
acagcggcuggacuuggaggua

SEQ ID NO: 1194534 - RNA, 16 nt, Human
acaccucuuggggagu

SEQ ID NO: 1194535 - RNA, 21 nt, Human
guguaugugggggucugugug

SEQ ID NO: 1194536 - RNA, 13 nt, Human
guguauguggggg

SEQ ID NO: 1194537 - RNA, 16 nt, Human
aagaggugugcaagag

SEQ ID NO: 1194538 - RNA, 18 nt, Human
aagaggugugcaagagag

SEQ ID NO: 1194539 - RNA, 22 nt, Human
gugguucacucuuggagccugc

SEQ ID NO: 1194540 - RNA, 23 nt, Human
gugguucacucuuggagccugca

SEQ ID NO: 1194541 - RNA, 12 nt, Human
guguuugaagca

SEQ ID NO: 1194542 - RNA, 18 nt, Human
aagccuggucagcccaaa

SEQ ID NO: 1194543 - RNA, 12 nt, Human
guucagcuuggg

SEQ ID NO: 1194544 - RNA, 21 nt, Human
aagucacuggccaguggcugg

SEQ ID NO: 1194545 - RNA, 19 nt, Human
guuuggacaaaauggaaua

SEQ ID NO: 1194546 - RNA, 15 nt, Human
guuuuaaagcuucca

SEQ ID NO: 1194547 - RNA, 21 nt, Human
aagggguaggauuacuaggug

SEQ ID NO: 1194548 - RNA, 18 nt, Human
aagugugggucugugugu

SEQ ID NO: 1194549 - RNA, 17 nt, Human
aagugugggucugugug

SEQ ID NO: 1194550 - RNA, 10 nt, Human
aagugugggu

SEQ ID NO: 1194551 - RNA, 20 nt, Human
aagugugggucugugugugu

SEQ ID NO: 1194552 - RNA, 16 nt, Human
uaaaauugugaugugu

SEQ ID NO: 1194553 - RNA, 15 nt, Human
uaaaauugugaugug

SEQ ID NO: 1194554 - RNA, 19 nt, Human
aaguuauuuuuaauuuggu

SEQ ID NO: 1194555 - RNA, 10 nt, Human
gugauguguc

SEQ ID NO: 1194556 - RNA, 15 nt, Human
gugcucuccaagccc

SEQ ID NO: 1194557 - RNA, 12 nt, Human
aacgucuuaaau

SEQ ID NO: 1194558 - RNA, 14 nt, Human
aacgucuuaaauau

SEQ ID NO: 1194559 - RNA, 15 nt, Human
aacgucuuaaauauu

SEQ ID NO: 1194560 - RNA, 22 nt, Human
gucuuuccacuccuccuagcca

SEQ ID NO: 1194561 - RNA, 15 nt, Human
guccaucagccucca

SEQ ID NO: 1194562 - RNA, 22 nt, Human
guccccagacuccaccaagccu

SEQ ID NO: 1194563 - RNA, 22 nt, Human
gucccgggacaccuaggcuagg

SEQ ID NO: 1194564 - RNA, 20 nt, Human
gucuauuuacggaacucaaa

SEQ ID NO: 1194565 - RNA, 18 nt, Human
gucacauuccugaacagg

SEQ ID NO: 1194566 - RNA, 22 nt, Human
gguuuguuuagaagaagugugu

SEQ ID NO: 1194567 - RNA, 17 nt, Human
gguuuucacauuggaaa

SEQ ID NO: 1194568 - RNA, 20 nt, Human
gguuuucacauuggaaacaa

SEQ ID NO: 1194569 - RNA, 22 nt, Human
gguggggggggggcgcggcugg

SEQ ID NO: 1194570 - RNA, 21 nt, Human
gguggggagagacgggcccug

SEQ ID NO: 1194571 - RNA, 16 nt, Human
gguggggggcuucaua

SEQ ID NO: 1194572 - RNA, 18 nt, Human
gguggggggcuucauaca

SEQ ID NO: 1194573 - RNA, 15 nt, Human
gguuccagccugcca

SEQ ID NO: 1194574 - RNA, 16 nt, Human
gguuccagccugccac

SEQ ID NO: 1194575 - RNA, 20 nt, Human
aaauacgugggcauucaaau

SEQ ID NO: 1194576 - RNA, 21 nt, Human
aaauacgugggcauucaaaug

SEQ ID NO: 1194577 - RNA, 22 nt, Human
aaauacgugggcauucaaaugu

SEQ ID NO: 1194578 - RNA, 18 nt, Human
gguaggaacugcugggcu

SEQ ID NO: 1194579 - RNA, 17 nt, Human
ggguguccugcaccggg

SEQ ID NO: 1194580 - RNA, 21 nt, Human
ggguguccugcaccggggccu

SEQ ID NO: 1194581 - RNA, 18 nt, Human
gggucauucauggccugg

SEQ ID NO: 1194582 - RNA, 21 nt, Human
gggucaucuguaccucugccu

SEQ ID NO: 1194583 - RNA, 15 nt, Human
aaaccaccagaagcc

SEQ ID NO: 1194584 - RNA, 18 nt, Human
aaaccaccagaagcccag

SEQ ID NO: 1194585 - RNA, 19 nt, Human
aaaccaccagaagcccaga

SEQ ID NO: 1194586 - RNA, 22 nt, Human
gggggcagucugagagaggcca

SEQ ID NO: 1194587 - RNA, 22 nt, Human
gggggcuucauacacaugagau

SEQ ID NO: 1194588 - RNA, 14 nt, Human
aaaauauuuaaagg

SEQ ID NO: 1194589 - RNA, 23 nt, Human
ggcaucggggagccgggagccug

SEQ ID NO: 1194590 - RNA, 22 nt, Human
ggcaucggggagccgggagccu

SEQ ID NO: 1194591 - RNA, 16 nt, Human
ggcauccagagucccu

SEQ ID NO: 1194592 - RNA, 18 nt, Human
ggcauccagagucccugc

SEQ ID NO: 1194593 - RNA, 14 nt, Human
ggcaggagggaggu

SEQ ID NO: 1194594 - RNA, 12 nt, Human
ggcaggggccgg

SEQ ID NO: 1194595 - RNA, 14 nt, Human
ggagggggagaggg

SEQ ID NO: 1194596 - RNA, 22 nt, Human
ggaguguguaauuuaaaauugu

SEQ ID NO: 1194597 - RNA, 11 nt, Human
ggaguguguaa

SEQ ID NO: 1194598 - RNA, 15 nt, Human
ggaugguguucaaaa

SEQ ID NO: 1194599 - RNA, 18 nt, Human
ggcucuugaacugagcuu

SEQ ID NO: 1194600 - RNA, 19 nt, Human
ggcucuugaacugagcuug

SEQ ID NO: 1194601 - RNA, 20 nt, Human
ggcucuugaacugagcuugg

SEQ ID NO: 1194602 - RNA, 16 nt, Human
ggacaccccgacuuuu

SEQ ID NO: 1194603 - RNA, 19 nt, Human
ggaauacucuuauaucuau

SEQ ID NO: 1194604 - RNA, 18 nt, Human
ggacaguauuugugggga

SEQ ID NO: 1194605 - RNA, 17 nt, Human
ggacaggggcaggagga

SEQ ID NO: 1194606 - RNA, 19 nt, Human
ggacaguauuuguggggag

SEQ ID NO: 1194607 - RNA, 16 nt, Human
ggacaccuaggcuagg

SEQ ID NO: 1194608 - RNA, 22 nt, Human
gcuuuuccucaaagggagagag

SEQ ID NO: 1194609 - RNA, 17 nt, Human
gcuuuucuuucuaccaa

SEQ ID NO: 1194610 - RNA, 20 nt, Human
gcugggaauaagugccagga

SEQ ID NO: 1194611 - RNA, 23 nt, Human
gcugggacaccccgacuuuuguu

SEQ ID NO: 1194612 - RNA, 13 nt, Human
gcuggacuuggag

SEQ ID NO: 1194613 - RNA, 15 nt, Human
gcugcagccaggcca

SEQ ID NO: 1194614 - RNA, 23 nt, Human
gcugcagccaggccacuggcccc

SEQ ID NO: 1194615 - RNA, 21 nt, Human
gcguggaacucgugucuggca

SEQ ID NO: 1194616 - RNA, 13 nt, Human
gcggcugggagga

SEQ ID NO: 1194617 - RNA, 16 nt, Human
gcggcuggacuuggag

SEQ ID NO: 1194618 - RNA, 15 nt, Human
gcggcuggacuugga

SEQ ID NO: 1194619 - RNA, 17 nt, Human
gcuaggguggggagaga

SEQ ID NO: 1194620 - RNA, 18 nt, Human
gcuaggguggggagagac

SEQ ID NO: 1194621 - RNA, 18 nt, Human
gcucagaggguguccugc

SEQ ID NO: 1194622 - RNA, 19 nt, Human
gcucagaggguguccugca

SEQ ID NO: 1194623 - RNA, 21 nt, Human
gcucagaggguguccugcacc

SEQ ID NO: 1194624 - RNA, 21 nt, Human
gcucacugcuaagaauauuug

SEQ ID NO: 1194625 - RNA, 19 nt, Human
gccauucuuucccaacacc

SEQ ID NO: 1194626 - RNA, 17 nt, Human
gcaucggggagccggga

SEQ ID NO: 1194627 - RNA, 22 nt, Human
gcauccagagucccugccugga

SEQ ID NO: 1194628 - RNA, 23 nt, Human
gcauccagagucccugccuggac

SEQ ID NO: 1194629 - RNA, 21 nt, Human
gcauccagagucccugccugg

SEQ ID NO: 1194630 - RNA, 20 nt, Human
gcagccaggccacuggcccc

SEQ ID NO: 1194631 - RNA, 17 nt, Human
gcagagcugcgggcugg

SEQ ID NO: 1194632 - RNA, 19 nt, Human
gcagagcugcgggcugggu

SEQ ID NO: 1194633 - RNA, 17 nt, Human
gaucccaacacugccag

SEQ ID NO: 1194634 - RNA, 23 nt, Human
gauccagcccugaguuccuagcc

SEQ ID NO: 1194635 - RNA, 18 nt, Human
gaucccaacacugccagc

SEQ ID NO: 1194636 - RNA, 19 nt, Human
gaucccaacacugccagca

SEQ ID NO: 1194637 - RNA, 15 nt, Human
gaucccaugagcucc

SEQ ID NO: 1194638 - RNA, 12 nt, Human
gaucucugcagg

SEQ ID NO: 1194639 - RNA, 23 nt, Human
gaucucugcaggaaauggcugug

SEQ ID NO: 1194640 - RNA, 12 nt, Human
gauacugaaaua

SEQ ID NO: 1194641 - RNA, 13 nt, Human
gauggaaugaugg

SEQ ID NO: 1194642 - RNA, 16 nt, Human
gagacgggcccuggug

SEQ ID NO: 1194643 - RNA, 22 nt, Human
gaggacaguauuuguggggagg

SEQ ID NO: 1194644 - RNA, 22 nt, Human
gaauaucuccgucaacucauau

SEQ ID NO: 1194645 - RNA, 15 nt, Human
gacaaagucaagcca

SEQ ID NO: 1194646 - RNA, 13 nt, Human
gaauuauuuuaaa

SEQ ID NO: 1194647 - RNA, 16 nt, Human
gaauuauuuuaaaaga

SEQ ID NO: 1194648 - RNA, 18 nt, Human
gaauuauuuuaaaagaua

SEQ ID NO: 1194649 - RNA, 14 nt, Human
gacaaaaagcuacu

SEQ ID NO: 1194650 - RNA, 17 nt, Human
cuucuaccucuuggcug

SEQ ID NO: 1194651 - RNA, 15 nt, Human
cuuccucuccugucu

SEQ ID NO: 1194652 - RNA, 19 nt, Human
cuuccucuccugucucccu

SEQ ID NO: 1194653 - RNA, 20 nt, Human
cuugguuccagccugccacu

SEQ ID NO: 1194654 - RNA, 17 nt, Human
cuugguuccagccugcc

SEQ ID NO: 1194655 - RNA, 19 nt, Human
cuugguuccagccugccac

SEQ ID NO: 1194656 - RNA, 14 nt, Human
cuuuugucccagaa

SEQ ID NO: 1194657 - RNA, 18 nt, Human
cuuuuggaagguauuuaa

SEQ ID NO: 1194658 - RNA, 11 nt, Human
gaaacuuggau

SEQ ID NO: 1194659 - RNA, 23 nt, Human
cuggcccuaugcuuccggccucc

SEQ ID NO: 1194660 - RNA, 19 nt, Human
cuguuaucccugccugguc

SEQ ID NO: 1194661 - RNA, 22 nt, Human
cuggugaccuuccaagagccug

SEQ ID NO: 1194662 - RNA, 23 nt, Human
cuggugaccuuccaagagccuga

SEQ ID NO: 1194663 - RNA, 18 nt, Human
cagggcugaggccucuca

SEQ ID NO: 1194664 - RNA, 16 nt, Human
cagggcugaggccucu

SEQ ID NO: 1194665 - RNA, 16 nt, Human
cagggaugguguucaa

SEQ ID NO: 1194666 - RNA, 17 nt, Human
cagucugagagaggcca

SEQ ID NO: 1194667 - RNA, 14 nt, Human
cagugggccuggcc

SEQ ID NO: 1194668 - RNA, 15 nt, Human
cagugggccuggcca

SEQ ID NO: 1194669 - RNA, 21 nt, Human
cagugggccuggccagcaggu

SEQ ID NO: 1194670 - RNA, 14 nt, Human
caguggggaaugaa

SEQ ID NO: 1194671 - RNA, 23 nt, Human
cagaucauuaucagccugugcca

SEQ ID NO: 1194672 - RNA, 17 nt, Human
cagaggguguccugcac

SEQ ID NO: 1194673 - RNA, 19 nt, Human
ccaaugugaacagcggcug

SEQ ID NO: 1194674 - RNA, 16 nt, Human
cauuuguguugaagag

SEQ ID NO: 1194675 - RNA, 20 nt, Human
cauuuguguugaagagguuu

SEQ ID NO: 1194676 - RNA, 21 nt, Human
ccaccacacugauccagcccu

SEQ ID NO: 1194677 - RNA, 17 nt, Human
ccaccgccuccuacagc

SEQ ID NO: 1194678 - RNA, 13 nt, Human
ccaccgccuccua

SEQ ID NO: 1194679 - RNA, 14 nt, Human
ccacuccuccuagc

SEQ ID NO: 1194680 - RNA, 12 nt, Human
cauccuggaaua

SEQ ID NO: 1194681 - RNA, 17 nt, Human
cauggcucccccuccac

SEQ ID NO: 1194682 - RNA, 19 nt, Human
auucuuugaccuguuggga

SEQ ID NO: 1194683 - RNA, 13 nt, Human
auuccugaacagg

SEQ ID NO: 1194684 - RNA, 13 nt, Human
auucugagagcug

SEQ ID NO: 1194685 - RNA, 14 nt, Human
auucugagagcugu

SEQ ID NO: 1194686 - RNA, 18 nt, Human
caacaccucuuggggagu

SEQ ID NO: 1194687 - RNA, 16 nt, Human
caaagucaagccacau

SEQ ID NO: 1194688 - RNA, 20 nt, Human
caaauccuugugggaaaaga

SEQ ID NO: 1194689 - RNA, 22 nt, Human
caaaugagggucuugguuccag

SEQ ID NO: 1194690 - RNA, 23 nt, Human
caagaauuucuaggacugaauua

SEQ ID NO: 1194691 - RNA, 15 nt, Human
caaaccaccagaagc

SEQ ID NO: 1194692 - RNA, 16 nt, Human
caaaccaccagaagcc

SEQ ID NO: 1194693 - RNA, 20 nt, Human
caaaccaccagaagcccaga

SEQ ID NO: 1194694 - RNA, 22 nt, Human
caaaccaccagaagcccagaau

SEQ ID NO: 1194695 - RNA, 13 nt, Human
cacuggggcaggg

SEQ ID NO: 1194696 - RNA, 23 nt, Human
cacuggggauugggccccugcca

SEQ ID NO: 1194697 - RNA, 15 nt, Human
cacuggggcaggggc

SEQ ID NO: 1194698 - RNA, 19 nt, Human
cacuggggcaggggccggg

SEQ ID NO: 1194699 - RNA, 15 nt, Human
cacuggggauugggc

SEQ ID NO: 1194700 - RNA, 16 nt, Human
cacuggggauugggcc

SEQ ID NO: 1194701 - RNA, 17 nt, Human
cacuggggauugggccc

SEQ ID NO: 1194702 - RNA, 18 nt, Human
cacuggggauugggcccc

SEQ ID NO: 1194703 - RNA, 21 nt, Human
cagaauaaacuggcagcucag

SEQ ID NO: 1194704 - RNA, 17 nt, Human
cacucuuggagccugca

SEQ ID NO: 1194705 - RNA, 19 nt, Human
cacucuuggagccugcaga

SEQ ID NO: 1194706 - RNA, 21 nt, Human
cacucuuggagccugcagagc

SEQ ID NO: 1194707 - RNA, 14 nt, Human
cacucuuggagccu

SEQ ID NO: 1194708 - RNA, 15 nt, Human
cacucuuggagccug

SEQ ID NO: 1194709 - RNA, 16 nt, Human
cacucuuggagccugc

SEQ ID NO: 1194710 - RNA, 17 nt, Human
ccauccuacccccugug

SEQ ID NO: 1194711 - RNA, 22 nt, Human
ccagggggccagucccugaggc

SEQ ID NO: 1194712 - RNA, 22 nt, Human
cuaauucuuugaccuguuggga

SEQ ID NO: 1194713 - RNA, 21 nt, Human
cuaauucuuugaccuguuggg

SEQ ID NO: 1194714 - RNA, 23 nt, Human
cuagaauuugauaugugaacagu

SEQ ID NO: 1194715 - RNA, 16 nt, Human
cgaauuuuaaaagaug

SEQ ID NO: 1194716 - RNA, 15 nt, Human
cucgugucuggcaca

SEQ ID NO: 1194717 - RNA, 14 nt, Human
cuccucuuccaggc

SEQ ID NO: 1194718 - RNA, 12 nt, Human
cuccuacagccc

SEQ ID NO: 1194719 - RNA, 18 nt, Human
cucaugugacucuuucca

SEQ ID NO: 1194720 - RNA, 13 nt, Human
cuccaagaauuuc

SEQ ID NO: 1194721 - RNA, 14 nt, Human
cuccaagaauuucu

SEQ ID NO: 1194722 - RNA, 23 nt, Human
cuccaagcccaguucagcuuggg

SEQ ID NO: 1194723 - RNA, 12 nt, Human
cugagaggccac

SEQ ID NO: 1194724 - RNA, 13 nt, Human
cugagagaggcca

SEQ ID NO: 1194725 - RNA, 14 nt, Human
cugagagaggccau

SEQ ID NO: 1194726 - RNA, 21 nt, Human
cugagagaggccauucuuucc

SEQ ID NO: 1194727 - RNA, 22 nt, Human
cugagagaggccauucuuuccc

SEQ ID NO: 1194728 - RNA, 16 nt, Human
cugagaucucugcagg

SEQ ID NO: 1194729 - RNA, 17 nt, Human
cugagaucucugcagga

SEQ ID NO: 1194730 - RNA, 18 nt, Human
cugagaucucugcaggaa

SEQ ID NO: 1194731 - RNA, 21 nt, Human
uuuuauuuuucucaugaugag

SEQ ID NO: 1194732 - RNA, 16 nt, Human
uuuucacauuggaaac

SEQ ID NO: 1194733 - RNA, 21 nt, Human
uuccugaggaagagggacugu

SEQ ID NO: 1194734 - RNA, 13 nt, Human
uucugagagcugu

SEQ ID NO: 1194735 - RNA, 19 nt, Human
uucugagagcugugcauca

SEQ ID NO: 1194736 - RNA, 19 nt, Human
uugacaaagucaagccaca

SEQ ID NO: 1194737 - RNA, 20 nt, Human
uugacaaagucaagccacau

SEQ ID NO: 1194738 - RNA, 12 nt, Human
uugaauuuuaca

SEQ ID NO: 1194739 - RNA, 13 nt, Human
uugaaaagaggug

SEQ ID NO: 1194740 - RNA, 14 nt, Human
uugaaaagaggugu

SEQ ID NO: 1194741 - RNA, 21 nt, Human
uugaaaagaggugugcaagag

SEQ ID NO: 1194742 - RNA, 13 nt, Human
uucagcuugggga

SEQ ID NO: 1194743 - RNA, 20 nt, Human
uucaugcuguucaugaaaga

SEQ ID NO: 1194744 - RNA, 13 nt, Human
uuauuuuaaaaga

SEQ ID NO: 1194745 - RNA, 18 nt, Human
uucaaauguauuacagug

SEQ ID NO: 1194746 - RNA, 19 nt, Human
uuauaucuauauuuuacau

SEQ ID NO: 1194747 - RNA, 23 nt, Human
uuauaucuauauuuuacauaaau

SEQ ID NO: 1194748 - RNA, 19 nt, Human
uuuccaaccggcuuugugg

SEQ ID NO: 1194749 - RNA, 21 nt, Human
uuuaauagguuuggacaaaau

SEQ ID NO: 1194750 - RNA, 20 nt, Human
uuguguugaagagguuuuaa

SEQ ID NO: 1194751 - RNA, 17 nt, Human
uguaaauuuaugugaug

SEQ ID NO: 1194752 - RNA, 15 nt, Human
ugguuccagccugcc

SEQ ID NO: 1194753 - RNA, 16 nt, Human
ugguuccagccugcca

SEQ ID NO: 1194754 - RNA, 18 nt, Human
uguccugcaccggggccu

SEQ ID NO: 1194755 - RNA, 13 nt, Human
uguccucagcccc

SEQ ID NO: 1194756 - RNA, 13 nt, Human
uguaugcuucaua

SEQ ID NO: 1194757 - RNA, 14 nt, Human
uguaugcuucauac

SEQ ID NO: 1194758 - RNA, 16 nt, Human
uguaugcuucauacag

SEQ ID NO: 1194759 - RNA, 19 nt, Human
uguaugcuucauacaggga

SEQ ID NO: 1194760 - RNA, 14 nt, Human
ugggaggagggcag

SEQ ID NO: 1194761 - RNA, 17 nt, Human
ugggaggagggcaggca

SEQ ID NO: 1194762 - RNA, 18 nt, Human
ugggaggagggcaggcau

SEQ ID NO: 1194763 - RNA, 17 nt, Human
uggggggcuucauacac

SEQ ID NO: 1194764 - RNA, 20 nt, Human
uggcuccauugguguugaca

SEQ ID NO: 1194765 - RNA, 15 nt, Human
uggcuccaggccagg

SEQ ID NO: 1194766 - RNA, 23 nt, Human
uggccuaaccugccgagagucca

SEQ ID NO: 1194767 - RNA, 14 nt, Human
uggccccugagauc

SEQ ID NO: 1194768 - RNA, 16 nt, Human
uggaaaagccaagagg

SEQ ID NO: 1194769 - RNA, 19 nt, Human
uggaaaagccaagaggcug

SEQ ID NO: 1194770 - RNA, 17 nt, Human
ugaguuggcugggaaua

SEQ ID NO: 1194771 - RNA, 16 nt, Human
ugaguuggcugggaau

SEQ ID NO: 1194772 - RNA, 14 nt, Human
ugaguuggcuggga

SEQ ID NO: 1194773 - RNA, 19 nt, Human
ugagguggaagagggcugc

SEQ ID NO: 1194774 - RNA, 16 nt, Human
ugaggcugcuuuccaa

SEQ ID NO: 1194775 - RNA, 20 nt, Human
ugaggcugcuuuccaaagcc

SEQ ID NO: 1194776 - RNA, 23 nt, Human
ugaggcugcuuuccaaagccaau

SEQ ID NO: 1194777 - RNA, 15 nt, Human
ugaugaaaauauuua

SEQ ID NO: 1194778 - RNA, 14 nt, Human
ugaugaaaauauuu

SEQ ID NO: 1194779 - RNA, 21 nt, Human
ugcauuauauuuguaaauuua

SEQ ID NO: 1194780 - RNA, 22 nt, Human
ugccaucauguuuacagaggac

SEQ ID NO: 1194781 - RNA, 18 nt, Human
ugcccgggagcucaggaa

SEQ ID NO: 1194782 - RNA, 19 nt, Human
ugcccagaaugaggcugcu

SEQ ID NO: 1194783 - RNA, 17 nt, Human
ugcccagaaugaggcug

SEQ ID NO: 1194784 - RNA, 18 nt, Human
ugcccagaaugaggcugc

SEQ ID NO: 1194785 - RNA, 17 nt, Human
ugccugguccucacacu

SEQ ID NO: 1194786 - RNA, 18 nt, Human
ugauuuuuaugccaccug

SEQ ID NO: 1194787 - RNA, 22 nt, Human
ugcaacucugaaggguaauuau

SEQ ID NO: 1194788 - RNA, 22 nt, Human
ugcaauguagaggggaaaagag

SEQ ID NO: 1194789 - RNA, 15 nt, Human
ucugccaggagacag

SEQ ID NO: 1194790 - RNA, 14 nt, Human
ucuggcugcagagc

SEQ ID NO: 1194791 - RNA, 18 nt, Human
ucugaaauuuccugggag

SEQ ID NO: 1194792 - RNA, 20 nt, Human
ucugaaauuuccugggagcu

SEQ ID NO: 1194793 - RNA, 14 nt, Human
ucugcaacucugaa

SEQ ID NO: 1194794 - RNA, 15 nt, Human
ucugcaacucugaag

SEQ ID NO: 1194795 - RNA, 15 nt, Human
ucucugauacagaaa

SEQ ID NO: 1194796 - RNA, 14 nt, Human
ucgugucuggcaca

SEQ ID NO: 1194797 - RNA, 21 nt, Human
ucgugucuggcacagccuggc

SEQ ID NO: 1194798 - RNA, 22 nt, Human
ucuaugauuccagguggcauca

SEQ ID NO: 1194799 - RNA, 23 nt, Human
ucuaggacugaauuaugaaacuu

SEQ ID NO: 1194800 - RNA, 16 nt, Human
ucuaggacugaauuau

SEQ ID NO: 1194801 - RNA, 16 nt, Human
ucccuccucugcccgg

SEQ ID NO: 1194802 - RNA, 15 nt, Human
ucccucuacugggag

SEQ ID NO: 1194803 - RNA, 17 nt, Human
ucccucuacugggagcc

SEQ ID NO: 1194804 - RNA, 16 nt, Human
ucccuuccuuccucuc

SEQ ID NO: 1194805 - RNA, 19 nt, Human
ucccuuccuuccucuccug

SEQ ID NO: 1194806 - RNA, 13 nt, Human
ucccugccuggac

SEQ ID NO: 1194807 - RNA, 23 nt, Human
ucccugccugguccucacacuca

SEQ ID NO: 1194808 - RNA, 20 nt, Human
uccuaauaaucauuggauuc

SEQ ID NO: 1194809 - RNA, 12 nt, Human
uauucccaugag

SEQ ID NO: 1194810 - RNA, 17 nt, Human
ucaaugccccugaauuu

SEQ ID NO: 1194811 - RNA, 18 nt, Human
ucaaugccccugaauuua

SEQ ID NO: 1194812 - RNA, 20 nt, Human
ucaaugccccugaauuuaaa

SEQ ID NO: 1194813 - RNA, 22 nt, Human
ucaaugccccugaauuuaaaua

SEQ ID NO: 1194814 - RNA, 14 nt, Human
ucaaaaaacuugua

SEQ ID NO: 1194815 - RNA, 15 nt, Human
ucaaaaaacuuguaa

SEQ ID NO: 1194816 - RNA, 14 nt, Human
ucauuccagaggaa

SEQ ID NO: 1194817 - RNA, 14 nt, Human
uccagguggcauca

SEQ ID NO: 1194818 - RNA, 19 nt, Human
ucagaggguguccugcacc

SEQ ID NO: 1194819 - RNA, 20 nt, Human
ucacuuguuuuauuuaaccu

SEQ ID NO: 1194820 - RNA, 19 nt, Human
ucacugcuaagaauauuug

SEQ ID NO: 1194821 - RNA, 15 nt, Human
ucagauaugauucaa

SEQ ID NO: 1194822 - RNA, 16 nt, Human
ucagauaugauucaaa

SEQ ID NO: 1194823 - RNA, 16 nt, Human
gggaggagggcaggca

SEQ ID NO: 1194824 - RNA, 12 nt, Human
gggaggagggca

SEQ ID NO: 1194825 - RNA, 13 nt, Human
gggagccgggagc

SEQ ID NO: 1194826 - RNA, 23 nt, Human
gggagcucaggaaccgaggcagg

SEQ ID NO: 1194827 - RNA, 12 nt, Human
gggagcucagga

SEQ ID NO: 1194828 - RNA, 22 nt, Human
gggagcucaggaaccgaggcag

SEQ ID NO: 1194829 - RNA, 20 nt, Human
gggacaccaagccuuggcuc

SEQ ID NO: 1194830 - RNA, 14 nt, Human
gggacaccuaggcu

SEQ ID NO: 1194831 - RNA, 21 nt, Human
ggcuguggcauccagaguccc

SEQ ID NO: 1194832 - RNA, 23 nt, Human
ggcuguggcauccagagucccug

SEQ ID NO: 1194833 - RNA, 13 nt, Human
ggcugggaggagg

SEQ ID NO: 1194834 - RNA, 20 nt, Human
ggcugggaggagggcaggca

SEQ ID NO: 1194835 - RNA, 21 nt, Human
ggcugggaggagggcaggcau

SEQ ID NO: 1194836 - RNA, 13 nt, Human
ggcuggacuugga

SEQ ID NO: 1194837 - RNA, 18 nt, Human
ggcuggacuuggagguag

SEQ ID NO: 1194838 - RNA, 18 nt, Human
ggcuggagcuagaauuug

SEQ ID NO: 1194839 - RNA, 16 nt, Human
ggccugacucucagca

SEQ ID NO: 1194840 - RNA, 15 nt, Human
ggccugggcaggagg

SEQ ID NO: 1194841 - RNA, 17 nt, Human
ggccugggcaggaggga

SEQ ID NO: 1194842 - RNA, 19 nt, Human
ggccugggcaggagggagg

SEQ ID NO: 1194843 - RNA, 20 nt, Human
ggccucucauuccagaggaa

SEQ ID NO: 1194844 - RNA, 15 nt, Human
ggccuaaccugccga

SEQ ID NO: 1194845 - RNA, 16 nt, Human
ggccuaaccugccgag

SEQ ID NO: 1194846 - RNA, 21 nt, Human
ggccuaaccugccgagagucc

SEQ ID NO: 1194847 - RNA, 21 nt, Human
ggagcucaggaaccgaggcag

SEQ ID NO: 1194848 - RNA, 14 nt, Human
ggagcuagaauuug

SEQ ID NO: 1194849 - RNA, 17 nt, Human
ggagccugcagagcugc

SEQ ID NO: 1194850 - RNA, 16 nt, Human
ggagccuacccacccc

SEQ ID NO: 1194851 - RNA, 19 nt, Human
ggagacagguuagcugcuc

SEQ ID NO: 1194852 - RNA, 17 nt, Human
ggacugaauuaugaaac

SEQ ID NO: 1194853 - RNA, 19 nt, Human
ggacugaauuaugaaacuu

SEQ ID NO: 1194854 - RNA, 12 nt, Human
ggaccagccucu

SEQ ID NO: 1194855 - RNA, 16 nt, Human
ggauucugagagcugu

SEQ ID NO: 1194856 - RNA, 14 nt, Human
gcugauuguauuua

SEQ ID NO: 1194857 - RNA, 15 nt, Human
gcucuccaagcccag

SEQ ID NO: 1194858 - RNA, 19 nt, Human
gcuguggccuaaccugccg

SEQ ID NO: 1194859 - RNA, 20 nt, Human
gcuguggccuaaccugccga

SEQ ID NO: 1194860 - RNA, 16 nt, Human
gcugugugcucuccaa

SEQ ID NO: 1194861 - RNA, 14 nt, Human
gcuggggaugucuc

SEQ ID NO: 1194862 - RNA, 22 nt, Human
gcugggcuuggcagcccggguc

SEQ ID NO: 1194863 - RNA, 21 nt, Human
gcugggaggagggcaggcauc

SEQ ID NO: 1194864 - RNA, 10 nt, Human
gcuucauaca

SEQ ID NO: 1194865 - RNA, 11 nt, Human
gcuucauacac

SEQ ID NO: 1194866 - RNA, 14 nt, Human
gcuuuccaaagcca

SEQ ID NO: 1194867 - RNA, 15 nt, Human
gcuccuuaaggcucu

SEQ ID NO: 1194868 - RNA, 17 nt, Human
gcuccuuaaggcucuuu

SEQ ID NO: 1194869 - RNA, 21 nt, Human
gcuccuuaaggcucuuuugua

SEQ ID NO: 1194870 - RNA, 17 nt, Human
gcuccaggccagggggc

SEQ ID NO: 1194871 - RNA, 18 nt, Human
gcuccaggccagggggcc

SEQ ID NO: 1194872 - RNA, 15 nt, Human
gccuugucacgccag

SEQ ID NO: 1194873 - RNA, 16 nt, Human
gccuugucacgccaga

SEQ ID NO: 1194874 - RNA, 17 nt, Human
gccuugucacgccagac

SEQ ID NO: 1194875 - RNA, 17 nt, Human
gcgaagcguuguccuca

SEQ ID NO: 1194876 - RNA, 14 nt, Human
gcgaauuuuaaaag

SEQ ID NO: 1194877 - RNA, 15 nt, Human
gcgaauuuuaaaaga

SEQ ID NO: 1194878 - RNA, 16 nt, Human
gcgaauuuuaaaagau

SEQ ID NO: 1194879 - RNA, 16 nt, Human
gccugggcaggaggga

SEQ ID NO: 1194880 - RNA, 17 nt, Human
gccugguccucacacuc

SEQ ID NO: 1194881 - RNA, 13 nt, Human
gccuggucagccc

SEQ ID NO: 1194882 - RNA, 14 nt, Human
gccuggucagccca

SEQ ID NO: 1194883 - RNA, 15 nt, Human
gccuggucagcccaa

SEQ ID NO: 1194884 - RNA, 16 nt, Human
gccuggaccagccucu

SEQ ID NO: 1194885 - RNA, 17 nt, Human
gccuggaccagccucuc

SEQ ID NO: 1194886 - RNA, 21 nt, Human
gccagacuucccacggcuccu

SEQ ID NO: 1194887 - RNA, 15 nt, Human
gccacgauugcagga

SEQ ID NO: 1194888 - RNA, 16 nt, Human
gccaccugaauaaaga

SEQ ID NO: 1194889 - RNA, 20 nt, Human
gccaaugugaacagcggcug

SEQ ID NO: 1194890 - RNA, 23 nt, Human
gcccaaaccaccagaagcccaga

SEQ ID NO: 1194891 - RNA, 21 nt, Human
gcccaaaccaccagaagccca

SEQ ID NO: 1194892 - RNA, 22 nt, Human
gcccaaaccaccagaagcccag

SEQ ID NO: 1194893 - RNA, 21 nt, Human
gcaggcaucggggagccggga

SEQ ID NO: 1194894 - RNA, 22 nt, Human
gcaggcaucggggagccgggag

SEQ ID NO: 1194895 - RNA, 23 nt, Human
gcaggcaucggggagccgggagc

SEQ ID NO: 1194896 - RNA, 17 nt, Human
gcagugggccuggccag

SEQ ID NO: 1194897 - RNA, 16 nt, Human
gcagugggccuggcca

SEQ ID NO: 1194898 - RNA, 18 nt, Human
gcaggaaauggcugugga

SEQ ID NO: 1194899 - RNA, 15 nt, Human
gcaccacacucagcc

SEQ ID NO: 1194900 - RNA, 17 nt, Human
gcaccacacucagcccu

SEQ ID NO: 1194901 - RNA, 21 nt, Human
gauguguccugauaagcugag

SEQ ID NO: 1194902 - RNA, 21 nt, Human
gauguggaaaagccaagaggc

SEQ ID NO: 1194903 - RNA, 23 nt, Human
gauguggaaaagccaagaggcug

SEQ ID NO: 1194904 - RNA, 22 nt, Human
gauuaagaucucagugguuaag

SEQ ID NO: 1194905 - RNA, 13 nt, Human
gaugcauggagau

SEQ ID NO: 1194906 - RNA, 20 nt, Human
gaugcauggagauagcccca

SEQ ID NO: 1194907 - RNA, 17 nt, Human
gaugcaauguagagggg

SEQ ID NO: 1194908 - RNA, 22 nt, Human
gagguuuguuuagaagaagugu

SEQ ID NO: 1194909 - RNA, 16 nt, Human
gagucccugccuggac

SEQ ID NO: 1194910 - RNA, 19 nt, Human
gagucccugccuggaccag

SEQ ID NO: 1194911 - RNA, 14 nt, Human
gagucccugccauc

SEQ ID NO: 1194912 - RNA, 14 nt, Human
gagucccugccugg

SEQ ID NO: 1194913 - RNA, 15 nt, Human
gagucccugccugga

SEQ ID NO: 1194914 - RNA, 13 nt, Human
gaguuccuagcca

SEQ ID NO: 1194915 - RNA, 15 nt, Human
gaggaugucugggcc

SEQ ID NO: 1194916 - RNA, 13 nt, Human
gaggagggcaggc

SEQ ID NO: 1194917 - RNA, 14 nt, Human
gaggagggcaggca

SEQ ID NO: 1194918 - RNA, 15 nt, Human
gaggagggcaggcau

SEQ ID NO: 1194919 - RNA, 23 nt, Human
gagcucaggaaccgaggcaggga

SEQ ID NO: 1194920 - RNA, 20 nt, Human
gagcuccuuaaggcucuuuu

SEQ ID NO: 1194921 - RNA, 12 nt, Human
gagccugcagag

SEQ ID NO: 1194922 - RNA, 15 nt, Human
gagccugcagagcug

SEQ ID NO: 1194923 - RNA, 13 nt, Human
gaacuauuagagc

SEQ ID NO: 1194924 - RNA, 14 nt, Human
gaaugccuccugca

SEQ ID NO: 1194925 - RNA, 20 nt, Human
gaauaagugccaggauggaa

SEQ ID NO: 1194926 - RNA, 17 nt, Human
gaauaaagaaugaaugg

SEQ ID NO: 1194927 - RNA, 19 nt, Human
gaaggaucccaugagcucc

SEQ ID NO: 1194928 - RNA, 10 nt, Human
gaagcccaga

SEQ ID NO: 1194929 - RNA, 12 nt, Human
gaagcccagaau

SEQ ID NO: 1194930 - RNA, 17 nt, Human
cuuucccaacaccucuu

SEQ ID NO: 1194931 - RNA, 20 nt, Human
cuuuccaaagccaaugugaa

SEQ ID NO: 1194932 - RNA, 17 nt, Human
cuuggagguagcuuuga

SEQ ID NO: 1194933 - RNA, 20 nt, Human
cuuggggacaggggcaggag

SEQ ID NO: 1194934 - RNA, 22 nt, Human
cuuuuuucucugauacagaaaa

SEQ ID NO: 1194935 - RNA, 20 nt, Human
cuuuuuucucugauacagaa

SEQ ID NO: 1194936 - RNA, 19 nt, Human
cuuccaaacaggcucagag

SEQ ID NO: 1194937 - RNA, 15 nt, Human
cuuaaggcucuuuug

SEQ ID NO: 1194938 - RNA, 21 nt, Human
cuguguguguguauguggggg

SEQ ID NO: 1194939 - RNA, 20 nt, Human
cuguguguuuaugugugugu

SEQ ID NO: 1194940 - RNA, 18 nt, Human
cuguguguuuaugugugu

SEQ ID NO: 1194941 - RNA, 20 nt, Human
cuguguguguguaugugggg

SEQ ID NO: 1194942 - RNA, 18 nt, Human
cuguguguguguaugugg

SEQ ID NO: 1194943 - RNA, 16 nt, Human
cuguguguguguaugu

SEQ ID NO: 1194944 - RNA, 15 nt, Human
cuguguguguguaug

SEQ ID NO: 1194945 - RNA, 14 nt, Human
cuguguguguguau

SEQ ID NO: 1194946 - RNA, 18 nt, Human
cuguggccuaaccugccg

SEQ ID NO: 1194947 - RNA, 17 nt, Human
cugugcccacccuccac

SEQ ID NO: 1194948 - RNA, 23 nt, Human
cugugcccacccuccacucuccu

SEQ ID NO: 1194949 - RNA, 14 nt, Human
cuggugguggcucg

SEQ ID NO: 1194950 - RNA, 22 nt, Human
cuggugguggcucgggaggcga

SEQ ID NO: 1194951 - RNA, 12 nt, Human
cuggugguucac

SEQ ID NO: 1194952 - RNA, 20 nt, Human
cuggugguucacucuuggag

SEQ ID NO: 1194953 - RNA, 21 nt, Human
cuggugguucacucuuggagc

SEQ ID NO: 1194954 - RNA, 23 nt, Human
cuggugguucacucuuggagccu

SEQ ID NO: 1194955 - RNA, 13 nt, Human
cugauuguauuua

SEQ ID NO: 1194956 - RNA, 22 nt, Human
cugauacagaaaaguugaauuu

SEQ ID NO: 1194957 - RNA, 15 nt, Human
cugaguuccuagcca

SEQ ID NO: 1194958 - RNA, 16 nt, Human
cugaguuccuagccac

SEQ ID NO: 1194959 - RNA, 17 nt, Human
cugaguuccuagccacc

SEQ ID NO: 1194960 - RNA, 18 nt, Human
cugaguuccuagccaccg

SEQ ID NO: 1194961 - RNA, 17 nt, Human
cugccuggaccagccuc

SEQ ID NO: 1194962 - RNA, 22 nt, Human
cugcgggcuggguguggucucc

SEQ ID NO: 1194963 - RNA, 16 nt, Human
cugccacucaggccca

SEQ ID NO: 1194964 - RNA, 23 nt, Human
cugccacucaggcccaaagccuc

SEQ ID NO: 1194965 - RNA, 12 nt, Human
cugagcaggugu

SEQ ID NO: 1194966 - RNA, 16 nt, Human
cugaauuaugaaacuu

SEQ ID NO: 1194967 - RNA, 20 nt, Human
cugaaauaaacgucuuaaau

SEQ ID NO: 1194968 - RNA, 13 nt, Human
cugaauuaugaaa

SEQ ID NO: 1194969 - RNA, 14 nt, Human
cugaauuaugaaac

SEQ ID NO: 1194970 - RNA, 15 nt, Human
cugaauuaugaaacu

SEQ ID NO: 1194971 - RNA, 14 nt, Human
cucugcccgggagc

SEQ ID NO: 1194972 - RNA, 20 nt, Human
cucugcccgggagcucagga

SEQ ID NO: 1194973 - RNA, 15 nt, Human
cucugauacagaaaa

SEQ ID NO: 1194974 - RNA, 19 nt, Human
cucugaaggguaauuauau

SEQ ID NO: 1194975 - RNA, 14 nt, Human
cuauuguagagcca

SEQ ID NO: 1194976 - RNA, 17 nt, Human
cuauauuuuacauaaau

SEQ ID NO: 1194977 - RNA, 16 nt, Human
cuaucuguuuacagug

SEQ ID NO: 1194978 - RNA, 17 nt, Human
cuaucuguuuacagugu

SEQ ID NO: 1194979 - RNA, 13 nt, Human
cuaugagggccuu

SEQ ID NO: 1194980 - RNA, 15 nt, Human
cuaugagggccuuga

SEQ ID NO: 1194981 - RNA, 17 nt, Human
cuaugagggccuugagu

SEQ ID NO: 1194982 - RNA, 13 nt, Human
cucgagaucccaa

SEQ ID NO: 1194983 - RNA, 21 nt, Human
cucgagaucccaacacugcca

SEQ ID NO: 1194984 - RNA, 22 nt, Human
cucgagaucccaacacugccag

SEQ ID NO: 1194985 - RNA, 23 nt, Human
cucgagaucccaacacugccagc

SEQ ID NO: 1194986 - RNA, 12 nt, Human
cuccuccuagcc

SEQ ID NO: 1194987 - RNA, 13 nt, Human
cuccaccugcucu

SEQ ID NO: 1194988 - RNA, 23 nt, Human
cuccaccaagccuggucagccca

SEQ ID NO: 1194989 - RNA, 21 nt, Human
cuccaaugcuguuaucccugc

SEQ ID NO: 1194990 - RNA, 22 nt, Human
cgagaucccaacacugccagca

SEQ ID NO: 1194991 - RNA, 13 nt, Human
cgagaucccaaca

SEQ ID NO: 1194992 - RNA, 15 nt, Human
cgagaucccaacacu

SEQ ID NO: 1194993 - RNA, 21 nt, Human
cgagaucccaacacugccagc

SEQ ID NO: 1194994 - RNA, 15 nt, Human
ccuugucacgccaga

SEQ ID NO: 1194995 - RNA, 18 nt, Human
ccuugucacgccagacuu

SEQ ID NO: 1194996 - RNA, 15 nt, Human
ccuuccaagagccug

SEQ ID NO: 1194997 - RNA, 16 nt, Human
ccuuccaagagccuga

SEQ ID NO: 1194998 - RNA, 17 nt, Human
ccuuccaagagccugag

SEQ ID NO: 1194999 - RNA, 13 nt, Human
ccuuaaggcucuu

SEQ ID NO: 1195000 - RNA, 16 nt, Human
ccuuaaggcucuuuug

SEQ ID NO: 1195001 - RNA, 18 nt, Human
ccuuaaggcucuuuugua

SEQ ID NO: 1195002 - RNA, 19 nt, Human
ccugaggaagagggacugu

SEQ ID NO: 1195003 - RNA, 15 nt, Human
ccugaggcagguccc

SEQ ID NO: 1195004 - RNA, 14 nt, Human
ccugccacucaggc

SEQ ID NO: 1195005 - RNA, 22 nt, Human
ccugccacucaggcccaaagcc

SEQ ID NO: 1195006 - RNA, 23 nt, Human
ccugccacucaggcccaaagccu

SEQ ID NO: 1195007 - RNA, 14 nt, Human
ccugccagaccccc

SEQ ID NO: 1195008 - RNA, 12 nt, Human
ccugggcaggag

SEQ ID NO: 1195009 - RNA, 14 nt, Human
ccugggcaggaggg

SEQ ID NO: 1195010 - RNA, 12 nt, Human
ccuggucagccc

SEQ ID NO: 1195011 - RNA, 14 nt, Human
ccuggucagcccaa

SEQ ID NO: 1195012 - RNA, 15 nt, Human
ccuggcuccaggcca

SEQ ID NO: 1195013 - RNA, 16 nt, Human
ccuggcuccaggccag

SEQ ID NO: 1195014 - RNA, 17 nt, Human
ccuggcuccaggccagg

SEQ ID NO: 1195015 - RNA, 18 nt, Human
ccugccugguccucacac

SEQ ID NO: 1195016 - RNA, 18 nt, Human
ccucucauuccagaggaa

SEQ ID NO: 1195017 - RNA, 18 nt, Human
ccucuccacucaugugac

SEQ ID NO: 1195018 - RNA, 20 nt, Human
ccgggacaccuaggcuaggg

SEQ ID NO: 1195019 - RNA, 19 nt, Human
ccgggacaccuaggcuagg

SEQ ID NO: 1195020 - RNA, 16 nt, Human
ccggcuuuguggcacu

SEQ ID NO: 1195021 - RNA, 12 nt, Human
ccggguuccagc

SEQ ID NO: 1195022 - RNA, 15 nt, Human
ccggguuccagcacc

SEQ ID NO: 1195023 - RNA, 15 nt, Human
ccgaggcagggaagg

SEQ ID NO: 1195024 - RNA, 13 nt, Human
cccugccagaccc

SEQ ID NO: 1195025 - RNA, 21 nt, Human
cccugccagacccccuggaga

SEQ ID NO: 1195026 - RNA, 13 nt, Human
cccuccaccugcu

SEQ ID NO: 1195027 - RNA, 23 nt, Human
cccuccacucuccucuuccaggc

SEQ ID NO: 1195028 - RNA, 17 nt, Human
cccaccacacccucccu

SEQ ID NO: 1195029 - RNA, 21 nt, Human
cccacaggagguggucuggga

SEQ ID NO: 1195030 - RNA, 16 nt, Human
cccacaggaggugguc

SEQ ID NO: 1195031 - RNA, 18 nt, Human
ccauccuacccccugugc

SEQ ID NO: 1195032 - RNA, 21 nt, Human
cccaaaacaccggguuccagc

SEQ ID NO: 1195033 - RNA, 13 nt, Human
ccaggagacaggu

SEQ ID NO: 1195034 - RNA, 19 nt, Human
ccaggccagggggccaguc

SEQ ID NO: 1195035 - RNA, 16 nt, Human
ccagcauuucccuucc

SEQ ID NO: 1195036 - RNA, 21 nt, Human
ccagcauuucccuuccuuccu

SEQ ID NO: 1195037 - RNA, 18 nt, Human
ccagacccccuggagacu

SEQ ID NO: 1195038 - RNA, 12 nt, Human
ccagacccccug

SEQ ID NO: 1195039 - RNA, 16 nt, Human
ccagacccccuggaga

SEQ ID NO: 1195040 - RNA, 19 nt, Human
ccacucaugugacucuuuc

SEQ ID NO: 1195041 - RNA, 22 nt, Human
ccacucaugugacucuuuccaa

SEQ ID NO: 1195042 - RNA, 20 nt, Human
ccaccugaauaaagaaugaa

SEQ ID NO: 1195043 - RNA, 15 nt, Human
ccacccuccacucuc

SEQ ID NO: 1195044 - RNA, 22 nt, Human
ccaccaagccuggucagcccaa

SEQ ID NO: 1195045 - RNA, 19 nt, Human
ccacacugauccagcccug

SEQ ID NO: 1195046 - RNA, 22 nt, Human
ccacacugauccagcccugagu

SEQ ID NO: 1195047 - RNA, 20 nt, Human
ccaaaccaccagaagcccag

SEQ ID NO: 1195048 - RNA, 13 nt, Human
cauuccagaggaa

SEQ ID NO: 1195049 - RNA, 21 nt, Human
cauucagauaugauucaaaug

SEQ ID NO: 1195050 - RNA, 14 nt, Human
cauuccagaggaag

SEQ ID NO: 1195051 - RNA, 20 nt, Human
cauucaaauguauuacagug

SEQ ID NO: 1195052 - RNA, 12 nt, Human
cauucuuuccca

SEQ ID NO: 1195053 - RNA, 14 nt, Human
cauucuuucccaac

SEQ ID NO: 1195054 - RNA, 14 nt, Human
cauuccugaacagg

SEQ ID NO: 1195055 - RNA, 17 nt, Human
ccaaaccaccagaagcc

SEQ ID NO: 1195056 - RNA, 14 nt, Human
caugugacucuuuc

SEQ ID NO: 1195057 - RNA, 16 nt, Human
caugugacucuuucca

SEQ ID NO: 1195058 - RNA, 17 nt, Human
caugugacucuuuccaa

SEQ ID NO: 1195059 - RNA, 16 nt, Human
caugcuguucaugaaa

SEQ ID NO: 1195060 - RNA, 18 nt, Human
caugcuguucaugaaaga

SEQ ID NO: 1195061 - RNA, 20 nt, Human
caugcuguucaugaaagauu

SEQ ID NO: 1195062 - RNA, 15 nt, Human
caugcuguucaugaa

SEQ ID NO: 1195063 - RNA, 19 nt, Human
caugaguuggcugggaaua

SEQ ID NO: 1195064 - RNA, 23 nt, Human
caugagcuccuuaaggcucuuuu

SEQ ID NO: 1195065 - RNA, 18 nt, Human
caugagauaauaugcaga

SEQ ID NO: 1195066 - RNA, 14 nt, Human
caugaaagauucaa

SEQ ID NO: 1195067 - RNA, 18 nt, Human
cauccuacccccugugcc

SEQ ID NO: 1195068 - RNA, 19 nt, Human
cauccuacccccugugccu

SEQ ID NO: 1195069 - RNA, 15 nt, Human
cauccuacccccugu

SEQ ID NO: 1195070 - RNA, 21 nt, Human
caucauguuuacagaggacag

SEQ ID NO: 1195071 - RNA, 19 nt, Human
caucauguuuacagaggac

SEQ ID NO: 1195072 - RNA, 13 nt, Human
caucauguuuaca

SEQ ID NO: 1195073 - RNA, 21 nt, Human
cauccagagucccugccugga

SEQ ID NO: 1195074 - RNA, 13 nt, Human
cauccagaguccc

SEQ ID NO: 1195075 - RNA, 17 nt, Human
cauccagagucccugcc

SEQ ID NO: 1195076 - RNA, 18 nt, Human
cauccagagucccugccu

SEQ ID NO: 1195077 - RNA, 20 nt, Human
cauccagagucccugccugg

SEQ ID NO: 1195078 - RNA, 12 nt, Human
cagguguucuuc

SEQ ID NO: 1195079 - RNA, 12 nt, Human
cagguccccaga

SEQ ID NO: 1195080 - RNA, 13 nt, Human
cagguccccagac

SEQ ID NO: 1195081 - RNA, 18 nt, Human
cagguccccagcuuuggc

SEQ ID NO: 1195082 - RNA, 12 nt, Human
caguauguggaa

SEQ ID NO: 1195083 - RNA, 17 nt, Human
cagucauucagauauga

SEQ ID NO: 1195084 - RNA, 20 nt, Human
cagucauucagauaugauuc

SEQ ID NO: 1195085 - RNA, 20 nt, Human
cagucccugaggcagguccc

SEQ ID NO: 1195086 - RNA, 23 nt, Human
cagucccugaggcagguccccag

SEQ ID NO: 1195087 - RNA, 14 nt, Human
cagucccugaggca

SEQ ID NO: 1195088 - RNA, 22 nt, Human
cagucuuuaaucugagaggcca

SEQ ID NO: 1195089 - RNA, 13 nt, Human
cagggaaggaucc

SEQ ID NO: 1195090 - RNA, 18 nt, Human
cagggaaggaucccauga

SEQ ID NO: 1195091 - RNA, 14 nt, Human
caggggcaggagga

SEQ ID NO: 1195092 - RNA, 22 nt, Human
cagggggccagucccugaggca

SEQ ID NO: 1195093 - RNA, 11 nt, Human
caggcucagag

SEQ ID NO: 1195094 - RNA, 15 nt, Human
caggcucagagggug

SEQ ID NO: 1195095 - RNA, 20 nt, Human
caggcaucggggagccggga

SEQ ID NO: 1195096 - RNA, 21 nt, Human
caggcaucggggagccgggag

SEQ ID NO: 1195097 - RNA, 21 nt, Human
caggauauucucacagcucca

SEQ ID NO: 1195098 - RNA, 21 nt, Human
caggcccccagaaccccuggc

SEQ ID NO: 1195099 - RNA, 21 nt, Human
caggccagggggccagucccu

SEQ ID NO: 1195100 - RNA, 21 nt, Human
caggagucccugccaucaugu

SEQ ID NO: 1195101 - RNA, 15 nt, Human
caggagucccugcca

SEQ ID NO: 1195102 - RNA, 14 nt, Human
caggagucccugcc

SEQ ID NO: 1195103 - RNA, 23 nt, Human
caggagacagguuagcugcuccc

SEQ ID NO: 1195104 - RNA, 15 nt, Human
caggaaccgaggcag

SEQ ID NO: 1195105 - RNA, 17 nt, Human
caggaaccgaggcaggg

SEQ ID NO: 1195106 - RNA, 18 nt, Human
caggaaccgaggcaggga

SEQ ID NO: 1195107 - RNA, 23 nt, Human
cagccucuccacucaugugacuc

SEQ ID NO: 1195108 - RNA, 23 nt, Human
cagccuggcuguggccuaaccug

SEQ ID NO: 1195109 - RNA, 21 nt, Human
cagccuccauccuacccccug

SEQ ID NO: 1195110 - RNA, 18 nt, Human
cagccuccauccuacccc

SEQ ID NO: 1195111 - RNA, 18 nt, Human
cagcccugaguuccuagc

SEQ ID NO: 1195112 - RNA, 19 nt, Human
cagcccugaguuccuagcc

SEQ ID NO: 1195113 - RNA, 21 nt, Human
cagcccugaguuccuagccac

SEQ ID NO: 1195114 - RNA, 18 nt, Human
cagcccucauuggcucuu

SEQ ID NO: 1195115 - RNA, 15 nt, Human
cagcauuucccuucc

SEQ ID NO: 1195116 - RNA, 16 nt, Human
cagcccaccuggcuuu

SEQ ID NO: 1195117 - RNA, 16 nt, Human
cagcccaaaccaccag

SEQ ID NO: 1195118 - RNA, 19 nt, Human
cagcccaaaccaccagaag

SEQ ID NO: 1195119 - RNA, 20 nt, Human
cagcccaaaccaccagaagc

SEQ ID NO: 1195120 - RNA, 21 nt, Human
cagcccaaaccaccagaagcc

SEQ ID NO: 1195121 - RNA, 23 nt, Human
cagcccaaaccaccagaagccca

SEQ ID NO: 1195122 - RNA, 22 nt, Human
cagaggacaguauuugugggga

SEQ ID NO: 1195123 - RNA, 22 nt, Human
cagagcagugggccuggccagc

SEQ ID NO: 1195124 - RNA, 15 nt, Human
cagagcagugggccu

SEQ ID NO: 1195125 - RNA, 17 nt, Human
cagagcagugggccugg

SEQ ID NO: 1195126 - RNA, 20 nt, Human
cagagcagugggccuggcca

SEQ ID NO: 1195127 - RNA, 21 nt, Human
cagagcagugggccuggccag

SEQ ID NO: 1195128 - RNA, 18 nt, Human
cagagucccugccuggac

SEQ ID NO: 1195129 - RNA, 14 nt, Human
cagagucccugccu

SEQ ID NO: 1195130 - RNA, 12 nt, Human
cagagaaaaagg

SEQ ID NO: 1195131 - RNA, 17 nt, Human
cagagaaaaagggaggg

SEQ ID NO: 1195132 - RNA, 18 nt, Human
cagagaaaaagggagggg

SEQ ID NO: 1195133 - RNA, 12 nt, Human
cagacuucccac

SEQ ID NO: 1195134 - RNA, 22 nt, Human
cagacuucccacggcuccucga

SEQ ID NO: 1195135 - RNA, 15 nt, Human
cagacccccuggaga

SEQ ID NO: 1195136 - RNA, 14 nt, Human
cagaaugaggcugc

SEQ ID NO: 1195137 - RNA, 15 nt, Human
cagaaugaggcugcu

SEQ ID NO: 1195138 - RNA, 11 nt, Human
cagaagcccag

SEQ ID NO: 1195139 - RNA, 12 nt, Human
cagaagcccaga

SEQ ID NO: 1195140 - RNA, 14 nt, Human
cagaagcccagaau

SEQ ID NO: 1195141 - RNA, 23 nt, Human
cagaaccccuggcuccaggccag

SEQ ID NO: 1195142 - RNA, 17 nt, Human
cagaaaaguugaauuuu

SEQ ID NO: 1195143 - RNA, 20 nt, Human
cagaaaaguugaauuuuaca

SEQ ID NO: 1195144 - RNA, 22 nt, Human
cagaaaaguugaauuuuacaug

SEQ ID NO: 1195145 - RNA, 22 nt, Human
cacucaugugacucuuuccaac

SEQ ID NO: 1195146 - RNA, 16 nt, Human
cacucaugugacucuu

SEQ ID NO: 1195147 - RNA, 13 nt, Human
cacuccuccuagc

SEQ ID NO: 1195148 - RNA, 18 nt, Human
cacuccuccuagccaccc

SEQ ID NO: 1195149 - RNA, 19 nt, Human
cacguguggccuguucuuc

SEQ ID NO: 1195150 - RNA, 16 nt, Human
cacguaaugaaacuug

SEQ ID NO: 1195151 - RNA, 19 nt, Human
cacguaaugaaacuuggau

SEQ ID NO: 1195152 - RNA, 20 nt, Human
cacggcuccucgagauccca

SEQ ID NO: 1195153 - RNA, 22 nt, Human
cacggcuccucgagaucccaac

SEQ ID NO: 1195154 - RNA, 17 nt, Human
cacuggccccugagauc

SEQ ID NO: 1195155 - RNA, 18 nt, Human
cacugcuaagaauauuug

SEQ ID NO: 1195156 - RNA, 14 nt, Human
cacugauccagccc

SEQ ID NO: 1195157 - RNA, 15 nt, Human
cacugauccagcccu

SEQ ID NO: 1195158 - RNA, 16 nt, Human
cacugauccagcccug

SEQ ID NO: 1195159 - RNA, 14 nt, Human
caccggggccuggg

SEQ ID NO: 1195160 - RNA, 21 nt, Human
caccggggccugggcaggagg

SEQ ID NO: 1195161 - RNA, 22 nt, Human
caccggggccugggcaggaggg

SEQ ID NO: 1195162 - RNA, 17 nt, Human
caccgccuccuacagcc

SEQ ID NO: 1195163 - RNA, 18 nt, Human
gaccuuuccugaggaaga

SEQ ID NO: 1195164 - RNA, 12 nt, Human
gcaggaggaagg

SEQ ID NO: 1195165 - RNA, 21 nt, Human
gccucucauuccagaggaagg

SEQ ID NO: 1195166 - RNA, 21 nt, Human
gcggcuggacuuggagguagc

SEQ ID NO: 1195167 - RNA, 17 nt, Dobrava virus
cauugauuugcuuccug

SEQ ID NO: 1195168 - RNA, 14 nt, Dobrava virus
uuuauguaauccca

SEQ ID NO: 1195169 - RNA, 14 nt, Dobrava virus
caacuaccuaccuc

SEQ ID NO: 1195170 - RNA, 15 nt, Dobrava virus
auauaucaguuuaaa

SEQ ID NO: 1195171 - RNA, 15 nt, Dobrava virus
uuuccuuucuuuacu

SEQ ID NO: 1195172 - RNA, 20 nt, Dobrava virus
auaucaguuuaaacuucugu

SEQ ID NO: 1195173 - RNA, 18 nt, Dobrava virus
gaauuauuauacuacuga

SEQ ID NO: 1195174 - RNA, 16 nt, Dobrava virus
uuuucauuuuccggag

SEQ ID NO: 1195175 - RNA, 22 nt, Dobrava virus
cuuaagugacuuuuuucuguau

SEQ ID NO: 1195176 - RNA, 12 nt, Dobrava virus
accuaccucaaa

SEQ ID NO: 1195177 - RNA, 23 nt, Dobrava virus
guuuauauuuauuuucauuuucc

SEQ ID NO: 1195178 - RNA, 17 nt, Dobrava virus
cuaacaucuuauuuccu

SEQ ID NO: 1195179 - RNA, 21 nt, Dobrava virus
uacugauuggugaauguauuu

SEQ ID NO: 1195180 - RNA, 19 nt, Dobrava virus
uuaaacuucuguacuuauu

SEQ ID NO: 1195181 - RNA, 15 nt, Dobrava virus
cuuucuuuacuaaca

SEQ ID NO: 1195182 - RNA, 21 nt, Dobrava virus
aucuaaaaaaaauaacuccuu

SEQ ID NO: 1195183 - RNA, 21 nt, Dobrava virus
cuuucuuuacuaacaacaacu

SEQ ID NO: 1195184 - RNA, 15 nt, Dobrava virus
uauuucuauaucuug

SEQ ID NO: 1195185 - RNA, 18 nt, Dobrava virus
uuucauuugaucuguacu

SEQ ID NO: 1195186 - RNA, 12 nt, Dobrava virus
cuuucaacaaug

SEQ ID NO: 1195187 - RNA, 14 nt, Dobrava virus
guacuuauuaacuu

SEQ ID NO: 1195188 - RNA, 21 nt, Dobrava virus
ucauuugaucuguacuaacau

SEQ ID NO: 1195189 - RNA, 21 nt, Dobrava virus
ugauuugcuuccugaaugucu

SEQ ID NO: 1195190 - RNA, 14 nt, Dobrava virus
guauauagcuuuca

SEQ ID NO: 1195191 - RNA, 23 nt, Dobrava virus
uauagcuuucaacaaugcaauuu

SEQ ID NO: 1195192 - RNA, 19 nt, Dobrava virus
auuuucauuuuccggagca

SEQ ID NO: 1195193 - RNA, 16 nt, Dobrava virus
acaacuaccuaccuca

SEQ ID NO: 1195194 - RNA, 19 nt, Dobrava virus
cauuaucccaugcuuuaug

SEQ ID NO: 1195195 - RNA, 17 nt, Dobrava virus
auauuuauuuucauuuu

SEQ ID NO: 1195196 - RNA, 20 nt, Dobrava virus
aacuacuaccucauugauuu

SEQ ID NO: 1195197 - RNA, 23 nt, Dobrava virus
uuuacauuuaucaaccuaguuau

SEQ ID NO: 1195198 - RNA, 22 nt, Dobrava virus
ggaauuauuauacuacugauug

SEQ ID NO: 1195199 - RNA, 22 nt, Dobrava virus
cuaccucaacaacuacuaccuc

SEQ ID NO: 1195200 - RNA, 18 nt, Dobrava virus
cuuaagugacuuuuuucu

SEQ ID NO: 1195201 - RNA, 14 nt, Dobrava virus
cauugauuugcuuc

SEQ ID NO: 1195202 - RNA, 17 nt, Dobrava virus
uuuguugcauuauccca

SEQ ID NO: 1195203 - RNA, 14 nt, Dobrava virus
acuaccuaccucaa

SEQ ID NO: 1195204 - RNA, 22 nt, Dobrava virus
uacuacugauuggugaauguau

SEQ ID NO: 1195205 - RNA, 23 nt, Dobrava virus
agcuuguccuuguauauagcuuu

SEQ ID NO: 1195206 - RNA, 22 nt, Dobrava virus
gcugcauuaacugcuuggacug

SEQ ID NO: 1195207 - RNA, 16 nt, Dobrava virus
ugacuuuuuucuguau

SEQ ID NO: 1195208 - RNA, 12 nt, Dobrava virus
cuacuaccucau

SEQ ID NO: 1195209 - RNA, 22 nt, Dobrava virus
ucauuuuccggagcauacuacu

SEQ ID NO: 1195210 - RNA, 21 nt, Dobrava virus
aucuguacuaacaucuuauuu

SEQ ID NO: 1195211 - RNA, 18 nt, Dobrava virus
auuaacuuuuuacauuua

SEQ ID NO: 1195212 - RNA, 18 nt, Dobrava virus
aucccaugcuuuauguaa

SEQ ID NO: 1195213 - RNA, 13 nt, Dobrava virus
acuacuaccucau

SEQ ID NO: 1195214 - RNA, 19 nt, Dobrava virus
acaacuaccuaccucaaaa

SEQ ID NO: 1195215 - RNA, 21 nt, Dobrava virus
uuucuguauauauggauguag

SEQ ID NO: 1195216 - RNA, 16 nt, Dobrava virus
auauuuauuuucauuu

SEQ ID NO: 1195217 - RNA, 17 nt, Dobrava virus
aaauaacuccuucauua

SEQ ID NO: 1195218 - RNA, 20 nt, Dobrava virus
guuaucuaaaaaaaauaacu

SEQ ID NO: 1195219 - RNA, 14 nt, Dobrava virus
cuaccucaacaacu

SEQ ID NO: 1195220 - RNA, 11 nt, Dobrava virus
cggagcauacu

SEQ ID NO: 1195221 - RNA, 17 nt, Dobrava virus
cugauuggugaauguau

SEQ ID NO: 1195222 - RNA, 11 nt, Dobrava virus
acuaccucaac

SEQ ID NO: 1195223 - RNA, 19 nt, Dobrava virus
cauuugaucuguacuaaca

SEQ ID NO: 1195224 - RNA, 12 nt, Dobrava virus
uccggagcauac

SEQ ID NO: 1195225 - RNA, 16 nt, Dobrava virus
uauagcuuucaacaau

SEQ ID NO: 1195226 - RNA, 21 nt, Dobrava virus
uagcuuucaacaaugcaauuu

SEQ ID NO: 1195227 - RNA, 17 nt, Dobrava virus
auuacuauaaaccuuag

SEQ ID NO: 1195228 - RNA, 23 nt, Dobrava virus
ucauugauuugcuuccugaaugu

SEQ ID NO: 1195229 - RNA, 12 nt, Dobrava virus
acuauaaaccuu

SEQ ID NO: 1195230 - RNA, 21 nt, Dobrava virus
uucauuuuccggagcauacua

SEQ ID NO: 1195231 - RNA, 13 nt, Dobrava virus
acuaccucaacaa

SEQ ID NO: 1195232 - RNA, 14 nt, Dobrava virus
auuuucauuuuccg

SEQ ID NO: 1195233 - RNA, 15 nt, Dobrava virus
caucuuauuuccuuc

SEQ ID NO: 1195234 - RNA, 12 nt, Dobrava virus
cauuuuccggag

SEQ ID NO: 1195235 - RNA, 16 nt, Dobrava virus
caguuuaaacuucugu

SEQ ID NO: 1195236 - RNA, 13 nt, Dobrava virus
cuaccuaccucaa

SEQ ID NO: 1195237 - RNA, 18 nt, Dobrava virus
cauuuaucaaccuaguua

SEQ ID NO: 1195238 - RNA, 18 nt, Dobrava virus
cuacugauuggugaaugu

SEQ ID NO: 1195239 - RNA, 13 nt, Dobrava virus
cuaacaucuuauu

SEQ ID NO: 1195240 - RNA, 15 nt, Dobrava virus
acaacuacuaccuca

SEQ ID NO: 1195241 - RNA, 18 nt, Dobrava virus
guuuauauuuauuuucau

SEQ ID NO: 1195242 - RNA, 18 nt, Dobrava virus
cuuauuuccuucuuuucc

SEQ ID NO: 1195243 - RNA, 22 nt, Dobrava virus
cugauuggugaauguauuugca

SEQ ID NO: 1195244 - RNA, 16 nt, Dobrava virus
gaauguauuugcacua

SEQ ID NO: 1195245 - RNA, 20 nt, Dobrava virus
ucuuuagggagucuacuacu

SEQ ID NO: 1195246 - RNA, 23 nt, Dobrava virus
auauauggauguagauuucauuu

SEQ ID NO: 1195247 - RNA, 20 nt, Dobrava virus
ucuugcggagcauacuacua

SEQ ID NO: 1195248 - RNA, 21 nt, Dobrava virus
ucuuuagggagucuacuacua

SEQ ID NO: 1195249 - RNA, 20 nt, Dobrava virus
cuggaauuauuauacuacug

SEQ ID NO: 1195250 - RNA, 16 nt, Dobrava virus
aacaucuuauuuccuu

SEQ ID NO: 1195251 - RNA, 19 nt, Dobrava virus
uuuccggagcauacuacua

SEQ ID NO: 1195252 - RNA, 23 nt, Human
agucugagagaggccauucuuuc

SEQ ID NO: 1195253 - RNA, 16 nt, Human
agucugagagaggcca

SEQ ID NO: 1195254 - RNA, 21 nt, Human
auccagagucccugccuggac

SEQ ID NO: 1195255 - RNA, 20 nt, Human
auccagagucccugccugga

SEQ ID NO: 1195256 - RNA, 19 nt, Human
auccagagucccugccugg

SEQ ID NO: 1195257 - RNA, 16 nt, Human
augaugggucaguugu

SEQ ID NO: 1195258 - RNA, 18 nt, Human
agcuccuuaaggcucuuu

SEQ ID NO: 1195259 - RNA, 17 nt, Human
agcuccuuaaggcucuu

SEQ ID NO: 1195260 - RNA, 16 nt, Human
agcuccuuaaggcucu

SEQ ID NO: 1195261 - RNA, 19 nt, Human
agcuaauucuuugaccugu

SEQ ID NO: 1195262 - RNA, 16 nt, Human
aggaaccgaggcaggg

SEQ ID NO: 1195263 - RNA, 22 nt, Human
aggaacugcugggcuuggcagc

SEQ ID NO: 1195264 - RNA, 10 nt, Human
agagggcugc

SEQ ID NO: 1195265 - RNA, 18 nt, Human
aagagaagggcagggcug

SEQ ID NO: 1195266 - RNA, 23 nt, Human
acagaggacaguauuugugggga

SEQ ID NO: 1195267 - RNA, 11 nt, Human
aauugugaugu

SEQ ID NO: 1195268 - RNA, 14 nt, Human
aauugugauguguc

SEQ ID NO: 1195269 - RNA, 15 nt, Human
aauugugaugugucc

SEQ ID NO: 1195270 - RNA, 14 nt, Human
accaucucuuuacc

SEQ ID NO: 1195271 - RNA, 22 nt, Human
ggcgaagcguuguccucagccc

SEQ ID NO: 1195272 - RNA, 17 nt, Human
ggcccugugccuuggug

SEQ ID NO: 1195273 - RNA, 15 nt, Human
ggcacuggggcaggg

SEQ ID NO: 1195274 - RNA, 22 nt, Human
ggcauccagagucccugccugg

SEQ ID NO: 1195275 - RNA, 19 nt, Human
ggccaguggcuggaucugu

SEQ ID NO: 1195276 - RNA, 13 nt, Human
ggaugucugggcc

SEQ ID NO: 1195277 - RNA, 13 nt, Human
ggcacagccuggc

SEQ ID NO: 1195278 - RNA, 12 nt, Human
ggcacagccugg

SEQ ID NO: 1195279 - RNA, 14 nt, Human
aaaagggaggggga

SEQ ID NO: 1195280 - RNA, 14 nt, Human
gggaugucucucau

SEQ ID NO: 1195281 - RNA, 19 nt, Human
gggagaaugucaguaugug

SEQ ID NO: 1195282 - RNA, 22 nt, Human
gggagaaugucaguauguggaa

SEQ ID NO: 1195283 - RNA, 22 nt, Human
gggcccuggugguggcucggga

SEQ ID NO: 1195284 - RNA, 18 nt, Human
gggcucagagugggguag

SEQ ID NO: 1195285 - RNA, 13 nt, Human
ggguggggagaga

SEQ ID NO: 1195286 - RNA, 23 nt, Human
ggguguccugcaccggggccugg

SEQ ID NO: 1195287 - RNA, 16 nt, Human
gguaggaacugcuggg

SEQ ID NO: 1195288 - RNA, 21 nt, Human
ggugcuucuaguucugccagg

SEQ ID NO: 1195289 - RNA, 20 nt, Human
ggucuguguguguguaugug

SEQ ID NO: 1195290 - RNA, 21 nt, Human
ggucuguguguguguaugugg

SEQ ID NO: 1195291 - RNA, 11 nt, Human
ggucugugugu

SEQ ID NO: 1195292 - RNA, 17 nt, Human
ggucuguguguguguau

SEQ ID NO: 1195293 - RNA, 16 nt, Human
guaaauuuaugugaug

SEQ ID NO: 1195294 - RNA, 17 nt, Human
guaaauuuaugugaugg

SEQ ID NO: 1195295 - RNA, 22 nt, Human
gcugcuccccacgucagcuggg

SEQ ID NO: 1195296 - RNA, 13 nt, Human
gcugcuccccacg

SEQ ID NO: 1195297 - RNA, 14 nt, Human
gcugaggccucuca

SEQ ID NO: 1195298 - RNA, 18 nt, Human
gcuccucgagaucccaac

SEQ ID NO: 1195299 - RNA, 14 nt, Human
ggaacugcugggcu

SEQ ID NO: 1195300 - RNA, 15 nt, Human
ggaacugcugggcuu

SEQ ID NO: 1195301 - RNA, 20 nt, Human
gcuguagacauuugcuauga

SEQ ID NO: 1195302 - RNA, 13 nt, Human
gcuggaucuguga

SEQ ID NO: 1195303 - RNA, 19 nt, Human
gcuuuccucaucaggccau

SEQ ID NO: 1195304 - RNA, 22 nt, Human
gcggcugggaggagggcaggca

SEQ ID NO: 1195305 - RNA, 19 nt, Human
gcggcugggaggagggcag

SEQ ID NO: 1195306 - RNA, 18 nt, Human
gcggcugggaggagggca

SEQ ID NO: 1195307 - RNA, 17 nt, Human
gcggcugggaggagggc

SEQ ID NO: 1195308 - RNA, 14 nt, Human
gcggcugggaggag

SEQ ID NO: 1195309 - RNA, 14 nt, Human
gccaguggcuggau

SEQ ID NO: 1195310 - RNA, 23 nt, Human
gccaguggcuggaucugugaggg

SEQ ID NO: 1195311 - RNA, 14 nt, Human
gccaggauggaaug

SEQ ID NO: 1195312 - RNA, 20 nt, Human
gcaccggggccugggcagga

SEQ ID NO: 1195313 - RNA, 16 nt, Human
gaguccaucagccucc

SEQ ID NO: 1195314 - RNA, 15 nt, Human
gaguccaucagccuc

SEQ ID NO: 1195315 - RNA, 14 nt, Human
gaguccaucagccu

SEQ ID NO: 1195316 - RNA, 13 nt, Human
gaguccaucagcc

SEQ ID NO: 1195317 - RNA, 18 nt, Human
gagugaggaugucugggc

SEQ ID NO: 1195318 - RNA, 15 nt, Human
gaguuuagggugggg

SEQ ID NO: 1195319 - RNA, 14 nt, Human
gaguuuaggguggg

SEQ ID NO: 1195320 - RNA, 16 nt, Human
gaucccaacacugcca

SEQ ID NO: 1195321 - RNA, 12 nt, Human
gaucccaacacu

SEQ ID NO: 1195322 - RNA, 19 nt, Human
gagcuggggaugucucuca

SEQ ID NO: 1195323 - RNA, 19 nt, Human
gaagugugggucugugugu

SEQ ID NO: 1195324 - RNA, 17 nt, Human
gaagugugggucugugu

SEQ ID NO: 1195325 - RNA, 18 nt, Human
gaagugugggucugugug

SEQ ID NO: 1195326 - RNA, 15 nt, Human
gaaggcuauggggau

SEQ ID NO: 1195327 - RNA, 19 nt, Human
gaagggcagggcugaggcc

SEQ ID NO: 1195328 - RNA, 16 nt, Human
gacagguuagcugcuc

SEQ ID NO: 1195329 - RNA, 15 nt, Human
gacaguauuuguggg

SEQ ID NO: 1195330 - RNA, 18 nt, Human
cuuauuggcagcucuacu

SEQ ID NO: 1195331 - RNA, 17 nt, Human
cugccaucauguuuaca

SEQ ID NO: 1195332 - RNA, 22 nt, Human
cugccaucauguuuacagagga

SEQ ID NO: 1195333 - RNA, 23 nt, Human
cugccaucauguuuacagaggac

SEQ ID NO: 1195334 - RNA, 22 nt, Human
cuggggaugucucucaugacca

SEQ ID NO: 1195335 - RNA, 24 nt, Human
cagccccgcguggaacucgugucu

SEQ ID NO: 1195336 - RNA, 24 nt, Human
cagccucuccacucaugugacucu

SEQ ID NO: 1195337 - RNA, 15 nt, Human
caguauuugugggga

SEQ ID NO: 1195338 - RNA, 22 nt, Human
cacugccagcauuucccuuccu

SEQ ID NO: 1195339 - RNA, 18 nt, Human
cacugccagcauuucccu

SEQ ID NO: 1195340 - RNA, 15 nt, Human
caaacaggcucagag

SEQ ID NO: 1195341 - RNA, 14 nt, Human
caaacaggcucaga

SEQ ID NO: 1195342 - RNA, 22 nt, Human
auuuguggggagggauuugggg

SEQ ID NO: 1195343 - RNA, 16 nt, Human
auuugcuaugagcugg

SEQ ID NO: 1195344 - RNA, 20 nt, Human
auuugcuaugagcuggggau

SEQ ID NO: 1195345 - RNA, 19 nt, Human
auucuuucccaacaccucu

SEQ ID NO: 1195346 - RNA, 16 nt, Human
auucuuucccaacacc

SEQ ID NO: 1195347 - RNA, 22 nt, Human
cccugugccuugucacgccaga

SEQ ID NO: 1195348 - RNA, 20 nt, Human
cccugugccuugucacgcca

SEQ ID NO: 1195349 - RNA, 15 nt, Human
cccugugccuuguca

SEQ ID NO: 1195350 - RNA, 24 nt, Human
cccugugccuuggugugcuguauc

SEQ ID NO: 1195351 - RNA, 14 nt, Human
ccugacucucagca

SEQ ID NO: 1195352 - RNA, 14 nt, Human
cccgggagcucagg

SEQ ID NO: 1195353 - RNA, 14 nt, Human
ccccgacuuuuguu

SEQ ID NO: 1195354 - RNA, 12 nt, Human
ccaugagcuccu

SEQ ID NO: 1195355 - RNA, 22 nt, Human
ccagagucccugccuggaccag

SEQ ID NO: 1195356 - RNA, 19 nt, Human
ccagagucccugccuggac

SEQ ID NO: 1195357 - RNA, 18 nt, Human
ccagagucccugccugga

SEQ ID NO: 1195358 - RNA, 17 nt, Human
ccagagucccugccugg

SEQ ID NO: 1195359 - RNA, 16 nt, Human
ccagagucccugccug

SEQ ID NO: 1195360 - RNA, 23 nt, Human
cggcuccucgagaucccaacacu

SEQ ID NO: 1195361 - RNA, 21 nt, Human
cgugucuggcacagccuggcu

SEQ ID NO: 1195362 - RNA, 14 nt, Human
cgugucuggcacag

SEQ ID NO: 1195363 - RNA, 21 nt, Human
cuaaccugccgagaguccauc

SEQ ID NO: 1195364 - RNA, 19 nt, Human
cuaaccugccgagagucca

SEQ ID NO: 1195365 - RNA, 12 nt, Human
cuaaccugccga

SEQ ID NO: 1195366 - RNA, 14 nt, Human
cucccuccucugcc

SEQ ID NO: 1195367 - RNA, 13 nt, Human
cucccuccucugc

SEQ ID NO: 1195368 - RNA, 16 nt, Human
cucaucuuucuuccaa

SEQ ID NO: 1195369 - RNA, 19 nt, Human
gucucccuccucugcccgg

SEQ ID NO: 1195370 - RNA, 19 nt, Human
gucuggcacagccuggcug

SEQ ID NO: 1195371 - RNA, 17 nt, Human
gucuggcacagccuggc

SEQ ID NO: 1195372 - RNA, 17 nt, Human
gucaguauguggaagug

SEQ ID NO: 1195373 - RNA, 21 nt, Human
gucaguauguggaaguguggg

SEQ ID NO: 1195374 - RNA, 13 nt, Human
gucaguuguauca

SEQ ID NO: 1195375 - RNA, 12 nt, Human
aaauugugaugu

SEQ ID NO: 1195376 - RNA, 15 nt, Human
aaauugugauguguc

SEQ ID NO: 1195377 - RNA, 12 nt, Human
aaauuuauguga

SEQ ID NO: 1195378 - RNA, 15 nt, Human
aaauuuaugugaugg

SEQ ID NO: 1195379 - RNA, 22 nt, Human
guggccuaaccugccgagaguc

SEQ ID NO: 1195380 - RNA, 21 nt, Human
guggccuaaccugccgagagu

SEQ ID NO: 1195381 - RNA, 14 nt, Human
gugugggucugugu

SEQ ID NO: 1195382 - RNA, 20 nt, Human
gugugucacccuuaggccag

SEQ ID NO: 1195383 - RNA, 13 nt, Human
guguguauguggg

SEQ ID NO: 1195384 - RNA, 15 nt, Human
guguguauguggggg

SEQ ID NO: 1195385 - RNA, 19 nt, Human
gugggguagguugggagaa

SEQ ID NO: 1195386 - RNA, 16 nt, Human
gugugugggagugugu

SEQ ID NO: 1195387 - RNA, 14 nt, Human
aaggcucuuuugua

SEQ ID NO: 1195388 - RNA, 15 nt, Human
uacccccugugccuu

SEQ ID NO: 1195389 - RNA, 13 nt, Human
uaccucuuggcug

SEQ ID NO: 1195390 - RNA, 19 nt, Human
uaauuuaaaauugugaugu

SEQ ID NO: 1195391 - RNA, 20 nt, Human
uaauuuaaaauugugaugug

SEQ ID NO: 1195392 - RNA, 20 nt, Human
uaugccaccugaauaaagaa

SEQ ID NO: 1195393 - RNA, 21 nt, Human
uaugguaggaacugcugggcu

SEQ ID NO: 1195394 - RNA, 15 nt, Human
uaucagcacgugugg

SEQ ID NO: 1195395 - RNA, 14 nt, Human
uaucagcacgugug

SEQ ID NO: 1195396 - RNA, 21 nt, Human
uagacauuugcuaugagcugg

SEQ ID NO: 1195397 - RNA, 14 nt, Human
uagaagaagugugu

SEQ ID NO: 1195398 - RNA, 16 nt, Human
aauuccacacccucac

SEQ ID NO: 1195399 - RNA, 20 nt, Human
uccauccuacccccugugcc

SEQ ID NO: 1195400 - RNA, 16 nt, Human
uccauccuacccccug

SEQ ID NO: 1195401 - RNA, 23 nt, Human
acucgugucuggcacagccuggc

SEQ ID NO: 1195402 - RNA, 22 nt, Human
acucgugucuggcacagccugg

SEQ ID NO: 1195403 - RNA, 13 nt, Human
uccucuccugucu

SEQ ID NO: 1195404 - RNA, 22 nt, Human
uccucugcccgggagcucagga

SEQ ID NO: 1195405 - RNA, 16 nt, Human
uccucugcccgggagc

SEQ ID NO: 1195406 - RNA, 18 nt, Human
uaugugggggucugugug

SEQ ID NO: 1195407 - RNA, 19 nt, Human
uaugugggggucugugugu

SEQ ID NO: 1195408 - RNA, 20 nt, Human
uaugugggggucuguguguu

SEQ ID NO: 1195409 - RNA, 20 nt, Human
ucggggagccgggagccuga

SEQ ID NO: 1195410 - RNA, 16 nt, Human
acuggggcaggggccg

SEQ ID NO: 1195411 - RNA, 14 nt, Human
ucuaguucugccag

SEQ ID NO: 1195412 - RNA, 15 nt, Human
ucuaccucuuggcug

SEQ ID NO: 1195413 - RNA, 22 nt, Human
ucuggcacagccuggcuguggc

SEQ ID NO: 1195414 - RNA, 23 nt, Human
ucuuggggaguuuaggguggggg

SEQ ID NO: 1195415 - RNA, 22 nt, Human
ucuuggggaguuuagggugggg

SEQ ID NO: 1195416 - RNA, 17 nt, Human
agagacgggcccuggug

SEQ ID NO: 1195417 - RNA, 21 nt, Human
ugacccucaucuuucuuccaa

SEQ ID NO: 1195418 - RNA, 17 nt, Human
agcauuucccuuccuuc

SEQ ID NO: 1195419 - RNA, 21 nt, Human
ugauagaaggcuauggggaua

SEQ ID NO: 1195420 - RNA, 24 nt, Human
ugauaagcagucauccucagauca

SEQ ID NO: 1195421 - RNA, 18 nt, Human
ugaguucauaaauuuaug

SEQ ID NO: 1195422 - RNA, 18 nt, Human
agccugacccucaucuuu

SEQ ID NO: 1195423 - RNA, 22 nt, Human
agcucaggaaccgaggcaggga

SEQ ID NO: 1195424 - RNA, 21 nt, Human
agcucaggaaccgaggcaggg

SEQ ID NO: 1195425 - RNA, 20 nt, Human
agcucaggaaccgaggcagg

SEQ ID NO: 1195426 - RNA, 21 nt, Human
agcugggacaccccgacuuuu

SEQ ID NO: 1195427 - RNA, 23 nt, Human
ugcuguauccauccauggggcug

SEQ ID NO: 1195428 - RNA, 18 nt, Human
ugcuauuguagagccaga

SEQ ID NO: 1195429 - RNA, 16 nt, Human
uggccuaaccugccga

SEQ ID NO: 1195430 - RNA, 21 nt, Human
uggccuguucuucuauggguu

SEQ ID NO: 1195431 - RNA, 19 nt, Human
aggaucccaugagcuccuu

SEQ ID NO: 1195432 - RNA, 12 nt, Human
aggacaguauuu

SEQ ID NO: 1195433 - RNA, 19 nt, Human
aggacaguauuugugggga

SEQ ID NO: 1195434 - RNA, 19 nt, Human
uggggaguuuagggugggg

SEQ ID NO: 1195435 - RNA, 18 nt, Human
uggggaguuuaggguggg

SEQ ID NO: 1195436 - RNA, 21 nt, Human
ugggguagguugggagaaugu

SEQ ID NO: 1195437 - RNA, 15 nt, Human
ugggguagguuggga

SEQ ID NO: 1195438 - RNA, 14 nt, Human
uggggcugauugua

SEQ ID NO: 1195439 - RNA, 16 nt, Human
agggggagagggcugc

SEQ ID NO: 1195440 - RNA, 15 nt, Human
agggggagagggcug

SEQ ID NO: 1195441 - RNA, 12 nt, Human
ugggucugugug

SEQ ID NO: 1195442 - RNA, 13 nt, Human
ugguaggaacugc

SEQ ID NO: 1195443 - RNA, 20 nt, Human
ugguaggaacugcugggcuu

SEQ ID NO: 1195444 - RNA, 23 nt, Human
agucccugccuggaccagccucu

SEQ ID NO: 1195445 - RNA, 22 nt, Human
agucccugccuggaccagccuc

SEQ ID NO: 1195446 - RNA, 21 nt, Human
agucccugccuggaccagccu

SEQ ID NO: 1195447 - RNA, 15 nt, Human
agucccugccuggac

SEQ ID NO: 1195448 - RNA, 14 nt, Human
agucccugccugga

SEQ ID NO: 1195449 - RNA, 19 nt, Human
aguauguggaagugugggu

SEQ ID NO: 1195450 - RNA, 15 nt, Human
aguauguggaagugu

SEQ ID NO: 1195451 - RNA, 17 nt, Human
aguauguggaagugugg

SEQ ID NO: 1195452 - RNA, 18 nt, Human
ugucaguauguggaagug

SEQ ID NO: 1195453 - RNA, 19 nt, Human
ugucaguauguggaagugu

SEQ ID NO: 1195454 - RNA, 20 nt, Human
ugucaguauguggaagugug

SEQ ID NO: 1195455 - RNA, 22 nt, Human
ugucaguauguggaaguguggg

SEQ ID NO: 1195456 - RNA, 21 nt, Human
uguaauuuaaaauugugaugu

SEQ ID NO: 1195457 - RNA, 22 nt, Human
uguaauuuaaaauugugaugug

SEQ ID NO: 1195458 - RNA, 17 nt, Human
uguaauuuaaaauugug

SEQ ID NO: 1195459 - RNA, 18 nt, Human
uguaauuuaaaauuguga

SEQ ID NO: 1195460 - RNA, 20 nt, Human
uguaauuuaaaauugugaug

SEQ ID NO: 1195461 - RNA, 23 nt, Human
agguugggagaaugucaguaugu

SEQ ID NO: 1195462 - RNA, 19 nt, Human
uguggcacuggggcagggg

SEQ ID NO: 1195463 - RNA, 13 nt, Human
uguguguguguau

SEQ ID NO: 1195464 - RNA, 16 nt, Human
uguguguguguaugug

SEQ ID NO: 1195465 - RNA, 16 nt, Human
uguugugugugggagu

SEQ ID NO: 1195466 - RNA, 14 nt, Human
uguuguguguggga

SEQ ID NO: 1195467 - RNA, 15 nt, Human
uguugugugugggag

SEQ ID NO: 1195468 - RNA, 19 nt, Human
agugugggucugugugugu

SEQ ID NO: 1195469 - RNA, 23 nt, Human
agugugggucuguguguguguau

SEQ ID NO: 1195470 - RNA, 15 nt, Human
agugugggucugugu

SEQ ID NO: 1195471 - RNA, 16 nt, Human
agugugggucugugug

SEQ ID NO: 1195472 - RNA, 17 nt, Human
agugugggucugugugu

SEQ ID NO: 1195473 - RNA, 16 nt, Human
uuagccuuugucccag

SEQ ID NO: 1195474 - RNA, 16 nt, Human
uucuaguucugccagg

SEQ ID NO: 1195475 - RNA, 15 nt, Human
uucuaguucugccag

SEQ ID NO: 1195476 - RNA, 16 nt, Human
auggccugggggaugu

SEQ ID NO: 1195477 - RNA, 21 nt, Human
auggaaugaugggucaguugu

SEQ ID NO: 1195478 - RNA, 12 nt, Human
uuuaugugaugg

SEQ ID NO: 1195479 - RNA, 11 nt, Human
uuuaugugugu

SEQ ID NO: 1195480 - RNA, 13 nt, Human
uuuaugugugugu

SEQ ID NO: 1195481 - RNA, 20 nt, Human
aucugagaggccacagugca

SEQ ID NO: 1195482 - RNA, 16 nt, Human
aucuguaccucugccu

SEQ ID NO: 1195483 - RNA, 20 nt, Human
auuuaaaauugugauguguc

SEQ ID NO: 1195484 - RNA, 19 nt, Human
auuuaaaauugugaugugu

SEQ ID NO: 1195485 - RNA, 23 nt, Human
auugcaggagucccugccaucau

SEQ ID NO: 1195486 - RNA, 15 nt, Human
auguuuacagaggac

SEQ ID NO: 1195487 - RNA, 17 nt, Human
auguuuacagaggacag

SEQ ID NO: 1195488 - RNA, 19 nt, Human
auguuuacagaggacagua

SEQ ID NO: 1195489 - RNA, 17 nt, Human
uuuguaaauuuauguga

SEQ ID NO: 1195490 - RNA, 19 nt, Human
uuugcuaugagcuggggau

SEQ ID NO: 1195491 - RNA, 13 nt, Human
augucaguaugug

SEQ ID NO: 1195492 - RNA, 14 nt, Human
augucaguaugugg

SEQ ID NO: 1195493 - RNA, 16 nt, Human
augucaguauguggaa

SEQ ID NO: 1195494 - RNA, 17 nt, Human
caagccuuggcucuacc

SEQ ID NO: 1195495 - RNA, 14 nt, Human
cccucaucuuucuu

SEQ ID NO: 1195496 - RNA, 18 nt, Human
cccugccuggaccagccu

SEQ ID NO: 1195497 - RNA, 13 nt, Human
cccugccuggacc

SEQ ID NO: 1195498 - RNA, 12 nt, Human
cccugccuggac

SEQ ID NO: 1195499 - RNA, 20 nt, Human
cccugccaucauguuuacag

SEQ ID NO: 1195500 - RNA, 19 nt, Human
ccggcuuuguggcacuggg

SEQ ID NO: 1195501 - RNA, 17 nt, Human
ccggcuuuguggcacug

SEQ ID NO: 1195502 - RNA, 19 nt, Human
ccggggccugggcaggagg

SEQ ID NO: 1195503 - RNA, 15 nt, Human
ccggggccugggcag

SEQ ID NO: 1195504 - RNA, 15 nt, Human
ccgggagcucaggaa

SEQ ID NO: 1195505 - RNA, 13 nt, Human
ccgggagcucagg

SEQ ID NO: 1195506 - RNA, 18 nt, Human
ccucagccccgcguggaa

SEQ ID NO: 1195507 - RNA, 23 nt, Human
ccuccauccuacccccugugccu

SEQ ID NO: 1195508 - RNA, 22 nt, Human
ccuccauccuacccccugugcc

SEQ ID NO: 1195509 - RNA, 17 nt, Human
ccuccauccuacccccu

SEQ ID NO: 1195510 - RNA, 21 nt, Human
cccagcuaugguucucucgca

SEQ ID NO: 1195511 - RNA, 20 nt, Human
ccaucauguuuacagaggac

SEQ ID NO: 1195512 - RNA, 22 nt, Human
ccaucauguuuacagaggacag

SEQ ID NO: 1195513 - RNA, 19 nt, Human
cauggggcugauuguauuu

SEQ ID NO: 1195514 - RNA, 21 nt, Human
cauuaccucagugagaagcca

SEQ ID NO: 1195515 - RNA, 22 nt, Human
cauuaccucagugagaagccag

SEQ ID NO: 1195516 - RNA, 15 nt, Human
cauaccuggcccugu

SEQ ID NO: 1195517 - RNA, 18 nt, Human
cauaaucacaacccuuca

SEQ ID NO: 1195518 - RNA, 16 nt, Human
caguggcuggaucugu

SEQ ID NO: 1195519 - RNA, 18 nt, Human
caguggcuggaucuguga

SEQ ID NO: 1195520 - RNA, 20 nt, Human
caguggcuggaucugugagg

SEQ ID NO: 1195521 - RNA, 18 nt, Human
cggcugggaggagggcag

SEQ ID NO: 1195522 - RNA, 17 nt, Human
cgggagccugacccuca

SEQ ID NO: 1195523 - RNA, 12 nt, Human
cggcugggagga

SEQ ID NO: 1195524 - RNA, 19 nt, Human
cggggccugggcaggaggg

SEQ ID NO: 1195525 - RNA, 17 nt, Human
cggggccugggcaggag

SEQ ID NO: 1195526 - RNA, 21 nt, Human
cgggggcagucugagagaggc

SEQ ID NO: 1195527 - RNA, 18 nt, Human
cgggggcagucugagaga

SEQ ID NO: 1195528 - RNA, 17 nt, Human
cgggggcagucugagag

SEQ ID NO: 1195529 - RNA, 15 nt, Human
cgggucaucuguacc

SEQ ID NO: 1195530 - RNA, 22 nt, Human
cgggucaucuguaccucugccu

SEQ ID NO: 1195531 - RNA, 23 nt, Human
cguggcuguggcauccagagucc

SEQ ID NO: 1195532 - RNA, 16 nt, Human
cguuguccucagcccc

SEQ ID NO: 1195533 - RNA, 14 nt, Human
cuacccccugugcc

SEQ ID NO: 1195534 - RNA, 18 nt, Human
cuccauccuacccccugu

SEQ ID NO: 1195535 - RNA, 22 nt, Human
cuccauccuacccccugugccu

SEQ ID NO: 1195536 - RNA, 20 nt, Human
cuccauccuacccccugugc

SEQ ID NO: 1195537 - RNA, 23 nt, Human
cuccauccuacccccugugccuu

SEQ ID NO: 1195538 - RNA, 24 nt, Human
cuccucgagaucccaacacugcca

SEQ ID NO: 1195539 - RNA, 21 nt, Human
cuccucgagaucccaacacug

SEQ ID NO: 1195540 - RNA, 17 nt, Human
cuccucgagaucccaac

SEQ ID NO: 1195541 - RNA, 21 nt, Human
cucuccacucaugugacucuu

SEQ ID NO: 1195542 - RNA, 22 nt, Human
cucuccacucaugugacucuuu

SEQ ID NO: 1195543 - RNA, 18 nt, Human
cucuccugucucccuccu

SEQ ID NO: 1195544 - RNA, 17 nt, Human
cucuccugucucccucc

SEQ ID NO: 1195545 - RNA, 15 nt, Human
cucuccugucucccu

SEQ ID NO: 1195546 - RNA, 23 nt, Human
cucuuggggaguuuagggugggg

SEQ ID NO: 1195547 - RNA, 19 nt, Human
cugcccgggagcucaggaa

SEQ ID NO: 1195548 - RNA, 11 nt, Human
cugccaggaga

SEQ ID NO: 1195549 - RNA, 21 nt, Human
cuggcacagccuggcuguggc

SEQ ID NO: 1195550 - RNA, 16 nt, Human
cuggcacagccuggcu

SEQ ID NO: 1195551 - RNA, 23 nt, Human
cuggcacagccuggcuguggccu

SEQ ID NO: 1195552 - RNA, 18 nt, Human
cuggcuguggccuaaccu

SEQ ID NO: 1195553 - RNA, 19 nt, Human
cugggaggagggcaggcau

SEQ ID NO: 1195554 - RNA, 14 nt, Human
cuguaccucugccu

SEQ ID NO: 1195555 - RNA, 21 nt, Human
cuuggggaguuuagggugggg

SEQ ID NO: 1195556 - RNA, 20 nt, Human
cuuggggaguuuaggguggg

SEQ ID NO: 1195557 - RNA, 23 nt, Human
cuugucacgccagacuucccacg

SEQ ID NO: 1195558 - RNA, 22 nt, Human
cuuucuuccaaacaggcucaga

SEQ ID NO: 1195559 - RNA, 19 nt, Human
cuuucuuccaaacaggcuc

SEQ ID NO: 1195560 - RNA, 13 nt, Human
cuuucuuccaaac

SEQ ID NO: 1195561 - RNA, 12 nt, Human
cuuuggacuugu

SEQ ID NO: 1195562 - RNA, 21 nt, Human
gaaggaucccaugagcuccuu

SEQ ID NO: 1195563 - RNA, 13 nt, Human
gaagaaguguguc

SEQ ID NO: 1195564 - RNA, 20 nt, Human
gacaccuaggcuaggguggg

SEQ ID NO: 1195565 - RNA, 16 nt, Human
gacaccuaggcuaggg

SEQ ID NO: 1195566 - RNA, 15 nt, Human
gacaccuaggcuagg

SEQ ID NO: 1195567 - RNA, 17 nt, Human
gaccuuuccugaggaag

SEQ ID NO: 1195568 - RNA, 21 nt, Human
gagagaggccauucuuuccca

SEQ ID NO: 1195569 - RNA, 13 nt, Human
gagagaggccauu

SEQ ID NO: 1195570 - RNA, 18 nt, Human
gacuugucccgggacacc

SEQ ID NO: 1195571 - RNA, 22 nt, Human
gagaagccagcuuuccucauca

SEQ ID NO: 1195572 - RNA, 21 nt, Human
gagccugacccucaucuuucu

SEQ ID NO: 1195573 - RNA, 22 nt, Human
gagcucaggaaccgaggcaggg

SEQ ID NO: 1195574 - RNA, 21 nt, Human
gagcucaggaaccgaggcagg

SEQ ID NO: 1195575 - RNA, 20 nt, Human
gagcucaggaaccgaggcag

SEQ ID NO: 1195576 - RNA, 17 nt, Human
gaucccaugagcuccuu

SEQ ID NO: 1195577 - RNA, 14 nt, Human
gaucauuaucagcc

SEQ ID NO: 1195578 - RNA, 13 nt, Human
gauagaugugugg

SEQ ID NO: 1195579 - RNA, 20 nt, Human
gauggcaaagaaggagagca

SEQ ID NO: 1195580 - RNA, 21 nt, Human
gaucugugaggggcucucuca

SEQ ID NO: 1195581 - RNA, 20 nt, Human
gauuuggggcucagaguggg

SEQ ID NO: 1195582 - RNA, 23 nt, Human
gauugcaggagucccugccauca

SEQ ID NO: 1195583 - RNA, 20 nt, Human
gcaggggccgggggcagucu

SEQ ID NO: 1195584 - RNA, 19 nt, Human
gcaggggccgggggcaguc

SEQ ID NO: 1195585 - RNA, 18 nt, Human
gcauuauauuuguaaauu

SEQ ID NO: 1195586 - RNA, 19 nt, Human
gcccgggagcucaggaacc

SEQ ID NO: 1195587 - RNA, 17 nt, Human
gcccgggagcucaggaa

SEQ ID NO: 1195588 - RNA, 15 nt, Human
gcccgggagcucagg

SEQ ID NO: 1195589 - RNA, 17 nt, Human
gccaucauguuuacaga

SEQ ID NO: 1195590 - RNA, 21 nt, Human
gccaucauguuuacagaggac

SEQ ID NO: 1195591 - RNA, 17 nt, Human
gccuaaccugccgagag

SEQ ID NO: 1195592 - RNA, 24 nt, Human
gccucuccacucaugugacucuuu

SEQ ID NO: 1195593 - RNA, 21 nt, Human
gccucuccacucaugugacuc

SEQ ID NO: 1195594 - RNA, 20 nt, Human
gccucucauuccagaggaag

SEQ ID NO: 1195595 - RNA, 19 nt, Human
gccucucauuccagaggaa

SEQ ID NO: 1195596 - RNA, 18 nt, Human
gccuuuggacuugucccg

SEQ ID NO: 1195597 - RNA, 18 nt, Human
gcgcggcugggaggaggg

SEQ ID NO: 1195598 - RNA, 12 nt, Human
gcgcggcuggga

SEQ ID NO: 1195599 - RNA, 19 nt, Human
guagugauuuuuaugccac

SEQ ID NO: 1195600 - RNA, 14 nt, Human
guagguugggagaa

SEQ ID NO: 1195601 - RNA, 22 nt, Human
gucagcugggacaccccgacuu

SEQ ID NO: 1195602 - RNA, 16 nt, Human
gucccugaagagaagg

SEQ ID NO: 1195603 - RNA, 13 nt, Human
gucccugccugga

SEQ ID NO: 1195604 - RNA, 14 nt, Human
gucccugccuggac

SEQ ID NO: 1195605 - RNA, 18 nt, Human
gucugagagaggccauuc

SEQ ID NO: 1195606 - RNA, 15 nt, Human
gucugagagaggcca

SEQ ID NO: 1195607 - RNA, 14 nt, Human
gucugagagaggcc

SEQ ID NO: 1195608 - RNA, 13 nt, Human
gucugagagaggc

SEQ ID NO: 1195609 - RNA, 11 nt, Human
gucugugugug

SEQ ID NO: 1195610 - RNA, 12 nt, Human
gucugugugugu

SEQ ID NO: 1195611 - RNA, 16 nt, Human
gucuguguguguguau

SEQ ID NO: 1195612 - RNA, 20 nt, Human
gucuguguguguguaugugg

SEQ ID NO: 1195613 - RNA, 11 nt, Human
gucuguguguu

SEQ ID NO: 1195614 - RNA, 21 nt, Human
gucuguguguuuaugugugug

SEQ ID NO: 1195615 - RNA, 22 nt, Human
gucuguguguuuaugugugugu

SEQ ID NO: 1195616 - RNA, 21 nt, Human
gugacuauggagcugagcagg

SEQ ID NO: 1195617 - RNA, 15 nt, Human
gugaggaugucuggg

SEQ ID NO: 1195618 - RNA, 14 nt, Human
gugccuuuugccau

SEQ ID NO: 1195619 - RNA, 21 nt, Human
gugccaggauggaaugauggg

SEQ ID NO: 1195620 - RNA, 21 nt, Human
gugauuuuuaugccaccugaa

SEQ ID NO: 1195621 - RNA, 16 nt, Human
guggcucgggaggcga

SEQ ID NO: 1195622 - RNA, 17 nt, Human
guggcuggaucugugag

SEQ ID NO: 1195623 - RNA, 21 nt, Human
guggggagagacgggcccugg

SEQ ID NO: 1195624 - RNA, 20 nt, Human
guguaauuuaaaauugugau

SEQ ID NO: 1195625 - RNA, 22 nt, Human
guguaauuuaaaauugugaugu

SEQ ID NO: 1195626 - RNA, 23 nt, Human
guguaauuuaaaauugugaugug

SEQ ID NO: 1195627 - RNA, 21 nt, Human
guguccugcaccggggccugg

SEQ ID NO: 1195628 - RNA, 17 nt, Human
gugucuggcacagccug

SEQ ID NO: 1195629 - RNA, 17 nt, Human
gugugggaguguguaau

SEQ ID NO: 1195630 - RNA, 14 nt, Human
guguguuuaugugu

SEQ ID NO: 1195631 - RNA, 15 nt, Human
guguguuuaugugug

SEQ ID NO: 1195632 - RNA, 16 nt, Human
guguguuuaugugugu

SEQ ID NO: 1195633 - RNA, 12 nt, Human
guguguugugug

SEQ ID NO: 1195634 - RNA, 14 nt, Human
guguguugugugug

SEQ ID NO: 1195635 - RNA, 17 nt, Human
guguguuguguguggga

SEQ ID NO: 1195636 - RNA, 14 nt, Human
guucugccaggaga

SEQ ID NO: 1195637 - RNA, 13 nt, Human
guucugccaggag

SEQ ID NO: 1195638 - RNA, 12 nt, Human
guucugccagga

SEQ ID NO: 1195639 - RNA, 23 nt, Human
guuguccucagccccgcguggaa

SEQ ID NO: 1195640 - RNA, 17 nt, Human
guuguccucagccccgc

SEQ ID NO: 1195641 - RNA, 12 nt, Human
guuguguguggg

SEQ ID NO: 1195642 - RNA, 13 nt, Human
guuguguguggga

SEQ ID NO: 1195643 - RNA, 14 nt, Human
guugugugugggag

SEQ ID NO: 1195644 - RNA, 16 nt, Human
guugugugugggagug

SEQ ID NO: 1195645 - RNA, 22 nt, Human
guugugugugggaguguguaau

SEQ ID NO: 1195646 - RNA, 16 nt, Human
guuuagaagaagugug

SEQ ID NO: 1195647 - RNA, 13 nt, Human
uaaauuuauguga

SEQ ID NO: 1195648 - RNA, 22 nt, Human
uaagugccaggauggaaugaug

SEQ ID NO: 1195649 - RNA, 22 nt, Human
uauaaacaugcuugcauuauau

SEQ ID NO: 1195650 - RNA, 20 nt, Human
uauauuuguaaauuuaugug

SEQ ID NO: 1195651 - RNA, 17 nt, Human
ucaucuuucuuccaaac

SEQ ID NO: 1195652 - RNA, 14 nt, Human
ucaucuuucuucca

SEQ ID NO: 1195653 - RNA, 23 nt, Human
ucagccuccauccuacccccugu

SEQ ID NO: 1195654 - RNA, 20 nt, Human
ucagaucauuaucagccugu

SEQ ID NO: 1195655 - RNA, 15 nt, Human
uccagagucccugcc

SEQ ID NO: 1195656 - RNA, 15 nt, Human
ucccaacacugccag

SEQ ID NO: 1195657 - RNA, 14 nt, Human
ucccaacacugcca

SEQ ID NO: 1195658 - RNA, 16 nt, Human
ucccaacacugccagc

SEQ ID NO: 1195659 - RNA, 23 nt, Human
ucccaugagcuccuuaaggcucu

SEQ ID NO: 1195660 - RNA, 23 nt, Human
uccucgagaucccaacacugcca

SEQ ID NO: 1195661 - RNA, 16 nt, Human
uccucgagaucccaac

SEQ ID NO: 1195662 - RNA, 19 nt, Human
uccugucccucauccauag

SEQ ID NO: 1195663 - RNA, 19 nt, Human
ucuuuccaaccggcuuugu

SEQ ID NO: 1195664 - RNA, 11 nt, Human
ucugugugugu

SEQ ID NO: 1195665 - RNA, 13 nt, Human
ucugugugugugu

SEQ ID NO: 1195666 - RNA, 22 nt, Human
ucuucauuaccucagugagaag

SEQ ID NO: 1195667 - RNA, 19 nt, Human
ugacucuuuccaaccggcu

SEQ ID NO: 1195668 - RNA, 13 nt, Human
ugacucuuuccaa

SEQ ID NO: 1195669 - RNA, 16 nt, Human
ugacucuuuccaaccg

SEQ ID NO: 1195670 - RNA, 14 nt, Human
ugacucuuuccaac

SEQ ID NO: 1195671 - RNA, 20 nt, Human
ugaagagaagggcagggcug

SEQ ID NO: 1195672 - RNA, 22 nt, Human
ugaagagaagggcagggcugag

SEQ ID NO: 1195673 - RNA, 22 nt, Human
ugcaccggggccugggcaggag

SEQ ID NO: 1195674 - RNA, 16 nt, Human
ugcaccggggccuggg

SEQ ID NO: 1195675 - RNA, 12 nt, Human
ugcaccggggcc

SEQ ID NO: 1195676 - RNA, 18 nt, Human
ugccaggauggaaugaug

SEQ ID NO: 1195677 - RNA, 18 nt, Human
uggaacucgugucuggca

SEQ ID NO: 1195678 - RNA, 20 nt, Human
uggaaugaugggucaguugu

SEQ ID NO: 1195679 - RNA, 21 nt, Human
ugggacaccccgacuuuuguu

SEQ ID NO: 1195680 - RNA, 21 nt, Human
ugggagugaggaugucugggc

SEQ ID NO: 1195681 - RNA, 18 nt, Human
ugggggucuguguguuua

SEQ ID NO: 1195682 - RNA, 15 nt, Human
ugggggucugugugu

SEQ ID NO: 1195683 - RNA, 11 nt, Human
ugggggaugua

SEQ ID NO: 1195684 - RNA, 21 nt, Human
uguccucagccccgcguggaa

SEQ ID NO: 1195685 - RNA, 14 nt, Human
ugucacgccagacu

SEQ ID NO: 1195686 - RNA, 22 nt, Human
ugucacccuuaggccagcacca

SEQ ID NO: 1195687 - RNA, 14 nt, Human
uguaccucugccuc

SEQ ID NO: 1195688 - RNA, 17 nt, Human
ugucuggcacagccugg

SEQ ID NO: 1195689 - RNA, 20 nt, Human
ugugccuugucacgccagac

SEQ ID NO: 1195690 - RNA, 19 nt, Human
ugugccuugucacgccaga

SEQ ID NO: 1195691 - RNA, 17 nt, Human
ugugccuugucacgcca

SEQ ID NO: 1195692 - RNA, 17 nt, Human
ugugccuuggugugcug

SEQ ID NO: 1195693 - RNA, 16 nt, Human
ugugccuuuugccauc

SEQ ID NO: 1195694 - RNA, 15 nt, Human
uguggccuaaccugc

SEQ ID NO: 1195695 - RNA, 15 nt, Human
uguggaagugugggu

SEQ ID NO: 1195696 - RNA, 14 nt, Human
ugugggagugugua

SEQ ID NO: 1195697 - RNA, 15 nt, Human
ugugggaguguguaa

SEQ ID NO: 1195698 - RNA, 19 nt, Human
uguguaauuuaaaauugug

SEQ ID NO: 1195699 - RNA, 22 nt, Human
uguguaauuuaaaauugugaug

SEQ ID NO: 1195700 - RNA, 23 nt, Human
uguguaauuuaaaauugugaugu

SEQ ID NO: 1195701 - RNA, 11 nt, Human
uguguaauuua

SEQ ID NO: 1195702 - RNA, 18 nt, Human
uguguaauuuaaaauugu

SEQ ID NO: 1195703 - RNA, 16 nt, Human
uguuuagaagaagugu

SEQ ID NO: 1195704 - RNA, 16 nt, Human
uguucuuuugucccag

SEQ ID NO: 1195705 - RNA, 16 nt, Human
ugugugggagugugua

SEQ ID NO: 1195706 - RNA, 14 nt, Human
ugugugggagugug

SEQ ID NO: 1195707 - RNA, 15 nt, Human
ugugugggagugugu

SEQ ID NO: 1195708 - RNA, 11 nt, Human
uguguaugugg

SEQ ID NO: 1195709 - RNA, 12 nt, Human
uguguauguggg

SEQ ID NO: 1195710 - RNA, 13 nt, Human
uguguaugugggg

SEQ ID NO: 1195711 - RNA, 18 nt, Human
ggccagcaccaucucuuu

SEQ ID NO: 1195712 - RNA, 23 nt, Human
ggcaggcaucggggagccgggag

SEQ ID NO: 1195713 - RNA, 17 nt, Human
ggagagacgggcccugg

SEQ ID NO: 1195714 - RNA, 15 nt, Human
ggagagacgggcccu

SEQ ID NO: 1195715 - RNA, 15 nt, Human
aaaaagggaggggga

SEQ ID NO: 1195716 - RNA, 20 nt, Human
ggcuccucgagaucccaaca

SEQ ID NO: 1195717 - RNA, 17 nt, Human
ggcuggaucugugaggg

SEQ ID NO: 1195718 - RNA, 14 nt, Human
gggagggggagagg

SEQ ID NO: 1195719 - RNA, 15 nt, Human
ggggccugggcagga

SEQ ID NO: 1195720 - RNA, 12 nt, Human
ggggccugggca

SEQ ID NO: 1195721 - RNA, 23 nt, Human
ggggucuguguguuuaugugugu

SEQ ID NO: 1195722 - RNA, 16 nt, Human
aaaauugugauguguc

SEQ ID NO: 1195723 - RNA, 12 nt, Human
gccauucuuucc

SEQ ID NO: 1195724 - RNA, 19 nt, Human
gcuauggggauagaugugu

SEQ ID NO: 1195725 - RNA, 21 nt, Human
gcuauggggauagaugugugg

SEQ ID NO: 1195726 - RNA, 19 nt, Human
gcaccggggccugggcagg

SEQ ID NO: 1195727 - RNA, 16 nt, Human
gcaccggggccugggc

SEQ ID NO: 1195728 - RNA, 14 nt, Human
gcaccggggccugg

SEQ ID NO: 1195729 - RNA, 23 nt, Human
gaggugcuucuaguucugccagg

SEQ ID NO: 1195730 - RNA, 22 nt, Human
gaggugcuucuaguucugccag

SEQ ID NO: 1195731 - RNA, 17 nt, Human
gaguccaucagccucca

SEQ ID NO: 1195732 - RNA, 18 nt, Human
gagucagggagagcugaa

SEQ ID NO: 1195733 - RNA, 13 nt, Human
gaguuggcuggga

SEQ ID NO: 1195734 - RNA, 16 nt, Human
gagggcugccuuugga

SEQ ID NO: 1195735 - RNA, 9 nt, Human
gagggcugc

SEQ ID NO: 1195736 - RNA, 21 nt, Human
gaagugugggucugugugugu

SEQ ID NO: 1195737 - RNA, 24 nt, Human
gaagugugggucugugugugugua

SEQ ID NO: 1195738 - RNA, 15 nt, Human
gaaccgaggcaggga

SEQ ID NO: 1195739 - RNA, 12 nt, Human
gaaccgaggcag

SEQ ID NO: 1195740 - RNA, 17 nt, Human
gaacugcugggcuuggc

SEQ ID NO: 1195741 - RNA, 20 nt, Human
gaacugcugggcuuggcagc

SEQ ID NO: 1195742 - RNA, 19 nt, Human
cugcaccggggccugggca

SEQ ID NO: 1195743 - RNA, 18 nt, Human
cugcaccggggccugggc

SEQ ID NO: 1195744 - RNA, 16 nt, Human
cugcaccggggccugg

SEQ ID NO: 1195745 - RNA, 14 nt, Human
cugcaccggggccu

SEQ ID NO: 1195746 - RNA, 14 nt, Human
cuggaucugugagg

SEQ ID NO: 1195747 - RNA, 13 nt, Human
cugggcaggaggg

SEQ ID NO: 1195748 - RNA, 13 nt, Human
cuggcccugugcc

SEQ ID NO: 1195749 - RNA, 14 nt, Human
cucaugugacucuu

SEQ ID NO: 1195750 - RNA, 24 nt, Human
cuccucugcccgggagcucaggaa

SEQ ID NO: 1195751 - RNA, 22 nt, Human
cuccucugcccgggagcucagg

SEQ ID NO: 1195752 - RNA, 16 nt, Human
cuccugucucccuccu

SEQ ID NO: 1195753 - RNA, 20 nt, Human
cucaggccugacucucagca

SEQ ID NO: 1195754 - RNA, 23 nt, Human
cucaggccgaaggaggagucagg

SEQ ID NO: 1195755 - RNA, 23 nt, Human
cucaugauagaaggcuaugggga

SEQ ID NO: 1195756 - RNA, 22 nt, Human
ccucugcccgggagcucaggaa

SEQ ID NO: 1195757 - RNA, 21 nt, Human
ccucugcccgggagcucagga

SEQ ID NO: 1195758 - RNA, 22 nt, Human
ccucuuggggaguuuagggugg

SEQ ID NO: 1195759 - RNA, 15 nt, Human
ccucuuggcugccuu

SEQ ID NO: 1195760 - RNA, 23 nt, Human
ccucuuggggaguuuaggguggg

SEQ ID NO: 1195761 - RNA, 19 nt, Human
ccugccuggaccagccucu

SEQ ID NO: 1195762 - RNA, 12 nt, Human
ccugccuggacc

SEQ ID NO: 1195763 - RNA, 21 nt, Human
ccaugagcuccuuaaggcucu

SEQ ID NO: 1195764 - RNA, 13 nt, Human
ccauugguguuga

SEQ ID NO: 1195765 - RNA, 21 nt, Human
ccccgcguggaacucgugucu

SEQ ID NO: 1195766 - RNA, 18 nt, Human
ccagagaaaaagggaggg

SEQ ID NO: 1195767 - RNA, 23 nt, Human
ccagacuucccacggcuccucga

SEQ ID NO: 1195768 - RNA, 17 nt, Human
auucauggccuggggga

SEQ ID NO: 1195769 - RNA, 13 nt, Human
auucuuucccaac

SEQ ID NO: 1195770 - RNA, 17 nt, Human
auuuuuaugccaccuga

SEQ ID NO: 1195771 - RNA, 19 nt, Human
caccuaggcuagggugggg

SEQ ID NO: 1195772 - RNA, 18 nt, Human
caccuaggcuaggguggg

SEQ ID NO: 1195773 - RNA, 17 nt, Human
cagcacguguggccugu

SEQ ID NO: 1195774 - RNA, 17 nt, Human
caucuguaccucugccu

SEQ ID NO: 1195775 - RNA, 22 nt, Human
aacacugccagcauuucccuuc

SEQ ID NO: 1195776 - RNA, 12 nt, Human
aacacugccagc

SEQ ID NO: 1195777 - RNA, 19 nt, Human
aacucgugucuggcacagc

SEQ ID NO: 1195778 - RNA, 16 nt, Human
gucucccuccucugcc

SEQ ID NO: 1195779 - RNA, 12 nt, Human
gucucccuccuc

SEQ ID NO: 1195780 - RNA, 15 nt, Human
guauguggaagugug

SEQ ID NO: 1195781 - RNA, 16 nt, Human
guauguggaagugugg

SEQ ID NO: 1195782 - RNA, 17 nt, Human
guauguggaaguguggg

SEQ ID NO: 1195783 - RNA, 18 nt, Human
guauguggaagugugggu

SEQ ID NO: 1195784 - RNA, 21 nt, Human
guauguggaagugugggucug

SEQ ID NO: 1195785 - RNA, 19 nt, Human
guaugugggggucugugug

SEQ ID NO: 1195786 - RNA, 20 nt, Human
guaugugggggucugugugu

SEQ ID NO: 1195787 - RNA, 16 nt, Human
guaggaacugcugggc

SEQ ID NO: 1195788 - RNA, 14 nt, Human
guggcacuggggca

SEQ ID NO: 1195789 - RNA, 21 nt, Human
guggaagugugggucugugug

SEQ ID NO: 1195790 - RNA, 22 nt, Human
guggaagugugggucugugugu

SEQ ID NO: 1195791 - RNA, 23 nt, Human
gugcuauuguagagccagagguc

SEQ ID NO: 1195792 - RNA, 14 nt, Human
guggaagugugggu

SEQ ID NO: 1195793 - RNA, 15 nt, Human
guggaaguguggguc

SEQ ID NO: 1195794 - RNA, 19 nt, Human
guggaagugugggucugug

SEQ ID NO: 1195795 - RNA, 20 nt, Human
guggaagugugggucugugu

SEQ ID NO: 1195796 - RNA, 19 nt, Human
aagaagugugucacccuua

SEQ ID NO: 1195797 - RNA, 23 nt, Human
guggggggggggcgcggcuggga

SEQ ID NO: 1195798 - RNA, 13 nt, Human
gugggucugugug

SEQ ID NO: 1195799 - RNA, 16 nt, Human
gugggucugugugugu

SEQ ID NO: 1195800 - RNA, 14 nt, Human
gugguggcucggga

SEQ ID NO: 1195801 - RNA, 13 nt, Human
gugggagugugua

SEQ ID NO: 1195802 - RNA, 14 nt, Human
gugggaguguguaa

SEQ ID NO: 1195803 - RNA, 15 nt, Human
guguuguguguggga

SEQ ID NO: 1195804 - RNA, 12 nt, Human
guguguaugugg

SEQ ID NO: 1195805 - RNA, 14 nt, Human
guguguaauuuaaa

SEQ ID NO: 1195806 - RNA, 16 nt, Human
guuuucuuaacuuaaa

SEQ ID NO: 1195807 - RNA, 18 nt, Human
guuguaucagcacgugug

SEQ ID NO: 1195808 - RNA, 13 nt, Human
guuuaugugugug

SEQ ID NO: 1195809 - RNA, 16 nt, Human
guuuaugugugugugu

SEQ ID NO: 1195810 - RNA, 23 nt, Human
aaggcuauggggauagaugugug

SEQ ID NO: 1195811 - RNA, 17 nt, Human
acaccccgacuuuuguu

SEQ ID NO: 1195812 - RNA, 18 nt, Human
uacagaggacaguauuug

SEQ ID NO: 1195813 - RNA, 14 nt, Human
uacagaggacagua

SEQ ID NO: 1195814 - RNA, 15 nt, Human
uaauuuaaaauugug

SEQ ID NO: 1195815 - RNA, 16 nt, Human
uaauuuaaaauuguga

SEQ ID NO: 1195816 - RNA, 18 nt, Human
accagagaaaaagggagg

SEQ ID NO: 1195817 - RNA, 16 nt, Human
uauuuguaaauuuaug

SEQ ID NO: 1195818 - RNA, 17 nt, Human
uauuuguaaauuuaugu

SEQ ID NO: 1195819 - RNA, 22 nt, Human
uauuuguaaauuuaugugaugg

SEQ ID NO: 1195820 - RNA, 17 nt, Human
ucaggaaccgaggcagg

SEQ ID NO: 1195821 - RNA, 21 nt, Human
uccaaccggcuuuguggcacu

SEQ ID NO: 1195822 - RNA, 21 nt, Human
uccacucaugugacucuuucc

SEQ ID NO: 1195823 - RNA, 14 nt, Human
uccacucaugugac

SEQ ID NO: 1195824 - RNA, 21 nt, Human
ucccgggacaccuaggcuagg

SEQ ID NO: 1195825 - RNA, 19 nt, Human
acucaugugacucuuucca

SEQ ID NO: 1195826 - RNA, 18 nt, Human
acucaugugacucuuucc

SEQ ID NO: 1195827 - RNA, 21 nt, Human
ucgagaucccaacacugccag

SEQ ID NO: 1195828 - RNA, 18 nt, Human
ucgagaucccaacacugc

SEQ ID NO: 1195829 - RNA, 17 nt, Human
ucgagaucccaacacug

SEQ ID NO: 1195830 - RNA, 23 nt, Human
acuggccaguggcuggaucugug

SEQ ID NO: 1195831 - RNA, 23 nt, Human
acuugucccgggacaccuaggcu

SEQ ID NO: 1195832 - RNA, 16 nt, Human
ucucauuccagaggaa

SEQ ID NO: 1195833 - RNA, 20 nt, Human
ucugagagaggccauucuuu

SEQ ID NO: 1195834 - RNA, 14 nt, Human
ucugagagaggcca

SEQ ID NO: 1195835 - RNA, 13 nt, Human
ucuuucuuccaaa

SEQ ID NO: 1195836 - RNA, 19 nt, Human
agacuucccacggcuccuc

SEQ ID NO: 1195837 - RNA, 14 nt, Human
agacuuaucaacau

SEQ ID NO: 1195838 - RNA, 21 nt, Human
agacauuugcuaugagcuggg

SEQ ID NO: 1195839 - RNA, 17 nt, Human
agaaugucaguaugugg

SEQ ID NO: 1195840 - RNA, 19 nt, Human
agaaugucaguauguggaa

SEQ ID NO: 1195841 - RNA, 15 nt, Human
agaaugucaguaugu

SEQ ID NO: 1195842 - RNA, 16 nt, Human
agaaugucaguaugug

SEQ ID NO: 1195843 - RNA, 21 nt, Human
agaggccauucuuucccaaca

SEQ ID NO: 1195844 - RNA, 17 nt, Human
agagucccugccuggac

SEQ ID NO: 1195845 - RNA, 14 nt, Human
agagucccugccug

SEQ ID NO: 1195846 - RNA, 23 nt, Human
agaguccaucagccuccauccua

SEQ ID NO: 1195847 - RNA, 20 nt, Human
agaucccaacacugccagca

SEQ ID NO: 1195848 - RNA, 19 nt, Human
agaucccaacacugccagc

SEQ ID NO: 1195849 - RNA, 18 nt, Human
agaucccaacacugccag

SEQ ID NO: 1195850 - RNA, 23 nt, Human
agccccgcguggaacucgugucu

SEQ ID NO: 1195851 - RNA, 16 nt, Human
agccucuccacucaug

SEQ ID NO: 1195852 - RNA, 15 nt, Human
ugaugggucaguugu

SEQ ID NO: 1195853 - RNA, 22 nt, Human
ugccgagaguccaucagccucc

SEQ ID NO: 1195854 - RNA, 16 nt, Human
ugccaucauguuuaca

SEQ ID NO: 1195855 - RNA, 17 nt, Human
ugccuugucacgccaga

SEQ ID NO: 1195856 - RNA, 16 nt, Human
ugccuuggugugcugu

SEQ ID NO: 1195857 - RNA, 15 nt, Human
ugccuugucacgcca

SEQ ID NO: 1195858 - RNA, 16 nt, Human
ugcuaugagcugggga

SEQ ID NO: 1195859 - RNA, 19 nt, Human
ugcuaugagcuggggaugu

SEQ ID NO: 1195860 - RNA, 20 nt, Human
ugcuaugagcuggggauguc

SEQ ID NO: 1195861 - RNA, 22 nt, Human
ugcuaugagcuggggaugucuc

SEQ ID NO: 1195862 - RNA, 23 nt, Human
agggaaggaucccaugagcuccu

SEQ ID NO: 1195863 - RNA, 22 nt, Human
agggaaggaucccaugagcucc

SEQ ID NO: 1195864 - RNA, 15 nt, Human
agggaaggaucccau

SEQ ID NO: 1195865 - RNA, 19 nt, Human
ugggagaaugucaguaugu

SEQ ID NO: 1195866 - RNA, 20 nt, Human
ugggagaaugucaguaugug

SEQ ID NO: 1195867 - RNA, 22 nt, Human
ugggagaaugucaguaugugga

SEQ ID NO: 1195868 - RNA, 13 nt, Human
uggggagagacgg

SEQ ID NO: 1195869 - RNA, 14 nt, Human
uggggagggauuug

SEQ ID NO: 1195870 - RNA, 15 nt, Human
uggggcucagagugg

SEQ ID NO: 1195871 - RNA, 22 nt, Human
uggggagggauuuggggcucag

SEQ ID NO: 1195872 - RNA, 21 nt, Human
aggguggggggggggcgcggc

SEQ ID NO: 1195873 - RNA, 19 nt, Human
agguuuuuguagugauuuu

SEQ ID NO: 1195874 - RNA, 23 nt, Human
agguuuguuuagaagaagugugu

SEQ ID NO: 1195875 - RNA, 12 nt, Human
uguauguggggg

SEQ ID NO: 1195876 - RNA, 20 nt, Human
uguaugugggggucugugug

SEQ ID NO: 1195877 - RNA, 17 nt, Human
ugugacucuuuccaacc

SEQ ID NO: 1195878 - RNA, 15 nt, Human
ugugacucuuuccaa

SEQ ID NO: 1195879 - RNA, 14 nt, Human
ugugacucuuucca

SEQ ID NO: 1195880 - RNA, 12 nt, Human
ugugacucuuuc

SEQ ID NO: 1195881 - RNA, 21 nt, Human
uguggcauccagagucccugc

SEQ ID NO: 1195882 - RNA, 19 nt, Human
uguggcauccagagucccu

SEQ ID NO: 1195883 - RNA, 16 nt, Human
uguggcauccagaguc

SEQ ID NO: 1195884 - RNA, 12 nt, Human
ugugugugggag

SEQ ID NO: 1195885 - RNA, 20 nt, Human
ugugugugggaguguguaau

SEQ ID NO: 1195886 - RNA, 14 nt, Human
uguguguguaugug

SEQ ID NO: 1195887 - RNA, 12 nt, Human
aguucugccagg

SEQ ID NO: 1195888 - RNA, 20 nt, Human
aguucugccaggagacaggu

SEQ ID NO: 1195889 - RNA, 14 nt, Human
aguucugccaggag

SEQ ID NO: 1195890 - RNA, 13 nt, Human
aguucugccagga

SEQ ID NO: 1195891 - RNA, 13 nt, Human
uguuuaugugugu

SEQ ID NO: 1195892 - RNA, 16 nt, Human
uguuuaugugugugug

SEQ ID NO: 1195893 - RNA, 14 nt, Human
aguuuagggugggg

SEQ ID NO: 1195894 - RNA, 13 nt, Human
aguuuaggguggg

SEQ ID NO: 1195895 - RNA, 12 nt, Human
aguuuagggugg

SEQ ID NO: 1195896 - RNA, 13 nt, Human
uuaaaauugugau

SEQ ID NO: 1195897 - RNA, 18 nt, Human
uuaaaauugugauguguc

SEQ ID NO: 1195898 - RNA, 14 nt, Human
uuagaagaagugug

SEQ ID NO: 1195899 - RNA, 15 nt, Human
uuagaagaagugugu

SEQ ID NO: 1195900 - RNA, 16 nt, Human
uuagaagaaguguguc

SEQ ID NO: 1195901 - RNA, 17 nt, Human
aucccaacacugccagc

SEQ ID NO: 1195902 - RNA, 16 nt, Human
aucccaacacugccag

SEQ ID NO: 1195903 - RNA, 15 nt, Human
aucccaacacugcca

SEQ ID NO: 1195904 - RNA, 11 nt, Human
aucccaacacu

SEQ ID NO: 1195905 - RNA, 12 nt, Human
uucugccaggag

SEQ ID NO: 1195906 - RNA, 17 nt, Human
uucuaguucugccagga

SEQ ID NO: 1195907 - RNA, 18 nt, Human
aucauguuuacagaggac

SEQ ID NO: 1195908 - RNA, 23 nt, Human
aucauguuuacagaggacaguau

SEQ ID NO: 1195909 - RNA, 20 nt, Human
auauuuguaaauuuauguga

SEQ ID NO: 1195910 - RNA, 16 nt, Human
uuggacuugucccggg

SEQ ID NO: 1195911 - RNA, 21 nt, Human
aucugugaggggcucucucau

SEQ ID NO: 1195912 - RNA, 22 nt, Human
aucugugaggggcucucucaug

SEQ ID NO: 1195913 - RNA, 19 nt, Human
uuguaaauuuaugugaugg

SEQ ID NO: 1195914 - RNA, 12 nt, Human
uugugauguguc

SEQ ID NO: 1195915 - RNA, 18 nt, Human
augaguuggcugggaaua

SEQ ID NO: 1195916 - RNA, 19 nt, Human
uuucccuuccuuccucucc

SEQ ID NO: 1195917 - RNA, 23 nt, Human
uuugaccuguugggagugaggau

SEQ ID NO: 1195918 - RNA, 17 nt, Human
auguauauaaacaugcu

SEQ ID NO: 1195919 - RNA, 18 nt, Human
uuuguaagguuuuuguag

SEQ ID NO: 1195920 - RNA, 15 nt, Human
uuuguagugauuuuu

SEQ ID NO: 1195921 - RNA, 22 nt, Human
uuuguagugauuuuuaugccac

SEQ ID NO: 1195922 - RNA, 22 nt, Human
auguguguguguuguguguggg

SEQ ID NO: 1195923 - RNA, 23 nt, Human
auguguguguguuguguguggga

SEQ ID NO: 1195924 - RNA, 15 nt, Human
auuuaaaauugugau

SEQ ID NO: 1195925 - RNA, 17 nt, Human
auuguagagccagaggu

SEQ ID NO: 1195926 - RNA, 18 nt, Human
auuguagagccagagguc

SEQ ID NO: 1195927 - RNA, 14 nt, Human
aacaggcucagagg

SEQ ID NO: 1195928 - RNA, 13 nt, Human
accggggccuggg

SEQ ID NO: 1195929 - RNA, 19 nt, Human
accggggccugggcaggag

SEQ ID NO: 1195930 - RNA, 19 nt, Human
acccucaucuuucuuccaa

SEQ ID NO: 1195931 - RNA, 16 nt, Human
acccucaucuuucuuc

SEQ ID NO: 1195932 - RNA, 14 nt, Human
acccucaucuuucu

SEQ ID NO: 1195933 - RNA, 13 nt, Human
acccucaucuuuc

SEQ ID NO: 1195934 - RNA, 12 nt, Human
agagaggccauu

SEQ ID NO: 1195935 - RNA, 23 nt, Human
agagaggccauucuuucccaaca

SEQ ID NO: 1195936 - RNA, 22 nt, Human
agagaggccauucuuucccaac

SEQ ID NO: 1195937 - RNA, 13 nt, Human
agcaucucccagu

SEQ ID NO: 1195938 - RNA, 19 nt, Human
agagugggguagguuggga

SEQ ID NO: 1195939 - RNA, 19 nt, Human
aggcuaggguggggagaga

SEQ ID NO: 1195940 - RNA, 16 nt, Human
aggcuaggguggggag

SEQ ID NO: 1195941 - RNA, 15 nt, Human
aggcuagggugggga

SEQ ID NO: 1195942 - RNA, 14 nt, Human
aggcuagggugggg

SEQ ID NO: 1195943 - RNA, 22 nt, Human
agggauuuggggcucagagugg

SEQ ID NO: 1195944 - RNA, 19 nt, Human
aggcaucggggagccggga

SEQ ID NO: 1195945 - RNA, 20 nt, Human
aggagacagguuagcugcuc

SEQ ID NO: 1195946 - RNA, 13 nt, Human
aggagggcaggca

SEQ ID NO: 1195947 - RNA, 15 nt, Human
aggagggaggugcuu

SEQ ID NO: 1195948 - RNA, 15 nt, Human
aggagggcaggcauc

SEQ ID NO: 1195949 - RNA, 13 nt, Human
aggaugucugggc

SEQ ID NO: 1195950 - RNA, 16 nt, Human
ccaaacaggcucagag

SEQ ID NO: 1195951 - RNA, 19 nt, Human
cauugucccugaagagaag

SEQ ID NO: 1195952 - RNA, 16 nt, Human
ccaacacugccagcau

SEQ ID NO: 1195953 - RNA, 15 nt, Human
ccaacacugccagca

SEQ ID NO: 1195954 - RNA, 14 nt, Human
ccaacacugccagc

SEQ ID NO: 1195955 - RNA, 13 nt, Human
ccaacacugccag

SEQ ID NO: 1195956 - RNA, 19 nt, Human
ccaagccuuggcucuaccc

SEQ ID NO: 1195957 - RNA, 21 nt, Human
ccacgucagcugggacacccc

SEQ ID NO: 1195958 - RNA, 16 nt, Human
ccacacccucacugcu

SEQ ID NO: 1195959 - RNA, 20 nt, Human
ccacacagacuugggcaggg

SEQ ID NO: 1195960 - RNA, 13 nt, Human
ccaucagccucca

SEQ ID NO: 1195961 - RNA, 13 nt, Human
cccaacaccucuu

SEQ ID NO: 1195962 - RNA, 22 nt, Human
ccgacuuuuguuuaccagagaa

SEQ ID NO: 1195963 - RNA, 15 nt, Human
ccuccucugcccggg

SEQ ID NO: 1195964 - RNA, 14 nt, Human
ccuccucugcccgg

SEQ ID NO: 1195965 - RNA, 23 nt, Human
ccucuccacucaugugacucuuu

SEQ ID NO: 1195966 - RNA, 16 nt, Human
ccuggaccagccucuc

SEQ ID NO: 1195967 - RNA, 15 nt, Human
ccuggaccagccucu

SEQ ID NO: 1195968 - RNA, 14 nt, Human
ccuggaccagccuc

SEQ ID NO: 1195969 - RNA, 23 nt, Human
cggcugggaggagggcaggcauc

SEQ ID NO: 1195970 - RNA, 22 nt, Human
cggcugggaggagggcaggcau

SEQ ID NO: 1195971 - RNA, 16 nt, Human
cgggagcucaggaacc

SEQ ID NO: 1195972 - RNA, 23 nt, Human
cgauugcaggagucccugccauc

SEQ ID NO: 1195973 - RNA, 21 nt, Human
cgauugcaggagucccugcca

SEQ ID NO: 1195974 - RNA, 19 nt, Human
cgucagcugggacaccccg

SEQ ID NO: 1195975 - RNA, 22 nt, Human
cuccuuaaggcucuuuuguaag

SEQ ID NO: 1195976 - RNA, 13 nt, Human
cuccuuaaggcuc

SEQ ID NO: 1195977 - RNA, 17 nt, Human
cuccauugguguugaca

SEQ ID NO: 1195978 - RNA, 15 nt, Human
cucauuccagaggaa

SEQ ID NO: 1195979 - RNA, 17 nt, Human
cucauuccagaggaagg

SEQ ID NO: 1195980 - RNA, 19 nt, Human
cucuccacucaugugacuc

SEQ ID NO: 1195981 - RNA, 21 nt, Human
cucuuggggaguuuagggugg

SEQ ID NO: 1195982 - RNA, 21 nt, Human
cugaagagaagggcagggcug

SEQ ID NO: 1195983 - RNA, 20 nt, Human
cugccagcauuucccuuccu

SEQ ID NO: 1195984 - RNA, 16 nt, Human
cugccaggagacaggu

SEQ ID NO: 1195985 - RNA, 18 nt, Human
cugcccgggagcucagga

SEQ ID NO: 1195986 - RNA, 12 nt, Human
cuggaccagccu

SEQ ID NO: 1195987 - RNA, 15 nt, Human
cuggcacagccuggc

SEQ ID NO: 1195988 - RNA, 14 nt, Human
cuggcacagccugg

SEQ ID NO: 1195989 - RNA, 14 nt, Human
cuuccuuccucucc

SEQ ID NO: 1195990 - RNA, 20 nt, Human
gaagcguuguccucagcccc

SEQ ID NO: 1195991 - RNA, 19 nt, Human
gaagcguuguccucagccc

SEQ ID NO: 1195992 - RNA, 13 nt, Human
gaagcguuguccu

SEQ ID NO: 1195993 - RNA, 17 nt, Human
gaagagaagggcagggc

SEQ ID NO: 1195994 - RNA, 18 nt, Human
gacuucccacggcuccuc

SEQ ID NO: 1195995 - RNA, 21 nt, Human
gaguguguaauuuaaaauugu

SEQ ID NO: 1195996 - RNA, 22 nt, Human
gaguguguaauuuaaaauugug

SEQ ID NO: 1195997 - RNA, 19 nt, Human
gcacagccuggcuguggcc

SEQ ID NO: 1195998 - RNA, 12 nt, Human
gcacagccuggc

SEQ ID NO: 1195999 - RNA, 15 nt, Human
gcaggagggaggugc

SEQ ID NO: 1196000 - RNA, 13 nt, Human
gccccgcguggaa

SEQ ID NO: 1196001 - RNA, 21 nt, Human
gccgagaguccaucagccucc

SEQ ID NO: 1196002 - RNA, 19 nt, Human
gccgggagccugacccuca

SEQ ID NO: 1196003 - RNA, 14 nt, Human
gccgggagccugac

SEQ ID NO: 1196004 - RNA, 13 nt, Human
gccgggagccuga

SEQ ID NO: 1196005 - RNA, 20 nt, Human
gcugccuuuggacuuguccc

SEQ ID NO: 1196006 - RNA, 15 nt, Human
gcugccuuuggacuu

SEQ ID NO: 1196007 - RNA, 23 nt, Human
gcugggacaccccgacuuuuguu

SEQ ID NO: 1196008 - RNA, 19 nt, Human
gcugggaggagggcaggca

SEQ ID NO: 1196009 - RNA, 17 nt, Human
gcugggaggagggcagg

SEQ ID NO: 1196010 - RNA, 18 nt, Human
gcuucuaguucugccagg

SEQ ID NO: 1196011 - RNA, 20 nt, Human
gcuucuaguucugccaggag

SEQ ID NO: 1196012 - RNA, 19 nt, Human
gcuucuaguucugccagga

SEQ ID NO: 1196013 - RNA, 21 nt, Human
gcuucuaguucugccaggaga

SEQ ID NO: 1196014 - RNA, 20 nt, Human
ggaaccgaggcagggaagga

SEQ ID NO: 1196015 - RNA, 16 nt, Human
ggaaccgaggcaggga

SEQ ID NO: 1196016 - RNA, 15 nt, Human
ggaaccgaggcaggg

SEQ ID NO: 1196017 - RNA, 17 nt, Human
ggaacucgugucuggca

SEQ ID NO: 1196018 - RNA, 17 nt, Human
ggaaggaucccaugagc

SEQ ID NO: 1196019 - RNA, 20 nt, Human
ggaggagggcaggcaucggg

SEQ ID NO: 1196020 - RNA, 15 nt, Human
ggaggagggcaggca

SEQ ID NO: 1196021 - RNA, 14 nt, Human
ggaggagggcaggc

SEQ ID NO: 1196022 - RNA, 16 nt, Human
ggagccgggagccuga

SEQ ID NO: 1196023 - RNA, 14 nt, Human
ggagggcaggcauc

SEQ ID NO: 1196024 - RNA, 13 nt, Human
ggagggcaggcau

SEQ ID NO: 1196025 - RNA, 12 nt, Human
ggagggauuugg

SEQ ID NO: 1196026 - RNA, 13 nt, Human
ggauagaugugug

SEQ ID NO: 1196027 - RNA, 14 nt, Human
ggauagaugugugg

SEQ ID NO: 1196028 - RNA, 15 nt, Human
ggauagaugugugga

SEQ ID NO: 1196029 - RNA, 20 nt, Human
ggaucccaugagcuccuuaa

SEQ ID NO: 1196030 - RNA, 17 nt, Human
ggaucccaugagcuccu

SEQ ID NO: 1196031 - RNA, 20 nt, Human
ggcagucugagagaggccau

SEQ ID NO: 1196032 - RNA, 15 nt, Human
gggaaggaucccaug

SEQ ID NO: 1196033 - RNA, 19 nt, Human
gggcagucugagagaggcc

SEQ ID NO: 1196034 - RNA, 18 nt, Human
gggcagucugagagaggc

SEQ ID NO: 1196035 - RNA, 17 nt, Human
gggcagucugagagagg

SEQ ID NO: 1196036 - RNA, 23 nt, Human
gggaggugcuucuaguucugcca

SEQ ID NO: 1196037 - RNA, 16 nt, Human
gggaguuuaggguggg

SEQ ID NO: 1196038 - RNA, 11 nt, Human
gggagugugua

SEQ ID NO: 1196039 - RNA, 14 nt, Human
gggauagaugugug

SEQ ID NO: 1196040 - RNA, 13 nt, Human
gggauagaugugu

SEQ ID NO: 1196041 - RNA, 21 nt, Human
gggcagucugagagaggccau

SEQ ID NO: 1196042 - RNA, 20 nt, Human
gggcagucugagagaggcca

SEQ ID NO: 1196043 - RNA, 15 nt, Human
gggccugggcaggag

SEQ ID NO: 1196044 - RNA, 13 nt, Human
gggccugggcagg

SEQ ID NO: 1196045 - RNA, 12 nt, Human
gggccugggcag

SEQ ID NO: 1196046 - RNA, 17 nt, Human
gggccugggcaggaggg

SEQ ID NO: 1196047 - RNA, 16 nt, Human
gggccugggcaggagg

SEQ ID NO: 1196048 - RNA, 16 nt, Human
ggggcgcggcugggag

SEQ ID NO: 1196049 - RNA, 15 nt, Human
ggggcgcggcuggga

SEQ ID NO: 1196050 - RNA, 19 nt, Human
ggggcagucugagagaggc

SEQ ID NO: 1196051 - RNA, 15 nt, Human
ggggcagucugagag

SEQ ID NO: 1196052 - RNA, 18 nt, Human
ggggcagucugagagagg

SEQ ID NO: 1196053 - RNA, 15 nt, Human
gggggagagggcugc

SEQ ID NO: 1196054 - RNA, 21 nt, Human
gguguccugcaccggggccug

SEQ ID NO: 1196055 - RNA, 15 nt, Human
ggugguggcucggga

SEQ ID NO: 1196056 - RNA, 22 nt, Human
uagugauuuuuaugccaccuga

SEQ ID NO: 1196057 - RNA, 21 nt, Human
uagugauuuuuaugccaccug

SEQ ID NO: 1196058 - RNA, 20 nt, Human
uagugauuuuuaugccaccu

SEQ ID NO: 1196059 - RNA, 13 nt, Human
uaggcuagggugg

SEQ ID NO: 1196060 - RNA, 15 nt, Human
uaggcuagggugggg

SEQ ID NO: 1196061 - RNA, 15 nt, Human
uaggaacugcugggc

SEQ ID NO: 1196062 - RNA, 18 nt, Human
uaggaacugcugggcuug

SEQ ID NO: 1196063 - RNA, 11 nt, Human
uagaugugugg

SEQ ID NO: 1196064 - RNA, 19 nt, Human
uaauucuuugaccuguugg

SEQ ID NO: 1196065 - RNA, 19 nt, Human
gguugggagaaugucagua

SEQ ID NO: 1196066 - RNA, 18 nt, Human
ucacgccagacuucccac

SEQ ID NO: 1196067 - RNA, 22 nt, Human
ucagucuuuaaucugagaggcc

SEQ ID NO: 1196068 - RNA, 19 nt, Human
uccuuaaggcucuuuugua

SEQ ID NO: 1196069 - RNA, 16 nt, Human
uccuuaaggcucuuuu

SEQ ID NO: 1196070 - RNA, 19 nt, Human
ucuuuuguaagguuuuugu

SEQ ID NO: 1196071 - RNA, 22 nt, Human
ucuguguguguguauguggggg

SEQ ID NO: 1196072 - RNA, 15 nt, Human
ucuguguguuuaugu

SEQ ID NO: 1196073 - RNA, 16 nt, Human
ucuguguguuuaugug

SEQ ID NO: 1196074 - RNA, 19 nt, Human
ucuguguguuuaugugugu

SEQ ID NO: 1196075 - RNA, 20 nt, Human
ucuguguguuuaugugugug

SEQ ID NO: 1196076 - RNA, 15 nt, Human
ucuguguguguguau

SEQ ID NO: 1196077 - RNA, 18 nt, Human
ucuguguguguguaugug

SEQ ID NO: 1196078 - RNA, 19 nt, Human
ucuguguguguguaugugg

SEQ ID NO: 1196079 - RNA, 21 nt, Human
ucuguguguguguaugugggg

SEQ ID NO: 1196080 - RNA, 19 nt, Human
ugcuucuaguucugccagg

SEQ ID NO: 1196081 - RNA, 18 nt, Human
ugcuucuaguucugccag

SEQ ID NO: 1196082 - RNA, 20 nt, Human
ugcuucuaguucugccagga

SEQ ID NO: 1196083 - RNA, 21 nt, Human
uggaagugugggucugugugu

SEQ ID NO: 1196084 - RNA, 23 nt, Human
uggaagugugggucugugugugu

SEQ ID NO: 1196085 - RNA, 18 nt, Human
uggggcaggggccggggg

SEQ ID NO: 1196086 - RNA, 16 nt, Human
uggggcaggggccggg

SEQ ID NO: 1196087 - RNA, 15 nt, Human
uuacagaggacagua

SEQ ID NO: 1196088 - RNA, 14 nt, Human
uguguauguggggg

SEQ ID NO: 1196089 - RNA, 23 nt, Human
uguguaugugggggucugugugu

SEQ ID NO: 1196090 - RNA, 15 nt, Human
uguguuuaugugugu

SEQ ID NO: 1196091 - RNA, 13 nt, Human
uguguuuaugugu

SEQ ID NO: 1196092 - RNA, 14 nt, Human
uguguugugugugg

SEQ ID NO: 1196093 - RNA, 23 nt, Human
uguguugugugugggagugugua

SEQ ID NO: 1196094 - RNA, 11 nt, Human
uguguguaugu

SEQ ID NO: 1196095 - RNA, 21 nt, Human
uguuuacagaggacaguauuu

SEQ ID NO: 1196096 - RNA, 14 nt, Human
uguuuacagaggac

SEQ ID NO: 1196097 - RNA, 16 nt, Human
ugugggggucugugug

SEQ ID NO: 1196098 - RNA, 14 nt, Human
ugugggucugugug

SEQ ID NO: 1196099 - RNA, 16 nt, Human
ugugggucugugugug

SEQ ID NO: 1196100 - RNA, 20 nt, Human
ugugggucugugugugugua

SEQ ID NO: 1196101 - RNA, 18 nt, Human
ugugaggggcucucucau

SEQ ID NO: 1196102 - RNA, 15 nt, Human
uguaaauuuauguga

SEQ ID NO: 1196103 - RNA, 16 nt, Human
uguaaauuuaugugau

SEQ ID NO: 1196104 - RNA, 17 nt, Human
uuuagaagaaguguguc

SEQ ID NO: 1196105 - RNA, 19 nt, Human
uuuagaagaagugugucac

SEQ ID NO: 1196106 - RNA, 15 nt, Human
cucgugucuggcaca

SEQ ID NO: 1196107 - RNA, 18 nt, Human
cucaugugacucuuucca

SEQ ID NO: 1196108 - RNA, 22 nt, Human
cugagagaggccauucuuuccc

SEQ ID NO: 1196109 - RNA, 21 nt, Human
cugagagaggccauucuuucc

SEQ ID NO: 1196110 - RNA, 14 nt, Human
cugagagaggccau

SEQ ID NO: 1196111 - RNA, 13 nt, Human
cugagagaggcca

SEQ ID NO: 1196112 - RNA, 12 nt, Human
cugagaggccac

SEQ ID NO: 1196113 - RNA, 21 nt, Human
cuaauucuuugaccuguuggg

SEQ ID NO: 1196114 - RNA, 22 nt, Human
cuaauucuuugaccuguuggga

SEQ ID NO: 1196115 - RNA, 17 nt, Human
ccauccuacccccugug

SEQ ID NO: 1196116 - RNA, 19 nt, Human
cacuggggcaggggccggg

SEQ ID NO: 1196117 - RNA, 15 nt, Human
cacuggggcaggggc

SEQ ID NO: 1196118 - RNA, 13 nt, Human
cacuggggcaggg

SEQ ID NO: 1196119 - RNA, 18 nt, Human
caacaccucuuggggagu

SEQ ID NO: 1196120 - RNA, 19 nt, Human
auucuuugaccuguuggga

SEQ ID NO: 1196121 - RNA, 17 nt, Human
cagaggguguccugcac

SEQ ID NO: 1196122 - RNA, 23 nt, Human
cagaucauuaucagccugugcca

SEQ ID NO: 1196123 - RNA, 17 nt, Human
cagucugagagaggcca

SEQ ID NO: 1196124 - RNA, 16 nt, Human
cagggcugaggccucu

SEQ ID NO: 1196125 - RNA, 18 nt, Human
cagggcugaggccucuca

SEQ ID NO: 1196126 - RNA, 11 nt, Human
ggaguguguaa

SEQ ID NO: 1196127 - RNA, 22 nt, Human
ggaguguguaauuuaaaauugu

SEQ ID NO: 1196128 - RNA, 14 nt, Human
ggagggggagaggg

SEQ ID NO: 1196129 - RNA, 12 nt, Human
ggcaggggccgg

SEQ ID NO: 1196130 - RNA, 14 nt, Human
ggcaggagggaggu

SEQ ID NO: 1196131 - RNA, 18 nt, Human
ggcauccagagucccugc

SEQ ID NO: 1196132 - RNA, 16 nt, Human
ggcauccagagucccu

SEQ ID NO: 1196133 - RNA, 22 nt, Human
ggcaucggggagccgggagccu

SEQ ID NO: 1196134 - RNA, 23 nt, Human
ggcaucggggagccgggagccug

SEQ ID NO: 1196135 - RNA, 22 nt, Human
gggggcagucugagagaggcca

SEQ ID NO: 1196136 - RNA, 21 nt, Human
gggucaucuguaccucugccu

SEQ ID NO: 1196137 - RNA, 18 nt, Human
gggucauucauggccugg

SEQ ID NO: 1196138 - RNA, 21 nt, Human
ggguguccugcaccggggccu

SEQ ID NO: 1196139 - RNA, 17 nt, Human
ggguguccugcaccggg

SEQ ID NO: 1196140 - RNA, 18 nt, Human
gguaggaacugcugggcu

SEQ ID NO: 1196141 - RNA, 21 nt, Human
gguggggagagacgggcccug

SEQ ID NO: 1196142 - RNA, 22 nt, Human
gguggggggggggcgcggcugg

SEQ ID NO: 1196143 - RNA, 22 nt, Human
gguuuguuuagaagaagugugu

SEQ ID NO: 1196144 - RNA, 20 nt, Human
gcugggaauaagugccagga

SEQ ID NO: 1196145 - RNA, 22 nt, Human
gcuuuuccucaaagggagagag

SEQ ID NO: 1196146 - RNA, 16 nt, Human
ggacaccuaggcuagg

SEQ ID NO: 1196147 - RNA, 19 nt, Human
ggacaguauuuguggggag

SEQ ID NO: 1196148 - RNA, 18 nt, Human
ggacaguauuugugggga

SEQ ID NO: 1196149 - RNA, 16 nt, Human
ggacaccccgacuuuu

SEQ ID NO: 1196150 - RNA, 18 nt, Human
gcuaggguggggagagac

SEQ ID NO: 1196151 - RNA, 17 nt, Human
gcuaggguggggagaga

SEQ ID NO: 1196152 - RNA, 19 nt, Human
gcucagaggguguccugca

SEQ ID NO: 1196153 - RNA, 18 nt, Human
gcucagaggguguccugc

SEQ ID NO: 1196154 - RNA, 13 nt, Human
gcggcugggagga

SEQ ID NO: 1196155 - RNA, 21 nt, Human
gcguggaacucgugucuggca

SEQ ID NO: 1196156 - RNA, 19 nt, Human
gccauucuuucccaacacc

SEQ ID NO: 1196157 - RNA, 15 nt, Human
gaucccaugagcucc

SEQ ID NO: 1196158 - RNA, 19 nt, Human
gaucccaacacugccagca

SEQ ID NO: 1196159 - RNA, 18 nt, Human
gaucccaacacugccagc

SEQ ID NO: 1196160 - RNA, 17 nt, Human
gaucccaacacugccag

SEQ ID NO: 1196161 - RNA, 13 nt, Human
gauggaaugaugg

SEQ ID NO: 1196162 - RNA, 21 nt, Human
gcauccagagucccugccugg

SEQ ID NO: 1196163 - RNA, 23 nt, Human
gcauccagagucccugccuggac

SEQ ID NO: 1196164 - RNA, 22 nt, Human
gcauccagagucccugccugga

SEQ ID NO: 1196165 - RNA, 17 nt, Human
gcaucggggagccggga

SEQ ID NO: 1196166 - RNA, 22 nt, Human
gaggacaguauuuguggggagg

SEQ ID NO: 1196167 - RNA, 16 nt, Human
gagacgggcccuggug

SEQ ID NO: 1196168 - RNA, 19 nt, Human
cuuccucuccugucucccu

SEQ ID NO: 1196169 - RNA, 15 nt, Human
cuuccucuccugucu

SEQ ID NO: 1196170 - RNA, 17 nt, Human
cuucuaccucuuggcug

SEQ ID NO: 1196171 - RNA, 14 nt, Human
cuuuugucccagaa

SEQ ID NO: 1196172 - RNA, 23 nt, Human
cuggcccuaugcuuccggccucc

SEQ ID NO: 1196173 - RNA, 22 nt, Human
gucccgggacaccuaggcuagg

SEQ ID NO: 1196174 - RNA, 15 nt, Human
guccaucagccucca

SEQ ID NO: 1196175 - RNA, 10 nt, Human
gugauguguc

SEQ ID NO: 1196176 - RNA, 15 nt, Human
uaaaauugugaugug

SEQ ID NO: 1196177 - RNA, 16 nt, Human
uaaaauugugaugugu

SEQ ID NO: 1196178 - RNA, 20 nt, Human
aagugugggucugugugugu

SEQ ID NO: 1196179 - RNA, 10 nt, Human
aagugugggu

SEQ ID NO: 1196180 - RNA, 17 nt, Human
aagugugggucugugug

SEQ ID NO: 1196181 - RNA, 18 nt, Human
aagugugggucugugugu

SEQ ID NO: 1196182 - RNA, 21 nt, Human
aagucacuggccaguggcugg

SEQ ID NO: 1196183 - RNA, 13 nt, Human
guguauguggggg

SEQ ID NO: 1196184 - RNA, 21 nt, Human
guguaugugggggucugugug

SEQ ID NO: 1196185 - RNA, 16 nt, Human
acaccucuuggggagu

SEQ ID NO: 1196186 - RNA, 12 nt, Human
uauguggaagug

SEQ ID NO: 1196187 - RNA, 16 nt, Human
uauguggaaguguggg

SEQ ID NO: 1196188 - RNA, 20 nt, Human
uauggggauagaugugugga

SEQ ID NO: 1196189 - RNA, 22 nt, Human
uaacuuaaaagaacauguauau

SEQ ID NO: 1196190 - RNA, 13 nt, Human
accgaggcaggga

SEQ ID NO: 1196191 - RNA, 16 nt, Human
ucauaaauuuaugguu

SEQ ID NO: 1196192 - RNA, 12 nt, Human
ucaguaugugga

SEQ ID NO: 1196193 - RNA, 14 nt, Human
ucaguauguggaag

SEQ ID NO: 1196194 - RNA, 16 nt, Human
ucaguauguggaagug

SEQ ID NO: 1196195 - RNA, 19 nt, Human
ucaugugacucuuuccaac

SEQ ID NO: 1196196 - RNA, 18 nt, Human
ucaugugacucuuuccaa

SEQ ID NO: 1196197 - RNA, 17 nt, Human
ucauguuuacagaggac

SEQ ID NO: 1196198 - RNA, 17 nt, Human
ucaugugacucuuucca

SEQ ID NO: 1196199 - RNA, 14 nt, Human
ucaugugacucuuu

SEQ ID NO: 1196200 - RNA, 17 nt, Human
accuaggcuaggguggg

SEQ ID NO: 1196201 - RNA, 12 nt, Human
accuaggcuagg

SEQ ID NO: 1196202 - RNA, 17 nt, Human
ucagauuugccuuauug

SEQ ID NO: 1196203 - RNA, 22 nt, Human
ucagauuugccuuauuggcagc

SEQ ID NO: 1196204 - RNA, 23 nt, Human
ucacagcaagucacuggccagug

SEQ ID NO: 1196205 - RNA, 19 nt, Human
uccugcaccggggccuggg

SEQ ID NO: 1196206 - RNA, 18 nt, Human
uccugcaccggggccugg

SEQ ID NO: 1196207 - RNA, 16 nt, Human
ucuaguucugccagga

SEQ ID NO: 1196208 - RNA, 15 nt, Human
ucuaguucugccagg

SEQ ID NO: 1196209 - RNA, 17 nt, Human
ucuaguucugccaggag

SEQ ID NO: 1196210 - RNA, 14 nt, Human
agaagaaguguguc

SEQ ID NO: 1196211 - RNA, 13 nt, Human
agaaugucaguau

SEQ ID NO: 1196212 - RNA, 13 nt, Human
ugagagaggccau

SEQ ID NO: 1196213 - RNA, 13 nt, Human
ugcuccccacguc

SEQ ID NO: 1196214 - RNA, 22 nt, Human
ugcuauuguagagccagagguc

SEQ ID NO: 1196215 - RNA, 15 nt, Human
ugcuguagacauuug

SEQ ID NO: 1196216 - RNA, 22 nt, Human
uggaccagccucuccacucaug

SEQ ID NO: 1196217 - RNA, 16 nt, Human
uggaccagccucucca

SEQ ID NO: 1196218 - RNA, 19 nt, Human
aggccauucuuucccaaca

SEQ ID NO: 1196219 - RNA, 18 nt, Human
aggccauucuuucccaac

SEQ ID NO: 1196220 - RNA, 17 nt, Human
aggccauucuuucccaa

SEQ ID NO: 1196221 - RNA, 21 nt, Human
aggccucucauuccagaggaa

SEQ ID NO: 1196222 - RNA, 14 nt, Human
uggccaguggcugg

SEQ ID NO: 1196223 - RNA, 15 nt, Human
uggccaguggcugga

SEQ ID NO: 1196224 - RNA, 16 nt, Human
uggccaguggcuggau

SEQ ID NO: 1196225 - RNA, 23 nt, Human
uggccaguggcuggaucugugag

SEQ ID NO: 1196226 - RNA, 22 nt, Human
uggaccuuuccugaggaagagg

SEQ ID NO: 1196227 - RNA, 22 nt, Human
uggcugccuugugaaggaauua

SEQ ID NO: 1196228 - RNA, 14 nt, Human
agcugccugugccu

SEQ ID NO: 1196229 - RNA, 14 nt, Human
aguccaucagccuc

SEQ ID NO: 1196230 - RNA, 13 nt, Human
aguccaucagccu

SEQ ID NO: 1196231 - RNA, 16 nt, Human
aguccaucagccucca

SEQ ID NO: 1196232 - RNA, 21 nt, Human
uguaugugggggucugugugu

SEQ ID NO: 1196233 - RNA, 22 nt, Human
uguaugugggggucuguguguu

SEQ ID NO: 1196234 - RNA, 22 nt, Human
uguauccauccauggggcugau

SEQ ID NO: 1196235 - RNA, 13 nt, Human
agucccugccugg

SEQ ID NO: 1196236 - RNA, 11 nt, Human
ugugauguguc

SEQ ID NO: 1196237 - RNA, 13 nt, Human
ugggucugugugu

SEQ ID NO: 1196238 - RNA, 15 nt, Human
ugggucugugugugu

SEQ ID NO: 1196239 - RNA, 23 nt, Human
ugggaauaagugccaggauggaa

SEQ ID NO: 1196240 - RNA, 14 nt, Human
uuaucaacauuugu

SEQ ID NO: 1196241 - RNA, 18 nt, Human
uguugggagugaggaugu

SEQ ID NO: 1196242 - RNA, 18 nt, Human
aucggggagccgggagcc

SEQ ID NO: 1196243 - RNA, 16 nt, Human
aucggggagccgggag

SEQ ID NO: 1196244 - RNA, 20 nt, Human
auccauggggcugauuguau

SEQ ID NO: 1196245 - RNA, 20 nt, Human
aucauuaucagccugugcca

SEQ ID NO: 1196246 - RNA, 16 nt, Human
uucagauuugccuuau

SEQ ID NO: 1196247 - RNA, 22 nt, Human
uuguccucagccccgcguggaa

SEQ ID NO: 1196248 - RNA, 18 nt, Human
uugucccugaagagaagg

SEQ ID NO: 1196249 - RNA, 20 nt, Human
uugucacgccagacuuccca

SEQ ID NO: 1196250 - RNA, 13 nt, Human
uugucacgccaga

SEQ ID NO: 1196251 - RNA, 10 nt, Human
uugugugugg

SEQ ID NO: 1196252 - RNA, 13 nt, Human
uugugugugggag

SEQ ID NO: 1196253 - RNA, 16 nt, Human
uugugugugggagugu

SEQ ID NO: 1196254 - RNA, 20 nt, Human
uugcuaugagcuggggaugu

SEQ ID NO: 1196255 - RNA, 16 nt, Human
uuuuguuuaccagaga

SEQ ID NO: 1196256 - RNA, 13 nt, Human
auguggaagugug

SEQ ID NO: 1196257 - RNA, 15 nt, Human
auguggaaguguggg

SEQ ID NO: 1196258 - RNA, 16 nt, Human
auguggaagugugggu

SEQ ID NO: 1196259 - RNA, 22 nt, Human
auguggaagugugggucugugu

SEQ ID NO: 1196260 - RNA, 23 nt, Human
auguggaagugugggucugugug

SEQ ID NO: 1196261 - RNA, 10 nt, Human
augugugugu

SEQ ID NO: 1196262 - RNA, 18 nt, Human
auguguguguguugugug

SEQ ID NO: 1196263 - RNA, 13 nt, Human
auugugauguguc

SEQ ID NO: 1196264 - RNA, 14 nt, Human
auugugaugugucc

SEQ ID NO: 1196265 - RNA, 15 nt, Human
auugugauguguccu

SEQ ID NO: 1196266 - RNA, 12 nt, Human
auugguguugac

SEQ ID NO: 1196267 - RNA, 15 nt, Human
acagguuagcugcuc

SEQ ID NO: 1196268 - RNA, 15 nt, Human
accccgacuuuuguu

SEQ ID NO: 1196269 - RNA, 12 nt, Human
accccgacuuuu

SEQ ID NO: 1196270 - RNA, 22 nt, Human
acgccagacuucccacggcucc

SEQ ID NO: 1196271 - RNA, 16 nt, Human
acgccagacuucccac

SEQ ID NO: 1196272 - RNA, 13 nt, Human
acucagucuuuaa

SEQ ID NO: 1196273 - RNA, 16 nt, Human
aaugucaguaugugga

SEQ ID NO: 1196274 - RNA, 22 nt, Human
aaugucaguauguggaagugug

SEQ ID NO: 1196275 - RNA, 16 nt, Human
agaggguguccugcac

SEQ ID NO: 1196276 - RNA, 14 nt, Human
agacgggcccuggu

SEQ ID NO: 1196277 - RNA, 13 nt, Human
agccagaggucug

SEQ ID NO: 1196278 - RNA, 17 nt, Human
aggggccgggggcaguc

SEQ ID NO: 1196279 - RNA, 23 nt, Human
aggugcuucuaguucugccagga

SEQ ID NO: 1196280 - RNA, 22 nt, Human
aggugcuucuaguucugccagg

SEQ ID NO: 1196281 - RNA, 21 nt, Human
aggugcuucuaguucugccag

SEQ ID NO: 1196282 - RNA, 19 nt, Human
aggcuauggggauagaugu

SEQ ID NO: 1196283 - RNA, 21 nt, Human
aggcuauggggauagaugugu

SEQ ID NO: 1196284 - RNA, 22 nt, Human
aggcuauggggauagaugugug

SEQ ID NO: 1196285 - RNA, 16 nt, Human
aggaacugcugggcuu

SEQ ID NO: 1196286 - RNA, 17 nt, Human
augugggggucugugug

SEQ ID NO: 1196287 - RNA, 18 nt, Human
augugggggucugugugu

SEQ ID NO: 1196288 - RNA, 16 nt, Human
augugggggucugugu

SEQ ID NO: 1196289 - RNA, 20 nt, Human
aguuguaucagcacgugugg

SEQ ID NO: 1196290 - RNA, 23 nt, Human
aguuguaucagcacguguggccu

SEQ ID NO: 1196291 - RNA, 14 nt, Human
caacacugccagca

SEQ ID NO: 1196292 - RNA, 13 nt, Human
caacacugccagc

SEQ ID NO: 1196293 - RNA, 12 nt, Human
caacacugccag

SEQ ID NO: 1196294 - RNA, 22 nt, Human
caaccggcuuuguggcacuggg

SEQ ID NO: 1196295 - RNA, 13 nt, Human
caaccggcuuugu

SEQ ID NO: 1196296 - RNA, 22 nt, Human
caccggggccugggcaggaggg

SEQ ID NO: 1196297 - RNA, 21 nt, Human
caccggggccugggcaggagg

SEQ ID NO: 1196298 - RNA, 14 nt, Human
caccggggccuggg

SEQ ID NO: 1196299 - RNA, 22 nt, Human
cacggcuccucgagaucccaac

SEQ ID NO: 1196300 - RNA, 20 nt, Human
cacggcuccucgagauccca

SEQ ID NO: 1196301 - RNA, 19 nt, Human
cacguguggccuguucuuc

SEQ ID NO: 1196302 - RNA, 16 nt, Human
cacucaugugacucuu

SEQ ID NO: 1196303 - RNA, 22 nt, Human
cacucaugugacucuuuccaac

SEQ ID NO: 1196304 - RNA, 22 nt, Human
cagacuucccacggcuccucga

SEQ ID NO: 1196305 - RNA, 12 nt, Human
cagacuucccac

SEQ ID NO: 1196306 - RNA, 18 nt, Human
cagagaaaaagggagggg

SEQ ID NO: 1196307 - RNA, 17 nt, Human
cagagaaaaagggaggg

SEQ ID NO: 1196308 - RNA, 12 nt, Human
cagagaaaaagg

SEQ ID NO: 1196309 - RNA, 14 nt, Human
cagagucccugccu

SEQ ID NO: 1196310 - RNA, 18 nt, Human
cagagucccugccuggac

SEQ ID NO: 1196311 - RNA, 22 nt, Human
cagaggacaguauuugugggga

SEQ ID NO: 1196312 - RNA, 15 nt, Human
cagcauuucccuucc

SEQ ID NO: 1196313 - RNA, 18 nt, Human
cagccuccauccuacccc

SEQ ID NO: 1196314 - RNA, 21 nt, Human
cagccuccauccuacccccug

SEQ ID NO: 1196315 - RNA, 23 nt, Human
cagccuggcuguggccuaaccug

SEQ ID NO: 1196316 - RNA, 23 nt, Human
cagccucuccacucaugugacuc

SEQ ID NO: 1196317 - RNA, 18 nt, Human
caggaaccgaggcaggga

SEQ ID NO: 1196318 - RNA, 17 nt, Human
caggaaccgaggcaggg

SEQ ID NO: 1196319 - RNA, 15 nt, Human
caggaaccgaggcag

SEQ ID NO: 1196320 - RNA, 23 nt, Human
caggagacagguuagcugcuccc

SEQ ID NO: 1196321 - RNA, 14 nt, Human
caggagucccugcc

SEQ ID NO: 1196322 - RNA, 15 nt, Human
caggagucccugcca

SEQ ID NO: 1196323 - RNA, 21 nt, Human
caggagucccugccaucaugu

SEQ ID NO: 1196324 - RNA, 21 nt, Human
caggcaucggggagccgggag

SEQ ID NO: 1196325 - RNA, 20 nt, Human
caggcaucggggagccggga

SEQ ID NO: 1196326 - RNA, 15 nt, Human
caggcucagagggug

SEQ ID NO: 1196327 - RNA, 11 nt, Human
caggcucagag

SEQ ID NO: 1196328 - RNA, 18 nt, Human
cagggaaggaucccauga

SEQ ID NO: 1196329 - RNA, 13 nt, Human
cagggaaggaucc

SEQ ID NO: 1196330 - RNA, 22 nt, Human
cagucuuuaaucugagaggcca

SEQ ID NO: 1196331 - RNA, 12 nt, Human
caguauguggaa

SEQ ID NO: 1196332 - RNA, 12 nt, Human
cagguguucuuc

SEQ ID NO: 1196333 - RNA, 20 nt, Human
cauccagagucccugccugg

SEQ ID NO: 1196334 - RNA, 18 nt, Human
cauccagagucccugccu

SEQ ID NO: 1196335 - RNA, 17 nt, Human
cauccagagucccugcc

SEQ ID NO: 1196336 - RNA, 13 nt, Human
cauccagaguccc

SEQ ID NO: 1196337 - RNA, 21 nt, Human
cauccagagucccugccugga

SEQ ID NO: 1196338 - RNA, 13 nt, Human
caucauguuuaca

SEQ ID NO: 1196339 - RNA, 19 nt, Human
caucauguuuacagaggac

SEQ ID NO: 1196340 - RNA, 21 nt, Human
caucauguuuacagaggacag

SEQ ID NO: 1196341 - RNA, 15 nt, Human
cauccuacccccugu

SEQ ID NO: 1196342 - RNA, 19 nt, Human
cauccuacccccugugccu

SEQ ID NO: 1196343 - RNA, 18 nt, Human
cauccuacccccugugcc

SEQ ID NO: 1196344 - RNA, 23 nt, Human
caugagcuccuuaaggcucuuuu

SEQ ID NO: 1196345 - RNA, 19 nt, Human
caugaguuggcugggaaua

SEQ ID NO: 1196346 - RNA, 17 nt, Human
caugugacucuuuccaa

SEQ ID NO: 1196347 - RNA, 16 nt, Human
caugugacucuuucca

SEQ ID NO: 1196348 - RNA, 14 nt, Human
caugugacucuuuc

SEQ ID NO: 1196349 - RNA, 14 nt, Human
cauucuuucccaac

SEQ ID NO: 1196350 - RNA, 12 nt, Human
cauucuuuccca

SEQ ID NO: 1196351 - RNA, 14 nt, Human
cauuccagaggaag

SEQ ID NO: 1196352 - RNA, 13 nt, Human
cauuccagaggaa

SEQ ID NO: 1196353 - RNA, 20 nt, Human
ccaccugaauaaagaaugaa

SEQ ID NO: 1196354 - RNA, 22 nt, Human
ccacucaugugacucuuuccaa

SEQ ID NO: 1196355 - RNA, 19 nt, Human
ccacucaugugacucuuuc

SEQ ID NO: 1196356 - RNA, 21 nt, Human
ccagcauuucccuuccuuccu

SEQ ID NO: 1196357 - RNA, 16 nt, Human
ccagcauuucccuucc

SEQ ID NO: 1196358 - RNA, 13 nt, Human
ccaggagacaggu

SEQ ID NO: 1196359 - RNA, 18 nt, Human
ccauccuacccccugugc

SEQ ID NO: 1196360 - RNA, 15 nt, Human
ccgaggcagggaagg

SEQ ID NO: 1196361 - RNA, 16 nt, Human
ccggcuuuguggcacu

SEQ ID NO: 1196362 - RNA, 19 nt, Human
ccgggacaccuaggcuagg

SEQ ID NO: 1196363 - RNA, 20 nt, Human
ccgggacaccuaggcuaggg

SEQ ID NO: 1196364 - RNA, 18 nt, Human
ccucuccacucaugugac

SEQ ID NO: 1196365 - RNA, 18 nt, Human
ccucucauuccagaggaa

SEQ ID NO: 1196366 - RNA, 14 nt, Human
ccugggcaggaggg

SEQ ID NO: 1196367 - RNA, 12 nt, Human
ccugggcaggag

SEQ ID NO: 1196368 - RNA, 19 nt, Human
ccugaggaagagggacugu

SEQ ID NO: 1196369 - RNA, 18 nt, Human
ccuuaaggcucuuuugua

SEQ ID NO: 1196370 - RNA, 16 nt, Human
ccuuaaggcucuuuug

SEQ ID NO: 1196371 - RNA, 13 nt, Human
ccuuaaggcucuu

SEQ ID NO: 1196372 - RNA, 18 nt, Human
ccuugucacgccagacuu

SEQ ID NO: 1196373 - RNA, 15 nt, Human
ccuugucacgccaga

SEQ ID NO: 1196374 - RNA, 21 nt, Human
cgagaucccaacacugccagc

SEQ ID NO: 1196375 - RNA, 15 nt, Human
cgagaucccaacacu

SEQ ID NO: 1196376 - RNA, 13 nt, Human
cgagaucccaaca

SEQ ID NO: 1196377 - RNA, 22 nt, Human
cgagaucccaacacugccagca

SEQ ID NO: 1196378 - RNA, 23 nt, Human
cucgagaucccaacacugccagc

SEQ ID NO: 1196379 - RNA, 22 nt, Human
cucgagaucccaacacugccag

SEQ ID NO: 1196380 - RNA, 21 nt, Human
cucgagaucccaacacugcca

SEQ ID NO: 1196381 - RNA, 13 nt, Human
cucgagaucccaa

SEQ ID NO: 1196382 - RNA, 14 nt, Human
cuauuguagagcca

SEQ ID NO: 1196383 - RNA, 20 nt, Human
cucugcccgggagcucagga

SEQ ID NO: 1196384 - RNA, 14 nt, Human
cucugcccgggagc

SEQ ID NO: 1196385 - RNA, 12 nt, Human
cugagcaggugu

SEQ ID NO: 1196386 - RNA, 17 nt, Human
cugccuggaccagccuc

SEQ ID NO: 1196387 - RNA, 13 nt, Human
cugauuguauuua

SEQ ID NO: 1196388 - RNA, 22 nt, Human
cuggugguggcucgggaggcga

SEQ ID NO: 1196389 - RNA, 14 nt, Human
cuggugguggcucg

SEQ ID NO: 1196390 - RNA, 18 nt, Human
cuguggccuaaccugccg

SEQ ID NO: 1196391 - RNA, 14 nt, Human
cuguguguguguau

SEQ ID NO: 1196392 - RNA, 15 nt, Human
cuguguguguguaug

SEQ ID NO: 1196393 - RNA, 16 nt, Human
cuguguguguguaugu

SEQ ID NO: 1196394 - RNA, 18 nt, Human
cuguguguguguaugugg

SEQ ID NO: 1196395 - RNA, 20 nt, Human
cuguguguguguaugugggg

SEQ ID NO: 1196396 - RNA, 18 nt, Human
cuguguguuuaugugugu

SEQ ID NO: 1196397 - RNA, 20 nt, Human
cuguguguuuaugugugugu

SEQ ID NO: 1196398 - RNA, 21 nt, Human
cuguguguguguauguggggg

SEQ ID NO: 1196399 - RNA, 15 nt, Human
cuuaaggcucuuuug

SEQ ID NO: 1196400 - RNA, 19 nt, Human
cuuccaaacaggcucagag

SEQ ID NO: 1196401 - RNA, 17 nt, Human
cuuucccaacaccucuu

SEQ ID NO: 1196402 - RNA, 19 nt, Human
gaaggaucccaugagcucc

SEQ ID NO: 1196403 - RNA, 17 nt, Human
gaauaaagaaugaaugg

SEQ ID NO: 1196404 - RNA, 20 nt, Human
gaauaagugccaggauggaa

SEQ ID NO: 1196405 - RNA, 14 nt, Human
gaaugccuccugca

SEQ ID NO: 1196406 - RNA, 13 nt, Human
gaacuauuagagc

SEQ ID NO: 1196407 - RNA, 20 nt, Human
gagcuccuuaaggcucuuuu

SEQ ID NO: 1196408 - RNA, 23 nt, Human
gagcucaggaaccgaggcaggga

SEQ ID NO: 1196409 - RNA, 15 nt, Human
gaggagggcaggcau

SEQ ID NO: 1196410 - RNA, 14 nt, Human
gaggagggcaggca

SEQ ID NO: 1196411 - RNA, 13 nt, Human
gaggagggcaggc

SEQ ID NO: 1196412 - RNA, 15 nt, Human
gaggaugucugggcc

SEQ ID NO: 1196413 - RNA, 15 nt, Human
gagucccugccugga

SEQ ID NO: 1196414 - RNA, 14 nt, Human
gagucccugccugg

SEQ ID NO: 1196415 - RNA, 14 nt, Human
gagucccugccauc

SEQ ID NO: 1196416 - RNA, 19 nt, Human
gagucccugccuggaccag

SEQ ID NO: 1196417 - RNA, 16 nt, Human
gagucccugccuggac

SEQ ID NO: 1196418 - RNA, 22 nt, Human
gagguuuguuuagaagaagugu

SEQ ID NO: 1196419 - RNA, 21 nt, Human
gauguguccugauaagcugag

SEQ ID NO: 1196420 - RNA, 23 nt, Human
gcaggcaucggggagccgggagc

SEQ ID NO: 1196421 - RNA, 22 nt, Human
gcaggcaucggggagccgggag

SEQ ID NO: 1196422 - RNA, 21 nt, Human
gcaggcaucggggagccggga

SEQ ID NO: 1196423 - RNA, 16 nt, Human
gccaccugaauaaaga

SEQ ID NO: 1196424 - RNA, 15 nt, Human
gccacgauugcagga

SEQ ID NO: 1196425 - RNA, 21 nt, Human
gccagacuucccacggcuccu

SEQ ID NO: 1196426 - RNA, 17 nt, Human
gccuggaccagccucuc

SEQ ID NO: 1196427 - RNA, 16 nt, Human
gccuggaccagccucu

SEQ ID NO: 1196428 - RNA, 16 nt, Human
gccugggcaggaggga

SEQ ID NO: 1196429 - RNA, 17 nt, Human
gcgaagcguuguccuca

SEQ ID NO: 1196430 - RNA, 17 nt, Human
gccuugucacgccagac

SEQ ID NO: 1196431 - RNA, 16 nt, Human
gccuugucacgccaga

SEQ ID NO: 1196432 - RNA, 15 nt, Human
gccuugucacgccag

SEQ ID NO: 1196433 - RNA, 21 nt, Human
gcuccuuaaggcucuuuugua

SEQ ID NO: 1196434 - RNA, 17 nt, Human
gcuccuuaaggcucuuu

SEQ ID NO: 1196435 - RNA, 15 nt, Human
gcuccuuaaggcucu

SEQ ID NO: 1196436 - RNA, 21 nt, Human
gcugggaggagggcaggcauc

SEQ ID NO: 1196437 - RNA, 22 nt, Human
gcugggcuuggcagcccggguc

SEQ ID NO: 1196438 - RNA, 14 nt, Human
gcuggggaugucuc

SEQ ID NO: 1196439 - RNA, 20 nt, Human
gcuguggccuaaccugccga

SEQ ID NO: 1196440 - RNA, 19 nt, Human
gcuguggccuaaccugccg

SEQ ID NO: 1196441 - RNA, 14 nt, Human
gcugauuguauuua

SEQ ID NO: 1196442 - RNA, 12 nt, Human
ggaccagccucu

SEQ ID NO: 1196443 - RNA, 19 nt, Human
ggagacagguuagcugcuc

SEQ ID NO: 1196444 - RNA, 21 nt, Human
ggagcucaggaaccgaggcag

SEQ ID NO: 1196445 - RNA, 21 nt, Human
ggccuaaccugccgagagucc

SEQ ID NO: 1196446 - RNA, 16 nt, Human
ggccuaaccugccgag

SEQ ID NO: 1196447 - RNA, 15 nt, Human
ggccuaaccugccga

SEQ ID NO: 1196448 - RNA, 20 nt, Human
ggccucucauuccagaggaa

SEQ ID NO: 1196449 - RNA, 19 nt, Human
ggccugggcaggagggagg

SEQ ID NO: 1196450 - RNA, 17 nt, Human
ggccugggcaggaggga

SEQ ID NO: 1196451 - RNA, 15 nt, Human
ggccugggcaggagg

SEQ ID NO: 1196452 - RNA, 16 nt, Human
ggccugacucucagca

SEQ ID NO: 1196453 - RNA, 21 nt, Human
ggcugggaggagggcaggcau

SEQ ID NO: 1196454 - RNA, 20 nt, Human
ggcugggaggagggcaggca

SEQ ID NO: 1196455 - RNA, 13 nt, Human
ggcugggaggagg

SEQ ID NO: 1196456 - RNA, 23 nt, Human
ggcuguggcauccagagucccug

SEQ ID NO: 1196457 - RNA, 21 nt, Human
ggcuguggcauccagaguccc

SEQ ID NO: 1196458 - RNA, 14 nt, Human
gggacaccuaggcu

SEQ ID NO: 1196459 - RNA, 20 nt, Human
gggacaccaagccuuggcuc

SEQ ID NO: 1196460 - RNA, 22 nt, Human
gggagcucaggaaccgaggcag

SEQ ID NO: 1196461 - RNA, 12 nt, Human
gggagcucagga

SEQ ID NO: 1196462 - RNA, 23 nt, Human
gggagcucaggaaccgaggcagg

SEQ ID NO: 1196463 - RNA, 13 nt, Human
gggagccgggagc

SEQ ID NO: 1196464 - RNA, 12 nt, Human
gggaggagggca

SEQ ID NO: 1196465 - RNA, 16 nt, Human
gggaggagggcaggca

SEQ ID NO: 1196466 - RNA, 19 nt, Human
ucagaggguguccugcacc

SEQ ID NO: 1196467 - RNA, 14 nt, Human
ucauuccagaggaa

SEQ ID NO: 1196468 - RNA, 12 nt, Human
uauucccaugag

SEQ ID NO: 1196469 - RNA, 13 nt, Human
ucccugccuggac

SEQ ID NO: 1196470 - RNA, 19 nt, Human
ucccuuccuuccucuccug

SEQ ID NO: 1196471 - RNA, 16 nt, Human
ucccuuccuuccucuc

SEQ ID NO: 1196472 - RNA, 16 nt, Human
ucccuccucugcccgg

SEQ ID NO: 1196473 - RNA, 21 nt, Human
ucgugucuggcacagccuggc

SEQ ID NO: 1196474 - RNA, 14 nt, Human
ucgugucuggcaca

SEQ ID NO: 1196475 - RNA, 15 nt, Human
ucugccaggagacag

SEQ ID NO: 1196476 - RNA, 18 nt, Human
ugauuuuuaugccaccug

SEQ ID NO: 1196477 - RNA, 17 nt, Human
ugcccgggagcucagga

SEQ ID NO: 1196478 - RNA, 18 nt, Human
ugcccgggagcucaggaa

SEQ ID NO: 1196479 - RNA, 22 nt, Human
ugccaucauguuuacagaggac

SEQ ID NO: 1196480 - RNA, 21 nt, Human
ugcauuauauuuguaaauuua

SEQ ID NO: 1196481 - RNA, 14 nt, Human
ugaguuggcuggga

SEQ ID NO: 1196482 - RNA, 16 nt, Human
ugaguuggcugggaau

SEQ ID NO: 1196483 - RNA, 17 nt, Human
ugaguuggcugggaaua

SEQ ID NO: 1196484 - RNA, 23 nt, Human
uggccuaaccugccgagagucca

SEQ ID NO: 1196485 - RNA, 20 nt, Human
uggcuccauugguguugaca

SEQ ID NO: 1196486 - RNA, 18 nt, Human
ugggaggagggcaggcau

SEQ ID NO: 1196487 - RNA, 17 nt, Human
ugggaggagggcaggca

SEQ ID NO: 1196488 - RNA, 14 nt, Human
ugggaggagggcag

SEQ ID NO: 1196489 - RNA, 13 nt, Human
uguccucagcccc

SEQ ID NO: 1196490 - RNA, 18 nt, Human
uguccugcaccggggccu

SEQ ID NO: 1196491 - RNA, 17 nt, Human
uguaaauuuaugugaug

SEQ ID NO: 1196492 - RNA, 19 nt, Human
uuuccaaccggcuuugugg

SEQ ID NO: 1196493 - RNA, 21 nt, Human
uuccugaggaagagggacugu

SEQ ID NO: 1196494 - RNA, 21 nt, Human
uuuuauuuuucucaugaugag

SEQ ID NO: 1196495 - RNA, 18 nt, Human
cugacccucaucuuucuu

SEQ ID NO: 1196496 - RNA, 18 nt, Human
cugaggaagagggacugu

SEQ ID NO: 1196497 - RNA, 23 nt, Human
cugaggaagagggacuguucuuu

SEQ ID NO: 1196498 - RNA, 13 nt, Human
cuaguucugccag

SEQ ID NO: 1196499 - RNA, 15 nt, Human
cuaggguggggagag

SEQ ID NO: 1196500 - RNA, 16 nt, Human
cuaguucugccaggag

SEQ ID NO: 1196501 - RNA, 15 nt, Human
cuaguucugccagga

SEQ ID NO: 1196502 - RNA, 14 nt, Human
cuaguucugccagg

SEQ ID NO: 1196503 - RNA, 15 nt, Human
cuaggcuaggguggg

SEQ ID NO: 1196504 - RNA, 13 nt, Human
cgugucuggcaca

SEQ ID NO: 1196505 - RNA, 20 nt, Human
ccauucuuucccaacaccuc

SEQ ID NO: 1196506 - RNA, 14 nt, Human
ccauucuuucccaa

SEQ ID NO: 1196507 - RNA, 12 nt, Human
ccauucuuuccc

SEQ ID NO: 1196508 - RNA, 22 nt, Human
ccugacccucaucuuucuucca

SEQ ID NO: 1196509 - RNA, 19 nt, Human
ccugacccucaucuuucuu

SEQ ID NO: 1196510 - RNA, 18 nt, Human
ccugacccucaucuuucu

SEQ ID NO: 1196511 - RNA, 18 nt, Human
ccugccaucauguuuaca

SEQ ID NO: 1196512 - RNA, 20 nt, Human
ccugccaucauguuuacaga

SEQ ID NO: 1196513 - RNA, 21 nt, Human
ccuggugguggcucgggaggc

SEQ ID NO: 1196514 - RNA, 18 nt, Human
ccuggugguggcucggga

SEQ ID NO: 1196515 - RNA, 21 nt, Human
ccugucucccuccucugcccg

SEQ ID NO: 1196516 - RNA, 18 nt, Human
cagucugagagaggccau

SEQ ID NO: 1196517 - RNA, 15 nt, Human
caggccugacucuca

SEQ ID NO: 1196518 - RNA, 19 nt, Human
cauccauggggcugauugu

SEQ ID NO: 1196519 - RNA, 17 nt, Human
caccuaggcuagggugg

SEQ ID NO: 1196520 - RNA, 15 nt, Human
ggcagggcugaggcc

SEQ ID NO: 1196521 - RNA, 20 nt, Human
ggcucagaggguguccugca

SEQ ID NO: 1196522 - RNA, 14 nt, Human
ggcucagagugggg

SEQ ID NO: 1196523 - RNA, 22 nt, Human
gggacaccuaggcuaggguggg

SEQ ID NO: 1196524 - RNA, 17 nt, Human
ggggccgggggcagucu

SEQ ID NO: 1196525 - RNA, 18 nt, Human
gggggcgcggcugggagg

SEQ ID NO: 1196526 - RNA, 18 nt, Human
ggguggggagagacgggc

SEQ ID NO: 1196527 - RNA, 14 nt, Human
ggguggggagagac

SEQ ID NO: 1196528 - RNA, 22 nt, Human
ggugcuucuaguucugccagga

SEQ ID NO: 1196529 - RNA, 23 nt, Human
guaauuuaaaauugugauguguc

SEQ ID NO: 1196530 - RNA, 19 nt, Human
guaauuuaaaauugugaug

SEQ ID NO: 1196531 - RNA, 20 nt, Human
guaauuuaaaauugugaugu

SEQ ID NO: 1196532 - RNA, 15 nt, Human
guagagccagagguc

SEQ ID NO: 1196533 - RNA, 17 nt, Human
gcuucuaguucugccag

SEQ ID NO: 1196534 - RNA, 16 nt, Human
gcuucuaguucugcca

SEQ ID NO: 1196535 - RNA, 20 nt, Human
ggaacugcugggcuuggcag

SEQ ID NO: 1196536 - RNA, 12 nt, Human
ggaagugugggu

SEQ ID NO: 1196537 - RNA, 21 nt, Human
ggaagugugggucugugugug

SEQ ID NO: 1196538 - RNA, 22 nt, Human
ggaagugugggucugugugugu

SEQ ID NO: 1196539 - RNA, 22 nt, Human
gcuaauucuuugaccuguuggg

SEQ ID NO: 1196540 - RNA, 21 nt, Human
gcucaggaaccgaggcaggga

SEQ ID NO: 1196541 - RNA, 20 nt, Human
gcucaggaaccgaggcaggg

SEQ ID NO: 1196542 - RNA, 19 nt, Human
gcucaggaaccgaggcagg

SEQ ID NO: 1196543 - RNA, 16 nt, Human
gcucaggaaccgaggc

SEQ ID NO: 1196544 - RNA, 23 nt, Human
gccuccauccuacccccugugcc

SEQ ID NO: 1196545 - RNA, 18 nt, Human
gcauuucccuuccuuccu

SEQ ID NO: 1196546 - RNA, 15 nt, Human
gacuauggagcugag

SEQ ID NO: 1196547 - RNA, 20 nt, Human
gacccucaucuuucuuccaa

SEQ ID NO: 1196548 - RNA, 19 nt, Human
gacccucaucuuucuucca

SEQ ID NO: 1196549 - RNA, 15 nt, Human
gacccucaucuuucu

SEQ ID NO: 1196550 - RNA, 18 nt, Human
cuucuaguucugccagga

SEQ ID NO: 1196551 - RNA, 17 nt, Human
cuucuaguucugccagg

SEQ ID NO: 1196552 - RNA, 16 nt, Human
cuucuaguucugccag

SEQ ID NO: 1196553 - RNA, 19 nt, Human
cuucuaguucugccaggag

SEQ ID NO: 1196554 - RNA, 14 nt, Human
cuuugaccuguugg

SEQ ID NO: 1196555 - RNA, 18 nt, Human
cugggaauaagugccagg

SEQ ID NO: 1196556 - RNA, 16 nt, Human
cuggggaugucucuca

SEQ ID NO: 1196557 - RNA, 17 nt, Human
cuggggaugucucucau

SEQ ID NO: 1196558 - RNA, 15 nt, Human
cuuaggccagcacca

SEQ ID NO: 1196559 - RNA, 20 nt, Human
cugugccuugucacgccaga

SEQ ID NO: 1196560 - RNA, 16 nt, Human
cugugccuuuugccau

SEQ ID NO: 1196561 - RNA, 20 nt, Human
guccugcaccggggccuggg

SEQ ID NO: 1196562 - RNA, 19 nt, Human
guccugcaccggggccugg

SEQ ID NO: 1196563 - RNA, 15 nt, Human
guccugcaccggggc

SEQ ID NO: 1196564 - RNA, 18 nt, Human
guggcacuggggcagggg

SEQ ID NO: 1196565 - RNA, 17 nt, Human
guggcacuggggcaggg

SEQ ID NO: 1196566 - RNA, 14 nt, Human
gugggggucugugu

SEQ ID NO: 1196567 - RNA, 15 nt, Human
gugggggucugugug

SEQ ID NO: 1196568 - RNA, 16 nt, Human
gugggggucugugugu

SEQ ID NO: 1196569 - RNA, 13 nt, Human
guguguguaugug

SEQ ID NO: 1196570 - RNA, 14 nt, Human
guguguguaugugg

SEQ ID NO: 1196571 - RNA, 17 nt, Human
guguguguugugugugg

SEQ ID NO: 1196572 - RNA, 17 nt, Human
aauaagugccaggaugg

SEQ ID NO: 1196573 - RNA, 14 nt, Human
guugggagaauguc

SEQ ID NO: 1196574 - RNA, 21 nt, Human
guugggagaaugucaguaugu

SEQ ID NO: 1196575 - RNA, 12 nt, Human
guguuuaugugu

SEQ ID NO: 1196576 - RNA, 16 nt, Human
guguuuaugugugugu

SEQ ID NO: 1196577 - RNA, 19 nt, Human
uaccagagaaaaagggagg

SEQ ID NO: 1196578 - RNA, 14 nt, Human
aauuuaugugaugg

SEQ ID NO: 1196579 - RNA, 18 nt, Human
aauucuuugaccuguugg

SEQ ID NO: 1196580 - RNA, 22 nt, Human
aauucuuugaccuguugggagu

SEQ ID NO: 1196581 - RNA, 14 nt, Human
uaguucugccagga

SEQ ID NO: 1196582 - RNA, 13 nt, Human
uaguucugccagg

SEQ ID NO: 1196583 - RNA, 23 nt, Human
acaccuaggcuaggguggggaga

SEQ ID NO: 1196584 - RNA, 20 nt, Human
acaccuaggcuagggugggg

SEQ ID NO: 1196585 - RNA, 12 nt, Human
acagccuggcug

SEQ ID NO: 1196586 - RNA, 19 nt, Human
uauggggauagaugugugg

SEQ ID NO: 1196587 - RNA, 17 nt, Human
uauggggauagaugugu

SEQ ID NO: 1196588 - RNA, 18 nt, Human
uauggggauagaugugug

SEQ ID NO: 1196589 - RNA, 21 nt, Human
acagacacucccacuuggcau

SEQ ID NO: 1196590 - RNA, 23 nt, Human
uauguguguguguuguguguggg

SEQ ID NO: 1196591 - RNA, 11 nt, Human
uaugugugugu

SEQ ID NO: 1196592 - RNA, 14 nt, Human
uauguguguguguu

SEQ ID NO: 1196593 - RNA, 22 nt, Human
uauguguguguguugugugugg

SEQ ID NO: 1196594 - RNA, 20 nt, Human
accagagaaaaagggagggg

SEQ ID NO: 1196595 - RNA, 16 nt, Human
ucagccccgcguggaa

SEQ ID NO: 1196596 - RNA, 22 nt, Human
acccagcuaugguucucucgca

SEQ ID NO: 1196597 - RNA, 18 nt, Human
ucaggaaccgaggcaggg

SEQ ID NO: 1196598 - RNA, 15 nt, Human
ucaggccgaaggagg

SEQ ID NO: 1196599 - RNA, 18 nt, Human
accugaauaaagaaugaa

SEQ ID NO: 1196600 - RNA, 22 nt, Human
ucaugauagaaggcuaugggga

SEQ ID NO: 1196601 - RNA, 17 nt, Human
acucaugugacucuuuc

SEQ ID NO: 1196602 - RNA, 16 nt, Human
acucaugugacucuuu

SEQ ID NO: 1196603 - RNA, 15 nt, Human
acucaugugacucuu

SEQ ID NO: 1196604 - RNA, 11 nt, Human
uccucagcccc

SEQ ID NO: 1196605 - RNA, 21 nt, Human
acucuggagguuuguuuagaa

SEQ ID NO: 1196606 - RNA, 21 nt, Human
uccugcaccggggccugggca

SEQ ID NO: 1196607 - RNA, 20 nt, Human
uccugcaccggggccugggc

SEQ ID NO: 1196608 - RNA, 23 nt, Human
ucgagaucccaacacugccagca

SEQ ID NO: 1196609 - RNA, 22 nt, Human
ucgagaucccaacacugccagc

SEQ ID NO: 1196610 - RNA, 14 nt, Human
acuggggcaggggc

SEQ ID NO: 1196611 - RNA, 17 nt, Human
ugaggaagagggacugu

SEQ ID NO: 1196612 - RNA, 22 nt, Human
ugagggugacuauggagcugag

SEQ ID NO: 1196613 - RNA, 22 nt, Human
agagggacuguucuuuuguccc

SEQ ID NO: 1196614 - RNA, 11 nt, Human
ucuggcccuau

SEQ ID NO: 1196615 - RNA, 19 nt, Human
agccugacccucaucuuuc

SEQ ID NO: 1196616 - RNA, 19 nt, Human
ugccuugugaaggaauuau

SEQ ID NO: 1196617 - RNA, 15 nt, Human
agcuggggaugucuc

SEQ ID NO: 1196618 - RNA, 22 nt, Human
uggcacagccuggcuguggccu

SEQ ID NO: 1196619 - RNA, 15 nt, Human
aggccauucuuuccc

SEQ ID NO: 1196620 - RNA, 14 nt, Human
aggccauucuuucc

SEQ ID NO: 1196621 - RNA, 22 nt, Human
uggcauccagagucccugccug

SEQ ID NO: 1196622 - RNA, 21 nt, Human
uggcauccagagucccugccu

SEQ ID NO: 1196623 - RNA, 20 nt, Human
uggcauccagagucccugcc

SEQ ID NO: 1196624 - RNA, 16 nt, Human
aggccugacucucagc

SEQ ID NO: 1196625 - RNA, 18 nt, Human
aggcgaagcguuguccuc

SEQ ID NO: 1196626 - RNA, 20 nt, Human
aggcucagaggguguccugc

SEQ ID NO: 1196627 - RNA, 19 nt, Human
aggcucagaggguguccug

SEQ ID NO: 1196628 - RNA, 18 nt, Human
aggcucagaggguguccu

SEQ ID NO: 1196629 - RNA, 20 nt, Human
uggaagugugggucugugug

SEQ ID NO: 1196630 - RNA, 13 nt, Human
uggaagugugggu

SEQ ID NO: 1196631 - RNA, 14 nt, Human
uggaaguguggguc

SEQ ID NO: 1196632 - RNA, 20 nt, Human
uggcuguggccuaaccugcc

SEQ ID NO: 1196633 - RNA, 17 nt, Human
uggcuguggcauccaga

SEQ ID NO: 1196634 - RNA, 21 nt, Human
uguagugauuuuuaugccacc

SEQ ID NO: 1196635 - RNA, 20 nt, Human
uguagugauuuuuaugccac

SEQ ID NO: 1196636 - RNA, 14 nt, Human
aguauuugugggga

SEQ ID NO: 1196637 - RNA, 20 nt, Human
agugauuuuuaugccaccug

SEQ ID NO: 1196638 - RNA, 16 nt, Human
agugauuuuuaugcca

SEQ ID NO: 1196639 - RNA, 21 nt, Human
agugauuuuuaugccaccuga

SEQ ID NO: 1196640 - RNA, 14 nt, Human
agugaggaugucug

SEQ ID NO: 1196641 - RNA, 18 nt, Human
agugccaggauggaauga

SEQ ID NO: 1196642 - RNA, 9 nt, Human
aguguguaa

SEQ ID NO: 1196643 - RNA, 16 nt, Human
agugggguagguuggg

SEQ ID NO: 1196644 - RNA, 18 nt, Human
uguguguuguguguggga

SEQ ID NO: 1196645 - RNA, 10 nt, Human
uuaugugugu

SEQ ID NO: 1196646 - RNA, 12 nt, Human
uuaugugugugu

SEQ ID NO: 1196647 - RNA, 14 nt, Human
uuaugugugugugu

SEQ ID NO: 1196648 - RNA, 19 nt, Human
auagaaggcuauggggaua

SEQ ID NO: 1196649 - RNA, 11 nt, Human
auagaugugug

SEQ ID NO: 1196650 - RNA, 12 nt, Human
auagaugugugg

SEQ ID NO: 1196651 - RNA, 13 nt, Human
auagaugugugga

SEQ ID NO: 1196652 - RNA, 14 nt, Human
auagauguguggac

SEQ ID NO: 1196653 - RNA, 18 nt, Human
auaaucacaacccuucag

SEQ ID NO: 1196654 - RNA, 13 nt, Human
uucugccaggaga

SEQ ID NO: 1196655 - RNA, 19 nt, Human
auccauagcaccuccacau

SEQ ID NO: 1196656 - RNA, 16 nt, Human
auccuacccccugugc

SEQ ID NO: 1196657 - RNA, 14 nt, Human
auccuacccccugu

SEQ ID NO: 1196658 - RNA, 13 nt, Human
aucaggccauugu

SEQ ID NO: 1196659 - RNA, 16 nt, Human
aucaggccauuguccc

SEQ ID NO: 1196660 - RNA, 16 nt, Human
augugacucuuuccaa

SEQ ID NO: 1196661 - RNA, 12 nt, Human
augugacucuuu

SEQ ID NO: 1196662 - RNA, 21 nt, Human
augugacucuuuccaaccggc

SEQ ID NO: 1196663 - RNA, 16 nt, Human
augguucucaggccug

SEQ ID NO: 1196664 - RNA, 20 nt, Human
auggggauagauguguggac

SEQ ID NO: 1196665 - RNA, 20 nt, Human
auuucccuuccuuccucucc

SEQ ID NO: 1196666 - RNA, 16 nt, Human
auuucccuuccuuccu

SEQ ID NO: 1196667 - RNA, 18 nt, Human
auuuguaaauuuauguga

SEQ ID NO: 1196668 - RNA, 19 nt, Human
auuuguaaauuuaugugau

SEQ ID NO: 1196669 - RNA, 12 nt, Human
auuuuucucaug

SEQ ID NO: 1196670 - RNA, 12 nt, Human
auuccagaggaa

SEQ ID NO: 1196671 - RNA, 13 nt, Human
aagggagggggag

SEQ ID NO: 1196672 - RNA, 13 nt, Human
aaugucaguaugu

SEQ ID NO: 1196673 - RNA, 15 nt, Human
aaugucaguaugugg

SEQ ID NO: 1196674 - RNA, 12 nt, Human
acugccagcauu

SEQ ID NO: 1196675 - RNA, 23 nt, Human
accugccgagaguccaucagccu

SEQ ID NO: 1196676 - RNA, 16 nt, Human
accugccgagagucca

SEQ ID NO: 1196677 - RNA, 11 nt, Human
acacugccagc

SEQ ID NO: 1196678 - RNA, 13 nt, Human
acccccugugccu

SEQ ID NO: 1196679 - RNA, 22 nt, Human
agcuccuuaaggcucuuuugua

SEQ ID NO: 1196680 - RNA, 14 nt, Human
agcugagcaggugu

SEQ ID NO: 1196681 - RNA, 17 nt, Human
agcugcuccccacguca

SEQ ID NO: 1196682 - RNA, 14 nt, Human
agcugcuccccacg

SEQ ID NO: 1196683 - RNA, 21 nt, Human
aggagucccugccaucauguu

SEQ ID NO: 1196684 - RNA, 14 nt, Human
agccgggagccuga

SEQ ID NO: 1196685 - RNA, 20 nt, Human
agaggacaguauuugugggg

SEQ ID NO: 1196686 - RNA, 19 nt, Human
augagcuccuuaaggcucu

SEQ ID NO: 1196687 - RNA, 14 nt, Human
aucagccugugcca

SEQ ID NO: 1196688 - RNA, 18 nt, Human
aguucauaaauuuauggu

SEQ ID NO: 1196689 - RNA, 16 nt, Human
aguggcuggaucugug

SEQ ID NO: 1196690 - RNA, 16 nt, Human
caccccgacuuuuguu

SEQ ID NO: 1196691 - RNA, 16 nt, Human
cccaacacugccagca

SEQ ID NO: 1196692 - RNA, 15 nt, Human
cccaacacugccagc

SEQ ID NO: 1196693 - RNA, 14 nt, Human
cccaacacugccag

SEQ ID NO: 1196694 - RNA, 15 nt, Human
cccacgucagcuggg

SEQ ID NO: 1196695 - RNA, 15 nt, Human
cccacggcuccucga

SEQ ID NO: 1196696 - RNA, 22 nt, Human
cccaugagcuccuuaaggcucu

SEQ ID NO: 1196697 - RNA, 15 nt, Human
cccaugagcuccuua

SEQ ID NO: 1196698 - RNA, 14 nt, Human
cccaugagcuccuu

SEQ ID NO: 1196699 - RNA, 13 nt, Human
cccaugagcuccu

SEQ ID NO: 1196700 - RNA, 18 nt, Human
cccagaaugccuccugca

SEQ ID NO: 1196701 - RNA, 22 nt, Human
cccccugugccuugucacgcca

SEQ ID NO: 1196702 - RNA, 14 nt, Human
ccccugugccuugu

SEQ ID NO: 1196703 - RNA, 20 nt, Human
ccgagaguccaucagccucc

SEQ ID NO: 1196704 - RNA, 21 nt, Human
ccgagaguccaucagccucca

SEQ ID NO: 1196705 - RNA, 21 nt, Human
ccgggggcagucugagagagg

SEQ ID NO: 1196706 - RNA, 20 nt, Human
ccggggccugggcaggaggg

SEQ ID NO: 1196707 - RNA, 23 nt, Human
ccguggcuguggcauccagaguc

SEQ ID NO: 1196708 - RNA, 22 nt, Human
ccgggucaucuguaccucugcc

SEQ ID NO: 1196709 - RNA, 13 nt, Human
ccuaaccugccga

SEQ ID NO: 1196710 - RNA, 12 nt, Human
ccuaaccugccg

SEQ ID NO: 1196711 - RNA, 16 nt, Human
ccuaggcuaggguggg

SEQ ID NO: 1196712 - RNA, 17 nt, Human
ccugcaccggggccugg

SEQ ID NO: 1196713 - RNA, 15 nt, Human
ccugcaccggggccu

SEQ ID NO: 1196714 - RNA, 19 nt, Human
ccugaagagaagggcaggg

SEQ ID NO: 1196715 - RNA, 23 nt, Human
ccugccgagaguccaucagccuc

SEQ ID NO: 1196716 - RNA, 22 nt, Human
ccugccgagaguccaucagccu

SEQ ID NO: 1196717 - RNA, 14 nt, Human
ccugccgagagucc

SEQ ID NO: 1196718 - RNA, 21 nt, Human
cgaagcguuguccucagcccc

SEQ ID NO: 1196719 - RNA, 17 nt, Human
cgaagcguuguccucag

SEQ ID NO: 1196720 - RNA, 16 nt, Human
cgaagcguuguccuca

SEQ ID NO: 1196721 - RNA, 15 nt, Human
cgaagcguuguccuc

SEQ ID NO: 1196722 - RNA, 14 nt, Human
ccuuugucccagaa

SEQ ID NO: 1196723 - RNA, 17 nt, Human
ccugugccuuuugccau

SEQ ID NO: 1196724 - RNA, 12 nt, Human
cgcggcugggag

SEQ ID NO: 1196725 - RNA, 11 nt, Human
cgcggcuggga

SEQ ID NO: 1196726 - RNA, 16 nt, Human
cgcggcugggaggagg

SEQ ID NO: 1196727 - RNA, 19 nt, Human
cgggacaccuaggcuaggg

SEQ ID NO: 1196728 - RNA, 18 nt, Human
cgggacaccuaggcuagg

SEQ ID NO: 1196729 - RNA, 13 nt, Human
cuacccccugugc

SEQ ID NO: 1196730 - RNA, 16 nt, Human
cucagaggguguccug

SEQ ID NO: 1196731 - RNA, 17 nt, Human
cucagccccgcguggaa

SEQ ID NO: 1196732 - RNA, 19 nt, Human
cucaggaaccgaggcaggg

SEQ ID NO: 1196733 - RNA, 18 nt, Human
cucaggaaccgaggcagg

SEQ ID NO: 1196734 - RNA, 17 nt, Human
cucaggaaccgaggcag

SEQ ID NO: 1196735 - RNA, 22 nt, Human
cuccacucaugugacucuuucc

SEQ ID NO: 1196736 - RNA, 16 nt, Human
cuccacucaugugacu

SEQ ID NO: 1196737 - RNA, 20 nt, Human
cuccccacgucagcugggac

SEQ ID NO: 1196738 - RNA, 21 nt, Human
cuauggggauagaugugugga

SEQ ID NO: 1196739 - RNA, 19 nt, Human
cuauggggauagaugugug

SEQ ID NO: 1196740 - RNA, 20 nt, Human
cuauggggauagaugugugg

SEQ ID NO: 1196741 - RNA, 22 nt, Human
cuacucuggagguuuguuuaga

SEQ ID NO: 1196742 - RNA, 23 nt, Human
cugccgagaguccaucagccucc

SEQ ID NO: 1196743 - RNA, 22 nt, Human
cugccgagaguccaucagccuc

SEQ ID NO: 1196744 - RNA, 11 nt, Human
cugcugggcuu

SEQ ID NO: 1196745 - RNA, 18 nt, Human
cuggaccagccucuccac

SEQ ID NO: 1196746 - RNA, 14 nt, Human
cuggaccagccucu

SEQ ID NO: 1196747 - RNA, 12 nt, Human
cuggagguuugu

SEQ ID NO: 1196748 - RNA, 17 nt, Human
cuggagguuuguuuaga

SEQ ID NO: 1196749 - RNA, 21 nt, Human
cuggccaguggcuggaucugu

SEQ ID NO: 1196750 - RNA, 21 nt, Human
cugucucccuccucugcccgg

SEQ ID NO: 1196751 - RNA, 19 nt, Human
cugugaggggcucucucau

SEQ ID NO: 1196752 - RNA, 16 nt, Human
cuguguguuuaugugu

SEQ ID NO: 1196753 - RNA, 17 nt, Human
cuguguguuuaugugug

SEQ ID NO: 1196754 - RNA, 13 nt, Human
cuuucccaacacc

SEQ ID NO: 1196755 - RNA, 18 nt, Human
cuugucacgccagacuuc

SEQ ID NO: 1196756 - RNA, 16 nt, Human
cuugucacgccagacu

SEQ ID NO: 1196757 - RNA, 13 nt, Human
cuugucacgccag

SEQ ID NO: 1196758 - RNA, 14 nt, Human
cuuuguggcacugg

SEQ ID NO: 1196759 - RNA, 14 nt, Human
gaccagccucucca

SEQ ID NO: 1196760 - RNA, 19 nt, Human
gaaugucaguauguggaag

SEQ ID NO: 1196761 - RNA, 13 nt, Human
gaaugucaguaug

SEQ ID NO: 1196762 - RNA, 16 nt, Human
gaaugucaguaugugg

SEQ ID NO: 1196763 - RNA, 18 nt, Human
gaaugucaguauguggaa

SEQ ID NO: 1196764 - RNA, 13 nt, Human
gagagacgggccc

SEQ ID NO: 1196765 - RNA, 17 nt, Human
gagaaugucaguaugug

SEQ ID NO: 1196766 - RNA, 20 nt, Human
gagaucccaacacugccagc

SEQ ID NO: 1196767 - RNA, 19 nt, Human
gagaucccaacacugccag

SEQ ID NO: 1196768 - RNA, 18 nt, Human
gagaucccaacacugcca

SEQ ID NO: 1196769 - RNA, 14 nt, Human
gaggcagggaagga

SEQ ID NO: 1196770 - RNA, 21 nt, Human
gaggcgaagcguuguccucag

SEQ ID NO: 1196771 - RNA, 20 nt, Human
gaggcgaagcguuguccuca

SEQ ID NO: 1196772 - RNA, 22 nt, Human
gaggccucucauuccagaggaa

SEQ ID NO: 1196773 - RNA, 14 nt, Human
gagggggagagggc

SEQ ID NO: 1196774 - RNA, 13 nt, Human
gaggguguccugc

SEQ ID NO: 1196775 - RNA, 23 nt, Human
gagucccugccuggaccagccuc

SEQ ID NO: 1196776 - RNA, 21 nt, Human
gagucccugccuggaccagcc

SEQ ID NO: 1196777 - RNA, 14 nt, Human
gauagaugugugga

SEQ ID NO: 1196778 - RNA, 22 nt, Human
gauagauguguggacacauugg

SEQ ID NO: 1196779 - RNA, 13 nt, Human
gaguguguaauuu

SEQ ID NO: 1196780 - RNA, 18 nt, Human
gcacuggggcaggggccg

SEQ ID NO: 1196781 - RNA, 15 nt, Human
gcacuggggcagggg

SEQ ID NO: 1196782 - RNA, 23 nt, Human
gcacuggggcaggggccgggggc

SEQ ID NO: 1196783 - RNA, 15 nt, Human
gaugggucaguugua

SEQ ID NO: 1196784 - RNA, 21 nt, Human
gaugggucaguuguaucagca

SEQ ID NO: 1196785 - RNA, 23 nt, Human
gcccuggugguggcucgggaggc

SEQ ID NO: 1196786 - RNA, 17 nt, Human
gccugacccucaucuuu

SEQ ID NO: 1196787 - RNA, 17 nt, Human
gcuaugagcuggggaug

SEQ ID NO: 1196788 - RNA, 21 nt, Human
gcucagaggguguccugcacc

SEQ ID NO: 1196789 - RNA, 22 nt, Human
gcuuuguggcacuggggcaggg

SEQ ID NO: 1196790 - RNA, 14 nt, Human
gcuuuguggcacug

SEQ ID NO: 1196791 - RNA, 22 nt, Human
ggaaggaucccaugagcuccuu

SEQ ID NO: 1196792 - RNA, 23 nt, Human
ggaagggacaccaagccuuggcu

SEQ ID NO: 1196793 - RNA, 22 nt, Human
ggagaaugucaguauguggaag

SEQ ID NO: 1196794 - RNA, 20 nt, Human
ggccauucuuucccaacacc

SEQ ID NO: 1196795 - RNA, 17 nt, Human
ggauggaaugauggguc

SEQ ID NO: 1196796 - RNA, 22 nt, Human
ggccuaaccugccgagagucca

SEQ ID NO: 1196797 - RNA, 12 nt, Human
ggcccugugccu

SEQ ID NO: 1196798 - RNA, 16 nt, Human
ggcuaggguggggaga

SEQ ID NO: 1196799 - RNA, 21 nt, Human
ggcuauggggauagaugugug

SEQ ID NO: 1196800 - RNA, 13 nt, Human
ggccugggcagga

SEQ ID NO: 1196801 - RNA, 14 nt, Human
ggccugggcaggag

SEQ ID NO: 1196802 - RNA, 16 nt, Human
ggcgcggcugggagga

SEQ ID NO: 1196803 - RNA, 14 nt, Human
gggcgcggcuggga

SEQ ID NO: 1196804 - RNA, 18 nt, Human
ggggaguuuagggugggg

SEQ ID NO: 1196805 - RNA, 13 nt, Human
ggggauagaugug

SEQ ID NO: 1196806 - RNA, 14 nt, Human
gucacgccagacuu

SEQ ID NO: 1196807 - RNA, 20 nt, Human
gucccagaaugccuccugca

SEQ ID NO: 1196808 - RNA, 12 nt, Human
guccucagcccc

SEQ ID NO: 1196809 - RNA, 23 nt, Human
gucccugccuggaccagccucuc

SEQ ID NO: 1196810 - RNA, 22 nt, Human
gucccugccuggaccagccucu

SEQ ID NO: 1196811 - RNA, 21 nt, Human
gucccugccuggaccagccuc

SEQ ID NO: 1196812 - RNA, 20 nt, Human
gucccugccuggaccagccu

SEQ ID NO: 1196813 - RNA, 12 nt, Human
gugacucuuucc

SEQ ID NO: 1196814 - RNA, 20 nt, Human
gugauuuuuaugccaccuga

SEQ ID NO: 1196815 - RNA, 19 nt, Human
gugauuuuuaugccaccug

SEQ ID NO: 1196816 - RNA, 17 nt, Human
gugauuuuuaugccacc

SEQ ID NO: 1196817 - RNA, 16 nt, Human
gugauuuuuaugccac

SEQ ID NO: 1196818 - RNA, 19 nt, Human
gugccuugucacgccagac

SEQ ID NO: 1196819 - RNA, 22 nt, Human
gugcuucuaguucugccaggag

SEQ ID NO: 1196820 - RNA, 21 nt, Human
gugcuucuaguucugccagga

SEQ ID NO: 1196821 - RNA, 20 nt, Human
gugcuucuaguucugccagg

SEQ ID NO: 1196822 - RNA, 18 nt, Human
guggcucgggaggcgaag

SEQ ID NO: 1196823 - RNA, 14 nt, Human
guggcauccagagu

SEQ ID NO: 1196824 - RNA, 16 nt, Human
uaggcuagggugggga

SEQ ID NO: 1196825 - RNA, 23 nt, Human
uaugagcuggggaugucucucau

SEQ ID NO: 1196826 - RNA, 14 nt, Human
uccaaacaggcuca

SEQ ID NO: 1196827 - RNA, 12 nt, Human
ucaucuuucuuc

SEQ ID NO: 1196828 - RNA, 21 nt, Human
uccagagucccugccuggacc

SEQ ID NO: 1196829 - RNA, 20 nt, Human
uccagagucccugccuggac

SEQ ID NO: 1196830 - RNA, 19 nt, Human
uccagagucccugccugga

SEQ ID NO: 1196831 - RNA, 18 nt, Human
uccagagucccugccugg

SEQ ID NO: 1196832 - RNA, 17 nt, Human
uccuacccccugugccu

SEQ ID NO: 1196833 - RNA, 16 nt, Human
uccuacccccugugcc

SEQ ID NO: 1196834 - RNA, 15 nt, Human
uccuacccccugugc

SEQ ID NO: 1196835 - RNA, 13 nt, Human
uccuacccccugu

SEQ ID NO: 1196836 - RNA, 23 nt, Human
uccugucucccuccucugcccgg

SEQ ID NO: 1196837 - RNA, 15 nt, Human
uccugucucccuccu

SEQ ID NO: 1196838 - RNA, 18 nt, Human
ucucccuccucugcccgg

SEQ ID NO: 1196839 - RNA, 21 nt, Human
ugagcuccuuaaggcucuuuu

SEQ ID NO: 1196840 - RNA, 19 nt, Human
ugagcuccuuaaggcucuu

SEQ ID NO: 1196841 - RNA, 20 nt, Human
ugagcuggggaugucucuca

SEQ ID NO: 1196842 - RNA, 17 nt, Human
ugacauacauccaacau

SEQ ID NO: 1196843 - RNA, 15 nt, Human
uggaccagccucucc

SEQ ID NO: 1196844 - RNA, 19 nt, Human
uggaucugugaggggcucu

SEQ ID NO: 1196845 - RNA, 15 nt, Human
uggaucugugagggg

SEQ ID NO: 1196846 - RNA, 18 nt, Human
ugggcaggagggaggugc

SEQ ID NO: 1196847 - RNA, 16 nt, Human
ugggcaggagggaggu

SEQ ID NO: 1196848 - RNA, 15 nt, Human
ugggcaggagggagg

SEQ ID NO: 1196849 - RNA, 13 nt, Human
ugggcaggaggga

SEQ ID NO: 1196850 - RNA, 22 nt, Human
ugggagugaggaugucugggcc

SEQ ID NO: 1196851 - RNA, 11 nt, Human
ugggagugugu

SEQ ID NO: 1196852 - RNA, 13 nt, Human
ugggaguguguaa

SEQ ID NO: 1196853 - RNA, 20 nt, Human
uggggaguuuaggguggggg

SEQ ID NO: 1196854 - RNA, 16 nt, Human
uggggauagaugugug

SEQ ID NO: 1196855 - RNA, 17 nt, Human
uggggauagaugugugg

SEQ ID NO: 1196856 - RNA, 18 nt, Human
uggggauagaugugugga

SEQ ID NO: 1196857 - RNA, 20 nt, Human
uggggauagauguguggaca

SEQ ID NO: 1196858 - RNA, 14 nt, Human
ugggggucugugug

SEQ ID NO: 1196859 - RNA, 13 nt, Human
uuaugccaccuga

SEQ ID NO: 1196860 - RNA, 16 nt, Human
uuaugccaccugaaua

SEQ ID NO: 1196861 - RNA, 12 nt, Human
uuaacucagucu

SEQ ID NO: 1196862 - RNA, 19 nt, Human
uguuuagaagaaguguguc

SEQ ID NO: 1196863 - RNA, 14 nt, Human
uuuaugccaccuga

SEQ ID NO: 1196864 - RNA, 20 nt, Human
uuuacagaggacaguauuug

SEQ ID NO: 1196865 - RNA, 16 nt, Human
uuuaaaauugugaugu

SEQ ID NO: 1196866 - RNA, 15 nt, Human
uuguuuagaagaagu

SEQ ID NO: 1196867 - RNA, 18 nt, Human
uuguuuagaagaagugug

SEQ ID NO: 1196868 - RNA, 16 nt, Human
uuggcagcucuacucu

SEQ ID NO: 1196869 - RNA, 11 nt, Human
uuuguggggag

SEQ ID NO: 1196870 - RNA, 18 nt, Human
aaggaauuauucccauga

SEQ ID NO: 1196871 - RNA, 16 nt, Human
auagcaccuccacaua

SEQ ID NO: 1196872 - RNA, 19 nt, Eastern equine encephalitis virus
augcaaccguuacacccac

SEQ ID NO: 1196873 - RNA, 23 nt, Eastern equine encephalitis virus
accgauucaaaacacgcuccaag

SEQ ID NO: 1196874 - RNA, 13 nt, Eastern equine encephalitis virus
cgaccuugcugac

SEQ ID NO: 1196875 - RNA, 15 nt, Eastern equine encephalitis virus
ccaggucacuuggaa

SEQ ID NO: 1196876 - RNA, 21 nt, Eastern equine encephalitis virus
uuggacacucauuucacccag

SEQ ID NO: 1196877 - RNA, 16 nt, Eastern equine encephalitis virus
accuaguacugcaaga

SEQ ID NO: 1196878 - RNA, 14 nt, Eastern equine encephalitis virus
auagguccacuguc

SEQ ID NO: 1196879 - RNA, 16 nt, Eastern equine encephalitis virus
ugcaucgccacgcugg

SEQ ID NO: 1196880 - RNA, 20 nt, Eastern equine encephalitis virus
augucaaacaaugcagggcu

SEQ ID NO: 1196881 - RNA, 13 nt, Eastern equine encephalitis virus
aagagucaggaga

SEQ ID NO: 1196882 - RNA, 17 nt, Eastern equine encephalitis virus
gccuccgauuucggugg

SEQ ID NO: 1196883 - RNA, 22 nt, Eastern equine encephalitis virus
auggaccuuaaacgggauguca

SEQ ID NO: 1196884 - RNA, 12 nt, Eastern equine encephalitis virus
cacaaugcauga

SEQ ID NO: 1196885 - RNA, 13 nt, Eastern equine encephalitis virus
cgauaacaaggug

SEQ ID NO: 1196886 - RNA, 21 nt, Eastern equine encephalitis virus
acaccaacuugaagcuacaac

SEQ ID NO: 1196887 - RNA, 18 nt, Eastern equine encephalitis virus
agggacccaaagcagcug

SEQ ID NO: 1196888 - RNA, 19 nt, Eastern equine encephalitis virus
acgcaagaagccugcgcca

SEQ ID NO: 1196889 - RNA, 17 nt, Eastern equine encephalitis virus
accuggaguacaucacc

SEQ ID NO: 1196890 - RNA, 17 nt, Eastern equine encephalitis virus
auucgauaacaaggugg

SEQ ID NO: 1196891 - RNA, 23 nt, Eastern equine encephalitis virus
aucaaaacuuuuucuggaugcag

SEQ ID NO: 1196892 - RNA, 19 nt, Eastern equine encephalitis virus
cagaaguggccgucaaagu

SEQ ID NO: 1196893 - RNA, 20 nt, Eastern equine encephalitis virus
cucaucauagguccacuguc

SEQ ID NO: 1196894 - RNA, 15 nt, Eastern equine encephalitis virus
caggcaauggugaac

SEQ ID NO: 1196895 - RNA, 14 nt, Eastern equine encephalitis virus
agguguugcaguua

SEQ ID NO: 1196896 - RNA, 19 nt, Eastern equine encephalitis virus
acaagcgugcagaccaagg

SEQ ID NO: 1196897 - RNA, 20 nt, Eastern equine encephalitis virus
cgcagagcucugcaugauga

SEQ ID NO: 1196898 - RNA, 14 nt, Eastern equine encephalitis virus
agaaugacgucacu

SEQ ID NO: 1196899 - RNA, 18 nt, Eastern equine encephalitis virus
ugaaagcaguugaaucac

SEQ ID NO: 1196900 - RNA, 15 nt, Eastern equine encephalitis virus
ggcgcagagcucugc

SEQ ID NO: 1196901 - RNA, 19 nt, Eastern equine encephalitis virus
ggcggcccuuuaggccacc

SEQ ID NO: 1196902 - RNA, 18 nt, Eastern equine encephalitis virus
agggaacuaccagcagcg

SEQ ID NO: 1196903 - RNA, 19 nt, Eastern equine encephalitis virus
guguggcuccuuugcagga

SEQ ID NO: 1196904 - RNA, 20 nt, Eastern equine encephalitis virus
cuuacagccauugcaugaga

SEQ ID NO: 1196905 - RNA, 20 nt, Eastern equine encephalitis virus
agcgacuauacaaccaccug

SEQ ID NO: 1196906 - RNA, 19 nt, Eastern equine encephalitis virus
aguucggggcaaugaugaa

SEQ ID NO: 1196907 - RNA, 14 nt, Eastern equine encephalitis virus
gccugcgcaggaaa

SEQ ID NO: 1196908 - RNA, 19 nt, Eastern equine encephalitis virus
gccacgcuggcaccagagc

SEQ ID NO: 1196909 - RNA, 15 nt, Eastern equine encephalitis virus
caagagucaggagaa

SEQ ID NO: 1196910 - RNA, 21 nt, Eastern equine encephalitis virus
aaggagcuuuccaaagaagca

SEQ ID NO: 1196911 - RNA, 19 nt, Eastern equine encephalitis virus
agguagaauucaggccagu

SEQ ID NO: 1196912 - RNA, 16 nt, Eastern equine encephalitis virus
agaccuauucuugaca

SEQ ID NO: 1196913 - RNA, 16 nt, Eastern equine encephalitis virus
ugcuaggagaaccagg

SEQ ID NO: 1196914 - RNA, 16 nt, Eastern equine encephalitis virus
ucgacaaccugcaugu

SEQ ID NO: 1196915 - RNA, 15 nt, Eastern equine encephalitis virus
gucagauaaaacguu

SEQ ID NO: 1196916 - RNA, 15 nt, Eastern equine encephalitis virus
gccuacaaauccagu

SEQ ID NO: 1196917 - RNA, 16 nt, Eastern equine encephalitis virus
caaccuaguacugcaa

SEQ ID NO: 1196918 - RNA, 15 nt, Eastern equine encephalitis virus
cacagcagugaugcc

SEQ ID NO: 1196919 - RNA, 21 nt, Eastern equine encephalitis virus
uauuacauccuggcucaaugc

SEQ ID NO: 1196920 - RNA, 14 nt, Eastern equine encephalitis virus
ccaacaacugucaa

SEQ ID NO: 1196921 - RNA, 23 nt, Eastern equine encephalitis virus
ugagcaacuggccgccaucaagc

SEQ ID NO: 1196922 - RNA, 17 nt, Eastern equine encephalitis virus
cacucaauguaccucca

SEQ ID NO: 1196923 - RNA, 14 nt, Eastern equine encephalitis virus
cacaguugcccaua

SEQ ID NO: 1196924 - RNA, 12 nt, Eastern equine encephalitis virus
gugacaagccuc

SEQ ID NO: 1196925 - RNA, 23 nt, Eastern equine encephalitis virus
cggcucuaucaguggugacaugg

SEQ ID NO: 1196926 - RNA, 23 nt, Eastern equine encephalitis virus
cgcauauacaauuacacuacagg

SEQ ID NO: 1196927 - RNA, 14 nt, Eastern equine encephalitis virus
accaccaccaccug

SEQ ID NO: 1196928 - RNA, 13 nt, Eastern equine encephalitis virus
caguuaccugcaa

SEQ ID NO: 1196929 - RNA, 18 nt, Eastern equine encephalitis virus
caucagguguugcaguua

SEQ ID NO: 1196930 - RNA, 13 nt, Eastern equine encephalitis virus
cuacagcaguggu

SEQ ID NO: 1196931 - RNA, 18 nt, Eastern equine encephalitis virus
gacugccucgaggagagg

SEQ ID NO: 1196932 - RNA, 16 nt, Eastern equine encephalitis virus
gucgcaauuguccugg

SEQ ID NO: 1196933 - RNA, 17 nt, Eastern equine encephalitis virus
ccuauaaacacuacagg

SEQ ID NO: 1196934 - RNA, 20 nt, Eastern equine encephalitis virus
cccguauauugcugauugcc

SEQ ID NO: 1196935 - RNA, 14 nt, Eastern equine encephalitis virus
uccaguacaccagu

SEQ ID NO: 1196936 - RNA, 17 nt, Eastern equine encephalitis virus
gggaugucaaggucaca

SEQ ID NO: 1196937 - RNA, 21 nt, Eastern equine encephalitis virus
aggcugcuauauuaccacauu

SEQ ID NO: 1196938 - RNA, 16 nt, Eastern equine encephalitis virus
cgugcagaccaaggac

SEQ ID NO: 1196939 - RNA, 18 nt, Eastern equine encephalitis virus
aggccaagugcaucgcca

SEQ ID NO: 1196940 - RNA, 13 nt, Eastern equine encephalitis virus
cacgcaaaagcuu

SEQ ID NO: 1196941 - RNA, 18 nt, Eastern equine encephalitis virus
gcuuaucccacuugcagc

SEQ ID NO: 1196942 - RNA, 16 nt, Eastern equine encephalitis virus
gaauuacgacagccga

SEQ ID NO: 1196943 - RNA, 21 nt, Eastern equine encephalitis virus
caucugacgcacugauggcag

SEQ ID NO: 1196944 - RNA, 16 nt, Eastern equine encephalitis virus
cuauaaacacuacagg

SEQ ID NO: 1196945 - RNA, 23 nt, Eastern equine encephalitis virus
agagauuuggacacucauuucac

SEQ ID NO: 1196946 - RNA, 19 nt, Eastern equine encephalitis virus
acgccgccgaugcagugca

SEQ ID NO: 1196947 - RNA, 14 nt, Eastern equine encephalitis virus
cacuagugcaguua

SEQ ID NO: 1196948 - RNA, 16 nt, Eastern equine encephalitis virus
acagauacccauuaac

SEQ ID NO: 1196949 - RNA, 16 nt, Eastern equine encephalitis virus
aauacuacugcaagug

SEQ ID NO: 1196950 - RNA, 17 nt, Eastern equine encephalitis virus
ccuacagauacagcugg

SEQ ID NO: 1196951 - RNA, 17 nt, Eastern equine encephalitis virus
acgucacucuugcugag

SEQ ID NO: 1196952 - RNA, 14 nt, Eastern equine encephalitis virus
agcggcgcccaagu

SEQ ID NO: 1196953 - RNA, 23 nt, Eastern equine encephalitis virus
uuuaauacacacuuuauaaucag

SEQ ID NO: 1196954 - RNA, 14 nt, Eastern equine encephalitis virus
gugcaguuaccugc

SEQ ID NO: 1196955 - RNA, 20 nt, Eastern equine encephalitis virus
guugaccacuucccccugcg

SEQ ID NO: 1196956 - RNA, 15 nt, Eastern equine encephalitis virus
cgaucagcagugcca

SEQ ID NO: 1196957 - RNA, 14 nt, Eastern equine encephalitis virus
augccgaacaaggu

SEQ ID NO: 1196958 - RNA, 22 nt, Eastern equine encephalitis virus
uacuaaacacuaaauucacccu

SEQ ID NO: 1196959 - RNA, 14 nt, Eastern equine encephalitis virus
acgcuggcaccaga

SEQ ID NO: 1196960 - RNA, 19 nt, Eastern equine encephalitis virus
gccuucuccaguagugaaa

SEQ ID NO: 1196961 - RNA, 18 nt, Eastern equine encephalitis virus
auagacaaugagcaacug

SEQ ID NO: 1196962 - RNA, 21 nt, Eastern equine encephalitis virus
agucucguaaaguagagaaca

SEQ ID NO: 1196963 - RNA, 21 nt, Eastern equine encephalitis virus
acauuccacuucuccacugca

SEQ ID NO: 1196964 - RNA, 21 nt, Eastern equine encephalitis virus
ugaagcuacaacgaccccagg

SEQ ID NO: 1196965 - RNA, 23 nt, Eastern equine encephalitis virus
aagcaucccuauaucuauagaua

SEQ ID NO: 1196966 - RNA, 15 nt, Eastern equine encephalitis virus
cuagcagcagccacg

SEQ ID NO: 1196967 - RNA, 19 nt, Eastern equine encephalitis virus
uggcaucacugaagagcug

SEQ ID NO: 1196968 - RNA, 14 nt, Eastern equine encephalitis virus
cccauucauguggg

SEQ ID NO: 1196969 - RNA, 18 nt, Eastern equine encephalitis virus
gggaaaccauccaccaaa

SEQ ID NO: 1196970 - RNA, 13 nt, Eastern equine encephalitis virus
cuggguggaguca

SEQ ID NO: 1196971 - RNA, 23 nt, Eastern equine encephalitis virus
aguauaccuggggaaaccaucca

SEQ ID NO: 1196972 - RNA, 18 nt, Eastern equine encephalitis virus
caauucauucuccaucag

SEQ ID NO: 1196973 - RNA, 21 nt, Eastern equine encephalitis virus
gcguuacuuugcugcauuaag

SEQ ID NO: 1196974 - RNA, 19 nt, Eastern equine encephalitis virus
cgcuuauuguaugcaugcg

SEQ ID NO: 1196975 - RNA, 17 nt, Eastern equine encephalitis virus
ugcaguuaccugcaaag

SEQ ID NO: 1196976 - RNA, 18 nt, Eastern equine encephalitis virus
acuggacgaugaccaaga

SEQ ID NO: 1196977 - RNA, 17 nt, Eastern equine encephalitis virus
augggagcgucagcugg

SEQ ID NO: 1196978 - RNA, 23 nt, Eastern equine encephalitis virus
gccuucuccaguagugaaaugcu

SEQ ID NO: 1196979 - RNA, 18 nt, Eastern equine encephalitis virus
ugcauaaccccguauaaa

SEQ ID NO: 1196980 - RNA, 12 nt, Eastern equine encephalitis virus
uccgcauccaga

SEQ ID NO: 1196981 - RNA, 14 nt, Eastern equine encephalitis virus
uacaggcagcgcau

SEQ ID NO: 1196982 - RNA, 19 nt, Eastern equine encephalitis virus
ccacugucaucugcguggu

SEQ ID NO: 1196983 - RNA, 17 nt, Eastern equine encephalitis virus
agauacgaucagcagug

SEQ ID NO: 1196984 - RNA, 17 nt, Eastern equine encephalitis virus
gaagcuagagucagaua

SEQ ID NO: 1196985 - RNA, 17 nt, Eastern equine encephalitis virus
uaaauucacccuaguuc

SEQ ID NO: 1196986 - RNA, 14 nt, Eastern equine encephalitis virus
caagccuaagccug

SEQ ID NO: 1196987 - RNA, 17 nt, Eastern equine encephalitis virus
aguguauaaggcugucu

SEQ ID NO: 1196988 - RNA, 19 nt, Eastern equine encephalitis virus
aggcacuguucaggcaaug

SEQ ID NO: 1196989 - RNA, 22 nt, Eastern equine encephalitis virus
caggccaguggguagagagaaa

SEQ ID NO: 1196990 - RNA, 20 nt, Eastern equine encephalitis virus
acuguucaggcaauggugaa

SEQ ID NO: 1196991 - RNA, 21 nt, Eastern equine encephalitis virus
aucaacuaaccuggaguacau

SEQ ID NO: 1196992 - RNA, 14 nt, Eastern equine encephalitis virus
aacauaacaucugu

SEQ ID NO: 1196993 - RNA, 23 nt, Eastern equine encephalitis virus
gcaggucugcacuagugcaguua

SEQ ID NO: 1196994 - RNA, 14 nt, Eastern equine encephalitis virus
gcuggagaucugca

SEQ ID NO: 1196995 - RNA, 17 nt, Eastern equine encephalitis virus
ggacaagggcaccugca

SEQ ID NO: 1196996 - RNA, 22 nt, Eastern equine encephalitis virus
uuccaaucauguugaacggaca

SEQ ID NO: 1196997 - RNA, 17 nt, Eastern equine encephalitis virus
gaagaagucagagggga

SEQ ID NO: 1196998 - RNA, 13 nt, Eastern equine encephalitis virus
ugcgcaugcugcg

SEQ ID NO: 1196999 - RNA, 18 nt, Eastern equine encephalitis virus
uggaguacaucaccugca

SEQ ID NO: 1197000 - RNA, 20 nt, Eastern equine encephalitis virus
gacaaaacauacugaagaaa

SEQ ID NO: 1197001 - RNA, 16 nt, Eastern equine encephalitis virus
accacccugcaugcca

SEQ ID NO: 1197002 - RNA, 20 nt, Eastern equine encephalitis virus
cacaagcgugcagaccaagg

SEQ ID NO: 1197003 - RNA, 19 nt, Eastern equine encephalitis virus
cauaacgccgccgaugcag

SEQ ID NO: 1197004 - RNA, 15 nt, Eastern equine encephalitis virus
aacauacugaagaaa

SEQ ID NO: 1197005 - RNA, 12 nt, Eastern equine encephalitis virus
ucgcuugccacu

SEQ ID NO: 1197006 - RNA, 15 nt, Eastern equine encephalitis virus
gcgucuacugcaggg

SEQ ID NO: 1197007 - RNA, 12 nt, Eastern equine encephalitis virus
ugcagcucaaau

SEQ ID NO: 1197008 - RNA, 17 nt, Eastern equine encephalitis virus
uaccacauuauaacacu

SEQ ID NO: 1197009 - RNA, 14 nt, Eastern equine encephalitis virus
gaucagcagugcca

SEQ ID NO: 1197010 - RNA, 12 nt, Eastern equine encephalitis virus
caaccugcaugu

SEQ ID NO: 1197011 - RNA, 20 nt, Eastern equine encephalitis virus
aguugauuuggccuacauga

SEQ ID NO: 1197012 - RNA, 15 nt, Eastern equine encephalitis virus
gccaccacuugcagc

SEQ ID NO: 1197013 - RNA, 19 nt, Eastern equine encephalitis virus
gaaaagggacaaaggggca

SEQ ID NO: 1197014 - RNA, 14 nt, Eastern equine encephalitis virus
aaaccccauccuga

SEQ ID NO: 1197015 - RNA, 22 nt, Eastern equine encephalitis virus
aaacaccgacagucucagaccu

SEQ ID NO: 1197016 - RNA, 16 nt, Eastern equine encephalitis virus
cucuggaagacugccu

SEQ ID NO: 1197017 - RNA, 20 nt, Eastern equine encephalitis virus
ggacccaaagcagcugcccu

SEQ ID NO: 1197018 - RNA, 22 nt, Eastern equine encephalitis virus
agagugcucuauugaccacgca

SEQ ID NO: 1197019 - RNA, 16 nt, Eastern equine encephalitis virus
auacgaucagcagugc

SEQ ID NO: 1197020 - RNA, 19 nt, Eastern equine encephalitis virus
cagcugguuaauaccagga

SEQ ID NO: 1197021 - RNA, 18 nt, Eastern equine encephalitis virus
ucugcgacacugaaaaca

SEQ ID NO: 1197022 - RNA, 21 nt, Eastern equine encephalitis virus
gcugcuuauuuugcugugggc

SEQ ID NO: 1197023 - RNA, 17 nt, Eastern equine encephalitis virus
cggcucuaucaguggug

SEQ ID NO: 1197024 - RNA, 17 nt, Eastern equine encephalitis virus
acacuaagggcagugca

SEQ ID NO: 1197025 - RNA, 17 nt, Eastern equine encephalitis virus
ugcaaccguuacaccca

SEQ ID NO: 1197026 - RNA, 22 nt, Eastern equine encephalitis virus
agagucgccgacccccugaaga

SEQ ID NO: 1197027 - RNA, 17 nt, Eastern equine encephalitis virus
agcaacuggccgccauc

SEQ ID NO: 1197028 - RNA, 13 nt, Eastern equine encephalitis virus
cucagaccuggaa

SEQ ID NO: 1197029 - RNA, 23 nt, Eastern equine encephalitis virus
gcaugaaaucagauacccuccag

SEQ ID NO: 1197030 - RNA, 23 nt, Eastern equine encephalitis virus
auacagcugguuaauaccaggau

SEQ ID NO: 1197031 - RNA, 17 nt, Eastern equine encephalitis virus
uaccgucacccaccuga

SEQ ID NO: 1197032 - RNA, 15 nt, Eastern equine encephalitis virus
uacgcggcaaugcaa

SEQ ID NO: 1197033 - RNA, 20 nt, Eastern equine encephalitis virus
cagggcuuaccugauugaca

SEQ ID NO: 1197034 - RNA, 18 nt, Eastern equine encephalitis virus
gagcucugcaugaugaag

SEQ ID NO: 1197035 - RNA, 21 nt, Eastern equine encephalitis virus
uacagucaaagauacaccaga

SEQ ID NO: 1197036 - RNA, 20 nt, Eastern equine encephalitis virus
caggucugcacuagugcagu

SEQ ID NO: 1197037 - RNA, 16 nt, Eastern equine encephalitis virus
gaucgacaaccugcau

SEQ ID NO: 1197038 - RNA, 17 nt, Eastern equine encephalitis virus
guagagaacaugaaggc

SEQ ID NO: 1197039 - RNA, 18 nt, Eastern equine encephalitis virus
ugcaaccguuacacccac

SEQ ID NO: 1197040 - RNA, 16 nt, Eastern equine encephalitis virus
aaugcugucuuuuaua

SEQ ID NO: 1197041 - RNA, 20 nt, Eastern equine encephalitis virus
agagcuggugaaagcaguug

SEQ ID NO: 1197042 - RNA, 17 nt, Eastern equine encephalitis virus
cgauugcccuggagccg

SEQ ID NO: 1197043 - RNA, 14 nt, Eastern equine encephalitis virus
aguugaucaggcau

SEQ ID NO: 1197044 - RNA, 14 nt, Eastern equine encephalitis virus
cgcccaagugaaau

SEQ ID NO: 1197045 - RNA, 23 nt, Eastern equine encephalitis virus
uagagagaaauaccgucacccac

SEQ ID NO: 1197046 - RNA, 21 nt, Eastern equine encephalitis virus
cauaauugccgcauauacaau

SEQ ID NO: 1197047 - RNA, 20 nt, Eastern equine encephalitis virus
ucaaauugaggaccugagac

SEQ ID NO: 1197048 - RNA, 11 nt, Eastern equine encephalitis virus
ccgucacccac

SEQ ID NO: 1197049 - RNA, 18 nt, Eastern equine encephalitis virus
agugcaucgccacgcugg

SEQ ID NO: 1197050 - RNA, 16 nt, Eastern equine encephalitis virus
guugccuacaaaucca

SEQ ID NO: 1197051 - RNA, 18 nt, Eastern equine encephalitis virus
acagcgaauguguaugaa

SEQ ID NO: 1197052 - RNA, 18 nt, Eastern equine encephalitis virus
cagugcauaaugcugcuc

SEQ ID NO: 1197053 - RNA, 17 nt, Eastern equine encephalitis virus
guggcuccuuugcagga

SEQ ID NO: 1197054 - RNA, 14 nt, Eastern equine encephalitis virus
guacuagcagcagc

SEQ ID NO: 1197055 - RNA, 21 nt, Eastern equine encephalitis virus
gcaccauggagcuguacagua

SEQ ID NO: 1197056 - RNA, 22 nt, Eastern equine encephalitis virus
auccauccugcuuuuaagcugc

SEQ ID NO: 1197057 - RNA, 17 nt, Eastern equine encephalitis virus
accuugaguauggugau

SEQ ID NO: 1197058 - RNA, 15 nt, Eastern equine encephalitis virus
cacucuugcugagag

SEQ ID NO: 1197059 - RNA, 13 nt, Eastern equine encephalitis virus
gucaauggugaaa

SEQ ID NO: 1197060 - RNA, 14 nt, Eastern equine encephalitis virus
aggaccgcccgcca

SEQ ID NO: 1197061 - RNA, 21 nt, Eastern equine encephalitis virus
aucacgcacaucaaccagcaa

SEQ ID NO: 1197062 - RNA, 12 nt, Eastern equine encephalitis virus
accacccugcau

SEQ ID NO: 1197063 - RNA, 12 nt, Eastern equine encephalitis virus
augagcaacugg

SEQ ID NO: 1197064 - RNA, 14 nt, Eastern equine encephalitis virus
gggccuaaccgcca

SEQ ID NO: 1197065 - RNA, 13 nt, Eastern equine encephalitis virus
aagggcaccugca

SEQ ID NO: 1197066 - RNA, 14 nt, Eastern equine encephalitis virus
aagcugcaggucug

SEQ ID NO: 1197067 - RNA, 19 nt, Eastern equine encephalitis virus
guuggaguauaccugggga

SEQ ID NO: 1197068 - RNA, 18 nt, Eastern equine encephalitis virus
gucacauccguguggcuc

SEQ ID NO: 1197069 - RNA, 16 nt, Eastern equine encephalitis virus
guugucaauaucauga

SEQ ID NO: 1197070 - RNA, 14 nt, Eastern equine encephalitis virus
augcaugaaaucag

SEQ ID NO: 1197071 - RNA, 18 nt, Eastern equine encephalitis virus
caccggcaaagcaggcuc

SEQ ID NO: 1197072 - RNA, 17 nt, Eastern equine encephalitis virus
aaaagugccuucuccag

SEQ ID NO: 1197073 - RNA, 13 nt, Eastern equine encephalitis virus
uggaagacugccu

SEQ ID NO: 1197074 - RNA, 20 nt, Eastern equine encephalitis virus
aagaucgacaaccugcaugu

SEQ ID NO: 1197075 - RNA, 16 nt, Eastern equine encephalitis virus
uuuaauacacacuuua

SEQ ID NO: 1197076 - RNA, 22 nt, Eastern equine encephalitis virus
guauguagagcgcucggaagag

SEQ ID NO: 1197077 - RNA, 22 nt, Eastern equine encephalitis virus
gacaacaucgugaaagggguua

SEQ ID NO: 1197078 - RNA, 20 nt, Eastern equine encephalitis virus
gagucaacgaaggauccagg

SEQ ID NO: 1197079 - RNA, 14 nt, Eastern equine encephalitis virus
auuuacaaaaucau

SEQ ID NO: 1197080 - RNA, 16 nt, Eastern equine encephalitis virus
ggaugcgcacgcagga

SEQ ID NO: 1197081 - RNA, 15 nt, Eastern equine encephalitis virus
gaaagggguuacauc

SEQ ID NO: 1197082 - RNA, 20 nt, Eastern equine encephalitis virus
agcgaccaccaccaccugcc

SEQ ID NO: 1197083 - RNA, 17 nt, Eastern equine encephalitis virus
aggcguauguagagcgc

SEQ ID NO: 1197084 - RNA, 23 nt, Eastern equine encephalitis virus
uccaagauguacuagcagcagcc

SEQ ID NO: 1197085 - RNA, 19 nt, Eastern equine encephalitis virus
aaugcuaggagaaccagga

SEQ ID NO: 1197086 - RNA, 18 nt, Eastern equine encephalitis virus
cguguggcuccuuugcag

SEQ ID NO: 1197087 - RNA, 21 nt, Eastern equine encephalitis virus
ugcacacaccuuucacccagg

SEQ ID NO: 1197088 - RNA, 13 nt, Eastern equine encephalitis virus
augaucagcugcu

SEQ ID NO: 1197089 - RNA, 20 nt, Eastern equine encephalitis virus
cugaaaacacccagaugagc

SEQ ID NO: 1197090 - RNA, 14 nt, Eastern equine encephalitis virus
gaucgacaaccugc

SEQ ID NO: 1197091 - RNA, 14 nt, Eastern equine encephalitis virus
augaaggcaaucac

SEQ ID NO: 1197092 - RNA, 13 nt, Eastern equine encephalitis virus
gcccaagugaaau

SEQ ID NO: 1197093 - RNA, 14 nt, Eastern equine encephalitis virus
gacaaccugcaugu

SEQ ID NO: 1197094 - RNA, 13 nt, Eastern equine encephalitis virus
agaucaucgaugc

SEQ ID NO: 1197095 - RNA, 23 nt, Eastern equine encephalitis virus
auauaccgccuccuauaaacacu

SEQ ID NO: 1197096 - RNA, 23 nt, Eastern equine encephalitis virus
uuacuaaacacuaaauucacccu

SEQ ID NO: 1197097 - RNA, 13 nt, Eastern equine encephalitis virus
gaaagggugacag

SEQ ID NO: 1197098 - RNA, 13 nt, Eastern equine encephalitis virus
aacggacagguga

SEQ ID NO: 1197099 - RNA, 19 nt, Eastern equine encephalitis virus
gacagucucagaccuggaa

SEQ ID NO: 1197100 - RNA, 22 nt, Eastern equine encephalitis virus
aaaguuugcaaccuaguacugc

SEQ ID NO: 1197101 - RNA, 23 nt, Eastern equine encephalitis virus
cugagauacgaucagcagugcca

SEQ ID NO: 1197102 - RNA, 16 nt, Eastern equine encephalitis virus
gacaaugagcaacugg

SEQ ID NO: 1197103 - RNA, 14 nt, Eastern equine encephalitis virus
ccugcuguuuagau

SEQ ID NO: 1197104 - RNA, 23 nt, Eastern equine encephalitis virus
acuaaacacuaaauucacccuag

SEQ ID NO: 1197105 - RNA, 15 nt, Eastern equine encephalitis virus
gcauccacagugcca

SEQ ID NO: 1197106 - RNA, 23 nt, Eastern equine encephalitis virus
gacuauacaaccaccugcacgga

SEQ ID NO: 1197107 - RNA, 17 nt, Eastern equine encephalitis virus
gccgccgaugcagugca

SEQ ID NO: 1197108 - RNA, 16 nt, Eastern equine encephalitis virus
gaguacaucaccugca

SEQ ID NO: 1197109 - RNA, 15 nt, Eastern equine encephalitis virus
cucaccauguuggaa

SEQ ID NO: 1197110 - RNA, 21 nt, Eastern equine encephalitis virus
cuuuuggagaccugcaaucac

SEQ ID NO: 1197111 - RNA, 15 nt, Eastern equine encephalitis virus
aaccuaaaccaggca

SEQ ID NO: 1197112 - RNA, 22 nt, Eastern equine encephalitis virus
ccauaagguagaauucaggcca

SEQ ID NO: 1197113 - RNA, 12 nt, Eastern equine encephalitis virus
cuaacccuccag

SEQ ID NO: 1197114 - RNA, 23 nt, Eastern equine encephalitis virus
ccuaugaucagcugcucgaugcc

SEQ ID NO: 1197115 - RNA, 13 nt, Eastern equine encephalitis virus
gcuuuuaagcugc

SEQ ID NO: 1197116 - RNA, 15 nt, Eastern equine encephalitis virus
gcauccagacaucag

SEQ ID NO: 1197117 - RNA, 18 nt, Eastern equine encephalitis virus
cuguacaguaugagaaca

SEQ ID NO: 1197118 - RNA, 15 nt, Eastern equine encephalitis virus
caagccuccuggcuu

SEQ ID NO: 1197119 - RNA, 16 nt, Eastern equine encephalitis virus
agugacaagccuccug

SEQ ID NO: 1197120 - RNA, 21 nt, Eastern equine encephalitis virus
acagcugguuaauaccaggau

SEQ ID NO: 1197121 - RNA, 20 nt, Eastern equine encephalitis virus
ccauucgauaacaagguggu

SEQ ID NO: 1197122 - RNA, 20 nt, Eastern equine encephalitis virus
caagauguacuagcagcagc

SEQ ID NO: 1197123 - RNA, 19 nt, Eastern equine encephalitis virus
uauaagacaaaagugccuu

SEQ ID NO: 1197124 - RNA, 13 nt, Eastern equine encephalitis virus
uugacaacaaagg

SEQ ID NO: 1197125 - RNA, 18 nt, Eastern equine encephalitis virus
cacacaggcacuguucag

SEQ ID NO: 1197126 - RNA, 14 nt, Eastern equine encephalitis virus
gggcagugcauaau

SEQ ID NO: 1197127 - RNA, 18 nt, Eastern equine encephalitis virus
gauacaccagagggguca

SEQ ID NO: 1197128 - RNA, 18 nt, Eastern equine encephalitis virus
ccagaggggucagagcca

SEQ ID NO: 1197129 - RNA, 22 nt, Eastern equine encephalitis virus
agccugcgcaggaaaaagaagc

SEQ ID NO: 1197130 - RNA, 12 nt, Eastern equine encephalitis virus
agugcauaaggc

SEQ ID NO: 1197131 - RNA, 12 nt, Eastern equine encephalitis virus
cugcaaguauaa

SEQ ID NO: 1197132 - RNA, 20 nt, Eastern equine encephalitis virus
caggcucuuuuggagaccug

SEQ ID NO: 1197133 - RNA, 19 nt, Eastern equine encephalitis virus
ccaggucacuuggaaguga

SEQ ID NO: 1197134 - RNA, 15 nt, Eastern equine encephalitis virus
agguguuuacccauu

SEQ ID NO: 1197135 - RNA, 13 nt, Eastern equine encephalitis virus
aucucucugcaga

SEQ ID NO: 1197136 - RNA, 16 nt, Eastern equine encephalitis virus
acaccuuucacccagg

SEQ ID NO: 1197137 - RNA, 18 nt, Eastern equine encephalitis virus
caugugaucaaccacccu

SEQ ID NO: 1197138 - RNA, 20 nt, Eastern equine encephalitis virus
ugaacauggaagugaagauc

SEQ ID NO: 1197139 - RNA, 15 nt, Eastern equine encephalitis virus
cgugcagaccaagga

SEQ ID NO: 1197140 - RNA, 16 nt, Eastern equine encephalitis virus
gccaucaagcugaaga

SEQ ID NO: 1197141 - RNA, 23 nt, Eastern equine encephalitis virus
uacugcaagagaauuuucccacc

SEQ ID NO: 1197142 - RNA, 20 nt, Eastern equine encephalitis virus
ggcucaagagucaggagaag

SEQ ID NO: 1197143 - RNA, 16 nt, Eastern equine encephalitis virus
acgaucagcagugcca

SEQ ID NO: 1197144 - RNA, 20 nt, Eastern equine encephalitis virus
uaaaguagagaacaugaagg

SEQ ID NO: 1197145 - RNA, 15 nt, Eastern equine encephalitis virus
cgcaccucagccccu

SEQ ID NO: 1197146 - RNA, 22 nt, Eastern equine encephalitis virus
gacuauacaaccaccugcacgg

SEQ ID NO: 1197147 - RNA, 17 nt, Eastern equine encephalitis virus
guacaucaccugcaagu

SEQ ID NO: 1197148 - RNA, 16 nt, Eastern equine encephalitis virus
acccaaagcagcugcc

SEQ ID NO: 1197149 - RNA, 15 nt, Eastern equine encephalitis virus
agaagcgaccaccac

SEQ ID NO: 1197150 - RNA, 14 nt, Eastern equine encephalitis virus
guacaucaccugca

SEQ ID NO: 1197151 - RNA, 17 nt, Eastern equine encephalitis virus
agcgcauaaugcugucu

SEQ ID NO: 1197152 - RNA, 12 nt, Eastern equine encephalitis virus
aggcacccgauu

SEQ ID NO: 1197153 - RNA, 15 nt, Eastern equine encephalitis virus
cagauacccuccagu

SEQ ID NO: 1197154 - RNA, 14 nt, Eastern equine encephalitis virus
cgcacugauggcag

SEQ ID NO: 1197155 - RNA, 19 nt, Eastern equine encephalitis virus
gaaggcagaauagacaaug

SEQ ID NO: 1197156 - RNA, 22 nt, Eastern equine encephalitis virus
aguugauuuggccuacaugagu

SEQ ID NO: 1197157 - RNA, 13 nt, Eastern equine encephalitis virus
gucaccggagaag

SEQ ID NO: 1197158 - RNA, 17 nt, Eastern equine encephalitis virus
agcgcucggaagagugc

SEQ ID NO: 1197159 - RNA, 20 nt, Eastern equine encephalitis virus
uugcaauguuacucaaauga

SEQ ID NO: 1197160 - RNA, 21 nt, Eastern equine encephalitis virus
cuauaaacacuacaggcagcg

SEQ ID NO: 1197161 - RNA, 19 nt, Eastern equine encephalitis virus
aaugagggaacuuccagug

SEQ ID NO: 1197162 - RNA, 21 nt, Eastern equine encephalitis virus
aguaugggcucaagagucagg

SEQ ID NO: 1197163 - RNA, 13 nt, Eastern equine encephalitis virus
gaagucagagggg

SEQ ID NO: 1197164 - RNA, 19 nt, Eastern equine encephalitis virus
ugagaacaauagguucacc

SEQ ID NO: 1197165 - RNA, 14 nt, Eastern equine encephalitis virus
caucaacuaaccug

SEQ ID NO: 1197166 - RNA, 17 nt, Eastern equine encephalitis virus
uccaaaccccauccuga

SEQ ID NO: 1197167 - RNA, 21 nt, Eastern equine encephalitis virus
caauguaccuccaaaccccau

SEQ ID NO: 1197168 - RNA, 19 nt, Eastern equine encephalitis virus
uggagccgcuccgugcaga

SEQ ID NO: 1197169 - RNA, 13 nt, Eastern equine encephalitis virus
uagagagaaauac

SEQ ID NO: 1197170 - RNA, 15 nt, Eastern equine encephalitis virus
gacaggcgcagagcu

SEQ ID NO: 1197171 - RNA, 21 nt, Eastern equine encephalitis virus
uacaauuacacuacagguaau

SEQ ID NO: 1197172 - RNA, 14 nt, Eastern equine encephalitis virus
uacaaccaccugca

SEQ ID NO: 1197173 - RNA, 19 nt, Eastern equine encephalitis virus
uacaacucuggaagacugc

SEQ ID NO: 1197174 - RNA, 22 nt, Eastern equine encephalitis virus
cuaccagcagcgacuauacaac

SEQ ID NO: 1197175 - RNA, 16 nt, Eastern equine encephalitis virus
ccuggguggagucaac

SEQ ID NO: 1197176 - RNA, 16 nt, Eastern equine encephalitis virus
agggaacuuccagugu

SEQ ID NO: 1197177 - RNA, 13 nt, Eastern equine encephalitis virus
ccugcaacaaaaa

SEQ ID NO: 1197178 - RNA, 13 nt, Eastern equine encephalitis virus
auucaaguacugc

SEQ ID NO: 1197179 - RNA, 18 nt, Eastern equine encephalitis virus
cacuuggaagugaugcaa

SEQ ID NO: 1197180 - RNA, 15 nt, Eastern equine encephalitis virus
aggugauacaggcag

SEQ ID NO: 1197181 - RNA, 15 nt, Eastern equine encephalitis virus
acccugcaugccaug

SEQ ID NO: 1197182 - RNA, 14 nt, Eastern equine encephalitis virus
ugcaguuaccugca

SEQ ID NO: 1197183 - RNA, 15 nt, Eastern equine encephalitis virus
aaaagggguuacagu

SEQ ID NO: 1197184 - RNA, 19 nt, Eastern equine encephalitis virus
ugagaagcuguugcagaag

SEQ ID NO: 1197185 - RNA, 19 nt, Eastern equine encephalitis virus
cugcacuagugcaguuacc

SEQ ID NO: 1197186 - RNA, 15 nt, Eastern equine encephalitis virus
auucgauaacaaggu

SEQ ID NO: 1197187 - RNA, 14 nt, Eastern equine encephalitis virus
ccaccaccugccaa

SEQ ID NO: 1197188 - RNA, 21 nt, Eastern equine encephalitis virus
cgcuggcaccagagccucuag

SEQ ID NO: 1197189 - RNA, 17 nt, Eastern equine encephalitis virus
gaauucaggccaguggg

SEQ ID NO: 1197190 - RNA, 18 nt, Eastern equine encephalitis virus
aucaccgauucaaaacac

SEQ ID NO: 1197191 - RNA, 17 nt, Eastern equine encephalitis virus
agugcaguuaccugcaa

SEQ ID NO: 1197192 - RNA, 16 nt, Eastern equine encephalitis virus
gccuaucuugacaugg

SEQ ID NO: 1197193 - RNA, 23 nt, Eastern equine encephalitis virus
agcgcuuauuguaugcaugcgca

SEQ ID NO: 1197194 - RNA, 12 nt, Eastern equine encephalitis virus
agcuauggugac

SEQ ID NO: 1197195 - RNA, 20 nt, Eastern equine encephalitis virus
cugaagguaaucggagcagg

SEQ ID NO: 1197196 - RNA, 23 nt, Eastern equine encephalitis virus
gacacgguuacaguuggguuuca

SEQ ID NO: 1197197 - RNA, 16 nt, Eastern equine encephalitis virus
auguacuagcagcagc

SEQ ID NO: 1197198 - RNA, 21 nt, Eastern equine encephalitis virus
aaucagauacccuccaguaca

SEQ ID NO: 1197199 - RNA, 15 nt, Eastern equine encephalitis virus
agccauugcaugaga

SEQ ID NO: 1197200 - RNA, 19 nt, Eastern equine encephalitis virus
uucccaccguagccagcua

SEQ ID NO: 1197201 - RNA, 18 nt, Eastern equine encephalitis virus
aucugcgugguccccauu

SEQ ID NO: 1197202 - RNA, 18 nt, Eastern equine encephalitis virus
ccacaagcgugcagacca

SEQ ID NO: 1197203 - RNA, 18 nt, Eastern equine encephalitis virus
gaagacggauggaguuga

SEQ ID NO: 1197204 - RNA, 16 nt, Eastern equine encephalitis virus
gugcaguuaccugcaa

SEQ ID NO: 1197205 - RNA, 13 nt, Eastern equine encephalitis virus
agugaaaugcugc

SEQ ID NO: 1197206 - RNA, 17 nt, Eastern equine encephalitis virus
cuuaccugauugacaac

SEQ ID NO: 1197207 - RNA, 19 nt, Eastern equine encephalitis virus
gugcgcagguugaacgcug

SEQ ID NO: 1197208 - RNA, 14 nt, Eastern equine encephalitis virus
caugucugcagaag

SEQ ID NO: 1197209 - RNA, 20 nt, Eastern equine encephalitis virus
accacggcuauuacauccug

SEQ ID NO: 1197210 - RNA, 14 nt, Eastern equine encephalitis virus
ugaaaacacccaga

SEQ ID NO: 1197211 - RNA, 17 nt, Eastern equine encephalitis virus
gacaacaucgugaaagg

SEQ ID NO: 1197212 - RNA, 12 nt, Eastern equine encephalitis virus
caggcgcagagc

SEQ ID NO: 1197213 - RNA, 14 nt, Eastern equine encephalitis virus
uaguaucuaaccua

SEQ ID NO: 1197214 - RNA, 21 nt, Eastern equine encephalitis virus
cuugucaaccacauaacacua

SEQ ID NO: 1197215 - RNA, 19 nt, Eastern equine encephalitis virus
gucaaagauacaccagagg

SEQ ID NO: 1197216 - RNA, 18 nt, Eastern equine encephalitis virus
agcguuccguccaugaga

SEQ ID NO: 1197217 - RNA, 22 nt, Eastern equine encephalitis virus
ucagcuauguucggucugaaga

SEQ ID NO: 1197218 - RNA, 19 nt, Eastern equine encephalitis virus
aauaucacguuuccaugug

SEQ ID NO: 1197219 - RNA, 15 nt, Eastern equine encephalitis virus
cuaucauugcagaac

SEQ ID NO: 1197220 - RNA, 21 nt, Eastern equine encephalitis virus
cauagucggugcgacagcccu

SEQ ID NO: 1197221 - RNA, 21 nt, Eastern equine encephalitis virus
caaccaccugcacggauguca

SEQ ID NO: 1197222 - RNA, 14 nt, Eastern equine encephalitis virus
uucgauaacaaggu

SEQ ID NO: 1197223 - RNA, 18 nt, Eastern equine encephalitis virus
gaugucaaacaaugcagg

SEQ ID NO: 1197224 - RNA, 14 nt, Eastern equine encephalitis virus
auacaggcagcuga

SEQ ID NO: 1197225 - RNA, 20 nt, Eastern equine encephalitis virus
accuccaaaccccauccuga

SEQ ID NO: 1197226 - RNA, 19 nt, Eastern equine encephalitis virus
gacacuacguugagaugca

SEQ ID NO: 1197227 - RNA, 22 nt, Eastern equine encephalitis virus
ccaggacggcucuaucaguggu

SEQ ID NO: 1197228 - RNA, 23 nt, Eastern equine encephalitis virus
agcaggcucuuuuggagaccugc

SEQ ID NO: 1197229 - RNA, 14 nt, Eastern equine encephalitis virus
ccaaagaagcacag

SEQ ID NO: 1197230 - RNA, 21 nt, Eastern equine encephalitis virus
aacuguccaauucauucucca

SEQ ID NO: 1197231 - RNA, 17 nt, Eastern equine encephalitis virus
uacgacuuuccugagua

SEQ ID NO: 1197232 - RNA, 13 nt, Eastern equine encephalitis virus
gaugcagugcaua

SEQ ID NO: 1197233 - RNA, 23 nt, Eastern equine encephalitis virus
cuguucaggcaauggugaacaua

SEQ ID NO: 1197234 - RNA, 21 nt, Eastern equine encephalitis virus
gccauggucgcuugccacugu

SEQ ID NO: 1197235 - RNA, 16 nt, Eastern equine encephalitis virus
gcaccuaacccuccag

SEQ ID NO: 1197236 - RNA, 13 nt, Eastern equine encephalitis virus
cuacaagacaaac

SEQ ID NO: 1197237 - RNA, 16 nt, Eastern equine encephalitis virus
cucaaugcccaccagg

SEQ ID NO: 1197238 - RNA, 22 nt, Eastern equine encephalitis virus
gugccuguuaaggccaagugca

SEQ ID NO: 1197239 - RNA, 11 nt, Eastern equine encephalitis virus
gcucugcauga

SEQ ID NO: 1197240 - RNA, 20 nt, Eastern equine encephalitis virus
acaccagaggggucagagcc

SEQ ID NO: 1197241 - RNA, 14 nt, Eastern equine encephalitis virus
guaugaugccuauc

SEQ ID NO: 1197242 - RNA, 13 nt, Eastern equine encephalitis virus
aacuucaugugcc

SEQ ID NO: 1197243 - RNA, 22 nt, Eastern equine encephalitis virus
agauguuuacgucaauggugaa

SEQ ID NO: 1197244 - RNA, 15 nt, Eastern equine encephalitis virus
ugcaugugcgcaccu

SEQ ID NO: 1197245 - RNA, 20 nt, Eastern equine encephalitis virus
cgacuauacaaccaccugca

SEQ ID NO: 1197246 - RNA, 16 nt, Eastern equine encephalitis virus
auggaaccaaaaaggg

SEQ ID NO: 1197247 - RNA, 16 nt, Eastern equine encephalitis virus
acugaaaacacccaga

SEQ ID NO: 1197248 - RNA, 23 nt, Eastern equine encephalitis virus
cccaagugaaauacuacugcaag

SEQ ID NO: 1197249 - RNA, 12 nt, Eastern equine encephalitis virus
uuacuaaacacu

SEQ ID NO: 1197250 - RNA, 16 nt, Eastern equine encephalitis virus
augucaaacaaugcag

SEQ ID NO: 1197251 - RNA, 16 nt, Eastern equine encephalitis virus
aggagucauccgcauc

SEQ ID NO: 1197252 - RNA, 21 nt, Eastern equine encephalitis virus
accgauucaaaacacgcucca

SEQ ID NO: 1197253 - RNA, 19 nt, Eastern equine encephalitis virus
augaucagcugcucgaugc

SEQ ID NO: 1197254 - RNA, 14 nt, Eastern equine encephalitis virus
ucaagcugaagaag

SEQ ID NO: 1197255 - RNA, 17 nt, Eastern equine encephalitis virus
ucgagagcuugugcgca

SEQ ID NO: 1197256 - RNA, 20 nt, Eastern equine encephalitis virus
ccacggcuauuacauccugg

SEQ ID NO: 1197257 - RNA, 22 nt, Eastern equine encephalitis virus
gcgacuauacaaccaccugcac

SEQ ID NO: 1197258 - RNA, 17 nt, Eastern equine encephalitis virus
aucuugucaaccacaua

SEQ ID NO: 1197259 - RNA, 22 nt, Eastern equine encephalitis virus
aauuguccuggguggagucaac

SEQ ID NO: 1197260 - RNA, 16 nt, Eastern equine encephalitis virus
agcaccuaacccucca

SEQ ID NO: 1197261 - RNA, 22 nt, Eastern equine encephalitis virus
accagaggggucagagccaugg

SEQ ID NO: 1197262 - RNA, 15 nt, Eastern equine encephalitis virus
agcucugcaugauga

SEQ ID NO: 1197263 - RNA, 15 nt, Eastern equine encephalitis virus
gcccuaacugugggc

SEQ ID NO: 1197264 - RNA, 14 nt, Eastern equine encephalitis virus
acaucaaccagcaa

SEQ ID NO: 1197265 - RNA, 17 nt, Eastern equine encephalitis virus
cgcagagcucugcauga

SEQ ID NO: 1197266 - RNA, 22 nt, Eastern equine encephalitis virus
gauacagcugguuaauaccagg

SEQ ID NO: 1197267 - RNA, 19 nt, Eastern equine encephalitis virus
gcagaaaauugugcagugg

SEQ ID NO: 1197268 - RNA, 18 nt, Eastern equine encephalitis virus
uugaaacaacgagcaccu

SEQ ID NO: 1197269 - RNA, 17 nt, Eastern equine encephalitis virus
ccaguauaagcuggcac

SEQ ID NO: 1197270 - RNA, 20 nt, Eastern equine encephalitis virus
caccagaggggucagagcca

SEQ ID NO: 1197271 - RNA, 16 nt, Eastern equine encephalitis virus
acucgcaaucuuugca

SEQ ID NO: 1197272 - RNA, 16 nt, Eastern equine encephalitis virus
uuaucccacuugcagc

SEQ ID NO: 1197273 - RNA, 20 nt, Eastern equine encephalitis virus
gcacacaccuuucacccagg

SEQ ID NO: 1197274 - RNA, 15 nt, Eastern equine encephalitis virus
caccaccaccugcca

SEQ ID NO: 1197275 - RNA, 19 nt, Eastern equine encephalitis virus
ccuuagcauccacagugcc

SEQ ID NO: 1197276 - RNA, 24 nt, Eastern equine encephalitis virus
agggcagaugacaccuugcaagug

SEQ ID NO: 1197277 - RNA, 18 nt, Eastern equine encephalitis virus
cacacagcagugaugccg

SEQ ID NO: 1197278 - RNA, 15 nt, Eastern equine encephalitis virus
ccuuagcauccacag

SEQ ID NO: 1197279 - RNA, 20 nt, Eastern equine encephalitis virus
ugauugcccuaacugugggc

SEQ ID NO: 1197280 - RNA, 16 nt, Eastern equine encephalitis virus
cuacugcaagugccca

SEQ ID NO: 1197281 - RNA, 14 nt, Eastern equine encephalitis virus
gaguacaucaccug

SEQ ID NO: 1197282 - RNA, 23 nt, Eastern equine encephalitis virus
aacucaucauagguccacuguca

SEQ ID NO: 1197283 - RNA, 15 nt, Eastern equine encephalitis virus
ugcaagcaacagcuu

SEQ ID NO: 1197284 - RNA, 17 nt, Eastern equine encephalitis virus
cacagcguugaccacau

SEQ ID NO: 1197285 - RNA, 17 nt, Eastern equine encephalitis virus
cgugcagaccaaggaca

SEQ ID NO: 1197286 - RNA, 20 nt, Eastern equine encephalitis virus
cuggaguacaucaccugcaa

SEQ ID NO: 1197287 - RNA, 17 nt, Eastern equine encephalitis virus
ugaaacaccgacagucu

SEQ ID NO: 1197288 - RNA, 14 nt, Eastern equine encephalitis virus
gacaugucugcaga

SEQ ID NO: 1197289 - RNA, 17 nt, Eastern equine encephalitis virus
accaccaccaccugcca

SEQ ID NO: 1197290 - RNA, 14 nt, Eastern equine encephalitis virus
cugauugacaacaa

SEQ ID NO: 1197291 - RNA, 22 nt, Eastern equine encephalitis virus
ugccuguuaaggccaagugcau

SEQ ID NO: 1197292 - RNA, 12 nt, Eastern equine encephalitis virus
gggaauccacau

SEQ ID NO: 1197293 - RNA, 19 nt, Eastern equine encephalitis virus
acuuacagccauugcauga

SEQ ID NO: 1197294 - RNA, 14 nt, Eastern equine encephalitis virus
cuaaauaucagaga

SEQ ID NO: 1197295 - RNA, 22 nt, Eastern equine encephalitis virus
cccuggagccgcuccgugcaga

SEQ ID NO: 1197296 - RNA, 16 nt, Eastern equine encephalitis virus
cagaauuacgacagcc

SEQ ID NO: 1197297 - RNA, 12 nt, Eastern equine encephalitis virus
uacaauuacacu

SEQ ID NO: 1197298 - RNA, 15 nt, Eastern equine encephalitis virus
cauuauaacacuaag

SEQ ID NO: 1197299 - RNA, 16 nt, Eastern equine encephalitis virus
uuccaucaacuaaccu

SEQ ID NO: 1197300 - RNA, 11 nt, Eastern equine encephalitis virus
cauugcagaac

SEQ ID NO: 1197301 - RNA, 16 nt, Eastern equine encephalitis virus
caaacaccaacuugaa

SEQ ID NO: 1197302 - RNA, 20 nt, Eastern equine encephalitis virus
ggcugcuauauuaccacauu

SEQ ID NO: 1197303 - RNA, 16 nt, Eastern equine encephalitis virus
cuauucuugacaacaa

SEQ ID NO: 1197304 - RNA, 19 nt, Eastern equine encephalitis virus
ucaauaaagaucgacaacc

SEQ ID NO: 1197305 - RNA, 14 nt, Eastern equine encephalitis virus
ggagcgucagcugg

SEQ ID NO: 1197306 - RNA, 21 nt, Eastern equine encephalitis virus
uuuggacacucauuucaccca

SEQ ID NO: 1197307 - RNA, 19 nt, Eastern equine encephalitis virus
gacacugaaaacacccaga

SEQ ID NO: 1197308 - RNA, 21 nt, Eastern equine encephalitis virus
cgcugcuuauuuugcuguggg

SEQ ID NO: 1197309 - RNA, 17 nt, Eastern equine encephalitis virus
uugcaaccuaguacugc

SEQ ID NO: 1197310 - RNA, 20 nt, Eastern equine encephalitis virus
ccacgcuggcaccagagccu

SEQ ID NO: 1197311 - RNA, 14 nt, Eastern equine encephalitis virus
uaccgucacccacc

SEQ ID NO: 1197312 - RNA, 17 nt, Eastern equine encephalitis virus
acacuacguugagaugc

SEQ ID NO: 1197313 - RNA, 12 nt, Eastern equine encephalitis virus
auugugcagugg

SEQ ID NO: 1197314 - RNA, 19 nt, Eastern equine encephalitis virus
cagcuggagaucugcagau

SEQ ID NO: 1197315 - RNA, 23 nt, Eastern equine encephalitis virus
gccgcuccgugcagaaaauugug

SEQ ID NO: 1197316 - RNA, 18 nt, Eastern equine encephalitis virus
gaaggccagcauauauga

SEQ ID NO: 1197317 - RNA, 15 nt, Eastern equine encephalitis virus
uucacccaguauaag

SEQ ID NO: 1197318 - RNA, 14 nt, Eastern equine encephalitis virus
accacccugcaugc

SEQ ID NO: 1197319 - RNA, 18 nt, Eastern equine encephalitis virus
ugaugugccacaaugcau

SEQ ID NO: 1197320 - RNA, 18 nt, Eastern equine encephalitis virus
augcacccguucaccuac

SEQ ID NO: 1197321 - RNA, 15 nt, Eastern equine encephalitis virus
cauccagacaucagc

SEQ ID NO: 1197322 - RNA, 16 nt, Eastern equine encephalitis virus
acucauuucacccagu

SEQ ID NO: 1197323 - RNA, 14 nt, Eastern equine encephalitis virus
acuuugcugcauua

SEQ ID NO: 1197324 - RNA, 19 nt, Eastern equine encephalitis virus
gcucaagagucaggagaag

SEQ ID NO: 1197325 - RNA, 19 nt, Eastern equine encephalitis virus
gccaagaaacaaaaacgua

SEQ ID NO: 1197326 - RNA, 13 nt, Eastern equine encephalitis virus
aagaaacaaaaac

SEQ ID NO: 1197327 - RNA, 13 nt, Eastern equine encephalitis virus
aucagcauuuauc

SEQ ID NO: 1197328 - RNA, 16 nt, Eastern equine encephalitis virus
gcaaucuuugcauaac

SEQ ID NO: 1197329 - RNA, 12 nt, Eastern equine encephalitis virus
gggacaaaacau

SEQ ID NO: 1197330 - RNA, 16 nt, Eastern equine encephalitis virus
uauaaucaggcauaau

SEQ ID NO: 1197331 - RNA, 14 nt, Eastern equine encephalitis virus
ugccacucaaugua

SEQ ID NO: 1197332 - RNA, 15 nt, Eastern equine encephalitis virus
uccaaucauguugaa

SEQ ID NO: 1197333 - RNA, 17 nt, Eastern equine encephalitis virus
cagcgaauguguaugaa

SEQ ID NO: 1197334 - RNA, 19 nt, Eastern equine encephalitis virus
uugcauaaccccguauaaa

SEQ ID NO: 1197335 - RNA, 21 nt, Eastern equine encephalitis virus
cgacuauacaaccaccugcac

SEQ ID NO: 1197336 - RNA, 22 nt, Eastern equine encephalitis virus
ugaugugccacaaugcaugaaa

SEQ ID NO: 1197337 - RNA, 13 nt, Eastern equine encephalitis virus
agcaacgaucugu

SEQ ID NO: 1197338 - RNA, 15 nt, Eastern equine encephalitis virus
ccuaugaucagcugc

SEQ ID NO: 1197339 - RNA, 14 nt, Eastern equine encephalitis virus
ccaccaccaccugc

SEQ ID NO: 1197340 - RNA, 16 nt, Eastern equine encephalitis virus
auaacauaacggauga

SEQ ID NO: 1197341 - RNA, 18 nt, Eastern equine encephalitis virus
agaagcuguugcagaaga

SEQ ID NO: 1197342 - RNA, 17 nt, Eastern equine encephalitis virus
acuaucagugucaggug

SEQ ID NO: 1197343 - RNA, 22 nt, Eastern equine encephalitis virus
gucggcgauauccgccacugcg

SEQ ID NO: 1197344 - RNA, 14 nt, Eastern equine encephalitis virus
ugcacaguugccca

SEQ ID NO: 1197345 - RNA, 13 nt, Eastern equine encephalitis virus
cuggcaccagagc

SEQ ID NO: 1197346 - RNA, 19 nt, Eastern equine encephalitis virus
ugucugcggcgccuugggc

SEQ ID NO: 1197347 - RNA, 17 nt, Eastern equine encephalitis virus
ccauggagcuguacagu

SEQ ID NO: 1197348 - RNA, 22 nt, Eastern equine encephalitis virus
cgucacccaccugaacauggag

SEQ ID NO: 1197349 - RNA, 19 nt, Eastern equine encephalitis virus
gaccuugcugacgaccagg

SEQ ID NO: 1197350 - RNA, 18 nt, Eastern equine encephalitis virus
cauaagaggucaccccau

SEQ ID NO: 1197351 - RNA, 17 nt, Eastern equine encephalitis virus
gcaguguauaaggcugu

SEQ ID NO: 1197352 - RNA, 22 nt, Eastern equine encephalitis virus
augcuaucauugcagaacacuu

SEQ ID NO: 1197353 - RNA, 16 nt, Eastern equine encephalitis virus
augauucuugaagacc

SEQ ID NO: 1197354 - RNA, 14 nt, Eastern equine encephalitis virus
cacucaauguaccu

SEQ ID NO: 1197355 - RNA, 14 nt, Eastern equine encephalitis virus
ugcauaaugcugcu

SEQ ID NO: 1197356 - RNA, 20 nt, Eastern equine encephalitis virus
ucauuucacccaguauaagc

SEQ ID NO: 1197357 - RNA, 16 nt, Eastern equine encephalitis virus
cuaugaucagcugcuc

SEQ ID NO: 1197358 - RNA, 22 nt, Eastern equine encephalitis virus
aaggcugucuuacuaaacacua

SEQ ID NO: 1197359 - RNA, 20 nt, Eastern equine encephalitis virus
gcgacuauacaaccaccugc

SEQ ID NO: 1197360 - RNA, 15 nt, Eastern equine encephalitis virus
agugcauaaugcugc

SEQ ID NO: 1197361 - RNA, 15 nt, Eastern equine encephalitis virus
cacguuggaacagaa

SEQ ID NO: 1197362 - RNA, 20 nt, Eastern equine encephalitis virus
augcuaggagaaccaggaga

SEQ ID NO: 1197363 - RNA, 14 nt, Eastern equine encephalitis virus
cuggcaccauggag

SEQ ID NO: 1197364 - RNA, 19 nt, Eastern equine encephalitis virus
gaucgcuagccgcgugcuc

SEQ ID NO: 1197365 - RNA, 23 nt, Eastern equine encephalitis virus
acuaucagugucagguguuuaca

SEQ ID NO: 1197366 - RNA, 15 nt, Eastern equine encephalitis virus
cugacuaucaguguc

SEQ ID NO: 1197367 - RNA, 17 nt, Eastern equine encephalitis virus
caguguauaaggcuguc

SEQ ID NO: 1197368 - RNA, 15 nt, Eastern equine encephalitis virus
cuggcaccagagccu

SEQ ID NO: 1197369 - RNA, 20 nt, Eastern equine encephalitis virus
ccaugugaucaaccacccug

SEQ ID NO: 1197370 - RNA, 21 nt, Eastern equine encephalitis virus
cauaagguagaauucaggcca

SEQ ID NO: 1197371 - RNA, 23 nt, Eastern equine encephalitis virus
gacggcucuaucaguggugacau

SEQ ID NO: 1197372 - RNA, 14 nt, Eastern equine encephalitis virus
cuauucuugacaac

SEQ ID NO: 1197373 - RNA, 14 nt, Eastern equine encephalitis virus
agcgaccaccacca

SEQ ID NO: 1197374 - RNA, 17 nt, Eastern equine encephalitis virus
caacgaccccaggcugg

SEQ ID NO: 1197375 - RNA, 17 nt, Eastern equine encephalitis virus
ggugacgguggugcaua

SEQ ID NO: 1197376 - RNA, 15 nt, Eastern equine encephalitis virus
agaccuaggaguuga

SEQ ID NO: 1197377 - RNA, 18 nt, Eastern equine encephalitis virus
agagggaacuaccagcag

SEQ ID NO: 1197378 - RNA, 14 nt, Eastern equine encephalitis virus
ccaagaaacaaaaa

SEQ ID NO: 1197379 - RNA, 16 nt, Eastern equine encephalitis virus
caaauccaacucgaca

SEQ ID NO: 1197380 - RNA, 16 nt, Eastern equine encephalitis virus
accgaaagaccacauc

SEQ ID NO: 1197381 - RNA, 22 nt, Eastern equine encephalitis virus
cuggagcguuccguccaugaga

SEQ ID NO: 1197382 - RNA, 18 nt, Eastern equine encephalitis virus
gcagugcauaaggcugcu

SEQ ID NO: 1197383 - RNA, 20 nt, Eastern equine encephalitis virus
guaugcaugcgcaugcugcg

SEQ ID NO: 1197384 - RNA, 20 nt, Eastern equine encephalitis virus
acacucuuuaucaauacugu

SEQ ID NO: 1197385 - RNA, 16 nt, Eastern equine encephalitis virus
uucaugugcccuuugu

SEQ ID NO: 1197386 - RNA, 22 nt, Eastern equine encephalitis virus
gagucgccgacccccugaagag

SEQ ID NO: 1197387 - RNA, 16 nt, Eastern equine encephalitis virus
ugccacaaugcaugaa

SEQ ID NO: 1197388 - RNA, 16 nt, Eastern equine encephalitis virus
aguacaucaccugcaa

SEQ ID NO: 1197389 - RNA, 13 nt, Eastern equine encephalitis virus
accaccaccugcc

SEQ ID NO: 1197390 - RNA, 16 nt, Eastern equine encephalitis virus
gggaacauaacaucug

SEQ ID NO: 1197391 - RNA, 14 nt, Eastern equine encephalitis virus
ggagaaccaggaga

SEQ ID NO: 1197392 - RNA, 15 nt, Eastern equine encephalitis virus
caugucugcagaaga

SEQ ID NO: 1197393 - RNA, 19 nt, Eastern equine encephalitis virus
cuccaguacaccagugaca

SEQ ID NO: 1197394 - RNA, 13 nt, Eastern equine encephalitis virus
uauccgccacugc

SEQ ID NO: 1197395 - RNA, 12 nt, Eastern equine encephalitis virus
uuaauaccagga

SEQ ID NO: 1197396 - RNA, 14 nt, Eastern equine encephalitis virus
acacuacguugaga

SEQ ID NO: 1197397 - RNA, 16 nt, Eastern equine encephalitis virus
gaccaccaccaccugc

SEQ ID NO: 1197398 - RNA, 21 nt, Eastern equine encephalitis virus
agcaacuuuaaacacauaaga

SEQ ID NO: 1197399 - RNA, 13 nt, Eastern equine encephalitis virus
agaggggaugcgc

SEQ ID NO: 1197400 - RNA, 20 nt, Eastern equine encephalitis virus
uggcggcccuuuaggccacc

SEQ ID NO: 1197401 - RNA, 23 nt, Eastern equine encephalitis virus
agaagcgaccaccaccaccugcc

SEQ ID NO: 1197402 - RNA, 12 nt, Eastern equine encephalitis virus
aacccuccagca

SEQ ID NO: 1197403 - RNA, 19 nt, Eastern equine encephalitis virus
auaucacguuuccauguga

SEQ ID NO: 1197404 - RNA, 15 nt, Eastern equine encephalitis virus
auacccuccaguaca

SEQ ID NO: 1197405 - RNA, 15 nt, Eastern equine encephalitis virus
acuuuguuugacaug

SEQ ID NO: 1197406 - RNA, 22 nt, Eastern equine encephalitis virus
uugucaaccacauaacacuaua

SEQ ID NO: 1197407 - RNA, 19 nt, Eastern equine encephalitis virus
aaugauucuugaagaccua

SEQ ID NO: 1197408 - RNA, 17 nt, Eastern equine encephalitis virus
aaacacuacaggcagcg

SEQ ID NO: 1197409 - RNA, 20 nt, Eastern equine encephalitis virus
gccaaacgcaagaagccugc

SEQ ID NO: 1197410 - RNA, 13 nt, Eastern equine encephalitis virus
agguguugcaguu

SEQ ID NO: 1197411 - RNA, 15 nt, Eastern equine encephalitis virus
gcacguagaaggcag

SEQ ID NO: 1197412 - RNA, 15 nt, Eastern equine encephalitis virus
ccaccugccaagaaa

SEQ ID NO: 1197413 - RNA, 13 nt, Eastern equine encephalitis virus
uuacaggaacugc

SEQ ID NO: 1197414 - RNA, 15 nt, Eastern equine encephalitis virus
gcgaccaccaccacc

SEQ ID NO: 1197415 - RNA, 17 nt, Eastern equine encephalitis virus
uucaggugauacaggca

SEQ ID NO: 1197416 - RNA, 14 nt, Eastern equine encephalitis virus
ccuccagcaggacc

SEQ ID NO: 1197417 - RNA, 15 nt, Eastern equine encephalitis virus
uguuacucaaaugag

SEQ ID NO: 1197418 - RNA, 19 nt, Eastern equine encephalitis virus
caucauagguccacuguca

SEQ ID NO: 1197419 - RNA, 11 nt, Eastern equine encephalitis virus
caccaccugcc

SEQ ID NO: 1197420 - RNA, 12 nt, Eastern equine encephalitis virus
gacgcggugcua

SEQ ID NO: 1197421 - RNA, 15 nt, Eastern equine encephalitis virus
caucaagcugaagaa

SEQ ID NO: 1197422 - RNA, 12 nt, Eastern equine encephalitis virus
guacgagaggga

SEQ ID NO: 1197423 - RNA, 21 nt, Eastern equine encephalitis virus
gugcagaaaauugugcagugg

SEQ ID NO: 1197424 - RNA, 20 nt, Eastern equine encephalitis virus
ccuggaguacaucaccugca

SEQ ID NO: 1197425 - RNA, 21 nt, Eastern equine encephalitis virus
caggucugcacuagugcaguu

SEQ ID NO: 1197426 - RNA, 10 nt, Eastern equine encephalitis virus
cccugcaugc

SEQ ID NO: 1197427 - RNA, 15 nt, Eastern equine encephalitis virus
caggcacuguucagg

SEQ ID NO: 1197428 - RNA, 14 nt, Eastern equine encephalitis virus
cuccuauaaacacu

SEQ ID NO: 1197429 - RNA, 13 nt, Eastern equine encephalitis virus
aggcgcagagcuc

SEQ ID NO: 1197430 - RNA, 15 nt, Eastern equine encephalitis virus
cagccauugcaugag

SEQ ID NO: 1197431 - RNA, 18 nt, Eastern equine encephalitis virus
agccuaugaucagcugcu

SEQ ID NO: 1197432 - RNA, 17 nt, Eastern equine encephalitis virus
gagccuaugaucagcug

SEQ ID NO: 1197433 - RNA, 16 nt, Eastern equine encephalitis virus
accacauuauaacacu

SEQ ID NO: 1197434 - RNA, 16 nt, Eastern equine encephalitis virus
ucaaccacauaacacu

SEQ ID NO: 1197435 - RNA, 12 nt, Eastern equine encephalitis virus
gagcgugagaag

SEQ ID NO: 1197436 - RNA, 21 nt, Eastern equine encephalitis virus
caacgaucuguacgcaaacac

SEQ ID NO: 1197437 - RNA, 20 nt, Eastern equine encephalitis virus
gucgccgacccccugaagag

SEQ ID NO: 1197438 - RNA, 23 nt, Eastern equine encephalitis virus
ggaguugauuuggccuacaugag

SEQ ID NO: 1197439 - RNA, 15 nt, Eastern equine encephalitis virus
cuguguggcuaucau

SEQ ID NO: 1197440 - RNA, 20 nt, Eastern equine encephalitis virus
acugcaaacauccauccugc

SEQ ID NO: 1197441 - RNA, 14 nt, Eastern equine encephalitis virus
ccucgugucgcacc

SEQ ID NO: 1197442 - RNA, 18 nt, Eastern equine encephalitis virus
ccaccacuugcagcucaa

SEQ ID NO: 1197443 - RNA, 12 nt, Eastern equine encephalitis virus
auagacauuaac

SEQ ID NO: 1197444 - RNA, 21 nt, Eastern equine encephalitis virus
gaucaaccacccugcaugcca

SEQ ID NO: 1197445 - RNA, 13 nt, Eastern equine encephalitis virus
acauccauccugc

SEQ ID NO: 1197446 - RNA, 12 nt, Eastern equine encephalitis virus
cuaaccuggagu

SEQ ID NO: 1197447 - RNA, 21 nt, Eastern equine encephalitis virus
cauaaugcugcuccuaaguaa

SEQ ID NO: 1197448 - RNA, 13 nt, Eastern equine encephalitis virus
gcaucgccacgcu

SEQ ID NO: 1197449 - RNA, 16 nt, Eastern equine encephalitis virus
uauacaaccaccugca

SEQ ID NO: 1197450 - RNA, 12 nt, Eastern equine encephalitis virus
aagcugaagaag

SEQ ID NO: 1197451 - RNA, 23 nt, Eastern equine encephalitis virus
auggaaccaaaaagggguuacag

SEQ ID NO: 1197452 - RNA, 16 nt, Eastern equine encephalitis virus
ggugauacaggcagcu

SEQ ID NO: 1197453 - RNA, 12 nt, Eastern equine encephalitis virus
ucaagcugaaga

SEQ ID NO: 1197454 - RNA, 16 nt, Eastern equine encephalitis virus
accuccaaaccccauc

SEQ ID NO: 1197455 - RNA, 22 nt, Eastern equine encephalitis virus
cuggaguacaucaccugcaagu

SEQ ID NO: 1197456 - RNA, 19 nt, Eastern equine encephalitis virus
gcgaccaccaccaccugcc

SEQ ID NO: 1197457 - RNA, 22 nt, Eastern equine encephalitis virus
ucgaggagagggcgacacuuuu

SEQ ID NO: 1197458 - RNA, 21 nt, Eastern equine encephalitis virus
cacuacguugagaugcaucaa

SEQ ID NO: 1197459 - RNA, 22 nt, Eastern equine encephalitis virus
cauccugcuuuuaagcugcagg

SEQ ID NO: 1197460 - RNA, 21 nt, Eastern equine encephalitis virus
ccacaagcgugcagaccaagg

SEQ ID NO: 1197461 - RNA, 17 nt, Eastern equine encephalitis virus
caaaaagggguuacagu

SEQ ID NO: 1197462 - RNA, 11 nt, Eastern equine encephalitis virus
uaccugcaaag

SEQ ID NO: 1197463 - RNA, 19 nt, Eastern equine encephalitis virus
auuaccacauuauaacacu

SEQ ID NO: 1197464 - RNA, 15 nt, Eastern equine encephalitis virus
gcaucacugaagagc

SEQ ID NO: 1197465 - RNA, 18 nt, Eastern equine encephalitis virus
agggcagugcauaaugcu

SEQ ID NO: 1197466 - RNA, 19 nt, Eastern equine encephalitis virus
cacacuuuguuugacaugu

SEQ ID NO: 1197467 - RNA, 18 nt, Eastern equine encephalitis virus
aauccaguaaagcaggaa

SEQ ID NO: 1197468 - RNA, 17 nt, Eastern equine encephalitis virus
cuuuccaaagaagcaca

SEQ ID NO: 1197469 - RNA, 20 nt, Eastern equine encephalitis virus
ugaugcuaucauugcagaac

SEQ ID NO: 1197470 - RNA, 18 nt, Eastern equine encephalitis virus
caauuacacuacagguaa

SEQ ID NO: 1197471 - RNA, 17 nt, Eastern equine encephalitis virus
cgaucagcagugccauc

SEQ ID NO: 1197472 - RNA, 22 nt, Eastern equine encephalitis virus
uagcuauagaagaagucagagg

SEQ ID NO: 1197473 - RNA, 23 nt, Eastern equine encephalitis virus
auaacgccgccgaugcagugcau

SEQ ID NO: 1197474 - RNA, 18 nt, Eastern equine encephalitis virus
gccgacgagggcagauga

SEQ ID NO: 1197475 - RNA, 19 nt, Eastern equine encephalitis virus
ucccgcgaaaauaggagau

SEQ ID NO: 1197476 - RNA, 14 nt, Eastern equine encephalitis virus
uagagaacaugaag

SEQ ID NO: 1197477 - RNA, 20 nt, Eastern equine encephalitis virus
cauccugacuaucaguguca

SEQ ID NO: 1197478 - RNA, 13 nt, Eastern equine encephalitis virus
gugaaaugcugcg

SEQ ID NO: 1197479 - RNA, 16 nt, Eastern equine encephalitis virus
ggaggagccuacugcu

SEQ ID NO: 1197480 - RNA, 19 nt, Eastern equine encephalitis virus
gagccauggucgcuugcca

SEQ ID NO: 1197481 - RNA, 22 nt, Eastern equine encephalitis virus
gcggugcuagagacagacauag

SEQ ID NO: 1197482 - RNA, 15 nt, Eastern equine encephalitis virus
ucauucuccaucagg

SEQ ID NO: 1197483 - RNA, 14 nt, Eastern equine encephalitis virus
uccuauaaacacua

SEQ ID NO: 1197484 - RNA, 15 nt, Eastern equine encephalitis virus
auucuccaucaggug

SEQ ID NO: 1197485 - RNA, 12 nt, Eastern equine encephalitis virus
gucagcuggaga

SEQ ID NO: 1197486 - RNA, 21 nt, Eastern equine encephalitis virus
caugugaucaaccacccugca

SEQ ID NO: 1197487 - RNA, 20 nt, Eastern equine encephalitis virus
gcucuuuuggagaccugcaa

SEQ ID NO: 1197488 - RNA, 20 nt, Eastern equine encephalitis virus
cagaugacaccuugcaagug

SEQ ID NO: 1197489 - RNA, 11 nt, Eastern equine encephalitis virus
caucaccugca

SEQ ID NO: 1197490 - RNA, 17 nt, Eastern equine encephalitis virus
ucaaccacccugcaugc

SEQ ID NO: 1197491 - RNA, 16 nt, Eastern equine encephalitis virus
augaacggcaaaacgc

SEQ ID NO: 1197492 - RNA, 22 nt, Eastern equine encephalitis virus
uccaguguuggauucagcugcc

SEQ ID NO: 1197493 - RNA, 14 nt, Eastern equine encephalitis virus
uacaguaugagaac

SEQ ID NO: 1197494 - RNA, 18 nt, Eastern equine encephalitis virus
guuacacccacaagcgug

SEQ ID NO: 1197495 - RNA, 13 nt, Eastern equine encephalitis virus
gucacccaccuga

SEQ ID NO: 1197496 - RNA, 16 nt, Eastern equine encephalitis virus
aaugagggaacuucca

SEQ ID NO: 1197497 - RNA, 20 nt, Eastern equine encephalitis virus
ugugccuguuaaggccaagu

SEQ ID NO: 1197498 - RNA, 20 nt, Eastern equine encephalitis virus
ccgagccuaugaucagcugc

SEQ ID NO: 1197499 - RNA, 17 nt, Eastern equine encephalitis virus
uccugcucccauguauu

SEQ ID NO: 1197500 - RNA, 17 nt, Eastern equine encephalitis virus
uaaugauucuugaagac

SEQ ID NO: 1197501 - RNA, 15 nt, Eastern equine encephalitis virus
cuagagucagauaaa

SEQ ID NO: 1197502 - RNA, 21 nt, Eastern equine encephalitis virus
ggacaaaacauacugaagaaa

SEQ ID NO: 1197503 - RNA, 15 nt, Eastern equine encephalitis virus
cccugcaugccaugc

SEQ ID NO: 1197504 - RNA, 19 nt, Eastern equine encephalitis virus
gcauaaugcugucuuuuau

SEQ ID NO: 1197505 - RNA, 20 nt, Eastern equine encephalitis virus
caagcugaagaaggccagca

SEQ ID NO: 1197506 - RNA, 18 nt, Eastern equine encephalitis virus
agccauggucgcuugcca

SEQ ID NO: 1197507 - RNA, 23 nt, Eastern equine encephalitis virus
guggacgaguguucaaaccgcug

SEQ ID NO: 1197508 - RNA, 13 nt, Eastern equine encephalitis virus
accugcaugugcg

SEQ ID NO: 1197509 - RNA, 13 nt, Eastern equine encephalitis virus
ccacccugcaugc

SEQ ID NO: 1197510 - RNA, 23 nt, Eastern equine encephalitis virus
cgauuucggugguauagccaccg

SEQ ID NO: 1197511 - RNA, 13 nt, Eastern equine encephalitis virus
ugcaaguauaaga

SEQ ID NO: 1197512 - RNA, 19 nt, Eastern equine encephalitis virus
cgagccuaugaucagcugc

SEQ ID NO: 1197513 - RNA, 16 nt, Eastern equine encephalitis virus
acuauacaaccaccug

SEQ ID NO: 1197514 - RNA, 13 nt, Eastern equine encephalitis virus
cuucuccacugca

SEQ ID NO: 1197515 - RNA, 15 nt, Eastern equine encephalitis virus
ggcaccggcaaagca

SEQ ID NO: 1197516 - RNA, 14 nt, Eastern equine encephalitis virus
aggggucagagcca

SEQ ID NO: 1197517 - RNA, 20 nt, Eastern equine encephalitis virus
cuauguucggucugaagacg

SEQ ID NO: 1197518 - RNA, 17 nt, Eastern equine encephalitis virus
gcgaaaauaggagaugc

SEQ ID NO: 1197519 - RNA, 21 nt, Eastern equine encephalitis virus
cugacgcacugauggcagagc

SEQ ID NO: 1197520 - RNA, 17 nt, Eastern equine encephalitis virus
gcagaaccgcaaccagu

SEQ ID NO: 1197521 - RNA, 14 nt, Eastern equine encephalitis virus
ggaguugaucaggc

SEQ ID NO: 1197522 - RNA, 16 nt, Eastern equine encephalitis virus
caguagugaaaugcug

SEQ ID NO: 1197523 - RNA, 16 nt, Eastern equine encephalitis virus
ccauguuggaacagaa

SEQ ID NO: 1197524 - RNA, 17 nt, Eastern equine encephalitis virus
caaacgcaagaagccug

SEQ ID NO: 1197525 - RNA, 22 nt, Eastern equine encephalitis virus
uauggugaugugccacaaugca

SEQ ID NO: 1197526 - RNA, 18 nt, Eastern equine encephalitis virus
cgggacaagggcaccugc

SEQ ID NO: 1197527 - RNA, 21 nt, Eastern equine encephalitis virus
aguugagcacaaacaccgcac

SEQ ID NO: 1197528 - RNA, 18 nt, Eastern equine encephalitis virus
cugucaauuucacaguca

SEQ ID NO: 1197529 - RNA, 17 nt, Eastern equine encephalitis virus
uaucagagauguuccca

SEQ ID NO: 1197530 - RNA, 14 nt, Eastern equine encephalitis virus
ccauccaccaaaaa

SEQ ID NO: 1197531 - RNA, 13 nt, Eastern equine encephalitis virus
aucaucgaugcag

SEQ ID NO: 1197532 - RNA, 20 nt, Eastern equine encephalitis virus
gacaacaaagguagagucgu

SEQ ID NO: 1197533 - RNA, 13 nt, Eastern equine encephalitis virus
cuaagggcagugc

SEQ ID NO: 1197534 - RNA, 12 nt, Eastern equine encephalitis virus
ugaaaugcugcg

SEQ ID NO: 1197535 - RNA, 16 nt, Eastern equine encephalitis virus
ucaucagcagaagugg

SEQ ID NO: 1197536 - RNA, 14 nt, Eastern equine encephalitis virus
agagcucugcauga

SEQ ID NO: 1197537 - RNA, 22 nt, Eastern equine encephalitis virus
cgccuccuauaaacacuacagg

SEQ ID NO: 1197538 - RNA, 23 nt, Eastern equine encephalitis virus
agccgcuuccacuggacgaugac

SEQ ID NO: 1197539 - RNA, 21 nt, Eastern equine encephalitis virus
gcagaaccgcaaccaguugaa

SEQ ID NO: 1197540 - RNA, 23 nt, Eastern equine encephalitis virus
gugcacacaccuuucacccaggc

SEQ ID NO: 1197541 - RNA, 21 nt, Eastern equine encephalitis virus
gaagcuguugcagaagaaacu

SEQ ID NO: 1197542 - RNA, 19 nt, Eastern equine encephalitis virus
auuccacuucuccacugca

SEQ ID NO: 1197543 - RNA, 18 nt, Eastern equine encephalitis virus
aaacacuaaauucacccu

SEQ ID NO: 1197544 - RNA, 19 nt, Eastern equine encephalitis virus
uggcucaaugcccaccagg

SEQ ID NO: 1197545 - RNA, 20 nt, Eastern equine encephalitis virus
aggcagaauagacaaugagc

SEQ ID NO: 1197546 - RNA, 14 nt, Eastern equine encephalitis virus
aaugcuaggagaac

SEQ ID NO: 1197547 - RNA, 15 nt, Eastern equine encephalitis virus
aaaguacacacaggc

SEQ ID NO: 1197548 - RNA, 15 nt, Eastern equine encephalitis virus
gugcgcagguugaac

SEQ ID NO: 1197549 - RNA, 18 nt, Eastern equine encephalitis virus
gccaccuuuugcccagcu

SEQ ID NO: 1197550 - RNA, 14 nt, Eastern equine encephalitis virus
cccgaacgcucaag

SEQ ID NO: 1197551 - RNA, 16 nt, Eastern equine encephalitis virus
aagcugaagaaggcca

SEQ ID NO: 1197552 - RNA, 18 nt, Eastern equine encephalitis virus
caacaaaaaaugggugua

SEQ ID NO: 1197553 - RNA, 16 nt, Eastern equine encephalitis virus
caccugcaacaaaaau

SEQ ID NO: 1197554 - RNA, 21 nt, Eastern equine encephalitis virus
ucgacaaccugcaugugcgca

SEQ ID NO: 1197555 - RNA, 19 nt, Eastern equine encephalitis virus
cgggacaagggcaccugca

SEQ ID NO: 1197556 - RNA, 17 nt, Eastern equine encephalitis virus
gacccaaagcagcugcc

SEQ ID NO: 1197557 - RNA, 19 nt, Eastern equine encephalitis virus
cucaaugcccaccagggga

SEQ ID NO: 1197558 - RNA, 23 nt, Eastern equine encephalitis virus
ggagucauccgcauccagacauc

SEQ ID NO: 1197559 - RNA, 15 nt, Eastern equine encephalitis virus
ugguugcccuaguuc

SEQ ID NO: 1197560 - RNA, 15 nt, Eastern equine encephalitis virus
ccugcacggauguca

SEQ ID NO: 1197561 - RNA, 13 nt, Eastern equine encephalitis virus
caaccaccugcac

SEQ ID NO: 1197562 - RNA, 14 nt, Eastern equine encephalitis virus
aggaaaaagaagcg

SEQ ID NO: 1197563 - RNA, 19 nt, Eastern equine encephalitis virus
ucugaaacaccgacagucu

SEQ ID NO: 1197564 - RNA, 22 nt, Eastern equine encephalitis virus
uaccagaauaucugaaacaccg

SEQ ID NO: 1197565 - RNA, 13 nt, Eastern equine encephalitis virus
accuaacccucca

SEQ ID NO: 1197566 - RNA, 18 nt, Eastern equine encephalitis virus
gccugagauacgaucagc

SEQ ID NO: 1197567 - RNA, 14 nt, Eastern equine encephalitis virus
agacaaacccgaua

SEQ ID NO: 1197568 - RNA, 16 nt, Eastern equine encephalitis virus
aaaacgcagaaaucaa

SEQ ID NO: 1197569 - RNA, 19 nt, Eastern equine encephalitis virus
agugcauaaugcugcuccu

SEQ ID NO: 1197570 - RNA, 15 nt, Eastern equine encephalitis virus
gucacuaaucaucac

SEQ ID NO: 1197571 - RNA, 14 nt, Eastern equine encephalitis virus
agcuggagaucugc

SEQ ID NO: 1197572 - RNA, 18 nt, Eastern equine encephalitis virus
caccuuucacccaggcgc

SEQ ID NO: 1197573 - RNA, 22 nt, Eastern equine encephalitis virus
uacacacuuuauaaucaggcau

SEQ ID NO: 1197574 - RNA, 18 nt, Eastern equine encephalitis virus
cuccaguacaccagugac

SEQ ID NO: 1197575 - RNA, 15 nt, Eastern equine encephalitis virus
gugcauaaugcugcu

SEQ ID NO: 1197576 - RNA, 19 nt, Eastern equine encephalitis virus
gaugugccacaaugcauga

SEQ ID NO: 1197577 - RNA, 20 nt, Eastern equine encephalitis virus
ccaggggacacgguuacagu

SEQ ID NO: 1197578 - RNA, 14 nt, Eastern equine encephalitis virus
cauccacagugcca

SEQ ID NO: 1197579 - RNA, 19 nt, Eastern equine encephalitis virus
uguaaugcuaggagaacca

SEQ ID NO: 1197580 - RNA, 20 nt, Eastern equine encephalitis virus
aaaaagggguuacagucaaa

SEQ ID NO: 1197581 - RNA, 15 nt, Eastern equine encephalitis virus
caguaaagcaggaaa

SEQ ID NO: 1197582 - RNA, 15 nt, Eastern equine encephalitis virus
caccgcacccugauu

SEQ ID NO: 1197583 - RNA, 13 nt, Eastern equine encephalitis virus
agcgaccaacaac

SEQ ID NO: 1197584 - RNA, 12 nt, Eastern equine encephalitis virus
gauacagcuggu

SEQ ID NO: 1197585 - RNA, 15 nt, Eastern equine encephalitis virus
gcuauuacauccugg

SEQ ID NO: 1197586 - RNA, 17 nt, Eastern equine encephalitis virus
gaaccaaaaagggguua

SEQ ID NO: 1197587 - RNA, 16 nt, Eastern equine encephalitis virus
acaauuacacuacagg

SEQ ID NO: 1197588 - RNA, 13 nt, Eastern equine encephalitis virus
cacccugcaugcc

SEQ ID NO: 1197589 - RNA, 13 nt, Eastern equine encephalitis virus
cacaaugcaugaa

SEQ ID NO: 1197590 - RNA, 23 nt, Eastern equine encephalitis virus
agacgcuuaucccacuugcagcg

SEQ ID NO: 1197591 - RNA, 14 nt, Eastern equine encephalitis virus
uaugaucagcugcu

SEQ ID NO: 1197592 - RNA, 21 nt, Eastern equine encephalitis virus
cagcuucucaucagcagaagu

SEQ ID NO: 1197593 - RNA, 19 nt, Eastern equine encephalitis virus
cauaacacuauaggcagug

SEQ ID NO: 1197594 - RNA, 11 nt, Eastern equine encephalitis virus
cucugcaugau

SEQ ID NO: 1197595 - RNA, 19 nt, Eastern equine encephalitis virus
gccuauggcgccgauuaac

SEQ ID NO: 1197596 - RNA, 17 nt, Eastern equine encephalitis virus
gucaauaucaugaucgc

SEQ ID NO: 1197597 - RNA, 18 nt, Eastern equine encephalitis virus
gcugaagaaggccagcau

SEQ ID NO: 1197598 - RNA, 22 nt, Eastern equine encephalitis virus
ugcaggucugcacuagugcagu

SEQ ID NO: 1197599 - RNA, 12 nt, Eastern equine encephalitis virus
ccuuucacccag

SEQ ID NO: 1197600 - RNA, 12 nt, Eastern equine encephalitis virus
caccucagcccc

SEQ ID NO: 1197601 - RNA, 18 nt, Eastern equine encephalitis virus
cagugcauaaggcugcua

SEQ ID NO: 1197602 - RNA, 15 nt, Eastern equine encephalitis virus
acuaagggcagugca

SEQ ID NO: 1197603 - RNA, 16 nt, Eastern equine encephalitis virus
ucaaagauacaccaga

SEQ ID NO: 1197604 - RNA, 12 nt, Eastern equine encephalitis virus
uuacgacagccg

SEQ ID NO: 1197605 - RNA, 14 nt, Eastern equine encephalitis virus
aaccacauaacacu

SEQ ID NO: 1197606 - RNA, 12 nt, Eastern equine encephalitis virus
caaucuuugcau

SEQ ID NO: 1197607 - RNA, 19 nt, Eastern equine encephalitis virus
gacgaguguucaaaccgcu

SEQ ID NO: 1197608 - RNA, 21 nt, Eastern equine encephalitis virus
ggcaguguauaaggcugucuu

SEQ ID NO: 1197609 - RNA, 20 nt, Eastern equine encephalitis virus
aggaaaacuucaugugcccu

SEQ ID NO: 1197610 - RNA, 23 nt, Eastern equine encephalitis virus
cagucaaagauacaccagagggg

SEQ ID NO: 1197611 - RNA, 16 nt, Eastern equine encephalitis virus
uaccgucacccaccug

SEQ ID NO: 1197612 - RNA, 14 nt, Eastern equine encephalitis virus
auaagguagaauuc

SEQ ID NO: 1197613 - RNA, 14 nt, Eastern equine encephalitis virus
caccagagggguca

SEQ ID NO: 1197614 - RNA, 22 nt, Eastern equine encephalitis virus
acaggcagcgcauaaugcuguc

SEQ ID NO: 1197615 - RNA, 15 nt, Eastern equine encephalitis virus
ccguauauugcugau

SEQ ID NO: 1197616 - RNA, 21 nt, Eastern equine encephalitis virus
gcucaaauugaggaccugaga

SEQ ID NO: 1197617 - RNA, 22 nt, Eastern equine encephalitis virus
ucuugucaaccacauaacacua

SEQ ID NO: 1197618 - RNA, 14 nt, Eastern equine encephalitis virus
ugcaggggauaggc

SEQ ID NO: 1197619 - RNA, 14 nt, Eastern equine encephalitis virus
cuaucaucaugguc

SEQ ID NO: 1197620 - RNA, 14 nt, Eastern equine encephalitis virus
acccugauuuuaca

SEQ ID NO: 1197621 - RNA, 21 nt, Eastern equine encephalitis virus
cuauagaagaagucagagggg

SEQ ID NO: 1197622 - RNA, 19 nt, Eastern equine encephalitis virus
cuuacagccauugcaugag

SEQ ID NO: 1197623 - RNA, 18 nt, Eastern equine encephalitis virus
gcacgaagugguagucua

SEQ ID NO: 1197624 - RNA, 21 nt, Eastern equine encephalitis virus
gaauuggcaucacugaagagc

SEQ ID NO: 1197625 - RNA, 18 nt, Eastern equine encephalitis virus
cacagugccaaggugaaa

SEQ ID NO: 1197626 - RNA, 17 nt, Eastern equine encephalitis virus
cacuaagggcagugcau

SEQ ID NO: 1197627 - RNA, 21 nt, Eastern equine encephalitis virus
uauaccuggggaaaccaucca

SEQ ID NO: 1197628 - RNA, 16 nt, Eastern equine encephalitis virus
gccacugucaugugcg

SEQ ID NO: 1197629 - RNA, 15 nt, Eastern equine encephalitis virus
ccaaagaagcacagu

SEQ ID NO: 1197630 - RNA, 20 nt, Eastern equine encephalitis virus
cagcugguuaauaccaggau

SEQ ID NO: 1197631 - RNA, 19 nt, Eastern equine encephalitis virus
gacuauacaaccaccugca

SEQ ID NO: 1197632 - RNA, 20 nt, Eastern equine encephalitis virus
uaaugcuaggagaaccagga

SEQ ID NO: 1197633 - RNA, 14 nt, Eastern equine encephalitis virus
cagguguugcaguu

SEQ ID NO: 1197634 - RNA, 16 nt, Eastern equine encephalitis virus
acugcaagcaacagcu

SEQ ID NO: 1197635 - RNA, 14 nt, Eastern equine encephalitis virus
gaacggacagguga

SEQ ID NO: 1197636 - RNA, 14 nt, Eastern equine encephalitis virus
ggacacgguuacag

SEQ ID NO: 1197637 - RNA, 22 nt, Eastern equine encephalitis virus
cgccaagccuaagccugcgcag

SEQ ID NO: 1197638 - RNA, 21 nt, Eastern equine encephalitis virus
ugcacggaugucaaacaaugc

SEQ ID NO: 1197639 - RNA, 14 nt, Eastern equine encephalitis virus
agcggaucauuuac

SEQ ID NO: 1197640 - RNA, 18 nt, Eastern equine encephalitis virus
cagucucagaccuggaau

SEQ ID NO: 1197641 - RNA, 20 nt, Eastern equine encephalitis virus
agaauuggcaucacugaaga

SEQ ID NO: 1197642 - RNA, 20 nt, Eastern equine encephalitis virus
aaguaauuuaauacacacuu

SEQ ID NO: 1197643 - RNA, 14 nt, Eastern equine encephalitis virus
accagagccucuag

SEQ ID NO: 1197644 - RNA, 24 nt, Eastern equine encephalitis virus
uuaucaauacuguugucaauauca

SEQ ID NO: 1197645 - RNA, 15 nt, Eastern equine encephalitis virus
aagcuguugcagaag

SEQ ID NO: 1197646 - RNA, 16 nt, Eastern equine encephalitis virus
cuaucauugcagaaca

SEQ ID NO: 1197647 - RNA, 15 nt, Eastern equine encephalitis virus
ccaccguagccagcu

SEQ ID NO: 1197648 - RNA, 11 nt, Eastern equine encephalitis virus
cuugccacugu

SEQ ID NO: 1197649 - RNA, 17 nt, Eastern equine encephalitis virus
cuauacaaccaccugca

SEQ ID NO: 1197650 - RNA, 18 nt, Eastern equine encephalitis virus
gagggaacuaccagcagc

SEQ ID NO: 1197651 - RNA, 14 nt, Eastern equine encephalitis virus
gaggggucagagcc

SEQ ID NO: 1197652 - RNA, 22 nt, Eastern equine encephalitis virus
uugcagcucaaauugaggaccu

SEQ ID NO: 1197653 - RNA, 24 nt, Eastern equine encephalitis virus
cuccaguacaccagugacaagccu

SEQ ID NO: 1197654 - RNA, 19 nt, Eastern equine encephalitis virus
agucauccgcauccagaca

SEQ ID NO: 1197655 - RNA, 17 nt, Eastern equine encephalitis virus
agcuguacaguaugaga

SEQ ID NO: 1197656 - RNA, 20 nt, Eastern equine encephalitis virus
gucucguaaaguagagaaca

SEQ ID NO: 1197657 - RNA, 17 nt, Eastern equine encephalitis virus
acccacaagcgugcaga

SEQ ID NO: 1197658 - RNA, 16 nt, Eastern equine encephalitis virus
ugaugccgaacaaggu

SEQ ID NO: 1197659 - RNA, 21 nt, Eastern equine encephalitis virus
ugccaucaccgauucaaaaca

SEQ ID NO: 1197660 - RNA, 13 nt, Eastern equine encephalitis virus
caccaccugccaa

SEQ ID NO: 1197661 - RNA, 17 nt, Eastern equine encephalitis virus
gcuacaacgaccccagg

SEQ ID NO: 1197662 - RNA, 23 nt, Eastern equine encephalitis virus
cagcagcgacuauacaaccaccu

SEQ ID NO: 1197663 - RNA, 12 nt, Eastern equine encephalitis virus
ucauuucaccca

SEQ ID NO: 1197664 - RNA, 17 nt, Eastern equine encephalitis virus
gugcuagagacagacau

SEQ ID NO: 1197665 - RNA, 13 nt, Eastern equine encephalitis virus
gcauaaggcugcu

SEQ ID NO: 1197666 - RNA, 18 nt, Eastern equine encephalitis virus
auaacacuauaggcagug

SEQ ID NO: 1197667 - RNA, 17 nt, Eastern equine encephalitis virus
aguagagaacaugaagg

SEQ ID NO: 1197668 - RNA, 23 nt, Eastern equine encephalitis virus
uagauacugccaccuuuugccca

SEQ ID NO: 1197669 - RNA, 21 nt, Eastern equine encephalitis virus
cgaucucgagcgugagaagcu

SEQ ID NO: 1197670 - RNA, 13 nt, Eastern equine encephalitis virus
aagcgaccaccac

SEQ ID NO: 1197671 - RNA, 18 nt, Eastern equine encephalitis virus
uacauuccacuucuccac

SEQ ID NO: 1197672 - RNA, 20 nt, Eastern equine encephalitis virus
cgcggugcuagagacagaca

SEQ ID NO: 1197673 - RNA, 12 nt, Eastern equine encephalitis virus
gcaugccaugcu

SEQ ID NO: 1197674 - RNA, 24 nt, Eastern equine encephalitis virus
cauaaugcugucuuuuauaucaau

SEQ ID NO: 1197675 - RNA, 17 nt, Eastern equine encephalitis virus
gccuugggcgccgcagc

SEQ ID NO: 1197676 - RNA, 14 nt, Eastern equine encephalitis virus
ugcaugccaugcug

SEQ ID NO: 1197677 - RNA, 15 nt, Eastern equine encephalitis virus
uauacaaccaccugc

SEQ ID NO: 1197678 - RNA, 14 nt, Eastern equine encephalitis virus
acauacugaagaaa

SEQ ID NO: 1197679 - RNA, 20 nt, Eastern equine encephalitis virus
ggaguugaauuaccaugcaa

SEQ ID NO: 1197680 - RNA, 23 nt, Eastern equine encephalitis virus
ccaagauguacuagcagcagcca

SEQ ID NO: 1197681 - RNA, 12 nt, Eastern equine encephalitis virus
agcauauaugac

SEQ ID NO: 1197682 - RNA, 23 nt, Eastern equine encephalitis virus
caggcucuuuuggagaccugcaa

SEQ ID NO: 1197683 - RNA, 18 nt, Eastern equine encephalitis virus
ucacgacgggccuaaccg

SEQ ID NO: 1197684 - RNA, 22 nt, Eastern equine encephalitis virus
gacggcucuaucaguggugaca

SEQ ID NO: 1197685 - RNA, 13 nt, Eastern equine encephalitis virus
cacagugccaagg

SEQ ID NO: 1197686 - RNA, 18 nt, Eastern equine encephalitis virus
ggaguacaucaccugcaa

SEQ ID NO: 1197687 - RNA, 12 nt, Eastern equine encephalitis virus
auuacauccugg

SEQ ID NO: 1197688 - RNA, 13 nt, Eastern equine encephalitis virus
caccaccaccugc

SEQ ID NO: 1197689 - RNA, 17 nt, Eastern equine encephalitis virus
aggcagcgcauaaugcu

SEQ ID NO: 1197690 - RNA, 18 nt, Eastern equine encephalitis virus
caacgaccccaggcuggu

SEQ ID NO: 1197691 - RNA, 21 nt, Eastern equine encephalitis virus
ccaguguuggauucagcugcc

SEQ ID NO: 1197692 - RNA, 20 nt, Eastern equine encephalitis virus
uaaacacauaagaggucacc

SEQ ID NO: 1197693 - RNA, 17 nt, Eastern equine encephalitis virus
agugcauaaugcugcuc

SEQ ID NO: 1197694 - RNA, 15 nt, Eastern equine encephalitis virus
guucggucugaagac

SEQ ID NO: 1197695 - RNA, 14 nt, Eastern equine encephalitis virus
ggccaccacuugca

SEQ ID NO: 1197696 - RNA, 23 nt, Eastern equine encephalitis virus
cgccacgugguugaacauggaag

SEQ ID NO: 1197697 - RNA, 14 nt, Eastern equine encephalitis virus
cuuaccaacaggca

SEQ ID NO: 1197698 - RNA, 21 nt, Eastern equine encephalitis virus
auuucacccaguauaagcugg

SEQ ID NO: 1197699 - RNA, 17 nt, Eastern equine encephalitis virus
aacauggaguugaauua

SEQ ID NO: 1197700 - RNA, 14 nt, Eastern equine encephalitis virus
aggagaaccaggag

SEQ ID NO: 1197701 - RNA, 22 nt, Eastern equine encephalitis virus
ccaaaaagggguuacagucaaa

SEQ ID NO: 1197702 - RNA, 14 nt, Eastern equine encephalitis virus
cggugcgacagccc

SEQ ID NO: 1197703 - RNA, 21 nt, Eastern equine encephalitis virus
cuucaacguagaguguuucaa

SEQ ID NO: 1197704 - RNA, 13 nt, Eastern equine encephalitis virus
gaagagcugguga

SEQ ID NO: 1197705 - RNA, 16 nt, Eastern equine encephalitis virus
gacaagggcaccugca

SEQ ID NO: 1197706 - RNA, 20 nt, Eastern equine encephalitis virus
aucgucgauuauccagcaca

SEQ ID NO: 1197707 - RNA, 20 nt, Eastern equine encephalitis virus
ggacaaaacauacugaagaa

SEQ ID NO: 1197708 - RNA, 14 nt, Eastern equine encephalitis virus
ucagcuauguucgg

SEQ ID NO: 1197709 - RNA, 22 nt, Eastern equine encephalitis virus
aggcucuuuuggagaccugcaa

SEQ ID NO: 1197710 - RNA, 15 nt, Eastern equine encephalitis virus
uuccaucgcuaaccu

SEQ ID NO: 1197711 - RNA, 22 nt, Eastern equine encephalitis virus
caauaaagaucgacaaccugca

SEQ ID NO: 1197712 - RNA, 16 nt, Eastern equine encephalitis virus
cuacaacgaccccagg

SEQ ID NO: 1197713 - RNA, 15 nt, Eastern equine encephalitis virus
gccacgugguugaac

SEQ ID NO: 1197714 - RNA, 23 nt, Eastern equine encephalitis virus
guuacaucugacgcacugauggc

SEQ ID NO: 1197715 - RNA, 22 nt, Eastern equine encephalitis virus
cuccuaaguaauuuaauacaca

SEQ ID NO: 1197716 - RNA, 16 nt, Eastern equine encephalitis virus
ccaagccuaagccugc

SEQ ID NO: 1197717 - RNA, 19 nt, Eastern equine encephalitis virus
caaagauacaccagagggg

SEQ ID NO: 1197718 - RNA, 13 nt, Eastern equine encephalitis virus
cggaagagugcuc

SEQ ID NO: 1197719 - RNA, 12 nt, Eastern equine encephalitis virus
ccggcaaagcag

SEQ ID NO: 1197720 - RNA, 22 nt, Eastern equine encephalitis virus
gcaggagucauccgcauccaga

SEQ ID NO: 1197721 - RNA, 22 nt, Eastern equine encephalitis virus
ggccgccaucaagcugaagaag

SEQ ID NO: 1197722 - RNA, 12 nt, Eastern equine encephalitis virus
gugcguccuggc

SEQ ID NO: 1197723 - RNA, 13 nt, Eastern equine encephalitis virus
aacauacugaaga

SEQ ID NO: 1197724 - RNA, 18 nt, Eastern equine encephalitis virus
cagugguugcccuaguuc

SEQ ID NO: 1197725 - RNA, 12 nt, Eastern equine encephalitis virus
caagcgugcaga

SEQ ID NO: 1197726 - RNA, 13 nt, Eastern equine encephalitis virus
acaaccugcaugu

SEQ ID NO: 1197727 - RNA, 13 nt, Eastern equine encephalitis virus
caacaacugucaa

SEQ ID NO: 1197728 - RNA, 23 nt, Eastern equine encephalitis virus
gcaagaagccugcgccaagccua

SEQ ID NO: 1197729 - RNA, 22 nt, Eastern equine encephalitis virus
cauggaguugaauuaccaugca

SEQ ID NO: 1197730 - RNA, 16 nt, Eastern equine encephalitis virus
gccacaaugcaugaaa

SEQ ID NO: 1197731 - RNA, 20 nt, Eastern equine encephalitis virus
aggagucauccgcauccaga

SEQ ID NO: 1197732 - RNA, 16 nt, Eastern equine encephalitis virus
cuggagaucugcagau

SEQ ID NO: 1197733 - RNA, 15 nt, Eastern equine encephalitis virus
uggaaagggugacag

SEQ ID NO: 1197734 - RNA, 15 nt, Eastern equine encephalitis virus
gcaccuguguggcua

SEQ ID NO: 1197735 - RNA, 12 nt, Eastern equine encephalitis virus
uaaaccuaaacc

SEQ ID NO: 1197736 - RNA, 17 nt, Eastern equine encephalitis virus
gcaaaacgcagaaauca

SEQ ID NO: 1197737 - RNA, 12 nt, Eastern equine encephalitis virus
cuggcucaaugc

SEQ ID NO: 1197738 - RNA, 16 nt, Eastern equine encephalitis virus
cacguagaaggcagaa

SEQ ID NO: 1197739 - RNA, 20 nt, Eastern equine encephalitis virus
cauuccacuucuccacugca

SEQ ID NO: 1197740 - RNA, 23 nt, Eastern equine encephalitis virus
cccauguauucaaguacugcaag

SEQ ID NO: 1197741 - RNA, 16 nt, Eastern equine encephalitis virus
gauauccgccacugcg

SEQ ID NO: 1197742 - RNA, 15 nt, Eastern equine encephalitis virus
ugacgaccaggucac

SEQ ID NO: 1197743 - RNA, 14 nt, Eastern equine encephalitis virus
ccacaagcgugcag

SEQ ID NO: 1197744 - RNA, 12 nt, Eastern equine encephalitis virus
cgacgacaacau

SEQ ID NO: 1197745 - RNA, 21 nt, Eastern equine encephalitis virus
caccugccaagaaacaaaaac

SEQ ID NO: 1197746 - RNA, 14 nt, Eastern equine encephalitis virus
gggacaagggcacc

SEQ ID NO: 1197747 - RNA, 20 nt, Eastern equine encephalitis virus
caagucccaauacuccuggc

SEQ ID NO: 1197748 - RNA, 19 nt, Eastern equine encephalitis virus
gccacaaugcaugaaauca

SEQ ID NO: 1197749 - RNA, 23 nt, Eastern equine encephalitis virus
cugcuguuuagauacugccaccu

SEQ ID NO: 1197750 - RNA, 20 nt, Eastern equine encephalitis virus
ggcuaguugccgaccacucu

SEQ ID NO: 1197751 - RNA, 12 nt, Eastern equine encephalitis virus
gggcaccugcaa

SEQ ID NO: 1197752 - RNA, 22 nt, Eastern equine encephalitis virus
uggaacagaauuacgacagccg

SEQ ID NO: 1197753 - RNA, 14 nt, Eastern equine encephalitis virus
guagaaggcagaau

SEQ ID NO: 1197754 - RNA, 16 nt, Eastern equine encephalitis virus
ccugcaugugcgcacc

SEQ ID NO: 1197755 - RNA, 12 nt, Eastern equine encephalitis virus
cuaaacacuaaa

SEQ ID NO: 1197756 - RNA, 19 nt, Eastern equine encephalitis virus
cugucaugugcguccuggc

SEQ ID NO: 1197757 - RNA, 22 nt, Eastern equine encephalitis virus
cugcauuaagccgacgagggca

SEQ ID NO: 1197758 - RNA, 12 nt, Eastern equine encephalitis virus
uucaaguacugc

SEQ ID NO: 1197759 - RNA, 18 nt, Eastern equine encephalitis virus
gccaccacuugcagcuca

SEQ ID NO: 1197760 - RNA, 22 nt, Eastern equine encephalitis virus
gcgaccaacaacugucaauuuc

SEQ ID NO: 1197761 - RNA, 18 nt, Eastern equine encephalitis virus
guucgauugcccuggagc

SEQ ID NO: 1197762 - RNA, 18 nt, Eastern equine encephalitis virus
cgcauccagacaucagcu

SEQ ID NO: 1197763 - RNA, 22 nt, Eastern equine encephalitis virus
cucuccuuagcauccacagugc

SEQ ID NO: 1197764 - RNA, 13 nt, Eastern equine encephalitis virus
auuguaugcaugc

SEQ ID NO: 1197765 - RNA, 23 nt, Eastern equine encephalitis virus
ccacauaacacuauaggcagugu

SEQ ID NO: 1197766 - RNA, 20 nt, Eastern equine encephalitis virus
accauguuggaacagaauua

SEQ ID NO: 1197767 - RNA, 15 nt, Eastern equine encephalitis virus
aacgaugaguacugg

SEQ ID NO: 1197768 - RNA, 14 nt, Eastern equine encephalitis virus
uccaguagugaaau

SEQ ID NO: 1197769 - RNA, 20 nt, Eastern equine encephalitis virus
uggagcuguacaguaugaga

SEQ ID NO: 1197770 - RNA, 15 nt, Eastern equine encephalitis virus
uccaucgcuaaccug

SEQ ID NO: 1197771 - RNA, 13 nt, Eastern equine encephalitis virus
ugaaaacacccag

SEQ ID NO: 1197772 - RNA, 18 nt, Eastern equine encephalitis virus
gccgagccuaugaucagc

SEQ ID NO: 1197773 - RNA, 14 nt, Eastern equine encephalitis virus
caagggcaccugca

SEQ ID NO: 1197774 - RNA, 22 nt, Eastern equine encephalitis virus
gcaacuuuaaacacauaagagg

SEQ ID NO: 1197775 - RNA, 16 nt, Eastern equine encephalitis virus
cgcaaucuuugcauaa

SEQ ID NO: 1197776 - RNA, 16 nt, Eastern equine encephalitis virus
ggauggccgcacgaag

SEQ ID NO: 1197777 - RNA, 17 nt, Eastern equine encephalitis virus
gccgacccccugaagag

SEQ ID NO: 1197778 - RNA, 21 nt, Eastern equine encephalitis virus
caugaaaucagauacccucca

SEQ ID NO: 1197779 - RNA, 19 nt, Eastern equine encephalitis virus
ucagcauuuaucguucugg

SEQ ID NO: 1197780 - RNA, 20 nt, Eastern equine encephalitis virus
ccaguguuggauucagcugc

SEQ ID NO: 1197781 - RNA, 14 nt, Eastern equine encephalitis virus
ggaguauaccuggg

SEQ ID NO: 1197782 - RNA, 15 nt, Eastern equine encephalitis virus
cgccgaugcagugca

SEQ ID NO: 1197783 - RNA, 23 nt, Eastern equine encephalitis virus
cccgccaaacgcaagaagccugc

SEQ ID NO: 1197784 - RNA, 17 nt, Eastern equine encephalitis virus
gaccaccaccaccugcc

SEQ ID NO: 1197785 - RNA, 12 nt, Eastern equine encephalitis virus
aaagcagcugcc

SEQ ID NO: 1197786 - RNA, 16 nt, Eastern equine encephalitis virus
agauacgaucagcagu

SEQ ID NO: 1197787 - RNA, 15 nt, Eastern equine encephalitis virus
caucagguguugcag

SEQ ID NO: 1197788 - RNA, 15 nt, Eastern equine encephalitis virus
ggcaucacugaagag

SEQ ID NO: 1197789 - RNA, 21 nt, Eastern equine encephalitis virus
acacgaaacacucaccauguu

SEQ ID NO: 1197790 - RNA, 21 nt, Eastern equine encephalitis virus
cgugagaagcuguugcagaag

SEQ ID NO: 1197791 - RNA, 14 nt, Eastern equine encephalitis virus
gaaagggugacagc

SEQ ID NO: 1197792 - RNA, 14 nt, Eastern equine encephalitis virus
aacacacagcagug

SEQ ID NO: 1197793 - RNA, 21 nt, Eastern equine encephalitis virus
cgagccuaugaucagcugcuc

SEQ ID NO: 1197794 - RNA, 24 nt, Eastern equine encephalitis virus
uugacaugguggacggagcauccu

SEQ ID NO: 1197795 - RNA, 23 nt, Eastern equine encephalitis virus
uaaagggacccaaagcagcugcc

SEQ ID NO: 1197796 - RNA, 23 nt, Eastern equine encephalitis virus
aaacuguccaauucauucuccau

SEQ ID NO: 1197797 - RNA, 14 nt, Eastern equine encephalitis virus
cugacuuugaaaca

SEQ ID NO: 1197798 - RNA, 17 nt, Eastern equine encephalitis virus
gccaagccuaagccugc

SEQ ID NO: 1197799 - RNA, 21 nt, Eastern equine encephalitis virus
gcagugguugcccuaguucug

SEQ ID NO: 1197800 - RNA, 16 nt, Eastern equine encephalitis virus
caacucuggaagacug

SEQ ID NO: 1197801 - RNA, 16 nt, Eastern equine encephalitis virus
ucaaccacccugcaug

SEQ ID NO: 1197802 - RNA, 20 nt, Eastern equine encephalitis virus
cagaaaauugugcaguggga

SEQ ID NO: 1197803 - RNA, 15 nt, Eastern equine encephalitis virus
caacuaaccuggagu

SEQ ID NO: 1197804 - RNA, 23 nt, Eastern equine encephalitis virus
uuccaguguuggauucagcugcc

SEQ ID NO: 1197805 - RNA, 20 nt, Eastern equine encephalitis virus
gugcacuuaccaacaggcac

SEQ ID NO: 1197806 - RNA, 16 nt, Eastern equine encephalitis virus
cagugcauaaggcugc

SEQ ID NO: 1197807 - RNA, 22 nt, Eastern equine encephalitis virus
auaacuggcaccauggagcugu

SEQ ID NO: 1197808 - RNA, 15 nt, Eastern equine encephalitis virus
accuaguacugcaag

SEQ ID NO: 1197809 - RNA, 16 nt, Eastern equine encephalitis virus
acgcuuaucccacuug

SEQ ID NO: 1197810 - RNA, 14 nt, Eastern equine encephalitis virus
gguggacggagcau

SEQ ID NO: 1197811 - RNA, 17 nt, Eastern equine encephalitis virus
gccuccuauaaacacua

SEQ ID NO: 1197812 - RNA, 18 nt, Eastern equine encephalitis virus
ugcacccguucaccuaca

SEQ ID NO: 1197813 - RNA, 18 nt, Eastern equine encephalitis virus
cuugucaaccacauaaca

SEQ ID NO: 1197814 - RNA, 18 nt, Eastern equine encephalitis virus
cauaucucucugcagaac

SEQ ID NO: 1197815 - RNA, 13 nt, Eastern equine encephalitis virus
cgacaaccugcau

SEQ ID NO: 1197816 - RNA, 20 nt, Eastern equine encephalitis virus
uaccuccaaaccccauccug

SEQ ID NO: 1197817 - RNA, 16 nt, Eastern equine encephalitis virus
acccgaccuugcugac

SEQ ID NO: 1197818 - RNA, 15 nt, Eastern equine encephalitis virus
uaauuuuucuuuuau

SEQ ID NO: 1197819 - RNA, 22 nt, Eastern equine encephalitis virus
caagugcugaauuaccugugga

SEQ ID NO: 1197820 - RNA, 18 nt, Eastern equine encephalitis virus
gccaucaagcugaagaag

SEQ ID NO: 1197821 - RNA, 16 nt, Eastern equine encephalitis virus
ggcaaagcaggcucuu

SEQ ID NO: 1197822 - RNA, 17 nt, Eastern equine encephalitis virus
aaacacauaagagguca

SEQ ID NO: 1197823 - RNA, 17 nt, Eastern equine encephalitis virus
guagagcgcucggaaga

SEQ ID NO: 1197824 - RNA, 21 nt, Eastern equine encephalitis virus
gccagcuauaacauaacggau

SEQ ID NO: 1197825 - RNA, 22 nt, Eastern equine encephalitis virus
gaucaaccacccugcaugccau

SEQ ID NO: 1197826 - RNA, 23 nt, Eastern equine encephalitis virus
gcagcucaaauugaggaccugag

SEQ ID NO: 1197827 - RNA, 17 nt, Eastern equine encephalitis virus
cgagacgggacaagggc

SEQ ID NO: 1197828 - RNA, 18 nt, Eastern equine encephalitis virus
gcaaccguuacacccaca

SEQ ID NO: 1197829 - RNA, 16 nt, Eastern equine encephalitis virus
guacuagcagcagcca

SEQ ID NO: 1197830 - RNA, 13 nt, Eastern equine encephalitis virus
caggccagugggu

SEQ ID NO: 1197831 - RNA, 19 nt, Eastern equine encephalitis virus
ggaccgcccgccaaacgca

SEQ ID NO: 1197832 - RNA, 20 nt, Eastern equine encephalitis virus
cgauugcccuggagccgcuc

SEQ ID NO: 1197833 - RNA, 20 nt, Eastern equine encephalitis virus
agcuauguucggucugaaga

SEQ ID NO: 1197834 - RNA, 18 nt, Eastern equine encephalitis virus
aaacguuuccaaucaugu

SEQ ID NO: 1197835 - RNA, 16 nt, Eastern equine encephalitis virus
acgaaggauccaggac

SEQ ID NO: 1197836 - RNA, 20 nt, Eastern equine encephalitis virus
cauccuggcucaaugcccac

SEQ ID NO: 1197837 - RNA, 19 nt, Eastern equine encephalitis virus
acccguucaccuacagaua

SEQ ID NO: 1197838 - RNA, 17 nt, Eastern equine encephalitis virus
cacccaccugaacaugg

SEQ ID NO: 1197839 - RNA, 17 nt, Eastern equine encephalitis virus
gacggcucuaucagugg

SEQ ID NO: 1197840 - RNA, 15 nt, Eastern equine encephalitis virus
gagaaccaggagaga

SEQ ID NO: 1197841 - RNA, 18 nt, Eastern equine encephalitis virus
gaugccuaucuugacaug

SEQ ID NO: 1197842 - RNA, 17 nt, Eastern equine encephalitis virus
uguacuagcagcagcca

SEQ ID NO: 1197843 - RNA, 16 nt, Eastern equine encephalitis virus
agcgugcagaccaagg

SEQ ID NO: 1197844 - RNA, 19 nt, Eastern equine encephalitis virus
gacacucauuucacccagu

SEQ ID NO: 1197845 - RNA, 23 nt, Eastern equine encephalitis virus
cauggucgcuugccacugucaug

SEQ ID NO: 1197846 - RNA, 21 nt, Eastern equine encephalitis virus
gcagugaugccgaacaaggug

SEQ ID NO: 1197847 - RNA, 20 nt, Eastern equine encephalitis virus
ucacccuaguucgauguacu

SEQ ID NO: 1197848 - RNA, 16 nt, Eastern equine encephalitis virus
cugaagaaagaccaaa

SEQ ID NO: 1197849 - RNA, 16 nt, Eastern equine encephalitis virus
augcuguuaugaaaag

SEQ ID NO: 1197850 - RNA, 21 nt, Eastern equine encephalitis virus
ccucuaguugagcacaaacac

SEQ ID NO: 1197851 - RNA, 17 nt, Eastern equine encephalitis virus
gugauacaggcagcuga

SEQ ID NO: 1197852 - RNA, 22 nt, Eastern equine encephalitis virus
gccgagccuaugaucagcugcu

SEQ ID NO: 1197853 - RNA, 19 nt, Eastern equine encephalitis virus
cagaggggucagagccaug

SEQ ID NO: 1197854 - RNA, 23 nt, Eastern equine encephalitis virus
uagguccacugucaucugcgugg

SEQ ID NO: 1197855 - RNA, 21 nt, Eastern equine encephalitis virus
uauaccgccuccuauaaacac

SEQ ID NO: 1197856 - RNA, 14 nt, Eastern equine encephalitis virus
gacacgguuacagu

SEQ ID NO: 1197857 - RNA, 13 nt, Eastern equine encephalitis virus
uauuacuacaaca

SEQ ID NO: 1197858 - RNA, 12 nt, Eastern equine encephalitis virus
uccacacuuugu

SEQ ID NO: 1197859 - RNA, 19 nt, Eastern equine encephalitis virus
guauucaaguacugcaagc

SEQ ID NO: 1197860 - RNA, 20 nt, Eastern equine encephalitis virus
gaaaacgcauaacuuacagc

SEQ ID NO: 1197861 - RNA, 17 nt, Eastern equine encephalitis virus
gguucaugggcaugaag

SEQ ID NO: 1197862 - RNA, 22 nt, Eastern equine encephalitis virus
guuaaggccaagugcaucgcca

SEQ ID NO: 1197863 - RNA, 20 nt, Eastern equine encephalitis virus
gagaaauaccgucacccacc

SEQ ID NO: 1197864 - RNA, 22 nt, Eastern equine encephalitis virus
acaggcgcagagcucugcauga

SEQ ID NO: 1197865 - RNA, 19 nt, Eastern equine encephalitis virus
acccuccaguacaccagug

SEQ ID NO: 1197866 - RNA, 12 nt, Eastern equine encephalitis virus
ccaccaccugcc

SEQ ID NO: 1197867 - RNA, 22 nt, Eastern equine encephalitis virus
aaucacgcacaucaaccagcaa

SEQ ID NO: 1197868 - RNA, 15 nt, Eastern equine encephalitis virus
gccgaugcagugcau

SEQ ID NO: 1197869 - RNA, 24 nt, Eastern equine encephalitis virus
cacggcuauuacauccuggcucaa

SEQ ID NO: 1197870 - RNA, 21 nt, Eastern equine encephalitis virus
cagacgcuuaucccacuugca

SEQ ID NO: 1197871 - RNA, 19 nt, Eastern equine encephalitis virus
ggcagaugacaccuugcaa

SEQ ID NO: 1197872 - RNA, 23 nt, Eastern equine encephalitis virus
cuuaccugauugacaacaaaaaa

SEQ ID NO: 1197873 - RNA, 21 nt, Eastern equine encephalitis virus
acuuacagccauugcaugaga

SEQ ID NO: 1197874 - RNA, 21 nt, Eastern equine encephalitis virus
aggggaugcgcacgcaggagu

SEQ ID NO: 1197875 - RNA, 16 nt, Eastern equine encephalitis virus
aggugauacaggcagc

SEQ ID NO: 1197876 - RNA, 22 nt, Eastern equine encephalitis virus
cacuaaauucacccuaguucga

SEQ ID NO: 1197877 - RNA, 16 nt, Eastern equine encephalitis virus
cugcaaguauaagaca

SEQ ID NO: 1197878 - RNA, 19 nt, Eastern equine encephalitis virus
cuggaagacugccucgagg

SEQ ID NO: 1197879 - RNA, 20 nt, Eastern equine encephalitis virus
agcugguuaauaccaggaua

SEQ ID NO: 1197880 - RNA, 20 nt, Eastern equine encephalitis virus
uggaguugaauuaccaugca

SEQ ID NO: 1197881 - RNA, 17 nt, Eastern equine encephalitis virus
cacugaaaacacccaga

SEQ ID NO: 1197882 - RNA, 21 nt, Eastern equine encephalitis virus
guuuccaugugaucaaccacc

SEQ ID NO: 1197883 - RNA, 16 nt, Eastern equine encephalitis virus
ccacacuuuguuugac

SEQ ID NO: 1197884 - RNA, 20 nt, Eastern equine encephalitis virus
cucuggaagacugccucgag

SEQ ID NO: 1197885 - RNA, 21 nt, Eastern equine encephalitis virus
cacaggcacuguucaggcaau

SEQ ID NO: 1197886 - RNA, 18 nt, Eastern equine encephalitis virus
gggaugcgcacgcaggag

SEQ ID NO: 1197887 - RNA, 20 nt, Eastern equine encephalitis virus
auauacaauuacacuacagg

SEQ ID NO: 1197888 - RNA, 16 nt, Eastern equine encephalitis virus
agcucugcaugaugaa

SEQ ID NO: 1197889 - RNA, 16 nt, Eastern equine encephalitis virus
cgucacucuugcugag

SEQ ID NO: 1197890 - RNA, 19 nt, Eastern equine encephalitis virus
ggacacucauuucacccag

SEQ ID NO: 1197891 - RNA, 16 nt, Eastern equine encephalitis virus
agacggauggaguuga

SEQ ID NO: 1197892 - RNA, 12 nt, Eastern equine encephalitis virus
cuggggaaacca

SEQ ID NO: 1197893 - RNA, 19 nt, Eastern equine encephalitis virus
aggcucuuuuggagaccug

SEQ ID NO: 1197894 - RNA, 14 nt, Eastern equine encephalitis virus
cagcacaacauacu

SEQ ID NO: 1197895 - RNA, 16 nt, Eastern equine encephalitis virus
cuaggagaaccaggag

SEQ ID NO: 1197896 - RNA, 15 nt, Eastern equine encephalitis virus
cuccaguagugaaau

SEQ ID NO: 1197897 - RNA, 20 nt, Eastern equine encephalitis virus
aguuugcaaccuaguacugc

SEQ ID NO: 1197898 - RNA, 21 nt, Eastern equine encephalitis virus
acaagcgugcagaccaaggac

SEQ ID NO: 1197899 - RNA, 14 nt, Eastern equine encephalitis virus
agacaucagcuaug

SEQ ID NO: 1197900 - RNA, 14 nt, Eastern equine encephalitis virus
gacccaaagcagcu

SEQ ID NO: 1197901 - RNA, 21 nt, Eastern equine encephalitis virus
uccuggcucaaugcccaccag

SEQ ID NO: 1197902 - RNA, 15 nt, Eastern equine encephalitis virus
auccgcauccagaca

SEQ ID NO: 1197903 - RNA, 22 nt, Eastern equine encephalitis virus
ggcauagucggugcgacagccc

SEQ ID NO: 1197904 - RNA, 20 nt, Eastern equine encephalitis virus
ggcgcagagcucugcaugau

SEQ ID NO: 1197905 - RNA, 21 nt, Eastern equine encephalitis virus
uggacacucauuucacccagu

SEQ ID NO: 1197906 - RNA, 15 nt, Eastern equine encephalitis virus
acuacaggcagcgca

SEQ ID NO: 1197907 - RNA, 19 nt, Eastern equine encephalitis virus
ggcgauauccgccacugcg

SEQ ID NO: 1197908 - RNA, 21 nt, Eastern equine encephalitis virus
ggagcuguacaguaugagaac

SEQ ID NO: 1197909 - RNA, 15 nt, Eastern equine encephalitis virus
cacuguucaggcaau

SEQ ID NO: 1197910 - RNA, 21 nt, Eastern equine encephalitis virus
ccauggucgcuugccacuguc

SEQ ID NO: 1197911 - RNA, 19 nt, Eastern equine encephalitis virus
accauggagcuguacagua

SEQ ID NO: 1197912 - RNA, 19 nt, Eastern equine encephalitis virus
aggcaaacgacagcgaaug

SEQ ID NO: 1197913 - RNA, 16 nt, Eastern equine encephalitis virus
guacaacucuggaaga

SEQ ID NO: 1197914 - RNA, 16 nt, Eastern equine encephalitis virus
agcauccacagugcca

SEQ ID NO: 1197915 - RNA, 13 nt, Eastern equine encephalitis virus
ucaagcugaagaa

SEQ ID NO: 1197916 - RNA, 16 nt, Eastern equine encephalitis virus
gccgccgaugcagugc

SEQ ID NO: 1197917 - RNA, 19 nt, Eastern equine encephalitis virus
cagaaaauugugcaguggg

SEQ ID NO: 1197918 - RNA, 20 nt, Eastern equine encephalitis virus
cacuagugcaguuaccugca

SEQ ID NO: 1197919 - RNA, 19 nt, Eastern equine encephalitis virus
ugcacacaccuuucaccca

SEQ ID NO: 1197920 - RNA, 17 nt, Eastern equine encephalitis virus
caccugcaaguauaaga

SEQ ID NO: 1197921 - RNA, 17 nt, Eastern equine encephalitis virus
gccaaacgcaagaagcc

SEQ ID NO: 1197922 - RNA, 19 nt, Eastern equine encephalitis virus
caggcugguaucgugcaca

SEQ ID NO: 1197923 - RNA, 20 nt, Eastern equine encephalitis virus
ccuuagcauccacagugcca

SEQ ID NO: 1197924 - RNA, 14 nt, Eastern equine encephalitis virus
aacgaccccaggcu

SEQ ID NO: 1197925 - RNA, 16 nt, Eastern equine encephalitis virus
guguucaaaccgcugc

SEQ ID NO: 1197926 - RNA, 16 nt, Eastern equine encephalitis virus
gaccugagacguucca

SEQ ID NO: 1197927 - RNA, 22 nt, Eastern equine encephalitis virus
cauaacgccgccgaugcagugc

SEQ ID NO: 1197928 - RNA, 15 nt, Eastern equine encephalitis virus
uccuuagcauccaca

SEQ ID NO: 1197929 - RNA, 17 nt, Eastern equine encephalitis virus
caucuugucaaccacau

SEQ ID NO: 1197930 - RNA, 12 nt, Eastern equine encephalitis virus
gccgcugugaaa

SEQ ID NO: 1197931 - RNA, 20 nt, Eastern equine encephalitis virus
cuaaccuggaguacaucacc

SEQ ID NO: 1197932 - RNA, 14 nt, Eastern equine encephalitis virus
cagucucagaccug

SEQ ID NO: 1197933 - RNA, 22 nt, Eastern equine encephalitis virus
uagagagaaauaccgucaccca

SEQ ID NO: 1197934 - RNA, 12 nt, Eastern equine encephalitis virus
aacaucugugca

SEQ ID NO: 1197935 - RNA, 19 nt, Eastern equine encephalitis virus
ccuccaguacaccagugac

SEQ ID NO: 1197936 - RNA, 16 nt, Eastern equine encephalitis virus
uggugacauggaacca

SEQ ID NO: 1197937 - RNA, 16 nt, Eastern equine encephalitis virus
augccgaacaaggugg

SEQ ID NO: 1197938 - RNA, 15 nt, Eastern equine encephalitis virus
gacagccgagccuau

SEQ ID NO: 1197939 - RNA, 15 nt, Eastern equine encephalitis virus
ugaaagggguuacau

SEQ ID NO: 1197940 - RNA, 15 nt, Eastern equine encephalitis virus
cuuuccaaagaagca

SEQ ID NO: 1197941 - RNA, 23 nt, Eastern equine encephalitis virus
cacgugguugaacauggaaguga

SEQ ID NO: 1197942 - RNA, 12 nt, Eastern equine encephalitis virus
caaccaccugca

SEQ ID NO: 1197943 - RNA, 19 nt, Eastern equine encephalitis virus
gcauagucggugcgacagc

SEQ ID NO: 1197944 - RNA, 18 nt, Eastern equine encephalitis virus
auaggcaguguauaaggc

SEQ ID NO: 1197945 - RNA, 13 nt, Eastern equine encephalitis virus
caagccuccuggc

SEQ ID NO: 1197946 - RNA, 12 nt, Eastern equine encephalitis virus
agcucugcauga

SEQ ID NO: 1197947 - RNA, 22 nt, Eastern equine encephalitis virus
uaccagcagcgacuauacaacc

SEQ ID NO: 1197948 - RNA, 13 nt, Eastern equine encephalitis virus
cuccacugcaaac

SEQ ID NO: 1197949 - RNA, 22 nt, Eastern equine encephalitis virus
acccaccugaacauggaguuga

SEQ ID NO: 1197950 - RNA, 21 nt, Eastern equine encephalitis virus
uaccuauccugcucccaugua

SEQ ID NO: 1197951 - RNA, 18 nt, Eastern equine encephalitis virus
cugucuuacuaaacacua

SEQ ID NO: 1197952 - RNA, 16 nt, Eastern equine encephalitis virus
gagucauccgcaucca

SEQ ID NO: 1197953 - RNA, 17 nt, Eastern equine encephalitis virus
cuccuuagcauccacag

SEQ ID NO: 1197954 - RNA, 18 nt, Eastern equine encephalitis virus
agaaauaccgucacccac

SEQ ID NO: 1197955 - RNA, 17 nt, Eastern equine encephalitis virus
aggaguugaucaggcau

SEQ ID NO: 1197956 - RNA, 18 nt, Eastern equine encephalitis virus
acgggccuaaccgccaua

SEQ ID NO: 1197957 - RNA, 22 nt, Eastern equine encephalitis virus
aauugccgcauauacaauuaca

SEQ ID NO: 1197958 - RNA, 20 nt, Eastern equine encephalitis virus
gacgcacugauggcagagcg

SEQ ID NO: 1197959 - RNA, 21 nt, Eastern equine encephalitis virus
uaccaggauaauuccaucaac

SEQ ID NO: 1197960 - RNA, 23 nt, Eastern equine encephalitis virus
aguggccgucaaaguuugcaacc

SEQ ID NO: 1197961 - RNA, 13 nt, Eastern equine encephalitis virus
uacaucaccugca

SEQ ID NO: 1197962 - RNA, 15 nt, Eastern equine encephalitis virus
agugcauaaggcugc

SEQ ID NO: 1197963 - RNA, 21 nt, Eastern equine encephalitis virus
gcggugcuagagacagacaua

SEQ ID NO: 1197964 - RNA, 14 nt, Eastern equine encephalitis virus
acccuccagcagga

SEQ ID NO: 1197965 - RNA, 12 nt, Eastern equine encephalitis virus
agggcagugcau

SEQ ID NO: 1197966 - RNA, 20 nt, Eastern equine encephalitis virus
aaaguucaggugauacaggc

SEQ ID NO: 1197967 - RNA, 20 nt, Eastern equine encephalitis virus
cuuccacuggacgaugacca

SEQ ID NO: 1197968 - RNA, 19 nt, Eastern equine encephalitis virus
aguguuggauucagcugcc

SEQ ID NO: 1197969 - RNA, 17 nt, Eastern equine encephalitis virus
caccacuugcagcucaa

SEQ ID NO: 1197970 - RNA, 16 nt, Eastern equine encephalitis virus
agccuaugaucagcug

SEQ ID NO: 1197971 - RNA, 17 nt, Eastern equine encephalitis virus
ucacagucaccggagaa

SEQ ID NO: 1197972 - RNA, 17 nt, Eastern equine encephalitis virus
acuaagggcagugcaua

SEQ ID NO: 1197973 - RNA, 18 nt, Eastern equine encephalitis virus
acaccuuucacccaggcg

SEQ ID NO: 1197974 - RNA, 17 nt, Eastern equine encephalitis virus
acacgaaacacucacca

SEQ ID NO: 1197975 - RNA, 23 nt, Eastern equine encephalitis virus
gugcugcuaccgaauauccacac

SEQ ID NO: 1197976 - RNA, 15 nt, Eastern equine encephalitis virus
gaguaugaugccuau

SEQ ID NO: 1197977 - RNA, 16 nt, Eastern equine encephalitis virus
cauccgagacgggaca

SEQ ID NO: 1197978 - RNA, 13 nt, Eastern equine encephalitis virus
cgaaggauccagg

SEQ ID NO: 1197979 - RNA, 14 nt, Eastern equine encephalitis virus
acgaugaguacugg

SEQ ID NO: 1197980 - RNA, 21 nt, Eastern equine encephalitis virus
acaggcgcagagcucugcaug

SEQ ID NO: 1197981 - RNA, 19 nt, Eastern equine encephalitis virus
caguggugacauggaacca

SEQ ID NO: 1197982 - RNA, 12 nt, Eastern equine encephalitis virus
uguaagccaccg

SEQ ID NO: 1197983 - RNA, 21 nt, Eastern equine encephalitis virus
gcugcacguagaaggcagaau

SEQ ID NO: 1197984 - RNA, 13 nt, Eastern equine encephalitis virus
ccaccacuugcag

SEQ ID NO: 1197985 - RNA, 21 nt, Eastern equine encephalitis virus
ggacggcucuaucagugguga

SEQ ID NO: 1197986 - RNA, 15 nt, Eastern equine encephalitis virus
cacuucuccacugca

SEQ ID NO: 1197987 - RNA, 17 nt, Eastern equine encephalitis virus
ggacccaaagcagcugc

SEQ ID NO: 1197988 - RNA, 17 nt, Eastern equine encephalitis virus
cagaggggucagagcca

SEQ ID NO: 1197989 - RNA, 20 nt, Eastern equine encephalitis virus
ugccacaaugcaugaaauca

SEQ ID NO: 1197990 - RNA, 15 nt, Eastern equine encephalitis virus
cagguguugcaguua

SEQ ID NO: 1197991 - RNA, 13 nt, Eastern equine encephalitis virus
acccugcaugcca

SEQ ID NO: 1197992 - RNA, 13 nt, Eastern equine encephalitis virus
acaaugcaugaaa

SEQ ID NO: 1197993 - RNA, 19 nt, Eastern equine encephalitis virus
aagaauccacacgaaacac

SEQ ID NO: 1197994 - RNA, 24 nt, Eastern equine encephalitis virus
cuugcugagagcggaucauuuaca

SEQ ID NO: 1197995 - RNA, 17 nt, Eastern equine encephalitis virus
uggcaucacugaagagc

SEQ ID NO: 1197996 - RNA, 23 nt, Eastern equine encephalitis virus
ggggcuuauugcuacagcagugg

SEQ ID NO: 1197997 - RNA, 15 nt, Eastern equine encephalitis virus
ugcugacgaccaggu

SEQ ID NO: 1197998 - RNA, 19 nt, Eastern equine encephalitis virus
caaguauaagacaaaagug

SEQ ID NO: 1197999 - RNA, 22 nt, Eastern equine encephalitis virus
caggcagcugauccacuugcaa

SEQ ID NO: 1198000 - RNA, 20 nt, Eastern equine encephalitis virus
ugaccaagacgucgacaggc

SEQ ID NO: 1198001 - RNA, 22 nt, Eastern equine encephalitis virus
ccacaucgucgauuauccagca

SEQ ID NO: 1198002 - RNA, 17 nt, Eastern equine encephalitis virus
auguauucaaguacugc

SEQ ID NO: 1198003 - RNA, 16 nt, Eastern equine encephalitis virus
uuauuuugcugugggc

SEQ ID NO: 1198004 - RNA, 23 nt, Eastern equine encephalitis virus
acaccagugacaagccuccuggc

SEQ ID NO: 1198005 - RNA, 14 nt, Eastern equine encephalitis virus
gaacaugaaggcaa

SEQ ID NO: 1198006 - RNA, 19 nt, Eastern equine encephalitis virus
agggacccaaagcagcugc

SEQ ID NO: 1198007 - RNA, 15 nt, Eastern equine encephalitis virus
uccgccacugcgugg

SEQ ID NO: 1198008 - RNA, 19 nt, Eastern equine encephalitis virus
ggcaucacugaagagcugg

SEQ ID NO: 1198009 - RNA, 14 nt, Eastern equine encephalitis virus
cguauauugcugau

SEQ ID NO: 1198010 - RNA, 13 nt, Eastern equine encephalitis virus
gaucgacaaccug

SEQ ID NO: 1198011 - RNA, 13 nt, Eastern equine encephalitis virus
gcaguguauaagg

SEQ ID NO: 1198012 - RNA, 20 nt, Eastern equine encephalitis virus
cuucugcgacacugaaaaca

SEQ ID NO: 1198013 - RNA, 12 nt, Eastern equine encephalitis virus
gaaugguuacgc

SEQ ID NO: 1198014 - RNA, 21 nt, Eastern equine encephalitis virus
cugagauacgaucagcagugc

SEQ ID NO: 1198015 - RNA, 21 nt, Eastern equine encephalitis virus
gcuaggagaaccaggagagau

SEQ ID NO: 1198016 - RNA, 21 nt, Eastern equine encephalitis virus
gcagcgacuauacaaccaccu

SEQ ID NO: 1198017 - RNA, 16 nt, Eastern equine encephalitis virus
gcaugcugcgcugcuu

SEQ ID NO: 1198018 - RNA, 13 nt, Eastern equine encephalitis virus
gcucuaucagugg

SEQ ID NO: 1198019 - RNA, 21 nt, Eastern equine encephalitis virus
auggcgccgauuaacccgaug

SEQ ID NO: 1198020 - RNA, 14 nt, Eastern equine encephalitis virus
accuuucacccagg

SEQ ID NO: 1198021 - RNA, 20 nt, Eastern equine encephalitis virus
agcgucagcuggagaucugc

SEQ ID NO: 1198022 - RNA, 16 nt, Eastern equine encephalitis virus
cagagcucugcaugau

SEQ ID NO: 1198023 - RNA, 20 nt, Eastern equine encephalitis virus
cacuaaauucacccuaguuc

SEQ ID NO: 1198024 - RNA, 20 nt, Eastern equine encephalitis virus
ucaagcugaagaaggccagc

SEQ ID NO: 1198025 - RNA, 18 nt, Eastern equine encephalitis virus
acaacgagcaccuaaccc

SEQ ID NO: 1198026 - RNA, 14 nt, Eastern equine encephalitis virus
acgagggcagauga

SEQ ID NO: 1198027 - RNA, 16 nt, Eastern equine encephalitis virus
gaaaauugugcagugg

SEQ ID NO: 1198028 - RNA, 13 nt, Eastern equine encephalitis virus
aauuuuucuuuua

SEQ ID NO: 1198029 - RNA, 17 nt, Eastern equine encephalitis virus
gaaauacuacugcaagu

SEQ ID NO: 1198030 - RNA, 21 nt, Eastern equine encephalitis virus
auacaccagaggggucagagc

SEQ ID NO: 1198031 - RNA, 17 nt, Eastern equine encephalitis virus
cugauugacaacaaaaa

SEQ ID NO: 1198032 - RNA, 14 nt, Eastern equine encephalitis virus
acauaacacuauag

SEQ ID NO: 1198033 - RNA, 22 nt, Eastern equine encephalitis virus
gcaucgccacgcuggcaccaga

SEQ ID NO: 1198034 - RNA, 23 nt, Eastern equine encephalitis virus
uuauaacacuaagggcagugcau

SEQ ID NO: 1198035 - RNA, 17 nt, Eastern equine encephalitis virus
cacauuagcaucuucag

SEQ ID NO: 1198036 - RNA, 23 nt, Eastern equine encephalitis virus
agguagaauucaggccagugggu

SEQ ID NO: 1198037 - RNA, 16 nt, Eastern equine encephalitis virus
uaccugcaaaggagau

SEQ ID NO: 1198038 - RNA, 18 nt, Eastern equine encephalitis virus
ccugaagagacuguuuaa

SEQ ID NO: 1198039 - RNA, 17 nt, Eastern equine encephalitis virus
caaagauacaccagagg

SEQ ID NO: 1198040 - RNA, 23 nt, Eastern equine encephalitis virus
gcacugauggcagagcggugcgc

SEQ ID NO: 1198041 - RNA, 12 nt, Eastern equine encephalitis virus
agaacaugaagg

SEQ ID NO: 1198042 - RNA, 15 nt, Eastern equine encephalitis virus
gcuggcaccagagcc

SEQ ID NO: 1198043 - RNA, 13 nt, Eastern equine encephalitis virus
cuugccacuguca

SEQ ID NO: 1198044 - RNA, 23 nt, Eastern equine encephalitis virus
gcuguuaugaaaagaauccacac

SEQ ID NO: 1198045 - RNA, 23 nt, Eastern equine encephalitis virus
gccucgaucucgagcgugagaag

SEQ ID NO: 1198046 - RNA, 17 nt, Eastern equine encephalitis virus
ggcuauuacauccuggc

SEQ ID NO: 1198047 - RNA, 18 nt, Eastern equine encephalitis virus
ggaaagggugacagcggg

SEQ ID NO: 1198048 - RNA, 16 nt, Eastern equine encephalitis virus
auuuaauacacacuuu

SEQ ID NO: 1198049 - RNA, 16 nt, Eastern equine encephalitis virus
aacacgcuccaagaug

SEQ ID NO: 1198050 - RNA, 12 nt, Eastern equine encephalitis virus
ccacugcguggu

SEQ ID NO: 1198051 - RNA, 21 nt, Eastern equine encephalitis virus
cacccacaagcgugcagacca

SEQ ID NO: 1198052 - RNA, 21 nt, Eastern equine encephalitis virus
acguuggaacagaauuggcau

SEQ ID NO: 1198053 - RNA, 15 nt, Eastern equine encephalitis virus
cagagcggugcgcca

SEQ ID NO: 1198054 - RNA, 20 nt, Eastern equine encephalitis virus
agcguugaccacauuagcau

SEQ ID NO: 1198055 - RNA, 17 nt, Eastern equine encephalitis virus
agguugugcauuaguau

SEQ ID NO: 1198056 - RNA, 19 nt, Eastern equine encephalitis virus
cucuccuuagcauccacag

SEQ ID NO: 1198057 - RNA, 20 nt, Eastern equine encephalitis virus
cugcuaccgaauauccacac

SEQ ID NO: 1198058 - RNA, 22 nt, Eastern equine encephalitis virus
cuguuaugaaaagaauccacac

SEQ ID NO: 1198059 - RNA, 19 nt, Eastern equine encephalitis virus
ccgaccuugcugacgacca

SEQ ID NO: 1198060 - RNA, 23 nt, Eastern equine encephalitis virus
cucgacaauggauugagcgacca

SEQ ID NO: 1198061 - RNA, 19 nt, Eastern equine encephalitis virus
ccuauggcgccgauuaacc

SEQ ID NO: 1198062 - RNA, 18 nt, Eastern equine encephalitis virus
gugguauacaucgagagc

SEQ ID NO: 1198063 - RNA, 19 nt, Eastern equine encephalitis virus
gcuacgaggugaacuacgu

SEQ ID NO: 1198064 - RNA, 19 nt, Eastern equine encephalitis virus
caggaaaaagaagcgacca

SEQ ID NO: 1198065 - RNA, 20 nt, Eastern equine encephalitis virus
caggagaagggaauccacau

SEQ ID NO: 1198066 - RNA, 20 nt, Eastern equine encephalitis virus
gauccuaauccgccuaggcg

SEQ ID NO: 1198067 - RNA, 15 nt, Human
aaaaaauauuuuccu

SEQ ID NO: 1198068 - RNA, 23 nt, Human
aguggcuuaaaacaacacucaca

SEQ ID NO: 1198069 - RNA, 18 nt, Human
aguguauuuuuuuacuaa

SEQ ID NO: 1198070 - RNA, 17 nt, Human
aguguauuuuuuuacua

SEQ ID NO: 1198071 - RNA, 16 nt, Human
agugggagcugccugu

SEQ ID NO: 1198072 - RNA, 15 nt, Human
agugggagcugccug

SEQ ID NO: 1198073 - RNA, 14 nt, Human
agugggagcugccu

SEQ ID NO: 1198074 - RNA, 20 nt, Human
aguucagguaacaggcagau

SEQ ID NO: 1198075 - RNA, 19 nt, Human
aguucagguaacaggcaga

SEQ ID NO: 1198076 - RNA, 17 nt, Human
aguuacagacaaagcgu

SEQ ID NO: 1198077 - RNA, 16 nt, Human
aguuacagacaaagcg

SEQ ID NO: 1198078 - RNA, 14 nt, Human
aguuacagacaaag

SEQ ID NO: 1198079 - RNA, 12 nt, Human
aguuaaauaaau

SEQ ID NO: 1198080 - RNA, 14 nt, Human
aguugaagacagag

SEQ ID NO: 1198081 - RNA, 20 nt, Human
aguuguuugauucagacagc

SEQ ID NO: 1198082 - RNA, 15 nt, Human
aguaucuugaagacu

SEQ ID NO: 1198083 - RNA, 12 nt, Human
aguaucuugaag

SEQ ID NO: 1198084 - RNA, 11 nt, Human
aguaucuugaa

SEQ ID NO: 1198085 - RNA, 17 nt, Human
aguaugaggcauuuguu

SEQ ID NO: 1198086 - RNA, 16 nt, Human
aguaugaggcauuugu

SEQ ID NO: 1198087 - RNA, 15 nt, Human
aguaugaggcauuug

SEQ ID NO: 1198088 - RNA, 14 nt, Human
aguaugguggcugg

SEQ ID NO: 1198089 - RNA, 16 nt, Human
agugaagacaaugacu

SEQ ID NO: 1198090 - RNA, 14 nt, Human
agugaagacaauga

SEQ ID NO: 1198091 - RNA, 18 nt, Human
agucuggaaugcaguggu

SEQ ID NO: 1198092 - RNA, 17 nt, Human
agucuggaaugcagugg

SEQ ID NO: 1198093 - RNA, 20 nt, Human
agucugauucccaagcucug

SEQ ID NO: 1198094 - RNA, 18 nt, Human
agucugauucccaagcuc

SEQ ID NO: 1198095 - RNA, 16 nt, Human
agucugauucccaagc

SEQ ID NO: 1198096 - RNA, 21 nt, Human
aguccuggcaugggaaugaau

SEQ ID NO: 1198097 - RNA, 20 nt, Human
aguccuggcaugggaaugaa

SEQ ID NO: 1198098 - RNA, 22 nt, Human
aguccuggcaugggaaugaaug

SEQ ID NO: 1198099 - RNA, 17 nt, Human
agucugaaggcuggguu

SEQ ID NO: 1198100 - RNA, 16 nt, Human
agucugaaggcugggu

SEQ ID NO: 1198101 - RNA, 15 nt, Human
agucugaaggcuggg

SEQ ID NO: 1198102 - RNA, 13 nt, Human
agucugaaggcug

SEQ ID NO: 1198103 - RNA, 18 nt, Human
auaguaugguggcugggu

SEQ ID NO: 1198104 - RNA, 17 nt, Human
auaguaugguggcuggg

SEQ ID NO: 1198105 - RNA, 21 nt, Human
auagccaaggccaaaggaagc

SEQ ID NO: 1198106 - RNA, 15 nt, Human
auagccaaggccaaa

SEQ ID NO: 1198107 - RNA, 19 nt, Human
auauuuacuucuuauacau

SEQ ID NO: 1198108 - RNA, 22 nt, Human
auauuaccacagacauacuaac

SEQ ID NO: 1198109 - RNA, 16 nt, Human
auaugcucugcauguu

SEQ ID NO: 1198110 - RNA, 21 nt, Human
auacaccacuacauucuguua

SEQ ID NO: 1198111 - RNA, 20 nt, Human
auacaccacuacauucuguu

SEQ ID NO: 1198112 - RNA, 19 nt, Human
auacaccacuacauucugu

SEQ ID NO: 1198113 - RNA, 15 nt, Human
auaauguaagcucua

SEQ ID NO: 1198114 - RNA, 21 nt, Human
auaaugcgugcauaccacuuu

SEQ ID NO: 1198115 - RNA, 12 nt, Human
auacccaccccc

SEQ ID NO: 1198116 - RNA, 11 nt, Human
auacccacccc

SEQ ID NO: 1198117 - RNA, 18 nt, Human
auaccugucccccugaca

SEQ ID NO: 1198118 - RNA, 15 nt, Human
auaaaacuuuuuaaa

SEQ ID NO: 1198119 - RNA, 24 nt, Human
auaaacuuuaccuuuuuuauacau

SEQ ID NO: 1198120 - RNA, 17 nt, Human
auaaaacuuuuuaaaau

SEQ ID NO: 1198121 - RNA, 21 nt, Human
auaaacuuuaccuuuuuuaua

SEQ ID NO: 1198122 - RNA, 20 nt, Human
auaaagcagcguuucuauga

SEQ ID NO: 1198123 - RNA, 19 nt, Human
auaaagcagcguuucuaug

SEQ ID NO: 1198124 - RNA, 18 nt, Human
auaaagcagcguuucuau

SEQ ID NO: 1198125 - RNA, 14 nt, Human
auaaagcagcguuu

SEQ ID NO: 1198126 - RNA, 13 nt, Human
auaaagcagcguu

SEQ ID NO: 1198127 - RNA, 20 nt, Human
aucagccugcuccagcuguu

SEQ ID NO: 1198128 - RNA, 19 nt, Human
aucagccugcuccagcugu

SEQ ID NO: 1198129 - RNA, 18 nt, Human
aucagccugcuccagcug

SEQ ID NO: 1198130 - RNA, 23 nt, Human
aucagcacgauuucuguuuagau

SEQ ID NO: 1198131 - RNA, 20 nt, Human
aucagcacgauuucuguuua

SEQ ID NO: 1198132 - RNA, 19 nt, Human
aucagcacgauuucuguuu

SEQ ID NO: 1198133 - RNA, 21 nt, Human
aucaccgaaaacguggcugcu

SEQ ID NO: 1198134 - RNA, 19 nt, Human
aucaccgaaaacguggcug

SEQ ID NO: 1198135 - RNA, 14 nt, Human
aucaccgaaaacgu

SEQ ID NO: 1198136 - RNA, 21 nt, Human
aucacagccucugaaaaccaa

SEQ ID NO: 1198137 - RNA, 20 nt, Human
aucaccaacgucugugccau

SEQ ID NO: 1198138 - RNA, 19 nt, Human
aucaccaacgucugugcca

SEQ ID NO: 1198139 - RNA, 18 nt, Human
aucaccaacgucugugcc

SEQ ID NO: 1198140 - RNA, 12 nt, Human
aucagcugcuac

SEQ ID NO: 1198141 - RNA, 15 nt, Human
auccucccaccucag

SEQ ID NO: 1198142 - RNA, 13 nt, Human
auccuccaggugc

SEQ ID NO: 1198143 - RNA, 23 nt, Human
auccuccaggugcacaagcucca

SEQ ID NO: 1198144 - RNA, 11 nt, Human
auccuccaggu

SEQ ID NO: 1198145 - RNA, 15 nt, Human
auccccuguagagug

SEQ ID NO: 1198146 - RNA, 15 nt, Human
auccagacccggcug

SEQ ID NO: 1198147 - RNA, 14 nt, Human
aucccauuuaaaaa

SEQ ID NO: 1198148 - RNA, 15 nt, Human
aucccauuuaaaaaa

SEQ ID NO: 1198149 - RNA, 19 nt, Human
auccucccaccucagccuc

SEQ ID NO: 1198150 - RNA, 18 nt, Human
auccucccaccucagccu

SEQ ID NO: 1198151 - RNA, 20 nt, Human
auccucccaccucagccucc

SEQ ID NO: 1198152 - RNA, 23 nt, Human
augaccuuucaauaggaaaaacu

SEQ ID NO: 1198153 - RNA, 22 nt, Human
augaccuuucaauaggaaaaac

SEQ ID NO: 1198154 - RNA, 21 nt, Human
augaccuuucaauaggaaaaa

SEQ ID NO: 1198155 - RNA, 19 nt, Human
augaaagacuguacaaagu

SEQ ID NO: 1198156 - RNA, 17 nt, Human
augaaagacuguacaaa

SEQ ID NO: 1198157 - RNA, 16 nt, Human
augaaagacuguacaa

SEQ ID NO: 1198158 - RNA, 13 nt, Human
augaaagacugua

SEQ ID NO: 1198159 - RNA, 22 nt, Human
aucugcuuuuuaaagaaugcuc

SEQ ID NO: 1198160 - RNA, 14 nt, Human
aucuucuuuauaau

SEQ ID NO: 1198161 - RNA, 17 nt, Human
aucuugaauuguaagga

SEQ ID NO: 1198162 - RNA, 22 nt, Human
augugaaacuggauuaaacuua

SEQ ID NO: 1198163 - RNA, 14 nt, Human
augucuuuucuugc

SEQ ID NO: 1198164 - RNA, 23 nt, Human
auguaauuaaguacuauguauca

SEQ ID NO: 1198165 - RNA, 17 nt, Human
auguaauuaaguacuau

SEQ ID NO: 1198166 - RNA, 15 nt, Human
auguaauuaaguacu

SEQ ID NO: 1198167 - RNA, 15 nt, Human
auggucggaaaacau

SEQ ID NO: 1198168 - RNA, 19 nt, Human
auggucaccaaaucagcug

SEQ ID NO: 1198169 - RNA, 12 nt, Human
auguucugggac

SEQ ID NO: 1198170 - RNA, 11 nt, Human
auguucuggga

SEQ ID NO: 1198171 - RNA, 16 nt, Human
auguucucucuucucc

SEQ ID NO: 1198172 - RNA, 20 nt, Human
augugggcuaguugggcuuc

SEQ ID NO: 1198173 - RNA, 22 nt, Human
auguuugccucugccucugaca

SEQ ID NO: 1198174 - RNA, 19 nt, Human
auguuugccucugccucug

SEQ ID NO: 1198175 - RNA, 13 nt, Human
auguucugggaca

SEQ ID NO: 1198176 - RNA, 11 nt, Human
augcugcccug

SEQ ID NO: 1198177 - RNA, 16 nt, Human
augcucuuuacuucau

SEQ ID NO: 1198178 - RNA, 14 nt, Human
augcuuguacauaa

SEQ ID NO: 1198179 - RNA, 13 nt, Human
augcuuguacaua

SEQ ID NO: 1198180 - RNA, 12 nt, Human
augcuuguacau

SEQ ID NO: 1198181 - RNA, 12 nt, Human
augcugcccugu

SEQ ID NO: 1198182 - RNA, 15 nt, Human
augcuuguacauaau

SEQ ID NO: 1198183 - RNA, 15 nt, Human
auggauuuccagcca

SEQ ID NO: 1198184 - RNA, 19 nt, Human
augccucucucaggccaaa

SEQ ID NO: 1198185 - RNA, 20 nt, Human
augcaugaaguaauaugcac

SEQ ID NO: 1198186 - RNA, 16 nt, Human
augcaugaaguaauau

SEQ ID NO: 1198187 - RNA, 18 nt, Human
augcacagaguuguuaca

SEQ ID NO: 1198188 - RNA, 17 nt, Human
augcacagaguuguuac

SEQ ID NO: 1198189 - RNA, 16 nt, Human
augcacagaguuguua

SEQ ID NO: 1198190 - RNA, 17 nt, Human
augcacaaacagaggcc

SEQ ID NO: 1198191 - RNA, 16 nt, Human
augcacaaacagaggc

SEQ ID NO: 1198192 - RNA, 15 nt, Human
augcacaaacagagg

SEQ ID NO: 1198193 - RNA, 24 nt, Human
augauguuuuccaugaguccccug

SEQ ID NO: 1198194 - RNA, 17 nt, Human
augaugccaugaggaac

SEQ ID NO: 1198195 - RNA, 16 nt, Human
augaugccaugaggaa

SEQ ID NO: 1198196 - RNA, 16 nt, Human
agaggagagaggaccc

SEQ ID NO: 1198197 - RNA, 15 nt, Human
agaggagagaggacc

SEQ ID NO: 1198198 - RNA, 14 nt, Human
agaggacuuuucuu

SEQ ID NO: 1198199 - RNA, 16 nt, Human
agaggaaggagaggag

SEQ ID NO: 1198200 - RNA, 12 nt, Human
agagggcacaga

SEQ ID NO: 1198201 - RNA, 22 nt, Human
agaggguggugaccucugccug

SEQ ID NO: 1198202 - RNA, 20 nt, Human
agaggguggugaccucugcc

SEQ ID NO: 1198203 - RNA, 14 nt, Human
agagugugccugaa

SEQ ID NO: 1198204 - RNA, 19 nt, Human
agaguggggauaugauuua

SEQ ID NO: 1198205 - RNA, 11 nt, Human
agagugggagc

SEQ ID NO: 1198206 - RNA, 23 nt, Human
agaggguggugaccucugccuga

SEQ ID NO: 1198207 - RNA, 14 nt, Human
agagcccaggccuc

SEQ ID NO: 1198208 - RNA, 13 nt, Human
agagcccaggccu

SEQ ID NO: 1198209 - RNA, 15 nt, Human
agagcccaggccucc

SEQ ID NO: 1198210 - RNA, 19 nt, Human
agauauaugcucugcaugu

SEQ ID NO: 1198211 - RNA, 21 nt, Human
agacgcugugcugcccugccc

SEQ ID NO: 1198212 - RNA, 12 nt, Human
agacagcugccu

SEQ ID NO: 1198213 - RNA, 12 nt, Human
agacagcucuua

SEQ ID NO: 1198214 - RNA, 11 nt, Human
agacagcucuu

SEQ ID NO: 1198215 - RNA, 18 nt, Human
agacggagucccaccuug

SEQ ID NO: 1198216 - RNA, 22 nt, Human
agacgcugugcugcccugccca

SEQ ID NO: 1198217 - RNA, 16 nt, Human
agacagcccgggcucu

SEQ ID NO: 1198218 - RNA, 15 nt, Human
agacagcccgggcuc

SEQ ID NO: 1198219 - RNA, 14 nt, Human
agacagcccgggcu

SEQ ID NO: 1198220 - RNA, 15 nt, Human
agacagauacuccuc

SEQ ID NO: 1198221 - RNA, 21 nt, Human
agacagauacuccuccaaggu

SEQ ID NO: 1198222 - RNA, 22 nt, Human
agacagauacuccuccaagguu

SEQ ID NO: 1198223 - RNA, 17 nt, Human
agagcccacgcccccac

SEQ ID NO: 1198224 - RNA, 16 nt, Human
agagcccacgccccca

SEQ ID NO: 1198225 - RNA, 13 nt, Human
agagcccacgccc

SEQ ID NO: 1198226 - RNA, 19 nt, Human
agagcccaccuuggcucaa

SEQ ID NO: 1198227 - RNA, 21 nt, Human
agagaggguggugaccucugc

SEQ ID NO: 1198228 - RNA, 20 nt, Human
agagaggguggugaccucug

SEQ ID NO: 1198229 - RNA, 22 nt, Human
agagaggguggugaccucugcc

SEQ ID NO: 1198230 - RNA, 23 nt, Human
agagaggguggugaccucugccu

SEQ ID NO: 1198231 - RNA, 19 nt, Human
agacuggaagcacagcuuc

SEQ ID NO: 1198232 - RNA, 17 nt, Human
agacuggaagcacagcu

SEQ ID NO: 1198233 - RNA, 13 nt, Human
agccgcuggggcc

SEQ ID NO: 1198234 - RNA, 21 nt, Human
agccgccaugcuccuggccca

SEQ ID NO: 1198235 - RNA, 14 nt, Human
agccuccuccagcc

SEQ ID NO: 1198236 - RNA, 22 nt, Human
agccucccgaguagcugggacu

SEQ ID NO: 1198237 - RNA, 20 nt, Human
agccucccgaguagcuggga

SEQ ID NO: 1198238 - RNA, 19 nt, Human
agccucccgaguagcuggg

SEQ ID NO: 1198239 - RNA, 18 nt, Human
agccucccgaguagcugg

SEQ ID NO: 1198240 - RNA, 22 nt, Human
agccucccacgacugcccggca

SEQ ID NO: 1198241 - RNA, 21 nt, Human
agccucccaaagugcugggau

SEQ ID NO: 1198242 - RNA, 21 nt, Human
agccagcaggcucucaggcca

SEQ ID NO: 1198243 - RNA, 20 nt, Human
agccagcaggcucucaggcc

SEQ ID NO: 1198244 - RNA, 19 nt, Human
agccagcaggcucucaggc

SEQ ID NO: 1198245 - RNA, 18 nt, Human
agccagcaggcucucagg

SEQ ID NO: 1198246 - RNA, 15 nt, Human
agccccagugcccac

SEQ ID NO: 1198247 - RNA, 14 nt, Human
agccccagugccca

SEQ ID NO: 1198248 - RNA, 13 nt, Human
agccccagugccc

SEQ ID NO: 1198249 - RNA, 16 nt, Human
agccccauucugccug

SEQ ID NO: 1198250 - RNA, 13 nt, Human
agccccauucugc

SEQ ID NO: 1198251 - RNA, 23 nt, Human
agccaagugugguagagugugcc

SEQ ID NO: 1198252 - RNA, 23 nt, Human
agcaugccuggauggggcugcac

SEQ ID NO: 1198253 - RNA, 23 nt, Human
agcauccuggcacccggccccug

SEQ ID NO: 1198254 - RNA, 22 nt, Human
agcauccuggcacccggccccu

SEQ ID NO: 1198255 - RNA, 20 nt, Human
agcacagacccugcccugug

SEQ ID NO: 1198256 - RNA, 19 nt, Human
agcacagacccugcccugu

SEQ ID NO: 1198257 - RNA, 18 nt, Human
agcacagacccugcccug

SEQ ID NO: 1198258 - RNA, 12 nt, Human
agcacagacccu

SEQ ID NO: 1198259 - RNA, 23 nt, Human
agcacacuugacaucaacugcau

SEQ ID NO: 1198260 - RNA, 20 nt, Human
agcagugcaugcugucccuu

SEQ ID NO: 1198261 - RNA, 19 nt, Human
agcagugcaugcugucccu

SEQ ID NO: 1198262 - RNA, 18 nt, Human
agcagcguuucuaugaca

SEQ ID NO: 1198263 - RNA, 13 nt, Human
agcagcguuucua

SEQ ID NO: 1198264 - RNA, 23 nt, Human
aggaugcuuguacauaaugcgug

SEQ ID NO: 1198265 - RNA, 21 nt, Human
aggaugcuuguacauaaugcg

SEQ ID NO: 1198266 - RNA, 13 nt, Human
aggaccucaggug

SEQ ID NO: 1198267 - RNA, 16 nt, Human
aggauguucugggaca

SEQ ID NO: 1198268 - RNA, 15 nt, Human
aggauguucugggac

SEQ ID NO: 1198269 - RNA, 14 nt, Human
aggauuauuggaaa

SEQ ID NO: 1198270 - RNA, 18 nt, Human
aggauguucugggacaca

SEQ ID NO: 1198271 - RNA, 17 nt, Human
aggaauccagacccggc

SEQ ID NO: 1198272 - RNA, 21 nt, Human
aggaaucaugugccaagcaga

SEQ ID NO: 1198273 - RNA, 20 nt, Human
aggaauccagacccggcugc

SEQ ID NO: 1198274 - RNA, 23 nt, Human
agcugcgguccacccaggagccc

SEQ ID NO: 1198275 - RNA, 12 nt, Human
agcuccuucugu

SEQ ID NO: 1198276 - RNA, 13 nt, Human
agcuccuucuguc

SEQ ID NO: 1198277 - RNA, 23 nt, Human
agcuccgcuuucuacccagcgag

SEQ ID NO: 1198278 - RNA, 21 nt, Human
agcuccgcuuucuacccagcg

SEQ ID NO: 1198279 - RNA, 20 nt, Human
agcuccgcuuucuacccagc

SEQ ID NO: 1198280 - RNA, 23 nt, Human
aggugcuaggaacacuccuucac

SEQ ID NO: 1198281 - RNA, 22 nt, Human
aggugcuaggaacacuccuuca

SEQ ID NO: 1198282 - RNA, 19 nt, Human
aggugcuaggaacacuccu

SEQ ID NO: 1198283 - RNA, 15 nt, Human
agguuaauaaaguaa

SEQ ID NO: 1198284 - RNA, 23 nt, Human
agguucccuuugacgccauccca

SEQ ID NO: 1198285 - RNA, 22 nt, Human
agguucccuuugacgccauccc

SEQ ID NO: 1198286 - RNA, 15 nt, Human
agguucaaagauauu

SEQ ID NO: 1198287 - RNA, 14 nt, Human
agguucaaagauau

SEQ ID NO: 1198288 - RNA, 23 nt, Human
aggucuguucuuuccaaaguaca

SEQ ID NO: 1198289 - RNA, 22 nt, Human
aggucuguucuuuccaaaguac

SEQ ID NO: 1198290 - RNA, 15 nt, Human
aggguaucuggugac

SEQ ID NO: 1198291 - RNA, 21 nt, Human
aggguaucaggugcugccauc

SEQ ID NO: 1198292 - RNA, 19 nt, Human
aggguaucaggugcugcca

SEQ ID NO: 1198293 - RNA, 21 nt, Human
aggggccucuuaugggcuggg

SEQ ID NO: 1198294 - RNA, 20 nt, Human
aggggccucuuaugggcugg

SEQ ID NO: 1198295 - RNA, 19 nt, Human
aggggccucuuaugggcug

SEQ ID NO: 1198296 - RNA, 11 nt, Human
agggucccugg

SEQ ID NO: 1198297 - RNA, 23 nt, Human
agggacagaggggguggccuccc

SEQ ID NO: 1198298 - RNA, 22 nt, Human
agggacagaggggguggccucc

SEQ ID NO: 1198299 - RNA, 21 nt, Human
aggcugucaauuacaggaagu

SEQ ID NO: 1198300 - RNA, 20 nt, Human
aggcugucaauuacaggaag

SEQ ID NO: 1198301 - RNA, 18 nt, Human
aggcuguaucccaugagc

SEQ ID NO: 1198302 - RNA, 13 nt, Human
aggcuguauccca

SEQ ID NO: 1198303 - RNA, 17 nt, Human
agggacgcuacccggga

SEQ ID NO: 1198304 - RNA, 21 nt, Human
aggcccuucucuccagccccu

SEQ ID NO: 1198305 - RNA, 20 nt, Human
aggcccuucucuccagcccc

SEQ ID NO: 1198306 - RNA, 23 nt, Human
aggcccuucucuccagccccugg

SEQ ID NO: 1198307 - RNA, 22 nt, Human
aggcccuucucuccagccccug

SEQ ID NO: 1198308 - RNA, 19 nt, Human
accccuccaugugggcuag

SEQ ID NO: 1198309 - RNA, 16 nt, Human
accccuccaugugggc

SEQ ID NO: 1198310 - RNA, 16 nt, Human
accauauuaccacaga

SEQ ID NO: 1198311 - RNA, 14 nt, Human
accauauuaccaca

SEQ ID NO: 1198312 - RNA, 15 nt, Human
acccaccucagccuc

SEQ ID NO: 1198313 - RNA, 14 nt, Human
acccaccucagccu

SEQ ID NO: 1198314 - RNA, 13 nt, Human
acccaccucagcc

SEQ ID NO: 1198315 - RNA, 23 nt, Human
acccaagggccuggccugagcug

SEQ ID NO: 1198316 - RNA, 22 nt, Human
acccaagggccuggccugagcu

SEQ ID NO: 1198317 - RNA, 19 nt, Human
acccaagggccuggccuga

SEQ ID NO: 1198318 - RNA, 20 nt, Human
accauauuaccacagacaua

SEQ ID NO: 1198319 - RNA, 16 nt, Human
acccaccucagccucc

SEQ ID NO: 1198320 - RNA, 11 nt, Human
acccccugaau

SEQ ID NO: 1198321 - RNA, 17 nt, Human
accagccaguaaauggg

SEQ ID NO: 1198322 - RNA, 14 nt, Human
accagcagaaaugc

SEQ ID NO: 1198323 - RNA, 13 nt, Human
accagcagaaaug

SEQ ID NO: 1198324 - RNA, 12 nt, Human
accaagcccagu

SEQ ID NO: 1198325 - RNA, 15 nt, Human
acauuuauucugcuc

SEQ ID NO: 1198326 - RNA, 22 nt, Human
acauaaugcgugcauaccacuu

SEQ ID NO: 1198327 - RNA, 23 nt, Human
acauaaugcgugcauaccacuuu

SEQ ID NO: 1198328 - RNA, 14 nt, Human
acaggcacccacca

SEQ ID NO: 1198329 - RNA, 23 nt, Human
acaggcaaugcuggcuguuggcu

SEQ ID NO: 1198330 - RNA, 19 nt, Human
acaggcaaugcuggcuguu

SEQ ID NO: 1198331 - RNA, 19 nt, Human
acaggguuuugccauguug

SEQ ID NO: 1198332 - RNA, 18 nt, Human
acaugugcacaugcacgu

SEQ ID NO: 1198333 - RNA, 16 nt, Human
acaugugcacaugcac

SEQ ID NO: 1198334 - RNA, 19 nt, Human
acaucagcacgauuucugu

SEQ ID NO: 1198335 - RNA, 18 nt, Human
acaucagcacgauuucug

SEQ ID NO: 1198336 - RNA, 17 nt, Human
acaucagcacgauuucu

SEQ ID NO: 1198337 - RNA, 15 nt, Human
acaucagcacgauuu

SEQ ID NO: 1198338 - RNA, 15 nt, Human
acacugcauguuugu

SEQ ID NO: 1198339 - RNA, 14 nt, Human
acacugcauguuug

SEQ ID NO: 1198340 - RNA, 21 nt, Human
acagagugagacucugucuca

SEQ ID NO: 1198341 - RNA, 19 nt, Human
acagagugagacucugucu

SEQ ID NO: 1198342 - RNA, 15 nt, Human
acagagugagacucu

SEQ ID NO: 1198343 - RNA, 14 nt, Human
acagaggggguggc

SEQ ID NO: 1198344 - RNA, 15 nt, Human
acagacacaggcccg

SEQ ID NO: 1198345 - RNA, 23 nt, Human
acagaggcagccccauucugccu

SEQ ID NO: 1198346 - RNA, 19 nt, Human
acagaggcagccccauucu

SEQ ID NO: 1198347 - RNA, 15 nt, Human
acagaggcagcccca

SEQ ID NO: 1198348 - RNA, 14 nt, Human
acagacacaggccc

SEQ ID NO: 1198349 - RNA, 13 nt, Human
acagacacaggcc

SEQ ID NO: 1198350 - RNA, 13 nt, Human
acagacaaagcgu

SEQ ID NO: 1198351 - RNA, 11 nt, Human
acagacacagg

SEQ ID NO: 1198352 - RNA, 15 nt, Human
acacuguacugcaau

SEQ ID NO: 1198353 - RNA, 15 nt, Human
acaggcaagcaccuc

SEQ ID NO: 1198354 - RNA, 12 nt, Human
acaggcaagcac

SEQ ID NO: 1198355 - RNA, 18 nt, Human
acagcucuucuccaggcu

SEQ ID NO: 1198356 - RNA, 17 nt, Human
acagcucuucuccaggc

SEQ ID NO: 1198357 - RNA, 16 nt, Human
acagcucuucuccagg

SEQ ID NO: 1198358 - RNA, 17 nt, Human
acagccacggccaggcc

SEQ ID NO: 1198359 - RNA, 16 nt, Human
acagccacggccaggc

SEQ ID NO: 1198360 - RNA, 15 nt, Human
acagccacggccagg

SEQ ID NO: 1198361 - RNA, 18 nt, Human
acagccacggccaggcca

SEQ ID NO: 1198362 - RNA, 19 nt, Human
acagccacggccaggccag

SEQ ID NO: 1198363 - RNA, 15 nt, Human
acaaggcaaggcugu

SEQ ID NO: 1198364 - RNA, 22 nt, Human
acaaaauguaggguuauaauaa

SEQ ID NO: 1198365 - RNA, 14 nt, Human
acaaggcaaggcug

SEQ ID NO: 1198366 - RNA, 12 nt, Human
acaaggcaaggc

SEQ ID NO: 1198367 - RNA, 17 nt, Human
acaaggauugcuacugu

SEQ ID NO: 1198368 - RNA, 22 nt, Human
acacauuuuuuaaaugcaccug

SEQ ID NO: 1198369 - RNA, 20 nt, Human
acacauuuuuuaaaugcacc

SEQ ID NO: 1198370 - RNA, 12 nt, Human
acacauuuuucu

SEQ ID NO: 1198371 - RNA, 22 nt, Human
acacauuuuauuuuauuaugca

SEQ ID NO: 1198372 - RNA, 13 nt, Human
acacagcucuucu

SEQ ID NO: 1198373 - RNA, 11 nt, Human
acacagcucuu

SEQ ID NO: 1198374 - RNA, 19 nt, Human
acacagaggcugccucucc

SEQ ID NO: 1198375 - RNA, 20 nt, Human
acacagcucuguccugggag

SEQ ID NO: 1198376 - RNA, 17 nt, Human
acacgcgugcacacacc

SEQ ID NO: 1198377 - RNA, 15 nt, Human
acacgcgugcacaca

SEQ ID NO: 1198378 - RNA, 16 nt, Human
accugucccccugaca

SEQ ID NO: 1198379 - RNA, 15 nt, Human
accugucccccugac

SEQ ID NO: 1198380 - RNA, 12 nt, Human
accugucccccu

SEQ ID NO: 1198381 - RNA, 18 nt, Human
accuuggcugcagggagu

SEQ ID NO: 1198382 - RNA, 17 nt, Human
accuuggcugcagggag

SEQ ID NO: 1198383 - RNA, 15 nt, Human
accuuuaagagaaau

SEQ ID NO: 1198384 - RNA, 18 nt, Human
accuuucccaucuuccaa

SEQ ID NO: 1198385 - RNA, 13 nt, Human
accuuucccaucu

SEQ ID NO: 1198386 - RNA, 20 nt, Human
accucugcagcaauaaagca

SEQ ID NO: 1198387 - RNA, 18 nt, Human
accucugcagcaauaaag

SEQ ID NO: 1198388 - RNA, 21 nt, Human
accucugcagcaauaaagcag

SEQ ID NO: 1198389 - RNA, 13 nt, Human
acgucugacaggc

SEQ ID NO: 1198390 - RNA, 15 nt, Human
acgucugacaggcaa

SEQ ID NO: 1198391 - RNA, 14 nt, Human
acgucugacaggca

SEQ ID NO: 1198392 - RNA, 15 nt, Human
acgcugugcugcccu

SEQ ID NO: 1198393 - RNA, 14 nt, Human
acgcugugcugccc

SEQ ID NO: 1198394 - RNA, 12 nt, Human
acgcugugcugc

SEQ ID NO: 1198395 - RNA, 11 nt, Human
acgcugugcug

SEQ ID NO: 1198396 - RNA, 11 nt, Human
acgugaguccu

SEQ ID NO: 1198397 - RNA, 15 nt, Human
acuaaguuuuuaugg

SEQ ID NO: 1198398 - RNA, 19 nt, Human
acucaguccauagcagaga

SEQ ID NO: 1198399 - RNA, 18 nt, Human
acucaaaagcugggcagg

SEQ ID NO: 1198400 - RNA, 13 nt, Human
acucaaaagcugg

SEQ ID NO: 1198401 - RNA, 19 nt, Human
acucugucgcccagucugg

SEQ ID NO: 1198402 - RNA, 23 nt, Human
acucuaucaaguauuauaccuuu

SEQ ID NO: 1198403 - RNA, 17 nt, Human
acucuagggaaaaacca

SEQ ID NO: 1198404 - RNA, 15 nt, Human
acucuagggaaaaac

SEQ ID NO: 1198405 - RNA, 18 nt, Human
acugguuccauggccucu

SEQ ID NO: 1198406 - RNA, 15 nt, Human
acuggagaaaaugga

SEQ ID NO: 1198407 - RNA, 19 nt, Human
acuggaagcacagcuucau

SEQ ID NO: 1198408 - RNA, 17 nt, Human
acuggaagcacagcuuc

SEQ ID NO: 1198409 - RNA, 20 nt, Human
acugugcugagucugaaggc

SEQ ID NO: 1198410 - RNA, 22 nt, Human
acugugcugagucugaaggcug

SEQ ID NO: 1198411 - RNA, 15 nt, Human
acuugggccacugug

SEQ ID NO: 1198412 - RNA, 14 nt, Human
acuugggccacugu

SEQ ID NO: 1198413 - RNA, 16 nt, Human
acuugguuuuuaaaaa

SEQ ID NO: 1198414 - RNA, 14 nt, Human
acuuuucuuugugg

SEQ ID NO: 1198415 - RNA, 19 nt, Human
agaaaauaguggugugauu

SEQ ID NO: 1198416 - RNA, 15 nt, Human
agaaaauaccaagga

SEQ ID NO: 1198417 - RNA, 16 nt, Human
acuuuucuuucagcca

SEQ ID NO: 1198418 - RNA, 20 nt, Human
acuuuucauaaccuagccuu

SEQ ID NO: 1198419 - RNA, 15 nt, Human
acuuuuauaaacuuu

SEQ ID NO: 1198420 - RNA, 13 nt, Human
acuuuuauaaacu

SEQ ID NO: 1198421 - RNA, 20 nt, Human
acuuuguucuggcucuucca

SEQ ID NO: 1198422 - RNA, 19 nt, Human
acuuuguucuggcucuucc

SEQ ID NO: 1198423 - RNA, 17 nt, Human
acuuuguucuggcucuu

SEQ ID NO: 1198424 - RNA, 16 nt, Human
acuuuguucuggcucu

SEQ ID NO: 1198425 - RNA, 23 nt, Human
agaaaguacuucuccacccugcu

SEQ ID NO: 1198426 - RNA, 22 nt, Human
agaaaguacuucuccacccugc

SEQ ID NO: 1198427 - RNA, 21 nt, Human
aaugcuggcuguuggcugggg

SEQ ID NO: 1198428 - RNA, 17 nt, Human
aaugugaaaagaaaaau

SEQ ID NO: 1198429 - RNA, 15 nt, Human
aaugugaaaagaaaa

SEQ ID NO: 1198430 - RNA, 16 nt, Human
aauguuugccucugcc

SEQ ID NO: 1198431 - RNA, 15 nt, Human
aauguuugccucugc

SEQ ID NO: 1198432 - RNA, 23 nt, Human
aaugccuuacccucauguucuua

SEQ ID NO: 1198433 - RNA, 19 nt, Human
aaugcgugcauaccacuuu

SEQ ID NO: 1198434 - RNA, 18 nt, Human
aaugcgugcauaccacuu

SEQ ID NO: 1198435 - RNA, 22 nt, Human
aauacucuacccucuuagaaaa

SEQ ID NO: 1198436 - RNA, 20 nt, Human
aauacucuacccucuuagaa

SEQ ID NO: 1198437 - RNA, 13 nt, Human
aauagacaauuua

SEQ ID NO: 1198438 - RNA, 15 nt, Human
aaucaccgaaaacgu

SEQ ID NO: 1198439 - RNA, 14 nt, Human
aaucaccgaaaacg

SEQ ID NO: 1198440 - RNA, 18 nt, Human
aaucucaaauuucuaaau

SEQ ID NO: 1198441 - RNA, 17 nt, Human
aaucucaaauuucuaaa

SEQ ID NO: 1198442 - RNA, 16 nt, Human
aaucucaaauuucuaa

SEQ ID NO: 1198443 - RNA, 19 nt, Human
aauccagacccggcugcgu

SEQ ID NO: 1198444 - RNA, 19 nt, Human
aaggucauuuuuuuuaaga

SEQ ID NO: 1198445 - RNA, 13 nt, Human
aagggcccagaga

SEQ ID NO: 1198446 - RNA, 18 nt, Human
aagggacgcuacccggga

SEQ ID NO: 1198447 - RNA, 23 nt, Human
aaguaucccuacuguaauuugug

SEQ ID NO: 1198448 - RNA, 18 nt, Human
aaguaucccuacuguaau

SEQ ID NO: 1198449 - RNA, 21 nt, Human
aaguagaagucuuagauguau

SEQ ID NO: 1198450 - RNA, 20 nt, Human
aaguagaagucuuagaugua

SEQ ID NO: 1198451 - RNA, 19 nt, Human
aaguagaagucuuagaugu

SEQ ID NO: 1198452 - RNA, 18 nt, Human
aaguccucuuuucugaga

SEQ ID NO: 1198453 - RNA, 22 nt, Human
aaguccucuuuucugagaggac

SEQ ID NO: 1198454 - RNA, 19 nt, Human
aaguggaaaaauagccugc

SEQ ID NO: 1198455 - RNA, 21 nt, Human
aaguggaaaaauagccugccu

SEQ ID NO: 1198456 - RNA, 21 nt, Human
aagcuggucccacucagucca

SEQ ID NO: 1198457 - RNA, 18 nt, Human
aagcuggucccacucagu

SEQ ID NO: 1198458 - RNA, 15 nt, Human
aaggauugcuacugu

SEQ ID NO: 1198459 - RNA, 15 nt, Human
aaggauguucuagca

SEQ ID NO: 1198460 - RNA, 21 nt, Human
aagcgauucuucugcuucagc

SEQ ID NO: 1198461 - RNA, 14 nt, Human
aagauaaaugugcu

SEQ ID NO: 1198462 - RNA, 13 nt, Human
aagauaaaugugc

SEQ ID NO: 1198463 - RNA, 12 nt, Human
aagauaaaugug

SEQ ID NO: 1198464 - RNA, 22 nt, Human
aagcagcguuucuaugacacau

SEQ ID NO: 1198465 - RNA, 21 nt, Human
aagcagcguuucuaugacaca

SEQ ID NO: 1198466 - RNA, 20 nt, Human
aagcagcguuucuaugacac

SEQ ID NO: 1198467 - RNA, 17 nt, Human
aagcagcguuucuauga

SEQ ID NO: 1198468 - RNA, 14 nt, Human
aagcagcguuucua

SEQ ID NO: 1198469 - RNA, 23 nt, Human
aagccagcaggcucucaggccag

SEQ ID NO: 1198470 - RNA, 20 nt, Human
aagccagcaggcucucaggc

SEQ ID NO: 1198471 - RNA, 24 nt, Human
aaauagcucaggugucccugcacu

SEQ ID NO: 1198472 - RNA, 16 nt, Human
aaagccuccuccagcc

SEQ ID NO: 1198473 - RNA, 16 nt, Human
aaaggcuccaggagca

SEQ ID NO: 1198474 - RNA, 14 nt, Human
aaaggcuaccuuug

SEQ ID NO: 1198475 - RNA, 19 nt, Human
aaauaaaacuuuuuaaaau

SEQ ID NO: 1198476 - RNA, 16 nt, Human
aaauaaaacuuuuuaa

SEQ ID NO: 1198477 - RNA, 13 nt, Human
aaauaaaacuuuu

SEQ ID NO: 1198478 - RNA, 13 nt, Human
aaaguggaaaaau

SEQ ID NO: 1198479 - RNA, 20 nt, Human
aaaggcuccaggagcagcca

SEQ ID NO: 1198480 - RNA, 19 nt, Human
aaaggcuccaggagcagcc

SEQ ID NO: 1198481 - RNA, 17 nt, Human
aaaauaaaacuuuuuaa

SEQ ID NO: 1198482 - RNA, 15 nt, Human
aaaaagaaaggaggg

SEQ ID NO: 1198483 - RNA, 16 nt, Human
aaacacuguucucugc

SEQ ID NO: 1198484 - RNA, 22 nt, Human
aaaaucucaaauuucuaaaucu

SEQ ID NO: 1198485 - RNA, 19 nt, Human
aaaaucucaaauuucuaaa

SEQ ID NO: 1198486 - RNA, 20 nt, Human
aaagauauuuugcuuuguga

SEQ ID NO: 1198487 - RNA, 17 nt, Human
aaagauauuuugcuuug

SEQ ID NO: 1198488 - RNA, 16 nt, Human
aaagauauuuugcuuu

SEQ ID NO: 1198489 - RNA, 12 nt, Human
aaagauauuuug

SEQ ID NO: 1198490 - RNA, 18 nt, Human
aaaccaucauugaaaucu

SEQ ID NO: 1198491 - RNA, 18 nt, Human
aaacucuccucugcugcu

SEQ ID NO: 1198492 - RNA, 13 nt, Human
aaccacgcuggac

SEQ ID NO: 1198493 - RNA, 15 nt, Human
aaccacuucagcuga

SEQ ID NO: 1198494 - RNA, 21 nt, Human
aaauucuugcaaaguaucccu

SEQ ID NO: 1198495 - RNA, 18 nt, Human
aacuuaaucuaaauggaa

SEQ ID NO: 1198496 - RNA, 16 nt, Human
aacuuaaucuaaaugg

SEQ ID NO: 1198497 - RNA, 15 nt, Human
aacuuaaucuaaaug

SEQ ID NO: 1198498 - RNA, 14 nt, Human
aacugauaaagaug

SEQ ID NO: 1198499 - RNA, 11 nt, Human
cucggugccuu

SEQ ID NO: 1198500 - RNA, 22 nt, Human
cuccuagccugugccucuggga

SEQ ID NO: 1198501 - RNA, 17 nt, Human
cuccuuuagcgcccagu

SEQ ID NO: 1198502 - RNA, 16 nt, Human
cuccuuuagcgcccag

SEQ ID NO: 1198503 - RNA, 22 nt, Human
cuccuuuagcgcccaguugggu

SEQ ID NO: 1198504 - RNA, 24 nt, Human
cuccuuuucacaguucucuccuuc

SEQ ID NO: 1198505 - RNA, 10 nt, Human
cucuccucug

SEQ ID NO: 1198506 - RNA, 20 nt, Human
cucuccuccuuuucacaguu

SEQ ID NO: 1198507 - RNA, 13 nt, Human
cucuccuccuuuu

SEQ ID NO: 1198508 - RNA, 21 nt, Human
cucuccgaccagacaccuuga

SEQ ID NO: 1198509 - RNA, 16 nt, Human
cucuccgaccagacac

SEQ ID NO: 1198510 - RNA, 13 nt, Human
cucucccuuggau

SEQ ID NO: 1198511 - RNA, 22 nt, Human
cuccgcuuucuacccagcgagc

SEQ ID NO: 1198512 - RNA, 23 nt, Human
cuccgcuuucuacccagcgagcc

SEQ ID NO: 1198513 - RNA, 21 nt, Human
cuccgcuuucuacccagcgag

SEQ ID NO: 1198514 - RNA, 15 nt, Human
cucccucuuucccuc

SEQ ID NO: 1198515 - RNA, 16 nt, Human
cucccucccucuuucc

SEQ ID NO: 1198516 - RNA, 19 nt, Human
cucccucuuucccucccuu

SEQ ID NO: 1198517 - RNA, 17 nt, Human
cucagaaucucaaauaa

SEQ ID NO: 1198518 - RNA, 16 nt, Human
cucagaaucucaaaua

SEQ ID NO: 1198519 - RNA, 11 nt, Human
cuccagacaca

SEQ ID NO: 1198520 - RNA, 22 nt, Human
cuccagaauuucccaaagcagu

SEQ ID NO: 1198521 - RNA, 16 nt, Human
cuccagacacaugucc

SEQ ID NO: 1198522 - RNA, 23 nt, Human
cuccaggcuguaucccaugagcc

SEQ ID NO: 1198523 - RNA, 22 nt, Human
cuccaggugcacaagcuccaag

SEQ ID NO: 1198524 - RNA, 20 nt, Human
cuccaggugcacaagcucca

SEQ ID NO: 1198525 - RNA, 19 nt, Human
cuccaggugcacaagcucc

SEQ ID NO: 1198526 - RNA, 18 nt, Human
cuccaggugcacaagcuc

SEQ ID NO: 1198527 - RNA, 17 nt, Human
cucccaccucagccucc

SEQ ID NO: 1198528 - RNA, 16 nt, Human
cucccaccucagccuc

SEQ ID NO: 1198529 - RNA, 14 nt, Human
cucccaccucagcc

SEQ ID NO: 1198530 - RNA, 23 nt, Human
cugacacacagcucuguccuggg

SEQ ID NO: 1198531 - RNA, 22 nt, Human
cugacacacagcucuguccugg

SEQ ID NO: 1198532 - RNA, 21 nt, Human
cugacacacagcucuguccug

SEQ ID NO: 1198533 - RNA, 20 nt, Human
cugacacacagcucuguccu

SEQ ID NO: 1198534 - RNA, 19 nt, Human
cugacacacagcucugucc

SEQ ID NO: 1198535 - RNA, 18 nt, Human
cugacacacagcucuguc

SEQ ID NO: 1198536 - RNA, 17 nt, Human
cugacacacagcucugu

SEQ ID NO: 1198537 - RNA, 16 nt, Human
cugacacacagcucug

SEQ ID NO: 1198538 - RNA, 15 nt, Human
cugacacacagcucu

SEQ ID NO: 1198539 - RNA, 13 nt, Human
cugacacacagcu

SEQ ID NO: 1198540 - RNA, 14 nt, Human
cugaaaauguaugu

SEQ ID NO: 1198541 - RNA, 19 nt, Human
cucugcacaagcugcaccc

SEQ ID NO: 1198542 - RNA, 18 nt, Human
cucugcacaagcugcacc

SEQ ID NO: 1198543 - RNA, 17 nt, Human
cucugcacaagcugcac

SEQ ID NO: 1198544 - RNA, 24 nt, Human
cucuugauucauaaugacuuaagc

SEQ ID NO: 1198545 - RNA, 16 nt, Human
cucuugagccugggag

SEQ ID NO: 1198546 - RNA, 15 nt, Human
cucuugagccuggga

SEQ ID NO: 1198547 - RNA, 22 nt, Human
cucuugauucauaaugacuuaa

SEQ ID NO: 1198548 - RNA, 14 nt, Human
cucuugagccuggg

SEQ ID NO: 1198549 - RNA, 17 nt, Human
cugaguacguugugcau

SEQ ID NO: 1198550 - RNA, 14 nt, Human
cugaggaauccaga

SEQ ID NO: 1198551 - RNA, 19 nt, Human
cugacccugcuucaaauau

SEQ ID NO: 1198552 - RNA, 22 nt, Human
cugagcugggaugauuggaggg

SEQ ID NO: 1198553 - RNA, 12 nt, Human
cugagcugggau

SEQ ID NO: 1198554 - RNA, 23 nt, Human
cugacccugcuucaaauauuucc

SEQ ID NO: 1198555 - RNA, 22 nt, Human
cugaggugggaggaucucuuga

SEQ ID NO: 1198556 - RNA, 13 nt, Human
cugaggugggagg

SEQ ID NO: 1198557 - RNA, 14 nt, Human
cugaggggccucuu

SEQ ID NO: 1198558 - RNA, 23 nt, Human
cugaggaauccagacccggcugc

SEQ ID NO: 1198559 - RNA, 18 nt, Human
cugaucucucgugauuga

SEQ ID NO: 1198560 - RNA, 17 nt, Human
cugaucucucgugauug

SEQ ID NO: 1198561 - RNA, 13 nt, Human
cguuaaaauacca

SEQ ID NO: 1198562 - RNA, 22 nt, Human
cuaaaguguauuuuuuuacuaa

SEQ ID NO: 1198563 - RNA, 19 nt, Human
cuaaaggcuaccuuuguau

SEQ ID NO: 1198564 - RNA, 17 nt, Human
cuaaaggcuaccuuugu

SEQ ID NO: 1198565 - RNA, 16 nt, Human
cuaaaggcuaccuuug

SEQ ID NO: 1198566 - RNA, 15 nt, Human
cuaaaggcuaccuuu

SEQ ID NO: 1198567 - RNA, 15 nt, Human
cuaaagcugccagcc

SEQ ID NO: 1198568 - RNA, 14 nt, Human
cuaaagcugccagc

SEQ ID NO: 1198569 - RNA, 15 nt, Human
cggagacggaguccc

SEQ ID NO: 1198570 - RNA, 13 nt, Human
cgguguggagaag

SEQ ID NO: 1198571 - RNA, 16 nt, Human
cguacacauuuuauuu

SEQ ID NO: 1198572 - RNA, 13 nt, Human
cguacacauuuua

SEQ ID NO: 1198573 - RNA, 13 nt, Human
cgaguagcuggga

SEQ ID NO: 1198574 - RNA, 23 nt, Human
cgcuggaccuugaacuggguacu

SEQ ID NO: 1198575 - RNA, 19 nt, Human
cgcuggaccuugaacuggg

SEQ ID NO: 1198576 - RNA, 18 nt, Human
cgcugccccuggcagccc

SEQ ID NO: 1198577 - RNA, 17 nt, Human
cgcugccccuggcagcc

SEQ ID NO: 1198578 - RNA, 16 nt, Human
cgcugccccuggcagc

SEQ ID NO: 1198579 - RNA, 16 nt, Human
cgccuuaaggauguuc

SEQ ID NO: 1198580 - RNA, 20 nt, Human
cgcuggggccaguugguccc

SEQ ID NO: 1198581 - RNA, 17 nt, Human
cgcuggggccaguuggu

SEQ ID NO: 1198582 - RNA, 14 nt, Human
cuagggaagauaau

SEQ ID NO: 1198583 - RNA, 19 nt, Human
cuaguuugauuaaauucuu

SEQ ID NO: 1198584 - RNA, 17 nt, Human
cuaguuugauuaaauuc

SEQ ID NO: 1198585 - RNA, 21 nt, Human
cuaguuugauuaaauucuugc

SEQ ID NO: 1198586 - RNA, 20 nt, Human
cuaguuugauuaaauucuug

SEQ ID NO: 1198587 - RNA, 13 nt, Human
cuaggccugggga

SEQ ID NO: 1198588 - RNA, 12 nt, Human
cuaggccugggg

SEQ ID NO: 1198589 - RNA, 19 nt, Human
cuaggccuggccagaugca

SEQ ID NO: 1198590 - RNA, 18 nt, Human
cuaggccuggccagaugc

SEQ ID NO: 1198591 - RNA, 15 nt, Human
cuaggccuggccaga

SEQ ID NO: 1198592 - RNA, 14 nt, Human
cuaggccuggccag

SEQ ID NO: 1198593 - RNA, 13 nt, Human
cuaggccuggcca

SEQ ID NO: 1198594 - RNA, 19 nt, Human
cuagccagaggagagagga

SEQ ID NO: 1198595 - RNA, 20 nt, Human
cuagcauacguacacauuuu

SEQ ID NO: 1198596 - RNA, 19 nt, Human
cuagcauacguacacauuu

SEQ ID NO: 1198597 - RNA, 18 nt, Human
cuagcauacguacacauu

SEQ ID NO: 1198598 - RNA, 16 nt, Human
cuagcauacguacaca

SEQ ID NO: 1198599 - RNA, 23 nt, Human
cuaccugaggggccucuuauggg

SEQ ID NO: 1198600 - RNA, 19 nt, Human
cuaccugaggggccucuua

SEQ ID NO: 1198601 - RNA, 16 nt, Human
cuaccugaggggccuc

SEQ ID NO: 1198602 - RNA, 18 nt, Human
cucaccugccccucaacu

SEQ ID NO: 1198603 - RNA, 16 nt, Human
cucaccugccccucaa

SEQ ID NO: 1198604 - RNA, 14 nt, Human
cucaccugccccuc

SEQ ID NO: 1198605 - RNA, 13 nt, Human
cucaccugccccu

SEQ ID NO: 1198606 - RNA, 17 nt, Human
cucaccucucccuugga

SEQ ID NO: 1198607 - RNA, 16 nt, Human
cucaccucucccuugg

SEQ ID NO: 1198608 - RNA, 15 nt, Human
cucaccucucccuug

SEQ ID NO: 1198609 - RNA, 14 nt, Human
cucaccucucccuu

SEQ ID NO: 1198610 - RNA, 13 nt, Human
cucaccucucccu

SEQ ID NO: 1198611 - RNA, 14 nt, Human
cucacaaaggaugc

SEQ ID NO: 1198612 - RNA, 12 nt, Human
cucaaauaacua

SEQ ID NO: 1198613 - RNA, 21 nt, Human
cucacacaugagcaucaggcc

SEQ ID NO: 1198614 - RNA, 14 nt, Human
cucacacaugagca

SEQ ID NO: 1198615 - RNA, 18 nt, Human
cucaaaaaaagaaaaaga

SEQ ID NO: 1198616 - RNA, 17 nt, Human
cuauguugcccaggcag

SEQ ID NO: 1198617 - RNA, 16 nt, Human
cuauguugcccaggca

SEQ ID NO: 1198618 - RNA, 15 nt, Human
cuauguugcccaggc

SEQ ID NO: 1198619 - RNA, 22 nt, Human
cuauguguagggcgggaggaug

SEQ ID NO: 1198620 - RNA, 19 nt, Human
cuauguaucaaugaguaac

SEQ ID NO: 1198621 - RNA, 20 nt, Human
cuaucucccccagccccauc

SEQ ID NO: 1198622 - RNA, 20 nt, Human
ccugguggcagugggagcug

SEQ ID NO: 1198623 - RNA, 19 nt, Human
ccugguggcagugggagcu

SEQ ID NO: 1198624 - RNA, 18 nt, Human
ccugguggcagugggagc

SEQ ID NO: 1198625 - RNA, 13 nt, Human
ccugguguggaag

SEQ ID NO: 1198626 - RNA, 15 nt, Human
ccuggggagaaagua

SEQ ID NO: 1198627 - RNA, 21 nt, Human
ccuggccccucagggucccug

SEQ ID NO: 1198628 - RNA, 20 nt, Human
ccuggccccucagggucccu

SEQ ID NO: 1198629 - RNA, 18 nt, Human
ccuggccccucagggucc

SEQ ID NO: 1198630 - RNA, 18 nt, Human
ccuggauggggcugcacc

SEQ ID NO: 1198631 - RNA, 17 nt, Human
ccuggauggggcugcac

SEQ ID NO: 1198632 - RNA, 15 nt, Human
ccuggauggggcugc

SEQ ID NO: 1198633 - RNA, 17 nt, Human
ccugcccaccuggccuc

SEQ ID NO: 1198634 - RNA, 15 nt, Human
ccugcccaccuggcc

SEQ ID NO: 1198635 - RNA, 16 nt, Human
ccugccucagccuccc

SEQ ID NO: 1198636 - RNA, 15 nt, Human
ccugccucagccucc

SEQ ID NO: 1198637 - RNA, 22 nt, Human
ccugcccaggccccugccaccc

SEQ ID NO: 1198638 - RNA, 21 nt, Human
ccugcccaggccccugccacc

SEQ ID NO: 1198639 - RNA, 19 nt, Human
ccugcccaggccccugcca

SEQ ID NO: 1198640 - RNA, 19 nt, Human
ccugcccaccuggccucug

SEQ ID NO: 1198641 - RNA, 18 nt, Human
ccugcccaccuggccucu

SEQ ID NO: 1198642 - RNA, 15 nt, Human
ccugcaggcagccag

SEQ ID NO: 1198643 - RNA, 14 nt, Human
ccugcaggcagcca

SEQ ID NO: 1198644 - RNA, 13 nt, Human
ccugcaggcagcc

SEQ ID NO: 1198645 - RNA, 12 nt, Human
ccugcaggcagc

SEQ ID NO: 1198646 - RNA, 16 nt, Human
ccucuuugagugaagc

SEQ ID NO: 1198647 - RNA, 15 nt, Human
ccucuuugagugaag

SEQ ID NO: 1198648 - RNA, 19 nt, Human
ccucuuucccucccuuccu

SEQ ID NO: 1198649 - RNA, 14 nt, Human
ccuccgccucuugg

SEQ ID NO: 1198650 - RNA, 15 nt, Human
ccucgaacuggcugc

SEQ ID NO: 1198651 - RNA, 18 nt, Human
ccuccuuuucacaguucu

SEQ ID NO: 1198652 - RNA, 23 nt, Human
ccuccuuugugaggaagccgcug

SEQ ID NO: 1198653 - RNA, 23 nt, Human
ccucaacucuccuccagagucag

SEQ ID NO: 1198654 - RNA, 21 nt, Human
ccucaacucuccuccagaguc

SEQ ID NO: 1198655 - RNA, 15 nt, Human
ccucaaccuccuggg

SEQ ID NO: 1198656 - RNA, 16 nt, Human
ccucaacaccucugca

SEQ ID NO: 1198657 - RNA, 12 nt, Human
ccucccaucacc

SEQ ID NO: 1198658 - RNA, 20 nt, Human
ccuccaagaccuucuccuuc

SEQ ID NO: 1198659 - RNA, 19 nt, Human
ccuccaagaccuucuccuu

SEQ ID NO: 1198660 - RNA, 17 nt, Human
ccuccaagaccuucucc

SEQ ID NO: 1198661 - RNA, 16 nt, Human
ccuccaagaccuucuc

SEQ ID NO: 1198662 - RNA, 17 nt, Human
ccucccaucacccgcua

SEQ ID NO: 1198663 - RNA, 23 nt, Human
ccucaagugauucuccugccuca

SEQ ID NO: 1198664 - RNA, 20 nt, Human
ccucaagugauucuccugcc

SEQ ID NO: 1198665 - RNA, 16 nt, Human
ccucaaccuccugggc

SEQ ID NO: 1198666 - RNA, 18 nt, Human
ccucaggcaggugggaug

SEQ ID NO: 1198667 - RNA, 12 nt, Human
ccucaggcaggu

SEQ ID NO: 1198668 - RNA, 10 nt, Human
ccucaggccu

SEQ ID NO: 1198669 - RNA, 19 nt, Human
ccuagccuuagaagucaca

SEQ ID NO: 1198670 - RNA, 23 nt, Human
ccuagccugugccucugggacug

SEQ ID NO: 1198671 - RNA, 22 nt, Human
ccuagccuuagaagucacacag

SEQ ID NO: 1198672 - RNA, 18 nt, Human
ccggcaggguccuagaaa

SEQ ID NO: 1198673 - RNA, 18 nt, Human
ccggccaccugcggugcu

SEQ ID NO: 1198674 - RNA, 17 nt, Human
ccggccaccugcggugc

SEQ ID NO: 1198675 - RNA, 23 nt, Human
ccgcagcccugcagagggcacag

SEQ ID NO: 1198676 - RNA, 18 nt, Human
ccgcagcccugcagaggg

SEQ ID NO: 1198677 - RNA, 14 nt, Human
ccgcagcccugcag

SEQ ID NO: 1198678 - RNA, 15 nt, Human
cccugugggccccca

SEQ ID NO: 1198679 - RNA, 17 nt, Human
cccugugauggggcccu

SEQ ID NO: 1198680 - RNA, 15 nt, Human
cccugugauggggcc

SEQ ID NO: 1198681 - RNA, 23 nt, Human
cccugugaguacuacaguccucc

SEQ ID NO: 1198682 - RNA, 21 nt, Human
cccugugaguacuacaguccu

SEQ ID NO: 1198683 - RNA, 14 nt, Human
cccuccuuucacca

SEQ ID NO: 1198684 - RNA, 23 nt, Human
cccuuuuuuggcugcugaaggcu

SEQ ID NO: 1198685 - RNA, 22 nt, Human
cccuuuuuuggcugcugaaggc

SEQ ID NO: 1198686 - RNA, 21 nt, Human
cccuuuuuuggcugcugaagg

SEQ ID NO: 1198687 - RNA, 19 nt, Human
cccuucucuccagccccug

SEQ ID NO: 1198688 - RNA, 14 nt, Human
cccuucucuccagc

SEQ ID NO: 1198689 - RNA, 16 nt, Human
cccaacucaccccagc

SEQ ID NO: 1198690 - RNA, 15 nt, Human
cccaacucaccccag

SEQ ID NO: 1198691 - RNA, 23 nt, Human
cccacugcuuuuggucuguguga

SEQ ID NO: 1198692 - RNA, 13 nt, Human
cccacucccugca

SEQ ID NO: 1198693 - RNA, 12 nt, Human
cccacccccacc

SEQ ID NO: 1198694 - RNA, 15 nt, Human
cccaagcucugcucc

SEQ ID NO: 1198695 - RNA, 14 nt, Human
cccaagcucugcuc

SEQ ID NO: 1198696 - RNA, 13 nt, Human
cccaagcucugcu

SEQ ID NO: 1198697 - RNA, 20 nt, Human
cccaacucaccccagcccca

SEQ ID NO: 1198698 - RNA, 17 nt, Human
cccaacucaccccagcc

SEQ ID NO: 1198699 - RNA, 13 nt, Human
ccaguuggucccc

SEQ ID NO: 1198700 - RNA, 21 nt, Human
ccaucccauaugccugggcag

SEQ ID NO: 1198701 - RNA, 20 nt, Human
ccaucccauaugccugggca

SEQ ID NO: 1198702 - RNA, 19 nt, Human
ccaucccauaugccugggc

SEQ ID NO: 1198703 - RNA, 20 nt, Human
ccaucccaaacccuucagug

SEQ ID NO: 1198704 - RNA, 20 nt, Human
ccaguuggucccccuuccau

SEQ ID NO: 1198705 - RNA, 18 nt, Human
ccaguuggucccccuucc

SEQ ID NO: 1198706 - RNA, 19 nt, Human
ccauccagguucagcuugu

SEQ ID NO: 1198707 - RNA, 13 nt, Human
ccaugaguccccu

SEQ ID NO: 1198708 - RNA, 23 nt, Human
ccaugaggaacaaggcaaggcug

SEQ ID NO: 1198709 - RNA, 20 nt, Human
ccaugaggaacaaggcaagg

SEQ ID NO: 1198710 - RNA, 16 nt, Human
ccaggcuggcgugcag

SEQ ID NO: 1198711 - RNA, 12 nt, Human
ccaggcuggcgu

SEQ ID NO: 1198712 - RNA, 23 nt, Human
ccaggcaggucuugaacuccugg

SEQ ID NO: 1198713 - RNA, 14 nt, Human
ccaggcaggucuug

SEQ ID NO: 1198714 - RNA, 12 nt, Human
ccaggcaggucu

SEQ ID NO: 1198715 - RNA, 24 nt, Human
ccagccccuucugacccaugcugc

SEQ ID NO: 1198716 - RNA, 23 nt, Human
ccagccccuucugacccaugcug

SEQ ID NO: 1198717 - RNA, 18 nt, Human
ccagccccauccucugua

SEQ ID NO: 1198718 - RNA, 17 nt, Human
ccagccccauccucugu

SEQ ID NO: 1198719 - RNA, 15 nt, Human
ccagccccauccucu

SEQ ID NO: 1198720 - RNA, 17 nt, Human
ccagccccagugcccac

SEQ ID NO: 1198721 - RNA, 14 nt, Human
ccagcagagcaccu

SEQ ID NO: 1198722 - RNA, 13 nt, Human
ccagcagagcacc

SEQ ID NO: 1198723 - RNA, 12 nt, Human
ccagcagagcac

SEQ ID NO: 1198724 - RNA, 12 nt, Human
ccagcagaaaug

SEQ ID NO: 1198725 - RNA, 15 nt, Human
ccccugacaacacuc

SEQ ID NO: 1198726 - RNA, 16 nt, Human
ccccugccacccuggg

SEQ ID NO: 1198727 - RNA, 14 nt, Human
ccccugccacccug

SEQ ID NO: 1198728 - RNA, 22 nt, Human
cccgaauagcugggacuacagg

SEQ ID NO: 1198729 - RNA, 18 nt, Human
cccgaauagcugggacua

SEQ ID NO: 1198730 - RNA, 17 nt, Human
cccgaauagcugggacu

SEQ ID NO: 1198731 - RNA, 16 nt, Human
ccccuucugacccaug

SEQ ID NO: 1198732 - RNA, 14 nt, Human
ccccuucugaccca

SEQ ID NO: 1198733 - RNA, 13 nt, Human
ccccuucugaccc

SEQ ID NO: 1198734 - RNA, 16 nt, Human
cccggccccugcuggu

SEQ ID NO: 1198735 - RNA, 15 nt, Human
cccggccccugcugg

SEQ ID NO: 1198736 - RNA, 15 nt, Human
cccgggaagggggcu

SEQ ID NO: 1198737 - RNA, 11 nt, Human
cccggcuccag

SEQ ID NO: 1198738 - RNA, 16 nt, Human
cccucaacaccucugc

SEQ ID NO: 1198739 - RNA, 22 nt, Human
cccgggaagggggcugggacau

SEQ ID NO: 1198740 - RNA, 21 nt, Human
cccgggaagggggcugggaca

SEQ ID NO: 1198741 - RNA, 18 nt, Human
cccgggaagggggcuggg

SEQ ID NO: 1198742 - RNA, 16 nt, Human
cccucaacucuccucc

SEQ ID NO: 1198743 - RNA, 20 nt, Human
cccucaacucuccuccagag

SEQ ID NO: 1198744 - RNA, 23 nt, Human
ccccgacccuugccgucuaccug

SEQ ID NO: 1198745 - RNA, 14 nt, Human
ccccgcacugggcu

SEQ ID NO: 1198746 - RNA, 15 nt, Human
cccauuugcuccuuu

SEQ ID NO: 1198747 - RNA, 15 nt, Human
cccauucugccugcc

SEQ ID NO: 1198748 - RNA, 14 nt, Human
cccauucugccugc

SEQ ID NO: 1198749 - RNA, 19 nt, Human
cccauucugccugcccagg

SEQ ID NO: 1198750 - RNA, 20 nt, Human
cccauucugccugcccaggc

SEQ ID NO: 1198751 - RNA, 10 nt, Human
ccccagcccc

SEQ ID NO: 1198752 - RNA, 21 nt, Human
ccccagauugcaacaggcugg

SEQ ID NO: 1198753 - RNA, 20 nt, Human
ccccagauugcaacaggcug

SEQ ID NO: 1198754 - RNA, 15 nt, Human
ccccagauugcaaca

SEQ ID NO: 1198755 - RNA, 22 nt, Human
cccauccucuguacagagccca

SEQ ID NO: 1198756 - RNA, 21 nt, Human
cccauccucuguacagagccc

SEQ ID NO: 1198757 - RNA, 22 nt, Human
cccaggcuuagucacugagaca

SEQ ID NO: 1198758 - RNA, 18 nt, Human
cccaggaaaggcuccagg

SEQ ID NO: 1198759 - RNA, 17 nt, Human
cccaggaaaggcuccag

SEQ ID NO: 1198760 - RNA, 19 nt, Human
cccaggaaaggcuccagga

SEQ ID NO: 1198761 - RNA, 16 nt, Human
cccaggaaaggcucca

SEQ ID NO: 1198762 - RNA, 12 nt, Human
caccucagccuc

SEQ ID NO: 1198763 - RNA, 14 nt, Human
caccuuugaagaag

SEQ ID NO: 1198764 - RNA, 14 nt, Human
caccuuucccaucu

SEQ ID NO: 1198765 - RNA, 16 nt, Human
caccuuggcugcaggg

SEQ ID NO: 1198766 - RNA, 15 nt, Human
caccuuggcugcagg

SEQ ID NO: 1198767 - RNA, 18 nt, Human
caccuuggcugcagggag

SEQ ID NO: 1198768 - RNA, 14 nt, Human
cacuccagccuggg

SEQ ID NO: 1198769 - RNA, 13 nt, Human
cacuccagccugg

SEQ ID NO: 1198770 - RNA, 21 nt, Human
cacuacauucuguuaaucauu

SEQ ID NO: 1198771 - RNA, 17 nt, Human
cacuacauucuguuaau

SEQ ID NO: 1198772 - RNA, 16 nt, Human
cacuacauucuguuaa

SEQ ID NO: 1198773 - RNA, 21 nt, Human
cacuacauuauaaaugucucu

SEQ ID NO: 1198774 - RNA, 15 nt, Human
cacggcucacugcag

SEQ ID NO: 1198775 - RNA, 14 nt, Human
cacggcucacugca

SEQ ID NO: 1198776 - RNA, 13 nt, Human
cacggccaggcca

SEQ ID NO: 1198777 - RNA, 12 nt, Human
cacggccaggcc

SEQ ID NO: 1198778 - RNA, 22 nt, Human
cacucuuauugcccacgcugga

SEQ ID NO: 1198779 - RNA, 21 nt, Human
cacucuuauugcccacgcugg

SEQ ID NO: 1198780 - RNA, 20 nt, Human
cacucuuauugcccacgcug

SEQ ID NO: 1198781 - RNA, 13 nt, Human
cacuuucuagcca

SEQ ID NO: 1198782 - RNA, 17 nt, Human
cacuuucuagccagagg

SEQ ID NO: 1198783 - RNA, 16 nt, Human
cacuuucuagccagag

SEQ ID NO: 1198784 - RNA, 18 nt, Human
cacuuucuagccagagga

SEQ ID NO: 1198785 - RNA, 18 nt, Human
cacuuguguuaugaagca

SEQ ID NO: 1198786 - RNA, 17 nt, Human
cacugccaugccagcuu

SEQ ID NO: 1198787 - RNA, 23 nt, Human
cacugcagccucaaccuccuggg

SEQ ID NO: 1198788 - RNA, 22 nt, Human
cacugcagccucaaccuccugg

SEQ ID NO: 1198789 - RNA, 21 nt, Human
cacugcagccucaaccuccug

SEQ ID NO: 1198790 - RNA, 20 nt, Human
cacugcagccucaaccuccu

SEQ ID NO: 1198791 - RNA, 19 nt, Human
cacugcagccucaaccucc

SEQ ID NO: 1198792 - RNA, 23 nt, Human
cacuguugcccaggcuggcgugc

SEQ ID NO: 1198793 - RNA, 19 nt, Human
cacuguugcccaggcuggc

SEQ ID NO: 1198794 - RNA, 18 nt, Human
cacuguugcccaggcugg

SEQ ID NO: 1198795 - RNA, 20 nt, Human
cacugggcuuggggaccaga

SEQ ID NO: 1198796 - RNA, 17 nt, Human
cagaaauguguuaucac

SEQ ID NO: 1198797 - RNA, 16 nt, Human
cagaaauguacagcaa

SEQ ID NO: 1198798 - RNA, 16 nt, Human
cagaaguuucugccgc

SEQ ID NO: 1198799 - RNA, 14 nt, Human
cagaaguuucugcc

SEQ ID NO: 1198800 - RNA, 21 nt, Human
caaggccaaaggaagcacaug

SEQ ID NO: 1198801 - RNA, 20 nt, Human
caaggccaaaggaagcacau

SEQ ID NO: 1198802 - RNA, 19 nt, Human
caaggccaaaggaagcaca

SEQ ID NO: 1198803 - RNA, 18 nt, Human
caaggcaaggcugucaau

SEQ ID NO: 1198804 - RNA, 17 nt, Human
caaggcaaggcugucaa

SEQ ID NO: 1198805 - RNA, 21 nt, Human
cacaagcuccaagcucccagg

SEQ ID NO: 1198806 - RNA, 20 nt, Human
cacaagcuccaagcucccag

SEQ ID NO: 1198807 - RNA, 19 nt, Human
cacaagcuccaagcuccca

SEQ ID NO: 1198808 - RNA, 18 nt, Human
cacaagcuccaagcuccc

SEQ ID NO: 1198809 - RNA, 20 nt, Human
cacaagagcccaggccuccu

SEQ ID NO: 1198810 - RNA, 19 nt, Human
cacaagagcccaggccucc

SEQ ID NO: 1198811 - RNA, 18 nt, Human
cacaagagcccaggccuc

SEQ ID NO: 1198812 - RNA, 15 nt, Human
caaugggagcucaug

SEQ ID NO: 1198813 - RNA, 21 nt, Human
caaugcuggcuguuggcuggg

SEQ ID NO: 1198814 - RNA, 20 nt, Human
caaugcuggcuguuggcugg

SEQ ID NO: 1198815 - RNA, 13 nt, Human
caaugcuggcugu

SEQ ID NO: 1198816 - RNA, 18 nt, Human
cacagcucuucuccaggc

SEQ ID NO: 1198817 - RNA, 17 nt, Human
cacagcucuucuccagg

SEQ ID NO: 1198818 - RNA, 15 nt, Human
cacagcucuucucca

SEQ ID NO: 1198819 - RNA, 14 nt, Human
cacagcucuucucc

SEQ ID NO: 1198820 - RNA, 19 nt, Human
cacagcucuguccugggag

SEQ ID NO: 1198821 - RNA, 18 nt, Human
cacagcucuguccuggga

SEQ ID NO: 1198822 - RNA, 16 nt, Human
cacagcucuguccugg

SEQ ID NO: 1198823 - RNA, 15 nt, Human
cacagcucuguccug

SEQ ID NO: 1198824 - RNA, 14 nt, Human
cacagcucuguccu

SEQ ID NO: 1198825 - RNA, 11 nt, Human
cacagcucugu

SEQ ID NO: 1198826 - RNA, 18 nt, Human
cacagacccugcccugug

SEQ ID NO: 1198827 - RNA, 17 nt, Human
cacagacccugcccugu

SEQ ID NO: 1198828 - RNA, 16 nt, Human
cacagacccugcccug

SEQ ID NO: 1198829 - RNA, 14 nt, Human
cacagacccugccc

SEQ ID NO: 1198830 - RNA, 20 nt, Human
cacacauuuuuuaaaugcac

SEQ ID NO: 1198831 - RNA, 19 nt, Human
cacacauuuuuuaaaugca

SEQ ID NO: 1198832 - RNA, 16 nt, Human
cacacauuuuuuaaau

SEQ ID NO: 1198833 - RNA, 12 nt, Human
cacacauuuuuu

SEQ ID NO: 1198834 - RNA, 11 nt, Human
cacacauuuuu

SEQ ID NO: 1198835 - RNA, 10 nt, Human
cacacauuuu

SEQ ID NO: 1198836 - RNA, 21 nt, Human
cacauuuuauuuuauuaugca

SEQ ID NO: 1198837 - RNA, 20 nt, Human
cacauuuuauuuuauuaugc

SEQ ID NO: 1198838 - RNA, 19 nt, Human
cacauuuuauuuuauuaug

SEQ ID NO: 1198839 - RNA, 17 nt, Human
caccaacauacucccau

SEQ ID NO: 1198840 - RNA, 16 nt, Human
caccaacgucugugcc

SEQ ID NO: 1198841 - RNA, 14 nt, Human
caccaacgucugug

SEQ ID NO: 1198842 - RNA, 16 nt, Human
cacccaggagccccga

SEQ ID NO: 1198843 - RNA, 18 nt, Human
cacccaccucagccuccc

SEQ ID NO: 1198844 - RNA, 16 nt, Human
caccagccccagugcc

SEQ ID NO: 1198845 - RNA, 13 nt, Human
caccagccccagu

SEQ ID NO: 1198846 - RNA, 18 nt, Human
auucaacagguuuuccug

SEQ ID NO: 1198847 - RNA, 19 nt, Human
auuaaaugcccagccccuu

SEQ ID NO: 1198848 - RNA, 17 nt, Human
auuaaaugcccagcccc

SEQ ID NO: 1198849 - RNA, 11 nt, Human
auuaaauuaug

SEQ ID NO: 1198850 - RNA, 16 nt, Human
auucuugcaaaguauc

SEQ ID NO: 1198851 - RNA, 15 nt, Human
auucuugcaaaguau

SEQ ID NO: 1198852 - RNA, 14 nt, Human
auucuugcaaagua

SEQ ID NO: 1198853 - RNA, 22 nt, Human
auucuucuguacgucugacagg

SEQ ID NO: 1198854 - RNA, 20 nt, Human
auucuucugcuucagccucc

SEQ ID NO: 1198855 - RNA, 19 nt, Human
auucuucugcuucagccuc

SEQ ID NO: 1198856 - RNA, 19 nt, Human
auucucuaguuugauuaaa

SEQ ID NO: 1198857 - RNA, 18 nt, Human
auucucuaguuugauuaa

SEQ ID NO: 1198858 - RNA, 17 nt, Human
auucucuaguuugauua

SEQ ID NO: 1198859 - RNA, 22 nt, Human
auucuccuuguguuacuaaguu

SEQ ID NO: 1198860 - RNA, 21 nt, Human
auucuccuuguguuacuaagu

SEQ ID NO: 1198861 - RNA, 19 nt, Human
auucuccuuguguuacuaa

SEQ ID NO: 1198862 - RNA, 18 nt, Human
auucuccuuguguuacua

SEQ ID NO: 1198863 - RNA, 21 nt, Human
auuuaaugaaagacuguacaa

SEQ ID NO: 1198864 - RNA, 20 nt, Human
auuuaaugaaagacuguaca

SEQ ID NO: 1198865 - RNA, 16 nt, Human
auuuaaugaaagacug

SEQ ID NO: 1198866 - RNA, 18 nt, Human
caacucaccccagcccca

SEQ ID NO: 1198867 - RNA, 18 nt, Human
caagaccacguuucuaaa

SEQ ID NO: 1198868 - RNA, 17 nt, Human
caagaccacguuucuaa

SEQ ID NO: 1198869 - RNA, 22 nt, Human
caagaauugaagcaggacuaaa

SEQ ID NO: 1198870 - RNA, 14 nt, Human
caacucuccuccag

SEQ ID NO: 1198871 - RNA, 18 nt, Human
caaagauauuuugcuuug

SEQ ID NO: 1198872 - RNA, 22 nt, Human
caaagcagugcaugcugucccu

SEQ ID NO: 1198873 - RNA, 21 nt, Human
caaagcagugcaugcuguccc

SEQ ID NO: 1198874 - RNA, 18 nt, Human
caaagcagugcaugcugu

SEQ ID NO: 1198875 - RNA, 16 nt, Human
caaagauauuuugcuu

SEQ ID NO: 1198876 - RNA, 14 nt, Human
caaagauauuuugc

SEQ ID NO: 1198877 - RNA, 21 nt, Human
caaaguaucccuacuguaauu

SEQ ID NO: 1198878 - RNA, 19 nt, Human
caaaguaucccuacuguaa

SEQ ID NO: 1198879 - RNA, 23 nt, Human
caaaugcuguaacuuucugaaau

SEQ ID NO: 1198880 - RNA, 14 nt, Human
auuuuuagacagag

SEQ ID NO: 1198881 - RNA, 18 nt, Human
auuuuuaagugcugcauu

SEQ ID NO: 1198882 - RNA, 16 nt, Human
auuuuuaagugcugca

SEQ ID NO: 1198883 - RNA, 19 nt, Human
auuuuuaagugcugcauuu

SEQ ID NO: 1198884 - RNA, 23 nt, Human
auuuuuuuuuccuucagugccuu

SEQ ID NO: 1198885 - RNA, 22 nt, Human
auuuuuuuuuccuucagugccu

SEQ ID NO: 1198886 - RNA, 20 nt, Human
auuuuuuuuuccuucagugc

SEQ ID NO: 1198887 - RNA, 18 nt, Human
auuuuuuuuuccuucagu

SEQ ID NO: 1198888 - RNA, 16 nt, Human
auuuuuuugagacaga

SEQ ID NO: 1198889 - RNA, 14 nt, Human
caaacccuucagug

SEQ ID NO: 1198890 - RNA, 19 nt, Human
caucaggccaggcccucug

SEQ ID NO: 1198891 - RNA, 16 nt, Human
caucaggccaggcccu

SEQ ID NO: 1198892 - RNA, 20 nt, Human
caucaggccaggcccucugc

SEQ ID NO: 1198893 - RNA, 15 nt, Human
caucaggccaggccc

SEQ ID NO: 1198894 - RNA, 21 nt, Human
cauccccuguagagugggagc

SEQ ID NO: 1198895 - RNA, 14 nt, Human
cauccccuguagag

SEQ ID NO: 1198896 - RNA, 19 nt, Human
caucccauaugccugggca

SEQ ID NO: 1198897 - RNA, 23 nt, Human
cauagcagagaaugaaagggccc

SEQ ID NO: 1198898 - RNA, 22 nt, Human
cauagcagagaaugaaagggcc

SEQ ID NO: 1198899 - RNA, 19 nt, Human
cauagcagagaaugaaagg

SEQ ID NO: 1198900 - RNA, 15 nt, Human
cagugggagcugccu

SEQ ID NO: 1198901 - RNA, 22 nt, Human
cauauucaggaagcucagggcc

SEQ ID NO: 1198902 - RNA, 20 nt, Human
cauauucaggaagcucaggg

SEQ ID NO: 1198903 - RNA, 15 nt, Human
cauauucaggaagcu

SEQ ID NO: 1198904 - RNA, 14 nt, Human
cauauucaggaagc

SEQ ID NO: 1198905 - RNA, 22 nt, Human
cauaugccugggcagaaggaag

SEQ ID NO: 1198906 - RNA, 20 nt, Human
cauaugccugggcagaagga

SEQ ID NO: 1198907 - RNA, 15 nt, Human
cauaugccugggcag

SEQ ID NO: 1198908 - RNA, 13 nt, Human
caugcugcccugu

SEQ ID NO: 1198909 - RNA, 12 nt, Human
caugcugcccug

SEQ ID NO: 1198910 - RNA, 13 nt, Human
caugcuccuggcc

SEQ ID NO: 1198911 - RNA, 16 nt, Human
caugcacgugugugca

SEQ ID NO: 1198912 - RNA, 24 nt, Human
caugauuaaccacuucagcugacu

SEQ ID NO: 1198913 - RNA, 23 nt, Human
caugauuaaccacuucagcugac

SEQ ID NO: 1198914 - RNA, 22 nt, Human
caugauuaaccacuucagcuga

SEQ ID NO: 1198915 - RNA, 23 nt, Human
caugacacgaauauugcugaugg

SEQ ID NO: 1198916 - RNA, 21 nt, Human
caugacacgaauauugcugau

SEQ ID NO: 1198917 - RNA, 23 nt, Human
caugaaguaauaugcacacauuu

SEQ ID NO: 1198918 - RNA, 22 nt, Human
caugaaguaauaugcacacauu

SEQ ID NO: 1198919 - RNA, 19 nt, Human
caugaaguaauaugcacac

SEQ ID NO: 1198920 - RNA, 15 nt, Human
caugaaguaauaugc

SEQ ID NO: 1198921 - RNA, 15 nt, Human
caugcugcccuguga

SEQ ID NO: 1198922 - RNA, 14 nt, Human
caugcugcccugug

SEQ ID NO: 1198923 - RNA, 13 nt, Human
cauguuggccagg

SEQ ID NO: 1198924 - RNA, 12 nt, Human
cauguuggccag

SEQ ID NO: 1198925 - RNA, 20 nt, Human
cauguccaagaagcccagga

SEQ ID NO: 1198926 - RNA, 19 nt, Human
cauguccaagaagcccagg

SEQ ID NO: 1198927 - RNA, 18 nt, Human
cauguccaagaagcccag

SEQ ID NO: 1198928 - RNA, 23 nt, Human
cauuaucuagauacuguaucaug

SEQ ID NO: 1198929 - RNA, 22 nt, Human
cauuaggugugacugaauuucu

SEQ ID NO: 1198930 - RNA, 12 nt, Human
cauuccuguucc

SEQ ID NO: 1198931 - RNA, 16 nt, Human
ccaaggccaaaggaag

SEQ ID NO: 1198932 - RNA, 13 nt, Human
ccaagaagcccag

SEQ ID NO: 1198933 - RNA, 16 nt, Human
ccaacgucugugccau

SEQ ID NO: 1198934 - RNA, 15 nt, Human
ccaacgucugugcca

SEQ ID NO: 1198935 - RNA, 13 nt, Human
ccaacgucugugc

SEQ ID NO: 1198936 - RNA, 22 nt, Human
ccaaauggaaaugggcagagca

SEQ ID NO: 1198937 - RNA, 19 nt, Human
ccaagcuggucccacucag

SEQ ID NO: 1198938 - RNA, 12 nt, Human
ccaagcuggucc

SEQ ID NO: 1198939 - RNA, 15 nt, Human
ccaagaagcccagga

SEQ ID NO: 1198940 - RNA, 14 nt, Human
ccaagaagcccagg

SEQ ID NO: 1198941 - RNA, 15 nt, Human
ccaaggccaaaggaa

SEQ ID NO: 1198942 - RNA, 20 nt, Human
ccaagcuggucccacucagu

SEQ ID NO: 1198943 - RNA, 16 nt, Human
cauuuuuuaaaugcac

SEQ ID NO: 1198944 - RNA, 15 nt, Human
cauuuuuuaaaugca

SEQ ID NO: 1198945 - RNA, 19 nt, Human
cauuuuuuaaaugcaccug

SEQ ID NO: 1198946 - RNA, 15 nt, Human
cauuuauucugcuca

SEQ ID NO: 1198947 - RNA, 14 nt, Human
cauuuauucugcuc

SEQ ID NO: 1198948 - RNA, 15 nt, Human
cauuuggauuggaug

SEQ ID NO: 1198949 - RNA, 17 nt, Human
cauuugucacacacuuu

SEQ ID NO: 1198950 - RNA, 22 nt, Human
ccacagagaaaguacuucucca

SEQ ID NO: 1198951 - RNA, 13 nt, Human
ccacgcccccacu

SEQ ID NO: 1198952 - RNA, 19 nt, Human
ccaccuuggcugcagggag

SEQ ID NO: 1198953 - RNA, 18 nt, Human
ccaccuuggcugcaggga

SEQ ID NO: 1198954 - RNA, 18 nt, Human
ccacgcuggaccuugaac

SEQ ID NO: 1198955 - RNA, 13 nt, Human
ccacgcuggagug

SEQ ID NO: 1198956 - RNA, 16 nt, Human
ccaccuuggcugcagg

SEQ ID NO: 1198957 - RNA, 15 nt, Human
ccaccuuggcugcag

SEQ ID NO: 1198958 - RNA, 14 nt, Human
ccaccuuggcugca

SEQ ID NO: 1198959 - RNA, 12 nt, Human
ccaccuuggcug

SEQ ID NO: 1198960 - RNA, 19 nt, Human
ccaccaucaugucuggcua

SEQ ID NO: 1198961 - RNA, 18 nt, Human
ccaccaucaugucuggcu

SEQ ID NO: 1198962 - RNA, 12 nt, Human
caggccuccuac

SEQ ID NO: 1198963 - RNA, 19 nt, Human
caggcugggcuucaguggc

SEQ ID NO: 1198964 - RNA, 17 nt, Human
caggcugggcuucagug

SEQ ID NO: 1198965 - RNA, 16 nt, Human
caggcugggcuucagu

SEQ ID NO: 1198966 - RNA, 15 nt, Human
caggcuggcgugcag

SEQ ID NO: 1198967 - RNA, 22 nt, Human
cagggaguccgaaagggacuug

SEQ ID NO: 1198968 - RNA, 18 nt, Human
cagggaggugaccccagg

SEQ ID NO: 1198969 - RNA, 18 nt, Human
caggcacccaccaucaug

SEQ ID NO: 1198970 - RNA, 23 nt, Human
caggcacccaccaucaugucugg

SEQ ID NO: 1198971 - RNA, 22 nt, Human
caggcacccaccaucaugucug

SEQ ID NO: 1198972 - RNA, 18 nt, Human
caggaggccagccuugac

SEQ ID NO: 1198973 - RNA, 17 nt, Human
caggaggccagccuuga

SEQ ID NO: 1198974 - RNA, 16 nt, Human
caggaggccagccuug

SEQ ID NO: 1198975 - RNA, 15 nt, Human
caggaggccagccuu

SEQ ID NO: 1198976 - RNA, 21 nt, Human
caggccagagggagugacaga

SEQ ID NO: 1198977 - RNA, 19 nt, Human
caggccagagggagugaca

SEQ ID NO: 1198978 - RNA, 23 nt, Human
caggccagagggagugacagagg

SEQ ID NO: 1198979 - RNA, 20 nt, Human
cagucugauucccaagcucu

SEQ ID NO: 1198980 - RNA, 19 nt, Human
cagucugauucccaagcuc

SEQ ID NO: 1198981 - RNA, 23 nt, Human
cagugcaugcugucccuuacgug

SEQ ID NO: 1198982 - RNA, 22 nt, Human
cagugcaugcugucccuuacgu

SEQ ID NO: 1198983 - RNA, 19 nt, Human
cagugcaugcugucccuua

SEQ ID NO: 1198984 - RNA, 15 nt, Human
cagugccaaaaacaa

SEQ ID NO: 1198985 - RNA, 11 nt, Human
cagugggagcu

SEQ ID NO: 1198986 - RNA, 12 nt, Human
cagugcccacag

SEQ ID NO: 1198987 - RNA, 18 nt, Human
cagguuuaagcuguuacu

SEQ ID NO: 1198988 - RNA, 16 nt, Human
cagguuuaagcuguua

SEQ ID NO: 1198989 - RNA, 21 nt, Human
cagguuggugggggccucggu

SEQ ID NO: 1198990 - RNA, 22 nt, Human
cagucaccccggccaccugcgg

SEQ ID NO: 1198991 - RNA, 20 nt, Human
cagucaccccggccaccugc

SEQ ID NO: 1198992 - RNA, 14 nt, Human
cagguugguggggg

SEQ ID NO: 1198993 - RNA, 20 nt, Human
caggugcuaggaacacuccu

SEQ ID NO: 1198994 - RNA, 18 nt, Human
caggugcuaggaacacuc

SEQ ID NO: 1198995 - RNA, 14 nt, Human
caggugcgaaagga

SEQ ID NO: 1198996 - RNA, 20 nt, Human
caggugauccacccaccuca

SEQ ID NO: 1198997 - RNA, 17 nt, Human
caggugauccacccacc

SEQ ID NO: 1198998 - RNA, 16 nt, Human
caggugauccacccac

SEQ ID NO: 1198999 - RNA, 14 nt, Human
caggguuggccccu

SEQ ID NO: 1199000 - RNA, 12 nt, Human
caggguuggccc

SEQ ID NO: 1199001 - RNA, 18 nt, Human
cagggucucacucugucg

SEQ ID NO: 1199002 - RNA, 21 nt, Human
cagggucucacucugucgccc

SEQ ID NO: 1199003 - RNA, 22 nt, Human
cagggucucacucugucgccca

SEQ ID NO: 1199004 - RNA, 13 nt, Human
cagcuccagcuca

SEQ ID NO: 1199005 - RNA, 15 nt, Human
cagcuccagcucacc

SEQ ID NO: 1199006 - RNA, 14 nt, Human
cagcuccagcucac

SEQ ID NO: 1199007 - RNA, 20 nt, Human
cagcuccagcucaccagccc

SEQ ID NO: 1199008 - RNA, 18 nt, Human
cagcuccagcucaccagc

SEQ ID NO: 1199009 - RNA, 17 nt, Human
cagcuccagcucaccag

SEQ ID NO: 1199010 - RNA, 16 nt, Human
cagcuccagcucacca

SEQ ID NO: 1199011 - RNA, 22 nt, Human
cagcuccagcucaccagcccca

SEQ ID NO: 1199012 - RNA, 15 nt, Human
caggaaaggcuccag

SEQ ID NO: 1199013 - RNA, 14 nt, Human
caggaaaggcucca

SEQ ID NO: 1199014 - RNA, 19 nt, Human
cagcuucauuuccuguguc

SEQ ID NO: 1199015 - RNA, 18 nt, Human
cagcuucauuuccugugu

SEQ ID NO: 1199016 - RNA, 15 nt, Human
cagcuucauuuccug

SEQ ID NO: 1199017 - RNA, 19 nt, Human
cagcugugcucuggacagg

SEQ ID NO: 1199018 - RNA, 18 nt, Human
cagcugugcucuggacag

SEQ ID NO: 1199019 - RNA, 21 nt, Human
cagccgagauagccaaggcca

SEQ ID NO: 1199020 - RNA, 21 nt, Human
cagccccuggaugcagccuca

SEQ ID NO: 1199021 - RNA, 19 nt, Human
cagccccuggaugcagccu

SEQ ID NO: 1199022 - RNA, 18 nt, Human
cagccccuggaugcagcc

SEQ ID NO: 1199023 - RNA, 17 nt, Human
cagccccuggaugcagc

SEQ ID NO: 1199024 - RNA, 21 nt, Human
cagcccuuagcagggaaacag

SEQ ID NO: 1199025 - RNA, 16 nt, Human
cagcccuuagcaggga

SEQ ID NO: 1199026 - RNA, 22 nt, Human
cagccccuggaugcagccucac

SEQ ID NO: 1199027 - RNA, 14 nt, Human
cagccccuggaugc

SEQ ID NO: 1199028 - RNA, 13 nt, Human
cagccccuggaug

SEQ ID NO: 1199029 - RNA, 12 nt, Human
cagccccuggau

SEQ ID NO: 1199030 - RNA, 17 nt, Human
cagcggggacagcuccu

SEQ ID NO: 1199031 - RNA, 16 nt, Human
cagcggggacagcucc

SEQ ID NO: 1199032 - RNA, 15 nt, Human
cagcggggacagcuc

SEQ ID NO: 1199033 - RNA, 23 nt, Human
cagcauauucaggaagcucaggg

SEQ ID NO: 1199034 - RNA, 22 nt, Human
cagcauauucaggaagcucagg

SEQ ID NO: 1199035 - RNA, 19 nt, Human
cagcauauucaggaagcuc

SEQ ID NO: 1199036 - RNA, 13 nt, Human
cagccaggccaca

SEQ ID NO: 1199037 - RNA, 12 nt, Human
cagccaggccac

SEQ ID NO: 1199038 - RNA, 22 nt, Human
cagccaggccacaagacccuug

SEQ ID NO: 1199039 - RNA, 20 nt, Human
cagagucagaaguuucugcc

SEQ ID NO: 1199040 - RNA, 20 nt, Human
cagaggggguggccucccaa

SEQ ID NO: 1199041 - RNA, 19 nt, Human
cagaggggguggccuccca

SEQ ID NO: 1199042 - RNA, 18 nt, Human
cagaggggguggccuccc

SEQ ID NO: 1199043 - RNA, 22 nt, Human
cagagggccugcaagggaguga

SEQ ID NO: 1199044 - RNA, 18 nt, Human
cagagcugccaccugccu

SEQ ID NO: 1199045 - RNA, 23 nt, Human
cagaaguuugagaucagccuggg

SEQ ID NO: 1199046 - RNA, 22 nt, Human
cagaaguuugagaucagccugg

SEQ ID NO: 1199047 - RNA, 20 nt, Human
cagaaguuugagaucagccu

SEQ ID NO: 1199048 - RNA, 19 nt, Human
cagaaguuucugccgcagc

SEQ ID NO: 1199049 - RNA, 20 nt, Human
ggccagugugacaaggauug

SEQ ID NO: 1199050 - RNA, 17 nt, Human
ggccaguuggucccccu

SEQ ID NO: 1199051 - RNA, 14 nt, Human
ggccaguugguccc

SEQ ID NO: 1199052 - RNA, 21 nt, Human
ggcccuucucuccagccccug

SEQ ID NO: 1199053 - RNA, 20 nt, Human
ggcccuucucuccagccccu

SEQ ID NO: 1199054 - RNA, 15 nt, Human
ggcccggcuccaggc

SEQ ID NO: 1199055 - RNA, 14 nt, Human
ggccccugcugguu

SEQ ID NO: 1199056 - RNA, 13 nt, Human
ggccccugcuggu

SEQ ID NO: 1199057 - RNA, 13 nt, Human
ggcccggcuccag

SEQ ID NO: 1199058 - RNA, 23 nt, Human
ggccccugcugguucaggguugg

SEQ ID NO: 1199059 - RNA, 23 nt, Human
ggcccuucucuccagccccugga

SEQ ID NO: 1199060 - RNA, 22 nt, Human
ggcccuucucuccagccccugg

SEQ ID NO: 1199061 - RNA, 16 nt, Human
ggagagaagagaaugc

SEQ ID NO: 1199062 - RNA, 23 nt, Human
ggcacucagaagacacugauggg

SEQ ID NO: 1199063 - RNA, 18 nt, Human
ggcacaucagcacgauuu

SEQ ID NO: 1199064 - RNA, 13 nt, Human
ggcacaucagcac

SEQ ID NO: 1199065 - RNA, 23 nt, Human
ggcacagaaaauggaagacagcu

SEQ ID NO: 1199066 - RNA, 21 nt, Human
ggcacagaaaauggaagacag

SEQ ID NO: 1199067 - RNA, 20 nt, Human
ggcacagaaaauggaagaca

SEQ ID NO: 1199068 - RNA, 11 nt, Human
ggcagccccug

SEQ ID NO: 1199069 - RNA, 21 nt, Human
ggcaguggugguuuucuguuc

SEQ ID NO: 1199070 - RNA, 20 nt, Human
ggcaguggugguuuucuguu

SEQ ID NO: 1199071 - RNA, 22 nt, Human
ggcagccccuguucuggcagag

SEQ ID NO: 1199072 - RNA, 11 nt, Human
ggcucucaggc

SEQ ID NO: 1199073 - RNA, 14 nt, Human
ggcucucaggccag

SEQ ID NO: 1199074 - RNA, 13 nt, Human
ggcucucaggcca

SEQ ID NO: 1199075 - RNA, 12 nt, Human
ggcucuuccagg

SEQ ID NO: 1199076 - RNA, 14 nt, Human
ggcucuuccaggcu

SEQ ID NO: 1199077 - RNA, 22 nt, Human
ggcugcggaaugaaccacaucu

SEQ ID NO: 1199078 - RNA, 21 nt, Human
ggcugccaaugggagcucaug

SEQ ID NO: 1199079 - RNA, 20 nt, Human
ggcugccaaugggagcucau

SEQ ID NO: 1199080 - RNA, 19 nt, Human
ggcugccaaugggagcuca

SEQ ID NO: 1199081 - RNA, 18 nt, Human
ggcugggagagccuucca

SEQ ID NO: 1199082 - RNA, 16 nt, Human
ggcugggagagccuuc

SEQ ID NO: 1199083 - RNA, 15 nt, Human
ggcugggagagccuu

SEQ ID NO: 1199084 - RNA, 14 nt, Human
ggcugggagagccu

SEQ ID NO: 1199085 - RNA, 13 nt, Human
ggcugcugaaggc

SEQ ID NO: 1199086 - RNA, 18 nt, Human
ggcucagcggggacagcu

SEQ ID NO: 1199087 - RNA, 19 nt, Human
ggcucagcaaaagaugcuu

SEQ ID NO: 1199088 - RNA, 20 nt, Human
ggcucagguggggucacucu

SEQ ID NO: 1199089 - RNA, 19 nt, Human
ggcucagguggggucacuc

SEQ ID NO: 1199090 - RNA, 20 nt, Human
ggcucagcggggacagcucc

SEQ ID NO: 1199091 - RNA, 19 nt, Human
ggcucagcggggacagcuc

SEQ ID NO: 1199092 - RNA, 13 nt, Human
gggaagagacuug

SEQ ID NO: 1199093 - RNA, 13 nt, Human
gggacagcuccuu

SEQ ID NO: 1199094 - RNA, 12 nt, Human
gggacagcuccu

SEQ ID NO: 1199095 - RNA, 16 nt, Human
gggacagcuccuucug

SEQ ID NO: 1199096 - RNA, 15 nt, Human
gggacagcuccuucu

SEQ ID NO: 1199097 - RNA, 18 nt, Human
gggaagaagcucucuccu

SEQ ID NO: 1199098 - RNA, 21 nt, Human
ggcuuccuccugguguggaag

SEQ ID NO: 1199099 - RNA, 22 nt, Human
ggcuucauccuccucagaucuu

SEQ ID NO: 1199100 - RNA, 18 nt, Human
ggcuucauccuccucaga

SEQ ID NO: 1199101 - RNA, 16 nt, Human
ggcuuccucauaguau

SEQ ID NO: 1199102 - RNA, 20 nt, Human
ggcuucaguggcagcugcuu

SEQ ID NO: 1199103 - RNA, 19 nt, Human
ggcuucaguggcagcugcu

SEQ ID NO: 1199104 - RNA, 18 nt, Human
ggcuucaguggcagcugc

SEQ ID NO: 1199105 - RNA, 18 nt, Human
ggcuguaucccaugagcc

SEQ ID NO: 1199106 - RNA, 22 nt, Human
ggcuggguucuacccaggugcu

SEQ ID NO: 1199107 - RNA, 21 nt, Human
ggcuggguucuacccaggugc

SEQ ID NO: 1199108 - RNA, 19 nt, Human
ggcuggguucuacccaggu

SEQ ID NO: 1199109 - RNA, 19 nt, Human
ggcuggguggcaccagcag

SEQ ID NO: 1199110 - RNA, 19 nt, Human
ggcugggggccucagugcc

SEQ ID NO: 1199111 - RNA, 17 nt, Human
ggcugggggccucagug

SEQ ID NO: 1199112 - RNA, 16 nt, Human
ggcugggggccucagu

SEQ ID NO: 1199113 - RNA, 15 nt, Human
ggcugggggccucag

SEQ ID NO: 1199114 - RNA, 21 nt, Human
gggagaaccaaaaagaggcua

SEQ ID NO: 1199115 - RNA, 23 nt, Human
gggacuuggaagcuccgcuuucu

SEQ ID NO: 1199116 - RNA, 18 nt, Human
gggacuuggaagcuccgc

SEQ ID NO: 1199117 - RNA, 17 nt, Human
gggacuuggaagcuccg

SEQ ID NO: 1199118 - RNA, 15 nt, Human
gggacuuggaagcuc

SEQ ID NO: 1199119 - RNA, 15 nt, Human
gggaggucgaggcag

SEQ ID NO: 1199120 - RNA, 18 nt, Human
gggaggucaaggcugcag

SEQ ID NO: 1199121 - RNA, 16 nt, Human
gggagggagggcucca

SEQ ID NO: 1199122 - RNA, 15 nt, Human
gggagggagggcucc

SEQ ID NO: 1199123 - RNA, 23 nt, Human
gggagcaggcucgggcuccccag

SEQ ID NO: 1199124 - RNA, 19 nt, Human
gggagagccuuccaggggu

SEQ ID NO: 1199125 - RNA, 15 nt, Human
gggagagccuuccag

SEQ ID NO: 1199126 - RNA, 20 nt, Human
gggaccagagcugccaccug

SEQ ID NO: 1199127 - RNA, 14 nt, Human
gggaccagagcugc

SEQ ID NO: 1199128 - RNA, 14 nt, Human
aaaacaugcuacac

SEQ ID NO: 1199129 - RNA, 13 nt, Human
aaaacaugcuaca

SEQ ID NO: 1199130 - RNA, 12 nt, Human
aaaacccaagug

SEQ ID NO: 1199131 - RNA, 15 nt, Human
aaaacaugcuacaca

SEQ ID NO: 1199132 - RNA, 14 nt, Human
aaaacguggcugcu

SEQ ID NO: 1199133 - RNA, 18 nt, Human
aaaacucuccucugcugc

SEQ ID NO: 1199134 - RNA, 22 nt, Human
aaaacuugauguguuaucucuu

SEQ ID NO: 1199135 - RNA, 11 nt, Human
guagagccagg

SEQ ID NO: 1199136 - RNA, 10 nt, Human
guagagccag

SEQ ID NO: 1199137 - RNA, 13 nt, Human
guagagacagggu

SEQ ID NO: 1199138 - RNA, 18 nt, Human
guagagccagggucucac

SEQ ID NO: 1199139 - RNA, 15 nt, Human
guagagccagggucu

SEQ ID NO: 1199140 - RNA, 12 nt, Human
guagagacaggg

SEQ ID NO: 1199141 - RNA, 11 nt, Human
guagagacagg

SEQ ID NO: 1199142 - RNA, 21 nt, Human
guagaagucuuagauguauau

SEQ ID NO: 1199143 - RNA, 18 nt, Human
guagaagcccuucuaccu

SEQ ID NO: 1199144 - RNA, 23 nt, Human
guagaaauaucugaaaauguaug

SEQ ID NO: 1199145 - RNA, 21 nt, Human
guagaaauaucugaaaaugua

SEQ ID NO: 1199146 - RNA, 20 nt, Human
guagaaauaucugaaaaugu

SEQ ID NO: 1199147 - RNA, 16 nt, Human
guacuggagaaaaugg

SEQ ID NO: 1199148 - RNA, 13 nt, Human
guacuauguauca

SEQ ID NO: 1199149 - RNA, 19 nt, Human
guacuacaguccucccauc

SEQ ID NO: 1199150 - RNA, 18 nt, Human
guacuacaguccucccau

SEQ ID NO: 1199151 - RNA, 14 nt, Human
guacccacugcucu

SEQ ID NO: 1199152 - RNA, 13 nt, Human
guacccacugcuc

SEQ ID NO: 1199153 - RNA, 17 nt, Human
guacuauguaucaauga

SEQ ID NO: 1199154 - RNA, 15 nt, Human
guacuauguaucaau

SEQ ID NO: 1199155 - RNA, 19 nt, Human
guacauggaauaacaugua

SEQ ID NO: 1199156 - RNA, 20 nt, Human
guacaugaaaacacauuuuu

SEQ ID NO: 1199157 - RNA, 19 nt, Human
guacaugaaaacacauuuu

SEQ ID NO: 1199158 - RNA, 18 nt, Human
guacaugaaaacacauuu

SEQ ID NO: 1199159 - RNA, 17 nt, Human
guacaugaaaacacauu

SEQ ID NO: 1199160 - RNA, 16 nt, Human
guacaugaaaacacau

SEQ ID NO: 1199161 - RNA, 15 nt, Human
guacaugaaaacaca

SEQ ID NO: 1199162 - RNA, 14 nt, Human
guacaugaaaacac

SEQ ID NO: 1199163 - RNA, 12 nt, Human
guacccacugcu

SEQ ID NO: 1199164 - RNA, 18 nt, Human
aaaucagccugcuccagc

SEQ ID NO: 1199165 - RNA, 12 nt, Human
aaaucagccugc

SEQ ID NO: 1199166 - RNA, 19 nt, Human
aaaucagccguguaaccau

SEQ ID NO: 1199167 - RNA, 18 nt, Human
guaauaugcacacauuuu

SEQ ID NO: 1199168 - RNA, 17 nt, Human
guaauaugcacacauuu

SEQ ID NO: 1199169 - RNA, 16 nt, Human
guaauaugcacacauu

SEQ ID NO: 1199170 - RNA, 14 nt, Human
guaauaugcacaca

SEQ ID NO: 1199171 - RNA, 18 nt, Human
aaauaccagccaguaaau

SEQ ID NO: 1199172 - RNA, 17 nt, Human
aaauacagauagauaua

SEQ ID NO: 1199173 - RNA, 21 nt, Human
guaauuuuuuuaucgucacug

SEQ ID NO: 1199174 - RNA, 18 nt, Human
aaaguaucccuacuguaa

SEQ ID NO: 1199175 - RNA, 23 nt, Human
aaaguacuucuccacccugcucu

SEQ ID NO: 1199176 - RNA, 21 nt, Human
aaaguacuucuccacccugcu

SEQ ID NO: 1199177 - RNA, 20 nt, Human
aaaguacuucuccacccugc

SEQ ID NO: 1199178 - RNA, 19 nt, Human
aaaguacuucuccacccug

SEQ ID NO: 1199179 - RNA, 13 nt, Human
gguggaugccugg

SEQ ID NO: 1199180 - RNA, 21 nt, Human
ggugcauuugaggucuguucu

SEQ ID NO: 1199181 - RNA, 16 nt, Human
ggugcaaugaccuuuc

SEQ ID NO: 1199182 - RNA, 13 nt, Human
ggugcaaugaccu

SEQ ID NO: 1199183 - RNA, 12 nt, Human
ggugcaaugacc

SEQ ID NO: 1199184 - RNA, 24 nt, Human
ggugauccacccaccucagccucc

SEQ ID NO: 1199185 - RNA, 23 nt, Human
ggugauccacccaccucagccuc

SEQ ID NO: 1199186 - RNA, 18 nt, Human
ggugauccacccaccuca

SEQ ID NO: 1199187 - RNA, 13 nt, Human
ggugaacagaaca

SEQ ID NO: 1199188 - RNA, 13 nt, Human
ggucgaggcagga

SEQ ID NO: 1199189 - RNA, 22 nt, Human
aaagggacuuggaagcuccgcu

SEQ ID NO: 1199190 - RNA, 17 nt, Human
aaaggagauuggaagga

SEQ ID NO: 1199191 - RNA, 21 nt, Human
aaaggagagcuagcagcaggg

SEQ ID NO: 1199192 - RNA, 13 nt, Human
aaagcugcugaca

SEQ ID NO: 1199193 - RNA, 15 nt, Human
aaagcucacuuuacu

SEQ ID NO: 1199194 - RNA, 14 nt, Human
ggguggccucccaa

SEQ ID NO: 1199195 - RNA, 14 nt, Human
aaagacuguacaaa

SEQ ID NO: 1199196 - RNA, 13 nt, Human
aaagacuguacaa

SEQ ID NO: 1199197 - RNA, 23 nt, Human
aaagacugaguacguugugcauu

SEQ ID NO: 1199198 - RNA, 19 nt, Human
aaagaugcuucucacugcc

SEQ ID NO: 1199199 - RNA, 17 nt, Human
aaagaugcuucucacug

SEQ ID NO: 1199200 - RNA, 14 nt, Human
gguccugcugcagu

SEQ ID NO: 1199201 - RNA, 12 nt, Human
gguccugcugca

SEQ ID NO: 1199202 - RNA, 11 nt, Human
gguccugcugc

SEQ ID NO: 1199203 - RNA, 15 nt, Human
aaacgggcucagcaa

SEQ ID NO: 1199204 - RNA, 23 nt, Human
aaaccaagucaagugaaaaagga

SEQ ID NO: 1199205 - RNA, 19 nt, Human
aaacuuaaucuaaauggaa

SEQ ID NO: 1199206 - RNA, 18 nt, Human
aaacuuaaucuaaaugga

SEQ ID NO: 1199207 - RNA, 17 nt, Human
aaacuuaaucuaaaugg

SEQ ID NO: 1199208 - RNA, 16 nt, Human
aaacuuaaucuaaaug

SEQ ID NO: 1199209 - RNA, 19 nt, Human
aaacuguuaauaguucagg

SEQ ID NO: 1199210 - RNA, 13 nt, Human
aaacucuccucug

SEQ ID NO: 1199211 - RNA, 15 nt, Human
ggggccucagugcca

SEQ ID NO: 1199212 - RNA, 18 nt, Human
gggggccucagugccacu

SEQ ID NO: 1199213 - RNA, 17 nt, Human
gggggccucagugccac

SEQ ID NO: 1199214 - RNA, 15 nt, Human
gggggccucagugcc

SEQ ID NO: 1199215 - RNA, 12 nt, Human
gggggccucagu

SEQ ID NO: 1199216 - RNA, 11 nt, Human
ggggagaaagu

SEQ ID NO: 1199217 - RNA, 13 nt, Human
ggggaccucaggc

SEQ ID NO: 1199218 - RNA, 16 nt, Human
aaacauggccuuugcu

SEQ ID NO: 1199219 - RNA, 17 nt, Human
aaacauggccuuugcuu

SEQ ID NO: 1199220 - RNA, 16 nt, Human
ggggaccagagcugcc

SEQ ID NO: 1199221 - RNA, 22 nt, Human
ggggaauguuugccucugccuc

SEQ ID NO: 1199222 - RNA, 18 nt, Human
ggggaauguuugccucug

SEQ ID NO: 1199223 - RNA, 20 nt, Human
aaaauuuugauguuuuaagg

SEQ ID NO: 1199224 - RNA, 19 nt, Human
aaaauuuagaaauauaauu

SEQ ID NO: 1199225 - RNA, 13 nt, Human
gggaugagaaagg

SEQ ID NO: 1199226 - RNA, 19 nt, Human
aaacacaaacgggcucagc

SEQ ID NO: 1199227 - RNA, 11 nt, Human
aaacacauuuu

SEQ ID NO: 1199228 - RNA, 12 nt, Human
aaacacauuuuu

SEQ ID NO: 1199229 - RNA, 13 nt, Human
gcugcuggcuggu

SEQ ID NO: 1199230 - RNA, 18 nt, Human
gcugcugaaggcucgagc

SEQ ID NO: 1199231 - RNA, 15 nt, Human
gcugcugaaggcucg

SEQ ID NO: 1199232 - RNA, 14 nt, Human
gcugcugaaggcuc

SEQ ID NO: 1199233 - RNA, 13 nt, Human
gcugcugaaggcu

SEQ ID NO: 1199234 - RNA, 23 nt, Human
gcucugguccauagagagcaaga

SEQ ID NO: 1199235 - RNA, 16 nt, Human
gcucugguccauagag

SEQ ID NO: 1199236 - RNA, 15 nt, Human
gcucugguccauaga

SEQ ID NO: 1199237 - RNA, 13 nt, Human
gcucugcccuugg

SEQ ID NO: 1199238 - RNA, 20 nt, Human
gcuggccuggccccucaggg

SEQ ID NO: 1199239 - RNA, 22 nt, Human
gcuggagugcagugagccgaga

SEQ ID NO: 1199240 - RNA, 18 nt, Human
gcuggagugcagugagcc

SEQ ID NO: 1199241 - RNA, 23 nt, Human
gcuggguggcaccagcagccugg

SEQ ID NO: 1199242 - RNA, 22 nt, Human
gcuggguggcaccagcagccug

SEQ ID NO: 1199243 - RNA, 21 nt, Human
gcuggguggcaccagcagccu

SEQ ID NO: 1199244 - RNA, 12 nt, Human
gcugggcucccu

SEQ ID NO: 1199245 - RNA, 17 nt, Human
gcuggcuguuggcuggg

SEQ ID NO: 1199246 - RNA, 16 nt, Human
gcuggcuguuggcugg

SEQ ID NO: 1199247 - RNA, 15 nt, Human
gcuggcuguuggcug

SEQ ID NO: 1199248 - RNA, 12 nt, Human
gcuucagccucc

SEQ ID NO: 1199249 - RNA, 19 nt, Human
gcuucacggaagagccuug

SEQ ID NO: 1199250 - RNA, 18 nt, Human
gcuucacggaagagccuu

SEQ ID NO: 1199251 - RNA, 17 nt, Human
gcuucacggaagagccu

SEQ ID NO: 1199252 - RNA, 21 nt, Human
gcuucaaggauccugagccag

SEQ ID NO: 1199253 - RNA, 20 nt, Human
gcuucaaggauccugagcca

SEQ ID NO: 1199254 - RNA, 19 nt, Human
gcuucaaggauccugagcc

SEQ ID NO: 1199255 - RNA, 22 nt, Human
gcuuccucauaguaugguggcu

SEQ ID NO: 1199256 - RNA, 12 nt, Human
gcuuguacauaa

SEQ ID NO: 1199257 - RNA, 20 nt, Human
gcuuguaaauagcucaggug

SEQ ID NO: 1199258 - RNA, 14 nt, Human
gcuugagcucagga

SEQ ID NO: 1199259 - RNA, 12 nt, Human
ggacccccugaa

SEQ ID NO: 1199260 - RNA, 11 nt, Human
ggacccugagg

SEQ ID NO: 1199261 - RNA, 20 nt, Human
ggacguguuaugacuccaga

SEQ ID NO: 1199262 - RNA, 20 nt, Human
ggaccucaggccugggggcu

SEQ ID NO: 1199263 - RNA, 15 nt, Human
ggaccucaggccugg

SEQ ID NO: 1199264 - RNA, 14 nt, Human
ggaccucaggccug

SEQ ID NO: 1199265 - RNA, 13 nt, Human
ggaccucaggccu

SEQ ID NO: 1199266 - RNA, 13 nt, Human
ggacccugaggcc

SEQ ID NO: 1199267 - RNA, 12 nt, Human
ggacccugaggc

SEQ ID NO: 1199268 - RNA, 18 nt, Human
ggacucaaugcacugaca

SEQ ID NO: 1199269 - RNA, 16 nt, Human
ggacucaaugcacuga

SEQ ID NO: 1199270 - RNA, 15 nt, Human
ggacucaaugcacug

SEQ ID NO: 1199271 - RNA, 14 nt, Human
ggacuacaggugug

SEQ ID NO: 1199272 - RNA, 24 nt, Human
ggacuaacuugucuuuggacccug

SEQ ID NO: 1199273 - RNA, 20 nt, Human
ggacuaacuugucuuuggac

SEQ ID NO: 1199274 - RNA, 16 nt, Human
ggagaaaggaagggcu

SEQ ID NO: 1199275 - RNA, 9 nt, Human
ggacuuugu

SEQ ID NO: 1199276 - RNA, 15 nt, Human
ggacuuggaagcucc

SEQ ID NO: 1199277 - RNA, 14 nt, Human
ggacuuggaagcuc

SEQ ID NO: 1199278 - RNA, 23 nt, Human
ggacaggcauguucucugaggac

SEQ ID NO: 1199279 - RNA, 14 nt, Human
ggaacacucugaga

SEQ ID NO: 1199280 - RNA, 12 nt, Human
ggaacacucuga

SEQ ID NO: 1199281 - RNA, 17 nt, Human
ggaacagacuggaagca

SEQ ID NO: 1199282 - RNA, 16 nt, Human
ggaacacucugagacu

SEQ ID NO: 1199283 - RNA, 15 nt, Human
ggaacacucugagac

SEQ ID NO: 1199284 - RNA, 15 nt, Human
ggaagagaaaaaaua

SEQ ID NO: 1199285 - RNA, 13 nt, Human
ggaagagaaaaaa

SEQ ID NO: 1199286 - RNA, 18 nt, Human
ggaagacuuuggaaagag

SEQ ID NO: 1199287 - RNA, 17 nt, Human
ggaagacuuuggaaaga

SEQ ID NO: 1199288 - RNA, 13 nt, Human
ggaagacuuugga

SEQ ID NO: 1199289 - RNA, 14 nt, Human
ggaagacagcucuu

SEQ ID NO: 1199290 - RNA, 13 nt, Human
ggaagacagcucu

SEQ ID NO: 1199291 - RNA, 20 nt, Human
ggaaggaaacccagcucugg

SEQ ID NO: 1199292 - RNA, 19 nt, Human
ggaaggaaacccagcucug

SEQ ID NO: 1199293 - RNA, 16 nt, Human
ggaaggaaacccagcu

SEQ ID NO: 1199294 - RNA, 11 nt, Human
ggaagcuccgc

SEQ ID NO: 1199295 - RNA, 23 nt, Human
ggaagcucagggccuggcucagg

SEQ ID NO: 1199296 - RNA, 15 nt, Human
ggaagcucagggccu

SEQ ID NO: 1199297 - RNA, 15 nt, Human
ggaagccgcuggggc

SEQ ID NO: 1199298 - RNA, 23 nt, Human
ggacaaggaugaucuaggaagac

SEQ ID NO: 1199299 - RNA, 22 nt, Human
ggacaaggaugaucuaggaaga

SEQ ID NO: 1199300 - RNA, 13 nt, Human
ggacaagagcagg

SEQ ID NO: 1199301 - RNA, 16 nt, Human
ggaauccagacccggc

SEQ ID NO: 1199302 - RNA, 18 nt, Human
ggaauaacauguaauuaa

SEQ ID NO: 1199303 - RNA, 20 nt, Human
ggacagcuccuucuguccua

SEQ ID NO: 1199304 - RNA, 19 nt, Human
ggacagcuccuucuguccu

SEQ ID NO: 1199305 - RNA, 22 nt, Human
ggacacuaaccacgcuggaccu

SEQ ID NO: 1199306 - RNA, 17 nt, Human
ggacacuaaccacgcug

SEQ ID NO: 1199307 - RNA, 21 nt, Human
ggacacagcucuucuccaggc

SEQ ID NO: 1199308 - RNA, 18 nt, Human
ggacacagcucuucucca

SEQ ID NO: 1199309 - RNA, 15 nt, Human
ggacacagcucuucu

SEQ ID NO: 1199310 - RNA, 11 nt, Human
gcucugcccuu

SEQ ID NO: 1199311 - RNA, 23 nt, Human
gcucugcaagaauugaagcagga

SEQ ID NO: 1199312 - RNA, 17 nt, Human
gcucugaucauccacug

SEQ ID NO: 1199313 - RNA, 20 nt, Human
gcuccuggcccacugcaucg

SEQ ID NO: 1199314 - RNA, 19 nt, Human
gcuccuggcccacugcauc

SEQ ID NO: 1199315 - RNA, 18 nt, Human
gcuccuggcccacugcau

SEQ ID NO: 1199316 - RNA, 15 nt, Human
gcuccuggcccacug

SEQ ID NO: 1199317 - RNA, 14 nt, Human
gcuccuggcccacu

SEQ ID NO: 1199318 - RNA, 17 nt, Human
gcucccaggcauucccc

SEQ ID NO: 1199319 - RNA, 18 nt, Human
gcuccagcucaccagccc

SEQ ID NO: 1199320 - RNA, 21 nt, Human
gcuccagcucaccagccccag

SEQ ID NO: 1199321 - RNA, 20 nt, Human
gcuccagcucaccagcccca

SEQ ID NO: 1199322 - RNA, 22 nt, Human
gcgggaggauguucugggacac

SEQ ID NO: 1199323 - RNA, 21 nt, Human
gcgggaggauguucugggaca

SEQ ID NO: 1199324 - RNA, 20 nt, Human
gcgugcacacaccagagccc

SEQ ID NO: 1199325 - RNA, 23 nt, Human
gcgugcacacaccagagcccacc

SEQ ID NO: 1199326 - RNA, 18 nt, Human
gcguuucuaugacacaug

SEQ ID NO: 1199327 - RNA, 15 nt, Human
gcuaaugggacacua

SEQ ID NO: 1199328 - RNA, 13 nt, Human
gcuaaugggacac

SEQ ID NO: 1199329 - RNA, 23 nt, Human
gcuaagugauccucccaccucag

SEQ ID NO: 1199330 - RNA, 12 nt, Human
gcuaugcauuug

SEQ ID NO: 1199331 - RNA, 22 nt, Human
gcuagugugguguuuccuggca

SEQ ID NO: 1199332 - RNA, 21 nt, Human
gcuagugugguguuuccuggc

SEQ ID NO: 1199333 - RNA, 19 nt, Human
gcuauucaguaauaacucu

SEQ ID NO: 1199334 - RNA, 13 nt, Human
gcuaugcauuuga

SEQ ID NO: 1199335 - RNA, 23 nt, Human
gcuaggccuggccagaugcacca

SEQ ID NO: 1199336 - RNA, 17 nt, Human
gcuaggccuggccagau

SEQ ID NO: 1199337 - RNA, 16 nt, Human
gcuaggccuggccaga

SEQ ID NO: 1199338 - RNA, 14 nt, Human
gcucagagagggug

SEQ ID NO: 1199339 - RNA, 13 nt, Human
gcucagagagggu

SEQ ID NO: 1199340 - RNA, 17 nt, Human
gcucaggugucccugca

SEQ ID NO: 1199341 - RNA, 16 nt, Human
gcucaggugucccugc

SEQ ID NO: 1199342 - RNA, 14 nt, Human
gcucaggugucccu

SEQ ID NO: 1199343 - RNA, 20 nt, Human
gcuauucaguaauaacucua

SEQ ID NO: 1199344 - RNA, 14 nt, Human
gcucacugcagccu

SEQ ID NO: 1199345 - RNA, 13 nt, Human
gcucacugcagcc

SEQ ID NO: 1199346 - RNA, 12 nt, Human
gcucacugcagc

SEQ ID NO: 1199347 - RNA, 11 nt, Human
gcucacugcag

SEQ ID NO: 1199348 - RNA, 16 nt, Human
gcucacugcagccuca

SEQ ID NO: 1199349 - RNA, 15 nt, Human
gcucacugcagccuc

SEQ ID NO: 1199350 - RNA, 17 nt, Human
gcucacugcagccucaa

SEQ ID NO: 1199351 - RNA, 18 nt, Human
gcccugcagagggcacag

SEQ ID NO: 1199352 - RNA, 22 nt, Human
gcccugcccaccuggccucugc

SEQ ID NO: 1199353 - RNA, 21 nt, Human
gcccugcccaccuggccucug

SEQ ID NO: 1199354 - RNA, 20 nt, Human
gcccugcccaccuggccucu

SEQ ID NO: 1199355 - RNA, 17 nt, Human
gcccugcccaccuggcc

SEQ ID NO: 1199356 - RNA, 11 nt, Human
gcccugccucc

SEQ ID NO: 1199357 - RNA, 20 nt, Human
gccgcagcccugcagagggc

SEQ ID NO: 1199358 - RNA, 22 nt, Human
gcccuuagcagggaaacagcua

SEQ ID NO: 1199359 - RNA, 20 nt, Human
gcccuuagcagggaaacagc

SEQ ID NO: 1199360 - RNA, 13 nt, Human
gcccugccuccuu

SEQ ID NO: 1199361 - RNA, 12 nt, Human
gcccugccuccu

SEQ ID NO: 1199362 - RNA, 14 nt, Human
gcccugccuccuuu

SEQ ID NO: 1199363 - RNA, 20 nt, Human
gccuaggugacagagugaga

SEQ ID NO: 1199364 - RNA, 15 nt, Human
gccuaggugacagag

SEQ ID NO: 1199365 - RNA, 14 nt, Human
gccuaggugacaga

SEQ ID NO: 1199366 - RNA, 13 nt, Human
gccuaggugacag

SEQ ID NO: 1199367 - RNA, 23 nt, Human
gccuagcauacguacacauuuua

SEQ ID NO: 1199368 - RNA, 22 nt, Human
gccuagcauacguacacauuuu

SEQ ID NO: 1199369 - RNA, 21 nt, Human
gccuagcauacguacacauuu

SEQ ID NO: 1199370 - RNA, 20 nt, Human
gccuagcauacguacacauu

SEQ ID NO: 1199371 - RNA, 12 nt, Human
gcccccacuggu

SEQ ID NO: 1199372 - RNA, 17 nt, Human
gccccugccacccuggg

SEQ ID NO: 1199373 - RNA, 23 nt, Human
gcccgggcucugccucccaucac

SEQ ID NO: 1199374 - RNA, 20 nt, Human
gccuggccugagcugggaug

SEQ ID NO: 1199375 - RNA, 18 nt, Human
gccuggccugagcuggga

SEQ ID NO: 1199376 - RNA, 14 nt, Human
gccuggccugagcu

SEQ ID NO: 1199377 - RNA, 13 nt, Human
gccuggccugagc

SEQ ID NO: 1199378 - RNA, 20 nt, Human
gccuguugggccaggagccu

SEQ ID NO: 1199379 - RNA, 18 nt, Human
gccuguugggccaggagc

SEQ ID NO: 1199380 - RNA, 16 nt, Human
gccuguugggccagga

SEQ ID NO: 1199381 - RNA, 15 nt, Human
gccuguugggccagg

SEQ ID NO: 1199382 - RNA, 14 nt, Human
gccuguugggccag

SEQ ID NO: 1199383 - RNA, 19 nt, Human
gccugugccucugggacug

SEQ ID NO: 1199384 - RNA, 18 nt, Human
gccugugccucugggacu

SEQ ID NO: 1199385 - RNA, 17 nt, Human
gccugugccucugggac

SEQ ID NO: 1199386 - RNA, 16 nt, Human
gccugugccucuggga

SEQ ID NO: 1199387 - RNA, 13 nt, Human
gccuggcucaggu

SEQ ID NO: 1199388 - RNA, 20 nt, Human
gcgcagcauauucaggaagc

SEQ ID NO: 1199389 - RNA, 22 nt, Human
gcgaucuggguucacugcaacc

SEQ ID NO: 1199390 - RNA, 17 nt, Human
gcgagcccugguggcag

SEQ ID NO: 1199391 - RNA, 21 nt, Human
gccuugaccauucuccaccug

SEQ ID NO: 1199392 - RNA, 20 nt, Human
gccuugaccauucuccaccu

SEQ ID NO: 1199393 - RNA, 19 nt, Human
gccuugaccauucuccacc

SEQ ID NO: 1199394 - RNA, 17 nt, Human
gccuugaccauucucca

SEQ ID NO: 1199395 - RNA, 21 nt, Human
gccuguugggccaggagccuc

SEQ ID NO: 1199396 - RNA, 22 nt, Human
gccugcccaggccccugccacc

SEQ ID NO: 1199397 - RNA, 17 nt, Human
gccugcccaggccccug

SEQ ID NO: 1199398 - RNA, 15 nt, Human
gccugcccaggcccc

SEQ ID NO: 1199399 - RNA, 17 nt, Human
gccucgaacuggcugca

SEQ ID NO: 1199400 - RNA, 23 nt, Human
gccuccugugugugcgccuacag

SEQ ID NO: 1199401 - RNA, 19 nt, Human
gccuccugugugugcgccu

SEQ ID NO: 1199402 - RNA, 17 nt, Human
gccucccaaagugcugg

SEQ ID NO: 1199403 - RNA, 16 nt, Human
gccucccaaagugcug

SEQ ID NO: 1199404 - RNA, 22 nt, Human
gccucgaacuggcugcaaaggg

SEQ ID NO: 1199405 - RNA, 20 nt, Human
gccucgaacuggcugcaaag

SEQ ID NO: 1199406 - RNA, 18 nt, Human
gccucuuaugggcugggu

SEQ ID NO: 1199407 - RNA, 17 nt, Human
gccucuuaugggcuggg

SEQ ID NO: 1199408 - RNA, 16 nt, Human
gccucuuaugggcugg

SEQ ID NO: 1199409 - RNA, 14 nt, Human
gccugcccaggccc

SEQ ID NO: 1199410 - RNA, 13 nt, Human
gccugcccaggcc

SEQ ID NO: 1199411 - RNA, 21 nt, Human
gccucuuaugggcuggguucu

SEQ ID NO: 1199412 - RNA, 14 nt, Human
gccucuuggguuca

SEQ ID NO: 1199413 - RNA, 19 nt, Human
gcacacaccagagcccacc

SEQ ID NO: 1199414 - RNA, 18 nt, Human
gcacacaccagagcccac

SEQ ID NO: 1199415 - RNA, 17 nt, Human
gcacacaccagagccca

SEQ ID NO: 1199416 - RNA, 16 nt, Human
gcacacaccagagccc

SEQ ID NO: 1199417 - RNA, 15 nt, Human
gcacacaccagagcc

SEQ ID NO: 1199418 - RNA, 14 nt, Human
gcacacaccagagc

SEQ ID NO: 1199419 - RNA, 12 nt, Human
gcacacaccaga

SEQ ID NO: 1199420 - RNA, 21 nt, Human
gcaauaaagcagcguuucuau

SEQ ID NO: 1199421 - RNA, 11 nt, Human
gcaauaaagca

SEQ ID NO: 1199422 - RNA, 19 nt, Human
gcaaccuccgccucuuggg

SEQ ID NO: 1199423 - RNA, 18 nt, Human
gcaaccuccgccucuugg

SEQ ID NO: 1199424 - RNA, 22 nt, Human
gcaacccuggugaccagcacca

SEQ ID NO: 1199425 - RNA, 18 nt, Human
gcaacccccagccugcua

SEQ ID NO: 1199426 - RNA, 17 nt, Human
gcaaaagaugcuucuca

SEQ ID NO: 1199427 - RNA, 16 nt, Human
gcaaaagaugcuucuc

SEQ ID NO: 1199428 - RNA, 15 nt, Human
gcaaaagaugcuucu

SEQ ID NO: 1199429 - RNA, 22 nt, Human
gcacuauagccuaggugacaga

SEQ ID NO: 1199430 - RNA, 12 nt, Human
gcacuccccugc

SEQ ID NO: 1199431 - RNA, 17 nt, Human
gcacuccagccugggug

SEQ ID NO: 1199432 - RNA, 12 nt, Human
gcaccuccugcc

SEQ ID NO: 1199433 - RNA, 18 nt, Human
gcaccggcuggccuggcc

SEQ ID NO: 1199434 - RNA, 17 nt, Human
gcaccggcuggccuggc

SEQ ID NO: 1199435 - RNA, 16 nt, Human
gcaccggcuggccugg

SEQ ID NO: 1199436 - RNA, 15 nt, Human
gcaccggcuggccug

SEQ ID NO: 1199437 - RNA, 14 nt, Human
gcacacauuuuuua

SEQ ID NO: 1199438 - RNA, 12 nt, Human
gcacacauuuuu

SEQ ID NO: 1199439 - RNA, 11 nt, Human
gcacacauuuu

SEQ ID NO: 1199440 - RNA, 20 nt, Human
gcacacaccagagcccaccu

SEQ ID NO: 1199441 - RNA, 19 nt, Human
gauucuccugccucagccu

SEQ ID NO: 1199442 - RNA, 21 nt, Human
gauucuccugccucagccucc

SEQ ID NO: 1199443 - RNA, 20 nt, Human
gauucuccugccucagccuc

SEQ ID NO: 1199444 - RNA, 23 nt, Human
gauuuaacagaaauguacagcaa

SEQ ID NO: 1199445 - RNA, 20 nt, Human
gauuuaacagaaauguacag

SEQ ID NO: 1199446 - RNA, 21 nt, Human
gauucuucugcuucagccucc

SEQ ID NO: 1199447 - RNA, 23 nt, Human
gauucuuauggacaaugacccag

SEQ ID NO: 1199448 - RNA, 23 nt, Human
gauuuuuuuuuccuucagugccu

SEQ ID NO: 1199449 - RNA, 22 nt, Human
gauuuuuuuuuccuucagugcc

SEQ ID NO: 1199450 - RNA, 16 nt, Human
gauuucacucuccuug

SEQ ID NO: 1199451 - RNA, 13 nt, Human
gauuucacucucc

SEQ ID NO: 1199452 - RNA, 12 nt, Human
gauucuuuccug

SEQ ID NO: 1199453 - RNA, 18 nt, Human
gauuucacucuccuuggu

SEQ ID NO: 1199454 - RNA, 17 nt, Human
gauuucacucuccuugg

SEQ ID NO: 1199455 - RNA, 23 nt, Human
gaugcuucucacugccaugccag

SEQ ID NO: 1199456 - RNA, 16 nt, Human
gaugcuuguacauaau

SEQ ID NO: 1199457 - RNA, 14 nt, Human
gaugcuuguacaua

SEQ ID NO: 1199458 - RNA, 20 nt, Human
gaucuggguucacugcaacc

SEQ ID NO: 1199459 - RNA, 18 nt, Human
gaucuggguucacugcaa

SEQ ID NO: 1199460 - RNA, 22 nt, Human
gaguugauagcacagacccugc

SEQ ID NO: 1199461 - RNA, 16 nt, Human
gcacuuuguucuggcu

SEQ ID NO: 1199462 - RNA, 16 nt, Human
gcagcuugaggguugg

SEQ ID NO: 1199463 - RNA, 20 nt, Human
gcagcugcuuuugucuaugg

SEQ ID NO: 1199464 - RNA, 13 nt, Human
gcagcugcuuuug

SEQ ID NO: 1199465 - RNA, 23 nt, Human
gcagcugcgguccacccaggagc

SEQ ID NO: 1199466 - RNA, 22 nt, Human
gcagcugcgguccacccaggag

SEQ ID NO: 1199467 - RNA, 16 nt, Human
gcaggcucucaggcca

SEQ ID NO: 1199468 - RNA, 15 nt, Human
gcaggcucucaggcc

SEQ ID NO: 1199469 - RNA, 14 nt, Human
gcaggcucucaggc

SEQ ID NO: 1199470 - RNA, 13 nt, Human
gcaggcucucagg

SEQ ID NO: 1199471 - RNA, 12 nt, Human
gcaggcucucag

SEQ ID NO: 1199472 - RNA, 22 nt, Human
gcaggcucgggcuccccagccc

SEQ ID NO: 1199473 - RNA, 21 nt, Human
gcagcuugaggguugggcugg

SEQ ID NO: 1199474 - RNA, 19 nt, Human
gcagcuugaggguugggcu

SEQ ID NO: 1199475 - RNA, 18 nt, Human
gcaggcucucaggccagc

SEQ ID NO: 1199476 - RNA, 17 nt, Human
gcaggcucucaggccag

SEQ ID NO: 1199477 - RNA, 22 nt, Human
gcagggaaacagcuaaugggac

SEQ ID NO: 1199478 - RNA, 16 nt, Human
gcauaccacuuuuguu

SEQ ID NO: 1199479 - RNA, 15 nt, Human
gcauaccacuuuugu

SEQ ID NO: 1199480 - RNA, 15 nt, Human
gcauaaaaauuagcc

SEQ ID NO: 1199481 - RNA, 23 nt, Human
gcaguugccagucaccccggcca

SEQ ID NO: 1199482 - RNA, 14 nt, Human
gcaguugccaguca

SEQ ID NO: 1199483 - RNA, 19 nt, Human
gccaaggccaaaggaagca

SEQ ID NO: 1199484 - RNA, 17 nt, Human
gccaaggccaaaggaag

SEQ ID NO: 1199485 - RNA, 11 nt, Human
gccaaggccaa

SEQ ID NO: 1199486 - RNA, 15 nt, Human
gcauuuaaaagauac

SEQ ID NO: 1199487 - RNA, 12 nt, Human
gcauuuaaaaga

SEQ ID NO: 1199488 - RNA, 16 nt, Human
gcauuugaaaauuuug

SEQ ID NO: 1199489 - RNA, 14 nt, Human
gcauuugaaaauuu

SEQ ID NO: 1199490 - RNA, 18 nt, Human
gccaagaauucuuaaaua

SEQ ID NO: 1199491 - RNA, 14 nt, Human
gccaagaauucuua

SEQ ID NO: 1199492 - RNA, 21 nt, Human
gcauccuggcacccggccccu

SEQ ID NO: 1199493 - RNA, 17 nt, Human
gcauccuggcacccggc

SEQ ID NO: 1199494 - RNA, 23 nt, Human
gcauccuggcacccggccccugc

SEQ ID NO: 1199495 - RNA, 22 nt, Human
gcauccuggcacccggccccug

SEQ ID NO: 1199496 - RNA, 19 nt, Human
gcaugggaaugaaugucag

SEQ ID NO: 1199497 - RNA, 16 nt, Human
gcaugggaaugaaugu

SEQ ID NO: 1199498 - RNA, 18 nt, Human
gcaugugaugagaggaaa

SEQ ID NO: 1199499 - RNA, 17 nt, Human
gcaugugaugagaggaa

SEQ ID NO: 1199500 - RNA, 20 nt, Human
gagcugccuguucagcucca

SEQ ID NO: 1199501 - RNA, 19 nt, Human
gagcugccuguucagcucc

SEQ ID NO: 1199502 - RNA, 16 nt, Human
gagcugccuguucagc

SEQ ID NO: 1199503 - RNA, 17 nt, Human
gagcggagaaaggaagg

SEQ ID NO: 1199504 - RNA, 13 nt, Human
gagccuuccaggg

SEQ ID NO: 1199505 - RNA, 12 nt, Human
gagccuuccagg

SEQ ID NO: 1199506 - RNA, 22 nt, Human
gagcaucaggccaggcccucug

SEQ ID NO: 1199507 - RNA, 20 nt, Human
gagcaucaggccaggcccuc

SEQ ID NO: 1199508 - RNA, 12 nt, Human
gaggggaacaga

SEQ ID NO: 1199509 - RNA, 15 nt, Human
gagggcuccagacac

SEQ ID NO: 1199510 - RNA, 14 nt, Human
gagggcuccagaca

SEQ ID NO: 1199511 - RNA, 13 nt, Human
gagggcuccagac

SEQ ID NO: 1199512 - RNA, 12 nt, Human
gagggcuccaga

SEQ ID NO: 1199513 - RNA, 14 nt, Human
gaggcugccucucc

SEQ ID NO: 1199514 - RNA, 17 nt, Human
gaggcucugcccuuggu

SEQ ID NO: 1199515 - RNA, 15 nt, Human
gaggcucugcccuug

SEQ ID NO: 1199516 - RNA, 14 nt, Human
gaggcucugcccuu

SEQ ID NO: 1199517 - RNA, 13 nt, Human
gaggcucugcccu

SEQ ID NO: 1199518 - RNA, 12 nt, Human
gaggcucugccc

SEQ ID NO: 1199519 - RNA, 20 nt, Human
gaggccagagacacaagccu

SEQ ID NO: 1199520 - RNA, 21 nt, Human
gagucacuggaacacuaauga

SEQ ID NO: 1199521 - RNA, 14 nt, Human
gagucacuggaaca

SEQ ID NO: 1199522 - RNA, 18 nt, Human
gaggugggauccuccagg

SEQ ID NO: 1199523 - RNA, 17 nt, Human
gaggugggauccuccag

SEQ ID NO: 1199524 - RNA, 16 nt, Human
gaggugggauccucca

SEQ ID NO: 1199525 - RNA, 15 nt, Human
gaggugggauccucc

SEQ ID NO: 1199526 - RNA, 21 nt, Human
gaguugauagcacagacccug

SEQ ID NO: 1199527 - RNA, 22 nt, Human
gaguugauacuacaguuuguua

SEQ ID NO: 1199528 - RNA, 19 nt, Human
gaguugauacuacaguuug

SEQ ID NO: 1199529 - RNA, 18 nt, Human
gagugccuuacacaaugg

SEQ ID NO: 1199530 - RNA, 18 nt, Human
gagugcagugagccgaga

SEQ ID NO: 1199531 - RNA, 24 nt, Human
gagugagcacuaaggugugcucug

SEQ ID NO: 1199532 - RNA, 18 nt, Human
gagugagacucugucuca

SEQ ID NO: 1199533 - RNA, 14 nt, Human
gagugagacucugu

SEQ ID NO: 1199534 - RNA, 18 nt, Human
gagucagaaguuucugcc

SEQ ID NO: 1199535 - RNA, 15 nt, Human
gaccaucccugaagg

SEQ ID NO: 1199536 - RNA, 16 nt, Human
gacccuauugcugcuu

SEQ ID NO: 1199537 - RNA, 13 nt, Human
gacccggcugcgu

SEQ ID NO: 1199538 - RNA, 12 nt, Human
gacccggcugcg

SEQ ID NO: 1199539 - RNA, 18 nt, Human
gaccaucccugaaggccc

SEQ ID NO: 1199540 - RNA, 17 nt, Human
gaccaucccugaaggcc

SEQ ID NO: 1199541 - RNA, 16 nt, Human
gaccaucccugaaggc

SEQ ID NO: 1199542 - RNA, 16 nt, Human
gaccauucuccaccug

SEQ ID NO: 1199543 - RNA, 17 nt, Human
gaccauucuccaccugc

SEQ ID NO: 1199544 - RNA, 16 nt, Human
gacagcuccuucuguc

SEQ ID NO: 1199545 - RNA, 15 nt, Human
gacagcuccuucugu

SEQ ID NO: 1199546 - RNA, 14 nt, Human
gacagcuccuucug

SEQ ID NO: 1199547 - RNA, 13 nt, Human
gacagcuccuucu

SEQ ID NO: 1199548 - RNA, 17 nt, Human
gagaagcggcuggcagc

SEQ ID NO: 1199549 - RNA, 23 nt, Human
gacuuuucuguccgagcuuugaa

SEQ ID NO: 1199550 - RNA, 21 nt, Human
gacuuuucuguccgagcuuug

SEQ ID NO: 1199551 - RNA, 22 nt, Human
gacuuuguuaguuucuccaagc

SEQ ID NO: 1199552 - RNA, 14 nt, Human
gacuuuggaaagag

SEQ ID NO: 1199553 - RNA, 14 nt, Human
gacuuuggaaagac

SEQ ID NO: 1199554 - RNA, 18 nt, Human
gacuguuuucucuugaga

SEQ ID NO: 1199555 - RNA, 16 nt, Human
gacuguuuucucuuga

SEQ ID NO: 1199556 - RNA, 17 nt, Human
gacucaaugcacugaca

SEQ ID NO: 1199557 - RNA, 14 nt, Human
gacucaaugcacug

SEQ ID NO: 1199558 - RNA, 22 nt, Human
gacuguacaaaguagaagucuu

SEQ ID NO: 1199559 - RNA, 15 nt, Human
gacgcugugcugccc

SEQ ID NO: 1199560 - RNA, 13 nt, Human
gacgcugugcugc

SEQ ID NO: 1199561 - RNA, 12 nt, Human
gacgcugugcug

SEQ ID NO: 1199562 - RNA, 22 nt, Human
gaaccaccacacccagcccacu

SEQ ID NO: 1199563 - RNA, 21 nt, Human
gaaccaccacacccagcccac

SEQ ID NO: 1199564 - RNA, 20 nt, Human
gaaccaccacacccagccca

SEQ ID NO: 1199565 - RNA, 18 nt, Human
gaaccaccacacccagcc

SEQ ID NO: 1199566 - RNA, 14 nt, Human
gaagcacaugccuc

SEQ ID NO: 1199567 - RNA, 22 nt, Human
gaagcacaugccucucucaggc

SEQ ID NO: 1199568 - RNA, 14 nt, Human
gaagcacagcuuca

SEQ ID NO: 1199569 - RNA, 13 nt, Human
gaagcacagcuuc

SEQ ID NO: 1199570 - RNA, 18 nt, Human
gaagacucauucuucugu

SEQ ID NO: 1199571 - RNA, 17 nt, Human
gaagacucauucuucug

SEQ ID NO: 1199572 - RNA, 16 nt, Human
gaagacucauucuucu

SEQ ID NO: 1199573 - RNA, 16 nt, Human
gaagcaccauaacuuu

SEQ ID NO: 1199574 - RNA, 13 nt, Human
gaagacagcucuu

SEQ ID NO: 1199575 - RNA, 12 nt, Human
gaagacagcucu

SEQ ID NO: 1199576 - RNA, 15 nt, Human
gaagacagagcuaca

SEQ ID NO: 1199577 - RNA, 13 nt, Human
gaagacagagcua

SEQ ID NO: 1199578 - RNA, 21 nt, Human
gaagacacugaugggcaaccc

SEQ ID NO: 1199579 - RNA, 16 nt, Human
gaagacacugaugggc

SEQ ID NO: 1199580 - RNA, 15 nt, Human
gaagacagcucuuau

SEQ ID NO: 1199581 - RNA, 14 nt, Human
gaagacagcucuua

SEQ ID NO: 1199582 - RNA, 22 nt, Human
gaaccauggucggaaaacaugc

SEQ ID NO: 1199583 - RNA, 23 nt, Human
gaaccaccacacccagcccacuu

SEQ ID NO: 1199584 - RNA, 15 nt, Human
gaacuccuggccuca

SEQ ID NO: 1199585 - RNA, 14 nt, Human
gaacuccuggccuc

SEQ ID NO: 1199586 - RNA, 13 nt, Human
gaacuccuggccu

SEQ ID NO: 1199587 - RNA, 13 nt, Human
gaaagggcccaga

SEQ ID NO: 1199588 - RNA, 16 nt, Human
gaaaggcuccaggagc

SEQ ID NO: 1199589 - RNA, 15 nt, Human
gaaaggcuccaggag

SEQ ID NO: 1199590 - RNA, 14 nt, Human
gaaaggcuccagga

SEQ ID NO: 1199591 - RNA, 13 nt, Human
gaaaggcuccagg

SEQ ID NO: 1199592 - RNA, 17 nt, Human
gaaacuggauuaaacuu

SEQ ID NO: 1199593 - RNA, 13 nt, Human
gaaacuggauuaa

SEQ ID NO: 1199594 - RNA, 16 nt, Human
gaaagggcccagagag

SEQ ID NO: 1199595 - RNA, 15 nt, Human
gaaagggcccagaga

SEQ ID NO: 1199596 - RNA, 23 nt, Human
gaaaagaaaaaugagccuggcaa

SEQ ID NO: 1199597 - RNA, 24 nt, Human
cuuggauuguccccgacccuugcc

SEQ ID NO: 1199598 - RNA, 23 nt, Human
cuuggauuguccccgacccuugc

SEQ ID NO: 1199599 - RNA, 12 nt, Human
cuugcaaaguau

SEQ ID NO: 1199600 - RNA, 12 nt, Human
cuugauucauaa

SEQ ID NO: 1199601 - RNA, 18 nt, Human
cuugauguguuaucucuu

SEQ ID NO: 1199602 - RNA, 22 nt, Human
cuugauauccucuuugagugaa

SEQ ID NO: 1199603 - RNA, 16 nt, Human
cuugacaucaacugca

SEQ ID NO: 1199604 - RNA, 18 nt, Human
cuugaauuguaaggaaug

SEQ ID NO: 1199605 - RNA, 15 nt, Human
cuucugacccaugcu

SEQ ID NO: 1199606 - RNA, 18 nt, Human
cuucuucagagacuccug

SEQ ID NO: 1199607 - RNA, 14 nt, Human
cuucuucagagacu

SEQ ID NO: 1199608 - RNA, 13 nt, Human
cuucuucagagac

SEQ ID NO: 1199609 - RNA, 13 nt, Human
cuuccuccuggug

SEQ ID NO: 1199610 - RNA, 22 nt, Human
cuuccucuuuccaucuacccuc

SEQ ID NO: 1199611 - RNA, 20 nt, Human
cuuucagccaagaauucuua

SEQ ID NO: 1199612 - RNA, 20 nt, Human
cuuucacccuuuucuguuug

SEQ ID NO: 1199613 - RNA, 15 nt, Human
cuuucacccuuuucu

SEQ ID NO: 1199614 - RNA, 14 nt, Human
cuuucacccuuuuc

SEQ ID NO: 1199615 - RNA, 13 nt, Human
cuuguggacacag

SEQ ID NO: 1199616 - RNA, 19 nt, Human
cuugucuuuggacccugag

SEQ ID NO: 1199617 - RNA, 18 nt, Human
cuugucuuuggacccuga

SEQ ID NO: 1199618 - RNA, 15 nt, Human
cuugucuuuggaccc

SEQ ID NO: 1199619 - RNA, 13 nt, Human
cuugucuuuggac

SEQ ID NO: 1199620 - RNA, 20 nt, Human
cuuggugucgggcaugacac

SEQ ID NO: 1199621 - RNA, 19 nt, Human
cuuggugucgggcaugaca

SEQ ID NO: 1199622 - RNA, 15 nt, Human
cuugguccugcugca

SEQ ID NO: 1199623 - RNA, 14 nt, Human
cuugguccugcugc

SEQ ID NO: 1199624 - RNA, 22 nt, Human
cuugguagaagcccuucuaccu

SEQ ID NO: 1199625 - RNA, 21 nt, Human
cuuuuauaaacuuuaccuuuu

SEQ ID NO: 1199626 - RNA, 20 nt, Human
cuuuuauaaacuuuaccuuu

SEQ ID NO: 1199627 - RNA, 22 nt, Human
cuuuguauucucuccuguaccu

SEQ ID NO: 1199628 - RNA, 17 nt, Human
cuuuguauucucuccug

SEQ ID NO: 1199629 - RNA, 18 nt, Human
cuuugacgccaucccagc

SEQ ID NO: 1199630 - RNA, 17 nt, Human
cuuugacgccaucccag

SEQ ID NO: 1199631 - RNA, 16 nt, Human
cuuugacgccauccca

SEQ ID NO: 1199632 - RNA, 17 nt, Human
cuuucuacccagcgagc

SEQ ID NO: 1199633 - RNA, 16 nt, Human
cuuucuacccagcgag

SEQ ID NO: 1199634 - RNA, 15 nt, Human
cuuucuacccagcga

SEQ ID NO: 1199635 - RNA, 21 nt, Human
cugcugacuguuuucucuuga

SEQ ID NO: 1199636 - RNA, 18 nt, Human
cugcugacuguuuucucu

SEQ ID NO: 1199637 - RNA, 17 nt, Human
cugcuaucaaagagguu

SEQ ID NO: 1199638 - RNA, 20 nt, Human
cugccuguucagcuccagcu

SEQ ID NO: 1199639 - RNA, 23 nt, Human
cugccuguugggccaggagccuc

SEQ ID NO: 1199640 - RNA, 22 nt, Human
cugccuguugggccaggagccu

SEQ ID NO: 1199641 - RNA, 21 nt, Human
cugccuguugggccaggagcc

SEQ ID NO: 1199642 - RNA, 19 nt, Human
cugccuguucagcuccagc

SEQ ID NO: 1199643 - RNA, 20 nt, Human
cugccuguugggccaggagc

SEQ ID NO: 1199644 - RNA, 18 nt, Human
cugccuguucagcuccag

SEQ ID NO: 1199645 - RNA, 17 nt, Human
cugccuguucagcucca

SEQ ID NO: 1199646 - RNA, 23 nt, Human
cugccucucccaucacuucccua

SEQ ID NO: 1199647 - RNA, 22 nt, Human
cugccucucccaucacuucccu

SEQ ID NO: 1199648 - RNA, 15 nt, Human
cugccucucccauca

SEQ ID NO: 1199649 - RNA, 20 nt, Human
cugcuuuugucuaugggacu

SEQ ID NO: 1199650 - RNA, 23 nt, Human
cugcuucaaggauccugagccag

SEQ ID NO: 1199651 - RNA, 22 nt, Human
cugcuucaaggauccugagcca

SEQ ID NO: 1199652 - RNA, 21 nt, Human
cugcuucaaggauccugagcc

SEQ ID NO: 1199653 - RNA, 13 nt, Human
cugcuucaaggau

SEQ ID NO: 1199654 - RNA, 12 nt, Human
cugcuucaagga

SEQ ID NO: 1199655 - RNA, 19 nt, Human
cugcuucaaauauuucccu

SEQ ID NO: 1199656 - RNA, 14 nt, Human
cugcuucaaauauu

SEQ ID NO: 1199657 - RNA, 14 nt, Human
cuggagaaaaugga

SEQ ID NO: 1199658 - RNA, 14 nt, Human
cuggaagcacagcu

SEQ ID NO: 1199659 - RNA, 19 nt, Human
cugcuuuuuaaagaaugcu

SEQ ID NO: 1199660 - RNA, 21 nt, Human
cugcuuuugucuaugggacuc

SEQ ID NO: 1199661 - RNA, 18 nt, Human
cuggcagaguugaagaca

SEQ ID NO: 1199662 - RNA, 17 nt, Human
cuggcagaguugaagac

SEQ ID NO: 1199663 - RNA, 13 nt, Human
cuggcagccccug

SEQ ID NO: 1199664 - RNA, 12 nt, Human
cuggcagccccu

SEQ ID NO: 1199665 - RNA, 11 nt, Human
cuggcagccca

SEQ ID NO: 1199666 - RNA, 19 nt, Human
cuggcagaguugaagacag

SEQ ID NO: 1199667 - RNA, 11 nt, Human
cugggacacag

SEQ ID NO: 1199668 - RNA, 22 nt, Human
cuggccccucagggucccuggu

SEQ ID NO: 1199669 - RNA, 14 nt, Human
cuggccuagcauac

SEQ ID NO: 1199670 - RNA, 16 nt, Human
cugggcagaaggaaga

SEQ ID NO: 1199671 - RNA, 15 nt, Human
cugggcagaaggaag

SEQ ID NO: 1199672 - RNA, 12 nt, Human
cugggcagaagg

SEQ ID NO: 1199673 - RNA, 20 nt, Human
cuggguucacugcaaccucc

SEQ ID NO: 1199674 - RNA, 18 nt, Human
cuggguucacugcaaccu

SEQ ID NO: 1199675 - RNA, 14 nt, Human
cuguuggcuggggg

SEQ ID NO: 1199676 - RNA, 22 nt, Human
cuguuggcugggggccucagug

SEQ ID NO: 1199677 - RNA, 19 nt, Human
cuguuggcugggggccuca

SEQ ID NO: 1199678 - RNA, 13 nt, Human
cuuaaauaaugug

SEQ ID NO: 1199679 - RNA, 14 nt, Human
cuuaaaacaacacu

SEQ ID NO: 1199680 - RNA, 15 nt, Human
cuuaccagcagagca

SEQ ID NO: 1199681 - RNA, 13 nt, Human
cuuacacaauggu

SEQ ID NO: 1199682 - RNA, 21 nt, Human
cuuagggaaggauacaaaagc

SEQ ID NO: 1199683 - RNA, 19 nt, Human
cuuagggaaggauacaaaa

SEQ ID NO: 1199684 - RNA, 16 nt, Human
cuuaccagcagagcac

SEQ ID NO: 1199685 - RNA, 22 nt, Human
cuuagcucauucuccuuguguu

SEQ ID NO: 1199686 - RNA, 23 nt, Human
cuuagcucauucuccuuguguua

SEQ ID NO: 1199687 - RNA, 16 nt, Human
cugucgcccagucugg

SEQ ID NO: 1199688 - RNA, 23 nt, Human
cugucaauuacaggaaguacugg

SEQ ID NO: 1199689 - RNA, 20 nt, Human
cugucaauuacaggaaguac

SEQ ID NO: 1199690 - RNA, 22 nt, Human
cuggugacaugucuuuucuugc

SEQ ID NO: 1199691 - RNA, 13 nt, Human
cuguagaguggga

SEQ ID NO: 1199692 - RNA, 14 nt, Human
cugugcugcccugc

SEQ ID NO: 1199693 - RNA, 13 nt, Human
cugugcugcccug

SEQ ID NO: 1199694 - RNA, 12 nt, Human
cugugcugcccu

SEQ ID NO: 1199695 - RNA, 19 nt, Human
cugugucagcauagaagua

SEQ ID NO: 1199696 - RNA, 17 nt, Human
cugugucagcauagaag

SEQ ID NO: 1199697 - RNA, 21 nt, Human
cugugcugcccugcccaccug

SEQ ID NO: 1199698 - RNA, 19 nt, Human
cugugcugcccugcccacc

SEQ ID NO: 1199699 - RNA, 18 nt, Human
cugugcugcccugcccac

SEQ ID NO: 1199700 - RNA, 17 nt, Human
cugugcugcccugccca

SEQ ID NO: 1199701 - RNA, 15 nt, Human
cugugcugcccugcc

SEQ ID NO: 1199702 - RNA, 13 nt, Human
auucaggaagcuc

SEQ ID NO: 1199703 - RNA, 22 nt, Human
auuccccacccugaaagcccug

SEQ ID NO: 1199704 - RNA, 13 nt, Human
auucagacagcug

SEQ ID NO: 1199705 - RNA, 12 nt, Human
auucagacagcu

SEQ ID NO: 1199706 - RNA, 11 nt, Human
auucagacagc

SEQ ID NO: 1199707 - RNA, 17 nt, Human
auucagacagcugccug

SEQ ID NO: 1199708 - RNA, 16 nt, Human
auucagacagcugccu

SEQ ID NO: 1199709 - RNA, 15 nt, Human
auucagacagcugcc

SEQ ID NO: 1199710 - RNA, 14 nt, Human
auucagacagcugc

SEQ ID NO: 1199711 - RNA, 18 nt, Human
auucagacagcugccugg

SEQ ID NO: 1199712 - RNA, 12 nt, Human
auucaggaagcu

SEQ ID NO: 1199713 - RNA, 18 nt, Human
auuaucuagauacuguau

SEQ ID NO: 1199714 - RNA, 14 nt, Human
auuaucuagauacu

SEQ ID NO: 1199715 - RNA, 19 nt, Human
auucagacagcugccuggg

SEQ ID NO: 1199716 - RNA, 20 nt, Human
auugaaaucuuuuugcuuug

SEQ ID NO: 1199717 - RNA, 18 nt, Human
auugaaaucuuuuugcuu

SEQ ID NO: 1199718 - RNA, 17 nt, Human
auugaaaucuuuuugcu

SEQ ID NO: 1199719 - RNA, 15 nt, Human
auugaaaaaccauuu

SEQ ID NO: 1199720 - RNA, 13 nt, Human
auucuuccucccu

SEQ ID NO: 1199721 - RNA, 14 nt, Human
auucuuaaauaugu

SEQ ID NO: 1199722 - RNA, 21 nt, Human
auucuguuggccagugugaca

SEQ ID NO: 1199723 - RNA, 19 nt, Human
auucuguuggccaguguga

SEQ ID NO: 1199724 - RNA, 14 nt, Human
auucuguuggccag

SEQ ID NO: 1199725 - RNA, 22 nt, Human
auucugcucacauaucugucau

SEQ ID NO: 1199726 - RNA, 21 nt, Human
auucugcucacauaucuguca

SEQ ID NO: 1199727 - RNA, 20 nt, Human
auucugcucacauaucuguc

SEQ ID NO: 1199728 - RNA, 19 nt, Human
auucugcucacauaucugu

SEQ ID NO: 1199729 - RNA, 18 nt, Human
auucugcucacauaucug

SEQ ID NO: 1199730 - RNA, 21 nt, Human
auucugccugcccaggccccu

SEQ ID NO: 1199731 - RNA, 20 nt, Human
auucugccugcccaggcccc

SEQ ID NO: 1199732 - RNA, 19 nt, Human
auucugccugcccaggccc

SEQ ID NO: 1199733 - RNA, 18 nt, Human
auucugccugcccaggcc

SEQ ID NO: 1199734 - RNA, 17 nt, Human
auucugccugcccaggc

SEQ ID NO: 1199735 - RNA, 16 nt, Human
auucugccugcccagg

SEQ ID NO: 1199736 - RNA, 15 nt, Human
auucugccugcccag

SEQ ID NO: 1199737 - RNA, 14 nt, Human
auucugccugccca

SEQ ID NO: 1199738 - RNA, 13 nt, Human
auucugccugccc

SEQ ID NO: 1199739 - RNA, 11 nt, Human
auucugccugc

SEQ ID NO: 1199740 - RNA, 17 nt, Human
auucucauuugucacac

SEQ ID NO: 1199741 - RNA, 21 nt, Human
auuuuucuuagggaaggauac

SEQ ID NO: 1199742 - RNA, 21 nt, Human
auuuuguuuuugucuuaaaaa

SEQ ID NO: 1199743 - RNA, 22 nt, Human
auuuuucuuagggaaggauaca

SEQ ID NO: 1199744 - RNA, 19 nt, Human
auuuuuguagagccagggu

SEQ ID NO: 1199745 - RNA, 12 nt, Human
auuuuuguaauu

SEQ ID NO: 1199746 - RNA, 14 nt, Human
auuuuuuaaaugca

SEQ ID NO: 1199747 - RNA, 13 nt, Human
auuuuuuaaaugc

SEQ ID NO: 1199748 - RNA, 21 nt, Human
auuuugcugucccuuuuccuu

SEQ ID NO: 1199749 - RNA, 20 nt, Human
auuuugcuaaaugugaauga

SEQ ID NO: 1199750 - RNA, 17 nt, Human
auuuugauguuuuaagg

SEQ ID NO: 1199751 - RNA, 15 nt, Human
auuuugauguuuuaa

SEQ ID NO: 1199752 - RNA, 19 nt, Human
auuuugauccaagcugguc

SEQ ID NO: 1199753 - RNA, 16 nt, Human
auuuuccugccaggca

SEQ ID NO: 1199754 - RNA, 19 nt, Human
auuuucccuauuagagaag

SEQ ID NO: 1199755 - RNA, 19 nt, Human
auuuugugcccccauguaa

SEQ ID NO: 1199756 - RNA, 23 nt, Human
auuuugucauauaagauucauau

SEQ ID NO: 1199757 - RNA, 20 nt, Human
auuuuggaaaauaaauuauu

SEQ ID NO: 1199758 - RNA, 19 nt, Human
auuuuggaaaauaaauuau

SEQ ID NO: 1199759 - RNA, 14 nt, Human
auuuuggaaaauaa

SEQ ID NO: 1199760 - RNA, 20 nt, Human
auuuugcuuugugauuuuug

SEQ ID NO: 1199761 - RNA, 18 nt, Human
auuuugcuuugugauuuu

SEQ ID NO: 1199762 - RNA, 12 nt, Human
auuuugcuuugu

SEQ ID NO: 1199763 - RNA, 22 nt, Human
auuuuaaaaauacagauagaua

SEQ ID NO: 1199764 - RNA, 23 nt, Human
auuucuuccacaagagcccaggc

SEQ ID NO: 1199765 - RNA, 20 nt, Human
auuucuuccacaagagccca

SEQ ID NO: 1199766 - RNA, 16 nt, Human
auuugaaaauuuugau

SEQ ID NO: 1199767 - RNA, 19 nt, Human
auuucccaaagcagugcau

SEQ ID NO: 1199768 - RNA, 14 nt, Human
auuuauuuaaauuu

SEQ ID NO: 1199769 - RNA, 12 nt, Human
auuuauuuaaau

SEQ ID NO: 1199770 - RNA, 21 nt, Human
auugauuuccguuaaaauacc

SEQ ID NO: 1199771 - RNA, 17 nt, Human
auuuaaaagauacaguu

SEQ ID NO: 1199772 - RNA, 16 nt, Human
auuuaaaagauacagu

SEQ ID NO: 1199773 - RNA, 14 nt, Human
auuuaaaagauaca

SEQ ID NO: 1199774 - RNA, 14 nt, Human
auugugggaagggg

SEQ ID NO: 1199775 - RNA, 13 nt, Human
auugugggaaggg

SEQ ID NO: 1199776 - RNA, 23 nt, Human
auugucaaaguggugagaggcau

SEQ ID NO: 1199777 - RNA, 20 nt, Human
augggcuggguucuacccag

SEQ ID NO: 1199778 - RNA, 18 nt, Human
augggccuccugugugug

SEQ ID NO: 1199779 - RNA, 15 nt, Human
augggggugcauuug

SEQ ID NO: 1199780 - RNA, 24 nt, Human
auggggcugcaccggcuggccugg

SEQ ID NO: 1199781 - RNA, 13 nt, Human
auggggcccugcc

SEQ ID NO: 1199782 - RNA, 14 nt, Human
augggggugcauuu

SEQ ID NO: 1199783 - RNA, 18 nt, Human
augggcaacccccagccu

SEQ ID NO: 1199784 - RNA, 15 nt, Human
augggauccuggagu

SEQ ID NO: 1199785 - RNA, 19 nt, Human
uuucuggcuaugcauuuga

SEQ ID NO: 1199786 - RNA, 18 nt, Human
uuucuggcuaugcauuug

SEQ ID NO: 1199787 - RNA, 16 nt, Human
uuucuggcuaugcauu

SEQ ID NO: 1199788 - RNA, 15 nt, Human
uuucuggcuaugcau

SEQ ID NO: 1199789 - RNA, 19 nt, Human
uuucugcagccacuauugu

SEQ ID NO: 1199790 - RNA, 21 nt, Human
uuucugcagccacuauuguua

SEQ ID NO: 1199791 - RNA, 14 nt, Human
augguuuucuugug

SEQ ID NO: 1199792 - RNA, 16 nt, Human
augguuuucaaaauaa

SEQ ID NO: 1199793 - RNA, 15 nt, Human
augguuuucaaaaua

SEQ ID NO: 1199794 - RNA, 14 nt, Human
augguuuucaaaau

SEQ ID NO: 1199795 - RNA, 17 nt, Human
augguggcuggguugga

SEQ ID NO: 1199796 - RNA, 15 nt, Human
augguggcuggguug

SEQ ID NO: 1199797 - RNA, 13 nt, Human
augguggcugggu

SEQ ID NO: 1199798 - RNA, 12 nt, Human
augguggcuggg

SEQ ID NO: 1199799 - RNA, 19 nt, Human
auggugcaaugaccuuuca

SEQ ID NO: 1199800 - RNA, 17 nt, Human
auggugcaaugaccuuu

SEQ ID NO: 1199801 - RNA, 16 nt, Human
auggugcaaugaccuu

SEQ ID NO: 1199802 - RNA, 15 nt, Human
auggugcaaugaccu

SEQ ID NO: 1199803 - RNA, 13 nt, Human
auggugcaaugac

SEQ ID NO: 1199804 - RNA, 12 nt, Human
auggugcaauga

SEQ ID NO: 1199805 - RNA, 20 nt, Human
augggugcuuggaggaagga

SEQ ID NO: 1199806 - RNA, 20 nt, Human
auggugagggauacccaucc

SEQ ID NO: 1199807 - RNA, 15 nt, Human
augggugcuuggagg

SEQ ID NO: 1199808 - RNA, 16 nt, Human
augugaugagaggaaa

SEQ ID NO: 1199809 - RNA, 19 nt, Human
augugaugagaggaaauca

SEQ ID NO: 1199810 - RNA, 17 nt, Human
augugaugagaggaaau

SEQ ID NO: 1199811 - RNA, 23 nt, Human
augucucuuuaaugucacaggca

SEQ ID NO: 1199812 - RNA, 23 nt, Human
augugcacaugcacgugugugca

SEQ ID NO: 1199813 - RNA, 16 nt, Human
auguauguguaaguau

SEQ ID NO: 1199814 - RNA, 15 nt, Human
augucagugugacug

SEQ ID NO: 1199815 - RNA, 13 nt, Human
augucagugugac

SEQ ID NO: 1199816 - RNA, 12 nt, Human
augucaguguga

SEQ ID NO: 1199817 - RNA, 18 nt, Human
uuugaccucugcagcaau

SEQ ID NO: 1199818 - RNA, 12 nt, Human
uuugaccucugc

SEQ ID NO: 1199819 - RNA, 13 nt, Human
uuugccucugccu

SEQ ID NO: 1199820 - RNA, 15 nt, Human
uuugccguuauuaaa

SEQ ID NO: 1199821 - RNA, 22 nt, Human
uuugauucagacagcugccugg

SEQ ID NO: 1199822 - RNA, 21 nt, Human
uuugauucagacagcugccug

SEQ ID NO: 1199823 - RNA, 23 nt, Human
uuugauuaaauucuugcaaagua

SEQ ID NO: 1199824 - RNA, 21 nt, Human
uuugauuaaauucuugcaaag

SEQ ID NO: 1199825 - RNA, 18 nt, Human
uuugauuaaauucuugca

SEQ ID NO: 1199826 - RNA, 13 nt, Human
uuugauuaaauuc

SEQ ID NO: 1199827 - RNA, 22 nt, Human
uuugauguucuuucacccuuuu

SEQ ID NO: 1199828 - RNA, 20 nt, Human
uuugacgccaucccagcccc

SEQ ID NO: 1199829 - RNA, 19 nt, Human
uuugacgccaucccagccc

SEQ ID NO: 1199830 - RNA, 16 nt, Human
uuugacgccaucccag

SEQ ID NO: 1199831 - RNA, 14 nt, Human
uuugacgccauccc

SEQ ID NO: 1199832 - RNA, 13 nt, Human
uuugacgccaucc

SEQ ID NO: 1199833 - RNA, 18 nt, Human
augcagccucacaguccu

SEQ ID NO: 1199834 - RNA, 12 nt, Human
uuuaauucaguu

SEQ ID NO: 1199835 - RNA, 23 nt, Human
augcagugguaugaucacggcuc

SEQ ID NO: 1199836 - RNA, 20 nt, Human
augcgugcauaccacuuuug

SEQ ID NO: 1199837 - RNA, 15 nt, Human
augcccagccccuuc

SEQ ID NO: 1199838 - RNA, 14 nt, Human
augcccagccccuu

SEQ ID NO: 1199839 - RNA, 13 nt, Human
augcccagccccu

SEQ ID NO: 1199840 - RNA, 12 nt, Human
augcccagcccc

SEQ ID NO: 1199841 - RNA, 13 nt, Human
uuuaaagaaugcu

SEQ ID NO: 1199842 - RNA, 21 nt, Human
augcacuuuguucuggcucuu

SEQ ID NO: 1199843 - RNA, 20 nt, Human
augcacuuuguucuggcucu

SEQ ID NO: 1199844 - RNA, 19 nt, Human
augcacuuuguucuggcuc

SEQ ID NO: 1199845 - RNA, 17 nt, Human
augcacuuuguucuggc

SEQ ID NO: 1199846 - RNA, 14 nt, Human
augcaccuggaaua

SEQ ID NO: 1199847 - RNA, 13 nt, Human
augcaccuggaau

SEQ ID NO: 1199848 - RNA, 22 nt, Human
augcaccagcccuuagcaggga

SEQ ID NO: 1199849 - RNA, 20 nt, Human
augaucuaggaagacuuugg

SEQ ID NO: 1199850 - RNA, 17 nt, Human
augaucuaggaagacuu

SEQ ID NO: 1199851 - RNA, 20 nt, Human
uuguguuacuaaguuuuuau

SEQ ID NO: 1199852 - RNA, 15 nt, Human
uuguguuacuaaguu

SEQ ID NO: 1199853 - RNA, 13 nt, Human
uuguguuacuaag

SEQ ID NO: 1199854 - RNA, 21 nt, Human
uuguuccacaaguuaaauaaa

SEQ ID NO: 1199855 - RNA, 13 nt, Human
uuguguucaccuu

SEQ ID NO: 1199856 - RNA, 13 nt, Human
augcuucucacug

SEQ ID NO: 1199857 - RNA, 22 nt, Human
uuucaaacuuuacuauggcccu

SEQ ID NO: 1199858 - RNA, 16 nt, Human
uuucaaacuuuacuau

SEQ ID NO: 1199859 - RNA, 12 nt, Human
auggacuuuguu

SEQ ID NO: 1199860 - RNA, 11 nt, Human
auggacuuugu

SEQ ID NO: 1199861 - RNA, 18 nt, Human
uuuccaugaguccccugu

SEQ ID NO: 1199862 - RNA, 17 nt, Human
uuuccaugaguccccug

SEQ ID NO: 1199863 - RNA, 19 nt, Human
augggagagaagagaaugc

SEQ ID NO: 1199864 - RNA, 15 nt, Human
augggagagaagaga

SEQ ID NO: 1199865 - RNA, 18 nt, Human
auggcuaauguacugcau

SEQ ID NO: 1199866 - RNA, 20 nt, Human
aucaggccaggcccucugcc

SEQ ID NO: 1199867 - RNA, 15 nt, Human
aucagcacgauuucu

SEQ ID NO: 1199868 - RNA, 18 nt, Human
aucaggccaggcccucug

SEQ ID NO: 1199869 - RNA, 16 nt, Human
aucaggccaggcccuc

SEQ ID NO: 1199870 - RNA, 15 nt, Human
aucaggccaggcccu

SEQ ID NO: 1199871 - RNA, 13 nt, Human
aucagcacgauuu

SEQ ID NO: 1199872 - RNA, 12 nt, Human
aucagaauucuc

SEQ ID NO: 1199873 - RNA, 11 nt, Human
aucagaauucu

SEQ ID NO: 1199874 - RNA, 16 nt, Human
uucuagcauggcugcc

SEQ ID NO: 1199875 - RNA, 21 nt, Human
uucuaaaucuccaaaauaaaa

SEQ ID NO: 1199876 - RNA, 21 nt, Human
uucuaaaggcuaccuuuguau

SEQ ID NO: 1199877 - RNA, 20 nt, Human
uucuaaaggcuaccuuugua

SEQ ID NO: 1199878 - RNA, 19 nt, Human
uucgcuccugugucuugca

SEQ ID NO: 1199879 - RNA, 15 nt, Human
uucgcuccugugucu

SEQ ID NO: 1199880 - RNA, 18 nt, Human
uuccugaagaauugaaaa

SEQ ID NO: 1199881 - RNA, 14 nt, Human
uuccugaaccgaug

SEQ ID NO: 1199882 - RNA, 22 nt, Human
uuccucuuuccaucuacccucc

SEQ ID NO: 1199883 - RNA, 17 nt, Human
uuccucuuuccaucuac

SEQ ID NO: 1199884 - RNA, 13 nt, Human
uuccucuuuccau

SEQ ID NO: 1199885 - RNA, 16 nt, Human
uuccguuaaaauacca

SEQ ID NO: 1199886 - RNA, 14 nt, Human
uuccguuaaaauac

SEQ ID NO: 1199887 - RNA, 20 nt, Human
uucccucaccuuucccaucu

SEQ ID NO: 1199888 - RNA, 19 nt, Human
aucacggcucacugcagcc

SEQ ID NO: 1199889 - RNA, 18 nt, Human
aucacggcucacugcagc

SEQ ID NO: 1199890 - RNA, 15 nt, Human
aucacggcucacugc

SEQ ID NO: 1199891 - RNA, 14 nt, Human
aucacgccacugca

SEQ ID NO: 1199892 - RNA, 13 nt, Human
aucacgccacugc

SEQ ID NO: 1199893 - RNA, 14 nt, Human
aucaaugaguaaca

SEQ ID NO: 1199894 - RNA, 11 nt, Human
uuccugugucu

SEQ ID NO: 1199895 - RNA, 16 nt, Human
auccuccucagaucuu

SEQ ID NO: 1199896 - RNA, 16 nt, Human
auccuaggcauuugcu

SEQ ID NO: 1199897 - RNA, 12 nt, Human
auccuaagcuau

SEQ ID NO: 1199898 - RNA, 21 nt, Human
auccuaagcuauucaguaaua

SEQ ID NO: 1199899 - RNA, 15 nt, Human
uucuucugcuucagc

SEQ ID NO: 1199900 - RNA, 13 nt, Human
uucuucugcuuca

SEQ ID NO: 1199901 - RNA, 14 nt, Human
uucuucucccucag

SEQ ID NO: 1199902 - RNA, 13 nt, Human
uucuucucccuca

SEQ ID NO: 1199903 - RNA, 23 nt, Human
aucccucauccucauacccaccc

SEQ ID NO: 1199904 - RNA, 21 nt, Human
aucccucauccucauacccac

SEQ ID NO: 1199905 - RNA, 14 nt, Human
aucccucauccuca

SEQ ID NO: 1199906 - RNA, 13 nt, Human
aucccaugagccu

SEQ ID NO: 1199907 - RNA, 24 nt, Human
aucccauaugccugggcagaagga

SEQ ID NO: 1199908 - RNA, 20 nt, Human
uucuucugcuucagccuccc

SEQ ID NO: 1199909 - RNA, 21 nt, Human
auccaguaucuugaagacuuu

SEQ ID NO: 1199910 - RNA, 20 nt, Human
aucccaaacccuucagugcc

SEQ ID NO: 1199911 - RNA, 19 nt, Human
aucccaaacccuucagugc

SEQ ID NO: 1199912 - RNA, 18 nt, Human
aucccauaugccugggca

SEQ ID NO: 1199913 - RNA, 16 nt, Human
auccaguaucuugaag

SEQ ID NO: 1199914 - RNA, 16 nt, Human
auccacccaccucagc

SEQ ID NO: 1199915 - RNA, 15 nt, Human
auccacccaccucag

SEQ ID NO: 1199916 - RNA, 13 nt, Human
auccacccaccuc

SEQ ID NO: 1199917 - RNA, 21 nt, Human
auccaagcuggucccacucag

SEQ ID NO: 1199918 - RNA, 18 nt, Human
auccaagcuggucccacu

SEQ ID NO: 1199919 - RNA, 23 nt, Human
uucugaacuuggcgcugccccug

SEQ ID NO: 1199920 - RNA, 15 nt, Human
uucugccauauucug

SEQ ID NO: 1199921 - RNA, 22 nt, Human
uucugaacuuggcgcugccccu

SEQ ID NO: 1199922 - RNA, 19 nt, Human
uucugaacuuggcgcugcc

SEQ ID NO: 1199923 - RNA, 17 nt, Human
uucuggcucuuccaggc

SEQ ID NO: 1199924 - RNA, 16 nt, Human
uucuggcucuuccagg

SEQ ID NO: 1199925 - RNA, 21 nt, Human
uucugccugcccaggccccug

SEQ ID NO: 1199926 - RNA, 18 nt, Human
uucugccugcccaggccc

SEQ ID NO: 1199927 - RNA, 21 nt, Human
uucuccuuguguuacuaaguu

SEQ ID NO: 1199928 - RNA, 14 nt, Human
aucaggugcugcca

SEQ ID NO: 1199929 - RNA, 20 nt, Human
uucucuaguuugauuaaauu

SEQ ID NO: 1199930 - RNA, 17 nt, Human
uucucuaguuugauuaa

SEQ ID NO: 1199931 - RNA, 15 nt, Human
uucucuaguuugauu

SEQ ID NO: 1199932 - RNA, 14 nt, Human
uugauuaaauucuu

SEQ ID NO: 1199933 - RNA, 13 nt, Human
uugauuaaauucu

SEQ ID NO: 1199934 - RNA, 23 nt, Human
uugauguuuuaaggaugcuugua

SEQ ID NO: 1199935 - RNA, 23 nt, Human
aucugaaaauguauguguaagua

SEQ ID NO: 1199936 - RNA, 18 nt, Human
uugcaccacugcacucca

SEQ ID NO: 1199937 - RNA, 16 nt, Human
uugcaccacugcacuc

SEQ ID NO: 1199938 - RNA, 15 nt, Human
uugcaccacugcacu

SEQ ID NO: 1199939 - RNA, 19 nt, Human
uugcaauggcagccuuggc

SEQ ID NO: 1199940 - RNA, 17 nt, Human
uugcaauggcagccuug

SEQ ID NO: 1199941 - RNA, 16 nt, Human
uugcaauggcagccuu

SEQ ID NO: 1199942 - RNA, 21 nt, Human
aucuccaaaauaaaacuuuuu

SEQ ID NO: 1199943 - RNA, 20 nt, Human
aucuccaaaauaaaacuuuu

SEQ ID NO: 1199944 - RNA, 17 nt, Human
aucuccaaaauaaaacu

SEQ ID NO: 1199945 - RNA, 14 nt, Human
aucuccaaaauaaa

SEQ ID NO: 1199946 - RNA, 16 nt, Human
aucucagggccugguc

SEQ ID NO: 1199947 - RNA, 22 nt, Human
aucugaaaauguauguguaagu

SEQ ID NO: 1199948 - RNA, 20 nt, Human
aucugaaaauguauguguaa

SEQ ID NO: 1199949 - RNA, 19 nt, Human
aucugaaaauguaugugua

SEQ ID NO: 1199950 - RNA, 16 nt, Human
aucugaaaauguaugu

SEQ ID NO: 1199951 - RNA, 14 nt, Human
aucugaaaauguau

SEQ ID NO: 1199952 - RNA, 18 nt, Human
aucucuugagccugggag

SEQ ID NO: 1199953 - RNA, 15 nt, Human
aucucuugagccugg

SEQ ID NO: 1199954 - RNA, 15 nt, Human
aucucccccagcccc

SEQ ID NO: 1199955 - RNA, 17 nt, Human
aucucccccagccccau

SEQ ID NO: 1199956 - RNA, 16 nt, Human
aucucccccagcccca

SEQ ID NO: 1199957 - RNA, 21 nt, Human
aucucccccagccccauccuc

SEQ ID NO: 1199958 - RNA, 20 nt, Human
aucuaauauguaacaagcca

SEQ ID NO: 1199959 - RNA, 18 nt, Human
aucuaauauguaacaagc

SEQ ID NO: 1199960 - RNA, 15 nt, Human
uugauacuacaguuu

SEQ ID NO: 1199961 - RNA, 20 nt, Human
uugaguugauucagcucugc

SEQ ID NO: 1199962 - RNA, 11 nt, Human
uugagugccuu

SEQ ID NO: 1199963 - RNA, 20 nt, Human
uugagugaagcugggagaac

SEQ ID NO: 1199964 - RNA, 16 nt, Human
uugagaucagccuggg

SEQ ID NO: 1199965 - RNA, 19 nt, Human
aucuaaauggaaccacucu

SEQ ID NO: 1199966 - RNA, 18 nt, Human
aucuaaauggaaccacuc

SEQ ID NO: 1199967 - RNA, 17 nt, Human
aucuaaauggaaccacu

SEQ ID NO: 1199968 - RNA, 13 nt, Human
aucuaaauggaac

SEQ ID NO: 1199969 - RNA, 17 nt, Human
auccucuguacagagcc

SEQ ID NO: 1199970 - RNA, 16 nt, Human
auccucuguacagagc

SEQ ID NO: 1199971 - RNA, 23 nt, Human
aucugugaaaggaaagagggagg

SEQ ID NO: 1199972 - RNA, 18 nt, Human
aucugugaaaggaaagag

SEQ ID NO: 1199973 - RNA, 20 nt, Human
aucuuggucagauuugaacu

SEQ ID NO: 1199974 - RNA, 13 nt, Human
aucuugcucugcu

SEQ ID NO: 1199975 - RNA, 17 nt, Human
aucugugaaaggaaaga

SEQ ID NO: 1199976 - RNA, 17 nt, Human
aucuggugacuuuccuc

SEQ ID NO: 1199977 - RNA, 16 nt, Human
aucuggugacuuuccu

SEQ ID NO: 1199978 - RNA, 10 nt, Human
aucuggugac

SEQ ID NO: 1199979 - RNA, 19 nt, Human
augaaagggcccagagagg

SEQ ID NO: 1199980 - RNA, 18 nt, Human
uuggggaccagagcugcc

SEQ ID NO: 1199981 - RNA, 14 nt, Human
uuggggauauuuuu

SEQ ID NO: 1199982 - RNA, 18 nt, Human
augaaagggcccagagag

SEQ ID NO: 1199983 - RNA, 22 nt, Human
aucuuuucauuuaggugaggaa

SEQ ID NO: 1199984 - RNA, 18 nt, Human
aucuuugcagacaggcaa

SEQ ID NO: 1199985 - RNA, 17 nt, Human
aucuuugcagacaggca

SEQ ID NO: 1199986 - RNA, 18 nt, Human
uuggccccugcccggcug

SEQ ID NO: 1199987 - RNA, 16 nt, Human
uuggagggugucccaa

SEQ ID NO: 1199988 - RNA, 14 nt, Human
uugcuugaaagaaa

SEQ ID NO: 1199989 - RNA, 22 nt, Human
auaagccaaaaaaugcuugcuu

SEQ ID NO: 1199990 - RNA, 21 nt, Human
auaagauucauauuuacuucu

SEQ ID NO: 1199991 - RNA, 18 nt, Human
uuagguuggcaaaaaggc

SEQ ID NO: 1199992 - RNA, 15 nt, Human
uuaggugaggaagca

SEQ ID NO: 1199993 - RNA, 19 nt, Human
uuaggugugggggaagcac

SEQ ID NO: 1199994 - RNA, 13 nt, Human
uuauaaacuuuac

SEQ ID NO: 1199995 - RNA, 13 nt, Human
uuaguagagacag

SEQ ID NO: 1199996 - RNA, 14 nt, Human
uuaguagagacagg

SEQ ID NO: 1199997 - RNA, 17 nt, Human
uuaguagagacaggguu

SEQ ID NO: 1199998 - RNA, 19 nt, Human
uuaccagcagagcaccuua

SEQ ID NO: 1199999 - RNA, 20 nt, Human
uuacauaagauaaaugugcu

SEQ ID NO: 1200000 - RNA, 14 nt, Human
uuacaggugugaac

SEQ ID NO: 1200001 - RNA, 14 nt, Human
auaagauucauauu

SEQ ID NO: 1200002 - RNA, 16 nt, Human
uuagaagucacacagu

SEQ ID NO: 1200003 - RNA, 23 nt, Human
uuacuguacaugaaaacacauuu

SEQ ID NO: 1200004 - RNA, 22 nt, Human
uuacuguacaugaaaacacauu

SEQ ID NO: 1200005 - RNA, 14 nt, Human
uuacuguacaugaa

SEQ ID NO: 1200006 - RNA, 13 nt, Human
uuacuguacauga

SEQ ID NO: 1200007 - RNA, 12 nt, Human
uuacuguacaug

SEQ ID NO: 1200008 - RNA, 15 nt, Human
uuacugcagcuuugu

SEQ ID NO: 1200009 - RNA, 15 nt, Human
uuaaucuaaauggaa

SEQ ID NO: 1200010 - RNA, 23 nt, Human
uuaacuuuuauaaacuuuaccuu

SEQ ID NO: 1200011 - RNA, 22 nt, Human
uuaacuuuuauaaacuuuaccu

SEQ ID NO: 1200012 - RNA, 19 nt, Human
uuaagaaaaaggaugcaca

SEQ ID NO: 1200013 - RNA, 20 nt, Human
uuaaaaaucucaaauuucua

SEQ ID NO: 1200014 - RNA, 19 nt, Human
uuaaaaaucucaaauuucu

SEQ ID NO: 1200015 - RNA, 16 nt, Human
uuaacagaaauguaca

SEQ ID NO: 1200016 - RNA, 14 nt, Human
uuaacagaaaugua

SEQ ID NO: 1200017 - RNA, 13 nt, Human
uuaacagaaaugu

SEQ ID NO: 1200018 - RNA, 12 nt, Human
uuaacagaaaug

SEQ ID NO: 1200019 - RNA, 22 nt, Human
aguuuguuaguaugaggcauuu

SEQ ID NO: 1200020 - RNA, 19 nt, Human
aguuucugccgcagcccug

SEQ ID NO: 1200021 - RNA, 15 nt, Human
aguuucugccgcagc

SEQ ID NO: 1200022 - RNA, 14 nt, Human
aguuucucuuuuca

SEQ ID NO: 1200023 - RNA, 14 nt, Human
auagagagagacca

SEQ ID NO: 1200024 - RNA, 23 nt, Human
auagacaauuuauuauggcacau

SEQ ID NO: 1200025 - RNA, 22 nt, Human
auagacaauuuauuauggcaca

SEQ ID NO: 1200026 - RNA, 16 nt, Human
auagacaauuuauuau

SEQ ID NO: 1200027 - RNA, 16 nt, Human
auacucugcuuagaau

SEQ ID NO: 1200028 - RNA, 14 nt, Human
auacucccaucugu

SEQ ID NO: 1200029 - RNA, 17 nt, Human
auacuccuccaagguua

SEQ ID NO: 1200030 - RNA, 11 nt, Human
auacucccauc

SEQ ID NO: 1200031 - RNA, 12 nt, Human
uuauuaugcaug

SEQ ID NO: 1200032 - RNA, 13 nt, Human
uuauuaugcauga

SEQ ID NO: 1200033 - RNA, 22 nt, Human
uuaugggcuggguucuacccag

SEQ ID NO: 1200034 - RNA, 13 nt, Human
uuaugggcugggu

SEQ ID NO: 1200035 - RNA, 19 nt, Human
uuauggcuuuugugcauua

SEQ ID NO: 1200036 - RNA, 21 nt, Human
uuaucacccagaagaaaauag

SEQ ID NO: 1200037 - RNA, 19 nt, Human
uuaucacccagaagaaaau

SEQ ID NO: 1200038 - RNA, 18 nt, Human
uuaucacccagaagaaaa

SEQ ID NO: 1200039 - RNA, 17 nt, Human
uuaucacccagaagaaa

SEQ ID NO: 1200040 - RNA, 11 nt, Human
uuaugacucca

SEQ ID NO: 1200041 - RNA, 18 nt, Human
auacaguuacucagaauu

SEQ ID NO: 1200042 - RNA, 23 nt, Human
auacaggaaaagcugcugacagu

SEQ ID NO: 1200043 - RNA, 23 nt, Human
auacagauagauauaugcucugc

SEQ ID NO: 1200044 - RNA, 20 nt, Human
auacaguuacucagaauucu

SEQ ID NO: 1200045 - RNA, 18 nt, Human
uuauaaacuuuaccuuuu

SEQ ID NO: 1200046 - RNA, 17 nt, Human
uuauaaacuuuaccuuu

SEQ ID NO: 1200047 - RNA, 17 nt, Human
auacagaggcaacugca

SEQ ID NO: 1200048 - RNA, 16 nt, Human
auacagaggcaacugc

SEQ ID NO: 1200049 - RNA, 16 nt, Human
auacguacacauuuua

SEQ ID NO: 1200050 - RNA, 15 nt, Human
auacguacacauuuu

SEQ ID NO: 1200051 - RNA, 14 nt, Human
auacguacacauuu

SEQ ID NO: 1200052 - RNA, 13 nt, Human
auacguacacauu

SEQ ID NO: 1200053 - RNA, 14 nt, Human
auaccuuuuuuaga

SEQ ID NO: 1200054 - RNA, 17 nt, Human
auaccagccaguaaaug

SEQ ID NO: 1200055 - RNA, 18 nt, Human
auaccacuuuuguucuug

SEQ ID NO: 1200056 - RNA, 17 nt, Human
auaccacuuuuguucuu

SEQ ID NO: 1200057 - RNA, 20 nt, Human
auacuaaccagcagaaaugc

SEQ ID NO: 1200058 - RNA, 19 nt, Human
auacuaaccagcagaaaug

SEQ ID NO: 1200059 - RNA, 13 nt, Human
auacuaaccagca

SEQ ID NO: 1200060 - RNA, 11 nt, Human
uguguguuuau

SEQ ID NO: 1200061 - RNA, 20 nt, Human
ugugucuugcaauggcagcc

SEQ ID NO: 1200062 - RNA, 11 nt, Human
aguggcagcug

SEQ ID NO: 1200063 - RNA, 19 nt, Human
uguuacauaagauaaaugu

SEQ ID NO: 1200064 - RNA, 23 nt, Human
uguguuaucacccagaagaaaau

SEQ ID NO: 1200065 - RNA, 22 nt, Human
uguguuaucacccagaagaaaa

SEQ ID NO: 1200066 - RNA, 22 nt, Human
agugugguguuuccuggcacug

SEQ ID NO: 1200067 - RNA, 17 nt, Human
uguuaugacuccagaau

SEQ ID NO: 1200068 - RNA, 13 nt, Human
uguuaugacucca

SEQ ID NO: 1200069 - RNA, 19 nt, Human
uguuccacaaguuaaauaa

SEQ ID NO: 1200070 - RNA, 21 nt, Human
agugugccugaagucccagau

SEQ ID NO: 1200071 - RNA, 20 nt, Human
agugugacugaucucucgug

SEQ ID NO: 1200072 - RNA, 16 nt, Human
aguguuguggauuuaa

SEQ ID NO: 1200073 - RNA, 13 nt, Human
aguuacucagaau

SEQ ID NO: 1200074 - RNA, 20 nt, Human
aguguuguggauuuaacaga

SEQ ID NO: 1200075 - RNA, 19 nt, Human
aguguuguggauuuaacag

SEQ ID NO: 1200076 - RNA, 12 nt, Human
uguugcccaggc

SEQ ID NO: 1200077 - RNA, 23 nt, Human
uguugcccaggcuggcgugcagu

SEQ ID NO: 1200078 - RNA, 14 nt, Human
agugccaaaaacaa

SEQ ID NO: 1200079 - RNA, 16 nt, Human
agugcaugcugucccu

SEQ ID NO: 1200080 - RNA, 17 nt, Human
agugcagugagccgaga

SEQ ID NO: 1200081 - RNA, 12 nt, Human
agugaggcucug

SEQ ID NO: 1200082 - RNA, 14 nt, Human
agugaggcucugcc

SEQ ID NO: 1200083 - RNA, 13 nt, Human
agugaggcucugc

SEQ ID NO: 1200084 - RNA, 16 nt, Human
agugaggaugaaaaaa

SEQ ID NO: 1200085 - RNA, 12 nt, Human
ugugcucugauc

SEQ ID NO: 1200086 - RNA, 12 nt, Human
ugugcugcccug

SEQ ID NO: 1200087 - RNA, 19 nt, Human
ugugcugagucugaaggcu

SEQ ID NO: 1200088 - RNA, 18 nt, Human
ugugcugagucugaaggc

SEQ ID NO: 1200089 - RNA, 22 nt, Human
uguggauuuaacagaaauguac

SEQ ID NO: 1200090 - RNA, 23 nt, Human
agugagcugguuuuuagcggaga

SEQ ID NO: 1200091 - RNA, 20 nt, Human
uguggauuuaacagaaaugu

SEQ ID NO: 1200092 - RNA, 19 nt, Human
uguggauuuaacagaaaug

SEQ ID NO: 1200093 - RNA, 14 nt, Human
uguggaugauaaaa

SEQ ID NO: 1200094 - RNA, 21 nt, Human
ugugcugcccugcccaccugg

SEQ ID NO: 1200095 - RNA, 20 nt, Human
ugugcugcccugcccaccug

SEQ ID NO: 1200096 - RNA, 19 nt, Human
ugugcugcccugcccaccu

SEQ ID NO: 1200097 - RNA, 18 nt, Human
ugugcugcccugcccacc

SEQ ID NO: 1200098 - RNA, 22 nt, Human
ugugaugaugaaaugaggucag

SEQ ID NO: 1200099 - RNA, 19 nt, Human
ugugaugagaggaaaucac

SEQ ID NO: 1200100 - RNA, 12 nt, Human
agugagcugguu

SEQ ID NO: 1200101 - RNA, 22 nt, Human
agugagcacuaaggugugcucu

SEQ ID NO: 1200102 - RNA, 14 nt, Human
agugagcacuaagg

SEQ ID NO: 1200103 - RNA, 21 nt, Human
agugacugauggcuaauguac

SEQ ID NO: 1200104 - RNA, 20 nt, Human
agugaacuugggccacugug

SEQ ID NO: 1200105 - RNA, 16 nt, Human
agugaacuugggccac

SEQ ID NO: 1200106 - RNA, 23 nt, Human
agucuuagauguauauauuuccu

SEQ ID NO: 1200107 - RNA, 16 nt, Human
agucuuagauguauau

SEQ ID NO: 1200108 - RNA, 14 nt, Human
agucuuagauguau

SEQ ID NO: 1200109 - RNA, 13 nt, Human
agucuuagaugua

SEQ ID NO: 1200110 - RNA, 12 nt, Human
agucugaaggcu

SEQ ID NO: 1200111 - RNA, 17 nt, Human
agucucuugauucauaa

SEQ ID NO: 1200112 - RNA, 16 nt, Human
agucucuugauucaua

SEQ ID NO: 1200113 - RNA, 12 nt, Human
ugugaggaagcc

SEQ ID NO: 1200114 - RNA, 11 nt, Human
ugugaggaagc

SEQ ID NO: 1200115 - RNA, 19 nt, Human
aguauucuuauuuaaugaa

SEQ ID NO: 1200116 - RNA, 17 nt, Human
agucaccccggccaccu

SEQ ID NO: 1200117 - RNA, 15 nt, Human
agucaccaagcccag

SEQ ID NO: 1200118 - RNA, 15 nt, Human
aguauuacuucugcu

SEQ ID NO: 1200119 - RNA, 23 nt, Human
ugucccugcacuugcagacucua

SEQ ID NO: 1200120 - RNA, 22 nt, Human
ugucccugcacuugcagacucu

SEQ ID NO: 1200121 - RNA, 20 nt, Human
ugucccugcacuugcagacu

SEQ ID NO: 1200122 - RNA, 22 nt, Human
uguccaagaagcccaggaaagg

SEQ ID NO: 1200123 - RNA, 18 nt, Human
uguccaagaagcccagga

SEQ ID NO: 1200124 - RNA, 17 nt, Human
uguccaagaagcccagg

SEQ ID NO: 1200125 - RNA, 16 nt, Human
uguccaagaagcccag

SEQ ID NO: 1200126 - RNA, 15 nt, Human
uguccaagaagccca

SEQ ID NO: 1200127 - RNA, 14 nt, Human
uguccaagaagccc

SEQ ID NO: 1200128 - RNA, 22 nt, Human
ugucauuugagcagggcucagc

SEQ ID NO: 1200129 - RNA, 21 nt, Human
ugucauuugagcagggcucag

SEQ ID NO: 1200130 - RNA, 20 nt, Human
ugucauuugagcagggcuca

SEQ ID NO: 1200131 - RNA, 20 nt, Human
ugucagguggggcagcuuga

SEQ ID NO: 1200132 - RNA, 18 nt, Human
ugucagguggggcagcuu

SEQ ID NO: 1200133 - RNA, 17 nt, Human
ugucagguggggcagcu

SEQ ID NO: 1200134 - RNA, 23 nt, Human
agucucacuguugcccaggcugg

SEQ ID NO: 1200135 - RNA, 16 nt, Human
aguccucccaucucac

SEQ ID NO: 1200136 - RNA, 14 nt, Human
aguccucccaucuc

SEQ ID NO: 1200137 - RNA, 16 nt, Human
agucccaccuuggcug

SEQ ID NO: 1200138 - RNA, 15 nt, Human
agucccaccuuggcu

SEQ ID NO: 1200139 - RNA, 20 nt, Human
agucccaccuuggcugcagg

SEQ ID NO: 1200140 - RNA, 19 nt, Human
agucccaccuuggcugcag

SEQ ID NO: 1200141 - RNA, 18 nt, Human
agucccaccuuggcugca

SEQ ID NO: 1200142 - RNA, 22 nt, Human
agucagaaguuucugccgcagc

SEQ ID NO: 1200143 - RNA, 23 nt, Human
ugucccuuacgugaguccuggca

SEQ ID NO: 1200144 - RNA, 19 nt, Human
ugucccuuacgugaguccu

SEQ ID NO: 1200145 - RNA, 17 nt, Human
uguaggguuauaauaau

SEQ ID NO: 1200146 - RNA, 16 nt, Human
uguaggguuauaauaa

SEQ ID NO: 1200147 - RNA, 22 nt, Human
uguauauauuuccuauauuguu

SEQ ID NO: 1200148 - RNA, 18 nt, Human
uguauauauuuccuauau

SEQ ID NO: 1200149 - RNA, 21 nt, Human
uguacauggaauaacauguaa

SEQ ID NO: 1200150 - RNA, 23 nt, Human
aguacacuguuucaaacuuuacu

SEQ ID NO: 1200151 - RNA, 21 nt, Human
aguacacuguuucaaacuuua

SEQ ID NO: 1200152 - RNA, 12 nt, Human
aggugugcucug

SEQ ID NO: 1200153 - RNA, 14 nt, Human
agguugaagcacca

SEQ ID NO: 1200154 - RNA, 22 nt, Human
aggugugagucaccaagcccag

SEQ ID NO: 1200155 - RNA, 21 nt, Human
aggugugagucaccaagccca

SEQ ID NO: 1200156 - RNA, 20 nt, Human
aggugucccugcacuugcag

SEQ ID NO: 1200157 - RNA, 16 nt, Human
aggugucccugcacuu

SEQ ID NO: 1200158 - RNA, 12 nt, Human
aggugggaggau

SEQ ID NO: 1200159 - RNA, 23 nt, Human
uguaauuaaguacuauguaucaa

SEQ ID NO: 1200160 - RNA, 21 nt, Human
uguaauuaaguacuauguauc

SEQ ID NO: 1200161 - RNA, 19 nt, Human
uguaauuaaguacuaugua

SEQ ID NO: 1200162 - RNA, 18 nt, Human
uguaauuaaguacuaugu

SEQ ID NO: 1200163 - RNA, 20 nt, Human
agguuggcaaaaaggcagga

SEQ ID NO: 1200164 - RNA, 20 nt, Human
uguacauaaugcgugcauac

SEQ ID NO: 1200165 - RNA, 19 nt, Human
uguacauaaugcgugcaua

SEQ ID NO: 1200166 - RNA, 20 nt, Human
uguaauuuuuuuaucgucac

SEQ ID NO: 1200167 - RNA, 16 nt, Human
uguacaugaaaacaca

SEQ ID NO: 1200168 - RNA, 14 nt, Human
uguacaugaaaaca

SEQ ID NO: 1200169 - RNA, 14 nt, Human
uggcuucacggaag

SEQ ID NO: 1200170 - RNA, 23 nt, Human
uggcuguuggcugggggccucag

SEQ ID NO: 1200171 - RNA, 18 nt, Human
uggcuguuggcugggggc

SEQ ID NO: 1200172 - RNA, 16 nt, Human
uggcuguuggcugggg

SEQ ID NO: 1200173 - RNA, 23 nt, Human
uggcugcaaaggguaucaggugc

SEQ ID NO: 1200174 - RNA, 16 nt, Human
uggcuuuugugcauua

SEQ ID NO: 1200175 - RNA, 22 nt, Human
uggcuucacggaagagccuugc

SEQ ID NO: 1200176 - RNA, 20 nt, Human
uggcuucacggaagagccuu

SEQ ID NO: 1200177 - RNA, 17 nt, Human
uggcuucacggaagagc

SEQ ID NO: 1200178 - RNA, 21 nt, Human
uggcuuuugugcauuaucuag

SEQ ID NO: 1200179 - RNA, 13 nt, Human
uggcucacgccug

SEQ ID NO: 1200180 - RNA, 19 nt, Human
uggcuaauguacugcauau

SEQ ID NO: 1200181 - RNA, 17 nt, Human
uggcuaauguacugcau

SEQ ID NO: 1200182 - RNA, 23 nt, Human
aggcuccaggagcagccacauuc

SEQ ID NO: 1200183 - RNA, 19 nt, Human
aggcuccaggagcagccac

SEQ ID NO: 1200184 - RNA, 18 nt, Human
aggcuccaggagcagcca

SEQ ID NO: 1200185 - RNA, 17 nt, Human
aggcuccaggagcagcc

SEQ ID NO: 1200186 - RNA, 17 nt, Human
aggcuggguucugaucc

SEQ ID NO: 1200187 - RNA, 14 nt, Human
aggcuggguucuga

SEQ ID NO: 1200188 - RNA, 22 nt, Human
aggcugggggaagaagcucucu

SEQ ID NO: 1200189 - RNA, 17 nt, Human
aggcugggggaagaagc

SEQ ID NO: 1200190 - RNA, 23 nt, Human
aggcugggcuucaguggcagcug

SEQ ID NO: 1200191 - RNA, 22 nt, Human
aggcugggcuucaguggcagcu

SEQ ID NO: 1200192 - RNA, 21 nt, Human
aggcugggcuucaguggcagc

SEQ ID NO: 1200193 - RNA, 20 nt, Human
aggcugggcuucaguggcag

SEQ ID NO: 1200194 - RNA, 19 nt, Human
aggcugggcuucaguggca

SEQ ID NO: 1200195 - RNA, 18 nt, Human
aggcugggcuucaguggc

SEQ ID NO: 1200196 - RNA, 14 nt, Human
aggcugggcuucag

SEQ ID NO: 1200197 - RNA, 23 nt, Human
aggcugggcucccuucccaccuc

SEQ ID NO: 1200198 - RNA, 21 nt, Human
aggcugggcucccuucccacc

SEQ ID NO: 1200199 - RNA, 18 nt, Human
aggcugggcucccuuccc

SEQ ID NO: 1200200 - RNA, 14 nt, Human
aggcugggcucccu

SEQ ID NO: 1200201 - RNA, 13 nt, Human
aggcugggcuccc

SEQ ID NO: 1200202 - RNA, 22 nt, Human
aggcugggagagccuuccaggg

SEQ ID NO: 1200203 - RNA, 21 nt, Human
aggcugggagagccuuccagg

SEQ ID NO: 1200204 - RNA, 20 nt, Human
aggcugggagagccuuccag

SEQ ID NO: 1200205 - RNA, 19 nt, Human
aggcugggagagccuucca

SEQ ID NO: 1200206 - RNA, 23 nt, Human
aggcuuagucacugagacagccc

SEQ ID NO: 1200207 - RNA, 22 nt, Human
aggcuuagucacugagacagcc

SEQ ID NO: 1200208 - RNA, 23 nt, Human
ugggcagaaggaagacuucaucc

SEQ ID NO: 1200209 - RNA, 20 nt, Human
ugggcagaaggaagacuuca

SEQ ID NO: 1200210 - RNA, 16 nt, Human
ugggcagaaggaagac

SEQ ID NO: 1200211 - RNA, 13 nt, Human
ugggcagaaggaa

SEQ ID NO: 1200212 - RNA, 16 nt, Human
ugggcaacccccagcc

SEQ ID NO: 1200213 - RNA, 17 nt, Human
ugggaggucaaggcugc

SEQ ID NO: 1200214 - RNA, 22 nt, Human
ugggaggauugcuugagcucag

SEQ ID NO: 1200215 - RNA, 21 nt, Human
ugggaggauugcuugagcuca

SEQ ID NO: 1200216 - RNA, 18 nt, Human
ugggaggauugcuugagc

SEQ ID NO: 1200217 - RNA, 22 nt, Human
ugggagaaccaaaaagaggcua

SEQ ID NO: 1200218 - RNA, 21 nt, Human
ugggagaaccaaaaagaggcu

SEQ ID NO: 1200219 - RNA, 20 nt, Human
agggacuuggaagcuccgcu

SEQ ID NO: 1200220 - RNA, 19 nt, Human
agggacuuggaagcuccgc

SEQ ID NO: 1200221 - RNA, 18 nt, Human
agggacuuggaagcuccg

SEQ ID NO: 1200222 - RNA, 15 nt, Human
agggacuuggaagcu

SEQ ID NO: 1200223 - RNA, 18 nt, Human
ugggacucaaugcacuga

SEQ ID NO: 1200224 - RNA, 16 nt, Human
ugggacuacaggugug

SEQ ID NO: 1200225 - RNA, 18 nt, Human
ugggacuacaggcaccca

SEQ ID NO: 1200226 - RNA, 15 nt, Human
ugggcucccuuccca

SEQ ID NO: 1200227 - RNA, 14 nt, Human
ugggcucccuuccc

SEQ ID NO: 1200228 - RNA, 20 nt, Human
agggcuccagacacaugucc

SEQ ID NO: 1200229 - RNA, 18 nt, Human
agggcccagagagggugg

SEQ ID NO: 1200230 - RNA, 14 nt, Human
agggcccagagagg

SEQ ID NO: 1200231 - RNA, 20 nt, Human
agggagugaguugauagcac

SEQ ID NO: 1200232 - RNA, 23 nt, Human
agggaguccgaaagggacuugga

SEQ ID NO: 1200233 - RNA, 20 nt, Human
agggaguccgaaagggacuu

SEQ ID NO: 1200234 - RNA, 15 nt, Human
agggagggcuucugc

SEQ ID NO: 1200235 - RNA, 22 nt, Human
agggagggcuccagacacaugu

SEQ ID NO: 1200236 - RNA, 19 nt, Human
agggagggcuccagacaca

SEQ ID NO: 1200237 - RNA, 13 nt, Human
agggagggcucca

SEQ ID NO: 1200238 - RNA, 12 nt, Human
agggagggcucc

SEQ ID NO: 1200239 - RNA, 13 nt, Human
agggcccagagag

SEQ ID NO: 1200240 - RNA, 12 nt, Human
agggcccagaga

SEQ ID NO: 1200241 - RNA, 16 nt, Human
agggauacccauccca

SEQ ID NO: 1200242 - RNA, 15 nt, Human
aggaggccagccuug

SEQ ID NO: 1200243 - RNA, 21 nt, Human
aggaguuugagaccaaccugg

SEQ ID NO: 1200244 - RNA, 20 nt, Human
uggaaguacuauaauuuacc

SEQ ID NO: 1200245 - RNA, 13 nt, Human
uggaagcuccgcu

SEQ ID NO: 1200246 - RNA, 14 nt, Human
uggaacacucugag

SEQ ID NO: 1200247 - RNA, 12 nt, Human
uggaacacucug

SEQ ID NO: 1200248 - RNA, 12 nt, Human
ugcugcccugcc

SEQ ID NO: 1200249 - RNA, 10 nt, Human
ugcugcccug

SEQ ID NO: 1200250 - RNA, 15 nt, Human
uggacaccggaaaca

SEQ ID NO: 1200251 - RNA, 17 nt, Human
aggcaagcaccuccugc

SEQ ID NO: 1200252 - RNA, 14 nt, Human
aggcaagcaccucc

SEQ ID NO: 1200253 - RNA, 18 nt, Human
aggaugcuuguacauaau

SEQ ID NO: 1200254 - RNA, 16 nt, Human
aggaugcuuguacaua

SEQ ID NO: 1200255 - RNA, 15 nt, Human
aggaugcuuguacau

SEQ ID NO: 1200256 - RNA, 12 nt, Human
aggaucucuuga

SEQ ID NO: 1200257 - RNA, 21 nt, Human
aggauccugagccagauuuca

SEQ ID NO: 1200258 - RNA, 12 nt, Human
aggaucagucug

SEQ ID NO: 1200259 - RNA, 16 nt, Human
aggcaaugcuggcugu

SEQ ID NO: 1200260 - RNA, 15 nt, Human
aggcaaugcuggcug

SEQ ID NO: 1200261 - RNA, 14 nt, Human
uggagaaaauggac

SEQ ID NO: 1200262 - RNA, 24 nt, Human
uggacuuuguuaguuucuccaagc

SEQ ID NO: 1200263 - RNA, 22 nt, Human
uggacuuuguuaguuucuccaa

SEQ ID NO: 1200264 - RNA, 14 nt, Human
aggcagguccaggg

SEQ ID NO: 1200265 - RNA, 22 nt, Human
aggcagggucucacucugucgc

SEQ ID NO: 1200266 - RNA, 21 nt, Human
aggcagggucucacucugucg

SEQ ID NO: 1200267 - RNA, 20 nt, Human
aggcagggucucacucuguc

SEQ ID NO: 1200268 - RNA, 19 nt, Human
aggcagggucucacucugu

SEQ ID NO: 1200269 - RNA, 22 nt, Human
aggcaggucuugaacuccuggc

SEQ ID NO: 1200270 - RNA, 21 nt, Human
aggcaggucuugaacuccugg

SEQ ID NO: 1200271 - RNA, 22 nt, Human
aggcagccccauucugccugcc

SEQ ID NO: 1200272 - RNA, 21 nt, Human
aggcagccccauucugccugc

SEQ ID NO: 1200273 - RNA, 20 nt, Human
aggcagccccauucugccug

SEQ ID NO: 1200274 - RNA, 15 nt, Human
aggcacccaccauca

SEQ ID NO: 1200275 - RNA, 19 nt, Human
aggcagccccauucugccu

SEQ ID NO: 1200276 - RNA, 12 nt, Human
aggcaggauggc

SEQ ID NO: 1200277 - RNA, 16 nt, Human
aggcuccaggagcagc

SEQ ID NO: 1200278 - RNA, 14 nt, Human
aggcuccaggagca

SEQ ID NO: 1200279 - RNA, 13 nt, Human
aggcuccaggagc

SEQ ID NO: 1200280 - RNA, 18 nt, Human
aggccuucucugaaggac

SEQ ID NO: 1200281 - RNA, 17 nt, Human
aggccuucucugaagga

SEQ ID NO: 1200282 - RNA, 19 nt, Human
uggccucugcacuccccug

SEQ ID NO: 1200283 - RNA, 20 nt, Human
uggccucugcacuccccugc

SEQ ID NO: 1200284 - RNA, 14 nt, Human
uggcccacugcauc

SEQ ID NO: 1200285 - RNA, 13 nt, Human
uggcccacugcau

SEQ ID NO: 1200286 - RNA, 19 nt, Human
uggcccacgcacuucggga

SEQ ID NO: 1200287 - RNA, 12 nt, Human
aggccuggccag

SEQ ID NO: 1200288 - RNA, 15 nt, Human
aggccuggccagaug

SEQ ID NO: 1200289 - RNA, 13 nt, Human
aggccuggccaga

SEQ ID NO: 1200290 - RNA, 17 nt, Human
aggcccggcuccaggcu

SEQ ID NO: 1200291 - RNA, 16 nt, Human
aggcccggcuccaggc

SEQ ID NO: 1200292 - RNA, 15 nt, Human
aggcccggcuccagg

SEQ ID NO: 1200293 - RNA, 21 nt, Human
aggccccugccacccugggga

SEQ ID NO: 1200294 - RNA, 18 nt, Human
aggccccugccacccugg

SEQ ID NO: 1200295 - RNA, 17 nt, Human
aggccccugccacccug

SEQ ID NO: 1200296 - RNA, 15 nt, Human
aggccccugccaccc

SEQ ID NO: 1200297 - RNA, 13 nt, Human
aggccccugccac

SEQ ID NO: 1200298 - RNA, 20 nt, Human
aggcccagagggccugcaag

SEQ ID NO: 1200299 - RNA, 19 nt, Human
aggcccagagggccugcaa

SEQ ID NO: 1200300 - RNA, 16 nt, Human
aggcccagagggccug

SEQ ID NO: 1200301 - RNA, 18 nt, Human
aggccaugggccuccugu

SEQ ID NO: 1200302 - RNA, 23 nt, Human
aggccagagacacaagccuucgg

SEQ ID NO: 1200303 - RNA, 18 nt, Human
aggccagagacacaagcc

SEQ ID NO: 1200304 - RNA, 13 nt, Human
aggccagagacac

SEQ ID NO: 1200305 - RNA, 18 nt, Human
uggcagcucagagagggu

SEQ ID NO: 1200306 - RNA, 16 nt, Human
uggcagcucagagagg

SEQ ID NO: 1200307 - RNA, 15 nt, Human
uggcagcucagagag

SEQ ID NO: 1200308 - RNA, 14 nt, Human
uggcagcucagaga

SEQ ID NO: 1200309 - RNA, 18 nt, Human
uggcaccagcagccugga

SEQ ID NO: 1200310 - RNA, 17 nt, Human
uggcaccagcagccugg

SEQ ID NO: 1200311 - RNA, 16 nt, Human
uggcaccagcagccug

SEQ ID NO: 1200312 - RNA, 17 nt, Human
ugccuguucagcuccag

SEQ ID NO: 1200313 - RNA, 16 nt, Human
ugccuguucagcucca

SEQ ID NO: 1200314 - RNA, 15 nt, Human
ugccuguucagcucc

SEQ ID NO: 1200315 - RNA, 18 nt, Human
ugcggacagccacggcca

SEQ ID NO: 1200316 - RNA, 19 nt, Human
ugcgaaaggaugaaaguga

SEQ ID NO: 1200317 - RNA, 13 nt, Human
ugcgaaaggauga

SEQ ID NO: 1200318 - RNA, 10 nt, Human
agcugccugu

SEQ ID NO: 1200319 - RNA, 21 nt, Human
agcugccugggaucccucauc

SEQ ID NO: 1200320 - RNA, 19 nt, Human
agcugccugggaucccuca

SEQ ID NO: 1200321 - RNA, 13 nt, Human
agcugccugggau

SEQ ID NO: 1200322 - RNA, 22 nt, Human
ugccucugacacacagcucugu

SEQ ID NO: 1200323 - RNA, 14 nt, Human
agcugggcagguug

SEQ ID NO: 1200324 - RNA, 19 nt, Human
agcugggacuacaggugug

SEQ ID NO: 1200325 - RNA, 23 nt, Human
agcugggaugauuggagggggga

SEQ ID NO: 1200326 - RNA, 21 nt, Human
ugccucugacacacagcucug

SEQ ID NO: 1200327 - RNA, 20 nt, Human
ugccucugacacacagcucu

SEQ ID NO: 1200328 - RNA, 16 nt, Human
ugccucucucaggcca

SEQ ID NO: 1200329 - RNA, 15 nt, Human
ugccucucucaggcc

SEQ ID NO: 1200330 - RNA, 14 nt, Human
ugccucucucaggc

SEQ ID NO: 1200331 - RNA, 13 nt, Human
ugccucucucagg

SEQ ID NO: 1200332 - RNA, 19 nt, Human
ugccucccaucacccgcua

SEQ ID NO: 1200333 - RNA, 14 nt, Human
ugccucccaucacc

SEQ ID NO: 1200334 - RNA, 13 nt, Human
ugccucccaucac

SEQ ID NO: 1200335 - RNA, 14 nt, Human
agcugccagccgag

SEQ ID NO: 1200336 - RNA, 13 nt, Human
agcugccaccugc

SEQ ID NO: 1200337 - RNA, 22 nt, Human
agcugcacccucaggcaggugg

SEQ ID NO: 1200338 - RNA, 20 nt, Human
agcugcacccucaggcaggu

SEQ ID NO: 1200339 - RNA, 19 nt, Human
agcugcacccucaggcagg

SEQ ID NO: 1200340 - RNA, 18 nt, Human
agcugcacccucaggcag

SEQ ID NO: 1200341 - RNA, 17 nt, Human
agcugcacccucaggca

SEQ ID NO: 1200342 - RNA, 13 nt, Human
agcugcacccuca

SEQ ID NO: 1200343 - RNA, 18 nt, Human
agcucuucuccaggcugu

SEQ ID NO: 1200344 - RNA, 14 nt, Human
agcucuguccuggg

SEQ ID NO: 1200345 - RNA, 12 nt, Human
agcucuguccug

SEQ ID NO: 1200346 - RNA, 22 nt, Human
agcucugcuccucuccccagca

SEQ ID NO: 1200347 - RNA, 12 nt, Human
agcucugcuccu

SEQ ID NO: 1200348 - RNA, 16 nt, Human
agcucucuccucccuu

SEQ ID NO: 1200349 - RNA, 22 nt, Human
ugcccuccaagaccuucuccuu

SEQ ID NO: 1200350 - RNA, 20 nt, Human
ugcccuccaagaccuucucc

SEQ ID NO: 1200351 - RNA, 19 nt, Human
ugcccuccaagaccuucuc

SEQ ID NO: 1200352 - RNA, 17 nt, Human
ugcugacuguuuucucu

SEQ ID NO: 1200353 - RNA, 18 nt, Human
ugcucugcauguuacaua

SEQ ID NO: 1200354 - RNA, 15 nt, Human
ugcucugcauguuac

SEQ ID NO: 1200355 - RNA, 22 nt, Human
ugcucugaucauccacugugcc

SEQ ID NO: 1200356 - RNA, 23 nt, Human
aggaaaggcuccaggagcagcca

SEQ ID NO: 1200357 - RNA, 22 nt, Human
aggaaaggcuccaggagcagcc

SEQ ID NO: 1200358 - RNA, 20 nt, Human
aggaaaggcuccaggagcag

SEQ ID NO: 1200359 - RNA, 18 nt, Human
aggaaaggcuccaggagc

SEQ ID NO: 1200360 - RNA, 24 nt, Human
ugcugacuguuuucucuugagagg

SEQ ID NO: 1200361 - RNA, 21 nt, Human
ugcugacuguuuucucuugag

SEQ ID NO: 1200362 - RNA, 14 nt, Human
ugcugagucugaag

SEQ ID NO: 1200363 - RNA, 23 nt, Human
aggaauccagacccggcugcgug

SEQ ID NO: 1200364 - RNA, 22 nt, Human
aggaagcucagggccuggcuca

SEQ ID NO: 1200365 - RNA, 18 nt, Human
aggaagcucagggccugg

SEQ ID NO: 1200366 - RNA, 17 nt, Human
aggaagcucagggccug

SEQ ID NO: 1200367 - RNA, 14 nt, Human
aggaagagaaaaaa

SEQ ID NO: 1200368 - RNA, 15 nt, Human
aggaagacuuuggaa

SEQ ID NO: 1200369 - RNA, 15 nt, Human
ugcugccauccaggu

SEQ ID NO: 1200370 - RNA, 14 nt, Human
ugcugccauccagg

SEQ ID NO: 1200371 - RNA, 13 nt, Human
ugcugccauccag

SEQ ID NO: 1200372 - RNA, 12 nt, Human
ugcugccaucca

SEQ ID NO: 1200373 - RNA, 22 nt, Human
ugcugccauccagguucagcuu

SEQ ID NO: 1200374 - RNA, 21 nt, Human
ugcugccauccagguucagcu

SEQ ID NO: 1200375 - RNA, 11 nt, Human
ugcugccaucc

SEQ ID NO: 1200376 - RNA, 15 nt, Human
agcuuaucucagggg

SEQ ID NO: 1200377 - RNA, 14 nt, Human
agcuuaucucaggg

SEQ ID NO: 1200378 - RNA, 12 nt, Human
agcuuaucucag

SEQ ID NO: 1200379 - RNA, 20 nt, Human
agcuuaaaggggcuagagug

SEQ ID NO: 1200380 - RNA, 21 nt, Human
ugcggacagccacggccaggc

SEQ ID NO: 1200381 - RNA, 20 nt, Human
ugcggacagccacggccagg

SEQ ID NO: 1200382 - RNA, 21 nt, Human
agcuuguaaauagcucaggug

SEQ ID NO: 1200383 - RNA, 20 nt, Human
agcuuguaaauagcucaggu

SEQ ID NO: 1200384 - RNA, 19 nt, Human
agcuuguaaauagcucagg

SEQ ID NO: 1200385 - RNA, 21 nt, Human
aggaaacccagcucuggucca

SEQ ID NO: 1200386 - RNA, 20 nt, Human
aggaaacccagcucuggucc

SEQ ID NO: 1200387 - RNA, 18 nt, Human
aggaaacccagcucuggu

SEQ ID NO: 1200388 - RNA, 17 nt, Human
aggaaacccagcucugg

SEQ ID NO: 1200389 - RNA, 16 nt, Human
aggaaacccagcucug

SEQ ID NO: 1200390 - RNA, 15 nt, Human
aggaaacccagcucu

SEQ ID NO: 1200391 - RNA, 19 nt, Human
agcuuugaaaauucagugg

SEQ ID NO: 1200392 - RNA, 18 nt, Human
agcuuugaaaauucagug

SEQ ID NO: 1200393 - RNA, 16 nt, Human
agcuuugaaaauucag

SEQ ID NO: 1200394 - RNA, 12 nt, Human
agcuuugaaaau

SEQ ID NO: 1200395 - RNA, 13 nt, Human
aggaaagaggcuc

SEQ ID NO: 1200396 - RNA, 12 nt, Human
aggaaagaggcu

SEQ ID NO: 1200397 - RNA, 19 nt, Human
aggaaagcaaaggagauug

SEQ ID NO: 1200398 - RNA, 17 nt, Human
aggaaagcaaaggagau

SEQ ID NO: 1200399 - RNA, 16 nt, Human
aggaaagaggcucugg

SEQ ID NO: 1200400 - RNA, 16 nt, Human
agccucagcauccugg

SEQ ID NO: 1200401 - RNA, 15 nt, Human
agccucagcauccug

SEQ ID NO: 1200402 - RNA, 19 nt, Human
agccucaaccuccugggcu

SEQ ID NO: 1200403 - RNA, 14 nt, Human
agccucagcauccu

SEQ ID NO: 1200404 - RNA, 13 nt, Human
agccucagcaucc

SEQ ID NO: 1200405 - RNA, 18 nt, Human
agccucaaccuccugggc

SEQ ID NO: 1200406 - RNA, 17 nt, Human
agccucaaccuccuggg

SEQ ID NO: 1200407 - RNA, 20 nt, Human
ugcagccucaaccuccuggg

SEQ ID NO: 1200408 - RNA, 19 nt, Human
ugcagccucaaccuccugg

SEQ ID NO: 1200409 - RNA, 18 nt, Human
ugcagccucaaccuccug

SEQ ID NO: 1200410 - RNA, 14 nt, Human
ugcagugagccgag

SEQ ID NO: 1200411 - RNA, 16 nt, Human
ugcaugcugucccuua

SEQ ID NO: 1200412 - RNA, 19 nt, Human
agccugccucuucucuacu

SEQ ID NO: 1200413 - RNA, 16 nt, Human
agccugccucuucucu

SEQ ID NO: 1200414 - RNA, 23 nt, Human
agccugcaguuauuaacacuaac

SEQ ID NO: 1200415 - RNA, 15 nt, Human
ugcaugcugucccuu

SEQ ID NO: 1200416 - RNA, 14 nt, Human
ugcaugcugucccu

SEQ ID NO: 1200417 - RNA, 13 nt, Human
ugcaugcuguccc

SEQ ID NO: 1200418 - RNA, 21 nt, Human
ugcaugaggcuaguguggugu

SEQ ID NO: 1200419 - RNA, 22 nt, Human
ugcaugaaguaauaugcacaca

SEQ ID NO: 1200420 - RNA, 22 nt, Human
ugcauaccacuuuuguucuugg

SEQ ID NO: 1200421 - RNA, 13 nt, Human
ugcacuccccugc

SEQ ID NO: 1200422 - RNA, 12 nt, Human
ugcacuccccug

SEQ ID NO: 1200423 - RNA, 22 nt, Human
ugcacuauagccuaggugacag

SEQ ID NO: 1200424 - RNA, 15 nt, Human
ugcaccacugcacuc

SEQ ID NO: 1200425 - RNA, 14 nt, Human
ugcaccacugcacu

SEQ ID NO: 1200426 - RNA, 17 nt, Human
ugcacacaccagagccc

SEQ ID NO: 1200427 - RNA, 15 nt, Human
ugcacacaccagagc

SEQ ID NO: 1200428 - RNA, 14 nt, Human
ugcacaagcugcac

SEQ ID NO: 1200429 - RNA, 23 nt, Human
ugcacaagcuccaagcucccagg

SEQ ID NO: 1200430 - RNA, 22 nt, Human
ugcacaagcuccaagcucccag

SEQ ID NO: 1200431 - RNA, 20 nt, Human
ugcacaagcuccaagcuccc

SEQ ID NO: 1200432 - RNA, 18 nt, Human
ugcacaagcuccaagcuc

SEQ ID NO: 1200433 - RNA, 16 nt, Human
ugcacaagcuccaagc

SEQ ID NO: 1200434 - RNA, 15 nt, Human
ugcacaagcuccaag

SEQ ID NO: 1200435 - RNA, 15 nt, Human
agccucaaccuccug

SEQ ID NO: 1200436 - RNA, 17 nt, Human
agccuaggugacagagu

SEQ ID NO: 1200437 - RNA, 15 nt, Human
agccuaggugacaga

SEQ ID NO: 1200438 - RNA, 15 nt, Human
ugcacuccccugcug

SEQ ID NO: 1200439 - RNA, 20 nt, Human
ugcagacucuacagaggcca

SEQ ID NO: 1200440 - RNA, 19 nt, Human
ugcagacucuacagaggcc

SEQ ID NO: 1200441 - RNA, 22 nt, Human
ugcagacucuacagaggccaug

SEQ ID NO: 1200442 - RNA, 23 nt, Human
ugcauuugaaaauuuugauguuu

SEQ ID NO: 1200443 - RNA, 19 nt, Human
ugcauuugaaaauuuugau

SEQ ID NO: 1200444 - RNA, 18 nt, Human
ugcauuugaggucuguuc

SEQ ID NO: 1200445 - RNA, 22 nt, Human
agcgcccaguuggguggaugcc

SEQ ID NO: 1200446 - RNA, 14 nt, Human
agcgcccaguuggg

SEQ ID NO: 1200447 - RNA, 14 nt, Human
agccugcuccagcu

SEQ ID NO: 1200448 - RNA, 23 nt, Human
agcgugguggacaugcacagcua

SEQ ID NO: 1200449 - RNA, 20 nt, Human
agcgugguggacaugcacag

SEQ ID NO: 1200450 - RNA, 17 nt, Human
agcgugagccacugcac

SEQ ID NO: 1200451 - RNA, 16 nt, Human
agcgugagccacugca

SEQ ID NO: 1200452 - RNA, 15 nt, Human
agcgugagccacugc

SEQ ID NO: 1200453 - RNA, 17 nt, Human
agcggggacagcuccuu

SEQ ID NO: 1200454 - RNA, 16 nt, Human
agcggggacagcuccu

SEQ ID NO: 1200455 - RNA, 15 nt, Human
agcggggacagcucc

SEQ ID NO: 1200456 - RNA, 21 nt, Human
ugccauauucuguuggccagu

SEQ ID NO: 1200457 - RNA, 20 nt, Human
ugccauauucuguuggccag

SEQ ID NO: 1200458 - RNA, 17 nt, Human
ugccauauucuguuggc

SEQ ID NO: 1200459 - RNA, 16 nt, Human
ugccauauucuguugg

SEQ ID NO: 1200460 - RNA, 15 nt, Human
ugccauauucuguug

SEQ ID NO: 1200461 - RNA, 23 nt, Human
ugccagucaccccggccaccugc

SEQ ID NO: 1200462 - RNA, 22 nt, Human
ugccagucaccccggccaccug

SEQ ID NO: 1200463 - RNA, 20 nt, Human
ugccagucaccccggccacc

SEQ ID NO: 1200464 - RNA, 18 nt, Human
ugccagucaccccggcca

SEQ ID NO: 1200465 - RNA, 16 nt, Human
ugccagucaccccggc

SEQ ID NO: 1200466 - RNA, 15 nt, Human
ugccagucaccccgg

SEQ ID NO: 1200467 - RNA, 19 nt, Human
ugccccucaacucuccucc

SEQ ID NO: 1200468 - RNA, 11 nt, Human
ugcccaggccc

SEQ ID NO: 1200469 - RNA, 20 nt, Human
ugcccaggcaggucuugaac

SEQ ID NO: 1200470 - RNA, 17 nt, Human
ugcccaggcaggucuug

SEQ ID NO: 1200471 - RNA, 16 nt, Human
ugcccaggcaggucuu

SEQ ID NO: 1200472 - RNA, 15 nt, Human
ugcccaggcaggucu

SEQ ID NO: 1200473 - RNA, 14 nt, Human
ugcccacaggauca

SEQ ID NO: 1200474 - RNA, 22 nt, Human
ugcccaggccccugccacccug

SEQ ID NO: 1200475 - RNA, 20 nt, Human
ugcccaggccccugccaccc

SEQ ID NO: 1200476 - RNA, 14 nt, Human
ugcccaggccccug

SEQ ID NO: 1200477 - RNA, 16 nt, Human
ugcccacaggaucagu

SEQ ID NO: 1200478 - RNA, 12 nt, Human
ugcccaggcccc

SEQ ID NO: 1200479 - RNA, 19 nt, Human
ugccauguuggccaggcug

SEQ ID NO: 1200480 - RNA, 18 nt, Human
ugccauguuggccaggcu

SEQ ID NO: 1200481 - RNA, 17 nt, Human
ugccauguuggccaggc

SEQ ID NO: 1200482 - RNA, 17 nt, Human
agcucagggccuggcuc

SEQ ID NO: 1200483 - RNA, 16 nt, Human
agcucagggccuggcu

SEQ ID NO: 1200484 - RNA, 15 nt, Human
agcucagggccuggc

SEQ ID NO: 1200485 - RNA, 18 nt, Human
agcucagggccuggcuca

SEQ ID NO: 1200486 - RNA, 21 nt, Human
ugccauguuggccaggcuggu

SEQ ID NO: 1200487 - RNA, 20 nt, Human
ugccauguuggccaggcugg

SEQ ID NO: 1200488 - RNA, 16 nt, Human
ucuggcagcucagaga

SEQ ID NO: 1200489 - RNA, 16 nt, Human
agaagcggcuggcagc

SEQ ID NO: 1200490 - RNA, 15 nt, Human
agaagcggcuggcag

SEQ ID NO: 1200491 - RNA, 15 nt, Human
ucuggcagcucagag

SEQ ID NO: 1200492 - RNA, 14 nt, Human
ucuggcagcucaga

SEQ ID NO: 1200493 - RNA, 18 nt, Human
ucugcccuccaagaccuu

SEQ ID NO: 1200494 - RNA, 14 nt, Human
ucugcccuccaaga

SEQ ID NO: 1200495 - RNA, 13 nt, Human
ucugcuucagccu

SEQ ID NO: 1200496 - RNA, 17 nt, Human
ucugcucacauaucugu

SEQ ID NO: 1200497 - RNA, 16 nt, Human
ucugcucacauaucug

SEQ ID NO: 1200498 - RNA, 21 nt, Human
ucugauucccaagcucugcuc

SEQ ID NO: 1200499 - RNA, 20 nt, Human
ucugauucccaagcucugcu

SEQ ID NO: 1200500 - RNA, 19 nt, Human
ucugauucccaagcucugc

SEQ ID NO: 1200501 - RNA, 19 nt, Human
ucugacccugcuucaaaua

SEQ ID NO: 1200502 - RNA, 17 nt, Human
agaaauguacagcaagg

SEQ ID NO: 1200503 - RNA, 11 nt, Human
agaaauguguu

SEQ ID NO: 1200504 - RNA, 23 nt, Human
acuuugaccucugcagcaauaaa

SEQ ID NO: 1200505 - RNA, 19 nt, Human
acuuugaccucugcagcaa

SEQ ID NO: 1200506 - RNA, 23 nt, Human
acuuuaccuuuuuuauacauaaa

SEQ ID NO: 1200507 - RNA, 22 nt, Human
acuuuaccuuuuuuauacauaa

SEQ ID NO: 1200508 - RNA, 19 nt, Human
acuuuaccuuuuuuauaca

SEQ ID NO: 1200509 - RNA, 18 nt, Human
acuuuaccuuuuuuauac

SEQ ID NO: 1200510 - RNA, 23 nt, Human
acuuuggaaagacuuuuccaacc

SEQ ID NO: 1200511 - RNA, 17 nt, Human
acuuuggaaagacuuuu

SEQ ID NO: 1200512 - RNA, 14 nt, Human
acuuuggaaagacu

SEQ ID NO: 1200513 - RNA, 13 nt, Human
acuuuggaaagac

SEQ ID NO: 1200514 - RNA, 12 nt, Human
ucuccucugcug

SEQ ID NO: 1200515 - RNA, 21 nt, Human
ucucccuuggauuguccccga

SEQ ID NO: 1200516 - RNA, 19 nt, Human
ucucccuuggauugucccc

SEQ ID NO: 1200517 - RNA, 15 nt, Human
ucuccucugcugcug

SEQ ID NO: 1200518 - RNA, 14 nt, Human
ucuccucugcugcu

SEQ ID NO: 1200519 - RNA, 13 nt, Human
ucuccucugcugc

SEQ ID NO: 1200520 - RNA, 18 nt, Human
ucucccuuggauuguccc

SEQ ID NO: 1200521 - RNA, 11 nt, Human
ucucccuugga

SEQ ID NO: 1200522 - RNA, 14 nt, Human
ucucuugagccugg

SEQ ID NO: 1200523 - RNA, 13 nt, Human
ucucuugagccug

SEQ ID NO: 1200524 - RNA, 15 nt, Human
ucucuugagccuggg

SEQ ID NO: 1200525 - RNA, 17 nt, Human
ucucuugagccugggag

SEQ ID NO: 1200526 - RNA, 22 nt, Human
ucucuuuaaugucacaggcagg

SEQ ID NO: 1200527 - RNA, 17 nt, Human
agaaaaaugagccuggc

SEQ ID NO: 1200528 - RNA, 22 nt, Human
ucucuccuguaccucuugagcc

SEQ ID NO: 1200529 - RNA, 20 nt, Human
ucucuccuguaccucuugag

SEQ ID NO: 1200530 - RNA, 16 nt, Human
ucucuccagccccugg

SEQ ID NO: 1200531 - RNA, 15 nt, Human
ucucuccagccccug

SEQ ID NO: 1200532 - RNA, 14 nt, Human
ucucuccagccccu

SEQ ID NO: 1200533 - RNA, 13 nt, Human
ucucuccagcccc

SEQ ID NO: 1200534 - RNA, 20 nt, Human
ucuccuucaccuuugucccc

SEQ ID NO: 1200535 - RNA, 14 nt, Human
ucucuugagagggu

SEQ ID NO: 1200536 - RNA, 11 nt, Human
ucucugcccuc

SEQ ID NO: 1200537 - RNA, 23 nt, Human
agaauuucccaaagcagugcaug

SEQ ID NO: 1200538 - RNA, 18 nt, Human
agaauuucccaaagcagu

SEQ ID NO: 1200539 - RNA, 17 nt, Human
agaauuucccaaagcag

SEQ ID NO: 1200540 - RNA, 20 nt, Human
ucuguuggccagugugacaa

SEQ ID NO: 1200541 - RNA, 19 nt, Human
ucuguuggccagugugaca

SEQ ID NO: 1200542 - RNA, 22 nt, Human
ucugugaaaggaaagagggagg

SEQ ID NO: 1200543 - RNA, 21 nt, Human
ucugugaaaggaaagagggag

SEQ ID NO: 1200544 - RNA, 15 nt, Human
ucugugaaaggaaag

SEQ ID NO: 1200545 - RNA, 23 nt, Human
ucugucauuugagcagggcucag

SEQ ID NO: 1200546 - RNA, 20 nt, Human
ucugucauuugagcagggcu

SEQ ID NO: 1200547 - RNA, 15 nt, Human
ucugucauuugagca

SEQ ID NO: 1200548 - RNA, 16 nt, Human
ucuggguucacugcaa

SEQ ID NO: 1200549 - RNA, 14 nt, Human
ucuggguucacugc

SEQ ID NO: 1200550 - RNA, 11 nt, Human
ucuggggcugu

SEQ ID NO: 1200551 - RNA, 18 nt, Human
ucugguccauagagagca

SEQ ID NO: 1200552 - RNA, 19 nt, Human
agacagucccugccaaugg

SEQ ID NO: 1200553 - RNA, 17 nt, Human
agacagucccugccaau

SEQ ID NO: 1200554 - RNA, 16 nt, Human
agacagucccugccaa

SEQ ID NO: 1200555 - RNA, 15 nt, Human
agacagucccugcca

SEQ ID NO: 1200556 - RNA, 21 nt, Human
agacaggguuuugccauguug

SEQ ID NO: 1200557 - RNA, 23 nt, Human
agacaggcaagcaccuccugccu

SEQ ID NO: 1200558 - RNA, 16 nt, Human
agacaggaccagggau

SEQ ID NO: 1200559 - RNA, 15 nt, Human
agacaggaccaggga

SEQ ID NO: 1200560 - RNA, 22 nt, Human
ucuuauugcccacgcuggagug

SEQ ID NO: 1200561 - RNA, 18 nt, Human
ucuuauugcccacgcugg

SEQ ID NO: 1200562 - RNA, 18 nt, Human
ucuuaugggcuggguucu

SEQ ID NO: 1200563 - RNA, 14 nt, Human
ucuuauugcccacg

SEQ ID NO: 1200564 - RNA, 16 nt, Human
ucuuaugggcuggguu

SEQ ID NO: 1200565 - RNA, 15 nt, Human
ucuuaugggcugggu

SEQ ID NO: 1200566 - RNA, 14 nt, Human
ucuuaugggcuggg

SEQ ID NO: 1200567 - RNA, 12 nt, Human
ucuucagagacu

SEQ ID NO: 1200568 - RNA, 22 nt, Human
ucuuccaggcugggagagccuu

SEQ ID NO: 1200569 - RNA, 17 nt, Human
ucuuauuuaaugaaaga

SEQ ID NO: 1200570 - RNA, 18 nt, Human
ucuugcaauggcagccuu

SEQ ID NO: 1200571 - RNA, 17 nt, Human
ucuugcaauggcagccu

SEQ ID NO: 1200572 - RNA, 16 nt, Human
ucuugcaauggcagcc

SEQ ID NO: 1200573 - RNA, 13 nt, Human
ucuugcaauggca

SEQ ID NO: 1200574 - RNA, 18 nt, Human
agacucauucuucuguac

SEQ ID NO: 1200575 - RNA, 17 nt, Human
agacucauucuucugua

SEQ ID NO: 1200576 - RNA, 18 nt, Human
agacuaucuaaauguuga

SEQ ID NO: 1200577 - RNA, 17 nt, Human
agacuaucuaaauguug

SEQ ID NO: 1200578 - RNA, 19 nt, Human
agacuaucuaaauguugaa

SEQ ID NO: 1200579 - RNA, 23 nt, Human
agacccuuguggucccaccccac

SEQ ID NO: 1200580 - RNA, 22 nt, Human
agacccuuguggucccacccca

SEQ ID NO: 1200581 - RNA, 20 nt, Human
agacccuuguggucccaccc

SEQ ID NO: 1200582 - RNA, 19 nt, Human
agacccuuguggucccacc

SEQ ID NO: 1200583 - RNA, 15 nt, Human
agacccuuguggucc

SEQ ID NO: 1200584 - RNA, 13 nt, Human
agacccuuguggu

SEQ ID NO: 1200585 - RNA, 23 nt, Human
agacccugcccugugggccccca

SEQ ID NO: 1200586 - RNA, 21 nt, Human
agacccugcccugugggcccc

SEQ ID NO: 1200587 - RNA, 19 nt, Human
agacccugcccugugggcc

SEQ ID NO: 1200588 - RNA, 16 nt, Human
agacccugcccugugg

SEQ ID NO: 1200589 - RNA, 14 nt, Human
agacccugcccugu

SEQ ID NO: 1200590 - RNA, 13 nt, Human
agacccugcccug

SEQ ID NO: 1200591 - RNA, 12 nt, Human
agacccugcccu

SEQ ID NO: 1200592 - RNA, 15 nt, Human
ucuuuacuucaugga

SEQ ID NO: 1200593 - RNA, 19 nt, Human
agacucuacagaggccaug

SEQ ID NO: 1200594 - RNA, 17 nt, Human
agacucuacagaggcca

SEQ ID NO: 1200595 - RNA, 23 nt, Human
agacuccugcaggcagccaggcc

SEQ ID NO: 1200596 - RNA, 20 nt, Human
agacuccugcaggcagccag

SEQ ID NO: 1200597 - RNA, 19 nt, Human
agacuccugcaggcagcca

SEQ ID NO: 1200598 - RNA, 18 nt, Human
agacuccugcaggcagcc

SEQ ID NO: 1200599 - RNA, 17 nt, Human
agacuccugcaggcagc

SEQ ID NO: 1200600 - RNA, 16 nt, Human
agacuccugcaggcag

SEQ ID NO: 1200601 - RNA, 15 nt, Human
agacuccugcaggca

SEQ ID NO: 1200602 - RNA, 16 nt, Human
ucuuuccugaggcugg

SEQ ID NO: 1200603 - RNA, 15 nt, Human
ucuuuccugaggcug

SEQ ID NO: 1200604 - RNA, 14 nt, Human
ucuuuccugaggcu

SEQ ID NO: 1200605 - RNA, 13 nt, Human
ucuuuccugaggc

SEQ ID NO: 1200606 - RNA, 18 nt, Human
agagaccaucccugaagg

SEQ ID NO: 1200607 - RNA, 15 nt, Human
agagaccaucccuga

SEQ ID NO: 1200608 - RNA, 14 nt, Human
agagaccaucccug

SEQ ID NO: 1200609 - RNA, 13 nt, Human
agagaccaucccu

SEQ ID NO: 1200610 - RNA, 15 nt, Human
agacuuuggaaagac

SEQ ID NO: 1200611 - RNA, 18 nt, Human
agagaaugaaagggccca

SEQ ID NO: 1200612 - RNA, 14 nt, Human
agacuuuggaaaga

SEQ ID NO: 1200613 - RNA, 12 nt, Human
agacuuuggaaa

SEQ ID NO: 1200614 - RNA, 17 nt, Human
agacuucaucccucugg

SEQ ID NO: 1200615 - RNA, 14 nt, Human
agacuucaucccuc

SEQ ID NO: 1200616 - RNA, 21 nt, Human
agagggagggagggcuccaga

SEQ ID NO: 1200617 - RNA, 15 nt, Human
agagggagguaagga

SEQ ID NO: 1200618 - RNA, 22 nt, Human
agagggagggagggcuccagac

SEQ ID NO: 1200619 - RNA, 17 nt, Human
agaggcuaugugagcac

SEQ ID NO: 1200620 - RNA, 17 nt, Human
ugaagacaaugacuuac

SEQ ID NO: 1200621 - RNA, 13 nt, Human
ugaagacaaugac

SEQ ID NO: 1200622 - RNA, 11 nt, Human
ugaagacaaug

SEQ ID NO: 1200623 - RNA, 17 nt, Human
ugaacuuugaccucugc

SEQ ID NO: 1200624 - RNA, 16 nt, Human
ugaacuuugaccucug

SEQ ID NO: 1200625 - RNA, 11 nt, Human
ugaacuuugac

SEQ ID NO: 1200626 - RNA, 21 nt, Human
ucuuuggucuacacugugcug

SEQ ID NO: 1200627 - RNA, 14 nt, Human
ucuuuggucuacac

SEQ ID NO: 1200628 - RNA, 18 nt, Human
agaggcaacugcauuggc

SEQ ID NO: 1200629 - RNA, 21 nt, Human
agaggaaaucaccgaaaacgu

SEQ ID NO: 1200630 - RNA, 12 nt, Human
agaggaaaucac

SEQ ID NO: 1200631 - RNA, 11 nt, Human
agaggaaauca

SEQ ID NO: 1200632 - RNA, 19 nt, Human
agaggaaagcaaaggagau

SEQ ID NO: 1200633 - RNA, 18 nt, Human
agaggaaagcaaaggaga

SEQ ID NO: 1200634 - RNA, 16 nt, Human
agaggaaagcaaagga

SEQ ID NO: 1200635 - RNA, 12 nt, Human
agaggaaagcaa

SEQ ID NO: 1200636 - RNA, 19 nt, Human
agagcugggugucaagagg

SEQ ID NO: 1200637 - RNA, 21 nt, Human
ugaagacaaugacuuacugua

SEQ ID NO: 1200638 - RNA, 16 nt, Human
agagugagacucuguc

SEQ ID NO: 1200639 - RNA, 15 nt, Human
agagugagacucugu

SEQ ID NO: 1200640 - RNA, 22 nt, Human
agagucucacuguugcccaggc

SEQ ID NO: 1200641 - RNA, 20 nt, Human
agagucucacuguugcccag

SEQ ID NO: 1200642 - RNA, 18 nt, Human
ugaaugucagugugacug

SEQ ID NO: 1200643 - RNA, 15 nt, Human
ugaaugucaguguga

SEQ ID NO: 1200644 - RNA, 14 nt, Human
ugaaugucagugug

SEQ ID NO: 1200645 - RNA, 21 nt, Human
agaucaaccccuucgcuccug

SEQ ID NO: 1200646 - RNA, 19 nt, Human
agaucaaccccuucgcucc

SEQ ID NO: 1200647 - RNA, 14 nt, Human
agaucaaccccuuc

SEQ ID NO: 1200648 - RNA, 19 nt, Human
agauacaggaaaagcugcu

SEQ ID NO: 1200649 - RNA, 19 nt, Human
agagugagacucugucuca

SEQ ID NO: 1200650 - RNA, 19 nt, Human
agauaaggguaucugguga

SEQ ID NO: 1200651 - RNA, 18 nt, Human
agauaauacaccacuaca

SEQ ID NO: 1200652 - RNA, 18 nt, Human
agaugcuucucacugcca

SEQ ID NO: 1200653 - RNA, 12 nt, Human
ugacccaugcug

SEQ ID NO: 1200654 - RNA, 12 nt, Human
ugaccugaggcc

SEQ ID NO: 1200655 - RNA, 14 nt, Human
ugaccucugccuga

SEQ ID NO: 1200656 - RNA, 13 nt, Human
ugaccucugccug

SEQ ID NO: 1200657 - RNA, 21 nt, Human
ugacuguuuucucuugagagg

SEQ ID NO: 1200658 - RNA, 23 nt, Human
ugacuccagaauuucccaaagca

SEQ ID NO: 1200659 - RNA, 20 nt, Human
ugacuccagaauuucccaaa

SEQ ID NO: 1200660 - RNA, 19 nt, Human
ugacuccagaauuucccaa

SEQ ID NO: 1200661 - RNA, 17 nt, Human
ugacuccagaauuuccc

SEQ ID NO: 1200662 - RNA, 17 nt, Human
ugaccugaggcccuucu

SEQ ID NO: 1200663 - RNA, 15 nt, Human
ugaccugaggcccuu

SEQ ID NO: 1200664 - RNA, 14 nt, Human
ugaccugaggcccu

SEQ ID NO: 1200665 - RNA, 17 nt, Human
agauuucacucuccuug

SEQ ID NO: 1200666 - RNA, 14 nt, Human
agauuucacucucc

SEQ ID NO: 1200667 - RNA, 13 nt, Human
agauuucacucuc

SEQ ID NO: 1200668 - RNA, 20 nt, Human
ugaggguugggcugguguca

SEQ ID NO: 1200669 - RNA, 16 nt, Human
ugaggucagagccugc

SEQ ID NO: 1200670 - RNA, 14 nt, Human
ugaggucagagccu

SEQ ID NO: 1200671 - RNA, 13 nt, Human
ugaggucagagcc

SEQ ID NO: 1200672 - RNA, 19 nt, Human
agcagagaccaucccugaa

SEQ ID NO: 1200673 - RNA, 18 nt, Human
agcagagaccaucccuga

SEQ ID NO: 1200674 - RNA, 17 nt, Human
ugaggucagagccugca

SEQ ID NO: 1200675 - RNA, 20 nt, Human
agcagagcaccuuagacagu

SEQ ID NO: 1200676 - RNA, 20 nt, Human
agcagagaccaucccugaag

SEQ ID NO: 1200677 - RNA, 19 nt, Human
agcagauggagaccccuug

SEQ ID NO: 1200678 - RNA, 17 nt, Human
agcagaggaaggagagg

SEQ ID NO: 1200679 - RNA, 13 nt, Human
ugaggggccucuu

SEQ ID NO: 1200680 - RNA, 12 nt, Human
ugaggggccucu

SEQ ID NO: 1200681 - RNA, 24 nt, Human
ugaggcccuucucuccagccccug

SEQ ID NO: 1200682 - RNA, 23 nt, Human
ugaggcccuucucuccagccccu

SEQ ID NO: 1200683 - RNA, 22 nt, Human
ugaggcccuucucuccagcccc

SEQ ID NO: 1200684 - RNA, 20 nt, Human
ugaggcccuucucuccagcc

SEQ ID NO: 1200685 - RNA, 19 nt, Human
ugaggcccuucucuccagc

SEQ ID NO: 1200686 - RNA, 18 nt, Human
ugaggcccuucucuccag

SEQ ID NO: 1200687 - RNA, 16 nt, Human
ugaggcccuucucucc

SEQ ID NO: 1200688 - RNA, 19 nt, Human
ugagggauacccaucccau

SEQ ID NO: 1200689 - RNA, 21 nt, Human
ugaggaagccgcuggggccag

SEQ ID NO: 1200690 - RNA, 19 nt, Human
ugaggaagccgcuggggcc

SEQ ID NO: 1200691 - RNA, 18 nt, Human
ugaggaagccgcuggggc

SEQ ID NO: 1200692 - RNA, 17 nt, Human
ugaggaagccgcugggg

SEQ ID NO: 1200693 - RNA, 14 nt, Human
ugaggaagccgcug

SEQ ID NO: 1200694 - RNA, 22 nt, Human
ugaggaagcaaaagcaucuaug

SEQ ID NO: 1200695 - RNA, 15 nt, Human
ugaggaagcaaaagc

SEQ ID NO: 1200696 - RNA, 23 nt, Human
ugaggcccagagggccugcaagg

SEQ ID NO: 1200697 - RNA, 22 nt, Human
ugaggcccagagggccugcaag

SEQ ID NO: 1200698 - RNA, 21 nt, Human
ugaggcccagagggccugcaa

SEQ ID NO: 1200699 - RNA, 20 nt, Human
ugaggcccagagggccugca

SEQ ID NO: 1200700 - RNA, 18 nt, Human
ugaggcccagagggccug

SEQ ID NO: 1200701 - RNA, 17 nt, Human
ugaggcccagagggccu

SEQ ID NO: 1200702 - RNA, 15 nt, Human
ugaggcccagagggc

SEQ ID NO: 1200703 - RNA, 13 nt, Human
ugaggcccagagg

SEQ ID NO: 1200704 - RNA, 12 nt, Human
ugaggcccagag

SEQ ID NO: 1200705 - RNA, 20 nt, Human
ugaggccagagacacaagcc

SEQ ID NO: 1200706 - RNA, 16 nt, Human
ugaggccagagacaca

SEQ ID NO: 1200707 - RNA, 14 nt, Human
ugaggccagagaca

SEQ ID NO: 1200708 - RNA, 12 nt, Human
ugaggccagaga

SEQ ID NO: 1200709 - RNA, 21 nt, Human
ugaggacacuaaccacgcugg

SEQ ID NO: 1200710 - RNA, 22 nt, Human
ugaggaauccagacccggcugc

SEQ ID NO: 1200711 - RNA, 21 nt, Human
ugaggaauccagacccggcug

SEQ ID NO: 1200712 - RNA, 16 nt, Human
agcacagcuucauuuc

SEQ ID NO: 1200713 - RNA, 16 nt, Human
agcacaugccucucuc

SEQ ID NO: 1200714 - RNA, 14 nt, Human
agcacaugccucuc

SEQ ID NO: 1200715 - RNA, 13 nt, Human
agcacaugccucu

SEQ ID NO: 1200716 - RNA, 13 nt, Human
agcaagugagagc

SEQ ID NO: 1200717 - RNA, 20 nt, Human
agcaagugagacccugucuc

SEQ ID NO: 1200718 - RNA, 22 nt, Human
ugagccagauuucacucuccuu

SEQ ID NO: 1200719 - RNA, 17 nt, Human
ugagccagauuucacuc

SEQ ID NO: 1200720 - RNA, 22 nt, Human
agcaagugagagcuggguguca

SEQ ID NO: 1200721 - RNA, 14 nt, Human
agcaagugagagcu

SEQ ID NO: 1200722 - RNA, 16 nt, Human
ugagccagauuucacu

SEQ ID NO: 1200723 - RNA, 14 nt, Human
ugagccagauuuca

SEQ ID NO: 1200724 - RNA, 13 nt, Human
ugagccagauuuc

SEQ ID NO: 1200725 - RNA, 23 nt, Human
ugagccacugcaccgggccacag

SEQ ID NO: 1200726 - RNA, 21 nt, Human
ugagccacugcaccgggccac

SEQ ID NO: 1200727 - RNA, 24 nt, Human
ugagcaucaggccaggcccucugc

SEQ ID NO: 1200728 - RNA, 22 nt, Human
ugagcaucaggccaggcccucu

SEQ ID NO: 1200729 - RNA, 23 nt, Human
ugagcacuaaggugugcucugau

SEQ ID NO: 1200730 - RNA, 22 nt, Human
ugagcacuaaggugugcucuga

SEQ ID NO: 1200731 - RNA, 21 nt, Human
ugagcacuaaggugugcucug

SEQ ID NO: 1200732 - RNA, 20 nt, Human
ugagcacuaaggugugcucu

SEQ ID NO: 1200733 - RNA, 15 nt, Human
ugagcaauccugcaa

SEQ ID NO: 1200734 - RNA, 19 nt, Human
ugagccuugaacuuugacc

SEQ ID NO: 1200735 - RNA, 18 nt, Human
ugagccuugaacuuugac

SEQ ID NO: 1200736 - RNA, 17 nt, Human
ugagccuugaacuuuga

SEQ ID NO: 1200737 - RNA, 15 nt, Human
ugagccuugaacuuu

SEQ ID NO: 1200738 - RNA, 14 nt, Human
ugagccuugaacuu

SEQ ID NO: 1200739 - RNA, 22 nt, Human
ugagccugggaggucaaggcug

SEQ ID NO: 1200740 - RNA, 19 nt, Human
ugagccugggaggucaagg

SEQ ID NO: 1200741 - RNA, 14 nt, Human
ugagccugggaggu

SEQ ID NO: 1200742 - RNA, 16 nt, Human
ugagccuggcaagaau

SEQ ID NO: 1200743 - RNA, 11 nt, Human
ugagccuggca

SEQ ID NO: 1200744 - RNA, 17 nt, Human
agcagagaccaucccug

SEQ ID NO: 1200745 - RNA, 16 nt, Human
agcagagaccaucccu

SEQ ID NO: 1200746 - RNA, 15 nt, Human
agcagagaccauccc

SEQ ID NO: 1200747 - RNA, 21 nt, Human
agcagagaauucucuuaucca

SEQ ID NO: 1200748 - RNA, 14 nt, Human
agcagagaauucuc

SEQ ID NO: 1200749 - RNA, 23 nt, Human
agcagagaaugaaagggcccaga

SEQ ID NO: 1200750 - RNA, 22 nt, Human
agcagagaaugaaagggcccag

SEQ ID NO: 1200751 - RNA, 21 nt, Human
agcagagaaugaaagggccca

SEQ ID NO: 1200752 - RNA, 19 nt, Human
agcagaaaugccuuacccu

SEQ ID NO: 1200753 - RNA, 13 nt, Human
agcagaaaugccu

SEQ ID NO: 1200754 - RNA, 12 nt, Human
agcagaaaugcc

SEQ ID NO: 1200755 - RNA, 23 nt, Human
agcacuuugggaggccaaggugg

SEQ ID NO: 1200756 - RNA, 22 nt, Human
agcacuuugggaggccaaggug

SEQ ID NO: 1200757 - RNA, 17 nt, Human
agcacgauuucuguuua

SEQ ID NO: 1200758 - RNA, 16 nt, Human
agcacgauuucuguuu

SEQ ID NO: 1200759 - RNA, 15 nt, Human
agcacgauuucuguu

SEQ ID NO: 1200760 - RNA, 14 nt, Human
agcacgauuucugu

SEQ ID NO: 1200761 - RNA, 13 nt, Human
agcacgauuucug

SEQ ID NO: 1200762 - RNA, 23 nt, Human
agcaccuuagacagucccugcca

SEQ ID NO: 1200763 - RNA, 22 nt, Human
agcaccuuagacagucccugcc

SEQ ID NO: 1200764 - RNA, 21 nt, Human
agcaccuuagacagucccugc

SEQ ID NO: 1200765 - RNA, 20 nt, Human
agcaccuuagacagucccug

SEQ ID NO: 1200766 - RNA, 19 nt, Human
agcaccuuagacagucccu

SEQ ID NO: 1200767 - RNA, 19 nt, Human
acuggguacuuguggacac

SEQ ID NO: 1200768 - RNA, 23 nt, Human
acuggguacuuguggacacagcu

SEQ ID NO: 1200769 - RNA, 20 nt, Human
acuggguacuuguggacaca

SEQ ID NO: 1200770 - RNA, 14 nt, Human
ucgcuccugugucu

SEQ ID NO: 1200771 - RNA, 13 nt, Human
ucgcuccuguguc

SEQ ID NO: 1200772 - RNA, 12 nt, Human
ucgcuccugugu

SEQ ID NO: 1200773 - RNA, 13 nt, Human
acuguacaaagua

SEQ ID NO: 1200774 - RNA, 19 nt, Human
acuguaauuugugauacaa

SEQ ID NO: 1200775 - RNA, 15 nt, Human
acuguacaaaguaga

SEQ ID NO: 1200776 - RNA, 14 nt, Human
acuguacaaaguag

SEQ ID NO: 1200777 - RNA, 23 nt, Human
acuguacaugaaaacacauuuuu

SEQ ID NO: 1200778 - RNA, 16 nt, Human
acuguacaugaaaaca

SEQ ID NO: 1200779 - RNA, 14 nt, Human
acuguacaugaaaa

SEQ ID NO: 1200780 - RNA, 13 nt, Human
acuguacaugaaa

SEQ ID NO: 1200781 - RNA, 15 nt, Human
ucgagcaugccugga

SEQ ID NO: 1200782 - RNA, 14 nt, Human
ucgagcaugccugg

SEQ ID NO: 1200783 - RNA, 14 nt, Human
ucgcgacaaugcaa

SEQ ID NO: 1200784 - RNA, 13 nt, Human
ucgcgacaaugca

SEQ ID NO: 1200785 - RNA, 17 nt, Human
ucgaggacagggaggug

SEQ ID NO: 1200786 - RNA, 14 nt, Human
ucgaggacagggag

SEQ ID NO: 1200787 - RNA, 15 nt, Human
ucgaacuggcugcaa

SEQ ID NO: 1200788 - RNA, 14 nt, Human
ucgaacuggcugca

SEQ ID NO: 1200789 - RNA, 15 nt, Human
uccuuucaccacaug

SEQ ID NO: 1200790 - RNA, 14 nt, Human
uccuucagugccuu

SEQ ID NO: 1200791 - RNA, 22 nt, Human
uccuucagugccuuauggaaca

SEQ ID NO: 1200792 - RNA, 13 nt, Human
uccuucagugccu

SEQ ID NO: 1200793 - RNA, 12 nt, Human
uccuucagugcc

SEQ ID NO: 1200794 - RNA, 11 nt, Human
uccuucagugc

SEQ ID NO: 1200795 - RNA, 22 nt, Human
acuggcugcaaaggguaucagg

SEQ ID NO: 1200796 - RNA, 21 nt, Human
acugcuugugaaaggaaagag

SEQ ID NO: 1200797 - RNA, 23 nt, Human
acugcuuccagugaggcucugcc

SEQ ID NO: 1200798 - RNA, 22 nt, Human
acugcuuccagugaggcucugc

SEQ ID NO: 1200799 - RNA, 21 nt, Human
acugcuuccagugaggcucug

SEQ ID NO: 1200800 - RNA, 18 nt, Human
acugcuuccagugaggcu

SEQ ID NO: 1200801 - RNA, 19 nt, Human
uccugccucagccucccaa

SEQ ID NO: 1200802 - RNA, 22 nt, Human
uccugcaggcagccaggccaca

SEQ ID NO: 1200803 - RNA, 20 nt, Human
uccugcaggcagccaggcca

SEQ ID NO: 1200804 - RNA, 19 nt, Human
uccugcaggcagccaggcc

SEQ ID NO: 1200805 - RNA, 17 nt, Human
uccugcaggcagccagg

SEQ ID NO: 1200806 - RNA, 16 nt, Human
uccugcaggcagccag

SEQ ID NO: 1200807 - RNA, 21 nt, Human
uccugccucgaacuggcugca

SEQ ID NO: 1200808 - RNA, 20 nt, Human
uccugccucgaacuggcugc

SEQ ID NO: 1200809 - RNA, 15 nt, Human
uccucuccccagcaa

SEQ ID NO: 1200810 - RNA, 14 nt, Human
acugcaaccuccgc

SEQ ID NO: 1200811 - RNA, 13 nt, Human
acugcaaccuccg

SEQ ID NO: 1200812 - RNA, 22 nt, Human
acugcaaccuccgccucuuggg

SEQ ID NO: 1200813 - RNA, 16 nt, Human
acugcaaccuccgccu

SEQ ID NO: 1200814 - RNA, 21 nt, Human
acugaguacguugugcauuug

SEQ ID NO: 1200815 - RNA, 19 nt, Human
acugaguacguugugcauu

SEQ ID NO: 1200816 - RNA, 18 nt, Human
acugaguacguugugcau

SEQ ID NO: 1200817 - RNA, 23 nt, Human
acugaguacguugugcauuuggu

SEQ ID NO: 1200818 - RNA, 22 nt, Human
acugaguacguugugcauuugg

SEQ ID NO: 1200819 - RNA, 19 nt, Human
uccuguucccaugagauga

SEQ ID NO: 1200820 - RNA, 18 nt, Human
uccugugugugcgccuac

SEQ ID NO: 1200821 - RNA, 14 nt, Human
uccugugugugcgc

SEQ ID NO: 1200822 - RNA, 13 nt, Human
uccugugugugcg

SEQ ID NO: 1200823 - RNA, 24 nt, Human
uccugugucuugcaauggcagccu

SEQ ID NO: 1200824 - RNA, 23 nt, Human
uccugugucuugcaauggcagcc

SEQ ID NO: 1200825 - RNA, 22 nt, Human
acugcagccucaaccuccuggg

SEQ ID NO: 1200826 - RNA, 21 nt, Human
acugcagccucaaccuccugg

SEQ ID NO: 1200827 - RNA, 19 nt, Human
acugcagccucaaccuccu

SEQ ID NO: 1200828 - RNA, 23 nt, Human
acugcagccucaaccuccugggc

SEQ ID NO: 1200829 - RNA, 21 nt, Human
uccugcugcaguugccaguca

SEQ ID NO: 1200830 - RNA, 13 nt, Human
uccugcugcaguu

SEQ ID NO: 1200831 - RNA, 21 nt, Human
acucuccucugcugcuggcug

SEQ ID NO: 1200832 - RNA, 19 nt, Human
acucuccucugcugcuggc

SEQ ID NO: 1200833 - RNA, 18 nt, Human
acucuccucugcugcugg

SEQ ID NO: 1200834 - RNA, 17 nt, Human
acucuccucugcugcug

SEQ ID NO: 1200835 - RNA, 23 nt, Human
acucgcgacaaugcaaaccauca

SEQ ID NO: 1200836 - RNA, 20 nt, Human
acucgcgacaaugcaaacca

SEQ ID NO: 1200837 - RNA, 18 nt, Human
acucgcgacaaugcaaac

SEQ ID NO: 1200838 - RNA, 19 nt, Human
uccuaggcauuugcugaau

SEQ ID NO: 1200839 - RNA, 20 nt, Human
uccucagaucuucugugggu

SEQ ID NO: 1200840 - RNA, 19 nt, Human
acucuuauugcccacgcug

SEQ ID NO: 1200841 - RNA, 16 nt, Human
acucuuauugcccacg

SEQ ID NO: 1200842 - RNA, 19 nt, Human
uccucccucccucuuuccc

SEQ ID NO: 1200843 - RNA, 17 nt, Human
uccucccucccucuuuc

SEQ ID NO: 1200844 - RNA, 12 nt, Human
uccucuccccag

SEQ ID NO: 1200845 - RNA, 18 nt, Human
uccucauacccaccccca

SEQ ID NO: 1200846 - RNA, 14 nt, Human
uccucauacccacc

SEQ ID NO: 1200847 - RNA, 22 nt, Human
uccucauacccacccccaccca

SEQ ID NO: 1200848 - RNA, 22 nt, Human
ucccucauccucauacccaccc

SEQ ID NO: 1200849 - RNA, 21 nt, Human
ucccucagucuggcccuuccu

SEQ ID NO: 1200850 - RNA, 20 nt, Human
uccuagcacuuugggaggcc

SEQ ID NO: 1200851 - RNA, 14 nt, Human
uccuaggcauuugc

SEQ ID NO: 1200852 - RNA, 23 nt, Human
ucccuuugacgccaucccagccc

SEQ ID NO: 1200853 - RNA, 22 nt, Human
ucccuuugacgccaucccagcc

SEQ ID NO: 1200854 - RNA, 22 nt, Human
ucccuuuccaaaugcccagcuu

SEQ ID NO: 1200855 - RNA, 22 nt, Human
ucccuuacgugaguccuggcau

SEQ ID NO: 1200856 - RNA, 18 nt, Human
ucccuuacgugaguccug

SEQ ID NO: 1200857 - RNA, 12 nt, Human
acuccugcaggc

SEQ ID NO: 1200858 - RNA, 16 nt, Human
ucccgaauagcuggga

SEQ ID NO: 1200859 - RNA, 15 nt, Human
ucccgaauagcuggg

SEQ ID NO: 1200860 - RNA, 18 nt, Human
ucccuauuagagaagaga

SEQ ID NO: 1200861 - RNA, 18 nt, Human
ucccgaauagcugggacu

SEQ ID NO: 1200862 - RNA, 24 nt, Human
uccccaccgcagacaggaccaggg

SEQ ID NO: 1200863 - RNA, 18 nt, Human
acuauagccuaggugaca

SEQ ID NO: 1200864 - RNA, 17 nt, Human
acuauagccuaggugac

SEQ ID NO: 1200865 - RNA, 23 nt, Human
acuauaauuuaccugaagucuuu

SEQ ID NO: 1200866 - RNA, 23 nt, Human
acuauguugcccaggcaggucuu

SEQ ID NO: 1200867 - RNA, 20 nt, Human
acuauguugcccaggcaggu

SEQ ID NO: 1200868 - RNA, 19 nt, Human
acuauguugcccaggcagg

SEQ ID NO: 1200869 - RNA, 18 nt, Human
acuauguugcccaggcag

SEQ ID NO: 1200870 - RNA, 16 nt, Human
acuaucuaaauguuga

SEQ ID NO: 1200871 - RNA, 24 nt, Human
uccagccugggugacagagcaagu

SEQ ID NO: 1200872 - RNA, 13 nt, Human
uccagccugggug

SEQ ID NO: 1200873 - RNA, 15 nt, Human
uccagcucaccagcc

SEQ ID NO: 1200874 - RNA, 14 nt, Human
uccagcucaccagc

SEQ ID NO: 1200875 - RNA, 12 nt, Human
acguuucuaaag

SEQ ID NO: 1200876 - RNA, 14 nt, Human
acguuucuaaaggc

SEQ ID NO: 1200877 - RNA, 15 nt, Human
acguuucuaaaggcu

SEQ ID NO: 1200878 - RNA, 15 nt, Human
acuacaguccuccca

SEQ ID NO: 1200879 - RNA, 17 nt, Human
acuaaccagcagaaaug

SEQ ID NO: 1200880 - RNA, 16 nt, Human
acuaaccagcagaaau

SEQ ID NO: 1200881 - RNA, 13 nt, Human
acuaaccacgcug

SEQ ID NO: 1200882 - RNA, 22 nt, Human
ucccagugccgagaaggaagcc

SEQ ID NO: 1200883 - RNA, 19 nt, Human
ucccagugccgagaaggaa

SEQ ID NO: 1200884 - RNA, 11 nt, Human
acuacauucug

SEQ ID NO: 1200885 - RNA, 17 nt, Human
acuacaguccucccauc

SEQ ID NO: 1200886 - RNA, 16 nt, Human
acuacaguccucccau

SEQ ID NO: 1200887 - RNA, 19 nt, Human
ucccaucucacacaugagc

SEQ ID NO: 1200888 - RNA, 14 nt, Human
ucccaucucacaca

SEQ ID NO: 1200889 - RNA, 13 nt, Human
ucccaucucacac

SEQ ID NO: 1200890 - RNA, 16 nt, Human
ucccauaugccugggc

SEQ ID NO: 1200891 - RNA, 15 nt, Human
ucccauaugccuggg

SEQ ID NO: 1200892 - RNA, 19 nt, Human
ucaugacaaagacugagua

SEQ ID NO: 1200893 - RNA, 23 nt, Human
ucauccacugugccaugugccag

SEQ ID NO: 1200894 - RNA, 21 nt, Human
ucauccacugugccaugugcc

SEQ ID NO: 1200895 - RNA, 19 nt, Human
ucauccacugugccaugug

SEQ ID NO: 1200896 - RNA, 17 nt, Human
ucauguucuuaauucuu

SEQ ID NO: 1200897 - RNA, 11 nt, Human
ucauguucuua

SEQ ID NO: 1200898 - RNA, 13 nt, Human
ucaugucuggcua

SEQ ID NO: 1200899 - RNA, 15 nt, Human
accucucccuuggau

SEQ ID NO: 1200900 - RNA, 14 nt, Human
accucucccuugga

SEQ ID NO: 1200901 - RNA, 13 nt, Human
accucucccuugg

SEQ ID NO: 1200902 - RNA, 12 nt, Human
accucugcacaa

SEQ ID NO: 1200903 - RNA, 19 nt, Human
accucucucacuccuugaa

SEQ ID NO: 1200904 - RNA, 14 nt, Human
accucucucacucc

SEQ ID NO: 1200905 - RNA, 23 nt, Human
accucucccuuggauuguccccg

SEQ ID NO: 1200906 - RNA, 17 nt, Human
accucggugccuuccuc

SEQ ID NO: 1200907 - RNA, 22 nt, Human
ucauugaccugaggcccuucuc

SEQ ID NO: 1200908 - RNA, 21 nt, Human
ucauucuccuuguguuacuaa

SEQ ID NO: 1200909 - RNA, 17 nt, Human
accgccaaggcuggggg

SEQ ID NO: 1200910 - RNA, 20 nt, Human
accgcagacaggaccaggga

SEQ ID NO: 1200911 - RNA, 22 nt, Human
ucauauuuacuucuuauacauu

SEQ ID NO: 1200912 - RNA, 21 nt, Human
ucauauuuacuucuuauacau

SEQ ID NO: 1200913 - RNA, 20 nt, Human
ucauauuuacuucuuauaca

SEQ ID NO: 1200914 - RNA, 10 nt, Human
acccuuuucu

SEQ ID NO: 1200915 - RNA, 13 nt, Human
accuagccuuaga

SEQ ID NO: 1200916 - RNA, 20 nt, Human
accuccgccucuuggguuca

SEQ ID NO: 1200917 - RNA, 11 nt, Human
accucagccuc

SEQ ID NO: 1200918 - RNA, 22 nt, Human
accugaagucuuuguacagaca

SEQ ID NO: 1200919 - RNA, 15 nt, Human
accugaagucuuugu

SEQ ID NO: 1200920 - RNA, 22 nt, Human
accugcggugcuaucuccccca

SEQ ID NO: 1200921 - RNA, 19 nt, Human
accugcggugcuaucuccc

SEQ ID NO: 1200922 - RNA, 23 nt, Human
accugcggugcuaucucccccag

SEQ ID NO: 1200923 - RNA, 19 nt, Human
ucauuugagcagggcucag

SEQ ID NO: 1200924 - RNA, 17 nt, Human
accuggaauauauaacc

SEQ ID NO: 1200925 - RNA, 14 nt, Human
accuggaauauaua

SEQ ID NO: 1200926 - RNA, 21 nt, Human
ucauuugagcagggcucagcg

SEQ ID NO: 1200927 - RNA, 17 nt, Human
ucauuuuuuuuaagaaa

SEQ ID NO: 1200928 - RNA, 13 nt, Human
ucauuuuuuuuaa

SEQ ID NO: 1200929 - RNA, 16 nt, Human
uccaagcuggucccac

SEQ ID NO: 1200930 - RNA, 11 nt, Human
uccaagcuggu

SEQ ID NO: 1200931 - RNA, 13 nt, Human
uccaagcucccag

SEQ ID NO: 1200932 - RNA, 12 nt, Human
uccaagcuccca

SEQ ID NO: 1200933 - RNA, 15 nt, Human
uccaagcucccaggc

SEQ ID NO: 1200934 - RNA, 14 nt, Human
uccaagcucccagg

SEQ ID NO: 1200935 - RNA, 16 nt, Human
uccaagcucccaggca

SEQ ID NO: 1200936 - RNA, 12 nt, Human
accuucuccuuc

SEQ ID NO: 1200937 - RNA, 16 nt, Human
accuugacagggcaca

SEQ ID NO: 1200938 - RNA, 15 nt, Human
accuugacagggcac

SEQ ID NO: 1200939 - RNA, 14 nt, Human
accuugacagggca

SEQ ID NO: 1200940 - RNA, 13 nt, Human
accuucuccuuca

SEQ ID NO: 1200941 - RNA, 14 nt, Human
accuucuccuucac

SEQ ID NO: 1200942 - RNA, 17 nt, Human
accuuagacagucccug

SEQ ID NO: 1200943 - RNA, 18 nt, Human
uccaccaucaagccacca

SEQ ID NO: 1200944 - RNA, 15 nt, Human
uccaccaucaagcca

SEQ ID NO: 1200945 - RNA, 22 nt, Human
uccagccccuggaugcagccuc

SEQ ID NO: 1200946 - RNA, 21 nt, Human
uccagccccuggaugcagccu

SEQ ID NO: 1200947 - RNA, 19 nt, Human
uccagccccuggaugcagc

SEQ ID NO: 1200948 - RNA, 17 nt, Human
uccagccccuggaugca

SEQ ID NO: 1200949 - RNA, 16 nt, Human
uccagccccuggaugc

SEQ ID NO: 1200950 - RNA, 15 nt, Human
uccagccccuggaug

SEQ ID NO: 1200951 - RNA, 14 nt, Human
uccagacccggcug

SEQ ID NO: 1200952 - RNA, 22 nt, Human
uccagaaguuugagaucagccu

SEQ ID NO: 1200953 - RNA, 13 nt, Human
accuuugucccca

SEQ ID NO: 1200954 - RNA, 23 nt, Human
accuuuguauucucuccuguacc

SEQ ID NO: 1200955 - RNA, 19 nt, Human
accuuuguauucucuccug

SEQ ID NO: 1200956 - RNA, 15 nt, Human
accuuuguauucucu

SEQ ID NO: 1200957 - RNA, 12 nt, Human
ucaggccaggcc

SEQ ID NO: 1200958 - RNA, 11 nt, Human
ucaggccaggc

SEQ ID NO: 1200959 - RNA, 20 nt, Human
ucaggccagcugcuugggcu

SEQ ID NO: 1200960 - RNA, 15 nt, Human
ucaggccagcugcuu

SEQ ID NO: 1200961 - RNA, 19 nt, Human
accccuucgcuccuguguc

SEQ ID NO: 1200962 - RNA, 16 nt, Human
ucagguaacaggcaga

SEQ ID NO: 1200963 - RNA, 15 nt, Human
ucagguaacaggcag

SEQ ID NO: 1200964 - RNA, 13 nt, Human
ucagguaacaggc

SEQ ID NO: 1200965 - RNA, 18 nt, Human
ucagggucccugguggca

SEQ ID NO: 1200966 - RNA, 14 nt, Human
ucagggucccuggu

SEQ ID NO: 1200967 - RNA, 13 nt, Human
ucagggucccugg

SEQ ID NO: 1200968 - RNA, 18 nt, Human
ucagcggggacagcuccu

SEQ ID NO: 1200969 - RNA, 17 nt, Human
ucagcggggacagcucc

SEQ ID NO: 1200970 - RNA, 16 nt, Human
ucagcggggacagcuc

SEQ ID NO: 1200971 - RNA, 23 nt, Human
ucaggccaaacucaccugccccu

SEQ ID NO: 1200972 - RNA, 20 nt, Human
ucaggccaaacucaccugcc

SEQ ID NO: 1200973 - RNA, 20 nt, Human
ucaggaagcucagggccugg

SEQ ID NO: 1200974 - RNA, 19 nt, Human
ucaggaagcucagggccug

SEQ ID NO: 1200975 - RNA, 17 nt, Human
ucaggaagcucagggcc

SEQ ID NO: 1200976 - RNA, 12 nt, Human
ucaggaagcuca

SEQ ID NO: 1200977 - RNA, 20 nt, Human
accccuucgcuccugugucu

SEQ ID NO: 1200978 - RNA, 20 nt, Human
acccuuguggucccacccca

SEQ ID NO: 1200979 - RNA, 19 nt, Human
acccuuguggucccacccc

SEQ ID NO: 1200980 - RNA, 17 nt, Human
acccuuguggucccacc

SEQ ID NO: 1200981 - RNA, 16 nt, Human
acccuuguggucccac

SEQ ID NO: 1200982 - RNA, 14 nt, Human
acccugcccugugg

SEQ ID NO: 1200983 - RNA, 13 nt, Human
acccugcccugug

SEQ ID NO: 1200984 - RNA, 12 nt, Human
acccugcccugu

SEQ ID NO: 1200985 - RNA, 11 nt, Human
acccugcccug

SEQ ID NO: 1200986 - RNA, 14 nt, Human
acccucuuagaaaa

SEQ ID NO: 1200987 - RNA, 15 nt, Human
acccagcucuggucc

SEQ ID NO: 1200988 - RNA, 13 nt, Human
acccagcucuggu

SEQ ID NO: 1200989 - RNA, 13 nt, Human
ucagaucuucugu

SEQ ID NO: 1200990 - RNA, 14 nt, Human
ucagaagacacuga

SEQ ID NO: 1200991 - RNA, 13 nt, Human
ucagaagacacug

SEQ ID NO: 1200992 - RNA, 12 nt, Human
ucagccugggca

SEQ ID NO: 1200993 - RNA, 10 nt, Human
ucagccuggg

SEQ ID NO: 1200994 - RNA, 15 nt, Human
acccccagccugcua

SEQ ID NO: 1200995 - RNA, 11 nt, Human
accagacaggu

SEQ ID NO: 1200996 - RNA, 23 nt, Human
accagacaccuugacagggcaca

SEQ ID NO: 1200997 - RNA, 22 nt, Human
accagacaccuugacagggcac

SEQ ID NO: 1200998 - RNA, 12 nt, Human
accacuuuuguu

SEQ ID NO: 1200999 - RNA, 12 nt, Human
accagagcugcc

SEQ ID NO: 1201000 - RNA, 12 nt, Human
accagagcccac

SEQ ID NO: 1201001 - RNA, 22 nt, Human
accagagcccaccuuggcucaa

SEQ ID NO: 1201002 - RNA, 19 nt, Human
accagagcccaccuuggcu

SEQ ID NO: 1201003 - RNA, 23 nt, Human
ucaccugaagacucauucuucug

SEQ ID NO: 1201004 - RNA, 19 nt, Human
ucaccugaagacucauucu

SEQ ID NO: 1201005 - RNA, 14 nt, Human
accacaucuugcuc

SEQ ID NO: 1201006 - RNA, 22 nt, Human
accacagacauacuaaccagca

SEQ ID NO: 1201007 - RNA, 21 nt, Human
accacagacauacuaaccagc

SEQ ID NO: 1201008 - RNA, 20 nt, Human
accacucuaucaaguauuau

SEQ ID NO: 1201009 - RNA, 24 nt, Human
accacaucuugcucugcugacaga

SEQ ID NO: 1201010 - RNA, 21 nt, Human
accacaucuugcucugcugac

SEQ ID NO: 1201011 - RNA, 20 nt, Human
accacaucuugcucugcuga

SEQ ID NO: 1201012 - RNA, 16 nt, Human
accacaucuugcucug

SEQ ID NO: 1201013 - RNA, 17 nt, Human
accacugcacuccagcc

SEQ ID NO: 1201014 - RNA, 14 nt, Human
accacuucagcuga

SEQ ID NO: 1201015 - RNA, 13 nt, Human
accacuucagcug

SEQ ID NO: 1201016 - RNA, 15 nt, Human
accacuucagcugac

SEQ ID NO: 1201017 - RNA, 18 nt, Human
acccagcccacuucugcc

SEQ ID NO: 1201018 - RNA, 17 nt, Human
acccagcccacuucugc

SEQ ID NO: 1201019 - RNA, 16 nt, Human
acccagcccacuucug

SEQ ID NO: 1201020 - RNA, 16 nt, Human
acccagaagaaaauag

SEQ ID NO: 1201021 - RNA, 23 nt, Human
accauuuugggguacccacugcu

SEQ ID NO: 1201022 - RNA, 16 nt, Human
accauucuccaccugc

SEQ ID NO: 1201023 - RNA, 13 nt, Human
accauucuccacc

SEQ ID NO: 1201024 - RNA, 18 nt, Human
accauucuccaccugcca

SEQ ID NO: 1201025 - RNA, 22 nt, Human
accaugauuaaccacuucagcu

SEQ ID NO: 1201026 - RNA, 23 nt, Human
accaugauuaaccacuucagcug

SEQ ID NO: 1201027 - RNA, 19 nt, Human
ucacuguugcccaggcugg

SEQ ID NO: 1201028 - RNA, 18 nt, Human
ucacuguugcccaggcug

SEQ ID NO: 1201029 - RNA, 17 nt, Human
ucacuguugcccaggcu

SEQ ID NO: 1201030 - RNA, 21 nt, Human
accaguguuguggauuuaaca

SEQ ID NO: 1201031 - RNA, 15 nt, Human
ucacugagacagccc

SEQ ID NO: 1201032 - RNA, 14 nt, Human
ucacugagacagcc

SEQ ID NO: 1201033 - RNA, 13 nt, Human
ucacugagacagc

SEQ ID NO: 1201034 - RNA, 16 nt, Human
ucacugagacagcccg

SEQ ID NO: 1201035 - RNA, 13 nt, Human
ucacugcagccuc

SEQ ID NO: 1201036 - RNA, 12 nt, Human
ucacugcagccu

SEQ ID NO: 1201037 - RNA, 19 nt, Human
uauguuuuaagaggcaggg

SEQ ID NO: 1201038 - RNA, 17 nt, Human
uauguuuuaagaggcag

SEQ ID NO: 1201039 - RNA, 22 nt, Human
uauuaaaaaucucaaauuucua

SEQ ID NO: 1201040 - RNA, 20 nt, Human
uauuaaaaaucucaaauuuc

SEQ ID NO: 1201041 - RNA, 18 nt, Human
uauuaaaaaucucaaauu

SEQ ID NO: 1201042 - RNA, 16 nt, Human
uauuaaaaaucucaaa

SEQ ID NO: 1201043 - RNA, 23 nt, Human
uauuaaaaaucucaaauuucuaa

SEQ ID NO: 1201044 - RNA, 12 nt, Human
uauuagagaaga

SEQ ID NO: 1201045 - RNA, 16 nt, Human
uauuaccacagacaua

SEQ ID NO: 1201046 - RNA, 22 nt, Human
uauucaggaagcucagggccug

SEQ ID NO: 1201047 - RNA, 18 nt, Human
uauucaggaagcucaggg

SEQ ID NO: 1201048 - RNA, 15 nt, Human
acaguuaagagaaau

SEQ ID NO: 1201049 - RNA, 22 nt, Human
acaguccuuaccagcagagcac

SEQ ID NO: 1201050 - RNA, 21 nt, Human
acaguccuuaccagcagagca

SEQ ID NO: 1201051 - RNA, 20 nt, Human
acaguccuuaccagcagagc

SEQ ID NO: 1201052 - RNA, 18 nt, Human
acaguccuuaccagcaga

SEQ ID NO: 1201053 - RNA, 17 nt, Human
acaguccucccaucuca

SEQ ID NO: 1201054 - RNA, 15 nt, Human
acaguccucccaucu

SEQ ID NO: 1201055 - RNA, 14 nt, Human
acaguccucccauc

SEQ ID NO: 1201056 - RNA, 13 nt, Human
acaguccucccau

SEQ ID NO: 1201057 - RNA, 15 nt, Human
acagucccugccaau

SEQ ID NO: 1201058 - RNA, 13 nt, Human
acagucccugcca

SEQ ID NO: 1201059 - RNA, 19 nt, Human
acaguauuacuucugcuac

SEQ ID NO: 1201060 - RNA, 17 nt, Human
acaguauuacuucugcu

SEQ ID NO: 1201061 - RNA, 16 nt, Human
acaguauuacuucugc

SEQ ID NO: 1201062 - RNA, 15 nt, Human
acaguauuacuucug

SEQ ID NO: 1201063 - RNA, 22 nt, Human
acagggcacaccgggcacucag

SEQ ID NO: 1201064 - RNA, 22 nt, Human
acagguuuuccugaagaauuga

SEQ ID NO: 1201065 - RNA, 21 nt, Human
acaggcugggcuucaguggca

SEQ ID NO: 1201066 - RNA, 17 nt, Human
acaggcugggcuucagu

SEQ ID NO: 1201067 - RNA, 14 nt, Human
acaggcugggcuuc

SEQ ID NO: 1201068 - RNA, 17 nt, Human
uauugucaaagugguga

SEQ ID NO: 1201069 - RNA, 13 nt, Human
uauugucaaagug

SEQ ID NO: 1201070 - RNA, 21 nt, Human
uauuuaaugaaagacuguaca

SEQ ID NO: 1201071 - RNA, 15 nt, Human
uauuuaaugaaagac

SEQ ID NO: 1201072 - RNA, 13 nt, Human
uauuuauuuaaau

SEQ ID NO: 1201073 - RNA, 14 nt, Human
uauuuauuuaaauu

SEQ ID NO: 1201074 - RNA, 23 nt, Human
uauuuaauuuuuuugagacagag

SEQ ID NO: 1201075 - RNA, 18 nt, Human
uauuuacuucuuauacau

SEQ ID NO: 1201076 - RNA, 15 nt, Human
uauucuuauuuaaug

SEQ ID NO: 1201077 - RNA, 16 nt, Human
uauucuguuggccagu

SEQ ID NO: 1201078 - RNA, 24 nt, Human
uauucucuccuguaccucuugagc

SEQ ID NO: 1201079 - RNA, 20 nt, Human
uauucucuccuguaccucuu

SEQ ID NO: 1201080 - RNA, 17 nt, Human
acaguucucuccuucuu

SEQ ID NO: 1201081 - RNA, 20 nt, Human
acaguucaauucucauuugu

SEQ ID NO: 1201082 - RNA, 20 nt, Human
acaguuacucagaauucucu

SEQ ID NO: 1201083 - RNA, 13 nt, Human
acaguuacucaga

SEQ ID NO: 1201084 - RNA, 16 nt, Human
acaguucucuccuucu

SEQ ID NO: 1201085 - RNA, 17 nt, Human
acagacccugcccugug

SEQ ID NO: 1201086 - RNA, 23 nt, Human
acagacacaggcccggcuccagg

SEQ ID NO: 1201087 - RNA, 13 nt, Human
acacuccuucaca

SEQ ID NO: 1201088 - RNA, 11 nt, Human
acacuccuuca

SEQ ID NO: 1201089 - RNA, 17 nt, Human
acagacuggaagcacag

SEQ ID NO: 1201090 - RNA, 14 nt, Human
acagacuggaagca

SEQ ID NO: 1201091 - RNA, 20 nt, Human
acagacccugcccugugggc

SEQ ID NO: 1201092 - RNA, 18 nt, Human
acagacccugcccugugg

SEQ ID NO: 1201093 - RNA, 18 nt, Human
uaucacccagaagaaaau

SEQ ID NO: 1201094 - RNA, 21 nt, Human
uaucaaguauuauaccuuuuu

SEQ ID NO: 1201095 - RNA, 18 nt, Human
acagagcuacacagggga

SEQ ID NO: 1201096 - RNA, 16 nt, Human
acagagcuacacaggg

SEQ ID NO: 1201097 - RNA, 16 nt, Human
uaucuagauacuguau

SEQ ID NO: 1201098 - RNA, 15 nt, Human
uaucuagauacugua

SEQ ID NO: 1201099 - RNA, 10 nt, Human
uaucagaauu

SEQ ID NO: 1201100 - RNA, 19 nt, Human
uaucuagauacuguaucau

SEQ ID NO: 1201101 - RNA, 18 nt, Human
uaucucccccagccccau

SEQ ID NO: 1201102 - RNA, 17 nt, Human
uaucucccccagcccca

SEQ ID NO: 1201103 - RNA, 16 nt, Human
uauggcuuuugugcau

SEQ ID NO: 1201104 - RNA, 17 nt, Human
acagcuaacauggaagu

SEQ ID NO: 1201105 - RNA, 15 nt, Human
acagcuaacauggaa

SEQ ID NO: 1201106 - RNA, 14 nt, Human
acagcuaacaugga

SEQ ID NO: 1201107 - RNA, 19 nt, Human
uaugcucugcauguuacau

SEQ ID NO: 1201108 - RNA, 18 nt, Human
uaugcucugcauguuaca

SEQ ID NO: 1201109 - RNA, 20 nt, Human
acagaguuuucacucuuauu

SEQ ID NO: 1201110 - RNA, 18 nt, Human
acagaguuuucacucuua

SEQ ID NO: 1201111 - RNA, 15 nt, Human
acagaguuguuacau

SEQ ID NO: 1201112 - RNA, 23 nt, Human
uaugaucacggcucacugcagcc

SEQ ID NO: 1201113 - RNA, 21 nt, Human
uaugaucacggcucacugcag

SEQ ID NO: 1201114 - RNA, 13 nt, Human
uaugaggcauuug

SEQ ID NO: 1201115 - RNA, 15 nt, Human
uaucuugaagacuuu

SEQ ID NO: 1201116 - RNA, 20 nt, Human
uauaaccaguguuguggauu

SEQ ID NO: 1201117 - RNA, 14 nt, Human
uauacauuugauaa

SEQ ID NO: 1201118 - RNA, 14 nt, Human
uauacauaaacaag

SEQ ID NO: 1201119 - RNA, 13 nt, Human
uauacauaaacaa

SEQ ID NO: 1201120 - RNA, 21 nt, Human
uauacacuuacacuuuaugca

SEQ ID NO: 1201121 - RNA, 23 nt, Human
acacucauugaccugaggcccuu

SEQ ID NO: 1201122 - RNA, 21 nt, Human
acacucauugaccugaggccc

SEQ ID NO: 1201123 - RNA, 20 nt, Human
uauagccuaggugacagagu

SEQ ID NO: 1201124 - RNA, 20 nt, Human
uaguuccucauuagcauuuu

SEQ ID NO: 1201125 - RNA, 23 nt, Human
acaagcugcacccucaggcaggu

SEQ ID NO: 1201126 - RNA, 22 nt, Human
acaagcugcacccucaggcagg

SEQ ID NO: 1201127 - RNA, 21 nt, Human
acaagcugcacccucaggcag

SEQ ID NO: 1201128 - RNA, 19 nt, Human
acaagcugcacccucaggc

SEQ ID NO: 1201129 - RNA, 21 nt, Human
uagucaggugccucaagagaa

SEQ ID NO: 1201130 - RNA, 19 nt, Human
acacccugugauggggccc

SEQ ID NO: 1201131 - RNA, 18 nt, Human
acacccugugauggggcc

SEQ ID NO: 1201132 - RNA, 12 nt, Human
acacccugugau

SEQ ID NO: 1201133 - RNA, 11 nt, Human
acacccuguga

SEQ ID NO: 1201134 - RNA, 21 nt, Human
acacccagcccacuucugcca

SEQ ID NO: 1201135 - RNA, 20 nt, Human
acacccagcccacuucugcc

SEQ ID NO: 1201136 - RNA, 21 nt, Human
acacaugcaaggucauuuuuu

SEQ ID NO: 1201137 - RNA, 20 nt, Human
acacaugcaaggucauuuuu

SEQ ID NO: 1201138 - RNA, 19 nt, Human
acacaugcaaggucauuuu

SEQ ID NO: 1201139 - RNA, 15 nt, Human
uacguacacauuuua

SEQ ID NO: 1201140 - RNA, 22 nt, Human
aauucuucuccacuuucuagcc

SEQ ID NO: 1201141 - RNA, 20 nt, Human
aauucuugcaaaguaucccu

SEQ ID NO: 1201142 - RNA, 14 nt, Human
aauucuugcaaagu

SEQ ID NO: 1201143 - RNA, 16 nt, Human
uacuauguaucaauga

SEQ ID NO: 1201144 - RNA, 16 nt, Human
uacuauaauuuaccug

SEQ ID NO: 1201145 - RNA, 14 nt, Human
uacguugugcauuu

SEQ ID NO: 1201146 - RNA, 13 nt, Human
uacguugugcauu

SEQ ID NO: 1201147 - RNA, 14 nt, Human
uacgucugacaggc

SEQ ID NO: 1201148 - RNA, 21 nt, Human
aauuucuaaaucuccaaaaua

SEQ ID NO: 1201149 - RNA, 13 nt, Human
aauuucuaaaucu

SEQ ID NO: 1201150 - RNA, 17 nt, Human
aauuuagaaauauaauu

SEQ ID NO: 1201151 - RNA, 15 nt, Human
aauuuaccugaaguc

SEQ ID NO: 1201152 - RNA, 19 nt, Human
aauuuacauacucugcuua

SEQ ID NO: 1201153 - RNA, 13 nt, Human
aauuuaaaagucu

SEQ ID NO: 1201154 - RNA, 22 nt, Human
aauuguuuggggaugagaaagg

SEQ ID NO: 1201155 - RNA, 16 nt, Human
uagaagucacacagua

SEQ ID NO: 1201156 - RNA, 17 nt, Human
uagaagucuuagaugua

SEQ ID NO: 1201157 - RNA, 16 nt, Human
uagaagucuuagaugu

SEQ ID NO: 1201158 - RNA, 20 nt, Human
uagaagucuuagauguauau

SEQ ID NO: 1201159 - RNA, 19 nt, Human
uagaagucuuagauguaua

SEQ ID NO: 1201160 - RNA, 18 nt, Human
uagaagucuuagauguau

SEQ ID NO: 1201161 - RNA, 18 nt, Human
uagacaauuuauuauggc

SEQ ID NO: 1201162 - RNA, 16 nt, Human
uagacaauuuauuaug

SEQ ID NO: 1201163 - RNA, 18 nt, Human
aauuuuuauuaaauuaug

SEQ ID NO: 1201164 - RNA, 17 nt, Human
aauuuuuauuaaauuau

SEQ ID NO: 1201165 - RNA, 16 nt, Human
uagacagucccugcca

SEQ ID NO: 1201166 - RNA, 14 nt, Human
uagacagucccugc

SEQ ID NO: 1201167 - RNA, 12 nt, Human
uagacagucccu

SEQ ID NO: 1201168 - RNA, 17 nt, Human
aauuuuuuugagacaga

SEQ ID NO: 1201169 - RNA, 13 nt, Human
acaaaaacauggc

SEQ ID NO: 1201170 - RNA, 21 nt, Human
acaacacucauugaccugagg

SEQ ID NO: 1201171 - RNA, 12 nt, Human
acaacacucaca

SEQ ID NO: 1201172 - RNA, 15 nt, Human
acaacaacaaaauga

SEQ ID NO: 1201173 - RNA, 21 nt, Human
acaagcgugagccacugcacc

SEQ ID NO: 1201174 - RNA, 20 nt, Human
acaagcgugagccacugcac

SEQ ID NO: 1201175 - RNA, 13 nt, Human
acaagcugcaccc

SEQ ID NO: 1201176 - RNA, 12 nt, Human
acaagccacccc

SEQ ID NO: 1201177 - RNA, 18 nt, Human
acaagagcccaggccucc

SEQ ID NO: 1201178 - RNA, 17 nt, Human
acaagagcccaggccuc

SEQ ID NO: 1201179 - RNA, 19 nt, Human
uagcacagacccugcccug

SEQ ID NO: 1201180 - RNA, 18 nt, Human
uagcacagacccugcccu

SEQ ID NO: 1201181 - RNA, 17 nt, Human
uagcacagacccugccc

SEQ ID NO: 1201182 - RNA, 22 nt, Human
uagauuuuagacccuauugcug

SEQ ID NO: 1201183 - RNA, 16 nt, Human
acaaaaagcauaaaaa

SEQ ID NO: 1201184 - RNA, 17 nt, Human
uaccacuuuuguucuug

SEQ ID NO: 1201185 - RNA, 17 nt, Human
uaccauccccuguagag

SEQ ID NO: 1201186 - RNA, 22 nt, Human
uacccuggcacuauaauguaag

SEQ ID NO: 1201187 - RNA, 20 nt, Human
uacccuggcacuauaaugua

SEQ ID NO: 1201188 - RNA, 16 nt, Human
uacccucauguucuua

SEQ ID NO: 1201189 - RNA, 20 nt, Human
uacccgggaagggggcuggg

SEQ ID NO: 1201190 - RNA, 15 nt, Human
aaugucacaggcagg

SEQ ID NO: 1201191 - RNA, 22 nt, Human
aauuaacuuuuauaaacuuuac

SEQ ID NO: 1201192 - RNA, 20 nt, Human
aauuaacuuuuauaaacuuu

SEQ ID NO: 1201193 - RNA, 18 nt, Human
aauuaacuuuuauaaacu

SEQ ID NO: 1201194 - RNA, 13 nt, Human
aauuaaguacuau

SEQ ID NO: 1201195 - RNA, 15 nt, Human
uacauaaugcgugca

SEQ ID NO: 1201196 - RNA, 15 nt, Human
uacaguccucccauc

SEQ ID NO: 1201197 - RNA, 12 nt, Human
uacaguccuccc

SEQ ID NO: 1201198 - RNA, 18 nt, Human
uacaguaucucagggccu

SEQ ID NO: 1201199 - RNA, 24 nt, Human
uacagcaaggagauuuacaacugg

SEQ ID NO: 1201200 - RNA, 18 nt, Human
uacaguccucccaucuca

SEQ ID NO: 1201201 - RNA, 17 nt, Human
uacaguccucccaucuc

SEQ ID NO: 1201202 - RNA, 14 nt, Human
aaugucacaggcag

SEQ ID NO: 1201203 - RNA, 13 nt, Human
aaugucacaggca

SEQ ID NO: 1201204 - RNA, 15 nt, Human
aauguaagcucuacu

SEQ ID NO: 1201205 - RNA, 13 nt, Human
aauguaagcucua

SEQ ID NO: 1201206 - RNA, 22 nt, Human
aaugguuuucuuguguguuuau

SEQ ID NO: 1201207 - RNA, 18 nt, Human
aaugguuuucuugugugu

SEQ ID NO: 1201208 - RNA, 17 nt, Human
aaugguuuucuugugug

SEQ ID NO: 1201209 - RNA, 23 nt, Human
aauguacagcaaggagauuuaca

SEQ ID NO: 1201210 - RNA, 21 nt, Human
aauguacagcaaggagauuua

SEQ ID NO: 1201211 - RNA, 22 nt, Human
uacagcaaggagauuuacaacu

SEQ ID NO: 1201212 - RNA, 18 nt, Human
uaauuuaccugaagucuu

SEQ ID NO: 1201213 - RNA, 17 nt, Human
uaauuuaccugaagucu

SEQ ID NO: 1201214 - RNA, 15 nt, Human
uacaaaaagcauaaa

SEQ ID NO: 1201215 - RNA, 16 nt, Human
uacaaaaacauggccu

SEQ ID NO: 1201216 - RNA, 20 nt, Human
uacaagcgugagccacugca

SEQ ID NO: 1201217 - RNA, 19 nt, Human
uacaagcgugagccacugc

SEQ ID NO: 1201218 - RNA, 18 nt, Human
uacaagcgugagccacug

SEQ ID NO: 1201219 - RNA, 16 nt, Human
uacaagcgugagccac

SEQ ID NO: 1201220 - RNA, 21 nt, Human
uacaagcgugagccacugcac

SEQ ID NO: 1201221 - RNA, 18 nt, Human
aaugcacaaacagaggcc

SEQ ID NO: 1201222 - RNA, 23 nt, Human
aaugcaaaccaucauugaaaucu

SEQ ID NO: 1201223 - RNA, 22 nt, Human
aaugcaaaccaucauugaaauc

SEQ ID NO: 1201224 - RNA, 16 nt, Human
aaugcaaaccaucauu

SEQ ID NO: 1201225 - RNA, 15 nt, Human
aaugaccuuucaaua

SEQ ID NO: 1201226 - RNA, 14 nt, Human
aaugaccuuucaau

SEQ ID NO: 1201227 - RNA, 13 nt, Human
aaugaccuuucaa

SEQ ID NO: 1201228 - RNA, 21 nt, Human
aaugaaugucagugugacuga

SEQ ID NO: 1201229 - RNA, 20 nt, Human
aaugaaugucagugugacug

SEQ ID NO: 1201230 - RNA, 16 nt, Human
aaugcacuuuguucug

SEQ ID NO: 1201231 - RNA, 13 nt, Human
aaugcacuuuguu

SEQ ID NO: 1201232 - RNA, 20 nt, Human
aaugcacaaacagaggccgc

SEQ ID NO: 1201233 - RNA, 19 nt, Human
aaugcacaaacagaggccg

SEQ ID NO: 1201234 - RNA, 20 nt, Human
aaugcacuuuguucuggcuc

SEQ ID NO: 1201235 - RNA, 19 nt, Human
aaugcacuuuguucuggcu

SEQ ID NO: 1201236 - RNA, 23 nt, Human
uaauuaguuccucauuagcauuu

SEQ ID NO: 1201237 - RNA, 23 nt, Human
uaaugugaaacuggauuaaacuu

SEQ ID NO: 1201238 - RNA, 22 nt, Human
uaaugugaaacuggauuaaacu

SEQ ID NO: 1201239 - RNA, 20 nt, Human
uaaugugaaacuggauuaaa

SEQ ID NO: 1201240 - RNA, 12 nt, Human
uaaugugaaacu

SEQ ID NO: 1201241 - RNA, 17 nt, Human
uaaugucacaggcaggu

SEQ ID NO: 1201242 - RNA, 16 nt, Human
uaaugucacaggcagg

SEQ ID NO: 1201243 - RNA, 15 nt, Human
uaaugucacaggcag

SEQ ID NO: 1201244 - RNA, 17 nt, Human
uaauguaagcucuacug

SEQ ID NO: 1201245 - RNA, 16 nt, Human
uaauguaagcucuacu

SEQ ID NO: 1201246 - RNA, 15 nt, Human
aaugaaugucagugu

SEQ ID NO: 1201247 - RNA, 14 nt, Human
aaugaaugaaacau

SEQ ID NO: 1201248 - RNA, 21 nt, Human
uaauauugauaugcuuauaca

SEQ ID NO: 1201249 - RNA, 14 nt, Human
uaauagacaauuua

SEQ ID NO: 1201250 - RNA, 23 nt, Human
uaauacaccacuacauucuguua

SEQ ID NO: 1201251 - RNA, 22 nt, Human
uaauacaccacuacauucuguu

SEQ ID NO: 1201252 - RNA, 20 nt, Human
aauacaguaucucagggccu

SEQ ID NO: 1201253 - RNA, 11 nt, Human
aagcucccagg

SEQ ID NO: 1201254 - RNA, 13 nt, Human
guguuuauuguca

SEQ ID NO: 1201255 - RNA, 23 nt, Human
aagcucccaggcauuccccagga

SEQ ID NO: 1201256 - RNA, 22 nt, Human
aagcucccaggcauuccccagg

SEQ ID NO: 1201257 - RNA, 12 nt, Human
aagcucccaggc

SEQ ID NO: 1201258 - RNA, 17 nt, Human
aagcucugcuccucucc

SEQ ID NO: 1201259 - RNA, 18 nt, Human
aagcuguuacugucuuca

SEQ ID NO: 1201260 - RNA, 13 nt, Human
aagcucugcuccu

SEQ ID NO: 1201261 - RNA, 23 nt, Human
guugauagcacagacccugcccu

SEQ ID NO: 1201262 - RNA, 13 nt, Human
guucucugcccuc

SEQ ID NO: 1201263 - RNA, 12 nt, Human
guucucugcccu

SEQ ID NO: 1201264 - RNA, 11 nt, Human
guucucugccc

SEQ ID NO: 1201265 - RNA, 16 nt, Human
guucucugaggacacu

SEQ ID NO: 1201266 - RNA, 17 nt, Human
guugggcuggugucacc

SEQ ID NO: 1201267 - RNA, 13 nt, Human
guuggguggaugc

SEQ ID NO: 1201268 - RNA, 17 nt, Human
guugcccaggcuggcgu

SEQ ID NO: 1201269 - RNA, 16 nt, Human
guugcccaggcuggcg

SEQ ID NO: 1201270 - RNA, 15 nt, Human
guugcccaggcuggc

SEQ ID NO: 1201271 - RNA, 15 nt, Human
aaggcuaccuuugua

SEQ ID NO: 1201272 - RNA, 13 nt, Human
aaggcuaccuuug

SEQ ID NO: 1201273 - RNA, 19 nt, Human
aaggccccgcccaggcuua

SEQ ID NO: 1201274 - RNA, 16 nt, Human
aaggccccgcccaggc

SEQ ID NO: 1201275 - RNA, 14 nt, Human
aaggccccgcccag

SEQ ID NO: 1201276 - RNA, 19 nt, Human
aaggaugcccaaagaugca

SEQ ID NO: 1201277 - RNA, 14 nt, Human
aaggaugcccaaag

SEQ ID NO: 1201278 - RNA, 24 nt, Human
aaggaugcacagaguuguuacauu

SEQ ID NO: 1201279 - RNA, 18 nt, Human
aaggagauuuacaacugg

SEQ ID NO: 1201280 - RNA, 16 nt, Human
aaggaaacccagcucu

SEQ ID NO: 1201281 - RNA, 15 nt, Human
aaggaaacccagcuc

SEQ ID NO: 1201282 - RNA, 22 nt, Human
aaggauccugagccagauuuca

SEQ ID NO: 1201283 - RNA, 13 nt, Human
aaggauccugagc

SEQ ID NO: 1201284 - RNA, 12 nt, Human
aaggauccugag

SEQ ID NO: 1201285 - RNA, 11 nt, Human
aaggauccuga

SEQ ID NO: 1201286 - RNA, 20 nt, Human
aaggaggaagagaaaaaaua

SEQ ID NO: 1201287 - RNA, 13 nt, Human
aagucacacagug

SEQ ID NO: 1201288 - RNA, 19 nt, Human
aaguauucuuauuuaauga

SEQ ID NO: 1201289 - RNA, 18 nt, Human
aaguauucuuauuuaaug

SEQ ID NO: 1201290 - RNA, 21 nt, Human
aagucaagugaaaaaggagga

SEQ ID NO: 1201291 - RNA, 24 nt, Human
aagucacacaguauuacuucugcu

SEQ ID NO: 1201292 - RNA, 23 nt, Human
aaguacuucuccacccugcucuc

SEQ ID NO: 1201293 - RNA, 22 nt, Human
aaguacuucuccacccugcucu

SEQ ID NO: 1201294 - RNA, 21 nt, Human
aaguacuucuccacccugcuc

SEQ ID NO: 1201295 - RNA, 15 nt, Human
aaguacuggagaaaa

SEQ ID NO: 1201296 - RNA, 16 nt, Human
aaguacuauguaucaa

SEQ ID NO: 1201297 - RNA, 16 nt, Human
guuuuugucuuaaaaa

SEQ ID NO: 1201298 - RNA, 18 nt, Human
guuuuucuaggccugggg

SEQ ID NO: 1201299 - RNA, 19 nt, Human
aagucuuagauguauauau

SEQ ID NO: 1201300 - RNA, 18 nt, Human
aagucuuagauguauaua

SEQ ID NO: 1201301 - RNA, 18 nt, Human
guuuuacugcagcuuugu

SEQ ID NO: 1201302 - RNA, 16 nt, Human
guuuuacugcagcuuu

SEQ ID NO: 1201303 - RNA, 18 nt, Human
guuuuaaggaugcuugua

SEQ ID NO: 1201304 - RNA, 16 nt, Human
guuuuaagaggcaggg

SEQ ID NO: 1201305 - RNA, 14 nt, Human
guuuuaagaggcag

SEQ ID NO: 1201306 - RNA, 13 nt, Human
guuugcuaaguga

SEQ ID NO: 1201307 - RNA, 17 nt, Human
guuugccucugccucug

SEQ ID NO: 1201308 - RNA, 22 nt, Human
guuucugccgcagcccugcaga

SEQ ID NO: 1201309 - RNA, 22 nt, Human
guuucuaugacacaugcaaggu

SEQ ID NO: 1201310 - RNA, 16 nt, Human
aaggguaucuggugac

SEQ ID NO: 1201311 - RNA, 19 nt, Human
aaggguaucaggugcugcc

SEQ ID NO: 1201312 - RNA, 17 nt, Human
aaggggcaguggugguu

SEQ ID NO: 1201313 - RNA, 14 nt, Human
aaggggcaguggug

SEQ ID NO: 1201314 - RNA, 13 nt, Human
aagggccuggccu

SEQ ID NO: 1201315 - RNA, 14 nt, Human
aaggcugggggaag

SEQ ID NO: 1201316 - RNA, 15 nt, Human
aagggcccagagagg

SEQ ID NO: 1201317 - RNA, 15 nt, Human
aauaacuaaaaggua

SEQ ID NO: 1201318 - RNA, 12 nt, Human
aauaaauuauuu

SEQ ID NO: 1201319 - RNA, 22 nt, Human
aauaacauguaauuaaguacua

SEQ ID NO: 1201320 - RNA, 19 nt, Human
aauaacauguaauuaagua

SEQ ID NO: 1201321 - RNA, 12 nt, Human
aauaacauguaa

SEQ ID NO: 1201322 - RNA, 20 nt, Human
uaaaguguauuuuuuuacua

SEQ ID NO: 1201323 - RNA, 19 nt, Human
uaaaguguauuuuuuuacu

SEQ ID NO: 1201324 - RNA, 15 nt, Human
uaaaguguauuuuuu

SEQ ID NO: 1201325 - RNA, 14 nt, Human
uaaaguguauuuuu

SEQ ID NO: 1201326 - RNA, 13 nt, Human
uaaagucaggggu

SEQ ID NO: 1201327 - RNA, 14 nt, Human
aauaaaguaauuau

SEQ ID NO: 1201328 - RNA, 19 nt, Human
uaaaucuccaaaauaaaac

SEQ ID NO: 1201329 - RNA, 21 nt, Human
aauacaccacuacauucuguu

SEQ ID NO: 1201330 - RNA, 20 nt, Human
aauacaccacuacauucugu

SEQ ID NO: 1201331 - RNA, 18 nt, Human
aauacaccacuacauucu

SEQ ID NO: 1201332 - RNA, 16 nt, Human
aauacaccacuacauu

SEQ ID NO: 1201333 - RNA, 15 nt, Human
aauacaccacuacau

SEQ ID NO: 1201334 - RNA, 22 nt, Human
uaaaucuccaaaauaaaacuuu

SEQ ID NO: 1201335 - RNA, 21 nt, Human
uaaaucuccaaaauaaaacuu

SEQ ID NO: 1201336 - RNA, 20 nt, Human
uaaaucuccaaaauaaaacu

SEQ ID NO: 1201337 - RNA, 13 nt, Human
uaacaagccaccc

SEQ ID NO: 1201338 - RNA, 18 nt, Human
uaaaccgccaaggcuggg

SEQ ID NO: 1201339 - RNA, 16 nt, Human
uaaaccgccaaggcug

SEQ ID NO: 1201340 - RNA, 21 nt, Human
uaaaggcuaccuuuguauucu

SEQ ID NO: 1201341 - RNA, 19 nt, Human
uaaaggcuaccuuuguauu

SEQ ID NO: 1201342 - RNA, 14 nt, Human
aaguuaaauaaauc

SEQ ID NO: 1201343 - RNA, 12 nt, Human
aaguuaaauaaa

SEQ ID NO: 1201344 - RNA, 19 nt, Human
gugugguguuuccuggcac

SEQ ID NO: 1201345 - RNA, 15 nt, Human
gugugguguuuccug

SEQ ID NO: 1201346 - RNA, 20 nt, Human
gugugagucaccaagcccag

SEQ ID NO: 1201347 - RNA, 18 nt, Human
gugugagucaccaagccc

SEQ ID NO: 1201348 - RNA, 13 nt, Human
gugugagucacca

SEQ ID NO: 1201349 - RNA, 21 nt, Human
gugucuugcaauggcagccuu

SEQ ID NO: 1201350 - RNA, 20 nt, Human
gugucccaaaaagaaaggag

SEQ ID NO: 1201351 - RNA, 18 nt, Human
gugguuauggagagggug

SEQ ID NO: 1201352 - RNA, 19 nt, Human
gugguguuuccuggcacug

SEQ ID NO: 1201353 - RNA, 19 nt, Human
aagaguaggaagacuuugg

SEQ ID NO: 1201354 - RNA, 18 nt, Human
aagaguaggaagacuuug

SEQ ID NO: 1201355 - RNA, 16 nt, Human
aagaguaggaagacuu

SEQ ID NO: 1201356 - RNA, 20 nt, Human
aagaguaggaagacuuugga

SEQ ID NO: 1201357 - RNA, 22 nt, Human
aagauauuuugcuuugugauuu

SEQ ID NO: 1201358 - RNA, 20 nt, Human
aagauauuuugcuuugugau

SEQ ID NO: 1201359 - RNA, 17 nt, Human
aagauauuuugcuuugu

SEQ ID NO: 1201360 - RNA, 16 nt, Human
gugguguuuccuggca

SEQ ID NO: 1201361 - RNA, 15 nt, Human
gugguguuuccuggc

SEQ ID NO: 1201362 - RNA, 18 nt, Human
gugggauccuccaggugc

SEQ ID NO: 1201363 - RNA, 15 nt, Human
gugggauccuccagg

SEQ ID NO: 1201364 - RNA, 12 nt, Human
gugggagcugag

SEQ ID NO: 1201365 - RNA, 15 nt, Human
guggccucccaacuc

SEQ ID NO: 1201366 - RNA, 14 nt, Human
guggccucccaacu

SEQ ID NO: 1201367 - RNA, 13 nt, Human
guggccucccaac

SEQ ID NO: 1201368 - RNA, 16 nt, Human
aagacuguacaaagua

SEQ ID NO: 1201369 - RNA, 19 nt, Human
aagagauugugguuucauu

SEQ ID NO: 1201370 - RNA, 16 nt, Human
aagagauugugguuuc

SEQ ID NO: 1201371 - RNA, 16 nt, Human
aagagcccaggccucc

SEQ ID NO: 1201372 - RNA, 14 nt, Human
aagagcccaggccu

SEQ ID NO: 1201373 - RNA, 12 nt, Human
aagagcccaggc

SEQ ID NO: 1201374 - RNA, 17 nt, Human
aagacucauucuucugu

SEQ ID NO: 1201375 - RNA, 23 nt, Human
aagacgcugugcugcccugccca

SEQ ID NO: 1201376 - RNA, 22 nt, Human
aagacgcugugcugcccugccc

SEQ ID NO: 1201377 - RNA, 21 nt, Human
aagacgcugugcugcccugcc

SEQ ID NO: 1201378 - RNA, 18 nt, Human
guggcaccagcagccugg

SEQ ID NO: 1201379 - RNA, 14 nt, Human
guggcaccagcagc

SEQ ID NO: 1201380 - RNA, 13 nt, Human
guggcaccagcag

SEQ ID NO: 1201381 - RNA, 14 nt, Human
guggcagcugcggu

SEQ ID NO: 1201382 - RNA, 22 nt, Human
guggcagcucaccucucccuug

SEQ ID NO: 1201383 - RNA, 23 nt, Human
guggauuuaacagaaauguacag

SEQ ID NO: 1201384 - RNA, 21 nt, Human
guggauuuaacagaaauguac

SEQ ID NO: 1201385 - RNA, 19 nt, Human
guggcagcugcgguccacc

SEQ ID NO: 1201386 - RNA, 17 nt, Human
guggcagcugcggucca

SEQ ID NO: 1201387 - RNA, 24 nt, Human
guggacacagcucuucuccaggcu

SEQ ID NO: 1201388 - RNA, 17 nt, Human
guggacacagcucuucu

SEQ ID NO: 1201389 - RNA, 15 nt, Human
guggacacagcucuu

SEQ ID NO: 1201390 - RNA, 14 nt, Human
guggacacagcucu

SEQ ID NO: 1201391 - RNA, 21 nt, Human
gugcugcccugcccaccuggc

SEQ ID NO: 1201392 - RNA, 20 nt, Human
gugcugcccugcccaccugg

SEQ ID NO: 1201393 - RNA, 19 nt, Human
gugcugcccugcccaccug

SEQ ID NO: 1201394 - RNA, 22 nt, Human
gugcauuugaggucuguucuuu

SEQ ID NO: 1201395 - RNA, 21 nt, Human
gugcauuugaggucuguucuu

SEQ ID NO: 1201396 - RNA, 14 nt, Human
gugccaagcagagg

SEQ ID NO: 1201397 - RNA, 15 nt, Human
gugcauuuggugguu

SEQ ID NO: 1201398 - RNA, 18 nt, Human
gugcacguacacacacau

SEQ ID NO: 1201399 - RNA, 17 nt, Human
gugcacacaccagagcc

SEQ ID NO: 1201400 - RNA, 14 nt, Human
gugcacacaccaga

SEQ ID NO: 1201401 - RNA, 12 nt, Human
gugcacacacca

SEQ ID NO: 1201402 - RNA, 14 nt, Human
aacuuggcgcugcc

SEQ ID NO: 1201403 - RNA, 17 nt, Human
aacuuggcgcugccccu

SEQ ID NO: 1201404 - RNA, 23 nt, Human
aacuugguucccauuugcuccuu

SEQ ID NO: 1201405 - RNA, 15 nt, Human
gugccucugggacug

SEQ ID NO: 1201406 - RNA, 15 nt, Human
aagaagcucucuccu

SEQ ID NO: 1201407 - RNA, 14 nt, Human
aagaagcucucucc

SEQ ID NO: 1201408 - RNA, 17 nt, Human
aagaagcccaggaaagg

SEQ ID NO: 1201409 - RNA, 16 nt, Human
aagaagcccaggaaag

SEQ ID NO: 1201410 - RNA, 16 nt, Human
aagaaaauaccaagga

SEQ ID NO: 1201411 - RNA, 22 nt, Human
aagaaaaaggaugcacagaguu

SEQ ID NO: 1201412 - RNA, 20 nt, Human
aagaaaaaggaugcacagag

SEQ ID NO: 1201413 - RNA, 17 nt, Human
guccugcugcaguugcc

SEQ ID NO: 1201414 - RNA, 16 nt, Human
guccugcugcaguugc

SEQ ID NO: 1201415 - RNA, 13 nt, Human
guccugcugcagu

SEQ ID NO: 1201416 - RNA, 23 nt, Human
gucgcccagucuggaaugcagug

SEQ ID NO: 1201417 - RNA, 14 nt, Human
gucgaggacaggga

SEQ ID NO: 1201418 - RNA, 14 nt, Human
gucgcccagucugg

SEQ ID NO: 1201419 - RNA, 13 nt, Human
gucgcccagucug

SEQ ID NO: 1201420 - RNA, 16 nt, Human
aacauuuugucauaua

SEQ ID NO: 1201421 - RNA, 13 nt, Human
gucuccauguuug

SEQ ID NO: 1201422 - RNA, 18 nt, Human
aaccacaucuugcucugc

SEQ ID NO: 1201423 - RNA, 13 nt, Human
aaccacaucuugc

SEQ ID NO: 1201424 - RNA, 22 nt, Human
gucucaaacucuugaccucagg

SEQ ID NO: 1201425 - RNA, 15 nt, Human
gucuaugggacucaa

SEQ ID NO: 1201426 - RNA, 14 nt, Human
gucuaugggacuca

SEQ ID NO: 1201427 - RNA, 13 nt, Human
guccgagcuuuga

SEQ ID NO: 1201428 - RNA, 22 nt, Human
guccgaaagggacuuggaagcu

SEQ ID NO: 1201429 - RNA, 21 nt, Human
guccgaaagggacuuggaagc

SEQ ID NO: 1201430 - RNA, 13 nt, Human
gucccuuuuccuu

SEQ ID NO: 1201431 - RNA, 23 nt, Human
guccccuguuuguuucugaaagg

SEQ ID NO: 1201432 - RNA, 16 nt, Human
guccccgcacugggcu

SEQ ID NO: 1201433 - RNA, 15 nt, Human
guccccgcacugggc

SEQ ID NO: 1201434 - RNA, 18 nt, Human
gucccccugacaacacuc

SEQ ID NO: 1201435 - RNA, 13 nt, Human
gucccccugacaa

SEQ ID NO: 1201436 - RNA, 22 nt, Human
guagcucuaggagggcuggcaa

SEQ ID NO: 1201437 - RNA, 18 nt, Human
gucccaccuuggcugcag

SEQ ID NO: 1201438 - RNA, 17 nt, Human
gucccaccuuggcugca

SEQ ID NO: 1201439 - RNA, 20 nt, Human
gucccaccuuggcugcaggg

SEQ ID NO: 1201440 - RNA, 19 nt, Human
gucccaccuuggcugcagg

SEQ ID NO: 1201441 - RNA, 22 nt, Human
aacauguuuuucuucucccuca

SEQ ID NO: 1201442 - RNA, 14 nt, Human
aacaucaacaucuu

SEQ ID NO: 1201443 - RNA, 20 nt, Human
aacauacucccaucugugaa

SEQ ID NO: 1201444 - RNA, 18 nt, Human
aacauacucccaucugug

SEQ ID NO: 1201445 - RNA, 15 nt, Human
guccuacccacccuc

SEQ ID NO: 1201446 - RNA, 13 nt, Human
guccuacccaccc

SEQ ID NO: 1201447 - RNA, 19 nt, Human
aacagguuuuccugaagaa

SEQ ID NO: 1201448 - RNA, 15 nt, Human
gugagucgaggacag

SEQ ID NO: 1201449 - RNA, 20 nt, Human
gugaguccuggcaugggaau

SEQ ID NO: 1201450 - RNA, 17 nt, Human
gugaguccuggcauggg

SEQ ID NO: 1201451 - RNA, 21 nt, Human
gugaguacuacaguccuccca

SEQ ID NO: 1201452 - RNA, 19 nt, Human
gugaguacuacaguccucc

SEQ ID NO: 1201453 - RNA, 12 nt, Human
gugagagcuggg

SEQ ID NO: 1201454 - RNA, 12 nt, Human
gugaccccaggu

SEQ ID NO: 1201455 - RNA, 16 nt, Human
gugagaggggaacaga

SEQ ID NO: 1201456 - RNA, 13 nt, Human
gugagagcugggu

SEQ ID NO: 1201457 - RNA, 21 nt, Human
gugagcacuaaggugugcucu

SEQ ID NO: 1201458 - RNA, 17 nt, Human
gugaguacuacaguccu

SEQ ID NO: 1201459 - RNA, 18 nt, Human
gugaccauguuuuguuua

SEQ ID NO: 1201460 - RNA, 21 nt, Human
gugaccagcaccaucucuccu

SEQ ID NO: 1201461 - RNA, 18 nt, Human
gugaccagcaccaucucu

SEQ ID NO: 1201462 - RNA, 17 nt, Human
gugaccaaugaugguca

SEQ ID NO: 1201463 - RNA, 14 nt, Human
gugacaugucuuuu

SEQ ID NO: 1201464 - RNA, 23 nt, Human
gugacagaggcagccccauucug

SEQ ID NO: 1201465 - RNA, 19 nt, Human
gugacagaggcagccccau

SEQ ID NO: 1201466 - RNA, 18 nt, Human
gugacagaggcagcccca

SEQ ID NO: 1201467 - RNA, 16 nt, Human
gugacagaggcagccc

SEQ ID NO: 1201468 - RNA, 14 nt, Human
gugaagugaagaca

SEQ ID NO: 1201469 - RNA, 23 nt, Human
gugaagacaaugacuuacuguac

SEQ ID NO: 1201470 - RNA, 23 nt, Human
aacguggcugcuucaaggauccu

SEQ ID NO: 1201471 - RNA, 16 nt, Human
gucuuuguacagacaa

SEQ ID NO: 1201472 - RNA, 15 nt, Human
gucuuuguacagaca

SEQ ID NO: 1201473 - RNA, 16 nt, Human
gucuucaguaagccgu

SEQ ID NO: 1201474 - RNA, 19 nt, Human
aaccugauugugucucuug

SEQ ID NO: 1201475 - RNA, 18 nt, Human
aaccugauugugucucuu

SEQ ID NO: 1201476 - RNA, 13 nt, Human
gucugacccacug

SEQ ID NO: 1201477 - RNA, 23 nt, Human
gucugacaggcaaugcuggcugu

SEQ ID NO: 1201478 - RNA, 22 nt, Human
gucugacaggcaaugcuggcug

SEQ ID NO: 1201479 - RNA, 21 nt, Human
gucugacaggcaaugcuggcu

SEQ ID NO: 1201480 - RNA, 20 nt, Human
gucucuugguccugcugcag

SEQ ID NO: 1201481 - RNA, 19 nt, Human
gucucuugguccugcugca

SEQ ID NO: 1201482 - RNA, 18 nt, Human
gucucuugguccugcugc

SEQ ID NO: 1201483 - RNA, 17 nt, Human
gucucuugguccugcug

SEQ ID NO: 1201484 - RNA, 20 nt, Human
gucucuuuaaugucacaggc

SEQ ID NO: 1201485 - RNA, 19 nt, Human
gucucuuuaaugucacagg

SEQ ID NO: 1201486 - RNA, 18 nt, Human
gucucuuuaaugucacag

SEQ ID NO: 1201487 - RNA, 23 nt, Human
gucucuuuaaugucacaggcagg

SEQ ID NO: 1201488 - RNA, 22 nt, Human
gucucuuuaaugucacaggcag

SEQ ID NO: 1201489 - RNA, 19 nt, Human
gucugaaggcuggguucug

SEQ ID NO: 1201490 - RNA, 22 nt, Human
cacccccacccaagggccuggc

SEQ ID NO: 1201491 - RNA, 17 nt, Human
caccccggccaccugcg

SEQ ID NO: 1201492 - RNA, 16 nt, Human
caccccggccaccugc

SEQ ID NO: 1201493 - RNA, 15 nt, Human
caccccggccaccug

SEQ ID NO: 1201494 - RNA, 14 nt, Human
caccccggccaccu

SEQ ID NO: 1201495 - RNA, 18 nt, Human
cacccaagggccuggccu

SEQ ID NO: 1201496 - RNA, 17 nt, Human
cacccaagggccuggcc

SEQ ID NO: 1201497 - RNA, 23 nt, Human
cacccaagggccuggccugagcu

SEQ ID NO: 1201498 - RNA, 21 nt, Human
cacccaagggccuggccugag

SEQ ID NO: 1201499 - RNA, 20 nt, Human
cacccaagggccuggccuga

SEQ ID NO: 1201500 - RNA, 19 nt, Human
cacccaagggccuggccug

SEQ ID NO: 1201501 - RNA, 13 nt, Human
caccccagcccca

SEQ ID NO: 1201502 - RNA, 17 nt, Human
cacccaccucagccucc

SEQ ID NO: 1201503 - RNA, 16 nt, Human
cacccaccucagccuc

SEQ ID NO: 1201504 - RNA, 14 nt, Human
cacccaccucagcc

SEQ ID NO: 1201505 - RNA, 13 nt, Human
cacccaccucagc

SEQ ID NO: 1201506 - RNA, 12 nt, Human
cacccaccucag

SEQ ID NO: 1201507 - RNA, 22 nt, Human
cacccaccaucaugucuggcua

SEQ ID NO: 1201508 - RNA, 20 nt, Human
cacccaccaucaugucuggc

SEQ ID NO: 1201509 - RNA, 12 nt, Human
caaaggaagcac

SEQ ID NO: 1201510 - RNA, 16 nt, Human
caaagcuuguuaagau

SEQ ID NO: 1201511 - RNA, 18 nt, Human
caaagcuaggccuggcca

SEQ ID NO: 1201512 - RNA, 17 nt, Human
caaagcuaggccuggcc

SEQ ID NO: 1201513 - RNA, 16 nt, Human
caaagcuaggccuggc

SEQ ID NO: 1201514 - RNA, 22 nt, Human
caaagccaaagcuaggccuggc

SEQ ID NO: 1201515 - RNA, 21 nt, Human
caaagccaaagcuaggccugg

SEQ ID NO: 1201516 - RNA, 20 nt, Human
caaagccaaagcuaggccug

SEQ ID NO: 1201517 - RNA, 18 nt, Human
auuuuuuuacuaauagac

SEQ ID NO: 1201518 - RNA, 16 nt, Human
caaaaaaugcuugcuu

SEQ ID NO: 1201519 - RNA, 21 nt, Human
caaaggaugcccaaagaugca

SEQ ID NO: 1201520 - RNA, 22 nt, Human
caaauucugcuugcuugcuuuu

SEQ ID NO: 1201521 - RNA, 13 nt, Human
caaaucagcugcu

SEQ ID NO: 1201522 - RNA, 16 nt, Human
caaaucagcugcuacu

SEQ ID NO: 1201523 - RNA, 20 nt, Human
caacucuccuccagagucag

SEQ ID NO: 1201524 - RNA, 15 nt, Human
caacccucaucacca

SEQ ID NO: 1201525 - RNA, 12 nt, Human
caacccucauca

SEQ ID NO: 1201526 - RNA, 16 nt, Human
caaccugauugugucu

SEQ ID NO: 1201527 - RNA, 19 nt, Human
caacucuccuccagaguca

SEQ ID NO: 1201528 - RNA, 22 nt, Human
caacaucuuggucagauuugaa

SEQ ID NO: 1201529 - RNA, 19 nt, Human
caacagguuuuccugaaga

SEQ ID NO: 1201530 - RNA, 15 nt, Human
caacagguuuuccug

SEQ ID NO: 1201531 - RNA, 18 nt, Human
caacaggguuuuuuucca

SEQ ID NO: 1201532 - RNA, 24 nt, Human
caacaggcugggcuucaguggcag

SEQ ID NO: 1201533 - RNA, 23 nt, Human
caacaggcugggcuucaguggca

SEQ ID NO: 1201534 - RNA, 19 nt, Human
caaccccuucgcuccugug

SEQ ID NO: 1201535 - RNA, 18 nt, Human
caaccccuucgcuccugu

SEQ ID NO: 1201536 - RNA, 21 nt, Human
caaccccuucgcuccuguguc

SEQ ID NO: 1201537 - RNA, 22 nt, Human
caaccccuucgcuccugugucu

SEQ ID NO: 1201538 - RNA, 22 nt, Human
caagccaccaacauacucccau

SEQ ID NO: 1201539 - RNA, 23 nt, Human
caaggugggaggauugcuugagc

SEQ ID NO: 1201540 - RNA, 12 nt, Human
caaggugggagg

SEQ ID NO: 1201541 - RNA, 19 nt, Human
caagggccuggccugagcu

SEQ ID NO: 1201542 - RNA, 19 nt, Human
caaggauugcuacuguccu

SEQ ID NO: 1201543 - RNA, 15 nt, Human
caaggauugcuacug

SEQ ID NO: 1201544 - RNA, 22 nt, Human
caagugugguagagugugccug

SEQ ID NO: 1201545 - RNA, 22 nt, Human
caagugauucuccugccucagc

SEQ ID NO: 1201546 - RNA, 18 nt, Human
caagugauucuccugccu

SEQ ID NO: 1201547 - RNA, 17 nt, Human
caagugauucuccugcc

SEQ ID NO: 1201548 - RNA, 16 nt, Human
caagugauucuccugc

SEQ ID NO: 1201549 - RNA, 19 nt, Human
caagugaaaaaggaggaag

SEQ ID NO: 1201550 - RNA, 18 nt, Human
caagcgugagccacugca

SEQ ID NO: 1201551 - RNA, 17 nt, Human
caagcgugagccacugc

SEQ ID NO: 1201552 - RNA, 13 nt, Human
caaggauccugag

SEQ ID NO: 1201553 - RNA, 21 nt, Human
caaggaugaucuaggaagacu

SEQ ID NO: 1201554 - RNA, 21 nt, Human
caagccaccaacauacuccca

SEQ ID NO: 1201555 - RNA, 16 nt, Human
caagcgugagccacug

SEQ ID NO: 1201556 - RNA, 16 nt, Human
cacauuccugaugcuu

SEQ ID NO: 1201557 - RNA, 15 nt, Human
cacaugugcacaugc

SEQ ID NO: 1201558 - RNA, 14 nt, Human
cacaugugcacaug

SEQ ID NO: 1201559 - RNA, 17 nt, Human
cacaugugcacaugcac

SEQ ID NO: 1201560 - RNA, 19 nt, Human
cacaugccucucucaggcc

SEQ ID NO: 1201561 - RNA, 18 nt, Human
cacaugccucucucaggc

SEQ ID NO: 1201562 - RNA, 17 nt, Human
cacaugccucucucagg

SEQ ID NO: 1201563 - RNA, 19 nt, Human
cacaucagcacgauuucug

SEQ ID NO: 1201564 - RNA, 18 nt, Human
cacaucagcacgauuucu

SEQ ID NO: 1201565 - RNA, 14 nt, Human
cacauaucugucau

SEQ ID NO: 1201566 - RNA, 12 nt, Human
cacauaucuguc

SEQ ID NO: 1201567 - RNA, 15 nt, Human
caccacacccagccc

SEQ ID NO: 1201568 - RNA, 13 nt, Human
caccacacccagc

SEQ ID NO: 1201569 - RNA, 17 nt, Human
caccacacccagcccac

SEQ ID NO: 1201570 - RNA, 20 nt, Human
caccacuacauucuguuaau

SEQ ID NO: 1201571 - RNA, 19 nt, Human
caccacuacauucuguuaa

SEQ ID NO: 1201572 - RNA, 18 nt, Human
caccacuacauucuguua

SEQ ID NO: 1201573 - RNA, 17 nt, Human
caccacuacauucuguu

SEQ ID NO: 1201574 - RNA, 16 nt, Human
caccacuacauucugu

SEQ ID NO: 1201575 - RNA, 14 nt, Human
caccaccucuuugg

SEQ ID NO: 1201576 - RNA, 19 nt, Human
caccacaugugcacaugca

SEQ ID NO: 1201577 - RNA, 18 nt, Human
caccacaugugcacaugc

SEQ ID NO: 1201578 - RNA, 15 nt, Human
caccacaugugcaca

SEQ ID NO: 1201579 - RNA, 21 nt, Human
cacagugagucgaggacaggg

SEQ ID NO: 1201580 - RNA, 19 nt, Human
cacaggcccggcuccaggc

SEQ ID NO: 1201581 - RNA, 18 nt, Human
cacaggcccggcuccagg

SEQ ID NO: 1201582 - RNA, 17 nt, Human
cacaggcccggcuccag

SEQ ID NO: 1201583 - RNA, 16 nt, Human
cacaggcccggcucca

SEQ ID NO: 1201584 - RNA, 10 nt, Human
cacaggcagg

SEQ ID NO: 1201585 - RNA, 17 nt, Human
cacaggaucagucugau

SEQ ID NO: 1201586 - RNA, 16 nt, Human
cacaggaucagucuga

SEQ ID NO: 1201587 - RNA, 15 nt, Human
cacaggaucagucug

SEQ ID NO: 1201588 - RNA, 12 nt, Human
cacaggaucagu

SEQ ID NO: 1201589 - RNA, 17 nt, Human
cacauacacacacacgc

SEQ ID NO: 1201590 - RNA, 20 nt, Human
cacagugagucgaggacagg

SEQ ID NO: 1201591 - RNA, 19 nt, Human
cacagugagucgaggacag

SEQ ID NO: 1201592 - RNA, 23 nt, Human
cacaggcccggcuccaggcuccu

SEQ ID NO: 1201593 - RNA, 20 nt, Human
cacaggcccggcuccaggcu

SEQ ID NO: 1201594 - RNA, 18 nt, Human
cacagugagucgaggaca

SEQ ID NO: 1201595 - RNA, 23 nt, Human
cacagaugggugcuuggaggaag

SEQ ID NO: 1201596 - RNA, 18 nt, Human
cacagaugggugcuugga

SEQ ID NO: 1201597 - RNA, 14 nt, Human
cacagaugggugcu

SEQ ID NO: 1201598 - RNA, 21 nt, Human
cacagaguuguuacauuuuua

SEQ ID NO: 1201599 - RNA, 20 nt, Human
cacagaguuguuacauuuuu

SEQ ID NO: 1201600 - RNA, 20 nt, Human
cacagaugggugcuuggagg

SEQ ID NO: 1201601 - RNA, 17 nt, Human
cacagaguuguuacauu

SEQ ID NO: 1201602 - RNA, 16 nt, Human
cacagaguuguuacau

SEQ ID NO: 1201603 - RNA, 12 nt, Human
cacagagaaagu

SEQ ID NO: 1201604 - RNA, 21 nt, Human
cacacuugacaucaacugcau

SEQ ID NO: 1201605 - RNA, 12 nt, Human
cacacagcucug

SEQ ID NO: 1201606 - RNA, 21 nt, Human
cacacagaggcugccucuccc

SEQ ID NO: 1201607 - RNA, 19 nt, Human
cacacagaggcugccucuc

SEQ ID NO: 1201608 - RNA, 15 nt, Human
cacacaccagagccc

SEQ ID NO: 1201609 - RNA, 14 nt, Human
cacacaccagagcc

SEQ ID NO: 1201610 - RNA, 13 nt, Human
cacacccagccca

SEQ ID NO: 1201611 - RNA, 15 nt, Human
cacaccagagcccac

SEQ ID NO: 1201612 - RNA, 13 nt, Human
cacaccagagccc

SEQ ID NO: 1201613 - RNA, 12 nt, Human
cacaccagagcc

SEQ ID NO: 1201614 - RNA, 17 nt, Human
cacaccgggcacucaga

SEQ ID NO: 1201615 - RNA, 19 nt, Human
caaugugaaaagaaaaaug

SEQ ID NO: 1201616 - RNA, 23 nt, Human
caaugcacuuuguucuggcucuu

SEQ ID NO: 1201617 - RNA, 20 nt, Human
caaugcaaaccaucauugaa

SEQ ID NO: 1201618 - RNA, 19 nt, Human
caaugcaaaccaucauuga

SEQ ID NO: 1201619 - RNA, 18 nt, Human
caaugcaaaccaucauug

SEQ ID NO: 1201620 - RNA, 17 nt, Human
caaugcaaaccaucauu

SEQ ID NO: 1201621 - RNA, 13 nt, Human
caaugaccuuuca

SEQ ID NO: 1201622 - RNA, 21 nt, Human
caauaggaaaaacugauuuuu

SEQ ID NO: 1201623 - RNA, 20 nt, Human
caauaggaaaaacugauuuu

SEQ ID NO: 1201624 - RNA, 18 nt, Human
cacaaaaguuucucuuuu

SEQ ID NO: 1201625 - RNA, 16 nt, Human
cacaaaaguuucucuu

SEQ ID NO: 1201626 - RNA, 15 nt, Human
uuggauuguccccga

SEQ ID NO: 1201627 - RNA, 21 nt, Human
uuggacccugaggcccagagg

SEQ ID NO: 1201628 - RNA, 19 nt, Human
uuggacccugaggcccaga

SEQ ID NO: 1201629 - RNA, 18 nt, Human
uuggacccugaggcccag

SEQ ID NO: 1201630 - RNA, 11 nt, Human
uuggaaggaac

SEQ ID NO: 1201631 - RNA, 19 nt, Human
uuggaagcuccgcuuucua

SEQ ID NO: 1201632 - RNA, 18 nt, Human
uugcugucccuuuuccuu

SEQ ID NO: 1201633 - RNA, 16 nt, Human
uugcugucccuuuucc

SEQ ID NO: 1201634 - RNA, 16 nt, Human
uugcugcuugaggcaa

SEQ ID NO: 1201635 - RNA, 14 nt, Human
uugcugcuugaggc

SEQ ID NO: 1201636 - RNA, 23 nt, Human
uugcccacgcuggagugcaguga

SEQ ID NO: 1201637 - RNA, 21 nt, Human
uugccauguuggccaggcugg

SEQ ID NO: 1201638 - RNA, 20 nt, Human
uugccauguuggccaggcug

SEQ ID NO: 1201639 - RNA, 20 nt, Human
uugucuaugggacucaaugc

SEQ ID NO: 1201640 - RNA, 14 nt, Human
uugucuaugggacu

SEQ ID NO: 1201641 - RNA, 22 nt, Human
uugucaaaguggugagaggcau

SEQ ID NO: 1201642 - RNA, 23 nt, Human
uuggcuucacggaagagccuugc

SEQ ID NO: 1201643 - RNA, 20 nt, Human
uuggucugacccacugcuuu

SEQ ID NO: 1201644 - RNA, 20 nt, Human
uugaacuuugaccucugcag

SEQ ID NO: 1201645 - RNA, 18 nt, Human
uugaacuuugaccucugc

SEQ ID NO: 1201646 - RNA, 17 nt, Human
uugaacuuugaccucug

SEQ ID NO: 1201647 - RNA, 16 nt, Human
uugaaugaugccauga

SEQ ID NO: 1201648 - RNA, 12 nt, Human
uugaaugaugcc

SEQ ID NO: 1201649 - RNA, 15 nt, Human
uugaacuuugaccuc

SEQ ID NO: 1201650 - RNA, 21 nt, Human
uucuuuccugaggcugggcuc

SEQ ID NO: 1201651 - RNA, 16 nt, Human
uucuggcuaugcauuu

SEQ ID NO: 1201652 - RNA, 20 nt, Human
uucuggcagaguugaagaca

SEQ ID NO: 1201653 - RNA, 14 nt, Human
uucuuguguguuua

SEQ ID NO: 1201654 - RNA, 17 nt, Human
uucuuagggaaggauac

SEQ ID NO: 1201655 - RNA, 13 nt, Human
uucuucagagacu

SEQ ID NO: 1201656 - RNA, 16 nt, Human
uugauaugcuuauaca

SEQ ID NO: 1201657 - RNA, 16 nt, Human
uugauucagcucugca

SEQ ID NO: 1201658 - RNA, 23 nt, Human
uugauucagacagcugccuggga

SEQ ID NO: 1201659 - RNA, 21 nt, Human
uugauucagacagcugccugg

SEQ ID NO: 1201660 - RNA, 17 nt, Human
uugauucagacagcugc

SEQ ID NO: 1201661 - RNA, 16 nt, Human
uugagccuugaacuuu

SEQ ID NO: 1201662 - RNA, 15 nt, Human
uugagccuugaacuu

SEQ ID NO: 1201663 - RNA, 14 nt, Human
uugagccuugaacu

SEQ ID NO: 1201664 - RNA, 14 nt, Human
uugaauuguaagga

SEQ ID NO: 1201665 - RNA, 19 nt, Human
uugagccuugaacuuugac

SEQ ID NO: 1201666 - RNA, 19 nt, Human
uugccauguuggccaggcu

SEQ ID NO: 1201667 - RNA, 18 nt, Human
uugccauguuggccaggc

SEQ ID NO: 1201668 - RNA, 17 nt, Human
uugccauguuggccagg

SEQ ID NO: 1201669 - RNA, 16 nt, Human
uugccauguuggccag

SEQ ID NO: 1201670 - RNA, 13 nt, Human
uugccagucaccc

SEQ ID NO: 1201671 - RNA, 23 nt, Human
uugcagacaggcaagcaccuccu

SEQ ID NO: 1201672 - RNA, 17 nt, Human
uugauucauaaugacuu

SEQ ID NO: 1201673 - RNA, 13 nt, Human
uugauucauaaug

SEQ ID NO: 1201674 - RNA, 24 nt, Human
uugucuuuggacccugaggcccag

SEQ ID NO: 1201675 - RNA, 20 nt, Human
uugucuuuggacccugaggc

SEQ ID NO: 1201676 - RNA, 15 nt, Human
uugucuuuggacccu

SEQ ID NO: 1201677 - RNA, 20 nt, Human
uuguuuggggaugagaaagg

SEQ ID NO: 1201678 - RNA, 13 nt, Human
uuuaacagaaaug

SEQ ID NO: 1201679 - RNA, 13 nt, Human
uuuaaaagauaca

SEQ ID NO: 1201680 - RNA, 18 nt, Human
uuuaacagaaauguacag

SEQ ID NO: 1201681 - RNA, 15 nt, Human
uuuaacagaaaugua

SEQ ID NO: 1201682 - RNA, 14 nt, Human
uuuaacagaaaugu

SEQ ID NO: 1201683 - RNA, 19 nt, Human
uuuagacccuauugcugcu

SEQ ID NO: 1201684 - RNA, 22 nt, Human
uuuagacccuauugcugcuuga

SEQ ID NO: 1201685 - RNA, 20 nt, Human
uuuauacauaaacaagacca

SEQ ID NO: 1201686 - RNA, 12 nt, Human
uuuauacauaaa

SEQ ID NO: 1201687 - RNA, 16 nt, Human
uuuaucgucacugcuu

SEQ ID NO: 1201688 - RNA, 17 nt, Human
uuucagccaagaauucu

SEQ ID NO: 1201689 - RNA, 14 nt, Human
uuucugaaauaaca

SEQ ID NO: 1201690 - RNA, 23 nt, Human
uuucuacucgaguuacagacaaa

SEQ ID NO: 1201691 - RNA, 22 nt, Human
uuucuacccagcgagcccuggu

SEQ ID NO: 1201692 - RNA, 18 nt, Human
uuucuacccagcgagccc

SEQ ID NO: 1201693 - RNA, 15 nt, Human
uuucuacccagcgag

SEQ ID NO: 1201694 - RNA, 19 nt, Human
uuucuaaaucuccaaaaua

SEQ ID NO: 1201695 - RNA, 19 nt, Human
uuuccuggcacugcuucca

SEQ ID NO: 1201696 - RNA, 23 nt, Human
uuuccuggcacugcuuccaguga

SEQ ID NO: 1201697 - RNA, 14 nt, Human
uuugauccaagcug

SEQ ID NO: 1201698 - RNA, 19 nt, Human
uuuggacccugaggcccag

SEQ ID NO: 1201699 - RNA, 15 nt, Human
uuuggacccugaggc

SEQ ID NO: 1201700 - RNA, 14 nt, Human
uuugcuugaaagaa

SEQ ID NO: 1201701 - RNA, 16 nt, Human
uuugcuugaaagaaaa

SEQ ID NO: 1201702 - RNA, 15 nt, Human
uuuguauucucuccu

SEQ ID NO: 1201703 - RNA, 17 nt, Human
uuugaggucuguucuuu

SEQ ID NO: 1201704 - RNA, 17 nt, Human
uuugagaucagccuggg

SEQ ID NO: 1201705 - RNA, 16 nt, Human
uuugagaucagccugg

SEQ ID NO: 1201706 - RNA, 19 nt, Human
uuucuuguguguuuauugu

SEQ ID NO: 1201707 - RNA, 16 nt, Human
uguuuagauaauacac

SEQ ID NO: 1201708 - RNA, 20 nt, Human
uguuuagauaauacaccacu

SEQ ID NO: 1201709 - RNA, 15 nt, Human
uguuucaaacuuuac

SEQ ID NO: 1201710 - RNA, 13 nt, Human
uguuugugauuga

SEQ ID NO: 1201711 - RNA, 21 nt, Human
uuaaaauaccagccaguaaau

SEQ ID NO: 1201712 - RNA, 17 nt, Human
uuaaaagauacaguuac

SEQ ID NO: 1201713 - RNA, 14 nt, Human
uuaaaagauacagu

SEQ ID NO: 1201714 - RNA, 19 nt, Human
uguuuuaaggaugcuugua

SEQ ID NO: 1201715 - RNA, 18 nt, Human
uguuuuaaggaugcuugu

SEQ ID NO: 1201716 - RNA, 22 nt, Human
uguuuuaagaggcagggucuca

SEQ ID NO: 1201717 - RNA, 18 nt, Human
uuaacuuuuauaaacuuu

SEQ ID NO: 1201718 - RNA, 17 nt, Human
uuaacuuuuauaaacuu

SEQ ID NO: 1201719 - RNA, 16 nt, Human
uuaacuuuuauaaacu

SEQ ID NO: 1201720 - RNA, 15 nt, Human
uuaacuuuuauaaac

SEQ ID NO: 1201721 - RNA, 16 nt, Human
uuaacuucacauauug

SEQ ID NO: 1201722 - RNA, 17 nt, Human
uuaaccacuucagcuga

SEQ ID NO: 1201723 - RNA, 22 nt, Human
uuaauuaaaacacaacaucuuu

SEQ ID NO: 1201724 - RNA, 21 nt, Human
uuacaagcgugagccacugca

SEQ ID NO: 1201725 - RNA, 20 nt, Human
uuacaagcgugagccacugc

SEQ ID NO: 1201726 - RNA, 22 nt, Human
uuaauauugauaugcuuauaca

SEQ ID NO: 1201727 - RNA, 18 nt, Human
uuaauauugauaugcuua

SEQ ID NO: 1201728 - RNA, 17 nt, Human
uuaagcuguuacugucu

SEQ ID NO: 1201729 - RNA, 16 nt, Human
uuacuaauagacaauu

SEQ ID NO: 1201730 - RNA, 14 nt, Human
uuacuaaguuuuua

SEQ ID NO: 1201731 - RNA, 13 nt, Human
uuacuaaguuuuu

SEQ ID NO: 1201732 - RNA, 21 nt, Human
uuacuuaaaccgccaaggcug

SEQ ID NO: 1201733 - RNA, 19 nt, Human
uuacuauggcccuggccua

SEQ ID NO: 1201734 - RNA, 23 nt, Human
uuacuucuuauacauuugauaaa

SEQ ID NO: 1201735 - RNA, 12 nt, Human
uuacuucugcua

SEQ ID NO: 1201736 - RNA, 11 nt, Human
uuacuucugcu

SEQ ID NO: 1201737 - RNA, 18 nt, Human
uuacuuagguguggggga

SEQ ID NO: 1201738 - RNA, 18 nt, Human
uuagacagucccugccaa

SEQ ID NO: 1201739 - RNA, 17 nt, Human
uuagacagucccugcca

SEQ ID NO: 1201740 - RNA, 16 nt, Human
uuagacagucccugcc

SEQ ID NO: 1201741 - RNA, 15 nt, Human
uuagacagucccugc

SEQ ID NO: 1201742 - RNA, 14 nt, Human
uuacuuuguguuca

SEQ ID NO: 1201743 - RNA, 18 nt, Human
uuacuuuaaaaggagcca

SEQ ID NO: 1201744 - RNA, 17 nt, Human
uuacuuuaaaaggagcc

SEQ ID NO: 1201745 - RNA, 16 nt, Human
uuaguaugaggcauuu

SEQ ID NO: 1201746 - RNA, 18 nt, Human
uuaguaugaggcauuugu

SEQ ID NO: 1201747 - RNA, 22 nt, Human
uuagauaauacaccacuacauu

SEQ ID NO: 1201748 - RNA, 14 nt, Human
uuagaguugauacu

SEQ ID NO: 1201749 - RNA, 16 nt, Human
uuauggaacacucuga

SEQ ID NO: 1201750 - RNA, 22 nt, Human
uuaugcaugaaguaauaugcac

SEQ ID NO: 1201751 - RNA, 16 nt, Human
uuaugcaugaaguaau

SEQ ID NO: 1201752 - RNA, 16 nt, Human
uuaucuagauacugua

SEQ ID NO: 1201753 - RNA, 14 nt, Human
uuaguuccuugagu

SEQ ID NO: 1201754 - RNA, 16 nt, Human
uuaguuccucauuagc

SEQ ID NO: 1201755 - RNA, 17 nt, Human
uuaucuagauacuguau

SEQ ID NO: 1201756 - RNA, 15 nt, Human
uuauugcccacgcug

SEQ ID NO: 1201757 - RNA, 11 nt, Human
uuauucugcuc

SEQ ID NO: 1201758 - RNA, 20 nt, Human
uucaauaggaaaaacugauu

SEQ ID NO: 1201759 - RNA, 18 nt, Human
uucaauaggaaaaacuga

SEQ ID NO: 1201760 - RNA, 15 nt, Human
uucaauaggaaaaac

SEQ ID NO: 1201761 - RNA, 13 nt, Human
uucaauaggaaaa

SEQ ID NO: 1201762 - RNA, 15 nt, Human
uucacgugguccuaa

SEQ ID NO: 1201763 - RNA, 13 nt, Human
uucacucuccuug

SEQ ID NO: 1201764 - RNA, 18 nt, Human
uuauugucaaagugguga

SEQ ID NO: 1201765 - RNA, 17 nt, Human
uuauugucaaaguggug

SEQ ID NO: 1201766 - RNA, 15 nt, Human
uuccaaauucugcuu

SEQ ID NO: 1201767 - RNA, 21 nt, Human
uucaucuugaauuguaaggaa

SEQ ID NO: 1201768 - RNA, 15 nt, Human
uucaggaagcucagg

SEQ ID NO: 1201769 - RNA, 13 nt, Human
uucaggaagcuca

SEQ ID NO: 1201770 - RNA, 11 nt, Human
uucaggaagcu

SEQ ID NO: 1201771 - RNA, 16 nt, Human
uucauuuccugugucu

SEQ ID NO: 1201772 - RNA, 15 nt, Human
uucauuuccuguguc

SEQ ID NO: 1201773 - RNA, 20 nt, Human
uucccucccuuccucuuucc

SEQ ID NO: 1201774 - RNA, 17 nt, Human
uucccucccuuccucuu

SEQ ID NO: 1201775 - RNA, 11 nt, Human
uucccucccuu

SEQ ID NO: 1201776 - RNA, 20 nt, Human
uuccccaggaggccagccuu

SEQ ID NO: 1201777 - RNA, 19 nt, Human
uuccccaggaggccagccu

SEQ ID NO: 1201778 - RNA, 18 nt, Human
uuccccaggaggccagcc

SEQ ID NO: 1201779 - RNA, 17 nt, Human
uuccccaggaggccagc

SEQ ID NO: 1201780 - RNA, 21 nt, Human
uuccccaggaggccagccuug

SEQ ID NO: 1201781 - RNA, 16 nt, Human
uuccccaggaggccag

SEQ ID NO: 1201782 - RNA, 15 nt, Human
uuccccaggaggcca

SEQ ID NO: 1201783 - RNA, 16 nt, Human
uucccauuugcuccuu

SEQ ID NO: 1201784 - RNA, 13 nt, Human
uuccucauuagca

SEQ ID NO: 1201785 - RNA, 22 nt, Human
uucccuuugacgccaucccagc

SEQ ID NO: 1201786 - RNA, 21 nt, Human
uucccuuugacgccaucccag

SEQ ID NO: 1201787 - RNA, 20 nt, Human
uucccuuugacgccauccca

SEQ ID NO: 1201788 - RNA, 20 nt, Human
uucgggaggucgaggcagga

SEQ ID NO: 1201789 - RNA, 17 nt, Human
uucuaaagcugccagcc

SEQ ID NO: 1201790 - RNA, 13 nt, Human
uucuaaagcugcc

SEQ ID NO: 1201791 - RNA, 20 nt, Human
uuccuugaguugauucagcu

SEQ ID NO: 1201792 - RNA, 19 nt, Human
uuccuggcacugcuuccag

SEQ ID NO: 1201793 - RNA, 14 nt, Human
uuccuggcacugcu

SEQ ID NO: 1201794 - RNA, 19 nt, Human
uuccugaugcuucuucaga

SEQ ID NO: 1201795 - RNA, 18 nt, Human
uuccugaugcuucuucag

SEQ ID NO: 1201796 - RNA, 15 nt, Human
uuccugaugcuucuu

SEQ ID NO: 1201797 - RNA, 17 nt, Human
uuccugccaggcauggu

SEQ ID NO: 1201798 - RNA, 23 nt, Human
uuccugaugcuucuucagagacu

SEQ ID NO: 1201799 - RNA, 16 nt, Human
ugggggaguggccaca

SEQ ID NO: 1201800 - RNA, 18 nt, Human
uggguacuuguggacaca

SEQ ID NO: 1201801 - RNA, 17 nt, Human
uggguacuuguggacac

SEQ ID NO: 1201802 - RNA, 21 nt, Human
uggggccaguuggucccccuu

SEQ ID NO: 1201803 - RNA, 20 nt, Human
uggggccaguuggucccccu

SEQ ID NO: 1201804 - RNA, 23 nt, Human
uggggaugagaaagguugaagca

SEQ ID NO: 1201805 - RNA, 15 nt, Human
uggggaugagaaagg

SEQ ID NO: 1201806 - RNA, 16 nt, Human
ugggagugggcccaau

SEQ ID NO: 1201807 - RNA, 14 nt, Human
ugggagugggccca

SEQ ID NO: 1201808 - RNA, 20 nt, Human
uggcugggggccucagugcc

SEQ ID NO: 1201809 - RNA, 17 nt, Human
uggcugggggccucagu

SEQ ID NO: 1201810 - RNA, 16 nt, Human
uggcugggggccucag

SEQ ID NO: 1201811 - RNA, 14 nt, Human
ugggauccuccagg

SEQ ID NO: 1201812 - RNA, 13 nt, Human
ugggauccuccag

SEQ ID NO: 1201813 - RNA, 12 nt, Human
ugggauccucca

SEQ ID NO: 1201814 - RNA, 22 nt, Human
ugggauuacaagcgugagccac

SEQ ID NO: 1201815 - RNA, 22 nt, Human
ugggcagagcagagaccauccc

SEQ ID NO: 1201816 - RNA, 23 nt, Human
ugggcagagcagagaccaucccu

SEQ ID NO: 1201817 - RNA, 19 nt, Human
ugguccuaaucuucugaac

SEQ ID NO: 1201818 - RNA, 17 nt, Human
ugguccuaaucuucuga

SEQ ID NO: 1201819 - RNA, 23 nt, Human
ugguccugcugcaguugccaguc

SEQ ID NO: 1201820 - RNA, 15 nt, Human
ugguccugcugcagu

SEQ ID NO: 1201821 - RNA, 13 nt, Human
ugguccugcugca

SEQ ID NO: 1201822 - RNA, 23 nt, Human
uggucccccuuccauggacuuug

SEQ ID NO: 1201823 - RNA, 18 nt, Human
uggucccccuuccaugga

SEQ ID NO: 1201824 - RNA, 16 nt, Human
uggucccccuuccaug

SEQ ID NO: 1201825 - RNA, 15 nt, Human
uggucccccuuccau

SEQ ID NO: 1201826 - RNA, 14 nt, Human
uggucccccuucca

SEQ ID NO: 1201827 - RNA, 19 nt, Human
uggugacuuuccucuuugg

SEQ ID NO: 1201828 - RNA, 22 nt, Human
uggugaccucugccugaaguca

SEQ ID NO: 1201829 - RNA, 17 nt, Human
uggugaccucugccuga

SEQ ID NO: 1201830 - RNA, 16 nt, Human
uggugaccucugccug

SEQ ID NO: 1201831 - RNA, 15 nt, Human
uggugaccucugccu

SEQ ID NO: 1201832 - RNA, 21 nt, Human
uggugcaaugaccuuucaaua

SEQ ID NO: 1201833 - RNA, 14 nt, Human
uggugaccucugcc

SEQ ID NO: 1201834 - RNA, 13 nt, Human
uggugaccucugc

SEQ ID NO: 1201835 - RNA, 19 nt, Human
uggucuacacugugcugag

SEQ ID NO: 1201836 - RNA, 18 nt, Human
uggucuacacugugcuga

SEQ ID NO: 1201837 - RNA, 17 nt, Human
uggucuacacugugcug

SEQ ID NO: 1201838 - RNA, 16 nt, Human
uggucuacacugugcu

SEQ ID NO: 1201839 - RNA, 15 nt, Human
uggucuacacugugc

SEQ ID NO: 1201840 - RNA, 17 nt, Human
uggucggaaaacaugcu

SEQ ID NO: 1201841 - RNA, 14 nt, Human
uggucggaaaacau

SEQ ID NO: 1201842 - RNA, 23 nt, Human
uggaggaaggaaacccagcucug

SEQ ID NO: 1201843 - RNA, 21 nt, Human
uggaggaaggaaacccagcuc

SEQ ID NO: 1201844 - RNA, 12 nt, Human
uggcaaaaaggc

SEQ ID NO: 1201845 - RNA, 16 nt, Human
uggcaaaaaggcagga

SEQ ID NO: 1201846 - RNA, 16 nt, Human
uggcacuauaauguaa

SEQ ID NO: 1201847 - RNA, 15 nt, Human
uggcacuauaaugua

SEQ ID NO: 1201848 - RNA, 23 nt, Human
uggcgcugccccuggcagccccu

SEQ ID NO: 1201849 - RNA, 16 nt, Human
uggcgcugccccuggc

SEQ ID NO: 1201850 - RNA, 23 nt, Human
uggcgcagcauauucaggaagcu

SEQ ID NO: 1201851 - RNA, 22 nt, Human
uggcgcagcauauucaggaagc

SEQ ID NO: 1201852 - RNA, 16 nt, Human
uggcugcuucaaggau

SEQ ID NO: 1201853 - RNA, 15 nt, Human
uggcugcuucaagga

SEQ ID NO: 1201854 - RNA, 11 nt, Human
uggcugcuuca

SEQ ID NO: 1201855 - RNA, 20 nt, Human
uggccccugcccggcugcgg

SEQ ID NO: 1201856 - RNA, 16 nt, Human
uggccccugcccggcu

SEQ ID NO: 1201857 - RNA, 15 nt, Human
uggccccugcccggc

SEQ ID NO: 1201858 - RNA, 13 nt, Human
uggccaggcuggu

SEQ ID NO: 1201859 - RNA, 15 nt, Human
uggccaggcuggucu

SEQ ID NO: 1201860 - RNA, 20 nt, Human
uggccagaugcaccagcccu

SEQ ID NO: 1201861 - RNA, 19 nt, Human
uggccagaugcaccagccc

SEQ ID NO: 1201862 - RNA, 18 nt, Human
uggccagaugcaccagcc

SEQ ID NO: 1201863 - RNA, 17 nt, Human
uggccagaugcaccagc

SEQ ID NO: 1201864 - RNA, 19 nt, Human
uggcagaguugaagacaga

SEQ ID NO: 1201865 - RNA, 17 nt, Human
uggcagaguugaagaca

SEQ ID NO: 1201866 - RNA, 21 nt, Human
uggcagaguggauucuugaac

SEQ ID NO: 1201867 - RNA, 15 nt, Human
uggcagaguugaaga

SEQ ID NO: 1201868 - RNA, 22 nt, Human
ugcuacuguccuacccacccuc

SEQ ID NO: 1201869 - RNA, 21 nt, Human
ugcuacuguccuacccacccu

SEQ ID NO: 1201870 - RNA, 17 nt, Human
ugcggacagccacggcc

SEQ ID NO: 1201871 - RNA, 22 nt, Human
ugcuaggaacacuccuucacag

SEQ ID NO: 1201872 - RNA, 21 nt, Human
ugcuaggaacacuccuucaca

SEQ ID NO: 1201873 - RNA, 23 nt, Human
ugcucuccgaccagacaccuuga

SEQ ID NO: 1201874 - RNA, 18 nt, Human
ugcuguaacuuucugaaa

SEQ ID NO: 1201875 - RNA, 13 nt, Human
ugcuggguguggc

SEQ ID NO: 1201876 - RNA, 17 nt, Human
ugcugggcuugucugua

SEQ ID NO: 1201877 - RNA, 23 nt, Human
ugcugcauuuaaaagauacaguu

SEQ ID NO: 1201878 - RNA, 19 nt, Human
ugcugcauuuaaaagauac

SEQ ID NO: 1201879 - RNA, 18 nt, Human
ugcugcauuuaaaagaua

SEQ ID NO: 1201880 - RNA, 17 nt, Human
ugcugcauuuaaaagau

SEQ ID NO: 1201881 - RNA, 19 nt, Human
ugcugcuugaggcaacuca

SEQ ID NO: 1201882 - RNA, 12 nt, Human
ugcugcuugagg

SEQ ID NO: 1201883 - RNA, 15 nt, Human
ugcccugcccaccug

SEQ ID NO: 1201884 - RNA, 20 nt, Human
ugcccugcccaccuggccuc

SEQ ID NO: 1201885 - RNA, 16 nt, Human
ugcccugcccaccugg

SEQ ID NO: 1201886 - RNA, 21 nt, Human
ugcccugcccaccuggccucu

SEQ ID NO: 1201887 - RNA, 23 nt, Human
ugcccugugaguacuacaguccu

SEQ ID NO: 1201888 - RNA, 15 nt, Human
ugccucaagagaagg

SEQ ID NO: 1201889 - RNA, 14 nt, Human
ugccucaagagaag

SEQ ID NO: 1201890 - RNA, 20 nt, Human
ugcccaggcuggcgugcagu

SEQ ID NO: 1201891 - RNA, 19 nt, Human
ugcccaggcuggcgugcag

SEQ ID NO: 1201892 - RNA, 18 nt, Human
ugcccaggcuggcgugca

SEQ ID NO: 1201893 - RNA, 14 nt, Human
ugcccggcugcgga

SEQ ID NO: 1201894 - RNA, 12 nt, Human
ugcccggcugcg

SEQ ID NO: 1201895 - RNA, 17 nt, Human
ugccccuggcagccccu

SEQ ID NO: 1201896 - RNA, 16 nt, Human
ugccccuggcagcccc

SEQ ID NO: 1201897 - RNA, 14 nt, Human
ugccaggcauggug

SEQ ID NO: 1201898 - RNA, 22 nt, Human
ugccaggaagccagcaggcucu

SEQ ID NO: 1201899 - RNA, 20 nt, Human
ugccaggaagccagcaggcu

SEQ ID NO: 1201900 - RNA, 23 nt, Human
ugcauuuggugguuucagaaaug

SEQ ID NO: 1201901 - RNA, 21 nt, Human
ugcauuuggugguuucagaaa

SEQ ID NO: 1201902 - RNA, 16 nt, Human
ugcaguugccagucac

SEQ ID NO: 1201903 - RNA, 13 nt, Human
ugcagggaguccg

SEQ ID NO: 1201904 - RNA, 21 nt, Human
ugcaguggugcgaucuggguu

SEQ ID NO: 1201905 - RNA, 21 nt, Human
ugcaguuacacuaaaagguga

SEQ ID NO: 1201906 - RNA, 22 nt, Human
ugacagagugagacucugucuc

SEQ ID NO: 1201907 - RNA, 19 nt, Human
ugacagagugagacucugu

SEQ ID NO: 1201908 - RNA, 17 nt, Human
ugacagagugagacucu

SEQ ID NO: 1201909 - RNA, 14 nt, Human
ugacagagugagac

SEQ ID NO: 1201910 - RNA, 23 nt, Human
ugacagaggcagccccauucugc

SEQ ID NO: 1201911 - RNA, 18 nt, Human
ugacagaggcagccccau

SEQ ID NO: 1201912 - RNA, 17 nt, Human
ugacagaggcagcccca

SEQ ID NO: 1201913 - RNA, 16 nt, Human
ugacagaggcagcccc

SEQ ID NO: 1201914 - RNA, 15 nt, Human
ugacagaggcagccc

SEQ ID NO: 1201915 - RNA, 14 nt, Human
ugacagaggcagcc

SEQ ID NO: 1201916 - RNA, 23 nt, Human
ugacagacacaggcccggcucca

SEQ ID NO: 1201917 - RNA, 20 nt, Human
ugacagacacaggcccggcu

SEQ ID NO: 1201918 - RNA, 18 nt, Human
ugacaaggauugcuacug

SEQ ID NO: 1201919 - RNA, 20 nt, Human
ugaccgugaggccagagaca

SEQ ID NO: 1201920 - RNA, 16 nt, Human
ugaccgugaggccaga

SEQ ID NO: 1201921 - RNA, 14 nt, Human
ugaccgugaggcca

SEQ ID NO: 1201922 - RNA, 13 nt, Human
ugaccgugaggcc

SEQ ID NO: 1201923 - RNA, 19 nt, Human
ugaccauucuccaccugcc

SEQ ID NO: 1201924 - RNA, 18 nt, Human
ugaccauucuccaccugc

SEQ ID NO: 1201925 - RNA, 17 nt, Human
ugaccauucuccaccug

SEQ ID NO: 1201926 - RNA, 16 nt, Human
ugaccauucuccaccu

SEQ ID NO: 1201927 - RNA, 20 nt, Human
ugaccagcaccaucucuccu

SEQ ID NO: 1201928 - RNA, 19 nt, Human
ugaccagcaccaucucucc

SEQ ID NO: 1201929 - RNA, 15 nt, Human
ugacaugucuuuucu

SEQ ID NO: 1201930 - RNA, 13 nt, Human
ugacaugucuuuu

SEQ ID NO: 1201931 - RNA, 17 nt, Human
ugaacuccuggccucaa

SEQ ID NO: 1201932 - RNA, 22 nt, Human
ugaaggacauugcggacagcca

SEQ ID NO: 1201933 - RNA, 20 nt, Human
ugaaggacauugcggacagc

SEQ ID NO: 1201934 - RNA, 19 nt, Human
ugaaggacauugcggacag

SEQ ID NO: 1201935 - RNA, 16 nt, Human
ugaaggccccgcccag

SEQ ID NO: 1201936 - RNA, 15 nt, Human
ugaaggccccgccca

SEQ ID NO: 1201937 - RNA, 17 nt, Human
ugaaggccccgcccagg

SEQ ID NO: 1201938 - RNA, 23 nt, Human
ugaaugaugauccuaggcauuug

SEQ ID NO: 1201939 - RNA, 17 nt, Human
ucuuuccaaaguacacu

SEQ ID NO: 1201940 - RNA, 14 nt, Human
ucuuuccaaaguac

SEQ ID NO: 1201941 - RNA, 13 nt, Human
ucuuuccaaagua

SEQ ID NO: 1201942 - RNA, 21 nt, Human
ucuuucagccaagaauucuua

SEQ ID NO: 1201943 - RNA, 20 nt, Human
ucuuucagccaagaauucuu

SEQ ID NO: 1201944 - RNA, 19 nt, Human
ucuuucagccaagaauucu

SEQ ID NO: 1201945 - RNA, 16 nt, Human
ucuuucagccaagaau

SEQ ID NO: 1201946 - RNA, 17 nt, Human
ucuuuggacacucacac

SEQ ID NO: 1201947 - RNA, 23 nt, Human
ucuuucacccuuuucuguuugcu

SEQ ID NO: 1201948 - RNA, 21 nt, Human
ucuuguguguuuauugucaaa

SEQ ID NO: 1201949 - RNA, 16 nt, Human
ucuuguguguuuauug

SEQ ID NO: 1201950 - RNA, 15 nt, Human
ucuugcaugaggcua

SEQ ID NO: 1201951 - RNA, 16 nt, Human
ucucccuucauccuuc

SEQ ID NO: 1201952 - RNA, 21 nt, Human
ugaaccaccacacccagccca

SEQ ID NO: 1201953 - RNA, 20 nt, Human
ugaaccaccacacccagccc

SEQ ID NO: 1201954 - RNA, 17 nt, Human
ugaaccaccacacccag

SEQ ID NO: 1201955 - RNA, 23 nt, Human
ugaaccacaucuugcucugcuga

SEQ ID NO: 1201956 - RNA, 19 nt, Human
ugaaccacaucuugcucug

SEQ ID NO: 1201957 - RNA, 22 nt, Human
ugaaccaagaacuuuccaggaa

SEQ ID NO: 1201958 - RNA, 14 nt, Human
ugaaacauuuuguc

SEQ ID NO: 1201959 - RNA, 21 nt, Human
ugaaaauuuugauguuuuaag

SEQ ID NO: 1201960 - RNA, 19 nt, Human
ugaaaauuuugauguuuua

SEQ ID NO: 1201961 - RNA, 13 nt, Human
ugaaaauuuugau

SEQ ID NO: 1201962 - RNA, 15 nt, Human
ugaaagggcccagag

SEQ ID NO: 1201963 - RNA, 13 nt, Human
ugaaagggcccag

SEQ ID NO: 1201964 - RNA, 23 nt, Human
ugaaagggaguauuacaaaaaca

SEQ ID NO: 1201965 - RNA, 18 nt, Human
ugaaagcccugagcuuuc

SEQ ID NO: 1201966 - RNA, 13 nt, Human
ugagcugggauga

SEQ ID NO: 1201967 - RNA, 23 nt, Human
ugaggcauuuguuugaacugaua

SEQ ID NO: 1201968 - RNA, 23 nt, Human
ugaggcuagugugguguuuccug

SEQ ID NO: 1201969 - RNA, 17 nt, Human
ugaggcuaguguggugu

SEQ ID NO: 1201970 - RNA, 21 nt, Human
ugaggcauuuguuugaacuga

SEQ ID NO: 1201971 - RNA, 20 nt, Human
ugaggcauuuguuugaacug

SEQ ID NO: 1201972 - RNA, 19 nt, Human
ugaggcauuuguuugaacu

SEQ ID NO: 1201973 - RNA, 12 nt, Human
ugaggcauuugu

SEQ ID NO: 1201974 - RNA, 13 nt, Human
ugaggugggagga

SEQ ID NO: 1201975 - RNA, 12 nt, Human
ugaggugggagg

SEQ ID NO: 1201976 - RNA, 17 nt, Human
ugagggaacagagaggu

SEQ ID NO: 1201977 - RNA, 15 nt, Human
ugaggcucugcccuu

SEQ ID NO: 1201978 - RNA, 14 nt, Human
ugaggcucugcccu

SEQ ID NO: 1201979 - RNA, 13 nt, Human
ugaggcucugccc

SEQ ID NO: 1201980 - RNA, 20 nt, Human
ugaguugauagcacagaccc

SEQ ID NO: 1201981 - RNA, 16 nt, Human
ugaguugauagcacag

SEQ ID NO: 1201982 - RNA, 14 nt, Human
ugagugagcaugcc

SEQ ID NO: 1201983 - RNA, 21 nt, Human
ugaguugauagcacagacccu

SEQ ID NO: 1201984 - RNA, 18 nt, Human
ugagucugaaggcugggu

SEQ ID NO: 1201985 - RNA, 17 nt, Human
ugagucugaaggcuggg

SEQ ID NO: 1201986 - RNA, 15 nt, Human
ugagucugaaggcug

SEQ ID NO: 1201987 - RNA, 13 nt, Human
ugagucugaaggc

SEQ ID NO: 1201988 - RNA, 19 nt, Human
ugagucgaggacagggagg

SEQ ID NO: 1201989 - RNA, 19 nt, Human
ugaguccagaaguuugaga

SEQ ID NO: 1201990 - RNA, 21 nt, Human
ugaggugggaggaucucuuga

SEQ ID NO: 1201991 - RNA, 10 nt, Human
ugagccuggc

SEQ ID NO: 1201992 - RNA, 21 nt, Human
ugagccucagcauccuggcac

SEQ ID NO: 1201993 - RNA, 18 nt, Human
ugagccucagcauccugg

SEQ ID NO: 1201994 - RNA, 22 nt, Human
ugagccucagcauccuggcacc

SEQ ID NO: 1201995 - RNA, 17 nt, Human
ugagccucagcauccug

SEQ ID NO: 1201996 - RNA, 21 nt, Human
ugagccgagaucacgccacug

SEQ ID NO: 1201997 - RNA, 19 nt, Human
ugagccgagaucacgccac

SEQ ID NO: 1201998 - RNA, 21 nt, Human
ugagcaucaggccaggcccuc

SEQ ID NO: 1201999 - RNA, 20 nt, Human
ugagcaucaggccaggcccu

SEQ ID NO: 1202000 - RNA, 19 nt, Human
ugagcaucaggccaggccc

SEQ ID NO: 1202001 - RNA, 18 nt, Human
ugagcaucaggccaggcc

SEQ ID NO: 1202002 - RNA, 19 nt, Human
ugagcagggcucagcgggg

SEQ ID NO: 1202003 - RNA, 17 nt, Human
ugagcagggcucagcgg

SEQ ID NO: 1202004 - RNA, 16 nt, Human
ugagcagggcucagcg

SEQ ID NO: 1202005 - RNA, 15 nt, Human
ugagcagggcucagc

SEQ ID NO: 1202006 - RNA, 14 nt, Human
ugagcagggcucag

SEQ ID NO: 1202007 - RNA, 13 nt, Human
ugagcagggcuca

SEQ ID NO: 1202008 - RNA, 15 nt, Human
ugagaucagccuggg

SEQ ID NO: 1202009 - RNA, 14 nt, Human
ugagaucagccugg

SEQ ID NO: 1202010 - RNA, 15 nt, Human
ugagaucaaaacggu

SEQ ID NO: 1202011 - RNA, 23 nt, Human
ugagacucgcgacaaugcaaacc

SEQ ID NO: 1202012 - RNA, 22 nt, Human
ugagacucgcgacaaugcaaac

SEQ ID NO: 1202013 - RNA, 21 nt, Human
ugagacucgcgacaaugcaaa

SEQ ID NO: 1202014 - RNA, 20 nt, Human
ugagacucgcgacaaugcaa

SEQ ID NO: 1202015 - RNA, 19 nt, Human
ugagacucgcgacaaugca

SEQ ID NO: 1202016 - RNA, 21 nt, Human
ugaccucaggugauccaccca

SEQ ID NO: 1202017 - RNA, 20 nt, Human
ugaccucaggugauccaccc

SEQ ID NO: 1202018 - RNA, 21 nt, Human
ugauucuccugccucagccuc

SEQ ID NO: 1202019 - RNA, 23 nt, Human
ugauucagacagcugccugggau

SEQ ID NO: 1202020 - RNA, 21 nt, Human
ugauucagacagcugccuggg

SEQ ID NO: 1202021 - RNA, 20 nt, Human
ugauucagacagcugccugg

SEQ ID NO: 1202022 - RNA, 19 nt, Human
ugauucagacagcugccug

SEQ ID NO: 1202023 - RNA, 18 nt, Human
ugauucagacagcugccu

SEQ ID NO: 1202024 - RNA, 16 nt, Human
ugauugugucucuugg

SEQ ID NO: 1202025 - RNA, 21 nt, Human
ugauuggaggggggagguggg

SEQ ID NO: 1202026 - RNA, 13 nt, Human
ugauuggaggggg

SEQ ID NO: 1202027 - RNA, 20 nt, Human
ugauguucuuucacccuuuu

SEQ ID NO: 1202028 - RNA, 20 nt, Human
ugauucaacagguuuuccug

SEQ ID NO: 1202029 - RNA, 16 nt, Human
ugauucagacagcugc

SEQ ID NO: 1202030 - RNA, 15 nt, Human
ugauucagacagcug

SEQ ID NO: 1202031 - RNA, 14 nt, Human
ugauucagacagcu

SEQ ID NO: 1202032 - RNA, 13 nt, Human
ugauucagacagc

SEQ ID NO: 1202033 - RNA, 16 nt, Human
ugauguguuaucucuu

SEQ ID NO: 1202034 - RNA, 18 nt, Human
ugaugcuucuucagagac

SEQ ID NO: 1202035 - RNA, 17 nt, Human
ugaugcuucuucagaga

SEQ ID NO: 1202036 - RNA, 16 nt, Human
ugaugcuucuucagag

SEQ ID NO: 1202037 - RNA, 18 nt, Human
ugaucuuugcagacaggc

SEQ ID NO: 1202038 - RNA, 16 nt, Human
ugaucuuugcagacag

SEQ ID NO: 1202039 - RNA, 17 nt, Human
ugauccaagcugguccc

SEQ ID NO: 1202040 - RNA, 15 nt, Human
ugauccaagcugguc

SEQ ID NO: 1202041 - RNA, 14 nt, Human
ugauccaagcuggu

SEQ ID NO: 1202042 - RNA, 13 nt, Human
ugauccaagcugg

SEQ ID NO: 1202043 - RNA, 14 nt, Human
ugauagcacagacc

SEQ ID NO: 1202044 - RNA, 13 nt, Human
ugauagcacagac

SEQ ID NO: 1202045 - RNA, 20 nt, Human
ugauaagaaccuuuugagug

SEQ ID NO: 1202046 - RNA, 17 nt, Human
ugaucucucgugauuga

SEQ ID NO: 1202047 - RNA, 19 nt, Human
ugauccacccaccucagcc

SEQ ID NO: 1202048 - RNA, 18 nt, Human
ugauccacccaccucagc

SEQ ID NO: 1202049 - RNA, 17 nt, Human
ugauccacccaccucag

SEQ ID NO: 1202050 - RNA, 20 nt, Human
ugaucuucuuuauaauucua

SEQ ID NO: 1202051 - RNA, 23 nt, Human
ucucccucagucuggcccuuccu

SEQ ID NO: 1202052 - RNA, 18 nt, Human
ucucccucagucuggccc

SEQ ID NO: 1202053 - RNA, 13 nt, Human
ucucccccagccc

SEQ ID NO: 1202054 - RNA, 12 nt, Human
ucucccccagcc

SEQ ID NO: 1202055 - RNA, 11 nt, Human
ucuccaggcug

SEQ ID NO: 1202056 - RNA, 22 nt, Human
ucuccagccccuggaugcagcc

SEQ ID NO: 1202057 - RNA, 18 nt, Human
ucuccagccccuggaugc

SEQ ID NO: 1202058 - RNA, 16 nt, Human
ucuccagccccuggau

SEQ ID NO: 1202059 - RNA, 15 nt, Human
ucuccagccccugga

SEQ ID NO: 1202060 - RNA, 14 nt, Human
ucuccagccccugg

SEQ ID NO: 1202061 - RNA, 13 nt, Human
ucuccagccccug

SEQ ID NO: 1202062 - RNA, 12 nt, Human
ucuccagccccu

SEQ ID NO: 1202063 - RNA, 18 nt, Human
ucucauacucaccucacc

SEQ ID NO: 1202064 - RNA, 16 nt, Human
ucucauacucaccuca

SEQ ID NO: 1202065 - RNA, 23 nt, Human
ucuaugggacucaaugcacugac

SEQ ID NO: 1202066 - RNA, 19 nt, Human
ucuaugggacucaaugcac

SEQ ID NO: 1202067 - RNA, 13 nt, Human
ucuaugggacuca

SEQ ID NO: 1202068 - RNA, 12 nt, Human
ucuaugggacuc

SEQ ID NO: 1202069 - RNA, 16 nt, Human
ucuccaccugccaggg

SEQ ID NO: 1202070 - RNA, 15 nt, Human
ucuccaccugccagg

SEQ ID NO: 1202071 - RNA, 14 nt, Human
ucuccaccugccag

SEQ ID NO: 1202072 - RNA, 19 nt, Human
ucuccaccugccagggaca

SEQ ID NO: 1202073 - RNA, 17 nt, Human
ucuccaccugccaggga

SEQ ID NO: 1202074 - RNA, 22 nt, Human
ucuccaccugccagggacagag

SEQ ID NO: 1202075 - RNA, 16 nt, Human
ucuccacccugcucuc

SEQ ID NO: 1202076 - RNA, 14 nt, Human
ucuccacccugcuc

SEQ ID NO: 1202077 - RNA, 17 nt, Human
ucuccacccugcucucc

SEQ ID NO: 1202078 - RNA, 13 nt, Human
ucuccacccugcu

SEQ ID NO: 1202079 - RNA, 14 nt, Human
ucuaccuuccugca

SEQ ID NO: 1202080 - RNA, 16 nt, Human
ucuacagaggccaugg

SEQ ID NO: 1202081 - RNA, 15 nt, Human
ucuacagaggccaug

SEQ ID NO: 1202082 - RNA, 21 nt, Human
ucuaggaagacuuuggaaaga

SEQ ID NO: 1202083 - RNA, 19 nt, Human
ucuaggaagacuuuggaaa

SEQ ID NO: 1202084 - RNA, 16 nt, Human
ucuaggaagacuuugg

SEQ ID NO: 1202085 - RNA, 15 nt, Human
ucuaggaagacuuug

SEQ ID NO: 1202086 - RNA, 17 nt, Human
ucuaugacacaugcaag

SEQ ID NO: 1202087 - RNA, 14 nt, Human
ucuaugacacaugc

SEQ ID NO: 1202088 - RNA, 13 nt, Human
ucgugacaacacu

SEQ ID NO: 1202089 - RNA, 20 nt, Human
ucuaaaggcuaccuuuguau

SEQ ID NO: 1202090 - RNA, 19 nt, Human
ucuaaaggcuaccuuugua

SEQ ID NO: 1202091 - RNA, 18 nt, Human
ucuaaaggcuaccuuugu

SEQ ID NO: 1202092 - RNA, 13 nt, Human
uccuguagcccua

SEQ ID NO: 1202093 - RNA, 11 nt, Human
uccuguagccc

SEQ ID NO: 1202094 - RNA, 12 nt, Human
uccuggccucaa

SEQ ID NO: 1202095 - RNA, 17 nt, Human
uccuggcacugcuucca

SEQ ID NO: 1202096 - RNA, 16 nt, Human
uccuggcacugcuucc

SEQ ID NO: 1202097 - RNA, 13 nt, Human
uccuggcacugcu

SEQ ID NO: 1202098 - RNA, 23 nt, Human
uccuggcacccggccccugcugg

SEQ ID NO: 1202099 - RNA, 14 nt, Human
uccuggaguucugg

SEQ ID NO: 1202100 - RNA, 20 nt, Human
uccugcccuuaccugccagg

SEQ ID NO: 1202101 - RNA, 17 nt, Human
uccugcccuuaccugcc

SEQ ID NO: 1202102 - RNA, 14 nt, Human
uccugccaggcaug

SEQ ID NO: 1202103 - RNA, 13 nt, Human
uccugccaggcau

SEQ ID NO: 1202104 - RNA, 23 nt, Human
uccuauauuguuuucaguguaca

SEQ ID NO: 1202105 - RNA, 12 nt, Human
uccuaguuccac

SEQ ID NO: 1202106 - RNA, 13 nt, Human
uccucccaccuca

SEQ ID NO: 1202107 - RNA, 12 nt, Human
uccucccaccuc

SEQ ID NO: 1202108 - RNA, 10 nt, Human
uccuccaggu

SEQ ID NO: 1202109 - RNA, 18 nt, Human
uccucauuagcauuuugc

SEQ ID NO: 1202110 - RNA, 21 nt, Human
uccuaagcuauucaguaauaa

SEQ ID NO: 1202111 - RNA, 20 nt, Human
uccuaagcuauucaguaaua

SEQ ID NO: 1202112 - RNA, 20 nt, Human
uccgcuuucuacccagcgag

SEQ ID NO: 1202113 - RNA, 18 nt, Human
uccgcuuucuacccagcg

SEQ ID NO: 1202114 - RNA, 16 nt, Human
uccgcuuucuacccag

SEQ ID NO: 1202115 - RNA, 14 nt, Human
uccgccucuugggu

SEQ ID NO: 1202116 - RNA, 16 nt, Human
ucccuuccucuuucca

SEQ ID NO: 1202117 - RNA, 15 nt, Human
ucccuuccucuuucc

SEQ ID NO: 1202118 - RNA, 21 nt, Human
ucccccuuccauggacuuugu

SEQ ID NO: 1202119 - RNA, 15 nt, Human
ucccccuuccaugga

SEQ ID NO: 1202120 - RNA, 21 nt, Human
uccacuuucuagccagaggag

SEQ ID NO: 1202121 - RNA, 20 nt, Human
uccacuuucuagccagagga

SEQ ID NO: 1202122 - RNA, 16 nt, Human
uccaaaguacacuguu

SEQ ID NO: 1202123 - RNA, 14 nt, Human
uccaaaguacacug

SEQ ID NO: 1202124 - RNA, 20 nt, Human
uccaggggugggacacccug

SEQ ID NO: 1202125 - RNA, 19 nt, Human
uccaggggugggacacccu

SEQ ID NO: 1202126 - RNA, 15 nt, Human
uccaggagcagccac

SEQ ID NO: 1202127 - RNA, 14 nt, Human
uccaggagcagcca

SEQ ID NO: 1202128 - RNA, 13 nt, Human
uccaggagcagcc

SEQ ID NO: 1202129 - RNA, 12 nt, Human
uccaggagcagc

SEQ ID NO: 1202130 - RNA, 13 nt, Human
uccauggacuuug

SEQ ID NO: 1202131 - RNA, 15 nt, Human
uccauagagagcaag

SEQ ID NO: 1202132 - RNA, 14 nt, Human
uccauagagagcaa

SEQ ID NO: 1202133 - RNA, 20 nt, Human
uccagguuuaagcuguuacu

SEQ ID NO: 1202134 - RNA, 22 nt, Human
uccaggggugggacacccugug

SEQ ID NO: 1202135 - RNA, 22 nt, Human
ucccccagccccauccucugua

SEQ ID NO: 1202136 - RNA, 21 nt, Human
ucccccagccccauccucugu

SEQ ID NO: 1202137 - RNA, 20 nt, Human
ucccccagccccauccucug

SEQ ID NO: 1202138 - RNA, 17 nt, Human
uccccaggaggccagcc

SEQ ID NO: 1202139 - RNA, 17 nt, Human
ucccccagccccauccu

SEQ ID NO: 1202140 - RNA, 16 nt, Human
uccccaggaggccagc

SEQ ID NO: 1202141 - RNA, 15 nt, Human
uccccaggaggccag

SEQ ID NO: 1202142 - RNA, 14 nt, Human
uccccaggaggcca

SEQ ID NO: 1202143 - RNA, 22 nt, Human
uccccagcaagugagagcuggg

SEQ ID NO: 1202144 - RNA, 21 nt, Human
uccccagcaagugagagcugg

SEQ ID NO: 1202145 - RNA, 20 nt, Human
uccccagcaagugagagcug

SEQ ID NO: 1202146 - RNA, 23 nt, Human
uccccagauugcaacaggcuggg

SEQ ID NO: 1202147 - RNA, 22 nt, Human
uccccagauugcaacaggcugg

SEQ ID NO: 1202148 - RNA, 20 nt, Human
uccccagauugcaacaggcu

SEQ ID NO: 1202149 - RNA, 19 nt, Human
uccccagauugcaacaggc

SEQ ID NO: 1202150 - RNA, 18 nt, Human
uccccagauugcaacagg

SEQ ID NO: 1202151 - RNA, 13 nt, Human
uccccagauugca

SEQ ID NO: 1202152 - RNA, 20 nt, Human
ucccaugagccucagcaucc

SEQ ID NO: 1202153 - RNA, 18 nt, Human
ucccaccuuggcugcagg

SEQ ID NO: 1202154 - RNA, 17 nt, Human
ucccaccuuggcugcag

SEQ ID NO: 1202155 - RNA, 16 nt, Human
ucccaccuuggcugca

SEQ ID NO: 1202156 - RNA, 13 nt, Human
ucccaccuuggcu

SEQ ID NO: 1202157 - RNA, 22 nt, Human
ucccaccucucucacuccuuga

SEQ ID NO: 1202158 - RNA, 20 nt, Human
uccaugugggcuaguugggc

SEQ ID NO: 1202159 - RNA, 24 nt, Human
ucccaggcauuccccaggaggcca

SEQ ID NO: 1202160 - RNA, 23 nt, Human
ucccagcugugcucuggacaggc

SEQ ID NO: 1202161 - RNA, 22 nt, Human
ucccagcugugcucuggacagg

SEQ ID NO: 1202162 - RNA, 21 nt, Human
ucccagcugugcucuggacag

SEQ ID NO: 1202163 - RNA, 19 nt, Human
ucccaugagccucagcauc

SEQ ID NO: 1202164 - RNA, 18 nt, Human
ucccaugagccucagcau

SEQ ID NO: 1202165 - RNA, 15 nt, Human
ucccaucuuccaagg

SEQ ID NO: 1202166 - RNA, 18 nt, Human
ucauccacugugccaugu

SEQ ID NO: 1202167 - RNA, 17 nt, Human
ucauccacugugccaug

SEQ ID NO: 1202168 - RNA, 14 nt, Human
ucauccacugugcc

SEQ ID NO: 1202169 - RNA, 16 nt, Human
ucagugccaaaaacaa

SEQ ID NO: 1202170 - RNA, 20 nt, Human
ucaguguacauggaauaaca

SEQ ID NO: 1202171 - RNA, 13 nt, Human
uccaaaguacacu

SEQ ID NO: 1202172 - RNA, 23 nt, Human
ucagucugauucccaagcucugc

SEQ ID NO: 1202173 - RNA, 22 nt, Human
ucagucugauucccaagcucug

SEQ ID NO: 1202174 - RNA, 21 nt, Human
ucagucugauucccaagcucu

SEQ ID NO: 1202175 - RNA, 21 nt, Human
ucagguggggcagcuugaggg

SEQ ID NO: 1202176 - RNA, 20 nt, Human
ucagguggggcagcuugagg

SEQ ID NO: 1202177 - RNA, 19 nt, Human
ucagguggggcagcuugag

SEQ ID NO: 1202178 - RNA, 18 nt, Human
ucagguggggcagcuuga

SEQ ID NO: 1202179 - RNA, 23 nt, Human
ucaggugccucaagagaaggcaa

SEQ ID NO: 1202180 - RNA, 23 nt, Human
ucaggugauccacccaccucagc

SEQ ID NO: 1202181 - RNA, 16 nt, Human
ucaggugauccaccca

SEQ ID NO: 1202182 - RNA, 23 nt, Human
ucagcucugcaagaauugaagca

SEQ ID NO: 1202183 - RNA, 23 nt, Human
ucaggaagcucagggccuggcuc

SEQ ID NO: 1202184 - RNA, 24 nt, Human
ucagcuccagcucaccagccccag

SEQ ID NO: 1202185 - RNA, 23 nt, Human
ucagcuccagcucaccagcccca

SEQ ID NO: 1202186 - RNA, 21 nt, Human
ucaggccugggggcugggcag

SEQ ID NO: 1202187 - RNA, 23 nt, Human
uaugacuccagaauuucccaaag

SEQ ID NO: 1202188 - RNA, 17 nt, Human
uaugacuccagaauuuc

SEQ ID NO: 1202189 - RNA, 16 nt, Human
uaugacuccagaauuu

SEQ ID NO: 1202190 - RNA, 14 nt, Human
uaugcacacauuuu

SEQ ID NO: 1202191 - RNA, 13 nt, Human
uaugcacacauuu

SEQ ID NO: 1202192 - RNA, 18 nt, Human
uaugcaaucaaaucugcu

SEQ ID NO: 1202193 - RNA, 18 nt, Human
uaugcaugaaguaauaug

SEQ ID NO: 1202194 - RNA, 13 nt, Human
uaugcaugaagua

SEQ ID NO: 1202195 - RNA, 18 nt, Human
uauggaacacucugagac

SEQ ID NO: 1202196 - RNA, 17 nt, Human
uauggaacacucugaga

SEQ ID NO: 1202197 - RNA, 16 nt, Human
uauggaacacucugag

SEQ ID NO: 1202198 - RNA, 13 nt, Human
uauggaacacucu

SEQ ID NO: 1202199 - RNA, 17 nt, Human
uauggacaaugacccag

SEQ ID NO: 1202200 - RNA, 19 nt, Human
uauggaacacucugagacu

SEQ ID NO: 1202201 - RNA, 14 nt, Human
uaucuugaagacuu

SEQ ID NO: 1202202 - RNA, 23 nt, Human
uaucugucauuugagcagggcuc

SEQ ID NO: 1202203 - RNA, 21 nt, Human
uaucugucauuugagcagggc

SEQ ID NO: 1202204 - RNA, 20 nt, Human
uaucugucauuugagcaggg

SEQ ID NO: 1202205 - RNA, 12 nt, Human
uaugacacaugc

SEQ ID NO: 1202206 - RNA, 22 nt, Human
uaugacacaugcaaggucauuu

SEQ ID NO: 1202207 - RNA, 19 nt, Human
uauauguuuuaagaggcag

SEQ ID NO: 1202208 - RNA, 21 nt, Human
uaucuaauauguaacaagcca

SEQ ID NO: 1202209 - RNA, 16 nt, Human
uaucgucacugcuuaa

SEQ ID NO: 1202210 - RNA, 21 nt, Human
uagggaaaaaccagcguguga

SEQ ID NO: 1202211 - RNA, 20 nt, Human
uagggaaaaaccagcgugug

SEQ ID NO: 1202212 - RNA, 19 nt, Human
uagggaaaaaccagcgugu

SEQ ID NO: 1202213 - RNA, 15 nt, Human
uaggccuggccagau

SEQ ID NO: 1202214 - RNA, 18 nt, Human
uaggccuggccagaugca

SEQ ID NO: 1202215 - RNA, 15 nt, Human
uaguaugaggcauuu

SEQ ID NO: 1202216 - RNA, 23 nt, Human
uaggugacagagugagacucugu

SEQ ID NO: 1202217 - RNA, 21 nt, Human
uauaugcucugcauguuacau

SEQ ID NO: 1202218 - RNA, 22 nt, Human
uauuuauuaaaugcccagcccc

SEQ ID NO: 1202219 - RNA, 17 nt, Human
uauuuaugggauccugg

SEQ ID NO: 1202220 - RNA, 23 nt, Human
uauugcugauggugcaaugaccu

SEQ ID NO: 1202221 - RNA, 15 nt, Human
uauugcccacgcugg

SEQ ID NO: 1202222 - RNA, 14 nt, Human
uauugcccacgcug

SEQ ID NO: 1202223 - RNA, 13 nt, Human
uauugcccacgcu

SEQ ID NO: 1202224 - RNA, 21 nt, Human
uauugauaugcuuauacacuu

SEQ ID NO: 1202225 - RNA, 20 nt, Human
uauugauaugcuuauacacu

SEQ ID NO: 1202226 - RNA, 13 nt, Human
uauuauaccuuuu

SEQ ID NO: 1202227 - RNA, 12 nt, Human
uauuauaccuuu

SEQ ID NO: 1202228 - RNA, 14 nt, Human
uauuaaggaagaca

SEQ ID NO: 1202229 - RNA, 24 nt, Human
uauuaagaaagacuaucuaaaugu

SEQ ID NO: 1202230 - RNA, 14 nt, Human
uauuauaccuuuuu

SEQ ID NO: 1202231 - RNA, 16 nt, Human
uauuaagaaagacuau

SEQ ID NO: 1202232 - RNA, 19 nt, Human
uauuaaaugcccagccccu

SEQ ID NO: 1202233 - RNA, 17 nt, Human
uauuaaaugcccagccc

SEQ ID NO: 1202234 - RNA, 15 nt, Human
uauuaaaugcccagc

SEQ ID NO: 1202235 - RNA, 22 nt, Human
uauguucuuaguggauguucug

SEQ ID NO: 1202236 - RNA, 21 nt, Human
uauguugcccaggcaggucuu

SEQ ID NO: 1202237 - RNA, 23 nt, Human
ucaaagagguuuuaaaaaaaucc

SEQ ID NO: 1202238 - RNA, 12 nt, Human
ucaaagagguuu

SEQ ID NO: 1202239 - RNA, 13 nt, Human
ucaaacuuuacua

SEQ ID NO: 1202240 - RNA, 17 nt, Human
ucaaggauccugagcca

SEQ ID NO: 1202241 - RNA, 16 nt, Human
ucaaggauccugagcc

SEQ ID NO: 1202242 - RNA, 15 nt, Human
ucaaggauccugagc

SEQ ID NO: 1202243 - RNA, 14 nt, Human
ucaaggauccugag

SEQ ID NO: 1202244 - RNA, 13 nt, Human
ucaaggauccuga

SEQ ID NO: 1202245 - RNA, 21 nt, Human
ucaagcgauucuucugcuuca

SEQ ID NO: 1202246 - RNA, 19 nt, Human
ucaagcgauucuucugcuu

SEQ ID NO: 1202247 - RNA, 18 nt, Human
ucaagcgauucuucugcu

SEQ ID NO: 1202248 - RNA, 20 nt, Human
ucaagccaccaacauacucc

SEQ ID NO: 1202249 - RNA, 12 nt, Human
ucaagccaccaa

SEQ ID NO: 1202250 - RNA, 16 nt, Human
ucaaccuccugggcua

SEQ ID NO: 1202251 - RNA, 15 nt, Human
ucaaccuccugggcu

SEQ ID NO: 1202252 - RNA, 20 nt, Human
ucaaccccuucgcuccugug

SEQ ID NO: 1202253 - RNA, 19 nt, Human
ucaaccccuucgcuccugu

SEQ ID NO: 1202254 - RNA, 18 nt, Human
ucaaccccuucgcuccug

SEQ ID NO: 1202255 - RNA, 20 nt, Human
ucaacucuccuccagaguca

SEQ ID NO: 1202256 - RNA, 23 nt, Human
ucacacaugagcaucaggccagg

SEQ ID NO: 1202257 - RNA, 15 nt, Human
ucacacacuuuggcu

SEQ ID NO: 1202258 - RNA, 18 nt, Human
ucaccaacgucugugcca

SEQ ID NO: 1202259 - RNA, 17 nt, Human
ucaccaacgucugugcc

SEQ ID NO: 1202260 - RNA, 14 nt, Human
ucacauuuauucug

SEQ ID NO: 1202261 - RNA, 18 nt, Human
ucacccgcuaagagggag

SEQ ID NO: 1202262 - RNA, 13 nt, Human
ucaccaagcccag

SEQ ID NO: 1202263 - RNA, 23 nt, Human
ucaccgaaaacguggcugcuuca

SEQ ID NO: 1202264 - RNA, 22 nt, Human
ucaccgaaaacguggcugcuuc

SEQ ID NO: 1202265 - RNA, 21 nt, Human
ucaccgaaaacguggcugcuu

SEQ ID NO: 1202266 - RNA, 20 nt, Human
ucaccgaaaacguggcugcu

SEQ ID NO: 1202267 - RNA, 19 nt, Human
ucaccgaaaacguggcugc

SEQ ID NO: 1202268 - RNA, 15 nt, Human
ucaccgaaaacgugg

SEQ ID NO: 1202269 - RNA, 19 nt, Human
ucacccgcuaagagggagg

SEQ ID NO: 1202270 - RNA, 14 nt, Human
ucaccgaaaacgug

SEQ ID NO: 1202271 - RNA, 12 nt, Human
ucacccuuuucu

SEQ ID NO: 1202272 - RNA, 21 nt, Human
guggcagugggagcugccugu

SEQ ID NO: 1202273 - RNA, 19 nt, Human
guggcagugggagcugccu

SEQ ID NO: 1202274 - RNA, 17 nt, Human
guggcagugggagcugc

SEQ ID NO: 1202275 - RNA, 16 nt, Human
guggcagugggagcug

SEQ ID NO: 1202276 - RNA, 15 nt, Human
guggcagugggagcu

SEQ ID NO: 1202277 - RNA, 19 nt, Human
guggcagcugcuuuugucu

SEQ ID NO: 1202278 - RNA, 13 nt, Human
guggcagcugcuu

SEQ ID NO: 1202279 - RNA, 12 nt, Human
guggcagcugcu

SEQ ID NO: 1202280 - RNA, 23 nt, Human
guggcagcugcgguccacccagg

SEQ ID NO: 1202281 - RNA, 22 nt, Human
guggcagcugcgguccacccag

SEQ ID NO: 1202282 - RNA, 21 nt, Human
guggcagcugcgguccaccca

SEQ ID NO: 1202283 - RNA, 20 nt, Human
guggaugccugguggcagcu

SEQ ID NO: 1202284 - RNA, 18 nt, Human
guggaugccugguggcag

SEQ ID NO: 1202285 - RNA, 16 nt, Human
guggaugccugguggc

SEQ ID NO: 1202286 - RNA, 17 nt, Human
guggaguucaucuugaa

SEQ ID NO: 1202287 - RNA, 20 nt, Human
guggagaagcggcuggcagc

SEQ ID NO: 1202288 - RNA, 15 nt, Human
gugcuuggaggaagg

SEQ ID NO: 1202289 - RNA, 13 nt, Human
gugcuuggaggaa

SEQ ID NO: 1202290 - RNA, 12 nt, Human
gugcuuggagga

SEQ ID NO: 1202291 - RNA, 12 nt, Human
gugcugcccugc

SEQ ID NO: 1202292 - RNA, 11 nt, Human
gugcugcccug

SEQ ID NO: 1202293 - RNA, 22 nt, Human
gugcugccauccagguucagcu

SEQ ID NO: 1202294 - RNA, 18 nt, Human
guggaaaaauagccugcc

SEQ ID NO: 1202295 - RNA, 16 nt, Human
gugcucuggacaggca

SEQ ID NO: 1202296 - RNA, 15 nt, Human
gugcucuggacaggc

SEQ ID NO: 1202297 - RNA, 21 nt, Human
gugccuuggggacaagagcag

SEQ ID NO: 1202298 - RNA, 22 nt, Human
gugccgagaaggaagccuccca

SEQ ID NO: 1202299 - RNA, 23 nt, Human
gugcugaaugguuuucaaaauaa

SEQ ID NO: 1202300 - RNA, 20 nt, Human
gugcugaaugguuuucaaaa

SEQ ID NO: 1202301 - RNA, 19 nt, Human
gugcugaaugguuuucaaa

SEQ ID NO: 1202302 - RNA, 18 nt, Human
gugcucuggacaggcaug

SEQ ID NO: 1202303 - RNA, 17 nt, Human
gugcucuggacaggcau

SEQ ID NO: 1202304 - RNA, 19 nt, Human
gugcugagucugaaggcug

SEQ ID NO: 1202305 - RNA, 18 nt, Human
gugcugagucugaaggcu

SEQ ID NO: 1202306 - RNA, 17 nt, Human
gugcugagucugaaggc

SEQ ID NO: 1202307 - RNA, 16 nt, Human
gugcugagucugaagg

SEQ ID NO: 1202308 - RNA, 12 nt, Human
gugcugagucug

SEQ ID NO: 1202309 - RNA, 20 nt, Human
gugcugcauuuaaaagauac

SEQ ID NO: 1202310 - RNA, 19 nt, Human
gugcugcauuuaaaagaua

SEQ ID NO: 1202311 - RNA, 12 nt, Human
gugcugcauuua

SEQ ID NO: 1202312 - RNA, 19 nt, Human
gugcugccauccagguuca

SEQ ID NO: 1202313 - RNA, 18 nt, Human
gugcugccauccagguuc

SEQ ID NO: 1202314 - RNA, 15 nt, Human
gugcugccauccagg

SEQ ID NO: 1202315 - RNA, 23 nt, Human
gugauucuccugccucagccucc

SEQ ID NO: 1202316 - RNA, 22 nt, Human
gugauucuccugccucagccuc

SEQ ID NO: 1202317 - RNA, 20 nt, Human
gugauucuccugccucagcc

SEQ ID NO: 1202318 - RNA, 19 nt, Human
gugauucuccugccucagc

SEQ ID NO: 1202319 - RNA, 18 nt, Human
gugauucuccugccucag

SEQ ID NO: 1202320 - RNA, 17 nt, Human
gugauucuccugccuca

SEQ ID NO: 1202321 - RNA, 16 nt, Human
gugauucuccugccuc

SEQ ID NO: 1202322 - RNA, 14 nt, Human
gugauucuccugcc

SEQ ID NO: 1202323 - RNA, 23 nt, Human
gugauccucccaccucagccucc

SEQ ID NO: 1202324 - RNA, 22 nt, Human
gugauccucccaccucagccuc

SEQ ID NO: 1202325 - RNA, 20 nt, Human
gugauccucccaccucagcc

SEQ ID NO: 1202326 - RNA, 18 nt, Human
gugauccucccaccucag

SEQ ID NO: 1202327 - RNA, 15 nt, Human
gugauccucccaccu

SEQ ID NO: 1202328 - RNA, 14 nt, Human
gugauccucccacc

SEQ ID NO: 1202329 - RNA, 22 nt, Human
gugauccacccaccucagccuc

SEQ ID NO: 1202330 - RNA, 20 nt, Human
gugauccacccaccucagcc

SEQ ID NO: 1202331 - RNA, 18 nt, Human
gugauccacccaccucag

SEQ ID NO: 1202332 - RNA, 15 nt, Human
gugauccacccaccu

SEQ ID NO: 1202333 - RNA, 13 nt, Human
gugaggccagaga

SEQ ID NO: 1202334 - RNA, 11 nt, Human
gugaggccaga

SEQ ID NO: 1202335 - RNA, 20 nt, Human
gugcccacaggaucagucug

SEQ ID NO: 1202336 - RNA, 22 nt, Human
gugccagguuuuuggucugacc

SEQ ID NO: 1202337 - RNA, 22 nt, Human
gugcaugcugucccuuacguga

SEQ ID NO: 1202338 - RNA, 14 nt, Human
gugcauaccacuuu

SEQ ID NO: 1202339 - RNA, 13 nt, Human
gugcauaccacuu

SEQ ID NO: 1202340 - RNA, 21 nt, Human
gugcauaccacuuuuguucuu

SEQ ID NO: 1202341 - RNA, 19 nt, Human
gugcauaaguuaacuucca

SEQ ID NO: 1202342 - RNA, 15 nt, Human
gugacugaauuucuu

SEQ ID NO: 1202343 - RNA, 18 nt, Human
gugacugaauuucuuuug

SEQ ID NO: 1202344 - RNA, 16 nt, Human
gugacugaauuucuuu

SEQ ID NO: 1202345 - RNA, 16 nt, Human
gugacaacacuugugu

SEQ ID NO: 1202346 - RNA, 12 nt, Human
gugaccucugcc

SEQ ID NO: 1202347 - RNA, 19 nt, Human
gugaggaagccgcuggggc

SEQ ID NO: 1202348 - RNA, 16 nt, Human
gugaggaagccgcugg

SEQ ID NO: 1202349 - RNA, 11 nt, Human
gugaggaagcc

SEQ ID NO: 1202350 - RNA, 14 nt, Human
gugagccacugcac

SEQ ID NO: 1202351 - RNA, 17 nt, Human
gugacugaucucucgug

SEQ ID NO: 1202352 - RNA, 13 nt, Human
gugagccacugca

SEQ ID NO: 1202353 - RNA, 19 nt, Human
gugaaaggaaagagggagg

SEQ ID NO: 1202354 - RNA, 12 nt, Human
gugaaacuggau

SEQ ID NO: 1202355 - RNA, 23 nt, Human
gugaaaagaaaaaugagccuggc

SEQ ID NO: 1202356 - RNA, 14 nt, Human
gugaaaagaaaaau

SEQ ID NO: 1202357 - RNA, 12 nt, Human
gucccagugccg

SEQ ID NO: 1202358 - RNA, 23 nt, Human
guccuagaaauuccccacccuga

SEQ ID NO: 1202359 - RNA, 23 nt, Human
guccuacucugugucaggugggg

SEQ ID NO: 1202360 - RNA, 15 nt, Human
guccuacucuguguc

SEQ ID NO: 1202361 - RNA, 18 nt, Human
gucccugguggcagcuca

SEQ ID NO: 1202362 - RNA, 17 nt, Human
gucccugguggcagcuc

SEQ ID NO: 1202363 - RNA, 16 nt, Human
gucccugguggcagcu

SEQ ID NO: 1202364 - RNA, 16 nt, Human
guccugggagugagcu

SEQ ID NO: 1202365 - RNA, 15 nt, Human
guccugggagugagc

SEQ ID NO: 1202366 - RNA, 23 nt, Human
guccucccaucucacacaugagc

SEQ ID NO: 1202367 - RNA, 14 nt, Human
guccucccaucuca

SEQ ID NO: 1202368 - RNA, 13 nt, Human
guccucccaucuc

SEQ ID NO: 1202369 - RNA, 12 nt, Human
guccucccaucu

SEQ ID NO: 1202370 - RNA, 19 nt, Human
guccugggagugagcuggu

SEQ ID NO: 1202371 - RNA, 18 nt, Human
guccugggagugagcugg

SEQ ID NO: 1202372 - RNA, 17 nt, Human
guccugggagugagcug

SEQ ID NO: 1202373 - RNA, 11 nt, Human
gucucacucug

SEQ ID NO: 1202374 - RNA, 13 nt, Human
gucuaccugaggg

SEQ ID NO: 1202375 - RNA, 23 nt, Human
gucucacuguugcccaggcuggc

SEQ ID NO: 1202376 - RNA, 22 nt, Human
gucucacuguugcccaggcugg

SEQ ID NO: 1202377 - RNA, 21 nt, Human
gucucacuguugcccaggcug

SEQ ID NO: 1202378 - RNA, 20 nt, Human
gucucacuguugcccaggcu

SEQ ID NO: 1202379 - RNA, 19 nt, Human
gucucacuguugcccaggc

SEQ ID NO: 1202380 - RNA, 18 nt, Human
gucucacuguugcccagg

SEQ ID NO: 1202381 - RNA, 17 nt, Human
gucucacuguugcccag

SEQ ID NO: 1202382 - RNA, 16 nt, Human
gucucacuguugccca

SEQ ID NO: 1202383 - RNA, 23 nt, Human
gucucacuauguugcccaggcag

SEQ ID NO: 1202384 - RNA, 21 nt, Human
gucucacuauguugcccaggc

SEQ ID NO: 1202385 - RNA, 20 nt, Human
gucucacuauguugcccagg

SEQ ID NO: 1202386 - RNA, 18 nt, Human
guccuuaccagcagagca

SEQ ID NO: 1202387 - RNA, 17 nt, Human
guccuuaccagcagagc

SEQ ID NO: 1202388 - RNA, 16 nt, Human
guccuuaccagcagag

SEQ ID NO: 1202389 - RNA, 15 nt, Human
guccuuaccagcaga

SEQ ID NO: 1202390 - RNA, 15 nt, Human
gucuacacugugcug

SEQ ID NO: 1202391 - RNA, 21 nt, Human
gucugauucccaagcucugcu

SEQ ID NO: 1202392 - RNA, 20 nt, Human
gucugauucccaagcucugc

SEQ ID NO: 1202393 - RNA, 19 nt, Human
gucugauucccaagcucug

SEQ ID NO: 1202394 - RNA, 18 nt, Human
gucugauucccaagcucu

SEQ ID NO: 1202395 - RNA, 17 nt, Human
gucugauucccaagcuc

SEQ ID NO: 1202396 - RNA, 21 nt, Human
gucugaggaauccagacccgg

SEQ ID NO: 1202397 - RNA, 19 nt, Human
gucugaggaauccagaccc

SEQ ID NO: 1202398 - RNA, 18 nt, Human
gucugaggaauccagacc

SEQ ID NO: 1202399 - RNA, 15 nt, Human
gucugacccacugcu

SEQ ID NO: 1202400 - RNA, 14 nt, Human
gucugacccacugc

SEQ ID NO: 1202401 - RNA, 17 nt, Human
gucccagauacuugggg

SEQ ID NO: 1202402 - RNA, 15 nt, Human
gucccacucagucca

SEQ ID NO: 1202403 - RNA, 14 nt, Human
gucccacucagucc

SEQ ID NO: 1202404 - RNA, 16 nt, Human
guccacccaggagccc

SEQ ID NO: 1202405 - RNA, 15 nt, Human
guccacccaggagcc

SEQ ID NO: 1202406 - RNA, 14 nt, Human
guccacccaggagc

SEQ ID NO: 1202407 - RNA, 21 nt, Human
gucauauaagauucauauuua

SEQ ID NO: 1202408 - RNA, 15 nt, Human
guagagugggagcug

SEQ ID NO: 1202409 - RNA, 13 nt, Human
guagagugggagc

SEQ ID NO: 1202410 - RNA, 15 nt, Human
guagagugugccuga

SEQ ID NO: 1202411 - RNA, 13 nt, Human
guauuacuucugc

SEQ ID NO: 1202412 - RNA, 15 nt, Human
guauuacuucugcua

SEQ ID NO: 1202413 - RNA, 14 nt, Human
guauuacuucugcu

SEQ ID NO: 1202414 - RNA, 14 nt, Human
guauuauaccuuuu

SEQ ID NO: 1202415 - RNA, 20 nt, Human
gucaccugaagacucauucu

SEQ ID NO: 1202416 - RNA, 15 nt, Human
gucaccccggccacc

SEQ ID NO: 1202417 - RNA, 13 nt, Human
gucaccccggcca

SEQ ID NO: 1202418 - RNA, 16 nt, Human
gucaauuacaggaagu

SEQ ID NO: 1202419 - RNA, 15 nt, Human
gucaauuacaggaag

SEQ ID NO: 1202420 - RNA, 13 nt, Human
gucaauuacagga

SEQ ID NO: 1202421 - RNA, 19 nt, Human
gucaagagggucugaggaa

SEQ ID NO: 1202422 - RNA, 18 nt, Human
gucaagagggucugagga

SEQ ID NO: 1202423 - RNA, 19 nt, Human
gucaagugaaaaaggagga

SEQ ID NO: 1202424 - RNA, 18 nt, Human
gucaagugaaaaaggagg

SEQ ID NO: 1202425 - RNA, 16 nt, Human
gucaagugaaaaagga

SEQ ID NO: 1202426 - RNA, 17 nt, Human
ggggaucacagccucug

SEQ ID NO: 1202427 - RNA, 13 nt, Human
ggggaguggccac

SEQ ID NO: 1202428 - RNA, 22 nt, Human
gggcuuggggaccagagcugcc

SEQ ID NO: 1202429 - RNA, 21 nt, Human
gggcuuggggaccagagcugc

SEQ ID NO: 1202430 - RNA, 19 nt, Human
gggcuucauccuccucaga

SEQ ID NO: 1202431 - RNA, 20 nt, Human
gggcuucaguggcagcugcu

SEQ ID NO: 1202432 - RNA, 19 nt, Human
gggcuucaguggcagcugc

SEQ ID NO: 1202433 - RNA, 18 nt, Human
gggcuucaguggcagcug

SEQ ID NO: 1202434 - RNA, 17 nt, Human
gggcuucaguggcagcu

SEQ ID NO: 1202435 - RNA, 16 nt, Human
gggcuucaguggcagc

SEQ ID NO: 1202436 - RNA, 15 nt, Human
gggcuucaguggcag

SEQ ID NO: 1202437 - RNA, 20 nt, Human
gggcuucauccuccucagau

SEQ ID NO: 1202438 - RNA, 20 nt, Human
gggcuuggggaccagagcug

SEQ ID NO: 1202439 - RNA, 17 nt, Human
ggggcugggcagaggaa

SEQ ID NO: 1202440 - RNA, 16 nt, Human
ggggcugggcagagga

SEQ ID NO: 1202441 - RNA, 13 nt, Human
ggggcugggacau

SEQ ID NO: 1202442 - RNA, 23 nt, Human
ggguagagcggagaaaggaaggg

SEQ ID NO: 1202443 - RNA, 23 nt, Human
ggguacuuguggacacagcucuu

SEQ ID NO: 1202444 - RNA, 22 nt, Human
ggguacuuguggacacagcucu

SEQ ID NO: 1202445 - RNA, 19 nt, Human
ggguacuuguggacacagc

SEQ ID NO: 1202446 - RNA, 18 nt, Human
ggguacccacugcucugg

SEQ ID NO: 1202447 - RNA, 15 nt, Human
ggguacccacugcuc

SEQ ID NO: 1202448 - RNA, 13 nt, Human
ggguacccacugc

SEQ ID NO: 1202449 - RNA, 23 nt, Human
gggguucccuuuuuuggcugcug

SEQ ID NO: 1202450 - RNA, 16 nt, Human
gggcgcgguggcucac

SEQ ID NO: 1202451 - RNA, 13 nt, Human
gggcucccuuccc

SEQ ID NO: 1202452 - RNA, 23 nt, Human
gggcucccuucccaccucucuca

SEQ ID NO: 1202453 - RNA, 18 nt, Human
gggcucccuucccaccuc

SEQ ID NO: 1202454 - RNA, 17 nt, Human
gggcucccuucccaccu

SEQ ID NO: 1202455 - RNA, 14 nt, Human
gggcucccuuccca

SEQ ID NO: 1202456 - RNA, 17 nt, Human
gggccuggcucaggugg

SEQ ID NO: 1202457 - RNA, 18 nt, Human
gggccuggucguuuucaa

SEQ ID NO: 1202458 - RNA, 16 nt, Human
gggccuggcucaggug

SEQ ID NO: 1202459 - RNA, 14 nt, Human
gggccuggcucagg

SEQ ID NO: 1202460 - RNA, 12 nt, Human
gggccuggcuca

SEQ ID NO: 1202461 - RNA, 12 nt, Human
gggccuggccug

SEQ ID NO: 1202462 - RNA, 14 nt, Human
gggcuucaguggca

SEQ ID NO: 1202463 - RNA, 17 nt, Human
gggcugcaccggcuggc

SEQ ID NO: 1202464 - RNA, 14 nt, Human
gggcugcaccggcu

SEQ ID NO: 1202465 - RNA, 16 nt, Human
gggcugaggugggagg

SEQ ID NO: 1202466 - RNA, 20 nt, Human
gggcucugccucccaucacc

SEQ ID NO: 1202467 - RNA, 17 nt, Human
gggcucugccucccauc

SEQ ID NO: 1202468 - RNA, 16 nt, Human
gggcucugccucccau

SEQ ID NO: 1202469 - RNA, 15 nt, Human
gggcucugccuccca

SEQ ID NO: 1202470 - RNA, 13 nt, Human
gggcucugccucc

SEQ ID NO: 1202471 - RNA, 22 nt, Human
ggguucuacccaggugcuagga

SEQ ID NO: 1202472 - RNA, 23 nt, Human
ggguucccuuuuuuggcugcuga

SEQ ID NO: 1202473 - RNA, 19 nt, Human
ggguuggccccugcccggc

SEQ ID NO: 1202474 - RNA, 22 nt, Human
gguacuuguggacacagcucuu

SEQ ID NO: 1202475 - RNA, 21 nt, Human
gguacuuguggacacagcucu

SEQ ID NO: 1202476 - RNA, 15 nt, Human
ggguugggcuggugu

SEQ ID NO: 1202477 - RNA, 17 nt, Human
gguacccacugcucugg

SEQ ID NO: 1202478 - RNA, 22 nt, Human
ggucccacucaguccauagcag

SEQ ID NO: 1202479 - RNA, 14 nt, Human
ggucccacucaguc

SEQ ID NO: 1202480 - RNA, 12 nt, Human
ggucccacucag

SEQ ID NO: 1202481 - RNA, 23 nt, Human
ggucccccuuccauggacuuugu

SEQ ID NO: 1202482 - RNA, 18 nt, Human
ggucccccuuccauggac

SEQ ID NO: 1202483 - RNA, 13 nt, Human
ggucccccuucca

SEQ ID NO: 1202484 - RNA, 16 nt, Human
ggucagagccugcagu

SEQ ID NO: 1202485 - RNA, 15 nt, Human
ggucagagccugcag

SEQ ID NO: 1202486 - RNA, 14 nt, Human
ggucagagccugca

SEQ ID NO: 1202487 - RNA, 13 nt, Human
ggucagagccugc

SEQ ID NO: 1202488 - RNA, 12 nt, Human
ggucagagccug

SEQ ID NO: 1202489 - RNA, 22 nt, Human
ggucacucuggcagcucagaga

SEQ ID NO: 1202490 - RNA, 20 nt, Human
ggucacucuggcagcucaga

SEQ ID NO: 1202491 - RNA, 16 nt, Human
ggucacucuggcagcu

SEQ ID NO: 1202492 - RNA, 22 nt, Human
gguagaaauaucugaaaaugua

SEQ ID NO: 1202493 - RNA, 16 nt, Human
gguggcagugggagcu

SEQ ID NO: 1202494 - RNA, 23 nt, Human
gguggcagcugcgguccacccag

SEQ ID NO: 1202495 - RNA, 15 nt, Human
gguggcagcugcggu

SEQ ID NO: 1202496 - RNA, 13 nt, Human
gguggcagcugcg

SEQ ID NO: 1202497 - RNA, 12 nt, Human
gguggcagcugc

SEQ ID NO: 1202498 - RNA, 11 nt, Human
gguggcagcug

SEQ ID NO: 1202499 - RNA, 13 nt, Human
gguggcagcucac

SEQ ID NO: 1202500 - RNA, 23 nt, Human
ggugcuaucucccccagccccau

SEQ ID NO: 1202501 - RNA, 22 nt, Human
ggugcuaucucccccagcccca

SEQ ID NO: 1202502 - RNA, 21 nt, Human
ggugaccucugccugaaguca

SEQ ID NO: 1202503 - RNA, 16 nt, Human
ggugaccucugccuga

SEQ ID NO: 1202504 - RNA, 14 nt, Human
ggugaccucugccu

SEQ ID NO: 1202505 - RNA, 21 nt, Human
ggugacagagugagacucugu

SEQ ID NO: 1202506 - RNA, 22 nt, Human
ggucucacuauguugcccaggc

SEQ ID NO: 1202507 - RNA, 23 nt, Human
gguccuagaaauuccccacccug

SEQ ID NO: 1202508 - RNA, 22 nt, Human
ggucccugguggcagcucaccu

SEQ ID NO: 1202509 - RNA, 14 nt, Human
ggucccugguggca

SEQ ID NO: 1202510 - RNA, 18 nt, Human
ggugaagugaagacaaug

SEQ ID NO: 1202511 - RNA, 16 nt, Human
ggugaacuugguuccc

SEQ ID NO: 1202512 - RNA, 19 nt, Human
ggucugaggaauccagacc

SEQ ID NO: 1202513 - RNA, 16 nt, Human
ggucucacucugucgc

SEQ ID NO: 1202514 - RNA, 12 nt, Human
ggucucacucug

SEQ ID NO: 1202515 - RNA, 16 nt, Human
ggucugacccacugcu

SEQ ID NO: 1202516 - RNA, 15 nt, Human
ggucugacccacugc

SEQ ID NO: 1202517 - RNA, 20 nt, Human
guaaaugggggugcauuuga

SEQ ID NO: 1202518 - RNA, 19 nt, Human
guaaaugggggugcauuug

SEQ ID NO: 1202519 - RNA, 18 nt, Human
guaaaugggggugcauuu

SEQ ID NO: 1202520 - RNA, 22 nt, Human
guaaauuaacuuuuauaaacuu

SEQ ID NO: 1202521 - RNA, 21 nt, Human
guaaauuaacuuuuauaaacu

SEQ ID NO: 1202522 - RNA, 17 nt, Human
guaaauuaacuuuuaua

SEQ ID NO: 1202523 - RNA, 16 nt, Human
guaaauuaacuuuuau

SEQ ID NO: 1202524 - RNA, 15 nt, Human
guaaauuaacuuuua

SEQ ID NO: 1202525 - RNA, 22 nt, Human
guaaguauucuuauuuaaugaa

SEQ ID NO: 1202526 - RNA, 13 nt, Human
guaaggaaugauu

SEQ ID NO: 1202527 - RNA, 23 nt, Human
guaaggaauaccugucccccuga

SEQ ID NO: 1202528 - RNA, 21 nt, Human
guaaggaauaccugucccccu

SEQ ID NO: 1202529 - RNA, 20 nt, Human
guaaggaauaccuguccccc

SEQ ID NO: 1202530 - RNA, 18 nt, Human
guaaggaauaccuguccc

SEQ ID NO: 1202531 - RNA, 23 nt, Human
guaaauuaacuuuuauaaacuuu

SEQ ID NO: 1202532 - RNA, 15 nt, Human
gguuuucuguucuuu

SEQ ID NO: 1202533 - RNA, 13 nt, Human
gguuuucuguucu

SEQ ID NO: 1202534 - RNA, 12 nt, Human
gguuuucuguuc

SEQ ID NO: 1202535 - RNA, 23 nt, Human
gguuuugccauguuggccaggcu

SEQ ID NO: 1202536 - RNA, 13 nt, Human
gguuuaagcuguu

SEQ ID NO: 1202537 - RNA, 13 nt, Human
gguuggugggggc

SEQ ID NO: 1202538 - RNA, 14 nt, Human
gguugggcuggugu

SEQ ID NO: 1202539 - RNA, 18 nt, Human
gguuggcaaaaaggcagg

SEQ ID NO: 1202540 - RNA, 23 nt, Human
gguucaagcgauucuucugcuuc

SEQ ID NO: 1202541 - RNA, 22 nt, Human
gguucaagcgauucuucugcuu

SEQ ID NO: 1202542 - RNA, 12 nt, Human
gguucagcuugu

SEQ ID NO: 1202543 - RNA, 14 nt, Human
gguugaagcaccaa

SEQ ID NO: 1202544 - RNA, 21 nt, Human
gguucaagcgauucuucugcu

SEQ ID NO: 1202545 - RNA, 17 nt, Human
gguggccucccaacuca

SEQ ID NO: 1202546 - RNA, 13 nt, Human
gguggccucccaa

SEQ ID NO: 1202547 - RNA, 18 nt, Human
guacacuguuucaaacuu

SEQ ID NO: 1202548 - RNA, 21 nt, Human
guaauuaaguacuauguauca

SEQ ID NO: 1202549 - RNA, 20 nt, Human
guaauuaaguacuauguauc

SEQ ID NO: 1202550 - RNA, 17 nt, Human
guaauuaaguacuaugu

SEQ ID NO: 1202551 - RNA, 14 nt, Human
guaauuaaguacua

SEQ ID NO: 1202552 - RNA, 20 nt, Human
guacagcaaggagauuuaca

SEQ ID NO: 1202553 - RNA, 22 nt, Human
guacagagcccacgcccccacu

SEQ ID NO: 1202554 - RNA, 18 nt, Human
guacagagcccacgcccc

SEQ ID NO: 1202555 - RNA, 12 nt, Human
guacagagccca

SEQ ID NO: 1202556 - RNA, 16 nt, Human
guacagacaacaaacc

SEQ ID NO: 1202557 - RNA, 21 nt, Human
guacacuguuucaaacuuuac

SEQ ID NO: 1202558 - RNA, 20 nt, Human
guacacuguuucaaacuuua

SEQ ID NO: 1202559 - RNA, 19 nt, Human
guacacuguuucaaacuuu

SEQ ID NO: 1202560 - RNA, 20 nt, Human
guacauaaugcgugcauacc

SEQ ID NO: 1202561 - RNA, 15 nt, Human
guacccacugcucug

SEQ ID NO: 1202562 - RNA, 15 nt, Human
guacuucuccacccu

SEQ ID NO: 1202563 - RNA, 14 nt, Human
guacuucuccaccc

SEQ ID NO: 1202564 - RNA, 17 nt, Human
guacuacaguccuccca

SEQ ID NO: 1202565 - RNA, 23 nt, Human
guacuaaggaaucuuucugcuuu

SEQ ID NO: 1202566 - RNA, 15 nt, Human
guacuaaggaaucuu

SEQ ID NO: 1202567 - RNA, 17 nt, Human
guacguugugcauuugg

SEQ ID NO: 1202568 - RNA, 16 nt, Human
guacguugugcauuug

SEQ ID NO: 1202569 - RNA, 15 nt, Human
guacguugugcauuu

SEQ ID NO: 1202570 - RNA, 14 nt, Human
guacguugugcauu

SEQ ID NO: 1202571 - RNA, 17 nt, Human
guacgucugacaggcaa

SEQ ID NO: 1202572 - RNA, 15 nt, Human
guacgucugacaggc

SEQ ID NO: 1202573 - RNA, 14 nt, Human
guacgucugacagg

SEQ ID NO: 1202574 - RNA, 22 nt, Human
guaccucuugagccuugaacuu

SEQ ID NO: 1202575 - RNA, 21 nt, Human
guaccucuugagccuugaacu

SEQ ID NO: 1202576 - RNA, 13 nt, Human
guaccucuugagc

SEQ ID NO: 1202577 - RNA, 16 nt, Human
guacccacugcucugg

SEQ ID NO: 1202578 - RNA, 20 nt, Human
guacuuguggacacagcucu

SEQ ID NO: 1202579 - RNA, 16 nt, Human
guacuuguggacacag

SEQ ID NO: 1202580 - RNA, 21 nt, Human
guacuucuccacccugcucuc

SEQ ID NO: 1202581 - RNA, 20 nt, Human
guacuucuccacccugcucu

SEQ ID NO: 1202582 - RNA, 19 nt, Human
guacuucuccacccugcuc

SEQ ID NO: 1202583 - RNA, 18 nt, Human
guacuucuccacccugcu

SEQ ID NO: 1202584 - RNA, 17 nt, Human
guacuucuccacccugc

SEQ ID NO: 1202585 - RNA, 16 nt, Human
guacuucuccacccug

SEQ ID NO: 1202586 - RNA, 16 nt, Human
guagagcggagaaagg

SEQ ID NO: 1202587 - RNA, 21 nt, Human
guacuuguggacacagcucuu

SEQ ID NO: 1202588 - RNA, 15 nt, Human
ggcgcgguggcucac

SEQ ID NO: 1202589 - RNA, 23 nt, Human
ggcgcugccccuggcagccccug

SEQ ID NO: 1202590 - RNA, 21 nt, Human
ggcgcugccccuggcagcccc

SEQ ID NO: 1202591 - RNA, 19 nt, Human
ggcgcugccccuggcagcc

SEQ ID NO: 1202592 - RNA, 14 nt, Human
ggccugggggcugg

SEQ ID NO: 1202593 - RNA, 22 nt, Human
ggccugggggcugggcagagga

SEQ ID NO: 1202594 - RNA, 20 nt, Human
ggccugggggcugggcagag

SEQ ID NO: 1202595 - RNA, 15 nt, Human
ggcuaugcauuugaa

SEQ ID NO: 1202596 - RNA, 16 nt, Human
ggcuaguugggcuucc

SEQ ID NO: 1202597 - RNA, 15 nt, Human
ggcuaguugggcuuc

SEQ ID NO: 1202598 - RNA, 23 nt, Human
ggcuagugugguguuuccuggca

SEQ ID NO: 1202599 - RNA, 22 nt, Human
ggcuaggaccccuccauguggg

SEQ ID NO: 1202600 - RNA, 16 nt, Human
ggcuaggaccccucca

SEQ ID NO: 1202601 - RNA, 22 nt, Human
ggcuagagguucaaagauauuu

SEQ ID NO: 1202602 - RNA, 17 nt, Human
ggcuagagguucaaaga

SEQ ID NO: 1202603 - RNA, 11 nt, Human
ggcuccaggcu

SEQ ID NO: 1202604 - RNA, 16 nt, Human
ggcuccaggcuccuuu

SEQ ID NO: 1202605 - RNA, 21 nt, Human
ggcucaaguccucuuuucuga

SEQ ID NO: 1202606 - RNA, 15 nt, Human
ggcucaaguccucuu

SEQ ID NO: 1202607 - RNA, 19 nt, Human
ggcuccaggagcagccaca

SEQ ID NO: 1202608 - RNA, 13 nt, Human
ggcuccaggagca

SEQ ID NO: 1202609 - RNA, 12 nt, Human
ggcuccaggagc

SEQ ID NO: 1202610 - RNA, 18 nt, Human
ggccucuuaugggcuggg

SEQ ID NO: 1202611 - RNA, 17 nt, Human
ggccucuuaugggcugg

SEQ ID NO: 1202612 - RNA, 20 nt, Human
ggccucgguguggagaagcg

SEQ ID NO: 1202613 - RNA, 16 nt, Human
ggccucugcacucccc

SEQ ID NO: 1202614 - RNA, 15 nt, Human
ggccucugcacuccc

SEQ ID NO: 1202615 - RNA, 14 nt, Human
ggccucugcacucc

SEQ ID NO: 1202616 - RNA, 13 nt, Human
ggccucugcacuc

SEQ ID NO: 1202617 - RNA, 21 nt, Human
ggcccucugcccacucccugc

SEQ ID NO: 1202618 - RNA, 20 nt, Human
ggcccucugcccacucccug

SEQ ID NO: 1202619 - RNA, 19 nt, Human
ggcccucugcccacucccu

SEQ ID NO: 1202620 - RNA, 17 nt, Human
ggcccucugcccacucc

SEQ ID NO: 1202621 - RNA, 16 nt, Human
ggcccucugcccacuc

SEQ ID NO: 1202622 - RNA, 15 nt, Human
ggcccucugcccacu

SEQ ID NO: 1202623 - RNA, 13 nt, Human
ggcccucugccca

SEQ ID NO: 1202624 - RNA, 12 nt, Human
ggcccagagagg

SEQ ID NO: 1202625 - RNA, 11 nt, Human
ggcccagagag

SEQ ID NO: 1202626 - RNA, 15 nt, Human
ggcccugccuccuuu

SEQ ID NO: 1202627 - RNA, 14 nt, Human
ggcccugccuccuu

SEQ ID NO: 1202628 - RNA, 13 nt, Human
ggcccugccuccu

SEQ ID NO: 1202629 - RNA, 19 nt, Human
ggauuacaagcgugagcca

SEQ ID NO: 1202630 - RNA, 15 nt, Human
ggaugcuuguacaua

SEQ ID NO: 1202631 - RNA, 19 nt, Human
ggaugcagccucacagucc

SEQ ID NO: 1202632 - RNA, 17 nt, Human
ggaugcagccucacagu

SEQ ID NO: 1202633 - RNA, 16 nt, Human
ggaugcagccucacag

SEQ ID NO: 1202634 - RNA, 23 nt, Human
ggaugcacagaguuguuacauuu

SEQ ID NO: 1202635 - RNA, 21 nt, Human
ggaugauuggaggggggaggu

SEQ ID NO: 1202636 - RNA, 14 nt, Human
ggauccuccaggug

SEQ ID NO: 1202637 - RNA, 13 nt, Human
ggauccuccaggu

SEQ ID NO: 1202638 - RNA, 12 nt, Human
ggauccuccagg

SEQ ID NO: 1202639 - RNA, 15 nt, Human
ggagugcagugagcc

SEQ ID NO: 1202640 - RNA, 14 nt, Human
ggagugcagugagc

SEQ ID NO: 1202641 - RNA, 12 nt, Human
ggagugcaguga

SEQ ID NO: 1202642 - RNA, 18 nt, Human
ggauacaaaagcauguga

SEQ ID NO: 1202643 - RNA, 22 nt, Human
ggaucccucauccucauaccca

SEQ ID NO: 1202644 - RNA, 17 nt, Human
ggaucccucauccucau

SEQ ID NO: 1202645 - RNA, 13 nt, Human
ggaucccucaucc

SEQ ID NO: 1202646 - RNA, 17 nt, Human
ggauugcuacuguccua

SEQ ID NO: 1202647 - RNA, 17 nt, Human
ggcaacccccagccugc

SEQ ID NO: 1202648 - RNA, 16 nt, Human
ggcaacccccagccug

SEQ ID NO: 1202649 - RNA, 16 nt, Human
ggauucuuccucccuc

SEQ ID NO: 1202650 - RNA, 16 nt, Human
ggauucuuauggacaa

SEQ ID NO: 1202651 - RNA, 23 nt, Human
ggauuacaagcgugagccacugc

SEQ ID NO: 1202652 - RNA, 23 nt, Human
ggcaaugcuggcuguuggcuggg

SEQ ID NO: 1202653 - RNA, 15 nt, Human
ggcaaugcuggcugu

SEQ ID NO: 1202654 - RNA, 14 nt, Human
ggcaaugcuggcug

SEQ ID NO: 1202655 - RNA, 19 nt, Human
ggcaacccccagccugcua

SEQ ID NO: 1202656 - RNA, 18 nt, Human
ggcaacccccagccugcu

SEQ ID NO: 1202657 - RNA, 23 nt, Human
ggcacccaccaucaugucuggcu

SEQ ID NO: 1202658 - RNA, 22 nt, Human
ggcacccggccccugcugguuc

SEQ ID NO: 1202659 - RNA, 18 nt, Human
ggccaggcccucugccca

SEQ ID NO: 1202660 - RNA, 23 nt, Human
ggccagcugcuugggcuucaucc

SEQ ID NO: 1202661 - RNA, 17 nt, Human
ggccagcugcuugggcu

SEQ ID NO: 1202662 - RNA, 22 nt, Human
ggccagccuugaccauucucca

SEQ ID NO: 1202663 - RNA, 20 nt, Human
ggccagccuugaccauucuc

SEQ ID NO: 1202664 - RNA, 19 nt, Human
ggcauuccccaggaggcca

SEQ ID NO: 1202665 - RNA, 18 nt, Human
ggcauuccccaggaggcc

SEQ ID NO: 1202666 - RNA, 17 nt, Human
ggcauuccccaggaggc

SEQ ID NO: 1202667 - RNA, 22 nt, Human
ggcaugggaaugaaugucagug

SEQ ID NO: 1202668 - RNA, 18 nt, Human
ggcaugggaaugaauguc

SEQ ID NO: 1202669 - RNA, 21 nt, Human
ggcagcucagagaggguggga

SEQ ID NO: 1202670 - RNA, 16 nt, Human
ggcagcucaccucucc

SEQ ID NO: 1202671 - RNA, 17 nt, Human
ggcagcuugaggguugg

SEQ ID NO: 1202672 - RNA, 14 nt, Human
ggcagcucaccucu

SEQ ID NO: 1202673 - RNA, 12 nt, Human
ggcagcucaccu

SEQ ID NO: 1202674 - RNA, 16 nt, Human
ggcagugggagcugcc

SEQ ID NO: 1202675 - RNA, 14 nt, Human
ggcagugggagcug

SEQ ID NO: 1202676 - RNA, 13 nt, Human
ggcagugggagcu

SEQ ID NO: 1202677 - RNA, 20 nt, Human
ggcagggucucacucugucg

SEQ ID NO: 1202678 - RNA, 19 nt, Human
ggcagggucucacucuguc

SEQ ID NO: 1202679 - RNA, 22 nt, Human
ggcaugacacgaauauugcuga

SEQ ID NO: 1202680 - RNA, 18 nt, Human
ggcaugacacgaauauug

SEQ ID NO: 1202681 - RNA, 15 nt, Human
ggcaugaagacagau

SEQ ID NO: 1202682 - RNA, 18 nt, Human
ggagaagcggcuggcagc

SEQ ID NO: 1202683 - RNA, 17 nt, Human
ggagaagcggcuggcag

SEQ ID NO: 1202684 - RNA, 20 nt, Human
ggacgcuacccgggaagggg

SEQ ID NO: 1202685 - RNA, 19 nt, Human
ggacgcuacccgggaaggg

SEQ ID NO: 1202686 - RNA, 17 nt, Human
ggacgcuacccgggaag

SEQ ID NO: 1202687 - RNA, 17 nt, Human
ggaccuugaacugggua

SEQ ID NO: 1202688 - RNA, 15 nt, Human
ggaccuugaacuggg

SEQ ID NO: 1202689 - RNA, 23 nt, Human
ggaccucaggugagaagcagagg

SEQ ID NO: 1202690 - RNA, 19 nt, Human
ggaccucaggugagaagca

SEQ ID NO: 1202691 - RNA, 14 nt, Human
ggaccagagcugcc

SEQ ID NO: 1202692 - RNA, 13 nt, Human
ggaccagagcugc

SEQ ID NO: 1202693 - RNA, 20 nt, Human
ggacauugcggacagccacg

SEQ ID NO: 1202694 - RNA, 22 nt, Human
ggacagccacggccaggccaga

SEQ ID NO: 1202695 - RNA, 21 nt, Human
ggacagccacggccaggccag

SEQ ID NO: 1202696 - RNA, 20 nt, Human
ggacagccacggccaggcca

SEQ ID NO: 1202697 - RNA, 19 nt, Human
ggacagccacggccaggcc

SEQ ID NO: 1202698 - RNA, 15 nt, Human
ggacagccacggcca

SEQ ID NO: 1202699 - RNA, 22 nt, Human
ggacacucaaaagcugggcagg

SEQ ID NO: 1202700 - RNA, 17 nt, Human
ggacacucaaaagcugg

SEQ ID NO: 1202701 - RNA, 23 nt, Human
ggaaggggagauaaggguaucug

SEQ ID NO: 1202702 - RNA, 18 nt, Human
ggaaguacuggagaaaau

SEQ ID NO: 1202703 - RNA, 16 nt, Human
ggaaguacuggagaaa

SEQ ID NO: 1202704 - RNA, 12 nt, Human
ggaaguacugga

SEQ ID NO: 1202705 - RNA, 19 nt, Human
ggaauguuugccucugccu

SEQ ID NO: 1202706 - RNA, 12 nt, Human
ggaaugcagugg

SEQ ID NO: 1202707 - RNA, 24 nt, Human
ggaaugauuaauuaaaacacaaca

SEQ ID NO: 1202708 - RNA, 15 nt, Human
gcuuugugauuuuug

SEQ ID NO: 1202709 - RNA, 22 nt, Human
gcuugaggguugggcugguguc

SEQ ID NO: 1202710 - RNA, 20 nt, Human
gcuugaggguugggcuggug

SEQ ID NO: 1202711 - RNA, 18 nt, Human
gcuugaggguugggcugg

SEQ ID NO: 1202712 - RNA, 14 nt, Human
ggaaaagcugcuga

SEQ ID NO: 1202713 - RNA, 20 nt, Human
ggaaaagcugcugacagugu

SEQ ID NO: 1202714 - RNA, 18 nt, Human
ggaaaagcugcugacagu

SEQ ID NO: 1202715 - RNA, 18 nt, Human
ggaaaacaugcuacacac

SEQ ID NO: 1202716 - RNA, 21 nt, Human
gcuuuguuuguugucagcuga

SEQ ID NO: 1202717 - RNA, 23 nt, Human
ggaaaucaccgaaaacguggcug

SEQ ID NO: 1202718 - RNA, 16 nt, Human
ggaacaggaaacugau

SEQ ID NO: 1202719 - RNA, 21 nt, Human
ggaaaucaccgaaaacguggc

SEQ ID NO: 1202720 - RNA, 14 nt, Human
ggaaaucaccgaaa

SEQ ID NO: 1202721 - RNA, 22 nt, Human
ggaaaggcuccaggagcagcca

SEQ ID NO: 1202722 - RNA, 21 nt, Human
ggaaaggcuccaggagcagcc

SEQ ID NO: 1202723 - RNA, 20 nt, Human
ggaaaggcuccaggagcagc

SEQ ID NO: 1202724 - RNA, 19 nt, Human
ggaaaggcuccaggagcag

SEQ ID NO: 1202725 - RNA, 17 nt, Human
ggaaaggcuccaggagc

SEQ ID NO: 1202726 - RNA, 14 nt, Human
ggaaaggcuccagg

SEQ ID NO: 1202727 - RNA, 13 nt, Human
ggaaaggcuccag

SEQ ID NO: 1202728 - RNA, 12 nt, Human
ggaaaggcucca

SEQ ID NO: 1202729 - RNA, 23 nt, Human
ggaaaaucagccugcuccagcug

SEQ ID NO: 1202730 - RNA, 19 nt, Human
ggaaaaucagccugcucca

SEQ ID NO: 1202731 - RNA, 14 nt, Human
gcuguucagcuggu

SEQ ID NO: 1202732 - RNA, 17 nt, Human
gcugucuccauguuuga

SEQ ID NO: 1202733 - RNA, 20 nt, Human
gcugccaaugggagcucaug

SEQ ID NO: 1202734 - RNA, 19 nt, Human
gcugccaaugggagcucau

SEQ ID NO: 1202735 - RNA, 16 nt, Human
gcugccaaugggagcu

SEQ ID NO: 1202736 - RNA, 15 nt, Human
gcugccaaugggagc

SEQ ID NO: 1202737 - RNA, 21 nt, Human
gcuuagucacugagacagccc

SEQ ID NO: 1202738 - RNA, 20 nt, Human
gcuuagucacugagacagcc

SEQ ID NO: 1202739 - RNA, 19 nt, Human
gcuuagucacugagacagc

SEQ ID NO: 1202740 - RNA, 17 nt, Human
gcuuagucacugagaca

SEQ ID NO: 1202741 - RNA, 15 nt, Human
gcuuagucacugaga

SEQ ID NO: 1202742 - RNA, 18 nt, Human
gcuucaguggcagcugcu

SEQ ID NO: 1202743 - RNA, 17 nt, Human
gcuucaguggcagcugc

SEQ ID NO: 1202744 - RNA, 16 nt, Human
gcuucauuuccugugu

SEQ ID NO: 1202745 - RNA, 13 nt, Human
gcuucauuuccug

SEQ ID NO: 1202746 - RNA, 15 nt, Human
gcuucauccuccuca

SEQ ID NO: 1202747 - RNA, 12 nt, Human
gcuucauccucc

SEQ ID NO: 1202748 - RNA, 16 nt, Human
gcuucaguggcagcug

SEQ ID NO: 1202749 - RNA, 19 nt, Human
gcuuaucucaggggugugc

SEQ ID NO: 1202750 - RNA, 20 nt, Human
gcuuauacacuuacacuuua

SEQ ID NO: 1202751 - RNA, 12 nt, Human
gcuuauacacuu

SEQ ID NO: 1202752 - RNA, 18 nt, Human
gcuuccagugaggcucug

SEQ ID NO: 1202753 - RNA, 16 nt, Human
gcuuccagugaggcuc

SEQ ID NO: 1202754 - RNA, 15 nt, Human
gcuuccagugaggcu

SEQ ID NO: 1202755 - RNA, 18 nt, Human
gcuucauuuccugugucu

SEQ ID NO: 1202756 - RNA, 21 nt, Human
gcuucauccuccucagaucuu

SEQ ID NO: 1202757 - RNA, 17 nt, Human
gcuucauuuccuguguc

SEQ ID NO: 1202758 - RNA, 16 nt, Human
gcuugaggguugggcu

SEQ ID NO: 1202759 - RNA, 14 nt, Human
gcucaccucucccu

SEQ ID NO: 1202760 - RNA, 19 nt, Human
gcucaccagccccagugcc

SEQ ID NO: 1202761 - RNA, 23 nt, Human
gcucaccagccccagugcccaca

SEQ ID NO: 1202762 - RNA, 20 nt, Human
gcucaccagccccagugccc

SEQ ID NO: 1202763 - RNA, 23 nt, Human
gcucagcaaaagaugcuucucac

SEQ ID NO: 1202764 - RNA, 22 nt, Human
gcucagcaaaagaugcuucuca

SEQ ID NO: 1202765 - RNA, 20 nt, Human
gcucagcaaaagaugcuucu

SEQ ID NO: 1202766 - RNA, 17 nt, Human
gcucagcaaaagaugcu

SEQ ID NO: 1202767 - RNA, 19 nt, Human
gcucaggugucccugcacu

SEQ ID NO: 1202768 - RNA, 18 nt, Human
gcucaggugucccugcac

SEQ ID NO: 1202769 - RNA, 22 nt, Human
gcucagcggggacagcuccuuc

SEQ ID NO: 1202770 - RNA, 21 nt, Human
gcucagcggggacagcuccuu

SEQ ID NO: 1202771 - RNA, 20 nt, Human
gcucagcggggacagcuccu

SEQ ID NO: 1202772 - RNA, 16 nt, Human
gcucagcggggacagc

SEQ ID NO: 1202773 - RNA, 15 nt, Human
gcucagcggggacag

SEQ ID NO: 1202774 - RNA, 15 nt, Human
gcuccaagcucccag

SEQ ID NO: 1202775 - RNA, 14 nt, Human
gcuccaagcuccca

SEQ ID NO: 1202776 - RNA, 13 nt, Human
gcuccaagcuccc

SEQ ID NO: 1202777 - RNA, 19 nt, Human
gcuccaagcucccaggcau

SEQ ID NO: 1202778 - RNA, 18 nt, Human
gcuccaagcucccaggca

SEQ ID NO: 1202779 - RNA, 17 nt, Human
gcuccaagcucccaggc

SEQ ID NO: 1202780 - RNA, 16 nt, Human
gcuccaagcucccagg

SEQ ID NO: 1202781 - RNA, 21 nt, Human
gcuccaagcucccaggcauuc

SEQ ID NO: 1202782 - RNA, 23 nt, Human
gcuccaggcuccuuuagcgccca

SEQ ID NO: 1202783 - RNA, 16 nt, Human
gcuccaggcuccuuua

SEQ ID NO: 1202784 - RNA, 11 nt, Human
gcuccagcugu

SEQ ID NO: 1202785 - RNA, 24 nt, Human
gcuccaggcuccuuuagcgcccag

SEQ ID NO: 1202786 - RNA, 20 nt, Human
gcuccagcuguucagcuggu

SEQ ID NO: 1202787 - RNA, 23 nt, Human
gcuaucucccccagccccauccu

SEQ ID NO: 1202788 - RNA, 22 nt, Human
gcuaucucccccagccccaucc

SEQ ID NO: 1202789 - RNA, 21 nt, Human
gcuaucucccccagccccauc

SEQ ID NO: 1202790 - RNA, 20 nt, Human
gcuaucucccccagccccau

SEQ ID NO: 1202791 - RNA, 19 nt, Human
gcuaucucccccagcccca

SEQ ID NO: 1202792 - RNA, 18 nt, Human
gcuaucucccccagcccc

SEQ ID NO: 1202793 - RNA, 17 nt, Human
gcuaucucccccagccc

SEQ ID NO: 1202794 - RNA, 16 nt, Human
gcuaucucccccagcc

SEQ ID NO: 1202795 - RNA, 21 nt, Human
gcuagagguucaaagauauuu

SEQ ID NO: 1202796 - RNA, 19 nt, Human
gcuagagguucaaagauau

SEQ ID NO: 1202797 - RNA, 18 nt, Human
gcuagagguucaaagaua

SEQ ID NO: 1202798 - RNA, 21 nt, Human
gcuacccgggaagggggcugg

SEQ ID NO: 1202799 - RNA, 15 nt, Human
gcuacccgggaaggg

SEQ ID NO: 1202800 - RNA, 14 nt, Human
gcuacccgggaagg

SEQ ID NO: 1202801 - RNA, 23 nt, Human
gcuaagagggagggagggcucca

SEQ ID NO: 1202802 - RNA, 22 nt, Human
gcuaagagggagggagggcucc

SEQ ID NO: 1202803 - RNA, 14 nt, Human
gcuaacauggaagu

SEQ ID NO: 1202804 - RNA, 16 nt, Human
gcuaaaugugaaugau

SEQ ID NO: 1202805 - RNA, 13 nt, Human
gcuaaaugugaau

SEQ ID NO: 1202806 - RNA, 23 nt, Human
gcgugagccacugcaccgggcca

SEQ ID NO: 1202807 - RNA, 18 nt, Human
gcgugagccacugcaccg

SEQ ID NO: 1202808 - RNA, 20 nt, Human
gcgguccacccaggagcccc

SEQ ID NO: 1202809 - RNA, 19 nt, Human
gcgguccacccaggagccc

SEQ ID NO: 1202810 - RNA, 18 nt, Human
gcgguccacccaggagcc

SEQ ID NO: 1202811 - RNA, 16 nt, Human
gcgguccacccaggag

SEQ ID NO: 1202812 - RNA, 13 nt, Human
gcggggacagcuc

SEQ ID NO: 1202813 - RNA, 12 nt, Human
gcggggacagcu

SEQ ID NO: 1202814 - RNA, 15 nt, Human
gcgggcuuccuccug

SEQ ID NO: 1202815 - RNA, 17 nt, Human
gcugcauuuaaaagaua

SEQ ID NO: 1202816 - RNA, 21 nt, Human
gcugcaguugccagucacccc

SEQ ID NO: 1202817 - RNA, 20 nt, Human
gcugcaguugccagucaccc

SEQ ID NO: 1202818 - RNA, 18 nt, Human
gcugcaguugccagucac

SEQ ID NO: 1202819 - RNA, 21 nt, Human
gcugauggugcaaugaccuuu

SEQ ID NO: 1202820 - RNA, 18 nt, Human
gcugauggugcaaugacc

SEQ ID NO: 1202821 - RNA, 16 nt, Human
gcugauggugcaauga

SEQ ID NO: 1202822 - RNA, 15 nt, Human
gcugauggugcaaug

SEQ ID NO: 1202823 - RNA, 23 nt, Human
gcugagugggggaucacagccuc

SEQ ID NO: 1202824 - RNA, 22 nt, Human
gcugagugggggaucacagccu

SEQ ID NO: 1202825 - RNA, 19 nt, Human
gcugagucugaaggcuggg

SEQ ID NO: 1202826 - RNA, 18 nt, Human
gcugagucugaaggcugg

SEQ ID NO: 1202827 - RNA, 16 nt, Human
gcugagucugaaggcu

SEQ ID NO: 1202828 - RNA, 15 nt, Human
gcugagucugaaggc

SEQ ID NO: 1202829 - RNA, 21 nt, Human
gcugacagacacaggcccggc

SEQ ID NO: 1202830 - RNA, 12 nt, Human
gcucuucuccag

SEQ ID NO: 1202831 - RNA, 22 nt, Human
gcucuuccaggcugggagagcc

SEQ ID NO: 1202832 - RNA, 19 nt, Human
gcucuuccaggcugggaga

SEQ ID NO: 1202833 - RNA, 16 nt, Human
gcucuucuccaggcug

SEQ ID NO: 1202834 - RNA, 14 nt, Human
gcucuucuccaggc

SEQ ID NO: 1202835 - RNA, 22 nt, Human
gcucuggacaggcauguucucu

SEQ ID NO: 1202836 - RNA, 21 nt, Human
gcucuggacaggcauguucuc

SEQ ID NO: 1202837 - RNA, 16 nt, Human
gcucuggacaggcaug

SEQ ID NO: 1202838 - RNA, 15 nt, Human
gcucuggacaggcau

SEQ ID NO: 1202839 - RNA, 14 nt, Human
gcucuggacaggca

SEQ ID NO: 1202840 - RNA, 23 nt, Human
gcucugcugacagacacaggccc

SEQ ID NO: 1202841 - RNA, 20 nt, Human
gcucugcugacagacacagg

SEQ ID NO: 1202842 - RNA, 19 nt, Human
gcucugcugacagacacag

SEQ ID NO: 1202843 - RNA, 18 nt, Human
gcucugcugacagacaca

SEQ ID NO: 1202844 - RNA, 14 nt, Human
gcucugcugacaga

SEQ ID NO: 1202845 - RNA, 13 nt, Human
gcucugcugacag

SEQ ID NO: 1202846 - RNA, 21 nt, Human
gcucugcuccucuccccagca

SEQ ID NO: 1202847 - RNA, 19 nt, Human
gcucugcuccucuccccag

SEQ ID NO: 1202848 - RNA, 14 nt, Human
gcucugcuccucuc

SEQ ID NO: 1202849 - RNA, 13 nt, Human
gcucugcuccucu

SEQ ID NO: 1202850 - RNA, 22 nt, Human
gcucugccucccaucacccgcu

SEQ ID NO: 1202851 - RNA, 15 nt, Human
gcucugccucccauc

SEQ ID NO: 1202852 - RNA, 14 nt, Human
gcucugccucccau

SEQ ID NO: 1202853 - RNA, 13 nt, Human
gcucugccuccca

SEQ ID NO: 1202854 - RNA, 11 nt, Human
gcucugccucc

SEQ ID NO: 1202855 - RNA, 23 nt, Human
gcucugcccuugguuaggcauug

SEQ ID NO: 1202856 - RNA, 14 nt, Human
gcucugcccuuggu

SEQ ID NO: 1202857 - RNA, 17 nt, Human
gcucgagcaugccugga

SEQ ID NO: 1202858 - RNA, 16 nt, Human
gcucgagcaugccugg

SEQ ID NO: 1202859 - RNA, 21 nt, Human
gcuccuucuguccuacucugu

SEQ ID NO: 1202860 - RNA, 19 nt, Human
gcucccuucccaccucucu

SEQ ID NO: 1202861 - RNA, 18 nt, Human
gcucccuucccaccucuc

SEQ ID NO: 1202862 - RNA, 16 nt, Human
gcucccuucccaccuc

SEQ ID NO: 1202863 - RNA, 15 nt, Human
gcucccuucccaccu

SEQ ID NO: 1202864 - RNA, 17 nt, Human
gcucuccgaccagacac

SEQ ID NO: 1202865 - RNA, 13 nt, Human
gcucuccgaccag

SEQ ID NO: 1202866 - RNA, 19 nt, Human
gcucuccgaccagacaccu

SEQ ID NO: 1202867 - RNA, 22 nt, Human
gccugaagucacacagugaguc

SEQ ID NO: 1202868 - RNA, 15 nt, Human
gccugcuccagcugu

SEQ ID NO: 1202869 - RNA, 18 nt, Human
gccugcuccagcuguuca

SEQ ID NO: 1202870 - RNA, 16 nt, Human
gccugcuccagcuguu

SEQ ID NO: 1202871 - RNA, 16 nt, Human
gccuggccagaugcac

SEQ ID NO: 1202872 - RNA, 15 nt, Human
gccuggccagaugca

SEQ ID NO: 1202873 - RNA, 14 nt, Human
gccuggccagaugc

SEQ ID NO: 1202874 - RNA, 15 nt, Human
gccugggcagaagga

SEQ ID NO: 1202875 - RNA, 15 nt, Human
gccuggauggggcug

SEQ ID NO: 1202876 - RNA, 14 nt, Human
gccuggauggggcu

SEQ ID NO: 1202877 - RNA, 21 nt, Human
gccugggggcugggcagagga

SEQ ID NO: 1202878 - RNA, 20 nt, Human
gccugggggcugggcagagg

SEQ ID NO: 1202879 - RNA, 18 nt, Human
gccugggcagaaggaaga

SEQ ID NO: 1202880 - RNA, 17 nt, Human
gccugggcagaaggaag

SEQ ID NO: 1202881 - RNA, 16 nt, Human
gccugggcagaaggaa

SEQ ID NO: 1202882 - RNA, 21 nt, Human
gccucccacgacugcccggca

SEQ ID NO: 1202883 - RNA, 14 nt, Human
gccucccacgacug

SEQ ID NO: 1202884 - RNA, 23 nt, Human
gccucccaacucaccccagcccc

SEQ ID NO: 1202885 - RNA, 22 nt, Human
gccucccaacucaccccagccc

SEQ ID NO: 1202886 - RNA, 15 nt, Human
gccucagugccacua

SEQ ID NO: 1202887 - RNA, 15 nt, Human
gccucccgaguagcu

SEQ ID NO: 1202888 - RNA, 23 nt, Human
gccucccgaauagcugggacuac

SEQ ID NO: 1202889 - RNA, 17 nt, Human
gccucccgaguagcugg

SEQ ID NO: 1202890 - RNA, 14 nt, Human
gccucagugccacu

SEQ ID NO: 1202891 - RNA, 12 nt, Human
gccucagugcca

SEQ ID NO: 1202892 - RNA, 22 nt, Human
gccucaagugauucuccugccu

SEQ ID NO: 1202893 - RNA, 23 nt, Human
gccucagccucccaaagugcugg

SEQ ID NO: 1202894 - RNA, 21 nt, Human
gccucaagugauucuccugcc

SEQ ID NO: 1202895 - RNA, 20 nt, Human
gccucaagugauucuccugc

SEQ ID NO: 1202896 - RNA, 19 nt, Human
gccucaagugauucuccug

SEQ ID NO: 1202897 - RNA, 17 nt, Human
gccucaaccuccugggc

SEQ ID NO: 1202898 - RNA, 16 nt, Human
gccucaaccuccuggg

SEQ ID NO: 1202899 - RNA, 14 nt, Human
gccucaaccuccug

SEQ ID NO: 1202900 - RNA, 23 nt, Human
gcccugguggcagugggagcugc

SEQ ID NO: 1202901 - RNA, 22 nt, Human
gcccugguggcagugggagcug

SEQ ID NO: 1202902 - RNA, 21 nt, Human
gcccugguggcagugggagcu

SEQ ID NO: 1202903 - RNA, 20 nt, Human
gcccugguggcagugggagc

SEQ ID NO: 1202904 - RNA, 19 nt, Human
gcccugguggcagugggag

SEQ ID NO: 1202905 - RNA, 18 nt, Human
gcccugguggcaguggga

SEQ ID NO: 1202906 - RNA, 17 nt, Human
gcccugguggcaguggg

SEQ ID NO: 1202907 - RNA, 14 nt, Human
gcccugguggcagu

SEQ ID NO: 1202908 - RNA, 18 nt, Human
gccgagauugcaccacug

SEQ ID NO: 1202909 - RNA, 19 nt, Human
gccgagaucacgccacugc

SEQ ID NO: 1202910 - RNA, 18 nt, Human
gccgagaucacgccacug

SEQ ID NO: 1202911 - RNA, 16 nt, Human
gccgagaucacgccac

SEQ ID NO: 1202912 - RNA, 22 nt, Human
gcccuucucuccagccccugga

SEQ ID NO: 1202913 - RNA, 21 nt, Human
gcccuucucuccagccccugg

SEQ ID NO: 1202914 - RNA, 23 nt, Human
gcccuucucuccagccccuggau

SEQ ID NO: 1202915 - RNA, 19 nt, Human
gcccuucucuccagccccu

SEQ ID NO: 1202916 - RNA, 16 nt, Human
gcccugagcuuucugc

SEQ ID NO: 1202917 - RNA, 12 nt, Human
gcccucugccca

SEQ ID NO: 1202918 - RNA, 18 nt, Human
gcccggcuccaggcuccu

SEQ ID NO: 1202919 - RNA, 17 nt, Human
gcccggcuccaggcucc

SEQ ID NO: 1202920 - RNA, 16 nt, Human
gcccggcuccaggcuc

SEQ ID NO: 1202921 - RNA, 12 nt, Human
gcccggcuccag

SEQ ID NO: 1202922 - RNA, 21 nt, Human
gccccuguucuggcagaguug

SEQ ID NO: 1202923 - RNA, 16 nt, Human
gccccugccacccugg

SEQ ID NO: 1202924 - RNA, 15 nt, Human
gccccugccacccug

SEQ ID NO: 1202925 - RNA, 14 nt, Human
gccccugccacccu

SEQ ID NO: 1202926 - RNA, 13 nt, Human
gccccugccaccc

SEQ ID NO: 1202927 - RNA, 17 nt, Human
gcagacucuacagaggc

SEQ ID NO: 1202928 - RNA, 15 nt, Human
gcagacucuacagag

SEQ ID NO: 1202929 - RNA, 19 nt, Human
gaugggugcuuggaggaag

SEQ ID NO: 1202930 - RNA, 19 nt, Human
gauggggcugcaccggcug

SEQ ID NO: 1202931 - RNA, 15 nt, Human
gauggggcugcaccg

SEQ ID NO: 1202932 - RNA, 13 nt, Human
gauggggcugcac

SEQ ID NO: 1202933 - RNA, 22 nt, Human
gaugggcaacccccagccugcu

SEQ ID NO: 1202934 - RNA, 21 nt, Human
gaugggcaacccccagccugc

SEQ ID NO: 1202935 - RNA, 20 nt, Human
gaugggcaacccccagccug

SEQ ID NO: 1202936 - RNA, 22 nt, Human
gauggccgggcgcgguggcuca

SEQ ID NO: 1202937 - RNA, 20 nt, Human
gaugcccaaagaugcagccg

SEQ ID NO: 1202938 - RNA, 19 nt, Human
gaugcccaaagaugcagcc

SEQ ID NO: 1202939 - RNA, 17 nt, Human
gauggugcaaugaccuu

SEQ ID NO: 1202940 - RNA, 16 nt, Human
gauggugcaaugaccu

SEQ ID NO: 1202941 - RNA, 15 nt, Human
gauggugcaaugacc

SEQ ID NO: 1202942 - RNA, 14 nt, Human
gauggugcaaugac

SEQ ID NO: 1202943 - RNA, 12 nt, Human
gauggugcaaug

SEQ ID NO: 1202944 - RNA, 22 nt, Human
gauuacaagcgugagccacugc

SEQ ID NO: 1202945 - RNA, 15 nt, Human
gauuaaacuuaaucu

SEQ ID NO: 1202946 - RNA, 23 nt, Human
gauuacaagcgugagccacugca

SEQ ID NO: 1202947 - RNA, 20 nt, Human
gauuacaggugugaaccacc

SEQ ID NO: 1202948 - RNA, 15 nt, Human
gauugcaacaggcug

SEQ ID NO: 1202949 - RNA, 14 nt, Human
gauucuccugccuc

SEQ ID NO: 1202950 - RNA, 14 nt, Human
gauuuaacagaaau

SEQ ID NO: 1202951 - RNA, 13 nt, Human
gauuuaacagaaa

SEQ ID NO: 1202952 - RNA, 22 nt, Human
gauuuccguuaaaauaccagcc

SEQ ID NO: 1202953 - RNA, 15 nt, Human
gauuuaacagaaaug

SEQ ID NO: 1202954 - RNA, 12 nt, Human
gcaaaccaucau

SEQ ID NO: 1202955 - RNA, 19 nt, Human
gauuuugauccaagcuggu

SEQ ID NO: 1202956 - RNA, 21 nt, Human
gauuuugaaauuuuuauuaaa

SEQ ID NO: 1202957 - RNA, 15 nt, Human
gcaaaccaucauuga

SEQ ID NO: 1202958 - RNA, 23 nt, Human
gcacugcuuccagugaggcucug

SEQ ID NO: 1202959 - RNA, 16 nt, Human
gcacgauuucuguuua

SEQ ID NO: 1202960 - RNA, 14 nt, Human
gcagacaggcaagc

SEQ ID NO: 1202961 - RNA, 13 nt, Human
gcagacaggcaag

SEQ ID NO: 1202962 - RNA, 12 nt, Human
gcagacaggcaa

SEQ ID NO: 1202963 - RNA, 15 nt, Human
gcacgauuucuguuu

SEQ ID NO: 1202964 - RNA, 13 nt, Human
gcacgauuucugu

SEQ ID NO: 1202965 - RNA, 21 nt, Human
gcaccuuagacagucccugcc

SEQ ID NO: 1202966 - RNA, 20 nt, Human
gcaccuuagacagucccugc

SEQ ID NO: 1202967 - RNA, 12 nt, Human
gcaccauaacuu

SEQ ID NO: 1202968 - RNA, 22 nt, Human
gcacagaguuguuacauuuuua

SEQ ID NO: 1202969 - RNA, 21 nt, Human
gcacagaguuguuacauuuuu

SEQ ID NO: 1202970 - RNA, 19 nt, Human
gcacagaguuguuacauuu

SEQ ID NO: 1202971 - RNA, 18 nt, Human
gcacagaguuguuacauu

SEQ ID NO: 1202972 - RNA, 16 nt, Human
gcacagaguuguuaca

SEQ ID NO: 1202973 - RNA, 15 nt, Human
gcaauggcagccuug

SEQ ID NO: 1202974 - RNA, 14 nt, Human
gcaacucaucuuag

SEQ ID NO: 1202975 - RNA, 14 nt, Human
gcaaugugauaaaa

SEQ ID NO: 1202976 - RNA, 16 nt, Human
gcacaaacagaggccg

SEQ ID NO: 1202977 - RNA, 15 nt, Human
gcacaaacagaggcc

SEQ ID NO: 1202978 - RNA, 14 nt, Human
gcacaaacagaggc

SEQ ID NO: 1202979 - RNA, 15 nt, Human
gcacagaguuguuac

SEQ ID NO: 1202980 - RNA, 22 nt, Human
gcacagacccugcccugugggc

SEQ ID NO: 1202981 - RNA, 21 nt, Human
gcacagacccugcccuguggg

SEQ ID NO: 1202982 - RNA, 20 nt, Human
gcacagacccugcccugugg

SEQ ID NO: 1202983 - RNA, 19 nt, Human
gcacagacccugcccugug

SEQ ID NO: 1202984 - RNA, 18 nt, Human
gcacagacccugcccugu

SEQ ID NO: 1202985 - RNA, 17 nt, Human
gcacagacccugcccug

SEQ ID NO: 1202986 - RNA, 16 nt, Human
gcacagacccugcccu

SEQ ID NO: 1202987 - RNA, 15 nt, Human
gcacagacccugccc

SEQ ID NO: 1202988 - RNA, 14 nt, Human
gcacagacccugcc

SEQ ID NO: 1202989 - RNA, 23 nt, Human
gcacagaaaauggaagacagcuc

SEQ ID NO: 1202990 - RNA, 22 nt, Human
gcacagaaaauggaagacagcu

SEQ ID NO: 1202991 - RNA, 21 nt, Human
gcacagaaaauggaagacagc

SEQ ID NO: 1202992 - RNA, 20 nt, Human
gcacagaaaauggaagacag

SEQ ID NO: 1202993 - RNA, 21 nt, Human
gcacaagcuccaagcucccag

SEQ ID NO: 1202994 - RNA, 18 nt, Human
gcacaagcuccaagcucc

SEQ ID NO: 1202995 - RNA, 17 nt, Human
gcacaagcuccaagcuc

SEQ ID NO: 1202996 - RNA, 15 nt, Human
gcacaagcuccaagc

SEQ ID NO: 1202997 - RNA, 20 nt, Human
gagugugccugaagucccag

SEQ ID NO: 1202998 - RNA, 12 nt, Human
gaguuacagaca

SEQ ID NO: 1202999 - RNA, 13 nt, Human
gagugggugaaua

SEQ ID NO: 1203000 - RNA, 17 nt, Human
gagugacagaggcagcc

SEQ ID NO: 1203001 - RNA, 20 nt, Human
gaguucaucuugaauuguaa

SEQ ID NO: 1203002 - RNA, 19 nt, Human
gaguucaucuugaauugua

SEQ ID NO: 1203003 - RNA, 14 nt, Human
gaguucaucuugaa

SEQ ID NO: 1203004 - RNA, 15 nt, Human
gaguuacagacaaag

SEQ ID NO: 1203005 - RNA, 13 nt, Human
gaguuacagacaa

SEQ ID NO: 1203006 - RNA, 21 nt, Human
gaguugaagacagagcuacac

SEQ ID NO: 1203007 - RNA, 17 nt, Human
gaguugaagacagagcu

SEQ ID NO: 1203008 - RNA, 15 nt, Human
gaguugaagacagag

SEQ ID NO: 1203009 - RNA, 23 nt, Human
gauacaggaaaagcugcugacag

SEQ ID NO: 1203010 - RNA, 21 nt, Human
gauacaggaaaagcugcugac

SEQ ID NO: 1203011 - RNA, 20 nt, Human
gauacaggaaaagcugcuga

SEQ ID NO: 1203012 - RNA, 22 nt, Human
gauaagaaccuuuugagugccu

SEQ ID NO: 1203013 - RNA, 22 nt, Human
gauagccaaggccaaaggaagc

SEQ ID NO: 1203014 - RNA, 16 nt, Human
gauagcacagacccug

SEQ ID NO: 1203015 - RNA, 15 nt, Human
gauagcacagacccu

SEQ ID NO: 1203016 - RNA, 20 nt, Human
gaucacggcucacugcagcc

SEQ ID NO: 1203017 - RNA, 14 nt, Human
gaucacagccucug

SEQ ID NO: 1203018 - RNA, 18 nt, Human
gaucacggcucacugcag

SEQ ID NO: 1203019 - RNA, 16 nt, Human
gaucacggcucacugc

SEQ ID NO: 1203020 - RNA, 15 nt, Human
gaucacggcucacug

SEQ ID NO: 1203021 - RNA, 11 nt, Human
gaguauauguc

SEQ ID NO: 1203022 - RNA, 19 nt, Human
gaguaggaagacuuuggaa

SEQ ID NO: 1203023 - RNA, 18 nt, Human
gaguaggaagacuuugga

SEQ ID NO: 1203024 - RNA, 16 nt, Human
gagucgaggacaggga

SEQ ID NO: 1203025 - RNA, 15 nt, Human
gagucgaggacaggg

SEQ ID NO: 1203026 - RNA, 14 nt, Human
gagucgaggacagg

SEQ ID NO: 1203027 - RNA, 19 nt, Human
gaguccgaaagggacuugg

SEQ ID NO: 1203028 - RNA, 19 nt, Human
gagucucacuguugcccag

SEQ ID NO: 1203029 - RNA, 13 nt, Human
gagucugaaggcu

SEQ ID NO: 1203030 - RNA, 12 nt, Human
gagucugaaggc

SEQ ID NO: 1203031 - RNA, 15 nt, Human
gagucugaaggcugg

SEQ ID NO: 1203032 - RNA, 14 nt, Human
gagucugaaggcug

SEQ ID NO: 1203033 - RNA, 16 nt, Human
gagugacagaggcagc

SEQ ID NO: 1203034 - RNA, 15 nt, Human
gagugacagaggcag

SEQ ID NO: 1203035 - RNA, 14 nt, Human
gagugacagaggca

SEQ ID NO: 1203036 - RNA, 17 nt, Human
gagugaagcugggagaa

SEQ ID NO: 1203037 - RNA, 17 nt, Human
gaguaggaagacuuugg

SEQ ID NO: 1203038 - RNA, 13 nt, Human
gaguaggaagacu

SEQ ID NO: 1203039 - RNA, 12 nt, Human
gaguaggaagac

SEQ ID NO: 1203040 - RNA, 22 nt, Human
gaguagcugggacuacaggcac

SEQ ID NO: 1203041 - RNA, 23 nt, Human
gaguacuacaguccucccaucuc

SEQ ID NO: 1203042 - RNA, 21 nt, Human
gaguacuacaguccucccauc

SEQ ID NO: 1203043 - RNA, 20 nt, Human
gaguacuacaguccucccau

SEQ ID NO: 1203044 - RNA, 16 nt, Human
gagguuucaaaccucc

SEQ ID NO: 1203045 - RNA, 17 nt, Human
gagguugggaggccauu

SEQ ID NO: 1203046 - RNA, 15 nt, Human
gagguugggaggcca

SEQ ID NO: 1203047 - RNA, 20 nt, Human
gaggucagagccugcaguua

SEQ ID NO: 1203048 - RNA, 17 nt, Human
gaggucagagccugcag

SEQ ID NO: 1203049 - RNA, 14 nt, Human
gaggguugggcugg

SEQ ID NO: 1203050 - RNA, 15 nt, Human
gaggguugggcuggu

SEQ ID NO: 1203051 - RNA, 24 nt, Human
gagguaaggaauaccugucccccu

SEQ ID NO: 1203052 - RNA, 21 nt, Human
gagguaaggaauaccuguccc

SEQ ID NO: 1203053 - RNA, 17 nt, Human
gaggucaaggcugcagu

SEQ ID NO: 1203054 - RNA, 13 nt, Human
gaggucagagccu

SEQ ID NO: 1203055 - RNA, 12 nt, Human
gaggucagagcc

SEQ ID NO: 1203056 - RNA, 14 nt, Human
gagggucugaggaa

SEQ ID NO: 1203057 - RNA, 13 nt, Human
gagggucugagga

SEQ ID NO: 1203058 - RNA, 22 nt, Human
gagggugucccaaaaagaaagg

SEQ ID NO: 1203059 - RNA, 21 nt, Human
gaggguggugaccucugccug

SEQ ID NO: 1203060 - RNA, 14 nt, Human
gaggguggugaccu

SEQ ID NO: 1203061 - RNA, 15 nt, Human
gagggugggaguggg

SEQ ID NO: 1203062 - RNA, 12 nt, Human
gaggguggaaua

SEQ ID NO: 1203063 - RNA, 21 nt, Human
gagggugaagugaagacaaug

SEQ ID NO: 1203064 - RNA, 14 nt, Human
gagggcacagaaaa

SEQ ID NO: 1203065 - RNA, 13 nt, Human
gaggguaaggcug

SEQ ID NO: 1203066 - RNA, 17 nt, Human
gaggggguggccuccca

SEQ ID NO: 1203067 - RNA, 19 nt, Human
gagggagggcuccagacac

SEQ ID NO: 1203068 - RNA, 20 nt, Human
gaggcugggcucccuuccca

SEQ ID NO: 1203069 - RNA, 22 nt, Human
gagggagugacagaggcagccc

SEQ ID NO: 1203070 - RNA, 21 nt, Human
gagggagugacagaggcagcc

SEQ ID NO: 1203071 - RNA, 18 nt, Human
gagggagugacagaggca

SEQ ID NO: 1203072 - RNA, 14 nt, Human
gagggagguaagga

SEQ ID NO: 1203073 - RNA, 20 nt, Human
gagggagggcuccagacaca

SEQ ID NO: 1203074 - RNA, 16 nt, Human
gaggccuucucugaag

SEQ ID NO: 1203075 - RNA, 19 nt, Human
gaggccuucucugaaggac

SEQ ID NO: 1203076 - RNA, 18 nt, Human
gaggccuucucugaagga

SEQ ID NO: 1203077 - RNA, 22 nt, Human
gaggcccuucucuccagccccu

SEQ ID NO: 1203078 - RNA, 21 nt, Human
gaggcccuucucuccagcccc

SEQ ID NO: 1203079 - RNA, 20 nt, Human
gaggcccuucucuccagccc

SEQ ID NO: 1203080 - RNA, 15 nt, Human
gaggcccuucucucc

SEQ ID NO: 1203081 - RNA, 19 nt, Human
gaggcccagagggccugca

SEQ ID NO: 1203082 - RNA, 16 nt, Human
gaggcccagagggccu

SEQ ID NO: 1203083 - RNA, 15 nt, Human
gaggcccagagggcc

SEQ ID NO: 1203084 - RNA, 14 nt, Human
gaggcccagagggc

SEQ ID NO: 1203085 - RNA, 13 nt, Human
gaggcccagaggg

SEQ ID NO: 1203086 - RNA, 11 nt, Human
gaggcccagag

SEQ ID NO: 1203087 - RNA, 21 nt, Human
gaggcagccccauucugccug

SEQ ID NO: 1203088 - RNA, 9 nt, Human
gaggcaggg

SEQ ID NO: 1203089 - RNA, 20 nt, Human
gaggcagccccauucugccu

SEQ ID NO: 1203090 - RNA, 19 nt, Human
gaggcagccccauucugcc

SEQ ID NO: 1203091 - RNA, 23 nt, Human
gaggccaugggccuccugugugu

SEQ ID NO: 1203092 - RNA, 21 nt, Human
gaggccaugggccuccugugu

SEQ ID NO: 1203093 - RNA, 20 nt, Human
gaggccaugggccuccugug

SEQ ID NO: 1203094 - RNA, 18 nt, Human
gaggccaugggccuccug

SEQ ID NO: 1203095 - RNA, 17 nt, Human
gaggccaugggccuccu

SEQ ID NO: 1203096 - RNA, 14 nt, Human
gaggccaugggccu

SEQ ID NO: 1203097 - RNA, 20 nt, Human
gaggauugcuugagcucagg

SEQ ID NO: 1203098 - RNA, 22 nt, Human
gaggaucucuugagccugggag

SEQ ID NO: 1203099 - RNA, 19 nt, Human
gaggaucucuugagccugg

SEQ ID NO: 1203100 - RNA, 16 nt, Human
gaggaucucuugagcc

SEQ ID NO: 1203101 - RNA, 13 nt, Human
gaggaucucuuga

SEQ ID NO: 1203102 - RNA, 19 nt, Human
gagaucacgccacugcacu

SEQ ID NO: 1203103 - RNA, 18 nt, Human
gagaucacgccacugcac

SEQ ID NO: 1203104 - RNA, 19 nt, Human
gagauagccaaggccaaag

SEQ ID NO: 1203105 - RNA, 16 nt, Human
gagauagccaaggcca

SEQ ID NO: 1203106 - RNA, 14 nt, Human
gagauagccaaggc

SEQ ID NO: 1203107 - RNA, 21 nt, Human
gagcacuaaggugugcucuga

SEQ ID NO: 1203108 - RNA, 15 nt, Human
gagcacuaaggugug

SEQ ID NO: 1203109 - RNA, 22 nt, Human
gagcaccuuagacagucccugc

SEQ ID NO: 1203110 - RNA, 21 nt, Human
gagcaccuuagacagucccug

SEQ ID NO: 1203111 - RNA, 20 nt, Human
gagcaccuuagacagucccu

SEQ ID NO: 1203112 - RNA, 18 nt, Human
gagcaagacgcugugcug

SEQ ID NO: 1203113 - RNA, 19 nt, Human
gagccagggucucacuaug

SEQ ID NO: 1203114 - RNA, 23 nt, Human
gagccagauuucacucuccuugg

SEQ ID NO: 1203115 - RNA, 14 nt, Human
gagccagggucuca

SEQ ID NO: 1203116 - RNA, 16 nt, Human
gagcagagaccauccc

SEQ ID NO: 1203117 - RNA, 12 nt, Human
gagcagagacca

SEQ ID NO: 1203118 - RNA, 16 nt, Human
gagcagagaauucucu

SEQ ID NO: 1203119 - RNA, 19 nt, Human
gagccaauuuaaagaaaac

SEQ ID NO: 1203120 - RNA, 23 nt, Human
gagaaugcacaaacagaggccgc

SEQ ID NO: 1203121 - RNA, 21 nt, Human
gagaccaucccugaaggcccc

SEQ ID NO: 1203122 - RNA, 18 nt, Human
gagaccaucccugaaggc

SEQ ID NO: 1203123 - RNA, 14 nt, Human
gagaccaucccuga

SEQ ID NO: 1203124 - RNA, 22 nt, Human
gagacaggguuuugccauguug

SEQ ID NO: 1203125 - RNA, 13 nt, Human
gagacucugucuc

SEQ ID NO: 1203126 - RNA, 22 nt, Human
gagacuccugcaggcagccagg

SEQ ID NO: 1203127 - RNA, 21 nt, Human
gagacucgcgacaaugcaaac

SEQ ID NO: 1203128 - RNA, 20 nt, Human
gagacucgcgacaaugcaaa

SEQ ID NO: 1203129 - RNA, 21 nt, Human
gagacuccugcaggcagccag

SEQ ID NO: 1203130 - RNA, 20 nt, Human
gagacuccugcaggcagcca

SEQ ID NO: 1203131 - RNA, 19 nt, Human
gagacuccugcaggcagcc

SEQ ID NO: 1203132 - RNA, 20 nt, Human
gagagggugggagugggccc

SEQ ID NO: 1203133 - RNA, 16 nt, Human
gagagggugggagugg

SEQ ID NO: 1203134 - RNA, 14 nt, Human
gagagggugggagu

SEQ ID NO: 1203135 - RNA, 13 nt, Human
gagaggggcacag

SEQ ID NO: 1203136 - RNA, 19 nt, Human
gagaggggaacagacugga

SEQ ID NO: 1203137 - RNA, 16 nt, Human
gagaagcagaggaagg

SEQ ID NO: 1203138 - RNA, 16 nt, Human
gagaagagaaugcaca

SEQ ID NO: 1203139 - RNA, 14 nt, Human
gagaagagaaugca

SEQ ID NO: 1203140 - RNA, 14 nt, Human
gagaaaugagcuug

SEQ ID NO: 1203141 - RNA, 22 nt, Human
gagaaaguacuucuccacccug

SEQ ID NO: 1203142 - RNA, 16 nt, Human
gagaaagguugaagca

SEQ ID NO: 1203143 - RNA, 13 nt, Human
gacuuggaagcuc

SEQ ID NO: 1203144 - RNA, 19 nt, Human
gacuuaagcacacuugaca

SEQ ID NO: 1203145 - RNA, 18 nt, Human
gacuggaagcacagcuuc

SEQ ID NO: 1203146 - RNA, 16 nt, Human
gacuggaagcacagcu

SEQ ID NO: 1203147 - RNA, 15 nt, Human
gacuggaagcacagc

SEQ ID NO: 1203148 - RNA, 14 nt, Human
gacuggaagcacag

SEQ ID NO: 1203149 - RNA, 15 nt, Human
gacugcccggcaggg

SEQ ID NO: 1203150 - RNA, 13 nt, Human
gacugcccggcag

SEQ ID NO: 1203151 - RNA, 23 nt, Human
gacugaguacguugugcauuugg

SEQ ID NO: 1203152 - RNA, 22 nt, Human
gacugaguacguugugcauuug

SEQ ID NO: 1203153 - RNA, 21 nt, Human
gacugaguacguugugcauuu

SEQ ID NO: 1203154 - RNA, 18 nt, Human
gacucgcgacaaugcaaa

SEQ ID NO: 1203155 - RNA, 17 nt, Human
gacucgcgacaaugcaa

SEQ ID NO: 1203156 - RNA, 15 nt, Human
gacucauucuucugu

SEQ ID NO: 1203157 - RNA, 21 nt, Human
gacuacaggugugagucacca

SEQ ID NO: 1203158 - RNA, 18 nt, Human
gacuacaggugugaguca

SEQ ID NO: 1203159 - RNA, 13 nt, Human
gacucgcgacaau

SEQ ID NO: 1203160 - RNA, 13 nt, Human
gacuccugcaggc

SEQ ID NO: 1203161 - RNA, 14 nt, Human
gacuccugcaggca

SEQ ID NO: 1203162 - RNA, 12 nt, Human
gacuccugcagg

SEQ ID NO: 1203163 - RNA, 13 nt, Human
gaaugucagugug

SEQ ID NO: 1203164 - RNA, 15 nt, Human
gaauguuugccucug

SEQ ID NO: 1203165 - RNA, 20 nt, Human
gaauccagacccggcugcgu

SEQ ID NO: 1203166 - RNA, 12 nt, Human
gaaaggcuccag

SEQ ID NO: 1203167 - RNA, 20 nt, Human
gaaugcacaaacagaggccg

SEQ ID NO: 1203168 - RNA, 11 nt, Human
gaaugcagugg

SEQ ID NO: 1203169 - RNA, 18 nt, Human
gaaugaaccacaucuugc

SEQ ID NO: 1203170 - RNA, 21 nt, Human
gaaugcacaaacagaggccgc

SEQ ID NO: 1203171 - RNA, 22 nt, Human
gaauuucuuuugccguuauuaa

SEQ ID NO: 1203172 - RNA, 15 nt, Human
gaauuguaaggaaug

SEQ ID NO: 1203173 - RNA, 23 nt, Human
gacaacacucauugaccugaggc

SEQ ID NO: 1203174 - RNA, 22 nt, Human
gacaacacucauugaccugagg

SEQ ID NO: 1203175 - RNA, 23 nt, Human
gacacauguccaagaagcccagg

SEQ ID NO: 1203176 - RNA, 20 nt, Human
gacacauguccaagaagccc

SEQ ID NO: 1203177 - RNA, 15 nt, Human
gacacauguccaaga

SEQ ID NO: 1203178 - RNA, 19 nt, Human
gacacaugcaaggucauuu

SEQ ID NO: 1203179 - RNA, 14 nt, Human
gacacaugcaaggu

SEQ ID NO: 1203180 - RNA, 21 nt, Human
gacacaggcccggcuccaggc

SEQ ID NO: 1203181 - RNA, 20 nt, Human
gacacaggcccggcuccagg

SEQ ID NO: 1203182 - RNA, 19 nt, Human
gacacaggcccggcuccag

SEQ ID NO: 1203183 - RNA, 22 nt, Human
gacacaagccuucggcgccuua

SEQ ID NO: 1203184 - RNA, 16 nt, Human
gacacaagccuucggc

SEQ ID NO: 1203185 - RNA, 21 nt, Human
gacaaggauugcuacuguccu

SEQ ID NO: 1203186 - RNA, 19 nt, Human
gacaaggauugcuacuguc

SEQ ID NO: 1203187 - RNA, 18 nt, Human
gacaaggauugcuacugu

SEQ ID NO: 1203188 - RNA, 21 nt, Human
gacaaggaugaucuaggaaga

SEQ ID NO: 1203189 - RNA, 18 nt, Human
gacaaugugaaaagaaaa

SEQ ID NO: 1203190 - RNA, 12 nt, Human
gacaaugugaaa

SEQ ID NO: 1203191 - RNA, 22 nt, Human
gacaaugcaaaccaucauugaa

SEQ ID NO: 1203192 - RNA, 20 nt, Human
gacaaugugaaaagaaaaau

SEQ ID NO: 1203193 - RNA, 19 nt, Human
gacaaugugaaaagaaaaa

SEQ ID NO: 1203194 - RNA, 20 nt, Human
gaccauucuccaccugccag

SEQ ID NO: 1203195 - RNA, 19 nt, Human
gaccauucuccaccugcca

SEQ ID NO: 1203196 - RNA, 22 nt, Human
gaccauucuccaccugccaggg

SEQ ID NO: 1203197 - RNA, 21 nt, Human
gaccauucuccaccugccagg

SEQ ID NO: 1203198 - RNA, 17 nt, Human
gaccagagcugccaccu

SEQ ID NO: 1203199 - RNA, 15 nt, Human
gaccagagcugccac

SEQ ID NO: 1203200 - RNA, 14 nt, Human
gaccagagcugcca

SEQ ID NO: 1203201 - RNA, 13 nt, Human
gaccagagcugcc

SEQ ID NO: 1203202 - RNA, 19 nt, Human
gaccagagcugccaccugc

SEQ ID NO: 1203203 - RNA, 18 nt, Human
gaccagagcugccaccug

SEQ ID NO: 1203204 - RNA, 11 nt, Human
gaccagagcug

SEQ ID NO: 1203205 - RNA, 21 nt, Human
gaccagacaccuugacagggc

SEQ ID NO: 1203206 - RNA, 16 nt, Human
gaccacguuucuaaag

SEQ ID NO: 1203207 - RNA, 14 nt, Human
gaccacguuucuaa

SEQ ID NO: 1203208 - RNA, 18 nt, Human
gacaugggaaaggggaag

SEQ ID NO: 1203209 - RNA, 19 nt, Human
gaccgugaggccagagaca

SEQ ID NO: 1203210 - RNA, 18 nt, Human
gaccgugaggccagagac

SEQ ID NO: 1203211 - RNA, 17 nt, Human
gaccgugaggccagaga

SEQ ID NO: 1203212 - RNA, 16 nt, Human
gaccgugaggccagag

SEQ ID NO: 1203213 - RNA, 23 nt, Human
gacccugucucaaaaaaagaaaa

SEQ ID NO: 1203214 - RNA, 21 nt, Human
gacccuuguggucccacccca

SEQ ID NO: 1203215 - RNA, 20 nt, Human
gacccuuguggucccacccc

SEQ ID NO: 1203216 - RNA, 19 nt, Human
gacccuuguggucccaccc

SEQ ID NO: 1203217 - RNA, 12 nt, Human
gacccugucuca

SEQ ID NO: 1203218 - RNA, 12 nt, Human
gacccugcccug

SEQ ID NO: 1203219 - RNA, 23 nt, Human
gacccugaggcccagagggccug

SEQ ID NO: 1203220 - RNA, 21 nt, Human
gaccccuccaugugggcuagu

SEQ ID NO: 1203221 - RNA, 18 nt, Human
gaccccuccaugugggcu

SEQ ID NO: 1203222 - RNA, 14 nt, Human
gaccccuccaugug

SEQ ID NO: 1203223 - RNA, 14 nt, Human
gacaugggaaaggg

SEQ ID NO: 1203224 - RNA, 14 nt, Human
gacaugaucuucuu

SEQ ID NO: 1203225 - RNA, 22 nt, Human
gacaguuaagagaaaugagcuu

SEQ ID NO: 1203226 - RNA, 14 nt, Human
gacaguuaagagaa

SEQ ID NO: 1203227 - RNA, 24 nt, Human
gacagggcacaccgggcacucaga

SEQ ID NO: 1203228 - RNA, 23 nt, Human
gacagggcacaccgggcacucag

SEQ ID NO: 1203229 - RNA, 16 nt, Human
gacagggaggugaccc

SEQ ID NO: 1203230 - RNA, 23 nt, Human
gacaggaccagggauuuccauga

SEQ ID NO: 1203231 - RNA, 15 nt, Human
gacaggaccagggau

SEQ ID NO: 1203232 - RNA, 14 nt, Human
gacaggaccaggga

SEQ ID NO: 1203233 - RNA, 21 nt, Human
gacagcugccugggaucccuc

SEQ ID NO: 1203234 - RNA, 18 nt, Human
gacagcugccugggaucc

SEQ ID NO: 1203235 - RNA, 17 nt, Human
gacagcugccugggauc

SEQ ID NO: 1203236 - RNA, 16 nt, Human
gacagcugccugggau

SEQ ID NO: 1203237 - RNA, 21 nt, Human
gacagccacggccaggccaga

SEQ ID NO: 1203238 - RNA, 20 nt, Human
gacagccacggccaggccag

SEQ ID NO: 1203239 - RNA, 19 nt, Human
gacagccacggccaggcca

SEQ ID NO: 1203240 - RNA, 18 nt, Human
gacagccacggccaggcc

SEQ ID NO: 1203241 - RNA, 17 nt, Human
gacagccacggccaggc

SEQ ID NO: 1203242 - RNA, 14 nt, Human
gacagccacggcca

SEQ ID NO: 1203243 - RNA, 22 nt, Human
gacagagugagacucugucuca

SEQ ID NO: 1203244 - RNA, 20 nt, Human
gacagagugagacucugucu

SEQ ID NO: 1203245 - RNA, 14 nt, Human
gacagagucucacu

SEQ ID NO: 1203246 - RNA, 23 nt, Human
gacagaggggguggccucccaac

SEQ ID NO: 1203247 - RNA, 22 nt, Human
gacagaggggguggccucccaa

SEQ ID NO: 1203248 - RNA, 21 nt, Human
gacagaggggguggccuccca

SEQ ID NO: 1203249 - RNA, 19 nt, Human
gacagaggggguggccucc

SEQ ID NO: 1203250 - RNA, 18 nt, Human
gacagaggggguggccuc

SEQ ID NO: 1203251 - RNA, 15 nt, Human
gacagaggggguggc

SEQ ID NO: 1203252 - RNA, 17 nt, Human
gacagaggcagccccau

SEQ ID NO: 1203253 - RNA, 16 nt, Human
gacagaggcagcccca

SEQ ID NO: 1203254 - RNA, 14 nt, Human
gacagaggcagccc

SEQ ID NO: 1203255 - RNA, 21 nt, Human
gacagagcaagugagacccug

SEQ ID NO: 1203256 - RNA, 18 nt, Human
cuuuguuaguuucuccaa

SEQ ID NO: 1203257 - RNA, 12 nt, Human
cuuuuguucuug

SEQ ID NO: 1203258 - RNA, 11 nt, Human
cuuuuguucuu

SEQ ID NO: 1203259 - RNA, 20 nt, Human
cuuuuguucuugguuuguaa

SEQ ID NO: 1203260 - RNA, 18 nt, Human
gaaaacacuguucucugc

SEQ ID NO: 1203261 - RNA, 19 nt, Human
gaaaacacauuuuucuuag

SEQ ID NO: 1203262 - RNA, 18 nt, Human
gaaaacacauuuuucuua

SEQ ID NO: 1203263 - RNA, 17 nt, Human
gaaaaaggaugcacaga

SEQ ID NO: 1203264 - RNA, 15 nt, Human
gaaaaaggaggaaga

SEQ ID NO: 1203265 - RNA, 12 nt, Human
gaaaaaggagga

SEQ ID NO: 1203266 - RNA, 22 nt, Human
cuuuuuuggcugcugaaggcuc

SEQ ID NO: 1203267 - RNA, 20 nt, Human
cuuuuuuggcugcugaaggc

SEQ ID NO: 1203268 - RNA, 17 nt, Human
cuuuuuuggcugcugaa

SEQ ID NO: 1203269 - RNA, 22 nt, Human
gaaaaucagccugcuccagcug

SEQ ID NO: 1203270 - RNA, 20 nt, Human
gaaaaucagccugcuccagc

SEQ ID NO: 1203271 - RNA, 22 nt, Human
gaaaacguggcugcuucaagga

SEQ ID NO: 1203272 - RNA, 20 nt, Human
gaaaacguggcugcuucaag

SEQ ID NO: 1203273 - RNA, 24 nt, Human
gaaaacacuguucucugcccucca

SEQ ID NO: 1203274 - RNA, 22 nt, Human
gaaagcccugagcuuucugcua

SEQ ID NO: 1203275 - RNA, 21 nt, Human
gaaagcccugagcuuucugcu

SEQ ID NO: 1203276 - RNA, 17 nt, Human
gaaagcccugagcuuuc

SEQ ID NO: 1203277 - RNA, 16 nt, Human
gaaagaguaggaagac

SEQ ID NO: 1203278 - RNA, 15 nt, Human
gaaagaguaggaaga

SEQ ID NO: 1203279 - RNA, 19 nt, Human
gaaagacuuuuccaacccu

SEQ ID NO: 1203280 - RNA, 23 nt, Human
gaaacccagcucugguccauaga

SEQ ID NO: 1203281 - RNA, 19 nt, Human
gaaacccagcucuggucca

SEQ ID NO: 1203282 - RNA, 18 nt, Human
gaaacccagcucuggucc

SEQ ID NO: 1203283 - RNA, 16 nt, Human
gaaacccagcucuggu

SEQ ID NO: 1203284 - RNA, 15 nt, Human
gaaacccagcucugg

SEQ ID NO: 1203285 - RNA, 14 nt, Human
gaaacccagcucug

SEQ ID NO: 1203286 - RNA, 13 nt, Human
gaaacccagcucu

SEQ ID NO: 1203287 - RNA, 21 nt, Human
cuuguaaauagcucagguguc

SEQ ID NO: 1203288 - RNA, 22 nt, Human
cuuguacauaaugcgugcauac

SEQ ID NO: 1203289 - RNA, 21 nt, Human
cuuguacauaaugcgugcaua

SEQ ID NO: 1203290 - RNA, 19 nt, Human
cuuguacauaaugcgugca

SEQ ID NO: 1203291 - RNA, 15 nt, Human
cuuguacauaaugcg

SEQ ID NO: 1203292 - RNA, 18 nt, Human
cuuguaaauagcucaggu

SEQ ID NO: 1203293 - RNA, 17 nt, Human
cuuguaaauagcucagg

SEQ ID NO: 1203294 - RNA, 23 nt, Human
cuuggggggcugaggugggagga

SEQ ID NO: 1203295 - RNA, 15 nt, Human
cuuuaugcacaaaau

SEQ ID NO: 1203296 - RNA, 19 nt, Human
cuuuauaauucuacuuuga

SEQ ID NO: 1203297 - RNA, 15 nt, Human
cuuuagcgcccaguu

SEQ ID NO: 1203298 - RNA, 14 nt, Human
cuuuagcgcccagu

SEQ ID NO: 1203299 - RNA, 13 nt, Human
cuuuacuauggcc

SEQ ID NO: 1203300 - RNA, 15 nt, Human
cuuuccaucuacccu

SEQ ID NO: 1203301 - RNA, 12 nt, Human
cuuuccugaggc

SEQ ID NO: 1203302 - RNA, 16 nt, Human
cuuucccucccuuccu

SEQ ID NO: 1203303 - RNA, 14 nt, Human
cuuucccucccuuc

SEQ ID NO: 1203304 - RNA, 13 nt, Human
cuuucccucccuu

SEQ ID NO: 1203305 - RNA, 11 nt, Human
cuuucccuccc

SEQ ID NO: 1203306 - RNA, 16 nt, Human
cuuuccugaggcuggg

SEQ ID NO: 1203307 - RNA, 15 nt, Human
cuuuccugaggcugg

SEQ ID NO: 1203308 - RNA, 13 nt, Human
cuuuccugaggcu

SEQ ID NO: 1203309 - RNA, 20 nt, Human
cuuucuggcuaugcauuuga

SEQ ID NO: 1203310 - RNA, 19 nt, Human
cuuucuggcuaugcauuug

SEQ ID NO: 1203311 - RNA, 18 nt, Human
cuuucuggcuaugcauuu

SEQ ID NO: 1203312 - RNA, 17 nt, Human
cuuucuggcuaugcauu

SEQ ID NO: 1203313 - RNA, 19 nt, Human
cuuuggcuauuagagauca

SEQ ID NO: 1203314 - RNA, 14 nt, Human
cuuuguccccaccg

SEQ ID NO: 1203315 - RNA, 19 nt, Human
cuuugugaggaagccgcug

SEQ ID NO: 1203316 - RNA, 15 nt, Human
cuuugugaggaagcc

SEQ ID NO: 1203317 - RNA, 15 nt, Human
cuuuguccccaccgc

SEQ ID NO: 1203318 - RNA, 20 nt, Human
cuuugcagacaggcaagcac

SEQ ID NO: 1203319 - RNA, 24 nt, Human
cuuugaccucugcagcaauaaagc

SEQ ID NO: 1203320 - RNA, 20 nt, Human
cuuugaccucugcagcaaua

SEQ ID NO: 1203321 - RNA, 18 nt, Human
cuuugaccucugcagcaa

SEQ ID NO: 1203322 - RNA, 17 nt, Human
cuuugaccucugcagca

SEQ ID NO: 1203323 - RNA, 15 nt, Human
cuuugaccucugcag

SEQ ID NO: 1203324 - RNA, 14 nt, Human
cuuugaccucugca

SEQ ID NO: 1203325 - RNA, 20 nt, Human
cuuagucacugagacagccc

SEQ ID NO: 1203326 - RNA, 19 nt, Human
cuuagucacugagacagcc

SEQ ID NO: 1203327 - RNA, 18 nt, Human
cuuagucacugagacagc

SEQ ID NO: 1203328 - RNA, 16 nt, Human
cuuagucacugagaca

SEQ ID NO: 1203329 - RNA, 19 nt, Human
cuuagauguauauauuucc

SEQ ID NO: 1203330 - RNA, 13 nt, Human
cuuagauguauau

SEQ ID NO: 1203331 - RNA, 16 nt, Human
cuguucuggcagaguu

SEQ ID NO: 1203332 - RNA, 23 nt, Human
cuucacagaugggugcuuggagg

SEQ ID NO: 1203333 - RNA, 16 nt, Human
cuucaaggauccugag

SEQ ID NO: 1203334 - RNA, 15 nt, Human
cuucaaggauccuga

SEQ ID NO: 1203335 - RNA, 13 nt, Human
cuucaaggauccu

SEQ ID NO: 1203336 - RNA, 10 nt, Human
cuucaaggau

SEQ ID NO: 1203337 - RNA, 17 nt, Human
cuuauuuaaugaaagac

SEQ ID NO: 1203338 - RNA, 18 nt, Human
cuuauuuaaugaaagacu

SEQ ID NO: 1203339 - RNA, 15 nt, Human
cuucaaauauuuccc

SEQ ID NO: 1203340 - RNA, 21 nt, Human
cuuccaggggugggacacccu

SEQ ID NO: 1203341 - RNA, 17 nt, Human
cuuccaggggugggaca

SEQ ID NO: 1203342 - RNA, 15 nt, Human
cuuccagggguggga

SEQ ID NO: 1203343 - RNA, 14 nt, Human
cuuccagggguggg

SEQ ID NO: 1203344 - RNA, 19 nt, Human
cuuccaggcugggagagcc

SEQ ID NO: 1203345 - RNA, 16 nt, Human
cuuccaggcugggaga

SEQ ID NO: 1203346 - RNA, 15 nt, Human
cuuccaggcugggag

SEQ ID NO: 1203347 - RNA, 17 nt, Human
cuucccuacaguugaaa

SEQ ID NO: 1203348 - RNA, 14 nt, Human
cuuccaggcuggga

SEQ ID NO: 1203349 - RNA, 12 nt, Human
cuuccaggcugg

SEQ ID NO: 1203350 - RNA, 22 nt, Human
cuuccacaagagcccaggccuc

SEQ ID NO: 1203351 - RNA, 21 nt, Human
cuuccacaagagcccaggccu

SEQ ID NO: 1203352 - RNA, 19 nt, Human
cuuccacaagagcccaggc

SEQ ID NO: 1203353 - RNA, 17 nt, Human
cuuccacaagagcccag

SEQ ID NO: 1203354 - RNA, 17 nt, Human
cuucaguggcagcugcu

SEQ ID NO: 1203355 - RNA, 16 nt, Human
cuucaguggcagcugc

SEQ ID NO: 1203356 - RNA, 15 nt, Human
cuucaguggcagcug

SEQ ID NO: 1203357 - RNA, 14 nt, Human
cuucaguggcagcu

SEQ ID NO: 1203358 - RNA, 13 nt, Human
cuucaguggcagc

SEQ ID NO: 1203359 - RNA, 22 nt, Human
cuucagugccuuauggaacacu

SEQ ID NO: 1203360 - RNA, 18 nt, Human
cuucagugccuuauggaa

SEQ ID NO: 1203361 - RNA, 23 nt, Human
cuucaguaagccgugauuuucau

SEQ ID NO: 1203362 - RNA, 16 nt, Human
cuucaguaagccguga

SEQ ID NO: 1203363 - RNA, 13 nt, Human
cuucugcuucagc

SEQ ID NO: 1203364 - RNA, 21 nt, Human
cuucuguccuacucuguguca

SEQ ID NO: 1203365 - RNA, 19 nt, Human
cuucuguccuacucugugu

SEQ ID NO: 1203366 - RNA, 18 nt, Human
cuucuguccuacucugug

SEQ ID NO: 1203367 - RNA, 17 nt, Human
cuucuguccuacucugu

SEQ ID NO: 1203368 - RNA, 16 nt, Human
cuucuguccuacucug

SEQ ID NO: 1203369 - RNA, 21 nt, Human
cuucuguacgucugacaggca

SEQ ID NO: 1203370 - RNA, 20 nt, Human
cuucuguacgucugacaggc

SEQ ID NO: 1203371 - RNA, 18 nt, Human
cuucuguacgucugacag

SEQ ID NO: 1203372 - RNA, 15 nt, Human
cuucuguacgucuga

SEQ ID NO: 1203373 - RNA, 14 nt, Human
cuucuguacgucug

SEQ ID NO: 1203374 - RNA, 13 nt, Human
cuucucugaagga

SEQ ID NO: 1203375 - RNA, 19 nt, Human
cuucucuccagccccugga

SEQ ID NO: 1203376 - RNA, 17 nt, Human
cuucucuccagccccug

SEQ ID NO: 1203377 - RNA, 15 nt, Human
cuucucuccagcccc

SEQ ID NO: 1203378 - RNA, 13 nt, Human
cuucucuccagcc

SEQ ID NO: 1203379 - RNA, 19 nt, Human
cuucuccuucaccuuuguc

SEQ ID NO: 1203380 - RNA, 14 nt, Human
cuucuccaggcugu

SEQ ID NO: 1203381 - RNA, 13 nt, Human
cuucuccaggcug

SEQ ID NO: 1203382 - RNA, 12 nt, Human
cuucuccaggcu

SEQ ID NO: 1203383 - RNA, 20 nt, Human
cuucuccacuuucuagccag

SEQ ID NO: 1203384 - RNA, 11 nt, Human
cuucuccacuu

SEQ ID NO: 1203385 - RNA, 21 nt, Human
cuugaggguugggcugguguc

SEQ ID NO: 1203386 - RNA, 20 nt, Human
cuugaggguugggcuggugu

SEQ ID NO: 1203387 - RNA, 19 nt, Human
cuugaggguugggcuggug

SEQ ID NO: 1203388 - RNA, 18 nt, Human
cuugagccuugaacuuug

SEQ ID NO: 1203389 - RNA, 17 nt, Human
cuugagccuugaacuuu

SEQ ID NO: 1203390 - RNA, 15 nt, Human
cuugagccuugaacu

SEQ ID NO: 1203391 - RNA, 13 nt, Human
cuugaccucaggu

SEQ ID NO: 1203392 - RNA, 21 nt, Human
cuugaccgugaggccagagac

SEQ ID NO: 1203393 - RNA, 20 nt, Human
cuugaccgugaggccagaga

SEQ ID NO: 1203394 - RNA, 18 nt, Human
cuugaccgugaggccaga

SEQ ID NO: 1203395 - RNA, 17 nt, Human
cuugaccgugaggccag

SEQ ID NO: 1203396 - RNA, 16 nt, Human
cuugaagacuuuucuu

SEQ ID NO: 1203397 - RNA, 23 nt, Human
cuugaccauucuccaccugccag

SEQ ID NO: 1203398 - RNA, 22 nt, Human
cuugaccauucuccaccugcca

SEQ ID NO: 1203399 - RNA, 21 nt, Human
cuugaacuuugaccucugcag

SEQ ID NO: 1203400 - RNA, 17 nt, Human
cuugaacuuugaccucu

SEQ ID NO: 1203401 - RNA, 13 nt, Human
cuugaacuccugg

SEQ ID NO: 1203402 - RNA, 23 nt, Human
cuugaaaacacuguucucugccc

SEQ ID NO: 1203403 - RNA, 14 nt, Human
cuugaaaacacugu

SEQ ID NO: 1203404 - RNA, 22 nt, Human
cuucuuuauaauucuacuuuga

SEQ ID NO: 1203405 - RNA, 21 nt, Human
cuucuguggguuucuaaagcu

SEQ ID NO: 1203406 - RNA, 14 nt, Human
cuucuguggguuuc

SEQ ID NO: 1203407 - RNA, 13 nt, Human
cuucuguggguuu

SEQ ID NO: 1203408 - RNA, 20 nt, Human
cugugugugcgccuacagga

SEQ ID NO: 1203409 - RNA, 23 nt, Human
cugugucuugcaauggcagccuu

SEQ ID NO: 1203410 - RNA, 22 nt, Human
cugugucuugcaauggcagccu

SEQ ID NO: 1203411 - RNA, 21 nt, Human
cugugucuugcaauggcagcc

SEQ ID NO: 1203412 - RNA, 21 nt, Human
cuguucagcugguugagguuu

SEQ ID NO: 1203413 - RNA, 19 nt, Human
cuguucagcugguugaggu

SEQ ID NO: 1203414 - RNA, 13 nt, Human
cuguuacugucuu

SEQ ID NO: 1203415 - RNA, 20 nt, Human
cuguucucugcccuccaaga

SEQ ID NO: 1203416 - RNA, 19 nt, Human
cuguucucugcccuccaag

SEQ ID NO: 1203417 - RNA, 18 nt, Human
cuguucucugcccuccaa

SEQ ID NO: 1203418 - RNA, 17 nt, Human
cuguucucugcccucca

SEQ ID NO: 1203419 - RNA, 16 nt, Human
cuguucucugcccucc

SEQ ID NO: 1203420 - RNA, 15 nt, Human
cuguucucugcccuc

SEQ ID NO: 1203421 - RNA, 14 nt, Human
cuguucucugcccu

SEQ ID NO: 1203422 - RNA, 13 nt, Human
cuguucucugccc

SEQ ID NO: 1203423 - RNA, 18 nt, Human
cugucuccauguuugaug

SEQ ID NO: 1203424 - RNA, 18 nt, Human
cugugauggggcccugcc

SEQ ID NO: 1203425 - RNA, 23 nt, Human
cugugaguacuacaguccuccca

SEQ ID NO: 1203426 - RNA, 21 nt, Human
cugugaguacuacaguccucc

SEQ ID NO: 1203427 - RNA, 20 nt, Human
cugugaguacuacaguccuc

SEQ ID NO: 1203428 - RNA, 22 nt, Human
cugugccauuuuguauuuuacu

SEQ ID NO: 1203429 - RNA, 14 nt, Human
cugugccauuuugu

SEQ ID NO: 1203430 - RNA, 18 nt, Human
cugugccaugugccaggu

SEQ ID NO: 1203431 - RNA, 16 nt, Human
cugugccaugugccag

SEQ ID NO: 1203432 - RNA, 20 nt, Human
cugugauggggcccugccuc

SEQ ID NO: 1203433 - RNA, 19 nt, Human
cugugauggggcccugccu

SEQ ID NO: 1203434 - RNA, 17 nt, Human
cuguggaugauaaaaca

SEQ ID NO: 1203435 - RNA, 14 nt, Human
cugugggcccccaa

SEQ ID NO: 1203436 - RNA, 22 nt, Human
cugugcugcccugcccaccugg

SEQ ID NO: 1203437 - RNA, 18 nt, Human
cugugccucugggacugg

SEQ ID NO: 1203438 - RNA, 17 nt, Human
cugugccucugggacug

SEQ ID NO: 1203439 - RNA, 16 nt, Human
cugugccucugggacu

SEQ ID NO: 1203440 - RNA, 14 nt, Human
cugugccucuggga

SEQ ID NO: 1203441 - RNA, 20 nt, Human
cugucccuuacgugaguccu

SEQ ID NO: 1203442 - RNA, 22 nt, Human
cuguccccgcacugggcuuggg

SEQ ID NO: 1203443 - RNA, 19 nt, Human
cuguccccgcacugggcuu

SEQ ID NO: 1203444 - RNA, 18 nt, Human
cuguccccgcacugggcu

SEQ ID NO: 1203445 - RNA, 14 nt, Human
cuguccuacccacc

SEQ ID NO: 1203446 - RNA, 15 nt, Human
cuguccgagcuuuga

SEQ ID NO: 1203447 - RNA, 22 nt, Human
cugucccuuacgugaguccugg

SEQ ID NO: 1203448 - RNA, 16 nt, Human
cugucucaaaaaaaga

SEQ ID NO: 1203449 - RNA, 23 nt, Human
cugucucaaaaaaacacaaaagu

SEQ ID NO: 1203450 - RNA, 18 nt, Human
cugucucaaaaaaagaaa

SEQ ID NO: 1203451 - RNA, 14 nt, Human
cuguacagagccca

SEQ ID NO: 1203452 - RNA, 13 nt, Human
cuguacagagccc

SEQ ID NO: 1203453 - RNA, 14 nt, Human
cuguaucccaugag

SEQ ID NO: 1203454 - RNA, 23 nt, Human
cuguaucccaugagccucagcau

SEQ ID NO: 1203455 - RNA, 13 nt, Human
cugucaauuacag

SEQ ID NO: 1203456 - RNA, 19 nt, Human
cuggguucuacccaggugc

SEQ ID NO: 1203457 - RNA, 17 nt, Human
cuggguucuacccaggu

SEQ ID NO: 1203458 - RNA, 16 nt, Human
cuggguucuacccagg

SEQ ID NO: 1203459 - RNA, 15 nt, Human
cuggguucuacccag

SEQ ID NO: 1203460 - RNA, 14 nt, Human
cuggguacuugugg

SEQ ID NO: 1203461 - RNA, 22 nt, Human
cuggguaacuagggaagauaau

SEQ ID NO: 1203462 - RNA, 19 nt, Human
cugggggcugggcagagga

SEQ ID NO: 1203463 - RNA, 15 nt, Human
cugggggaagaagcu

SEQ ID NO: 1203464 - RNA, 13 nt, Human
cugggggaagaag

SEQ ID NO: 1203465 - RNA, 13 nt, Human
cugggcuugggga

SEQ ID NO: 1203466 - RNA, 24 nt, Human
cugggcuucaguggcagcugcuuu

SEQ ID NO: 1203467 - RNA, 20 nt, Human
cuguaauccuagcacuuugg

SEQ ID NO: 1203468 - RNA, 13 nt, Human
cuguacaaaguag

SEQ ID NO: 1203469 - RNA, 15 nt, Human
cuguacaaaguagaa

SEQ ID NO: 1203470 - RNA, 14 nt, Human
cugguggcagcugc

SEQ ID NO: 1203471 - RNA, 13 nt, Human
cugguggcagcug

SEQ ID NO: 1203472 - RNA, 23 nt, Human
cugguggcagcucaccucucccu

SEQ ID NO: 1203473 - RNA, 15 nt, Human
cuggcccacugcauc

SEQ ID NO: 1203474 - RNA, 14 nt, Human
cuggccagaugcac

SEQ ID NO: 1203475 - RNA, 21 nt, Human
cuggcacccggccccugcugg

SEQ ID NO: 1203476 - RNA, 20 nt, Human
cuggcacccggccccugcug

SEQ ID NO: 1203477 - RNA, 20 nt, Human
cuggagugcagugagccgag

SEQ ID NO: 1203478 - RNA, 23 nt, Human
cuggcacugcuuccagugaggcu

SEQ ID NO: 1203479 - RNA, 20 nt, Human
cuggcacugcuuccagugag

SEQ ID NO: 1203480 - RNA, 19 nt, Human
cuggcacugcuuccaguga

SEQ ID NO: 1203481 - RNA, 22 nt, Human
cuggcacccggccccugcuggu

SEQ ID NO: 1203482 - RNA, 24 nt, Human
cuggcucuuccaggcugggagagc

SEQ ID NO: 1203483 - RNA, 22 nt, Human
cuggcucuuccaggcugggaga

SEQ ID NO: 1203484 - RNA, 21 nt, Human
cuggcucuuccaggcugggag

SEQ ID NO: 1203485 - RNA, 15 nt, Human
cuggcgugcaguggu

SEQ ID NO: 1203486 - RNA, 14 nt, Human
cuggcgugcagugg

SEQ ID NO: 1203487 - RNA, 14 nt, Human
cuggccugugucua

SEQ ID NO: 1203488 - RNA, 24 nt, Human
cuggccuggccccucagggucccu

SEQ ID NO: 1203489 - RNA, 13 nt, Human
cuggccuggcccc

SEQ ID NO: 1203490 - RNA, 21 nt, Human
cuggccucugcacuccccugc

SEQ ID NO: 1203491 - RNA, 20 nt, Human
cuggccucugcacuccccug

SEQ ID NO: 1203492 - RNA, 18 nt, Human
cuggccucugcacucccc

SEQ ID NO: 1203493 - RNA, 17 nt, Human
cuggagugcagugagcc

SEQ ID NO: 1203494 - RNA, 16 nt, Human
cuggagugcagugagc

SEQ ID NO: 1203495 - RNA, 15 nt, Human
cuggagugcagugag

SEQ ID NO: 1203496 - RNA, 14 nt, Human
cuggagugcaguga

SEQ ID NO: 1203497 - RNA, 22 nt, Human
cuggagguacgaaaagagggga

SEQ ID NO: 1203498 - RNA, 17 nt, Human
cuggagguacgaaaaga

SEQ ID NO: 1203499 - RNA, 23 nt, Human
cuggacaggcauguucucugagg

SEQ ID NO: 1203500 - RNA, 17 nt, Human
cuggacaggcauguucu

SEQ ID NO: 1203501 - RNA, 16 nt, Human
cuggaccuugaacugg

SEQ ID NO: 1203502 - RNA, 15 nt, Human
cuggacccuguggau

SEQ ID NO: 1203503 - RNA, 21 nt, Human
cuggaccuugaacuggguacu

SEQ ID NO: 1203504 - RNA, 20 nt, Human
cuggaccuugaacuggguac

SEQ ID NO: 1203505 - RNA, 17 nt, Human
cuggaccuugaacuggg

SEQ ID NO: 1203506 - RNA, 23 nt, Human
cugcugguucaggguuggccccu

SEQ ID NO: 1203507 - RNA, 15 nt, Human
cugcugguucagggu

SEQ ID NO: 1203508 - RNA, 13 nt, Human
cugcugguucagg

SEQ ID NO: 1203509 - RNA, 23 nt, Human
cugcuuccagugaggcucugccc

SEQ ID NO: 1203510 - RNA, 21 nt, Human
cugcuuccagugaggcucugc

SEQ ID NO: 1203511 - RNA, 20 nt, Human
cugcuuccagugaggcucug

SEQ ID NO: 1203512 - RNA, 19 nt, Human
cugcuuccagugaggcucu

SEQ ID NO: 1203513 - RNA, 18 nt, Human
cugcuuccagugaggcuc

SEQ ID NO: 1203514 - RNA, 16 nt, Human
cugcuuccagugaggc

SEQ ID NO: 1203515 - RNA, 15 nt, Human
cugcuuccagugagg

SEQ ID NO: 1203516 - RNA, 15 nt, Human
cugcugcuggcuggu

SEQ ID NO: 1203517 - RNA, 12 nt, Human
cugcugaaggcu

SEQ ID NO: 1203518 - RNA, 11 nt, Human
cugcugaaggc

SEQ ID NO: 1203519 - RNA, 20 nt, Human
cugcuccagcuguucagcug

SEQ ID NO: 1203520 - RNA, 19 nt, Human
cugcuccagcuguucagcu

SEQ ID NO: 1203521 - RNA, 19 nt, Human
cugcgaccacaagaaggau

SEQ ID NO: 1203522 - RNA, 15 nt, Human
cugccgcagcccugc

SEQ ID NO: 1203523 - RNA, 19 nt, Human
cugccgcagcccugcagag

SEQ ID NO: 1203524 - RNA, 18 nt, Human
cugccgcagcccugcaga

SEQ ID NO: 1203525 - RNA, 17 nt, Human
cugccgcagcccugcag

SEQ ID NO: 1203526 - RNA, 12 nt, Human
cugcccuccaag

SEQ ID NO: 1203527 - RNA, 23 nt, Human
cucccuucccaccucucucacuc

SEQ ID NO: 1203528 - RNA, 17 nt, Human
cucccuucccaccucuc

SEQ ID NO: 1203529 - RNA, 16 nt, Human
cucccuucccaccucu

SEQ ID NO: 1203530 - RNA, 15 nt, Human
cucccuucccaccuc

SEQ ID NO: 1203531 - RNA, 14 nt, Human
cucccuucccaccu

SEQ ID NO: 1203532 - RNA, 19 nt, Human
cugcccuccaagaccuucu

SEQ ID NO: 1203533 - RNA, 23 nt, Human
cugccucugacacacagcucugu

SEQ ID NO: 1203534 - RNA, 22 nt, Human
cugccucugacacacagcucug

SEQ ID NO: 1203535 - RNA, 15 nt, Human
cugccucugacacac

SEQ ID NO: 1203536 - RNA, 19 nt, Human
cugccucccaucacccgcu

SEQ ID NO: 1203537 - RNA, 16 nt, Human
cugccucccaucaccc

SEQ ID NO: 1203538 - RNA, 14 nt, Human
cugccucccaucac

SEQ ID NO: 1203539 - RNA, 12 nt, Human
cugccucccauc

SEQ ID NO: 1203540 - RNA, 11 nt, Human
cugccucccau

SEQ ID NO: 1203541 - RNA, 22 nt, Human
cugccugggaucccucauccuc

SEQ ID NO: 1203542 - RNA, 21 nt, Human
cugccugggaucccucauccu

SEQ ID NO: 1203543 - RNA, 20 nt, Human
cugccugcccaggccccugc

SEQ ID NO: 1203544 - RNA, 17 nt, Human
cugccugcccaggcccc

SEQ ID NO: 1203545 - RNA, 16 nt, Human
cugccugcccaggccc

SEQ ID NO: 1203546 - RNA, 16 nt, Human
cugccugaagucacac

SEQ ID NO: 1203547 - RNA, 15 nt, Human
cugccugaagucaca

SEQ ID NO: 1203548 - RNA, 15 nt, Human
cugccucuucucuac

SEQ ID NO: 1203549 - RNA, 13 nt, Human
cuacucuguguca

SEQ ID NO: 1203550 - RNA, 12 nt, Human
cuacucuguguc

SEQ ID NO: 1203551 - RNA, 19 nt, Human
cuacuguccuacccacccu

SEQ ID NO: 1203552 - RNA, 19 nt, Human
cuacucgaguuacagacaa

SEQ ID NO: 1203553 - RNA, 16 nt, Human
cuacucgaguuacaga

SEQ ID NO: 1203554 - RNA, 15 nt, Human
cuacucgaguuacag

SEQ ID NO: 1203555 - RNA, 21 nt, Human
cuagagguucaaagauauuuu

SEQ ID NO: 1203556 - RNA, 18 nt, Human
cuagagguucaaagauau

SEQ ID NO: 1203557 - RNA, 17 nt, Human
cuagagguucaaagaua

SEQ ID NO: 1203558 - RNA, 20 nt, Human
cuacuguccuacccacccuc

SEQ ID NO: 1203559 - RNA, 23 nt, Human
cuagccuuagaagucacacagua

SEQ ID NO: 1203560 - RNA, 22 nt, Human
cuagccuuagaagucacacagu

SEQ ID NO: 1203561 - RNA, 21 nt, Human
cuagccuuagaagucacacag

SEQ ID NO: 1203562 - RNA, 22 nt, Human
cuagccugugccucugggacug

SEQ ID NO: 1203563 - RNA, 21 nt, Human
cuagccugugccucugggacu

SEQ ID NO: 1203564 - RNA, 24 nt, Human
cuagauacuguaucaugacaaaga

SEQ ID NO: 1203565 - RNA, 16 nt, Human
cuagauacuguaucau

SEQ ID NO: 1203566 - RNA, 13 nt, Human
cuagauacuguau

SEQ ID NO: 1203567 - RNA, 17 nt, Human
cuauucaguaauaacuc

SEQ ID NO: 1203568 - RNA, 16 nt, Human
cuauguaucaaugagu

SEQ ID NO: 1203569 - RNA, 13 nt, Human
cuauguaucaaug

SEQ ID NO: 1203570 - RNA, 23 nt, Human
cuauucaguaauaacucuacccu

SEQ ID NO: 1203571 - RNA, 21 nt, Human
cuauagccuaggugacagagu

SEQ ID NO: 1203572 - RNA, 20 nt, Human
cuauagccuaggugacagag

SEQ ID NO: 1203573 - RNA, 19 nt, Human
cuauagccuaggugacaga

SEQ ID NO: 1203574 - RNA, 17 nt, Human
cuaggaagacuuuggaa

SEQ ID NO: 1203575 - RNA, 15 nt, Human
cuaggaagacuuugg

SEQ ID NO: 1203576 - RNA, 20 nt, Human
cuaggaacacuccuucacag

SEQ ID NO: 1203577 - RNA, 23 nt, Human
cucacacggacacucaaaagcug

SEQ ID NO: 1203578 - RNA, 14 nt, Human
cucaaguccucuuu

SEQ ID NO: 1203579 - RNA, 19 nt, Human
cucaacucuccuccagagu

SEQ ID NO: 1203580 - RNA, 18 nt, Human
cucaacucuccuccagag

SEQ ID NO: 1203581 - RNA, 16 nt, Human
cucaacucuccuccag

SEQ ID NO: 1203582 - RNA, 14 nt, Human
cucaacucuccucc

SEQ ID NO: 1203583 - RNA, 17 nt, Human
cucaaauuucuaaaucu

SEQ ID NO: 1203584 - RNA, 15 nt, Human
cucaaauuucuaaau

SEQ ID NO: 1203585 - RNA, 14 nt, Human
cucaaauuucuaaa

SEQ ID NO: 1203586 - RNA, 16 nt, Human
cuauugcugcuugagg

SEQ ID NO: 1203587 - RNA, 20 nt, Human
cuccccagccccaucccaaa

SEQ ID NO: 1203588 - RNA, 23 nt, Human
cuccccugcuggguguggcgcag

SEQ ID NO: 1203589 - RNA, 21 nt, Human
cuccccugcuggguguggcgc

SEQ ID NO: 1203590 - RNA, 15 nt, Human
cucccgaguagcugg

SEQ ID NO: 1203591 - RNA, 23 nt, Human
cucccgaauagcugggacuacag

SEQ ID NO: 1203592 - RNA, 20 nt, Human
cucccgaauagcugggacua

SEQ ID NO: 1203593 - RNA, 18 nt, Human
cucccucagucuggcccu

SEQ ID NO: 1203594 - RNA, 15 nt, Human
cucccuucauccuuc

SEQ ID NO: 1203595 - RNA, 16 nt, Human
cucccaucacuucccu

SEQ ID NO: 1203596 - RNA, 15 nt, Human
cucccacaaaggaga

SEQ ID NO: 1203597 - RNA, 16 nt, Human
cucccaacucacccca

SEQ ID NO: 1203598 - RNA, 15 nt, Human
cucccaacucacccc

SEQ ID NO: 1203599 - RNA, 14 nt, Human
cucccaacucaccc

SEQ ID NO: 1203600 - RNA, 16 nt, Human
cucccaaagugcuggg

SEQ ID NO: 1203601 - RNA, 18 nt, Human
cuccagcucaccagcccc

SEQ ID NO: 1203602 - RNA, 16 nt, Human
cuccagcucaccagcc

SEQ ID NO: 1203603 - RNA, 15 nt, Human
cuccagcucaccagc

SEQ ID NO: 1203604 - RNA, 15 nt, Human
cuccagccccuggau

SEQ ID NO: 1203605 - RNA, 14 nt, Human
cuccagccccugga

SEQ ID NO: 1203606 - RNA, 13 nt, Human
cuccagccccugg

SEQ ID NO: 1203607 - RNA, 11 nt, Human
cuccagccccu

SEQ ID NO: 1203608 - RNA, 16 nt, Human
cuccagagucagaagu

SEQ ID NO: 1203609 - RNA, 21 nt, Human
cucauugaccugaggcccuuc

SEQ ID NO: 1203610 - RNA, 19 nt, Human
cucauugaccugaggcccu

SEQ ID NO: 1203611 - RNA, 12 nt, Human
cucauucuucug

SEQ ID NO: 1203612 - RNA, 17 nt, Human
cucauugaccugaggcc

SEQ ID NO: 1203613 - RNA, 22 nt, Human
cucauucuccuuguguuacuaa

SEQ ID NO: 1203614 - RNA, 18 nt, Human
cucauucuccuuguguua

SEQ ID NO: 1203615 - RNA, 21 nt, Human
cucauuugucacacacuuugg

SEQ ID NO: 1203616 - RNA, 20 nt, Human
cucagggccuggcucaggug

SEQ ID NO: 1203617 - RNA, 19 nt, Human
cucagggccuggcucaggu

SEQ ID NO: 1203618 - RNA, 13 nt, Human
cucagggccuggc

SEQ ID NO: 1203619 - RNA, 18 nt, Human
cucaggcaggugggaugg

SEQ ID NO: 1203620 - RNA, 15 nt, Human
cucaggcagguggga

SEQ ID NO: 1203621 - RNA, 21 nt, Human
cucagguggggucacucuggc

SEQ ID NO: 1203622 - RNA, 20 nt, Human
cucagguggggucacucugg

SEQ ID NO: 1203623 - RNA, 19 nt, Human
cucagguggggucacucug

SEQ ID NO: 1203624 - RNA, 23 nt, Human
cucaggugauccacccaccucag

SEQ ID NO: 1203625 - RNA, 22 nt, Human
cucagggucccugguggcagcu

SEQ ID NO: 1203626 - RNA, 21 nt, Human
cucagggucccugguggcagc

SEQ ID NO: 1203627 - RNA, 20 nt, Human
cucagggucccugguggcag

SEQ ID NO: 1203628 - RNA, 14 nt, Human
cucagggccugguc

SEQ ID NO: 1203629 - RNA, 24 nt, Human
cucagggucccugguggcagcuca

SEQ ID NO: 1203630 - RNA, 15 nt, Human
cucagcauccuggca

SEQ ID NO: 1203631 - RNA, 22 nt, Human
cucagcauccuggcacccggcc

SEQ ID NO: 1203632 - RNA, 21 nt, Human
cucagcauccuggcacccggc

SEQ ID NO: 1203633 - RNA, 13 nt, Human
cucagcauccugg

SEQ ID NO: 1203634 - RNA, 16 nt, Human
cucagcaggggagggu

SEQ ID NO: 1203635 - RNA, 21 nt, Human
cucagcaaaagaugcuucuca

SEQ ID NO: 1203636 - RNA, 20 nt, Human
cucagcaaaagaugcuucuc

SEQ ID NO: 1203637 - RNA, 19 nt, Human
cucagcaaaagaugcuucu

SEQ ID NO: 1203638 - RNA, 21 nt, Human
cucagcggggacagcuccuuc

SEQ ID NO: 1203639 - RNA, 20 nt, Human
cucagcggggacagcuccuu

SEQ ID NO: 1203640 - RNA, 19 nt, Human
cucagcggggacagcuccu

SEQ ID NO: 1203641 - RNA, 18 nt, Human
cucagcggggacagcucc

SEQ ID NO: 1203642 - RNA, 16 nt, Human
cucagcggggacagcu

SEQ ID NO: 1203643 - RNA, 15 nt, Human
cucagcggggacagc

SEQ ID NO: 1203644 - RNA, 14 nt, Human
cucagcggggacag

SEQ ID NO: 1203645 - RNA, 23 nt, Human
cucagcggggacagcuccuucug

SEQ ID NO: 1203646 - RNA, 16 nt, Human
cucagaucuucugugg

SEQ ID NO: 1203647 - RNA, 19 nt, Human
cucacuguugcccaggcug

SEQ ID NO: 1203648 - RNA, 18 nt, Human
cucacuguugcccaggcu

SEQ ID NO: 1203649 - RNA, 17 nt, Human
cucacuguugcccaggc

SEQ ID NO: 1203650 - RNA, 16 nt, Human
cucacuguugcccagg

SEQ ID NO: 1203651 - RNA, 19 nt, Human
cucagagagggugggagug

SEQ ID NO: 1203652 - RNA, 23 nt, Human
cucagagagggugggagugggcc

SEQ ID NO: 1203653 - RNA, 16 nt, Human
cucacugcagccucaa

SEQ ID NO: 1203654 - RNA, 15 nt, Human
cucacugcagccuca

SEQ ID NO: 1203655 - RNA, 15 nt, Human
cucacuguugcccag

SEQ ID NO: 1203656 - RNA, 14 nt, Human
cucacuguugccca

SEQ ID NO: 1203657 - RNA, 17 nt, Human
cuacccucuuagaaaaa

SEQ ID NO: 1203658 - RNA, 19 nt, Human
cuacccagcgagcccuggu

SEQ ID NO: 1203659 - RNA, 13 nt, Human
cuacccaggugcu

SEQ ID NO: 1203660 - RNA, 18 nt, Human
cuacccagcgagcccugg

SEQ ID NO: 1203661 - RNA, 17 nt, Human
cuacccagcgagcccug

SEQ ID NO: 1203662 - RNA, 15 nt, Human
cuacccagcgagccc

SEQ ID NO: 1203663 - RNA, 13 nt, Human
cuacccacccucc

SEQ ID NO: 1203664 - RNA, 22 nt, Human
cuacauuauaaaugucucuuua

SEQ ID NO: 1203665 - RNA, 14 nt, Human
cuacauucuguuaa

SEQ ID NO: 1203666 - RNA, 13 nt, Human
cuacauucuguua

SEQ ID NO: 1203667 - RNA, 20 nt, Human
cuacauggaguauaugucaa

SEQ ID NO: 1203668 - RNA, 18 nt, Human
cuacauggaguauauguc

SEQ ID NO: 1203669 - RNA, 13 nt, Human
cuacaguccuccc

SEQ ID NO: 1203670 - RNA, 16 nt, Human
cuacaggugugaguca

SEQ ID NO: 1203671 - RNA, 14 nt, Human
cuacaggugugagu

SEQ ID NO: 1203672 - RNA, 17 nt, Human
cuacaggcacccaccau

SEQ ID NO: 1203673 - RNA, 15 nt, Human
cuacaggcacccacc

SEQ ID NO: 1203674 - RNA, 16 nt, Human
cuacaggagugagcac

SEQ ID NO: 1203675 - RNA, 15 nt, Human
cuacaggagugagca

SEQ ID NO: 1203676 - RNA, 14 nt, Human
cuacaggagugagc

SEQ ID NO: 1203677 - RNA, 22 nt, Human
cuacagaggccaugggccuccu

SEQ ID NO: 1203678 - RNA, 20 nt, Human
cuacagaggccaugggccuc

SEQ ID NO: 1203679 - RNA, 18 nt, Human
cuacagaggccaugggcc

SEQ ID NO: 1203680 - RNA, 18 nt, Human
cuacacugugcugagucu

SEQ ID NO: 1203681 - RNA, 17 nt, Human
cuacacugugcugaguc

SEQ ID NO: 1203682 - RNA, 14 nt, Human
cuacacugugcuga

SEQ ID NO: 1203683 - RNA, 13 nt, Human
cuacacugugcug

SEQ ID NO: 1203684 - RNA, 23 nt, Human
cuacagcuugaccgugaggccag

SEQ ID NO: 1203685 - RNA, 22 nt, Human
cuacagcuugaccgugaggcca

SEQ ID NO: 1203686 - RNA, 19 nt, Human
cuacagcuugaccgugagg

SEQ ID NO: 1203687 - RNA, 23 nt, Human
cuaauagacaauuuauuauggca

SEQ ID NO: 1203688 - RNA, 19 nt, Human
cuaauagacaauuuauuau

SEQ ID NO: 1203689 - RNA, 17 nt, Human
cuaauagacaauuuauu

SEQ ID NO: 1203690 - RNA, 22 nt, Human
cuaagcuauucaguaauaacuc

SEQ ID NO: 1203691 - RNA, 21 nt, Human
cuacacaggggaaaagaggag

SEQ ID NO: 1203692 - RNA, 13 nt, Human
cuaaugggacacu

SEQ ID NO: 1203693 - RNA, 12 nt, Human
cuaaugggacac

SEQ ID NO: 1203694 - RNA, 18 nt, Human
cuaauauguaacaagcca

SEQ ID NO: 1203695 - RNA, 14 nt, Human
cuaaccacgcugga

SEQ ID NO: 1203696 - RNA, 12 nt, Human
cuaaccacgcug

SEQ ID NO: 1203697 - RNA, 23 nt, Human
cuaagagggagggagggcuccag

SEQ ID NO: 1203698 - RNA, 22 nt, Human
cuaagagggagggagggcucca

SEQ ID NO: 1203699 - RNA, 15 nt, Human
cuaagagggagggag

SEQ ID NO: 1203700 - RNA, 13 nt, Human
cuaagagggaggg

SEQ ID NO: 1203701 - RNA, 22 nt, Human
cuaaaugaaaaucgugacaaca

SEQ ID NO: 1203702 - RNA, 21 nt, Human
cuaaaucuccaaaauaaaacu

SEQ ID NO: 1203703 - RNA, 23 nt, Human
cgggaggauguucugggacacag

SEQ ID NO: 1203704 - RNA, 20 nt, Human
cgggaagggggcugggacau

SEQ ID NO: 1203705 - RNA, 19 nt, Human
cgggaagggggcugggaca

SEQ ID NO: 1203706 - RNA, 16 nt, Human
cgggaagggggcuggg

SEQ ID NO: 1203707 - RNA, 14 nt, Human
cggcuggccuggcc

SEQ ID NO: 1203708 - RNA, 13 nt, Human
cggcuggccuggc

SEQ ID NO: 1203709 - RNA, 23 nt, Human
cggcuggcagcccaccccucaac

SEQ ID NO: 1203710 - RNA, 24 nt, Human
cggccaggccagagggagugacag

SEQ ID NO: 1203711 - RNA, 20 nt, Human
cggccaggccagagggagug

SEQ ID NO: 1203712 - RNA, 12 nt, Human
cggccaggccag

SEQ ID NO: 1203713 - RNA, 11 nt, Human
cggccaggcca

SEQ ID NO: 1203714 - RNA, 19 nt, Human
cgcgguggcucacgccugu

SEQ ID NO: 1203715 - RNA, 15 nt, Human
cgcgacaaugcaaac

SEQ ID NO: 1203716 - RNA, 14 nt, Human
cgcgacaaugcaaa

SEQ ID NO: 1203717 - RNA, 24 nt, Human
cgcuacccgggaagggggcuggga

SEQ ID NO: 1203718 - RNA, 21 nt, Human
cgcuacccgggaagggggcug

SEQ ID NO: 1203719 - RNA, 18 nt, Human
cgcuacccgggaaggggg

SEQ ID NO: 1203720 - RNA, 21 nt, Human
cgcccagucuggaaugcagug

SEQ ID NO: 1203721 - RNA, 19 nt, Human
cgcccagucuggaaugcag

SEQ ID NO: 1203722 - RNA, 13 nt, Human
cgcccagucugga

SEQ ID NO: 1203723 - RNA, 19 nt, Human
cgcagcccugcagagggca

SEQ ID NO: 1203724 - RNA, 18 nt, Human
cgcagcccugcagagggc

SEQ ID NO: 1203725 - RNA, 23 nt, Human
cgcugugcugcccugcccaccug

SEQ ID NO: 1203726 - RNA, 21 nt, Human
cgcugugcugcccugcccacc

SEQ ID NO: 1203727 - RNA, 19 nt, Human
cgcugugcugcccugccca

SEQ ID NO: 1203728 - RNA, 14 nt, Human
cgcugugcugcccu

SEQ ID NO: 1203729 - RNA, 13 nt, Human
cgcugugcugccc

SEQ ID NO: 1203730 - RNA, 11 nt, Human
cgcugugcugc

SEQ ID NO: 1203731 - RNA, 17 nt, Human
cggaauaguuggcuagg

SEQ ID NO: 1203732 - RNA, 16 nt, Human
cggaauaguuggcuag

SEQ ID NO: 1203733 - RNA, 16 nt, Human
cgcuuucuacccagcg

SEQ ID NO: 1203734 - RNA, 14 nt, Human
cgcuuucuacccag

SEQ ID NO: 1203735 - RNA, 17 nt, Human
cggagaaaggaagggcu

SEQ ID NO: 1203736 - RNA, 15 nt, Human
cggagaaaggaaggg

SEQ ID NO: 1203737 - RNA, 22 nt, Human
cggacagccacggccaggccag

SEQ ID NO: 1203738 - RNA, 21 nt, Human
cggacagccacggccaggcca

SEQ ID NO: 1203739 - RNA, 17 nt, Human
cgcagcccugcagaggg

SEQ ID NO: 1203740 - RNA, 20 nt, Human
cgcagcauauucaggaagcu

SEQ ID NO: 1203741 - RNA, 19 nt, Human
cgcagcauauucaggaagc

SEQ ID NO: 1203742 - RNA, 23 nt, Human
cgcacuucgggaggucgaggcag

SEQ ID NO: 1203743 - RNA, 17 nt, Human
cgcacugggcuugggga

SEQ ID NO: 1203744 - RNA, 13 nt, Human
cgcacugggcuug

SEQ ID NO: 1203745 - RNA, 16 nt, Human
cgaggacagggaggug

SEQ ID NO: 1203746 - RNA, 19 nt, Human
cgagcccugguggcagugg

SEQ ID NO: 1203747 - RNA, 20 nt, Human
ccugugccucugggacugga

SEQ ID NO: 1203748 - RNA, 20 nt, Human
ccugugggcccccaaaugga

SEQ ID NO: 1203749 - RNA, 20 nt, Human
ccuguggaugauaaaacaca

SEQ ID NO: 1203750 - RNA, 19 nt, Human
ccuucauuuggcauucccc

SEQ ID NO: 1203751 - RNA, 16 nt, Human
ccuucucuccagcccc

SEQ ID NO: 1203752 - RNA, 15 nt, Human
ccuucucuccagccc

SEQ ID NO: 1203753 - RNA, 13 nt, Human
ccuucucuccagc

SEQ ID NO: 1203754 - RNA, 12 nt, Human
ccuucucuccag

SEQ ID NO: 1203755 - RNA, 13 nt, Human
ccuuccaggggug

SEQ ID NO: 1203756 - RNA, 17 nt, Human
ccuuccauggacuuugu

SEQ ID NO: 1203757 - RNA, 19 nt, Human
ccuucucuccagccccugg

SEQ ID NO: 1203758 - RNA, 21 nt, Human
ccuuggugucgggcaugacac

SEQ ID NO: 1203759 - RNA, 20 nt, Human
ccuuggugucgggcaugaca

SEQ ID NO: 1203760 - RNA, 19 nt, Human
ccuuggugucgggcaugac

SEQ ID NO: 1203761 - RNA, 14 nt, Human
ccuuggggagcagg

SEQ ID NO: 1203762 - RNA, 16 nt, Human
ccuuggcugcagggag

SEQ ID NO: 1203763 - RNA, 22 nt, Human
ccuuggcucaaguccucuuuuc

SEQ ID NO: 1203764 - RNA, 19 nt, Human
ccuuggauuguccccgacc

SEQ ID NO: 1203765 - RNA, 15 nt, Human
ccuuggauugucccc

SEQ ID NO: 1203766 - RNA, 21 nt, Human
ccuugacagggcacaccgggc

SEQ ID NO: 1203767 - RNA, 18 nt, Human
ccuugacagggcacaccg

SEQ ID NO: 1203768 - RNA, 18 nt, Human
ccuucucuccagccccug

SEQ ID NO: 1203769 - RNA, 17 nt, Human
ccuucucuccagccccu

SEQ ID NO: 1203770 - RNA, 14 nt, Human
ccuuuguccccacc

SEQ ID NO: 1203771 - RNA, 18 nt, Human
ccuuuguccccaccgcag

SEQ ID NO: 1203772 - RNA, 16 nt, Human
ccuuuguccccaccgc

SEQ ID NO: 1203773 - RNA, 23 nt, Human
ccuuuguauucucuccuguaccu

SEQ ID NO: 1203774 - RNA, 22 nt, Human
ccuuuguauucucuccuguacc

SEQ ID NO: 1203775 - RNA, 24 nt, Human
ccuuuguauucucuccuguaccuc

SEQ ID NO: 1203776 - RNA, 15 nt, Human
ccuuuuuuggcugcu

SEQ ID NO: 1203777 - RNA, 23 nt, Human
ccuuugugaggaagccgcugggg

SEQ ID NO: 1203778 - RNA, 17 nt, Human
ccuuugugaggaagccg

SEQ ID NO: 1203779 - RNA, 16 nt, Human
ccuuugugaggaagcc

SEQ ID NO: 1203780 - RNA, 15 nt, Human
ccuuugugaggaagc

SEQ ID NO: 1203781 - RNA, 23 nt, Human
ccuuuguccccaccgcagacagg

SEQ ID NO: 1203782 - RNA, 22 nt, Human
ccuuuguccccaccgcagacag

SEQ ID NO: 1203783 - RNA, 14 nt, Human
ccuuugugaggaag

SEQ ID NO: 1203784 - RNA, 23 nt, Human
cgaacauguuuuucuucucccuc

SEQ ID NO: 1203785 - RNA, 21 nt, Human
cgaacauguuuuucuucuccc

SEQ ID NO: 1203786 - RNA, 22 nt, Human
ccuuuuuuggcugcugaaggcu

SEQ ID NO: 1203787 - RNA, 20 nt, Human
ccuuuuuuggcugcugaagg

SEQ ID NO: 1203788 - RNA, 18 nt, Human
ccuuuuuuggcugcugaa

SEQ ID NO: 1203789 - RNA, 17 nt, Human
ccuuuuuuggcugcuga

SEQ ID NO: 1203790 - RNA, 23 nt, Human
cgaaagggacuuggaagcuccgc

SEQ ID NO: 1203791 - RNA, 17 nt, Human
cgaauauugcugauggu

SEQ ID NO: 1203792 - RNA, 15 nt, Human
cgaauauugcugaug

SEQ ID NO: 1203793 - RNA, 14 nt, Human
cgaauauugcugau

SEQ ID NO: 1203794 - RNA, 12 nt, Human
cgaauauugcug

SEQ ID NO: 1203795 - RNA, 11 nt, Human
cgaauauugcu

SEQ ID NO: 1203796 - RNA, 16 nt, Human
cgaauagcugggacua

SEQ ID NO: 1203797 - RNA, 22 nt, Human
ccugcccuuaccugccaggaag

SEQ ID NO: 1203798 - RNA, 21 nt, Human
ccugcccuuaccugccaggaa

SEQ ID NO: 1203799 - RNA, 19 nt, Human
ccugcccuuaccugccagg

SEQ ID NO: 1203800 - RNA, 15 nt, Human
ccugcccugugggcc

SEQ ID NO: 1203801 - RNA, 14 nt, Human
ccugccuguugggc

SEQ ID NO: 1203802 - RNA, 14 nt, Human
ccugccucagccuc

SEQ ID NO: 1203803 - RNA, 13 nt, Human
ccugccucagccu

SEQ ID NO: 1203804 - RNA, 12 nt, Human
ccugccucagcc

SEQ ID NO: 1203805 - RNA, 14 nt, Human
ccugcccugugggc

SEQ ID NO: 1203806 - RNA, 12 nt, Human
ccugcccugugg

SEQ ID NO: 1203807 - RNA, 11 nt, Human
ccugcccugug

SEQ ID NO: 1203808 - RNA, 15 nt, Human
ccugccaggcauggu

SEQ ID NO: 1203809 - RNA, 12 nt, Human
ccugccaggcau

SEQ ID NO: 1203810 - RNA, 16 nt, Human
ccugcccggcugcgga

SEQ ID NO: 1203811 - RNA, 14 nt, Human
ccugcccggcugcg

SEQ ID NO: 1203812 - RNA, 22 nt, Human
ccugccuguugggccaggagcc

SEQ ID NO: 1203813 - RNA, 18 nt, Human
ccugaaagcccugagcuu

SEQ ID NO: 1203814 - RNA, 14 nt, Human
ccugaaagcccuga

SEQ ID NO: 1203815 - RNA, 13 nt, Human
ccugaaagcccug

SEQ ID NO: 1203816 - RNA, 22 nt, Human
ccugaaggccccgcccaggcuu

SEQ ID NO: 1203817 - RNA, 21 nt, Human
ccugaaggccccgcccaggcu

SEQ ID NO: 1203818 - RNA, 20 nt, Human
ccugaaggccccgcccaggc

SEQ ID NO: 1203819 - RNA, 19 nt, Human
ccugaaggccccgcccagg

SEQ ID NO: 1203820 - RNA, 18 nt, Human
ccugaaggccccgcccag

SEQ ID NO: 1203821 - RNA, 15 nt, Human
ccugagcugggauga

SEQ ID NO: 1203822 - RNA, 22 nt, Human
ccugccacccuggggagaaagu

SEQ ID NO: 1203823 - RNA, 16 nt, Human
ccugccacccugggga

SEQ ID NO: 1203824 - RNA, 14 nt, Human
ccugccacccuggg

SEQ ID NO: 1203825 - RNA, 13 nt, Human
ccugccacccugg

SEQ ID NO: 1203826 - RNA, 12 nt, Human
ccugccacccug

SEQ ID NO: 1203827 - RNA, 19 nt, Human
ccugccaauggacuaacuu

SEQ ID NO: 1203828 - RNA, 16 nt, Human
ccugcacuugcagacu

SEQ ID NO: 1203829 - RNA, 16 nt, Human
ccugaggcugggcucc

SEQ ID NO: 1203830 - RNA, 15 nt, Human
ccugaggcugggcuc

SEQ ID NO: 1203831 - RNA, 14 nt, Human
ccugaggcugggcu

SEQ ID NO: 1203832 - RNA, 13 nt, Human
ccugaggcugggc

SEQ ID NO: 1203833 - RNA, 18 nt, Human
ccugaggcccagagggcc

SEQ ID NO: 1203834 - RNA, 17 nt, Human
ccugaggcccagagggc

SEQ ID NO: 1203835 - RNA, 16 nt, Human
ccugaggcccagaggg

SEQ ID NO: 1203836 - RNA, 15 nt, Human
ccugaggcccagagg

SEQ ID NO: 1203837 - RNA, 12 nt, Human
ccugagcuggga

SEQ ID NO: 1203838 - RNA, 20 nt, Human
ccugagccagauuucacucu

SEQ ID NO: 1203839 - RNA, 18 nt, Human
ccugagccagauuucacu

SEQ ID NO: 1203840 - RNA, 16 nt, Human
ccugagccagauuuca

SEQ ID NO: 1203841 - RNA, 15 nt, Human
ccugagccagauuuc

SEQ ID NO: 1203842 - RNA, 20 nt, Human
ccugaagucacacagugagu

SEQ ID NO: 1203843 - RNA, 22 nt, Human
ccugaagucuuuguacagacaa

SEQ ID NO: 1203844 - RNA, 12 nt, Human
ccuggcacugcu

SEQ ID NO: 1203845 - RNA, 21 nt, Human
ccuggcacccggccccugcug

SEQ ID NO: 1203846 - RNA, 20 nt, Human
ccuggcacccggccccugcu

SEQ ID NO: 1203847 - RNA, 19 nt, Human
ccuggcacccggccccugc

SEQ ID NO: 1203848 - RNA, 21 nt, Human
ccugcuaauuccccagauugc

SEQ ID NO: 1203849 - RNA, 20 nt, Human
ccugccuguugggccaggag

SEQ ID NO: 1203850 - RNA, 19 nt, Human
ccugccuguugggccagga

SEQ ID NO: 1203851 - RNA, 18 nt, Human
ccugccuguugggccagg

SEQ ID NO: 1203852 - RNA, 13 nt, Human
ccuggcaugggaa

SEQ ID NO: 1203853 - RNA, 17 nt, Human
ccuggcacugcuuccag

SEQ ID NO: 1203854 - RNA, 16 nt, Human
ccuggcacugcuucca

SEQ ID NO: 1203855 - RNA, 13 nt, Human
ccuggcacugcuu

SEQ ID NO: 1203856 - RNA, 23 nt, Human
ccuggccagaugcaccagcccuu

SEQ ID NO: 1203857 - RNA, 21 nt, Human
ccuggccagaugcaccagccc

SEQ ID NO: 1203858 - RNA, 14 nt, Human
ccuggcccacugca

SEQ ID NO: 1203859 - RNA, 13 nt, Human
ccuggcccacugc

SEQ ID NO: 1203860 - RNA, 21 nt, Human
ccugggggcugggcagaggaa

SEQ ID NO: 1203861 - RNA, 20 nt, Human
ccugggggcugggcagagga

SEQ ID NO: 1203862 - RNA, 19 nt, Human
ccugggggcugggcagagg

SEQ ID NO: 1203863 - RNA, 16 nt, Human
ccugggagugagcugg

SEQ ID NO: 1203864 - RNA, 22 nt, Human
ccugggaggucaaggcugcagu

SEQ ID NO: 1203865 - RNA, 16 nt, Human
ccugggcagaaggaag

SEQ ID NO: 1203866 - RNA, 18 nt, Human
ccugggagugagcugguu

SEQ ID NO: 1203867 - RNA, 16 nt, Human
ccuggcccacugcauc

SEQ ID NO: 1203868 - RNA, 14 nt, Human
ccuggcaugggaau

SEQ ID NO: 1203869 - RNA, 18 nt, Human
ccugguggcagcugcggu

SEQ ID NO: 1203870 - RNA, 17 nt, Human
ccugguggcagcugcgg

SEQ ID NO: 1203871 - RNA, 16 nt, Human
ccugguggcagcugcg

SEQ ID NO: 1203872 - RNA, 15 nt, Human
ccugguggcagcugc

SEQ ID NO: 1203873 - RNA, 14 nt, Human
ccugguggcagcug

SEQ ID NO: 1203874 - RNA, 22 nt, Human
ccugguggcagcucaccucucc

SEQ ID NO: 1203875 - RNA, 21 nt, Human
ccugguggcagcucaccucuc

SEQ ID NO: 1203876 - RNA, 19 nt, Human
ccugguggcagcucaccuc

SEQ ID NO: 1203877 - RNA, 12 nt, Human
ccuguaccucuu

SEQ ID NO: 1203878 - RNA, 10 nt, Human
ccuguaccuc

SEQ ID NO: 1203879 - RNA, 15 nt, Human
ccugguggcaguggg

SEQ ID NO: 1203880 - RNA, 14 nt, Human
ccugguggcagugg

SEQ ID NO: 1203881 - RNA, 13 nt, Human
ccugguggcagug

SEQ ID NO: 1203882 - RNA, 19 nt, Human
ccuguagagugggagcuga

SEQ ID NO: 1203883 - RNA, 16 nt, Human
ccuguagagugggagc

SEQ ID NO: 1203884 - RNA, 15 nt, Human
ccuguagagugggag

SEQ ID NO: 1203885 - RNA, 13 nt, Human
ccuguagcccuaa

SEQ ID NO: 1203886 - RNA, 16 nt, Human
ccugucccccugacaa

SEQ ID NO: 1203887 - RNA, 15 nt, Human
ccugucccccugaca

SEQ ID NO: 1203888 - RNA, 14 nt, Human
ccugucccccugac

SEQ ID NO: 1203889 - RNA, 13 nt, Human
ccugucccccuga

SEQ ID NO: 1203890 - RNA, 12 nt, Human
ccugucccccug

SEQ ID NO: 1203891 - RNA, 21 nt, Human
ccuacaguugaaaaacagcug

SEQ ID NO: 1203892 - RNA, 18 nt, Human
ccgugaggccagagacac

SEQ ID NO: 1203893 - RNA, 22 nt, Human
ccgggcucugccucccaucacc

SEQ ID NO: 1203894 - RNA, 18 nt, Human
ccgggcucugccucccau

SEQ ID NO: 1203895 - RNA, 15 nt, Human
ccgggcucugccucc

SEQ ID NO: 1203896 - RNA, 14 nt, Human
ccgggcucugccuc

SEQ ID NO: 1203897 - RNA, 13 nt, Human
ccgggccacagag

SEQ ID NO: 1203898 - RNA, 22 nt, Human
ccgggcacucagaagacacuga

SEQ ID NO: 1203899 - RNA, 21 nt, Human
ccggcuccaggcuccuuuagc

SEQ ID NO: 1203900 - RNA, 16 nt, Human
ccggcuccaggcuccu

SEQ ID NO: 1203901 - RNA, 11 nt, Human
ccgcuggggcc

SEQ ID NO: 1203902 - RNA, 14 nt, Human
ccgcuggggccagu

SEQ ID NO: 1203903 - RNA, 18 nt, Human
ccgagauagccaaggcca

SEQ ID NO: 1203904 - RNA, 21 nt, Human
ccgagauugcaccacugcacu

SEQ ID NO: 1203905 - RNA, 19 nt, Human
ccgagauugcaccacugca

SEQ ID NO: 1203906 - RNA, 15 nt, Human
ccgagauugcaccac

SEQ ID NO: 1203907 - RNA, 15 nt, Human
ccgcagacaggacca

SEQ ID NO: 1203908 - RNA, 23 nt, Human
ccgcacugggcuuggggaccaga

SEQ ID NO: 1203909 - RNA, 19 nt, Human
ccgagcuuugaaaauucag

SEQ ID NO: 1203910 - RNA, 16 nt, Human
ccgaguagcugggacu

SEQ ID NO: 1203911 - RNA, 14 nt, Human
ccgaguagcuggga

SEQ ID NO: 1203912 - RNA, 12 nt, Human
cccugaggccca

SEQ ID NO: 1203913 - RNA, 14 nt, Human
cccugccuccuuug

SEQ ID NO: 1203914 - RNA, 11 nt, Human
cccugccuccu

SEQ ID NO: 1203915 - RNA, 21 nt, Human
cccugcucuccgaccagacac

SEQ ID NO: 1203916 - RNA, 22 nt, Human
cccugcucuccgaccagacacc

SEQ ID NO: 1203917 - RNA, 12 nt, Human
cccuuccaugga

SEQ ID NO: 1203918 - RNA, 23 nt, Human
cccuuagcagggaaacagcuaau

SEQ ID NO: 1203919 - RNA, 17 nt, Human
cccuuacgugaguccug

SEQ ID NO: 1203920 - RNA, 15 nt, Human
cccuuacgugagucc

SEQ ID NO: 1203921 - RNA, 14 nt, Human
cccuuagcagggaa

SEQ ID NO: 1203922 - RNA, 23 nt, Human
cccuuaccugccaggaagccagc

SEQ ID NO: 1203923 - RNA, 20 nt, Human
cccuuaccugccaggaagcc

SEQ ID NO: 1203924 - RNA, 17 nt, Human
cccuuaccugccaggaa

SEQ ID NO: 1203925 - RNA, 19 nt, Human
cccuguuuguuucugaaag

SEQ ID NO: 1203926 - RNA, 14 nt, Human
cccuguucuggcag

SEQ ID NO: 1203927 - RNA, 13 nt, Human
cccuguucuggca

SEQ ID NO: 1203928 - RNA, 15 nt, Human
cccugguggcagugg

SEQ ID NO: 1203929 - RNA, 14 nt, Human
cccugguggcagug

SEQ ID NO: 1203930 - RNA, 13 nt, Human
cccugguggcagu

SEQ ID NO: 1203931 - RNA, 21 nt, Human
cccugguggcagcucaccucu

SEQ ID NO: 1203932 - RNA, 13 nt, Human
cccugaggcccag

SEQ ID NO: 1203933 - RNA, 20 nt, Human
cccucuuucccucccuuccu

SEQ ID NO: 1203934 - RNA, 17 nt, Human
cccucuuucccucccuu

SEQ ID NO: 1203935 - RNA, 12 nt, Human
cccucuuucccu

SEQ ID NO: 1203936 - RNA, 12 nt, Human
cccucuggggcu

SEQ ID NO: 1203937 - RNA, 18 nt, Human
cccucugcccacucccug

SEQ ID NO: 1203938 - RNA, 15 nt, Human
cccucugcccacucc

SEQ ID NO: 1203939 - RNA, 11 nt, Human
cccucugccca

SEQ ID NO: 1203940 - RNA, 19 nt, Human
cccucugcccacucccugc

SEQ ID NO: 1203941 - RNA, 20 nt, Human
ccccuguucuggcagaguug

SEQ ID NO: 1203942 - RNA, 20 nt, Human
ccccuuccauggacuuuguu

SEQ ID NO: 1203943 - RNA, 13 nt, Human
ccccuuccaugga

SEQ ID NO: 1203944 - RNA, 23 nt, Human
cccgcuaagagggagggagggcu

SEQ ID NO: 1203945 - RNA, 22 nt, Human
cccgcccaggcuuagucacuga

SEQ ID NO: 1203946 - RNA, 20 nt, Human
cccgcccaggcuuagucacu

SEQ ID NO: 1203947 - RNA, 19 nt, Human
ccccuggaugcagccucac

SEQ ID NO: 1203948 - RNA, 18 nt, Human
ccccuggaugcagccuca

SEQ ID NO: 1203949 - RNA, 15 nt, Human
ccccuggaugcagcc

SEQ ID NO: 1203950 - RNA, 20 nt, Human
ccccugcugguucaggguug

SEQ ID NO: 1203951 - RNA, 15 nt, Human
ccccugcugguucag

SEQ ID NO: 1203952 - RNA, 13 nt, Human
ccccugcugguuc

SEQ ID NO: 1203953 - RNA, 11 nt, Human
ccccugcuggu

SEQ ID NO: 1203954 - RNA, 17 nt, Human
ccccugcuggguguggc

SEQ ID NO: 1203955 - RNA, 14 nt, Human
ccccugcugggugu

SEQ ID NO: 1203956 - RNA, 19 nt, Human
ccccugcccggcugcggaa

SEQ ID NO: 1203957 - RNA, 17 nt, Human
ccccugcccggcugcgg

SEQ ID NO: 1203958 - RNA, 23 nt, Human
ccccucaacucuccuccagaguc

SEQ ID NO: 1203959 - RNA, 16 nt, Human
ccccucaacaccucug

SEQ ID NO: 1203960 - RNA, 15 nt, Human
ccccucaacaccucu

SEQ ID NO: 1203961 - RNA, 12 nt, Human
cccccagccugc

SEQ ID NO: 1203962 - RNA, 19 nt, Human
cccccugacaacacucauu

SEQ ID NO: 1203963 - RNA, 17 nt, Human
cccccugacaacacuca

SEQ ID NO: 1203964 - RNA, 16 nt, Human
ccccucagggucccug

SEQ ID NO: 1203965 - RNA, 12 nt, Human
ccccuccaugug

SEQ ID NO: 1203966 - RNA, 15 nt, Human
cccccacuggugaca

SEQ ID NO: 1203967 - RNA, 13 nt, Human
cccccacugguga

SEQ ID NO: 1203968 - RNA, 11 nt, Human
cccccacuggu

SEQ ID NO: 1203969 - RNA, 24 nt, Human
cccccacccaagggccuggccuga

SEQ ID NO: 1203970 - RNA, 13 nt, Human
cccccacccaagg

SEQ ID NO: 1203971 - RNA, 17 nt, Human
ccccauccucuguacag

SEQ ID NO: 1203972 - RNA, 14 nt, Human
ccccauccucugua

SEQ ID NO: 1203973 - RNA, 20 nt, Human
ccccagugcccacaggauca

SEQ ID NO: 1203974 - RNA, 16 nt, Human
ccccagugcccacagg

SEQ ID NO: 1203975 - RNA, 15 nt, Human
ccccagugcccacag

SEQ ID NO: 1203976 - RNA, 14 nt, Human
ccccagugcccaca

SEQ ID NO: 1203977 - RNA, 19 nt, Human
cccaucucuacaaaaagca

SEQ ID NO: 1203978 - RNA, 14 nt, Human
cccaguugggugga

SEQ ID NO: 1203979 - RNA, 14 nt, Human
cccaugagccucag

SEQ ID NO: 1203980 - RNA, 12 nt, Human
cccaucugugaa

SEQ ID NO: 1203981 - RNA, 19 nt, Human
ccccaccgcagacaggacc

SEQ ID NO: 1203982 - RNA, 15 nt, Human
ccccaccgcagacag

SEQ ID NO: 1203983 - RNA, 14 nt, Human
cccacgcuggagug

SEQ ID NO: 1203984 - RNA, 16 nt, Human
cccaccuuggcugcag

SEQ ID NO: 1203985 - RNA, 19 nt, Human
cccacgcccccacugguga

SEQ ID NO: 1203986 - RNA, 17 nt, Human
cccacgcccccacuggu

SEQ ID NO: 1203987 - RNA, 15 nt, Human
cccaccuuggcugca

SEQ ID NO: 1203988 - RNA, 14 nt, Human
cccaccuuggcugc

SEQ ID NO: 1203989 - RNA, 22 nt, Human
cccaccuuggcucaaguccucu

SEQ ID NO: 1203990 - RNA, 15 nt, Human
cccaccuuggcucaa

SEQ ID NO: 1203991 - RNA, 12 nt, Human
cccaccuuggcu

SEQ ID NO: 1203992 - RNA, 17 nt, Human
cccaccucagccucccg

SEQ ID NO: 1203993 - RNA, 19 nt, Human
cccaccucucucacuccuu

SEQ ID NO: 1203994 - RNA, 17 nt, Human
cccaccucucucacucc

SEQ ID NO: 1203995 - RNA, 14 nt, Human
cccaccucucucac

SEQ ID NO: 1203996 - RNA, 13 nt, Human
cccaccucucuca

SEQ ID NO: 1203997 - RNA, 21 nt, Human
cccaccucagccucccaaagu

SEQ ID NO: 1203998 - RNA, 15 nt, Human
cccaccucagccucc

SEQ ID NO: 1203999 - RNA, 14 nt, Human
cccaccucagccuc

SEQ ID NO: 1204000 - RNA, 12 nt, Human
cccaccucagcc

SEQ ID NO: 1204001 - RNA, 23 nt, Human
ccauuuuggauucuuauggacaa

SEQ ID NO: 1204002 - RNA, 20 nt, Human
ccauuuugcugucccuuuuc

SEQ ID NO: 1204003 - RNA, 14 nt, Human
cccaagggccuggc

SEQ ID NO: 1204004 - RNA, 12 nt, Human
cccaagggccug

SEQ ID NO: 1204005 - RNA, 17 nt, Human
cccaagggccuggccug

SEQ ID NO: 1204006 - RNA, 16 nt, Human
cccaagggccuggccu

SEQ ID NO: 1204007 - RNA, 17 nt, Human
cccacaggaucagucug

SEQ ID NO: 1204008 - RNA, 14 nt, Human
ccauucuccaccug

SEQ ID NO: 1204009 - RNA, 16 nt, Human
ccauucugccugccca

SEQ ID NO: 1204010 - RNA, 15 nt, Human
ccauucugccugccc

SEQ ID NO: 1204011 - RNA, 13 nt, Human
ccauuugcuccuu

SEQ ID NO: 1204012 - RNA, 20 nt, Human
ccaggaggccagccuugacc

SEQ ID NO: 1204013 - RNA, 18 nt, Human
ccaggaggccagccuuga

SEQ ID NO: 1204014 - RNA, 15 nt, Human
ccaggaggccagccu

SEQ ID NO: 1204015 - RNA, 19 nt, Human
ccaggccccugccacccug

SEQ ID NO: 1204016 - RNA, 14 nt, Human
ccaggcccucugcc

SEQ ID NO: 1204017 - RNA, 13 nt, Human
ccaggcccucugc

SEQ ID NO: 1204018 - RNA, 16 nt, Human
ccaggccccugccacc

SEQ ID NO: 1204019 - RNA, 15 nt, Human
ccaggccccugccac

SEQ ID NO: 1204020 - RNA, 14 nt, Human
ccaggccccugcca

SEQ ID NO: 1204021 - RNA, 12 nt, Human
ccaggccagagg

SEQ ID NO: 1204022 - RNA, 23 nt, Human
ccaggcuuagucacugagacagc

SEQ ID NO: 1204023 - RNA, 22 nt, Human
ccaggcuuagucacugagacag

SEQ ID NO: 1204024 - RNA, 21 nt, Human
ccaggcuuagucacugagaca

SEQ ID NO: 1204025 - RNA, 14 nt, Human
ccaggcuggucuca

SEQ ID NO: 1204026 - RNA, 16 nt, Human
ccaggcccucugccca

SEQ ID NO: 1204027 - RNA, 15 nt, Human
ccaggcccucugccc

SEQ ID NO: 1204028 - RNA, 23 nt, Human
ccagugcccacaggaucagucug

SEQ ID NO: 1204029 - RNA, 15 nt, Human
ccaucucuccuccuu

SEQ ID NO: 1204030 - RNA, 21 nt, Human
ccaucucacacaugagcauca

SEQ ID NO: 1204031 - RNA, 20 nt, Human
ccaucucacacaugagcauc

SEQ ID NO: 1204032 - RNA, 18 nt, Human
ccaucucacacaugagca

SEQ ID NO: 1204033 - RNA, 17 nt, Human
ccaucucacacaugagc

SEQ ID NO: 1204034 - RNA, 15 nt, Human
ccaucucacacauga

SEQ ID NO: 1204035 - RNA, 14 nt, Human
ccaucucacacaug

SEQ ID NO: 1204036 - RNA, 17 nt, Human
ccaucauugaaaucuuu

SEQ ID NO: 1204037 - RNA, 16 nt, Human
ccaucauugaaaucuu

SEQ ID NO: 1204038 - RNA, 14 nt, Human
ccaucauugaaauc

SEQ ID NO: 1204039 - RNA, 12 nt, Human
ccaucauugaaa

SEQ ID NO: 1204040 - RNA, 13 nt, Human
ccaucaugucugg

SEQ ID NO: 1204041 - RNA, 12 nt, Human
ccaucaugucug

SEQ ID NO: 1204042 - RNA, 19 nt, Human
ccauauuaccacagacaua

SEQ ID NO: 1204043 - RNA, 16 nt, Human
ccaucaagccaccaac

SEQ ID NO: 1204044 - RNA, 14 nt, Human
ccaucaagccacca

SEQ ID NO: 1204045 - RNA, 13 nt, Human
ccaucaagccacc

SEQ ID NO: 1204046 - RNA, 23 nt, Human
ccagugugacaaggauugcuacu

SEQ ID NO: 1204047 - RNA, 14 nt, Human
ccagugugacaagg

SEQ ID NO: 1204048 - RNA, 15 nt, Human
ccauaugccugggca

SEQ ID NO: 1204049 - RNA, 13 nt, Human
ccagugaggcucu

SEQ ID NO: 1204050 - RNA, 23 nt, Human
ccaguaaaugggggugcauuuga

SEQ ID NO: 1204051 - RNA, 22 nt, Human
ccaguaaaugggggugcauuug

SEQ ID NO: 1204052 - RNA, 21 nt, Human
ccaguaaaugggggugcauuu

SEQ ID NO: 1204053 - RNA, 20 nt, Human
ccaguaaaugggggugcauu

SEQ ID NO: 1204054 - RNA, 16 nt, Human
ccagguuucuaugugu

SEQ ID NO: 1204055 - RNA, 13 nt, Human
ccagguuuaagcu

SEQ ID NO: 1204056 - RNA, 15 nt, Human
ccagacccggcugcg

SEQ ID NO: 1204057 - RNA, 14 nt, Human
ccagacccggcugc

SEQ ID NO: 1204058 - RNA, 16 nt, Human
ccagacccggcugcgu

SEQ ID NO: 1204059 - RNA, 22 nt, Human
ccagacacauguccaagaagcc

SEQ ID NO: 1204060 - RNA, 20 nt, Human
ccagacacauguccaagaag

SEQ ID NO: 1204061 - RNA, 17 nt, Human
ccagacacauguccaag

SEQ ID NO: 1204062 - RNA, 22 nt, Human
ccagaagaaaauagugguguga

SEQ ID NO: 1204063 - RNA, 19 nt, Human
ccacugugccaugugccag

SEQ ID NO: 1204064 - RNA, 16 nt, Human
ccacugugccaugugc

SEQ ID NO: 1204065 - RNA, 15 nt, Human
ccacugugccaugug

SEQ ID NO: 1204066 - RNA, 15 nt, Human
ccacugugaagagaa

SEQ ID NO: 1204067 - RNA, 14 nt, Human
ccacugugaagaga

SEQ ID NO: 1204068 - RNA, 23 nt, Human
ccacuggugacaugucuuuucuu

SEQ ID NO: 1204069 - RNA, 15 nt, Human
ccacugcucugguua

SEQ ID NO: 1204070 - RNA, 13 nt, Human
ccacugcucuggu

SEQ ID NO: 1204071 - RNA, 12 nt, Human
ccacugcucugg

SEQ ID NO: 1204072 - RNA, 22 nt, Human
ccacugcuuuuggucuguguga

SEQ ID NO: 1204073 - RNA, 20 nt, Human
ccacugcuuuuggucugugu

SEQ ID NO: 1204074 - RNA, 23 nt, Human
ccacugcaucguuucaucuucca

SEQ ID NO: 1204075 - RNA, 21 nt, Human
ccacugcaucguuucaucuuc

SEQ ID NO: 1204076 - RNA, 19 nt, Human
ccacccccacccaagggcc

SEQ ID NO: 1204077 - RNA, 14 nt, Human
ccacccuccuuuca

SEQ ID NO: 1204078 - RNA, 14 nt, Human
ccaccuggccucug

SEQ ID NO: 1204079 - RNA, 20 nt, Human
ccaccuggccucugcacucc

SEQ ID NO: 1204080 - RNA, 13 nt, Human
ccaccuggccucu

SEQ ID NO: 1204081 - RNA, 16 nt, Human
ccaccugccagggaca

SEQ ID NO: 1204082 - RNA, 15 nt, Human
ccaccugccagggac

SEQ ID NO: 1204083 - RNA, 14 nt, Human
ccaccugccaggga

SEQ ID NO: 1204084 - RNA, 13 nt, Human
ccaccugccaggg

SEQ ID NO: 1204085 - RNA, 20 nt, Human
ccaccucucucacuccuuga

SEQ ID NO: 1204086 - RNA, 19 nt, Human
ccaccucucucacuccuug

SEQ ID NO: 1204087 - RNA, 16 nt, Human
ccaccucucucacucc

SEQ ID NO: 1204088 - RNA, 14 nt, Human
ccaccucucucacu

SEQ ID NO: 1204089 - RNA, 13 nt, Human
ccacccugcucuc

SEQ ID NO: 1204090 - RNA, 12 nt, Human
ccacccugcucu

SEQ ID NO: 1204091 - RNA, 11 nt, Human
ccacccugcuc

SEQ ID NO: 1204092 - RNA, 13 nt, Human
ccaccuuggcuca

SEQ ID NO: 1204093 - RNA, 19 nt, Human
ccagccccaaaacucuccu

SEQ ID NO: 1204094 - RNA, 23 nt, Human
ccagccgagauagccaaggccaa

SEQ ID NO: 1204095 - RNA, 22 nt, Human
ccagccgagauagccaaggcca

SEQ ID NO: 1204096 - RNA, 20 nt, Human
ccagccgagauagccaaggc

SEQ ID NO: 1204097 - RNA, 17 nt, Human
ccagccgagauagccaa

SEQ ID NO: 1204098 - RNA, 17 nt, Human
ccagcccacuucugcca

SEQ ID NO: 1204099 - RNA, 16 nt, Human
ccagcccacuucugcc

SEQ ID NO: 1204100 - RNA, 23 nt, Human
ccagcaggcucucaggccagcug

SEQ ID NO: 1204101 - RNA, 21 nt, Human
ccagcaggcucucaggccagc

SEQ ID NO: 1204102 - RNA, 20 nt, Human
ccagcaggcucucaggccag

SEQ ID NO: 1204103 - RNA, 19 nt, Human
ccagcaggcucucaggcca

SEQ ID NO: 1204104 - RNA, 13 nt, Human
ccagcgagcccug

SEQ ID NO: 1204105 - RNA, 23 nt, Human
ccagccuugaccauucuccaccu

SEQ ID NO: 1204106 - RNA, 13 nt, Human
ccagccuggguga

SEQ ID NO: 1204107 - RNA, 19 nt, Human
ccagauuucacucuccuug

SEQ ID NO: 1204108 - RNA, 18 nt, Human
ccagauuucacucuccuu

SEQ ID NO: 1204109 - RNA, 23 nt, Human
ccagauugcaacaggcugggcuu

SEQ ID NO: 1204110 - RNA, 22 nt, Human
ccagauugcaacaggcugggcu

SEQ ID NO: 1204111 - RNA, 18 nt, Human
ccagauugcaacaggcug

SEQ ID NO: 1204112 - RNA, 16 nt, Human
ccagauugcaacaggc

SEQ ID NO: 1204113 - RNA, 14 nt, Human
ccagauugcaacag

SEQ ID NO: 1204114 - RNA, 14 nt, Human
ccagagcccaccuu

SEQ ID NO: 1204115 - RNA, 20 nt, Human
ccagcaagugagagcugggu

SEQ ID NO: 1204116 - RNA, 19 nt, Human
ccagcaagugagagcuggg

SEQ ID NO: 1204117 - RNA, 18 nt, Human
ccagcaagugagagcugg

SEQ ID NO: 1204118 - RNA, 17 nt, Human
ccagcaagugagagcug

SEQ ID NO: 1204119 - RNA, 18 nt, Human
ccagcaggcucucaggcc

SEQ ID NO: 1204120 - RNA, 17 nt, Human
ccagcaggcucucaggc

SEQ ID NO: 1204121 - RNA, 16 nt, Human
ccagcaggcucucagg

SEQ ID NO: 1204122 - RNA, 18 nt, Human
ccagcaccaucucuccuc

SEQ ID NO: 1204123 - RNA, 17 nt, Human
ccagcaccaucucuccu

SEQ ID NO: 1204124 - RNA, 16 nt, Human
ggccugcaagggagug

SEQ ID NO: 1204125 - RNA, 16 nt, Human
ggccuggccagaugca

SEQ ID NO: 1204126 - RNA, 15 nt, Human
ggccuggccagaugc

SEQ ID NO: 1204127 - RNA, 12 nt, Human
ggccuggccaga

SEQ ID NO: 1204128 - RNA, 16 nt, Human
ggcuagagguucaaag

SEQ ID NO: 1204129 - RNA, 14 nt, Human
ggcuaccuuuguau

SEQ ID NO: 1204130 - RNA, 13 nt, Human
ggcuaccuuugua

SEQ ID NO: 1204131 - RNA, 16 nt, Human
ggcuaauguacugcau

SEQ ID NO: 1204132 - RNA, 20 nt, Human
ggcuaagugauccucccacc

SEQ ID NO: 1204133 - RNA, 14 nt, Human
ggcgugcaguggug

SEQ ID NO: 1204134 - RNA, 23 nt, Human
ggccucccaacucaccccagccc

SEQ ID NO: 1204135 - RNA, 22 nt, Human
ggccucccaacucaccccagcc

SEQ ID NO: 1204136 - RNA, 20 nt, Human
ggccucccaacucaccccag

SEQ ID NO: 1204137 - RNA, 19 nt, Human
ggccucccaacucacccca

SEQ ID NO: 1204138 - RNA, 18 nt, Human
ggccucccaacucacccc

SEQ ID NO: 1204139 - RNA, 13 nt, Human
ggccucagugcca

SEQ ID NO: 1204140 - RNA, 17 nt, Human
ggccagaugcaccagcc

SEQ ID NO: 1204141 - RNA, 16 nt, Human
ggccagaugcaccagc

SEQ ID NO: 1204142 - RNA, 15 nt, Human
ggccagaugcaccag

SEQ ID NO: 1204143 - RNA, 22 nt, Human
ggccagagggagugacagaggc

SEQ ID NO: 1204144 - RNA, 22 nt, Human
aaaaaacugcugacuguuuucu

SEQ ID NO: 1204145 - RNA, 14 nt, Human
ggcuggguuggagg

SEQ ID NO: 1204146 - RNA, 12 nt, Human
aaaaaggcagga

SEQ ID NO: 1204147 - RNA, 21 nt, Human
aaaaaggaugcacagaguugu

SEQ ID NO: 1204148 - RNA, 14 nt, Human
aaaaaggaggaaga

SEQ ID NO: 1204149 - RNA, 15 nt, Human
ggcuggccuggcccc

SEQ ID NO: 1204150 - RNA, 14 nt, Human
ggcuggccuggccc

SEQ ID NO: 1204151 - RNA, 13 nt, Human
ggcuggccuggcc

SEQ ID NO: 1204152 - RNA, 15 nt, Human
ggcucacugcagccu

SEQ ID NO: 1204153 - RNA, 14 nt, Human
ggcucacugcagcc

SEQ ID NO: 1204154 - RNA, 13 nt, Human
ggcucacugcagc

SEQ ID NO: 1204155 - RNA, 20 nt, Human
ggcucuuccaggcugggaga

SEQ ID NO: 1204156 - RNA, 18 nt, Human
ggcucuuccaggcuggga

SEQ ID NO: 1204157 - RNA, 17 nt, Human
ggcucuuccaggcuggg

SEQ ID NO: 1204158 - RNA, 15 nt, Human
ggcucuuccaggcug

SEQ ID NO: 1204159 - RNA, 13 nt, Human
ggcucccuuccca

SEQ ID NO: 1204160 - RNA, 15 nt, Human
ggaguggccacagaa

SEQ ID NO: 1204161 - RNA, 22 nt, Human
ggagugggcccaaugcacuuug

SEQ ID NO: 1204162 - RNA, 12 nt, Human
ggagugggccca

SEQ ID NO: 1204163 - RNA, 16 nt, Human
ggaguggccacagaaa

SEQ ID NO: 1204164 - RNA, 12 nt, Human
ggauuuaacaga

SEQ ID NO: 1204165 - RNA, 20 nt, Human
ggauuguccccgacccuugc

SEQ ID NO: 1204166 - RNA, 16 nt, Human
ggauuguccccgaccc

SEQ ID NO: 1204167 - RNA, 22 nt, Human
ggauuuaacagaaauguacagc

SEQ ID NO: 1204168 - RNA, 17 nt, Human
ggauuuaacagaaaugu

SEQ ID NO: 1204169 - RNA, 16 nt, Human
ggauuuaacagaaaug

SEQ ID NO: 1204170 - RNA, 13 nt, Human
ggauuguccccga

SEQ ID NO: 1204171 - RNA, 14 nt, Human
ggaugaaaaaauaa

SEQ ID NO: 1204172 - RNA, 23 nt, Human
ggauccugagccagauuucacuc

SEQ ID NO: 1204173 - RNA, 20 nt, Human
ggauccugagccagauuuca

SEQ ID NO: 1204174 - RNA, 19 nt, Human
ggauccugagccagauuuc

SEQ ID NO: 1204175 - RNA, 18 nt, Human
ggauccugagccagauuu

SEQ ID NO: 1204176 - RNA, 16 nt, Human
ggauccugagccagau

SEQ ID NO: 1204177 - RNA, 15 nt, Human
ggauccugagccaga

SEQ ID NO: 1204178 - RNA, 16 nt, Human
ggaguucaucuugaau

SEQ ID NO: 1204179 - RNA, 18 nt, Human
ggaucucuugagccuggg

SEQ ID NO: 1204180 - RNA, 13 nt, Human
ggaggggggaggu

SEQ ID NO: 1204181 - RNA, 14 nt, Human
ggaggggggaggug

SEQ ID NO: 1204182 - RNA, 23 nt, Human
ggaggugggauccuccaggugca

SEQ ID NO: 1204183 - RNA, 22 nt, Human
ggaggugggauccuccaggugc

SEQ ID NO: 1204184 - RNA, 22 nt, Human
ggagguaaggaauaccuguccc

SEQ ID NO: 1204185 - RNA, 21 nt, Human
ggagggugacgggggugaacu

SEQ ID NO: 1204186 - RNA, 14 nt, Human
ggcauuugcugaau

SEQ ID NO: 1204187 - RNA, 19 nt, Human
ggccagagggagugacaga

SEQ ID NO: 1204188 - RNA, 17 nt, Human
ggccagagggagugaca

SEQ ID NO: 1204189 - RNA, 18 nt, Human
ggccagagacacaagccu

SEQ ID NO: 1204190 - RNA, 17 nt, Human
ggccagagacacaagcc

SEQ ID NO: 1204191 - RNA, 16 nt, Human
ggccaaaggaagcaca

SEQ ID NO: 1204192 - RNA, 14 nt, Human
ggccaaaggaagca

SEQ ID NO: 1204193 - RNA, 17 nt, Human
ggcauuuguuugaacug

SEQ ID NO: 1204194 - RNA, 21 nt, Human
ggccaaaggaagcacaugccu

SEQ ID NO: 1204195 - RNA, 19 nt, Human
ggccaaaggaagcacaugc

SEQ ID NO: 1204196 - RNA, 18 nt, Human
ggcaggaggaucacuuga

SEQ ID NO: 1204197 - RNA, 14 nt, Human
ggcagccaggccac

SEQ ID NO: 1204198 - RNA, 13 nt, Human
ggcagccaggcca

SEQ ID NO: 1204199 - RNA, 22 nt, Human
ggcacugcuuccagugaggcuc

SEQ ID NO: 1204200 - RNA, 20 nt, Human
ggcacugcuuccagugaggc

SEQ ID NO: 1204201 - RNA, 21 nt, Human
ggcagccccauucugccugcc

SEQ ID NO: 1204202 - RNA, 20 nt, Human
ggcagccccauucugccugc

SEQ ID NO: 1204203 - RNA, 16 nt, Human
ggcagccccauucugc

SEQ ID NO: 1204204 - RNA, 23 nt, Human
ggcagccccauucugccugccca

SEQ ID NO: 1204205 - RNA, 22 nt, Human
ggcagccccauucugccugccc

SEQ ID NO: 1204206 - RNA, 18 nt, Human
ggcacaccgggcacucag

SEQ ID NO: 1204207 - RNA, 16 nt, Human
ggcacugcuuccagug

SEQ ID NO: 1204208 - RNA, 19 nt, Human
ggcacagaaaauggaagac

SEQ ID NO: 1204209 - RNA, 15 nt, Human
ggcaaaaaggcagga

SEQ ID NO: 1204210 - RNA, 20 nt, Human
gguuuguaaauuaacuuuua

SEQ ID NO: 1204211 - RNA, 22 nt, Human
gguuucuaaagcugccagccga

SEQ ID NO: 1204212 - RNA, 16 nt, Human
gguuucuaaagcugcc

SEQ ID NO: 1204213 - RNA, 21 nt, Human
aaaguguauuuuuuuacuaau

SEQ ID NO: 1204214 - RNA, 14 nt, Human
aaaguguauuuuuu

SEQ ID NO: 1204215 - RNA, 21 nt, Human
aaaguaucccuacuguaauuu

SEQ ID NO: 1204216 - RNA, 22 nt, Human
aaaguagaagucuuagauguau

SEQ ID NO: 1204217 - RNA, 20 nt, Human
aaaguagaagucuuagaugu

SEQ ID NO: 1204218 - RNA, 20 nt, Human
aaaguacacuguuucaaacu

SEQ ID NO: 1204219 - RNA, 19 nt, Human
aaaguacacuguuucaaac

SEQ ID NO: 1204220 - RNA, 18 nt, Human
aaaguacacuguuucaaa

SEQ ID NO: 1204221 - RNA, 23 nt, Human
gguguggagaagcggcuggcagc

SEQ ID NO: 1204222 - RNA, 14 nt, Human
gguguggagaagcg

SEQ ID NO: 1204223 - RNA, 13 nt, Human
ggugggggccucg

SEQ ID NO: 1204224 - RNA, 13 nt, Human
ggugugggggaag

SEQ ID NO: 1204225 - RNA, 11 nt, Human
gguguggggga

SEQ ID NO: 1204226 - RNA, 17 nt, Human
gguucccauuugcuccu

SEQ ID NO: 1204227 - RNA, 19 nt, Human
gguguuuccuggcacugcu

SEQ ID NO: 1204228 - RNA, 17 nt, Human
gguguuuccuggcacug

SEQ ID NO: 1204229 - RNA, 22 nt, Human
gguucccuuuuuuggcugcuga

SEQ ID NO: 1204230 - RNA, 23 nt, Human
gguucccuuugacgccaucccag

SEQ ID NO: 1204231 - RNA, 19 nt, Human
gguggggaccucaggccug

SEQ ID NO: 1204232 - RNA, 20 nt, Human
ggugggaggaucucuugagc

SEQ ID NO: 1204233 - RNA, 17 nt, Human
ggugggacacccuguga

SEQ ID NO: 1204234 - RNA, 16 nt, Human
ggugggacacccugug

SEQ ID NO: 1204235 - RNA, 13 nt, Human
ggugggacacccu

SEQ ID NO: 1204236 - RNA, 18 nt, Human
gguggcuggguuggaggg

SEQ ID NO: 1204237 - RNA, 20 nt, Human
aaagggcccagagagggugg

SEQ ID NO: 1204238 - RNA, 20 nt, Human
gguggcaccagcagccugga

SEQ ID NO: 1204239 - RNA, 14 nt, Human
gguggcaccagcag

SEQ ID NO: 1204240 - RNA, 22 nt, Human
aaagcugccagccgagauagcc

SEQ ID NO: 1204241 - RNA, 13 nt, Human
aaagcugccagcc

SEQ ID NO: 1204242 - RNA, 12 nt, Human
aaagcugccagc

SEQ ID NO: 1204243 - RNA, 17 nt, Human
aaagcuaggccuggcca

SEQ ID NO: 1204244 - RNA, 16 nt, Human
aaagcuaggccuggcc

SEQ ID NO: 1204245 - RNA, 14 nt, Human
aaagcuaggccugg

SEQ ID NO: 1204246 - RNA, 16 nt, Human
aaagcagugcaugcug

SEQ ID NO: 1204247 - RNA, 13 nt, Human
aaagcagugcaug

SEQ ID NO: 1204248 - RNA, 15 nt, Human
aaagcagcguuucua

SEQ ID NO: 1204249 - RNA, 15 nt, Human
aaauauaggaacuua

SEQ ID NO: 1204250 - RNA, 21 nt, Human
aaauaccagccaguaaauggg

SEQ ID NO: 1204251 - RNA, 20 nt, Human
aaauaccagccaguaaaugg

SEQ ID NO: 1204252 - RNA, 19 nt, Human
aaauaccagccaguaaaug

SEQ ID NO: 1204253 - RNA, 16 nt, Human
guacacacacauacac

SEQ ID NO: 1204254 - RNA, 23 nt, Human
aaauaucugaaaauguaugugua

SEQ ID NO: 1204255 - RNA, 22 nt, Human
aaauaucugaaaauguaugugu

SEQ ID NO: 1204256 - RNA, 21 nt, Human
aaauaucugaaaauguaugug

SEQ ID NO: 1204257 - RNA, 19 nt, Human
aaauaucugaaaauguaug

SEQ ID NO: 1204258 - RNA, 18 nt, Human
aaauaucugaaaauguau

SEQ ID NO: 1204259 - RNA, 17 nt, Human
aaauaucugaaaaugua

SEQ ID NO: 1204260 - RNA, 14 nt, Human
aaauaucugaaaau

SEQ ID NO: 1204261 - RNA, 12 nt, Human
aaauaucugaaa

SEQ ID NO: 1204262 - RNA, 16 nt, Human
aaaucagcugcuacua

SEQ ID NO: 1204263 - RNA, 23 nt, Human
aaaucagccugcuccagcuguuc

SEQ ID NO: 1204264 - RNA, 21 nt, Human
aaaucagccugcuccagcugu

SEQ ID NO: 1204265 - RNA, 19 nt, Human
aaaucagccugcuccagcu

SEQ ID NO: 1204266 - RNA, 19 nt, Human
aaauauuaagaaagacuau

SEQ ID NO: 1204267 - RNA, 20 nt, Human
guaacaggaaaauuuuaaaa

SEQ ID NO: 1204268 - RNA, 19 nt, Human
guaacaggaaaauuuuaaa

SEQ ID NO: 1204269 - RNA, 16 nt, Human
guaacaagccacccca

SEQ ID NO: 1204270 - RNA, 22 nt, Human
aaauaaugugaaacuggauuaa

SEQ ID NO: 1204271 - RNA, 12 nt, Human
aaaguggugaga

SEQ ID NO: 1204272 - RNA, 22 nt, Human
aaaguguauuuuuuuacuaaua

SEQ ID NO: 1204273 - RNA, 22 nt, Human
guaauuugugauacaaugcugu

SEQ ID NO: 1204274 - RNA, 20 nt, Human
guaauuugugauacaaugcu

SEQ ID NO: 1204275 - RNA, 17 nt, Human
guaauuugugauacaau

SEQ ID NO: 1204276 - RNA, 15 nt, Human
guaauuugugauaca

SEQ ID NO: 1204277 - RNA, 23 nt, Human
guaauccuagcacuuugggaggc

SEQ ID NO: 1204278 - RNA, 20 nt, Human
gguaaggaauaccugucccc

SEQ ID NO: 1204279 - RNA, 14 nt, Human
gguaucaggugcug

SEQ ID NO: 1204280 - RNA, 20 nt, Human
gguaggguaagugagagagg

SEQ ID NO: 1204281 - RNA, 19 nt, Human
gguaucaggugcugccauc

SEQ ID NO: 1204282 - RNA, 22 nt, Human
aaacuugauguguuaucucuua

SEQ ID NO: 1204283 - RNA, 19 nt, Human
gggugggacacccugugau

SEQ ID NO: 1204284 - RNA, 20 nt, Human
ggguuuugccauguuggcca

SEQ ID NO: 1204285 - RNA, 23 nt, Human
ggguuuugccauguuggccaggc

SEQ ID NO: 1204286 - RNA, 13 nt, Human
gguaacaggcaga

SEQ ID NO: 1204287 - RNA, 18 nt, Human
gggugggacacccuguga

SEQ ID NO: 1204288 - RNA, 15 nt, Human
gggugggacacccug

SEQ ID NO: 1204289 - RNA, 14 nt, Human
aaacuuaaucuaaa

SEQ ID NO: 1204290 - RNA, 21 nt, Human
aaacguggcugcuucaaggau

SEQ ID NO: 1204291 - RNA, 22 nt, Human
gggucacucuggcagcucagag

SEQ ID NO: 1204292 - RNA, 20 nt, Human
gggucacucuggcagcucag

SEQ ID NO: 1204293 - RNA, 14 nt, Human
gggucacucuggca

SEQ ID NO: 1204294 - RNA, 19 nt, Human
aaacauuuugucauauaag

SEQ ID NO: 1204295 - RNA, 22 nt, Human
aaaccugugucucugagaguag

SEQ ID NO: 1204296 - RNA, 11 nt, Human
gggggcuggga

SEQ ID NO: 1204297 - RNA, 15 nt, Human
ggggcccugccuccu

SEQ ID NO: 1204298 - RNA, 15 nt, Human
gggggcugggcagag

SEQ ID NO: 1204299 - RNA, 13 nt, Human
ggggguggccucc

SEQ ID NO: 1204300 - RNA, 21 nt, Human
ggggucacucuggcagcucag

SEQ ID NO: 1204301 - RNA, 15 nt, Human
ggggaccagagcugc

SEQ ID NO: 1204302 - RNA, 14 nt, Human
ggggaccagagcug

SEQ ID NO: 1204303 - RNA, 13 nt, Human
ggggaccagagcu

SEQ ID NO: 1204304 - RNA, 12 nt, Human
ggggaccagagc

SEQ ID NO: 1204305 - RNA, 18 nt, Human
aaaauguauguguaagua

SEQ ID NO: 1204306 - RNA, 16 nt, Human
aaaauauuuuccugcc

SEQ ID NO: 1204307 - RNA, 20 nt, Human
aaaauggaagacagcucuua

SEQ ID NO: 1204308 - RNA, 13 nt, Human
aaaauaccaagga

SEQ ID NO: 1204309 - RNA, 14 nt, Human
aaaauaccaaggaa

SEQ ID NO: 1204310 - RNA, 17 nt, Human
aaaagguuaauaaagua

SEQ ID NO: 1204311 - RNA, 16 nt, Human
aaaagguuaauaaagu

SEQ ID NO: 1204312 - RNA, 11 nt, Human
aaaaggcagga

SEQ ID NO: 1204313 - RNA, 22 nt, Human
aaaaggaugcacagaguuguua

SEQ ID NO: 1204314 - RNA, 19 nt, Human
aaaaggaugcacagaguug

SEQ ID NO: 1204315 - RNA, 15 nt, Human
aaaaggaugcacaga

SEQ ID NO: 1204316 - RNA, 14 nt, Human
aaaaggaugcacag

SEQ ID NO: 1204317 - RNA, 13 nt, Human
aaaaggaugcaca

SEQ ID NO: 1204318 - RNA, 22 nt, Human
aaaaggagccaauuuaaagaaa

SEQ ID NO: 1204319 - RNA, 17 nt, Human
gggcuggguucuaccca

SEQ ID NO: 1204320 - RNA, 15 nt, Human
gggcugggcagagga

SEQ ID NO: 1204321 - RNA, 21 nt, Human
gggcugcaccggcuggccugg

SEQ ID NO: 1204322 - RNA, 20 nt, Human
gggcugcaccggcuggccug

SEQ ID NO: 1204323 - RNA, 19 nt, Human
gggcugcaccggcuggccu

SEQ ID NO: 1204324 - RNA, 13 nt, Human
gggcuccagacac

SEQ ID NO: 1204325 - RNA, 10 nt, Human
gggcuccaga

SEQ ID NO: 1204326 - RNA, 21 nt, Human
gggcucagcggggacagcucc

SEQ ID NO: 1204327 - RNA, 19 nt, Human
gggcucagcggggacagcu

SEQ ID NO: 1204328 - RNA, 17 nt, Human
gggcucagcggggacag

SEQ ID NO: 1204329 - RNA, 22 nt, Human
gggcucagcaaaagaugcuucu

SEQ ID NO: 1204330 - RNA, 18 nt, Human
gggcuaguugggcuuccu

SEQ ID NO: 1204331 - RNA, 15 nt, Human
gggcuaguugggcuu

SEQ ID NO: 1204332 - RNA, 14 nt, Human
gggccaggagccuc

SEQ ID NO: 1204333 - RNA, 13 nt, Human
gggccaggagccu

SEQ ID NO: 1204334 - RNA, 19 nt, Human
gggccucuuaugggcuggg

SEQ ID NO: 1204335 - RNA, 18 nt, Human
gggccucuuaugggcugg

SEQ ID NO: 1204336 - RNA, 22 nt, Human
gggccucgguguggagaagcgg

SEQ ID NO: 1204337 - RNA, 15 nt, Human
gggccucagugccac

SEQ ID NO: 1204338 - RNA, 14 nt, Human
gggccucagugcca

SEQ ID NO: 1204339 - RNA, 13 nt, Human
gggccucagugcc

SEQ ID NO: 1204340 - RNA, 21 nt, Human
gggcggugagaggggaacaga

SEQ ID NO: 1204341 - RNA, 14 nt, Human
gcugcaccggcugg

SEQ ID NO: 1204342 - RNA, 13 nt, Human
gcugcaccggcug

SEQ ID NO: 1204343 - RNA, 19 nt, Human
gcugcacccucaggcaggu

SEQ ID NO: 1204344 - RNA, 18 nt, Human
gcugcacccucaggcagg

SEQ ID NO: 1204345 - RNA, 20 nt, Human
gcugccccuggcagccccug

SEQ ID NO: 1204346 - RNA, 19 nt, Human
gcugccccuggcagccccu

SEQ ID NO: 1204347 - RNA, 18 nt, Human
gcugccccuggcagcccc

SEQ ID NO: 1204348 - RNA, 21 nt, Human
gcugccugggaucccucaucc

SEQ ID NO: 1204349 - RNA, 13 nt, Human
gcugccuguucag

SEQ ID NO: 1204350 - RNA, 12 nt, Human
gcugccuguuca

SEQ ID NO: 1204351 - RNA, 17 nt, Human
gcugccuguucagcucc

SEQ ID NO: 1204352 - RNA, 18 nt, Human
gcugccuguucagcucca

SEQ ID NO: 1204353 - RNA, 16 nt, Human
gcugccucucccauca

SEQ ID NO: 1204354 - RNA, 20 nt, Human
gcugccugggaucccucauc

SEQ ID NO: 1204355 - RNA, 15 nt, Human
gcugaggugggagga

SEQ ID NO: 1204356 - RNA, 14 nt, Human
gcugaggugggagg

SEQ ID NO: 1204357 - RNA, 23 nt, Human
gcugagggugagugggugaauaa

SEQ ID NO: 1204358 - RNA, 19 nt, Human
gcuguaucccaugagccuc

SEQ ID NO: 1204359 - RNA, 17 nt, Human
gcuguaucccaugagcc

SEQ ID NO: 1204360 - RNA, 15 nt, Human
gcuguuggcuggggg

SEQ ID NO: 1204361 - RNA, 17 nt, Human
gcugugcugcccugccc

SEQ ID NO: 1204362 - RNA, 16 nt, Human
gcugugcugcccugcc

SEQ ID NO: 1204363 - RNA, 15 nt, Human
gcugugcugcccugc

SEQ ID NO: 1204364 - RNA, 20 nt, Human
gcuguuggcugggggccuca

SEQ ID NO: 1204365 - RNA, 16 nt, Human
gcuguuggcugggggc

SEQ ID NO: 1204366 - RNA, 18 nt, Human
gcugugcucuggacaggc

SEQ ID NO: 1204367 - RNA, 16 nt, Human
gcugugcucuggacag

SEQ ID NO: 1204368 - RNA, 15 nt, Human
gcugugcucuggaca

SEQ ID NO: 1204369 - RNA, 13 nt, Human
gcugugcucugga

SEQ ID NO: 1204370 - RNA, 14 nt, Human
gcuggcgugcagug

SEQ ID NO: 1204371 - RNA, 20 nt, Human
gcuggcgugcaguggugcga

SEQ ID NO: 1204372 - RNA, 18 nt, Human
gcuggcgugcaguggugc

SEQ ID NO: 1204373 - RNA, 15 nt, Human
gcuggcgugcagugg

SEQ ID NO: 1204374 - RNA, 19 nt, Human
gcuggcuguuggcuggggg

SEQ ID NO: 1204375 - RNA, 18 nt, Human
gcuggcuguuggcugggg

SEQ ID NO: 1204376 - RNA, 12 nt, Human
gcugcugaaggc

SEQ ID NO: 1204377 - RNA, 23 nt, Human
gcuggcuguuggcugggggccuc

SEQ ID NO: 1204378 - RNA, 20 nt, Human
gcuggcuguuggcugggggc

SEQ ID NO: 1204379 - RNA, 19 nt, Human
gcugggguggggaccucag

SEQ ID NO: 1204380 - RNA, 17 nt, Human
gcugggguggggaccuc

SEQ ID NO: 1204381 - RNA, 21 nt, Human
gcuggguucuacccaggugcu

SEQ ID NO: 1204382 - RNA, 20 nt, Human
gcuggguucuacccaggugc

SEQ ID NO: 1204383 - RNA, 18 nt, Human
gcuggguucuacccaggu

SEQ ID NO: 1204384 - RNA, 23 nt, Human
gcugggguggggaccucaggccu

SEQ ID NO: 1204385 - RNA, 22 nt, Human
gcugggguggggaccucaggcc

SEQ ID NO: 1204386 - RNA, 23 nt, Human
gcuuucuacccagcgagcccugg

SEQ ID NO: 1204387 - RNA, 22 nt, Human
gcuuucuacccagcgagcccug

SEQ ID NO: 1204388 - RNA, 19 nt, Human
gcuuucuacccagcgagcc

SEQ ID NO: 1204389 - RNA, 13 nt, Human
gcuuucuacccag

SEQ ID NO: 1204390 - RNA, 20 nt, Human
gcuugaccgugaggccagag

SEQ ID NO: 1204391 - RNA, 22 nt, Human
gcuuggggaccagagcugccac

SEQ ID NO: 1204392 - RNA, 21 nt, Human
gcuuggggaccagagcugcca

SEQ ID NO: 1204393 - RNA, 20 nt, Human
gcuuggggaccagagcugcc

SEQ ID NO: 1204394 - RNA, 18 nt, Human
gcuuggggaccagagcug

SEQ ID NO: 1204395 - RNA, 17 nt, Human
gcuuggggaccagagcu

SEQ ID NO: 1204396 - RNA, 16 nt, Human
gcuuggggaccagagc

SEQ ID NO: 1204397 - RNA, 23 nt, Human
gcuugggcuucauccuccucaga

SEQ ID NO: 1204398 - RNA, 19 nt, Human
gcuugaccgugaggccaga

SEQ ID NO: 1204399 - RNA, 18 nt, Human
gcuugaccgugaggccag

SEQ ID NO: 1204400 - RNA, 17 nt, Human
gcuugaccgugaggcca

SEQ ID NO: 1204401 - RNA, 23 nt, Human
gcuucuucagagacuccugcagg

SEQ ID NO: 1204402 - RNA, 21 nt, Human
gcuucuucagagacuccugca

SEQ ID NO: 1204403 - RNA, 19 nt, Human
gcuucuucagagacuccug

SEQ ID NO: 1204404 - RNA, 16 nt, Human
gcuucuucagagacuc

SEQ ID NO: 1204405 - RNA, 17 nt, Human
gcuuaacuucacauauu

SEQ ID NO: 1204406 - RNA, 16 nt, Human
gcuuaacuucacauau

SEQ ID NO: 1204407 - RNA, 19 nt, Human
ggaaagcaaaggagauugg

SEQ ID NO: 1204408 - RNA, 17 nt, Human
ggaaagaguaggaagac

SEQ ID NO: 1204409 - RNA, 16 nt, Human
ggaaagaguaggaaga

SEQ ID NO: 1204410 - RNA, 14 nt, Human
ggaaagaggcucug

SEQ ID NO: 1204411 - RNA, 20 nt, Human
ggaaagacuuuuccaacccu

SEQ ID NO: 1204412 - RNA, 15 nt, Human
ggaaacccagcucug

SEQ ID NO: 1204413 - RNA, 20 nt, Human
ggaaacagcuaaugggacac

SEQ ID NO: 1204414 - RNA, 19 nt, Human
gcuuuugugcauuaucuag

SEQ ID NO: 1204415 - RNA, 13 nt, Human
gcuuuugugcauu

SEQ ID NO: 1204416 - RNA, 15 nt, Human
gcuuuuuaauauuga

SEQ ID NO: 1204417 - RNA, 18 nt, Human
ggaagccgcuggggccag

SEQ ID NO: 1204418 - RNA, 23 nt, Human
ggaagccagcaggcucucaggcc

SEQ ID NO: 1204419 - RNA, 22 nt, Human
ggaagccagcaggcucucaggc

SEQ ID NO: 1204420 - RNA, 21 nt, Human
ggaagccagcaggcucucagg

SEQ ID NO: 1204421 - RNA, 12 nt, Human
ggacacccugug

SEQ ID NO: 1204422 - RNA, 14 nt, Human
ggacacagcucuuc

SEQ ID NO: 1204423 - RNA, 13 nt, Human
ggacacagcucuu

SEQ ID NO: 1204424 - RNA, 12 nt, Human
ggacacagcucu

SEQ ID NO: 1204425 - RNA, 14 nt, Human
ggaaugauuaauua

SEQ ID NO: 1204426 - RNA, 19 nt, Human
ggaaugaaugucaguguga

SEQ ID NO: 1204427 - RNA, 19 nt, Human
ggaauaccugucccccuga

SEQ ID NO: 1204428 - RNA, 16 nt, Human
ggaauaccuguccccc

SEQ ID NO: 1204429 - RNA, 16 nt, Human
ggaauauauaaccagu

SEQ ID NO: 1204430 - RNA, 15 nt, Human
ggaauaccugucccc

SEQ ID NO: 1204431 - RNA, 22 nt, Human
ggaagcucagggccuggcucag

SEQ ID NO: 1204432 - RNA, 21 nt, Human
ggaagcucagggccuggcuca

SEQ ID NO: 1204433 - RNA, 17 nt, Human
ggaagcucagggccugg

SEQ ID NO: 1204434 - RNA, 16 nt, Human
ggaagcucagggccug

SEQ ID NO: 1204435 - RNA, 23 nt, Human
ggacacccugugauggggcccug

SEQ ID NO: 1204436 - RNA, 13 nt, Human
ggacacccuguga

SEQ ID NO: 1204437 - RNA, 17 nt, Human
ggacagggaggugaccc

SEQ ID NO: 1204438 - RNA, 14 nt, Human
ggacauggacaagg

SEQ ID NO: 1204439 - RNA, 13 nt, Human
ggacauggacaag

SEQ ID NO: 1204440 - RNA, 22 nt, Human
gcuaagugauccucccaccuca

SEQ ID NO: 1204441 - RNA, 18 nt, Human
gcuaagugauccucccac

SEQ ID NO: 1204442 - RNA, 21 nt, Human
gcuaguugggcuuccucauag

SEQ ID NO: 1204443 - RNA, 16 nt, Human
gcuaguugggcuuccu

SEQ ID NO: 1204444 - RNA, 14 nt, Human
gcuaguugggcuuc

SEQ ID NO: 1204445 - RNA, 18 nt, Human
gcuauucaguaauaacuc

SEQ ID NO: 1204446 - RNA, 22 nt, Human
gcuaggaccccuccaugugggc

SEQ ID NO: 1204447 - RNA, 20 nt, Human
gcuaggaccccuccaugugg

SEQ ID NO: 1204448 - RNA, 20 nt, Human
gcucagggccuggcucaggu

SEQ ID NO: 1204449 - RNA, 19 nt, Human
gcucagggccuggcucagg

SEQ ID NO: 1204450 - RNA, 18 nt, Human
gcucagggccuggcucag

SEQ ID NO: 1204451 - RNA, 13 nt, Human
gcucaggaguuug

SEQ ID NO: 1204452 - RNA, 23 nt, Human
gcgauucuucugcuucagccucc

SEQ ID NO: 1204453 - RNA, 21 nt, Human
gcgcagcauauucaggaagcu

SEQ ID NO: 1204454 - RNA, 22 nt, Human
gcgauucuucugcuucagccuc

SEQ ID NO: 1204455 - RNA, 23 nt, Human
gccuugaccauucuccaccugcc

SEQ ID NO: 1204456 - RNA, 22 nt, Human
gccuugaccauucuccaccugc

SEQ ID NO: 1204457 - RNA, 16 nt, Human
gccuugaccauucucc

SEQ ID NO: 1204458 - RNA, 23 nt, Human
gccuugaacuuugaccucugcag

SEQ ID NO: 1204459 - RNA, 14 nt, Human
gccuugaacuuuga

SEQ ID NO: 1204460 - RNA, 16 nt, Human
gccuucucugaaggac

SEQ ID NO: 1204461 - RNA, 15 nt, Human
gccuucucugaagga

SEQ ID NO: 1204462 - RNA, 17 nt, Human
gccuguucagcuccagc

SEQ ID NO: 1204463 - RNA, 16 nt, Human
gccuguucagcuccag

SEQ ID NO: 1204464 - RNA, 15 nt, Human
gccuguucagcucca

SEQ ID NO: 1204465 - RNA, 11 nt, Human
gccugggcaga

SEQ ID NO: 1204466 - RNA, 23 nt, Human
gccugggaucccucauccucaua

SEQ ID NO: 1204467 - RNA, 20 nt, Human
gcgggaggauguucugggac

SEQ ID NO: 1204468 - RNA, 15 nt, Human
gcggcuggcagccca

SEQ ID NO: 1204469 - RNA, 19 nt, Human
gccuagcauacguacacau

SEQ ID NO: 1204470 - RNA, 12 nt, Human
gccuagcauacg

SEQ ID NO: 1204471 - RNA, 17 nt, Human
gccuacaggagugagca

SEQ ID NO: 1204472 - RNA, 16 nt, Human
gccucgaacuggcugc

SEQ ID NO: 1204473 - RNA, 13 nt, Human
gccucgaacuggc

SEQ ID NO: 1204474 - RNA, 22 nt, Human
gccuccuuugugaggaagccgc

SEQ ID NO: 1204475 - RNA, 18 nt, Human
gccuccugcccuuaccug

SEQ ID NO: 1204476 - RNA, 21 nt, Human
gccccugcugguucaggguug

SEQ ID NO: 1204477 - RNA, 17 nt, Human
gccccuggcagccccug

SEQ ID NO: 1204478 - RNA, 16 nt, Human
gccccuggcagccccu

SEQ ID NO: 1204479 - RNA, 16 nt, Human
gccuacaggagugagc

SEQ ID NO: 1204480 - RNA, 19 nt, Human
gcccuuagcagggaaacag

SEQ ID NO: 1204481 - RNA, 21 nt, Human
gcccugugggcccccaaaugg

SEQ ID NO: 1204482 - RNA, 23 nt, Human
gcccuuaccugccaggaagccag

SEQ ID NO: 1204483 - RNA, 22 nt, Human
gcccuuaccugccaggaagcca

SEQ ID NO: 1204484 - RNA, 17 nt, Human
gcccugugggcccccaa

SEQ ID NO: 1204485 - RNA, 16 nt, Human
gcccugugggccccca

SEQ ID NO: 1204486 - RNA, 15 nt, Human
gcccugcccaccugg

SEQ ID NO: 1204487 - RNA, 14 nt, Human
gcccugcccaccug

SEQ ID NO: 1204488 - RNA, 20 nt, Human
gccccaaaacucuccucugc

SEQ ID NO: 1204489 - RNA, 21 nt, Human
gccccaaaacucuccucugcu

SEQ ID NO: 1204490 - RNA, 15 nt, Human
gccccuggcagcccc

SEQ ID NO: 1204491 - RNA, 12 nt, Human
gccccuggcagc

SEQ ID NO: 1204492 - RNA, 16 nt, Human
gccccugcugguucag

SEQ ID NO: 1204493 - RNA, 15 nt, Human
gccccugcugguuca

SEQ ID NO: 1204494 - RNA, 12 nt, Human
gccccugcuggu

SEQ ID NO: 1204495 - RNA, 13 nt, Human
gcccaggccccug

SEQ ID NO: 1204496 - RNA, 22 nt, Human
gcccaggccccugccacccugg

SEQ ID NO: 1204497 - RNA, 21 nt, Human
gcccaggccccugccacccug

SEQ ID NO: 1204498 - RNA, 20 nt, Human
gcccaggccccugccacccu

SEQ ID NO: 1204499 - RNA, 12 nt, Human
gcccaggccccu

SEQ ID NO: 1204500 - RNA, 11 nt, Human
gcccaggcccc

SEQ ID NO: 1204501 - RNA, 12 nt, Human
gcccaggcaggu

SEQ ID NO: 1204502 - RNA, 11 nt, Human
gcccaggcagg

SEQ ID NO: 1204503 - RNA, 21 nt, Human
gcccacgcccccacuggugac

SEQ ID NO: 1204504 - RNA, 17 nt, Human
gcccacgcccccacugg

SEQ ID NO: 1204505 - RNA, 16 nt, Human
gcccacgcccccacug

SEQ ID NO: 1204506 - RNA, 18 nt, Human
gcauuuacuuuguguuca

SEQ ID NO: 1204507 - RNA, 14 nt, Human
gcccacuucugcca

SEQ ID NO: 1204508 - RNA, 24 nt, Human
gcccaggaaaggcuccaggagcag

SEQ ID NO: 1204509 - RNA, 23 nt, Human
gcccaggaaaggcuccaggagca

SEQ ID NO: 1204510 - RNA, 22 nt, Human
gcccaggaaaggcuccaggagc

SEQ ID NO: 1204511 - RNA, 13 nt, Human
gcccacuucugcc

SEQ ID NO: 1204512 - RNA, 23 nt, Human
gcccacgcuggagugcagugagc

SEQ ID NO: 1204513 - RNA, 21 nt, Human
gcccacgcuggagugcaguga

SEQ ID NO: 1204514 - RNA, 19 nt, Human
gcccacgcuggagugcagu

SEQ ID NO: 1204515 - RNA, 21 nt, Human
gaugcuucuucagagacuccu

SEQ ID NO: 1204516 - RNA, 20 nt, Human
gaugcuucuucagagacucc

SEQ ID NO: 1204517 - RNA, 17 nt, Human
gaugcuucuucagagac

SEQ ID NO: 1204518 - RNA, 22 nt, Human
gaugauuggaggggggaggugg

SEQ ID NO: 1204519 - RNA, 14 nt, Human
gaugauccuaggca

SEQ ID NO: 1204520 - RNA, 13 nt, Human
gaugauccuaggc

SEQ ID NO: 1204521 - RNA, 19 nt, Human
gaucucuugagccugggag

SEQ ID NO: 1204522 - RNA, 21 nt, Human
gauacuguaucaugacaaaga

SEQ ID NO: 1204523 - RNA, 17 nt, Human
gauacuguaucaugaca

SEQ ID NO: 1204524 - RNA, 23 nt, Human
gauacaguuacucagaauucucu

SEQ ID NO: 1204525 - RNA, 19 nt, Human
gauacaguuacucagaauu

SEQ ID NO: 1204526 - RNA, 16 nt, Human
gauacaguuacucaga

SEQ ID NO: 1204527 - RNA, 22 nt, Human
gauccacccaccucagccuccc

SEQ ID NO: 1204528 - RNA, 21 nt, Human
gauccacccaccucagccucc

SEQ ID NO: 1204529 - RNA, 20 nt, Human
gauccacccaccucagccuc

SEQ ID NO: 1204530 - RNA, 19 nt, Human
gauccacccaccucagccu

SEQ ID NO: 1204531 - RNA, 18 nt, Human
gauccacccaccucagcc

SEQ ID NO: 1204532 - RNA, 21 nt, Human
gauccaagcuggucccacuca

SEQ ID NO: 1204533 - RNA, 19 nt, Human
gauccaagcuggucccacu

SEQ ID NO: 1204534 - RNA, 17 nt, Human
gauccaagcugguccca

SEQ ID NO: 1204535 - RNA, 16 nt, Human
gauccaagcugguccc

SEQ ID NO: 1204536 - RNA, 12 nt, Human
gauccaagcugg

SEQ ID NO: 1204537 - RNA, 21 nt, Human
gaucaaccccuucgcuccugu

SEQ ID NO: 1204538 - RNA, 23 nt, Human
gaucaaaagguuaauaaaguaau

SEQ ID NO: 1204539 - RNA, 20 nt, Human
gaucaaaagguuaauaaagu

SEQ ID NO: 1204540 - RNA, 15 nt, Human
gauauuuugcuuugu

SEQ ID NO: 1204541 - RNA, 20 nt, Human
gcaaccuccgccucuugggu

SEQ ID NO: 1204542 - RNA, 17 nt, Human
gcaacccccagccugcu

SEQ ID NO: 1204543 - RNA, 16 nt, Human
gcaacccccagccugc

SEQ ID NO: 1204544 - RNA, 15 nt, Human
gcaacccccagccug

SEQ ID NO: 1204545 - RNA, 14 nt, Human
gcaacccccagccu

SEQ ID NO: 1204546 - RNA, 18 nt, Human
gcaaccaccaccaaccac

SEQ ID NO: 1204547 - RNA, 16 nt, Human
gcaaccaccaccaacc

SEQ ID NO: 1204548 - RNA, 13 nt, Human
gcaaccaccacca

SEQ ID NO: 1204549 - RNA, 19 nt, Human
gcaacaggcugggcuucag

SEQ ID NO: 1204550 - RNA, 16 nt, Human
gcaacaggcugggcuu

SEQ ID NO: 1204551 - RNA, 15 nt, Human
gcaacaggcugggcu

SEQ ID NO: 1204552 - RNA, 14 nt, Human
gcaacaggcugggc

SEQ ID NO: 1204553 - RNA, 13 nt, Human
gcaacaggcuggg

SEQ ID NO: 1204554 - RNA, 16 nt, Human
gcaagugagagcuggg

SEQ ID NO: 1204555 - RNA, 15 nt, Human
gauucuucugcuuca

SEQ ID NO: 1204556 - RNA, 13 nt, Human
gauucuucugcuu

SEQ ID NO: 1204557 - RNA, 19 nt, Human
gauuuaacagaaauguaca

SEQ ID NO: 1204558 - RNA, 18 nt, Human
gauuuaacagaaauguac

SEQ ID NO: 1204559 - RNA, 17 nt, Human
gauuuaacagaaaugua

SEQ ID NO: 1204560 - RNA, 20 nt, Human
gauucuucugcuucagccuc

SEQ ID NO: 1204561 - RNA, 16 nt, Human
gauuuaacagaaaugu

SEQ ID NO: 1204562 - RNA, 22 nt, Human
gcaaaagaugcuucucacugcc

SEQ ID NO: 1204563 - RNA, 14 nt, Human
gcaaaaaggcagga

SEQ ID NO: 1204564 - RNA, 21 nt, Human
gauuuuuuuuuccuucagugc

SEQ ID NO: 1204565 - RNA, 18 nt, Human
gauuuuuuuuuccuucag

SEQ ID NO: 1204566 - RNA, 17 nt, Human
gauuuuuuuuuccuuca

SEQ ID NO: 1204567 - RNA, 12 nt, Human
gauuucacucuc

SEQ ID NO: 1204568 - RNA, 11 nt, Human
gauuucacucu

SEQ ID NO: 1204569 - RNA, 15 nt, Human
gcagccacauuccug

SEQ ID NO: 1204570 - RNA, 18 nt, Human
gcagcccaccccucaaca

SEQ ID NO: 1204571 - RNA, 19 nt, Human
gcaagugagagcugggugu

SEQ ID NO: 1204572 - RNA, 18 nt, Human
gcaagugagagcugggug

SEQ ID NO: 1204573 - RNA, 20 nt, Human
gcacucagaagacacugaug

SEQ ID NO: 1204574 - RNA, 22 nt, Human
gcacuuuguucuggcucuucca

SEQ ID NO: 1204575 - RNA, 19 nt, Human
gcacuuuguucuggcucuu

SEQ ID NO: 1204576 - RNA, 18 nt, Human
gcacuuuguucuggcucu

SEQ ID NO: 1204577 - RNA, 16 nt, Human
gcacuccccugcuggg

SEQ ID NO: 1204578 - RNA, 15 nt, Human
gcacuccccugcugg

SEQ ID NO: 1204579 - RNA, 14 nt, Human
gcacuccccugcug

SEQ ID NO: 1204580 - RNA, 13 nt, Human
gcacuccccugcu

SEQ ID NO: 1204581 - RNA, 15 nt, Human
gcacuccagccuggg

SEQ ID NO: 1204582 - RNA, 14 nt, Human
gcacuccagccugg

SEQ ID NO: 1204583 - RNA, 21 nt, Human
gcagaggaaagcaaaggagau

SEQ ID NO: 1204584 - RNA, 20 nt, Human
gcagaggaaagcaaaggaga

SEQ ID NO: 1204585 - RNA, 18 nt, Human
gcagaggaaagcaaagga

SEQ ID NO: 1204586 - RNA, 14 nt, Human
gcagaggaaagcaa

SEQ ID NO: 1204587 - RNA, 13 nt, Human
gcagaggaaagca

SEQ ID NO: 1204588 - RNA, 23 nt, Human
gcagcauauucaggaagcucagg

SEQ ID NO: 1204589 - RNA, 19 nt, Human
gcagcauauucaggaagcu

SEQ ID NO: 1204590 - RNA, 18 nt, Human
gcagcauauucaggaagc

SEQ ID NO: 1204591 - RNA, 17 nt, Human
gcagcauauucaggaag

SEQ ID NO: 1204592 - RNA, 14 nt, Human
gcagagggcacaga

SEQ ID NO: 1204593 - RNA, 18 nt, Human
gcauacguacacauuuua

SEQ ID NO: 1204594 - RNA, 17 nt, Human
gcauacguacacauuuu

SEQ ID NO: 1204595 - RNA, 16 nt, Human
gcauacguacacauuu

SEQ ID NO: 1204596 - RNA, 15 nt, Human
gcauacguacacauu

SEQ ID NO: 1204597 - RNA, 17 nt, Human
gcauccaguaucuugaa

SEQ ID NO: 1204598 - RNA, 14 nt, Human
gcauccaguaucuu

SEQ ID NO: 1204599 - RNA, 18 nt, Human
gcauccaguaucuugaag

SEQ ID NO: 1204600 - RNA, 14 nt, Human
gcauccuggcaccc

SEQ ID NO: 1204601 - RNA, 13 nt, Human
gcauccuggcacc

SEQ ID NO: 1204602 - RNA, 13 nt, Human
gcaugggaaugaa

SEQ ID NO: 1204603 - RNA, 21 nt, Human
gcauggcugccaaugggagcu

SEQ ID NO: 1204604 - RNA, 15 nt, Human
gcauuuacuuugugu

SEQ ID NO: 1204605 - RNA, 22 nt, Human
gcauuuaaaagauacaguuacu

SEQ ID NO: 1204606 - RNA, 18 nt, Human
gcauuuaaaagauacagu

SEQ ID NO: 1204607 - RNA, 17 nt, Human
gcauuuaaaagauacag

SEQ ID NO: 1204608 - RNA, 16 nt, Human
gcauuuaaaagauaca

SEQ ID NO: 1204609 - RNA, 18 nt, Human
gcauugugggaaggggag

SEQ ID NO: 1204610 - RNA, 16 nt, Human
gcauugugggaagggg

SEQ ID NO: 1204611 - RNA, 15 nt, Human
gcauugugggaaggg

SEQ ID NO: 1204612 - RNA, 13 nt, Human
gcauugugggaag

SEQ ID NO: 1204613 - RNA, 21 nt, Human
gcaugugaugagaggaaauca

SEQ ID NO: 1204614 - RNA, 19 nt, Human
gcaugugaugagaggaaau

SEQ ID NO: 1204615 - RNA, 24 nt, Human
gaauauugcugauggugcaaugac

SEQ ID NO: 1204616 - RNA, 23 nt, Human
gaauauugcugauggugcaauga

SEQ ID NO: 1204617 - RNA, 22 nt, Human
gaauauugcugauggugcaaug

SEQ ID NO: 1204618 - RNA, 15 nt, Human
gaauauauaaccagu

SEQ ID NO: 1204619 - RNA, 13 nt, Human
gaauauugcugau

SEQ ID NO: 1204620 - RNA, 12 nt, Human
gaauauugcuga

SEQ ID NO: 1204621 - RNA, 11 nt, Human
gaauauugcug

SEQ ID NO: 1204622 - RNA, 14 nt, Human
gaaugauuaauuaa

SEQ ID NO: 1204623 - RNA, 14 nt, Human
gaaugaugccauga

SEQ ID NO: 1204624 - RNA, 20 nt, Human
gaaugaugauccuaggcauu

SEQ ID NO: 1204625 - RNA, 17 nt, Human
gaauguuugccucugcc

SEQ ID NO: 1204626 - RNA, 16 nt, Human
gaauguuugccucugc

SEQ ID NO: 1204627 - RNA, 19 nt, Human
gaaugcacaaacagaggcc

SEQ ID NO: 1204628 - RNA, 18 nt, Human
gaaugcacaaacagaggc

SEQ ID NO: 1204629 - RNA, 19 nt, Human
gaauguuugccucugccuc

SEQ ID NO: 1204630 - RNA, 18 nt, Human
gaauguuugccucugccu

SEQ ID NO: 1204631 - RNA, 13 nt, Human
gacacagcucuuc

SEQ ID NO: 1204632 - RNA, 21 nt, Human
gacacagcucuucuccaggcu

SEQ ID NO: 1204633 - RNA, 20 nt, Human
gacacagcucuucuccaggc

SEQ ID NO: 1204634 - RNA, 19 nt, Human
gacacagcucuucuccagg

SEQ ID NO: 1204635 - RNA, 12 nt, Human
gacacagcucuu

SEQ ID NO: 1204636 - RNA, 14 nt, Human
gaccucaggccugg

SEQ ID NO: 1204637 - RNA, 10 nt, Human
gacccugagg

SEQ ID NO: 1204638 - RNA, 21 nt, Human
gaccucaggugauccacccac

SEQ ID NO: 1204639 - RNA, 20 nt, Human
gaccucaggugauccaccca

SEQ ID NO: 1204640 - RNA, 19 nt, Human
gaccucaggugauccaccc

SEQ ID NO: 1204641 - RNA, 21 nt, Human
gaccucaggugagaagcagag

SEQ ID NO: 1204642 - RNA, 19 nt, Human
gaccucaggugagaagcag

SEQ ID NO: 1204643 - RNA, 18 nt, Human
gaccucaggugagaagca

SEQ ID NO: 1204644 - RNA, 19 nt, Human
gaccucaggccugggggcu

SEQ ID NO: 1204645 - RNA, 21 nt, Human
gacgcugugcugcccugccca

SEQ ID NO: 1204646 - RNA, 18 nt, Human
gacgcugugcugcccugc

SEQ ID NO: 1204647 - RNA, 17 nt, Human
gacgcugugcugcccug

SEQ ID NO: 1204648 - RNA, 16 nt, Human
gacgcugugcugcccu

SEQ ID NO: 1204649 - RNA, 23 nt, Human
gacgcuacccgggaagggggcug

SEQ ID NO: 1204650 - RNA, 22 nt, Human
gacgcuacccgggaagggggcu

SEQ ID NO: 1204651 - RNA, 21 nt, Human
gacgccaucccagccccaaug

SEQ ID NO: 1204652 - RNA, 15 nt, Human
gacgccaucccagcc

SEQ ID NO: 1204653 - RNA, 13 nt, Human
gacgccaucccag

SEQ ID NO: 1204654 - RNA, 12 nt, Human
gacgccauccca

SEQ ID NO: 1204655 - RNA, 13 nt, Human
gaccucugccuga

SEQ ID NO: 1204656 - RNA, 22 nt, Human
gaccucugcagcaauaaagcag

SEQ ID NO: 1204657 - RNA, 18 nt, Human
gaccucugcagcaauaaa

SEQ ID NO: 1204658 - RNA, 16 nt, Human
gaccucugcagcaaua

SEQ ID NO: 1204659 - RNA, 18 nt, Human
gacagcuccuucuguccu

SEQ ID NO: 1204660 - RNA, 17 nt, Human
gacagcuccuucugucc

SEQ ID NO: 1204661 - RNA, 16 nt, Human
gacagcccgggcucug

SEQ ID NO: 1204662 - RNA, 14 nt, Human
gacagcccgggcuc

SEQ ID NO: 1204663 - RNA, 20 nt, Human
gacagucccugccaauggac

SEQ ID NO: 1204664 - RNA, 16 nt, Human
gacagucccugccaau

SEQ ID NO: 1204665 - RNA, 15 nt, Human
gacagucccugccaa

SEQ ID NO: 1204666 - RNA, 14 nt, Human
gacagucccugcca

SEQ ID NO: 1204667 - RNA, 12 nt, Human
gacagucccugc

SEQ ID NO: 1204668 - RNA, 11 nt, Human
gacagcucuua

SEQ ID NO: 1204669 - RNA, 10 nt, Human
gacagcucuu

SEQ ID NO: 1204670 - RNA, 19 nt, Human
gacagcuccuucuguccua

SEQ ID NO: 1204671 - RNA, 23 nt, Human
gacauugcggacagccacggcca

SEQ ID NO: 1204672 - RNA, 14 nt, Human
gagcccugguggca

SEQ ID NO: 1204673 - RNA, 13 nt, Human
gagcccugguggc

SEQ ID NO: 1204674 - RNA, 17 nt, Human
gagccccgaggccuucu

SEQ ID NO: 1204675 - RNA, 14 nt, Human
gagccccgaggccu

SEQ ID NO: 1204676 - RNA, 21 nt, Human
gagcaugccuggauggggcug

SEQ ID NO: 1204677 - RNA, 13 nt, Human
gagcaugccugga

SEQ ID NO: 1204678 - RNA, 17 nt, Human
gagcaucaggccaggcc

SEQ ID NO: 1204679 - RNA, 16 nt, Human
gagcaucaggccaggc

SEQ ID NO: 1204680 - RNA, 15 nt, Human
gagcaucaggccagg

SEQ ID NO: 1204681 - RNA, 14 nt, Human
gagcaucaggccag

SEQ ID NO: 1204682 - RNA, 23 nt, Human
gaggacuuuucuuuguggcuucc

SEQ ID NO: 1204683 - RNA, 20 nt, Human
gaggacuuuucuuuguggcu

SEQ ID NO: 1204684 - RNA, 16 nt, Human
gaggacuuuucuuugu

SEQ ID NO: 1204685 - RNA, 22 nt, Human
gaggcagggucucacucugucg

SEQ ID NO: 1204686 - RNA, 20 nt, Human
gaggcagggucucacucugu

SEQ ID NO: 1204687 - RNA, 19 nt, Human
gaggcagggucucacucug

SEQ ID NO: 1204688 - RNA, 15 nt, Human
gaggagagaggaccc

SEQ ID NO: 1204689 - RNA, 14 nt, Human
gaggagagaggacc

SEQ ID NO: 1204690 - RNA, 12 nt, Human
gaggagagagga

SEQ ID NO: 1204691 - RNA, 17 nt, Human
gaggccaaggugggagg

SEQ ID NO: 1204692 - RNA, 21 nt, Human
gaggcauuuguuugaacugau

SEQ ID NO: 1204693 - RNA, 19 nt, Human
gaggcauuuguuugaacug

SEQ ID NO: 1204694 - RNA, 22 nt, Human
gaggcaugugaugagaggaaau

SEQ ID NO: 1204695 - RNA, 21 nt, Human
gaggcaugugaugagaggaaa

SEQ ID NO: 1204696 - RNA, 20 nt, Human
gaggcaugugaugagaggaa

SEQ ID NO: 1204697 - RNA, 21 nt, Human
gagggccugcaagggagugag

SEQ ID NO: 1204698 - RNA, 17 nt, Human
gagggccugcaagggag

SEQ ID NO: 1204699 - RNA, 14 nt, Human
gagggccugcaagg

SEQ ID NO: 1204700 - RNA, 19 nt, Human
gacuuuuccaacccucauc

SEQ ID NO: 1204701 - RNA, 14 nt, Human
gacuuuuccaaccc

SEQ ID NO: 1204702 - RNA, 20 nt, Human
gacuuuuccaacccucauca

SEQ ID NO: 1204703 - RNA, 18 nt, Human
gagacgggggcagagagg

SEQ ID NO: 1204704 - RNA, 19 nt, Human
gagacggagucccaccuug

SEQ ID NO: 1204705 - RNA, 16 nt, Human
gagacggagucccacc

SEQ ID NO: 1204706 - RNA, 14 nt, Human
gagacggaguccca

SEQ ID NO: 1204707 - RNA, 23 nt, Human
gagaaugaaagggcccagagagg

SEQ ID NO: 1204708 - RNA, 15 nt, Human
gagaaugaaagggcc

SEQ ID NO: 1204709 - RNA, 14 nt, Human
gagauuggaaggaa

SEQ ID NO: 1204710 - RNA, 16 nt, Human
gagagccuuccagggg

SEQ ID NO: 1204711 - RNA, 15 nt, Human
gagagccuuccaggg

SEQ ID NO: 1204712 - RNA, 14 nt, Human
gagacuccugcagg

SEQ ID NO: 1204713 - RNA, 13 nt, Human
gagacuccugcag

SEQ ID NO: 1204714 - RNA, 13 nt, Human
gagagcugggugu

SEQ ID NO: 1204715 - RNA, 21 nt, Human
gagagcuagcagcagggaggg

SEQ ID NO: 1204716 - RNA, 15 nt, Human
gagagcuagcagcag

SEQ ID NO: 1204717 - RNA, 20 nt, Human
gagagccuuccagggguggg

SEQ ID NO: 1204718 - RNA, 18 nt, Human
gagagccuuccaggggug

SEQ ID NO: 1204719 - RNA, 15 nt, Human
gagaggacccccuga

SEQ ID NO: 1204720 - RNA, 20 nt, Human
gagagcugggugucaagagg

SEQ ID NO: 1204721 - RNA, 12 nt, Human
gagaggaaauca

SEQ ID NO: 1204722 - RNA, 23 nt, Human
cuuggcgcugccccuggcagccc

SEQ ID NO: 1204723 - RNA, 22 nt, Human
cuuggcgcugccccuggcagcc

SEQ ID NO: 1204724 - RNA, 21 nt, Human
cuuggcgcugccccuggcagc

SEQ ID NO: 1204725 - RNA, 22 nt, Human
cuuggauuguccccgacccuug

SEQ ID NO: 1204726 - RNA, 20 nt, Human
cuuggauuguccccgacccu

SEQ ID NO: 1204727 - RNA, 18 nt, Human
cuuggauuguccccgacc

SEQ ID NO: 1204728 - RNA, 15 nt, Human
cuuggauuguccccg

SEQ ID NO: 1204729 - RNA, 19 nt, Human
cuugccgucuaccugaggg

SEQ ID NO: 1204730 - RNA, 18 nt, Human
cuugccgucuaccugagg

SEQ ID NO: 1204731 - RNA, 19 nt, Human
cuugauucauaaugacuua

SEQ ID NO: 1204732 - RNA, 15 nt, Human
cuugauguguuaucu

SEQ ID NO: 1204733 - RNA, 18 nt, Human
cuuucaauaggaaaaacu

SEQ ID NO: 1204734 - RNA, 17 nt, Human
cuuucaauaggaaaaac

SEQ ID NO: 1204735 - RNA, 15 nt, Human
cuuucaauaggaaaa

SEQ ID NO: 1204736 - RNA, 14 nt, Human
cuuucaauaggaaa

SEQ ID NO: 1204737 - RNA, 23 nt, Human
cuuuaaugucacaggcaggucca

SEQ ID NO: 1204738 - RNA, 22 nt, Human
cuuuaaugucacaggcaggucc

SEQ ID NO: 1204739 - RNA, 20 nt, Human
cuuuaaugucacaggcaggu

SEQ ID NO: 1204740 - RNA, 19 nt, Human
cuuuaaugucacaggcagg

SEQ ID NO: 1204741 - RNA, 18 nt, Human
cuuuaaugucacaggcag

SEQ ID NO: 1204742 - RNA, 17 nt, Human
cuuuaaugucacaggca

SEQ ID NO: 1204743 - RNA, 22 nt, Human
cuugucuuuggacccugaggcc

SEQ ID NO: 1204744 - RNA, 21 nt, Human
cuugucuuuggacccugaggc

SEQ ID NO: 1204745 - RNA, 20 nt, Human
cuugguccugcugcaguugc

SEQ ID NO: 1204746 - RNA, 18 nt, Human
cuugguccugcugcaguu

SEQ ID NO: 1204747 - RNA, 17 nt, Human
cuugguccugcugcagu

SEQ ID NO: 1204748 - RNA, 16 nt, Human
cuugguccugcugcag

SEQ ID NO: 1204749 - RNA, 16 nt, Human
cuugguucccauuugc

SEQ ID NO: 1204750 - RNA, 20 nt, Human
cuugguucccauuugcuccu

SEQ ID NO: 1204751 - RNA, 22 nt, Human
cuugguccugcugcaguugcca

SEQ ID NO: 1204752 - RNA, 20 nt, Human
cuugucuuuggacccugagg

SEQ ID NO: 1204753 - RNA, 13 nt, Human
cuugucuguagau

SEQ ID NO: 1204754 - RNA, 16 nt, Human
cuucuuauacauuuga

SEQ ID NO: 1204755 - RNA, 13 nt, Human
cuucuuauacauu

SEQ ID NO: 1204756 - RNA, 20 nt, Human
cuucugacccaugcugcccu

SEQ ID NO: 1204757 - RNA, 23 nt, Human
cuucugaacuuggcgcugccccu

SEQ ID NO: 1204758 - RNA, 18 nt, Human
cuucugacccaugcugcc

SEQ ID NO: 1204759 - RNA, 17 nt, Human
cuucugacccaugcugc

SEQ ID NO: 1204760 - RNA, 16 nt, Human
cuucugacccaugcug

SEQ ID NO: 1204761 - RNA, 18 nt, Human
cuuccucccucccucuuu

SEQ ID NO: 1204762 - RNA, 14 nt, Human
cuuccucccucccu

SEQ ID NO: 1204763 - RNA, 13 nt, Human
cuuccucccuccc

SEQ ID NO: 1204764 - RNA, 12 nt, Human
cuuccucccucc

SEQ ID NO: 1204765 - RNA, 21 nt, Human
cuuccucuuuccaucuacccu

SEQ ID NO: 1204766 - RNA, 22 nt, Human
cuucugaacuuggcgcugcccc

SEQ ID NO: 1204767 - RNA, 19 nt, Human
cuucugaacuuggcgcugc

SEQ ID NO: 1204768 - RNA, 19 nt, Human
gaaauuuuuauuaaauuau

SEQ ID NO: 1204769 - RNA, 18 nt, Human
gaaauuuuuauuaaauua

SEQ ID NO: 1204770 - RNA, 19 nt, Human
gaaaucaccgaaaacgugg

SEQ ID NO: 1204771 - RNA, 17 nt, Human
gaaaucaccgaaaacgu

SEQ ID NO: 1204772 - RNA, 22 nt, Human
gaaaguacuucuccacccugcu

SEQ ID NO: 1204773 - RNA, 21 nt, Human
gaaaguacuucuccacccugc

SEQ ID NO: 1204774 - RNA, 20 nt, Human
gaaaggcuccaggagcagcc

SEQ ID NO: 1204775 - RNA, 19 nt, Human
gaaaggcuccaggagcagc

SEQ ID NO: 1204776 - RNA, 18 nt, Human
gaaaggcuccaggagcag

SEQ ID NO: 1204777 - RNA, 17 nt, Human
gaaaggcuccaggagca

SEQ ID NO: 1204778 - RNA, 20 nt, Human
gaaagacuaucuaaauguug

SEQ ID NO: 1204779 - RNA, 18 nt, Human
gaaagacuaucuaaaugu

SEQ ID NO: 1204780 - RNA, 21 nt, Human
gaacaaggcaaggcugucaau

SEQ ID NO: 1204781 - RNA, 18 nt, Human
gaacaaggcaaggcuguc

SEQ ID NO: 1204782 - RNA, 17 nt, Human
gaacaaggcaaggcugu

SEQ ID NO: 1204783 - RNA, 15 nt, Human
gaacaaggcaaggcu

SEQ ID NO: 1204784 - RNA, 14 nt, Human
gaacaaggcaaggc

SEQ ID NO: 1204785 - RNA, 18 nt, Human
cuuuugccguuauuaaaa

SEQ ID NO: 1204786 - RNA, 17 nt, Human
cuuuugucuaugggacu

SEQ ID NO: 1204787 - RNA, 16 nt, Human
cuuuuggucuguguga

SEQ ID NO: 1204788 - RNA, 15 nt, Human
cuuuuggucugugug

SEQ ID NO: 1204789 - RNA, 19 nt, Human
gaaaaaauauuuuccugcc

SEQ ID NO: 1204790 - RNA, 21 nt, Human
cuuuuuuuuuuuuuuugacaa

SEQ ID NO: 1204791 - RNA, 18 nt, Human
cuuuugugcauuaucuag

SEQ ID NO: 1204792 - RNA, 14 nt, Human
cuuuugugcauuau

SEQ ID NO: 1204793 - RNA, 18 nt, Human
gaaaauuuugauguuuua

SEQ ID NO: 1204794 - RNA, 22 nt, Human
cugucuaaugaaaccugugucu

SEQ ID NO: 1204795 - RNA, 21 nt, Human
cuguccugggagugagcuggu

SEQ ID NO: 1204796 - RNA, 16 nt, Human
cugucauuugagcagg

SEQ ID NO: 1204797 - RNA, 20 nt, Human
cuguccugggagugagcugg

SEQ ID NO: 1204798 - RNA, 14 nt, Human
cuguccugggagug

SEQ ID NO: 1204799 - RNA, 13 nt, Human
cuguccugggagu

SEQ ID NO: 1204800 - RNA, 14 nt, Human
cugucauuugagca

SEQ ID NO: 1204801 - RNA, 18 nt, Human
cuguaggaagguuaaugu

SEQ ID NO: 1204802 - RNA, 15 nt, Human
cuguagagugggagc

SEQ ID NO: 1204803 - RNA, 18 nt, Human
cuggucuuauuuguaaag

SEQ ID NO: 1204804 - RNA, 15 nt, Human
cuguuggccagugug

SEQ ID NO: 1204805 - RNA, 12 nt, Human
cuguuggccagu

SEQ ID NO: 1204806 - RNA, 19 nt, Human
cuuaaauaaugugaaacug

SEQ ID NO: 1204807 - RNA, 16 nt, Human
cuuaaauaaugugaaa

SEQ ID NO: 1204808 - RNA, 14 nt, Human
cuuaaauaauguga

SEQ ID NO: 1204809 - RNA, 17 nt, Human
cugugcucuggacaggc

SEQ ID NO: 1204810 - RNA, 15 nt, Human
cuguucagcuccagc

SEQ ID NO: 1204811 - RNA, 18 nt, Human
cuguucagcugguugagg

SEQ ID NO: 1204812 - RNA, 12 nt, Human
cuguucagcugg

SEQ ID NO: 1204813 - RNA, 22 nt, Human
cuguucagcuccagcucaccag

SEQ ID NO: 1204814 - RNA, 19 nt, Human
cuguucagcuccagcucac

SEQ ID NO: 1204815 - RNA, 18 nt, Human
cuguucagcuccagcuca

SEQ ID NO: 1204816 - RNA, 16 nt, Human
cuguucagcuccagcu

SEQ ID NO: 1204817 - RNA, 17 nt, Human
cuguuacugucuucagu

SEQ ID NO: 1204818 - RNA, 19 nt, Human
cugugcucuggacaggcau

SEQ ID NO: 1204819 - RNA, 18 nt, Human
cugugcucuggacaggca

SEQ ID NO: 1204820 - RNA, 23 nt, Human
cugcccuuaccugccaggaagcc

SEQ ID NO: 1204821 - RNA, 22 nt, Human
cugcccuuaccugccaggaagc

SEQ ID NO: 1204822 - RNA, 12 nt, Human
cugcccuguggg

SEQ ID NO: 1204823 - RNA, 11 nt, Human
cugcccugugg

SEQ ID NO: 1204824 - RNA, 19 nt, Human
cugcccuuaccugccagga

SEQ ID NO: 1204825 - RNA, 14 nt, Human
cugcccugugggcc

SEQ ID NO: 1204826 - RNA, 24 nt, Human
cugcccugugaguacuacaguccu

SEQ ID NO: 1204827 - RNA, 24 nt, Human
cugcugaaggcucgagcaugccug

SEQ ID NO: 1204828 - RNA, 23 nt, Human
cugcugaaggcucgagcaugccu

SEQ ID NO: 1204829 - RNA, 14 nt, Human
cugcucacauaucu

SEQ ID NO: 1204830 - RNA, 23 nt, Human
cugccuguucagcuccagcucac

SEQ ID NO: 1204831 - RNA, 14 nt, Human
cugccuguugggcc

SEQ ID NO: 1204832 - RNA, 20 nt, Human
cugccucgaacuggcugcaa

SEQ ID NO: 1204833 - RNA, 14 nt, Human
cugccucgaacugg

SEQ ID NO: 1204834 - RNA, 23 nt, Human
cugccuccuuugugaggaagccg

SEQ ID NO: 1204835 - RNA, 21 nt, Human
cugccuccuuugugaggaagc

SEQ ID NO: 1204836 - RNA, 17 nt, Human
cugccuccuuugugagg

SEQ ID NO: 1204837 - RNA, 14 nt, Human
cugccuccuuugug

SEQ ID NO: 1204838 - RNA, 22 nt, Human
cuggaugcagccucacaguccu

SEQ ID NO: 1204839 - RNA, 18 nt, Human
cuggaugcagccucacag

SEQ ID NO: 1204840 - RNA, 17 nt, Human
cuggaugcagccucaca

SEQ ID NO: 1204841 - RNA, 16 nt, Human
cuggaugcagccucac

SEQ ID NO: 1204842 - RNA, 14 nt, Human
cugcuuccagugag

SEQ ID NO: 1204843 - RNA, 20 nt, Human
cugcuucaaggauccugagc

SEQ ID NO: 1204844 - RNA, 19 nt, Human
cugcuucaaggauccugag

SEQ ID NO: 1204845 - RNA, 16 nt, Human
cugcuucaaggauccu

SEQ ID NO: 1204846 - RNA, 14 nt, Human
cugcuucaaggauc

SEQ ID NO: 1204847 - RNA, 21 nt, Human
cuggagaaaauggacguguua

SEQ ID NO: 1204848 - RNA, 22 nt, Human
cuggcagaguugaagacagagc

SEQ ID NO: 1204849 - RNA, 23 nt, Human
cuggcagccccuguucuggcaga

SEQ ID NO: 1204850 - RNA, 21 nt, Human
cuggcagaguugaagacagag

SEQ ID NO: 1204851 - RNA, 20 nt, Human
cuggcagaguugaagacaga

SEQ ID NO: 1204852 - RNA, 19 nt, Human
cuggcagcucagagagggu

SEQ ID NO: 1204853 - RNA, 17 nt, Human
cuggcagcucagagagg

SEQ ID NO: 1204854 - RNA, 16 nt, Human
cuggcagcucagagag

SEQ ID NO: 1204855 - RNA, 17 nt, Human
cugggacuacaggugug

SEQ ID NO: 1204856 - RNA, 21 nt, Human
cugggacuacaggcacccacc

SEQ ID NO: 1204857 - RNA, 17 nt, Human
cugggacuacaggcacc

SEQ ID NO: 1204858 - RNA, 15 nt, Human
cuggcucuuccaggc

SEQ ID NO: 1204859 - RNA, 14 nt, Human
cuggcucuuccagg

SEQ ID NO: 1204860 - RNA, 13 nt, Human
cuggcucuuccag

SEQ ID NO: 1204861 - RNA, 20 nt, Human
caggggaaaaucagccugcu

SEQ ID NO: 1204862 - RNA, 19 nt, Human
caggggaaaaucagccugc

SEQ ID NO: 1204863 - RNA, 23 nt, Human
cagggcucagcggggacagcucc

SEQ ID NO: 1204864 - RNA, 21 nt, Human
cagggcucagcggggacagcu

SEQ ID NO: 1204865 - RNA, 23 nt, Human
caggcugggcuucaguggcagcu

SEQ ID NO: 1204866 - RNA, 22 nt, Human
caggcugggcuucaguggcagc

SEQ ID NO: 1204867 - RNA, 21 nt, Human
caggcugggcuucaguggcag

SEQ ID NO: 1204868 - RNA, 20 nt, Human
caggcugggcuucaguggca

SEQ ID NO: 1204869 - RNA, 15 nt, Human
caggcugggagagcc

SEQ ID NO: 1204870 - RNA, 14 nt, Human
caggcugggagagc

SEQ ID NO: 1204871 - RNA, 12 nt, Human
caggcugggaga

SEQ ID NO: 1204872 - RNA, 20 nt, Human
caggccaggcccucugccca

SEQ ID NO: 1204873 - RNA, 16 nt, Human
caggccagagggagug

SEQ ID NO: 1204874 - RNA, 19 nt, Human
caggccaggcccucugccc

SEQ ID NO: 1204875 - RNA, 18 nt, Human
caggccaggcccucugcc

SEQ ID NO: 1204876 - RNA, 17 nt, Human
caggccaggcccucugc

SEQ ID NO: 1204877 - RNA, 23 nt, Human
caggccagcugcuugggcuucau

SEQ ID NO: 1204878 - RNA, 21 nt, Human
caggccagcugcuugggcuuc

SEQ ID NO: 1204879 - RNA, 19 nt, Human
caggccagcugcuugggcu

SEQ ID NO: 1204880 - RNA, 15 nt, Human
caggccagagggagu

SEQ ID NO: 1204881 - RNA, 13 nt, Human
caggccagaggga

SEQ ID NO: 1204882 - RNA, 18 nt, Human
caggcagauacaggaaaa

SEQ ID NO: 1204883 - RNA, 14 nt, Human
cagugcaugcuguc

SEQ ID NO: 1204884 - RNA, 13 nt, Human
cagugcaugcugu

SEQ ID NO: 1204885 - RNA, 15 nt, Human
cagucuggaaugcag

SEQ ID NO: 1204886 - RNA, 17 nt, Human
cagucuggaaugcagug

SEQ ID NO: 1204887 - RNA, 18 nt, Human
cagucuggaaugcagugg

SEQ ID NO: 1204888 - RNA, 18 nt, Human
caguggugguuuucuguu

SEQ ID NO: 1204889 - RNA, 21 nt, Human
caguggugcgaucuggguuca

SEQ ID NO: 1204890 - RNA, 18 nt, Human
cagugcccacaggaucag

SEQ ID NO: 1204891 - RNA, 23 nt, Human
cagugggagcugccuguucagcu

SEQ ID NO: 1204892 - RNA, 20 nt, Human
cagugggagcugccuguuca

SEQ ID NO: 1204893 - RNA, 17 nt, Human
cagugcccacaggauca

SEQ ID NO: 1204894 - RNA, 15 nt, Human
cagugcccacaggau

SEQ ID NO: 1204895 - RNA, 13 nt, Human
cagugcccacagg

SEQ ID NO: 1204896 - RNA, 17 nt, Human
cagugcaugcugucccu

SEQ ID NO: 1204897 - RNA, 16 nt, Human
cagugcaugcuguccc

SEQ ID NO: 1204898 - RNA, 14 nt, Human
cagucaccccggcc

SEQ ID NO: 1204899 - RNA, 20 nt, Human
caggugcacaagcuccaagc

SEQ ID NO: 1204900 - RNA, 19 nt, Human
caggugcacaagcuccaag

SEQ ID NO: 1204901 - RNA, 18 nt, Human
caggugcacaagcuccaa

SEQ ID NO: 1204902 - RNA, 17 nt, Human
caggugcacaagcucca

SEQ ID NO: 1204903 - RNA, 23 nt, Human
caggugauccacccaccucagcc

SEQ ID NO: 1204904 - RNA, 22 nt, Human
caggugauccacccaccucagc

SEQ ID NO: 1204905 - RNA, 15 nt, Human
caggugcacaagcuc

SEQ ID NO: 1204906 - RNA, 21 nt, Human
caggugauccacccaccucag

SEQ ID NO: 1204907 - RNA, 16 nt, Human
cagguuuuccugaaga

SEQ ID NO: 1204908 - RNA, 12 nt, Human
cagguuuuccug

SEQ ID NO: 1204909 - RNA, 14 nt, Human
cagguuuaagcugu

SEQ ID NO: 1204910 - RNA, 22 nt, Human
caggugcacaagcuccaagcuc

SEQ ID NO: 1204911 - RNA, 21 nt, Human
caggugcacaagcuccaagcu

SEQ ID NO: 1204912 - RNA, 23 nt, Human
cagaggggguggccucccaacuc

SEQ ID NO: 1204913 - RNA, 22 nt, Human
cagaggggguggccucccaacu

SEQ ID NO: 1204914 - RNA, 19 nt, Human
cagauucuuuccugaggcu

SEQ ID NO: 1204915 - RNA, 18 nt, Human
cagauucuuuccugaggc

SEQ ID NO: 1204916 - RNA, 17 nt, Human
cagauucuuuccugagg

SEQ ID NO: 1204917 - RNA, 17 nt, Human
cagcauagaaguaacuu

SEQ ID NO: 1204918 - RNA, 20 nt, Human
cagcacgauuucuguuuaga

SEQ ID NO: 1204919 - RNA, 19 nt, Human
cagcacgauuucuguuuag

SEQ ID NO: 1204920 - RNA, 18 nt, Human
cagcacgauuucuguuua

SEQ ID NO: 1204921 - RNA, 16 nt, Human
cagcacgauuucuguu

SEQ ID NO: 1204922 - RNA, 22 nt, Human
cagauucuuuccugaggcuggg

SEQ ID NO: 1204923 - RNA, 20 nt, Human
cagauucuuuccugaggcug

SEQ ID NO: 1204924 - RNA, 17 nt, Human
cagauugcaacaggcug

SEQ ID NO: 1204925 - RNA, 20 nt, Human
cagcaucauggagguuugaa

SEQ ID NO: 1204926 - RNA, 13 nt, Human
cagccaguaaaug

SEQ ID NO: 1204927 - RNA, 20 nt, Human
cagccgagauagccaaggcc

SEQ ID NO: 1204928 - RNA, 19 nt, Human
cagccgagauagccaaggc

SEQ ID NO: 1204929 - RNA, 15 nt, Human
cagccugcuccagcu

SEQ ID NO: 1204930 - RNA, 12 nt, Human
cagccugcucca

SEQ ID NO: 1204931 - RNA, 19 nt, Human
cagccugcuaauuccccag

SEQ ID NO: 1204932 - RNA, 19 nt, Human
cagcggggacagcuccuuc

SEQ ID NO: 1204933 - RNA, 18 nt, Human
cagcggggacagcuccuu

SEQ ID NO: 1204934 - RNA, 21 nt, Human
cagcggggacagcuccuucug

SEQ ID NO: 1204935 - RNA, 24 nt, Human
cagcugugcucuggacaggcaugu

SEQ ID NO: 1204936 - RNA, 20 nt, Human
cagcugugcucuggacaggc

SEQ ID NO: 1204937 - RNA, 15 nt, Human
cagcugccugggauc

SEQ ID NO: 1204938 - RNA, 14 nt, Human
cagcugccugggau

SEQ ID NO: 1204939 - RNA, 13 nt, Human
cagcugccuggga

SEQ ID NO: 1204940 - RNA, 12 nt, Human
cagcugccuggg

SEQ ID NO: 1204941 - RNA, 16 nt, Human
caggaaaagcugcuga

SEQ ID NO: 1204942 - RNA, 15 nt, Human
caggaaaagcugcug

SEQ ID NO: 1204943 - RNA, 18 nt, Human
caggaaaagcugcugaca

SEQ ID NO: 1204944 - RNA, 17 nt, Human
cauggcugccaauggga

SEQ ID NO: 1204945 - RNA, 17 nt, Human
caugggaaugaauguca

SEQ ID NO: 1204946 - RNA, 16 nt, Human
caugggaaugaauguc

SEQ ID NO: 1204947 - RNA, 15 nt, Human
caugggaaugaaugu

SEQ ID NO: 1204948 - RNA, 14 nt, Human
caugggaaugaaug

SEQ ID NO: 1204949 - RNA, 13 nt, Human
caugauguuuucc

SEQ ID NO: 1204950 - RNA, 23 nt, Human
caugcuacacacugcauguuugu

SEQ ID NO: 1204951 - RNA, 20 nt, Human
caugcuacacacugcauguu

SEQ ID NO: 1204952 - RNA, 14 nt, Human
caugcuacacacug

SEQ ID NO: 1204953 - RNA, 16 nt, Human
cauucuccaccugcca

SEQ ID NO: 1204954 - RNA, 14 nt, Human
cauucuccaccugc

SEQ ID NO: 1204955 - RNA, 13 nt, Human
cauucuccaccug

SEQ ID NO: 1204956 - RNA, 15 nt, Human
cauguuggccaggcu

SEQ ID NO: 1204957 - RNA, 14 nt, Human
cauguuggccaggc

SEQ ID NO: 1204958 - RNA, 16 nt, Human
cauguuggccaggcug

SEQ ID NO: 1204959 - RNA, 23 nt, Human
cauccuggcacccggccccugcu

SEQ ID NO: 1204960 - RNA, 22 nt, Human
cauccuggcacccggccccugc

SEQ ID NO: 1204961 - RNA, 15 nt, Human
cauccuggcacccgg

SEQ ID NO: 1204962 - RNA, 14 nt, Human
caucacuucccuac

SEQ ID NO: 1204963 - RNA, 12 nt, Human
caucacuucccu

SEQ ID NO: 1204964 - RNA, 22 nt, Human
caguggugguuuucuguucuuu

SEQ ID NO: 1204965 - RNA, 21 nt, Human
caguggugguuuucuguucuu

SEQ ID NO: 1204966 - RNA, 20 nt, Human
caguggugguuuucuguucu

SEQ ID NO: 1204967 - RNA, 19 nt, Human
caguggugguuuucuguuc

SEQ ID NO: 1204968 - RNA, 18 nt, Human
cauauucuguuggccagu

SEQ ID NO: 1204969 - RNA, 17 nt, Human
cauauucuguuggccag

SEQ ID NO: 1204970 - RNA, 16 nt, Human
cauauuaccacagaca

SEQ ID NO: 1204971 - RNA, 21 nt, Human
ccaccuuugaagaaguaagga

SEQ ID NO: 1204972 - RNA, 22 nt, Human
ccaccgcagacaggaccaggga

SEQ ID NO: 1204973 - RNA, 13 nt, Human
ccaccgcagacag

SEQ ID NO: 1204974 - RNA, 17 nt, Human
ccacgcccccacuggug

SEQ ID NO: 1204975 - RNA, 16 nt, Human
ccacgcccccacuggu

SEQ ID NO: 1204976 - RNA, 19 nt, Human
ccacgcccccacuggugac

SEQ ID NO: 1204977 - RNA, 18 nt, Human
ccacgcccccacugguga

SEQ ID NO: 1204978 - RNA, 14 nt, Human
ccaccaucaagcca

SEQ ID NO: 1204979 - RNA, 13 nt, Human
ccaccaucaagcc

SEQ ID NO: 1204980 - RNA, 15 nt, Human
ccaccaucaagccac

SEQ ID NO: 1204981 - RNA, 21 nt, Human
ccaaaacucuccucugcugcu

SEQ ID NO: 1204982 - RNA, 22 nt, Human
cauuuuuuuuaagaaaaaggau

SEQ ID NO: 1204983 - RNA, 17 nt, Human
ccaaugggagcucaugg

SEQ ID NO: 1204984 - RNA, 14 nt, Human
ccaaugcacuuugu

SEQ ID NO: 1204985 - RNA, 15 nt, Human
ccaaugauggucacc

SEQ ID NO: 1204986 - RNA, 17 nt, Human
ccaauauuuaccagacc

SEQ ID NO: 1204987 - RNA, 18 nt, Human
ccaagcucugcuccucuc

SEQ ID NO: 1204988 - RNA, 13 nt, Human
ccaagcucugcuc

SEQ ID NO: 1204989 - RNA, 12 nt, Human
ccaagcucugcu

SEQ ID NO: 1204990 - RNA, 18 nt, Human
ccaacucaccccagcccc

SEQ ID NO: 1204991 - RNA, 17 nt, Human
ccaacucaccccagccc

SEQ ID NO: 1204992 - RNA, 16 nt, Human
ccaacucaccccagcc

SEQ ID NO: 1204993 - RNA, 23 nt, Human
ccaaauggaaaugggcagagcag

SEQ ID NO: 1204994 - RNA, 22 nt, Human
auucuuuccugaggcugggcuc

SEQ ID NO: 1204995 - RNA, 17 nt, Human
auucuuuccugaggcug

SEQ ID NO: 1204996 - RNA, 21 nt, Human
auucucuccuguaccucuuga

SEQ ID NO: 1204997 - RNA, 19 nt, Human
auucucuccuguaccucuu

SEQ ID NO: 1204998 - RNA, 21 nt, Human
auuccugaugcuucuucagag

SEQ ID NO: 1204999 - RNA, 20 nt, Human
auucauauuuacuucuuaua

SEQ ID NO: 1205000 - RNA, 19 nt, Human
auucauauuuacuucuuau

SEQ ID NO: 1205001 - RNA, 18 nt, Human
auucauauuuacuucuua

SEQ ID NO: 1205002 - RNA, 20 nt, Human
auuaaauucuugcaaaguau

SEQ ID NO: 1205003 - RNA, 18 nt, Human
auuaaauucuugcaaagu

SEQ ID NO: 1205004 - RNA, 14 nt, Human
auuaaauucuugca

SEQ ID NO: 1205005 - RNA, 19 nt, Human
auuguucuuaguuugcagu

SEQ ID NO: 1205006 - RNA, 15 nt, Human
auuguaaggaaugau

SEQ ID NO: 1205007 - RNA, 16 nt, Human
auuguaaggaaugauu

SEQ ID NO: 1205008 - RNA, 16 nt, Human
auuucuguuuagauaa

SEQ ID NO: 1205009 - RNA, 14 nt, Human
auuucuguuuagau

SEQ ID NO: 1205010 - RNA, 12 nt, Human
auuucuguuuag

SEQ ID NO: 1205011 - RNA, 19 nt, Human
auuucuguuuagauaauac

SEQ ID NO: 1205012 - RNA, 15 nt, Human
auuuaaugaaagacu

SEQ ID NO: 1205013 - RNA, 14 nt, Human
auuuaaugaaagac

SEQ ID NO: 1205014 - RNA, 22 nt, Human
caacaccucugcacaagcugca

SEQ ID NO: 1205015 - RNA, 20 nt, Human
caacaccuuguuucccucuc

SEQ ID NO: 1205016 - RNA, 21 nt, Human
caaaucugcuuuuuaaagaau

SEQ ID NO: 1205017 - RNA, 23 nt, Human
caacaaaccuguuucugcagcca

SEQ ID NO: 1205018 - RNA, 17 nt, Human
caaaucagcugcuacua

SEQ ID NO: 1205019 - RNA, 22 nt, Human
caaaguacacuguuucaaacuu

SEQ ID NO: 1205020 - RNA, 21 nt, Human
caaaguacacuguuucaaacu

SEQ ID NO: 1205021 - RNA, 20 nt, Human
caaaguacacuguuucaaac

SEQ ID NO: 1205022 - RNA, 16 nt, Human
caaaguacacuguuuc

SEQ ID NO: 1205023 - RNA, 14 nt, Human
caaagaugcagccg

SEQ ID NO: 1205024 - RNA, 13 nt, Human
caaagaugcagcc

SEQ ID NO: 1205025 - RNA, 23 nt, Human
caagacccuuguggucccacccc

SEQ ID NO: 1205026 - RNA, 22 nt, Human
caagacccuuguggucccaccc

SEQ ID NO: 1205027 - RNA, 19 nt, Human
caagacccuugugguccca

SEQ ID NO: 1205028 - RNA, 18 nt, Human
caagacccuugugguccc

SEQ ID NO: 1205029 - RNA, 17 nt, Human
caacucaccccagcccc

SEQ ID NO: 1205030 - RNA, 16 nt, Human
caacucaccccagccc

SEQ ID NO: 1205031 - RNA, 15 nt, Human
caacucaccccagcc

SEQ ID NO: 1205032 - RNA, 13 nt, Human
caacucaccccag

SEQ ID NO: 1205033 - RNA, 17 nt, Human
caacccccagccugcua

SEQ ID NO: 1205034 - RNA, 16 nt, Human
caacccccagccugcu

SEQ ID NO: 1205035 - RNA, 15 nt, Human
caacccccagccugc

SEQ ID NO: 1205036 - RNA, 18 nt, Human
caaccacugcgaccacaa

SEQ ID NO: 1205037 - RNA, 19 nt, Human
caaaagcugggcagguugg

SEQ ID NO: 1205038 - RNA, 15 nt, Human
caaaagcugggcagg

SEQ ID NO: 1205039 - RNA, 17 nt, Human
auuuuuuuuuccuucag

SEQ ID NO: 1205040 - RNA, 16 nt, Human
auuuuuuuuuccuuca

SEQ ID NO: 1205041 - RNA, 13 nt, Human
auuuuuuuuuccu

SEQ ID NO: 1205042 - RNA, 13 nt, Human
auuuuuaagugcu

SEQ ID NO: 1205043 - RNA, 18 nt, Human
auuuugauccaagcuggu

SEQ ID NO: 1205044 - RNA, 13 nt, Human
auuuguuugaacu

SEQ ID NO: 1205045 - RNA, 16 nt, Human
auuuguuugaacugau

SEQ ID NO: 1205046 - RNA, 14 nt, Human
auuuguuugaacug

SEQ ID NO: 1205047 - RNA, 20 nt, Human
auuuguuugaacugauaaag

SEQ ID NO: 1205048 - RNA, 17 nt, Human
cacuggugacaugucuu

SEQ ID NO: 1205049 - RNA, 16 nt, Human
cacuguugcccaggcu

SEQ ID NO: 1205050 - RNA, 15 nt, Human
cacuguugcccaggc

SEQ ID NO: 1205051 - RNA, 23 nt, Human
cacugggcuuggggaccagagcu

SEQ ID NO: 1205052 - RNA, 22 nt, Human
cacugggcuuggggaccagagc

SEQ ID NO: 1205053 - RNA, 17 nt, Human
cacuguugcccaggcug

SEQ ID NO: 1205054 - RNA, 19 nt, Human
cacuguuucaaacuuuacu

SEQ ID NO: 1205055 - RNA, 23 nt, Human
cagaaguuucugccgcagcccug

SEQ ID NO: 1205056 - RNA, 22 nt, Human
cagaaguuucugccgcagcccu

SEQ ID NO: 1205057 - RNA, 21 nt, Human
cagaaguuucugccgcagccc

SEQ ID NO: 1205058 - RNA, 20 nt, Human
cagaaguuucugccgcagcc

SEQ ID NO: 1205059 - RNA, 19 nt, Human
cacucuuauugcccacgcu

SEQ ID NO: 1205060 - RNA, 18 nt, Human
cacucuuauugcccacgc

SEQ ID NO: 1205061 - RNA, 17 nt, Human
cacucuuauugcccacg

SEQ ID NO: 1205062 - RNA, 16 nt, Human
cacggccaggccagag

SEQ ID NO: 1205063 - RNA, 15 nt, Human
cacggccaggccaga

SEQ ID NO: 1205064 - RNA, 14 nt, Human
cacggccaggccag

SEQ ID NO: 1205065 - RNA, 20 nt, Human
cacggagggugacgggggug

SEQ ID NO: 1205066 - RNA, 17 nt, Human
cacggccaggccagagg

SEQ ID NO: 1205067 - RNA, 23 nt, Human
cacuacggaauaguuggcuagga

SEQ ID NO: 1205068 - RNA, 14 nt, Human
caccuuggcucaag

SEQ ID NO: 1205069 - RNA, 13 nt, Human
caccuuggcucaa

SEQ ID NO: 1205070 - RNA, 19 nt, Human
caccuugacagggcacacc

SEQ ID NO: 1205071 - RNA, 17 nt, Human
caccugccagggacaga

SEQ ID NO: 1205072 - RNA, 15 nt, Human
caccuuuguccccac

SEQ ID NO: 1205073 - RNA, 14 nt, Human
caccuuugucccca

SEQ ID NO: 1205074 - RNA, 17 nt, Human
caccuuuguccccaccg

SEQ ID NO: 1205075 - RNA, 16 nt, Human
caccugccagggacag

SEQ ID NO: 1205076 - RNA, 14 nt, Human
caccugccagggac

SEQ ID NO: 1205077 - RNA, 17 nt, Human
cacccagcccacuucug

SEQ ID NO: 1205078 - RNA, 15 nt, Human
caccagcagccugga

SEQ ID NO: 1205079 - RNA, 14 nt, Human
caccagcagccugg

SEQ ID NO: 1205080 - RNA, 23 nt, Human
caccaacauacucccaucuguga

SEQ ID NO: 1205081 - RNA, 23 nt, Human
cacccaggagccccgaggccuuc

SEQ ID NO: 1205082 - RNA, 20 nt, Human
cacccaggagccccgaggcc

SEQ ID NO: 1205083 - RNA, 19 nt, Human
cacccagcccacuucugcc

SEQ ID NO: 1205084 - RNA, 24 nt, Human
cacccaggagccccgaggccuucu

SEQ ID NO: 1205085 - RNA, 21 nt, Human
caccaacauacucccaucugu

SEQ ID NO: 1205086 - RNA, 20 nt, Human
caccaacauacucccaucug

SEQ ID NO: 1205087 - RNA, 21 nt, Human
cacauuuuuuaaaugcaccug

SEQ ID NO: 1205088 - RNA, 17 nt, Human
cacauuuuuuaaaugca

SEQ ID NO: 1205089 - RNA, 14 nt, Human
cacauuuuucuuag

SEQ ID NO: 1205090 - RNA, 13 nt, Human
cacauuuuucuua

SEQ ID NO: 1205091 - RNA, 17 nt, Human
cacauuuuauuuuauua

SEQ ID NO: 1205092 - RNA, 15 nt, Human
cacauuuuauuuuau

SEQ ID NO: 1205093 - RNA, 19 nt, Human
cacaucuugcucugcugac

SEQ ID NO: 1205094 - RNA, 18 nt, Human
cacaucuugcucugcuga

SEQ ID NO: 1205095 - RNA, 17 nt, Human
cacaucuugcucugcug

SEQ ID NO: 1205096 - RNA, 22 nt, Human
cacaucagcacgauuucuguuu

SEQ ID NO: 1205097 - RNA, 21 nt, Human
cacaucagcacgauuucuguu

SEQ ID NO: 1205098 - RNA, 20 nt, Human
cacaucagcacgauuucugu

SEQ ID NO: 1205099 - RNA, 19 nt, Human
cacaguauuacuucugcua

SEQ ID NO: 1205100 - RNA, 18 nt, Human
cacaguauuacuucugcu

SEQ ID NO: 1205101 - RNA, 16 nt, Human
cacaguauuacuucug

SEQ ID NO: 1205102 - RNA, 10 nt, Human
cacagcucuu

SEQ ID NO: 1205103 - RNA, 23 nt, Human
cacagcucuguccugggagugag

SEQ ID NO: 1205104 - RNA, 20 nt, Human
cacagcucuguccugggagu

SEQ ID NO: 1205105 - RNA, 22 nt, Human
cacagcuaacauggaaguacua

SEQ ID NO: 1205106 - RNA, 16 nt, Human
cacagcuaacauggaa

SEQ ID NO: 1205107 - RNA, 15 nt, Human
cacagcuaacaugga

SEQ ID NO: 1205108 - RNA, 22 nt, Human
cacagacccugcccugugggcc

SEQ ID NO: 1205109 - RNA, 18 nt, Human
cacagacauacuaaccag

SEQ ID NO: 1205110 - RNA, 21 nt, Human
cacagacccugcccugugggc

SEQ ID NO: 1205111 - RNA, 20 nt, Human
cacagacccugcccuguggg

SEQ ID NO: 1205112 - RNA, 19 nt, Human
cacagacccugcccugugg

SEQ ID NO: 1205113 - RNA, 13 nt, Human
caaguauuauacc

SEQ ID NO: 1205114 - RNA, 16 nt, Human
cacaagacccuugugg

SEQ ID NO: 1205115 - RNA, 14 nt, Human
cacaagacccuugu

SEQ ID NO: 1205116 - RNA, 14 nt, Human
cacaagccuucggc

SEQ ID NO: 1205117 - RNA, 13 nt, Human
cacaagcuccaag

SEQ ID NO: 1205118 - RNA, 23 nt, Human
caaugcuggcuguuggcuggggg

SEQ ID NO: 1205119 - RNA, 22 nt, Human
caaugcuggcuguuggcugggg

SEQ ID NO: 1205120 - RNA, 22 nt, Human
caaugcugugcccuaaagugua

SEQ ID NO: 1205121 - RNA, 22 nt, Human
ccauccccuguagagugggagc

SEQ ID NO: 1205122 - RNA, 16 nt, Human
ccauccccuguagagu

SEQ ID NO: 1205123 - RNA, 13 nt, Human
ccaugggccuccu

SEQ ID NO: 1205124 - RNA, 16 nt, Human
ccaugaguccccuguu

SEQ ID NO: 1205125 - RNA, 15 nt, Human
ccaugaguccccugu

SEQ ID NO: 1205126 - RNA, 14 nt, Human
ccaugaguccccug

SEQ ID NO: 1205127 - RNA, 19 nt, Human
ccaugagccucagcauccu

SEQ ID NO: 1205128 - RNA, 18 nt, Human
ccaugagccucagcaucc

SEQ ID NO: 1205129 - RNA, 14 nt, Human
ccaugagccucagc

SEQ ID NO: 1205130 - RNA, 13 nt, Human
ccaucccagcccc

SEQ ID NO: 1205131 - RNA, 12 nt, Human
ccaucccagccc

SEQ ID NO: 1205132 - RNA, 23 nt, Human
ccaucccaaacccuucagugcca

SEQ ID NO: 1205133 - RNA, 15 nt, Human
ccaugggccuccugu

SEQ ID NO: 1205134 - RNA, 14 nt, Human
ccaugggccuccug

SEQ ID NO: 1205135 - RNA, 17 nt, Human
ccaugggccuccugugu

SEQ ID NO: 1205136 - RNA, 18 nt, Human
ccaugaguccccuguuug

SEQ ID NO: 1205137 - RNA, 21 nt, Human
ccagucaccccggccaccugc

SEQ ID NO: 1205138 - RNA, 20 nt, Human
ccagucaccccggccaccug

SEQ ID NO: 1205139 - RNA, 13 nt, Human
ccagucaccccgg

SEQ ID NO: 1205140 - RNA, 12 nt, Human
ccagucaccccg

SEQ ID NO: 1205141 - RNA, 23 nt, Human
ccaggcugggagagccuuccagg

SEQ ID NO: 1205142 - RNA, 22 nt, Human
ccaggcugggagagccuuccag

SEQ ID NO: 1205143 - RNA, 21 nt, Human
ccaggcugggagagccuucca

SEQ ID NO: 1205144 - RNA, 18 nt, Human
ccaggcugggagagccuu

SEQ ID NO: 1205145 - RNA, 17 nt, Human
ccaggcugggagagccu

SEQ ID NO: 1205146 - RNA, 15 nt, Human
ccaggcugggagagc

SEQ ID NO: 1205147 - RNA, 14 nt, Human
ccaggcugggagag

SEQ ID NO: 1205148 - RNA, 13 nt, Human
ccaggcugggaga

SEQ ID NO: 1205149 - RNA, 19 nt, Human
ccagcagagcaccuuagac

SEQ ID NO: 1205150 - RNA, 23 nt, Human
ccagcagagcaccuuagacaguc

SEQ ID NO: 1205151 - RNA, 10 nt, Human
ccagccccuu

SEQ ID NO: 1205152 - RNA, 21 nt, Human
ccagccccuggaugcagccuc

SEQ ID NO: 1205153 - RNA, 20 nt, Human
ccagcagccuggacccugug

SEQ ID NO: 1205154 - RNA, 19 nt, Human
ccagcagccuggacccugu

SEQ ID NO: 1205155 - RNA, 15 nt, Human
ccagcagccuggacc

SEQ ID NO: 1205156 - RNA, 23 nt, Human
ccaggaaaggcuccaggagcagc

SEQ ID NO: 1205157 - RNA, 22 nt, Human
ccaggaaaggcuccaggagcag

SEQ ID NO: 1205158 - RNA, 21 nt, Human
ccaggaaaggcuccaggagca

SEQ ID NO: 1205159 - RNA, 20 nt, Human
cccaggcuuagucacugaga

SEQ ID NO: 1205160 - RNA, 15 nt, Human
cccaggcuuagucac

SEQ ID NO: 1205161 - RNA, 23 nt, Human
cccaggaaaggcuccaggagcag

SEQ ID NO: 1205162 - RNA, 22 nt, Human
cccaggaaaggcuccaggagca

SEQ ID NO: 1205163 - RNA, 21 nt, Human
cccaggaaaggcuccaggagc

SEQ ID NO: 1205164 - RNA, 22 nt, Human
cccagcuuaaaggggcuagagu

SEQ ID NO: 1205165 - RNA, 23 nt, Human
cccagcugugcucuggacaggca

SEQ ID NO: 1205166 - RNA, 21 nt, Human
cccagcugugcucuggacagg

SEQ ID NO: 1205167 - RNA, 17 nt, Human
cccagcccacuucugcc

SEQ ID NO: 1205168 - RNA, 14 nt, Human
cccagcccacuucu

SEQ ID NO: 1205169 - RNA, 22 nt, Human
ccccauccucuguacagagccc

SEQ ID NO: 1205170 - RNA, 21 nt, Human
ccccauccucuguacagagcc

SEQ ID NO: 1205171 - RNA, 19 nt, Human
ccccauccucuguacagag

SEQ ID NO: 1205172 - RNA, 21 nt, Human
ccccagcaagugagagcuggg

SEQ ID NO: 1205173 - RNA, 20 nt, Human
ccccagcaagugagagcugg

SEQ ID NO: 1205174 - RNA, 19 nt, Human
ccccagcaagugagagcug

SEQ ID NO: 1205175 - RNA, 17 nt, Human
ccccagcaagugagagc

SEQ ID NO: 1205176 - RNA, 23 nt, Human
ccccagauugcaacaggcugggc

SEQ ID NO: 1205177 - RNA, 22 nt, Human
ccccagauugcaacaggcuggg

SEQ ID NO: 1205178 - RNA, 23 nt, Human
cccauucugccugcccaggcccc

SEQ ID NO: 1205179 - RNA, 22 nt, Human
cccauucugccugcccaggccc

SEQ ID NO: 1205180 - RNA, 21 nt, Human
cccauucugccugcccaggcc

SEQ ID NO: 1205181 - RNA, 14 nt, Human
ccccauucugccug

SEQ ID NO: 1205182 - RNA, 13 nt, Human
ccccauucugccu

SEQ ID NO: 1205183 - RNA, 15 nt, Human
ccccauucugccugc

SEQ ID NO: 1205184 - RNA, 19 nt, Human
ccccuucgcuccugugucu

SEQ ID NO: 1205185 - RNA, 17 nt, Human
ccccuucgcuccugugu

SEQ ID NO: 1205186 - RNA, 15 nt, Human
ccccuucgcuccugu

SEQ ID NO: 1205187 - RNA, 14 nt, Human
ccccuucgcuccug

SEQ ID NO: 1205188 - RNA, 17 nt, Human
ccccuucugacccaugc

SEQ ID NO: 1205189 - RNA, 12 nt, Human
cccgggaagggg

SEQ ID NO: 1205190 - RNA, 12 nt, Human
cccggcugcgga

SEQ ID NO: 1205191 - RNA, 22 nt, Human
cccuucucuccagccccuggau

SEQ ID NO: 1205192 - RNA, 21 nt, Human
cccuucucuccagccccugga

SEQ ID NO: 1205193 - RNA, 15 nt, Human
cccuucgcuccugug

SEQ ID NO: 1205194 - RNA, 14 nt, Human
cccuucgcuccugu

SEQ ID NO: 1205195 - RNA, 13 nt, Human
ccggccccugcug

SEQ ID NO: 1205196 - RNA, 13 nt, Human
cccuucgcuccug

SEQ ID NO: 1205197 - RNA, 20 nt, Human
cccugugauggggcccugcc

SEQ ID NO: 1205198 - RNA, 19 nt, Human
cccugugauggggcccugc

SEQ ID NO: 1205199 - RNA, 18 nt, Human
cccugugauggggcccug

SEQ ID NO: 1205200 - RNA, 23 nt, Human
cccugucucaaaaaaagaaaaag

SEQ ID NO: 1205201 - RNA, 20 nt, Human
cccugucucaaaaaaagaaa

SEQ ID NO: 1205202 - RNA, 16 nt, Human
cccugucuaaugaaac

SEQ ID NO: 1205203 - RNA, 15 nt, Human
ccggccccugcuggu

SEQ ID NO: 1205204 - RNA, 14 nt, Human
ccggccccugcugg

SEQ ID NO: 1205205 - RNA, 16 nt, Human
ccucccaucucacaca

SEQ ID NO: 1205206 - RNA, 13 nt, Human
ccucccaucucac

SEQ ID NO: 1205207 - RNA, 17 nt, Human
ccucccaccucagccuc

SEQ ID NO: 1205208 - RNA, 15 nt, Human
ccucccaccucagcc

SEQ ID NO: 1205209 - RNA, 21 nt, Human
ccuggccucugcacuccccug

SEQ ID NO: 1205210 - RNA, 20 nt, Human
ccuggccucugcacuccccu

SEQ ID NO: 1205211 - RNA, 22 nt, Human
ccuggccucaagugauucuccu

SEQ ID NO: 1205212 - RNA, 22 nt, Human
ccuggccuagcauacguacaca

SEQ ID NO: 1205213 - RNA, 22 nt, Human
ccuggccucugcacuccccugc

SEQ ID NO: 1205214 - RNA, 21 nt, Human
ccugguggcagugggagcugc

SEQ ID NO: 1205215 - RNA, 18 nt, Human
ccugggggcugggcagag

SEQ ID NO: 1205216 - RNA, 22 nt, Human
ccugucuaaugaaaccuguguc

SEQ ID NO: 1205217 - RNA, 15 nt, Human
ccugucuaaugaaac

SEQ ID NO: 1205218 - RNA, 11 nt, Human
ccucuuucccu

SEQ ID NO: 1205219 - RNA, 19 nt, Human
ccugcugcaguugccaguc

SEQ ID NO: 1205220 - RNA, 17 nt, Human
ccugcugcaguugccag

SEQ ID NO: 1205221 - RNA, 23 nt, Human
ccugccucgaacuggcugcaaag

SEQ ID NO: 1205222 - RNA, 21 nt, Human
ccugccucgaacuggcugcaa

SEQ ID NO: 1205223 - RNA, 19 nt, Human
ccugccucgaacuggcugc

SEQ ID NO: 1205224 - RNA, 21 nt, Human
ccugcugcaguugccagucac

SEQ ID NO: 1205225 - RNA, 20 nt, Human
ccugcugcaguugccaguca

SEQ ID NO: 1205226 - RNA, 20 nt, Human
ccugcccaccuggccucugc

SEQ ID NO: 1205227 - RNA, 14 nt, Human
ccugcccaccuggc

SEQ ID NO: 1205228 - RNA, 13 nt, Human
ccugcccaccugg

SEQ ID NO: 1205229 - RNA, 12 nt, Human
ccugcccaccug

SEQ ID NO: 1205230 - RNA, 13 nt, Human
ccugcccaggccc

SEQ ID NO: 1205231 - RNA, 19 nt, Human
ccugcacuugcagacucua

SEQ ID NO: 1205232 - RNA, 18 nt, Human
ccugcacuugcagacucu

SEQ ID NO: 1205233 - RNA, 17 nt, Human
ccugcacuugcagacuc

SEQ ID NO: 1205234 - RNA, 16 nt, Human
ccucuuucccucccuu

SEQ ID NO: 1205235 - RNA, 13 nt, Human
ccucuuucccucc

SEQ ID NO: 1205236 - RNA, 23 nt, Human
cuaaguuuuuauggcuuuugugc

SEQ ID NO: 1205237 - RNA, 21 nt, Human
cuaagugguacuaacuuuccu

SEQ ID NO: 1205238 - RNA, 23 nt, Human
cuaagugauccucccaccucagc

SEQ ID NO: 1205239 - RNA, 22 nt, Human
cuacaguugaaaaacagcugag

SEQ ID NO: 1205240 - RNA, 21 nt, Human
cuacaguugaaaaacagcuga

SEQ ID NO: 1205241 - RNA, 20 nt, Human
cuacaguccucccaucucac

SEQ ID NO: 1205242 - RNA, 19 nt, Human
cuacaguccucccaucuca

SEQ ID NO: 1205243 - RNA, 17 nt, Human
cuaccuuuguauucucu

SEQ ID NO: 1205244 - RNA, 23 nt, Human
cuagcauacguacacauuuuauu

SEQ ID NO: 1205245 - RNA, 21 nt, Human
cuagcauacguacacauuuua

SEQ ID NO: 1205246 - RNA, 22 nt, Human
cuagaagauuuugaaauuuuua

SEQ ID NO: 1205247 - RNA, 15 nt, Human
cuaguuugauuaaau

SEQ ID NO: 1205248 - RNA, 13 nt, Human
cuaguuugauuaa

SEQ ID NO: 1205249 - RNA, 23 nt, Human
cuaguuguuugauucagacagcu

SEQ ID NO: 1205250 - RNA, 17 nt, Human
cuagccagaggagagag

SEQ ID NO: 1205251 - RNA, 15 nt, Human
cuagccagaggagag

SEQ ID NO: 1205252 - RNA, 13 nt, Human
cuagccagaggag

SEQ ID NO: 1205253 - RNA, 12 nt, Human
cuagccagagga

SEQ ID NO: 1205254 - RNA, 22 nt, Human
cuaguuugauuaaauucuugca

SEQ ID NO: 1205255 - RNA, 15 nt, Human
cuaucucccccagcc

SEQ ID NO: 1205256 - RNA, 14 nt, Human
cuaucuaaauguug

SEQ ID NO: 1205257 - RNA, 18 nt, Human
cucaaaagcugggcaggu

SEQ ID NO: 1205258 - RNA, 17 nt, Human
cucaaaaaaagaaaaag

SEQ ID NO: 1205259 - RNA, 17 nt, Human
cuaucucccccagcccc

SEQ ID NO: 1205260 - RNA, 16 nt, Human
cuaucucccccagccc

SEQ ID NO: 1205261 - RNA, 18 nt, Human
cuaucucccccagcccca

SEQ ID NO: 1205262 - RNA, 20 nt, Human
cucaaacucuugaccucagg

SEQ ID NO: 1205263 - RNA, 15 nt, Human
cucaaugcacugaca

SEQ ID NO: 1205264 - RNA, 13 nt, Human
cucaaugcacuga

SEQ ID NO: 1205265 - RNA, 21 nt, Human
ccuuuuuuagaguugauacua

SEQ ID NO: 1205266 - RNA, 13 nt, Human
cgacaaugcaaac

SEQ ID NO: 1205267 - RNA, 12 nt, Human
cgacaaugcaaa

SEQ ID NO: 1205268 - RNA, 20 nt, Human
cgacccuugccgucuaccug

SEQ ID NO: 1205269 - RNA, 19 nt, Human
cgacccuugccgucuaccu

SEQ ID NO: 1205270 - RNA, 17 nt, Human
cgacugcccggcagggu

SEQ ID NO: 1205271 - RNA, 17 nt, Human
ccuugccgucuaccuga

SEQ ID NO: 1205272 - RNA, 16 nt, Human
ccuugccgucuaccug

SEQ ID NO: 1205273 - RNA, 17 nt, Human
ccuuuugagugccuuac

SEQ ID NO: 1205274 - RNA, 15 nt, Human
ccuuuugagugccuu

SEQ ID NO: 1205275 - RNA, 21 nt, Human
ccuuucaauaggaaaaacuga

SEQ ID NO: 1205276 - RNA, 22 nt, Human
cgcaggauucuuccucccuccc

SEQ ID NO: 1205277 - RNA, 14 nt, Human
cgauagugguggug

SEQ ID NO: 1205278 - RNA, 17 nt, Human
cgccagauucuuuccug

SEQ ID NO: 1205279 - RNA, 18 nt, Human
cgguguggagaagcggcu

SEQ ID NO: 1205280 - RNA, 22 nt, Human
cggggacagcuccuucuguccu

SEQ ID NO: 1205281 - RNA, 15 nt, Human
cggggacagcuccuu

SEQ ID NO: 1205282 - RNA, 14 nt, Human
cggggacagcuccu

SEQ ID NO: 1205283 - RNA, 17 nt, Human
cgggcucugccucccau

SEQ ID NO: 1205284 - RNA, 16 nt, Human
cgggcucugccuccca

SEQ ID NO: 1205285 - RNA, 14 nt, Human
cgggcucugccucc

SEQ ID NO: 1205286 - RNA, 19 nt, Human
cgggcucagcaaaagaugc

SEQ ID NO: 1205287 - RNA, 15 nt, Human
cgggcucagcaaaag

SEQ ID NO: 1205288 - RNA, 11 nt, Human
cgggcucagca

SEQ ID NO: 1205289 - RNA, 17 nt, Human
cgggccacagagaaagu

SEQ ID NO: 1205290 - RNA, 14 nt, Human
cgggccacagagaa

SEQ ID NO: 1205291 - RNA, 12 nt, Human
cgggccacagag

SEQ ID NO: 1205292 - RNA, 16 nt, Human
cggcuccaggcuccuu

SEQ ID NO: 1205293 - RNA, 15 nt, Human
cggcuccaggcuccu

SEQ ID NO: 1205294 - RNA, 14 nt, Human
cggcuccaggcucc

SEQ ID NO: 1205295 - RNA, 13 nt, Human
cggcuccaggcuc

SEQ ID NO: 1205296 - RNA, 12 nt, Human
cggcuccaggcu

SEQ ID NO: 1205297 - RNA, 17 nt, Human
cggcucacugcagccuc

SEQ ID NO: 1205298 - RNA, 16 nt, Human
cggcucacugcagccu

SEQ ID NO: 1205299 - RNA, 15 nt, Human
cggcucacugcagcc

SEQ ID NO: 1205300 - RNA, 21 nt, Human
cggagucccaccuuggcugca

SEQ ID NO: 1205301 - RNA, 20 nt, Human
cggagucccaccuuggcugc

SEQ ID NO: 1205302 - RNA, 18 nt, Human
cggagucccaccuuggcu

SEQ ID NO: 1205303 - RNA, 16 nt, Human
cggagucccaccuugg

SEQ ID NO: 1205304 - RNA, 13 nt, Human
cgcugccccuggc

SEQ ID NO: 1205305 - RNA, 20 nt, Human
cguguaaccauggacccaau

SEQ ID NO: 1205306 - RNA, 14 nt, Human
cgugcacacaccag

SEQ ID NO: 1205307 - RNA, 16 nt, Human
cgugaguccuggcaug

SEQ ID NO: 1205308 - RNA, 17 nt, Human
cgugaggccagagacac

SEQ ID NO: 1205309 - RNA, 17 nt, Human
cgugaguccuggcaugg

SEQ ID NO: 1205310 - RNA, 18 nt, Human
cgugaguccuggcauggg

SEQ ID NO: 1205311 - RNA, 16 nt, Human
cgguuuuacugcagcu

SEQ ID NO: 1205312 - RNA, 22 nt, Human
cugagaggacuuuucuuugugg

SEQ ID NO: 1205313 - RNA, 21 nt, Human
cugagaggacuuuucuuugug

SEQ ID NO: 1205314 - RNA, 17 nt, Human
cugagaguagagucacu

SEQ ID NO: 1205315 - RNA, 22 nt, Human
cugagacucgcgacaaugcaaa

SEQ ID NO: 1205316 - RNA, 21 nt, Human
cugagacucgcgacaaugcaa

SEQ ID NO: 1205317 - RNA, 23 nt, Human
cugagacagcccgggcucugccu

SEQ ID NO: 1205318 - RNA, 22 nt, Human
cugacccaugcugcccugugag

SEQ ID NO: 1205319 - RNA, 21 nt, Human
cugacccaugcugcccuguga

SEQ ID NO: 1205320 - RNA, 21 nt, Human
cugagaucaaaacgguuuuac

SEQ ID NO: 1205321 - RNA, 15 nt, Human
cugagcuuucugcua

SEQ ID NO: 1205322 - RNA, 14 nt, Human
cugagcuuucugcu

SEQ ID NO: 1205323 - RNA, 23 nt, Human
cugaggacacuaaccacgcugga

SEQ ID NO: 1205324 - RNA, 20 nt, Human
cugaggacacuaaccacgcu

SEQ ID NO: 1205325 - RNA, 21 nt, Human
cugaggaauccagacccggcu

SEQ ID NO: 1205326 - RNA, 20 nt, Human
cugaggaauccagacccggc

SEQ ID NO: 1205327 - RNA, 17 nt, Human
cugaggaauccagaccc

SEQ ID NO: 1205328 - RNA, 12 nt, Human
cugaggugggag

SEQ ID NO: 1205329 - RNA, 21 nt, Human
cugaguacguugugcauuugg

SEQ ID NO: 1205330 - RNA, 20 nt, Human
cugaguacguugugcauuug

SEQ ID NO: 1205331 - RNA, 19 nt, Human
cugaguacguugugcauuu

SEQ ID NO: 1205332 - RNA, 18 nt, Human
cugaguacguugugcauu

SEQ ID NO: 1205333 - RNA, 23 nt, Human
cucuugagccuugaacuuugacc

SEQ ID NO: 1205334 - RNA, 18 nt, Human
cucuugagccuugaacuu

SEQ ID NO: 1205335 - RNA, 17 nt, Human
cucuugagccuugaacu

SEQ ID NO: 1205336 - RNA, 16 nt, Human
cucuugagccuugaac

SEQ ID NO: 1205337 - RNA, 23 nt, Human
cugaaggacauugcggacagcca

SEQ ID NO: 1205338 - RNA, 17 nt, Human
cugaaggcuggguucug

SEQ ID NO: 1205339 - RNA, 21 nt, Human
cugaaggccccgcccaggcuu

SEQ ID NO: 1205340 - RNA, 19 nt, Human
cugaaggccccgcccaggc

SEQ ID NO: 1205341 - RNA, 23 nt, Human
cugacaacacucauugaccugag

SEQ ID NO: 1205342 - RNA, 22 nt, Human
cugacaacacucauugaccuga

SEQ ID NO: 1205343 - RNA, 20 nt, Human
cucuuauugcccacgcugga

SEQ ID NO: 1205344 - RNA, 19 nt, Human
cucuuauugcccacgcugg

SEQ ID NO: 1205345 - RNA, 15 nt, Human
cucuuauugcccacg

SEQ ID NO: 1205346 - RNA, 14 nt, Human
cucuuauugcccac

SEQ ID NO: 1205347 - RNA, 19 nt, Human
cucuucagaucucuaacuu

SEQ ID NO: 1205348 - RNA, 18 nt, Human
cucuucagaucucuaacu

SEQ ID NO: 1205349 - RNA, 14 nt, Human
cucuucaaucucuu

SEQ ID NO: 1205350 - RNA, 20 nt, Human
cucugcuccucuccccagca

SEQ ID NO: 1205351 - RNA, 18 nt, Human
cucugcuccucuccccag

SEQ ID NO: 1205352 - RNA, 13 nt, Human
cucugcuccucuc

SEQ ID NO: 1205353 - RNA, 13 nt, Human
cucugcagcaaua

SEQ ID NO: 1205354 - RNA, 21 nt, Human
cucugcacuccccugcugggu

SEQ ID NO: 1205355 - RNA, 20 nt, Human
cucugcacuccccugcuggg

SEQ ID NO: 1205356 - RNA, 14 nt, Human
cucugguccauaga

SEQ ID NO: 1205357 - RNA, 16 nt, Human
cucugcugacagacac

SEQ ID NO: 1205358 - RNA, 14 nt, Human
cucugcugacagac

SEQ ID NO: 1205359 - RNA, 13 nt, Human
cucugcugacaga

SEQ ID NO: 1205360 - RNA, 15 nt, Human
cucugguccauagag

SEQ ID NO: 1205361 - RNA, 15 nt, Human
cucugguuaucuaau

SEQ ID NO: 1205362 - RNA, 12 nt, Human
cucauguucuua

SEQ ID NO: 1205363 - RNA, 15 nt, Human
cuccaagaccuucuc

SEQ ID NO: 1205364 - RNA, 22 nt, Human
cuccaagaccuucuccuucacc

SEQ ID NO: 1205365 - RNA, 24 nt, Human
cuccaagcaggacauggacaagga

SEQ ID NO: 1205366 - RNA, 22 nt, Human
cuccaagcaggacauggacaag

SEQ ID NO: 1205367 - RNA, 14 nt, Human
cuccaagcaggaca

SEQ ID NO: 1205368 - RNA, 13 nt, Human
cuccaagcaggac

SEQ ID NO: 1205369 - RNA, 16 nt, Human
cuccaagcucccaggc

SEQ ID NO: 1205370 - RNA, 15 nt, Human
cuccaagcucccagg

SEQ ID NO: 1205371 - RNA, 14 nt, Human
cuccaagcucccag

SEQ ID NO: 1205372 - RNA, 13 nt, Human
cuccaagcuccca

SEQ ID NO: 1205373 - RNA, 17 nt, Human
cuccaagcucccaggca

SEQ ID NO: 1205374 - RNA, 20 nt, Human
cuccacuuucuagccagagg

SEQ ID NO: 1205375 - RNA, 19 nt, Human
cuccacuuucuagccagag

SEQ ID NO: 1205376 - RNA, 16 nt, Human
cuccacuuucuagcca

SEQ ID NO: 1205377 - RNA, 16 nt, Human
cucgaacuggcugcaa

SEQ ID NO: 1205378 - RNA, 15 nt, Human
cucgaacuggcugca

SEQ ID NO: 1205379 - RNA, 14 nt, Human
cucgaacuggcugc

SEQ ID NO: 1205380 - RNA, 13 nt, Human
cucgaacuggcug

SEQ ID NO: 1205381 - RNA, 18 nt, Human
cuccucugcugcuggcug

SEQ ID NO: 1205382 - RNA, 16 nt, Human
cuccucugcugcuggc

SEQ ID NO: 1205383 - RNA, 18 nt, Human
cuccuggcccacugcauc

SEQ ID NO: 1205384 - RNA, 16 nt, Human
cuccuggcccacugca

SEQ ID NO: 1205385 - RNA, 20 nt, Human
cucccccagccccauccucu

SEQ ID NO: 1205386 - RNA, 15 nt, Human
cucccccagccccau

SEQ ID NO: 1205387 - RNA, 22 nt, Human
cucccccagccccauccucugu

SEQ ID NO: 1205388 - RNA, 16 nt, Human
auugucaaagugguga

SEQ ID NO: 1205389 - RNA, 20 nt, Human
auuguccccgacccuugccg

SEQ ID NO: 1205390 - RNA, 19 nt, Human
auuguccccgacccuugcc

SEQ ID NO: 1205391 - RNA, 17 nt, Human
auuguccccgacccuug

SEQ ID NO: 1205392 - RNA, 18 nt, Human
auugugucucuugguccu

SEQ ID NO: 1205393 - RNA, 14 nt, Human
auugugucucuugg

SEQ ID NO: 1205394 - RNA, 17 nt, Human
auucuccuuguguuacu

SEQ ID NO: 1205395 - RNA, 13 nt, Human
auucuucuccacu

SEQ ID NO: 1205396 - RNA, 22 nt, Human
auucuuccucccucccucuuuc

SEQ ID NO: 1205397 - RNA, 13 nt, Human
auucuuauuuaau

SEQ ID NO: 1205398 - RNA, 18 nt, Human
auucuuauuuaaugaaag

SEQ ID NO: 1205399 - RNA, 14 nt, Human
auucuuauuuaaug

SEQ ID NO: 1205400 - RNA, 14 nt, Human
auuugaaaauuuug

SEQ ID NO: 1205401 - RNA, 15 nt, Human
auuugaaaauuuuga

SEQ ID NO: 1205402 - RNA, 17 nt, Human
auuuccguuaaaauacc

SEQ ID NO: 1205403 - RNA, 16 nt, Human
auuuccguuaaaauac

SEQ ID NO: 1205404 - RNA, 15 nt, Human
auuuccguuaaaaua

SEQ ID NO: 1205405 - RNA, 17 nt, Human
auuuccagccaaagccu

SEQ ID NO: 1205406 - RNA, 13 nt, Human
auuuauucugcuc

SEQ ID NO: 1205407 - RNA, 15 nt, Human
auuuagaaauauaau

SEQ ID NO: 1205408 - RNA, 17 nt, Human
auuuacuucuuauacau

SEQ ID NO: 1205409 - RNA, 16 nt, Human
auuuacuucuuauaca

SEQ ID NO: 1205410 - RNA, 14 nt, Human
auuuacuucuuaua

SEQ ID NO: 1205411 - RNA, 15 nt, Human
auuuaacagaaaugu

SEQ ID NO: 1205412 - RNA, 14 nt, Human
auuuaacagaaaug

SEQ ID NO: 1205413 - RNA, 12 nt, Human
auuuaacagaaa

SEQ ID NO: 1205414 - RNA, 14 nt, Human
auuuauucugcuca

SEQ ID NO: 1205415 - RNA, 15 nt, Human
auuuuaauucaguug

SEQ ID NO: 1205416 - RNA, 15 nt, Human
auuugugauacaaug

SEQ ID NO: 1205417 - RNA, 14 nt, Human
auuugugauacaau

SEQ ID NO: 1205418 - RNA, 24 nt, Human
auguggaguucaucuugaauugua

SEQ ID NO: 1205419 - RNA, 20 nt, Human
auguggaguucaucuugaau

SEQ ID NO: 1205420 - RNA, 22 nt, Human
augugccagguuuuuggucuga

SEQ ID NO: 1205421 - RNA, 12 nt, Human
auggggcugcac

SEQ ID NO: 1205422 - RNA, 20 nt, Human
auggggcccugccuccuuug

SEQ ID NO: 1205423 - RNA, 20 nt, Human
auguugcccaggcaggucuu

SEQ ID NO: 1205424 - RNA, 17 nt, Human
auguugcccaggcaggu

SEQ ID NO: 1205425 - RNA, 12 nt, Human
auguugcccagg

SEQ ID NO: 1205426 - RNA, 20 nt, Human
uuuucauuuaggugaggaag

SEQ ID NO: 1205427 - RNA, 13 nt, Human
uuuuauuaugcau

SEQ ID NO: 1205428 - RNA, 11 nt, Human
uuuuauuuuau

SEQ ID NO: 1205429 - RNA, 22 nt, Human
auuaaaaaucucaaauuucuaa

SEQ ID NO: 1205430 - RNA, 20 nt, Human
auuaaaaaucucaaauuucu

SEQ ID NO: 1205431 - RNA, 19 nt, Human
auuaaaaaucucaaauuuc

SEQ ID NO: 1205432 - RNA, 15 nt, Human
auuaaaaaucucaaa

SEQ ID NO: 1205433 - RNA, 16 nt, Human
auuaaacuuaaucuaa

SEQ ID NO: 1205434 - RNA, 21 nt, Human
uuuuguuccacaaguuaaaua

SEQ ID NO: 1205435 - RNA, 15 nt, Human
uuuuguuccacaagu

SEQ ID NO: 1205436 - RNA, 23 nt, Human
uuuugugcauuaucuagauacug

SEQ ID NO: 1205437 - RNA, 20 nt, Human
uuuugugcauuaucuagaua

SEQ ID NO: 1205438 - RNA, 17 nt, Human
uuuugugcauuaucuag

SEQ ID NO: 1205439 - RNA, 12 nt, Human
uuuuuauggcuu

SEQ ID NO: 1205440 - RNA, 20 nt, Human
uuuuuaucgucacugcuuaa

SEQ ID NO: 1205441 - RNA, 23 nt, Human
uuuuuauacauaaacaagaccac

SEQ ID NO: 1205442 - RNA, 11 nt, Human
uuuuuacuaau

SEQ ID NO: 1205443 - RNA, 22 nt, Human
uuuuuagacagagucucacugu

SEQ ID NO: 1205444 - RNA, 23 nt, Human
uuuugccauguuggccaggcugg

SEQ ID NO: 1205445 - RNA, 17 nt, Human
uuuugauccaagcuggu

SEQ ID NO: 1205446 - RNA, 17 nt, Human
uuuugagugccuuacac

SEQ ID NO: 1205447 - RNA, 16 nt, Human
auuaaguacuauguau

SEQ ID NO: 1205448 - RNA, 14 nt, Human
auuaaguacuaugu

SEQ ID NO: 1205449 - RNA, 22 nt, Human
uuuuuauggcuuuugugcauua

SEQ ID NO: 1205450 - RNA, 21 nt, Human
uuuuuauggcuuuugugcauu

SEQ ID NO: 1205451 - RNA, 20 nt, Human
uuuuuauggcuuuugugcau

SEQ ID NO: 1205452 - RNA, 22 nt, Human
uuuuuguuccacaaguuaaaua

SEQ ID NO: 1205453 - RNA, 20 nt, Human
uuuuuguagagccagggucu

SEQ ID NO: 1205454 - RNA, 19 nt, Human
uuuuuguagagccaggguc

SEQ ID NO: 1205455 - RNA, 12 nt, Human
auuacuucugcu

SEQ ID NO: 1205456 - RNA, 20 nt, Human
auucaggaagcucagggccu

SEQ ID NO: 1205457 - RNA, 19 nt, Human
auucaggaagcucagggcc

SEQ ID NO: 1205458 - RNA, 17 nt, Human
auucaggaagcucaggg

SEQ ID NO: 1205459 - RNA, 19 nt, Human
auucaguaauaacucuacc

SEQ ID NO: 1205460 - RNA, 15 nt, Human
auucaguaauaacuc

SEQ ID NO: 1205461 - RNA, 14 nt, Human
auucaggaagcuca

SEQ ID NO: 1205462 - RNA, 17 nt, Human
auucccaagcucugcuc

SEQ ID NO: 1205463 - RNA, 16 nt, Human
auucccaagcucugcu

SEQ ID NO: 1205464 - RNA, 15 nt, Human
auucccaagcucugc

SEQ ID NO: 1205465 - RNA, 14 nt, Human
auucccaagcucug

SEQ ID NO: 1205466 - RNA, 16 nt, Human
auucuccuuguguuac

SEQ ID NO: 1205467 - RNA, 20 nt, Human
auucuccugccucagccucc

SEQ ID NO: 1205468 - RNA, 19 nt, Human
auucuccugccucagccuc

SEQ ID NO: 1205469 - RNA, 17 nt, Human
auucuccugccucagcc

SEQ ID NO: 1205470 - RNA, 15 nt, Human
auucuccugccucag

SEQ ID NO: 1205471 - RNA, 14 nt, Human
auucuccugccuca

SEQ ID NO: 1205472 - RNA, 13 nt, Human
auucuccugccuc

SEQ ID NO: 1205473 - RNA, 11 nt, Human
auucuccugcc

SEQ ID NO: 1205474 - RNA, 21 nt, Human
auucuccaccugccagggaca

SEQ ID NO: 1205475 - RNA, 20 nt, Human
auucuccaccugccagggac

SEQ ID NO: 1205476 - RNA, 19 nt, Human
auucuccaccugccaggga

SEQ ID NO: 1205477 - RNA, 12 nt, Human
auugaaaucuuu

SEQ ID NO: 1205478 - RNA, 19 nt, Human
uugcugaauacagaggcaa

SEQ ID NO: 1205479 - RNA, 20 nt, Human
uugcuaagugaggaugaaaa

SEQ ID NO: 1205480 - RNA, 17 nt, Human
uuggaaagaguaggaag

SEQ ID NO: 1205481 - RNA, 19 nt, Human
uugcugauggugcaaugac

SEQ ID NO: 1205482 - RNA, 18 nt, Human
uugcugauggugcaauga

SEQ ID NO: 1205483 - RNA, 17 nt, Human
uugcugauggugcaaug

SEQ ID NO: 1205484 - RNA, 14 nt, Human
augaaaugagguca

SEQ ID NO: 1205485 - RNA, 20 nt, Human
augaaagacuguacaaagua

SEQ ID NO: 1205486 - RNA, 16 nt, Human
uuggcugcugaaggcu

SEQ ID NO: 1205487 - RNA, 22 nt, Human
uuggcgcugccccuggcagccc

SEQ ID NO: 1205488 - RNA, 15 nt, Human
uuggcugcugaaggc

SEQ ID NO: 1205489 - RNA, 11 nt, Human
uuggcugcuga

SEQ ID NO: 1205490 - RNA, 14 nt, Human
uuggcugcagggag

SEQ ID NO: 1205491 - RNA, 23 nt, Human
uuggcuauuagagaucaaccccu

SEQ ID NO: 1205492 - RNA, 22 nt, Human
uuggcuaggaccccuccaugug

SEQ ID NO: 1205493 - RNA, 22 nt, Human
uuggcuagagguucaaagauau

SEQ ID NO: 1205494 - RNA, 21 nt, Human
uuggcuagagguucaaagaua

SEQ ID NO: 1205495 - RNA, 23 nt, Human
uuggaaagaguaggaagacuuug

SEQ ID NO: 1205496 - RNA, 18 nt, Human
uuggaaagaguaggaaga

SEQ ID NO: 1205497 - RNA, 20 nt, Human
uuguaaggaaugauuaauua

SEQ ID NO: 1205498 - RNA, 20 nt, Human
augacacgaauauugcugau

SEQ ID NO: 1205499 - RNA, 19 nt, Human
augacacgaauauugcuga

SEQ ID NO: 1205500 - RNA, 17 nt, Human
uugggguacccacugcu

SEQ ID NO: 1205501 - RNA, 19 nt, Human
uuggggaagaacgaagcca

SEQ ID NO: 1205502 - RNA, 22 nt, Human
augaaccacaucuugcucugcu

SEQ ID NO: 1205503 - RNA, 20 nt, Human
augaaccacaucuugcucug

SEQ ID NO: 1205504 - RNA, 13 nt, Human
augaaccacaucu

SEQ ID NO: 1205505 - RNA, 19 nt, Human
uugguuaggcauuguggga

SEQ ID NO: 1205506 - RNA, 22 nt, Human
uugggguacccacugcucuggu

SEQ ID NO: 1205507 - RNA, 14 nt, Human
uuguaaggaaugau

SEQ ID NO: 1205508 - RNA, 19 nt, Human
augaucacggcucacugca

SEQ ID NO: 1205509 - RNA, 18 nt, Human
augaucacggcucacugc

SEQ ID NO: 1205510 - RNA, 15 nt, Human
augaucacggcucac

SEQ ID NO: 1205511 - RNA, 16 nt, Human
augauccuaggcauuu

SEQ ID NO: 1205512 - RNA, 23 nt, Human
augaucacggcucacugcagccu

SEQ ID NO: 1205513 - RNA, 14 nt, Human
augaucuucuuuau

SEQ ID NO: 1205514 - RNA, 15 nt, Human
augaucuaggaagac

SEQ ID NO: 1205515 - RNA, 16 nt, Human
augcaccuggaauaua

SEQ ID NO: 1205516 - RNA, 22 nt, Human
augcaaggucauuuuuuuuaag

SEQ ID NO: 1205517 - RNA, 16 nt, Human
augcaaggucauuuuu

SEQ ID NO: 1205518 - RNA, 14 nt, Human
augcaaggucauuu

SEQ ID NO: 1205519 - RNA, 22 nt, Human
augcaaaccaucauugaaaucu

SEQ ID NO: 1205520 - RNA, 21 nt, Human
augcaaaccaucauugaaauc

SEQ ID NO: 1205521 - RNA, 20 nt, Human
augcaaaccaucauugaaau

SEQ ID NO: 1205522 - RNA, 19 nt, Human
augcaaaccaucauugaaa

SEQ ID NO: 1205523 - RNA, 18 nt, Human
augcaaaccaucauugaa

SEQ ID NO: 1205524 - RNA, 16 nt, Human
augcaaaccaucauug

SEQ ID NO: 1205525 - RNA, 18 nt, Human
augaucuucuuuauaauu

SEQ ID NO: 1205526 - RNA, 15 nt, Human
augaucuucuuuaua

SEQ ID NO: 1205527 - RNA, 19 nt, Human
augcaccuggaauauauaa

SEQ ID NO: 1205528 - RNA, 15 nt, Human
augauaaaacacaaa

SEQ ID NO: 1205529 - RNA, 19 nt, Human
augagccucagcauccugg

SEQ ID NO: 1205530 - RNA, 18 nt, Human
augagccucagcauccug

SEQ ID NO: 1205531 - RNA, 17 nt, Human
augagccucagcauccu

SEQ ID NO: 1205532 - RNA, 16 nt, Human
augagccucagcaucc

SEQ ID NO: 1205533 - RNA, 15 nt, Human
augagccucagcauc

SEQ ID NO: 1205534 - RNA, 12 nt, Human
augagccucagc

SEQ ID NO: 1205535 - RNA, 22 nt, Human
augagcaucaggccaggcccuc

SEQ ID NO: 1205536 - RNA, 21 nt, Human
augagcaucaggccaggcccu

SEQ ID NO: 1205537 - RNA, 20 nt, Human
augagcaucaggccaggccc

SEQ ID NO: 1205538 - RNA, 19 nt, Human
augagcaucaggccaggcc

SEQ ID NO: 1205539 - RNA, 18 nt, Human
augagcaucaggccaggc

SEQ ID NO: 1205540 - RNA, 17 nt, Human
augagcaucaggccagg

SEQ ID NO: 1205541 - RNA, 16 nt, Human
augagcaucaggccag

SEQ ID NO: 1205542 - RNA, 15 nt, Human
augagcaucaggcca

SEQ ID NO: 1205543 - RNA, 16 nt, Human
augagaggaaaucacc

SEQ ID NO: 1205544 - RNA, 15 nt, Human
augagaggaaaucac

SEQ ID NO: 1205545 - RNA, 14 nt, Human
augagaggaaauca

SEQ ID NO: 1205546 - RNA, 13 nt, Human
augagaggaaauc

SEQ ID NO: 1205547 - RNA, 12 nt, Human
augagaggaaau

SEQ ID NO: 1205548 - RNA, 18 nt, Human
uuuacuaauagacaauuu

SEQ ID NO: 1205549 - RNA, 17 nt, Human
uuuacuaauagacaauu

SEQ ID NO: 1205550 - RNA, 14 nt, Human
uuuacuaauagaca

SEQ ID NO: 1205551 - RNA, 21 nt, Human
uuuaccuuuuuuauacauaaa

SEQ ID NO: 1205552 - RNA, 20 nt, Human
uuuaccuuuuuuauacauaa

SEQ ID NO: 1205553 - RNA, 19 nt, Human
uuuaccuuuuuuauacaua

SEQ ID NO: 1205554 - RNA, 14 nt, Human
uuuaccuuuuuuau

SEQ ID NO: 1205555 - RNA, 17 nt, Human
augcuacacacugcaug

SEQ ID NO: 1205556 - RNA, 18 nt, Human
augcuacacacugcaugu

SEQ ID NO: 1205557 - RNA, 19 nt, Human
uuuauuaaaugcccagccc

SEQ ID NO: 1205558 - RNA, 15 nt, Human
uuuagauaauacacc

SEQ ID NO: 1205559 - RNA, 13 nt, Human
uuuagauaauaca

SEQ ID NO: 1205560 - RNA, 15 nt, Human
uuuaguagagacagg

SEQ ID NO: 1205561 - RNA, 19 nt, Human
uuuccagguuuaagcuguu

SEQ ID NO: 1205562 - RNA, 24 nt, Human
uuucacucuuauugcccacgcugg

SEQ ID NO: 1205563 - RNA, 15 nt, Human
uuucacucuccuugg

SEQ ID NO: 1205564 - RNA, 14 nt, Human
uuucacucuccuug

SEQ ID NO: 1205565 - RNA, 21 nt, Human
auggaaguacuauaauuuacc

SEQ ID NO: 1205566 - RNA, 18 nt, Human
auggaacacucugagacu

SEQ ID NO: 1205567 - RNA, 15 nt, Human
auggaauaacaugua

SEQ ID NO: 1205568 - RNA, 14 nt, Human
auggaauaacaugu

SEQ ID NO: 1205569 - RNA, 13 nt, Human
uuuauuaugcaug

SEQ ID NO: 1205570 - RNA, 22 nt, Human
augcugugcccuaaaguguauu

SEQ ID NO: 1205571 - RNA, 19 nt, Human
augcugugcccuaaagugu

SEQ ID NO: 1205572 - RNA, 14 nt, Human
uuucuaaagcugcc

SEQ ID NO: 1205573 - RNA, 21 nt, Human
uuucuaugacacaugcaaggu

SEQ ID NO: 1205574 - RNA, 15 nt, Human
uuucuaugacacaug

SEQ ID NO: 1205575 - RNA, 16 nt, Human
uuucugccgcagcccu

SEQ ID NO: 1205576 - RNA, 14 nt, Human
uuucugccgcagcc

SEQ ID NO: 1205577 - RNA, 14 nt, Human
auggggcccugccu

SEQ ID NO: 1205578 - RNA, 23 nt, Human
augggcuggguucuacccaggug

SEQ ID NO: 1205579 - RNA, 13 nt, Human
uuucuuuguggcu

SEQ ID NO: 1205580 - RNA, 23 nt, Human
uuuccuucauucaacccaccugc

SEQ ID NO: 1205581 - RNA, 21 nt, Human
uuuccuucauucaacccaccu

SEQ ID NO: 1205582 - RNA, 22 nt, Human
uuuccuucagugccuuauggaa

SEQ ID NO: 1205583 - RNA, 21 nt, Human
uuuccuucagugccuuaugga

SEQ ID NO: 1205584 - RNA, 18 nt, Human
uuuccuucagugccuuau

SEQ ID NO: 1205585 - RNA, 15 nt, Human
uuuccuucagugccu

SEQ ID NO: 1205586 - RNA, 12 nt, Human
uuuccuucagug

SEQ ID NO: 1205587 - RNA, 11 nt, Human
uuuccuucagu

SEQ ID NO: 1205588 - RNA, 12 nt, Human
uuuccugugucu

SEQ ID NO: 1205589 - RNA, 17 nt, Human
augggccuccugugugu

SEQ ID NO: 1205590 - RNA, 22 nt, Human
uuucgcaggauucuuccucccu

SEQ ID NO: 1205591 - RNA, 18 nt, Human
uuucgcaggauucuuccu

SEQ ID NO: 1205592 - RNA, 18 nt, Human
auggccucuucagaucuc

SEQ ID NO: 1205593 - RNA, 21 nt, Human
auggacccaauauuuaccaga

SEQ ID NO: 1205594 - RNA, 15 nt, Human
augggccuccugugu

SEQ ID NO: 1205595 - RNA, 15 nt, Human
augggcagagcagag

SEQ ID NO: 1205596 - RNA, 14 nt, Human
augggcagagcaga

SEQ ID NO: 1205597 - RNA, 13 nt, Human
augggcagagcag

SEQ ID NO: 1205598 - RNA, 21 nt, Human
augggcaacccccagccugcu

SEQ ID NO: 1205599 - RNA, 19 nt, Human
augggcaacccccagccug

SEQ ID NO: 1205600 - RNA, 13 nt, Human
augggagcucaug

SEQ ID NO: 1205601 - RNA, 16 nt, Human
uucagaaauguguuau

SEQ ID NO: 1205602 - RNA, 14 nt, Human
uucagccaagaauu

SEQ ID NO: 1205603 - RNA, 16 nt, Human
uucagguaacaggcag

SEQ ID NO: 1205604 - RNA, 15 nt, Human
uucagguaacaggca

SEQ ID NO: 1205605 - RNA, 22 nt, Human
uucaggguuggccccugcccgg

SEQ ID NO: 1205606 - RNA, 19 nt, Human
uucaggguuggccccugcc

SEQ ID NO: 1205607 - RNA, 17 nt, Human
uucaggguuggccccug

SEQ ID NO: 1205608 - RNA, 16 nt, Human
uucaggguuggccccu

SEQ ID NO: 1205609 - RNA, 14 nt, Human
uucaggguuggccc

SEQ ID NO: 1205610 - RNA, 22 nt, Human
auauauguuuuaagaggcaggg

SEQ ID NO: 1205611 - RNA, 21 nt, Human
auauauguuuuaagaggcagg

SEQ ID NO: 1205612 - RNA, 18 nt, Human
uucaucauccuaagcuau

SEQ ID NO: 1205613 - RNA, 14 nt, Human
uucaguaagccgug

SEQ ID NO: 1205614 - RNA, 17 nt, Human
uucagguaacaggcaga

SEQ ID NO: 1205615 - RNA, 16 nt, Human
uucagugccaaaaaca

SEQ ID NO: 1205616 - RNA, 21 nt, Human
auauguggaguucaucuugaa

SEQ ID NO: 1205617 - RNA, 20 nt, Human
auauguggaguucaucuuga

SEQ ID NO: 1205618 - RNA, 22 nt, Human
uuccaauuuacauacucugcuu

SEQ ID NO: 1205619 - RNA, 18 nt, Human
uuccagguuuaagcuguu

SEQ ID NO: 1205620 - RNA, 17 nt, Human
uuccaggggugggacac

SEQ ID NO: 1205621 - RNA, 17 nt, Human
uuccaggcugggagagc

SEQ ID NO: 1205622 - RNA, 15 nt, Human
uuccaggcugggaga

SEQ ID NO: 1205623 - RNA, 22 nt, Human
uuccacaagagcccaggccucc

SEQ ID NO: 1205624 - RNA, 21 nt, Human
uuccacaagagcccaggccuc

SEQ ID NO: 1205625 - RNA, 18 nt, Human
uuccaccaucaagccacc

SEQ ID NO: 1205626 - RNA, 19 nt, Human
auauuaccacagacauacu

SEQ ID NO: 1205627 - RNA, 15 nt, Human
auauugauaugcuua

SEQ ID NO: 1205628 - RNA, 22 nt, Human
auauugcugauggugcaaugac

SEQ ID NO: 1205629 - RNA, 17 nt, Human
auauuguuuucagugua

SEQ ID NO: 1205630 - RNA, 13 nt, Human
auauuguuuucag

SEQ ID NO: 1205631 - RNA, 17 nt, Human
auauuaccacagacaua

SEQ ID NO: 1205632 - RNA, 22 nt, Human
auauuaagaaagacuaucuaaa

SEQ ID NO: 1205633 - RNA, 17 nt, Human
auauuaagaaagacuau

SEQ ID NO: 1205634 - RNA, 16 nt, Human
auauuaagaaagacua

SEQ ID NO: 1205635 - RNA, 17 nt, Human
uuccagugaggcucugc

SEQ ID NO: 1205636 - RNA, 16 nt, Human
uuccagugaggcucug

SEQ ID NO: 1205637 - RNA, 15 nt, Human
uuccagugaggcucu

SEQ ID NO: 1205638 - RNA, 22 nt, Human
uuccucuuuuuauuuaguuccu

SEQ ID NO: 1205639 - RNA, 22 nt, Human
uuccuggcacugcuuccaguga

SEQ ID NO: 1205640 - RNA, 20 nt, Human
uuccuggcacugcuuccagu

SEQ ID NO: 1205641 - RNA, 17 nt, Human
aucacgccacugcacua

SEQ ID NO: 1205642 - RNA, 15 nt, Human
aucacgccacugcac

SEQ ID NO: 1205643 - RNA, 21 nt, Human
aucaacugcaucaagauguga

SEQ ID NO: 1205644 - RNA, 16 nt, Human
aucauuaggugugacu

SEQ ID NO: 1205645 - RNA, 23 nt, Human
aucauccacugugccaugugcca

SEQ ID NO: 1205646 - RNA, 21 nt, Human
aucauccacugugccaugugc

SEQ ID NO: 1205647 - RNA, 15 nt, Human
aucauaaaacuugau

SEQ ID NO: 1205648 - RNA, 19 nt, Human
aucaggugcugccauccag

SEQ ID NO: 1205649 - RNA, 17 nt, Human
aucaggugcugccaucc

SEQ ID NO: 1205650 - RNA, 15 nt, Human
aucaggugcugccau

SEQ ID NO: 1205651 - RNA, 19 nt, Human
aucagucugauucccaagc

SEQ ID NO: 1205652 - RNA, 13 nt, Human
aucauugaaaucu

SEQ ID NO: 1205653 - RNA, 12 nt, Human
aucauugaaauc

SEQ ID NO: 1205654 - RNA, 21 nt, Human
uucucuaguuugauuaaauuc

SEQ ID NO: 1205655 - RNA, 16 nt, Human
aucccaugagccucag

SEQ ID NO: 1205656 - RNA, 12 nt, Human
aucccagcccca

SEQ ID NO: 1205657 - RNA, 11 nt, Human
aucccagcccc

SEQ ID NO: 1205658 - RNA, 22 nt, Human
aucccugaaggccccgcccagg

SEQ ID NO: 1205659 - RNA, 17 nt, Human
aucccugaaggccccgc

SEQ ID NO: 1205660 - RNA, 18 nt, Human
aucccaugagccucagca

SEQ ID NO: 1205661 - RNA, 17 nt, Human
aucccaugagccucagc

SEQ ID NO: 1205662 - RNA, 17 nt, Human
uucugccugcccaggcc

SEQ ID NO: 1205663 - RNA, 16 nt, Human
uucugccugcccaggc

SEQ ID NO: 1205664 - RNA, 15 nt, Human
uucugccugcccagg

SEQ ID NO: 1205665 - RNA, 15 nt, Human
auccaguaucuugaa

SEQ ID NO: 1205666 - RNA, 14 nt, Human
auccaguaucuuga

SEQ ID NO: 1205667 - RNA, 17 nt, Human
auccagguucagcuugu

SEQ ID NO: 1205668 - RNA, 20 nt, Human
uucuuucuggcuaugcauuu

SEQ ID NO: 1205669 - RNA, 17 nt, Human
uucuuucuggcuaugca

SEQ ID NO: 1205670 - RNA, 12 nt, Human
uucuuucuggcu

SEQ ID NO: 1205671 - RNA, 11 nt, Human
uucuucucccu

SEQ ID NO: 1205672 - RNA, 22 nt, Human
uucuucuccacuuucuagccag

SEQ ID NO: 1205673 - RNA, 18 nt, Human
uucuguuuagauaauaca

SEQ ID NO: 1205674 - RNA, 13 nt, Human
uucuguuuagaua

SEQ ID NO: 1205675 - RNA, 23 nt, Human
auccuggcacccggccccugcug

SEQ ID NO: 1205676 - RNA, 22 nt, Human
auccuggcacccggccccugcu

SEQ ID NO: 1205677 - RNA, 21 nt, Human
auccuggcacccggccccugc

SEQ ID NO: 1205678 - RNA, 20 nt, Human
auccuggcacccggccccug

SEQ ID NO: 1205679 - RNA, 19 nt, Human
auccuggcacccggccccu

SEQ ID NO: 1205680 - RNA, 17 nt, Human
auccuggcacccggccc

SEQ ID NO: 1205681 - RNA, 15 nt, Human
auccuggaguucugg

SEQ ID NO: 1205682 - RNA, 21 nt, Human
auccugagccagauuucacuc

SEQ ID NO: 1205683 - RNA, 17 nt, Human
auccugagccagauuuc

SEQ ID NO: 1205684 - RNA, 15 nt, Human
auccugagccagauu

SEQ ID NO: 1205685 - RNA, 14 nt, Human
auccugagccagau

SEQ ID NO: 1205686 - RNA, 13 nt, Human
auccugagccaga

SEQ ID NO: 1205687 - RNA, 12 nt, Human
auccugagccag

SEQ ID NO: 1205688 - RNA, 11 nt, Human
auccugagcca

SEQ ID NO: 1205689 - RNA, 17 nt, Human
auccucuuugagugaag

SEQ ID NO: 1205690 - RNA, 20 nt, Human
uucuuuugccguuauuaaaa

SEQ ID NO: 1205691 - RNA, 20 nt, Human
auccucuguacagagcccac

SEQ ID NO: 1205692 - RNA, 18 nt, Human
auccucuguacagagccc

SEQ ID NO: 1205693 - RNA, 19 nt, Human
uugaccauucuccaccugc

SEQ ID NO: 1205694 - RNA, 18 nt, Human
uugaccauucuccaccug

SEQ ID NO: 1205695 - RNA, 13 nt, Human
uugacaucaacug

SEQ ID NO: 1205696 - RNA, 24 nt, Human
uugaccauucuccaccugccaggg

SEQ ID NO: 1205697 - RNA, 12 nt, Human
uugauaaaguaa

SEQ ID NO: 1205698 - RNA, 16 nt, Human
uugaggucuguucuuu

SEQ ID NO: 1205699 - RNA, 15 nt, Human
uugagaucagccugg

SEQ ID NO: 1205700 - RNA, 15 nt, Human
aucgugacaacacuu

SEQ ID NO: 1205701 - RNA, 14 nt, Human
aucgugacaacacu

SEQ ID NO: 1205702 - RNA, 18 nt, Human
aucgucacugcuuaacuu

SEQ ID NO: 1205703 - RNA, 14 nt, Human
aucgucacugcuua

SEQ ID NO: 1205704 - RNA, 15 nt, Human
aucuaaauguugaaa

SEQ ID NO: 1205705 - RNA, 13 nt, Human
uguugggccagga

SEQ ID NO: 1205706 - RNA, 16 nt, Human
uguugggccaggagcc

SEQ ID NO: 1205707 - RNA, 13 nt, Human
uguugucagcuga

SEQ ID NO: 1205708 - RNA, 21 nt, Human
aguuauuuuuauuuauuuaaa

SEQ ID NO: 1205709 - RNA, 20 nt, Human
uguucuuuccaaaguacacu

SEQ ID NO: 1205710 - RNA, 18 nt, Human
uguucuuuccaaaguaca

SEQ ID NO: 1205711 - RNA, 13 nt, Human
aguggcagcugcu

SEQ ID NO: 1205712 - RNA, 12 nt, Human
aguggcagcugc

SEQ ID NO: 1205713 - RNA, 20 nt, Human
aguggcagcugcuuuugucu

SEQ ID NO: 1205714 - RNA, 14 nt, Human
aguggcagcugcuu

SEQ ID NO: 1205715 - RNA, 18 nt, Human
agugggugaauaauacag

SEQ ID NO: 1205716 - RNA, 13 nt, Human
agugggugaauaa

SEQ ID NO: 1205717 - RNA, 18 nt, Human
agugggggaucacagccu

SEQ ID NO: 1205718 - RNA, 20 nt, Human
agugggggaguggccacaga

SEQ ID NO: 1205719 - RNA, 19 nt, Human
agugggggaguggccacag

SEQ ID NO: 1205720 - RNA, 21 nt, Human
agugguuccuaauccucuagg

SEQ ID NO: 1205721 - RNA, 16 nt, Human
aguggugcgaucuggg

SEQ ID NO: 1205722 - RNA, 19 nt, Human
agugggugaauaauacagu

SEQ ID NO: 1205723 - RNA, 22 nt, Human
aguguacauggaauaacaugua

SEQ ID NO: 1205724 - RNA, 21 nt, Human
aguguacauggaauaacaugu

SEQ ID NO: 1205725 - RNA, 14 nt, Human
uguucuuuccaaag

SEQ ID NO: 1205726 - RNA, 13 nt, Human
uguucuuuccaaa

SEQ ID NO: 1205727 - RNA, 19 nt, Human
uguucuugguuuguaaauu

SEQ ID NO: 1205728 - RNA, 18 nt, Human
uguucuugguuuguaaau

SEQ ID NO: 1205729 - RNA, 17 nt, Human
uguucuugguuuguaaa

SEQ ID NO: 1205730 - RNA, 16 nt, Human
uguucuuaauucuuag

SEQ ID NO: 1205731 - RNA, 14 nt, Human
uguucuuaauucuu

SEQ ID NO: 1205732 - RNA, 15 nt, Human
uguucugggacacag

SEQ ID NO: 1205733 - RNA, 14 nt, Human
uguucugggacaca

SEQ ID NO: 1205734 - RNA, 13 nt, Human
uguucugggacac

SEQ ID NO: 1205735 - RNA, 23 nt, Human
aguguacauggaauaacauguaa

SEQ ID NO: 1205736 - RNA, 16 nt, Human
aguucucuccuucuuc

SEQ ID NO: 1205737 - RNA, 13 nt, Human
aguucucuccuuc

SEQ ID NO: 1205738 - RNA, 17 nt, Human
uguuuucaguguacaug

SEQ ID NO: 1205739 - RNA, 15 nt, Human
uguuuucucuugaga

SEQ ID NO: 1205740 - RNA, 15 nt, Human
uguuuucaguguaca

SEQ ID NO: 1205741 - RNA, 19 nt, Human
uguuuggggaugagaaagg

SEQ ID NO: 1205742 - RNA, 15 nt, Human
uguuuggggaugaga

SEQ ID NO: 1205743 - RNA, 16 nt, Human
uguuugccucugccuc

SEQ ID NO: 1205744 - RNA, 14 nt, Human
uguuugccucugcc

SEQ ID NO: 1205745 - RNA, 14 nt, Human
uguugucagcugaa

SEQ ID NO: 1205746 - RNA, 23 nt, Human
aguugauucagcucugcaagaau

SEQ ID NO: 1205747 - RNA, 18 nt, Human
aguugauucagcucugca

SEQ ID NO: 1205748 - RNA, 17 nt, Human
aguugauucagcucugc

SEQ ID NO: 1205749 - RNA, 15 nt, Human
aguugauucagcucu

SEQ ID NO: 1205750 - RNA, 14 nt, Human
aguugauucagcuc

SEQ ID NO: 1205751 - RNA, 13 nt, Human
aguugauucagcu

SEQ ID NO: 1205752 - RNA, 23 nt, Human
aguugauagcacagacccugccc

SEQ ID NO: 1205753 - RNA, 22 nt, Human
aguugauagcacagacccugcc

SEQ ID NO: 1205754 - RNA, 21 nt, Human
aguugauagcacagacccugc

SEQ ID NO: 1205755 - RNA, 20 nt, Human
aguugauagcacagacccug

SEQ ID NO: 1205756 - RNA, 19 nt, Human
aguugauagcacagacccu

SEQ ID NO: 1205757 - RNA, 15 nt, Human
aguugauagcacaga

SEQ ID NO: 1205758 - RNA, 22 nt, Human
aguuuucacucuuauugcccac

SEQ ID NO: 1205759 - RNA, 20 nt, Human
uuaaauucuugcaaaguauc

SEQ ID NO: 1205760 - RNA, 16 nt, Human
uuaaauucuugcaaag

SEQ ID NO: 1205761 - RNA, 13 nt, Human
uuaaauucuugca

SEQ ID NO: 1205762 - RNA, 15 nt, Human
aguuucuccaagcag

SEQ ID NO: 1205763 - RNA, 13 nt, Human
aguuucuccaagc

SEQ ID NO: 1205764 - RNA, 21 nt, Human
aguuucuccaagcaggacaug

SEQ ID NO: 1205765 - RNA, 17 nt, Human
uuaaaacaacacucaca

SEQ ID NO: 1205766 - RNA, 18 nt, Human
uuaaaaaguggaaaaaua

SEQ ID NO: 1205767 - RNA, 20 nt, Human
aguugccagucaccccggcc

SEQ ID NO: 1205768 - RNA, 22 nt, Human
uuaaauaaugugaaacuggauu

SEQ ID NO: 1205769 - RNA, 21 nt, Human
uuaaauaaugugaaacuggau

SEQ ID NO: 1205770 - RNA, 20 nt, Human
uuaaauaaugugaaacugga

SEQ ID NO: 1205771 - RNA, 15 nt, Human
uuaaauaaaucauaa

SEQ ID NO: 1205772 - RNA, 13 nt, Human
uuaaauaaaucau

SEQ ID NO: 1205773 - RNA, 17 nt, Human
uuaaaccgccaaggcug

SEQ ID NO: 1205774 - RNA, 20 nt, Human
auacuacaguuuguuaguau

SEQ ID NO: 1205775 - RNA, 16 nt, Human
auacuacaguuuguua

SEQ ID NO: 1205776 - RNA, 15 nt, Human
auacuacaguuuguu

SEQ ID NO: 1205777 - RNA, 13 nt, Human
auacuacaguuug

SEQ ID NO: 1205778 - RNA, 21 nt, Human
auacuaaccagcagaaaugcc

SEQ ID NO: 1205779 - RNA, 19 nt, Human
auaccagccaguaaauggg

SEQ ID NO: 1205780 - RNA, 22 nt, Human
auacaggaaaagcugcugacag

SEQ ID NO: 1205781 - RNA, 20 nt, Human
auacaggaaaagcugcugac

SEQ ID NO: 1205782 - RNA, 19 nt, Human
auacaggaaaagcugcuga

SEQ ID NO: 1205783 - RNA, 14 nt, Human
auacaggaaaagcu

SEQ ID NO: 1205784 - RNA, 20 nt, Human
auacauaaacaagaccacgu

SEQ ID NO: 1205785 - RNA, 16 nt, Human
auacauuugauaaagu

SEQ ID NO: 1205786 - RNA, 15 nt, Human
auacaaaagcaugug

SEQ ID NO: 1205787 - RNA, 13 nt, Human
auacaaaagcaug

SEQ ID NO: 1205788 - RNA, 12 nt, Human
auacaaaagcau

SEQ ID NO: 1205789 - RNA, 16 nt, Human
auaaacuuuaccuuuu

SEQ ID NO: 1205790 - RNA, 15 nt, Human
auaaacuuuaccuuu

SEQ ID NO: 1205791 - RNA, 13 nt, Human
auaaacuuuaccu

SEQ ID NO: 1205792 - RNA, 23 nt, Human
uuaccauuuugggguacccacug

SEQ ID NO: 1205793 - RNA, 22 nt, Human
uuacaggaaguacuggagaaaa

SEQ ID NO: 1205794 - RNA, 18 nt, Human
uuacaggaaguacuggag

SEQ ID NO: 1205795 - RNA, 16 nt, Human
uuacaggaaguacugg

SEQ ID NO: 1205796 - RNA, 20 nt, Human
auaaccaguguuguggauuu

SEQ ID NO: 1205797 - RNA, 23 nt, Human
auaauacaccacuacauucuguu

SEQ ID NO: 1205798 - RNA, 22 nt, Human
auaaguuaacuuccaauuuaca

SEQ ID NO: 1205799 - RNA, 17 nt, Human
auaaguuaacuuccaau

SEQ ID NO: 1205800 - RNA, 23 nt, Human
auaagaaccuuuugagugccuua

SEQ ID NO: 1205801 - RNA, 22 nt, Human
auaagaaccuuuugagugccuu

SEQ ID NO: 1205802 - RNA, 19 nt, Human
auaauacaguaucucaggg

SEQ ID NO: 1205803 - RNA, 14 nt, Human
auaauucuacuuug

SEQ ID NO: 1205804 - RNA, 16 nt, Human
aggggauagagagaga

SEQ ID NO: 1205805 - RNA, 18 nt, Human
aggguaucaggugcugcc

SEQ ID NO: 1205806 - RNA, 16 nt, Human
aggguaucaggugcug

SEQ ID NO: 1205807 - RNA, 19 nt, Human
aggguacuaaggaaucuuu

SEQ ID NO: 1205808 - RNA, 23 nt, Human
uggguggaugccugguggcagcu

SEQ ID NO: 1205809 - RNA, 14 nt, Human
uggguggaugccug

SEQ ID NO: 1205810 - RNA, 16 nt, Human
ugguccauagagagca

SEQ ID NO: 1205811 - RNA, 15 nt, Human
ugguccauagagagc

SEQ ID NO: 1205812 - RNA, 23 nt, Human
uggucaccaaaucagcugcuacu

SEQ ID NO: 1205813 - RNA, 21 nt, Human
uggucaccaaaucagcugcua

SEQ ID NO: 1205814 - RNA, 12 nt, Human
uggucuguguga

SEQ ID NO: 1205815 - RNA, 16 nt, Human
uggucuuauuuguaaa

SEQ ID NO: 1205816 - RNA, 19 nt, Human
ugguccauagagagcaaga

SEQ ID NO: 1205817 - RNA, 13 nt, Human
uggucccacccca

SEQ ID NO: 1205818 - RNA, 15 nt, Human
aggguugggcuggug

SEQ ID NO: 1205819 - RNA, 17 nt, Human
aggguuggccccugccc

SEQ ID NO: 1205820 - RNA, 14 nt, Human
aggguuggccccug

SEQ ID NO: 1205821 - RNA, 13 nt, Human
aggguuggccccu

SEQ ID NO: 1205822 - RNA, 21 nt, Human
aggguggugaccucugccuga

SEQ ID NO: 1205823 - RNA, 19 nt, Human
aggguggugaccucugccu

SEQ ID NO: 1205824 - RNA, 18 nt, Human
aggguggugaccucugcc

SEQ ID NO: 1205825 - RNA, 19 nt, Human
uggugaacagaacaaaagg

SEQ ID NO: 1205826 - RNA, 17 nt, Human
agguaugcaaucaaauc

SEQ ID NO: 1205827 - RNA, 17 nt, Human
aggguugggcugguguc

SEQ ID NO: 1205828 - RNA, 23 nt, Human
aggucauuuuuuuuaagaaaaag

SEQ ID NO: 1205829 - RNA, 22 nt, Human
aggucauuuuuuuuaagaaaaa

SEQ ID NO: 1205830 - RNA, 21 nt, Human
aggucaaggcugcagugagcc

SEQ ID NO: 1205831 - RNA, 22 nt, Human
aggucuugaacuccuggccuca

SEQ ID NO: 1205832 - RNA, 21 nt, Human
aggucuugaacuccuggccuc

SEQ ID NO: 1205833 - RNA, 20 nt, Human
aggucuugaacuccuggccu

SEQ ID NO: 1205834 - RNA, 13 nt, Human
ugguggcagcugc

SEQ ID NO: 1205835 - RNA, 12 nt, Human
ugguggcagcug

SEQ ID NO: 1205836 - RNA, 23 nt, Human
ugguggcagcucaccucucccuu

SEQ ID NO: 1205837 - RNA, 20 nt, Human
ugguggcagcucaccucucc

SEQ ID NO: 1205838 - RNA, 19 nt, Human
ugguggcagcucaccucuc

SEQ ID NO: 1205839 - RNA, 16 nt, Human
ugguggcagcucaccu

SEQ ID NO: 1205840 - RNA, 12 nt, Human
ugguggcagcuc

SEQ ID NO: 1205841 - RNA, 15 nt, Human
ugguggcagagugga

SEQ ID NO: 1205842 - RNA, 17 nt, Human
ugguguuuccuggcacu

SEQ ID NO: 1205843 - RNA, 15 nt, Human
ugguguuuccuggca

SEQ ID NO: 1205844 - RNA, 22 nt, Human
ugguucaggguuggccccugcc

SEQ ID NO: 1205845 - RNA, 20 nt, Human
ugguucaggguuggccccug

SEQ ID NO: 1205846 - RNA, 23 nt, Human
ugguucaggguuggccccugccc

SEQ ID NO: 1205847 - RNA, 12 nt, Human
ugguuuucuguu

SEQ ID NO: 1205848 - RNA, 15 nt, Human
ugguuucagaaaugu

SEQ ID NO: 1205849 - RNA, 14 nt, Human
ugguuucagaaaug

SEQ ID NO: 1205850 - RNA, 15 nt, Human
ugguuuucuguucuu

SEQ ID NO: 1205851 - RNA, 13 nt, Human
ugguuuucuguuc

SEQ ID NO: 1205852 - RNA, 23 nt, Human
aggugauccacccaccucagccu

SEQ ID NO: 1205853 - RNA, 20 nt, Human
uguacaugaaaacacauuuu

SEQ ID NO: 1205854 - RNA, 19 nt, Human
uguacaugaaaacacauuu

SEQ ID NO: 1205855 - RNA, 18 nt, Human
uguacaugaaaacacauu

SEQ ID NO: 1205856 - RNA, 17 nt, Human
uguacaugaaaacacau

SEQ ID NO: 1205857 - RNA, 23 nt, Human
uguacaaaguagaagucuuagau

SEQ ID NO: 1205858 - RNA, 19 nt, Human
uguacaaaguagaagucuu

SEQ ID NO: 1205859 - RNA, 21 nt, Human
uguaauuugugauacaaugcu

SEQ ID NO: 1205860 - RNA, 17 nt, Human
uguaauuugugauacaa

SEQ ID NO: 1205861 - RNA, 16 nt, Human
uguaauuugugauaca

SEQ ID NO: 1205862 - RNA, 18 nt, Human
uguaaggaaugauuaauu

SEQ ID NO: 1205863 - RNA, 15 nt, Human
uguaaggaaugauua

SEQ ID NO: 1205864 - RNA, 14 nt, Human
uguaaggaaugauu

SEQ ID NO: 1205865 - RNA, 13 nt, Human
uguaaggaaugau

SEQ ID NO: 1205866 - RNA, 18 nt, Human
aggugugacugaauuucu

SEQ ID NO: 1205867 - RNA, 23 nt, Human
aggugugaaccaccacacccagc

SEQ ID NO: 1205868 - RNA, 22 nt, Human
aggugugaaccaccacacccag

SEQ ID NO: 1205869 - RNA, 20 nt, Human
aggugugagucaccaagccc

SEQ ID NO: 1205870 - RNA, 14 nt, Human
aggugugagucacc

SEQ ID NO: 1205871 - RNA, 20 nt, Human
aggugugacugaauuucuuu

SEQ ID NO: 1205872 - RNA, 16 nt, Human
agguggggcagcuuga

SEQ ID NO: 1205873 - RNA, 14 nt, Human
agguggggcagcuu

SEQ ID NO: 1205874 - RNA, 13 nt, Human
agguggggcagcu

SEQ ID NO: 1205875 - RNA, 18 nt, Human
ugugauggggcccugccu

SEQ ID NO: 1205876 - RNA, 17 nt, Human
ugugauggggcccugcc

SEQ ID NO: 1205877 - RNA, 16 nt, Human
ugugauggggcccugc

SEQ ID NO: 1205878 - RNA, 15 nt, Human
ugugauggggcccug

SEQ ID NO: 1205879 - RNA, 14 nt, Human
agugagagcugggu

SEQ ID NO: 1205880 - RNA, 22 nt, Human
agugagacucugucucaaaaaa

SEQ ID NO: 1205881 - RNA, 17 nt, Human
agugagacucugucuca

SEQ ID NO: 1205882 - RNA, 16 nt, Human
agugagacucugucuc

SEQ ID NO: 1205883 - RNA, 13 nt, Human
agugagacucugu

SEQ ID NO: 1205884 - RNA, 21 nt, Human
agugagacccugucucaaaaa

SEQ ID NO: 1205885 - RNA, 17 nt, Human
agugagacccugucuca

SEQ ID NO: 1205886 - RNA, 23 nt, Human
agugaaaaaggaggaagagaaaa

SEQ ID NO: 1205887 - RNA, 20 nt, Human
agugaaaaaggaggaagaga

SEQ ID NO: 1205888 - RNA, 17 nt, Human
agugaaaaaggaggaag

SEQ ID NO: 1205889 - RNA, 11 nt, Human
agugaaaaagg

SEQ ID NO: 1205890 - RNA, 19 nt, Human
ugugagcacaaagguagcu

SEQ ID NO: 1205891 - RNA, 16 nt, Human
agucccugccaaugga

SEQ ID NO: 1205892 - RNA, 14 nt, Human
agucccugccaaug

SEQ ID NO: 1205893 - RNA, 13 nt, Human
agucccugccaau

SEQ ID NO: 1205894 - RNA, 23 nt, Human
aguccccuguuuguuucugaaag

SEQ ID NO: 1205895 - RNA, 13 nt, Human
ugucucugagagu

SEQ ID NO: 1205896 - RNA, 22 nt, Human
ugucucuuuaaugucacaggca

SEQ ID NO: 1205897 - RNA, 21 nt, Human
ugucucuuuaaugucacaggc

SEQ ID NO: 1205898 - RNA, 22 nt, Human
ugucucuugguccugcugcagu

SEQ ID NO: 1205899 - RNA, 21 nt, Human
ugucucuugguccugcugcag

SEQ ID NO: 1205900 - RNA, 20 nt, Human
ugucucuugguccugcugca

SEQ ID NO: 1205901 - RNA, 19 nt, Human
ugucucuugguccugcugc

SEQ ID NO: 1205902 - RNA, 18 nt, Human
ugucucuugguccugcug

SEQ ID NO: 1205903 - RNA, 23 nt, Human
ugugaaccaccacacccagccca

SEQ ID NO: 1205904 - RNA, 22 nt, Human
ugugaaccaccacacccagccc

SEQ ID NO: 1205905 - RNA, 17 nt, Human
ugugaaccaccacaccc

SEQ ID NO: 1205906 - RNA, 16 nt, Human
ugugaaccaccacacc

SEQ ID NO: 1205907 - RNA, 15 nt, Human
ugugaaccaccacac

SEQ ID NO: 1205908 - RNA, 21 nt, Human
ugucuugcaauggcagccuug

SEQ ID NO: 1205909 - RNA, 20 nt, Human
ugucuugcaauggcagccuu

SEQ ID NO: 1205910 - RNA, 18 nt, Human
ugucuugcaauggcagcc

SEQ ID NO: 1205911 - RNA, 17 nt, Human
ugucuugcaauggcagc

SEQ ID NO: 1205912 - RNA, 15 nt, Human
ugucuugcaauggca

SEQ ID NO: 1205913 - RNA, 15 nt, Human
uguagagccaggguc

SEQ ID NO: 1205914 - RNA, 12 nt, Human
uguagagccagg

SEQ ID NO: 1205915 - RNA, 14 nt, Human
uguauguguaagua

SEQ ID NO: 1205916 - RNA, 16 nt, Human
uguaucccaugagccu

SEQ ID NO: 1205917 - RNA, 15 nt, Human
uguaucccaugagcc

SEQ ID NO: 1205918 - RNA, 14 nt, Human
aguagcugggacua

SEQ ID NO: 1205919 - RNA, 13 nt, Human
aguagcugggacu

SEQ ID NO: 1205920 - RNA, 19 nt, Human
ugucaaaguggugagaggc

SEQ ID NO: 1205921 - RNA, 16 nt, Human
ugucaaaguggugaga

SEQ ID NO: 1205922 - RNA, 15 nt, Human
ugucaaaguggugag

SEQ ID NO: 1205923 - RNA, 14 nt, Human
ugucaaagugguga

SEQ ID NO: 1205924 - RNA, 15 nt, Human
ugucagcauagaagu

SEQ ID NO: 1205925 - RNA, 17 nt, Human
agucacugagacagccc

SEQ ID NO: 1205926 - RNA, 16 nt, Human
agucacugagacagcc

SEQ ID NO: 1205927 - RNA, 15 nt, Human
agucacugagacagc

SEQ ID NO: 1205928 - RNA, 22 nt, Human
aguagcugggacuacaggcacc

SEQ ID NO: 1205929 - RNA, 21 nt, Human
aguagcugggacuacaggcac

SEQ ID NO: 1205930 - RNA, 19 nt, Human
aguagcugggacuacaggc

SEQ ID NO: 1205931 - RNA, 14 nt, Human
aguauuauaccuuu

SEQ ID NO: 1205932 - RNA, 15 nt, Human
aguauuauaccuuuu

SEQ ID NO: 1205933 - RNA, 19 nt, Human
aguccccuguuuguuucug

SEQ ID NO: 1205934 - RNA, 14 nt, Human
aguccccuguuugu

SEQ ID NO: 1205935 - RNA, 23 nt, Human
agucccaccuuggcugcagggag

SEQ ID NO: 1205936 - RNA, 21 nt, Human
agucccaccuuggcugcaggg

SEQ ID NO: 1205937 - RNA, 17 nt, Human
ugucccuuuuccuuuuu

SEQ ID NO: 1205938 - RNA, 12 nt, Human
ugucccuuuucc

SEQ ID NO: 1205939 - RNA, 14 nt, Human
ugucccugcacuug

SEQ ID NO: 1205940 - RNA, 18 nt, Human
agucacugagacagcccg

SEQ ID NO: 1205941 - RNA, 16 nt, Human
ugucagccauuccugu

SEQ ID NO: 1205942 - RNA, 24 nt, Human
agcugcuuuugucuaugggacuca

SEQ ID NO: 1205943 - RNA, 23 nt, Human
agcugcuuuugucuaugggacuc

SEQ ID NO: 1205944 - RNA, 13 nt, Human
agcugccuguuca

SEQ ID NO: 1205945 - RNA, 20 nt, Human
ugccugcccaggccccugcc

SEQ ID NO: 1205946 - RNA, 19 nt, Human
ugccugcccaggccccugc

SEQ ID NO: 1205947 - RNA, 18 nt, Human
ugccugcccaggccccug

SEQ ID NO: 1205948 - RNA, 17 nt, Human
ugccugcccaggccccu

SEQ ID NO: 1205949 - RNA, 12 nt, Human
ugccucugccuc

SEQ ID NO: 1205950 - RNA, 16 nt, Human
ugccucugacacacag

SEQ ID NO: 1205951 - RNA, 14 nt, Human
ugccucugacacac

SEQ ID NO: 1205952 - RNA, 11 nt, Human
ugccucugccu

SEQ ID NO: 1205953 - RNA, 20 nt, Human
ugccgcagcccugcagaggg

SEQ ID NO: 1205954 - RNA, 22 nt, Human
ugcccuuaccugccaggaagcc

SEQ ID NO: 1205955 - RNA, 18 nt, Human
ugcccugugggcccccaa

SEQ ID NO: 1205956 - RNA, 15 nt, Human
ugcccugugggcccc

SEQ ID NO: 1205957 - RNA, 17 nt, Human
agcucuucuccaggcug

SEQ ID NO: 1205958 - RNA, 16 nt, Human
agcucuucuccaggcu

SEQ ID NO: 1205959 - RNA, 15 nt, Human
agcucuucuccaggc

SEQ ID NO: 1205960 - RNA, 17 nt, Human
ugccucucucaggccaa

SEQ ID NO: 1205961 - RNA, 22 nt, Human
ugccucccaucacccgcuaaga

SEQ ID NO: 1205962 - RNA, 23 nt, Human
agcuccuucuguccuacucugug

SEQ ID NO: 1205963 - RNA, 21 nt, Human
agcuccagcucaccagcccca

SEQ ID NO: 1205964 - RNA, 19 nt, Human
agcuccagcucaccagccc

SEQ ID NO: 1205965 - RNA, 18 nt, Human
agcuccagcucaccagcc

SEQ ID NO: 1205966 - RNA, 17 nt, Human
agcuccagcucaccagc

SEQ ID NO: 1205967 - RNA, 13 nt, Human
agcuccagcucac

SEQ ID NO: 1205968 - RNA, 19 nt, Human
agcuccaagcucccaggca

SEQ ID NO: 1205969 - RNA, 18 nt, Human
agcuccaagcucccaggc

SEQ ID NO: 1205970 - RNA, 17 nt, Human
agcuccaagcucccagg

SEQ ID NO: 1205971 - RNA, 14 nt, Human
ugcccugcccaccu

SEQ ID NO: 1205972 - RNA, 23 nt, Human
agcggcuggcagcccaccccuca

SEQ ID NO: 1205973 - RNA, 20 nt, Human
agcggggacagcuccuucug

SEQ ID NO: 1205974 - RNA, 19 nt, Human
agcggggacagcuccuucu

SEQ ID NO: 1205975 - RNA, 22 nt, Human
agcggggacagcuccuucuguc

SEQ ID NO: 1205976 - RNA, 13 nt, Human
agcggcuggcagc

SEQ ID NO: 1205977 - RNA, 18 nt, Human
ugccagcuuaucucaggg

SEQ ID NO: 1205978 - RNA, 21 nt, Human
ugcauuugaggucuguucuuu

SEQ ID NO: 1205979 - RNA, 20 nt, Human
ugcauuugaggucuguucuu

SEQ ID NO: 1205980 - RNA, 22 nt, Human
agcgauucuucugcuucagccu

SEQ ID NO: 1205981 - RNA, 23 nt, Human
agccuugaccauucuccaccugc

SEQ ID NO: 1205982 - RNA, 23 nt, Human
agccuugaacuuugaccucugca

SEQ ID NO: 1205983 - RNA, 22 nt, Human
agccuugaacuuugaccucugc

SEQ ID NO: 1205984 - RNA, 16 nt, Human
agccuugaacuuugac

SEQ ID NO: 1205985 - RNA, 15 nt, Human
agccuugaacuuuga

SEQ ID NO: 1205986 - RNA, 18 nt, Human
agccuuccagggguggga

SEQ ID NO: 1205987 - RNA, 20 nt, Human
ugcauuuaaaagauacaguu

SEQ ID NO: 1205988 - RNA, 19 nt, Human
ugcauuugaggucuguucu

SEQ ID NO: 1205989 - RNA, 17 nt, Human
agcucaggugucccugc

SEQ ID NO: 1205990 - RNA, 15 nt, Human
agcuccaagcuccca

SEQ ID NO: 1205991 - RNA, 16 nt, Human
agcuccaagcucccag

SEQ ID NO: 1205992 - RNA, 20 nt, Human
agcucagggccuggcucagg

SEQ ID NO: 1205993 - RNA, 19 nt, Human
agcucagggccuggcucag

SEQ ID NO: 1205994 - RNA, 14 nt, Human
agcucagggccugg

SEQ ID NO: 1205995 - RNA, 13 nt, Human
agcucagggccug

SEQ ID NO: 1205996 - RNA, 12 nt, Human
agcucagggccu

SEQ ID NO: 1205997 - RNA, 19 nt, Human
agcuauucaguaauaacuc

SEQ ID NO: 1205998 - RNA, 21 nt, Human
agcuaggccuggccagaugca

SEQ ID NO: 1205999 - RNA, 13 nt, Human
agcgugagccacu

SEQ ID NO: 1206000 - RNA, 18 nt, Human
ugcccaggccccugccac

SEQ ID NO: 1206001 - RNA, 17 nt, Human
ugcccaggccccugcca

SEQ ID NO: 1206002 - RNA, 15 nt, Human
ugcccaggccccugc

SEQ ID NO: 1206003 - RNA, 20 nt, Human
ugcccagccccuucugaccc

SEQ ID NO: 1206004 - RNA, 17 nt, Human
ugcccagccccuucuga

SEQ ID NO: 1206005 - RNA, 16 nt, Human
ugcccagccccuucug

SEQ ID NO: 1206006 - RNA, 13 nt, Human
ugcccagccccuu

SEQ ID NO: 1206007 - RNA, 20 nt, Human
ugcccaaagaugcagccggu

SEQ ID NO: 1206008 - RNA, 17 nt, Human
ugcccaaagaugcagcc

SEQ ID NO: 1206009 - RNA, 20 nt, Human
ugcccuaaaguguauuuuuu

SEQ ID NO: 1206010 - RNA, 23 nt, Human
ugccccgaacauguuuuucuucu

SEQ ID NO: 1206011 - RNA, 17 nt, Human
agccgagaucacgccac

SEQ ID NO: 1206012 - RNA, 21 nt, Human
agccgagauagccaaggccaa

SEQ ID NO: 1206013 - RNA, 21 nt, Human
agcccuuagcagggaaacagc

SEQ ID NO: 1206014 - RNA, 16 nt, Human
agcccuuagcagggaa

SEQ ID NO: 1206015 - RNA, 18 nt, Human
ugcagacucuacagaggc

SEQ ID NO: 1206016 - RNA, 17 nt, Human
ugcagacucuacagagg

SEQ ID NO: 1206017 - RNA, 16 nt, Human
ugcagacucuacagag

SEQ ID NO: 1206018 - RNA, 22 nt, Human
ugcagacaggcaagcaccuccu

SEQ ID NO: 1206019 - RNA, 20 nt, Human
ugcacacauuuuuuaaaugc

SEQ ID NO: 1206020 - RNA, 21 nt, Human
agcccugguggcagugggagc

SEQ ID NO: 1206021 - RNA, 19 nt, Human
ugcacuccccugcugggug

SEQ ID NO: 1206022 - RNA, 17 nt, Human
ugcacuccccugcuggg

SEQ ID NO: 1206023 - RNA, 16 nt, Human
ugcacuccccugcugg

SEQ ID NO: 1206024 - RNA, 15 nt, Human
ugcacacauuuuuua

SEQ ID NO: 1206025 - RNA, 13 nt, Human
ugcacacauuuuu

SEQ ID NO: 1206026 - RNA, 12 nt, Human
ugcacacauuuu

SEQ ID NO: 1206027 - RNA, 23 nt, Human
ugcagccucaaccuccugggcua

SEQ ID NO: 1206028 - RNA, 22 nt, Human
ugcagccucaaccuccugggcu

SEQ ID NO: 1206029 - RNA, 21 nt, Human
ugcagccucaaccuccugggc

SEQ ID NO: 1206030 - RNA, 23 nt, Human
agccucugaaaaccaauguucuc

SEQ ID NO: 1206031 - RNA, 18 nt, Human
agccucacaguccuuacc

SEQ ID NO: 1206032 - RNA, 17 nt, Human
agccucacaguccuuac

SEQ ID NO: 1206033 - RNA, 20 nt, Human
agccucaaccuccugggcua

SEQ ID NO: 1206034 - RNA, 18 nt, Human
agccgagaucacgccacu

SEQ ID NO: 1206035 - RNA, 22 nt, Human
agccccauucugccugcccagg

SEQ ID NO: 1206036 - RNA, 21 nt, Human
agccccauucugccugcccag

SEQ ID NO: 1206037 - RNA, 18 nt, Human
agccccaaaacucuccuc

SEQ ID NO: 1206038 - RNA, 17 nt, Human
agccccaaaacucuccu

SEQ ID NO: 1206039 - RNA, 16 nt, Human
agccccaaaacucucc

SEQ ID NO: 1206040 - RNA, 21 nt, Human
ugcaaaccaucauugaaaucu

SEQ ID NO: 1206041 - RNA, 23 nt, Human
agccccauucugccugcccaggc

SEQ ID NO: 1206042 - RNA, 22 nt, Human
ugcacacaccagagcccaccuu

SEQ ID NO: 1206043 - RNA, 21 nt, Human
ugcacacaccagagcccaccu

SEQ ID NO: 1206044 - RNA, 18 nt, Human
ugcacacaccagagccca

SEQ ID NO: 1206045 - RNA, 16 nt, Human
agcccugguggcagug

SEQ ID NO: 1206046 - RNA, 15 nt, Human
agcccugguggcagu

SEQ ID NO: 1206047 - RNA, 14 nt, Human
agcccugguggcag

SEQ ID NO: 1206048 - RNA, 13 nt, Human
agcccgggcucug

SEQ ID NO: 1206049 - RNA, 22 nt, Human
agcccacuucugccauauucug

SEQ ID NO: 1206050 - RNA, 15 nt, Human
agcccacuucugcca

SEQ ID NO: 1206051 - RNA, 14 nt, Human
agcccacuucugcc

SEQ ID NO: 1206052 - RNA, 13 nt, Human
agcccacuucugc

SEQ ID NO: 1206053 - RNA, 22 nt, Human
agccaguaaaugggggugcauu

SEQ ID NO: 1206054 - RNA, 21 nt, Human
agccaguaaaugggggugcau

SEQ ID NO: 1206055 - RNA, 13 nt, Human
agccaguaaaugg

SEQ ID NO: 1206056 - RNA, 17 nt, Human
ugauuuggggauauuuu

SEQ ID NO: 1206057 - RNA, 22 nt, Human
ugauuuccguuaaaauaccagc

SEQ ID NO: 1206058 - RNA, 23 nt, Human
ugauucccaagcucugcuccucu

SEQ ID NO: 1206059 - RNA, 22 nt, Human
ugauucccaagcucugcuccuc

SEQ ID NO: 1206060 - RNA, 13 nt, Human
ugauucuccugcc

SEQ ID NO: 1206061 - RNA, 21 nt, Human
ugauucauaaugacuuaagca

SEQ ID NO: 1206062 - RNA, 16 nt, Human
ugauucauaaugacuu

SEQ ID NO: 1206063 - RNA, 18 nt, Human
agcccaggaaaggcucca

SEQ ID NO: 1206064 - RNA, 14 nt, Human
agcccaggaaaggc

SEQ ID NO: 1206065 - RNA, 19 nt, Human
ugauggggcccugccuccu

SEQ ID NO: 1206066 - RNA, 16 nt, Human
ugauggggcccugccu

SEQ ID NO: 1206067 - RNA, 15 nt, Human
ugauggggcccugcc

SEQ ID NO: 1206068 - RNA, 21 nt, Human
ugaugggcaacccccagccug

SEQ ID NO: 1206069 - RNA, 16 nt, Human
ugaugagaggaaauca

SEQ ID NO: 1206070 - RNA, 15 nt, Human
ugaugagaggaaauc

SEQ ID NO: 1206071 - RNA, 14 nt, Human
ugaugagaggaaau

SEQ ID NO: 1206072 - RNA, 13 nt, Human
ugaugagaggaaa

SEQ ID NO: 1206073 - RNA, 22 nt, Human
ugauccucccaccucagccucc

SEQ ID NO: 1206074 - RNA, 21 nt, Human
ugauccucccaccucagccuc

SEQ ID NO: 1206075 - RNA, 16 nt, Human
ugauccucccaccuca

SEQ ID NO: 1206076 - RNA, 15 nt, Human
ugauccucccaccuc

SEQ ID NO: 1206077 - RNA, 16 nt, Human
ugauccuaguuccacc

SEQ ID NO: 1206078 - RNA, 11 nt, Human
agccagaggag

SEQ ID NO: 1206079 - RNA, 10 nt, Human
agccagagga

SEQ ID NO: 1206080 - RNA, 20 nt, Human
agccacugcaccgggccaca

SEQ ID NO: 1206081 - RNA, 19 nt, Human
agccacugcaccgggccac

SEQ ID NO: 1206082 - RNA, 18 nt, Human
agccacugcaccgggcca

SEQ ID NO: 1206083 - RNA, 20 nt, Human
ugauuaaccacuucagcuga

SEQ ID NO: 1206084 - RNA, 15 nt, Human
ugauuaauuaaaaca

SEQ ID NO: 1206085 - RNA, 19 nt, Human
ugauuaaccacuucagcug

SEQ ID NO: 1206086 - RNA, 20 nt, Human
ugauuaaauucuugcaaagu

SEQ ID NO: 1206087 - RNA, 19 nt, Human
ugauuaaauucuugcaaag

SEQ ID NO: 1206088 - RNA, 15 nt, Human
ugauggugcaaugac

SEQ ID NO: 1206089 - RNA, 13 nt, Human
ugauggugcaaug

SEQ ID NO: 1206090 - RNA, 11 nt, Human
uggcugcugaa

SEQ ID NO: 1206091 - RNA, 17 nt, Human
uggcuuaaaacaacacu

SEQ ID NO: 1206092 - RNA, 15 nt, Human
uggcuguuggcuggg

SEQ ID NO: 1206093 - RNA, 13 nt, Human
uggcuguuggcug

SEQ ID NO: 1206094 - RNA, 14 nt, Human
uggcugugucuccc

SEQ ID NO: 1206095 - RNA, 23 nt, Human
uggcuucacggaagagccuugcg

SEQ ID NO: 1206096 - RNA, 16 nt, Human
ugggaaaggggaaguu

SEQ ID NO: 1206097 - RNA, 12 nt, Human
uggcugcaaagg

SEQ ID NO: 1206098 - RNA, 21 nt, Human
uggcucuuccaggcugggaga

SEQ ID NO: 1206099 - RNA, 20 nt, Human
uggcucuuccaggcugggag

SEQ ID NO: 1206100 - RNA, 18 nt, Human
uggcucaaguccucuuuu

SEQ ID NO: 1206101 - RNA, 20 nt, Human
uggcugccaaugggagcuca

SEQ ID NO: 1206102 - RNA, 18 nt, Human
uggcugccaaugggagcu

SEQ ID NO: 1206103 - RNA, 15 nt, Human
uggcugcagggaguc

SEQ ID NO: 1206104 - RNA, 14 nt, Human
uggcugcagggagu

SEQ ID NO: 1206105 - RNA, 13 nt, Human
uggcugcagggag

SEQ ID NO: 1206106 - RNA, 22 nt, Human
uggcuauuagagaucaaccccu

SEQ ID NO: 1206107 - RNA, 19 nt, Human
uggcuaugcauuugaaaau

SEQ ID NO: 1206108 - RNA, 17 nt, Human
uggcuaugcauuugaaa

SEQ ID NO: 1206109 - RNA, 15 nt, Human
uggcuaugcauuuga

SEQ ID NO: 1206110 - RNA, 14 nt, Human
uggcuaugcauuug

SEQ ID NO: 1206111 - RNA, 20 nt, Human
aggcuggcgugcaguggugc

SEQ ID NO: 1206112 - RNA, 18 nt, Human
aggcuggcgugcaguggu

SEQ ID NO: 1206113 - RNA, 16 nt, Human
aggcugggagagccuu

SEQ ID NO: 1206114 - RNA, 22 nt, Human
uggcuagagguucaaagauauu

SEQ ID NO: 1206115 - RNA, 14 nt, Human
aggcugggagagcc

SEQ ID NO: 1206116 - RNA, 16 nt, Human
aggcucugcccuuggu

SEQ ID NO: 1206117 - RNA, 17 nt, Human
aggcuggcgugcagugg

SEQ ID NO: 1206118 - RNA, 13 nt, Human
aggcuggcgugca

SEQ ID NO: 1206119 - RNA, 15 nt, Human
aggcucugcccuugg

SEQ ID NO: 1206120 - RNA, 14 nt, Human
aggcucugcccuug

SEQ ID NO: 1206121 - RNA, 13 nt, Human
aggcucugcccuu

SEQ ID NO: 1206122 - RNA, 12 nt, Human
aggcucugcccu

SEQ ID NO: 1206123 - RNA, 11 nt, Human
aggcucugccc

SEQ ID NO: 1206124 - RNA, 21 nt, Human
aggcucucaggccagcugcuu

SEQ ID NO: 1206125 - RNA, 20 nt, Human
aggcucucaggccagcugcu

SEQ ID NO: 1206126 - RNA, 19 nt, Human
aggcucucaggccagcugc

SEQ ID NO: 1206127 - RNA, 18 nt, Human
aggcucucaggccagcug

SEQ ID NO: 1206128 - RNA, 16 nt, Human
aggcucucaggccagc

SEQ ID NO: 1206129 - RNA, 15 nt, Human
aggcucucaggccag

SEQ ID NO: 1206130 - RNA, 14 nt, Human
aggcucucaggcca

SEQ ID NO: 1206131 - RNA, 12 nt, Human
aggcucucaggc

SEQ ID NO: 1206132 - RNA, 11 nt, Human
aggcucucagg

SEQ ID NO: 1206133 - RNA, 21 nt, Human
aggcucgagcaugccuggaug

SEQ ID NO: 1206134 - RNA, 19 nt, Human
aggcucgagcaugccugga

SEQ ID NO: 1206135 - RNA, 18 nt, Human
aggcucgagcaugccugg

SEQ ID NO: 1206136 - RNA, 17 nt, Human
aggcucgagcaugccug

SEQ ID NO: 1206137 - RNA, 15 nt, Human
aggcucgagcaugcc

SEQ ID NO: 1206138 - RNA, 12 nt, Human
aggcucgagcau

SEQ ID NO: 1206139 - RNA, 19 nt, Human
aggcuccuuuagcgcccag

SEQ ID NO: 1206140 - RNA, 16 nt, Human
aggccaaacucaccug

SEQ ID NO: 1206141 - RNA, 18 nt, Human
aggcauuuguuugaacug

SEQ ID NO: 1206142 - RNA, 23 nt, Human
aggccaaaggaagcacaugccuc

SEQ ID NO: 1206143 - RNA, 15 nt, Human
aggccaaaggaagca

SEQ ID NO: 1206144 - RNA, 14 nt, Human
aggccaaaggaagc

SEQ ID NO: 1206145 - RNA, 20 nt, Human
aggccaaacucaccugcccc

SEQ ID NO: 1206146 - RNA, 20 nt, Human
uggaugccugguggcagcug

SEQ ID NO: 1206147 - RNA, 19 nt, Human
uggaugccugguggcagcu

SEQ ID NO: 1206148 - RNA, 18 nt, Human
uggaugccugguggcagc

SEQ ID NO: 1206149 - RNA, 20 nt, Human
uggaguucaucuugaauugu

SEQ ID NO: 1206150 - RNA, 17 nt, Human
uggaguucaucuugaau

SEQ ID NO: 1206151 - RNA, 16 nt, Human
uggaguucaucuugaa

SEQ ID NO: 1206152 - RNA, 16 nt, Human
aggccacaagacccuu

SEQ ID NO: 1206153 - RNA, 15 nt, Human
aggccacaagacccu

SEQ ID NO: 1206154 - RNA, 22 nt, Human
uggcagaguugaagacagagcu

SEQ ID NO: 1206155 - RNA, 21 nt, Human
uggcagaguugaagacagagc

SEQ ID NO: 1206156 - RNA, 16 nt, Human
uggcacccggccccug

SEQ ID NO: 1206157 - RNA, 15 nt, Human
uggcacccggccccu

SEQ ID NO: 1206158 - RNA, 21 nt, Human
uggcacaucagcacgauuucu

SEQ ID NO: 1206159 - RNA, 20 nt, Human
uggcacaucagcacgauuuc

SEQ ID NO: 1206160 - RNA, 22 nt, Human
uggauuaaacuuaaucuaaaug

SEQ ID NO: 1206161 - RNA, 12 nt, Human
uggauguucuga

SEQ ID NO: 1206162 - RNA, 12 nt, Human
aggccagagaca

SEQ ID NO: 1206163 - RNA, 13 nt, Human
uggcagccuuggc

SEQ ID NO: 1206164 - RNA, 12 nt, Human
uggcagccccug

SEQ ID NO: 1206165 - RNA, 20 nt, Human
aggccacaagacccuugugg

SEQ ID NO: 1206166 - RNA, 21 nt, Human
uggccccugcccggcugcgga

SEQ ID NO: 1206167 - RNA, 23 nt, Human
aggccugggggcugggcagagga

SEQ ID NO: 1206168 - RNA, 12 nt, Human
uggccuggcccc

SEQ ID NO: 1206169 - RNA, 23 nt, Human
aggccuggccagaugcaccagcc

SEQ ID NO: 1206170 - RNA, 22 nt, Human
aggccuggccagaugcaccagc

SEQ ID NO: 1206171 - RNA, 21 nt, Human
aggccuggccagaugcaccag

SEQ ID NO: 1206172 - RNA, 17 nt, Human
aggccuggccagaugca

SEQ ID NO: 1206173 - RNA, 16 nt, Human
aggccuggccagaugc

SEQ ID NO: 1206174 - RNA, 18 nt, Human
uggccucugcacuccccu

SEQ ID NO: 1206175 - RNA, 23 nt, Human
uggccgggcgcgguggcucacgc

SEQ ID NO: 1206176 - RNA, 17 nt, Human
uggccucugcacucccc

SEQ ID NO: 1206177 - RNA, 15 nt, Human
uggccucugcacucc

SEQ ID NO: 1206178 - RNA, 14 nt, Human
uggccucugcacuc

SEQ ID NO: 1206179 - RNA, 15 nt, Human
aggcccucugcccac

SEQ ID NO: 1206180 - RNA, 14 nt, Human
aggcccucugccca

SEQ ID NO: 1206181 - RNA, 13 nt, Human
aggcccucugccc

SEQ ID NO: 1206182 - RNA, 17 nt, Human
uggccaggcuggucuca

SEQ ID NO: 1206183 - RNA, 22 nt, Human
uggcaugggaaugaaugucagu

SEQ ID NO: 1206184 - RNA, 15 nt, Human
uggcaugggaaugaa

SEQ ID NO: 1206185 - RNA, 12 nt, Human
uggcaugggaau

SEQ ID NO: 1206186 - RNA, 21 nt, Human
uggacacagcucuucuccagg

SEQ ID NO: 1206187 - RNA, 18 nt, Human
uggacacagcucuucucc

SEQ ID NO: 1206188 - RNA, 16 nt, Human
uggacacagcucuucu

SEQ ID NO: 1206189 - RNA, 15 nt, Human
uggacacagcucuuc

SEQ ID NO: 1206190 - RNA, 15 nt, Human
uggacccugaggccc

SEQ ID NO: 1206191 - RNA, 14 nt, Human
uggacccugaggcc

SEQ ID NO: 1206192 - RNA, 13 nt, Human
uggacccugaggc

SEQ ID NO: 1206193 - RNA, 12 nt, Human
uggacccugagg

SEQ ID NO: 1206194 - RNA, 19 nt, Human
aggcaacugcauuggcuuu

SEQ ID NO: 1206195 - RNA, 17 nt, Human
aggcaacucaucuuagg

SEQ ID NO: 1206196 - RNA, 19 nt, Human
aggaugcccaaagaugcag

SEQ ID NO: 1206197 - RNA, 14 nt, Human
aggaugcccaaaga

SEQ ID NO: 1206198 - RNA, 20 nt, Human
aggaugaucuaggaagacuu

SEQ ID NO: 1206199 - RNA, 19 nt, Human
aggauuuugauccaagcug

SEQ ID NO: 1206200 - RNA, 23 nt, Human
uggaaaugggcagagcagagacc

SEQ ID NO: 1206201 - RNA, 20 nt, Human
uggaaauauuaagaaagacu

SEQ ID NO: 1206202 - RNA, 17 nt, Human
aggaugaucuaggaaga

SEQ ID NO: 1206203 - RNA, 16 nt, Human
aggaugaucuaggaag

SEQ ID NO: 1206204 - RNA, 22 nt, Human
aggaucucuugagccugggagg

SEQ ID NO: 1206205 - RNA, 21 nt, Human
aggaucucuugagccugggag

SEQ ID NO: 1206206 - RNA, 18 nt, Human
aggauccugagccagauu

SEQ ID NO: 1206207 - RNA, 17 nt, Human
aggauccugagccagau

SEQ ID NO: 1206208 - RNA, 16 nt, Human
aggauccugagccaga

SEQ ID NO: 1206209 - RNA, 15 nt, Human
aggauccugagccag

SEQ ID NO: 1206210 - RNA, 21 nt, Human
aggauacaaaagcaugugaga

SEQ ID NO: 1206211 - RNA, 23 nt, Human
aggacauugcggacagccacggc

SEQ ID NO: 1206212 - RNA, 19 nt, Human
aggacauugcggacagcca

SEQ ID NO: 1206213 - RNA, 18 nt, Human
aggacauugcggacagcc

SEQ ID NO: 1206214 - RNA, 17 nt, Human
aggacauugcggacagc

SEQ ID NO: 1206215 - RNA, 15 nt, Human
aggacauugcggaca

SEQ ID NO: 1206216 - RNA, 22 nt, Human
aggagccccgaggccuucucug

SEQ ID NO: 1206217 - RNA, 17 nt, Human
aggagauuggaaggaac

SEQ ID NO: 1206218 - RNA, 16 nt, Human
ugcuugggcuucaucc

SEQ ID NO: 1206219 - RNA, 12 nt, Human
ugcuugggcuuc

SEQ ID NO: 1206220 - RNA, 21 nt, Human
ugcuuggaggaaggaaaccca

SEQ ID NO: 1206221 - RNA, 15 nt, Human
uggaaauauuaagaa

SEQ ID NO: 1206222 - RNA, 19 nt, Human
ugcuugggcuucauccucc

SEQ ID NO: 1206223 - RNA, 17 nt, Human
ugcugucccuuacguga

SEQ ID NO: 1206224 - RNA, 15 nt, Human
ugcugcccugugagu

SEQ ID NO: 1206225 - RNA, 14 nt, Human
ugcugcccugugag

SEQ ID NO: 1206226 - RNA, 13 nt, Human
ugcugcccuguga

SEQ ID NO: 1206227 - RNA, 18 nt, Human
ugcuggcuguuggcuggg

SEQ ID NO: 1206228 - RNA, 16 nt, Human
ugcuggcugguuagag

SEQ ID NO: 1206229 - RNA, 23 nt, Human
aggacacuaaccacgcuggaccu

SEQ ID NO: 1206230 - RNA, 22 nt, Human
aggacagggaggugaccccagg

SEQ ID NO: 1206231 - RNA, 14 nt, Human
ugcuucagccuccc

SEQ ID NO: 1206232 - RNA, 13 nt, Human
ugcuucagccucc

SEQ ID NO: 1206233 - RNA, 20 nt, Human
ugcuucaaggauccugagcc

SEQ ID NO: 1206234 - RNA, 19 nt, Human
ugcuucaaggauccugagc

SEQ ID NO: 1206235 - RNA, 18 nt, Human
ugcuucaaggauccugag

SEQ ID NO: 1206236 - RNA, 16 nt, Human
ugcuucaaggauccug

SEQ ID NO: 1206237 - RNA, 13 nt, Human
ugcuuauacacuu

SEQ ID NO: 1206238 - RNA, 19 nt, Human
agcugggacuacaggcacc

SEQ ID NO: 1206239 - RNA, 18 nt, Human
agcugggacuacaggcac

SEQ ID NO: 1206240 - RNA, 16 nt, Human
agcugggacuacaggc

SEQ ID NO: 1206241 - RNA, 20 nt, Human
ugcuccagcuguucagcugg

SEQ ID NO: 1206242 - RNA, 19 nt, Human
ugcuccagcuguucagcug

SEQ ID NO: 1206243 - RNA, 16 nt, Human
ugcuccagcuguucag

SEQ ID NO: 1206244 - RNA, 22 nt, Human
ugcucugcugacagacacaggc

SEQ ID NO: 1206245 - RNA, 21 nt, Human
ugcucugcugacagacacagg

SEQ ID NO: 1206246 - RNA, 15 nt, Human
ugcugagucugaagg

SEQ ID NO: 1206247 - RNA, 15 nt, Human
aggaagccagcaggc

SEQ ID NO: 1206248 - RNA, 14 nt, Human
aggaagccagcagg

SEQ ID NO: 1206249 - RNA, 24 nt, Human
aggaagcacaugccucucucaggc

SEQ ID NO: 1206250 - RNA, 23 nt, Human
aggaagcacaugccucucucagg

SEQ ID NO: 1206251 - RNA, 14 nt, Human
aggaagacuuugga

SEQ ID NO: 1206252 - RNA, 13 nt, Human
aggaagacuuugg

SEQ ID NO: 1206253 - RNA, 19 nt, Human
aggaagacuucaucccucu

SEQ ID NO: 1206254 - RNA, 13 nt, Human
aggaagacuucau

SEQ ID NO: 1206255 - RNA, 23 nt, Human
ugcugagucugaaggcuggguuc

SEQ ID NO: 1206256 - RNA, 22 nt, Human
ugcugagucugaaggcuggguu

SEQ ID NO: 1206257 - RNA, 21 nt, Human
ugcugagucugaaggcugggu

SEQ ID NO: 1206258 - RNA, 18 nt, Human
ugcugagucugaaggcug

SEQ ID NO: 1206259 - RNA, 17 nt, Human
ugcugagucugaaggcu

SEQ ID NO: 1206260 - RNA, 16 nt, Human
ugcugagucugaaggc

SEQ ID NO: 1206261 - RNA, 15 nt, Human
aggaaggagaggaga

SEQ ID NO: 1206262 - RNA, 19 nt, Human
aggaaggaaacccagcucu

SEQ ID NO: 1206263 - RNA, 18 nt, Human
aggaaggaaacccagcuc

SEQ ID NO: 1206264 - RNA, 18 nt, Human
aggaagccagcaggcucu

SEQ ID NO: 1206265 - RNA, 17 nt, Human
aggaagccagcaggcuc

SEQ ID NO: 1206266 - RNA, 10 nt, Human
ugagaggaaa

SEQ ID NO: 1206267 - RNA, 14 nt, Human
ugagagcugggugu

SEQ ID NO: 1206268 - RNA, 14 nt, Human
ugagaggaaaucac

SEQ ID NO: 1206269 - RNA, 13 nt, Human
ugagaggaaauca

SEQ ID NO: 1206270 - RNA, 12 nt, Human
ugagaggaaauc

SEQ ID NO: 1206271 - RNA, 11 nt, Human
ugagaggaaau

SEQ ID NO: 1206272 - RNA, 23 nt, Human
ugagaggacuuuucuuuguggcu

SEQ ID NO: 1206273 - RNA, 17 nt, Human
ugagaggaaaucaccga

SEQ ID NO: 1206274 - RNA, 20 nt, Human
ugagacucugucucaaaaaa

SEQ ID NO: 1206275 - RNA, 22 nt, Human
ugagacagcccgggcucugccu

SEQ ID NO: 1206276 - RNA, 20 nt, Human
ugagacagcccgggcucugc

SEQ ID NO: 1206277 - RNA, 19 nt, Human
ugagacagcccgggcucug

SEQ ID NO: 1206278 - RNA, 18 nt, Human
ugagacagcccgggcucu

SEQ ID NO: 1206279 - RNA, 17 nt, Human
ugagacagcccgggcuc

SEQ ID NO: 1206280 - RNA, 12 nt, Human
ugagaauuaccc

SEQ ID NO: 1206281 - RNA, 13 nt, Human
ugagacagcccgg

SEQ ID NO: 1206282 - RNA, 21 nt, Human
ugagacagaguuuucacucuu

SEQ ID NO: 1206283 - RNA, 11 nt, Human
ugagacagagu

SEQ ID NO: 1206284 - RNA, 22 nt, Human
agcacaugccucucucaggcca

SEQ ID NO: 1206285 - RNA, 21 nt, Human
agcacaugccucucucaggcc

SEQ ID NO: 1206286 - RNA, 20 nt, Human
agcacaugccucucucaggc

SEQ ID NO: 1206287 - RNA, 19 nt, Human
agcacaugccucucucagg

SEQ ID NO: 1206288 - RNA, 18 nt, Human
agcacaugccucucucag

SEQ ID NO: 1206289 - RNA, 21 nt, Human
agcacagcuucauuuccugug

SEQ ID NO: 1206290 - RNA, 18 nt, Human
agcaagugagagcugggu

SEQ ID NO: 1206291 - RNA, 17 nt, Human
agcaagugagagcuggg

SEQ ID NO: 1206292 - RNA, 16 nt, Human
agcaccaucucuccuc

SEQ ID NO: 1206293 - RNA, 22 nt, Human
agcaccaaaagcuuaccaaggg

SEQ ID NO: 1206294 - RNA, 23 nt, Human
agcacaugccucucucaggccaa

SEQ ID NO: 1206295 - RNA, 16 nt, Human
agcaccuccugccucg

SEQ ID NO: 1206296 - RNA, 14 nt, Human
agcaccuccugccu

SEQ ID NO: 1206297 - RNA, 13 nt, Human
agcaccuccugcc

SEQ ID NO: 1206298 - RNA, 16 nt, Human
agcaagugagagcugg

SEQ ID NO: 1206299 - RNA, 15 nt, Human
agcaagugagagcug

SEQ ID NO: 1206300 - RNA, 16 nt, Human
agcaagugagacccug

SEQ ID NO: 1206301 - RNA, 19 nt, Human
agcaaggagauuuacaacu

SEQ ID NO: 1206302 - RNA, 17 nt, Human
agcaaggagauuuacaa

SEQ ID NO: 1206303 - RNA, 14 nt, Human
agcaaggagauuua

SEQ ID NO: 1206304 - RNA, 21 nt, Human
ugagccagauuucacucuccu

SEQ ID NO: 1206305 - RNA, 20 nt, Human
ugagccagauuucacucucc

SEQ ID NO: 1206306 - RNA, 19 nt, Human
ugagccagauuucacucuc

SEQ ID NO: 1206307 - RNA, 18 nt, Human
ugagccagauuucacucu

SEQ ID NO: 1206308 - RNA, 18 nt, Human
ugagccacugcaccgggc

SEQ ID NO: 1206309 - RNA, 14 nt, Human
ugagccacugcacc

SEQ ID NO: 1206310 - RNA, 13 nt, Human
ugagccacugcac

SEQ ID NO: 1206311 - RNA, 12 nt, Human
ugagccacugca

SEQ ID NO: 1206312 - RNA, 22 nt, Human
ugacagggcacaccgggcacuc

SEQ ID NO: 1206313 - RNA, 19 nt, Human
ugacaggcaaugcuggcug

SEQ ID NO: 1206314 - RNA, 17 nt, Human
ugacaggcaaugcuggc

SEQ ID NO: 1206315 - RNA, 19 nt, Human
ugacacgaauauugcugau

SEQ ID NO: 1206316 - RNA, 16 nt, Human
ugacacgaauauugcu

SEQ ID NO: 1206317 - RNA, 18 nt, Human
agaucucuaacuucacca

SEQ ID NO: 1206318 - RNA, 20 nt, Human
ugacuuacuguacaugaaaa

SEQ ID NO: 1206319 - RNA, 12 nt, Human
ugacuuacugua

SEQ ID NO: 1206320 - RNA, 16 nt, Human
agauucauauuuacuu

SEQ ID NO: 1206321 - RNA, 13 nt, Human
agauucauauuua

SEQ ID NO: 1206322 - RNA, 19 nt, Human
agauuucacucuccuuggu

SEQ ID NO: 1206323 - RNA, 19 nt, Human
agauucauauuuacuucuu

SEQ ID NO: 1206324 - RNA, 15 nt, Human
ugaccuuuaagagaa

SEQ ID NO: 1206325 - RNA, 13 nt, Human
ugaccuuucaaua

SEQ ID NO: 1206326 - RNA, 12 nt, Human
ugaccuuucaau

SEQ ID NO: 1206327 - RNA, 12 nt, Human
ucuuuccugagg

SEQ ID NO: 1206328 - RNA, 19 nt, Human
ucuuuaaugucacaggcag

SEQ ID NO: 1206329 - RNA, 18 nt, Human
ucuuuaaugucacaggca

SEQ ID NO: 1206330 - RNA, 15 nt, Human
ucuuuaaugucacag

SEQ ID NO: 1206331 - RNA, 22 nt, Human
agacaggcaagcaccuccugcc

SEQ ID NO: 1206332 - RNA, 20 nt, Human
agacaggcaagcaccuccug

SEQ ID NO: 1206333 - RNA, 13 nt, Human
agacucugucuca

SEQ ID NO: 1206334 - RNA, 14 nt, Human
agacuccugcaggc

SEQ ID NO: 1206335 - RNA, 13 nt, Human
agacuccugcagg

SEQ ID NO: 1206336 - RNA, 14 nt, Human
ucuuuguggcuucc

SEQ ID NO: 1206337 - RNA, 20 nt, Human
ucuuuguacagacaacaaac

SEQ ID NO: 1206338 - RNA, 15 nt, Human
ucuuuguacagacaa

SEQ ID NO: 1206339 - RNA, 14 nt, Human
ucuuuguacagaca

SEQ ID NO: 1206340 - RNA, 19 nt, Human
agagacacaagccuucggc

SEQ ID NO: 1206341 - RNA, 16 nt, Human
agagacacaagccuuc

SEQ ID NO: 1206342 - RNA, 19 nt, Human
agacuuuucuuucagccaa

SEQ ID NO: 1206343 - RNA, 15 nt, Human
agacuuuuccaaccc

SEQ ID NO: 1206344 - RNA, 19 nt, Human
agacuuuggaaagaguagg

SEQ ID NO: 1206345 - RNA, 15 nt, Human
agacuuuggaaagag

SEQ ID NO: 1206346 - RNA, 17 nt, Human
agacuuuggaaagacuu

SEQ ID NO: 1206347 - RNA, 14 nt, Human
agacuguacaaagu

SEQ ID NO: 1206348 - RNA, 20 nt, Human
agacugguuccauggccucu

SEQ ID NO: 1206349 - RNA, 16 nt, Human
ugaaaaucgugacaac

SEQ ID NO: 1206350 - RNA, 18 nt, Human
ugaaacuggauuaaacuu

SEQ ID NO: 1206351 - RNA, 17 nt, Human
ugaaacuggauuaaacu

SEQ ID NO: 1206352 - RNA, 20 nt, Human
ugaaaacacauuuuucuuag

SEQ ID NO: 1206353 - RNA, 19 nt, Human
ugaaaacacauuuuucuua

SEQ ID NO: 1206354 - RNA, 17 nt, Human
ugaaaacacauuuuucu

SEQ ID NO: 1206355 - RNA, 15 nt, Human
ugaaaacacauuuuu

SEQ ID NO: 1206356 - RNA, 14 nt, Human
ugaaaacacauuuu

SEQ ID NO: 1206357 - RNA, 13 nt, Human
ugaaaacacauuu

SEQ ID NO: 1206358 - RNA, 12 nt, Human
ugaaaacacauu

SEQ ID NO: 1206359 - RNA, 23 nt, Human
agagaccaucccugaaggccccg

SEQ ID NO: 1206360 - RNA, 22 nt, Human
agagaccaucccugaaggcccc

SEQ ID NO: 1206361 - RNA, 21 nt, Human
agagaccaucccugaaggccc

SEQ ID NO: 1206362 - RNA, 19 nt, Human
agagaccaucccugaaggc

SEQ ID NO: 1206363 - RNA, 22 nt, Human
ugaaagacuguacaaaguagaa

SEQ ID NO: 1206364 - RNA, 19 nt, Human
ugaaagacuguacaaagua

SEQ ID NO: 1206365 - RNA, 18 nt, Human
ugaaagacuguacaaagu

SEQ ID NO: 1206366 - RNA, 16 nt, Human
ugaaagacuguacaaa

SEQ ID NO: 1206367 - RNA, 22 nt, Human
ugaaagaaaauaccaaggaaca

SEQ ID NO: 1206368 - RNA, 15 nt, Human
agagacuccugcagg

SEQ ID NO: 1206369 - RNA, 14 nt, Human
agagacuccugcag

SEQ ID NO: 1206370 - RNA, 13 nt, Human
agagacuccugca

SEQ ID NO: 1206371 - RNA, 12 nt, Human
agagacuccugc

SEQ ID NO: 1206372 - RNA, 19 nt, Human
ugaaauuuuuauuaaauua

SEQ ID NO: 1206373 - RNA, 20 nt, Human
ugaaauuuuuauuaaauuau

SEQ ID NO: 1206374 - RNA, 16 nt, Human
ugaaauaacauggccu

SEQ ID NO: 1206375 - RNA, 17 nt, Human
ugaaauaacauggccuu

SEQ ID NO: 1206376 - RNA, 16 nt, Human
agagauugugguuuca

SEQ ID NO: 1206377 - RNA, 22 nt, Human
ugaaccgaugagaaauaaaguu

SEQ ID NO: 1206378 - RNA, 22 nt, Human
ugaaccaccacacccagcccac

SEQ ID NO: 1206379 - RNA, 13 nt, Human
ugaagacagagcu

SEQ ID NO: 1206380 - RNA, 23 nt, Human
ugaagacaaugacuuacuguaca

SEQ ID NO: 1206381 - RNA, 22 nt, Human
ugaagacaaugacuuacuguac

SEQ ID NO: 1206382 - RNA, 11 nt, Human
ugaacuccugg

SEQ ID NO: 1206383 - RNA, 22 nt, Human
agaggcugccucucccaucacu

SEQ ID NO: 1206384 - RNA, 20 nt, Human
agagggagugacagaggcag

SEQ ID NO: 1206385 - RNA, 15 nt, Human
agagggagugacaga

SEQ ID NO: 1206386 - RNA, 20 nt, Human
agagguucaaagauauuuug

SEQ ID NO: 1206387 - RNA, 19 nt, Human
agagguucaaagauauuuu

SEQ ID NO: 1206388 - RNA, 16 nt, Human
agagguucaaagauau

SEQ ID NO: 1206389 - RNA, 24 nt, Human
agaggcagccccauucugccugcc

SEQ ID NO: 1206390 - RNA, 23 nt, Human
agaggcagccccauucugccugc

SEQ ID NO: 1206391 - RNA, 22 nt, Human
agaggcagccccauucugccug

SEQ ID NO: 1206392 - RNA, 13 nt, Human
ugaauaauacagu

SEQ ID NO: 1206393 - RNA, 12 nt, Human
ugaauaauacag

SEQ ID NO: 1206394 - RNA, 13 nt, Human
ugaagucacacag

SEQ ID NO: 1206395 - RNA, 22 nt, Human
ugaaguaauaugcacacauuuu

SEQ ID NO: 1206396 - RNA, 21 nt, Human
ugaaguaauaugcacacauuu

SEQ ID NO: 1206397 - RNA, 20 nt, Human
ugaaguaauaugcacacauu

SEQ ID NO: 1206398 - RNA, 16 nt, Human
ugaaguaauaugcaca

SEQ ID NO: 1206399 - RNA, 15 nt, Human
ugaaguaauaugcac

SEQ ID NO: 1206400 - RNA, 23 nt, Human
agaaguuucugccgcagcccugc

SEQ ID NO: 1206401 - RNA, 22 nt, Human
agaaguuucugccgcagcccug

SEQ ID NO: 1206402 - RNA, 21 nt, Human
agaaguuucugccgcagcccu

SEQ ID NO: 1206403 - RNA, 18 nt, Human
ucuguuggccagugugac

SEQ ID NO: 1206404 - RNA, 13 nt, Human
ucuguuuagauaa

SEQ ID NO: 1206405 - RNA, 22 nt, Human
ucuguucuuuccaaaguacacu

SEQ ID NO: 1206406 - RNA, 13 nt, Human
ucuguucuuucca

SEQ ID NO: 1206407 - RNA, 17 nt, Human
ucuguuggccaguguga

SEQ ID NO: 1206408 - RNA, 12 nt, Human
ucuguuggccag

SEQ ID NO: 1206409 - RNA, 16 nt, Human
agacacaggcccggcu

SEQ ID NO: 1206410 - RNA, 13 nt, Human
agacacaggcccg

SEQ ID NO: 1206411 - RNA, 12 nt, Human
agacacaggccc

SEQ ID NO: 1206412 - RNA, 13 nt, Human
agacagagcuaca

SEQ ID NO: 1206413 - RNA, 19 nt, Human
agacaccuugacagggcac

SEQ ID NO: 1206414 - RNA, 18 nt, Human
agacaccuugacagggca

SEQ ID NO: 1206415 - RNA, 17 nt, Human
agacaccuugacagggc

SEQ ID NO: 1206416 - RNA, 20 nt, Human
agacacauguccaagaagcc

SEQ ID NO: 1206417 - RNA, 16 nt, Human
agacacauguccaaga

SEQ ID NO: 1206418 - RNA, 16 nt, Human
agaaauguacagcaag

SEQ ID NO: 1206419 - RNA, 18 nt, Human
agaagauuuugaaauuuu

SEQ ID NO: 1206420 - RNA, 17 nt, Human
ucugcccacucccugca

SEQ ID NO: 1206421 - RNA, 23 nt, Human
agaagcccaggaaaggcuccagg

SEQ ID NO: 1206422 - RNA, 22 nt, Human
agaagcccaggaaaggcuccag

SEQ ID NO: 1206423 - RNA, 21 nt, Human
agaagcccaggaaaggcucca

SEQ ID NO: 1206424 - RNA, 20 nt, Human
agaagcccaggaaaggcucc

SEQ ID NO: 1206425 - RNA, 18 nt, Human
agaagcccaggaaaggcu

SEQ ID NO: 1206426 - RNA, 16 nt, Human
agaagcccaggaaagg

SEQ ID NO: 1206427 - RNA, 12 nt, Human
agaagcccagga

SEQ ID NO: 1206428 - RNA, 15 nt, Human
ucugcuucagccucc

SEQ ID NO: 1206429 - RNA, 14 nt, Human
ucugcuucagccuc

SEQ ID NO: 1206430 - RNA, 20 nt, Human
ucugcucacauaucugucau

SEQ ID NO: 1206431 - RNA, 19 nt, Human
ucugcucacauaucuguca

SEQ ID NO: 1206432 - RNA, 22 nt, Human
ucugccugcccaggccccugcc

SEQ ID NO: 1206433 - RNA, 21 nt, Human
ucugccugcccaggccccugc

SEQ ID NO: 1206434 - RNA, 22 nt, Human
ucugccgcagcccugcagaggg

SEQ ID NO: 1206435 - RNA, 23 nt, Human
ucugccgcagcccugcagagggc

SEQ ID NO: 1206436 - RNA, 19 nt, Human
ucugcccuccaagaccuuc

SEQ ID NO: 1206437 - RNA, 23 nt, Human
ucugcccacucccugcaaccuga

SEQ ID NO: 1206438 - RNA, 21 nt, Human
ucugcccacucccugcaaccu

SEQ ID NO: 1206439 - RNA, 18 nt, Human
ucugcccacucccugcaa

SEQ ID NO: 1206440 - RNA, 15 nt, Human
ucugccgcagcccug

SEQ ID NO: 1206441 - RNA, 14 nt, Human
ucugccgcagcccu

SEQ ID NO: 1206442 - RNA, 15 nt, Human
agaaauguacagcaa

SEQ ID NO: 1206443 - RNA, 14 nt, Human
agaaauguacagca

SEQ ID NO: 1206444 - RNA, 17 nt, Human
ucugcagcaauaaagca

SEQ ID NO: 1206445 - RNA, 18 nt, Human
ucugcagcaauaaagcag

SEQ ID NO: 1206446 - RNA, 15 nt, Human
ucugcacuccccugc

SEQ ID NO: 1206447 - RNA, 14 nt, Human
ucugcacuccccug

SEQ ID NO: 1206448 - RNA, 16 nt, Human
ucugcacuccccugcu

SEQ ID NO: 1206449 - RNA, 17 nt, Human
ucugcacuccccugcug

SEQ ID NO: 1206450 - RNA, 22 nt, Human
ucugagacucgcgacaaugcaa

SEQ ID NO: 1206451 - RNA, 21 nt, Human
ucugagacucgcgacaaugca

SEQ ID NO: 1206452 - RNA, 21 nt, Human
ucugaucauccacugugccau

SEQ ID NO: 1206453 - RNA, 17 nt, Human
ucugaucauccacugug

SEQ ID NO: 1206454 - RNA, 15 nt, Human
ucugacacacagcuc

SEQ ID NO: 1206455 - RNA, 14 nt, Human
ucugacacacagcu

SEQ ID NO: 1206456 - RNA, 13 nt, Human
ucugacacacagc

SEQ ID NO: 1206457 - RNA, 22 nt, Human
ucugaaggacauugcggacagc

SEQ ID NO: 1206458 - RNA, 21 nt, Human
ucugaaggacauugcggacag

SEQ ID NO: 1206459 - RNA, 15 nt, Human
agaaaugccuuaccc

SEQ ID NO: 1206460 - RNA, 22 nt, Human
ucuaguuguuugauucagacag

SEQ ID NO: 1206461 - RNA, 12 nt, Human
ucuaggaagacu

SEQ ID NO: 1206462 - RNA, 13 nt, Human
ucuagccagagga

SEQ ID NO: 1206463 - RNA, 22 nt, Human
ucuaguuugauuaaauucuugc

SEQ ID NO: 1206464 - RNA, 21 nt, Human
ucuaguuugauuaaauucuug

SEQ ID NO: 1206465 - RNA, 23 nt, Human
ucuaguuguuugauucagacagc

SEQ ID NO: 1206466 - RNA, 18 nt, Human
ucuagcauggcugccaau

SEQ ID NO: 1206467 - RNA, 13 nt, Human
ucuagauacugua

SEQ ID NO: 1206468 - RNA, 16 nt, Human
acuucaucccucuggg

SEQ ID NO: 1206469 - RNA, 19 nt, Human
ucucacuauguugcccagg

SEQ ID NO: 1206470 - RNA, 17 nt, Human
ucucacuauguugccca

SEQ ID NO: 1206471 - RNA, 16 nt, Human
acuuacacuuuaugca

SEQ ID NO: 1206472 - RNA, 22 nt, Human
acuuaaucuaaauggaaccacu

SEQ ID NO: 1206473 - RNA, 19 nt, Human
acuuaaucuaaauggaacc

SEQ ID NO: 1206474 - RNA, 17 nt, Human
acuuaaucuaaauggaa

SEQ ID NO: 1206475 - RNA, 13 nt, Human
acuuaagcacacu

SEQ ID NO: 1206476 - RNA, 12 nt, Human
acuguugcccag

SEQ ID NO: 1206477 - RNA, 15 nt, Human
acuuagguguggggg

SEQ ID NO: 1206478 - RNA, 21 nt, Human
acuuacuguacaugaaaacac

SEQ ID NO: 1206479 - RNA, 17 nt, Human
acuuacacuuuaugcac

SEQ ID NO: 1206480 - RNA, 22 nt, Human
acuuacuguacaugaaaacaca

SEQ ID NO: 1206481 - RNA, 19 nt, Human
acuguucucugcccuccaa

SEQ ID NO: 1206482 - RNA, 18 nt, Human
acuguucucugcccucca

SEQ ID NO: 1206483 - RNA, 17 nt, Human
acuguucucugcccucc

SEQ ID NO: 1206484 - RNA, 16 nt, Human
acuguucucugcccuc

SEQ ID NO: 1206485 - RNA, 21 nt, Human
ucuacccuggcacuauaaugu

SEQ ID NO: 1206486 - RNA, 19 nt, Human
ucuacccuggcacuauaau

SEQ ID NO: 1206487 - RNA, 14 nt, Human
ucuacccaggugcu

SEQ ID NO: 1206488 - RNA, 20 nt, Human
ucuacccagcgagcccuggu

SEQ ID NO: 1206489 - RNA, 18 nt, Human
uccugggagugagcuggu

SEQ ID NO: 1206490 - RNA, 21 nt, Human
ucuacagaggccaugggccuc

SEQ ID NO: 1206491 - RNA, 19 nt, Human
ucuacccagcgagcccugg

SEQ ID NO: 1206492 - RNA, 21 nt, Human
ucuccuuguguuacuaaguuu

SEQ ID NO: 1206493 - RNA, 13 nt, Human
ucuccuuguguua

SEQ ID NO: 1206494 - RNA, 18 nt, Human
ucuccuucaccuuugucc

SEQ ID NO: 1206495 - RNA, 19 nt, Human
agaaaaaauauuuucccua

SEQ ID NO: 1206496 - RNA, 16 nt, Human
ucuccuucaccuuugu

SEQ ID NO: 1206497 - RNA, 15 nt, Human
ucuccuucaccuuug

SEQ ID NO: 1206498 - RNA, 14 nt, Human
ucuccuucaccuuu

SEQ ID NO: 1206499 - RNA, 17 nt, Human
agaaaaaauauuuuccc

SEQ ID NO: 1206500 - RNA, 23 nt, Human
acuuuuguucuugguuuguaaau

SEQ ID NO: 1206501 - RNA, 15 nt, Human
acuuuuguucuuggu

SEQ ID NO: 1206502 - RNA, 13 nt, Human
acuuuuguucuug

SEQ ID NO: 1206503 - RNA, 12 nt, Human
acuuuuguucuu

SEQ ID NO: 1206504 - RNA, 14 nt, Human
acuuuguucuggcu

SEQ ID NO: 1206505 - RNA, 21 nt, Human
acuuuguuaguuucuccaagc

SEQ ID NO: 1206506 - RNA, 20 nt, Human
acuuuguuaguuucuccaag

SEQ ID NO: 1206507 - RNA, 14 nt, Human
acuuugaccucugc

SEQ ID NO: 1206508 - RNA, 13 nt, Human
acuuugaccucug

SEQ ID NO: 1206509 - RNA, 12 nt, Human
acuuugaccucu

SEQ ID NO: 1206510 - RNA, 12 nt, Human
acuuuaccuuuu

SEQ ID NO: 1206511 - RNA, 20 nt, Human
acuuucugaaauaacauggc

SEQ ID NO: 1206512 - RNA, 20 nt, Human
ucuccucugcugcuggcugg

SEQ ID NO: 1206513 - RNA, 18 nt, Human
ucuccucugcugcuggcu

SEQ ID NO: 1206514 - RNA, 17 nt, Human
ucuccucugcugcuggc

SEQ ID NO: 1206515 - RNA, 16 nt, Human
ucuccucugcugcugg

SEQ ID NO: 1206516 - RNA, 15 nt, Human
ucuccuccagaguca

SEQ ID NO: 1206517 - RNA, 23 nt, Human
ucuccgaccagacaccuugacag

SEQ ID NO: 1206518 - RNA, 17 nt, Human
ucuccgaccagacaccu

SEQ ID NO: 1206519 - RNA, 23 nt, Human
ucuccccagcaagugagagcugg

SEQ ID NO: 1206520 - RNA, 12 nt, Human
ucuccacccugc

SEQ ID NO: 1206521 - RNA, 19 nt, Human
ucuccaagcaggacaugga

SEQ ID NO: 1206522 - RNA, 18 nt, Human
ucuccaagcaggacaugg

SEQ ID NO: 1206523 - RNA, 22 nt, Human
acuuguggacacagcucuucuc

SEQ ID NO: 1206524 - RNA, 19 nt, Human
acuuguggacacagcucuu

SEQ ID NO: 1206525 - RNA, 21 nt, Human
acuugucuuuggacccugagg

SEQ ID NO: 1206526 - RNA, 20 nt, Human
acuugucuuuggacccugag

SEQ ID NO: 1206527 - RNA, 23 nt, Human
acuugcagacucuacagaggcca

SEQ ID NO: 1206528 - RNA, 22 nt, Human
acuugcagacucuacagaggcc

SEQ ID NO: 1206529 - RNA, 19 nt, Human
acuugcagacucuacagag

SEQ ID NO: 1206530 - RNA, 23 nt, Human
ucucacuauguugcccaggcagg

SEQ ID NO: 1206531 - RNA, 22 nt, Human
ucucacuauguugcccaggcag

SEQ ID NO: 1206532 - RNA, 21 nt, Human
ucucacuauguugcccaggca

SEQ ID NO: 1206533 - RNA, 20 nt, Human
ucucacuauguugcccaggc

SEQ ID NO: 1206534 - RNA, 13 nt, Human
ucucaggccagcu

SEQ ID NO: 1206535 - RNA, 12 nt, Human
ucucaggccagc

SEQ ID NO: 1206536 - RNA, 12 nt, Human
ucucaggccaaa

SEQ ID NO: 1206537 - RNA, 10 nt, Human
ucucaggcca

SEQ ID NO: 1206538 - RNA, 16 nt, Human
ucuccaagcaggacau

SEQ ID NO: 1206539 - RNA, 13 nt, Human
ucuccaaaauaaa

SEQ ID NO: 1206540 - RNA, 16 nt, Human
ucucauuugucacaca

SEQ ID NO: 1206541 - RNA, 14 nt, Human
ucucauuugucaca

SEQ ID NO: 1206542 - RNA, 21 nt, Human
ucucaggccagcugcuugggc

SEQ ID NO: 1206543 - RNA, 18 nt, Human
ucucaggccagcugcuug

SEQ ID NO: 1206544 - RNA, 17 nt, Human
ucucaggccagcugcuu

SEQ ID NO: 1206545 - RNA, 21 nt, Human
uccugaugcuucuucagagac

SEQ ID NO: 1206546 - RNA, 20 nt, Human
uccugaugcuucuucagaga

SEQ ID NO: 1206547 - RNA, 19 nt, Human
uccugaugcuucuucagag

SEQ ID NO: 1206548 - RNA, 13 nt, Human
acugcacuguuuu

SEQ ID NO: 1206549 - RNA, 20 nt, Human
acugcacuccagccugggug

SEQ ID NO: 1206550 - RNA, 19 nt, Human
acugcacuccagccugggu

SEQ ID NO: 1206551 - RNA, 18 nt, Human
acugcacuccagccuggg

SEQ ID NO: 1206552 - RNA, 17 nt, Human
acugcacuccagccugg

SEQ ID NO: 1206553 - RNA, 14 nt, Human
acugcacuccagcc

SEQ ID NO: 1206554 - RNA, 21 nt, Human
acugcacuauagccuagguga

SEQ ID NO: 1206555 - RNA, 20 nt, Human
acugcacuauagccuaggug

SEQ ID NO: 1206556 - RNA, 16 nt, Human
acugcaccgggccaca

SEQ ID NO: 1206557 - RNA, 14 nt, Human
acugcaccgggcca

SEQ ID NO: 1206558 - RNA, 21 nt, Human
acugauaaagaugagugagca

SEQ ID NO: 1206559 - RNA, 13 nt, Human
acugauaaagaug

SEQ ID NO: 1206560 - RNA, 15 nt, Human
uccuggaaauauuaa

SEQ ID NO: 1206561 - RNA, 12 nt, Human
uccugggaguga

SEQ ID NO: 1206562 - RNA, 17 nt, Human
uccugggagugagcugg

SEQ ID NO: 1206563 - RNA, 14 nt, Human
uccugggagugagc

SEQ ID NO: 1206564 - RNA, 15 nt, Human
uccugcaggcagcca

SEQ ID NO: 1206565 - RNA, 14 nt, Human
uccugcaggcagcc

SEQ ID NO: 1206566 - RNA, 13 nt, Human
uccugcaggcagc

SEQ ID NO: 1206567 - RNA, 12 nt, Human
uccugcaggcag

SEQ ID NO: 1206568 - RNA, 21 nt, Human
acugagacagcccgggcucug

SEQ ID NO: 1206569 - RNA, 18 nt, Human
acugagacagcccgggcu

SEQ ID NO: 1206570 - RNA, 15 nt, Human
acugagacagcccgg

SEQ ID NO: 1206571 - RNA, 23 nt, Human
acugagacagcccgggcucugcc

SEQ ID NO: 1206572 - RNA, 22 nt, Human
acugagacagcccgggcucugc

SEQ ID NO: 1206573 - RNA, 19 nt, Human
acucuuucuauuguuucuu

SEQ ID NO: 1206574 - RNA, 21 nt, Human
uccucuuuggucuacacugug

SEQ ID NO: 1206575 - RNA, 19 nt, Human
uccucuuuggucuacacug

SEQ ID NO: 1206576 - RNA, 15 nt, Human
uccucccucccucuu

SEQ ID NO: 1206577 - RNA, 19 nt, Human
uccucuuuccaucuacccu

SEQ ID NO: 1206578 - RNA, 12 nt, Human
uccucuuuccau

SEQ ID NO: 1206579 - RNA, 11 nt, Human
uccucuuucca

SEQ ID NO: 1206580 - RNA, 14 nt, Human
uccucccucccucu

SEQ ID NO: 1206581 - RNA, 11 nt, Human
uccucccuccc

SEQ ID NO: 1206582 - RNA, 23 nt, Human
uccucuuuggucuacacugugcu

SEQ ID NO: 1206583 - RNA, 22 nt, Human
uccucuuuggucuacacugugc

SEQ ID NO: 1206584 - RNA, 11 nt, Human
acuccuggccu

SEQ ID NO: 1206585 - RNA, 17 nt, Human
ucccugguggcagcuca

SEQ ID NO: 1206586 - RNA, 16 nt, Human
ucccugguggcagcuc

SEQ ID NO: 1206587 - RNA, 21 nt, Human
ucccugguggcagcucaccuc

SEQ ID NO: 1206588 - RNA, 20 nt, Human
ucccugguggcagcucaccu

SEQ ID NO: 1206589 - RNA, 19 nt, Human
ucccugguggcagcucacc

SEQ ID NO: 1206590 - RNA, 18 nt, Human
ucccugguggcagcucac

SEQ ID NO: 1206591 - RNA, 17 nt, Human
acuccugcaggcagcca

SEQ ID NO: 1206592 - RNA, 22 nt, Human
acuccugcaggcagccaggcca

SEQ ID NO: 1206593 - RNA, 16 nt, Human
acuccugcaggcagcc

SEQ ID NO: 1206594 - RNA, 15 nt, Human
acuccugcaggcagc

SEQ ID NO: 1206595 - RNA, 14 nt, Human
acuccugcaggcag

SEQ ID NO: 1206596 - RNA, 13 nt, Human
acucaccccagcc

SEQ ID NO: 1206597 - RNA, 15 nt, Human
acucaccccagcccc

SEQ ID NO: 1206598 - RNA, 14 nt, Human
acucaccccagccc

SEQ ID NO: 1206599 - RNA, 16 nt, Human
acucaccccagcccca

SEQ ID NO: 1206600 - RNA, 23 nt, Human
ucccuuuuuuggcugcugaaggc

SEQ ID NO: 1206601 - RNA, 22 nt, Human
ucccuuuuuuggcugcugaagg

SEQ ID NO: 1206602 - RNA, 20 nt, Human
ucccuuuuuuggcugcugaa

SEQ ID NO: 1206603 - RNA, 19 nt, Human
ucccuuuuuuggcugcuga

SEQ ID NO: 1206604 - RNA, 17 nt, Human
ucccuuuuuuggcugcu

SEQ ID NO: 1206605 - RNA, 21 nt, Human
ucccuuugacgccaucccagc

SEQ ID NO: 1206606 - RNA, 19 nt, Human
ucccuuugacgccauccca

SEQ ID NO: 1206607 - RNA, 18 nt, Human
ucccuuugacgccauccc

SEQ ID NO: 1206608 - RNA, 16 nt, Human
ucccuuugacgccauc

SEQ ID NO: 1206609 - RNA, 12 nt, Human
acuccuggccuc

SEQ ID NO: 1206610 - RNA, 20 nt, Human
ucccuuggauuguccccgac

SEQ ID NO: 1206611 - RNA, 19 nt, Human
ucccuuggauuguccccga

SEQ ID NO: 1206612 - RNA, 23 nt, Human
ucccugguggcagcucaccucuc

SEQ ID NO: 1206613 - RNA, 22 nt, Human
ucccugguggcagcucaccucu

SEQ ID NO: 1206614 - RNA, 14 nt, Human
acuccuggccucaa

SEQ ID NO: 1206615 - RNA, 13 nt, Human
acuccuggccuca

SEQ ID NO: 1206616 - RNA, 13 nt, Human
uccuaggcauuug

SEQ ID NO: 1206617 - RNA, 15 nt, Human
uccuacucuguguca

SEQ ID NO: 1206618 - RNA, 14 nt, Human
uccuacucuguguc

SEQ ID NO: 1206619 - RNA, 13 nt, Human
uccuacucugugu

SEQ ID NO: 1206620 - RNA, 14 nt, Human
acucuugaccucag

SEQ ID NO: 1206621 - RNA, 16 nt, Human
acucuugaccucaggu

SEQ ID NO: 1206622 - RNA, 15 nt, Human
acucuugaccucagg

SEQ ID NO: 1206623 - RNA, 23 nt, Human
uccucauacccacccccacccaa

SEQ ID NO: 1206624 - RNA, 22 nt, Human
uccucauaguaugguggcuggg

SEQ ID NO: 1206625 - RNA, 15 nt, Human
acucuccuugguguc

SEQ ID NO: 1206626 - RNA, 18 nt, Human
acucuccuggaaauauua

SEQ ID NO: 1206627 - RNA, 16 nt, Human
acucuccucugcugcu

SEQ ID NO: 1206628 - RNA, 14 nt, Human
acucuccucugcug

SEQ ID NO: 1206629 - RNA, 13 nt, Human
acucuccucugcu

SEQ ID NO: 1206630 - RNA, 12 nt, Human
acucuccucugc

SEQ ID NO: 1206631 - RNA, 17 nt, Human
acucuccuccagaguca

SEQ ID NO: 1206632 - RNA, 14 nt, Human
acucuccuccagag

SEQ ID NO: 1206633 - RNA, 24 nt, Human
acuccuugaaaacacuguucucug

SEQ ID NO: 1206634 - RNA, 23 nt, Human
acuccuugaaaacacuguucucu

SEQ ID NO: 1206635 - RNA, 22 nt, Human
acucugagacucgcgacaaugc

SEQ ID NO: 1206636 - RNA, 11 nt, Human
acucugagacu

SEQ ID NO: 1206637 - RNA, 23 nt, Human
acucuccuuggugucgggcauga

SEQ ID NO: 1206638 - RNA, 16 nt, Human
acucuccuuggugucg

SEQ ID NO: 1206639 - RNA, 15 nt, Human
acucuggcagcucag

SEQ ID NO: 1206640 - RNA, 13 nt, Human
acucuggcagcuc

SEQ ID NO: 1206641 - RNA, 16 nt, Human
uccagaauuucccaaa

SEQ ID NO: 1206642 - RNA, 15 nt, Human
uccagaauuucccaa

SEQ ID NO: 1206643 - RNA, 14 nt, Human
uccagaauuuccca

SEQ ID NO: 1206644 - RNA, 11 nt, Human
uccagccuggg

SEQ ID NO: 1206645 - RNA, 18 nt, Human
acgaauauugcugauggu

SEQ ID NO: 1206646 - RNA, 15 nt, Human
acgaauauugcugau

SEQ ID NO: 1206647 - RNA, 14 nt, Human
uccaggcuguaucc

SEQ ID NO: 1206648 - RNA, 23 nt, Human
uccaggcugggagagccuuccag

SEQ ID NO: 1206649 - RNA, 21 nt, Human
uccaggcugggagagccuucc

SEQ ID NO: 1206650 - RNA, 20 nt, Human
uccaggcugggagagccuuc

SEQ ID NO: 1206651 - RNA, 22 nt, Human
uccaggcuccuuuagcgcccag

SEQ ID NO: 1206652 - RNA, 12 nt, Human
uccaggcuccuu

SEQ ID NO: 1206653 - RNA, 10 nt, Human
uccaggcucc

SEQ ID NO: 1206654 - RNA, 18 nt, Human
accuuuguccccaccgca

SEQ ID NO: 1206655 - RNA, 17 nt, Human
accuuuguccccaccgc

SEQ ID NO: 1206656 - RNA, 15 nt, Human
accuugaaugaugcc

SEQ ID NO: 1206657 - RNA, 20 nt, Human
accuugaacuggguacuugu

SEQ ID NO: 1206658 - RNA, 14 nt, Human
accuuuuuuauaca

SEQ ID NO: 1206659 - RNA, 13 nt, Human
accuuuuuuauac

SEQ ID NO: 1206660 - RNA, 21 nt, Human
uccacugugccaugugccagg

SEQ ID NO: 1206661 - RNA, 23 nt, Human
uccagugaggcucugcccuuggu

SEQ ID NO: 1206662 - RNA, 22 nt, Human
uccagugaggcucugcccuugg

SEQ ID NO: 1206663 - RNA, 17 nt, Human
uccagugaggcucugcc

SEQ ID NO: 1206664 - RNA, 16 nt, Human
uccagugaggcucugc

SEQ ID NO: 1206665 - RNA, 15 nt, Human
uccagugaggcucug

SEQ ID NO: 1206666 - RNA, 18 nt, Human
uccaguaucuugaagacu

SEQ ID NO: 1206667 - RNA, 16 nt, Human
uccaguaucuugaaga

SEQ ID NO: 1206668 - RNA, 15 nt, Human
uccaguaucuugaag

SEQ ID NO: 1206669 - RNA, 14 nt, Human
uccaguaucuugaa

SEQ ID NO: 1206670 - RNA, 18 nt, Human
acggcuuuuacuuaaacc

SEQ ID NO: 1206671 - RNA, 18 nt, Human
acggcucacugcagccuc

SEQ ID NO: 1206672 - RNA, 17 nt, Human
acggcucacugcagccu

SEQ ID NO: 1206673 - RNA, 16 nt, Human
acggcucacugcagcc

SEQ ID NO: 1206674 - RNA, 13 nt, Human
acggccaggccag

SEQ ID NO: 1206675 - RNA, 12 nt, Human
acggccaggcca

SEQ ID NO: 1206676 - RNA, 20 nt, Human
acgcgugcacacaccagagc

SEQ ID NO: 1206677 - RNA, 21 nt, Human
acgcuacccgggaagggggcu

SEQ ID NO: 1206678 - RNA, 21 nt, Human
acgaauauugcugauggugca

SEQ ID NO: 1206679 - RNA, 23 nt, Human
acggagucccaccuuggcugcag

SEQ ID NO: 1206680 - RNA, 18 nt, Human
acgcuggagugcagugag

SEQ ID NO: 1206681 - RNA, 17 nt, Human
acgcuggagugcaguga

SEQ ID NO: 1206682 - RNA, 16 nt, Human
acgcuggagugcagug

SEQ ID NO: 1206683 - RNA, 15 nt, Human
acgcuggagugcagu

SEQ ID NO: 1206684 - RNA, 23 nt, Human
acgcuggaccuugaacuggguac

SEQ ID NO: 1206685 - RNA, 20 nt, Human
acgcuggaccuugaacuggg

SEQ ID NO: 1206686 - RNA, 13 nt, Human
acgcuggaccuug

SEQ ID NO: 1206687 - RNA, 23 nt, Human
acguggcugcuucaaggauccug

SEQ ID NO: 1206688 - RNA, 21 nt, Human
acguggcugcuucaaggaucc

SEQ ID NO: 1206689 - RNA, 19 nt, Human
acguggcugcuucaaggau

SEQ ID NO: 1206690 - RNA, 18 nt, Human
acguggcugcuucaagga

SEQ ID NO: 1206691 - RNA, 16 nt, Human
acguuucuaaaggcua

SEQ ID NO: 1206692 - RNA, 15 nt, Human
acguugugcauuugg

SEQ ID NO: 1206693 - RNA, 14 nt, Human
acguugugcauuug

SEQ ID NO: 1206694 - RNA, 13 nt, Human
acguugugcauuu

SEQ ID NO: 1206695 - RNA, 18 nt, Human
ucccagauacuugggggg

SEQ ID NO: 1206696 - RNA, 16 nt, Human
ucccagauacuugggg

SEQ ID NO: 1206697 - RNA, 22 nt, Human
acguuucuaaaggcuaccuuug

SEQ ID NO: 1206698 - RNA, 16 nt, Human
acucaaugcacugaca

SEQ ID NO: 1206699 - RNA, 17 nt, Human
acuauguugcccaggca

SEQ ID NO: 1206700 - RNA, 16 nt, Human
acuauguugcccaggc

SEQ ID NO: 1206701 - RNA, 15 nt, Human
acuauguugcccagg

SEQ ID NO: 1206702 - RNA, 22 nt, Human
acuauggcccuggccuagcaua

SEQ ID NO: 1206703 - RNA, 14 nt, Human
acuauguugcccag

SEQ ID NO: 1206704 - RNA, 21 nt, Human
acuaucuaaauguugaaagau

SEQ ID NO: 1206705 - RNA, 22 nt, Human
acuauagccuaggugacagagu

SEQ ID NO: 1206706 - RNA, 20 nt, Human
acuauagccuaggugacaga

SEQ ID NO: 1206707 - RNA, 18 nt, Human
uccccaggaggccagccu

SEQ ID NO: 1206708 - RNA, 16 nt, Human
uccccaccgcagacag

SEQ ID NO: 1206709 - RNA, 15 nt, Human
uccccaccgcagaca

SEQ ID NO: 1206710 - RNA, 23 nt, Human
uccccacccugaaagcccugagc

SEQ ID NO: 1206711 - RNA, 23 nt, Human
uccccaggaggccagccuugacc

SEQ ID NO: 1206712 - RNA, 21 nt, Human
uccccaggaggccagccuuga

SEQ ID NO: 1206713 - RNA, 20 nt, Human
uccccaggaggccagccuug

SEQ ID NO: 1206714 - RNA, 16 nt, Human
ucccccagccccaucc

SEQ ID NO: 1206715 - RNA, 15 nt, Human
ucccccagccccauc

SEQ ID NO: 1206716 - RNA, 13 nt, Human
ucccccagcccca

SEQ ID NO: 1206717 - RNA, 20 nt, Human
ucacaguucucuccuucuuc

SEQ ID NO: 1206718 - RNA, 16 nt, Human
ucacaguucucuccuu

SEQ ID NO: 1206719 - RNA, 13 nt, Human
ucacagccucuga

SEQ ID NO: 1206720 - RNA, 20 nt, Human
ucacagaugggugcuuggag

SEQ ID NO: 1206721 - RNA, 17 nt, Human
ucacaaaggaugcccaa

SEQ ID NO: 1206722 - RNA, 20 nt, Human
accaccacacccagcccacu

SEQ ID NO: 1206723 - RNA, 15 nt, Human
accaccacacccagc

SEQ ID NO: 1206724 - RNA, 18 nt, Human
accacaugugcacaugca

SEQ ID NO: 1206725 - RNA, 19 nt, Human
accacaucuugcucugcug

SEQ ID NO: 1206726 - RNA, 18 nt, Human
accacaucuugcucugcu

SEQ ID NO: 1206727 - RNA, 17 nt, Human
accacaucuugcucugc

SEQ ID NO: 1206728 - RNA, 16 nt, Human
accacuacauucuguu

SEQ ID NO: 1206729 - RNA, 17 nt, Human
accacuacauucuguua

SEQ ID NO: 1206730 - RNA, 22 nt, Human
accagcgugugacuacuccccc

SEQ ID NO: 1206731 - RNA, 17 nt, Human
accaguguuguggauuu

SEQ ID NO: 1206732 - RNA, 15 nt, Human
accaguguuguggau

SEQ ID NO: 1206733 - RNA, 10 nt, Human
ucacuugagu

SEQ ID NO: 1206734 - RNA, 23 nt, Human
ucacuguugcccaggcuggcgug

SEQ ID NO: 1206735 - RNA, 15 nt, Human
ucacugcagccucaa

SEQ ID NO: 1206736 - RNA, 14 nt, Human
ucacugcagccuca

SEQ ID NO: 1206737 - RNA, 22 nt, Human
ucacugagacagcccgggcucu

SEQ ID NO: 1206738 - RNA, 21 nt, Human
ucacugagacagcccgggcuc

SEQ ID NO: 1206739 - RNA, 17 nt, Human
ucacugagacagcccgg

SEQ ID NO: 1206740 - RNA, 17 nt, Human
ucacuauguugcccagg

SEQ ID NO: 1206741 - RNA, 14 nt, Human
acauuccugaugcu

SEQ ID NO: 1206742 - RNA, 19 nt, Human
acauguccaagaagcccag

SEQ ID NO: 1206743 - RNA, 15 nt, Human
acauguccaagaagc

SEQ ID NO: 1206744 - RNA, 23 nt, Human
acauguaauuaaguacuauguau

SEQ ID NO: 1206745 - RNA, 13 nt, Human
ucaaauuucuaaa

SEQ ID NO: 1206746 - RNA, 14 nt, Human
ucaaauuucuaaau

SEQ ID NO: 1206747 - RNA, 20 nt, Human
ucaacugcaucaagauguga

SEQ ID NO: 1206748 - RNA, 14 nt, Human
ucaaccagcagaug

SEQ ID NO: 1206749 - RNA, 22 nt, Human
acauguaauuaaguacuaugua

SEQ ID NO: 1206750 - RNA, 21 nt, Human
acauguaauuaaguacuaugu

SEQ ID NO: 1206751 - RNA, 19 nt, Human
acauguaauuaaguacuau

SEQ ID NO: 1206752 - RNA, 17 nt, Human
acauguaauuaaguacu

SEQ ID NO: 1206753 - RNA, 15 nt, Human
acauguaauuaagua

SEQ ID NO: 1206754 - RNA, 14 nt, Human
acauggaaguacua

SEQ ID NO: 1206755 - RNA, 22 nt, Human
acaugcuacacacugcauguuu

SEQ ID NO: 1206756 - RNA, 21 nt, Human
acaugcuacacacugcauguu

SEQ ID NO: 1206757 - RNA, 15 nt, Human
acaugcuacacacug

SEQ ID NO: 1206758 - RNA, 12 nt, Human
acagucccugcc

SEQ ID NO: 1206759 - RNA, 21 nt, Human
acauuuuuuaaaugcaccugg

SEQ ID NO: 1206760 - RNA, 17 nt, Human
acauuuuuuaaaugcac

SEQ ID NO: 1206761 - RNA, 16 nt, Human
acauuuuuuaaaugca

SEQ ID NO: 1206762 - RNA, 14 nt, Human
acauuuuuuaaaug

SEQ ID NO: 1206763 - RNA, 23 nt, Human
acauuuuuaagugcugcauuuaa

SEQ ID NO: 1206764 - RNA, 22 nt, Human
acauuuuuaagugcugcauuua

SEQ ID NO: 1206765 - RNA, 21 nt, Human
acauuuuuaagugcugcauuu

SEQ ID NO: 1206766 - RNA, 20 nt, Human
acauuuuauuuuauuaugca

SEQ ID NO: 1206767 - RNA, 19 nt, Human
acauuuuauuuuauuaugc

SEQ ID NO: 1206768 - RNA, 18 nt, Human
acauuuuauuuuauuaug

SEQ ID NO: 1206769 - RNA, 15 nt, Human
ucagcaaaagaugcu

SEQ ID NO: 1206770 - RNA, 18 nt, Human
accaguguuguggauuua

SEQ ID NO: 1206771 - RNA, 12 nt, Human
ucagauuugaac

SEQ ID NO: 1206772 - RNA, 21 nt, Human
ucagauuugaacucuucaauc

SEQ ID NO: 1206773 - RNA, 22 nt, Human
accccagccccaaaacucuccu

SEQ ID NO: 1206774 - RNA, 13 nt, Human
accccagccccaa

SEQ ID NO: 1206775 - RNA, 17 nt, Human
accccacacacgccaga

SEQ ID NO: 1206776 - RNA, 23 nt, Human
acccaggagccccgaggccuucu

SEQ ID NO: 1206777 - RNA, 12 nt, Human
ucagcuccagcu

SEQ ID NO: 1206778 - RNA, 23 nt, Human
ucagcggggacagcuccuucugu

SEQ ID NO: 1206779 - RNA, 21 nt, Human
ucagcggggacagcuccuucu

SEQ ID NO: 1206780 - RNA, 20 nt, Human
ucagcggggacagcuccuuc

SEQ ID NO: 1206781 - RNA, 19 nt, Human
ucagcggggacagcuccuu

SEQ ID NO: 1206782 - RNA, 18 nt, Human
accccaucucuacaaaaa

SEQ ID NO: 1206783 - RNA, 16 nt, Human
ucaggguuggccccug

SEQ ID NO: 1206784 - RNA, 19 nt, Human
ucagggucccugguggcag

SEQ ID NO: 1206785 - RNA, 23 nt, Human
ucaggccaggcccucugcccacu

SEQ ID NO: 1206786 - RNA, 22 nt, Human
ucaggccaggcccucugcccac

SEQ ID NO: 1206787 - RNA, 21 nt, Human
ucaggccaggcccucugccca

SEQ ID NO: 1206788 - RNA, 22 nt, Human
ucagcuuguaaauagcucaggu

SEQ ID NO: 1206789 - RNA, 21 nt, Human
ucagcuuguaaauagcucagg

SEQ ID NO: 1206790 - RNA, 15 nt, Human
ucagcuccagcucac

SEQ ID NO: 1206791 - RNA, 14 nt, Human
ucagcuccagcuca

SEQ ID NO: 1206792 - RNA, 13 nt, Human
acccgggaagggg

SEQ ID NO: 1206793 - RNA, 12 nt, Human
acccgggaaggg

SEQ ID NO: 1206794 - RNA, 22 nt, Human
acccggccccugcugguucagg

SEQ ID NO: 1206795 - RNA, 20 nt, Human
acccggccccugcugguuca

SEQ ID NO: 1206796 - RNA, 17 nt, Human
acccggccccugcuggu

SEQ ID NO: 1206797 - RNA, 17 nt, Human
ucaggguuggccccugc

SEQ ID NO: 1206798 - RNA, 23 nt, Human
ucagguaacaggcagauacagga

SEQ ID NO: 1206799 - RNA, 22 nt, Human
ucagguaacaggcagauacagg

SEQ ID NO: 1206800 - RNA, 21 nt, Human
ucagguaacaggcagauacag

SEQ ID NO: 1206801 - RNA, 16 nt, Human
acccggccccugcugg

SEQ ID NO: 1206802 - RNA, 15 nt, Human
acccggccccugcug

SEQ ID NO: 1206803 - RNA, 14 nt, Human
acccggccccugcu

SEQ ID NO: 1206804 - RNA, 15 nt, Human
accgaaaacguggcu

SEQ ID NO: 1206805 - RNA, 23 nt, Human
acccuuguggucccaccccacac

SEQ ID NO: 1206806 - RNA, 17 nt, Human
acccuugccgucuaccu

SEQ ID NO: 1206807 - RNA, 22 nt, Human
acccugcccugugggcccccaa

SEQ ID NO: 1206808 - RNA, 17 nt, Human
acccugcccugugggcc

SEQ ID NO: 1206809 - RNA, 15 nt, Human
acccugcccuguggg

SEQ ID NO: 1206810 - RNA, 17 nt, Human
acccugaggcccagagg

SEQ ID NO: 1206811 - RNA, 16 nt, Human
acccugaggcccagag

SEQ ID NO: 1206812 - RNA, 15 nt, Human
acccugaggcccaga

SEQ ID NO: 1206813 - RNA, 14 nt, Human
acccugaggcccag

SEQ ID NO: 1206814 - RNA, 18 nt, Human
acccugaaagcccugagc

SEQ ID NO: 1206815 - RNA, 16 nt, Human
acccugaaagcccuga

SEQ ID NO: 1206816 - RNA, 17 nt, Human
accgcagacaggaccag

SEQ ID NO: 1206817 - RNA, 16 nt, Human
accgcagacaggacca

SEQ ID NO: 1206818 - RNA, 12 nt, Human
accgcagacagg

SEQ ID NO: 1206819 - RNA, 20 nt, Human
accucccacaaaggagagcu

SEQ ID NO: 1206820 - RNA, 12 nt, Human
accuccugccuc

SEQ ID NO: 1206821 - RNA, 12 nt, Human
ucagugccacua

SEQ ID NO: 1206822 - RNA, 20 nt, Human
accgaaaacguggcugcuuc

SEQ ID NO: 1206823 - RNA, 19 nt, Human
accgaaaacguggcugcuu

SEQ ID NO: 1206824 - RNA, 17 nt, Human
accgaaaacguggcugc

SEQ ID NO: 1206825 - RNA, 15 nt, Human
ucagugccuuaugga

SEQ ID NO: 1206826 - RNA, 14 nt, Human
ucagugccuuaugg

SEQ ID NO: 1206827 - RNA, 12 nt, Human
ucagugccuuau

SEQ ID NO: 1206828 - RNA, 11 nt, Human
ucagugccuua

SEQ ID NO: 1206829 - RNA, 10 nt, Human
ucagugccuu

SEQ ID NO: 1206830 - RNA, 9 nt, Human
ucagugccu

SEQ ID NO: 1206831 - RNA, 11 nt, Human
ucaguggcagc

SEQ ID NO: 1206832 - RNA, 18 nt, Human
ucagugccuuauggaaca

SEQ ID NO: 1206833 - RNA, 16 nt, Human
ucagugccuuauggaa

SEQ ID NO: 1206834 - RNA, 13 nt, Human
ucaguggcagcug

SEQ ID NO: 1206835 - RNA, 12 nt, Human
ucaguggcagcu

SEQ ID NO: 1206836 - RNA, 14 nt, Human
ucauaaccuagccu

SEQ ID NO: 1206837 - RNA, 19 nt, Human
ucauaguaugguggcuggg

SEQ ID NO: 1206838 - RNA, 18 nt, Human
ucauaguaugguggcugg

SEQ ID NO: 1206839 - RNA, 15 nt, Human
ucauaguaugguggc

SEQ ID NO: 1206840 - RNA, 21 nt, Human
ucauaguaugguggcuggguu

SEQ ID NO: 1206841 - RNA, 18 nt, Human
ucauauaagauucauauu

SEQ ID NO: 1206842 - RNA, 16 nt, Human
ucauauuuacuucuua

SEQ ID NO: 1206843 - RNA, 23 nt, Human
ucauauuuacuucuuauacauuu

SEQ ID NO: 1206844 - RNA, 15 nt, Human
ucauauuuacuucuu

SEQ ID NO: 1206845 - RNA, 17 nt, Human
uaacuuccaauuuacau

SEQ ID NO: 1206846 - RNA, 14 nt, Human
uaacuucaccauau

SEQ ID NO: 1206847 - RNA, 21 nt, Human
uaacuucacauauugauuucc

SEQ ID NO: 1206848 - RNA, 16 nt, Human
uaacuuucugaaauaa

SEQ ID NO: 1206849 - RNA, 17 nt, Human
uaacauguaauuaagua

SEQ ID NO: 1206850 - RNA, 23 nt, Human
uaacauggacaugaucuucuuua

SEQ ID NO: 1206851 - RNA, 18 nt, Human
uaacauggacaugaucuu

SEQ ID NO: 1206852 - RNA, 22 nt, Human
aauaguggugugauuuggggau

SEQ ID NO: 1206853 - RNA, 13 nt, Human
aauaguuggcuag

SEQ ID NO: 1206854 - RNA, 17 nt, Human
aauauugauaugcuuau

SEQ ID NO: 1206855 - RNA, 22 nt, Human
aauaugcacacauuuuuuaaau

SEQ ID NO: 1206856 - RNA, 17 nt, Human
aauaugcacacauuuuu

SEQ ID NO: 1206857 - RNA, 16 nt, Human
aauaugcacacauuuu

SEQ ID NO: 1206858 - RNA, 15 nt, Human
uaagagaaaugagcu

SEQ ID NO: 1206859 - RNA, 22 nt, Human
uaagcuguuacugucuucagua

SEQ ID NO: 1206860 - RNA, 18 nt, Human
uaagcacacuugacauca

SEQ ID NO: 1206861 - RNA, 17 nt, Human
aaugaaaccugugucuc

SEQ ID NO: 1206862 - RNA, 17 nt, Human
aaugaaagacuguacaa

SEQ ID NO: 1206863 - RNA, 16 nt, Human
aaugaaagacuguaca

SEQ ID NO: 1206864 - RNA, 17 nt, Human
aaugaaacauuuuguca

SEQ ID NO: 1206865 - RNA, 22 nt, Human
aaugaaugucagugugacugau

SEQ ID NO: 1206866 - RNA, 13 nt, Human
aaugaaugucagu

SEQ ID NO: 1206867 - RNA, 14 nt, Human
aaugaaugucagug

SEQ ID NO: 1206868 - RNA, 18 nt, Human
aaugaaagacuguacaaa

SEQ ID NO: 1206869 - RNA, 18 nt, Human
uaaugucacaggcagguc

SEQ ID NO: 1206870 - RNA, 13 nt, Human
uaauguacugcau

SEQ ID NO: 1206871 - RNA, 22 nt, Human
uaauagacaauuuauuauggca

SEQ ID NO: 1206872 - RNA, 18 nt, Human
uaauagacaauuuauuau

SEQ ID NO: 1206873 - RNA, 16 nt, Human
uaauagacaauuuauu

SEQ ID NO: 1206874 - RNA, 21 nt, Human
uaauacaccacuacauucugu

SEQ ID NO: 1206875 - RNA, 19 nt, Human
uaauacaccacuacauucu

SEQ ID NO: 1206876 - RNA, 18 nt, Human
uaauacaccacuacauuc

SEQ ID NO: 1206877 - RNA, 16 nt, Human
uaauacaccacuacau

SEQ ID NO: 1206878 - RNA, 17 nt, Human
uaaugaaugaaacauuu

SEQ ID NO: 1206879 - RNA, 21 nt, Human
uaaguauucuuauuuaaugaa

SEQ ID NO: 1206880 - RNA, 20 nt, Human
uaaguauucuuauuuaauga

SEQ ID NO: 1206881 - RNA, 19 nt, Human
uaaguauucuuauuuaaug

SEQ ID NO: 1206882 - RNA, 19 nt, Human
uaaguacuauguaucaaug

SEQ ID NO: 1206883 - RNA, 17 nt, Human
uaaguacuauguaucaa

SEQ ID NO: 1206884 - RNA, 16 nt, Human
uaaguacuauguauca

SEQ ID NO: 1206885 - RNA, 13 nt, Human
uaaguacuaugua

SEQ ID NO: 1206886 - RNA, 23 nt, Human
aaucauuaggugugacugaauuu

SEQ ID NO: 1206887 - RNA, 17 nt, Human
aaucauuaggugugacu

SEQ ID NO: 1206888 - RNA, 15 nt, Human
aaucauuagguguga

SEQ ID NO: 1206889 - RNA, 20 nt, Human
aauguauguguaaguauucu

SEQ ID NO: 1206890 - RNA, 22 nt, Human
aaugugaaacuggauuaaacuu

SEQ ID NO: 1206891 - RNA, 15 nt, Human
aaugugaaacuggau

SEQ ID NO: 1206892 - RNA, 14 nt, Human
aaugugaaacugga

SEQ ID NO: 1206893 - RNA, 19 nt, Human
aaugugaaaagaaaaauga

SEQ ID NO: 1206894 - RNA, 21 nt, Human
aaugugcugaaugguuuucaa

SEQ ID NO: 1206895 - RNA, 24 nt, Human
uacauaaugcgugcauaccacuuu

SEQ ID NO: 1206896 - RNA, 23 nt, Human
uacauaaugcgugcauaccacuu

SEQ ID NO: 1206897 - RNA, 16 nt, Human
uacaggugugagucac

SEQ ID NO: 1206898 - RNA, 13 nt, Human
uacauucuguuaa

SEQ ID NO: 1206899 - RNA, 11 nt, Human
aauuaacuuuu

SEQ ID NO: 1206900 - RNA, 15 nt, Human
uacacuaaaagguga

SEQ ID NO: 1206901 - RNA, 23 nt, Human
uacacauuuuauuuuauuaugca

SEQ ID NO: 1206902 - RNA, 22 nt, Human
uacacauuuuauuuuauuaugc

SEQ ID NO: 1206903 - RNA, 21 nt, Human
uacacauuuuauuuuauuaug

SEQ ID NO: 1206904 - RNA, 22 nt, Human
uacagacaacaaaccuguuucu

SEQ ID NO: 1206905 - RNA, 16 nt, Human
aauggcagccuuggca

SEQ ID NO: 1206906 - RNA, 12 nt, Human
aauggcagccuu

SEQ ID NO: 1206907 - RNA, 22 nt, Human
aaugcacuuuguucuggcucuu

SEQ ID NO: 1206908 - RNA, 21 nt, Human
aaugcacuuuguucuggcucu

SEQ ID NO: 1206909 - RNA, 20 nt, Human
aaugaccuuucaauaggaaa

SEQ ID NO: 1206910 - RNA, 21 nt, Human
uacaaugcugugcccuaaagu

SEQ ID NO: 1206911 - RNA, 18 nt, Human
aaugaccuuucaauagga

SEQ ID NO: 1206912 - RNA, 17 nt, Human
aaugaccuuucaauagg

SEQ ID NO: 1206913 - RNA, 16 nt, Human
aaugaccuuucaauag

SEQ ID NO: 1206914 - RNA, 20 nt, Human
aauggacuaacuugucuuug

SEQ ID NO: 1206915 - RNA, 23 nt, Human
aauggacguguuaugacuccaga

SEQ ID NO: 1206916 - RNA, 14 nt, Human
aauggaaccacucu

SEQ ID NO: 1206917 - RNA, 21 nt, Human
aauggaaaugggcagagcaga

SEQ ID NO: 1206918 - RNA, 20 nt, Human
aauggaaaugggcagagcag

SEQ ID NO: 1206919 - RNA, 13 nt, Human
aaugcccagcccc

SEQ ID NO: 1206920 - RNA, 12 nt, Human
aaugcccagccc

SEQ ID NO: 1206921 - RNA, 11 nt, Human
aaugcccagcc

SEQ ID NO: 1206922 - RNA, 17 nt, Human
uaccugucccccugaca

SEQ ID NO: 1206923 - RNA, 16 nt, Human
uaccugucccccugac

SEQ ID NO: 1206924 - RNA, 14 nt, Human
uaccugucccccug

SEQ ID NO: 1206925 - RNA, 13 nt, Human
uaccugucccccu

SEQ ID NO: 1206926 - RNA, 10 nt, Human
uaccuguccc

SEQ ID NO: 1206927 - RNA, 23 nt, Human
uaccugccaggaagccagcaggc

SEQ ID NO: 1206928 - RNA, 20 nt, Human
uaccugccaggaagccagca

SEQ ID NO: 1206929 - RNA, 18 nt, Human
uaccugccaggaagccag

SEQ ID NO: 1206930 - RNA, 11 nt, Human
aauuacaggaa

SEQ ID NO: 1206931 - RNA, 15 nt, Human
aauuagccaagugug

SEQ ID NO: 1206932 - RNA, 12 nt, Human
aauuccccagau

SEQ ID NO: 1206933 - RNA, 14 nt, Human
aauuccccacccug

SEQ ID NO: 1206934 - RNA, 22 nt, Human
uacuguacaugaaaacacauuu

SEQ ID NO: 1206935 - RNA, 21 nt, Human
uacuguacaugaaaacacauu

SEQ ID NO: 1206936 - RNA, 23 nt, Human
uacuguaauuugugauacaaugc

SEQ ID NO: 1206937 - RNA, 20 nt, Human
uacuguaauuugugauacaa

SEQ ID NO: 1206938 - RNA, 19 nt, Human
uacuguaauuugugauaca

SEQ ID NO: 1206939 - RNA, 18 nt, Human
uacuguaauuugugauac

SEQ ID NO: 1206940 - RNA, 16 nt, Human
uacuggagaaaaugga

SEQ ID NO: 1206941 - RNA, 21 nt, Human
uacucugugucagguggggca

SEQ ID NO: 1206942 - RNA, 12 nt, Human
uacucuguguca

SEQ ID NO: 1206943 - RNA, 23 nt, Human
uacucuccuggaaauauuaagaa

SEQ ID NO: 1206944 - RNA, 22 nt, Human
uacucuccuggaaauauuaaga

SEQ ID NO: 1206945 - RNA, 14 nt, Human
uacuauguaucaau

SEQ ID NO: 1206946 - RNA, 13 nt, Human
uacuauguaucaa

SEQ ID NO: 1206947 - RNA, 12 nt, Human
uacuauguauca

SEQ ID NO: 1206948 - RNA, 23 nt, Human
uacuauggcccuggccuagcaua

SEQ ID NO: 1206949 - RNA, 17 nt, Human
uacuacuccuguaggaa

SEQ ID NO: 1206950 - RNA, 22 nt, Human
uacgccaggggaaaaucagccu

SEQ ID NO: 1206951 - RNA, 16 nt, Human
uacguugugcauuugg

SEQ ID NO: 1206952 - RNA, 15 nt, Human
uacguugugcauuug

SEQ ID NO: 1206953 - RNA, 14 nt, Human
uacguacacauuuu

SEQ ID NO: 1206954 - RNA, 13 nt, Human
uacguacacauuu

SEQ ID NO: 1206955 - RNA, 12 nt, Human
uacguacacauu

SEQ ID NO: 1206956 - RNA, 23 nt, Human
uauggcuuuugugcauuaucuag

SEQ ID NO: 1206957 - RNA, 21 nt, Human
uauggcuuuugugcauuaucu

SEQ ID NO: 1206958 - RNA, 18 nt, Human
uauggcuuuugugcauua

SEQ ID NO: 1206959 - RNA, 17 nt, Human
uauggcuuuugugcauu

SEQ ID NO: 1206960 - RNA, 22 nt, Human
uaugcuuauacacuuacacuuu

SEQ ID NO: 1206961 - RNA, 15 nt, Human
uaugcuuauacacuu

SEQ ID NO: 1206962 - RNA, 17 nt, Human
uaugccugggcagaagg

SEQ ID NO: 1206963 - RNA, 24 nt, Human
uaugcauuugaaaauuuugauguu

SEQ ID NO: 1206964 - RNA, 23 nt, Human
uaugcauuugaaaauuuugaugu

SEQ ID NO: 1206965 - RNA, 11 nt, Human
uaugcauuuga

SEQ ID NO: 1206966 - RNA, 20 nt, Human
acagcccgggcucugccucc

SEQ ID NO: 1206967 - RNA, 19 nt, Human
acagcccgggcucugccuc

SEQ ID NO: 1206968 - RNA, 18 nt, Human
acagcccgggcucugccu

SEQ ID NO: 1206969 - RNA, 17 nt, Human
acagcccgggcucugcc

SEQ ID NO: 1206970 - RNA, 21 nt, Human
acagcaaggagauuuacaacu

SEQ ID NO: 1206971 - RNA, 17 nt, Human
acagcaaggagauuuac

SEQ ID NO: 1206972 - RNA, 19 nt, Human
acagagcccacgcccccac

SEQ ID NO: 1206973 - RNA, 18 nt, Human
acagagcccacgccccca

SEQ ID NO: 1206974 - RNA, 15 nt, Human
acagagcccacgccc

SEQ ID NO: 1206975 - RNA, 20 nt, Human
acagagcccacgcccccacu

SEQ ID NO: 1206976 - RNA, 16 nt, Human
uaucucccccagcccc

SEQ ID NO: 1206977 - RNA, 14 nt, Human
uaucucccccagcc

SEQ ID NO: 1206978 - RNA, 13 nt, Human
uaucucccccagc

SEQ ID NO: 1206979 - RNA, 18 nt, Human
acagagaaaguacuucuc

SEQ ID NO: 1206980 - RNA, 11 nt, Human
acagagaaagu

SEQ ID NO: 1206981 - RNA, 18 nt, Human
uaucaaguauuauaccuu

SEQ ID NO: 1206982 - RNA, 17 nt, Human
acagaaauguacagcaa

SEQ ID NO: 1206983 - RNA, 16 nt, Human
acagaaauguacagca

SEQ ID NO: 1206984 - RNA, 14 nt, Human
acagaaauguacag

SEQ ID NO: 1206985 - RNA, 18 nt, Human
acagaaaauucuucucca

SEQ ID NO: 1206986 - RNA, 17 nt, Human
acagaaaauucuucucc

SEQ ID NO: 1206987 - RNA, 20 nt, Human
acagaaaauggaagacagcu

SEQ ID NO: 1206988 - RNA, 16 nt, Human
acagacccugcccugu

SEQ ID NO: 1206989 - RNA, 15 nt, Human
acagacccugcccug

SEQ ID NO: 1206990 - RNA, 14 nt, Human
acagacccugcccu

SEQ ID NO: 1206991 - RNA, 13 nt, Human
acagacccugccc

SEQ ID NO: 1206992 - RNA, 20 nt, Human
uauguggaguucaucuugaa

SEQ ID NO: 1206993 - RNA, 22 nt, Human
acaggcauguucucugaggaca

SEQ ID NO: 1206994 - RNA, 20 nt, Human
acaggcauguucucugagga

SEQ ID NO: 1206995 - RNA, 19 nt, Human
acaggcauguucucugagg

SEQ ID NO: 1206996 - RNA, 18 nt, Human
acaggcauguucucugag

SEQ ID NO: 1206997 - RNA, 15 nt, Human
acaggcauguucucu

SEQ ID NO: 1206998 - RNA, 13 nt, Human
acagcuaacaugg

SEQ ID NO: 1206999 - RNA, 13 nt, Human
acaggaaguacug

SEQ ID NO: 1207000 - RNA, 18 nt, Human
acaggaaaagcugcugac

SEQ ID NO: 1207001 - RNA, 17 nt, Human
acaggaaaagcugcuga

SEQ ID NO: 1207002 - RNA, 16 nt, Human
acaggaaaagcugcug

SEQ ID NO: 1207003 - RNA, 15 nt, Human
acaggaaaagcugcu

SEQ ID NO: 1207004 - RNA, 14 nt, Human
acaggcauguucuc

SEQ ID NO: 1207005 - RNA, 16 nt, Human
acaggcagguccaggg

SEQ ID NO: 1207006 - RNA, 14 nt, Human
acaggcagguccag

SEQ ID NO: 1207007 - RNA, 15 nt, Human
acaggaucagucuga

SEQ ID NO: 1207008 - RNA, 14 nt, Human
acaggaucagucug

SEQ ID NO: 1207009 - RNA, 16 nt, Human
acaggagugagcacua

SEQ ID NO: 1207010 - RNA, 23 nt, Human
acaggaccagggauuuccaugau

SEQ ID NO: 1207011 - RNA, 20 nt, Human
acagggcacaccgggcacuc

SEQ ID NO: 1207012 - RNA, 12 nt, Human
acagggcacacc

SEQ ID NO: 1207013 - RNA, 22 nt, Human
acaggcugggcuucaguggcag

SEQ ID NO: 1207014 - RNA, 12 nt, Human
acaggcugggcu

SEQ ID NO: 1207015 - RNA, 23 nt, Human
acaggcugggcuucaguggcagc

SEQ ID NO: 1207016 - RNA, 20 nt, Human
uauucaguaauaacucuacc

SEQ ID NO: 1207017 - RNA, 16 nt, Human
uauucaggaagcucag

SEQ ID NO: 1207018 - RNA, 14 nt, Human
uauucaggaagcuc

SEQ ID NO: 1207019 - RNA, 14 nt, Human
uauuacuucugcua

SEQ ID NO: 1207020 - RNA, 13 nt, Human
uauuacuucugcu

SEQ ID NO: 1207021 - RNA, 21 nt, Human
acaccucugcacaagcugcac

SEQ ID NO: 1207022 - RNA, 16 nt, Human
acaccgggcacucaga

SEQ ID NO: 1207023 - RNA, 12 nt, Human
acacgaauauug

SEQ ID NO: 1207024 - RNA, 22 nt, Human
acacucacauuuauucugcuca

SEQ ID NO: 1207025 - RNA, 20 nt, Human
acacucacauuuauucugcu

SEQ ID NO: 1207026 - RNA, 15 nt, Human
acacucaaaagcugg

SEQ ID NO: 1207027 - RNA, 21 nt, Human
acacauuuuauuuuauuaugc

SEQ ID NO: 1207028 - RNA, 20 nt, Human
acacauuuuauuuuauuaug

SEQ ID NO: 1207029 - RNA, 19 nt, Human
acacauuuuauuuuauuau

SEQ ID NO: 1207030 - RNA, 14 nt, Human
acacauuuuauuuu

SEQ ID NO: 1207031 - RNA, 18 nt, Human
acacaugcaaggucauuu

SEQ ID NO: 1207032 - RNA, 21 nt, Human
acacaugagcaucaggccagg

SEQ ID NO: 1207033 - RNA, 20 nt, Human
uaguuccaccaucaagccac

SEQ ID NO: 1207034 - RNA, 21 nt, Human
acacacugcauguuugugauu

SEQ ID NO: 1207035 - RNA, 21 nt, Human
acacacgcgugcacacaccag

SEQ ID NO: 1207036 - RNA, 20 nt, Human
acacaccagagcccaccuug

SEQ ID NO: 1207037 - RNA, 15 nt, Human
acacaccagagccca

SEQ ID NO: 1207038 - RNA, 14 nt, Human
acacaccagagccc

SEQ ID NO: 1207039 - RNA, 19 nt, Human
acacacagcucuguccugg

SEQ ID NO: 1207040 - RNA, 17 nt, Human
acacacagcucuguccu

SEQ ID NO: 1207041 - RNA, 14 nt, Human
acacacagcucugu

SEQ ID NO: 1207042 - RNA, 13 nt, Human
acacacagcucug

SEQ ID NO: 1207043 - RNA, 22 nt, Human
acacacacgcgugcacacacca

SEQ ID NO: 1207044 - RNA, 19 nt, Human
acaaugugaaaagaaaaau

SEQ ID NO: 1207045 - RNA, 17 nt, Human
acaaugugaaaagaaaa

SEQ ID NO: 1207046 - RNA, 24 nt, Human
acaaugcugugcccuaaaguguau

SEQ ID NO: 1207047 - RNA, 23 nt, Human
acaaugcugugcccuaaagugua

SEQ ID NO: 1207048 - RNA, 22 nt, Human
acaaugcugugcccuaaagugu

SEQ ID NO: 1207049 - RNA, 21 nt, Human
acaaugcugugcccuaaagug

SEQ ID NO: 1207050 - RNA, 22 nt, Human
acacaguauuacuucugcuaca

SEQ ID NO: 1207051 - RNA, 19 nt, Human
acacaguauuacuucugcu

SEQ ID NO: 1207052 - RNA, 18 nt, Human
acacaguauuacuucugc

SEQ ID NO: 1207053 - RNA, 20 nt, Human
uaggcauuugcugaauacag

SEQ ID NO: 1207054 - RNA, 16 nt, Human
uaggcauuugcugaau

SEQ ID NO: 1207055 - RNA, 19 nt, Human
acaaugacuuacuguacau

SEQ ID NO: 1207056 - RNA, 18 nt, Human
acaaugacuuacuguaca

SEQ ID NO: 1207057 - RNA, 17 nt, Human
acaaugacuuacuguac

SEQ ID NO: 1207058 - RNA, 12 nt, Human
acaaugacuuac

SEQ ID NO: 1207059 - RNA, 19 nt, Human
uagauauaugcucugcaug

SEQ ID NO: 1207060 - RNA, 15 nt, Human
uagauauaugcucug

SEQ ID NO: 1207061 - RNA, 22 nt, Human
acaaaggaugcccaaagaugca

SEQ ID NO: 1207062 - RNA, 22 nt, Human
acaaaagcaugugagacugguu

SEQ ID NO: 1207063 - RNA, 11 nt, Human
acaaaagcaug

SEQ ID NO: 1207064 - RNA, 19 nt, Human
acaagacccuugugguccc

SEQ ID NO: 1207065 - RNA, 19 nt, Human
acaagaccacguuucuaaa

SEQ ID NO: 1207066 - RNA, 23 nt, Human
acaacacucauugaccugaggcc

SEQ ID NO: 1207067 - RNA, 15 nt, Human
uagccagaggagaga

SEQ ID NO: 1207068 - RNA, 11 nt, Human
uagccagagga

SEQ ID NO: 1207069 - RNA, 21 nt, Human
uagccaaggccaaaggaagca

SEQ ID NO: 1207070 - RNA, 22 nt, Human
uagcauuuugcuaaaugugaau

SEQ ID NO: 1207071 - RNA, 16 nt, Human
uagcauuuugcuaaau

SEQ ID NO: 1207072 - RNA, 19 nt, Human
uagcauggcugccaauggg

SEQ ID NO: 1207073 - RNA, 23 nt, Human
aagaucaaaagguuaauaaagua

SEQ ID NO: 1207074 - RNA, 20 nt, Human
aagaucaaaagguuaauaaa

SEQ ID NO: 1207075 - RNA, 23 nt, Human
gugugaaccaccacacccagccc

SEQ ID NO: 1207076 - RNA, 20 nt, Human
gugucagguggggcagcuug

SEQ ID NO: 1207077 - RNA, 19 nt, Human
gugucagguggggcagcuu

SEQ ID NO: 1207078 - RNA, 18 nt, Human
gugucagguggggcagcu

SEQ ID NO: 1207079 - RNA, 14 nt, Human
gugucagguggggc

SEQ ID NO: 1207080 - RNA, 22 nt, Human
gugucaccugaagacucauucu

SEQ ID NO: 1207081 - RNA, 14 nt, Human
gugucaccugaaga

SEQ ID NO: 1207082 - RNA, 15 nt, Human
gugguuucagaaaug

SEQ ID NO: 1207083 - RNA, 18 nt, Human
gugcugcccugcccaccu

SEQ ID NO: 1207084 - RNA, 23 nt, Human
gugcugcccugcccaccuggccu

SEQ ID NO: 1207085 - RNA, 22 nt, Human
aagagggagggagggcuccaga

SEQ ID NO: 1207086 - RNA, 21 nt, Human
aagagggagggagggcuccag

SEQ ID NO: 1207087 - RNA, 14 nt, Human
aagaggcagggucu

SEQ ID NO: 1207088 - RNA, 11 nt, Human
aagaggcaggg

SEQ ID NO: 1207089 - RNA, 16 nt, Human
aagcacacuugacauc

SEQ ID NO: 1207090 - RNA, 20 nt, Human
aagcacaugccucucucagg

SEQ ID NO: 1207091 - RNA, 19 nt, Human
aagcacaugccucucucag

SEQ ID NO: 1207092 - RNA, 16 nt, Human
aagcacaugccucucu

SEQ ID NO: 1207093 - RNA, 15 nt, Human
aagcacaugccucuc

SEQ ID NO: 1207094 - RNA, 14 nt, Human
aagcacaugccucu

SEQ ID NO: 1207095 - RNA, 16 nt, Human
aagcaccuccugccuc

SEQ ID NO: 1207096 - RNA, 15 nt, Human
aagcaccuccugccu

SEQ ID NO: 1207097 - RNA, 14 nt, Human
aagcaccuccugcc

SEQ ID NO: 1207098 - RNA, 13 nt, Human
aagcaccuccugc

SEQ ID NO: 1207099 - RNA, 21 nt, Human
aagcacaugccucucucaggc

SEQ ID NO: 1207100 - RNA, 17 nt, Human
aagcaccuccugccucg

SEQ ID NO: 1207101 - RNA, 20 nt, Human
aagccaaagcuaggccuggc

SEQ ID NO: 1207102 - RNA, 18 nt, Human
aagccaaagcuaggccug

SEQ ID NO: 1207103 - RNA, 17 nt, Human
aagccaaagcuaggccu

SEQ ID NO: 1207104 - RNA, 16 nt, Human
aagcauuuacuuugug

SEQ ID NO: 1207105 - RNA, 12 nt, Human
aagcaugugaga

SEQ ID NO: 1207106 - RNA, 23 nt, Human
guucagcuuguaaauagcucagg

SEQ ID NO: 1207107 - RNA, 22 nt, Human
guucaggguuggccccugcccg

SEQ ID NO: 1207108 - RNA, 21 nt, Human
guucaggguuggccccugccc

SEQ ID NO: 1207109 - RNA, 18 nt, Human
guucagguaacaggcaga

SEQ ID NO: 1207110 - RNA, 17 nt, Human
guucagguaacaggcag

SEQ ID NO: 1207111 - RNA, 21 nt, Human
aagccgugauuuucauugcug

SEQ ID NO: 1207112 - RNA, 19 nt, Human
aagccuccuccagccgcca

SEQ ID NO: 1207113 - RNA, 15 nt, Human
aagccuccuccagcc

SEQ ID NO: 1207114 - RNA, 16 nt, Human
aagccucccacgacug

SEQ ID NO: 1207115 - RNA, 19 nt, Human
guuagagguucccuuugac

SEQ ID NO: 1207116 - RNA, 18 nt, Human
guuaaucauuagguguga

SEQ ID NO: 1207117 - RNA, 22 nt, Human
guucccuuuuuuggcugcugaa

SEQ ID NO: 1207118 - RNA, 21 nt, Human
guucccuuuuuuggcugcuga

SEQ ID NO: 1207119 - RNA, 17 nt, Human
guucuuaauucuuagcu

SEQ ID NO: 1207120 - RNA, 14 nt, Human
guucuuaauucuua

SEQ ID NO: 1207121 - RNA, 13 nt, Human
guucuuaauucuu

SEQ ID NO: 1207122 - RNA, 18 nt, Human
guucucugcccuccaaga

SEQ ID NO: 1207123 - RNA, 17 nt, Human
guucucugcccuccaag

SEQ ID NO: 1207124 - RNA, 15 nt, Human
guucucugcccucca

SEQ ID NO: 1207125 - RNA, 14 nt, Human
guucucugaggaca

SEQ ID NO: 1207126 - RNA, 12 nt, Human
guucucugagga

SEQ ID NO: 1207127 - RNA, 15 nt, Human
guucucucuucucca

SEQ ID NO: 1207128 - RNA, 19 nt, Human
guucuagcauggcugccaa

SEQ ID NO: 1207129 - RNA, 22 nt, Human
guugauagcacagacccugccc

SEQ ID NO: 1207130 - RNA, 19 nt, Human
guugauagcacagacccug

SEQ ID NO: 1207131 - RNA, 14 nt, Human
guugauagcacaga

SEQ ID NO: 1207132 - RNA, 18 nt, Human
guucuugguuuguaaauu

SEQ ID NO: 1207133 - RNA, 15 nt, Human
guucuugguuuguaa

SEQ ID NO: 1207134 - RNA, 14 nt, Human
guucuugguuugua

SEQ ID NO: 1207135 - RNA, 23 nt, Human
aaguauucuuauuuaaugaaaga

SEQ ID NO: 1207136 - RNA, 21 nt, Human
aaguauucuuauuuaaugaaa

SEQ ID NO: 1207137 - RNA, 19 nt, Human
aaguauuauaccuuuuuua

SEQ ID NO: 1207138 - RNA, 16 nt, Human
aaguauuauaccuuuu

SEQ ID NO: 1207139 - RNA, 15 nt, Human
aaguauuauaccuuu

SEQ ID NO: 1207140 - RNA, 20 nt, Human
aaguacuucuccacccugcu

SEQ ID NO: 1207141 - RNA, 19 nt, Human
aaguacuucuccacccugc

SEQ ID NO: 1207142 - RNA, 18 nt, Human
aaguacuucuccacccug

SEQ ID NO: 1207143 - RNA, 15 nt, Human
aaguacuauguauca

SEQ ID NO: 1207144 - RNA, 13 nt, Human
aaguacuauguau

SEQ ID NO: 1207145 - RNA, 17 nt, Human
aaguacuauaauuuacc

SEQ ID NO: 1207146 - RNA, 14 nt, Human
aaguacuauaauuu

SEQ ID NO: 1207147 - RNA, 21 nt, Human
aaguaauaugcacacauuuuu

SEQ ID NO: 1207148 - RNA, 20 nt, Human
aaguaauaugcacacauuuu

SEQ ID NO: 1207149 - RNA, 18 nt, Human
aaguaauaugcacacauu

SEQ ID NO: 1207150 - RNA, 19 nt, Human
guuuucuguucuuucuggc

SEQ ID NO: 1207151 - RNA, 16 nt, Human
guuuucuguucuuucu

SEQ ID NO: 1207152 - RNA, 15 nt, Human
guuuucuguucuuuc

SEQ ID NO: 1207153 - RNA, 14 nt, Human
guuuucuguucuuu

SEQ ID NO: 1207154 - RNA, 22 nt, Human
guuuuaaggaugcuuguacaua

SEQ ID NO: 1207155 - RNA, 23 nt, Human
aagggggcugggacaugggaaag

SEQ ID NO: 1207156 - RNA, 12 nt, Human
aagggggcuggg

SEQ ID NO: 1207157 - RNA, 13 nt, Human
aaggggagaguaa

SEQ ID NO: 1207158 - RNA, 20 nt, Human
aaggcugucaauuacaggaa

SEQ ID NO: 1207159 - RNA, 22 nt, Human
aaggcugggggaagaagcucuc

SEQ ID NO: 1207160 - RNA, 19 nt, Human
aaggcugggggaagaagcu

SEQ ID NO: 1207161 - RNA, 16 nt, Human
aaggcugggggaagaa

SEQ ID NO: 1207162 - RNA, 14 nt, Human
guuucagaaaugug

SEQ ID NO: 1207163 - RNA, 13 nt, Human
guuucagaaaugu

SEQ ID NO: 1207164 - RNA, 11 nt, Human
guuucagaaau

SEQ ID NO: 1207165 - RNA, 21 nt, Human
guuuaagugacugauggcuaa

SEQ ID NO: 1207166 - RNA, 23 nt, Human
guuguuugauucagacagcugcc

SEQ ID NO: 1207167 - RNA, 22 nt, Human
aaggaaacccagcucuggucca

SEQ ID NO: 1207168 - RNA, 17 nt, Human
aaggaaacccagcucug

SEQ ID NO: 1207169 - RNA, 13 nt, Human
aagugugguagag

SEQ ID NO: 1207170 - RNA, 23 nt, Human
aaguguauuuuuuuacuaauaga

SEQ ID NO: 1207171 - RNA, 20 nt, Human
aaguuugagaucagccuggg

SEQ ID NO: 1207172 - RNA, 21 nt, Human
aaguuucugccgcagcccugc

SEQ ID NO: 1207173 - RNA, 19 nt, Human
aaguuucugccgcagcccu

SEQ ID NO: 1207174 - RNA, 13 nt, Human
uaaaagucuugug

SEQ ID NO: 1207175 - RNA, 20 nt, Human
aagugauccucccaccucag

SEQ ID NO: 1207176 - RNA, 19 nt, Human
aagugauccucccaccuca

SEQ ID NO: 1207177 - RNA, 13 nt, Human
aagugauccuccc

SEQ ID NO: 1207178 - RNA, 21 nt, Human
uaaaauaccagccaguaaaug

SEQ ID NO: 1207179 - RNA, 23 nt, Human
aagugauccucccaccucagccu

SEQ ID NO: 1207180 - RNA, 15 nt, Human
uaaaacuuuuuaaaa

SEQ ID NO: 1207181 - RNA, 12 nt, Human
uaaaacuuuuua

SEQ ID NO: 1207182 - RNA, 13 nt, Human
uaaaacccaagug

SEQ ID NO: 1207183 - RNA, 22 nt, Human
uaaaaaugagguacucuccugg

SEQ ID NO: 1207184 - RNA, 15 nt, Human
uaaaaaugagguacu

SEQ ID NO: 1207185 - RNA, 23 nt, Human
uaaaaaucucaaauuucuaaauc

SEQ ID NO: 1207186 - RNA, 23 nt, Human
gugccaaaaacaacaacaaaaug

SEQ ID NO: 1207187 - RNA, 21 nt, Human
gugcauuuggugguuucagaa

SEQ ID NO: 1207188 - RNA, 20 nt, Human
gugcauuugaggucuguucu

SEQ ID NO: 1207189 - RNA, 19 nt, Human
gugcauuugaggucuguuc

SEQ ID NO: 1207190 - RNA, 17 nt, Human
gugcauuugaggucugu

SEQ ID NO: 1207191 - RNA, 22 nt, Human
gugcaaugaccuuucaauagga

SEQ ID NO: 1207192 - RNA, 21 nt, Human
gugcacaugcacgugugugca

SEQ ID NO: 1207193 - RNA, 23 nt, Human
gugcacaagcuccaagcucccag

SEQ ID NO: 1207194 - RNA, 21 nt, Human
gugcacaagcuccaagcuccc

SEQ ID NO: 1207195 - RNA, 16 nt, Human
gugcacaagcuccaag

SEQ ID NO: 1207196 - RNA, 13 nt, Human
gugcacaagcucc

SEQ ID NO: 1207197 - RNA, 18 nt, Human
gugcaaugaccuuucaau

SEQ ID NO: 1207198 - RNA, 22 nt, Human
aacuucaccauauuaccacaga

SEQ ID NO: 1207199 - RNA, 22 nt, Human
aacuucacauauugauuuccgu

SEQ ID NO: 1207200 - RNA, 14 nt, Human
aacuucacauauug

SEQ ID NO: 1207201 - RNA, 16 nt, Human
gugcucugaucaucca

SEQ ID NO: 1207202 - RNA, 14 nt, Human
gugcucuggacagg

SEQ ID NO: 1207203 - RNA, 13 nt, Human
gugcucuggacag

SEQ ID NO: 1207204 - RNA, 15 nt, Human
gugcugcccugccca

SEQ ID NO: 1207205 - RNA, 14 nt, Human
gugcugcccugccc

SEQ ID NO: 1207206 - RNA, 13 nt, Human
gugcugcccugcc

SEQ ID NO: 1207207 - RNA, 19 nt, Human
gugcuaucucccccagccc

SEQ ID NO: 1207208 - RNA, 18 nt, Human
gugcuaucucccccagcc

SEQ ID NO: 1207209 - RNA, 15 nt, Human
gugcuaucuccccca

SEQ ID NO: 1207210 - RNA, 17 nt, Human
gugcuaggaacacuccu

SEQ ID NO: 1207211 - RNA, 22 nt, Human
aagaaaauaguggugugauuug

SEQ ID NO: 1207212 - RNA, 21 nt, Human
aagaaaauaguggugugauuu

SEQ ID NO: 1207213 - RNA, 15 nt, Human
aagaaaauaguggug

SEQ ID NO: 1207214 - RNA, 18 nt, Human
aagaaaaaugagccuggc

SEQ ID NO: 1207215 - RNA, 17 nt, Human
aagaaaaaugagccugg

SEQ ID NO: 1207216 - RNA, 18 nt, Human
aagaaaaagaaaaagaaa

SEQ ID NO: 1207217 - RNA, 13 nt, Human
aagaaaaagaaaa

SEQ ID NO: 1207218 - RNA, 19 nt, Human
aagaaaaaauauuuucccu

SEQ ID NO: 1207219 - RNA, 23 nt, Human
aacuuuaccuuuuuuauacauaa

SEQ ID NO: 1207220 - RNA, 22 nt, Human
aacuuuaccuuuuuuauacaua

SEQ ID NO: 1207221 - RNA, 21 nt, Human
aacuuuaccuuuuuuauacau

SEQ ID NO: 1207222 - RNA, 18 nt, Human
gucuggaaugcaguggua

SEQ ID NO: 1207223 - RNA, 16 nt, Human
gucuggaaugcagugg

SEQ ID NO: 1207224 - RNA, 15 nt, Human
gucuggaaugcagug

SEQ ID NO: 1207225 - RNA, 20 nt, Human
gucugacaggcaaugcuggc

SEQ ID NO: 1207226 - RNA, 18 nt, Human
gucugacaggcaaugcug

SEQ ID NO: 1207227 - RNA, 15 nt, Human
gucugacaggcaaug

SEQ ID NO: 1207228 - RNA, 14 nt, Human
gucugacaggcaau

SEQ ID NO: 1207229 - RNA, 13 nt, Human
gucugacaggcaa

SEQ ID NO: 1207230 - RNA, 12 nt, Human
gucugacaggca

SEQ ID NO: 1207231 - RNA, 14 nt, Human
gucugaaggcuggg

SEQ ID NO: 1207232 - RNA, 19 nt, Human
gucucaaaaaaagaaaaag

SEQ ID NO: 1207233 - RNA, 17 nt, Human
gucucaaaaaaagaaaa

SEQ ID NO: 1207234 - RNA, 14 nt, Human
gucucaaaaaaaca

SEQ ID NO: 1207235 - RNA, 15 nt, Human
aacguggcugcuuca

SEQ ID NO: 1207236 - RNA, 13 nt, Human
aacguggcugcuu

SEQ ID NO: 1207237 - RNA, 12 nt, Human
aacguggcugcu

SEQ ID NO: 1207238 - RNA, 17 nt, Human
aacuagggaagauaaua

SEQ ID NO: 1207239 - RNA, 21 nt, Human
aacucuccucugcugcuggcu

SEQ ID NO: 1207240 - RNA, 19 nt, Human
aacucuccucugcugcugg

SEQ ID NO: 1207241 - RNA, 19 nt, Human
gugagucaccaagcccagu

SEQ ID NO: 1207242 - RNA, 17 nt, Human
gugagucaccaagccca

SEQ ID NO: 1207243 - RNA, 23 nt, Human
gugaguacuacaguccucccauc

SEQ ID NO: 1207244 - RNA, 18 nt, Human
gugaggcucugcccuugg

SEQ ID NO: 1207245 - RNA, 17 nt, Human
gugaggcucugcccuug

SEQ ID NO: 1207246 - RNA, 16 nt, Human
gugaggcucugcccuu

SEQ ID NO: 1207247 - RNA, 15 nt, Human
gugaggcucugcccu

SEQ ID NO: 1207248 - RNA, 14 nt, Human
gugaggcucugccc

SEQ ID NO: 1207249 - RNA, 13 nt, Human
gugaggcucugcc

SEQ ID NO: 1207250 - RNA, 12 nt, Human
gugaggcucugc

SEQ ID NO: 1207251 - RNA, 18 nt, Human
gugagacucugucucaaa

SEQ ID NO: 1207252 - RNA, 16 nt, Human
aacugcauuggcuuug

SEQ ID NO: 1207253 - RNA, 23 nt, Human
aacugauuuuuuuuuccuucagu

SEQ ID NO: 1207254 - RNA, 22 nt, Human
aacugauuuuuuuuuccuucag

SEQ ID NO: 1207255 - RNA, 21 nt, Human
aacugauuuuuuuuuccuuca

SEQ ID NO: 1207256 - RNA, 23 nt, Human
aacucuccucugcugcuggcugg

SEQ ID NO: 1207257 - RNA, 22 nt, Human
aacucuccucugcugcuggcug

SEQ ID NO: 1207258 - RNA, 16 nt, Human
gugagacucugucuca

SEQ ID NO: 1207259 - RNA, 14 nt, Human
gugagacucugucu

SEQ ID NO: 1207260 - RNA, 22 nt, Human
gugagacccugucucaaaaaaa

SEQ ID NO: 1207261 - RNA, 19 nt, Human
gugacaugucuuuucuugc

SEQ ID NO: 1207262 - RNA, 22 nt, Human
gugacagagugagacucugucu

SEQ ID NO: 1207263 - RNA, 20 nt, Human
gugacagagugagacucugu

SEQ ID NO: 1207264 - RNA, 23 nt, Human
gugaauaauacaguaucucaggg

SEQ ID NO: 1207265 - RNA, 12 nt, Human
aacuccuggccu

SEQ ID NO: 1207266 - RNA, 19 nt, Human
gucauuugagcagggcuca

SEQ ID NO: 1207267 - RNA, 22 nt, Human
guccccaccgcagacaggacca

SEQ ID NO: 1207268 - RNA, 18 nt, Human
guccccaccgcagacagg

SEQ ID NO: 1207269 - RNA, 20 nt, Human
gucccaccccacacacgcca

SEQ ID NO: 1207270 - RNA, 15 nt, Human
gucccaccccacaca

SEQ ID NO: 1207271 - RNA, 22 nt, Human
guccccuguuuguuucugaaag

SEQ ID NO: 1207272 - RNA, 18 nt, Human
guccccuguuuguuucug

SEQ ID NO: 1207273 - RNA, 19 nt, Human
gucccuuacgugaguccug

SEQ ID NO: 1207274 - RNA, 18 nt, Human
gucccuuacgugaguccu

SEQ ID NO: 1207275 - RNA, 19 nt, Human
gucccugguggcagcucac

SEQ ID NO: 1207276 - RNA, 17 nt, Human
gucauuugagcagggcu

SEQ ID NO: 1207277 - RNA, 19 nt, Human
aacacuguucucugcccuc

SEQ ID NO: 1207278 - RNA, 18 nt, Human
aacacuguucucugcccu

SEQ ID NO: 1207279 - RNA, 17 nt, Human
aacacuguucucugccc

SEQ ID NO: 1207280 - RNA, 17 nt, Human
aacacucauugaccuga

SEQ ID NO: 1207281 - RNA, 21 nt, Human
aacacucacauuuauucugcu

SEQ ID NO: 1207282 - RNA, 19 nt, Human
aacacaaacgggcucagca

SEQ ID NO: 1207283 - RNA, 19 nt, Human
aaauuucuaaaucuccaaa

SEQ ID NO: 1207284 - RNA, 22 nt, Human
gucuaugggacucaaugcacug

SEQ ID NO: 1207285 - RNA, 20 nt, Human
gucuaccugaggggccucuu

SEQ ID NO: 1207286 - RNA, 16 nt, Human
gucuaccugaggggcc

SEQ ID NO: 1207287 - RNA, 15 nt, Human
gucuaccugaggggc

SEQ ID NO: 1207288 - RNA, 14 nt, Human
gucuaccugagggg

SEQ ID NO: 1207289 - RNA, 16 nt, Human
guccuggcaugggaau

SEQ ID NO: 1207290 - RNA, 19 nt, Human
guccugcugcaguugccag

SEQ ID NO: 1207291 - RNA, 14 nt, Human
guccucuuuucuga

SEQ ID NO: 1207292 - RNA, 12 nt, Human
gucgaggcagga

SEQ ID NO: 1207293 - RNA, 16 nt, Human
gucgaggacagggagg

SEQ ID NO: 1207294 - RNA, 17 nt, Human
guccuggcaugggaaug

SEQ ID NO: 1207295 - RNA, 18 nt, Human
aacaguccauugaaaggg

SEQ ID NO: 1207296 - RNA, 22 nt, Human
gucaccaaaucagcugcuacua

SEQ ID NO: 1207297 - RNA, 12 nt, Human
gucacaggcagg

SEQ ID NO: 1207298 - RNA, 22 nt, Human
gucaauuacaggaaguacugga

SEQ ID NO: 1207299 - RNA, 16 nt, Human
gucacugagacagccc

SEQ ID NO: 1207300 - RNA, 15 nt, Human
gucacugagacagcc

SEQ ID NO: 1207301 - RNA, 14 nt, Human
gucacugagacagc

SEQ ID NO: 1207302 - RNA, 23 nt, Human
gucacucuggcagcucagagagg

SEQ ID NO: 1207303 - RNA, 15 nt, Human
gucaccaagcccagu

SEQ ID NO: 1207304 - RNA, 12 nt, Human
gucaccaagccc

SEQ ID NO: 1207305 - RNA, 23 nt, Human
gucacugagacagcccgggcucu

SEQ ID NO: 1207306 - RNA, 21 nt, Human
gucacugagacagcccgggcu

SEQ ID NO: 1207307 - RNA, 18 nt, Human
gucacugagacagcccgg

SEQ ID NO: 1207308 - RNA, 17 nt, Human
gucacugagacagcccg

SEQ ID NO: 1207309 - RNA, 10 nt, Human
gucacugcuu

SEQ ID NO: 1207310 - RNA, 15 nt, Human
aaauuucuaaaucuc

SEQ ID NO: 1207311 - RNA, 13 nt, Human
aaauuucuaaauc

SEQ ID NO: 1207312 - RNA, 15 nt, Human
gucagugugacugau

SEQ ID NO: 1207313 - RNA, 22 nt, Human
gucagguggggcagcuugaggg

SEQ ID NO: 1207314 - RNA, 18 nt, Human
gucagguggggcagcuug

SEQ ID NO: 1207315 - RNA, 17 nt, Human
gucagguggggcagcuu

SEQ ID NO: 1207316 - RNA, 16 nt, Human
gucagguggggcagcu

SEQ ID NO: 1207317 - RNA, 21 nt, Human
gucacugcuuaacuucacaua

SEQ ID NO: 1207318 - RNA, 15 nt, Human
gucacugcuuaacuu

SEQ ID NO: 1207319 - RNA, 23 nt, Human
gucagaaguuucugccgcagccc

SEQ ID NO: 1207320 - RNA, 21 nt, Human
gucagaaguuucugccgcagc

SEQ ID NO: 1207321 - RNA, 16 nt, Human
aaauuccccacccuga

SEQ ID NO: 1207322 - RNA, 21 nt, Human
guauucucuccuguaccucuu

SEQ ID NO: 1207323 - RNA, 18 nt, Human
guauucucuccuguaccu

SEQ ID NO: 1207324 - RNA, 21 nt, Human
aaaugucucuuuaaugucaca

SEQ ID NO: 1207325 - RNA, 14 nt, Human
aaaaacacaaaagu

SEQ ID NO: 1207326 - RNA, 12 nt, Human
aaaacacauuuu

SEQ ID NO: 1207327 - RNA, 12 nt, Human
aaaaagaggcua

SEQ ID NO: 1207328 - RNA, 15 nt, Human
aaaaacugauuuuuu

SEQ ID NO: 1207329 - RNA, 13 nt, Human
aaaaacugauuuu

SEQ ID NO: 1207330 - RNA, 14 nt, Human
aaaaacauggccuu

SEQ ID NO: 1207331 - RNA, 18 nt, Human
aguuacagacaaagcgug

SEQ ID NO: 1207332 - RNA, 19 nt, Human
aguuguuacauuuuuaagu

SEQ ID NO: 1207333 - RNA, 16 nt, Human
aguuguuacauuuuua

SEQ ID NO: 1207334 - RNA, 15 nt, Human
aguuguuacauuuuu

SEQ ID NO: 1207335 - RNA, 13 nt, Human
aguuguuacauuu

SEQ ID NO: 1207336 - RNA, 23 nt, Human
agugugacaaggauugcuacugu

SEQ ID NO: 1207337 - RNA, 20 nt, Human
agucaagugaaaaaggagga

SEQ ID NO: 1207338 - RNA, 16 nt, Human
agucaagugaaaaagg

SEQ ID NO: 1207339 - RNA, 13 nt, Human
agugauccuccca

SEQ ID NO: 1207340 - RNA, 21 nt, Human
auaugcuuauacacuuacacu

SEQ ID NO: 1207341 - RNA, 19 nt, Human
auaugcuuauacacuuaca

SEQ ID NO: 1207342 - RNA, 16 nt, Human
auaugcuuauacacuu

SEQ ID NO: 1207343 - RNA, 14 nt, Human
auaugcuuauacac

SEQ ID NO: 1207344 - RNA, 22 nt, Human
auaugccugggcagaaggaaga

SEQ ID NO: 1207345 - RNA, 17 nt, Human
auauucaggaagcucag

SEQ ID NO: 1207346 - RNA, 16 nt, Human
auauucaggaagcuca

SEQ ID NO: 1207347 - RNA, 14 nt, Human
auauucaggaagcu

SEQ ID NO: 1207348 - RNA, 13 nt, Human
auauucaggaagc

SEQ ID NO: 1207349 - RNA, 16 nt, Human
auauaggaacuuaaau

SEQ ID NO: 1207350 - RNA, 16 nt, Human
auaguaugguggcugg

SEQ ID NO: 1207351 - RNA, 15 nt, Human
auaguaugguggcug

SEQ ID NO: 1207352 - RNA, 21 nt, Human
auaaugugaaacuggauuaaa

SEQ ID NO: 1207353 - RNA, 19 nt, Human
auaaugugaaacuggauua

SEQ ID NO: 1207354 - RNA, 18 nt, Human
auaaugugaaacuggauu

SEQ ID NO: 1207355 - RNA, 13 nt, Human
auaccuguccccc

SEQ ID NO: 1207356 - RNA, 12 nt, Human
auaccugucccc

SEQ ID NO: 1207357 - RNA, 20 nt, Human
auguucuuucacccuuuucu

SEQ ID NO: 1207358 - RNA, 20 nt, Human
auguucuuaguggauguucu

SEQ ID NO: 1207359 - RNA, 15 nt, Human
auguucuuaauucuu

SEQ ID NO: 1207360 - RNA, 22 nt, Human
auguucugacccugcuucaaau

SEQ ID NO: 1207361 - RNA, 18 nt, Human
auguucucugaggacacu

SEQ ID NO: 1207362 - RNA, 13 nt, Human
auuaaauucuugc

SEQ ID NO: 1207363 - RNA, 16 nt, Human
auuaaaugcccagccc

SEQ ID NO: 1207364 - RNA, 15 nt, Human
auuaaaugcccagcc

SEQ ID NO: 1207365 - RNA, 14 nt, Human
auuaaaugcccagc

SEQ ID NO: 1207366 - RNA, 18 nt, Human
auguuuuaagaggcaggg

SEQ ID NO: 1207367 - RNA, 16 nt, Human
auguuuuaagaggcag

SEQ ID NO: 1207368 - RNA, 14 nt, Human
auguuugccucugc

SEQ ID NO: 1207369 - RNA, 17 nt, Human
auguaagcucuacugag

SEQ ID NO: 1207370 - RNA, 17 nt, Human
augucacaggcaggucc

SEQ ID NO: 1207371 - RNA, 16 nt, Human
augucacaggcagguc

SEQ ID NO: 1207372 - RNA, 15 nt, Human
augucacaggcaggu

SEQ ID NO: 1207373 - RNA, 23 nt, Human
auggcugccaaugggagcucaug

SEQ ID NO: 1207374 - RNA, 15 nt, Human
augggaaugaauguc

SEQ ID NO: 1207375 - RNA, 21 nt, Human
augggaaugaaugucagugug

SEQ ID NO: 1207376 - RNA, 11 nt, Human
auggaacacuc

SEQ ID NO: 1207377 - RNA, 20 nt, Human
auggaaaugggcagagcaga

SEQ ID NO: 1207378 - RNA, 19 nt, Human
auggaaaugggcagagcag

SEQ ID NO: 1207379 - RNA, 18 nt, Human
augccugguggcagcugc

SEQ ID NO: 1207380 - RNA, 17 nt, Human
augccugguggcagcug

SEQ ID NO: 1207381 - RNA, 16 nt, Human
augccugguggcagcu

SEQ ID NO: 1207382 - RNA, 15 nt, Human
augccugguggcagc

SEQ ID NO: 1207383 - RNA, 11 nt, Human
augccuggugg

SEQ ID NO: 1207384 - RNA, 17 nt, Human
augccugggcagaagga

SEQ ID NO: 1207385 - RNA, 23 nt, Human
augccuggauggggcugcaccgg

SEQ ID NO: 1207386 - RNA, 21 nt, Human
augccuggauggggcugcacc

SEQ ID NO: 1207387 - RNA, 18 nt, Human
augcauuugaaaauuuug

SEQ ID NO: 1207388 - RNA, 12 nt, Human
augcauuugaaa

SEQ ID NO: 1207389 - RNA, 10 nt, Human
augcauuuga

SEQ ID NO: 1207390 - RNA, 23 nt, Human
augcaugaaguaauaugcacaca

SEQ ID NO: 1207391 - RNA, 21 nt, Human
augcacagcuaacauggaagu

SEQ ID NO: 1207392 - RNA, 14 nt, Human
augcacagcuaaca

SEQ ID NO: 1207393 - RNA, 23 nt, Human
augcacacauuuuuuaaaugcac

SEQ ID NO: 1207394 - RNA, 22 nt, Human
augcacacauuuuuuaaaugca

SEQ ID NO: 1207395 - RNA, 19 nt, Human
augcacacauuuuuuaaau

SEQ ID NO: 1207396 - RNA, 17 nt, Human
augcacacauuuuuuaa

SEQ ID NO: 1207397 - RNA, 17 nt, Human
augacuccagaauuucc

SEQ ID NO: 1207398 - RNA, 16 nt, Human
augacuccagaauuuc

SEQ ID NO: 1207399 - RNA, 12 nt, Human
augacuccagaa

SEQ ID NO: 1207400 - RNA, 12 nt, Human
augacccagugg

SEQ ID NO: 1207401 - RNA, 14 nt, Human
augagccuggcaag

SEQ ID NO: 1207402 - RNA, 13 nt, Human
augagccuggcaa

SEQ ID NO: 1207403 - RNA, 22 nt, Human
aucuucugaacuuggcgcugcc

SEQ ID NO: 1207404 - RNA, 17 nt, Human
aucuucuuuauaauucu

SEQ ID NO: 1207405 - RNA, 18 nt, Human
aucuugaagacuuuucuu

SEQ ID NO: 1207406 - RNA, 17 nt, Human
aucuugaagacuuuucu

SEQ ID NO: 1207407 - RNA, 22 nt, Human
aucucucgugauugauaagaac

SEQ ID NO: 1207408 - RNA, 19 nt, Human
aucuuccaacucaaacucu

SEQ ID NO: 1207409 - RNA, 23 nt, Human
aucagcugcuacuacuccuguag

SEQ ID NO: 1207410 - RNA, 13 nt, Human
aucagcugcuacu

SEQ ID NO: 1207411 - RNA, 17 nt, Human
aucagccugcuccagcu

SEQ ID NO: 1207412 - RNA, 21 nt, Human
aucagccugggcaaugugaua

SEQ ID NO: 1207413 - RNA, 20 nt, Human
aucagccugggcaaugugau

SEQ ID NO: 1207414 - RNA, 11 nt, Human
aucagccuggg

SEQ ID NO: 1207415 - RNA, 11 nt, Human
auccuccucag

SEQ ID NO: 1207416 - RNA, 23 nt, Human
auccucauacccacccccaccca

SEQ ID NO: 1207417 - RNA, 22 nt, Human
auccuccaggugcacaagcucc

SEQ ID NO: 1207418 - RNA, 19 nt, Human
auccuccaggugcacaagc

SEQ ID NO: 1207419 - RNA, 14 nt, Human
auccuccaggugca

SEQ ID NO: 1207420 - RNA, 13 nt, Human
aucgaugcagugc

SEQ ID NO: 1207421 - RNA, 14 nt, Human
auccuccucagauc

SEQ ID NO: 1207422 - RNA, 20 nt, Human
auccacccaccucagccucc

SEQ ID NO: 1207423 - RNA, 18 nt, Human
auccacccaccucagccu

SEQ ID NO: 1207424 - RNA, 22 nt, Human
auccucauacccacccccaccc

SEQ ID NO: 1207425 - RNA, 19 nt, Human
auccucauacccaccccca

SEQ ID NO: 1207426 - RNA, 18 nt, Human
auccucauacccaccccc

SEQ ID NO: 1207427 - RNA, 13 nt, Human
aucccucauccuc

SEQ ID NO: 1207428 - RNA, 20 nt, Human
aggaccccuccaugugggcu

SEQ ID NO: 1207429 - RNA, 18 nt, Human
aggagaggggcacagggu

SEQ ID NO: 1207430 - RNA, 16 nt, Human
aggagaggggcacagg

SEQ ID NO: 1207431 - RNA, 15 nt, Human
aggagaggagagggg

SEQ ID NO: 1207432 - RNA, 15 nt, Human
aggagagcuagcagc

SEQ ID NO: 1207433 - RNA, 20 nt, Human
aggaccucaggugagaagca

SEQ ID NO: 1207434 - RNA, 14 nt, Human
aggaccucagguga

SEQ ID NO: 1207435 - RNA, 20 nt, Human
aggauguucugggacacagu

SEQ ID NO: 1207436 - RNA, 17 nt, Human
aggaggggauagagaga

SEQ ID NO: 1207437 - RNA, 12 nt, Human
aggauucuuccu

SEQ ID NO: 1207438 - RNA, 16 nt, Human
aggauucuuccucccu

SEQ ID NO: 1207439 - RNA, 15 nt, Human
aggaaaaacugauuu

SEQ ID NO: 1207440 - RNA, 13 nt, Human
aggaaaaacugau

SEQ ID NO: 1207441 - RNA, 22 nt, Human
agcugggugucaagagggucug

SEQ ID NO: 1207442 - RNA, 17 nt, Human
agcugggugucaagagg

SEQ ID NO: 1207443 - RNA, 21 nt, Human
agcuggucccacucaguccau

SEQ ID NO: 1207444 - RNA, 23 nt, Human
aggcuagugugguguuuccuggc

SEQ ID NO: 1207445 - RNA, 18 nt, Human
aggcugccucucccauca

SEQ ID NO: 1207446 - RNA, 20 nt, Human
agggacagaggggguggccu

SEQ ID NO: 1207447 - RNA, 13 nt, Human
agggacagagggg

SEQ ID NO: 1207448 - RNA, 12 nt, Human
agggacagaggg

SEQ ID NO: 1207449 - RNA, 21 nt, Human
agggacgcuacccgggaaggg

SEQ ID NO: 1207450 - RNA, 15 nt, Human
aggggcacagggucu

SEQ ID NO: 1207451 - RNA, 21 nt, Human
aggggauagagagagaccacu

SEQ ID NO: 1207452 - RNA, 19 nt, Human
agggcgggaggauguucug

SEQ ID NO: 1207453 - RNA, 18 nt, Human
agggccuggccugagcug

SEQ ID NO: 1207454 - RNA, 17 nt, Human
agggccuggccugagcu

SEQ ID NO: 1207455 - RNA, 16 nt, Human
agggccuggccugagc

SEQ ID NO: 1207456 - RNA, 15 nt, Human
agggccuggccugag

SEQ ID NO: 1207457 - RNA, 22 nt, Human
agggcacagaaaauggaagaca

SEQ ID NO: 1207458 - RNA, 21 nt, Human
agggcacaccgggcacucaga

SEQ ID NO: 1207459 - RNA, 20 nt, Human
agggcacaccgggcacucag

SEQ ID NO: 1207460 - RNA, 17 nt, Human
agggcacaccgggcacu

SEQ ID NO: 1207461 - RNA, 17 nt, Human
aggugcugccauccagg

SEQ ID NO: 1207462 - RNA, 16 nt, Human
aggugcugccauccag

SEQ ID NO: 1207463 - RNA, 14 nt, Human
aggucgaggcagga

SEQ ID NO: 1207464 - RNA, 17 nt, Human
agguucaaagauauuuu

SEQ ID NO: 1207465 - RNA, 14 nt, Human
agguuaauguucau

SEQ ID NO: 1207466 - RNA, 13 nt, Human
agguucccuuuga

SEQ ID NO: 1207467 - RNA, 13 nt, Human
agguucagcuugu

SEQ ID NO: 1207468 - RNA, 22 nt, Human
agguacgaaaagaggggaagag

SEQ ID NO: 1207469 - RNA, 17 nt, Human
agguaaggaauaccugu

SEQ ID NO: 1207470 - RNA, 20 nt, Human
agccagaggagagaggaccc

SEQ ID NO: 1207471 - RNA, 23 nt, Human
agccaaggccaaaggaagcacau

SEQ ID NO: 1207472 - RNA, 22 nt, Human
agccaaggccaaaggaagcaca

SEQ ID NO: 1207473 - RNA, 23 nt, Human
agccaaagcuaggccuggccaga

SEQ ID NO: 1207474 - RNA, 20 nt, Human
agccaaagcuaggccuggcc

SEQ ID NO: 1207475 - RNA, 19 nt, Human
agccaaagcuaggccuggc

SEQ ID NO: 1207476 - RNA, 20 nt, Human
agcaugccuggauggggcug

SEQ ID NO: 1207477 - RNA, 12 nt, Human
agcaugccugga

SEQ ID NO: 1207478 - RNA, 21 nt, Human
agcagccacauuccugaugcu

SEQ ID NO: 1207479 - RNA, 20 nt, Human
agcacuaaggugugcucuga

SEQ ID NO: 1207480 - RNA, 19 nt, Human
agcacuaaggugugcucug

SEQ ID NO: 1207481 - RNA, 20 nt, Human
agccgagauugcaccacugc

SEQ ID NO: 1207482 - RNA, 19 nt, Human
agccgagauugcaccacug

SEQ ID NO: 1207483 - RNA, 21 nt, Human
agccgagaucacgccacugca

SEQ ID NO: 1207484 - RNA, 22 nt, Human
agccgcuggggccaguuggucc

SEQ ID NO: 1207485 - RNA, 14 nt, Human
agccgcuggggcca

SEQ ID NO: 1207486 - RNA, 19 nt, Human
agccucccaaagugcuggg

SEQ ID NO: 1207487 - RNA, 18 nt, Human
agccucccaaagugcugg

SEQ ID NO: 1207488 - RNA, 17 nt, Human
agccucccgaguagcug

SEQ ID NO: 1207489 - RNA, 22 nt, Human
agccucccgaauagcugggacu

SEQ ID NO: 1207490 - RNA, 20 nt, Human
agccucccgaauagcuggga

SEQ ID NO: 1207491 - RNA, 19 nt, Human
agccucccgaauagcuggg

SEQ ID NO: 1207492 - RNA, 18 nt, Human
agccucccgaauagcugg

SEQ ID NO: 1207493 - RNA, 20 nt, Human
agccucccaaagugcuggga

SEQ ID NO: 1207494 - RNA, 20 nt, Human
agccgagaucacgccacugc

SEQ ID NO: 1207495 - RNA, 19 nt, Human
agccgagaucacgccacug

SEQ ID NO: 1207496 - RNA, 15 nt, Human
agcccugagcuuucu

SEQ ID NO: 1207497 - RNA, 11 nt, Human
agccccauccu

SEQ ID NO: 1207498 - RNA, 20 nt, Human
agccccaucccaaacccuuc

SEQ ID NO: 1207499 - RNA, 16 nt, Human
agccccagugcccaca

SEQ ID NO: 1207500 - RNA, 18 nt, Human
agacgggggcagagaggg

SEQ ID NO: 1207501 - RNA, 19 nt, Human
agacggagucccaccuugg

SEQ ID NO: 1207502 - RNA, 21 nt, Human
agaccaucccugaaggccccg

SEQ ID NO: 1207503 - RNA, 18 nt, Human
agaccaucccugaaggcc

SEQ ID NO: 1207504 - RNA, 17 nt, Human
agaccaucccugaaggc

SEQ ID NO: 1207505 - RNA, 14 nt, Human
agaccaucccugaa

SEQ ID NO: 1207506 - RNA, 13 nt, Human
agaccaucccuga

SEQ ID NO: 1207507 - RNA, 21 nt, Human
agacagcccgggcucugccuc

SEQ ID NO: 1207508 - RNA, 20 nt, Human
agacagcccgggcucugccu

SEQ ID NO: 1207509 - RNA, 18 nt, Human
agacagcccgggcucugc

SEQ ID NO: 1207510 - RNA, 17 nt, Human
agacagcccgggcucug

SEQ ID NO: 1207511 - RNA, 21 nt, Human
agacaauuuauuauggcacau

SEQ ID NO: 1207512 - RNA, 15 nt, Human
agacaauuuauuaug

SEQ ID NO: 1207513 - RNA, 19 nt, Human
agacaaugacuuacuguac

SEQ ID NO: 1207514 - RNA, 17 nt, Human
agacaaugacuuacugu

SEQ ID NO: 1207515 - RNA, 13 nt, Human
agacaaugacuua

SEQ ID NO: 1207516 - RNA, 18 nt, Human
agagaaaguacuucucca

SEQ ID NO: 1207517 - RNA, 21 nt, Human
agagaagagauugugguuuca

SEQ ID NO: 1207518 - RNA, 10 nt, Human
agagaagaga

SEQ ID NO: 1207519 - RNA, 13 nt, Human
agauagccaaggc

SEQ ID NO: 1207520 - RNA, 22 nt, Human
agauacuuggggggcugaggug

SEQ ID NO: 1207521 - RNA, 22 nt, Human
agaggggaacagacuggaagca

SEQ ID NO: 1207522 - RNA, 16 nt, Human
agaggggaagagacuu

SEQ ID NO: 1207523 - RNA, 13 nt, Human
agaggagaggggc

SEQ ID NO: 1207524 - RNA, 20 nt, Human
agauagccaaggccaaagga

SEQ ID NO: 1207525 - RNA, 16 nt, Human
agauagccaaggccaa

SEQ ID NO: 1207526 - RNA, 15 nt, Human
agauagccaaggcca

SEQ ID NO: 1207527 - RNA, 14 nt, Human
agaucuucuguggg

SEQ ID NO: 1207528 - RNA, 13 nt, Human
aaugucaguguga

SEQ ID NO: 1207529 - RNA, 16 nt, Human
aaugucagugugacug

SEQ ID NO: 1207530 - RNA, 15 nt, Human
aaugucagugugacu

SEQ ID NO: 1207531 - RNA, 22 nt, Human
aaugucuaguuguaacaccaug

SEQ ID NO: 1207532 - RNA, 21 nt, Human
aaugucagugugacugaucuc

SEQ ID NO: 1207533 - RNA, 17 nt, Human
aaugucagugugacuga

SEQ ID NO: 1207534 - RNA, 20 nt, Human
aaugucucuuuaaugucaca

SEQ ID NO: 1207535 - RNA, 15 nt, Human
aaugggcagagcaga

SEQ ID NO: 1207536 - RNA, 18 nt, Human
aauuaaaacacaacaucu

SEQ ID NO: 1207537 - RNA, 19 nt, Human
aauguuugccucugccucu

SEQ ID NO: 1207538 - RNA, 18 nt, Human
aauguuugccucugccuc

SEQ ID NO: 1207539 - RNA, 18 nt, Human
aauuaguggcacuugcuu

SEQ ID NO: 1207540 - RNA, 21 nt, Human
aaugaugauccuaggcauuug

SEQ ID NO: 1207541 - RNA, 23 nt, Human
aaugaaccacaucuugcucugcu

SEQ ID NO: 1207542 - RNA, 17 nt, Human
aaugaaccacaucuugc

SEQ ID NO: 1207543 - RNA, 16 nt, Human
aaugaaccacaucuug

SEQ ID NO: 1207544 - RNA, 22 nt, Human
aaucugcuuuuuaaagaaugcu

SEQ ID NO: 1207545 - RNA, 18 nt, Human
aaucuccaaaauaaaacu

SEQ ID NO: 1207546 - RNA, 14 nt, Human
aaucuccaaaauaa

SEQ ID NO: 1207547 - RNA, 13 nt, Human
aaucuccaaaaua

SEQ ID NO: 1207548 - RNA, 19 nt, Human
aaugaugccaugaggaaca

SEQ ID NO: 1207549 - RNA, 18 nt, Human
aauauaggaacuuaaaua

SEQ ID NO: 1207550 - RNA, 21 nt, Human
aauauaggaacuuaaauaaug

SEQ ID NO: 1207551 - RNA, 20 nt, Human
aauauaggaacuuaaauaau

SEQ ID NO: 1207552 - RNA, 16 nt, Human
aauaaugugaaacugg

SEQ ID NO: 1207553 - RNA, 17 nt, Human
aaguaucccuacuguaa

SEQ ID NO: 1207554 - RNA, 16 nt, Human
aaguaucccuacugua

SEQ ID NO: 1207555 - RNA, 11 nt, Human
aaguacuucuu

SEQ ID NO: 1207556 - RNA, 20 nt, Human
aagguuaauguucaucaucc

SEQ ID NO: 1207557 - RNA, 16 nt, Human
aagguuaauaaaguaa

SEQ ID NO: 1207558 - RNA, 15 nt, Human
aagguuaauaaagua

SEQ ID NO: 1207559 - RNA, 11 nt, Human
aaggugggagg

SEQ ID NO: 1207560 - RNA, 16 nt, Human
aagucuuagauguaua

SEQ ID NO: 1207561 - RNA, 17 nt, Human
aagucuuagauguauau

SEQ ID NO: 1207562 - RNA, 18 nt, Human
aaggcaaggcugucaauu

SEQ ID NO: 1207563 - RNA, 17 nt, Human
aaggcaaggcugucaau

SEQ ID NO: 1207564 - RNA, 22 nt, Human
aagcugcacccucaggcaggug

SEQ ID NO: 1207565 - RNA, 21 nt, Human
aagcugcacccucaggcaggu

SEQ ID NO: 1207566 - RNA, 12 nt, Human
aagcguggugga

SEQ ID NO: 1207567 - RNA, 18 nt, Human
aaggacauugcggacagc

SEQ ID NO: 1207568 - RNA, 15 nt, Human
aagcugggcagguug

SEQ ID NO: 1207569 - RNA, 13 nt, Human
aagcugggcaggu

SEQ ID NO: 1207570 - RNA, 11 nt, Human
aagcugggcag

SEQ ID NO: 1207571 - RNA, 14 nt, Human
aagcagaggaagga

SEQ ID NO: 1207572 - RNA, 21 nt, Human
aagcagaggaaggagaggaga

SEQ ID NO: 1207573 - RNA, 14 nt, Human
aaagugcugggauu

SEQ ID NO: 1207574 - RNA, 11 nt, Human
aaagugcuggg

SEQ ID NO: 1207575 - RNA, 20 nt, Human
aaauggacguguuaugacuc

SEQ ID NO: 1207576 - RNA, 22 nt, Human
aaauggacguguuaugacucca

SEQ ID NO: 1207577 - RNA, 21 nt, Human
aaauggacguguuaugacucc

SEQ ID NO: 1207578 - RNA, 18 nt, Human
aaauggaagacagcucuu

SEQ ID NO: 1207579 - RNA, 16 nt, Human
aaauggaaaugggcag

SEQ ID NO: 1207580 - RNA, 14 nt, Human
aaauauaauugaca

SEQ ID NO: 1207581 - RNA, 19 nt, Human
aaauaguggugugauuugg

SEQ ID NO: 1207582 - RNA, 18 nt, Human
aaacacuguucucugccc

SEQ ID NO: 1207583 - RNA, 13 nt, Human
aaaauucagugga

SEQ ID NO: 1207584 - RNA, 15 nt, Human
aaaacacauuuuucu

SEQ ID NO: 1207585 - RNA, 13 nt, Human
aaaacacauuuuu

SEQ ID NO: 1207586 - RNA, 22 nt, Human
aaacacuguucucugcccucca

SEQ ID NO: 1207587 - RNA, 19 nt, Human
aaacacuguucucugcccu

SEQ ID NO: 1207588 - RNA, 14 nt, Human
aaagaguaggaaga

SEQ ID NO: 1207589 - RNA, 15 nt, Human
aacuuuuauaaacuu

SEQ ID NO: 1207590 - RNA, 12 nt, Human
aacuuuuauaaa

SEQ ID NO: 1207591 - RNA, 20 nt, Human
aacuuugaccucugcagcaa

SEQ ID NO: 1207592 - RNA, 19 nt, Human
aacuuugaccucugcagca

SEQ ID NO: 1207593 - RNA, 17 nt, Human
aacuuugaccucugcag

SEQ ID NO: 1207594 - RNA, 14 nt, Human
aacuuugaccucug

SEQ ID NO: 1207595 - RNA, 13 nt, Human
aacuuugaccucu

SEQ ID NO: 1207596 - RNA, 19 nt, Human
aacuuuuauaaacuuuacc

SEQ ID NO: 1207597 - RNA, 16 nt, Human
aacuuuuauaaacuuu

SEQ ID NO: 1207598 - RNA, 13 nt, Human
aacuucacauauu

SEQ ID NO: 1207599 - RNA, 17 nt, Human
aacuuaaauaaugugaa

SEQ ID NO: 1207600 - RNA, 19 nt, Human
aacuuaaauaaugugaaac

SEQ ID NO: 1207601 - RNA, 20 nt, Human
aacugauuuuuuuuuccuuc

SEQ ID NO: 1207602 - RNA, 19 nt, Human
aacugauuuuuuuuuccuu

SEQ ID NO: 1207603 - RNA, 17 nt, Human
aacugauuuuuuuuucc

SEQ ID NO: 1207604 - RNA, 16 nt, Human
aacucaccugccccuc

SEQ ID NO: 1207605 - RNA, 15 nt, Human
aacucaccugccccu

SEQ ID NO: 1207606 - RNA, 15 nt, Human
aacucaccccagccc

SEQ ID NO: 1207607 - RNA, 12 nt, Human
aacucaccccag

SEQ ID NO: 1207608 - RNA, 14 nt, Human
aacccuggugacca

SEQ ID NO: 1207609 - RNA, 17 nt, Human
aaccaguguuguggauu

SEQ ID NO: 1207610 - RNA, 22 nt, Human
aaccacucuaucaaguauuaua

SEQ ID NO: 1207611 - RNA, 23 nt, Human
aacauguaauuaaguacuaugua

SEQ ID NO: 1207612 - RNA, 21 nt, Human
aacauguaauuaaguacuaug

SEQ ID NO: 1207613 - RNA, 14 nt, Human
aacauguaauuaag

SEQ ID NO: 1207614 - RNA, 22 nt, Human
aacaugcuacacacugcauguu

SEQ ID NO: 1207615 - RNA, 19 nt, Human
aacacauuuuucuuaggga

SEQ ID NO: 1207616 - RNA, 17 nt, Human
acuccccugcugggugu

SEQ ID NO: 1207617 - RNA, 13 nt, Human
acuccccugcugg

SEQ ID NO: 1207618 - RNA, 14 nt, Human
acucccccaggugg

SEQ ID NO: 1207619 - RNA, 17 nt, Human
acucaaacucuuaaaac

SEQ ID NO: 1207620 - RNA, 16 nt, Human
acucaaacucuuaaaa

SEQ ID NO: 1207621 - RNA, 11 nt, Human
acuauaaugua

SEQ ID NO: 1207622 - RNA, 18 nt, Human
acucuuaaaacccaagug

SEQ ID NO: 1207623 - RNA, 11 nt, Human
acucuuaaaac

SEQ ID NO: 1207624 - RNA, 19 nt, Human
acucugugucagguggggc

SEQ ID NO: 1207625 - RNA, 16 nt, Human
acucugugucaggugg

SEQ ID NO: 1207626 - RNA, 21 nt, Human
acucuaucaaguauuauaccu

SEQ ID NO: 1207627 - RNA, 16 nt, Human
acucuaucaaguauua

SEQ ID NO: 1207628 - RNA, 14 nt, Human
acucuaucaaguau

SEQ ID NO: 1207629 - RNA, 21 nt, Human
acucuacccucuuagaaaaac

SEQ ID NO: 1207630 - RNA, 18 nt, Human
acucuacccucuuagaaa

SEQ ID NO: 1207631 - RNA, 17 nt, Human
acgccagauucuuuccu

SEQ ID NO: 1207632 - RNA, 17 nt, Human
acgcugugcugcccugc

SEQ ID NO: 1207633 - RNA, 16 nt, Human
acgcugugcugcccug

SEQ ID NO: 1207634 - RNA, 19 nt, Human
acgcugugcugcccugccc

SEQ ID NO: 1207635 - RNA, 18 nt, Human
acgcugugcugcccugcc

SEQ ID NO: 1207636 - RNA, 17 nt, Human
acguggcugcuucaagg

SEQ ID NO: 1207637 - RNA, 15 nt, Human
acguggcugcuucaa

SEQ ID NO: 1207638 - RNA, 14 nt, Human
acguggcugcuuca

SEQ ID NO: 1207639 - RNA, 13 nt, Human
acguggcugcuuc

SEQ ID NO: 1207640 - RNA, 22 nt, Human
acuaaguuuuuauggcuuuugu

SEQ ID NO: 1207641 - RNA, 19 nt, Human
acgauuucuguuuagauaa

SEQ ID NO: 1207642 - RNA, 18 nt, Human
acgccacugcacuauagc

SEQ ID NO: 1207643 - RNA, 17 nt, Human
acgauuucuguuuagau

SEQ ID NO: 1207644 - RNA, 14 nt, Human
acgauuucuguuua

SEQ ID NO: 1207645 - RNA, 13 nt, Human
acgauuucuguuu

SEQ ID NO: 1207646 - RNA, 12 nt, Human
acgauuucuguu

SEQ ID NO: 1207647 - RNA, 21 nt, Human
accucugcacaagcugcaccc

SEQ ID NO: 1207648 - RNA, 15 nt, Human
accucugcagcaaua

SEQ ID NO: 1207649 - RNA, 18 nt, Human
accucugcacaagcugca

SEQ ID NO: 1207650 - RNA, 16 nt, Human
accucugcacaagcug

SEQ ID NO: 1207651 - RNA, 23 nt, Human
accugccccucaacucuccucca

SEQ ID NO: 1207652 - RNA, 23 nt, Human
accuuucaauaggaaaaacugau

SEQ ID NO: 1207653 - RNA, 21 nt, Human
accuuucaauaggaaaaacug

SEQ ID NO: 1207654 - RNA, 17 nt, Human
accuuucaauaggaaaa

SEQ ID NO: 1207655 - RNA, 14 nt, Human
accuuggcugcagg

SEQ ID NO: 1207656 - RNA, 16 nt, Human
accuuucaauaggaaa

SEQ ID NO: 1207657 - RNA, 12 nt, Human
accuuggcugca

SEQ ID NO: 1207658 - RNA, 14 nt, Human
accuuggcucaagu

SEQ ID NO: 1207659 - RNA, 19 nt, Human
acuucacauauugauuucc

SEQ ID NO: 1207660 - RNA, 13 nt, Human
acuguuucaaacu

SEQ ID NO: 1207661 - RNA, 19 nt, Human
acuucugccauauucuguu

SEQ ID NO: 1207662 - RNA, 18 nt, Human
acuucugccauauucugu

SEQ ID NO: 1207663 - RNA, 23 nt, Human
acuucacauauugauuuccguua

SEQ ID NO: 1207664 - RNA, 14 nt, Human
acuggagaaaaugg

SEQ ID NO: 1207665 - RNA, 16 nt, Human
acuggaagcacagcuu

SEQ ID NO: 1207666 - RNA, 15 nt, Human
acuggaagcacagcu

SEQ ID NO: 1207667 - RNA, 14 nt, Human
acuggaagcacagc

SEQ ID NO: 1207668 - RNA, 12 nt, Human
acugucuucagu

SEQ ID NO: 1207669 - RNA, 16 nt, Human
acugugccaugugcca

SEQ ID NO: 1207670 - RNA, 22 nt, Human
acuuuuauaaacuuuaccuuuu

SEQ ID NO: 1207671 - RNA, 19 nt, Human
acuuuuauaaacuuuaccu

SEQ ID NO: 1207672 - RNA, 23 nt, Human
agaaaauggacguguuaugacuc

SEQ ID NO: 1207673 - RNA, 22 nt, Human
agaaaauggacguguuaugacu

SEQ ID NO: 1207674 - RNA, 20 nt, Human
agaaaauggacguguuauga

SEQ ID NO: 1207675 - RNA, 15 nt, Human
agaaaauggacgugu

SEQ ID NO: 1207676 - RNA, 23 nt, Human
agaaaauggaagacagcucuuau

SEQ ID NO: 1207677 - RNA, 23 nt, Human
acuuuguucuggcucuuccaggc

SEQ ID NO: 1207678 - RNA, 16 nt, Human
acuuucuagccagagg

SEQ ID NO: 1207679 - RNA, 23 nt, Human
acuuuccuucauucaacccaccu

SEQ ID NO: 1207680 - RNA, 18 nt, Human
agaaauaaaguuucuguu

SEQ ID NO: 1207681 - RNA, 15 nt, Human
agaaauaaaguuucu

SEQ ID NO: 1207682 - RNA, 23 nt, Human
agaaaggaggggauagagagaga

SEQ ID NO: 1207683 - RNA, 20 nt, Human
agaaaggaggggauagagag

SEQ ID NO: 1207684 - RNA, 15 nt, Human
accccggccaccugc

SEQ ID NO: 1207685 - RNA, 18 nt, Human
acccaagggccuggccug

SEQ ID NO: 1207686 - RNA, 16 nt, Human
acccaagggccuggcc

SEQ ID NO: 1207687 - RNA, 13 nt, Human
acccaagggccug

SEQ ID NO: 1207688 - RNA, 18 nt, Human
acccaugcugcccuguga

SEQ ID NO: 1207689 - RNA, 17 nt, Human
acccaugcugcccugug

SEQ ID NO: 1207690 - RNA, 19 nt, Human
acccaugcugcccugugag

SEQ ID NO: 1207691 - RNA, 18 nt, Human
accaucccugaaggcccc

SEQ ID NO: 1207692 - RNA, 12 nt, Human
accaucauugaa

SEQ ID NO: 1207693 - RNA, 17 nt, Human
accaucaugucuggcua

SEQ ID NO: 1207694 - RNA, 16 nt, Human
accaucaugucuggcu

SEQ ID NO: 1207695 - RNA, 22 nt, Human
accaucccugaaggccccgccc

SEQ ID NO: 1207696 - RNA, 21 nt, Human
accaucccugaaggccccgcc

SEQ ID NO: 1207697 - RNA, 14 nt, Human
accaucaugucugg

SEQ ID NO: 1207698 - RNA, 20 nt, Human
accccucaacaccucugcac

SEQ ID NO: 1207699 - RNA, 23 nt, Human
acauaaacaagaccacguuucua

SEQ ID NO: 1207700 - RNA, 22 nt, Human
acaucagcacgauuucuguuua

SEQ ID NO: 1207701 - RNA, 21 nt, Human
acaucagcacgauuucuguuu

SEQ ID NO: 1207702 - RNA, 20 nt, Human
acaucagcacgauuucuguu

SEQ ID NO: 1207703 - RNA, 21 nt, Human
acauguuuuucuucucccuca

SEQ ID NO: 1207704 - RNA, 23 nt, Human
acaugcacagcuaacauggaagu

SEQ ID NO: 1207705 - RNA, 20 nt, Human
acaugcacagcuaacaugga

SEQ ID NO: 1207706 - RNA, 19 nt, Human
acaugcaaggucauuuuuu

SEQ ID NO: 1207707 - RNA, 17 nt, Human
accagcagccuggaccc

SEQ ID NO: 1207708 - RNA, 14 nt, Human
accagcagccugga

SEQ ID NO: 1207709 - RNA, 15 nt, Human
accacuacauucugu

SEQ ID NO: 1207710 - RNA, 14 nt, Human
accacuacauucug

SEQ ID NO: 1207711 - RNA, 14 nt, Human
accacgcuggaccu

SEQ ID NO: 1207712 - RNA, 19 nt, Human
accacguuucuaaaggcua

SEQ ID NO: 1207713 - RNA, 15 nt, Human
accacguuucuaaag

SEQ ID NO: 1207714 - RNA, 20 nt, Human
acaaaauguaggguuauaau

SEQ ID NO: 1207715 - RNA, 15 nt, Human
acaaacgggcucagc

SEQ ID NO: 1207716 - RNA, 21 nt, Human
acaaaccuguuucugcagcca

SEQ ID NO: 1207717 - RNA, 13 nt, Human
acaaagacugagu

SEQ ID NO: 1207718 - RNA, 18 nt, Human
acacaaacgggcucagca

SEQ ID NO: 1207719 - RNA, 15 nt, Human
acaauuuauuauggc

SEQ ID NO: 1207720 - RNA, 16 nt, Human
acaauuuauuauggca

SEQ ID NO: 1207721 - RNA, 15 nt, Human
acacggacacucaaa

SEQ ID NO: 1207722 - RNA, 15 nt, Human
acacuaaccacgcug

SEQ ID NO: 1207723 - RNA, 14 nt, Human
acacuaaccacgcu

SEQ ID NO: 1207724 - RNA, 14 nt, Human
acacagcucugucc

SEQ ID NO: 1207725 - RNA, 12 nt, Human
acacagcucugu

SEQ ID NO: 1207726 - RNA, 11 nt, Human
acacagcucug

SEQ ID NO: 1207727 - RNA, 14 nt, Human
acaccacuacauuc

SEQ ID NO: 1207728 - RNA, 13 nt, Human
acaccagagccca

SEQ ID NO: 1207729 - RNA, 12 nt, Human
acaccagagccc

SEQ ID NO: 1207730 - RNA, 17 nt, Human
acacugugcugagucug

SEQ ID NO: 1207731 - RNA, 15 nt, Human
acagccaugauucuu

SEQ ID NO: 1207732 - RNA, 14 nt, Human
acagagucucacug

SEQ ID NO: 1207733 - RNA, 12 nt, Human
acagagucucac

SEQ ID NO: 1207734 - RNA, 22 nt, Human
acagaggggguggccucccaac

SEQ ID NO: 1207735 - RNA, 23 nt, Human
acagagucucacuguugcccagg

SEQ ID NO: 1207736 - RNA, 19 nt, Human
acagagucucacuguugcc

SEQ ID NO: 1207737 - RNA, 17 nt, Human
acagagucucacuguug

SEQ ID NO: 1207738 - RNA, 16 nt, Human
acaggcaagcaccucc

SEQ ID NO: 1207739 - RNA, 18 nt, Human
acaggcaagcaccuccug

SEQ ID NO: 1207740 - RNA, 19 nt, Human
acaggcaagcaccuccugc

SEQ ID NO: 1207741 - RNA, 23 nt, Human
acaggugugaaccaccacaccca

SEQ ID NO: 1207742 - RNA, 20 nt, Human
acaggugugaaccaccacac

SEQ ID NO: 1207743 - RNA, 22 nt, Human
acaggugugagucaccaagccc

SEQ ID NO: 1207744 - RNA, 23 nt, Human
acagcugccugggaucccucauc

SEQ ID NO: 1207745 - RNA, 14 nt, Human
acagcugccuggga

SEQ ID NO: 1207746 - RNA, 13 nt, Human
acagcucuguccu

SEQ ID NO: 1207747 - RNA, 15 nt, Human
acagcuccuucuguc

SEQ ID NO: 1207748 - RNA, 14 nt, Human
acagcuccuucugu

SEQ ID NO: 1207749 - RNA, 13 nt, Human
acagcuccuucug

SEQ ID NO: 1207750 - RNA, 12 nt, Human
acagcuccuucu

SEQ ID NO: 1207751 - RNA, 14 nt, Human
caaccuccugggcu

SEQ ID NO: 1207752 - RNA, 15 nt, Human
caaccuccugggcua

SEQ ID NO: 1207753 - RNA, 14 nt, Human
caacgucugugcca

SEQ ID NO: 1207754 - RNA, 13 nt, Human
caacgucugugcc

SEQ ID NO: 1207755 - RNA, 22 nt, Human
caacacucauugaccugaggcc

SEQ ID NO: 1207756 - RNA, 20 nt, Human
caacacucauugaccugagg

SEQ ID NO: 1207757 - RNA, 18 nt, Human
caacacucauugaccuga

SEQ ID NO: 1207758 - RNA, 17 nt, Human
caagagcccaggccucc

SEQ ID NO: 1207759 - RNA, 16 nt, Human
caagagcccaggccuc

SEQ ID NO: 1207760 - RNA, 17 nt, Human
caagcaccuccugccuc

SEQ ID NO: 1207761 - RNA, 16 nt, Human
caagcaccuccugccu

SEQ ID NO: 1207762 - RNA, 15 nt, Human
caagcaccuccugcc

SEQ ID NO: 1207763 - RNA, 15 nt, Human
caagagcccaggccu

SEQ ID NO: 1207764 - RNA, 14 nt, Human
caagagcccaggcc

SEQ ID NO: 1207765 - RNA, 18 nt, Human
caagacucuuuggacacu

SEQ ID NO: 1207766 - RNA, 19 nt, Human
caagacgcugugcugcccu

SEQ ID NO: 1207767 - RNA, 18 nt, Human
caagacgcugugcugccc

SEQ ID NO: 1207768 - RNA, 17 nt, Human
caagacgcugugcugcc

SEQ ID NO: 1207769 - RNA, 16 nt, Human
caagacgcugugcugc

SEQ ID NO: 1207770 - RNA, 18 nt, Human
caagaccuucuccuucac

SEQ ID NO: 1207771 - RNA, 17 nt, Human
caagaccuucuccuuca

SEQ ID NO: 1207772 - RNA, 16 nt, Human
caagaccuucuccuuc

SEQ ID NO: 1207773 - RNA, 20 nt, Human
caagaacuuuccaggaaggc

SEQ ID NO: 1207774 - RNA, 22 nt, Human
caagcgauucuucugcuucagc

SEQ ID NO: 1207775 - RNA, 20 nt, Human
caagcgauucuucugcuuca

SEQ ID NO: 1207776 - RNA, 18 nt, Human
caagcaggacauggacaa

SEQ ID NO: 1207777 - RNA, 14 nt, Human
caagcaggacaugg

SEQ ID NO: 1207778 - RNA, 18 nt, Human
caagcaccuccugccucg

SEQ ID NO: 1207779 - RNA, 19 nt, Human
caagcuggucccacucagu

SEQ ID NO: 1207780 - RNA, 17 nt, Human
caagcuggucccacuca

SEQ ID NO: 1207781 - RNA, 17 nt, Human
caagugagagcugggug

SEQ ID NO: 1207782 - RNA, 15 nt, Human
caagugagagcuggg

SEQ ID NO: 1207783 - RNA, 14 nt, Human
caagugagagcugg

SEQ ID NO: 1207784 - RNA, 21 nt, Human
caaguccucuuuucugagagg

SEQ ID NO: 1207785 - RNA, 18 nt, Human
caagugagagcugggugu

SEQ ID NO: 1207786 - RNA, 14 nt, Human
caaguuaaauaaau

SEQ ID NO: 1207787 - RNA, 18 nt, Human
caaggggcccaaauucuu

SEQ ID NO: 1207788 - RNA, 23 nt, Human
caaggcugucaauuacaggaagu

SEQ ID NO: 1207789 - RNA, 15 nt, Human
caaggcugcagugag

SEQ ID NO: 1207790 - RNA, 12 nt, Human
caaggcugcagu

SEQ ID NO: 1207791 - RNA, 14 nt, Human
caaguccucuuuuc

SEQ ID NO: 1207792 - RNA, 20 nt, Human
caaggucauuuuuuuuaaga

SEQ ID NO: 1207793 - RNA, 14 nt, Human
caaggucauuuuuu

SEQ ID NO: 1207794 - RNA, 22 nt, Human
caaugcacuuuguucuggcucu

SEQ ID NO: 1207795 - RNA, 21 nt, Human
caaugcacuuuguucuggcuc

SEQ ID NO: 1207796 - RNA, 20 nt, Human
caaugcacuuuguucuggcu

SEQ ID NO: 1207797 - RNA, 17 nt, Human
caaugcacuuuguucug

SEQ ID NO: 1207798 - RNA, 17 nt, Human
caaugugauaaaacccc

SEQ ID NO: 1207799 - RNA, 15 nt, Human
caaugugauaaaacc

SEQ ID NO: 1207800 - RNA, 16 nt, Human
caauuacaggaaguac

SEQ ID NO: 1207801 - RNA, 23 nt, Human
caauucucauuugucacacacuu

SEQ ID NO: 1207802 - RNA, 17 nt, Human
caauuacaggaaguacu

SEQ ID NO: 1207803 - RNA, 18 nt, Human
caaugacuuacuguacau

SEQ ID NO: 1207804 - RNA, 17 nt, Human
caaugacuuacuguaca

SEQ ID NO: 1207805 - RNA, 15 nt, Human
caaugacuuacugua

SEQ ID NO: 1207806 - RNA, 23 nt, Human
caaugaccuuucaauaggaaaaa

SEQ ID NO: 1207807 - RNA, 17 nt, Human
caauauucgcuguguca

SEQ ID NO: 1207808 - RNA, 13 nt, Human
caauaggaaaaac

SEQ ID NO: 1207809 - RNA, 12 nt, Human
caauaggaaaaa

SEQ ID NO: 1207810 - RNA, 14 nt, Human
caauguucucucuu

SEQ ID NO: 1207811 - RNA, 14 nt, Human
caauaggaaaaacu

SEQ ID NO: 1207812 - RNA, 23 nt, Human
caaagugcugggauuacaggugu

SEQ ID NO: 1207813 - RNA, 19 nt, Human
caaaggguaucaggugcug

SEQ ID NO: 1207814 - RNA, 19 nt, Human
caaagugcugggauuacag

SEQ ID NO: 1207815 - RNA, 14 nt, Human
caaauuucuaaauc

SEQ ID NO: 1207816 - RNA, 12 nt, Human
caaauuucuaaa

SEQ ID NO: 1207817 - RNA, 11 nt, Human
caaauuucuaa

SEQ ID NO: 1207818 - RNA, 18 nt, Human
caaagccuccuccagccg

SEQ ID NO: 1207819 - RNA, 17 nt, Human
caaagccuccuccagcc

SEQ ID NO: 1207820 - RNA, 17 nt, Human
caaacucaccugccccu

SEQ ID NO: 1207821 - RNA, 15 nt, Human
caaagcuaggccugg

SEQ ID NO: 1207822 - RNA, 19 nt, Human
caaagcuaggccuggccag

SEQ ID NO: 1207823 - RNA, 14 nt, Human
caaagcuaggccug

SEQ ID NO: 1207824 - RNA, 13 nt, Human
caaagcuaggccu

SEQ ID NO: 1207825 - RNA, 13 nt, Human
caaaggaagcaca

SEQ ID NO: 1207826 - RNA, 18 nt, Human
caaaggguaucaggugcu

SEQ ID NO: 1207827 - RNA, 16 nt, Human
caaaggguaucaggug

SEQ ID NO: 1207828 - RNA, 14 nt, Human
caaaggaagcacau

SEQ ID NO: 1207829 - RNA, 20 nt, Human
caaacccuucagugccaaaa

SEQ ID NO: 1207830 - RNA, 15 nt, Human
caaacacauacagga

SEQ ID NO: 1207831 - RNA, 15 nt, Human
caaaauguaggguua

SEQ ID NO: 1207832 - RNA, 14 nt, Human
caaaauaaaacuuu

SEQ ID NO: 1207833 - RNA, 12 nt, Human
caaaauaaaacu

SEQ ID NO: 1207834 - RNA, 23 nt, Human
caaaacucuccucugcugcuggc

SEQ ID NO: 1207835 - RNA, 22 nt, Human
caaaacucuccucugcugcugg

SEQ ID NO: 1207836 - RNA, 21 nt, Human
caaaacucuccucugcugcug

SEQ ID NO: 1207837 - RNA, 20 nt, Human
caaaacucuccucugcugcu

SEQ ID NO: 1207838 - RNA, 17 nt, Human
caaaauaaaaaugaggu

SEQ ID NO: 1207839 - RNA, 13 nt, Human
caaaaaggcagga

SEQ ID NO: 1207840 - RNA, 20 nt, Human
caaaaacauggccuuugcuu

SEQ ID NO: 1207841 - RNA, 23 nt, Human
auuuugggguacccacugcucug

SEQ ID NO: 1207842 - RNA, 22 nt, Human
auuuugggguacccacugcucu

SEQ ID NO: 1207843 - RNA, 21 nt, Human
auuuugggguacccacugcuc

SEQ ID NO: 1207844 - RNA, 19 nt, Human
cacaggcagguccaggguu

SEQ ID NO: 1207845 - RNA, 22 nt, Human
cacagugagucgaggacaggga

SEQ ID NO: 1207846 - RNA, 22 nt, Human
cacaguccuuaccagcagagca

SEQ ID NO: 1207847 - RNA, 21 nt, Human
cacaguccuuaccagcagagc

SEQ ID NO: 1207848 - RNA, 15 nt, Human
cacaguccuuaccag

SEQ ID NO: 1207849 - RNA, 13 nt, Human
cacaguccuuacc

SEQ ID NO: 1207850 - RNA, 15 nt, Human
cacaguucucuccuu

SEQ ID NO: 1207851 - RNA, 14 nt, Human
cacaguucucuccu

SEQ ID NO: 1207852 - RNA, 22 nt, Human
cacagcuucauuuccugugucu

SEQ ID NO: 1207853 - RNA, 21 nt, Human
cacagcuucauuuccuguguc

SEQ ID NO: 1207854 - RNA, 23 nt, Human
cacagcugggguggggaccucag

SEQ ID NO: 1207855 - RNA, 22 nt, Human
cacagcugggguggggaccuca

SEQ ID NO: 1207856 - RNA, 15 nt, Human
cacaggcagguccag

SEQ ID NO: 1207857 - RNA, 14 nt, Human
cacaggcaggucca

SEQ ID NO: 1207858 - RNA, 11 nt, Human
cacaggcaggu

SEQ ID NO: 1207859 - RNA, 18 nt, Human
uuuuauuuuuagacagag

SEQ ID NO: 1207860 - RNA, 17 nt, Human
uuuucaaaauaaaaaug

SEQ ID NO: 1207861 - RNA, 21 nt, Human
uuuuauacauaaacaagacca

SEQ ID NO: 1207862 - RNA, 13 nt, Human
uuuuauacauaaa

SEQ ID NO: 1207863 - RNA, 15 nt, Human
uuuuacuaauagaca

SEQ ID NO: 1207864 - RNA, 22 nt, Human
uuuucccuauuagagaagagau

SEQ ID NO: 1207865 - RNA, 18 nt, Human
uuuucccuauuagagaag

SEQ ID NO: 1207866 - RNA, 16 nt, Human
uuuucuuucagccaag

SEQ ID NO: 1207867 - RNA, 14 nt, Human
uuuucuucucccuc

SEQ ID NO: 1207868 - RNA, 22 nt, Human
uuuucuuguguguuuauuguca

SEQ ID NO: 1207869 - RNA, 13 nt, Human
uuuucuucucccu

SEQ ID NO: 1207870 - RNA, 23 nt, Human
uuuucuacucgaguuacagacaa

SEQ ID NO: 1207871 - RNA, 22 nt, Human
uuuucuacucgaguuacagaca

SEQ ID NO: 1207872 - RNA, 20 nt, Human
uuuucuacucgaguuacaga

SEQ ID NO: 1207873 - RNA, 13 nt, Human
uuuucuacucgag

SEQ ID NO: 1207874 - RNA, 13 nt, Human
uuuggacccugag

SEQ ID NO: 1207875 - RNA, 21 nt, Human
uuugagugccuuacacaaugg

SEQ ID NO: 1207876 - RNA, 17 nt, Human
uuuccguuaaaauacca

SEQ ID NO: 1207877 - RNA, 15 nt, Human
uuuccguuaaaauac

SEQ ID NO: 1207878 - RNA, 15 nt, Human
uuuguugucagcuga

SEQ ID NO: 1207879 - RNA, 22 nt, Human
uuuguuaguaugaggcauuugu

SEQ ID NO: 1207880 - RNA, 16 nt, Human
uuuguugucagcugaa

SEQ ID NO: 1207881 - RNA, 17 nt, Human
uuuggucuacacugugc

SEQ ID NO: 1207882 - RNA, 23 nt, Human
uuuuuaagugcugcauuuaaaag

SEQ ID NO: 1207883 - RNA, 22 nt, Human
uuuuuaagugcugcauuuaaaa

SEQ ID NO: 1207884 - RNA, 19 nt, Human
uuuuuaagugcugcauuua

SEQ ID NO: 1207885 - RNA, 18 nt, Human
uuuuuaagugcugcauuu

SEQ ID NO: 1207886 - RNA, 17 nt, Human
uuuuuaagugcugcauu

SEQ ID NO: 1207887 - RNA, 16 nt, Human
uuuuuaagugcugcau

SEQ ID NO: 1207888 - RNA, 23 nt, Human
uuuuuaagaaaaaggaugcacag

SEQ ID NO: 1207889 - RNA, 12 nt, Human
uuuuuaagaaaa

SEQ ID NO: 1207890 - RNA, 12 nt, Human
uuuuuuacuaau

SEQ ID NO: 1207891 - RNA, 12 nt, Human
uuuuuuuuaaga

SEQ ID NO: 1207892 - RNA, 11 nt, Human
uuuuuuuacua

SEQ ID NO: 1207893 - RNA, 17 nt, Human
uuuuuuccuucagugcc

SEQ ID NO: 1207894 - RNA, 13 nt, Human
uuuuuuuugacaa

SEQ ID NO: 1207895 - RNA, 20 nt, Human
uuccugaggcugggcucccu

SEQ ID NO: 1207896 - RNA, 15 nt, Human
uuccugaggcugggc

SEQ ID NO: 1207897 - RNA, 16 nt, Human
uuccauggccucuuca

SEQ ID NO: 1207898 - RNA, 12 nt, Human
uuccauggccuc

SEQ ID NO: 1207899 - RNA, 21 nt, Human
uuccuugaguugauucagcuc

SEQ ID NO: 1207900 - RNA, 22 nt, Human
uucuacucgaguuacagacaaa

SEQ ID NO: 1207901 - RNA, 14 nt, Human
uucuacccaggugc

SEQ ID NO: 1207902 - RNA, 21 nt, Human
uucuacccagcgagcccuggu

SEQ ID NO: 1207903 - RNA, 20 nt, Human
uucuacccagcgagcccugg

SEQ ID NO: 1207904 - RNA, 13 nt, Human
uucuacgccaggg

SEQ ID NO: 1207905 - RNA, 19 nt, Human
uucuacccagcgagcccug

SEQ ID NO: 1207906 - RNA, 12 nt, Human
uucuacccagcg

SEQ ID NO: 1207907 - RNA, 21 nt, Human
uucugacccugcuucaaauau

SEQ ID NO: 1207908 - RNA, 18 nt, Human
uucugacccugcuucaaa

SEQ ID NO: 1207909 - RNA, 23 nt, Human
uucugacccaugcugcccuguga

SEQ ID NO: 1207910 - RNA, 17 nt, Human
uucucugcccuccaaga

SEQ ID NO: 1207911 - RNA, 16 nt, Human
uucucugcccuccaag

SEQ ID NO: 1207912 - RNA, 19 nt, Human
uucugcucacauaucuguc

SEQ ID NO: 1207913 - RNA, 19 nt, Human
uucugauccuaguuccacc

SEQ ID NO: 1207914 - RNA, 12 nt, Human
uucucugcccuc

SEQ ID NO: 1207915 - RNA, 11 nt, Human
uucucugcccu

SEQ ID NO: 1207916 - RNA, 20 nt, Human
uucucugaggacacuaacca

SEQ ID NO: 1207917 - RNA, 14 nt, Human
uucucugaggacac

SEQ ID NO: 1207918 - RNA, 22 nt, Human
uucucuccuguaccucuugagc

SEQ ID NO: 1207919 - RNA, 19 nt, Human
uucucuccuguaccucuug

SEQ ID NO: 1207920 - RNA, 18 nt, Human
uucucuccuguaccucuu

SEQ ID NO: 1207921 - RNA, 14 nt, Human
uucucuccuguacc

SEQ ID NO: 1207922 - RNA, 16 nt, Human
uucucuccagccccug

SEQ ID NO: 1207923 - RNA, 15 nt, Human
uucucuccagccccu

SEQ ID NO: 1207924 - RNA, 14 nt, Human
uucucuccagcccc

SEQ ID NO: 1207925 - RNA, 13 nt, Human
uucucuccagccc

SEQ ID NO: 1207926 - RNA, 15 nt, Human
uucuccaccugccag

SEQ ID NO: 1207927 - RNA, 14 nt, Human
uucuccaccugcca

SEQ ID NO: 1207928 - RNA, 12 nt, Human
uucuccaccugc

SEQ ID NO: 1207929 - RNA, 21 nt, Human
uucuccaccucccacaaagga

SEQ ID NO: 1207930 - RNA, 18 nt, Human
uucuccaccugccaggga

SEQ ID NO: 1207931 - RNA, 16 nt, Human
uucuccaccugccagg

SEQ ID NO: 1207932 - RNA, 20 nt, Human
uucuccaccugccagggaca

SEQ ID NO: 1207933 - RNA, 16 nt, Human
uugaacuccuggccuc

SEQ ID NO: 1207934 - RNA, 15 nt, Human
uugaacuccuggccu

SEQ ID NO: 1207935 - RNA, 23 nt, Human
uugaaaacacuguucucugcccu

SEQ ID NO: 1207936 - RNA, 20 nt, Human
uugaaaaaccauuuugcugu

SEQ ID NO: 1207937 - RNA, 21 nt, Human
uucuuuccaaaguacacuguu

SEQ ID NO: 1207938 - RNA, 14 nt, Human
uucuuuccaaagua

SEQ ID NO: 1207939 - RNA, 12 nt, Human
uucuuucagcca

SEQ ID NO: 1207940 - RNA, 21 nt, Human
uucuuguguguuuauugucaa

SEQ ID NO: 1207941 - RNA, 23 nt, Human
uucuuccucccucccucuuuccc

SEQ ID NO: 1207942 - RNA, 13 nt, Human
uucuuccucccuc

SEQ ID NO: 1207943 - RNA, 21 nt, Human
uucuuccacaagagcccaggc

SEQ ID NO: 1207944 - RNA, 21 nt, Human
uucuuauacauuugauaaagu

SEQ ID NO: 1207945 - RNA, 18 nt, Human
uucuguauuuuguuuuug

SEQ ID NO: 1207946 - RNA, 19 nt, Human
uucugcuucagccucccga

SEQ ID NO: 1207947 - RNA, 16 nt, Human
uucugcuucagccucc

SEQ ID NO: 1207948 - RNA, 15 nt, Human
uucugcuucagccuc

SEQ ID NO: 1207949 - RNA, 14 nt, Human
uucugcuucagccu

SEQ ID NO: 1207950 - RNA, 13 nt, Human
uugaacuuugacc

SEQ ID NO: 1207951 - RNA, 18 nt, Human
uugaacuggguacuugug

SEQ ID NO: 1207952 - RNA, 20 nt, Human
uugacgccaucccagcccca

SEQ ID NO: 1207953 - RNA, 19 nt, Human
uugacgccaucccagcccc

SEQ ID NO: 1207954 - RNA, 18 nt, Human
uugacgccaucccagccc

SEQ ID NO: 1207955 - RNA, 17 nt, Human
uugacgccaucccagcc

SEQ ID NO: 1207956 - RNA, 16 nt, Human
uugaccucugcagcaa

SEQ ID NO: 1207957 - RNA, 15 nt, Human
uugaccucugcagca

SEQ ID NO: 1207958 - RNA, 14 nt, Human
uugaccucugcagc

SEQ ID NO: 1207959 - RNA, 17 nt, Human
uugaccgugaggccaga

SEQ ID NO: 1207960 - RNA, 23 nt, Human
uugauauccucuuugagugaagc

SEQ ID NO: 1207961 - RNA, 15 nt, Human
uugaggucuguucuu

SEQ ID NO: 1207962 - RNA, 16 nt, Human
uugaggguugggcugg

SEQ ID NO: 1207963 - RNA, 13 nt, Human
uugaggguugggc

SEQ ID NO: 1207964 - RNA, 14 nt, Human
uugagccugggagg

SEQ ID NO: 1207965 - RNA, 11 nt, Human
uugagccuggg

SEQ ID NO: 1207966 - RNA, 21 nt, Human
uugcaaaguaucccuacugua

SEQ ID NO: 1207967 - RNA, 16 nt, Human
uugaugaucuuugcag

SEQ ID NO: 1207968 - RNA, 13 nt, Human
uuauacauaaaca

SEQ ID NO: 1207969 - RNA, 11 nt, Human
uuauacauaaa

SEQ ID NO: 1207970 - RNA, 15 nt, Human
uuauaaugaaugaaa

SEQ ID NO: 1207971 - RNA, 18 nt, Human
uuauaauaauguuaacau

SEQ ID NO: 1207972 - RNA, 15 nt, Human
uuauaauaauguuaa

SEQ ID NO: 1207973 - RNA, 21 nt, Human
ugugaaaagaaaaaugagccu

SEQ ID NO: 1207974 - RNA, 21 nt, Human
ugucuuuucuugcaugaggcu

SEQ ID NO: 1207975 - RNA, 17 nt, Human
ugugaaaagaaaaauga

SEQ ID NO: 1207976 - RNA, 15 nt, Human
ugugaaaagaaaaau

SEQ ID NO: 1207977 - RNA, 13 nt, Human
ugugaaaagaaaa

SEQ ID NO: 1207978 - RNA, 21 nt, Human
uuauuaaaugcccagccccuu

SEQ ID NO: 1207979 - RNA, 19 nt, Human
uuauuaaaugcccagcccc

SEQ ID NO: 1207980 - RNA, 23 nt, Human
uuauuaaaaaucucaaauuucua

SEQ ID NO: 1207981 - RNA, 18 nt, Human
uuauggcuuuugugcauu

SEQ ID NO: 1207982 - RNA, 17 nt, Human
uuauggcuuuugugcau

SEQ ID NO: 1207983 - RNA, 16 nt, Human
uuauggcuuuugugca

SEQ ID NO: 1207984 - RNA, 14 nt, Human
uuauggcacaucag

SEQ ID NO: 1207985 - RNA, 21 nt, Human
uuauggacaaugacccagugg

SEQ ID NO: 1207986 - RNA, 20 nt, Human
uuauggaacacucugagacu

SEQ ID NO: 1207987 - RNA, 18 nt, Human
uuauggaacacucugaga

SEQ ID NO: 1207988 - RNA, 17 nt, Human
uuauggaacacucugag

SEQ ID NO: 1207989 - RNA, 14 nt, Human
uuaucuagauacug

SEQ ID NO: 1207990 - RNA, 22 nt, Human
uuauuuuggaaaauaaauuauu

SEQ ID NO: 1207991 - RNA, 18 nt, Human
uucaaaugcuguaacuuu

SEQ ID NO: 1207992 - RNA, 18 nt, Human
uuauuuuauuaugcauga

SEQ ID NO: 1207993 - RNA, 17 nt, Human
uuauuuuaauucaguug

SEQ ID NO: 1207994 - RNA, 21 nt, Human
uucagacagcugccugggauc

SEQ ID NO: 1207995 - RNA, 17 nt, Human
uucagacagcugccugg

SEQ ID NO: 1207996 - RNA, 16 nt, Human
uucagacagcugccug

SEQ ID NO: 1207997 - RNA, 15 nt, Human
uucagacagcugccu

SEQ ID NO: 1207998 - RNA, 18 nt, Human
uucacggaagagccuugc

SEQ ID NO: 1207999 - RNA, 17 nt, Human
uucacggaagagccuug

SEQ ID NO: 1208000 - RNA, 13 nt, Human
uucacggaagagc

SEQ ID NO: 1208001 - RNA, 22 nt, Human
uucaccuuuguccccaccgcag

SEQ ID NO: 1208002 - RNA, 22 nt, Human
uucaauaggaaaaacugauuuu

SEQ ID NO: 1208003 - RNA, 21 nt, Human
uucaauaggaaaaacugauuu

SEQ ID NO: 1208004 - RNA, 20 nt, Human
uucaccuuuguccccaccgc

SEQ ID NO: 1208005 - RNA, 19 nt, Human
uucaccuuuguccccaccg

SEQ ID NO: 1208006 - RNA, 14 nt, Human
uucaccuuuguccc

SEQ ID NO: 1208007 - RNA, 13 nt, Human
uucacccuuuucu

SEQ ID NO: 1208008 - RNA, 16 nt, Human
uuccaaaguacacugu

SEQ ID NO: 1208009 - RNA, 13 nt, Human
uuccaaaguacac

SEQ ID NO: 1208010 - RNA, 19 nt, Human
uuccaacccucaucaccaa

SEQ ID NO: 1208011 - RNA, 15 nt, Human
uuccauggacuuugu

SEQ ID NO: 1208012 - RNA, 14 nt, Human
uuccauggacuuug

SEQ ID NO: 1208013 - RNA, 14 nt, Human
uucaguggcagcug

SEQ ID NO: 1208014 - RNA, 22 nt, Human
uucagcuuguaaauagcucagg

SEQ ID NO: 1208015 - RNA, 22 nt, Human
uucagcuccagcucaccagccc

SEQ ID NO: 1208016 - RNA, 15 nt, Human
uucagcuccagcuca

SEQ ID NO: 1208017 - RNA, 12 nt, Human
uucagcuccagc

SEQ ID NO: 1208018 - RNA, 13 nt, Human
uucaguguacaug

SEQ ID NO: 1208019 - RNA, 12 nt, Human
uucaguguacau

SEQ ID NO: 1208020 - RNA, 17 nt, Human
uucaguggcagcugcuu

SEQ ID NO: 1208021 - RNA, 16 nt, Human
uucaguggcagcugcu

SEQ ID NO: 1208022 - RNA, 15 nt, Human
uucaguggcagcugc

SEQ ID NO: 1208023 - RNA, 19 nt, Human
uucauccuccucagaucuu

SEQ ID NO: 1208024 - RNA, 15 nt, Human
uucauccuccucaga

SEQ ID NO: 1208025 - RNA, 15 nt, Human
uucauaaccuagccu

SEQ ID NO: 1208026 - RNA, 18 nt, Human
uuucauuuaggugaggaa

SEQ ID NO: 1208027 - RNA, 14 nt, Human
uuucauuuagguga

SEQ ID NO: 1208028 - RNA, 14 nt, Human
uuucaguguacaug

SEQ ID NO: 1208029 - RNA, 13 nt, Human
uuucaguguacau

SEQ ID NO: 1208030 - RNA, 19 nt, Human
uuucaauaggaaaaacuga

SEQ ID NO: 1208031 - RNA, 17 nt, Human
uuucaauaggaaaaacu

SEQ ID NO: 1208032 - RNA, 14 nt, Human
uuucaauaggaaaa

SEQ ID NO: 1208033 - RNA, 12 nt, Human
uuucaauaggaa

SEQ ID NO: 1208034 - RNA, 20 nt, Human
uuuauggcuuuugugcauua

SEQ ID NO: 1208035 - RNA, 13 nt, Human
uuuauuauggcac

SEQ ID NO: 1208036 - RNA, 16 nt, Human
uuuauggcuuuugugc

SEQ ID NO: 1208037 - RNA, 14 nt, Human
uuuauggcuuuugu

SEQ ID NO: 1208038 - RNA, 19 nt, Human
uuuauuuaguuccuugagu

SEQ ID NO: 1208039 - RNA, 12 nt, Human
uuuagacagagu

SEQ ID NO: 1208040 - RNA, 14 nt, Human
uuuagaaauauaau

SEQ ID NO: 1208041 - RNA, 22 nt, Human
uuuacuucuuauacauuugaua

SEQ ID NO: 1208042 - RNA, 19 nt, Human
uuuacuucuuauacauuug

SEQ ID NO: 1208043 - RNA, 18 nt, Human
uuuaagaaaaaggaugca

SEQ ID NO: 1208044 - RNA, 22 nt, Human
uuuaagaaaaaggaugcacaga

SEQ ID NO: 1208045 - RNA, 21 nt, Human
uuguguuuauauauaagccaa

SEQ ID NO: 1208046 - RNA, 23 nt, Human
uuguggauuuaacagaaauguac

SEQ ID NO: 1208047 - RNA, 22 nt, Human
uuguggauuuaacagaaaugua

SEQ ID NO: 1208048 - RNA, 21 nt, Human
uuguggauuuaacagaaaugu

SEQ ID NO: 1208049 - RNA, 20 nt, Human
uuguggauuuaacagaaaug

SEQ ID NO: 1208050 - RNA, 17 nt, Human
uuguggacacagcucuu

SEQ ID NO: 1208051 - RNA, 16 nt, Human
uuguggacacagcucu

SEQ ID NO: 1208052 - RNA, 12 nt, Human
uugugcauuugg

SEQ ID NO: 1208053 - RNA, 23 nt, Human
uugugcauuaucuagauacugua

SEQ ID NO: 1208054 - RNA, 22 nt, Human
uugugcauuaucuagauacugu

SEQ ID NO: 1208055 - RNA, 17 nt, Human
uugugcauuaucuagau

SEQ ID NO: 1208056 - RNA, 21 nt, Human
uuguuaguaugaggcauuugu

SEQ ID NO: 1208057 - RNA, 19 nt, Human
uuguuaguaugaggcauuu

SEQ ID NO: 1208058 - RNA, 14 nt, Human
uuguuacauuuuua

SEQ ID NO: 1208059 - RNA, 20 nt, Human
uuguuagugugucuuagugu

SEQ ID NO: 1208060 - RNA, 22 nt, Human
uuguuaguaugaggcauuuguu

SEQ ID NO: 1208061 - RNA, 21 nt, Human
uuguauucucuccuguaccuc

SEQ ID NO: 1208062 - RNA, 19 nt, Human
uuguauucucuccuguacc

SEQ ID NO: 1208063 - RNA, 16 nt, Human
uuguauucucuccugu

SEQ ID NO: 1208064 - RNA, 15 nt, Human
uuguauucucuccug

SEQ ID NO: 1208065 - RNA, 20 nt, Human
uugugaaaggaaagaggcuc

SEQ ID NO: 1208066 - RNA, 22 nt, Human
uugucuuaaaaaguggaaaaau

SEQ ID NO: 1208067 - RNA, 17 nt, Human
uugugauuuuuguaauu

SEQ ID NO: 1208068 - RNA, 16 nt, Human
uugugauuuuuguaau

SEQ ID NO: 1208069 - RNA, 12 nt, Human
uugugauuuuug

SEQ ID NO: 1208070 - RNA, 15 nt, Human
uugucuuaaaaagug

SEQ ID NO: 1208071 - RNA, 13 nt, Human
uuggucuguguga

SEQ ID NO: 1208072 - RNA, 16 nt, Human
uuggucccccuuccau

SEQ ID NO: 1208073 - RNA, 22 nt, Human
uuggguucaagcgauucuucug

SEQ ID NO: 1208074 - RNA, 23 nt, Human
uuguaaauuaacuuuuauaaacu

SEQ ID NO: 1208075 - RNA, 18 nt, Human
uuguaaauuaacuuuuau

SEQ ID NO: 1208076 - RNA, 16 nt, Human
uuguaaauuaacuuuu

SEQ ID NO: 1208077 - RNA, 15 nt, Human
uuguaaauuaacuuu

SEQ ID NO: 1208078 - RNA, 18 nt, Human
uuguacauaaugcgugca

SEQ ID NO: 1208079 - RNA, 17 nt, Human
uuguaaauagcucaggu

SEQ ID NO: 1208080 - RNA, 14 nt, Human
uguaacaagccacc

SEQ ID NO: 1208081 - RNA, 17 nt, Human
uguaacaagccacccca

SEQ ID NO: 1208082 - RNA, 11 nt, Human
uguacagagcc

SEQ ID NO: 1208083 - RNA, 14 nt, Human
uguacagacaacaa

SEQ ID NO: 1208084 - RNA, 23 nt, Human
ugguuuuuaaaaaacugcugacu

SEQ ID NO: 1208085 - RNA, 21 nt, Human
ugguuuuuaaaaaacugcuga

SEQ ID NO: 1208086 - RNA, 19 nt, Human
ugguuuucuuguguguuua

SEQ ID NO: 1208087 - RNA, 16 nt, Human
ugguuuucuguucuuu

SEQ ID NO: 1208088 - RNA, 19 nt, Human
uggugucgggcaugacacg

SEQ ID NO: 1208089 - RNA, 18 nt, Human
uggugucgggcaugacac

SEQ ID NO: 1208090 - RNA, 15 nt, Human
uggugucgggcauga

SEQ ID NO: 1208091 - RNA, 16 nt, Human
uggugucaccugaaga

SEQ ID NO: 1208092 - RNA, 18 nt, Human
ugguugaugaucuuugca

SEQ ID NO: 1208093 - RNA, 19 nt, Human
uggugguuuucuguucuuu

SEQ ID NO: 1208094 - RNA, 18 nt, Human
uggugguuucagaaaugu

SEQ ID NO: 1208095 - RNA, 17 nt, Human
uggugguuucagaaaug

SEQ ID NO: 1208096 - RNA, 18 nt, Human
uggugggggccucggugu

SEQ ID NO: 1208097 - RNA, 16 nt, Human
uggugggggccucggu

SEQ ID NO: 1208098 - RNA, 13 nt, Human
ugguggcuggguu

SEQ ID NO: 1208099 - RNA, 14 nt, Human
uggugagaggcauc

SEQ ID NO: 1208100 - RNA, 23 nt, Human
uggguacuuguggacacagcucu

SEQ ID NO: 1208101 - RNA, 20 nt, Human
uggguacuuguggacacagc

SEQ ID NO: 1208102 - RNA, 20 nt, Human
uggugcaaugaccuuucaau

SEQ ID NO: 1208103 - RNA, 19 nt, Human
uggugcaaugaccuuucaa

SEQ ID NO: 1208104 - RNA, 14 nt, Human
uggugcaaugaccu

SEQ ID NO: 1208105 - RNA, 18 nt, Human
ugguggcagugggagcug

SEQ ID NO: 1208106 - RNA, 13 nt, Human
ugguggcaguggg

SEQ ID NO: 1208107 - RNA, 20 nt, Human
ugguggcagugggagcugcc

SEQ ID NO: 1208108 - RNA, 20 nt, Human
uguccugggagugagcuggu

SEQ ID NO: 1208109 - RNA, 19 nt, Human
uguccugggagugagcugg

SEQ ID NO: 1208110 - RNA, 12 nt, Human
uguccugggagu

SEQ ID NO: 1208111 - RNA, 14 nt, Human
ugucuaaugaaacc

SEQ ID NO: 1208112 - RNA, 19 nt, Human
uguccccgcacugggcuug

SEQ ID NO: 1208113 - RNA, 17 nt, Human
uguccccgcacugggcu

SEQ ID NO: 1208114 - RNA, 16 nt, Human
ugucuuuucuugcaug

SEQ ID NO: 1208115 - RNA, 23 nt, Human
ugucuuuggacccugaggcccag

SEQ ID NO: 1208116 - RNA, 16 nt, Human
ugucuaugggacucaa

SEQ ID NO: 1208117 - RNA, 15 nt, Human
ugucuaugggacuca

SEQ ID NO: 1208118 - RNA, 14 nt, Human
ugucuaugggacuc

SEQ ID NO: 1208119 - RNA, 23 nt, Human
ugucuaguuguuugauucagaca

SEQ ID NO: 1208120 - RNA, 15 nt, Human
ugucuaguuguuuga

SEQ ID NO: 1208121 - RNA, 21 nt, Human
ugucucaaaaaaagaaaaaga

SEQ ID NO: 1208122 - RNA, 14 nt, Human
ugucacaggcaggu

SEQ ID NO: 1208123 - RNA, 13 nt, Human
ugucacacacuuu

SEQ ID NO: 1208124 - RNA, 21 nt, Human
ugucaauuacaggaaguacug

SEQ ID NO: 1208125 - RNA, 19 nt, Human
uguauuuuacuaauaaaau

SEQ ID NO: 1208126 - RNA, 19 nt, Human
ugucagugugacugaucuc

SEQ ID NO: 1208127 - RNA, 16 nt, Human
ugucagugugacugau

SEQ ID NO: 1208128 - RNA, 15 nt, Human
ugucagugugacuga

SEQ ID NO: 1208129 - RNA, 21 nt, Human
ugucacaggcagguccagggu

SEQ ID NO: 1208130 - RNA, 17 nt, Human
ugucacaggcaggucca

SEQ ID NO: 1208131 - RNA, 16 nt, Human
ugucacaggcaggucc

SEQ ID NO: 1208132 - RNA, 15 nt, Human
ugucacaggcagguc

SEQ ID NO: 1208133 - RNA, 23 nt, Human
uguacagcaaggagauuuacaac

SEQ ID NO: 1208134 - RNA, 22 nt, Human
uguacagcaaggagauuuacaa

SEQ ID NO: 1208135 - RNA, 13 nt, Human
uguacagagccca

SEQ ID NO: 1208136 - RNA, 12 nt, Human
uguacagagccc

SEQ ID NO: 1208137 - RNA, 18 nt, Human
uguaggaagguuaauguu

SEQ ID NO: 1208138 - RNA, 13 nt, Human
uguaucugagcag

SEQ ID NO: 1208139 - RNA, 16 nt, Human
ugggaggaucucuuga

SEQ ID NO: 1208140 - RNA, 15 nt, Human
ugggacacccuguga

SEQ ID NO: 1208141 - RNA, 14 nt, Human
ugggacacccugug

SEQ ID NO: 1208142 - RNA, 21 nt, Human
ugggaaugaaugucaguguga

SEQ ID NO: 1208143 - RNA, 16 nt, Human
ugggaaugaaugucag

SEQ ID NO: 1208144 - RNA, 18 nt, Human
ugggaggaucucuugagc

SEQ ID NO: 1208145 - RNA, 18 nt, Human
ugggaugauuggaggggg

SEQ ID NO: 1208146 - RNA, 18 nt, Human
ugggcagagcagagacca

SEQ ID NO: 1208147 - RNA, 17 nt, Human
ugggcagagcagagacc

SEQ ID NO: 1208148 - RNA, 15 nt, Human
ugggcagagcagaga

SEQ ID NO: 1208149 - RNA, 14 nt, Human
ugggcagagcagag

SEQ ID NO: 1208150 - RNA, 19 nt, Human
uggggggcugaggugggag

SEQ ID NO: 1208151 - RNA, 16 nt, Human
ugggggccucagugcc

SEQ ID NO: 1208152 - RNA, 13 nt, Human
uggggcagcuuga

SEQ ID NO: 1208153 - RNA, 21 nt, Human
ugggcuugucuguagauuuua

SEQ ID NO: 1208154 - RNA, 17 nt, Human
ugggcuugucuguagau

SEQ ID NO: 1208155 - RNA, 23 nt, Human
ugggcuuggggaccagagcugcc

SEQ ID NO: 1208156 - RNA, 22 nt, Human
ugggcuucauccuccucagauc

SEQ ID NO: 1208157 - RNA, 15 nt, Human
ugggcuucauccucc

SEQ ID NO: 1208158 - RNA, 22 nt, Human
ugggcuucaguggcagcugcuu

SEQ ID NO: 1208159 - RNA, 14 nt, Human
ugggccuggcuccc

SEQ ID NO: 1208160 - RNA, 13 nt, Human
uggccucugcacu

SEQ ID NO: 1208161 - RNA, 16 nt, Human
uggcugcugaaggcuc

SEQ ID NO: 1208162 - RNA, 14 nt, Human
uggcugcugaaggc

SEQ ID NO: 1208163 - RNA, 13 nt, Human
uggcugcugaagg

SEQ ID NO: 1208164 - RNA, 22 nt, Human
uggcuuccuaaaauucagugga

SEQ ID NO: 1208165 - RNA, 20 nt, Human
uggccuagcauacguacaca

SEQ ID NO: 1208166 - RNA, 14 nt, Human
uggccccugcccgg

SEQ ID NO: 1208167 - RNA, 22 nt, Human
uggccccucagggucccuggug

SEQ ID NO: 1208168 - RNA, 21 nt, Human
uggccccucagggucccuggu

SEQ ID NO: 1208169 - RNA, 20 nt, Human
uggccccucagggucccugg

SEQ ID NO: 1208170 - RNA, 13 nt, Human
uggccccucaggg

SEQ ID NO: 1208171 - RNA, 19 nt, Human
uggcagcugcgguccaccc

SEQ ID NO: 1208172 - RNA, 17 nt, Human
uggcagcugcgguccac

SEQ ID NO: 1208173 - RNA, 23 nt, Human
uggccucccaacucaccccagcc

SEQ ID NO: 1208174 - RNA, 22 nt, Human
uggccucccaacucaccccagc

SEQ ID NO: 1208175 - RNA, 21 nt, Human
uggccucccaacucaccccag

SEQ ID NO: 1208176 - RNA, 20 nt, Human
uggccucccaacucacccca

SEQ ID NO: 1208177 - RNA, 19 nt, Human
uggccucccaacucacccc

SEQ ID NO: 1208178 - RNA, 14 nt, Human
uggccucccaacuc

SEQ ID NO: 1208179 - RNA, 11 nt, Human
uggccucccaa

SEQ ID NO: 1208180 - RNA, 23 nt, Human
uggccucaagugauucuccugcc

SEQ ID NO: 1208181 - RNA, 18 nt, Human
uggccucaagugauucuc

SEQ ID NO: 1208182 - RNA, 23 nt, Human
uggccuagcauacguacacauuu

SEQ ID NO: 1208183 - RNA, 18 nt, Human
ugcuugugaaaggaaaga

SEQ ID NO: 1208184 - RNA, 13 nt, Human
ugcuucuucagag

SEQ ID NO: 1208185 - RNA, 17 nt, Human
uggaacacucugagacu

SEQ ID NO: 1208186 - RNA, 15 nt, Human
uggaacacucugaga

SEQ ID NO: 1208187 - RNA, 23 nt, Human
ugcuuccagugaggcucugcccu

SEQ ID NO: 1208188 - RNA, 22 nt, Human
ugcuuccagugaggcucugccc

SEQ ID NO: 1208189 - RNA, 18 nt, Human
ugcuuaacuucacauauu

SEQ ID NO: 1208190 - RNA, 17 nt, Human
ugcuuaacuucacauau

SEQ ID NO: 1208191 - RNA, 14 nt, Human
ugcuuaacuucaca

SEQ ID NO: 1208192 - RNA, 13 nt, Human
ugcuuaacuucac

SEQ ID NO: 1208193 - RNA, 19 nt, Human
ugcuuaacuucacauauug

SEQ ID NO: 1208194 - RNA, 22 nt, Human
uggcacugcuuccagugaggcu

SEQ ID NO: 1208195 - RNA, 22 nt, Human
uggcacuauaauguaagcucua

SEQ ID NO: 1208196 - RNA, 19 nt, Human
uggcacugcuuccagugag

SEQ ID NO: 1208197 - RNA, 17 nt, Human
uggauuuaacagaaaug

SEQ ID NO: 1208198 - RNA, 15 nt, Human
uggauuuaacagaaa

SEQ ID NO: 1208199 - RNA, 21 nt, Human
uggcacuauaauguaagcucu

SEQ ID NO: 1208200 - RNA, 22 nt, Human
uggaugcagccucacaguccuu

SEQ ID NO: 1208201 - RNA, 21 nt, Human
uggaugcagccucacaguccu

SEQ ID NO: 1208202 - RNA, 13 nt, Human
uggaugcagccuc

SEQ ID NO: 1208203 - RNA, 23 nt, Human
uggaggggggaggugggauccuc

SEQ ID NO: 1208204 - RNA, 20 nt, Human
uggacuaacuugucuuugga

SEQ ID NO: 1208205 - RNA, 19 nt, Human
uggacuaacuugucuuugg

SEQ ID NO: 1208206 - RNA, 23 nt, Human
uggacguguuaugacuccagaau

SEQ ID NO: 1208207 - RNA, 19 nt, Human
uggacguguuaugacucca

SEQ ID NO: 1208208 - RNA, 23 nt, Human
uggacaggcauguucucugagga

SEQ ID NO: 1208209 - RNA, 22 nt, Human
uggacaggcauguucucugagg

SEQ ID NO: 1208210 - RNA, 18 nt, Human
uggacaggcauguucucu

SEQ ID NO: 1208211 - RNA, 18 nt, Human
ugagucgaggacagggag

SEQ ID NO: 1208212 - RNA, 19 nt, Human
ugaguugauucagcucugc

SEQ ID NO: 1208213 - RNA, 16 nt, Human
ugaguugauucagcuc

SEQ ID NO: 1208214 - RNA, 23 nt, Human
ugaguugauagcacagacccugc

SEQ ID NO: 1208215 - RNA, 16 nt, Human
ugagucgaggacaggg

SEQ ID NO: 1208216 - RNA, 15 nt, Human
ugagucgaggacagg

SEQ ID NO: 1208217 - RNA, 21 nt, Human
ugauagcacagacccugcccu

SEQ ID NO: 1208218 - RNA, 20 nt, Human
ugauagcacagacccugccc

SEQ ID NO: 1208219 - RNA, 18 nt, Human
ugauagcacagacccugc

SEQ ID NO: 1208220 - RNA, 17 nt, Human
ugauagcacagacccug

SEQ ID NO: 1208221 - RNA, 16 nt, Human
ugauagcacagacccu

SEQ ID NO: 1208222 - RNA, 15 nt, Human
ugauagcacagaccc

SEQ ID NO: 1208223 - RNA, 23 nt, Human
ugauagcacagacccugcccugu

SEQ ID NO: 1208224 - RNA, 22 nt, Human
ugauagcacagacccugcccug

SEQ ID NO: 1208225 - RNA, 11 nt, Human
ugaggcugggc

SEQ ID NO: 1208226 - RNA, 20 nt, Human
ugaggucuguucuuuccaaa

SEQ ID NO: 1208227 - RNA, 15 nt, Human
ugaggucuguucuuu

SEQ ID NO: 1208228 - RNA, 14 nt, Human
ugaggucuguucuu

SEQ ID NO: 1208229 - RNA, 16 nt, Human
ugaggugcuauguucu

SEQ ID NO: 1208230 - RNA, 21 nt, Human
ugaguccccuguuuguuucug

SEQ ID NO: 1208231 - RNA, 19 nt, Human
ugagguuucaaaccucccu

SEQ ID NO: 1208232 - RNA, 14 nt, Human
ugagucgaggacag

SEQ ID NO: 1208233 - RNA, 22 nt, Human
ugaguccuggcaugggaaugaa

SEQ ID NO: 1208234 - RNA, 19 nt, Human
ugaguccuggcaugggaau

SEQ ID NO: 1208235 - RNA, 18 nt, Human
ugaguccuggcaugggaa

SEQ ID NO: 1208236 - RNA, 11 nt, Human
ugaguccuggc

SEQ ID NO: 1208237 - RNA, 20 nt, Human
ugaugaugaaaugaggucag

SEQ ID NO: 1208238 - RNA, 23 nt, Human
ugaugaucuuugcagacaggcaa

SEQ ID NO: 1208239 - RNA, 14 nt, Human
ugaugccaugagga

SEQ ID NO: 1208240 - RNA, 23 nt, Human
ugaucuuugcagacaggcaagca

SEQ ID NO: 1208241 - RNA, 21 nt, Human
ugaucuuugcagacaggcaag

SEQ ID NO: 1208242 - RNA, 20 nt, Human
ugaucuuugcagacaggcaa

SEQ ID NO: 1208243 - RNA, 19 nt, Human
ugaucuuugcagacaggca

SEQ ID NO: 1208244 - RNA, 23 nt, Human
ugaugcuucuucagagacuccug

SEQ ID NO: 1208245 - RNA, 22 nt, Human
ugaugcuucuucagagacuccu

SEQ ID NO: 1208246 - RNA, 21 nt, Human
ugaugcuucuucagagacucc

SEQ ID NO: 1208247 - RNA, 19 nt, Human
ugaugcuucuucagagacu

SEQ ID NO: 1208248 - RNA, 22 nt, Human
ugaucacggcucacugcagccu

SEQ ID NO: 1208249 - RNA, 20 nt, Human
ugauccacccaccucagccu

SEQ ID NO: 1208250 - RNA, 16 nt, Human
ugauccacccaccuca

SEQ ID NO: 1208251 - RNA, 15 nt, Human
ugauccacccaccuc

SEQ ID NO: 1208252 - RNA, 21 nt, Human
ugauccaagcuggucccacuc

SEQ ID NO: 1208253 - RNA, 24 nt, Human
ugaucauccacugugccaugugcc

SEQ ID NO: 1208254 - RNA, 13 nt, Human
ugaucauccacug

SEQ ID NO: 1208255 - RNA, 21 nt, Human
ugaucuaggaagacuuuggaa

SEQ ID NO: 1208256 - RNA, 19 nt, Human
ugaucuaggaagacuuugg

SEQ ID NO: 1208257 - RNA, 22 nt, Human
ugauccacccaccucagccucc

SEQ ID NO: 1208258 - RNA, 21 nt, Human
ugauccacccaccucagccuc

SEQ ID NO: 1208259 - RNA, 15 nt, Human
ugagccucagcaucc

SEQ ID NO: 1208260 - RNA, 13 nt, Human
ugagccucagcau

SEQ ID NO: 1208261 - RNA, 16 nt, Human
ugagcaucaggccagg

SEQ ID NO: 1208262 - RNA, 15 nt, Human
ugagcaucaggccag

SEQ ID NO: 1208263 - RNA, 14 nt, Human
ugagcaucaggcca

SEQ ID NO: 1208264 - RNA, 13 nt, Human
ugagcaucaggcc

SEQ ID NO: 1208265 - RNA, 17 nt, Human
ugagaguagagucacug

SEQ ID NO: 1208266 - RNA, 23 nt, Human
ugagaggcauccaguaucuugaa

SEQ ID NO: 1208267 - RNA, 22 nt, Human
ugagaggcauccaguaucuuga

SEQ ID NO: 1208268 - RNA, 14 nt, Human
ugagacucugucuc

SEQ ID NO: 1208269 - RNA, 13 nt, Human
ugagacucugucu

SEQ ID NO: 1208270 - RNA, 12 nt, Human
ugagacucuguc

SEQ ID NO: 1208271 - RNA, 12 nt, Human
ugagacccuguc

SEQ ID NO: 1208272 - RNA, 15 nt, Human
ugacugaauuucuuu

SEQ ID NO: 1208273 - RNA, 14 nt, Human
ugacugaauuucuu

SEQ ID NO: 1208274 - RNA, 13 nt, Human
ugacugaauuucu

SEQ ID NO: 1208275 - RNA, 20 nt, Human
ugacgccaucccagccccaa

SEQ ID NO: 1208276 - RNA, 19 nt, Human
ugacgccaucccagcccca

SEQ ID NO: 1208277 - RNA, 18 nt, Human
ugacgccaucccagcccc

SEQ ID NO: 1208278 - RNA, 17 nt, Human
ugacgccaucccagccc

SEQ ID NO: 1208279 - RNA, 16 nt, Human
ugacgccaucccagcc

SEQ ID NO: 1208280 - RNA, 15 nt, Human
ugacgccaucccagc

SEQ ID NO: 1208281 - RNA, 14 nt, Human
ugacgccaucccag

SEQ ID NO: 1208282 - RNA, 13 nt, Human
ugacgccauccca

SEQ ID NO: 1208283 - RNA, 22 nt, Human
ugaccuuucaauaggaaaaacu

SEQ ID NO: 1208284 - RNA, 18 nt, Human
ugaccuuucaauaggaaa

SEQ ID NO: 1208285 - RNA, 22 nt, Human
ugaccauucuccaccugccagg

SEQ ID NO: 1208286 - RNA, 21 nt, Human
ugaccauucuccaccugccag

SEQ ID NO: 1208287 - RNA, 20 nt, Human
ugaccauucuccaccugcca

SEQ ID NO: 1208288 - RNA, 17 nt, Human
ucuugaauuguaaggaa

SEQ ID NO: 1208289 - RNA, 15 nt, Human
ucuugaacuccuggc

SEQ ID NO: 1208290 - RNA, 23 nt, Human
ugaccauucuccaccugccaggg

SEQ ID NO: 1208291 - RNA, 16 nt, Human
ugaccuuucaauagga

SEQ ID NO: 1208292 - RNA, 15 nt, Human
ugaccuuucaauagg

SEQ ID NO: 1208293 - RNA, 14 nt, Human
ugaccuuucaauag

SEQ ID NO: 1208294 - RNA, 12 nt, Human
ugaccucugccu

SEQ ID NO: 1208295 - RNA, 23 nt, Human
ugaccucugcagcaauaaagcag

SEQ ID NO: 1208296 - RNA, 21 nt, Human
ugaccucugcagcaauaaagc

SEQ ID NO: 1208297 - RNA, 18 nt, Human
ugaccucugcagcaauaa

SEQ ID NO: 1208298 - RNA, 16 nt, Human
ugaccucugcagcaau

SEQ ID NO: 1208299 - RNA, 13 nt, Human
ugaccucugcagc

SEQ ID NO: 1208300 - RNA, 22 nt, Human
ugaccucaggugauccacccac

SEQ ID NO: 1208301 - RNA, 18 nt, Human
ugcauuaucuagauacug

SEQ ID NO: 1208302 - RNA, 17 nt, Human
ugcauuaucuagauacu

SEQ ID NO: 1208303 - RNA, 12 nt, Human
ugcauuaucuag

SEQ ID NO: 1208304 - RNA, 15 nt, Human
ugcauguuugugauu

SEQ ID NO: 1208305 - RNA, 12 nt, Human
ugccauccaggu

SEQ ID NO: 1208306 - RNA, 20 nt, Human
ugccauccagguucagcuug

SEQ ID NO: 1208307 - RNA, 15 nt, Human
ugccauccagguuca

SEQ ID NO: 1208308 - RNA, 17 nt, Human
ugccagguuuuuggucu

SEQ ID NO: 1208309 - RNA, 19 nt, Human
ugccaggaagccagcaggc

SEQ ID NO: 1208310 - RNA, 18 nt, Human
ugccaggaagccagcagg

SEQ ID NO: 1208311 - RNA, 16 nt, Human
ugccaggaagccagca

SEQ ID NO: 1208312 - RNA, 12 nt, Human
ugccaggaagcc

SEQ ID NO: 1208313 - RNA, 13 nt, Human
ugcccacucccug

SEQ ID NO: 1208314 - RNA, 18 nt, Human
ugcccacgcuggagugca

SEQ ID NO: 1208315 - RNA, 20 nt, Human
ugcccaccuggccucugcac

SEQ ID NO: 1208316 - RNA, 16 nt, Human
ugccauguuggccagg

SEQ ID NO: 1208317 - RNA, 15 nt, Human
ugccauguuggccag

SEQ ID NO: 1208318 - RNA, 12 nt, Human
ugccauguuggc

SEQ ID NO: 1208319 - RNA, 15 nt, Human
ugccaugugccaggu

SEQ ID NO: 1208320 - RNA, 14 nt, Human
ugccaugugccagg

SEQ ID NO: 1208321 - RNA, 23 nt, Human
ugccaugaggaacaaggcaaggc

SEQ ID NO: 1208322 - RNA, 20 nt, Human
ugccaugaggaacaaggcaa

SEQ ID NO: 1208323 - RNA, 23 nt, Human
ugcccugcccaccuggccucugc

SEQ ID NO: 1208324 - RNA, 22 nt, Human
ugcccugcccaccuggccucug

SEQ ID NO: 1208325 - RNA, 19 nt, Human
ugcccuaaaguguauuuuu

SEQ ID NO: 1208326 - RNA, 17 nt, Human
ugcccuaaaguguauuu

SEQ ID NO: 1208327 - RNA, 19 nt, Human
ugccgucuaccugaggggc

SEQ ID NO: 1208328 - RNA, 17 nt, Human
ugccgucuaccugaggg

SEQ ID NO: 1208329 - RNA, 16 nt, Human
ugccgucuaccugagg

SEQ ID NO: 1208330 - RNA, 15 nt, Human
ugccgucuaccugag

SEQ ID NO: 1208331 - RNA, 19 nt, Human
ugccugguggcagcugcgg

SEQ ID NO: 1208332 - RNA, 18 nt, Human
ugccugguggcagcugcg

SEQ ID NO: 1208333 - RNA, 17 nt, Human
ugccugguggcagcugc

SEQ ID NO: 1208334 - RNA, 13 nt, Human
ugccugcccaggc

SEQ ID NO: 1208335 - RNA, 21 nt, Human
ugccucuucucuacucuaggg

SEQ ID NO: 1208336 - RNA, 22 nt, Human
ugccuccuuugugaggaagccg

SEQ ID NO: 1208337 - RNA, 21 nt, Human
ugccuccuuugugaggaagcc

SEQ ID NO: 1208338 - RNA, 14 nt, Human
ugccucugggacug

SEQ ID NO: 1208339 - RNA, 13 nt, Human
ugccucugggacu

SEQ ID NO: 1208340 - RNA, 20 nt, Human
ugauuuuuuuuuccuucagu

SEQ ID NO: 1208341 - RNA, 19 nt, Human
ugauuuuuuuuuccuucag

SEQ ID NO: 1208342 - RNA, 17 nt, Human
ugauuuuuuuuuccuuc

SEQ ID NO: 1208343 - RNA, 16 nt, Human
ugauuuuuuuuuccuu

SEQ ID NO: 1208344 - RNA, 23 nt, Human
ugauuuuuuuuuccuucagugcc

SEQ ID NO: 1208345 - RNA, 22 nt, Human
ugauuuuuuuuuccuucagugc

SEQ ID NO: 1208346 - RNA, 15 nt, Human
ugauuuucauugcug

SEQ ID NO: 1208347 - RNA, 13 nt, Human
ugauuuucauugc

SEQ ID NO: 1208348 - RNA, 22 nt, Human
ugcaaccugauugugucucuug

SEQ ID NO: 1208349 - RNA, 20 nt, Human
ugcaaccugauugugucucu

SEQ ID NO: 1208350 - RNA, 19 nt, Human
ugcaaccugauugugucuc

SEQ ID NO: 1208351 - RNA, 21 nt, Human
ugcaaccuccgccucuugggu

SEQ ID NO: 1208352 - RNA, 20 nt, Human
ugcaaccuccgccucuuggg

SEQ ID NO: 1208353 - RNA, 18 nt, Human
ugcaaccuccgccucuug

SEQ ID NO: 1208354 - RNA, 14 nt, Human
ugcaaccuccgccu

SEQ ID NO: 1208355 - RNA, 13 nt, Human
ugcaaccuccgcc

SEQ ID NO: 1208356 - RNA, 20 nt, Human
ugcaacaggcugggcuucag

SEQ ID NO: 1208357 - RNA, 19 nt, Human
ugcaacaggcugggcuuca

SEQ ID NO: 1208358 - RNA, 17 nt, Human
ugcaacaggcugggcuu

SEQ ID NO: 1208359 - RNA, 16 nt, Human
ugcaacaggcugggcu

SEQ ID NO: 1208360 - RNA, 15 nt, Human
ugcaacaggcugggc

SEQ ID NO: 1208361 - RNA, 14 nt, Human
ugcaacaggcuggg

SEQ ID NO: 1208362 - RNA, 16 nt, Human
ugcaauggcagccuug

SEQ ID NO: 1208363 - RNA, 15 nt, Human
ugcaauggcagccuu

SEQ ID NO: 1208364 - RNA, 14 nt, Human
ugcaauggcagccu

SEQ ID NO: 1208365 - RNA, 13 nt, Human
ugcaauggcagcc

SEQ ID NO: 1208366 - RNA, 23 nt, Human
ugcaaugaccuuucaauaggaaa

SEQ ID NO: 1208367 - RNA, 22 nt, Human
ugcaaugaccuuucaauaggaa

SEQ ID NO: 1208368 - RNA, 19 nt, Human
ugcaaugaccuuucaauag

SEQ ID NO: 1208369 - RNA, 17 nt, Human
ugcaaugaccuuucaau

SEQ ID NO: 1208370 - RNA, 16 nt, Human
ugcaaugaccuuucaa

SEQ ID NO: 1208371 - RNA, 13 nt, Human
ugcaaugaccuuu

SEQ ID NO: 1208372 - RNA, 16 nt, Human
ugcacaaacagaggcc

SEQ ID NO: 1208373 - RNA, 15 nt, Human
ugcacaaacagaggc

SEQ ID NO: 1208374 - RNA, 20 nt, Human
ugcacaaacagaggccgcca

SEQ ID NO: 1208375 - RNA, 19 nt, Human
ugcacaaacagaggccgcc

SEQ ID NO: 1208376 - RNA, 17 nt, Human
ugcacaaacagaggccg

SEQ ID NO: 1208377 - RNA, 19 nt, Human
ugcacagaguuguuacauu

SEQ ID NO: 1208378 - RNA, 18 nt, Human
ugcacagaguuguuacau

SEQ ID NO: 1208379 - RNA, 17 nt, Human
ugcacagaguuguuaca

SEQ ID NO: 1208380 - RNA, 21 nt, Human
ugcacugacauuguuggccaa

SEQ ID NO: 1208381 - RNA, 18 nt, Human
ugcacugacauuguuggc

SEQ ID NO: 1208382 - RNA, 16 nt, Human
ugcacuugcagacucu

SEQ ID NO: 1208383 - RNA, 22 nt, Human
ugcaccuggaauauauaaccag

SEQ ID NO: 1208384 - RNA, 20 nt, Human
ugcaccuggaauauauaacc

SEQ ID NO: 1208385 - RNA, 17 nt, Human
ugcaccuggaauauaua

SEQ ID NO: 1208386 - RNA, 21 nt, Human
ugcaccggcuggccuggcccc

SEQ ID NO: 1208387 - RNA, 20 nt, Human
ugcaccggcuggccuggccc

SEQ ID NO: 1208388 - RNA, 19 nt, Human
ugcaccggcuggccuggcc

SEQ ID NO: 1208389 - RNA, 20 nt, Human
ugcacagaguuguuacauuu

SEQ ID NO: 1208390 - RNA, 14 nt, Human
ucugccugcccagg

SEQ ID NO: 1208391 - RNA, 18 nt, Human
ucugccauauucuguugg

SEQ ID NO: 1208392 - RNA, 18 nt, Human
ucugcugacagacacagg

SEQ ID NO: 1208393 - RNA, 21 nt, Human
ucugcuccucuccccagcaag

SEQ ID NO: 1208394 - RNA, 18 nt, Human
ucugcuccucuccccagc

SEQ ID NO: 1208395 - RNA, 16 nt, Human
ucugccugcccaggcc

SEQ ID NO: 1208396 - RNA, 15 nt, Human
ucugccugcccaggc

SEQ ID NO: 1208397 - RNA, 21 nt, Human
ucuggacaggcauguucucug

SEQ ID NO: 1208398 - RNA, 14 nt, Human
ucuggacaggcaug

SEQ ID NO: 1208399 - RNA, 16 nt, Human
ucuggaaugcaguggu

SEQ ID NO: 1208400 - RNA, 15 nt, Human
ucuggaaugcagugg

SEQ ID NO: 1208401 - RNA, 22 nt, Human
ucugcugacagacacaggcccg

SEQ ID NO: 1208402 - RNA, 21 nt, Human
ucugcugacagacacaggccc

SEQ ID NO: 1208403 - RNA, 20 nt, Human
ucugcugacagacacaggcc

SEQ ID NO: 1208404 - RNA, 19 nt, Human
ucugcugacagacacaggc

SEQ ID NO: 1208405 - RNA, 14 nt, Human
ucugggacacaguu

SEQ ID NO: 1208406 - RNA, 23 nt, Human
ucuggugacuuuccucuuugguc

SEQ ID NO: 1208407 - RNA, 23 nt, Human
ucuggcucuuccaggcugggaga

SEQ ID NO: 1208408 - RNA, 22 nt, Human
ucuggcuaugcauuugaaaauu

SEQ ID NO: 1208409 - RNA, 19 nt, Human
ucuggcuaugcauuugaaa

SEQ ID NO: 1208410 - RNA, 16 nt, Human
ucugucgcccagucug

SEQ ID NO: 1208411 - RNA, 14 nt, Human
ucugucgcccaguc

SEQ ID NO: 1208412 - RNA, 20 nt, Human
ucuguccuacucugugucag

SEQ ID NO: 1208413 - RNA, 19 nt, Human
ucuguccuacucuguguca

SEQ ID NO: 1208414 - RNA, 15 nt, Human
ucuguccuacucugu

SEQ ID NO: 1208415 - RNA, 22 nt, Human
ucuuaaauauguggaguucauc

SEQ ID NO: 1208416 - RNA, 13 nt, Human
ucuuaaaaagugg

SEQ ID NO: 1208417 - RNA, 12 nt, Human
ucuugaacuccu

SEQ ID NO: 1208418 - RNA, 23 nt, Human
ucuucagaucucuaacuucacca

SEQ ID NO: 1208419 - RNA, 18 nt, Human
ucuucagaucucuaacuu

SEQ ID NO: 1208420 - RNA, 17 nt, Human
ucucugaggacacuaac

SEQ ID NO: 1208421 - RNA, 16 nt, Human
ucucuaguuugauuaa

SEQ ID NO: 1208422 - RNA, 15 nt, Human
ucucuaguuugauua

SEQ ID NO: 1208423 - RNA, 19 nt, Human
ucucuaacuucaccauauu

SEQ ID NO: 1208424 - RNA, 12 nt, Human
ucucuaacuuca

SEQ ID NO: 1208425 - RNA, 22 nt, Human
ucucgugauugauaagaaccuu

SEQ ID NO: 1208426 - RNA, 14 nt, Human
ucucgugauugaua

SEQ ID NO: 1208427 - RNA, 19 nt, Human
ucuccuguaccucuugagc

SEQ ID NO: 1208428 - RNA, 17 nt, Human
ucuccuguaccucuuga

SEQ ID NO: 1208429 - RNA, 16 nt, Human
ucuccuguaccucuug

SEQ ID NO: 1208430 - RNA, 15 nt, Human
ucuccuguaccucuu

SEQ ID NO: 1208431 - RNA, 21 nt, Human
ucuccuggaaauauuaagaaa

SEQ ID NO: 1208432 - RNA, 19 nt, Human
ucuccugccucagccuccc

SEQ ID NO: 1208433 - RNA, 15 nt, Human
ucuccugccucagcc

SEQ ID NO: 1208434 - RNA, 17 nt, Human
ucuccugccucagccuc

SEQ ID NO: 1208435 - RNA, 21 nt, Human
ucugcaagaauugaagcagga

SEQ ID NO: 1208436 - RNA, 20 nt, Human
ucugcaagaauugaagcagg

SEQ ID NO: 1208437 - RNA, 15 nt, Human
ucugacccacugcuu

SEQ ID NO: 1208438 - RNA, 14 nt, Human
ucugacccacugcu

SEQ ID NO: 1208439 - RNA, 19 nt, Human
ucugacacacagcucuguc

SEQ ID NO: 1208440 - RNA, 18 nt, Human
ucugacacacagcucugu

SEQ ID NO: 1208441 - RNA, 17 nt, Human
ucugacacacagcucug

SEQ ID NO: 1208442 - RNA, 16 nt, Human
ucugacacacagcucu

SEQ ID NO: 1208443 - RNA, 13 nt, Human
ucugacccacugc

SEQ ID NO: 1208444 - RNA, 22 nt, Human
ucugacaggcaaugcuggcugu

SEQ ID NO: 1208445 - RNA, 21 nt, Human
ucugacaggcaaugcuggcug

SEQ ID NO: 1208446 - RNA, 12 nt, Human
ucugacaggcaa

SEQ ID NO: 1208447 - RNA, 14 nt, Human
ucugaaaauguaug

SEQ ID NO: 1208448 - RNA, 13 nt, Human
ucugaaaauguau

SEQ ID NO: 1208449 - RNA, 21 nt, Human
ucuaaaucuccaaaauaaaac

SEQ ID NO: 1208450 - RNA, 22 nt, Human
ucuaaaucuccaaaauaaaacu

SEQ ID NO: 1208451 - RNA, 16 nt, Human
ucgugauugauaagaa

SEQ ID NO: 1208452 - RNA, 18 nt, Human
ucuaggaggucucuaaga

SEQ ID NO: 1208453 - RNA, 14 nt, Human
ucuaauauguaaca

SEQ ID NO: 1208454 - RNA, 17 nt, Human
ucucaaauaacuaaaag

SEQ ID NO: 1208455 - RNA, 22 nt, Human
ucuaucaaguauuauaccuuuu

SEQ ID NO: 1208456 - RNA, 21 nt, Human
ucuaucaaguauuauaccuuu

SEQ ID NO: 1208457 - RNA, 15 nt, Human
ucuaucaaguauuau

SEQ ID NO: 1208458 - RNA, 20 nt, Human
uccuucaccuuuguccccac

SEQ ID NO: 1208459 - RNA, 18 nt, Human
uccuucaccuuugucccc

SEQ ID NO: 1208460 - RNA, 20 nt, Human
uccuuaccagcagagcaccu

SEQ ID NO: 1208461 - RNA, 19 nt, Human
uccuucacagaugggugcu

SEQ ID NO: 1208462 - RNA, 18 nt, Human
uccuucacagaugggugc

SEQ ID NO: 1208463 - RNA, 18 nt, Human
uccuuaccagcagagcac

SEQ ID NO: 1208464 - RNA, 17 nt, Human
uccuuaccagcagagca

SEQ ID NO: 1208465 - RNA, 16 nt, Human
uccuuaccagcagagc

SEQ ID NO: 1208466 - RNA, 22 nt, Human
uccuucaccuuuguccccaccg

SEQ ID NO: 1208467 - RNA, 21 nt, Human
uccuucaccuuuguccccacc

SEQ ID NO: 1208468 - RNA, 18 nt, Human
uccuuuucgcaggauucu

SEQ ID NO: 1208469 - RNA, 13 nt, Human
ucgaacuggcugc

SEQ ID NO: 1208470 - RNA, 23 nt, Human
uccuuuucacaguucucuccuuc

SEQ ID NO: 1208471 - RNA, 22 nt, Human
uccuguaccucuugagccuuga

SEQ ID NO: 1208472 - RNA, 20 nt, Human
uccuguaccucuugagccuu

SEQ ID NO: 1208473 - RNA, 22 nt, Human
uccuggcacugcuuccagugag

SEQ ID NO: 1208474 - RNA, 18 nt, Human
uccuggcacugcuuccag

SEQ ID NO: 1208475 - RNA, 22 nt, Human
uccuggcacccggccccugcug

SEQ ID NO: 1208476 - RNA, 21 nt, Human
uccuggcacccggccccugcu

SEQ ID NO: 1208477 - RNA, 20 nt, Human
uccuggcacccggccccugc

SEQ ID NO: 1208478 - RNA, 19 nt, Human
uccuggcacccggccccug

SEQ ID NO: 1208479 - RNA, 16 nt, Human
uccuggcacccggccc

SEQ ID NO: 1208480 - RNA, 14 nt, Human
uccuggcacccggc

SEQ ID NO: 1208481 - RNA, 17 nt, Human
uccugccucagccuccc

SEQ ID NO: 1208482 - RNA, 16 nt, Human
uccugccucagccucc

SEQ ID NO: 1208483 - RNA, 15 nt, Human
uccugccucagccuc

SEQ ID NO: 1208484 - RNA, 13 nt, Human
uccugccucagcc

SEQ ID NO: 1208485 - RNA, 13 nt, Human
uccugagccagau

SEQ ID NO: 1208486 - RNA, 14 nt, Human
uccugagccagauu

SEQ ID NO: 1208487 - RNA, 14 nt, Human
uccugccucagccu

SEQ ID NO: 1208488 - RNA, 16 nt, Human
ucccuauuagagaaga

SEQ ID NO: 1208489 - RNA, 21 nt, Human
uccccuguuuguuucugaaag

SEQ ID NO: 1208490 - RNA, 20 nt, Human
uccccuguuuguuucugaaa

SEQ ID NO: 1208491 - RNA, 18 nt, Human
uccagguuuaagcuguua

SEQ ID NO: 1208492 - RNA, 17 nt, Human
uccagguuuaagcuguu

SEQ ID NO: 1208493 - RNA, 14 nt, Human
ucccuucccaccuc

SEQ ID NO: 1208494 - RNA, 13 nt, Human
ucccuucccaccu

SEQ ID NO: 1208495 - RNA, 20 nt, Human
ucccugcacuugcagacucu

SEQ ID NO: 1208496 - RNA, 14 nt, Human
ucccugcacuugca

SEQ ID NO: 1208497 - RNA, 13 nt, Human
ucccugcacuugc

SEQ ID NO: 1208498 - RNA, 16 nt, Human
uccuaaucuucugaac

SEQ ID NO: 1208499 - RNA, 17 nt, Human
uccgaccagacaccuug

SEQ ID NO: 1208500 - RNA, 13 nt, Human
uccgaccagacac

SEQ ID NO: 1208501 - RNA, 18 nt, Human
uccuacccacccuccuuu

SEQ ID NO: 1208502 - RNA, 17 nt, Human
uccucauuagcauuuug

SEQ ID NO: 1208503 - RNA, 21 nt, Human
uccuauauuguuuucagugua

SEQ ID NO: 1208504 - RNA, 18 nt, Human
uccuauauuguuuucagu

SEQ ID NO: 1208505 - RNA, 14 nt, Human
uccucuaggagguc

SEQ ID NO: 1208506 - RNA, 19 nt, Human
uccuccuuuucacaguucu

SEQ ID NO: 1208507 - RNA, 17 nt, Human
uccucugcugcuggcug

SEQ ID NO: 1208508 - RNA, 16 nt, Human
uccucugcugcuggcu

SEQ ID NO: 1208509 - RNA, 15 nt, Human
uccucugcugcuggc

SEQ ID NO: 1208510 - RNA, 14 nt, Human
uccucugcugcugg

SEQ ID NO: 1208511 - RNA, 17 nt, Human
uccucuaggaggucucu

SEQ ID NO: 1208512 - RNA, 19 nt, Human
uccucuguacagagcccac

SEQ ID NO: 1208513 - RNA, 18 nt, Human
uccucuguacagagccca

SEQ ID NO: 1208514 - RNA, 17 nt, Human
uccucuguacagagccc

SEQ ID NO: 1208515 - RNA, 16 nt, Human
uccucuguacagagcc

SEQ ID NO: 1208516 - RNA, 22 nt, Human
uauuguuuucaguguacaugga

SEQ ID NO: 1208517 - RNA, 20 nt, Human
uauuguuuucaguguacaug

SEQ ID NO: 1208518 - RNA, 18 nt, Human
uauuguuuucaguguaca

SEQ ID NO: 1208519 - RNA, 12 nt, Human
uauuguuuucag

SEQ ID NO: 1208520 - RNA, 18 nt, Human
uauucucuccuguaccuc

SEQ ID NO: 1208521 - RNA, 17 nt, Human
uauucucuccuguaccu

SEQ ID NO: 1208522 - RNA, 22 nt, Human
uauuggaaauuuguuauaauga

SEQ ID NO: 1208523 - RNA, 22 nt, Human
uauugcugauggugcaaugacc

SEQ ID NO: 1208524 - RNA, 17 nt, Human
uauugcugauggugcaa

SEQ ID NO: 1208525 - RNA, 15 nt, Human
gggaguggccacaga

SEQ ID NO: 1208526 - RNA, 13 nt, Human
gggaguggccaca

SEQ ID NO: 1208527 - RNA, 12 nt, Human
uauuaaauuaug

SEQ ID NO: 1208528 - RNA, 20 nt, Human
uauguugcccaggcaggucu

SEQ ID NO: 1208529 - RNA, 19 nt, Human
uauguugcccaggcagguc

SEQ ID NO: 1208530 - RNA, 16 nt, Human
uauguugcccaggcag

SEQ ID NO: 1208531 - RNA, 13 nt, Human
uauguugcccagg

SEQ ID NO: 1208532 - RNA, 23 nt, Human
ucaaccccuucgcuccugugucu

SEQ ID NO: 1208533 - RNA, 15 nt, Human
ucaaaaaaagaaaaa

SEQ ID NO: 1208534 - RNA, 14 nt, Human
ucaaaaaaagaaaa

SEQ ID NO: 1208535 - RNA, 17 nt, Human
uauuuuuuucuuuucuu

SEQ ID NO: 1208536 - RNA, 15 nt, Human
uauuuuuuuacuaau

SEQ ID NO: 1208537 - RNA, 14 nt, Human
uauuuuuuuacuaa

SEQ ID NO: 1208538 - RNA, 22 nt, Human
uauuuucccuauuagagaagag

SEQ ID NO: 1208539 - RNA, 17 nt, Human
uauuuuauuaugcauga

SEQ ID NO: 1208540 - RNA, 14 nt, Human
uauuuuauuaugca

SEQ ID NO: 1208541 - RNA, 23 nt, Human
ucaauuacaggaaguacuggaga

SEQ ID NO: 1208542 - RNA, 21 nt, Human
ucaauuacaggaaguacugga

SEQ ID NO: 1208543 - RNA, 21 nt, Human
ucaagugauucuccugccuca

SEQ ID NO: 1208544 - RNA, 20 nt, Human
ucaagugauucuccugccuc

SEQ ID NO: 1208545 - RNA, 16 nt, Human
ucaccacaugugcaca

SEQ ID NO: 1208546 - RNA, 21 nt, Human
ucaccaaaucagcugcuacua

SEQ ID NO: 1208547 - RNA, 20 nt, Human
ucaccaaaucagcugcuacu

SEQ ID NO: 1208548 - RNA, 19 nt, Human
ucaccaaaucagcugcuac

SEQ ID NO: 1208549 - RNA, 19 nt, Human
ucacauuuauucugcucac

SEQ ID NO: 1208550 - RNA, 18 nt, Human
ucacauuuauucugcuca

SEQ ID NO: 1208551 - RNA, 17 nt, Human
ucacauuuauucugcuc

SEQ ID NO: 1208552 - RNA, 23 nt, Human
ucacaguccuuaccagcagagca

SEQ ID NO: 1208553 - RNA, 22 nt, Human
ucacaguccuuaccagcagagc

SEQ ID NO: 1208554 - RNA, 19 nt, Human
ucacaguccuuaccagcag

SEQ ID NO: 1208555 - RNA, 19 nt, Human
ucacaggcagguccagggu

SEQ ID NO: 1208556 - RNA, 18 nt, Human
ucacaggcagguccaggg

SEQ ID NO: 1208557 - RNA, 17 nt, Human
ucacaggcagguccagg

SEQ ID NO: 1208558 - RNA, 21 nt, Human
ucauucaacccaccugcgucu

SEQ ID NO: 1208559 - RNA, 16 nt, Human
ucauuuccugugucuu

SEQ ID NO: 1208560 - RNA, 13 nt, Human
ucauuuccugugu

SEQ ID NO: 1208561 - RNA, 19 nt, Human
ucaucuugaauuguaagga

SEQ ID NO: 1208562 - RNA, 23 nt, Human
ucaucuuagguuggcaaaaaggc

SEQ ID NO: 1208563 - RNA, 15 nt, Human
ucaggugcugccauc

SEQ ID NO: 1208564 - RNA, 14 nt, Human
ucaggugcugccau

SEQ ID NO: 1208565 - RNA, 13 nt, Human
ucaggugcugcca

SEQ ID NO: 1208566 - RNA, 23 nt, Human
ucaggugagaagcagaggaagga

SEQ ID NO: 1208567 - RNA, 21 nt, Human
ucaggugagaagcagaggaag

SEQ ID NO: 1208568 - RNA, 21 nt, Human
ucaucaccaacgucugugcca

SEQ ID NO: 1208569 - RNA, 20 nt, Human
ucaucaccaacgucugugcc

SEQ ID NO: 1208570 - RNA, 19 nt, Human
ucaucaccaacgucugugc

SEQ ID NO: 1208571 - RNA, 15 nt, Human
ucauacucaccucac

SEQ ID NO: 1208572 - RNA, 16 nt, Human
uccagguucagcuugu

SEQ ID NO: 1208573 - RNA, 15 nt, Human
uccagguucagcuug

SEQ ID NO: 1208574 - RNA, 22 nt, Human
uccaggugcacaagcuccaagc

SEQ ID NO: 1208575 - RNA, 21 nt, Human
uccaggugcacaagcuccaag

SEQ ID NO: 1208576 - RNA, 20 nt, Human
uccaggugcacaagcuccaa

SEQ ID NO: 1208577 - RNA, 18 nt, Human
uccaggugcacaagcucc

SEQ ID NO: 1208578 - RNA, 15 nt, Human
uccaggugcacaagc

SEQ ID NO: 1208579 - RNA, 23 nt, Human
uccaggggugggacacccuguga

SEQ ID NO: 1208580 - RNA, 22 nt, Human
uccaggagcagccacauuccug

SEQ ID NO: 1208581 - RNA, 18 nt, Human
uccaggagcagccacauu

SEQ ID NO: 1208582 - RNA, 17 nt, Human
uccaggagcagccacau

SEQ ID NO: 1208583 - RNA, 16 nt, Human
uccaggagcagccaca

SEQ ID NO: 1208584 - RNA, 17 nt, Human
uccagcuguucagcugg

SEQ ID NO: 1208585 - RNA, 18 nt, Human
uccagcucaccagcccca

SEQ ID NO: 1208586 - RNA, 17 nt, Human
uccagcucaccagcccc

SEQ ID NO: 1208587 - RNA, 16 nt, Human
uccagcucaccagccc

SEQ ID NO: 1208588 - RNA, 21 nt, Human
uccaccugccagggacagagg

SEQ ID NO: 1208589 - RNA, 18 nt, Human
uccaccugccagggacag

SEQ ID NO: 1208590 - RNA, 17 nt, Human
uccaccugccagggaca

SEQ ID NO: 1208591 - RNA, 13 nt, Human
uccacccugcucu

SEQ ID NO: 1208592 - RNA, 12 nt, Human
uccacccugcuc

SEQ ID NO: 1208593 - RNA, 18 nt, Human
uccacaaguuaaauaaau

SEQ ID NO: 1208594 - RNA, 17 nt, Human
uccacaaguuaaauaaa

SEQ ID NO: 1208595 - RNA, 19 nt, Human
uccacaagagcccaggccu

SEQ ID NO: 1208596 - RNA, 18 nt, Human
uccacaagagcccaggcc

SEQ ID NO: 1208597 - RNA, 17 nt, Human
uccacaagagcccaggc

SEQ ID NO: 1208598 - RNA, 16 nt, Human
uccacaagagcccagg

SEQ ID NO: 1208599 - RNA, 20 nt, Human
uccaaaauaaaacuuuuuaa

SEQ ID NO: 1208600 - RNA, 18 nt, Human
uccaauuuacauacucug

SEQ ID NO: 1208601 - RNA, 17 nt, Human
uccaauuuacauacucu

SEQ ID NO: 1208602 - RNA, 14 nt, Human
ucagacagcugccu

SEQ ID NO: 1208603 - RNA, 13 nt, Human
ucagacagcugcc

SEQ ID NO: 1208604 - RNA, 10 nt, Human
ucagaaaugu

SEQ ID NO: 1208605 - RNA, 23 nt, Human
ucagaauucucuaguuugauuaa

SEQ ID NO: 1208606 - RNA, 15 nt, Human
ucagaaauguguuau

SEQ ID NO: 1208607 - RNA, 18 nt, Human
ucacugccaugccagcuu

SEQ ID NO: 1208608 - RNA, 20 nt, Human
ucacucuuauugcccacgcu

SEQ ID NO: 1208609 - RNA, 17 nt, Human
ucacucuuauugcccac

SEQ ID NO: 1208610 - RNA, 16 nt, Human
ucaccagccccagugc

SEQ ID NO: 1208611 - RNA, 13 nt, Human
ucaccagccccag

SEQ ID NO: 1208612 - RNA, 14 nt, Human
ucacugcuuaacuu

SEQ ID NO: 1208613 - RNA, 20 nt, Human
ucagccucccgaguagcugg

SEQ ID NO: 1208614 - RNA, 18 nt, Human
ucagccucccgaguagcu

SEQ ID NO: 1208615 - RNA, 22 nt, Human
ucagccucccgaauagcuggga

SEQ ID NO: 1208616 - RNA, 21 nt, Human
ucagccucccgaauagcuggg

SEQ ID NO: 1208617 - RNA, 21 nt, Human
ucagccucccaaagugcuggg

SEQ ID NO: 1208618 - RNA, 19 nt, Human
ucagccucccaaagugcug

SEQ ID NO: 1208619 - RNA, 14 nt, Human
ucagccucccaaag

SEQ ID NO: 1208620 - RNA, 16 nt, Human
ucagcugaaccugggu

SEQ ID NO: 1208621 - RNA, 15 nt, Human
ucagcugaaccuggg

SEQ ID NO: 1208622 - RNA, 19 nt, Human
ucagccugcuccagcuguu

SEQ ID NO: 1208623 - RNA, 18 nt, Human
ucagccugcuccagcugu

SEQ ID NO: 1208624 - RNA, 22 nt, Human
ucagccucccgaguagcuggga

SEQ ID NO: 1208625 - RNA, 21 nt, Human
ucagccucccgaguagcuggg

SEQ ID NO: 1208626 - RNA, 16 nt, Human
ucaggugagaagcaga

SEQ ID NO: 1208627 - RNA, 15 nt, Human
ucaggugagaagcag

SEQ ID NO: 1208628 - RNA, 16 nt, Human
ucagggccuggcucag

SEQ ID NO: 1208629 - RNA, 14 nt, Human
ucagggccuggcuc

SEQ ID NO: 1208630 - RNA, 23 nt, Human
gggaggaucucuugagccuggga

SEQ ID NO: 1208631 - RNA, 21 nt, Human
gggaggauugcuugagcucag

SEQ ID NO: 1208632 - RNA, 22 nt, Human
gggaggauguucugggacacag

SEQ ID NO: 1208633 - RNA, 21 nt, Human
gggagugaguugauagcacag

SEQ ID NO: 1208634 - RNA, 17 nt, Human
gggagugacagaggcag

SEQ ID NO: 1208635 - RNA, 23 nt, Human
gggaggauugcuugagcucagga

SEQ ID NO: 1208636 - RNA, 22 nt, Human
gggagcugccuguucagcucca

SEQ ID NO: 1208637 - RNA, 21 nt, Human
gggagcugccuguucagcucc

SEQ ID NO: 1208638 - RNA, 13 nt, Human
gggagcugccugu

SEQ ID NO: 1208639 - RNA, 14 nt, Human
gggacacccuguga

SEQ ID NO: 1208640 - RNA, 21 nt, Human
gggaauguuugccucugccuc

SEQ ID NO: 1208641 - RNA, 19 nt, Human
gggaauguuugccucugcc

SEQ ID NO: 1208642 - RNA, 23 nt, Human
gggacucaaugcacugacauugu

SEQ ID NO: 1208643 - RNA, 19 nt, Human
gggacucaaugcacugaca

SEQ ID NO: 1208644 - RNA, 17 nt, Human
gggacucaaugcacuga

SEQ ID NO: 1208645 - RNA, 15 nt, Human
ggcuuaaaacaacac

SEQ ID NO: 1208646 - RNA, 20 nt, Human
ggcuguuggcugggggccuc

SEQ ID NO: 1208647 - RNA, 16 nt, Human
ggcuguuggcuggggg

SEQ ID NO: 1208648 - RNA, 15 nt, Human
ggcuguuggcugggg

SEQ ID NO: 1208649 - RNA, 14 nt, Human
ggcuguuggcuggg

SEQ ID NO: 1208650 - RNA, 21 nt, Human
ggcuucacggaagagccuugc

SEQ ID NO: 1208651 - RNA, 20 nt, Human
ggcuucacggaagagccuug

SEQ ID NO: 1208652 - RNA, 15 nt, Human
ggcuuagucacugag

SEQ ID NO: 1208653 - RNA, 14 nt, Human
ggcuuagucacuga

SEQ ID NO: 1208654 - RNA, 19 nt, Human
ggcuuggggaccagagcug

SEQ ID NO: 1208655 - RNA, 18 nt, Human
ggcuuggggaccagagcu

SEQ ID NO: 1208656 - RNA, 17 nt, Human
ggcuuggggaccagagc

SEQ ID NO: 1208657 - RNA, 21 nt, Human
ggcugggcucccuucccaccu

SEQ ID NO: 1208658 - RNA, 20 nt, Human
ggcugggcucccuucccacc

SEQ ID NO: 1208659 - RNA, 14 nt, Human
ggcugggggccuca

SEQ ID NO: 1208660 - RNA, 16 nt, Human
ggcugggggaagaagc

SEQ ID NO: 1208661 - RNA, 22 nt, Human
ggcugggcuucaguggcagcug

SEQ ID NO: 1208662 - RNA, 21 nt, Human
ggcugggcuucaguggcagcu

SEQ ID NO: 1208663 - RNA, 11 nt, Human
ggcugggcuuc

SEQ ID NO: 1208664 - RNA, 21 nt, Human
ggcugcuucaaggauccugag

SEQ ID NO: 1208665 - RNA, 20 nt, Human
ggcugcuucaaggauccuga

SEQ ID NO: 1208666 - RNA, 19 nt, Human
ggcugcuucaaggauccug

SEQ ID NO: 1208667 - RNA, 15 nt, Human
ggcugcuucaaggau

SEQ ID NO: 1208668 - RNA, 17 nt, Human
ggcucugccucccauca

SEQ ID NO: 1208669 - RNA, 22 nt, Human
ggccucugcacuccccugcugg

SEQ ID NO: 1208670 - RNA, 19 nt, Human
ggccucugcacuccccugc

SEQ ID NO: 1208671 - RNA, 18 nt, Human
ggccucugcacuccccug

SEQ ID NO: 1208672 - RNA, 13 nt, Human
ggccuggccccuc

SEQ ID NO: 1208673 - RNA, 12 nt, Human
ggccugagcugg

SEQ ID NO: 1208674 - RNA, 14 nt, Human
ggccuggccugagc

SEQ ID NO: 1208675 - RNA, 13 nt, Human
ggccuggccugag

SEQ ID NO: 1208676 - RNA, 10 nt, Human
ggccuggccu

SEQ ID NO: 1208677 - RNA, 23 nt, Human
ggccuggccccucagggucccug

SEQ ID NO: 1208678 - RNA, 18 nt, Human
ggccuggccccucagggu

SEQ ID NO: 1208679 - RNA, 17 nt, Human
ggccuggccccucaggg

SEQ ID NO: 1208680 - RNA, 15 nt, Human
ggccuggccccucag

SEQ ID NO: 1208681 - RNA, 14 nt, Human
ggccuggccccuca

SEQ ID NO: 1208682 - RNA, 19 nt, Human
ggccuggccugagcuggga

SEQ ID NO: 1208683 - RNA, 16 nt, Human
ggccuggccugagcug

SEQ ID NO: 1208684 - RNA, 15 nt, Human
ggccuggccugagcu

SEQ ID NO: 1208685 - RNA, 23 nt, Human
ggccugggggcugggcagaggaa

SEQ ID NO: 1208686 - RNA, 24 nt, Human
ggcgcagcauauucaggaagcuca

SEQ ID NO: 1208687 - RNA, 23 nt, Human
ggcgcagcauauucaggaagcuc

SEQ ID NO: 1208688 - RNA, 14 nt, Human
ggccuccugugugu

SEQ ID NO: 1208689 - RNA, 23 nt, Human
ggccucaagugauucuccugccu

SEQ ID NO: 1208690 - RNA, 22 nt, Human
ggccucaagugauucuccugcc

SEQ ID NO: 1208691 - RNA, 14 nt, Human
ggccucaagugauu

SEQ ID NO: 1208692 - RNA, 23 nt, Human
ggccuagcauacguacacauuuu

SEQ ID NO: 1208693 - RNA, 22 nt, Human
ggccuagcauacguacacauuu

SEQ ID NO: 1208694 - RNA, 20 nt, Human
ggccuagcauacguacacau

SEQ ID NO: 1208695 - RNA, 20 nt, Human
ggcccagagggccugcaagg

SEQ ID NO: 1208696 - RNA, 19 nt, Human
ggcccagagggccugcaag

SEQ ID NO: 1208697 - RNA, 17 nt, Human
ggcccagagggccugca

SEQ ID NO: 1208698 - RNA, 14 nt, Human
ggcccagagggccu

SEQ ID NO: 1208699 - RNA, 16 nt, Human
ggcucugccucccauc

SEQ ID NO: 1208700 - RNA, 15 nt, Human
ggcucugccucccau

SEQ ID NO: 1208701 - RNA, 13 nt, Human
ggcucugccuccc

SEQ ID NO: 1208702 - RNA, 15 nt, Human
ggcucugcccuuggu

SEQ ID NO: 1208703 - RNA, 14 nt, Human
ggcucugcccuugg

SEQ ID NO: 1208704 - RNA, 12 nt, Human
ggcucugcccuu

SEQ ID NO: 1208705 - RNA, 20 nt, Human
ggcucucaggccagcugcuu

SEQ ID NO: 1208706 - RNA, 19 nt, Human
ggcucucaggccagcugcu

SEQ ID NO: 1208707 - RNA, 18 nt, Human
ggcucucaggccagcugc

SEQ ID NO: 1208708 - RNA, 17 nt, Human
ggcucucaggccagcug

SEQ ID NO: 1208709 - RNA, 16 nt, Human
ggcucucaggccagcu

SEQ ID NO: 1208710 - RNA, 15 nt, Human
ggcucucaggccagc

SEQ ID NO: 1208711 - RNA, 15 nt, Human
ggcuccaggcuccuu

SEQ ID NO: 1208712 - RNA, 14 nt, Human
ggcuccaggcuccu

SEQ ID NO: 1208713 - RNA, 13 nt, Human
ggcuccaggcucc

SEQ ID NO: 1208714 - RNA, 12 nt, Human
ggcuccaggcuc

SEQ ID NO: 1208715 - RNA, 18 nt, Human
ggcuccaggagcagccac

SEQ ID NO: 1208716 - RNA, 17 nt, Human
ggcuccaggagcagcca

SEQ ID NO: 1208717 - RNA, 16 nt, Human
ggcuccaggagcagcc

SEQ ID NO: 1208718 - RNA, 14 nt, Human
ggcuccaggagcag

SEQ ID NO: 1208719 - RNA, 10 nt, Human
ggcuccagac

SEQ ID NO: 1208720 - RNA, 9 nt, Human
ggcuccaga

SEQ ID NO: 1208721 - RNA, 14 nt, Human
ggcuaugcauuuga

SEQ ID NO: 1208722 - RNA, 13 nt, Human
ggcuaugcauuug

SEQ ID NO: 1208723 - RNA, 12 nt, Human
ggcuaugcauuu

SEQ ID NO: 1208724 - RNA, 18 nt, Human
ggcgcugccccuggcagc

SEQ ID NO: 1208725 - RNA, 17 nt, Human
ggcgcugccccuggcag

SEQ ID NO: 1208726 - RNA, 11 nt, Human
ggcgcugcccc

SEQ ID NO: 1208727 - RNA, 15 nt, Human
ggagccuccugcccu

SEQ ID NO: 1208728 - RNA, 14 nt, Human
ggagccuccugccc

SEQ ID NO: 1208729 - RNA, 21 nt, Human
ggagaccccuuggggagcagg

SEQ ID NO: 1208730 - RNA, 17 nt, Human
ggagggagggcuccaga

SEQ ID NO: 1208731 - RNA, 16 nt, Human
ggagggagggcuccag

SEQ ID NO: 1208732 - RNA, 13 nt, Human
ggagggagggcuc

SEQ ID NO: 1208733 - RNA, 21 nt, Human
ggaggauguucugggacacag

SEQ ID NO: 1208734 - RNA, 18 nt, Human
ggaggauguucugggaca

SEQ ID NO: 1208735 - RNA, 22 nt, Human
ggagucccaccuuggcugcagg

SEQ ID NO: 1208736 - RNA, 18 nt, Human
ggaccuugaacuggguac

SEQ ID NO: 1208737 - RNA, 19 nt, Human
ggaccagagcugccaccug

SEQ ID NO: 1208738 - RNA, 17 nt, Human
ggacagcuccuucuguc

SEQ ID NO: 1208739 - RNA, 16 nt, Human
ggacagcuccuucugu

SEQ ID NO: 1208740 - RNA, 15 nt, Human
ggacagcuccuucug

SEQ ID NO: 1208741 - RNA, 11 nt, Human
ggacagcuccu

SEQ ID NO: 1208742 - RNA, 20 nt, Human
ggacagaggggguggccucc

SEQ ID NO: 1208743 - RNA, 16 nt, Human
ggacagaggggguggc

SEQ ID NO: 1208744 - RNA, 21 nt, Human
ggaugccugguggcagcugcg

SEQ ID NO: 1208745 - RNA, 20 nt, Human
ggaugccugguggcagcugc

SEQ ID NO: 1208746 - RNA, 19 nt, Human
ggaugccugguggcagcug

SEQ ID NO: 1208747 - RNA, 18 nt, Human
ggaugccugguggcagcu

SEQ ID NO: 1208748 - RNA, 22 nt, Human
ggaugaucuaggaagacuuugg

SEQ ID NO: 1208749 - RNA, 18 nt, Human
ggaugaucuaggaagacu

SEQ ID NO: 1208750 - RNA, 16 nt, Human
ggaugaucuaggaaga

SEQ ID NO: 1208751 - RNA, 23 nt, Human
ggagucccaccuuggcugcaggg

SEQ ID NO: 1208752 - RNA, 18 nt, Human
ggaugcccaaagaugcag

SEQ ID NO: 1208753 - RNA, 17 nt, Human
ggaugccugguggcagc

SEQ ID NO: 1208754 - RNA, 13 nt, Human
ggaugccuggugg

SEQ ID NO: 1208755 - RNA, 19 nt, Human
ggaugcccaaagaugcagc

SEQ ID NO: 1208756 - RNA, 20 nt, Human
ggcacucagaagacacugau

SEQ ID NO: 1208757 - RNA, 19 nt, Human
ggcacucagaagacacuga

SEQ ID NO: 1208758 - RNA, 18 nt, Human
ggcacucagaagacacug

SEQ ID NO: 1208759 - RNA, 20 nt, Human
ggcacccggccccugcuggu

SEQ ID NO: 1208760 - RNA, 19 nt, Human
ggcacccggccccugcugg

SEQ ID NO: 1208761 - RNA, 18 nt, Human
ggcacccggccccugcug

SEQ ID NO: 1208762 - RNA, 20 nt, Human
ggcacccaccaucaugucug

SEQ ID NO: 1208763 - RNA, 17 nt, Human
ggcaccagcagccugga

SEQ ID NO: 1208764 - RNA, 15 nt, Human
ggcaaggcugucaau

SEQ ID NO: 1208765 - RNA, 19 nt, Human
ggcaagcaccuccugccuc

SEQ ID NO: 1208766 - RNA, 18 nt, Human
ggcaagcaccuccugccu

SEQ ID NO: 1208767 - RNA, 17 nt, Human
ggcaagcaccuccugcc

SEQ ID NO: 1208768 - RNA, 21 nt, Human
ggauucuuccucccucccucu

SEQ ID NO: 1208769 - RNA, 17 nt, Human
ggccaggcccucugccc

SEQ ID NO: 1208770 - RNA, 16 nt, Human
ggccaggcccucugcc

SEQ ID NO: 1208771 - RNA, 15 nt, Human
ggccaggcccucugc

SEQ ID NO: 1208772 - RNA, 13 nt, Human
ggccaggagccuc

SEQ ID NO: 1208773 - RNA, 11 nt, Human
ggccaggagcc

SEQ ID NO: 1208774 - RNA, 22 nt, Human
ggccacagaaaauucuucucca

SEQ ID NO: 1208775 - RNA, 20 nt, Human
ggcauguucucugaggacac

SEQ ID NO: 1208776 - RNA, 18 nt, Human
ggcagggucucacucugu

SEQ ID NO: 1208777 - RNA, 17 nt, Human
ggcagggucucacucug

SEQ ID NO: 1208778 - RNA, 12 nt, Human
ggcaggguccua

SEQ ID NO: 1208779 - RNA, 22 nt, Human
ggcagcugcuuuugucuauggg

SEQ ID NO: 1208780 - RNA, 24 nt, Human
ggcagcugcgguccacccaggagc

SEQ ID NO: 1208781 - RNA, 23 nt, Human
ggcagcugcgguccacccaggag

SEQ ID NO: 1208782 - RNA, 21 nt, Human
ggcagaguugaagacagagcu

SEQ ID NO: 1208783 - RNA, 19 nt, Human
ggcagaguugaagacagag

SEQ ID NO: 1208784 - RNA, 17 nt, Human
ggcagaguugaagacag

SEQ ID NO: 1208785 - RNA, 23 nt, Human
ggcaugugaugagaggaaaucac

SEQ ID NO: 1208786 - RNA, 18 nt, Human
ggcaugugaugagaggaa

SEQ ID NO: 1208787 - RNA, 23 nt, Human
gcugcaaaggguaucaggugcug

SEQ ID NO: 1208788 - RNA, 22 nt, Human
gcugcaaaggguaucaggugcu

SEQ ID NO: 1208789 - RNA, 19 nt, Human
gcugcauuuaaaagauaca

SEQ ID NO: 1208790 - RNA, 18 nt, Human
gcugcauuuaaaagauac

SEQ ID NO: 1208791 - RNA, 17 nt, Human
gcugcaguugccaguca

SEQ ID NO: 1208792 - RNA, 14 nt, Human
gcugcaguugccag

SEQ ID NO: 1208793 - RNA, 13 nt, Human
gcugcaguugcca

SEQ ID NO: 1208794 - RNA, 13 nt, Human
gcugccaccugcc

SEQ ID NO: 1208795 - RNA, 12 nt, Human
gcugccaccugc

SEQ ID NO: 1208796 - RNA, 21 nt, Human
gcucucaggccagcugcuugg

SEQ ID NO: 1208797 - RNA, 22 nt, Human
gcugacuguuuucucuugagag

SEQ ID NO: 1208798 - RNA, 20 nt, Human
gcugacagacacaggcccgg

SEQ ID NO: 1208799 - RNA, 19 nt, Human
gcugacagacacaggcccg

SEQ ID NO: 1208800 - RNA, 18 nt, Human
gcugacagacacaggccc

SEQ ID NO: 1208801 - RNA, 16 nt, Human
gcuggaccuugaacug

SEQ ID NO: 1208802 - RNA, 15 nt, Human
gcuggaccuugaacu

SEQ ID NO: 1208803 - RNA, 22 nt, Human
gcugcuuuugucuaugggacuc

SEQ ID NO: 1208804 - RNA, 24 nt, Human
gcugcccugcccaccuggccucug

SEQ ID NO: 1208805 - RNA, 23 nt, Human
gcugcccugcccaccuggccucu

SEQ ID NO: 1208806 - RNA, 22 nt, Human
gcugcccugcccaccuggccuc

SEQ ID NO: 1208807 - RNA, 21 nt, Human
gcugcccugcccaccuggccu

SEQ ID NO: 1208808 - RNA, 20 nt, Human
gcugcccugcccaccuggcc

SEQ ID NO: 1208809 - RNA, 18 nt, Human
gcugcccugcccaccugg

SEQ ID NO: 1208810 - RNA, 16 nt, Human
gcugcccugcccaccu

SEQ ID NO: 1208811 - RNA, 14 nt, Human
gcugcccugcccac

SEQ ID NO: 1208812 - RNA, 13 nt, Human
gcugcccugccca

SEQ ID NO: 1208813 - RNA, 12 nt, Human
gcugcccugccc

SEQ ID NO: 1208814 - RNA, 15 nt, Human
gcugcgguccaccca

SEQ ID NO: 1208815 - RNA, 14 nt, Human
gcugcgguccaccc

SEQ ID NO: 1208816 - RNA, 21 nt, Human
gcugcgguccacccaggagcc

SEQ ID NO: 1208817 - RNA, 16 nt, Human
gcugcgguccacccag

SEQ ID NO: 1208818 - RNA, 22 nt, Human
gcugcgguccacccaggagccc

SEQ ID NO: 1208819 - RNA, 22 nt, Human
gcugccuguucagcuccagcuc

SEQ ID NO: 1208820 - RNA, 20 nt, Human
gcugccuguucagcuccagc

SEQ ID NO: 1208821 - RNA, 19 nt, Human
gcugccuguucagcuccag

SEQ ID NO: 1208822 - RNA, 15 nt, Human
gcugugucucccuuc

SEQ ID NO: 1208823 - RNA, 16 nt, Human
gcugucccuuuuccuu

SEQ ID NO: 1208824 - RNA, 23 nt, Human
gcugucccuuacgugaguccugg

SEQ ID NO: 1208825 - RNA, 15 nt, Human
gcuggugucaccuga

SEQ ID NO: 1208826 - RNA, 14 nt, Human
gcuggugucaccug

SEQ ID NO: 1208827 - RNA, 16 nt, Human
gcuggugucaccugaa

SEQ ID NO: 1208828 - RNA, 17 nt, Human
gcugucagccauuccug

SEQ ID NO: 1208829 - RNA, 15 nt, Human
gcugggggccucagu

SEQ ID NO: 1208830 - RNA, 14 nt, Human
gcugggggccucag

SEQ ID NO: 1208831 - RNA, 18 nt, Human
gcugggggccucagugcc

SEQ ID NO: 1208832 - RNA, 14 nt, Human
gcuggucccacuca

SEQ ID NO: 1208833 - RNA, 22 nt, Human
gcugggcuucaguggcagcugc

SEQ ID NO: 1208834 - RNA, 21 nt, Human
gcugggcuucaguggcagcug

SEQ ID NO: 1208835 - RNA, 20 nt, Human
gcugggcuucaguggcagcu

SEQ ID NO: 1208836 - RNA, 21 nt, Human
gcugggaugauuggagggggg

SEQ ID NO: 1208837 - RNA, 16 nt, Human
gcuggccuggccccuc

SEQ ID NO: 1208838 - RNA, 19 nt, Human
gcugggaugauuggagggg

SEQ ID NO: 1208839 - RNA, 15 nt, Human
gcuggccuggccccu

SEQ ID NO: 1208840 - RNA, 14 nt, Human
gcuggccuggcccc

SEQ ID NO: 1208841 - RNA, 13 nt, Human
gcuggccuggccc

SEQ ID NO: 1208842 - RNA, 13 nt, Human
gcuuaucucaggg

SEQ ID NO: 1208843 - RNA, 20 nt, Human
gcuucaguggcagcugcuuu

SEQ ID NO: 1208844 - RNA, 19 nt, Human
gcuucaguggcagcugcuu

SEQ ID NO: 1208845 - RNA, 22 nt, Human
gcuucucacugccaugccagcu

SEQ ID NO: 1208846 - RNA, 13 nt, Human
gcuccugugucuu

SEQ ID NO: 1208847 - RNA, 12 nt, Human
gcuccugugucu

SEQ ID NO: 1208848 - RNA, 21 nt, Human
gcucgagcaugccuggauggg

SEQ ID NO: 1208849 - RNA, 19 nt, Human
gcucgagcaugccuggaug

SEQ ID NO: 1208850 - RNA, 17 nt, Human
gcuccuuuagcgcccag

SEQ ID NO: 1208851 - RNA, 15 nt, Human
gcuccuucuguccua

SEQ ID NO: 1208852 - RNA, 13 nt, Human
gcuccuucugucc

SEQ ID NO: 1208853 - RNA, 24 nt, Human
gcuccgcuuucuacccagcgagcc

SEQ ID NO: 1208854 - RNA, 13 nt, Human
gcuccaggcuccu

SEQ ID NO: 1208855 - RNA, 12 nt, Human
gcuccaggcucc

SEQ ID NO: 1208856 - RNA, 18 nt, Human
gcuccaggagcagccaca

SEQ ID NO: 1208857 - RNA, 17 nt, Human
gcuccaggagcagccac

SEQ ID NO: 1208858 - RNA, 16 nt, Human
gcuccaggagcagcca

SEQ ID NO: 1208859 - RNA, 15 nt, Human
gcuccaggagcagcc

SEQ ID NO: 1208860 - RNA, 14 nt, Human
gcuccaggagcagc

SEQ ID NO: 1208861 - RNA, 12 nt, Human
gcuccaggagca

SEQ ID NO: 1208862 - RNA, 11 nt, Human
gcuccaggagc

SEQ ID NO: 1208863 - RNA, 21 nt, Human
gcuccagcuguucagcugguu

SEQ ID NO: 1208864 - RNA, 23 nt, Human
gcuccgcuuucuacccagcgagc

SEQ ID NO: 1208865 - RNA, 22 nt, Human
gcuccgcuuucuacccagcgag

SEQ ID NO: 1208866 - RNA, 21 nt, Human
gcuccgcuuucuacccagcga

SEQ ID NO: 1208867 - RNA, 18 nt, Human
gcuccgcuuucuacccag

SEQ ID NO: 1208868 - RNA, 20 nt, Human
gcucccuucccaccucucuc

SEQ ID NO: 1208869 - RNA, 23 nt, Human
gcucagcggggacagcuccuucu

SEQ ID NO: 1208870 - RNA, 19 nt, Human
gcucagcggggacagcucc

SEQ ID NO: 1208871 - RNA, 18 nt, Human
gcucagcggggacagcuc

SEQ ID NO: 1208872 - RNA, 17 nt, Human
gcucagcggggacagcu

SEQ ID NO: 1208873 - RNA, 18 nt, Human
gcucaccucucccuugga

SEQ ID NO: 1208874 - RNA, 17 nt, Human
gcucaccucucccuugg

SEQ ID NO: 1208875 - RNA, 16 nt, Human
gcucaccucucccuug

SEQ ID NO: 1208876 - RNA, 18 nt, Human
gcucaccagccccagugc

SEQ ID NO: 1208877 - RNA, 15 nt, Human
gcucaccagccccag

SEQ ID NO: 1208878 - RNA, 14 nt, Human
gcucaccagcccca

SEQ ID NO: 1208879 - RNA, 13 nt, Human
gcucaccagcccc

SEQ ID NO: 1208880 - RNA, 12 nt, Human
gcucaccagccc

SEQ ID NO: 1208881 - RNA, 16 nt, Human
gcucacauaucuguca

SEQ ID NO: 1208882 - RNA, 22 nt, Human
gcucaaguccucuuuucugaga

SEQ ID NO: 1208883 - RNA, 19 nt, Human
gcucaaguccucuuuucug

SEQ ID NO: 1208884 - RNA, 18 nt, Human
gcucaaguccucuuuucu

SEQ ID NO: 1208885 - RNA, 15 nt, Human
gcuaucucccccagc

SEQ ID NO: 1208886 - RNA, 14 nt, Human
gcuaucucccccag

SEQ ID NO: 1208887 - RNA, 13 nt, Human
gcuaucuccccca

SEQ ID NO: 1208888 - RNA, 22 nt, Human
gcggugcuaucucccccagccc

SEQ ID NO: 1208889 - RNA, 19 nt, Human
gcggugcuaucucccccag

SEQ ID NO: 1208890 - RNA, 16 nt, Human
gccuuacacaaugguu

SEQ ID NO: 1208891 - RNA, 15 nt, Human
gccuuacacaauggu

SEQ ID NO: 1208892 - RNA, 21 nt, Human
gcgacaaugcaaaccaucauu

SEQ ID NO: 1208893 - RNA, 20 nt, Human
gcgacaaugcaaaccaucau

SEQ ID NO: 1208894 - RNA, 13 nt, Human
gcgacaaugcaaa

SEQ ID NO: 1208895 - RNA, 12 nt, Human
gcgacaaugcaa

SEQ ID NO: 1208896 - RNA, 19 nt, Human
gcggugagaggggaacaga

SEQ ID NO: 1208897 - RNA, 14 nt, Human
gcgguccacccagg

SEQ ID NO: 1208898 - RNA, 13 nt, Human
gcgguccacccag

SEQ ID NO: 1208899 - RNA, 18 nt, Human
gcggggacagcuccuucu

SEQ ID NO: 1208900 - RNA, 17 nt, Human
gcggggacagcuccuuc

SEQ ID NO: 1208901 - RNA, 15 nt, Human
gcggggacagcuccu

SEQ ID NO: 1208902 - RNA, 14 nt, Human
gcggggacagcucc

SEQ ID NO: 1208903 - RNA, 19 nt, Human
gcggagacggagucccacc

SEQ ID NO: 1208904 - RNA, 16 nt, Human
gcggagaaaggaaggg

SEQ ID NO: 1208905 - RNA, 21 nt, Human
gcgcugccccuggcagccccu

SEQ ID NO: 1208906 - RNA, 18 nt, Human
gcgcugccccuggcagcc

SEQ ID NO: 1208907 - RNA, 21 nt, Human
gcgccuuaaggauguucuagc

SEQ ID NO: 1208908 - RNA, 23 nt, Human
gcgcccaguuggguggaugccug

SEQ ID NO: 1208909 - RNA, 14 nt, Human
gccuggccccucag

SEQ ID NO: 1208910 - RNA, 13 nt, Human
gccuggccccuca

SEQ ID NO: 1208911 - RNA, 22 nt, Human
gccuggccagaugcaccagccc

SEQ ID NO: 1208912 - RNA, 21 nt, Human
gccuggccagaugcaccagcc

SEQ ID NO: 1208913 - RNA, 20 nt, Human
gccuggccagaugcaccagc

SEQ ID NO: 1208914 - RNA, 20 nt, Human
gccuguaauccuagcacuuu

SEQ ID NO: 1208915 - RNA, 15 nt, Human
gccuguaauccuagc

SEQ ID NO: 1208916 - RNA, 18 nt, Human
gccuggauggggcugcac

SEQ ID NO: 1208917 - RNA, 16 nt, Human
gccuggauggggcugc

SEQ ID NO: 1208918 - RNA, 14 nt, Human
gccuggacccugug

SEQ ID NO: 1208919 - RNA, 20 nt, Human
gccuggauggggcugcaccg

SEQ ID NO: 1208920 - RNA, 12 nt, Human
gccugagcuggg

SEQ ID NO: 1208921 - RNA, 18 nt, Human
gccugaagucacacagug

SEQ ID NO: 1208922 - RNA, 17 nt, Human
gccugaagucacacagu

SEQ ID NO: 1208923 - RNA, 16 nt, Human
gccugaagucacacag

SEQ ID NO: 1208924 - RNA, 22 nt, Human
gcccaguuggguggaugccugg

SEQ ID NO: 1208925 - RNA, 21 nt, Human
gcccaguuggguggaugccug

SEQ ID NO: 1208926 - RNA, 19 nt, Human
gcccaguuggguggaugcc

SEQ ID NO: 1208927 - RNA, 20 nt, Human
gccagagacacaagccuucg

SEQ ID NO: 1208928 - RNA, 10 nt, Human
gccagaggag

SEQ ID NO: 1208929 - RNA, 19 nt, Human
gccagagacacaagccuuc

SEQ ID NO: 1208930 - RNA, 17 nt, Human
gccagagacacaagccu

SEQ ID NO: 1208931 - RNA, 16 nt, Human
gccagagacacaagcc

SEQ ID NO: 1208932 - RNA, 20 nt, Human
gccacuauuguuagucucuu

SEQ ID NO: 1208933 - RNA, 18 nt, Human
gccagaugcaccagcccu

SEQ ID NO: 1208934 - RNA, 17 nt, Human
gccagaugcaccagccc

SEQ ID NO: 1208935 - RNA, 16 nt, Human
gccagaugcaccagcc

SEQ ID NO: 1208936 - RNA, 23 nt, Human
gccagagggagugacagaggcag

SEQ ID NO: 1208937 - RNA, 22 nt, Human
gccagagggagugacagaggca

SEQ ID NO: 1208938 - RNA, 21 nt, Human
gccagagggagugacagaggc

SEQ ID NO: 1208939 - RNA, 22 nt, Human
gccagaggagagaggacccccu

SEQ ID NO: 1208940 - RNA, 19 nt, Human
gccagaggagagaggaccc

SEQ ID NO: 1208941 - RNA, 17 nt, Human
gccagaggagagaggac

SEQ ID NO: 1208942 - RNA, 15 nt, Human
gccagaggagagagg

SEQ ID NO: 1208943 - RNA, 13 nt, Human
gccagaggagaga

SEQ ID NO: 1208944 - RNA, 12 nt, Human
gccagaggagag

SEQ ID NO: 1208945 - RNA, 22 nt, Human
gccaccugcggugcuaucuccc

SEQ ID NO: 1208946 - RNA, 20 nt, Human
gccaccugcggugcuaucuc

SEQ ID NO: 1208947 - RNA, 14 nt, Human
gccaccugcggugc

SEQ ID NO: 1208948 - RNA, 19 nt, Human
gccacggccaggccagagg

SEQ ID NO: 1208949 - RNA, 18 nt, Human
gccacggccaggccagag

SEQ ID NO: 1208950 - RNA, 17 nt, Human
gccaccugccuguuggg

SEQ ID NO: 1208951 - RNA, 22 nt, Human
gccacaagacccuugugguccc

SEQ ID NO: 1208952 - RNA, 16 nt, Human
gccacaagacccuugu

SEQ ID NO: 1208953 - RNA, 23 nt, Human
gccacagagaaaguacuucucca

SEQ ID NO: 1208954 - RNA, 20 nt, Human
gccacagagaaaguacuucu

SEQ ID NO: 1208955 - RNA, 14 nt, Human
gccacagagaaagu

SEQ ID NO: 1208956 - RNA, 13 nt, Human
gccacagagaaag

SEQ ID NO: 1208957 - RNA, 23 nt, Human
gccaaggugggaggauugcuuga

SEQ ID NO: 1208958 - RNA, 15 nt, Human
gccaaggugggagga

SEQ ID NO: 1208959 - RNA, 14 nt, Human
gccaaggugggagg

SEQ ID NO: 1208960 - RNA, 23 nt, Human
gcauuuggugguuucagaaaugu

SEQ ID NO: 1208961 - RNA, 22 nt, Human
gcauuuggugguuucagaaaug

SEQ ID NO: 1208962 - RNA, 20 nt, Human
gcauuugaggucuguucuuu

SEQ ID NO: 1208963 - RNA, 19 nt, Human
gcauuugaggucuguucuu

SEQ ID NO: 1208964 - RNA, 21 nt, Human
gcauuugaggucuguucuuuc

SEQ ID NO: 1208965 - RNA, 21 nt, Human
gccaaggcugggggaagaagc

SEQ ID NO: 1208966 - RNA, 15 nt, Human
gcccaaagaugcagc

SEQ ID NO: 1208967 - RNA, 19 nt, Human
gccaugccagcuuaucuca

SEQ ID NO: 1208968 - RNA, 18 nt, Human
gccaugccagcuuaucuc

SEQ ID NO: 1208969 - RNA, 13 nt, Human
gccaugccagcuu

SEQ ID NO: 1208970 - RNA, 20 nt, Human
gccaugaggaacaaggcaag

SEQ ID NO: 1208971 - RNA, 18 nt, Human
gccaugaggaacaaggca

SEQ ID NO: 1208972 - RNA, 21 nt, Human
gccagucaccccggccaccug

SEQ ID NO: 1208973 - RNA, 20 nt, Human
gccagucaccccggccaccu

SEQ ID NO: 1208974 - RNA, 18 nt, Human
gccagucaccccggccac

SEQ ID NO: 1208975 - RNA, 17 nt, Human
gccagucaccccggcca

SEQ ID NO: 1208976 - RNA, 12 nt, Human
gccaguaaaugg

SEQ ID NO: 1208977 - RNA, 17 nt, Human
gccagguuuuuggucug

SEQ ID NO: 1208978 - RNA, 23 nt, Human
gccagggacagaggggguggccu

SEQ ID NO: 1208979 - RNA, 18 nt, Human
gccagggacagagggggu

SEQ ID NO: 1208980 - RNA, 16 nt, Human
gccagggacagagggg

SEQ ID NO: 1208981 - RNA, 13 nt, Human
gccagggacagag

SEQ ID NO: 1208982 - RNA, 21 nt, Human
gccagauuucacucuccuugg

SEQ ID NO: 1208983 - RNA, 18 nt, Human
gccagauuucacucuccu

SEQ ID NO: 1208984 - RNA, 12 nt, Human
gcccagccccuu

SEQ ID NO: 1208985 - RNA, 11 nt, Human
gcccagccccu

SEQ ID NO: 1208986 - RNA, 9 nt, Human
gcccagccc

SEQ ID NO: 1208987 - RNA, 22 nt, Human
gcccagagggccugcaagggag

SEQ ID NO: 1208988 - RNA, 21 nt, Human
gcccagagggccugcaaggga

SEQ ID NO: 1208989 - RNA, 20 nt, Human
gcccagagggccugcaaggg

SEQ ID NO: 1208990 - RNA, 19 nt, Human
gcccagagggccugcaagg

SEQ ID NO: 1208991 - RNA, 18 nt, Human
gcccagagggccugcaag

SEQ ID NO: 1208992 - RNA, 15 nt, Human
gcccagagggccugc

SEQ ID NO: 1208993 - RNA, 14 nt, Human
gcccagagggccug

SEQ ID NO: 1208994 - RNA, 12 nt, Human
gcccagagggcc

SEQ ID NO: 1208995 - RNA, 15 nt, Human
gcccagagagggugg

SEQ ID NO: 1208996 - RNA, 21 nt, Human
gcccaaugcacuuuguucugg

SEQ ID NO: 1208997 - RNA, 20 nt, Human
gcccagucuggaaugcagug

SEQ ID NO: 1208998 - RNA, 19 nt, Human
gcccagucuggaaugcagu

SEQ ID NO: 1208999 - RNA, 23 nt, Human
gcccaggcuuagucacugagaca

SEQ ID NO: 1209000 - RNA, 21 nt, Human
gcccaggcuuagucacugaga

SEQ ID NO: 1209001 - RNA, 19 nt, Human
gcccaggcuuagucacuga

SEQ ID NO: 1209002 - RNA, 22 nt, Human
gcccaggcuggcgugcaguggu

SEQ ID NO: 1209003 - RNA, 20 nt, Human
gcccaggcuggcgugcagug

SEQ ID NO: 1209004 - RNA, 19 nt, Human
gcccaggcuggcgugcagu

SEQ ID NO: 1209005 - RNA, 21 nt, Human
gcccaggaaaggcuccaggag

SEQ ID NO: 1209006 - RNA, 20 nt, Human
gcccaggaaaggcuccagga

SEQ ID NO: 1209007 - RNA, 19 nt, Human
gcccaggaaaggcuccagg

SEQ ID NO: 1209008 - RNA, 18 nt, Human
gcccaggaaaggcuccag

SEQ ID NO: 1209009 - RNA, 24 nt, Human
gcccagccccuucugacccaugcu

SEQ ID NO: 1209010 - RNA, 20 nt, Human
gcccagccccuucugaccca

SEQ ID NO: 1209011 - RNA, 17 nt, Human
gcccagccccuucugac

SEQ ID NO: 1209012 - RNA, 16 nt, Human
gcccagccccuucuga

SEQ ID NO: 1209013 - RNA, 14 nt, Human
gcccagccccuucu

SEQ ID NO: 1209014 - RNA, 13 nt, Human
gcccagccccuuc

SEQ ID NO: 1209015 - RNA, 18 nt, Human
gcaggcagccaggccaca

SEQ ID NO: 1209016 - RNA, 16 nt, Human
gcagggucucacucug

SEQ ID NO: 1209017 - RNA, 19 nt, Human
gcaggguccuagaaauucc

SEQ ID NO: 1209018 - RNA, 22 nt, Human
gcaggggaggguagagcggaga

SEQ ID NO: 1209019 - RNA, 12 nt, Human
gcagugggagcu

SEQ ID NO: 1209020 - RNA, 11 nt, Human
gcagugggagc

SEQ ID NO: 1209021 - RNA, 19 nt, Human
gcaguggugcgaucugggu

SEQ ID NO: 1209022 - RNA, 18 nt, Human
gcaguggugcgaucuggg

SEQ ID NO: 1209023 - RNA, 17 nt, Human
gcagggucucacucugu

SEQ ID NO: 1209024 - RNA, 19 nt, Human
gcauacguacacauuuuau

SEQ ID NO: 1209025 - RNA, 22 nt, Human
gcaguggugguuuucuguucuu

SEQ ID NO: 1209026 - RNA, 21 nt, Human
gcaguggugguuuucuguucu

SEQ ID NO: 1209027 - RNA, 20 nt, Human
gcaguggugguuuucuguuc

SEQ ID NO: 1209028 - RNA, 19 nt, Human
gcaguggugguuuucuguu

SEQ ID NO: 1209029 - RNA, 22 nt, Human
gcaguggugcgaucuggguuca

SEQ ID NO: 1209030 - RNA, 21 nt, Human
gcaguggugcgaucuggguuc

SEQ ID NO: 1209031 - RNA, 20 nt, Human
gcaguggugcgaucuggguu

SEQ ID NO: 1209032 - RNA, 18 nt, Human
gcauuugaggucuguucu

SEQ ID NO: 1209033 - RNA, 22 nt, Human
gcauuccccaggaggccagccu

SEQ ID NO: 1209034 - RNA, 21 nt, Human
gcauuccccaggaggccagcc

SEQ ID NO: 1209035 - RNA, 20 nt, Human
gcauuccccaggaggccagc

SEQ ID NO: 1209036 - RNA, 19 nt, Human
gcauuccccaggaggccag

SEQ ID NO: 1209037 - RNA, 18 nt, Human
gcauuccccaggaggcca

SEQ ID NO: 1209038 - RNA, 17 nt, Human
gcauuccccaggaggcc

SEQ ID NO: 1209039 - RNA, 16 nt, Human
gcauuccccaggaggc

SEQ ID NO: 1209040 - RNA, 15 nt, Human
gcauuccccaggagg

SEQ ID NO: 1209041 - RNA, 14 nt, Human
gcauuccccaggag

SEQ ID NO: 1209042 - RNA, 24 nt, Human
gcauuaucuagauacuguaucaug

SEQ ID NO: 1209043 - RNA, 22 nt, Human
gcauuaucuagauacuguauca

SEQ ID NO: 1209044 - RNA, 14 nt, Human
gcauguucucugag

SEQ ID NO: 1209045 - RNA, 13 nt, Human
gcauguuacauaa

SEQ ID NO: 1209046 - RNA, 15 nt, Human
gcaugccuggauggg

SEQ ID NO: 1209047 - RNA, 14 nt, Human
gcaugccuggaugg

SEQ ID NO: 1209048 - RNA, 22 nt, Human
gcaugacacgaauauugcugau

SEQ ID NO: 1209049 - RNA, 21 nt, Human
gcaugacacgaauauugcuga

SEQ ID NO: 1209050 - RNA, 23 nt, Human
gcaugaaguaauaugcacacauu

SEQ ID NO: 1209051 - RNA, 22 nt, Human
gcaugaaguaauaugcacacau

SEQ ID NO: 1209052 - RNA, 21 nt, Human
gcaugaaguaauaugcacaca

SEQ ID NO: 1209053 - RNA, 20 nt, Human
gcaugaaguaauaugcacac

SEQ ID NO: 1209054 - RNA, 12 nt, Human
gcaucaggccag

SEQ ID NO: 1209055 - RNA, 13 nt, Human
gcaucaggccagg

SEQ ID NO: 1209056 - RNA, 23 nt, Human
gcaucaggccaggcccucugccc

SEQ ID NO: 1209057 - RNA, 17 nt, Human
gcaccaucucuccuccu

SEQ ID NO: 1209058 - RNA, 15 nt, Human
gcaccaucucuccuc

SEQ ID NO: 1209059 - RNA, 14 nt, Human
gcaccaucucuccu

SEQ ID NO: 1209060 - RNA, 14 nt, Human
gcaccagcagccug

SEQ ID NO: 1209061 - RNA, 13 nt, Human
gcaccagcagccu

SEQ ID NO: 1209062 - RNA, 20 nt, Human
gauugugucucuugguccug

SEQ ID NO: 1209063 - RNA, 23 nt, Human
gcacagcuucauuuccugugucu

SEQ ID NO: 1209064 - RNA, 20 nt, Human
gcacuaaggugugcucugau

SEQ ID NO: 1209065 - RNA, 14 nt, Human
gcacgugugugcac

SEQ ID NO: 1209066 - RNA, 19 nt, Human
gcacccucaggcagguggg

SEQ ID NO: 1209067 - RNA, 14 nt, Human
gcacccggccccug

SEQ ID NO: 1209068 - RNA, 16 nt, Human
gcacccucaggcaggu

SEQ ID NO: 1209069 - RNA, 15 nt, Human
gcacugcuuccagug

SEQ ID NO: 1209070 - RNA, 14 nt, Human
gcacugcuuccagu

SEQ ID NO: 1209071 - RNA, 13 nt, Human
gcacugcuuccag

SEQ ID NO: 1209072 - RNA, 12 nt, Human
gcacugcuucca

SEQ ID NO: 1209073 - RNA, 22 nt, Human
gcacuauaauguaagcucuacu

SEQ ID NO: 1209074 - RNA, 20 nt, Human
gcacuauaauguaagcucua

SEQ ID NO: 1209075 - RNA, 15 nt, Human
gcacuauaauguaag

SEQ ID NO: 1209076 - RNA, 14 nt, Human
gcacuauaauguaa

SEQ ID NO: 1209077 - RNA, 12 nt, Human
gcacugggcuug

SEQ ID NO: 1209078 - RNA, 14 nt, Human
gcacugggcuuggg

SEQ ID NO: 1209079 - RNA, 19 nt, Human
gcacuguuuuauuuuaauu

SEQ ID NO: 1209080 - RNA, 19 nt, Human
gcagcucagagaggguggg

SEQ ID NO: 1209081 - RNA, 18 nt, Human
gcagcucagagagggugg

SEQ ID NO: 1209082 - RNA, 14 nt, Human
gcagcucagagagg

SEQ ID NO: 1209083 - RNA, 21 nt, Human
gcagcucaccucucccuugga

SEQ ID NO: 1209084 - RNA, 20 nt, Human
gcagcucaccucucccuugg

SEQ ID NO: 1209085 - RNA, 17 nt, Human
gcagcucaccucucccu

SEQ ID NO: 1209086 - RNA, 16 nt, Human
gcagcucaccucuccc

SEQ ID NO: 1209087 - RNA, 19 nt, Human
gcagccucacaguccuuac

SEQ ID NO: 1209088 - RNA, 17 nt, Human
gcagccucacaguccuu

SEQ ID NO: 1209089 - RNA, 19 nt, Human
gcagcagggagggcuucug

SEQ ID NO: 1209090 - RNA, 18 nt, Human
gcagcagggagggcuucu

SEQ ID NO: 1209091 - RNA, 20 nt, Human
gcagcagggagggcuucugc

SEQ ID NO: 1209092 - RNA, 22 nt, Human
gcagagaccaucccugaaggcc

SEQ ID NO: 1209093 - RNA, 21 nt, Human
gcagagaccaucccugaaggc

SEQ ID NO: 1209094 - RNA, 20 nt, Human
gcagagaccaucccugaagg

SEQ ID NO: 1209095 - RNA, 22 nt, Human
gcagacucuacagaggccaugg

SEQ ID NO: 1209096 - RNA, 19 nt, Human
gcagacucuacagaggcca

SEQ ID NO: 1209097 - RNA, 18 nt, Human
gcagacucuacagaggcc

SEQ ID NO: 1209098 - RNA, 16 nt, Human
gcacuugcagacucua

SEQ ID NO: 1209099 - RNA, 14 nt, Human
gcacuugcagacuc

SEQ ID NO: 1209100 - RNA, 22 nt, Human
gcacuucgggaggucgaggcag

SEQ ID NO: 1209101 - RNA, 18 nt, Human
gcagauggagaccccuug

SEQ ID NO: 1209102 - RNA, 16 nt, Human
gauguucugggacaca

SEQ ID NO: 1209103 - RNA, 20 nt, Human
gauggugcaaugaccuuuca

SEQ ID NO: 1209104 - RNA, 23 nt, Human
gauggugcaaugaccuuucaaua

SEQ ID NO: 1209105 - RNA, 19 nt, Human
gauucaacagguuuuccug

SEQ ID NO: 1209106 - RNA, 21 nt, Human
gauuaaccacuucagcugacu

SEQ ID NO: 1209107 - RNA, 19 nt, Human
gauuaaccacuucagcuga

SEQ ID NO: 1209108 - RNA, 18 nt, Human
gauuaaccacuucagcug

SEQ ID NO: 1209109 - RNA, 19 nt, Human
gauuaaauucuugcaaagu

SEQ ID NO: 1209110 - RNA, 12 nt, Human
gauuaaauucuu

SEQ ID NO: 1209111 - RNA, 23 nt, Human
gauguuuuccaugaguccccugu

SEQ ID NO: 1209112 - RNA, 15 nt, Human
gauguuuuccaugag

SEQ ID NO: 1209113 - RNA, 14 nt, Human
gauguuuuccauga

SEQ ID NO: 1209114 - RNA, 21 nt, Human
gauguucuuucacccuuuucu

SEQ ID NO: 1209115 - RNA, 22 nt, Human
gauucccaagcucugcuccucu

SEQ ID NO: 1209116 - RNA, 12 nt, Human
gauucagacagc

SEQ ID NO: 1209117 - RNA, 20 nt, Human
gauuguccccgacccuugcc

SEQ ID NO: 1209118 - RNA, 15 nt, Human
gauuguccccgaccc

SEQ ID NO: 1209119 - RNA, 23 nt, Human
gauugacgggacuguugguauug

SEQ ID NO: 1209120 - RNA, 21 nt, Human
gaugcacagaguuguuacauu

SEQ ID NO: 1209121 - RNA, 23 nt, Human
gaugagaaauaaaguuucuguug

SEQ ID NO: 1209122 - RNA, 22 nt, Human
gaugagaaagguugaagcacca

SEQ ID NO: 1209123 - RNA, 11 nt, Human
gaugagaaagg

SEQ ID NO: 1209124 - RNA, 14 nt, Human
gaugccugguggca

SEQ ID NO: 1209125 - RNA, 19 nt, Human
gauccugagccagauuuca

SEQ ID NO: 1209126 - RNA, 15 nt, Human
gauccugagccagau

SEQ ID NO: 1209127 - RNA, 14 nt, Human
gauccugagccaga

SEQ ID NO: 1209128 - RNA, 21 nt, Human
gauccucccaccucagccucc

SEQ ID NO: 1209129 - RNA, 20 nt, Human
gauccucccaccucagccuc

SEQ ID NO: 1209130 - RNA, 19 nt, Human
gauccucccaccucagccu

SEQ ID NO: 1209131 - RNA, 12 nt, Human
gauccuccaggu

SEQ ID NO: 1209132 - RNA, 11 nt, Human
gauccuccagg

SEQ ID NO: 1209133 - RNA, 16 nt, Human
gaucacgccacugcac

SEQ ID NO: 1209134 - RNA, 18 nt, Human
gauccuaguuccaccauc

SEQ ID NO: 1209135 - RNA, 15 nt, Human
gaucacgccacugca

SEQ ID NO: 1209136 - RNA, 14 nt, Human
gaucacgccacugc

SEQ ID NO: 1209137 - RNA, 13 nt, Human
gaucacgccacug

SEQ ID NO: 1209138 - RNA, 23 nt, Human
gaucaaccccuucgcuccugugu

SEQ ID NO: 1209139 - RNA, 15 nt, Human
gaugaaaaaauaaca

SEQ ID NO: 1209140 - RNA, 17 nt, Human
gaucuuugcagacaggc

SEQ ID NO: 1209141 - RNA, 16 nt, Human
gaucuuugcagacagg

SEQ ID NO: 1209142 - RNA, 21 nt, Human
gauccugagccagauuucacu

SEQ ID NO: 1209143 - RNA, 14 nt, Human
gagguucccuuuga

SEQ ID NO: 1209144 - RNA, 19 nt, Human
gagguucaaagauauuuug

SEQ ID NO: 1209145 - RNA, 16 nt, Human
gaguacguugugcauu

SEQ ID NO: 1209146 - RNA, 19 nt, Human
gagguuuuaaaaaaauccc

SEQ ID NO: 1209147 - RNA, 19 nt, Human
gaguacuacaguccuccca

SEQ ID NO: 1209148 - RNA, 18 nt, Human
gaguacuacaguccuccc

SEQ ID NO: 1209149 - RNA, 15 nt, Human
gaguacuacaguccu

SEQ ID NO: 1209150 - RNA, 20 nt, Human
gaguacguugugcauuuggu

SEQ ID NO: 1209151 - RNA, 18 nt, Human
gaguacguugugcauuug

SEQ ID NO: 1209152 - RNA, 17 nt, Human
gaguacguugugcauuu

SEQ ID NO: 1209153 - RNA, 22 nt, Human
gaggugggauccuccaggugca

SEQ ID NO: 1209154 - RNA, 21 nt, Human
gaggugggauccuccaggugc

SEQ ID NO: 1209155 - RNA, 15 nt, Human
gaggggggagguggg

SEQ ID NO: 1209156 - RNA, 22 nt, Human
gaggggggaggugggauccucc

SEQ ID NO: 1209157 - RNA, 15 nt, Human
gaggggguggccucc

SEQ ID NO: 1209158 - RNA, 17 nt, Human
gagucgaggacagggag

SEQ ID NO: 1209159 - RNA, 21 nt, Human
gagucucacuguugcccaggc

SEQ ID NO: 1209160 - RNA, 20 nt, Human
gagucucacuguugcccagg

SEQ ID NO: 1209161 - RNA, 21 nt, Human
gagucugaaggcuggguucug

SEQ ID NO: 1209162 - RNA, 23 nt, Human
gagucucacuguugcccaggcug

SEQ ID NO: 1209163 - RNA, 22 nt, Human
gagucucacuguugcccaggcu

SEQ ID NO: 1209164 - RNA, 23 nt, Human
gaguccccuguuuguuucugaaa

SEQ ID NO: 1209165 - RNA, 14 nt, Human
gaguccccuguuug

SEQ ID NO: 1209166 - RNA, 12 nt, Human
gaguccccuguu

SEQ ID NO: 1209167 - RNA, 19 nt, Human
gaguagcugggacuacagg

SEQ ID NO: 1209168 - RNA, 14 nt, Human
gaguagcugggacu

SEQ ID NO: 1209169 - RNA, 12 nt, Human
gaguagcuggga

SEQ ID NO: 1209170 - RNA, 14 nt, Human
gaguugaagacaga

SEQ ID NO: 1209171 - RNA, 23 nt, Human
gaguucaucuugaauuguaagga

SEQ ID NO: 1209172 - RNA, 17 nt, Human
gagugugccugaagucc

SEQ ID NO: 1209173 - RNA, 23 nt, Human
gagugggggaucacagccucuga

SEQ ID NO: 1209174 - RNA, 12 nt, Human
gagugggcccaa

SEQ ID NO: 1209175 - RNA, 18 nt, Human
gauagcacagacccugcc

SEQ ID NO: 1209176 - RNA, 17 nt, Human
gauagcacagacccugc

SEQ ID NO: 1209177 - RNA, 18 nt, Human
gauacaaugcugugcccu

SEQ ID NO: 1209178 - RNA, 13 nt, Human
gauacaaugcugu

SEQ ID NO: 1209179 - RNA, 22 nt, Human
gaucaaccccuucgcuccugug

SEQ ID NO: 1209180 - RNA, 23 nt, Human
gauauaugcucugcauguuacau

SEQ ID NO: 1209181 - RNA, 14 nt, Human
gauagccaaggcca

SEQ ID NO: 1209182 - RNA, 13 nt, Human
gauagccaaggcc

SEQ ID NO: 1209183 - RNA, 20 nt, Human
gauagcacagacccugcccu

SEQ ID NO: 1209184 - RNA, 19 nt, Human
gauagcacagacccugccc

SEQ ID NO: 1209185 - RNA, 12 nt, Human
gauagccaaggc

SEQ ID NO: 1209186 - RNA, 12 nt, Human
gaggauguucug

SEQ ID NO: 1209187 - RNA, 16 nt, Human
gaggauugcuugagcu

SEQ ID NO: 1209188 - RNA, 20 nt, Human
gaggauguucugggacacag

SEQ ID NO: 1209189 - RNA, 17 nt, Human
gaggauguucugggaca

SEQ ID NO: 1209190 - RNA, 23 nt, Human
gaggaguuugggguaugggagag

SEQ ID NO: 1209191 - RNA, 13 nt, Human
gaggccagccuug

SEQ ID NO: 1209192 - RNA, 12 nt, Human
gaggccagccuu

SEQ ID NO: 1209193 - RNA, 23 nt, Human
gaggcagccccauucugccugcc

SEQ ID NO: 1209194 - RNA, 22 nt, Human
gaggcagccccauucugccugc

SEQ ID NO: 1209195 - RNA, 18 nt, Human
gaggcagccccauucugc

SEQ ID NO: 1209196 - RNA, 13 nt, Human
gaggcagccccau

SEQ ID NO: 1209197 - RNA, 23 nt, Human
gaggacagggaggugaccccagg

SEQ ID NO: 1209198 - RNA, 22 nt, Human
gaggacagggaggugaccccag

SEQ ID NO: 1209199 - RNA, 13 nt, Human
gaggacagggagg

SEQ ID NO: 1209200 - RNA, 15 nt, Human
gaggaauccagaccc

SEQ ID NO: 1209201 - RNA, 14 nt, Human
gaggaauccagacc

SEQ ID NO: 1209202 - RNA, 22 nt, Human
gaggaaggaaacccagcucugg

SEQ ID NO: 1209203 - RNA, 15 nt, Human
gagggagggcuccag

SEQ ID NO: 1209204 - RNA, 15 nt, Human
gagggagggagggcu

SEQ ID NO: 1209205 - RNA, 14 nt, Human
gagggagggagggc

SEQ ID NO: 1209206 - RNA, 22 nt, Human
gaggggccucuuaugggcuggg

SEQ ID NO: 1209207 - RNA, 16 nt, Human
gagggagugacagagg

SEQ ID NO: 1209208 - RNA, 16 nt, Human
gagggagggcuccaga

SEQ ID NO: 1209209 - RNA, 14 nt, Human
gagggagugacaga

SEQ ID NO: 1209210 - RNA, 13 nt, Human
gagggagugacag

SEQ ID NO: 1209211 - RNA, 22 nt, Human
gagggcacagaaaauggaagac

SEQ ID NO: 1209212 - RNA, 23 nt, Human
gagggcacagaaaauggaagaca

SEQ ID NO: 1209213 - RNA, 24 nt, Human
gaggcccuucucuccagccccugg

SEQ ID NO: 1209214 - RNA, 23 nt, Human
gaggcccuucucuccagccccug

SEQ ID NO: 1209215 - RNA, 14 nt, Human
gaggcccuucucuc

SEQ ID NO: 1209216 - RNA, 16 nt, Human
gaggcugggcucccuu

SEQ ID NO: 1209217 - RNA, 15 nt, Human
gaggcugggcucccu

SEQ ID NO: 1209218 - RNA, 14 nt, Human
gaggcugggcuccc

SEQ ID NO: 1209219 - RNA, 13 nt, Human
gaggcugggcucc

SEQ ID NO: 1209220 - RNA, 14 nt, Human
gaggccuucucuga

SEQ ID NO: 1209221 - RNA, 23 nt, Human
gagcuacacaggggaaaagagga

SEQ ID NO: 1209222 - RNA, 16 nt, Human
gagcugccaccugccu

SEQ ID NO: 1209223 - RNA, 15 nt, Human
gagcugccaccugcc

SEQ ID NO: 1209224 - RNA, 13 nt, Human
gagcugccaccug

SEQ ID NO: 1209225 - RNA, 22 nt, Human
gagccuccugcccuuaccugcc

SEQ ID NO: 1209226 - RNA, 20 nt, Human
gagccuccugcccuuaccug

SEQ ID NO: 1209227 - RNA, 17 nt, Human
gagcccugguggcagug

SEQ ID NO: 1209228 - RNA, 19 nt, Human
gagccucagcauccuggca

SEQ ID NO: 1209229 - RNA, 16 nt, Human
gagcccugguggcagu

SEQ ID NO: 1209230 - RNA, 15 nt, Human
gagcccugguggcag

SEQ ID NO: 1209231 - RNA, 21 nt, Human
gagccucagcauccuggcacc

SEQ ID NO: 1209232 - RNA, 20 nt, Human
gagccucagcauccuggcac

SEQ ID NO: 1209233 - RNA, 14 nt, Human
gagccuccugcccu

SEQ ID NO: 1209234 - RNA, 18 nt, Human
gagcccugguggcagugg

SEQ ID NO: 1209235 - RNA, 21 nt, Human
gagccugggaggucaaggcug

SEQ ID NO: 1209236 - RNA, 13 nt, Human
gagccugggaggu

SEQ ID NO: 1209237 - RNA, 15 nt, Human
gagccuggcaagaau

SEQ ID NO: 1209238 - RNA, 10 nt, Human
gagccuggca

SEQ ID NO: 1209239 - RNA, 19 nt, Human
gagcaccuuagacaguccc

SEQ ID NO: 1209240 - RNA, 17 nt, Human
gagcaccuuagacaguc

SEQ ID NO: 1209241 - RNA, 23 nt, Human
gagcaagacgcugugcugcccug

SEQ ID NO: 1209242 - RNA, 22 nt, Human
gagcaagacgcugugcugcccu

SEQ ID NO: 1209243 - RNA, 21 nt, Human
gagcaagacgcugugcugccc

SEQ ID NO: 1209244 - RNA, 19 nt, Human
gagcaaaaucgaugcagug

SEQ ID NO: 1209245 - RNA, 16 nt, Human
gagaucagccugggca

SEQ ID NO: 1209246 - RNA, 14 nt, Human
gagaucagccuggg

SEQ ID NO: 1209247 - RNA, 13 nt, Human
gagaucagccugg

SEQ ID NO: 1209248 - RNA, 23 nt, Human
gagaucaaccccuucgcuccugu

SEQ ID NO: 1209249 - RNA, 20 nt, Human
gagaucaaccccuucgcucc

SEQ ID NO: 1209250 - RNA, 18 nt, Human
gagcccacgcccccacug

SEQ ID NO: 1209251 - RNA, 14 nt, Human
gagcccaggccucc

SEQ ID NO: 1209252 - RNA, 13 nt, Human
gagcccaggccuc

SEQ ID NO: 1209253 - RNA, 12 nt, Human
gagcccaggccu

SEQ ID NO: 1209254 - RNA, 16 nt, Human
gagcccacgcccccac

SEQ ID NO: 1209255 - RNA, 15 nt, Human
gagcccacgccccca

SEQ ID NO: 1209256 - RNA, 12 nt, Human
gagcccacgccc

SEQ ID NO: 1209257 - RNA, 13 nt, Human
gagccagauuuca

SEQ ID NO: 1209258 - RNA, 22 nt, Human
gagccacugcaccgggccacag

SEQ ID NO: 1209259 - RNA, 18 nt, Human
gagcagccacauuccuga

SEQ ID NO: 1209260 - RNA, 21 nt, Human
gagcagccacauuccugaugc

SEQ ID NO: 1209261 - RNA, 13 nt, Human
gagccacugcacc

SEQ ID NO: 1209262 - RNA, 21 nt, Human
gaaccacaucuugcucugcug

SEQ ID NO: 1209263 - RNA, 19 nt, Human
gaacagacuggaagcacag

SEQ ID NO: 1209264 - RNA, 16 nt, Human
gaacagacuggaagca

SEQ ID NO: 1209265 - RNA, 15 nt, Human
gaacagacuggaagc

SEQ ID NO: 1209266 - RNA, 17 nt, Human
gaaccaccacacccagc

SEQ ID NO: 1209267 - RNA, 16 nt, Human
gaaccaccacacccag

SEQ ID NO: 1209268 - RNA, 22 nt, Human
gaacuggguacuuguggacaca

SEQ ID NO: 1209269 - RNA, 16 nt, Human
gaacuuggcgcugccc

SEQ ID NO: 1209270 - RNA, 15 nt, Human
gaacuuggcgcugcc

SEQ ID NO: 1209271 - RNA, 13 nt, Human
gaacuuggcgcug

SEQ ID NO: 1209272 - RNA, 23 nt, Human
gaacuugguucccauuugcuccu

SEQ ID NO: 1209273 - RNA, 17 nt, Human
gaacuuggcgcugcccc

SEQ ID NO: 1209274 - RNA, 15 nt, Human
gaaaugggcagagca

SEQ ID NO: 1209275 - RNA, 20 nt, Human
gaaaugggcagagcagagac

SEQ ID NO: 1209276 - RNA, 14 nt, Human
gaaaugggcagagc

SEQ ID NO: 1209277 - RNA, 17 nt, Human
gaaauuuguuauaauga

SEQ ID NO: 1209278 - RNA, 21 nt, Human
gaaauaucugaaaauguaugu

SEQ ID NO: 1209279 - RNA, 17 nt, Human
gaaauauaggaacuuaa

SEQ ID NO: 1209280 - RNA, 13 nt, Human
gaaauauaauuga

SEQ ID NO: 1209281 - RNA, 21 nt, Human
gaaugaaagggcccagagagg

SEQ ID NO: 1209282 - RNA, 19 nt, Human
gaaugaaagggcccagaga

SEQ ID NO: 1209283 - RNA, 14 nt, Human
gaaugaaagggccc

SEQ ID NO: 1209284 - RNA, 16 nt, Human
gaaucucaaauaacua

SEQ ID NO: 1209285 - RNA, 18 nt, Human
gaauccagacccggcugc

SEQ ID NO: 1209286 - RNA, 15 nt, Human
gaauagcugggacua

SEQ ID NO: 1209287 - RNA, 14 nt, Human
gaauagcugggacu

SEQ ID NO: 1209288 - RNA, 14 nt, Human
gaauaacauguaau

SEQ ID NO: 1209289 - RNA, 20 nt, Human
gaaguuucugccgcagcccu

SEQ ID NO: 1209290 - RNA, 12 nt, Human
gaaguuucugcc

SEQ ID NO: 1209291 - RNA, 21 nt, Human
gaaggauacaaaagcauguga

SEQ ID NO: 1209292 - RNA, 19 nt, Human
gaaggauacaaaagcaugu

SEQ ID NO: 1209293 - RNA, 12 nt, Human
gaaggauacaaa

SEQ ID NO: 1209294 - RNA, 19 nt, Human
gaaggaaacccagcucugg

SEQ ID NO: 1209295 - RNA, 18 nt, Human
gaaggaaacccagcucug

SEQ ID NO: 1209296 - RNA, 17 nt, Human
gaaggaaacccagcucu

SEQ ID NO: 1209297 - RNA, 14 nt, Human
gaaggaaacccagc

SEQ ID NO: 1209298 - RNA, 17 nt, Human
gaaggccccgcccaggc

SEQ ID NO: 1209299 - RNA, 16 nt, Human
gaaggccccgcccagg

SEQ ID NO: 1209300 - RNA, 15 nt, Human
gaaggccccgcccag

SEQ ID NO: 1209301 - RNA, 14 nt, Human
gaaggccccgccca

SEQ ID NO: 1209302 - RNA, 19 nt, Human
gaagccagcaggcucucag

SEQ ID NO: 1209303 - RNA, 16 nt, Human
gaagccagcaggcucu

SEQ ID NO: 1209304 - RNA, 15 nt, Human
gaagccagcaggcuc

SEQ ID NO: 1209305 - RNA, 14 nt, Human
gaagaagcucucuc

SEQ ID NO: 1209306 - RNA, 21 nt, Human
gaagacucauucuucuguacg

SEQ ID NO: 1209307 - RNA, 19 nt, Human
gaagacucauucuucugua

SEQ ID NO: 1209308 - RNA, 23 nt, Human
gaagcccaggaaaggcuccagga

SEQ ID NO: 1209309 - RNA, 22 nt, Human
gaagcccaggaaaggcuccagg

SEQ ID NO: 1209310 - RNA, 21 nt, Human
gaagcccaggaaaggcuccag

SEQ ID NO: 1209311 - RNA, 20 nt, Human
gaagcccaggaaaggcucca

SEQ ID NO: 1209312 - RNA, 14 nt, Human
gaagcggcuggcag

SEQ ID NO: 1209313 - RNA, 22 nt, Human
cuuuccaaaugcccagcuuaaa

SEQ ID NO: 1209314 - RNA, 19 nt, Human
cuuuccaaaugcccagcuu

SEQ ID NO: 1209315 - RNA, 18 nt, Human
cuuuccaaaugcccagcu

SEQ ID NO: 1209316 - RNA, 13 nt, Human
cuuuauaauucua

SEQ ID NO: 1209317 - RNA, 21 nt, Human
cuuguguguuuauugucaaag

SEQ ID NO: 1209318 - RNA, 16 nt, Human
cuuguaaauagcucag

SEQ ID NO: 1209319 - RNA, 22 nt, Human
cuugggcuucauccuccucaga

SEQ ID NO: 1209320 - RNA, 21 nt, Human
cuuggggaccagagcugccac

SEQ ID NO: 1209321 - RNA, 13 nt, Human
cuugggcuucauc

SEQ ID NO: 1209322 - RNA, 18 nt, Human
cuugggccacugugaaga

SEQ ID NO: 1209323 - RNA, 14 nt, Human
cuugggccacugug

SEQ ID NO: 1209324 - RNA, 15 nt, Human
cuuggggggcugagg

SEQ ID NO: 1209325 - RNA, 16 nt, Human
cuuggggaccagagcu

SEQ ID NO: 1209326 - RNA, 22 nt, Human
cuuggggaccagagcugccacc

SEQ ID NO: 1209327 - RNA, 22 nt, Human
cuuggggggcugaggugggagg

SEQ ID NO: 1209328 - RNA, 16 nt, Human
cuuggggggcugaggu

SEQ ID NO: 1209329 - RNA, 16 nt, Human
cuuggcugcagggagu

SEQ ID NO: 1209330 - RNA, 22 nt, Human
cuuggaggaaggaaacccagcu

SEQ ID NO: 1209331 - RNA, 12 nt, Human
cuuggagggcau

SEQ ID NO: 1209332 - RNA, 23 nt, Human
cuuggagggcaugaagacagaua

SEQ ID NO: 1209333 - RNA, 17 nt, Human
cuuggcugcagggaguc

SEQ ID NO: 1209334 - RNA, 13 nt, Human
cuuggaggaagga

SEQ ID NO: 1209335 - RNA, 14 nt, Human
cuuggaagcuccgc

SEQ ID NO: 1209336 - RNA, 13 nt, Human
cuuggaagcuccg

SEQ ID NO: 1209337 - RNA, 16 nt, Human
cuuggaaaugggagac

SEQ ID NO: 1209338 - RNA, 20 nt, Human
cuugcuucaaccccaugaga

SEQ ID NO: 1209339 - RNA, 17 nt, Human
cuugcucugcugacaga

SEQ ID NO: 1209340 - RNA, 16 nt, Human
cuugcucugcugacag

SEQ ID NO: 1209341 - RNA, 14 nt, Human
cuugcucugcugac

SEQ ID NO: 1209342 - RNA, 21 nt, Human
cuucuccacccugcucuccga

SEQ ID NO: 1209343 - RNA, 18 nt, Human
cuucuccacccugcucuc

SEQ ID NO: 1209344 - RNA, 17 nt, Human
cuucuccacccugcucu

SEQ ID NO: 1209345 - RNA, 21 nt, Human
cuuuugagugccuuacacaau

SEQ ID NO: 1209346 - RNA, 16 nt, Human
cuuuugagcauuuaga

SEQ ID NO: 1209347 - RNA, 15 nt, Human
cuuuuuuggcugcug

SEQ ID NO: 1209348 - RNA, 14 nt, Human
cuuuuuuggcugcu

SEQ ID NO: 1209349 - RNA, 16 nt, Human
cuuuuuuggcugcuga

SEQ ID NO: 1209350 - RNA, 23 nt, Human
gaaaaaggaugcacagaguuguu

SEQ ID NO: 1209351 - RNA, 15 nt, Human
gaaaacaugcuacac

SEQ ID NO: 1209352 - RNA, 14 nt, Human
gaaaacaugcuaca

SEQ ID NO: 1209353 - RNA, 12 nt, Human
gaaaacaugcua

SEQ ID NO: 1209354 - RNA, 14 nt, Human
gaaaacacauuuuu

SEQ ID NO: 1209355 - RNA, 13 nt, Human
gaaaacacauuuu

SEQ ID NO: 1209356 - RNA, 19 nt, Human
gaaaacguggcugcuucaa

SEQ ID NO: 1209357 - RNA, 18 nt, Human
gaaaacguggcugcuuca

SEQ ID NO: 1209358 - RNA, 16 nt, Human
gaaaacguggcugcuu

SEQ ID NO: 1209359 - RNA, 15 nt, Human
gaaaacguggcugcu

SEQ ID NO: 1209360 - RNA, 16 nt, Human
gaaaacaugcuacaca

SEQ ID NO: 1209361 - RNA, 19 nt, Human
gaaaagcugcugacagugu

SEQ ID NO: 1209362 - RNA, 17 nt, Human
gaaaagcugcugacagu

SEQ ID NO: 1209363 - RNA, 13 nt, Human
gaaaagcugcuga

SEQ ID NO: 1209364 - RNA, 14 nt, Human
gaaaaucagccugc

SEQ ID NO: 1209365 - RNA, 18 nt, Human
gaaaaucagccugcucca

SEQ ID NO: 1209366 - RNA, 16 nt, Human
gaaaaucagccugcuc

SEQ ID NO: 1209367 - RNA, 18 nt, Human
gaaacagcuaaugggaca

SEQ ID NO: 1209368 - RNA, 16 nt, Human
cuuuucuuucagccaa

SEQ ID NO: 1209369 - RNA, 23 nt, Human
cuuuucuugcaugaggcuagugu

SEQ ID NO: 1209370 - RNA, 23 nt, Human
cuuuucuguccgagcuuugaaaa

SEQ ID NO: 1209371 - RNA, 18 nt, Human
cuuuucuguccgagcuuu

SEQ ID NO: 1209372 - RNA, 20 nt, Human
cuuuguuuguugucagcuga

SEQ ID NO: 1209373 - RNA, 18 nt, Human
cuuuguuuguugucagcu

SEQ ID NO: 1209374 - RNA, 22 nt, Human
cuuuucauaaccuagccuuaga

SEQ ID NO: 1209375 - RNA, 20 nt, Human
cuuuucauaaccuagccuua

SEQ ID NO: 1209376 - RNA, 15 nt, Human
cuuuguucuggcucu

SEQ ID NO: 1209377 - RNA, 14 nt, Human
cuuuguucuggcuc

SEQ ID NO: 1209378 - RNA, 19 nt, Human
cuuugugauuuuuguaauu

SEQ ID NO: 1209379 - RNA, 18 nt, Human
cuuugugauuuuuguaau

SEQ ID NO: 1209380 - RNA, 17 nt, Human
cuuugugauuuuuguaa

SEQ ID NO: 1209381 - RNA, 14 nt, Human
cuuugugauuuuug

SEQ ID NO: 1209382 - RNA, 23 nt, Human
cuuugggaggccaaggugggagg

SEQ ID NO: 1209383 - RNA, 22 nt, Human
cuuuguccccaccgcagacagg

SEQ ID NO: 1209384 - RNA, 18 nt, Human
cuuuguccccaccgcaga

SEQ ID NO: 1209385 - RNA, 13 nt, Human
cuuugggaggcca

SEQ ID NO: 1209386 - RNA, 16 nt, Human
cuuucccaucuuccaa

SEQ ID NO: 1209387 - RNA, 19 nt, Human
cuuuggacccugaggccca

SEQ ID NO: 1209388 - RNA, 18 nt, Human
cuuuggacccugaggccc

SEQ ID NO: 1209389 - RNA, 17 nt, Human
cuuuggacccugaggcc

SEQ ID NO: 1209390 - RNA, 16 nt, Human
cuuuggacccugaggc

SEQ ID NO: 1209391 - RNA, 15 nt, Human
cuuuggacccugagg

SEQ ID NO: 1209392 - RNA, 20 nt, Human
cuucauucaacccaccugcg

SEQ ID NO: 1209393 - RNA, 15 nt, Human
cuuccacaagagccc

SEQ ID NO: 1209394 - RNA, 14 nt, Human
cuuccacaagagcc

SEQ ID NO: 1209395 - RNA, 13 nt, Human
cuuccacaagagc

SEQ ID NO: 1209396 - RNA, 14 nt, Human
cuucagugccaaaa

SEQ ID NO: 1209397 - RNA, 15 nt, Human
cuucaguaagccgug

SEQ ID NO: 1209398 - RNA, 14 nt, Human
cuucaguaagccgu

SEQ ID NO: 1209399 - RNA, 19 nt, Human
cuucagcugacuuuucugu

SEQ ID NO: 1209400 - RNA, 15 nt, Human
cuucagcugacuuuu

SEQ ID NO: 1209401 - RNA, 20 nt, Human
cuucagccucccgaguagcu

SEQ ID NO: 1209402 - RNA, 16 nt, Human
cuucagccucccgagu

SEQ ID NO: 1209403 - RNA, 14 nt, Human
cuucagccucccga

SEQ ID NO: 1209404 - RNA, 23 nt, Human
cuucacauauugauuuccguuaa

SEQ ID NO: 1209405 - RNA, 14 nt, Human
cuucacauauugau

SEQ ID NO: 1209406 - RNA, 22 nt, Human
cuucaaggauccugagccagau

SEQ ID NO: 1209407 - RNA, 21 nt, Human
cuucaaggauccugagccaga

SEQ ID NO: 1209408 - RNA, 23 nt, Human
cuucaaggauccugagccagauu

SEQ ID NO: 1209409 - RNA, 21 nt, Human
cuuagucacugagacagcccg

SEQ ID NO: 1209410 - RNA, 22 nt, Human
cuuagucacugagacagcccgg

SEQ ID NO: 1209411 - RNA, 20 nt, Human
cuucaaggauccugagccag

SEQ ID NO: 1209412 - RNA, 19 nt, Human
cuucaaggauccugagcca

SEQ ID NO: 1209413 - RNA, 18 nt, Human
cuucaaggauccugagcc

SEQ ID NO: 1209414 - RNA, 17 nt, Human
cuucaaggauccugagc

SEQ ID NO: 1209415 - RNA, 21 nt, Human
cuucucacugccaugccagcu

SEQ ID NO: 1209416 - RNA, 16 nt, Human
cuucucacugccaugc

SEQ ID NO: 1209417 - RNA, 19 nt, Human
cuucgggaggucgaggcag

SEQ ID NO: 1209418 - RNA, 17 nt, Human
cuucgcuccugugucuu

SEQ ID NO: 1209419 - RNA, 16 nt, Human
cuuccacaagagccca

SEQ ID NO: 1209420 - RNA, 20 nt, Human
cuuaauucuuagcucauucu

SEQ ID NO: 1209421 - RNA, 14 nt, Human
cuuagucacugaga

SEQ ID NO: 1209422 - RNA, 23 nt, Human
cuuagguuggcaaaaaggcagga

SEQ ID NO: 1209423 - RNA, 11 nt, Human
cuuagacaguc

SEQ ID NO: 1209424 - RNA, 19 nt, Human
cuuagaauuaguggcacuu

SEQ ID NO: 1209425 - RNA, 20 nt, Human
cuuaccugccaggaagccag

SEQ ID NO: 1209426 - RNA, 13 nt, Human
cuuacuguacaug

SEQ ID NO: 1209427 - RNA, 20 nt, Human
cuuagaaaaaccaccaccau

SEQ ID NO: 1209428 - RNA, 20 nt, Human
cuuagaagucacacaguauu

SEQ ID NO: 1209429 - RNA, 17 nt, Human
cuuagaagucacacagu

SEQ ID NO: 1209430 - RNA, 16 nt, Human
cuguugcccaggcugg

SEQ ID NO: 1209431 - RNA, 15 nt, Human
cuguugcccaggcug

SEQ ID NO: 1209432 - RNA, 14 nt, Human
cuguugcccaggcu

SEQ ID NO: 1209433 - RNA, 13 nt, Human
cuguugcccaggc

SEQ ID NO: 1209434 - RNA, 12 nt, Human
cuguugcccagg

SEQ ID NO: 1209435 - RNA, 23 nt, Human
cuguucuuucuggcuaugcauuu

SEQ ID NO: 1209436 - RNA, 21 nt, Human
cuguucuuucuggcuaugcau

SEQ ID NO: 1209437 - RNA, 14 nt, Human
cuguucuuucuggc

SEQ ID NO: 1209438 - RNA, 13 nt, Human
cuguucuuucugg

SEQ ID NO: 1209439 - RNA, 21 nt, Human
cuguucuuuccaaaguacacu

SEQ ID NO: 1209440 - RNA, 19 nt, Human
cuguucuuuccaaaguaca

SEQ ID NO: 1209441 - RNA, 16 nt, Human
cuguucuuuccaaagu

SEQ ID NO: 1209442 - RNA, 15 nt, Human
cuguucuuuccaaag

SEQ ID NO: 1209443 - RNA, 16 nt, Human
cuguuaauaguucagg

SEQ ID NO: 1209444 - RNA, 17 nt, Human
cuguuucaaacuuuacu

SEQ ID NO: 1209445 - RNA, 15 nt, Human
cuguuucaaacuuua

SEQ ID NO: 1209446 - RNA, 18 nt, Human
cuguuuagauaauacacc

SEQ ID NO: 1209447 - RNA, 17 nt, Human
cuguuuagauaauacac

SEQ ID NO: 1209448 - RNA, 18 nt, Human
cuguugcccaggcuggcg

SEQ ID NO: 1209449 - RNA, 17 nt, Human
cuguugcccaggcuggc

SEQ ID NO: 1209450 - RNA, 19 nt, Human
cuguuugcuaagugaggau

SEQ ID NO: 1209451 - RNA, 17 nt, Human
cuguuugcuaagugagg

SEQ ID NO: 1209452 - RNA, 17 nt, Human
cuuaaaaaguggaaaaa

SEQ ID NO: 1209453 - RNA, 16 nt, Human
cuuaaaaaguggaaaa

SEQ ID NO: 1209454 - RNA, 13 nt, Human
cuguuuucucuug

SEQ ID NO: 1209455 - RNA, 18 nt, Human
cugugugugcgccuacag

SEQ ID NO: 1209456 - RNA, 20 nt, Human
cugugucuuuuuucacuaca

SEQ ID NO: 1209457 - RNA, 22 nt, Human
cuguggguuucuaaagcugcca

SEQ ID NO: 1209458 - RNA, 21 nt, Human
cuguggguuucuaaagcugcc

SEQ ID NO: 1209459 - RNA, 15 nt, Human
cugugccaugugcca

SEQ ID NO: 1209460 - RNA, 19 nt, Human
cugugcccuaaaguguauu

SEQ ID NO: 1209461 - RNA, 14 nt, Human
cugugccaugugcc

SEQ ID NO: 1209462 - RNA, 17 nt, Human
cugugauggggcccugc

SEQ ID NO: 1209463 - RNA, 23 nt, Human
cugugauggggcccugccuccuu

SEQ ID NO: 1209464 - RNA, 21 nt, Human
cugugauggggcccugccucc

SEQ ID NO: 1209465 - RNA, 16 nt, Human
cugugauggggcccug

SEQ ID NO: 1209466 - RNA, 15 nt, Human
cugugauggggcccu

SEQ ID NO: 1209467 - RNA, 22 nt, Human
cugugaaaggaaagagggaggu

SEQ ID NO: 1209468 - RNA, 16 nt, Human
cugugaaaggaaagag

SEQ ID NO: 1209469 - RNA, 15 nt, Human
cugugaaaggaaaga

SEQ ID NO: 1209470 - RNA, 18 nt, Human
cugucuucaguaagccgu

SEQ ID NO: 1209471 - RNA, 23 nt, Human
cugucauuugagcagggcucagc

SEQ ID NO: 1209472 - RNA, 22 nt, Human
cugucauuugagcagggcucag

SEQ ID NO: 1209473 - RNA, 21 nt, Human
cugucauuugagcagggcuca

SEQ ID NO: 1209474 - RNA, 19 nt, Human
cugucaauuacaggaagua

SEQ ID NO: 1209475 - RNA, 18 nt, Human
cugucaauuacaggaagu

SEQ ID NO: 1209476 - RNA, 19 nt, Human
cugguggcagugggagcug

SEQ ID NO: 1209477 - RNA, 21 nt, Human
cugguggcagcucaccucucc

SEQ ID NO: 1209478 - RNA, 18 nt, Human
cugguggcagugggagcu

SEQ ID NO: 1209479 - RNA, 14 nt, Human
cugguggcaguggg

SEQ ID NO: 1209480 - RNA, 15 nt, Human
cugguggcagcugcg

SEQ ID NO: 1209481 - RNA, 20 nt, Human
cugguggcagcucaccucuc

SEQ ID NO: 1209482 - RNA, 18 nt, Human
cugguggcagcucaccuc

SEQ ID NO: 1209483 - RNA, 17 nt, Human
cugguggcagcucaccu

SEQ ID NO: 1209484 - RNA, 22 nt, Human
cuguacagagcccacgccccca

SEQ ID NO: 1209485 - RNA, 18 nt, Human
cuguacagagcccacgcc

SEQ ID NO: 1209486 - RNA, 15 nt, Human
cuguacagagcccac

SEQ ID NO: 1209487 - RNA, 17 nt, Human
cuguaauuugugauaca

SEQ ID NO: 1209488 - RNA, 15 nt, Human
cuguaauuugugaua

SEQ ID NO: 1209489 - RNA, 14 nt, Human
cuguaauuugugau

SEQ ID NO: 1209490 - RNA, 19 nt, Human
cuguaauccuagcacuuug

SEQ ID NO: 1209491 - RNA, 22 nt, Human
cugguuagagguucccuuugac

SEQ ID NO: 1209492 - RNA, 21 nt, Human
cugguuagagguucccuuuga

SEQ ID NO: 1209493 - RNA, 16 nt, Human
cugucaauuacaggaa

SEQ ID NO: 1209494 - RNA, 15 nt, Human
cugucaauuacagga

SEQ ID NO: 1209495 - RNA, 20 nt, Human
cuguauuuuguuuuugucuu

SEQ ID NO: 1209496 - RNA, 20 nt, Human
cuguaucccaugagccucag

SEQ ID NO: 1209497 - RNA, 22 nt, Human
cuguaucccaugagccucagca

SEQ ID NO: 1209498 - RNA, 21 nt, Human
cuguaucccaugagccucagc

SEQ ID NO: 1209499 - RNA, 18 nt, Human
cuguacgucugacaggca

SEQ ID NO: 1209500 - RNA, 16 nt, Human
cuguacgucugacagg

SEQ ID NO: 1209501 - RNA, 15 nt, Human
cuguacgucugacag

SEQ ID NO: 1209502 - RNA, 14 nt, Human
cuguacgucugaca

SEQ ID NO: 1209503 - RNA, 21 nt, Human
cuguacaugaaaacacauuuu

SEQ ID NO: 1209504 - RNA, 20 nt, Human
cuguacaugaaaacacauuu

SEQ ID NO: 1209505 - RNA, 17 nt, Human
cuguacaugaaaacaca

SEQ ID NO: 1209506 - RNA, 20 nt, Human
cuguacgucugacaggcaau

SEQ ID NO: 1209507 - RNA, 19 nt, Human
cuguacgucugacaggcaa

SEQ ID NO: 1209508 - RNA, 18 nt, Human
cugggggcugggcagagg

SEQ ID NO: 1209509 - RNA, 14 nt, Human
cugggggcugggca

SEQ ID NO: 1209510 - RNA, 18 nt, Human
cugggcuugucuguagau

SEQ ID NO: 1209511 - RNA, 22 nt, Human
cugggcuuggggaccagagcug

SEQ ID NO: 1209512 - RNA, 17 nt, Human
cugggcuucaguggcag

SEQ ID NO: 1209513 - RNA, 15 nt, Human
cugggcuucaguggc

SEQ ID NO: 1209514 - RNA, 20 nt, Human
cuggguaacuagggaagaua

SEQ ID NO: 1209515 - RNA, 21 nt, Human
cugggauuacaagcgugagcc

SEQ ID NO: 1209516 - RNA, 17 nt, Human
cugauugugucucuugg

SEQ ID NO: 1209517 - RNA, 21 nt, Human
cugauggugcaaugaccuuuc

SEQ ID NO: 1209518 - RNA, 20 nt, Human
cugauggugcaaugaccuuu

SEQ ID NO: 1209519 - RNA, 19 nt, Human
cugauggugcaaugaccuu

SEQ ID NO: 1209520 - RNA, 17 nt, Human
cugauggugcaaugacc

SEQ ID NO: 1209521 - RNA, 21 nt, Human
cugauugugucucuugguccu

SEQ ID NO: 1209522 - RNA, 20 nt, Human
cugauuuuuuuuuccuucag

SEQ ID NO: 1209523 - RNA, 19 nt, Human
cugauuuuuuuuuccuuca

SEQ ID NO: 1209524 - RNA, 18 nt, Human
cugauuuuuuuuuccuuc

SEQ ID NO: 1209525 - RNA, 16 nt, Human
cugauuuuuuuuuccu

SEQ ID NO: 1209526 - RNA, 23 nt, Human
cugauuuuuuuuuccuucagugc

SEQ ID NO: 1209527 - RNA, 22 nt, Human
cugauuuuuuuuuccuucagug

SEQ ID NO: 1209528 - RNA, 21 nt, Human
cugauuuuuuuuuccuucagu

SEQ ID NO: 1209529 - RNA, 18 nt, Human
cugcacuugcagacucua

SEQ ID NO: 1209530 - RNA, 18 nt, Human
cugcacuccccugcuggg

SEQ ID NO: 1209531 - RNA, 17 nt, Human
cugcacuccccugcugg

SEQ ID NO: 1209532 - RNA, 16 nt, Human
cugcacuccccugcug

SEQ ID NO: 1209533 - RNA, 15 nt, Human
cugcacuccccugcu

SEQ ID NO: 1209534 - RNA, 14 nt, Human
cugcaccgggccac

SEQ ID NO: 1209535 - RNA, 12 nt, Human
cugcaccgggcc

SEQ ID NO: 1209536 - RNA, 23 nt, Human
cugcaccggcuggccuggccccu

SEQ ID NO: 1209537 - RNA, 22 nt, Human
cugcaccggcuggccuggcccc

SEQ ID NO: 1209538 - RNA, 16 nt, Human
cugcacccucaggcag

SEQ ID NO: 1209539 - RNA, 14 nt, Human
cugcacccucaggc

SEQ ID NO: 1209540 - RNA, 13 nt, Human
cugcacccucagg

SEQ ID NO: 1209541 - RNA, 22 nt, Human
cugcacaagcugcacccucagg

SEQ ID NO: 1209542 - RNA, 18 nt, Human
cugcaauaaggggagagu

SEQ ID NO: 1209543 - RNA, 19 nt, Human
cugagucugaaggcugggu

SEQ ID NO: 1209544 - RNA, 18 nt, Human
cugagucugaaggcuggg

SEQ ID NO: 1209545 - RNA, 16 nt, Human
cugauggugcaaugac

SEQ ID NO: 1209546 - RNA, 15 nt, Human
cugauggugcaauga

SEQ ID NO: 1209547 - RNA, 14 nt, Human
cugauggugcaaug

SEQ ID NO: 1209548 - RNA, 21 nt, Human
cugauccuaguuccaccauca

SEQ ID NO: 1209549 - RNA, 20 nt, Human
cugauccuaguuccaccauc

SEQ ID NO: 1209550 - RNA, 22 nt, Human
cugaggcugggcucccuuccca

SEQ ID NO: 1209551 - RNA, 17 nt, Human
cugaggcugggcucccu

SEQ ID NO: 1209552 - RNA, 16 nt, Human
cugaggcugggcuccc

SEQ ID NO: 1209553 - RNA, 15 nt, Human
cugaggcugggcucc

SEQ ID NO: 1209554 - RNA, 13 nt, Human
cugaggcugggcu

SEQ ID NO: 1209555 - RNA, 22 nt, Human
cugccugcccaggccccugcca

SEQ ID NO: 1209556 - RNA, 21 nt, Human
cugccugcccaggccccugcc

SEQ ID NO: 1209557 - RNA, 21 nt, Human
cugccucugacacacagcucu

SEQ ID NO: 1209558 - RNA, 18 nt, Human
cugccucugacacacagc

SEQ ID NO: 1209559 - RNA, 17 nt, Human
cugccucugacacacag

SEQ ID NO: 1209560 - RNA, 18 nt, Human
cugcgguccacccaggag

SEQ ID NO: 1209561 - RNA, 20 nt, Human
cugcgguccacccaggagcc

SEQ ID NO: 1209562 - RNA, 19 nt, Human
cugcgguccacccaggagc

SEQ ID NO: 1209563 - RNA, 15 nt, Human
cugccucagccuccc

SEQ ID NO: 1209564 - RNA, 19 nt, Human
cugccucagccucccaaag

SEQ ID NO: 1209565 - RNA, 14 nt, Human
cugccgcagcccug

SEQ ID NO: 1209566 - RNA, 23 nt, Human
cugccgcagcccugcagagggca

SEQ ID NO: 1209567 - RNA, 22 nt, Human
cugccgcagcccugcagagggc

SEQ ID NO: 1209568 - RNA, 21 nt, Human
cugccgcagcccugcagaggg

SEQ ID NO: 1209569 - RNA, 20 nt, Human
cugccgcagcccugcagagg

SEQ ID NO: 1209570 - RNA, 13 nt, Human
cugccgcagcccu

SEQ ID NO: 1209571 - RNA, 12 nt, Human
cugccgcagccc

SEQ ID NO: 1209572 - RNA, 13 nt, Human
cugccaggcaugg

SEQ ID NO: 1209573 - RNA, 11 nt, Human
cugccaggcau

SEQ ID NO: 1209574 - RNA, 15 nt, Human
cugcccaccuggccu

SEQ ID NO: 1209575 - RNA, 14 nt, Human
cugcccaccuggcc

SEQ ID NO: 1209576 - RNA, 15 nt, Human
cugccaugccagcuu

SEQ ID NO: 1209577 - RNA, 14 nt, Human
cugccaugccagcu

SEQ ID NO: 1209578 - RNA, 16 nt, Human
cugcccacucccugca

SEQ ID NO: 1209579 - RNA, 15 nt, Human
cugcccacucccugc

SEQ ID NO: 1209580 - RNA, 14 nt, Human
cugcccacucccug

SEQ ID NO: 1209581 - RNA, 22 nt, Human
cugcccaccuggccucugcacu

SEQ ID NO: 1209582 - RNA, 20 nt, Human
cugcccaccuggccucugca

SEQ ID NO: 1209583 - RNA, 19 nt, Human
cugcccaccuggccucugc

SEQ ID NO: 1209584 - RNA, 18 nt, Human
cugcccaccuggccucug

SEQ ID NO: 1209585 - RNA, 17 nt, Human
cugcccaccuggccucu

SEQ ID NO: 1209586 - RNA, 18 nt, Human
cugcccacucccugcaac

SEQ ID NO: 1209587 - RNA, 19 nt, Human
cugccaaugggagcucaug

SEQ ID NO: 1209588 - RNA, 18 nt, Human
cugccaaugggagcucau

SEQ ID NO: 1209589 - RNA, 22 nt, Human
cugcaugcgggcuuccuccugg

SEQ ID NO: 1209590 - RNA, 18 nt, Human
cugcaugcgggcuuccuc

SEQ ID NO: 1209591 - RNA, 22 nt, Human
cugcaguugccagucaccccgg

SEQ ID NO: 1209592 - RNA, 21 nt, Human
cugcaguugccagucaccccg

SEQ ID NO: 1209593 - RNA, 19 nt, Human
cugcaguugccagucaccc

SEQ ID NO: 1209594 - RNA, 23 nt, Human
cugcacuugcagacucuacagag

SEQ ID NO: 1209595 - RNA, 22 nt, Human
cugcaucguuucaucuuccaac

SEQ ID NO: 1209596 - RNA, 16 nt, Human
cugcaucguuucaucu

SEQ ID NO: 1209597 - RNA, 15 nt, Human
cugagccagauuuca

SEQ ID NO: 1209598 - RNA, 14 nt, Human
cugagccagauuuc

SEQ ID NO: 1209599 - RNA, 13 nt, Human
cugagccagauuu

SEQ ID NO: 1209600 - RNA, 22 nt, Human
cugagacagcccgggcucugcc

SEQ ID NO: 1209601 - RNA, 21 nt, Human
cugagacagcccgggcucugc

SEQ ID NO: 1209602 - RNA, 20 nt, Human
cugagacagcccgggcucug

SEQ ID NO: 1209603 - RNA, 14 nt, Human
cugaauuucuuuug

SEQ ID NO: 1209604 - RNA, 16 nt, Human
cugacagacacaggcc

SEQ ID NO: 1209605 - RNA, 18 nt, Human
cugacagacacaggcccg

SEQ ID NO: 1209606 - RNA, 17 nt, Human
cugacagacacaggccc

SEQ ID NO: 1209607 - RNA, 19 nt, Human
cugacagacacaggcccgg

SEQ ID NO: 1209608 - RNA, 12 nt, Human
cugaauuucuuu

SEQ ID NO: 1209609 - RNA, 20 nt, Human
cugaaugguuuucaaaauaa

SEQ ID NO: 1209610 - RNA, 19 nt, Human
cugaaugguuuucaaaaua

SEQ ID NO: 1209611 - RNA, 24 nt, Human
cugaagucuuuguacagacaacaa

SEQ ID NO: 1209612 - RNA, 17 nt, Human
cugaaguucagcugcau

SEQ ID NO: 1209613 - RNA, 20 nt, Human
cugaagucuuuguacagaca

SEQ ID NO: 1209614 - RNA, 17 nt, Human
cugaagucuuuguacag

SEQ ID NO: 1209615 - RNA, 22 nt, Human
cugaagucccagauacuugggg

SEQ ID NO: 1209616 - RNA, 19 nt, Human
cugaagucacacagugagu

SEQ ID NO: 1209617 - RNA, 18 nt, Human
cugaagucacacagugag

SEQ ID NO: 1209618 - RNA, 17 nt, Human
cugaagucacacaguga

SEQ ID NO: 1209619 - RNA, 21 nt, Human
cugaagucacacagugagucg

SEQ ID NO: 1209620 - RNA, 23 nt, Human
cugaaagggacgcuacccgggaa

SEQ ID NO: 1209621 - RNA, 14 nt, Human
cucuuuucaaaaca

SEQ ID NO: 1209622 - RNA, 23 nt, Human
cucuuuggucuacacugugcuga

SEQ ID NO: 1209623 - RNA, 22 nt, Human
cucuuuggucuacacugugcug

SEQ ID NO: 1209624 - RNA, 16 nt, Human
cucuucuccaggcugu

SEQ ID NO: 1209625 - RNA, 20 nt, Human
cucugcccacucccugcaac

SEQ ID NO: 1209626 - RNA, 18 nt, Human
cucugcccacucccugca

SEQ ID NO: 1209627 - RNA, 17 nt, Human
cucugcccacucccugc

SEQ ID NO: 1209628 - RNA, 16 nt, Human
cucugcccacucccug

SEQ ID NO: 1209629 - RNA, 15 nt, Human
cucugcccacucccu

SEQ ID NO: 1209630 - RNA, 13 nt, Human
cucugcccacucc

SEQ ID NO: 1209631 - RNA, 17 nt, Human
cucugccucccaucacc

SEQ ID NO: 1209632 - RNA, 16 nt, Human
cucugccucccaucac

SEQ ID NO: 1209633 - RNA, 14 nt, Human
cucugccucccauc

SEQ ID NO: 1209634 - RNA, 13 nt, Human
cucugccucccau

SEQ ID NO: 1209635 - RNA, 13 nt, Human
cucugcacaagcu

SEQ ID NO: 1209636 - RNA, 15 nt, Human
cucugcacaagcugc

SEQ ID NO: 1209637 - RNA, 14 nt, Human
cucugcacaagcug

SEQ ID NO: 1209638 - RNA, 16 nt, Human
cucugcacaagcugca

SEQ ID NO: 1209639 - RNA, 23 nt, Human
cucugacagaagaaccccagggu

SEQ ID NO: 1209640 - RNA, 19 nt, Human
cucugacacacagcucugu

SEQ ID NO: 1209641 - RNA, 18 nt, Human
cucugacacacagcucug

SEQ ID NO: 1209642 - RNA, 17 nt, Human
cucugacacacagcucu

SEQ ID NO: 1209643 - RNA, 16 nt, Human
cucugacacacagcuc

SEQ ID NO: 1209644 - RNA, 15 nt, Human
cucugacacacagcu

SEQ ID NO: 1209645 - RNA, 14 nt, Human
cucugacacacagc

SEQ ID NO: 1209646 - RNA, 16 nt, Human
cucugaggacacuaac

SEQ ID NO: 1209647 - RNA, 14 nt, Human
cucugaggacacua

SEQ ID NO: 1209648 - RNA, 12 nt, Human
cucugaggacac

SEQ ID NO: 1209649 - RNA, 23 nt, Human
cucugagacucgcgacaaugcaa

SEQ ID NO: 1209650 - RNA, 21 nt, Human
cucugagacucgcgacaaugc

SEQ ID NO: 1209651 - RNA, 13 nt, Human
cucuuaaaaccca

SEQ ID NO: 1209652 - RNA, 23 nt, Human
cucugugucagguggggcagcuu

SEQ ID NO: 1209653 - RNA, 22 nt, Human
cucugugucagguggggcagcu

SEQ ID NO: 1209654 - RNA, 21 nt, Human
cucugugucagguggggcagc

SEQ ID NO: 1209655 - RNA, 20 nt, Human
cucugugucagguggggcag

SEQ ID NO: 1209656 - RNA, 15 nt, Human
cucuucuccaggcug

SEQ ID NO: 1209657 - RNA, 23 nt, Human
cucuggcagcucagagagggugg

SEQ ID NO: 1209658 - RNA, 10 nt, Human
cucugccuga

SEQ ID NO: 1209659 - RNA, 20 nt, Human
cucugccucugacacacagc

SEQ ID NO: 1209660 - RNA, 19 nt, Human
cucugccucugacacacag

SEQ ID NO: 1209661 - RNA, 21 nt, Human
cucugccucccaucacccgcu

SEQ ID NO: 1209662 - RNA, 22 nt, Human
cucuguccugggagugagcugg

SEQ ID NO: 1209663 - RNA, 15 nt, Human
cucuguccugggagu

SEQ ID NO: 1209664 - RNA, 14 nt, Human
cucuguccugggag

SEQ ID NO: 1209665 - RNA, 19 nt, Human
cucugucgcccagucugga

SEQ ID NO: 1209666 - RNA, 18 nt, Human
cucugucgcccagucugg

SEQ ID NO: 1209667 - RNA, 17 nt, Human
cucugucgcccagucug

SEQ ID NO: 1209668 - RNA, 13 nt, Human
cucugucgcccag

SEQ ID NO: 1209669 - RNA, 18 nt, Human
cuauuguuagucucuuga

SEQ ID NO: 1209670 - RNA, 17 nt, Human
cucaaccuccugggcua

SEQ ID NO: 1209671 - RNA, 15 nt, Human
cucaaccuccugggc

SEQ ID NO: 1209672 - RNA, 13 nt, Human
cucaaccuccugg

SEQ ID NO: 1209673 - RNA, 21 nt, Human
cucaacaccucugcacaagcu

SEQ ID NO: 1209674 - RNA, 19 nt, Human
cucaccagccccagugccc

SEQ ID NO: 1209675 - RNA, 18 nt, Human
cucaccagccccagugcc

SEQ ID NO: 1209676 - RNA, 17 nt, Human
cucaccagccccagugc

SEQ ID NO: 1209677 - RNA, 15 nt, Human
cucaccagccccagu

SEQ ID NO: 1209678 - RNA, 14 nt, Human
cucaccagccccag

SEQ ID NO: 1209679 - RNA, 13 nt, Human
cucaccagcccca

SEQ ID NO: 1209680 - RNA, 22 nt, Human
cucacauuuauucugcucacau

SEQ ID NO: 1209681 - RNA, 19 nt, Human
cucacauuuauucugcuca

SEQ ID NO: 1209682 - RNA, 15 nt, Human
cucacauuuauucug

SEQ ID NO: 1209683 - RNA, 23 nt, Human
cucacaguccuuaccagcagagc

SEQ ID NO: 1209684 - RNA, 22 nt, Human
cucacaguccuuaccagcagag

SEQ ID NO: 1209685 - RNA, 19 nt, Human
cucacaguccuuaccagca

SEQ ID NO: 1209686 - RNA, 17 nt, Human
cucacaguccuuaccag

SEQ ID NO: 1209687 - RNA, 15 nt, Human
cucacaguccuuacc

SEQ ID NO: 1209688 - RNA, 24 nt, Human
cucacacaugagcaucaggccagg

SEQ ID NO: 1209689 - RNA, 22 nt, Human
cucacacaugagcaucaggcca

SEQ ID NO: 1209690 - RNA, 17 nt, Human
cucaagugauucuccug

SEQ ID NO: 1209691 - RNA, 21 nt, Human
cucaaguccucuuuucugaga

SEQ ID NO: 1209692 - RNA, 17 nt, Human
cucagcauccuggcacc

SEQ ID NO: 1209693 - RNA, 16 nt, Human
cucagcauccuggcac

SEQ ID NO: 1209694 - RNA, 15 nt, Human
cucagaucuucugug

SEQ ID NO: 1209695 - RNA, 18 nt, Human
cucagagagggugggagu

SEQ ID NO: 1209696 - RNA, 14 nt, Human
cucagagagggugg

SEQ ID NO: 1209697 - RNA, 22 nt, Human
cucacuguugcccaggcuggcg

SEQ ID NO: 1209698 - RNA, 21 nt, Human
cucacuguugcccaggcuggc

SEQ ID NO: 1209699 - RNA, 20 nt, Human
cucacuguugcccaggcugg

SEQ ID NO: 1209700 - RNA, 22 nt, Human
cucacugccaugccagcuuauc

SEQ ID NO: 1209701 - RNA, 19 nt, Human
cucacugccaugccagcuu

SEQ ID NO: 1209702 - RNA, 22 nt, Human
cucacucugucgcccagucugg

SEQ ID NO: 1209703 - RNA, 21 nt, Human
cucacucugucgcccagucug

SEQ ID NO: 1209704 - RNA, 13 nt, Human
cucacucugucgc

SEQ ID NO: 1209705 - RNA, 12 nt, Human
cucacugcagcc

SEQ ID NO: 1209706 - RNA, 13 nt, Human
cucacugcagccu

SEQ ID NO: 1209707 - RNA, 14 nt, Human
cucacugcagccuc

SEQ ID NO: 1209708 - RNA, 12 nt, Human
cucacucugucg

SEQ ID NO: 1209709 - RNA, 11 nt, Human
cucacucuguc

SEQ ID NO: 1209710 - RNA, 13 nt, Human
cucacuccuugaa

SEQ ID NO: 1209711 - RNA, 20 nt, Human
cucacuauguugcccaggca

SEQ ID NO: 1209712 - RNA, 19 nt, Human
cucacuauguugcccaggc

SEQ ID NO: 1209713 - RNA, 15 nt, Human
cucaccccagcccca

SEQ ID NO: 1209714 - RNA, 23 nt, Human
cucacuauguugcccaggcaggu

SEQ ID NO: 1209715 - RNA, 22 nt, Human
cucacuauguugcccaggcagg

SEQ ID NO: 1209716 - RNA, 21 nt, Human
cucacuauguugcccaggcag

SEQ ID NO: 1209717 - RNA, 15 nt, Human
cuauuagagaagaga

SEQ ID NO: 1209718 - RNA, 23 nt, Human
cuaugggacucaaugcacugaca

SEQ ID NO: 1209719 - RNA, 22 nt, Human
cuaugggacucaaugcacugac

SEQ ID NO: 1209720 - RNA, 18 nt, Human
cuaugggacucaaugcac

SEQ ID NO: 1209721 - RNA, 18 nt, Human
cuauagccuaggugacag

SEQ ID NO: 1209722 - RNA, 17 nt, Human
cuauagccuaggugaca

SEQ ID NO: 1209723 - RNA, 22 nt, Human
cuauaauuuaccugaagucuuu

SEQ ID NO: 1209724 - RNA, 21 nt, Human
cuauaauguaagcucuacuga

SEQ ID NO: 1209725 - RNA, 16 nt, Human
cuauaauguaagcucu

SEQ ID NO: 1209726 - RNA, 24 nt, Human
cuaggugacagagugagacucugu

SEQ ID NO: 1209727 - RNA, 18 nt, Human
cuaggugacagagugaga

SEQ ID NO: 1209728 - RNA, 14 nt, Human
cuaggugacagagu

SEQ ID NO: 1209729 - RNA, 23 nt, Human
cgcccaguuggguggaugccugg

SEQ ID NO: 1209730 - RNA, 22 nt, Human
cgcccaguuggguggaugccug

SEQ ID NO: 1209731 - RNA, 15 nt, Human
cgccaugcuccuggc

SEQ ID NO: 1209732 - RNA, 20 nt, Human
cgccaucccagccccaauga

SEQ ID NO: 1209733 - RNA, 19 nt, Human
cucgagcaugccuggaugg

SEQ ID NO: 1209734 - RNA, 16 nt, Human
cucgagcaugccugga

SEQ ID NO: 1209735 - RNA, 15 nt, Human
cucgagcaugccugg

SEQ ID NO: 1209736 - RNA, 13 nt, Human
cucgagcaugccu

SEQ ID NO: 1209737 - RNA, 23 nt, Human
cuccuuggugucgggcaugacac

SEQ ID NO: 1209738 - RNA, 22 nt, Human
cucgagcaugccuggauggggc

SEQ ID NO: 1209739 - RNA, 13 nt, Human
cucgcgacaaugc

SEQ ID NO: 1209740 - RNA, 14 nt, Human
cuccuggaaauauu

SEQ ID NO: 1209741 - RNA, 24 nt, Human
cuccugugugugcgccuacaggag

SEQ ID NO: 1209742 - RNA, 23 nt, Human
cuccugugugugcgccuacagga

SEQ ID NO: 1209743 - RNA, 21 nt, Human
cuccugugugugcgccuacag

SEQ ID NO: 1209744 - RNA, 22 nt, Human
cuccugccucgaacuggcugca

SEQ ID NO: 1209745 - RNA, 21 nt, Human
cuccugccucgaacuggcugc

SEQ ID NO: 1209746 - RNA, 20 nt, Human
cuccugccucgaacuggcug

SEQ ID NO: 1209747 - RNA, 18 nt, Human
cuccugccucgaacuggc

SEQ ID NO: 1209748 - RNA, 22 nt, Human
cuccucuccccagcaagugaga

SEQ ID NO: 1209749 - RNA, 15 nt, Human
cuccucuccccagca

SEQ ID NO: 1209750 - RNA, 13 nt, Human
cuccucuccccag

SEQ ID NO: 1209751 - RNA, 17 nt, Human
cuccugccucagccucc

SEQ ID NO: 1209752 - RNA, 12 nt, Human
cuccugccucag

SEQ ID NO: 1209753 - RNA, 11 nt, Human
cuccugccuca

SEQ ID NO: 1209754 - RNA, 22 nt, Human
cuccuccagccgccaugcuccu

SEQ ID NO: 1209755 - RNA, 15 nt, Human
cuccuccagccgcca

SEQ ID NO: 1209756 - RNA, 15 nt, Human
cuccuccagagucag

SEQ ID NO: 1209757 - RNA, 13 nt, Human
cuccuccagaguc

SEQ ID NO: 1209758 - RNA, 18 nt, Human
cuccucagaucuucugug

SEQ ID NO: 1209759 - RNA, 20 nt, Human
cucccgaguagcugggacua

SEQ ID NO: 1209760 - RNA, 19 nt, Human
cucccgaguagcugggacu

SEQ ID NO: 1209761 - RNA, 16 nt, Human
cucccgaauagcuggg

SEQ ID NO: 1209762 - RNA, 23 nt, Human
cuccccagcaagugagagcuggg

SEQ ID NO: 1209763 - RNA, 22 nt, Human
cuccccagcaagugagagcugg

SEQ ID NO: 1209764 - RNA, 13 nt, Human
cuccacccugcuc

SEQ ID NO: 1209765 - RNA, 15 nt, Human
cuccacccugcucuc

SEQ ID NO: 1209766 - RNA, 17 nt, Human
cucauuugucacacacu

SEQ ID NO: 1209767 - RNA, 16 nt, Human
cuccaaaauaaaacuu

SEQ ID NO: 1209768 - RNA, 15 nt, Human
cuccaaaauaaaacu

SEQ ID NO: 1209769 - RNA, 18 nt, Human
cucauuugucacacacuu

SEQ ID NO: 1209770 - RNA, 18 nt, Human
cuccaaaauaaaacuuuu

SEQ ID NO: 1209771 - RNA, 15 nt, Human
cuccaccugccaggg

SEQ ID NO: 1209772 - RNA, 14 nt, Human
cuccaccugccagg

SEQ ID NO: 1209773 - RNA, 13 nt, Human
cuccaccugccag

SEQ ID NO: 1209774 - RNA, 12 nt, Human
cuccaccugcca

SEQ ID NO: 1209775 - RNA, 14 nt, Human
cuccagcucaccag

SEQ ID NO: 1209776 - RNA, 12 nt, Human
cuccagccuggg

SEQ ID NO: 1209777 - RNA, 20 nt, Human
cuccagccccuggaugcagc

SEQ ID NO: 1209778 - RNA, 17 nt, Human
cuccagccccuggaugc

SEQ ID NO: 1209779 - RNA, 16 nt, Human
cuccagccccuggaug

SEQ ID NO: 1209780 - RNA, 23 nt, Human
cuccaggagcagccacauuccug

SEQ ID NO: 1209781 - RNA, 18 nt, Human
cuccaggagcagccacau

SEQ ID NO: 1209782 - RNA, 17 nt, Human
cuccaggagcagccaca

SEQ ID NO: 1209783 - RNA, 16 nt, Human
cuccaggagcagccac

SEQ ID NO: 1209784 - RNA, 15 nt, Human
cuccaggagcagcca

SEQ ID NO: 1209785 - RNA, 14 nt, Human
cuccaggagcagcc

SEQ ID NO: 1209786 - RNA, 13 nt, Human
cuccaggagcagc

SEQ ID NO: 1209787 - RNA, 11 nt, Human
cuccaggagca

SEQ ID NO: 1209788 - RNA, 15 nt, Human
cucauccucauaccc

SEQ ID NO: 1209789 - RNA, 22 nt, Human
cucaucaccaacgucugugcca

SEQ ID NO: 1209790 - RNA, 21 nt, Human
cucaucaccaacgucugugcc

SEQ ID NO: 1209791 - RNA, 23 nt, Human
cucauaguaugguggcuggguug

SEQ ID NO: 1209792 - RNA, 21 nt, Human
cucauacccacccccacccaa

SEQ ID NO: 1209793 - RNA, 19 nt, Human
cucauacccacccccaccc

SEQ ID NO: 1209794 - RNA, 18 nt, Human
cucauacccacccccacc

SEQ ID NO: 1209795 - RNA, 16 nt, Human
cucauacccaccccca

SEQ ID NO: 1209796 - RNA, 22 nt, Human
cucaggugauccacccaccuca

SEQ ID NO: 1209797 - RNA, 20 nt, Human
cucaggugauccacccaccu

SEQ ID NO: 1209798 - RNA, 19 nt, Human
cucaggugauccacccacc

SEQ ID NO: 1209799 - RNA, 18 nt, Human
cucaggugauccacccac

SEQ ID NO: 1209800 - RNA, 22 nt, Human
cucauacucaccucaccccacu

SEQ ID NO: 1209801 - RNA, 14 nt, Human
cucauacucaccuc

SEQ ID NO: 1209802 - RNA, 21 nt, Human
cucauaguaugguggcugggu

SEQ ID NO: 1209803 - RNA, 20 nt, Human
cucaggugagaagcagagga

SEQ ID NO: 1209804 - RNA, 19 nt, Human
cucaggugagaagcagagg

SEQ ID NO: 1209805 - RNA, 16 nt, Human
cucaggugagaagcag

SEQ ID NO: 1209806 - RNA, 18 nt, Human
cucagggucccugguggc

SEQ ID NO: 1209807 - RNA, 17 nt, Human
cucagggucccuggugg

SEQ ID NO: 1209808 - RNA, 16 nt, Human
cucagggucccuggug

SEQ ID NO: 1209809 - RNA, 15 nt, Human
cucagggucccuggu

SEQ ID NO: 1209810 - RNA, 18 nt, Human
cucagggccuggcucagg

SEQ ID NO: 1209811 - RNA, 15 nt, Human
cucagggccuggucg

SEQ ID NO: 1209812 - RNA, 16 nt, Human
cucagggccuggcuca

SEQ ID NO: 1209813 - RNA, 15 nt, Human
cucagggccuggcuc

SEQ ID NO: 1209814 - RNA, 14 nt, Human
cucagggccuggcu

SEQ ID NO: 1209815 - RNA, 18 nt, Human
cucagcauccuggcaccc

SEQ ID NO: 1209816 - RNA, 23 nt, Human
cucaggaguuugagaccaaccug

SEQ ID NO: 1209817 - RNA, 18 nt, Human
cucaggaguuugagacca

SEQ ID NO: 1209818 - RNA, 20 nt, Human
cgagauugcaccacugcacu

SEQ ID NO: 1209819 - RNA, 20 nt, Human
cgagaucacgccacugcacu

SEQ ID NO: 1209820 - RNA, 18 nt, Human
cgagaucacgccacugca

SEQ ID NO: 1209821 - RNA, 17 nt, Human
cgagcaugccuggaugg

SEQ ID NO: 1209822 - RNA, 16 nt, Human
cgagcaugccuggaug

SEQ ID NO: 1209823 - RNA, 13 nt, Human
cgagcaugccugg

SEQ ID NO: 1209824 - RNA, 20 nt, Human
cgagcaggcuucuucccccc

SEQ ID NO: 1209825 - RNA, 17 nt, Human
cgagaucacgccacugc

SEQ ID NO: 1209826 - RNA, 18 nt, Human
cgagauagccaaggccaa

SEQ ID NO: 1209827 - RNA, 14 nt, Human
cgaauagcugggac

SEQ ID NO: 1209828 - RNA, 13 nt, Human
cgaauagcuggga

SEQ ID NO: 1209829 - RNA, 15 nt, Human
cgaauagcugggacu

SEQ ID NO: 1209830 - RNA, 20 nt, Human
cgaaaacguggcugcuucaa

SEQ ID NO: 1209831 - RNA, 19 nt, Human
cgaaaacguggcugcuuca

SEQ ID NO: 1209832 - RNA, 18 nt, Human
cgaaaacguggcugcuuc

SEQ ID NO: 1209833 - RNA, 15 nt, Human
cgaaaacguggcugc

SEQ ID NO: 1209834 - RNA, 23 nt, Human
ccuuugacgccaucccagcccca

SEQ ID NO: 1209835 - RNA, 22 nt, Human
ccuuugacgccaucccagcccc

SEQ ID NO: 1209836 - RNA, 21 nt, Human
ccuuugacgccaucccagccc

SEQ ID NO: 1209837 - RNA, 20 nt, Human
ccuuugacgccaucccagcc

SEQ ID NO: 1209838 - RNA, 22 nt, Human
cgaaagggacuuggaagcuccg

SEQ ID NO: 1209839 - RNA, 19 nt, Human
cgaaagggacuuggaagcu

SEQ ID NO: 1209840 - RNA, 20 nt, Human
cgaaaggaugaaagugacca

SEQ ID NO: 1209841 - RNA, 12 nt, Human
cgaaagaacagu

SEQ ID NO: 1209842 - RNA, 21 nt, Human
cgaaagaacaguccauugaaa

SEQ ID NO: 1209843 - RNA, 14 nt, Human
cgaacuggcugcaa

SEQ ID NO: 1209844 - RNA, 12 nt, Human
cgaacuggcugc

SEQ ID NO: 1209845 - RNA, 17 nt, Human
cgccaugcuccuggccc

SEQ ID NO: 1209846 - RNA, 18 nt, Human
cgagcccugguggcagug

SEQ ID NO: 1209847 - RNA, 16 nt, Human
cgagcccugguggcag

SEQ ID NO: 1209848 - RNA, 15 nt, Human
cgagcccugguggca

SEQ ID NO: 1209849 - RNA, 18 nt, Human
cgagcaugccuggauggg

SEQ ID NO: 1209850 - RNA, 22 nt, Human
cgccaggggaaaaucagccugc

SEQ ID NO: 1209851 - RNA, 22 nt, Human
cgccagauucuuuccugaggcu

SEQ ID NO: 1209852 - RNA, 21 nt, Human
cgccagauucuuuccugaggc

SEQ ID NO: 1209853 - RNA, 20 nt, Human
cgccagauucuuuccugagg

SEQ ID NO: 1209854 - RNA, 19 nt, Human
cgccagauucuuuccugag

SEQ ID NO: 1209855 - RNA, 15 nt, Human
cgcagcccugcagag

SEQ ID NO: 1209856 - RNA, 16 nt, Human
cgcagacaggaccagg

SEQ ID NO: 1209857 - RNA, 15 nt, Human
cgcagacaggaccag

SEQ ID NO: 1209858 - RNA, 14 nt, Human
cgcagcccugcaga

SEQ ID NO: 1209859 - RNA, 14 nt, Human
cgagcaugccugga

SEQ ID NO: 1209860 - RNA, 18 nt, Human
ccuuugacgccaucccag

SEQ ID NO: 1209861 - RNA, 17 nt, Human
ccuuugacgccauccca

SEQ ID NO: 1209862 - RNA, 16 nt, Human
ccuuugacgccauccc

SEQ ID NO: 1209863 - RNA, 22 nt, Human
ccuugguuaggcauugugggaa

SEQ ID NO: 1209864 - RNA, 21 nt, Human
ccuugguuaggcauuguggga

SEQ ID NO: 1209865 - RNA, 22 nt, Human
ccuuggugucgggcaugacacg

SEQ ID NO: 1209866 - RNA, 20 nt, Human
ccuugaguugauucagcucu

SEQ ID NO: 1209867 - RNA, 13 nt, Human
ccuugacucuuuc

SEQ ID NO: 1209868 - RNA, 23 nt, Human
ccuugaccauucuccaccugcca

SEQ ID NO: 1209869 - RNA, 19 nt, Human
ccuucuccuucaccuuugu

SEQ ID NO: 1209870 - RNA, 15 nt, Human
ccuucuccuucaccu

SEQ ID NO: 1209871 - RNA, 15 nt, Human
ccuucggcgccuuaa

SEQ ID NO: 1209872 - RNA, 22 nt, Human
ccuucauuuggcauuccccacu

SEQ ID NO: 1209873 - RNA, 14 nt, Human
ccuucagugccaaa

SEQ ID NO: 1209874 - RNA, 11 nt, Human
ccuucagugcc

SEQ ID NO: 1209875 - RNA, 20 nt, Human
ccuucaccuuuguccccacc

SEQ ID NO: 1209876 - RNA, 19 nt, Human
ccuucaccuuuguccccac

SEQ ID NO: 1209877 - RNA, 14 nt, Human
ccuuagacaguccc

SEQ ID NO: 1209878 - RNA, 17 nt, Human
ccuucacagaugggugc

SEQ ID NO: 1209879 - RNA, 21 nt, Human
ccuucaccuuuguccccaccg

SEQ ID NO: 1209880 - RNA, 17 nt, Human
ccuugaaugaugccaug

SEQ ID NO: 1209881 - RNA, 20 nt, Human
ccuuacacaaugguuuucuu

SEQ ID NO: 1209882 - RNA, 14 nt, Human
ccuuacacaauggu

SEQ ID NO: 1209883 - RNA, 18 nt, Human
ccuuagaagucacacagu

SEQ ID NO: 1209884 - RNA, 17 nt, Human
ccuuagaagucacacag

SEQ ID NO: 1209885 - RNA, 19 nt, Human
ccuuaccugccaggaagcc

SEQ ID NO: 1209886 - RNA, 19 nt, Human
ccuuacccucauguucuua

SEQ ID NO: 1209887 - RNA, 15 nt, Human
ccuuacccucauguu

SEQ ID NO: 1209888 - RNA, 20 nt, Human
ccuuaccagcagagcaccuu

SEQ ID NO: 1209889 - RNA, 13 nt, Human
ccuuaccagcaga

SEQ ID NO: 1209890 - RNA, 21 nt, Human
ccugugugugcgccuacagga

SEQ ID NO: 1209891 - RNA, 20 nt, Human
ccugugugugcgccuacagg

SEQ ID NO: 1209892 - RNA, 22 nt, Human
ccugugucuugcaauggcagcc

SEQ ID NO: 1209893 - RNA, 21 nt, Human
ccugugucuugcaauggcagc

SEQ ID NO: 1209894 - RNA, 19 nt, Human
ccugugucuugcaauggca

SEQ ID NO: 1209895 - RNA, 17 nt, Human
ccugugucuugcaaugg

SEQ ID NO: 1209896 - RNA, 18 nt, Human
ccuguuuguuucugaaag

SEQ ID NO: 1209897 - RNA, 14 nt, Human
ccuguuuguuucug

SEQ ID NO: 1209898 - RNA, 16 nt, Human
ccuguuucugcagcca

SEQ ID NO: 1209899 - RNA, 12 nt, Human
ccuucagugccu

SEQ ID NO: 1209900 - RNA, 16 nt, Human
ccugagcuuucugcua

SEQ ID NO: 1209901 - RNA, 21 nt, Human
ccugaggcccagagggccugc

SEQ ID NO: 1209902 - RNA, 14 nt, Human
ccugagcuuucugc

SEQ ID NO: 1209903 - RNA, 12 nt, Human
ccugagccagau

SEQ ID NO: 1209904 - RNA, 17 nt, Human
ccugccaggaagccagc

SEQ ID NO: 1209905 - RNA, 15 nt, Human
ccugccaggaagcca

SEQ ID NO: 1209906 - RNA, 14 nt, Human
ccugccaggaagcc

SEQ ID NO: 1209907 - RNA, 13 nt, Human
ccugccaggaagc

SEQ ID NO: 1209908 - RNA, 22 nt, Human
ccugccagggacagagggggug

SEQ ID NO: 1209909 - RNA, 16 nt, Human
ccugccagggacagag

SEQ ID NO: 1209910 - RNA, 15 nt, Human
ccugccagggacaga

SEQ ID NO: 1209911 - RNA, 14 nt, Human
ccugccagggacag

SEQ ID NO: 1209912 - RNA, 13 nt, Human
ccugccagggaca

SEQ ID NO: 1209913 - RNA, 12 nt, Human
ccugccagggac

SEQ ID NO: 1209914 - RNA, 11 nt, Human
ccugccaggga

SEQ ID NO: 1209915 - RNA, 16 nt, Human
ccugccaggcauggug

SEQ ID NO: 1209916 - RNA, 23 nt, Human
ccugccaggaagccagcaggcuc

SEQ ID NO: 1209917 - RNA, 22 nt, Human
ccugccaggaagccagcaggcu

SEQ ID NO: 1209918 - RNA, 21 nt, Human
ccugccaggaagccagcaggc

SEQ ID NO: 1209919 - RNA, 19 nt, Human
ccugccaggaagccagcag

SEQ ID NO: 1209920 - RNA, 18 nt, Human
ccugccaggaagccagca

SEQ ID NO: 1209921 - RNA, 22 nt, Human
ccugcaaccugauugugucucu

SEQ ID NO: 1209922 - RNA, 19 nt, Human
ccugauugugucucuuggu

SEQ ID NO: 1209923 - RNA, 17 nt, Human
ccugauugugucucuug

SEQ ID NO: 1209924 - RNA, 15 nt, Human
ccugauugugucucu

SEQ ID NO: 1209925 - RNA, 14 nt, Human
ccugaggcccuucu

SEQ ID NO: 1209926 - RNA, 22 nt, Human
ccugaugcuucuucagagacuc

SEQ ID NO: 1209927 - RNA, 21 nt, Human
ccugaugcuucuucagagacu

SEQ ID NO: 1209928 - RNA, 20 nt, Human
ccugaugcuucuucagagac

SEQ ID NO: 1209929 - RNA, 12 nt, Human
ccugaggcccuu

SEQ ID NO: 1209930 - RNA, 11 nt, Human
ccugaggcccu

SEQ ID NO: 1209931 - RNA, 14 nt, Human
ccugcaagaacaag

SEQ ID NO: 1209932 - RNA, 20 nt, Human
ccuggccagaugcaccagcc

SEQ ID NO: 1209933 - RNA, 15 nt, Human
ccuggccagaugcac

SEQ ID NO: 1209934 - RNA, 14 nt, Human
ccuggcagccccug

SEQ ID NO: 1209935 - RNA, 13 nt, Human
ccuggcagccccu

SEQ ID NO: 1209936 - RNA, 12 nt, Human
ccuggcagcccc

SEQ ID NO: 1209937 - RNA, 22 nt, Human
ccuggcacuauaauguaagcuc

SEQ ID NO: 1209938 - RNA, 23 nt, Human
ccuggcacccggccccugcuggu

SEQ ID NO: 1209939 - RNA, 22 nt, Human
ccuggcacccggccccugcugg

SEQ ID NO: 1209940 - RNA, 18 nt, Human
ccuggaauauauaaccag

SEQ ID NO: 1209941 - RNA, 23 nt, Human
ccugccuguugggccaggagccu

SEQ ID NO: 1209942 - RNA, 11 nt, Human
ccugccucagc

SEQ ID NO: 1209943 - RNA, 22 nt, Human
ccugccccucaacucuccucca

SEQ ID NO: 1209944 - RNA, 17 nt, Human
ccugcggugcuaucucc

SEQ ID NO: 1209945 - RNA, 16 nt, Human
ccugcggugcuaucuc

SEQ ID NO: 1209946 - RNA, 14 nt, Human
ccugcuucaaauau

SEQ ID NO: 1209947 - RNA, 21 nt, Human
ccugcucuccgaccagacacc

SEQ ID NO: 1209948 - RNA, 22 nt, Human
ccugcggugcuaucucccccag

SEQ ID NO: 1209949 - RNA, 22 nt, Human
ccugcucuccgaccagacaccu

SEQ ID NO: 1209950 - RNA, 16 nt, Human
ccucuaggaggucucu

SEQ ID NO: 1209951 - RNA, 18 nt, Human
ccucgguguggagaagcg

SEQ ID NO: 1209952 - RNA, 14 nt, Human
ccucgguguggaga

SEQ ID NO: 1209953 - RNA, 16 nt, Human
ccucggugccuuccuc

SEQ ID NO: 1209954 - RNA, 14 nt, Human
ccuccugggcuaag

SEQ ID NO: 1209955 - RNA, 23 nt, Human
ccuccugccucgaacuggcugca

SEQ ID NO: 1209956 - RNA, 21 nt, Human
ccucccgaguagcugggacua

SEQ ID NO: 1209957 - RNA, 20 nt, Human
ccucccgaguagcugggacu

SEQ ID NO: 1209958 - RNA, 10 nt, Human
ccucccuccc

SEQ ID NO: 1209959 - RNA, 17 nt, Human
ccucccgaauagcuggg

SEQ ID NO: 1209960 - RNA, 16 nt, Human
ccucccaaagugcugg

SEQ ID NO: 1209961 - RNA, 15 nt, Human
ccucccaaagugcug

SEQ ID NO: 1209962 - RNA, 23 nt, Human
ccuccaugugggcuaguugggcu

SEQ ID NO: 1209963 - RNA, 21 nt, Human
ccuccaggugcacaagcucca

SEQ ID NO: 1209964 - RNA, 19 nt, Human
ccuccaggugcacaagcuc

SEQ ID NO: 1209965 - RNA, 22 nt, Human
ccuccaggugcacaagcuccaa

SEQ ID NO: 1209966 - RNA, 20 nt, Human
ccucauccucauacccaccc

SEQ ID NO: 1209967 - RNA, 13 nt, Human
ccucauccucaua

SEQ ID NO: 1209968 - RNA, 14 nt, Human
ccucaucaccaacg

SEQ ID NO: 1209969 - RNA, 13 nt, Human
ccucaucaccaac

SEQ ID NO: 1209970 - RNA, 22 nt, Human
ccucauaguaugguggcugggu

SEQ ID NO: 1209971 - RNA, 21 nt, Human
ccucauaguaugguggcuggg

SEQ ID NO: 1209972 - RNA, 20 nt, Human
ccucauaguaugguggcugg

SEQ ID NO: 1209973 - RNA, 13 nt, Human
ccucauacccacc

SEQ ID NO: 1209974 - RNA, 11 nt, Human
ccucagugcca

SEQ ID NO: 1209975 - RNA, 20 nt, Human
ccucagucuggcccuuccuu

SEQ ID NO: 1209976 - RNA, 18 nt, Human
ccggcuggccuggccccu

SEQ ID NO: 1209977 - RNA, 17 nt, Human
ccggcuggccuggcccc

SEQ ID NO: 1209978 - RNA, 23 nt, Human
ccgcuuucuacccagcgagcccu

SEQ ID NO: 1209979 - RNA, 19 nt, Human
ccgcuuucuacccagcgag

SEQ ID NO: 1209980 - RNA, 12 nt, Human
ccgcuuucuacc

SEQ ID NO: 1209981 - RNA, 13 nt, Human
ccgggcucugccu

SEQ ID NO: 1209982 - RNA, 20 nt, Human
ccgggcgcgguggcucacgc

SEQ ID NO: 1209983 - RNA, 14 nt, Human
ccgaggccuucucu

SEQ ID NO: 1209984 - RNA, 20 nt, Human
cccugguggcagcucaccuc

SEQ ID NO: 1209985 - RNA, 20 nt, Human
ccgaguagcugggacuacag

SEQ ID NO: 1209986 - RNA, 17 nt, Human
ccgaguagcugggacua

SEQ ID NO: 1209987 - RNA, 17 nt, Human
ccgaggccuucucugaa

SEQ ID NO: 1209988 - RNA, 19 nt, Human
ccgcacugggcuuggggac

SEQ ID NO: 1209989 - RNA, 14 nt, Human
ccgcacugggcuug

SEQ ID NO: 1209990 - RNA, 21 nt, Human
ccgcuaagagggagggagggc

SEQ ID NO: 1209991 - RNA, 23 nt, Human
ccgcuaagagggagggagggcuc

SEQ ID NO: 1209992 - RNA, 23 nt, Human
ccuaguuccaccaucaagccacc

SEQ ID NO: 1209993 - RNA, 21 nt, Human
ccuaguuccaccaucaagcca

SEQ ID NO: 1209994 - RNA, 13 nt, Human
ccuaguuccacca

SEQ ID NO: 1209995 - RNA, 18 nt, Human
ccuauauuguuuucagug

SEQ ID NO: 1209996 - RNA, 22 nt, Human
ccuauauuguuuucaguguaca

SEQ ID NO: 1209997 - RNA, 15 nt, Human
ccuaaaauucagugg

SEQ ID NO: 1209998 - RNA, 13 nt, Human
cccacaggaucag

SEQ ID NO: 1209999 - RNA, 23 nt, Human
cccaaugcacuuuguucuggcuc

SEQ ID NO: 1210000 - RNA, 20 nt, Human
cccaaugcacuuuguucugg

SEQ ID NO: 1210001 - RNA, 16 nt, Human
cccaaugcacuuuguu

SEQ ID NO: 1210002 - RNA, 20 nt, Human
cccaccgcagacaggaccag

SEQ ID NO: 1210003 - RNA, 18 nt, Human
cccaccaucaugucuggc

SEQ ID NO: 1210004 - RNA, 19 nt, Human
cccaccgcagacaggacca

SEQ ID NO: 1210005 - RNA, 22 nt, Human
cccaccucucucacuccuugaa

SEQ ID NO: 1210006 - RNA, 23 nt, Human
cccacuugagaauuacccuuuug

SEQ ID NO: 1210007 - RNA, 21 nt, Human
cccacgcuggagugcagugag

SEQ ID NO: 1210008 - RNA, 20 nt, Human
cccacgcuggagugcaguga

SEQ ID NO: 1210009 - RNA, 19 nt, Human
cccacgcuggagugcagug

SEQ ID NO: 1210010 - RNA, 21 nt, Human
cccacgacugcccggcagggu

SEQ ID NO: 1210011 - RNA, 20 nt, Human
cccacgacugcccggcaggg

SEQ ID NO: 1210012 - RNA, 21 nt, Human
cccaccuggccucugcacucc

SEQ ID NO: 1210013 - RNA, 19 nt, Human
cccaccuggccucugcacu

SEQ ID NO: 1210014 - RNA, 17 nt, Human
cccaccuggccucugca

SEQ ID NO: 1210015 - RNA, 23 nt, Human
cccugaggcccagagggccugca

SEQ ID NO: 1210016 - RNA, 20 nt, Human
cccugaggcccagagggccu

SEQ ID NO: 1210017 - RNA, 19 nt, Human
cccugaggcccagagggcc

SEQ ID NO: 1210018 - RNA, 18 nt, Human
cccugaggcccagagggc

SEQ ID NO: 1210019 - RNA, 17 nt, Human
cccugaggcccagaggg

SEQ ID NO: 1210020 - RNA, 16 nt, Human
cccugaggcccagagg

SEQ ID NO: 1210021 - RNA, 15 nt, Human
cccugaggcccagag

SEQ ID NO: 1210022 - RNA, 14 nt, Human
cccugaggcccaga

SEQ ID NO: 1210023 - RNA, 16 nt, Human
cccugaaagcccugag

SEQ ID NO: 1210024 - RNA, 15 nt, Human
cccugaaagcccuga

SEQ ID NO: 1210025 - RNA, 16 nt, Human
cccucuggggcuguuc

SEQ ID NO: 1210026 - RNA, 22 nt, Human
cccugcacuugcagacucuaca

SEQ ID NO: 1210027 - RNA, 19 nt, Human
cccugcacuugcagacucu

SEQ ID NO: 1210028 - RNA, 12 nt, Human
cccugcacuugc

SEQ ID NO: 1210029 - RNA, 16 nt, Human
cccugcaaccugauug

SEQ ID NO: 1210030 - RNA, 17 nt, Human
cccugcccaccuggccu

SEQ ID NO: 1210031 - RNA, 14 nt, Human
cccugcccaccugg

SEQ ID NO: 1210032 - RNA, 21 nt, Human
cccugcuggguguggcgcagc

SEQ ID NO: 1210033 - RNA, 16 nt, Human
cccugcuggguguggc

SEQ ID NO: 1210034 - RNA, 20 nt, Human
cccugcccaccuggccucug

SEQ ID NO: 1210035 - RNA, 18 nt, Human
cccugcccaccuggccuc

SEQ ID NO: 1210036 - RNA, 22 nt, Human
cccugcuggguguggcgcagca

SEQ ID NO: 1210037 - RNA, 17 nt, Human
cccugguggcagcucac

SEQ ID NO: 1210038 - RNA, 16 nt, Human
cccugguggcagcuca

SEQ ID NO: 1210039 - RNA, 15 nt, Human
cccugguggcagcuc

SEQ ID NO: 1210040 - RNA, 21 nt, Human
cccuggugaccagcaccaucu

SEQ ID NO: 1210041 - RNA, 15 nt, Human
cccgggcucugccuc

SEQ ID NO: 1210042 - RNA, 14 nt, Human
cccgggcucugccu

SEQ ID NO: 1210043 - RNA, 12 nt, Human
cccgggcucugc

SEQ ID NO: 1210044 - RNA, 20 nt, Human
cccgcugucagccauuccug

SEQ ID NO: 1210045 - RNA, 19 nt, Human
cccgcugucagccauuccu

SEQ ID NO: 1210046 - RNA, 22 nt, Human
cccgaguagcugggacuacagg

SEQ ID NO: 1210047 - RNA, 21 nt, Human
cccgaguagcugggacuacag

SEQ ID NO: 1210048 - RNA, 18 nt, Human
cccgaguagcugggacua

SEQ ID NO: 1210049 - RNA, 17 nt, Human
cccgaguagcugggacu

SEQ ID NO: 1210050 - RNA, 16 nt, Human
cccgaguagcugggac

SEQ ID NO: 1210051 - RNA, 15 nt, Human
cccgaguagcuggga

SEQ ID NO: 1210052 - RNA, 14 nt, Human
cccgaguagcuggg

SEQ ID NO: 1210053 - RNA, 13 nt, Human
cccgaguagcugg

SEQ ID NO: 1210054 - RNA, 18 nt, Human
cccagagggccugcaagg

SEQ ID NO: 1210055 - RNA, 15 nt, Human
cccagagggccugca

SEQ ID NO: 1210056 - RNA, 14 nt, Human
cccagagggccugc

SEQ ID NO: 1210057 - RNA, 20 nt, Human
cccuacaguugaaaaacagc

SEQ ID NO: 1210058 - RNA, 16 nt, Human
cccgggcucugccucc

SEQ ID NO: 1210059 - RNA, 17 nt, Human
ccauguuggccaggcug

SEQ ID NO: 1210060 - RNA, 18 nt, Human
ccauguuggccaggcugg

SEQ ID NO: 1210061 - RNA, 20 nt, Human
cccaaaacucuccucugcug

SEQ ID NO: 1210062 - RNA, 18 nt, Human
cccaaaacucuccucugc

SEQ ID NO: 1210063 - RNA, 16 nt, Human
cccaaaacucuccucu

SEQ ID NO: 1210064 - RNA, 15 nt, Human
cccaaagugcuggga

SEQ ID NO: 1210065 - RNA, 13 nt, Human
cccaaagugcugg

SEQ ID NO: 1210066 - RNA, 20 nt, Human
ccauucuccaccugccaggg

SEQ ID NO: 1210067 - RNA, 19 nt, Human
ccauucuccaccugccagg

SEQ ID NO: 1210068 - RNA, 14 nt, Human
ccauuuguguuuau

SEQ ID NO: 1210069 - RNA, 23 nt, Human
cccaaauggaaaugggcagagca

SEQ ID NO: 1210070 - RNA, 22 nt, Human
cccaaauggaaaugggcagagc

SEQ ID NO: 1210071 - RNA, 18 nt, Human
cccaaauggaaaugggca

SEQ ID NO: 1210072 - RNA, 16 nt, Human
cccaaagugcugggau

SEQ ID NO: 1210073 - RNA, 18 nt, Human
ccauguuuuguuuacggu

SEQ ID NO: 1210074 - RNA, 19 nt, Human
ccaggagccccgaggccuu

SEQ ID NO: 1210075 - RNA, 12 nt, Human
ccaggagccucc

SEQ ID NO: 1210076 - RNA, 20 nt, Human
ccaggagccccgaggccuuc

SEQ ID NO: 1210077 - RNA, 22 nt, Human
ccaggcauuccccaggaggcca

SEQ ID NO: 1210078 - RNA, 21 nt, Human
ccaggcauuccccaggaggcc

SEQ ID NO: 1210079 - RNA, 19 nt, Human
ccaggcauuccccaggagg

SEQ ID NO: 1210080 - RNA, 18 nt, Human
ccaggcauuccccaggag

SEQ ID NO: 1210081 - RNA, 21 nt, Human
ccaggcccucugcccacuccc

SEQ ID NO: 1210082 - RNA, 23 nt, Human
ccaggcccucugcccacucccug

SEQ ID NO: 1210083 - RNA, 22 nt, Human
ccaggcccucugcccacucccu

SEQ ID NO: 1210084 - RNA, 17 nt, Human
ccaggcuuagucacuga

SEQ ID NO: 1210085 - RNA, 21 nt, Human
ccagggacagaggggguggcc

SEQ ID NO: 1210086 - RNA, 15 nt, Human
ccagggacagagggg

SEQ ID NO: 1210087 - RNA, 20 nt, Human
ccaggcuuagucacugagac

SEQ ID NO: 1210088 - RNA, 22 nt, Human
ccagggacagaggggguggccu

SEQ ID NO: 1210089 - RNA, 20 nt, Human
ccagucuggaaugcaguggu

SEQ ID NO: 1210090 - RNA, 19 nt, Human
ccagucuggaaugcagugg

SEQ ID NO: 1210091 - RNA, 18 nt, Human
ccagucuggaaugcagug

SEQ ID NO: 1210092 - RNA, 17 nt, Human
ccagguuuuuggucuga

SEQ ID NO: 1210093 - RNA, 24 nt, Human
ccaggugcacaagcuccaagcucc

SEQ ID NO: 1210094 - RNA, 20 nt, Human
ccaggugcacaagcuccaag

SEQ ID NO: 1210095 - RNA, 19 nt, Human
ccaggugcacaagcuccaa

SEQ ID NO: 1210096 - RNA, 13 nt, Human
ccaucuacccucc

SEQ ID NO: 1210097 - RNA, 20 nt, Human
ccagugccgagaaggaagcc

SEQ ID NO: 1210098 - RNA, 16 nt, Human
ccagugaggcucugcc

SEQ ID NO: 1210099 - RNA, 15 nt, Human
ccagugaggcucugc

SEQ ID NO: 1210100 - RNA, 14 nt, Human
ccagugaggcucug

SEQ ID NO: 1210101 - RNA, 17 nt, Human
ccagugaggcucugccc

SEQ ID NO: 1210102 - RNA, 22 nt, Human
ccaguguuguggauuuaacaga

SEQ ID NO: 1210103 - RNA, 23 nt, Human
ccauauucuguuggccaguguga

SEQ ID NO: 1210104 - RNA, 15 nt, Human
ccagccaaagccucc

SEQ ID NO: 1210105 - RNA, 19 nt, Human
ccagccaaagccuccucca

SEQ ID NO: 1210106 - RNA, 18 nt, Human
ccagccaaagccuccucc

SEQ ID NO: 1210107 - RNA, 19 nt, Human
ccagccgccaugcuccugg

SEQ ID NO: 1210108 - RNA, 18 nt, Human
ccagccgccaugcuccug

SEQ ID NO: 1210109 - RNA, 14 nt, Human
ccagccgccaugcu

SEQ ID NO: 1210110 - RNA, 15 nt, Human
ccagccccagugccc

SEQ ID NO: 1210111 - RNA, 13 nt, Human
ccagccccagugc

SEQ ID NO: 1210112 - RNA, 23 nt, Human
ccagccccaaaacucuccucugc

SEQ ID NO: 1210113 - RNA, 16 nt, Human
ccagccccagugccca

SEQ ID NO: 1210114 - RNA, 17 nt, Human
ccagcccuuagcaggga

SEQ ID NO: 1210115 - RNA, 16 nt, Human
ccagcccuuagcaggg

SEQ ID NO: 1210116 - RNA, 15 nt, Human
ccagcaagugagagc

SEQ ID NO: 1210117 - RNA, 14 nt, Human
ccagauuucacucu

SEQ ID NO: 1210118 - RNA, 15 nt, Human
ccagauuucacucuc

SEQ ID NO: 1210119 - RNA, 22 nt, Human
ccagcaagugagagcugggugu

SEQ ID NO: 1210120 - RNA, 21 nt, Human
ccagcaagugagagcugggug

SEQ ID NO: 1210121 - RNA, 16 nt, Human
ccagcaagugagagcu

SEQ ID NO: 1210122 - RNA, 20 nt, Human
ccagacaccuugacagggca

SEQ ID NO: 1210123 - RNA, 14 nt, Human
ccagagaggguggu

SEQ ID NO: 1210124 - RNA, 23 nt, Human
ccagagaggguggugaccucugc

SEQ ID NO: 1210125 - RNA, 21 nt, Human
ccagagaggguggugaccucu

SEQ ID NO: 1210126 - RNA, 19 nt, Human
ccagacaccuugacagggc

SEQ ID NO: 1210127 - RNA, 17 nt, Human
ccagacaccuugacagg

SEQ ID NO: 1210128 - RNA, 21 nt, Human
ccagagggagugacagaggca

SEQ ID NO: 1210129 - RNA, 20 nt, Human
ccagagggagugacagaggc

SEQ ID NO: 1210130 - RNA, 19 nt, Human
ccagagggagugacagagg

SEQ ID NO: 1210131 - RNA, 18 nt, Human
ccagagggagugacagag

SEQ ID NO: 1210132 - RNA, 17 nt, Human
ccagagggagugacaga

SEQ ID NO: 1210133 - RNA, 16 nt, Human
ccagagggagugacag

SEQ ID NO: 1210134 - RNA, 22 nt, Human
ccagaggagagaggacccccug

SEQ ID NO: 1210135 - RNA, 21 nt, Human
ccagaggagagaggacccccu

SEQ ID NO: 1210136 - RNA, 19 nt, Human
ccagagcugccaccugccu

SEQ ID NO: 1210137 - RNA, 16 nt, Human
ccagagcugccaccug

SEQ ID NO: 1210138 - RNA, 15 nt, Human
ccagagcugccaccu

SEQ ID NO: 1210139 - RNA, 14 nt, Human
ccagagcugccacc

SEQ ID NO: 1210140 - RNA, 13 nt, Human
ccagagcugccac

SEQ ID NO: 1210141 - RNA, 12 nt, Human
ccagagcugcca

SEQ ID NO: 1210142 - RNA, 11 nt, Human
ccagagcugcc

SEQ ID NO: 1210143 - RNA, 12 nt, Human
ccagauuucacu

SEQ ID NO: 1210144 - RNA, 21 nt, Human
ccagauugcaacaggcugggc

SEQ ID NO: 1210145 - RNA, 20 nt, Human
ccagauugcaacaggcuggg

SEQ ID NO: 1210146 - RNA, 19 nt, Human
ccagauugcaacaggcugg

SEQ ID NO: 1210147 - RNA, 23 nt, Human
ccagauucuuuccugaggcuggg

SEQ ID NO: 1210148 - RNA, 22 nt, Human
ccagauucuuuccugaggcugg

SEQ ID NO: 1210149 - RNA, 21 nt, Human
ccagauucuuuccugaggcug

SEQ ID NO: 1210150 - RNA, 20 nt, Human
ccagauucuuuccugaggcu

SEQ ID NO: 1210151 - RNA, 19 nt, Human
ccagauucuuuccugaggc

SEQ ID NO: 1210152 - RNA, 18 nt, Human
ccagauucuuuccugagg

SEQ ID NO: 1210153 - RNA, 16 nt, Human
ccagagggccugcaag

SEQ ID NO: 1210154 - RNA, 15 nt, Human
ccagagggccugcaa

SEQ ID NO: 1210155 - RNA, 13 nt, Human
ccagagggccugc

SEQ ID NO: 1210156 - RNA, 23 nt, Human
ccagagggagugacagaggcagc

SEQ ID NO: 1210157 - RNA, 22 nt, Human
ccagagggagugacagaggcag

SEQ ID NO: 1210158 - RNA, 13 nt, Human
ccacucccugcaa

SEQ ID NO: 1210159 - RNA, 12 nt, Human
ccacucccugca

SEQ ID NO: 1210160 - RNA, 23 nt, Human
ccacuacggaauaguuggcuagg

SEQ ID NO: 1210161 - RNA, 22 nt, Human
ccacuacggaauaguuggcuag

SEQ ID NO: 1210162 - RNA, 18 nt, Human
ccacuacauucuguuaau

SEQ ID NO: 1210163 - RNA, 23 nt, Human
ccacugcacuccagccuggguga

SEQ ID NO: 1210164 - RNA, 20 nt, Human
ccacugcacuccagccuggg

SEQ ID NO: 1210165 - RNA, 19 nt, Human
ccacugcacuccagccugg

SEQ ID NO: 1210166 - RNA, 17 nt, Human
ccacucccugcaaccug

SEQ ID NO: 1210167 - RNA, 15 nt, Human
ccacucccugcaacc

SEQ ID NO: 1210168 - RNA, 11 nt, Human
ccacugcucug

SEQ ID NO: 1210169 - RNA, 16 nt, Human
ccacugcgaccacaag

SEQ ID NO: 1210170 - RNA, 13 nt, Human
ccacguuucuaaa

SEQ ID NO: 1210171 - RNA, 17 nt, Human
ccaccucccacaaagga

SEQ ID NO: 1210172 - RNA, 20 nt, Human
ccaccugccuguugggccag

SEQ ID NO: 1210173 - RNA, 17 nt, Human
ccaccugccuguugggc

SEQ ID NO: 1210174 - RNA, 12 nt, Human
ccaccugccagg

SEQ ID NO: 1210175 - RNA, 15 nt, Human
ccacggccaggccag

SEQ ID NO: 1210176 - RNA, 14 nt, Human
ccacggccaggcca

SEQ ID NO: 1210177 - RNA, 13 nt, Human
ccacggccaggcc

SEQ ID NO: 1210178 - RNA, 12 nt, Human
ccacggccaggc

SEQ ID NO: 1210179 - RNA, 18 nt, Human
ccaccuggccucugcacu

SEQ ID NO: 1210180 - RNA, 17 nt, Human
ccaccuggccucugcac

SEQ ID NO: 1210181 - RNA, 16 nt, Human
ccaccuggccucugca

SEQ ID NO: 1210182 - RNA, 15 nt, Human
ccaccuggccucugc

SEQ ID NO: 1210183 - RNA, 22 nt, Human
ccaccugcggugcuaucucccc

SEQ ID NO: 1210184 - RNA, 19 nt, Human
ccaccccucaacaccucug

SEQ ID NO: 1210185 - RNA, 15 nt, Human
ccaccucagccuccc

SEQ ID NO: 1210186 - RNA, 14 nt, Human
ccaccucagccucc

SEQ ID NO: 1210187 - RNA, 13 nt, Human
ccaccucagccuc

SEQ ID NO: 1210188 - RNA, 12 nt, Human
ccaccucagccu

SEQ ID NO: 1210189 - RNA, 18 nt, Human
ccacccugaaagcccuga

SEQ ID NO: 1210190 - RNA, 17 nt, Human
ccacccugaaagcccug

SEQ ID NO: 1210191 - RNA, 16 nt, Human
ccacccugaaagcccu

SEQ ID NO: 1210192 - RNA, 14 nt, Human
ccacccaggagccc

SEQ ID NO: 1210193 - RNA, 12 nt, Human
ccacccaggagc

SEQ ID NO: 1210194 - RNA, 12 nt, Human
ccacacccagcc

SEQ ID NO: 1210195 - RNA, 15 nt, Human
ccacacccagcccac

SEQ ID NO: 1210196 - RNA, 14 nt, Human
ccacacccagccca

SEQ ID NO: 1210197 - RNA, 13 nt, Human
ccacacccagccc

SEQ ID NO: 1210198 - RNA, 14 nt, Human
ccacaucuugcucu

SEQ ID NO: 1210199 - RNA, 18 nt, Human
ccaccaacauacucccau

SEQ ID NO: 1210200 - RNA, 14 nt, Human
ccaccaacauacuc

SEQ ID NO: 1210201 - RNA, 23 nt, Human
ccacaucuugcucugcugacaga

SEQ ID NO: 1210202 - RNA, 22 nt, Human
ccacaucuugcucugcugacag

SEQ ID NO: 1210203 - RNA, 17 nt, Human
ccacaucuugcucugcu

SEQ ID NO: 1210204 - RNA, 16 nt, Human
ccacaucuugcucugc

SEQ ID NO: 1210205 - RNA, 20 nt, Human
ccaccaacauacucccaucu

SEQ ID NO: 1210206 - RNA, 16 nt, Human
ccaccacacccagccc

SEQ ID NO: 1210207 - RNA, 14 nt, Human
ccaccacacccagc

SEQ ID NO: 1210208 - RNA, 19 nt, Human
ccacccaagggccuggccu

SEQ ID NO: 1210209 - RNA, 17 nt, Human
ccacccaagggccuggc

SEQ ID NO: 1210210 - RNA, 16 nt, Human
ccacccaagggccugg

SEQ ID NO: 1210211 - RNA, 17 nt, Human
ccaccacacccagccca

SEQ ID NO: 1210212 - RNA, 16 nt, Human
ccacccaccucagccu

SEQ ID NO: 1210213 - RNA, 15 nt, Human
ccacccaccucagcc

SEQ ID NO: 1210214 - RNA, 14 nt, Human
ccacccaccucagc

SEQ ID NO: 1210215 - RNA, 13 nt, Human
ccacccaccucag

SEQ ID NO: 1210216 - RNA, 22 nt, Human
ccacccaagggccuggccugag

SEQ ID NO: 1210217 - RNA, 21 nt, Human
ccacccaagggccuggccuga

SEQ ID NO: 1210218 - RNA, 20 nt, Human
ccacccaagggccuggccug

SEQ ID NO: 1210219 - RNA, 21 nt, Human
ccacccaggagccccgaggcc

SEQ ID NO: 1210220 - RNA, 17 nt, Human
cauuccccaggaggcca

SEQ ID NO: 1210221 - RNA, 15 nt, Human
cauuccccaggaggc

SEQ ID NO: 1210222 - RNA, 13 nt, Human
cauuccccaggag

SEQ ID NO: 1210223 - RNA, 19 nt, Human
cauuccccaggaggccagc

SEQ ID NO: 1210224 - RNA, 18 nt, Human
cauuccccaggaggccag

SEQ ID NO: 1210225 - RNA, 20 nt, Human
cauuccccaggaggccagcc

SEQ ID NO: 1210226 - RNA, 23 nt, Human
cauucuucuguacgucugacagg

SEQ ID NO: 1210227 - RNA, 22 nt, Human
cauuccugaugcuucuucagag

SEQ ID NO: 1210228 - RNA, 19 nt, Human
cauuccugaugcuucuuca

SEQ ID NO: 1210229 - RNA, 16 nt, Human
cauuccugaugcuucu

SEQ ID NO: 1210230 - RNA, 14 nt, Human
cauuccugaugcuu

SEQ ID NO: 1210231 - RNA, 23 nt, Human
cauuccugaugcuucuucagaga

SEQ ID NO: 1210232 - RNA, 20 nt, Human
cauucugccugcccaggccc

SEQ ID NO: 1210233 - RNA, 19 nt, Human
cauucugccugcccaggcc

SEQ ID NO: 1210234 - RNA, 18 nt, Human
cauucugccugcccaggc

SEQ ID NO: 1210235 - RNA, 17 nt, Human
cauucugccugcccagg

SEQ ID NO: 1210236 - RNA, 16 nt, Human
cauucugccugcccag

SEQ ID NO: 1210237 - RNA, 15 nt, Human
cauucugccugccca

SEQ ID NO: 1210238 - RNA, 13 nt, Human
cauucugccugcc

SEQ ID NO: 1210239 - RNA, 12 nt, Human
cauucugccugc

SEQ ID NO: 1210240 - RNA, 17 nt, Human
cauucuguuaaucauua

SEQ ID NO: 1210241 - RNA, 18 nt, Human
cauuuuuaguagagacag

SEQ ID NO: 1210242 - RNA, 17 nt, Human
cauuuuuaguagagaca

SEQ ID NO: 1210243 - RNA, 16 nt, Human
ccaaacccuucagugc

SEQ ID NO: 1210244 - RNA, 23 nt, Human
cauuuuauuuuauuaugcaugaa

SEQ ID NO: 1210245 - RNA, 20 nt, Human
cauuugaaaauuuugauguu

SEQ ID NO: 1210246 - RNA, 19 nt, Human
cauuugaaaauuuugaugu

SEQ ID NO: 1210247 - RNA, 17 nt, Human
cauuugaaaauuuugau

SEQ ID NO: 1210248 - RNA, 15 nt, Human
cauuuaaaaaaaauc

SEQ ID NO: 1210249 - RNA, 15 nt, Human
cauugugggaagggg

SEQ ID NO: 1210250 - RNA, 18 nt, Human
cauugaccugaggcccuu

SEQ ID NO: 1210251 - RNA, 17 nt, Human
cauugaccugaggcccu

SEQ ID NO: 1210252 - RNA, 15 nt, Human
cauugaccugaggcc

SEQ ID NO: 1210253 - RNA, 12 nt, Human
caugucuggcua

SEQ ID NO: 1210254 - RNA, 21 nt, Human
caugugaugagaggaaaucac

SEQ ID NO: 1210255 - RNA, 20 nt, Human
caugugaugagaggaaauca

SEQ ID NO: 1210256 - RNA, 18 nt, Human
caugugaugagaggaaau

SEQ ID NO: 1210257 - RNA, 17 nt, Human
caugugaugagaggaaa

SEQ ID NO: 1210258 - RNA, 16 nt, Human
caugugaugagaggaa

SEQ ID NO: 1210259 - RNA, 15 nt, Human
caugugaugagagga

SEQ ID NO: 1210260 - RNA, 14 nt, Human
caugugcacaugca

SEQ ID NO: 1210261 - RNA, 19 nt, Human
cauggucggaaaacaugcu

SEQ ID NO: 1210262 - RNA, 23 nt, Human
cauggucggaaaacaugcuacac

SEQ ID NO: 1210263 - RNA, 15 nt, Human
cauguuugugauuga

SEQ ID NO: 1210264 - RNA, 20 nt, Human
cauguuuuucuucucccuca

SEQ ID NO: 1210265 - RNA, 19 nt, Human
cauguuuuucuucucccuc

SEQ ID NO: 1210266 - RNA, 14 nt, Human
cauguuugugauug

SEQ ID NO: 1210267 - RNA, 12 nt, Human
cauguuugugau

SEQ ID NO: 1210268 - RNA, 17 nt, Human
caugcugucccuuacgu

SEQ ID NO: 1210269 - RNA, 15 nt, Human
caugcugucccuuac

SEQ ID NO: 1210270 - RNA, 13 nt, Human
caugcugucccuu

SEQ ID NO: 1210271 - RNA, 17 nt, Human
caugcgggcuuccuccu

SEQ ID NO: 1210272 - RNA, 15 nt, Human
cauggacuuccacug

SEQ ID NO: 1210273 - RNA, 18 nt, Human
caugggccuccugugugu

SEQ ID NO: 1210274 - RNA, 23 nt, Human
caugaguccccuguuuguuucug

SEQ ID NO: 1210275 - RNA, 15 nt, Human
caugaguccccuguu

SEQ ID NO: 1210276 - RNA, 14 nt, Human
caugaguccccugu

SEQ ID NO: 1210277 - RNA, 13 nt, Human
caugaguccccug

SEQ ID NO: 1210278 - RNA, 23 nt, Human
caugaggaacaaggcaaggcugu

SEQ ID NO: 1210279 - RNA, 21 nt, Human
caugaggaacaaggcaaggcu

SEQ ID NO: 1210280 - RNA, 20 nt, Human
caugaggaacaaggcaaggc

SEQ ID NO: 1210281 - RNA, 17 nt, Human
caugaggaacaaggcaa

SEQ ID NO: 1210282 - RNA, 16 nt, Human
caugaggaacaaggca

SEQ ID NO: 1210283 - RNA, 23 nt, Human
caugagccucagcauccuggcac

SEQ ID NO: 1210284 - RNA, 22 nt, Human
caugagccucagcauccuggca

SEQ ID NO: 1210285 - RNA, 13 nt, Human
caugagcaucagg

SEQ ID NO: 1210286 - RNA, 21 nt, Human
caugagccucagcauccuggc

SEQ ID NO: 1210287 - RNA, 20 nt, Human
caugagccucagcauccugg

SEQ ID NO: 1210288 - RNA, 19 nt, Human
caugagccucagcauccug

SEQ ID NO: 1210289 - RNA, 18 nt, Human
caugagccucagcauccu

SEQ ID NO: 1210290 - RNA, 17 nt, Human
caugagccucagcaucc

SEQ ID NO: 1210291 - RNA, 15 nt, Human
caugagccucagcau

SEQ ID NO: 1210292 - RNA, 12 nt, Human
caugagccucag

SEQ ID NO: 1210293 - RNA, 23 nt, Human
caugagcaucaggccaggcccuc

SEQ ID NO: 1210294 - RNA, 22 nt, Human
caugagcaucaggccaggcccu

SEQ ID NO: 1210295 - RNA, 21 nt, Human
caugagcaucaggccaggccc

SEQ ID NO: 1210296 - RNA, 20 nt, Human
caugagcaucaggccaggcc

SEQ ID NO: 1210297 - RNA, 18 nt, Human
caugagcaucaggccagg

SEQ ID NO: 1210298 - RNA, 17 nt, Human
caugagcaucaggccag

SEQ ID NO: 1210299 - RNA, 16 nt, Human
caugagcaucaggcca

SEQ ID NO: 1210300 - RNA, 15 nt, Human
caugagcaucaggcc

SEQ ID NO: 1210301 - RNA, 21 nt, Human
caugaaaacacauuuuucuua

SEQ ID NO: 1210302 - RNA, 19 nt, Human
caugaaaacacauuuuucu

SEQ ID NO: 1210303 - RNA, 12 nt, Human
caugaagacaga

SEQ ID NO: 1210304 - RNA, 17 nt, Human
caugaaaacacauuuuu

SEQ ID NO: 1210305 - RNA, 16 nt, Human
caugaaaacacauuuu

SEQ ID NO: 1210306 - RNA, 15 nt, Human
caugaaaacacauuu

SEQ ID NO: 1210307 - RNA, 14 nt, Human
caugaaaacacauu

SEQ ID NO: 1210308 - RNA, 13 nt, Human
caugaaaacacau

SEQ ID NO: 1210309 - RNA, 16 nt, Human
caucucuacaaaaagc

SEQ ID NO: 1210310 - RNA, 15 nt, Human
caucucuccuccuuu

SEQ ID NO: 1210311 - RNA, 19 nt, Human
caucuugcucugcugacag

SEQ ID NO: 1210312 - RNA, 17 nt, Human
caucuugcucugcugac

SEQ ID NO: 1210313 - RNA, 16 nt, Human
caucuugcucugcuga

SEQ ID NO: 1210314 - RNA, 21 nt, Human
caucuugaauuguaaggaaug

SEQ ID NO: 1210315 - RNA, 16 nt, Human
caucuugaauuguaag

SEQ ID NO: 1210316 - RNA, 15 nt, Human
caucaugucuggcua

SEQ ID NO: 1210317 - RNA, 14 nt, Human
caucaugucuggcu

SEQ ID NO: 1210318 - RNA, 13 nt, Human
caucaugucuggc

SEQ ID NO: 1210319 - RNA, 16 nt, Human
caucauccuaagcuau

SEQ ID NO: 1210320 - RNA, 12 nt, Human
caucacccgcua

SEQ ID NO: 1210321 - RNA, 23 nt, Human
cauccacugugccaugugccagg

SEQ ID NO: 1210322 - RNA, 17 nt, Human
cauccacugugccaugu

SEQ ID NO: 1210323 - RNA, 14 nt, Human
cauccacugugcca

SEQ ID NO: 1210324 - RNA, 15 nt, Human
caucccucuggggcu

SEQ ID NO: 1210325 - RNA, 14 nt, Human
caucaacaucuugg

SEQ ID NO: 1210326 - RNA, 21 nt, Human
cauauugauuuccguuaaaau

SEQ ID NO: 1210327 - RNA, 17 nt, Human
cauauugauuuccguua

SEQ ID NO: 1210328 - RNA, 22 nt, Human
cauauucuguuggccaguguga

SEQ ID NO: 1210329 - RNA, 17 nt, Human
cauaguaugguggcugg

SEQ ID NO: 1210330 - RNA, 16 nt, Human
cauaguaugguggcug

SEQ ID NO: 1210331 - RNA, 15 nt, Human
cauaguaugguggcu

SEQ ID NO: 1210332 - RNA, 23 nt, Human
cauauaagauucauauuuacuuc

SEQ ID NO: 1210333 - RNA, 23 nt, Human
caggugugagucaccaagcccag

SEQ ID NO: 1210334 - RNA, 22 nt, Human
caggugugagucaccaagccca

SEQ ID NO: 1210335 - RNA, 23 nt, Human
caggugugaaccaccacacccag

SEQ ID NO: 1210336 - RNA, 22 nt, Human
caggugugaaccaccacaccca

SEQ ID NO: 1210337 - RNA, 19 nt, Human
caggugugaaccaccacac

SEQ ID NO: 1210338 - RNA, 16 nt, Human
caggugugaaccacca

SEQ ID NO: 1210339 - RNA, 21 nt, Human
caggugugagucaccaagccc

SEQ ID NO: 1210340 - RNA, 20 nt, Human
caggugugagucaccaagcc

SEQ ID NO: 1210341 - RNA, 16 nt, Human
caggugugagucacca

SEQ ID NO: 1210342 - RNA, 12 nt, Human
caggugugaacc

SEQ ID NO: 1210343 - RNA, 19 nt, Human
caggugucccugcacuugc

SEQ ID NO: 1210344 - RNA, 18 nt, Human
caggugucccugcacuug

SEQ ID NO: 1210345 - RNA, 15 nt, Human
caggugucccugcac

SEQ ID NO: 1210346 - RNA, 16 nt, Human
caggugucccugcacu

SEQ ID NO: 1210347 - RNA, 22 nt, Human
caguaaaugggggugcauuuga

SEQ ID NO: 1210348 - RNA, 21 nt, Human
caguaaaugggggugcauuug

SEQ ID NO: 1210349 - RNA, 13 nt, Human
cagguucagcuug

SEQ ID NO: 1210350 - RNA, 12 nt, Human
cagguucagcuu

SEQ ID NO: 1210351 - RNA, 13 nt, Human
caguaauaacucu

SEQ ID NO: 1210352 - RNA, 12 nt, Human
caguaauaacuc

SEQ ID NO: 1210353 - RNA, 14 nt, Human
caggugucccugca

SEQ ID NO: 1210354 - RNA, 11 nt, Human
caggugucccu

SEQ ID NO: 1210355 - RNA, 20 nt, Human
caggugguuauggagagggu

SEQ ID NO: 1210356 - RNA, 18 nt, Human
caggugguuauggagagg

SEQ ID NO: 1210357 - RNA, 23 nt, Human
cagguggggucacucuggcagcu

SEQ ID NO: 1210358 - RNA, 22 nt, Human
cagguggggucacucuggcagc

SEQ ID NO: 1210359 - RNA, 21 nt, Human
cagguggggucacucuggcag

SEQ ID NO: 1210360 - RNA, 20 nt, Human
cagguggggucacucuggca

SEQ ID NO: 1210361 - RNA, 19 nt, Human
cagguggggucacucuggc

SEQ ID NO: 1210362 - RNA, 18 nt, Human
cagguggggucacucugg

SEQ ID NO: 1210363 - RNA, 17 nt, Human
cagguggggcagcuuga

SEQ ID NO: 1210364 - RNA, 16 nt, Human
cagguggggcagcuug

SEQ ID NO: 1210365 - RNA, 15 nt, Human
cagguggggcagcuu

SEQ ID NO: 1210366 - RNA, 14 nt, Human
cagguggggcagcu

SEQ ID NO: 1210367 - RNA, 13 nt, Human
cagguggggcagc

SEQ ID NO: 1210368 - RNA, 21 nt, Human
cagguaacaggcagauacagg

SEQ ID NO: 1210369 - RNA, 20 nt, Human
cagguaacaggcagauacag

SEQ ID NO: 1210370 - RNA, 23 nt, Human
caggucuugaacuccuggccuca

SEQ ID NO: 1210371 - RNA, 22 nt, Human
caggucuugaacuccuggccuc

SEQ ID NO: 1210372 - RNA, 21 nt, Human
caggucuugaacuccuggccu

SEQ ID NO: 1210373 - RNA, 20 nt, Human
caggucuugaacuccuggcc

SEQ ID NO: 1210374 - RNA, 19 nt, Human
caggucuugaacuccuggc

SEQ ID NO: 1210375 - RNA, 18 nt, Human
caggucuugaacuccugg

SEQ ID NO: 1210376 - RNA, 21 nt, Human
caggugagaagcagaggaagg

SEQ ID NO: 1210377 - RNA, 20 nt, Human
caggugagaagcagaggaag

SEQ ID NO: 1210378 - RNA, 13 nt, Human
caggugagaagca

SEQ ID NO: 1210379 - RNA, 21 nt, Human
caggggugggacacccuguga

SEQ ID NO: 1210380 - RNA, 20 nt, Human
caggggugggacacccugug

SEQ ID NO: 1210381 - RNA, 15 nt, Human
caggggugggacacc

SEQ ID NO: 1210382 - RNA, 14 nt, Human
caggggugggacac

SEQ ID NO: 1210383 - RNA, 17 nt, Human
cagguaacaggcagaua

SEQ ID NO: 1210384 - RNA, 16 nt, Human
cagguaacaggcagau

SEQ ID NO: 1210385 - RNA, 15 nt, Human
cagguaacaggcaga

SEQ ID NO: 1210386 - RNA, 14 nt, Human
cagguaacaggcag

SEQ ID NO: 1210387 - RNA, 16 nt, Human
caggguuuugccaugu

SEQ ID NO: 1210388 - RNA, 17 nt, Human
cagggucucacucuguc

SEQ ID NO: 1210389 - RNA, 16 nt, Human
cagggucucacucugu

SEQ ID NO: 1210390 - RNA, 15 nt, Human
cagggucucacucug

SEQ ID NO: 1210391 - RNA, 23 nt, Human
cagggucucacuauguugcccag

SEQ ID NO: 1210392 - RNA, 22 nt, Human
cagggucucacuauguugccca

SEQ ID NO: 1210393 - RNA, 21 nt, Human
cagggucucacuauguugccc

SEQ ID NO: 1210394 - RNA, 18 nt, Human
caggguccuguagcccua

SEQ ID NO: 1210395 - RNA, 23 nt, Human
cagggucccugguggcagcucac

SEQ ID NO: 1210396 - RNA, 22 nt, Human
cagggucccugguggcagcuca

SEQ ID NO: 1210397 - RNA, 19 nt, Human
cagggucccugguggcagc

SEQ ID NO: 1210398 - RNA, 18 nt, Human
cagggucccugguggcag

SEQ ID NO: 1210399 - RNA, 15 nt, Human
cagggucccuggugg

SEQ ID NO: 1210400 - RNA, 14 nt, Human
cagggucccuggug

SEQ ID NO: 1210401 - RNA, 12 nt, Human
cagggucccugg

SEQ ID NO: 1210402 - RNA, 21 nt, Human
caggguauuccagagugggga

SEQ ID NO: 1210403 - RNA, 20 nt, Human
caggguauuccagagugggg

SEQ ID NO: 1210404 - RNA, 16 nt, Human
caguauuacuucugcu

SEQ ID NO: 1210405 - RNA, 19 nt, Human
caguauuacuucugcuaca

SEQ ID NO: 1210406 - RNA, 18 nt, Human
caguauuacuucugcuac

SEQ ID NO: 1210407 - RNA, 14 nt, Human
caguccauugaaag

SEQ ID NO: 1210408 - RNA, 16 nt, Human
caguccauagcagaga

SEQ ID NO: 1210409 - RNA, 21 nt, Human
caguaucuugaagacuuuucu

SEQ ID NO: 1210410 - RNA, 18 nt, Human
caguaucuugaagacuuu

SEQ ID NO: 1210411 - RNA, 12 nt, Human
caguaucuugaa

SEQ ID NO: 1210412 - RNA, 15 nt, Human
caguaucucagggcc

SEQ ID NO: 1210413 - RNA, 13 nt, Human
caguaucucaggg

SEQ ID NO: 1210414 - RNA, 12 nt, Human
cagucccugcca

SEQ ID NO: 1210415 - RNA, 16 nt, Human
cagucccugccaaugg

SEQ ID NO: 1210416 - RNA, 15 nt, Human
cagucccugccaaug

SEQ ID NO: 1210417 - RNA, 14 nt, Human
cagucccugccaau

SEQ ID NO: 1210418 - RNA, 13 nt, Human
cagucccugccaa

SEQ ID NO: 1210419 - RNA, 15 nt, Human
caguccucccaucuc

SEQ ID NO: 1210420 - RNA, 14 nt, Human
caguccucccaucu

SEQ ID NO: 1210421 - RNA, 13 nt, Human
caguccucccauc

SEQ ID NO: 1210422 - RNA, 12 nt, Human
caguccucccau

SEQ ID NO: 1210423 - RNA, 17 nt, Human
cagucccugccaaugga

SEQ ID NO: 1210424 - RNA, 19 nt, Human
cagucuggaaugcaguggu

SEQ ID NO: 1210425 - RNA, 21 nt, Human
caguccuuaccagcagagcac

SEQ ID NO: 1210426 - RNA, 20 nt, Human
caguccuuaccagcagagca

SEQ ID NO: 1210427 - RNA, 19 nt, Human
caguccuuaccagcagagc

SEQ ID NO: 1210428 - RNA, 18 nt, Human
caguccuuaccagcagag

SEQ ID NO: 1210429 - RNA, 15 nt, Human
caguccuuaccagca

SEQ ID NO: 1210430 - RNA, 17 nt, Human
caguccucccaucucac

SEQ ID NO: 1210431 - RNA, 16 nt, Human
caguccucccaucuca

SEQ ID NO: 1210432 - RNA, 18 nt, Human
cagugagucgaggacagg

SEQ ID NO: 1210433 - RNA, 17 nt, Human
cagugagucgaggacag

SEQ ID NO: 1210434 - RNA, 21 nt, Human
cagugaggcucugcccuuggu

SEQ ID NO: 1210435 - RNA, 20 nt, Human
cagugaggcucugcccuugg

SEQ ID NO: 1210436 - RNA, 19 nt, Human
cagugaggcucugcccuug

SEQ ID NO: 1210437 - RNA, 18 nt, Human
cagugaggcucugcccuu

SEQ ID NO: 1210438 - RNA, 17 nt, Human
cagugaggcucugcccu

SEQ ID NO: 1210439 - RNA, 16 nt, Human
cagugaggcucugccc

SEQ ID NO: 1210440 - RNA, 15 nt, Human
cagugaggcucugcc

SEQ ID NO: 1210441 - RNA, 14 nt, Human
cagugaggcucugc

SEQ ID NO: 1210442 - RNA, 13 nt, Human
cagugaggcucug

SEQ ID NO: 1210443 - RNA, 12 nt, Human
cagugaggcucu

SEQ ID NO: 1210444 - RNA, 24 nt, Human
cagugagccgagauugcaccacug

SEQ ID NO: 1210445 - RNA, 22 nt, Human
cagugccuuauggaacacucug

SEQ ID NO: 1210446 - RNA, 21 nt, Human
cagugccuuauggaacacucu

SEQ ID NO: 1210447 - RNA, 20 nt, Human
cagugccuuauggaacacuc

SEQ ID NO: 1210448 - RNA, 19 nt, Human
cagugccuuauggaacacu

SEQ ID NO: 1210449 - RNA, 18 nt, Human
cagugccuuauggaacac

SEQ ID NO: 1210450 - RNA, 17 nt, Human
cagugccuuauggaaca

SEQ ID NO: 1210451 - RNA, 16 nt, Human
cagugccuuauggaac

SEQ ID NO: 1210452 - RNA, 15 nt, Human
cagugccuuauggaa

SEQ ID NO: 1210453 - RNA, 13 nt, Human
cagugccuuaugg

SEQ ID NO: 1210454 - RNA, 11 nt, Human
cagugccuuau

SEQ ID NO: 1210455 - RNA, 18 nt, Human
cagugccgagaaggaagc

SEQ ID NO: 1210456 - RNA, 15 nt, Human
cagugccgagaagga

SEQ ID NO: 1210457 - RNA, 23 nt, Human
cagugagucgaggacagggaggu

SEQ ID NO: 1210458 - RNA, 22 nt, Human
cagugagucgaggacagggagg

SEQ ID NO: 1210459 - RNA, 20 nt, Human
cagugagucgaggacaggga

SEQ ID NO: 1210460 - RNA, 19 nt, Human
cagugagucgaggacaggg

SEQ ID NO: 1210461 - RNA, 23 nt, Human
cagugccuuauggaacacucuga

SEQ ID NO: 1210462 - RNA, 20 nt, Human
cagggacagaggggguggcc

SEQ ID NO: 1210463 - RNA, 14 nt, Human
cagggacagagggg

SEQ ID NO: 1210464 - RNA, 13 nt, Human
cagggacagaggg

SEQ ID NO: 1210465 - RNA, 22 nt, Human
cagggaaacagcuaaugggaca

SEQ ID NO: 1210466 - RNA, 19 nt, Human
caggggaggguagagcgga

SEQ ID NO: 1210467 - RNA, 19 nt, Human
cagggccuggcucaggugg

SEQ ID NO: 1210468 - RNA, 16 nt, Human
cagggccuggcucagg

SEQ ID NO: 1210469 - RNA, 15 nt, Human
cagggccuggcucag

SEQ ID NO: 1210470 - RNA, 14 nt, Human
cagggccuggcuca

SEQ ID NO: 1210471 - RNA, 13 nt, Human
cagggccuggcuc

SEQ ID NO: 1210472 - RNA, 23 nt, Human
cagggcacaccgggcacucagaa

SEQ ID NO: 1210473 - RNA, 22 nt, Human
cagggcacaccgggcacucaga

SEQ ID NO: 1210474 - RNA, 21 nt, Human
cagggcacaccgggcacucag

SEQ ID NO: 1210475 - RNA, 19 nt, Human
cagggcacaccgggcacuc

SEQ ID NO: 1210476 - RNA, 17 nt, Human
cagggcacaccgggcac

SEQ ID NO: 1210477 - RNA, 15 nt, Human
cagggcacaccgggc

SEQ ID NO: 1210478 - RNA, 14 nt, Human
cagggcacaccggg

SEQ ID NO: 1210479 - RNA, 23 nt, Human
cagggacagaggggguggccucc

SEQ ID NO: 1210480 - RNA, 20 nt, Human
caggcuccuuuagcgcccag

SEQ ID NO: 1210481 - RNA, 19 nt, Human
caggcuccuuuagcgccca

SEQ ID NO: 1210482 - RNA, 14 nt, Human
caggcuccuuuagc

SEQ ID NO: 1210483 - RNA, 23 nt, Human
caggcucucaggccagcugcuug

SEQ ID NO: 1210484 - RNA, 21 nt, Human
caggcucucaggccagcugcu

SEQ ID NO: 1210485 - RNA, 20 nt, Human
caggcucucaggccagcugc

SEQ ID NO: 1210486 - RNA, 19 nt, Human
caggcucucaggccagcug

SEQ ID NO: 1210487 - RNA, 18 nt, Human
caggcucucaggccagcu

SEQ ID NO: 1210488 - RNA, 17 nt, Human
caggcucucaggccagc

SEQ ID NO: 1210489 - RNA, 16 nt, Human
caggcucucaggccag

SEQ ID NO: 1210490 - RNA, 15 nt, Human
caggcucucaggcca

SEQ ID NO: 1210491 - RNA, 14 nt, Human
caggcucucaggcc

SEQ ID NO: 1210492 - RNA, 13 nt, Human
caggcucucaggc

SEQ ID NO: 1210493 - RNA, 12 nt, Human
caggcucucagg

SEQ ID NO: 1210494 - RNA, 20 nt, Human
caggcucgggcuccccagcc

SEQ ID NO: 1210495 - RNA, 21 nt, Human
caggcuccuuuagcgcccagu

SEQ ID NO: 1210496 - RNA, 15 nt, Human
caggcccucugccca

SEQ ID NO: 1210497 - RNA, 14 nt, Human
caggcccucugccc

SEQ ID NO: 1210498 - RNA, 13 nt, Human
caggcccucugcc

SEQ ID NO: 1210499 - RNA, 22 nt, Human
caggcccggcuccaggcuccuu

SEQ ID NO: 1210500 - RNA, 21 nt, Human
caggcccggcuccaggcuccu

SEQ ID NO: 1210501 - RNA, 20 nt, Human
caggcccggcuccaggcucc

SEQ ID NO: 1210502 - RNA, 19 nt, Human
caggcccggcuccaggcuc

SEQ ID NO: 1210503 - RNA, 18 nt, Human
caggcccggcuccaggcu

SEQ ID NO: 1210504 - RNA, 17 nt, Human
caggcccggcuccaggc

SEQ ID NO: 1210505 - RNA, 22 nt, Human
caggcccucugcccacucccug

SEQ ID NO: 1210506 - RNA, 21 nt, Human
caggcccucugcccacucccu

SEQ ID NO: 1210507 - RNA, 20 nt, Human
caggcccucugcccacuccc

SEQ ID NO: 1210508 - RNA, 19 nt, Human
caggcccucugcccacucc

SEQ ID NO: 1210509 - RNA, 17 nt, Human
caggcccucugcccacu

SEQ ID NO: 1210510 - RNA, 16 nt, Human
caggcccucugcccac

SEQ ID NO: 1210511 - RNA, 16 nt, Human
cagggaaacagcuaau

SEQ ID NO: 1210512 - RNA, 23 nt, Human
caggcuuagucacugagacagcc

SEQ ID NO: 1210513 - RNA, 22 nt, Human
caggcuuagucacugagacagc

SEQ ID NO: 1210514 - RNA, 21 nt, Human
caggcuuagucacugagacag

SEQ ID NO: 1210515 - RNA, 20 nt, Human
caggcuuagucacugagaca

SEQ ID NO: 1210516 - RNA, 17 nt, Human
caggcuuagucacugag

SEQ ID NO: 1210517 - RNA, 16 nt, Human
caggcuuagucacuga

SEQ ID NO: 1210518 - RNA, 23 nt, Human
caggcuguaucccaugagccuca

SEQ ID NO: 1210519 - RNA, 22 nt, Human
caggcuguaucccaugagccuc

SEQ ID NO: 1210520 - RNA, 21 nt, Human
caggcuguaucccaugagccu

SEQ ID NO: 1210521 - RNA, 20 nt, Human
caggcuguaucccaugagcc

SEQ ID NO: 1210522 - RNA, 14 nt, Human
caggcuguauccca

SEQ ID NO: 1210523 - RNA, 12 nt, Human
caggcuggucuc

SEQ ID NO: 1210524 - RNA, 19 nt, Human
caggcuggucucaaacucu

SEQ ID NO: 1210525 - RNA, 17 nt, Human
caggcaugguggcccac

SEQ ID NO: 1210526 - RNA, 15 nt, Human
caggcaggugggaug

SEQ ID NO: 1210527 - RNA, 23 nt, Human
caggcaggucuugaacuccuggc

SEQ ID NO: 1210528 - RNA, 22 nt, Human
caggcaggucuugaacuccugg

SEQ ID NO: 1210529 - RNA, 13 nt, Human
caggcaggucuug

SEQ ID NO: 1210530 - RNA, 12 nt, Human
caggcaggucuu

SEQ ID NO: 1210531 - RNA, 19 nt, Human
caggcagguccaggguuug

SEQ ID NO: 1210532 - RNA, 15 nt, Human
caggcagguccaggg

SEQ ID NO: 1210533 - RNA, 14 nt, Human
caggcagguccagg

SEQ ID NO: 1210534 - RNA, 24 nt, Human
caggcauuccccaggaggccagcc

SEQ ID NO: 1210535 - RNA, 23 nt, Human
caggcauuccccaggaggccagc

SEQ ID NO: 1210536 - RNA, 22 nt, Human
caggcauuccccaggaggccag

SEQ ID NO: 1210537 - RNA, 21 nt, Human
caggcauuccccaggaggcca

SEQ ID NO: 1210538 - RNA, 20 nt, Human
caggcauuccccaggaggcc

SEQ ID NO: 1210539 - RNA, 19 nt, Human
caggcauuccccaggaggc

SEQ ID NO: 1210540 - RNA, 18 nt, Human
caggcauuccccaggagg

SEQ ID NO: 1210541 - RNA, 17 nt, Human
caggcauuccccaggag

SEQ ID NO: 1210542 - RNA, 16 nt, Human
caggcauuccccagga

SEQ ID NO: 1210543 - RNA, 15 nt, Human
caggcauuccccagg

SEQ ID NO: 1210544 - RNA, 13 nt, Human
caggcauucccca

SEQ ID NO: 1210545 - RNA, 20 nt, Human
caggcauguucucugaggac

SEQ ID NO: 1210546 - RNA, 19 nt, Human
caggcauguucucugagga

SEQ ID NO: 1210547 - RNA, 18 nt, Human
caggcauguucucugagg

SEQ ID NO: 1210548 - RNA, 15 nt, Human
caggcauguucucug

SEQ ID NO: 1210549 - RNA, 15 nt, Human
caggcagccaggcca

SEQ ID NO: 1210550 - RNA, 14 nt, Human
caggcagccaggcc

SEQ ID NO: 1210551 - RNA, 14 nt, Human
caggcaaugcuggc

SEQ ID NO: 1210552 - RNA, 21 nt, Human
caggcaagcaccuccugccuc

SEQ ID NO: 1210553 - RNA, 16 nt, Human
caggcaagcaccuccu

SEQ ID NO: 1210554 - RNA, 15 nt, Human
caggcaagcaccucc

SEQ ID NO: 1210555 - RNA, 14 nt, Human
caggcaagcaccuc

SEQ ID NO: 1210556 - RNA, 20 nt, Human
caggauucuuccucccuccc

SEQ ID NO: 1210557 - RNA, 13 nt, Human
caggcagguccag

SEQ ID NO: 1210558 - RNA, 17 nt, Human
caggcagccaggccaca

SEQ ID NO: 1210559 - RNA, 16 nt, Human
caggcagccaggccac

SEQ ID NO: 1210560 - RNA, 13 nt, Human
caggaucagucug

SEQ ID NO: 1210561 - RNA, 14 nt, Human
caggaucagucuga

SEQ ID NO: 1210562 - RNA, 23 nt, Human
caggauggccgggcgcgguggcu

SEQ ID NO: 1210563 - RNA, 18 nt, Human
caggauucuuccucccuc

SEQ ID NO: 1210564 - RNA, 17 nt, Human
caggauucuuccucccu

SEQ ID NO: 1210565 - RNA, 22 nt, Human
caggccaggcccucugcccacu

SEQ ID NO: 1210566 - RNA, 21 nt, Human
caggccaggcccucugcccac

SEQ ID NO: 1210567 - RNA, 20 nt, Human
caggccacaagacccuugug

SEQ ID NO: 1210568 - RNA, 18 nt, Human
caggccacaagacccuug

SEQ ID NO: 1210569 - RNA, 17 nt, Human
caggccacaagacccuu

SEQ ID NO: 1210570 - RNA, 13 nt, Human
caggccacaagac

SEQ ID NO: 1210571 - RNA, 23 nt, Human
caggccaaacucaccugccccuc

SEQ ID NO: 1210572 - RNA, 18 nt, Human
caggccaaacucaccugc

SEQ ID NO: 1210573 - RNA, 13 nt, Human
caggccccugcca

SEQ ID NO: 1210574 - RNA, 16 nt, Human
caggcccggcuccagg

SEQ ID NO: 1210575 - RNA, 15 nt, Human
caggcccggcuccag

SEQ ID NO: 1210576 - RNA, 14 nt, Human
caggcccggcucca

SEQ ID NO: 1210577 - RNA, 13 nt, Human
caggcccggcucc

SEQ ID NO: 1210578 - RNA, 20 nt, Human
caggccccugccacccuggg

SEQ ID NO: 1210579 - RNA, 19 nt, Human
caggccccugccacccugg

SEQ ID NO: 1210580 - RNA, 17 nt, Human
caggccccugccacccu

SEQ ID NO: 1210581 - RNA, 15 nt, Human
caggccccugccacc

SEQ ID NO: 1210582 - RNA, 12 nt, Human
caggagugagca

SEQ ID NO: 1210583 - RNA, 20 nt, Human
caggagccuccugcccuuac

SEQ ID NO: 1210584 - RNA, 17 nt, Human
caggagccuccugcccu

SEQ ID NO: 1210585 - RNA, 14 nt, Human
caggagccuccugc

SEQ ID NO: 1210586 - RNA, 23 nt, Human
caggagccccgaggccuucucug

SEQ ID NO: 1210587 - RNA, 22 nt, Human
caggagccccgaggccuucucu

SEQ ID NO: 1210588 - RNA, 20 nt, Human
caggagccccgaggccuucu

SEQ ID NO: 1210589 - RNA, 18 nt, Human
caggagccccgaggccuu

SEQ ID NO: 1210590 - RNA, 16 nt, Human
caggagccccgaggcc

SEQ ID NO: 1210591 - RNA, 15 nt, Human
caggagccccgaggc

SEQ ID NO: 1210592 - RNA, 19 nt, Human
caggagcagccacauuccu

SEQ ID NO: 1210593 - RNA, 14 nt, Human
caggagcagccaca

SEQ ID NO: 1210594 - RNA, 13 nt, Human
caggagcagccac

SEQ ID NO: 1210595 - RNA, 12 nt, Human
caggagcagcca

SEQ ID NO: 1210596 - RNA, 23 nt, Human
caggaguuugagaccaaccuggg

SEQ ID NO: 1210597 - RNA, 22 nt, Human
caggaguuugagaccaaccugg

SEQ ID NO: 1210598 - RNA, 21 nt, Human
caggaguuugagaccaaccug

SEQ ID NO: 1210599 - RNA, 22 nt, Human
caggaagccagcaggcucucag

SEQ ID NO: 1210600 - RNA, 21 nt, Human
caggaagccagcaggcucuca

SEQ ID NO: 1210601 - RNA, 19 nt, Human
caggaagccagcaggcucu

SEQ ID NO: 1210602 - RNA, 18 nt, Human
caggaagccagcaggcuc

SEQ ID NO: 1210603 - RNA, 17 nt, Human
caggaagccagcaggcu

SEQ ID NO: 1210604 - RNA, 16 nt, Human
caggaagccagcaggc

SEQ ID NO: 1210605 - RNA, 14 nt, Human
caggaagccagcag

SEQ ID NO: 1210606 - RNA, 23 nt, Human
caggaagcucagggccuggcuca

SEQ ID NO: 1210607 - RNA, 21 nt, Human
caggaagcucagggccuggcu

SEQ ID NO: 1210608 - RNA, 20 nt, Human
caggaagcucagggccuggc

SEQ ID NO: 1210609 - RNA, 19 nt, Human
caggaagcucagggccugg

SEQ ID NO: 1210610 - RNA, 18 nt, Human
caggaagcucagggccug

SEQ ID NO: 1210611 - RNA, 17 nt, Human
caggaagcucagggccu

SEQ ID NO: 1210612 - RNA, 16 nt, Human
caggaagcucagggcc

SEQ ID NO: 1210613 - RNA, 15 nt, Human
caggaagcucagggc

SEQ ID NO: 1210614 - RNA, 14 nt, Human
caggaagcucaggg

SEQ ID NO: 1210615 - RNA, 13 nt, Human
caggaagcucagg

SEQ ID NO: 1210616 - RNA, 20 nt, Human
caggaaguacuggagaaaau

SEQ ID NO: 1210617 - RNA, 18 nt, Human
caggaaguacuggagaaa

SEQ ID NO: 1210618 - RNA, 17 nt, Human
caggaaguacuggagaa

SEQ ID NO: 1210619 - RNA, 16 nt, Human
caggaaguacuggaga

SEQ ID NO: 1210620 - RNA, 14 nt, Human
caggaaguacugga

SEQ ID NO: 1210621 - RNA, 12 nt, Human
caggaaguacug

SEQ ID NO: 1210622 - RNA, 15 nt, Human
caggaaggcuaaagg

SEQ ID NO: 1210623 - RNA, 21 nt, Human
cagcuugaggguugggcuggu

SEQ ID NO: 1210624 - RNA, 20 nt, Human
cagcuugaggguugggcugg

SEQ ID NO: 1210625 - RNA, 19 nt, Human
cagcuugaggguugggcug

SEQ ID NO: 1210626 - RNA, 18 nt, Human
cagcuugaggguugggcu

SEQ ID NO: 1210627 - RNA, 15 nt, Human
cagcuugaggguugg

SEQ ID NO: 1210628 - RNA, 14 nt, Human
cagcuugaggguug

SEQ ID NO: 1210629 - RNA, 21 nt, Human
cagcuugaccgugaggccaga

SEQ ID NO: 1210630 - RNA, 20 nt, Human
cagcuugaccgugaggccag

SEQ ID NO: 1210631 - RNA, 19 nt, Human
cagcuugaccgugaggcca

SEQ ID NO: 1210632 - RNA, 18 nt, Human
cagcuugaccgugaggcc

SEQ ID NO: 1210633 - RNA, 21 nt, Human
cagcuucauuuccugugucuu

SEQ ID NO: 1210634 - RNA, 20 nt, Human
cagcuucauuuccugugucu

SEQ ID NO: 1210635 - RNA, 23 nt, Human
cagcuuuguuuguugucagcuga

SEQ ID NO: 1210636 - RNA, 22 nt, Human
cagcuuuguuuguugucagcug

SEQ ID NO: 1210637 - RNA, 21 nt, Human
cagcuuuguuuguugucagcu

SEQ ID NO: 1210638 - RNA, 12 nt, Human
cagcuuuguuug

SEQ ID NO: 1210639 - RNA, 22 nt, Human
cagcuuguaaauagcucaggug

SEQ ID NO: 1210640 - RNA, 21 nt, Human
cagcuuguaaauagcucaggu

SEQ ID NO: 1210641 - RNA, 20 nt, Human
cagcuuguaaauagcucagg

SEQ ID NO: 1210642 - RNA, 19 nt, Human
cagcuuguaaauagcucag

SEQ ID NO: 1210643 - RNA, 18 nt, Human
cagcuuguaaauagcuca

SEQ ID NO: 1210644 - RNA, 23 nt, Human
cagcucuucuccaggcuguaucc

SEQ ID NO: 1210645 - RNA, 19 nt, Human
cagcucuucuccaggcugu

SEQ ID NO: 1210646 - RNA, 18 nt, Human
cagcucuucuccaggcug

SEQ ID NO: 1210647 - RNA, 17 nt, Human
cagcucuucuccaggcu

SEQ ID NO: 1210648 - RNA, 16 nt, Human
cagcucuucuccaggc

SEQ ID NO: 1210649 - RNA, 15 nt, Human
cagcucuucuccagg

SEQ ID NO: 1210650 - RNA, 14 nt, Human
cagcucuucuccag

SEQ ID NO: 1210651 - RNA, 13 nt, Human
cagcucuucucca

SEQ ID NO: 1210652 - RNA, 21 nt, Human
cagcucuuauauugccauuuc

SEQ ID NO: 1210653 - RNA, 10 nt, Human
cagcucuuau

SEQ ID NO: 1210654 - RNA, 23 nt, Human
cagcucuguccugggagugagcu

SEQ ID NO: 1210655 - RNA, 18 nt, Human
cagcucuguccugggagu

SEQ ID NO: 1210656 - RNA, 17 nt, Human
cagcucuguccugggag

SEQ ID NO: 1210657 - RNA, 16 nt, Human
cagcucuguccuggga

SEQ ID NO: 1210658 - RNA, 14 nt, Human
cagcucuguccugg

SEQ ID NO: 1210659 - RNA, 13 nt, Human
cagcucuguccug

SEQ ID NO: 1210660 - RNA, 12 nt, Human
cagcucuguccu

SEQ ID NO: 1210661 - RNA, 23 nt, Human
cagcucugguccauagagagcaa

SEQ ID NO: 1210662 - RNA, 22 nt, Human
cagcucugguccauagagagca

SEQ ID NO: 1210663 - RNA, 21 nt, Human
cagcucugguccauagagagc

SEQ ID NO: 1210664 - RNA, 18 nt, Human
cagcucugguccauagag

SEQ ID NO: 1210665 - RNA, 17 nt, Human
cagcucugguccauaga

SEQ ID NO: 1210666 - RNA, 16 nt, Human
cagcucugguccauag

SEQ ID NO: 1210667 - RNA, 13 nt, Human
cagcucuggucca

SEQ ID NO: 1210668 - RNA, 10 nt, Human
cagcucuggu

SEQ ID NO: 1210669 - RNA, 21 nt, Human
cagcucugcaagaauugaagc

SEQ ID NO: 1210670 - RNA, 16 nt, Human
cagcucugcaagaauu

SEQ ID NO: 1210671 - RNA, 15 nt, Human
cagcucugcaagaau

SEQ ID NO: 1210672 - RNA, 23 nt, Human
cagcuccuucuguccuacucugu

SEQ ID NO: 1210673 - RNA, 21 nt, Human
cagcuccuucuguccuacucu

SEQ ID NO: 1210674 - RNA, 17 nt, Human
cagcuccuucuguccua

SEQ ID NO: 1210675 - RNA, 16 nt, Human
cagcuccuucuguccu

SEQ ID NO: 1210676 - RNA, 20 nt, Human
cagcucagagagggugggag

SEQ ID NO: 1210677 - RNA, 19 nt, Human
cagcucagagaggguggga

SEQ ID NO: 1210678 - RNA, 17 nt, Human
cagcucagagagggugg

SEQ ID NO: 1210679 - RNA, 13 nt, Human
cagcucagagagg

SEQ ID NO: 1210680 - RNA, 23 nt, Human
cagcugggguggggaccucaggc

SEQ ID NO: 1210681 - RNA, 22 nt, Human
cagcugggguggggaccucagg

SEQ ID NO: 1210682 - RNA, 21 nt, Human
cagcugggguggggaccucag

SEQ ID NO: 1210683 - RNA, 18 nt, Human
cagcugguugagguuuca

SEQ ID NO: 1210684 - RNA, 22 nt, Human
cagcugcuuuugucuaugggac

SEQ ID NO: 1210685 - RNA, 24 nt, Human
cagcugcgguccacccaggagccc

SEQ ID NO: 1210686 - RNA, 23 nt, Human
cagcugcgguccacccaggagcc

SEQ ID NO: 1210687 - RNA, 22 nt, Human
cagcugcgguccacccaggagc

SEQ ID NO: 1210688 - RNA, 21 nt, Human
cagcugcgguccacccaggag

SEQ ID NO: 1210689 - RNA, 20 nt, Human
cagcugcgguccacccagga

SEQ ID NO: 1210690 - RNA, 19 nt, Human
cagcugcgguccacccagg

SEQ ID NO: 1210691 - RNA, 18 nt, Human
cagcugcgguccacccag

SEQ ID NO: 1210692 - RNA, 23 nt, Human
cagcugccugggaucccucaucc

SEQ ID NO: 1210693 - RNA, 18 nt, Human
cagcugccugggaucccu

SEQ ID NO: 1210694 - RNA, 22 nt, Human
cagcugcuugggcuucauccuc

SEQ ID NO: 1210695 - RNA, 21 nt, Human
cagcugcuugggcuucauccu

SEQ ID NO: 1210696 - RNA, 19 nt, Human
cagcugcuugggcuucauc

SEQ ID NO: 1210697 - RNA, 18 nt, Human
cagcugcuugggcuucau

SEQ ID NO: 1210698 - RNA, 16 nt, Human
cagcugcuugggcuuc

SEQ ID NO: 1210699 - RNA, 15 nt, Human
cagcugcuugggcuu

SEQ ID NO: 1210700 - RNA, 14 nt, Human
cagcugcuugggcu

SEQ ID NO: 1210701 - RNA, 13 nt, Human
cagcugcuugggc

SEQ ID NO: 1210702 - RNA, 17 nt, Human
cagcugcuacuacuccu

SEQ ID NO: 1210703 - RNA, 22 nt, Human
caggaagcucagggccuggcuc

SEQ ID NO: 1210704 - RNA, 19 nt, Human
cagccuggacccuguggau

SEQ ID NO: 1210705 - RNA, 15 nt, Human
cagccuggacccugu

SEQ ID NO: 1210706 - RNA, 23 nt, Human
cagccucccgaguagcugggacu

SEQ ID NO: 1210707 - RNA, 22 nt, Human
cagccucccgaguagcugggac

SEQ ID NO: 1210708 - RNA, 21 nt, Human
cagccucccgaguagcuggga

SEQ ID NO: 1210709 - RNA, 20 nt, Human
cagccucccgaguagcuggg

SEQ ID NO: 1210710 - RNA, 19 nt, Human
cagccucccgaguagcugg

SEQ ID NO: 1210711 - RNA, 23 nt, Human
cagccucccgaauagcugggacu

SEQ ID NO: 1210712 - RNA, 20 nt, Human
cagccugcuccagcuguuca

SEQ ID NO: 1210713 - RNA, 24 nt, Human
cagccuugaccauucuccaccugc

SEQ ID NO: 1210714 - RNA, 23 nt, Human
cagccuugaccauucuccaccug

SEQ ID NO: 1210715 - RNA, 22 nt, Human
cagccuugaccauucuccaccu

SEQ ID NO: 1210716 - RNA, 21 nt, Human
cagccuugaccauucuccacc

SEQ ID NO: 1210717 - RNA, 20 nt, Human
cagccuugaccauucuccac

SEQ ID NO: 1210718 - RNA, 17 nt, Human
cagccuugaccauucuc

SEQ ID NO: 1210719 - RNA, 19 nt, Human
cagccugggcaaugugaua

SEQ ID NO: 1210720 - RNA, 16 nt, Human
cagccugggcaaugug

SEQ ID NO: 1210721 - RNA, 19 nt, Human
cagcucaccagccccagug

SEQ ID NO: 1210722 - RNA, 17 nt, Human
cagcucaccagccccag

SEQ ID NO: 1210723 - RNA, 16 nt, Human
cagcucaccagcccca

SEQ ID NO: 1210724 - RNA, 15 nt, Human
cagcucaccagcccc

SEQ ID NO: 1210725 - RNA, 13 nt, Human
cagcucaccagcc

SEQ ID NO: 1210726 - RNA, 17 nt, Human
cagcucaccucucccuu

SEQ ID NO: 1210727 - RNA, 16 nt, Human
cagcucaccucucccu

SEQ ID NO: 1210728 - RNA, 15 nt, Human
cagcucaccucuccc

SEQ ID NO: 1210729 - RNA, 13 nt, Human
cagcucaccucuc

SEQ ID NO: 1210730 - RNA, 22 nt, Human
cagcucaccagccccagugccc

SEQ ID NO: 1210731 - RNA, 21 nt, Human
cagcucaccagccccagugcc

SEQ ID NO: 1210732 - RNA, 20 nt, Human
cagcucaccagccccagugc

SEQ ID NO: 1210733 - RNA, 12 nt, Human
cagcucagagag

SEQ ID NO: 1210734 - RNA, 20 nt, Human
cagcucaccucucccuugga

SEQ ID NO: 1210735 - RNA, 19 nt, Human
cagcucaccucucccuugg

SEQ ID NO: 1210736 - RNA, 19 nt, Human
cagcuaacauggaaguacu

SEQ ID NO: 1210737 - RNA, 21 nt, Human
cagcgagcccugguggcagug

SEQ ID NO: 1210738 - RNA, 20 nt, Human
cagcgagcccugguggcagu

SEQ ID NO: 1210739 - RNA, 19 nt, Human
cagcgagcccugguggcag

SEQ ID NO: 1210740 - RNA, 17 nt, Human
cagcgagcccugguggc

SEQ ID NO: 1210741 - RNA, 16 nt, Human
cagcgagcccuggugg

SEQ ID NO: 1210742 - RNA, 13 nt, Human
cagcgagcccugg

SEQ ID NO: 1210743 - RNA, 20 nt, Human
cagcuaacauggaaguacua

SEQ ID NO: 1210744 - RNA, 16 nt, Human
cagcuaaugggacacu

SEQ ID NO: 1210745 - RNA, 15 nt, Human
cagcuaaugggacac

SEQ ID NO: 1210746 - RNA, 23 nt, Human
cagccucccaaagugcugggauu

SEQ ID NO: 1210747 - RNA, 21 nt, Human
cagccucccaaagugcuggga

SEQ ID NO: 1210748 - RNA, 20 nt, Human
cagccucccaaagugcuggg

SEQ ID NO: 1210749 - RNA, 19 nt, Human
cagccucccaaagugcugg

SEQ ID NO: 1210750 - RNA, 22 nt, Human
cagccucccgaauagcugggac

SEQ ID NO: 1210751 - RNA, 21 nt, Human
cagccucccgaauagcuggga

SEQ ID NO: 1210752 - RNA, 20 nt, Human
cagccucccgaauagcuggg

SEQ ID NO: 1210753 - RNA, 21 nt, Human
cagccucaaccuccugggcua

SEQ ID NO: 1210754 - RNA, 20 nt, Human
cagccucaaccuccugggcu

SEQ ID NO: 1210755 - RNA, 19 nt, Human
cagccucaaccuccugggc

SEQ ID NO: 1210756 - RNA, 18 nt, Human
cagccucaaccuccuggg

SEQ ID NO: 1210757 - RNA, 17 nt, Human
cagccucaaccuccugg

SEQ ID NO: 1210758 - RNA, 20 nt, Human
cagccucacaguccuuacca

SEQ ID NO: 1210759 - RNA, 15 nt, Human
cagccucacaguccu

SEQ ID NO: 1210760 - RNA, 14 nt, Human
cagccucacagucc

SEQ ID NO: 1210761 - RNA, 20 nt, Human
cagcccugcagagggcacag

SEQ ID NO: 1210762 - RNA, 18 nt, Human
cagcccugcagagggcac

SEQ ID NO: 1210763 - RNA, 16 nt, Human
cagcccugcagagggc

SEQ ID NO: 1210764 - RNA, 15 nt, Human
cagcccugcagaggg

SEQ ID NO: 1210765 - RNA, 14 nt, Human
cagcccugcagagg

SEQ ID NO: 1210766 - RNA, 13 nt, Human
cagcccugcagag

SEQ ID NO: 1210767 - RNA, 21 nt, Human
cagccguguaaccauggaccc

SEQ ID NO: 1210768 - RNA, 22 nt, Human
cagcccgggcucugccucccau

SEQ ID NO: 1210769 - RNA, 21 nt, Human
cagcccgggcucugccuccca

SEQ ID NO: 1210770 - RNA, 20 nt, Human
cagcccgggcucugccuccc

SEQ ID NO: 1210771 - RNA, 19 nt, Human
cagcccgggcucugccucc

SEQ ID NO: 1210772 - RNA, 18 nt, Human
cagcccgggcucugccuc

SEQ ID NO: 1210773 - RNA, 17 nt, Human
cagcccgggcucugccu

SEQ ID NO: 1210774 - RNA, 16 nt, Human
cagcccgggcucugcc

SEQ ID NO: 1210775 - RNA, 15 nt, Human
cagcccgggcucugc

SEQ ID NO: 1210776 - RNA, 14 nt, Human
cagcccgggcucug

SEQ ID NO: 1210777 - RNA, 13 nt, Human
cagcccgggcucu

SEQ ID NO: 1210778 - RNA, 24 nt, Human
cagccccuucugacccaugcugcc

SEQ ID NO: 1210779 - RNA, 23 nt, Human
cagccccuucugacccaugcugc

SEQ ID NO: 1210780 - RNA, 22 nt, Human
cagccccuucugacccaugcug

SEQ ID NO: 1210781 - RNA, 21 nt, Human
cagccccuucugacccaugcu

SEQ ID NO: 1210782 - RNA, 19 nt, Human
cagccccuucugacccaug

SEQ ID NO: 1210783 - RNA, 17 nt, Human
cagccccuucugaccca

SEQ ID NO: 1210784 - RNA, 16 nt, Human
cagccccuucugaccc

SEQ ID NO: 1210785 - RNA, 21 nt, Human
cagccccuguucuggcagagu

SEQ ID NO: 1210786 - RNA, 20 nt, Human
cagccccuguucuggcagag

SEQ ID NO: 1210787 - RNA, 23 nt, Human
cagccccuggaugcagccucaca

SEQ ID NO: 1210788 - RNA, 18 nt, Human
cagccccauucugccugc

SEQ ID NO: 1210789 - RNA, 17 nt, Human
cagccccauucugccug

SEQ ID NO: 1210790 - RNA, 16 nt, Human
cagccccauucugccu

SEQ ID NO: 1210791 - RNA, 14 nt, Human
cagccccauucugc

SEQ ID NO: 1210792 - RNA, 13 nt, Human
cagccccauucug

SEQ ID NO: 1210793 - RNA, 22 nt, Human
cagccccauccucuguacagag

SEQ ID NO: 1210794 - RNA, 16 nt, Human
cagccccauccucugu

SEQ ID NO: 1210795 - RNA, 14 nt, Human
cagccccauccucu

SEQ ID NO: 1210796 - RNA, 13 nt, Human
cagccccauccuc

SEQ ID NO: 1210797 - RNA, 12 nt, Human
cagccccauccu

SEQ ID NO: 1210798 - RNA, 22 nt, Human
cagccccaucccaaacccuuca

SEQ ID NO: 1210799 - RNA, 21 nt, Human
cagccccaucccaaacccuuc

SEQ ID NO: 1210800 - RNA, 11 nt, Human
cagccccaucc

SEQ ID NO: 1210801 - RNA, 18 nt, Human
cagccccagugcccacag

SEQ ID NO: 1210802 - RNA, 17 nt, Human
cagccccagugcccaca

SEQ ID NO: 1210803 - RNA, 16 nt, Human
cagccccagugcccac

SEQ ID NO: 1210804 - RNA, 15 nt, Human
cagccccagugccca

SEQ ID NO: 1210805 - RNA, 14 nt, Human
cagccccagugccc

SEQ ID NO: 1210806 - RNA, 13 nt, Human
cagccccagugcc

SEQ ID NO: 1210807 - RNA, 23 nt, Human
cagcugcuuuugucuaugggacu

SEQ ID NO: 1210808 - RNA, 16 nt, Human
cagccaaagccuccuc

SEQ ID NO: 1210809 - RNA, 15 nt, Human
cagccaaagccuccu

SEQ ID NO: 1210810 - RNA, 21 nt, Human
cagccaaagccuccuccagcc

SEQ ID NO: 1210811 - RNA, 18 nt, Human
cagccaaagccuccucca

SEQ ID NO: 1210812 - RNA, 21 nt, Human
cagcauccuggcacccggccc

SEQ ID NO: 1210813 - RNA, 20 nt, Human
cagcauccuggcacccggcc

SEQ ID NO: 1210814 - RNA, 19 nt, Human
cagcauccuggcacccggc

SEQ ID NO: 1210815 - RNA, 17 nt, Human
cagcauccuggcacccg

SEQ ID NO: 1210816 - RNA, 16 nt, Human
cagcauccuggcaccc

SEQ ID NO: 1210817 - RNA, 15 nt, Human
cagcauccuggcacc

SEQ ID NO: 1210818 - RNA, 14 nt, Human
cagcauccuggcac

SEQ ID NO: 1210819 - RNA, 20 nt, Human
cagcagggagggcuucugcc

SEQ ID NO: 1210820 - RNA, 18 nt, Human
cagcagggagggcuucug

SEQ ID NO: 1210821 - RNA, 22 nt, Human
cagcaggcucucaggccagcug

SEQ ID NO: 1210822 - RNA, 20 nt, Human
cagcaggcucucaggccagc

SEQ ID NO: 1210823 - RNA, 19 nt, Human
cagcaggcucucaggccag

SEQ ID NO: 1210824 - RNA, 18 nt, Human
cagcaggcucucaggcca

SEQ ID NO: 1210825 - RNA, 17 nt, Human
cagcaggcucucaggcc

SEQ ID NO: 1210826 - RNA, 16 nt, Human
cagcaggcucucaggc

SEQ ID NO: 1210827 - RNA, 15 nt, Human
cagcaggcucucagg

SEQ ID NO: 1210828 - RNA, 14 nt, Human
cagcaggcucucag

SEQ ID NO: 1210829 - RNA, 12 nt, Human
cagcaggcucuc

SEQ ID NO: 1210830 - RNA, 22 nt, Human
cagcagccuggacccuguggau

SEQ ID NO: 1210831 - RNA, 19 nt, Human
cagcagccuggacccugug

SEQ ID NO: 1210832 - RNA, 18 nt, Human
cagcagccuggacccugu

SEQ ID NO: 1210833 - RNA, 15 nt, Human
cagcagccuggaccc

SEQ ID NO: 1210834 - RNA, 14 nt, Human
cagcagccuggacc

SEQ ID NO: 1210835 - RNA, 12 nt, Human
cagcagccugga

SEQ ID NO: 1210836 - RNA, 15 nt, Human
cagcccacuucugcc

SEQ ID NO: 1210837 - RNA, 15 nt, Human
cagcccaccccucaa

SEQ ID NO: 1210838 - RNA, 22 nt, Human
cagccccaaaacucuccucugc

SEQ ID NO: 1210839 - RNA, 21 nt, Human
cagccccaaaacucuccucug

SEQ ID NO: 1210840 - RNA, 20 nt, Human
cagccccaaaacucuccucu

SEQ ID NO: 1210841 - RNA, 18 nt, Human
cagcccacuucugccaua

SEQ ID NO: 1210842 - RNA, 22 nt, Human
cagccaguaaaugggggugcau

SEQ ID NO: 1210843 - RNA, 23 nt, Human
cagccacggccaggccagaggga

SEQ ID NO: 1210844 - RNA, 22 nt, Human
cagccacggccaggccagaggg

SEQ ID NO: 1210845 - RNA, 21 nt, Human
cagccacggccaggccagagg

SEQ ID NO: 1210846 - RNA, 19 nt, Human
cagccacggccaggccaga

SEQ ID NO: 1210847 - RNA, 18 nt, Human
cagccacggccaggccag

SEQ ID NO: 1210848 - RNA, 17 nt, Human
cagccacggccaggcca

SEQ ID NO: 1210849 - RNA, 16 nt, Human
cagccacggccaggcc

SEQ ID NO: 1210850 - RNA, 15 nt, Human
cagccacggccaggc

SEQ ID NO: 1210851 - RNA, 14 nt, Human
cagccacggccagg

SEQ ID NO: 1210852 - RNA, 19 nt, Human
cagccacauuccugaugcu

SEQ ID NO: 1210853 - RNA, 17 nt, Human
cagccacauuccugaug

SEQ ID NO: 1210854 - RNA, 15 nt, Human
cagccacauuccuga

SEQ ID NO: 1210855 - RNA, 14 nt, Human
cagccacauuccug

SEQ ID NO: 1210856 - RNA, 13 nt, Human
cagcagagcaccu

SEQ ID NO: 1210857 - RNA, 11 nt, Human
cagcagagcac

SEQ ID NO: 1210858 - RNA, 22 nt, Human
cagcagaaaugccuuacccuca

SEQ ID NO: 1210859 - RNA, 19 nt, Human
cagcagaaaugccuuaccc

SEQ ID NO: 1210860 - RNA, 17 nt, Human
cagcagaaaugccuuac

SEQ ID NO: 1210861 - RNA, 15 nt, Human
cagcagaaaugccuu

SEQ ID NO: 1210862 - RNA, 17 nt, Human
cagcaagugagagcugg

SEQ ID NO: 1210863 - RNA, 16 nt, Human
cagcaagugagagcug

SEQ ID NO: 1210864 - RNA, 15 nt, Human
cagcaagugagagcu

SEQ ID NO: 1210865 - RNA, 14 nt, Human
cagcaagugagagc

SEQ ID NO: 1210866 - RNA, 12 nt, Human
cagcaagugaga

SEQ ID NO: 1210867 - RNA, 18 nt, Human
cagcaaggagauuuacaa

SEQ ID NO: 1210868 - RNA, 17 nt, Human
cagcaaggagauuuaca

SEQ ID NO: 1210869 - RNA, 22 nt, Human
cagcaauaaagcagcguuucua

SEQ ID NO: 1210870 - RNA, 21 nt, Human
cagcaauaaagcagcguuucu

SEQ ID NO: 1210871 - RNA, 13 nt, Human
cagcaauaaagca

SEQ ID NO: 1210872 - RNA, 21 nt, Human
cagcaagugagagcugggugu

SEQ ID NO: 1210873 - RNA, 19 nt, Human
cagcaagugagagcugggu

SEQ ID NO: 1210874 - RNA, 18 nt, Human
cagcaaaagaugcuucuc

SEQ ID NO: 1210875 - RNA, 15 nt, Human
cagauucuuuccuga

SEQ ID NO: 1210876 - RNA, 14 nt, Human
cagauucuuuccug

SEQ ID NO: 1210877 - RNA, 23 nt, Human
cagaugggugcuuggaggaagga

SEQ ID NO: 1210878 - RNA, 18 nt, Human
cagaugggugcuuggagg

SEQ ID NO: 1210879 - RNA, 14 nt, Human
cagcucaccagccc

SEQ ID NO: 1210880 - RNA, 19 nt, Human
cagaggagagaggaccccc

SEQ ID NO: 1210881 - RNA, 15 nt, Human
cagaggagagaggac

SEQ ID NO: 1210882 - RNA, 13 nt, Human
cagaggagagagg

SEQ ID NO: 1210883 - RNA, 11 nt, Human
cagaggcagcc

SEQ ID NO: 1210884 - RNA, 20 nt, Human
cagaggagagaggacccccu

SEQ ID NO: 1210885 - RNA, 13 nt, Human
cagaggaaggaga

SEQ ID NO: 1210886 - RNA, 13 nt, Human
cagagccugcagu

SEQ ID NO: 1210887 - RNA, 12 nt, Human
cagagccugcag

SEQ ID NO: 1210888 - RNA, 23 nt, Human
cagagcccacgcccccacuggug

SEQ ID NO: 1210889 - RNA, 21 nt, Human
cagagcccacgcccccacugg

SEQ ID NO: 1210890 - RNA, 20 nt, Human
cagagcccacgcccccacug

SEQ ID NO: 1210891 - RNA, 19 nt, Human
cagagcccacgcccccacu

SEQ ID NO: 1210892 - RNA, 17 nt, Human
cagagcccacgccccca

SEQ ID NO: 1210893 - RNA, 16 nt, Human
cagagcccacgccccc

SEQ ID NO: 1210894 - RNA, 20 nt, Human
cagagcccaccuuggcucaa

SEQ ID NO: 1210895 - RNA, 19 nt, Human
cagagcccaccuuggcuca

SEQ ID NO: 1210896 - RNA, 17 nt, Human
cagagcccaccuuggcu

SEQ ID NO: 1210897 - RNA, 15 nt, Human
cagagcccaccuugg

SEQ ID NO: 1210898 - RNA, 21 nt, Human
cagagcagagaccaucccuga

SEQ ID NO: 1210899 - RNA, 19 nt, Human
cagagcagagaccaucccu

SEQ ID NO: 1210900 - RNA, 18 nt, Human
cagagcagagaccauccc

SEQ ID NO: 1210901 - RNA, 17 nt, Human
cagagcagagaccaucc

SEQ ID NO: 1210902 - RNA, 15 nt, Human
cagagcagagaccau

SEQ ID NO: 1210903 - RNA, 14 nt, Human
cagagcagagacca

SEQ ID NO: 1210904 - RNA, 13 nt, Human
cagagcagagacc

SEQ ID NO: 1210905 - RNA, 12 nt, Human
cagagcagagac

SEQ ID NO: 1210906 - RNA, 11 nt, Human
cagagcagaga

SEQ ID NO: 1210907 - RNA, 23 nt, Human
cagagcaccuuagacagucccug

SEQ ID NO: 1210908 - RNA, 22 nt, Human
cagagcaccuuagacagucccu

SEQ ID NO: 1210909 - RNA, 21 nt, Human
cagagcaccuuagacaguccc

SEQ ID NO: 1210910 - RNA, 19 nt, Human
cagagcaccuuagacaguc

SEQ ID NO: 1210911 - RNA, 18 nt, Human
cagagcaccuuagacagu

SEQ ID NO: 1210912 - RNA, 16 nt, Human
cagagaccaucccuga

SEQ ID NO: 1210913 - RNA, 14 nt, Human
cagagaccaucccu

SEQ ID NO: 1210914 - RNA, 13 nt, Human
cagagaccauccc

SEQ ID NO: 1210915 - RNA, 17 nt, Human
cagagacacaagccuuc

SEQ ID NO: 1210916 - RNA, 16 nt, Human
cagagacacaagccuu

SEQ ID NO: 1210917 - RNA, 15 nt, Human
cagagacacaagccu

SEQ ID NO: 1210918 - RNA, 14 nt, Human
cagagacacaagcc

SEQ ID NO: 1210919 - RNA, 15 nt, Human
cagagaauucucuua

SEQ ID NO: 1210920 - RNA, 21 nt, Human
cagagaaugaaagggcccaga

SEQ ID NO: 1210921 - RNA, 20 nt, Human
cagagaaugaaagggcccag

SEQ ID NO: 1210922 - RNA, 19 nt, Human
cagagaaugaaagggccca

SEQ ID NO: 1210923 - RNA, 19 nt, Human
cagagacuccugcaggcag

SEQ ID NO: 1210924 - RNA, 18 nt, Human
cagagacuccugcaggca

SEQ ID NO: 1210925 - RNA, 17 nt, Human
cagagacuccugcaggc

SEQ ID NO: 1210926 - RNA, 16 nt, Human
cagagacuccugcagg

SEQ ID NO: 1210927 - RNA, 15 nt, Human
cagagacuccugcag

SEQ ID NO: 1210928 - RNA, 14 nt, Human
cagagacuccugca

SEQ ID NO: 1210929 - RNA, 13 nt, Human
cagagacuccugc

SEQ ID NO: 1210930 - RNA, 21 nt, Human
cagagaccaucccugaaggcc

SEQ ID NO: 1210931 - RNA, 20 nt, Human
cagagaccaucccugaaggc

SEQ ID NO: 1210932 - RNA, 19 nt, Human
cagagaccaucccugaagg

SEQ ID NO: 1210933 - RNA, 18 nt, Human
cagagaccaucccugaag

SEQ ID NO: 1210934 - RNA, 17 nt, Human
cagagaccaucccugaa

SEQ ID NO: 1210935 - RNA, 20 nt, Human
cagagcaagugagacccugu

SEQ ID NO: 1210936 - RNA, 14 nt, Human
cagagcaagugaga

SEQ ID NO: 1210937 - RNA, 16 nt, Human
cagagcaccuuagaca

SEQ ID NO: 1210938 - RNA, 13 nt, Human
cagagucucacug

SEQ ID NO: 1210939 - RNA, 21 nt, Human
cagagucucacuguugcccag

SEQ ID NO: 1210940 - RNA, 20 nt, Human
cagagucucacuguugccca

SEQ ID NO: 1210941 - RNA, 19 nt, Human
cagagucucacuguugccc

SEQ ID NO: 1210942 - RNA, 17 nt, Human
cagagucucacuguugc

SEQ ID NO: 1210943 - RNA, 19 nt, Human
cagagggccugcaagggag

SEQ ID NO: 1210944 - RNA, 15 nt, Human
cagagggccugcaag

SEQ ID NO: 1210945 - RNA, 23 nt, Human
cagagggagugacagaggcagcc

SEQ ID NO: 1210946 - RNA, 22 nt, Human
cagagggagugacagaggcagc

SEQ ID NO: 1210947 - RNA, 21 nt, Human
cagagggagugacagaggcag

SEQ ID NO: 1210948 - RNA, 20 nt, Human
cagagggagugacagaggca

SEQ ID NO: 1210949 - RNA, 20 nt, Human
cagagugagacucugucuca

SEQ ID NO: 1210950 - RNA, 19 nt, Human
cagagugagacucugucuc

SEQ ID NO: 1210951 - RNA, 18 nt, Human
cagagugagacucugucu

SEQ ID NO: 1210952 - RNA, 17 nt, Human
cagagugagacucuguc

SEQ ID NO: 1210953 - RNA, 16 nt, Human
cagagugagacucugu

SEQ ID NO: 1210954 - RNA, 23 nt, Human
cagagucucacuguugcccaggc

SEQ ID NO: 1210955 - RNA, 22 nt, Human
cagagucucacuguugcccagg

SEQ ID NO: 1210956 - RNA, 19 nt, Human
cagagggagugacagaggc

SEQ ID NO: 1210957 - RNA, 18 nt, Human
cagagggagugacagagg

SEQ ID NO: 1210958 - RNA, 16 nt, Human
cagagggagugacaga

SEQ ID NO: 1210959 - RNA, 14 nt, Human
cagagggagugaca

SEQ ID NO: 1210960 - RNA, 23 nt, Human
cagaggcugccucucccaucacu

SEQ ID NO: 1210961 - RNA, 13 nt, Human
cagaggcugccuc

SEQ ID NO: 1210962 - RNA, 21 nt, Human
cagaggccaugggccuccugu

SEQ ID NO: 1210963 - RNA, 20 nt, Human
cagaggccaugggccuccug

SEQ ID NO: 1210964 - RNA, 19 nt, Human
cagaggccaugggccuccu

SEQ ID NO: 1210965 - RNA, 23 nt, Human
cagaggcagccccauucugccug

SEQ ID NO: 1210966 - RNA, 22 nt, Human
cagaggcagccccauucugccu

SEQ ID NO: 1210967 - RNA, 20 nt, Human
cagaggcagccccauucugc

SEQ ID NO: 1210968 - RNA, 19 nt, Human
cagaggcagccccauucug

SEQ ID NO: 1210969 - RNA, 18 nt, Human
cagaggcagccccauucu

SEQ ID NO: 1210970 - RNA, 15 nt, Human
cagaggcagccccau

SEQ ID NO: 1210971 - RNA, 14 nt, Human
cagaggcagcccca

SEQ ID NO: 1210972 - RNA, 13 nt, Human
cagaggcagcccc

SEQ ID NO: 1210973 - RNA, 12 nt, Human
cagaggcagccc

SEQ ID NO: 1210974 - RNA, 19 nt, Human
cagaguuguuacauuuuua

SEQ ID NO: 1210975 - RNA, 18 nt, Human
cagaguuguuacauuuuu

SEQ ID NO: 1210976 - RNA, 15 nt, Human
cagaguuguuacauu

SEQ ID NO: 1210977 - RNA, 14 nt, Human
cagaguuguuacau

SEQ ID NO: 1210978 - RNA, 22 nt, Human
cagaguugaagacagagcuaca

SEQ ID NO: 1210979 - RNA, 20 nt, Human
cagaguugaagacagagcua

SEQ ID NO: 1210980 - RNA, 19 nt, Human
cagaguugaagacagagcu

SEQ ID NO: 1210981 - RNA, 18 nt, Human
cagaguugaagacagagc

SEQ ID NO: 1210982 - RNA, 17 nt, Human
cagaguugaagacagag

SEQ ID NO: 1210983 - RNA, 16 nt, Human
cagaguugaagacaga

SEQ ID NO: 1210984 - RNA, 15 nt, Human
cagaguugaagacag

SEQ ID NO: 1210985 - RNA, 14 nt, Human
cagaguugaagaca

SEQ ID NO: 1210986 - RNA, 20 nt, Human
cagaucucuaacuucaccau

SEQ ID NO: 1210987 - RNA, 23 nt, Human
cagauacaggaaaagcugcugac

SEQ ID NO: 1210988 - RNA, 22 nt, Human
cagauacaggaaaagcugcuga

SEQ ID NO: 1210989 - RNA, 21 nt, Human
cagauacaggaaaagcugcug

SEQ ID NO: 1210990 - RNA, 20 nt, Human
cagauacaggaaaagcugcu

SEQ ID NO: 1210991 - RNA, 22 nt, Human
cagaugcaccagcccuuagcag

SEQ ID NO: 1210992 - RNA, 17 nt, Human
cagaugcaccagcccuu

SEQ ID NO: 1210993 - RNA, 16 nt, Human
cagaugcaccagcccu

SEQ ID NO: 1210994 - RNA, 14 nt, Human
cagaugcaccagcc

SEQ ID NO: 1210995 - RNA, 13 nt, Human
cagaugcaccagc

SEQ ID NO: 1210996 - RNA, 16 nt, Human
cagaggccaugggccu

SEQ ID NO: 1210997 - RNA, 23 nt, Human
cagagaaaguacuucuccacccu

SEQ ID NO: 1210998 - RNA, 19 nt, Human
cagagaaaguacuucucca

SEQ ID NO: 1210999 - RNA, 20 nt, Human
cagaccacaaaacuuuucua

SEQ ID NO: 1211000 - RNA, 14 nt, Human
cagaccacaaaacu

SEQ ID NO: 1211001 - RNA, 22 nt, Human
cagacccugcccugugggcccc

SEQ ID NO: 1211002 - RNA, 21 nt, Human
cagacccugcccugugggccc

SEQ ID NO: 1211003 - RNA, 17 nt, Human
cagacccugcccugugg

SEQ ID NO: 1211004 - RNA, 16 nt, Human
cagacccugcccugug

SEQ ID NO: 1211005 - RNA, 15 nt, Human
cagacccugcccugu

SEQ ID NO: 1211006 - RNA, 14 nt, Human
cagacccugcccug

SEQ ID NO: 1211007 - RNA, 13 nt, Human
cagacccugcccu

SEQ ID NO: 1211008 - RNA, 12 nt, Human
cagacccugccc

SEQ ID NO: 1211009 - RNA, 16 nt, Human
cagacccggcugcgug

SEQ ID NO: 1211010 - RNA, 14 nt, Human
cagacccggcugcg

SEQ ID NO: 1211011 - RNA, 12 nt, Human
cagacccggcug

SEQ ID NO: 1211012 - RNA, 14 nt, Human
cagaauuucccaaa

SEQ ID NO: 1211013 - RNA, 18 nt, Human
cagaauucucuaguuuga

SEQ ID NO: 1211014 - RNA, 15 nt, Human
cagaauucucuaguu

SEQ ID NO: 1211015 - RNA, 11 nt, Human
cagaauucuca

SEQ ID NO: 1211016 - RNA, 20 nt, Human
cagacaacaaaccuguuucu

SEQ ID NO: 1211017 - RNA, 22 nt, Human
cagacaaagcgugguggacaug

SEQ ID NO: 1211018 - RNA, 12 nt, Human
cagacaaagcgu

SEQ ID NO: 1211019 - RNA, 24 nt, Human
cagaauuucccaaagcagugcaug

SEQ ID NO: 1211020 - RNA, 20 nt, Human
cagaauuucccaaagcagug

SEQ ID NO: 1211021 - RNA, 19 nt, Human
cagaauuucccaaagcagu

SEQ ID NO: 1211022 - RNA, 18 nt, Human
cagaauuucccaaagcag

SEQ ID NO: 1211023 - RNA, 17 nt, Human
cagaauuucccaaagca

SEQ ID NO: 1211024 - RNA, 19 nt, Human
cagacauacuaaccagcag

SEQ ID NO: 1211025 - RNA, 20 nt, Human
cagacaguuaagagaaauga

SEQ ID NO: 1211026 - RNA, 22 nt, Human
cagacaccuugacagggcacac

SEQ ID NO: 1211027 - RNA, 20 nt, Human
cagacaccuugacagggcac

SEQ ID NO: 1211028 - RNA, 19 nt, Human
cagacaccuugacagggca

SEQ ID NO: 1211029 - RNA, 23 nt, Human
cagacacauguccaagaagccca

SEQ ID NO: 1211030 - RNA, 22 nt, Human
cagacacauguccaagaagccc

SEQ ID NO: 1211031 - RNA, 21 nt, Human
cagacacauguccaagaagcc

SEQ ID NO: 1211032 - RNA, 17 nt, Human
cagacacauguccaaga

SEQ ID NO: 1211033 - RNA, 14 nt, Human
cagacacaugucca

SEQ ID NO: 1211034 - RNA, 23 nt, Human
cagacacaggcccggcuccaggc

SEQ ID NO: 1211035 - RNA, 22 nt, Human
cagacacaggcccggcuccagg

SEQ ID NO: 1211036 - RNA, 21 nt, Human
cagacacaggcccggcuccag

SEQ ID NO: 1211037 - RNA, 18 nt, Human
cagacacaggcccggcuc

SEQ ID NO: 1211038 - RNA, 17 nt, Human
cagacacaggcccggcu

SEQ ID NO: 1211039 - RNA, 15 nt, Human
cagacacaggcccgg

SEQ ID NO: 1211040 - RNA, 14 nt, Human
cagacacaggcccg

SEQ ID NO: 1211041 - RNA, 13 nt, Human
cagacacaggccc

SEQ ID NO: 1211042 - RNA, 23 nt, Human
cagaaaauggaagacagcucuua

SEQ ID NO: 1211043 - RNA, 22 nt, Human
cagaaaauggaagacagcucuu

SEQ ID NO: 1211044 - RNA, 21 nt, Human
cagaaaauggaagacagcucu

SEQ ID NO: 1211045 - RNA, 20 nt, Human
cagaaaauggaagacagcuc

SEQ ID NO: 1211046 - RNA, 16 nt, Human
cagaaaauggaagaca

SEQ ID NO: 1211047 - RNA, 23 nt, Human
cacuuuguucuggcucuuccagg

SEQ ID NO: 1211048 - RNA, 16 nt, Human
cacuuuguucuggcuc

SEQ ID NO: 1211049 - RNA, 14 nt, Human
cacuuuguucuggc

SEQ ID NO: 1211050 - RNA, 13 nt, Human
cacuuuguucugg

SEQ ID NO: 1211051 - RNA, 16 nt, Human
cacuuugggaggccaa

SEQ ID NO: 1211052 - RNA, 13 nt, Human
cacuuugggaggc

SEQ ID NO: 1211053 - RNA, 12 nt, Human
cacuuugggagg

SEQ ID NO: 1211054 - RNA, 22 nt, Human
cacuuucuagccagaggagaga

SEQ ID NO: 1211055 - RNA, 22 nt, Human
cacuuuuguucuugguuuguaa

SEQ ID NO: 1211056 - RNA, 14 nt, Human
cacuuuuguucuug

SEQ ID NO: 1211057 - RNA, 21 nt, Human
cagaagacacugaugggcaac

SEQ ID NO: 1211058 - RNA, 18 nt, Human
cagaaucucaaauaacua

SEQ ID NO: 1211059 - RNA, 17 nt, Human
cagaaucucaaauaacu

SEQ ID NO: 1211060 - RNA, 19 nt, Human
cagaaggaagacuucaucc

SEQ ID NO: 1211061 - RNA, 18 nt, Human
cagaaggaagacuucauc

SEQ ID NO: 1211062 - RNA, 17 nt, Human
cagaaggaagacuucau

SEQ ID NO: 1211063 - RNA, 16 nt, Human
cagaaggaagacuuca

SEQ ID NO: 1211064 - RNA, 16 nt, Human
cagacaacaaaccugu

SEQ ID NO: 1211065 - RNA, 15 nt, Human
cacucauugaccuga

SEQ ID NO: 1211066 - RNA, 16 nt, Human
cacucaguccauagca

SEQ ID NO: 1211067 - RNA, 16 nt, Human
cacucccugcaaccug

SEQ ID NO: 1211068 - RNA, 13 nt, Human
cacucccugcaac

SEQ ID NO: 1211069 - RNA, 12 nt, Human
cacucccugcaa

SEQ ID NO: 1211070 - RNA, 22 nt, Human
cacucauugaccugaggcccuu

SEQ ID NO: 1211071 - RNA, 20 nt, Human
cacucauugaccugaggccc

SEQ ID NO: 1211072 - RNA, 19 nt, Human
cacucauugaccugaggcc

SEQ ID NO: 1211073 - RNA, 18 nt, Human
cacucauugaccugaggc

SEQ ID NO: 1211074 - RNA, 21 nt, Human
cacuccuucacagaugggugc

SEQ ID NO: 1211075 - RNA, 14 nt, Human
cacuccuucacaga

SEQ ID NO: 1211076 - RNA, 17 nt, Human
cacucccugcaaccuga

SEQ ID NO: 1211077 - RNA, 14 nt, Human
cacucuggcagcuc

SEQ ID NO: 1211078 - RNA, 13 nt, Human
cacucuggcagcu

SEQ ID NO: 1211079 - RNA, 12 nt, Human
cacucuggcagc

SEQ ID NO: 1211080 - RNA, 23 nt, Human
cacucugagacucgcgacaaugc

SEQ ID NO: 1211081 - RNA, 12 nt, Human
cacucugagacu

SEQ ID NO: 1211082 - RNA, 12 nt, Human
cacucuccuugg

SEQ ID NO: 1211083 - RNA, 22 nt, Human
cacucagaagacacugaugggc

SEQ ID NO: 1211084 - RNA, 19 nt, Human
cacucagaagacacugaug

SEQ ID NO: 1211085 - RNA, 18 nt, Human
cacucagaagacacugau

SEQ ID NO: 1211086 - RNA, 17 nt, Human
cacucagaagacacuga

SEQ ID NO: 1211087 - RNA, 16 nt, Human
cacucagaagacacug

SEQ ID NO: 1211088 - RNA, 12 nt, Human
cacucagaagac

SEQ ID NO: 1211089 - RNA, 20 nt, Human
cacucacauuuauucugcuc

SEQ ID NO: 1211090 - RNA, 19 nt, Human
cacucacauuuauucugcu

SEQ ID NO: 1211091 - RNA, 20 nt, Human
cacucaaaagcugggcaggu

SEQ ID NO: 1211092 - RNA, 19 nt, Human
cacucaaaagcugggcagg

SEQ ID NO: 1211093 - RNA, 18 nt, Human
cacucaaaagcugggcag

SEQ ID NO: 1211094 - RNA, 17 nt, Human
cacucaaaagcugggca

SEQ ID NO: 1211095 - RNA, 15 nt, Human
cacucaaaagcuggg

SEQ ID NO: 1211096 - RNA, 21 nt, Human
cacuauguugcccaggcaggu

SEQ ID NO: 1211097 - RNA, 20 nt, Human
cacuauguugcccaggcagg

SEQ ID NO: 1211098 - RNA, 18 nt, Human
cacuaaggugugcucuga

SEQ ID NO: 1211099 - RNA, 17 nt, Human
cacuaaggugugcucug

SEQ ID NO: 1211100 - RNA, 18 nt, Human
cacuaaccacgcuggacc

SEQ ID NO: 1211101 - RNA, 16 nt, Human
cacuaaccacgcugga

SEQ ID NO: 1211102 - RNA, 15 nt, Human
cacuaaccacgcugg

SEQ ID NO: 1211103 - RNA, 14 nt, Human
cacuaaccacgcug

SEQ ID NO: 1211104 - RNA, 21 nt, Human
cacuauagccuaggugacaga

SEQ ID NO: 1211105 - RNA, 14 nt, Human
cacuauagccuagg

SEQ ID NO: 1211106 - RNA, 18 nt, Human
cacuauaauguaagcucu

SEQ ID NO: 1211107 - RNA, 14 nt, Human
cacuauaauguaag

SEQ ID NO: 1211108 - RNA, 19 nt, Human
cacuauguugcccaggcag

SEQ ID NO: 1211109 - RNA, 18 nt, Human
cacuauguugcccaggca

SEQ ID NO: 1211110 - RNA, 17 nt, Human
cacuauguugcccaggc

SEQ ID NO: 1211111 - RNA, 16 nt, Human
cacuauguugcccagg

SEQ ID NO: 1211112 - RNA, 15 nt, Human
cacuauguugcccag

SEQ ID NO: 1211113 - RNA, 19 nt, Human
cacgugguccuaaucuucu

SEQ ID NO: 1211114 - RNA, 16 nt, Human
cacgugguccuaaucu

SEQ ID NO: 1211115 - RNA, 23 nt, Human
cacguuucuaaaggcuaccuuug

SEQ ID NO: 1211116 - RNA, 14 nt, Human
cacguuucuaaagg

SEQ ID NO: 1211117 - RNA, 12 nt, Human
cacguuucuaaa

SEQ ID NO: 1211118 - RNA, 14 nt, Human
cacguacacacaca

SEQ ID NO: 1211119 - RNA, 19 nt, Human
cacguacacacacauacac

SEQ ID NO: 1211120 - RNA, 18 nt, Human
cacguacacacacauaca

SEQ ID NO: 1211121 - RNA, 20 nt, Human
cacggcucacugcagccuca

SEQ ID NO: 1211122 - RNA, 19 nt, Human
cacggcucacugcagccuc

SEQ ID NO: 1211123 - RNA, 17 nt, Human
cacggcucacugcagcc

SEQ ID NO: 1211124 - RNA, 16 nt, Human
cacggcucacugcagc

SEQ ID NO: 1211125 - RNA, 15 nt, Human
cacgcuggagugcag

SEQ ID NO: 1211126 - RNA, 20 nt, Human
cacgcuggaccuugaacugg

SEQ ID NO: 1211127 - RNA, 17 nt, Human
cacgcuggaccuugaac

SEQ ID NO: 1211128 - RNA, 23 nt, Human
cacgcgugcacacaccagagccc

SEQ ID NO: 1211129 - RNA, 21 nt, Human
cacgcgugcacacaccagagc

SEQ ID NO: 1211130 - RNA, 16 nt, Human
cacgcgugcacacacc

SEQ ID NO: 1211131 - RNA, 15 nt, Human
cacgcgugcacacac

SEQ ID NO: 1211132 - RNA, 20 nt, Human
cacgccuguaauccuagcac

SEQ ID NO: 1211133 - RNA, 19 nt, Human
cacgccuguaauccuagca

SEQ ID NO: 1211134 - RNA, 18 nt, Human
cacgcccccacuggugac

SEQ ID NO: 1211135 - RNA, 17 nt, Human
cacgcccccacugguga

SEQ ID NO: 1211136 - RNA, 15 nt, Human
cacgcccccacuggu

SEQ ID NO: 1211137 - RNA, 13 nt, Human
cacgcccccacug

SEQ ID NO: 1211138 - RNA, 23 nt, Human
cacgccagauucuuuccugaggc

SEQ ID NO: 1211139 - RNA, 22 nt, Human
cacgccagauucuuuccugagg

SEQ ID NO: 1211140 - RNA, 20 nt, Human
cacgccagauucuuuccuga

SEQ ID NO: 1211141 - RNA, 19 nt, Human
cacgccagauucuuuccug

SEQ ID NO: 1211142 - RNA, 15 nt, Human
cacgccacugcacua

SEQ ID NO: 1211143 - RNA, 13 nt, Human
cacgccacugcac

SEQ ID NO: 1211144 - RNA, 17 nt, Human
cacgcacuucgggaggu

SEQ ID NO: 1211145 - RNA, 16 nt, Human
cacgauuucuguuuag

SEQ ID NO: 1211146 - RNA, 14 nt, Human
cacgauuucuguuu

SEQ ID NO: 1211147 - RNA, 12 nt, Human
cacgauuucugu

SEQ ID NO: 1211148 - RNA, 17 nt, Human
cacgacugcccggcagg

SEQ ID NO: 1211149 - RNA, 16 nt, Human
cacgacugcccggcag

SEQ ID NO: 1211150 - RNA, 22 nt, Human
cacgaauauugcugauggugca

SEQ ID NO: 1211151 - RNA, 19 nt, Human
cacgaauauugcugauggu

SEQ ID NO: 1211152 - RNA, 16 nt, Human
cacgaauauugcugau

SEQ ID NO: 1211153 - RNA, 18 nt, Human
caccuugacagggcacac

SEQ ID NO: 1211154 - RNA, 16 nt, Human
caccuugacagggcac

SEQ ID NO: 1211155 - RNA, 15 nt, Human
caccuugacagggca

SEQ ID NO: 1211156 - RNA, 13 nt, Human
caccuugacaggg

SEQ ID NO: 1211157 - RNA, 19 nt, Human
caccuuagacagucccugc

SEQ ID NO: 1211158 - RNA, 18 nt, Human
caccuuagacagucccug

SEQ ID NO: 1211159 - RNA, 16 nt, Human
caccuuagacaguccc

SEQ ID NO: 1211160 - RNA, 14 nt, Human
caccuuagacaguc

SEQ ID NO: 1211161 - RNA, 23 nt, Human
caccuuagacagucccugccaau

SEQ ID NO: 1211162 - RNA, 21 nt, Human
caccuuagacagucccugcca

SEQ ID NO: 1211163 - RNA, 24 nt, Human
cacugaugggcaacccccagccug

SEQ ID NO: 1211164 - RNA, 18 nt, Human
cacugaugggcaaccccc

SEQ ID NO: 1211165 - RNA, 14 nt, Human
cacugaugggcaac

SEQ ID NO: 1211166 - RNA, 23 nt, Human
cacugagacagcccgggcucugc

SEQ ID NO: 1211167 - RNA, 23 nt, Human
cacugcaaccuccgccucuuggg

SEQ ID NO: 1211168 - RNA, 16 nt, Human
cacugcaaccuccgcc

SEQ ID NO: 1211169 - RNA, 14 nt, Human
cacugcaaccuccg

SEQ ID NO: 1211170 - RNA, 13 nt, Human
cacugcaaccucc

SEQ ID NO: 1211171 - RNA, 22 nt, Human
cacugagacagcccgggcucug

SEQ ID NO: 1211172 - RNA, 19 nt, Human
cacugagacagcccgggcu

SEQ ID NO: 1211173 - RNA, 17 nt, Human
cacugagacagcccggg

SEQ ID NO: 1211174 - RNA, 14 nt, Human
cacugagacagccc

SEQ ID NO: 1211175 - RNA, 13 nt, Human
cacugagacagcc

SEQ ID NO: 1211176 - RNA, 12 nt, Human
cacugagacagc

SEQ ID NO: 1211177 - RNA, 23 nt, Human
cacugacauuguuggccaaagcc

SEQ ID NO: 1211178 - RNA, 20 nt, Human
cacucugucgcccagucugg

SEQ ID NO: 1211179 - RNA, 19 nt, Human
cacucugucgcccagucug

SEQ ID NO: 1211180 - RNA, 16 nt, Human
cacucugucgcccagu

SEQ ID NO: 1211181 - RNA, 15 nt, Human
cacucugucgcccag

SEQ ID NO: 1211182 - RNA, 23 nt, Human
cacucuggcagcucagagagggu

SEQ ID NO: 1211183 - RNA, 21 nt, Human
cacucuggcagcucagagagg

SEQ ID NO: 1211184 - RNA, 20 nt, Human
cacucuggcagcucagagag

SEQ ID NO: 1211185 - RNA, 19 nt, Human
cacucuggcagcucagaga

SEQ ID NO: 1211186 - RNA, 17 nt, Human
cacucuggcagcucaga

SEQ ID NO: 1211187 - RNA, 16 nt, Human
cacucuggcagcucag

SEQ ID NO: 1211188 - RNA, 15 nt, Human
cacucuggcagcuca

SEQ ID NO: 1211189 - RNA, 12 nt, Human
cacugcucuggu

SEQ ID NO: 1211190 - RNA, 19 nt, Human
cacugcacuauagccuagg

SEQ ID NO: 1211191 - RNA, 18 nt, Human
cacugcacuauagccuag

SEQ ID NO: 1211192 - RNA, 19 nt, Human
cacugcaccgggccacaga

SEQ ID NO: 1211193 - RNA, 18 nt, Human
cacugcaccgggccacag

SEQ ID NO: 1211194 - RNA, 16 nt, Human
cacugcaccgggccac

SEQ ID NO: 1211195 - RNA, 15 nt, Human
cacugcaccgggcca

SEQ ID NO: 1211196 - RNA, 14 nt, Human
cacugcaccgggcc

SEQ ID NO: 1211197 - RNA, 17 nt, Human
cacuggaacacuaauga

SEQ ID NO: 1211198 - RNA, 21 nt, Human
cacugcuuuuggucuguguga

SEQ ID NO: 1211199 - RNA, 20 nt, Human
cacugcuuuuggucugugug

SEQ ID NO: 1211200 - RNA, 22 nt, Human
cacugcuuccagugaggcucug

SEQ ID NO: 1211201 - RNA, 21 nt, Human
cacugcuuccagugaggcucu

SEQ ID NO: 1211202 - RNA, 20 nt, Human
cacugcuuccagugaggcuc

SEQ ID NO: 1211203 - RNA, 19 nt, Human
cacugcuuccagugaggcu

SEQ ID NO: 1211204 - RNA, 18 nt, Human
cacugcuuccagugaggc

SEQ ID NO: 1211205 - RNA, 16 nt, Human
cacugcuuccagugag

SEQ ID NO: 1211206 - RNA, 15 nt, Human
cacugcuuccaguga

SEQ ID NO: 1211207 - RNA, 14 nt, Human
cacugcuuccagug

SEQ ID NO: 1211208 - RNA, 13 nt, Human
cacugcuuaacuu

SEQ ID NO: 1211209 - RNA, 14 nt, Human
cacugugccaugug

SEQ ID NO: 1211210 - RNA, 13 nt, Human
cacugugaagaga

SEQ ID NO: 1211211 - RNA, 22 nt, Human
cacuguucucugcccuccaaga

SEQ ID NO: 1211212 - RNA, 21 nt, Human
cacuguucucugcccuccaag

SEQ ID NO: 1211213 - RNA, 19 nt, Human
cacuguucucugcccucca

SEQ ID NO: 1211214 - RNA, 17 nt, Human
cacuguucucugcccuc

SEQ ID NO: 1211215 - RNA, 16 nt, Human
cacuguucucugcccu

SEQ ID NO: 1211216 - RNA, 15 nt, Human
cacuguucucugccc

SEQ ID NO: 1211217 - RNA, 14 nt, Human
cacuguucucugcc

SEQ ID NO: 1211218 - RNA, 13 nt, Human
cacuguucucugc

SEQ ID NO: 1211219 - RNA, 15 nt, Human
cacugugcugagucu

SEQ ID NO: 1211220 - RNA, 13 nt, Human
cacugugcugagu

SEQ ID NO: 1211221 - RNA, 18 nt, Human
cacugugccaugugccag

SEQ ID NO: 1211222 - RNA, 16 nt, Human
cacugugccaugugcc

SEQ ID NO: 1211223 - RNA, 15 nt, Human
cacugugccaugugc

SEQ ID NO: 1211224 - RNA, 22 nt, Human
cacugugcugagucugaaggcu

SEQ ID NO: 1211225 - RNA, 21 nt, Human
cacugugcugagucugaaggc

SEQ ID NO: 1211226 - RNA, 20 nt, Human
cacugugcugagucugaagg

SEQ ID NO: 1211227 - RNA, 17 nt, Human
cacugugcugagucuga

SEQ ID NO: 1211228 - RNA, 20 nt, Human
cacuuucuagccagaggaga

SEQ ID NO: 1211229 - RNA, 19 nt, Human
cacuuucuagccagaggag

SEQ ID NO: 1211230 - RNA, 24 nt, Human
cacuugcagacucuacagaggcca

SEQ ID NO: 1211231 - RNA, 22 nt, Human
cacuugcagacucuacagaggc

SEQ ID NO: 1211232 - RNA, 19 nt, Human
cacuugcagacucuacaga

SEQ ID NO: 1211233 - RNA, 18 nt, Human
cacuugcagacucuacag

SEQ ID NO: 1211234 - RNA, 14 nt, Human
cacuugcagacucu

SEQ ID NO: 1211235 - RNA, 16 nt, Human
cacuugacaucaacug

SEQ ID NO: 1211236 - RNA, 20 nt, Human
cacuugagaauuacccuuuu

SEQ ID NO: 1211237 - RNA, 17 nt, Human
cacuugagaauuacccu

SEQ ID NO: 1211238 - RNA, 19 nt, Human
cacuugacaucaacugcau

SEQ ID NO: 1211239 - RNA, 13 nt, Human
cacuugcagacuc

SEQ ID NO: 1211240 - RNA, 13 nt, Human
cacuugaguccag

SEQ ID NO: 1211241 - RNA, 22 nt, Human
cacuucugccauauucuguugg

SEQ ID NO: 1211242 - RNA, 23 nt, Human
cacuucgggaggucgaggcagga

SEQ ID NO: 1211243 - RNA, 21 nt, Human
cacuucgggaggucgaggcag

SEQ ID NO: 1211244 - RNA, 16 nt, Human
cacuucccuacaugga

SEQ ID NO: 1211245 - RNA, 14 nt, Human
cacuguugcccagg

SEQ ID NO: 1211246 - RNA, 21 nt, Human
cacuucagcugacuuuucugu

SEQ ID NO: 1211247 - RNA, 12 nt, Human
cacuucagcuga

SEQ ID NO: 1211248 - RNA, 18 nt, Human
caccgggccacagagaaa

SEQ ID NO: 1211249 - RNA, 15 nt, Human
caccgggccacagag

SEQ ID NO: 1211250 - RNA, 22 nt, Human
caccgggcacucagaagacacu

SEQ ID NO: 1211251 - RNA, 15 nt, Human
caccgggcacucaga

SEQ ID NO: 1211252 - RNA, 21 nt, Human
caccgcagacaggaccaggga

SEQ ID NO: 1211253 - RNA, 14 nt, Human
caccgggcacucag

SEQ ID NO: 1211254 - RNA, 20 nt, Human
caccggcuggccuggccccu

SEQ ID NO: 1211255 - RNA, 18 nt, Human
caccggcuggccuggccc

SEQ ID NO: 1211256 - RNA, 17 nt, Human
caccggcuggccuggcc

SEQ ID NO: 1211257 - RNA, 16 nt, Human
caccggcuggccuggc

SEQ ID NO: 1211258 - RNA, 15 nt, Human
caccggcuggccugg

SEQ ID NO: 1211259 - RNA, 14 nt, Human
caccggcuggccug

SEQ ID NO: 1211260 - RNA, 17 nt, Human
caccucucccuuggauu

SEQ ID NO: 1211261 - RNA, 14 nt, Human
caccucucccuugg

SEQ ID NO: 1211262 - RNA, 13 nt, Human
caccucucccuug

SEQ ID NO: 1211263 - RNA, 14 nt, Human
caccuccugccucg

SEQ ID NO: 1211264 - RNA, 13 nt, Human
caccuccugccuc

SEQ ID NO: 1211265 - RNA, 11 nt, Human
caccuccugcc

SEQ ID NO: 1211266 - RNA, 23 nt, Human
caccuggccucugcacuccccug

SEQ ID NO: 1211267 - RNA, 20 nt, Human
caccuggccucugcacuccc

SEQ ID NO: 1211268 - RNA, 19 nt, Human
caccuggccucugcacucc

SEQ ID NO: 1211269 - RNA, 18 nt, Human
caccuggccucugcacuc

SEQ ID NO: 1211270 - RNA, 17 nt, Human
caccuggccucugcacu

SEQ ID NO: 1211271 - RNA, 15 nt, Human
caccuggccucugca

SEQ ID NO: 1211272 - RNA, 14 nt, Human
caccuggccucugc

SEQ ID NO: 1211273 - RNA, 13 nt, Human
caccuggccucug

SEQ ID NO: 1211274 - RNA, 12 nt, Human
caccuggccucu

SEQ ID NO: 1211275 - RNA, 20 nt, Human
caccuggaauauauaaccag

SEQ ID NO: 1211276 - RNA, 23 nt, Human
caccugcggugcuaucuccccca

SEQ ID NO: 1211277 - RNA, 23 nt, Human
caccugaagacucauucuucugu

SEQ ID NO: 1211278 - RNA, 15 nt, Human
caccugaagacucau

SEQ ID NO: 1211279 - RNA, 14 nt, Human
caccugaagacuca

SEQ ID NO: 1211280 - RNA, 19 nt, Human
caccucugcacaagcugca

SEQ ID NO: 1211281 - RNA, 18 nt, Human
caccucugcacaagcugc

SEQ ID NO: 1211282 - RNA, 19 nt, Human
caccucucucacuccuuga

SEQ ID NO: 1211283 - RNA, 18 nt, Human
caccucucucacuccuug

SEQ ID NO: 1211284 - RNA, 17 nt, Human
caccucucucacuccuu

SEQ ID NO: 1211285 - RNA, 15 nt, Human
caccucucucacucc

SEQ ID NO: 1211286 - RNA, 18 nt, Human
caccgcagacaggaccag

SEQ ID NO: 1211287 - RNA, 17 nt, Human
caccgcagacaggacca

SEQ ID NO: 1211288 - RNA, 15 nt, Human
caccgcagacaggac

SEQ ID NO: 1211289 - RNA, 14 nt, Human
caccgcagacagga

SEQ ID NO: 1211290 - RNA, 13 nt, Human
caccgcagacagg

SEQ ID NO: 1211291 - RNA, 12 nt, Human
caccgcagacag

SEQ ID NO: 1211292 - RNA, 22 nt, Human
caccgaaaacguggcugcuuca

SEQ ID NO: 1211293 - RNA, 21 nt, Human
caccgaaaacguggcugcuuc

SEQ ID NO: 1211294 - RNA, 19 nt, Human
caccgaaaacguggcugcu

SEQ ID NO: 1211295 - RNA, 18 nt, Human
caccgaaaacguggcugc

SEQ ID NO: 1211296 - RNA, 15 nt, Human
caccgaaaacguggc

SEQ ID NO: 1211297 - RNA, 23 nt, Human
cacccugugauggggcccugccu

SEQ ID NO: 1211298 - RNA, 22 nt, Human
cacccugugauggggcccugcc

SEQ ID NO: 1211299 - RNA, 21 nt, Human
cacccugugauggggcccugc

SEQ ID NO: 1211300 - RNA, 20 nt, Human
cacccugugauggggcccug

SEQ ID NO: 1211301 - RNA, 18 nt, Human
cacccugugauggggccc

SEQ ID NO: 1211302 - RNA, 15 nt, Human
cacccugugaugggg

SEQ ID NO: 1211303 - RNA, 12 nt, Human
cacccugugaug

SEQ ID NO: 1211304 - RNA, 11 nt, Human
cacccugugau

SEQ ID NO: 1211305 - RNA, 21 nt, Human
cacccggccccugcugguuca

SEQ ID NO: 1211306 - RNA, 18 nt, Human
cacccggccccugcuggu

SEQ ID NO: 1211307 - RNA, 17 nt, Human
cacccggccccugcugg

SEQ ID NO: 1211308 - RNA, 16 nt, Human
cacccggccccugcug

SEQ ID NO: 1211309 - RNA, 14 nt, Human
cacccggccccugc

SEQ ID NO: 1211310 - RNA, 13 nt, Human
cacccggccccug

SEQ ID NO: 1211311 - RNA, 12 nt, Human
cacccggccccu

SEQ ID NO: 1211312 - RNA, 19 nt, Human
cacccgcuaagagggaggg

SEQ ID NO: 1211313 - RNA, 20 nt, Human
caccccucaacaccucugca

SEQ ID NO: 1211314 - RNA, 13 nt, Human
cacauauugauuu

SEQ ID NO: 1211315 - RNA, 20 nt, Human
cacauauugauuuccguuaa

SEQ ID NO: 1211316 - RNA, 16 nt, Human
cacgccagauucuuuc

SEQ ID NO: 1211317 - RNA, 22 nt, Human
aggauguucuagcauggcugcc

SEQ ID NO: 1211318 - RNA, 14 nt, Human
aggaggucucuaag

SEQ ID NO: 1211319 - RNA, 19 nt, Human
aggaaguacuggagaaaau

SEQ ID NO: 1211320 - RNA, 14 nt, Human
aggagugagcacua

SEQ ID NO: 1211321 - RNA, 12 nt, Human
aggagugagcac

SEQ ID NO: 1211322 - RNA, 15 nt, Human
aggaggucucuaaga

SEQ ID NO: 1211323 - RNA, 18 nt, Human
aggcagccaggccacaag

SEQ ID NO: 1211324 - RNA, 12 nt, Human
aggcauguucuc

SEQ ID NO: 1211325 - RNA, 24 nt, Human
aggcaugugaugagaggaaaucac

SEQ ID NO: 1211326 - RNA, 23 nt, Human
aggcaugugaugagaggaaauca

SEQ ID NO: 1211327 - RNA, 17 nt, Human
aggcauuccccaggagg

SEQ ID NO: 1211328 - RNA, 23 nt, Human
aggcauuccccaggaggccagcc

SEQ ID NO: 1211329 - RNA, 22 nt, Human
aggcauuccccaggaggccagc

SEQ ID NO: 1211330 - RNA, 22 nt, Human
aggcauguucucugaggacacu

SEQ ID NO: 1211331 - RNA, 20 nt, Human
aggcauguucucugaggaca

SEQ ID NO: 1211332 - RNA, 21 nt, Human
aggcauuccccaggaggccag

SEQ ID NO: 1211333 - RNA, 23 nt, Human
aggccagcugcuugggcuucauc

SEQ ID NO: 1211334 - RNA, 17 nt, Human
aggcccucugcccacuc

SEQ ID NO: 1211335 - RNA, 17 nt, Human
aggccaugggccuccug

SEQ ID NO: 1211336 - RNA, 16 nt, Human
aggccaugggccuccu

SEQ ID NO: 1211337 - RNA, 14 nt, Human
aggccaugggccuc

SEQ ID NO: 1211338 - RNA, 23 nt, Human
aggccaggcccucugcccacucc

SEQ ID NO: 1211339 - RNA, 19 nt, Human
aggccaggcccucugccca

SEQ ID NO: 1211340 - RNA, 18 nt, Human
aggccaggcccucugccc

SEQ ID NO: 1211341 - RNA, 17 nt, Human
aggccaggcccucugcc

SEQ ID NO: 1211342 - RNA, 16 nt, Human
aggccagcugcuuggg

SEQ ID NO: 1211343 - RNA, 14 nt, Human
aggccagcugcuug

SEQ ID NO: 1211344 - RNA, 13 nt, Human
aggccagcugcuu

SEQ ID NO: 1211345 - RNA, 16 nt, Human
aggcagccaggccaca

SEQ ID NO: 1211346 - RNA, 15 nt, Human
aggcagccaggccac

SEQ ID NO: 1211347 - RNA, 14 nt, Human
aggcagccaggcca

SEQ ID NO: 1211348 - RNA, 13 nt, Human
aggcagauacagg

SEQ ID NO: 1211349 - RNA, 14 nt, Human
agggccuggcucag

SEQ ID NO: 1211350 - RNA, 13 nt, Human
agggccuggcuca

SEQ ID NO: 1211351 - RNA, 18 nt, Human
agggccuggcucaggugg

SEQ ID NO: 1211352 - RNA, 19 nt, Human
aggcugcagugagccgaga

SEQ ID NO: 1211353 - RNA, 17 nt, Human
aggcugcagugagccga

SEQ ID NO: 1211354 - RNA, 19 nt, Human
aggcugucaauuacaggaa

SEQ ID NO: 1211355 - RNA, 12 nt, Human
aggcugucaauu

SEQ ID NO: 1211356 - RNA, 24 nt, Human
aggcuguaucccaugagccucagc

SEQ ID NO: 1211357 - RNA, 20 nt, Human
aggcccucugcccacucccu

SEQ ID NO: 1211358 - RNA, 19 nt, Human
aggcccucugcccacuccc

SEQ ID NO: 1211359 - RNA, 21 nt, Human
aggcccucugcccacucccug

SEQ ID NO: 1211360 - RNA, 22 nt, Human
agcuuuguuuguugucagcuga

SEQ ID NO: 1211361 - RNA, 21 nt, Human
agcuuuguuuguugucagcug

SEQ ID NO: 1211362 - RNA, 15 nt, Human
aggaaguacuggaga

SEQ ID NO: 1211363 - RNA, 11 nt, Human
aggaaguacug

SEQ ID NO: 1211364 - RNA, 14 nt, Human
aggaagguagaaau

SEQ ID NO: 1211365 - RNA, 15 nt, Human
aggaacacuccuuca

SEQ ID NO: 1211366 - RNA, 12 nt, Human
aggaacacuccu

SEQ ID NO: 1211367 - RNA, 16 nt, Human
agcuggucccacucag

SEQ ID NO: 1211368 - RNA, 15 nt, Human
agcuggucccacuca

SEQ ID NO: 1211369 - RNA, 16 nt, Human
agcugguugagguuuc

SEQ ID NO: 1211370 - RNA, 21 nt, Human
agcugacuuuucuguccgagc

SEQ ID NO: 1211371 - RNA, 15 nt, Human
agcugacuuuucugu

SEQ ID NO: 1211372 - RNA, 23 nt, Human
agcucaccagccccagugcccac

SEQ ID NO: 1211373 - RNA, 22 nt, Human
agcucaccagccccagugccca

SEQ ID NO: 1211374 - RNA, 19 nt, Human
agcgauucuucugcuucag

SEQ ID NO: 1211375 - RNA, 17 nt, Human
agcgauucuucugcuuc

SEQ ID NO: 1211376 - RNA, 15 nt, Human
agcgauucuucugcu

SEQ ID NO: 1211377 - RNA, 20 nt, Human
agcuaacauggaaguacuau

SEQ ID NO: 1211378 - RNA, 19 nt, Human
agcuaacauggaaguacua

SEQ ID NO: 1211379 - RNA, 15 nt, Human
agcuaaugggacacu

SEQ ID NO: 1211380 - RNA, 14 nt, Human
agcuaaugggacac

SEQ ID NO: 1211381 - RNA, 13 nt, Human
agcuaaugggaca

SEQ ID NO: 1211382 - RNA, 21 nt, Human
agcucaccagccccagugccc

SEQ ID NO: 1211383 - RNA, 15 nt, Human
agcucaccagcccca

SEQ ID NO: 1211384 - RNA, 14 nt, Human
agcucaccagcccc

SEQ ID NO: 1211385 - RNA, 13 nt, Human
agcucaccagccc

SEQ ID NO: 1211386 - RNA, 18 nt, Human
agccugggcaaugugaua

SEQ ID NO: 1211387 - RNA, 14 nt, Human
agccuggacccugu

SEQ ID NO: 1211388 - RNA, 19 nt, Human
agaggguggugaccucugc

SEQ ID NO: 1211389 - RNA, 20 nt, Human
agagggucugaggaauccag

SEQ ID NO: 1211390 - RNA, 15 nt, Human
agaguugaagacaga

SEQ ID NO: 1211391 - RNA, 14 nt, Human
agaguugaagacag

SEQ ID NO: 1211392 - RNA, 13 nt, Human
agaguugaagaca

SEQ ID NO: 1211393 - RNA, 16 nt, Human
agauugcaccacugca

SEQ ID NO: 1211394 - RNA, 19 nt, Human
agauugcaacaggcugggc

SEQ ID NO: 1211395 - RNA, 17 nt, Human
agauugcaacaggcugg

SEQ ID NO: 1211396 - RNA, 16 nt, Human
agauugcaacaggcug

SEQ ID NO: 1211397 - RNA, 18 nt, Human
agauucuuuccugaggcu

SEQ ID NO: 1211398 - RNA, 16 nt, Human
agauucuuuccugagg

SEQ ID NO: 1211399 - RNA, 15 nt, Human
agauucuuuccugag

SEQ ID NO: 1211400 - RNA, 19 nt, Human
agcaaauucuguuuuucua

SEQ ID NO: 1211401 - RNA, 14 nt, Human
agauucuuuccuga

SEQ ID NO: 1211402 - RNA, 22 nt, Human
agaugggugcuuggaggaagga

SEQ ID NO: 1211403 - RNA, 20 nt, Human
agaugggugcuuggaggaag

SEQ ID NO: 1211404 - RNA, 18 nt, Human
agaugacaucugucuagg

SEQ ID NO: 1211405 - RNA, 22 nt, Human
agccagauuucacucuccuugg

SEQ ID NO: 1211406 - RNA, 20 nt, Human
agccagauuucacucuccuu

SEQ ID NO: 1211407 - RNA, 17 nt, Human
agccagauuucacucuc

SEQ ID NO: 1211408 - RNA, 14 nt, Human
agccagauuucacu

SEQ ID NO: 1211409 - RNA, 23 nt, Human
agccagcaggcucucaggccagc

SEQ ID NO: 1211410 - RNA, 22 nt, Human
agccagcaggcucucaggccag

SEQ ID NO: 1211411 - RNA, 20 nt, Human
agcccacgcccccacuggug

SEQ ID NO: 1211412 - RNA, 14 nt, Human
agcccaccuuggcu

SEQ ID NO: 1211413 - RNA, 19 nt, Human
agcccacgcccccacuggu

SEQ ID NO: 1211414 - RNA, 18 nt, Human
agcccacgcccccacugg

SEQ ID NO: 1211415 - RNA, 17 nt, Human
agcccacgcccccacug

SEQ ID NO: 1211416 - RNA, 13 nt, Human
agcccaccuuggc

SEQ ID NO: 1211417 - RNA, 23 nt, Human
agcccaccccucaacaccucugc

SEQ ID NO: 1211418 - RNA, 16 nt, Human
agcaucuaugugagac

SEQ ID NO: 1211419 - RNA, 18 nt, Human
agcagugcaugcuguccc

SEQ ID NO: 1211420 - RNA, 17 nt, Human
agcagugcaugcugucc

SEQ ID NO: 1211421 - RNA, 16 nt, Human
agcagugcaugcuguc

SEQ ID NO: 1211422 - RNA, 13 nt, Human
agcagugcaugcu

SEQ ID NO: 1211423 - RNA, 19 nt, Human
agcagcguuucuaugacac

SEQ ID NO: 1211424 - RNA, 20 nt, Human
agcagccuggacccugugga

SEQ ID NO: 1211425 - RNA, 16 nt, Human
agcagccuggacccug

SEQ ID NO: 1211426 - RNA, 21 nt, Human
agcacagacccugcccugugg

SEQ ID NO: 1211427 - RNA, 18 nt, Human
agagcccacgcccccacu

SEQ ID NO: 1211428 - RNA, 23 nt, Human
agagagcaagacgcugugcugcc

SEQ ID NO: 1211429 - RNA, 19 nt, Human
agagagcaagacgcugugc

SEQ ID NO: 1211430 - RNA, 11 nt, Human
agagagcaaga

SEQ ID NO: 1211431 - RNA, 16 nt, Human
agacucuuuggacacu

SEQ ID NO: 1211432 - RNA, 20 nt, Human
agacgcugugcugcccugcc

SEQ ID NO: 1211433 - RNA, 19 nt, Human
agacgcugugcugcccugc

SEQ ID NO: 1211434 - RNA, 18 nt, Human
agacgcugugcugcccug

SEQ ID NO: 1211435 - RNA, 17 nt, Human
agacgcugugcugcccu

SEQ ID NO: 1211436 - RNA, 15 nt, Human
agacuaucuaaaugu

SEQ ID NO: 1211437 - RNA, 15 nt, Human
agaccacguuucuaa

SEQ ID NO: 1211438 - RNA, 23 nt, Human
agaccaucccugaaggccccgcc

SEQ ID NO: 1211439 - RNA, 14 nt, Human
agaccacguuucua

SEQ ID NO: 1211440 - RNA, 23 nt, Human
agacagcccgggcucugccuccc

SEQ ID NO: 1211441 - RNA, 22 nt, Human
agacagcccgggcucugccucc

SEQ ID NO: 1211442 - RNA, 14 nt, Human
agacaauuuauuau

SEQ ID NO: 1211443 - RNA, 20 nt, Human
agacaaugugaaaagaaaaa

SEQ ID NO: 1211444 - RNA, 14 nt, Human
agaagucacacagu

SEQ ID NO: 1211445 - RNA, 19 nt, Human
agaagucuuagauguauau

SEQ ID NO: 1211446 - RNA, 17 nt, Human
agaagucuuagauguau

SEQ ID NO: 1211447 - RNA, 23 nt, Human
agaagagaaugcacaaacagagg

SEQ ID NO: 1211448 - RNA, 15 nt, Human
agaagagaaugcaca

SEQ ID NO: 1211449 - RNA, 21 nt, Human
agaaccaaaaagaggcuaugu

SEQ ID NO: 1211450 - RNA, 23 nt, Human
agaaugcacaaacagaggccgcc

SEQ ID NO: 1211451 - RNA, 18 nt, Human
agaaugcucuuuacuuca

SEQ ID NO: 1211452 - RNA, 16 nt, Human
agaaugaaagggccca

SEQ ID NO: 1211453 - RNA, 17 nt, Human
agaaucucaaauaacua

SEQ ID NO: 1211454 - RNA, 18 nt, Human
agaaccaaaaagaggcua

SEQ ID NO: 1211455 - RNA, 17 nt, Human
agaaccaaaaagaggcu

SEQ ID NO: 1211456 - RNA, 21 nt, Human
auccacugugccaugugccag

SEQ ID NO: 1211457 - RNA, 20 nt, Human
aucaugacaaagacugagua

SEQ ID NO: 1211458 - RNA, 15 nt, Human
aucauccuaagcuau

SEQ ID NO: 1211459 - RNA, 19 nt, Human
aucauggagguuugaagau

SEQ ID NO: 1211460 - RNA, 18 nt, Human
auauuuuuuucuuuucuu

SEQ ID NO: 1211461 - RNA, 24 nt, Human
aucaaaagguuaauaaaguaauua

SEQ ID NO: 1211462 - RNA, 20 nt, Human
aucaaaagguuaauaaagua

SEQ ID NO: 1211463 - RNA, 19 nt, Human
aucaaagagguuuuaaaaa

SEQ ID NO: 1211464 - RNA, 14 nt, Human
auagcacagacccu

SEQ ID NO: 1211465 - RNA, 15 nt, Human
auagcacagacccug

SEQ ID NO: 1211466 - RNA, 12 nt, Human
augaaagacugu

SEQ ID NO: 1211467 - RNA, 23 nt, Human
augaagcauuuacuuuguguuca

SEQ ID NO: 1211468 - RNA, 23 nt, Human
augaaguaauaugcacacauuuu

SEQ ID NO: 1211469 - RNA, 21 nt, Human
augaaguaauaugcacacauu

SEQ ID NO: 1211470 - RNA, 14 nt, Human
augaaguaauaugc

SEQ ID NO: 1211471 - RNA, 12 nt, Human
augagccuggca

SEQ ID NO: 1211472 - RNA, 11 nt, Human
augagccuggc

SEQ ID NO: 1211473 - RNA, 21 nt, Human
augagccucagcauccuggca

SEQ ID NO: 1211474 - RNA, 18 nt, Human
augaccuuucaauaggaa

SEQ ID NO: 1211475 - RNA, 15 nt, Human
augaccuuucaauag

SEQ ID NO: 1211476 - RNA, 13 nt, Human
augaccuuucaau

SEQ ID NO: 1211477 - RNA, 23 nt, Human
aucuaggaagacuuuggaaagag

SEQ ID NO: 1211478 - RNA, 16 nt, Human
augcuuugaucccuuc

SEQ ID NO: 1211479 - RNA, 22 nt, Human
augcuucuucagagacuccugc

SEQ ID NO: 1211480 - RNA, 20 nt, Human
augcuucuucagagacuccu

SEQ ID NO: 1211481 - RNA, 17 nt, Human
augcuucuucagagacu

SEQ ID NO: 1211482 - RNA, 14 nt, Human
augcuucuucagag

SEQ ID NO: 1211483 - RNA, 19 nt, Human
augcucugcauguuacaua

SEQ ID NO: 1211484 - RNA, 18 nt, Human
augcucugcauguuacau

SEQ ID NO: 1211485 - RNA, 19 nt, Human
augccugguggcagcugcg

SEQ ID NO: 1211486 - RNA, 14 nt, Human
augccugguggcag

SEQ ID NO: 1211487 - RNA, 13 nt, Human
augccugguggca

SEQ ID NO: 1211488 - RNA, 12 nt, Human
augccugguggc

SEQ ID NO: 1211489 - RNA, 21 nt, Human
augccugguggcagcugcggu

SEQ ID NO: 1211490 - RNA, 18 nt, Human
agucuggcccuuccuuuu

SEQ ID NO: 1211491 - RNA, 16 nt, Human
agucgaggacagggag

SEQ ID NO: 1211492 - RNA, 19 nt, Human
aguccuuaccagcagagca

SEQ ID NO: 1211493 - RNA, 22 nt, Human
agucugauucccaagcucugcu

SEQ ID NO: 1211494 - RNA, 21 nt, Human
agucugauucccaagcucugc

SEQ ID NO: 1211495 - RNA, 18 nt, Human
aguccuuaccagcagagc

SEQ ID NO: 1211496 - RNA, 16 nt, Human
aguccuuaccagcaga

SEQ ID NO: 1211497 - RNA, 14 nt, Human
aguccucuuuucug

SEQ ID NO: 1211498 - RNA, 19 nt, Human
agugacagaggcagcccca

SEQ ID NO: 1211499 - RNA, 16 nt, Human
agugacagaggcagcc

SEQ ID NO: 1211500 - RNA, 14 nt, Human
agugacagaggcag

SEQ ID NO: 1211501 - RNA, 23 nt, Human
agugauccucccaccucagccuc

SEQ ID NO: 1211502 - RNA, 22 nt, Human
agugauccucccaccucagccu

SEQ ID NO: 1211503 - RNA, 20 nt, Human
agugauccucccaccucagc

SEQ ID NO: 1211504 - RNA, 22 nt, Human
agugccuuauggaacacucuga

SEQ ID NO: 1211505 - RNA, 21 nt, Human
agugccuuauggaacacucug

SEQ ID NO: 1211506 - RNA, 20 nt, Human
agugccuuauggaacacucu

SEQ ID NO: 1211507 - RNA, 19 nt, Human
agugccuuauggaacacuc

SEQ ID NO: 1211508 - RNA, 20 nt, Human
agugauucuccugccucagc

SEQ ID NO: 1211509 - RNA, 19 nt, Human
agugauucuccugccucag

SEQ ID NO: 1211510 - RNA, 18 nt, Human
agugauucuccugccuca

SEQ ID NO: 1211511 - RNA, 22 nt, Human
aguacuucuccacccugcucuc

SEQ ID NO: 1211512 - RNA, 21 nt, Human
aguacuucuccacccugcucu

SEQ ID NO: 1211513 - RNA, 20 nt, Human
aguacuucuccacccugcuc

SEQ ID NO: 1211514 - RNA, 15 nt, Human
aguacuggagaaaau

SEQ ID NO: 1211515 - RNA, 14 nt, Human
aguacguugugcau

SEQ ID NO: 1211516 - RNA, 17 nt, Human
aguaacuuacuuaggug

SEQ ID NO: 1211517 - RNA, 21 nt, Human
aguaaaugggggugcauuuga

SEQ ID NO: 1211518 - RNA, 20 nt, Human
aguaaaugggggugcauuug

SEQ ID NO: 1211519 - RNA, 19 nt, Human
aguaaaugggggugcauuu

SEQ ID NO: 1211520 - RNA, 11 nt, Human
aguuugcaguu

SEQ ID NO: 1211521 - RNA, 16 nt, Human
aguuugauuaaauucu

SEQ ID NO: 1211522 - RNA, 14 nt, Human
aguuugauuaaauu

SEQ ID NO: 1211523 - RNA, 22 nt, Human
aguuguuagugugucuuagugu

SEQ ID NO: 1211524 - RNA, 17 nt, Human
aguuguuagugugucuu

SEQ ID NO: 1211525 - RNA, 17 nt, Human
aguugaagacagagcua

SEQ ID NO: 1211526 - RNA, 16 nt, Human
aguugaagacagagcu

SEQ ID NO: 1211527 - RNA, 18 nt, Human
aguugaaaaacagcugag

SEQ ID NO: 1211528 - RNA, 17 nt, Human
aguugaaaaacagcuga

SEQ ID NO: 1211529 - RNA, 21 nt, Human
aguuccaccaucaagccacca

SEQ ID NO: 1211530 - RNA, 18 nt, Human
aguuccaccaucaagcca

SEQ ID NO: 1211531 - RNA, 18 nt, Human
aguuacacuaaaagguga

SEQ ID NO: 1211532 - RNA, 14 nt, Human
aguucauacccugu

SEQ ID NO: 1211533 - RNA, 21 nt, Human
auaaagaugagugagcaugcc

SEQ ID NO: 1211534 - RNA, 15 nt, Human
auacaccacuacauu

SEQ ID NO: 1211535 - RNA, 23 nt, Human
auacaaugcugugcccuaaagug

SEQ ID NO: 1211536 - RNA, 12 nt, Human
auaauguuaaca

SEQ ID NO: 1211537 - RNA, 18 nt, Human
auacaccacuacauucug

SEQ ID NO: 1211538 - RNA, 17 nt, Human
auacaccacuacauucu

SEQ ID NO: 1211539 - RNA, 23 nt, Human
acccucaucaccaacgucugugc

SEQ ID NO: 1211540 - RNA, 23 nt, Human
acccuggcacuauaauguaagcu

SEQ ID NO: 1211541 - RNA, 13 nt, Human
acccucaucacca

SEQ ID NO: 1211542 - RNA, 16 nt, Human
acccucaggcaggugg

SEQ ID NO: 1211543 - RNA, 15 nt, Human
acccucaggcaggug

SEQ ID NO: 1211544 - RNA, 14 nt, Human
acccucaggcaggu

SEQ ID NO: 1211545 - RNA, 13 nt, Human
acccucaggcagg

SEQ ID NO: 1211546 - RNA, 16 nt, Human
acccugugauggggcc

SEQ ID NO: 1211547 - RNA, 16 nt, Human
acccuggggagaaagu

SEQ ID NO: 1211548 - RNA, 13 nt, Human
acccuauugcugc

SEQ ID NO: 1211549 - RNA, 19 nt, Human
acccuauugcugcuugagg

SEQ ID NO: 1211550 - RNA, 14 nt, Human
acccuauugcugcu

SEQ ID NO: 1211551 - RNA, 23 nt, Human
accgugaggccagagacacaagc

SEQ ID NO: 1211552 - RNA, 12 nt, Human
accucagccucc

SEQ ID NO: 1211553 - RNA, 18 nt, Human
accgugaggccagagaca

SEQ ID NO: 1211554 - RNA, 20 nt, Human
accgggcacucagaagacac

SEQ ID NO: 1211555 - RNA, 16 nt, Human
accgggcacucagaag

SEQ ID NO: 1211556 - RNA, 14 nt, Human
accgggcacucaga

SEQ ID NO: 1211557 - RNA, 12 nt, Human
accgggcacuca

SEQ ID NO: 1211558 - RNA, 21 nt, Human
acccugugauggggcccugcc

SEQ ID NO: 1211559 - RNA, 20 nt, Human
acccugugauggggcccugc

SEQ ID NO: 1211560 - RNA, 19 nt, Human
acccugugauggggcccug

SEQ ID NO: 1211561 - RNA, 17 nt, Human
acccugugauggggccc

SEQ ID NO: 1211562 - RNA, 21 nt, Human
accucaggugauccacccacc

SEQ ID NO: 1211563 - RNA, 20 nt, Human
accucaggugauccacccac

SEQ ID NO: 1211564 - RNA, 11 nt, Human
accucaggccu

SEQ ID NO: 1211565 - RNA, 13 nt, Human
acgucugugccau

SEQ ID NO: 1211566 - RNA, 19 nt, Human
acggacacucaaaagcugg

SEQ ID NO: 1211567 - RNA, 17 nt, Human
acggacacucaaaagcu

SEQ ID NO: 1211568 - RNA, 19 nt, Human
acggaauaguuggcuagga

SEQ ID NO: 1211569 - RNA, 22 nt, Human
acgcugugcugcccugcccacc

SEQ ID NO: 1211570 - RNA, 23 nt, Human
acgauuucuguuuagauaauaca

SEQ ID NO: 1211571 - RNA, 20 nt, Human
acgauuucuguuuagauaau

SEQ ID NO: 1211572 - RNA, 18 nt, Human
acuaauggggcggugaga

SEQ ID NO: 1211573 - RNA, 12 nt, Human
accuuggcucaa

SEQ ID NO: 1211574 - RNA, 20 nt, Human
accugccccucaacucuccu

SEQ ID NO: 1211575 - RNA, 15 nt, Human
accugccccucaacu

SEQ ID NO: 1211576 - RNA, 12 nt, Human
accugccccuca

SEQ ID NO: 1211577 - RNA, 23 nt, Human
accugccaggaagccagcaggcu

SEQ ID NO: 1211578 - RNA, 22 nt, Human
accugccaggaagccagcaggc

SEQ ID NO: 1211579 - RNA, 21 nt, Human
accugccaggaagccagcagg

SEQ ID NO: 1211580 - RNA, 23 nt, Human
accucugccugaagucacacagu

SEQ ID NO: 1211581 - RNA, 20 nt, Human
accucugccugaagucacac

SEQ ID NO: 1211582 - RNA, 12 nt, Human
accucugccuga

SEQ ID NO: 1211583 - RNA, 12 nt, Human
acugaauuucuu

SEQ ID NO: 1211584 - RNA, 13 nt, Human
acucuacccucuu

SEQ ID NO: 1211585 - RNA, 18 nt, Human
acugacauuguuggccaa

SEQ ID NO: 1211586 - RNA, 17 nt, Human
acugacauuguuggcca

SEQ ID NO: 1211587 - RNA, 23 nt, Human
acugaauuucuuuugccguuauu

SEQ ID NO: 1211588 - RNA, 22 nt, Human
acugacauuguuggccaaagcc

SEQ ID NO: 1211589 - RNA, 20 nt, Human
acugauuuuuuuuuccuuca

SEQ ID NO: 1211590 - RNA, 19 nt, Human
acugauuuuuuuuuccuuc

SEQ ID NO: 1211591 - RNA, 18 nt, Human
acugauuuuuuuuuccuu

SEQ ID NO: 1211592 - RNA, 17 nt, Human
acugauuuuuuuuuccu

SEQ ID NO: 1211593 - RNA, 16 nt, Human
acugauuuuuuuuucc

SEQ ID NO: 1211594 - RNA, 15 nt, Human
acucuacagaggcca

SEQ ID NO: 1211595 - RNA, 22 nt, Human
acucccaucugugaaaggaaag

SEQ ID NO: 1211596 - RNA, 23 nt, Human
acuuggggggcugaggugggagg

SEQ ID NO: 1211597 - RNA, 18 nt, Human
acuguuucaaacuuuacu

SEQ ID NO: 1211598 - RNA, 15 nt, Human
acuguuucaaacuuu

SEQ ID NO: 1211599 - RNA, 19 nt, Human
acuguuucaaacuuuacua

SEQ ID NO: 1211600 - RNA, 16 nt, Human
acugugaagagaacca

SEQ ID NO: 1211601 - RNA, 18 nt, Human
acugugccaugugccagg

SEQ ID NO: 1211602 - RNA, 17 nt, Human
acugugccaugugccag

SEQ ID NO: 1211603 - RNA, 15 nt, Human
acaggcagauacagg

SEQ ID NO: 1211604 - RNA, 18 nt, Human
acaggcaaugcuggcugu

SEQ ID NO: 1211605 - RNA, 23 nt, Human
acaggcacccaccaucaugucug

SEQ ID NO: 1211606 - RNA, 17 nt, Human
acaggcaaugcuggcug

SEQ ID NO: 1211607 - RNA, 16 nt, Human
acaggcaaugcuggcu

SEQ ID NO: 1211608 - RNA, 15 nt, Human
acaggcaaugcuggc

SEQ ID NO: 1211609 - RNA, 14 nt, Human
acaggauuauugga

SEQ ID NO: 1211610 - RNA, 20 nt, Human
acagcucuucuccaggcugu

SEQ ID NO: 1211611 - RNA, 19 nt, Human
acagcucuucuccaggcug

SEQ ID NO: 1211612 - RNA, 21 nt, Human
accaacgucugugccauuuug

SEQ ID NO: 1211613 - RNA, 14 nt, Human
accacguuucuaaa

SEQ ID NO: 1211614 - RNA, 13 nt, Human
accacguuucuaa

SEQ ID NO: 1211615 - RNA, 18 nt, Human
accacgcuggaccuugaa

SEQ ID NO: 1211616 - RNA, 16 nt, Human
accacgcuggaccuug

SEQ ID NO: 1211617 - RNA, 17 nt, Human
accaacgucugugccau

SEQ ID NO: 1211618 - RNA, 14 nt, Human
accaacgucugugc

SEQ ID NO: 1211619 - RNA, 16 nt, Human
accagagcugccaccu

SEQ ID NO: 1211620 - RNA, 14 nt, Human
accagagcugccac

SEQ ID NO: 1211621 - RNA, 13 nt, Human
accagagcugcca

SEQ ID NO: 1211622 - RNA, 19 nt, Human
accagagcugccaccugcc

SEQ ID NO: 1211623 - RNA, 13 nt, Human
acaugcacgugug

SEQ ID NO: 1211624 - RNA, 20 nt, Human
acauacaggaagguagaaau

SEQ ID NO: 1211625 - RNA, 21 nt, Human
acauaaugcgugcauaccacu

SEQ ID NO: 1211626 - RNA, 16 nt, Human
acauacaauuccaaac

SEQ ID NO: 1211627 - RNA, 15 nt, Human
acauaagauaaaugu

SEQ ID NO: 1211628 - RNA, 19 nt, Human
acauguuuuucuucucccu

SEQ ID NO: 1211629 - RNA, 19 nt, Human
aauuaugaguuauuuuuau

SEQ ID NO: 1211630 - RNA, 22 nt, Human
aauuguaaggaaugauuaauua

SEQ ID NO: 1211631 - RNA, 13 nt, Human
aauucuuaaauau

SEQ ID NO: 1211632 - RNA, 18 nt, Human
aauucuguuuuucuaggc

SEQ ID NO: 1211633 - RNA, 14 nt, Human
aauucuguuuuucu

SEQ ID NO: 1211634 - RNA, 15 nt, Human
aauucucuuauccaa

SEQ ID NO: 1211635 - RNA, 17 nt, Human
aauucucuaguuugauu

SEQ ID NO: 1211636 - RNA, 15 nt, Human
aauucucuaguuuga

SEQ ID NO: 1211637 - RNA, 21 nt, Human
aauucucauuugucacacacu

SEQ ID NO: 1211638 - RNA, 19 nt, Human
aauucucagaaucucaaau

SEQ ID NO: 1211639 - RNA, 14 nt, Human
aauucuacuuugag

SEQ ID NO: 1211640 - RNA, 17 nt, Human
aauuucccaaagcagug

SEQ ID NO: 1211641 - RNA, 15 nt, Human
aauuucccaaagcag

SEQ ID NO: 1211642 - RNA, 23 nt, Human
acaccagagcccaccuuggcuca

SEQ ID NO: 1211643 - RNA, 18 nt, Human
acaccagagcccaccuug

SEQ ID NO: 1211644 - RNA, 19 nt, Human
acacagcucuucuccaggc

SEQ ID NO: 1211645 - RNA, 18 nt, Human
acacagcucuucuccagg

SEQ ID NO: 1211646 - RNA, 16 nt, Human
acacagcucuucucca

SEQ ID NO: 1211647 - RNA, 14 nt, Human
acacagcucuucuc

SEQ ID NO: 1211648 - RNA, 20 nt, Human
acaaggcaaggcugucaauu

SEQ ID NO: 1211649 - RNA, 19 nt, Human
acaaggcaaggcugucaau

SEQ ID NO: 1211650 - RNA, 17 nt, Human
acaaggcaaggcuguca

SEQ ID NO: 1211651 - RNA, 16 nt, Human
acaaggcaaggcuguc

SEQ ID NO: 1211652 - RNA, 15 nt, Human
acaaguuaaauaaau

SEQ ID NO: 1211653 - RNA, 13 nt, Human
aacaggcugggcu

SEQ ID NO: 1211654 - RNA, 22 nt, Human
aacauggccuuugcuugaaaga

SEQ ID NO: 1211655 - RNA, 11 nt, Human
aacaggcagau

SEQ ID NO: 1211656 - RNA, 15 nt, Human
aaauucuugcaaagu

SEQ ID NO: 1211657 - RNA, 23 nt, Human
aaauucuucuccacuuucuagcc

SEQ ID NO: 1211658 - RNA, 18 nt, Human
aaauucuugcaaaguauc

SEQ ID NO: 1211659 - RNA, 16 nt, Human
aaccuuuugagugccu

SEQ ID NO: 1211660 - RNA, 23 nt, Human
aaccuuuugagugccuuacacaa

SEQ ID NO: 1211661 - RNA, 23 nt, Human
aacauggccuuugcuugaaagaa

SEQ ID NO: 1211662 - RNA, 19 nt, Human
aaaugcuguaacuuucuga

SEQ ID NO: 1211663 - RNA, 14 nt, Human
aaaucuuuuugcuu

SEQ ID NO: 1211664 - RNA, 13 nt, Human
aaaucuuuuugcu

SEQ ID NO: 1211665 - RNA, 19 nt, Human
aaaucuccaaaauaaaacu

SEQ ID NO: 1211666 - RNA, 20 nt, Human
aaaggaugcccaaagaugca

SEQ ID NO: 1211667 - RNA, 11 nt, Human
aaaagaaaaag

SEQ ID NO: 1211668 - RNA, 19 nt, Human
aaaacacuguucucugccc

SEQ ID NO: 1211669 - RNA, 17 nt, Human
aaaacacauuuuucuua

SEQ ID NO: 1211670 - RNA, 14 nt, Human
aaaauaaaacuuuu

SEQ ID NO: 1211671 - RNA, 21 nt, Human
aaaaucagccugcuccagcug

SEQ ID NO: 1211672 - RNA, 17 nt, Human
aaaaucagccugcucca

SEQ ID NO: 1211673 - RNA, 13 nt, Human
aaaaucagccugc

SEQ ID NO: 1211674 - RNA, 16 nt, Human
aaaauaaaacuuuuua

SEQ ID NO: 1211675 - RNA, 18 nt, Human
aaacccagcucuggucca

SEQ ID NO: 1211676 - RNA, 16 nt, Human
aaacccagcucugguc

SEQ ID NO: 1211677 - RNA, 12 nt, Human
aaacccagcucu

SEQ ID NO: 1211678 - RNA, 16 nt, Human
aaaccgccaaggcugg

SEQ ID NO: 1211679 - RNA, 15 nt, Human
aaaccgccaaggcug

SEQ ID NO: 1211680 - RNA, 23 nt, Human
aaacugauuuuuuuuuccuucag

SEQ ID NO: 1211681 - RNA, 23 nt, Human
aaacucuuaaaacccaagugccu

SEQ ID NO: 1211682 - RNA, 12 nt, Human
aaacucuuaaaa

SEQ ID NO: 1211683 - RNA, 16 nt, Human
aaaaucucaaauuucu

SEQ ID NO: 1211684 - RNA, 15 nt, Human
aaaaucucaaauuuc

SEQ ID NO: 1211685 - RNA, 18 nt, Human
aaaaucucaaauuucuaa

SEQ ID NO: 1211686 - RNA, 16 nt, Human
aagcgugagccacugc

SEQ ID NO: 1211687 - RNA, 15 nt, Human
aagcgugagccacug

SEQ ID NO: 1211688 - RNA, 14 nt, Human
aagcgauucuucug

SEQ ID NO: 1211689 - RNA, 14 nt, Human
aagcggcuggcagc

SEQ ID NO: 1211690 - RNA, 23 nt, Human
aagauacaguuacucagaauucu

SEQ ID NO: 1211691 - RNA, 17 nt, Human
aagauacaguuacucag

SEQ ID NO: 1211692 - RNA, 21 nt, Human
aagauaauauuaaggaagaca

SEQ ID NO: 1211693 - RNA, 19 nt, Human
aagauaauauuaaggaaga

SEQ ID NO: 1211694 - RNA, 18 nt, Human
aagccauaauuguucuua

SEQ ID NO: 1211695 - RNA, 20 nt, Human
aagcugcacccucaggcagg

SEQ ID NO: 1211696 - RNA, 19 nt, Human
aagcugcacccucaggcag

SEQ ID NO: 1211697 - RNA, 13 nt, Human
aagcugcacccuc

SEQ ID NO: 1211698 - RNA, 22 nt, Human
aagcuagacgagcaggcuucuu

SEQ ID NO: 1211699 - RNA, 13 nt, Human
aaggcaaggcugu

SEQ ID NO: 1211700 - RNA, 16 nt, Human
aaggcaaggcugucaa

SEQ ID NO: 1211701 - RNA, 15 nt, Human
aaggcaaggcuguca

SEQ ID NO: 1211702 - RNA, 13 nt, Human
aagagaaaaaaua

SEQ ID NO: 1211703 - RNA, 19 nt, Human
aagacuuuucuuucagcca

SEQ ID NO: 1211704 - RNA, 12 nt, Human
aagacuuuucuu

SEQ ID NO: 1211705 - RNA, 21 nt, Human
aagacuuuuccaacccucauc

SEQ ID NO: 1211706 - RNA, 17 nt, Human
aagaccacguuucuaaa

SEQ ID NO: 1211707 - RNA, 15 nt, Human
aagaccacguuucua

SEQ ID NO: 1211708 - RNA, 23 nt, Human
aagacagauacuccuccaagguu

SEQ ID NO: 1211709 - RNA, 20 nt, Human
aagacaaugugaaaagaaaa

SEQ ID NO: 1211710 - RNA, 19 nt, Human
aagacaaugugaaaagaaa

SEQ ID NO: 1211711 - RNA, 22 nt, Human
aagacaaugacuuacuguacau

SEQ ID NO: 1211712 - RNA, 22 nt, Human
aaguuguaggcauaaagucagg

SEQ ID NO: 1211713 - RNA, 22 nt, Human
aagugcugggauuacaggugug

SEQ ID NO: 1211714 - RNA, 12 nt, Human
aagugcugggau

SEQ ID NO: 1211715 - RNA, 22 nt, Human
aagugcugcauuuaaaagauac

SEQ ID NO: 1211716 - RNA, 22 nt, Human
aauaaugugaaacuggauuaaa

SEQ ID NO: 1211717 - RNA, 17 nt, Human
aauaaugugaaacugga

SEQ ID NO: 1211718 - RNA, 14 nt, Human
aauaaagcagcguu

SEQ ID NO: 1211719 - RNA, 19 nt, Human
aauaauguuaacauggaca

SEQ ID NO: 1211720 - RNA, 21 nt, Human
aaugaaagacuguacaaagua

SEQ ID NO: 1211721 - RNA, 20 nt, Human
aaugaaagacuguacaaagu

SEQ ID NO: 1211722 - RNA, 20 nt, Human
aaugaugccaugaggaacaa

SEQ ID NO: 1211723 - RNA, 13 nt, Human
aauauuaagaaag

SEQ ID NO: 1211724 - RNA, 23 nt, Human
aauauguggaguucaucuugaau

SEQ ID NO: 1211725 - RNA, 23 nt, Human
aaucaccgaaaacguggcugcuu

SEQ ID NO: 1211726 - RNA, 21 nt, Human
aaucaccgaaaacguggcugc

SEQ ID NO: 1211727 - RNA, 16 nt, Human
cucugcacuccccugc

SEQ ID NO: 1211728 - RNA, 15 nt, Human
cucugcacuccccug

SEQ ID NO: 1211729 - RNA, 21 nt, Human
cucugcacaagcugcacccuc

SEQ ID NO: 1211730 - RNA, 20 nt, Human
cucugcacaagcugcacccu

SEQ ID NO: 1211731 - RNA, 18 nt, Human
cucugcacuccccugcug

SEQ ID NO: 1211732 - RNA, 17 nt, Human
cucugcacuccccugcu

SEQ ID NO: 1211733 - RNA, 21 nt, Human
cucugcuccucuccccagcaa

SEQ ID NO: 1211734 - RNA, 13 nt, Human
cucugcugcuggc

SEQ ID NO: 1211735 - RNA, 23 nt, Human
cucugcugacagacacaggcccg

SEQ ID NO: 1211736 - RNA, 22 nt, Human
cucugcugacagacacaggccc

SEQ ID NO: 1211737 - RNA, 21 nt, Human
cucugcugacagacacaggcc

SEQ ID NO: 1211738 - RNA, 13 nt, Human
cucuguccuggga

SEQ ID NO: 1211739 - RNA, 16 nt, Human
cucuguacagagccca

SEQ ID NO: 1211740 - RNA, 15 nt, Human
cucuguacagagccc

SEQ ID NO: 1211741 - RNA, 14 nt, Human
cucuguacagagcc

SEQ ID NO: 1211742 - RNA, 16 nt, Human
cucugcugcuggcugg

SEQ ID NO: 1211743 - RNA, 15 nt, Human
cucugcugcuggcug

SEQ ID NO: 1211744 - RNA, 14 nt, Human
cucugcugcuggcu

SEQ ID NO: 1211745 - RNA, 16 nt, Human
cucuccuccagaguca

SEQ ID NO: 1211746 - RNA, 15 nt, Human
cucuccuccagaguc

SEQ ID NO: 1211747 - RNA, 13 nt, Human
cucuccuccagag

SEQ ID NO: 1211748 - RNA, 23 nt, Human
cucgguguggagaagcggcuggc

SEQ ID NO: 1211749 - RNA, 17 nt, Human
cucgguguggagaagcg

SEQ ID NO: 1211750 - RNA, 16 nt, Human
cucgguguggagaagc

SEQ ID NO: 1211751 - RNA, 23 nt, Human
cuccuuugugaggaagccgcugg

SEQ ID NO: 1211752 - RNA, 18 nt, Human
cuccuuugugaggaagcc

SEQ ID NO: 1211753 - RNA, 17 nt, Human
cuccuuugugaggaagc

SEQ ID NO: 1211754 - RNA, 14 nt, Human
cuccuuguguuacu

SEQ ID NO: 1211755 - RNA, 15 nt, Human
cuccuuucaccacau

SEQ ID NO: 1211756 - RNA, 16 nt, Human
cuccuguaccucuuga

SEQ ID NO: 1211757 - RNA, 18 nt, Human
cuccugggcuaagugauc

SEQ ID NO: 1211758 - RNA, 19 nt, Human
cuccuggccucaagugauu

SEQ ID NO: 1211759 - RNA, 19 nt, Human
cuccuggcccacugcaucg

SEQ ID NO: 1211760 - RNA, 15 nt, Human
cuccucugcugcugg

SEQ ID NO: 1211761 - RNA, 14 nt, Human
cuccucugcugcug

SEQ ID NO: 1211762 - RNA, 13 nt, Human
cuccucugcugcu

SEQ ID NO: 1211763 - RNA, 22 nt, Human
cuccaggcuguaucccaugagc

SEQ ID NO: 1211764 - RNA, 20 nt, Human
cuccaggcuguaucccauga

SEQ ID NO: 1211765 - RNA, 23 nt, Human
cuccaggcuccuuuagcgcccag

SEQ ID NO: 1211766 - RNA, 23 nt, Human
cuccaggugcacaagcuccaagc

SEQ ID NO: 1211767 - RNA, 20 nt, Human
cucccucuuucccucccuuc

SEQ ID NO: 1211768 - RNA, 15 nt, Human
cucccaggcauuccc

SEQ ID NO: 1211769 - RNA, 22 nt, Human
cucagucuggcccuuccuuuuc

SEQ ID NO: 1211770 - RNA, 17 nt, Human
cucaguccauagcagag

SEQ ID NO: 1211771 - RNA, 15 nt, Human
cucaguccauagcag

SEQ ID NO: 1211772 - RNA, 23 nt, Human
cucaggugucccugcacuugcag

SEQ ID NO: 1211773 - RNA, 20 nt, Human
cucaggccagcugcuugggc

SEQ ID NO: 1211774 - RNA, 18 nt, Human
cucaggccagcugcuugg

SEQ ID NO: 1211775 - RNA, 17 nt, Human
cucaggccagcugcuug

SEQ ID NO: 1211776 - RNA, 16 nt, Human
cucaggccagcugcuu

SEQ ID NO: 1211777 - RNA, 11 nt, Human
cucaggccugg

SEQ ID NO: 1211778 - RNA, 21 nt, Human
cucaggccaaacucaccugcc

SEQ ID NO: 1211779 - RNA, 20 nt, Human
cucaggccaaacucaccugc

SEQ ID NO: 1211780 - RNA, 19 nt, Human
cucaggccaaacucaccug

SEQ ID NO: 1211781 - RNA, 13 nt, Human
cucaggccugggg

SEQ ID NO: 1211782 - RNA, 23 nt, Human
cucagccucccgaauagcuggga

SEQ ID NO: 1211783 - RNA, 22 nt, Human
cucagccucccgaauagcuggg

SEQ ID NO: 1211784 - RNA, 21 nt, Human
cucagccucccgaauagcugg

SEQ ID NO: 1211785 - RNA, 19 nt, Human
cucagccucccgaauagcu

SEQ ID NO: 1211786 - RNA, 23 nt, Human
cucagaagacacugaugggcaac

SEQ ID NO: 1211787 - RNA, 22 nt, Human
cucagaagacacugaugggcaa

SEQ ID NO: 1211788 - RNA, 20 nt, Human
cucagaagacacugaugggc

SEQ ID NO: 1211789 - RNA, 17 nt, Human
cucagaagacacugaug

SEQ ID NO: 1211790 - RNA, 15 nt, Human
cucagaagacacuga

SEQ ID NO: 1211791 - RNA, 13 nt, Human
cucagaagacacu

SEQ ID NO: 1211792 - RNA, 17 nt, Human
cucaccuuucccaucuu

SEQ ID NO: 1211793 - RNA, 23 nt, Human
cucaauuauuuugcauuuuuucu

SEQ ID NO: 1211794 - RNA, 22 nt, Human
cuauguugcccaggcaggucuu

SEQ ID NO: 1211795 - RNA, 21 nt, Human
cuauguugcccaggcaggucu

SEQ ID NO: 1211796 - RNA, 19 nt, Human
cuauguugcccaggcaggu

SEQ ID NO: 1211797 - RNA, 18 nt, Human
cuauguugcccaggcagg

SEQ ID NO: 1211798 - RNA, 14 nt, Human
cuauguugcccagg

SEQ ID NO: 1211799 - RNA, 17 nt, Human
cuaugugagcacaaagg

SEQ ID NO: 1211800 - RNA, 14 nt, Human
cuaugugagaccau

SEQ ID NO: 1211801 - RNA, 14 nt, Human
cuaucucccccagc

SEQ ID NO: 1211802 - RNA, 13 nt, Human
cuaucucccccag

SEQ ID NO: 1211803 - RNA, 14 nt, Human
cgugaggccagaga

SEQ ID NO: 1211804 - RNA, 22 nt, Human
cgugagccacugcaccgggcca

SEQ ID NO: 1211805 - RNA, 20 nt, Human
cgugagccacugcaccgggc

SEQ ID NO: 1211806 - RNA, 15 nt, Human
cgugagccacugcac

SEQ ID NO: 1211807 - RNA, 14 nt, Human
cgugagccacugca

SEQ ID NO: 1211808 - RNA, 15 nt, Human
cgugacaacacuugu

SEQ ID NO: 1211809 - RNA, 14 nt, Human
cgugacaacacuug

SEQ ID NO: 1211810 - RNA, 11 nt, Human
cuaaagcugcc

SEQ ID NO: 1211811 - RNA, 19 nt, Human
cguguuaugacuccagaau

SEQ ID NO: 1211812 - RNA, 15 nt, Human
cguguuaugacucca

SEQ ID NO: 1211813 - RNA, 16 nt, Human
cgugaggccagagaca

SEQ ID NO: 1211814 - RNA, 19 nt, Human
cgugaguccuggcauggga

SEQ ID NO: 1211815 - RNA, 19 nt, Human
cuaaaguguauuuuuuuac

SEQ ID NO: 1211816 - RNA, 16 nt, Human
cuaacuuuccuucauu

SEQ ID NO: 1211817 - RNA, 22 nt, Human
cuaacuugucuuuggacccuga

SEQ ID NO: 1211818 - RNA, 14 nt, Human
cuaacuugucuuug

SEQ ID NO: 1211819 - RNA, 19 nt, Human
cuacaaaaagcauaaaaau

SEQ ID NO: 1211820 - RNA, 20 nt, Human
cuaauaaaauuuaaaagucu

SEQ ID NO: 1211821 - RNA, 20 nt, Human
cuaaguuuuuauggcuuuug

SEQ ID NO: 1211822 - RNA, 14 nt, Human
cuaaguuuuuaugg

SEQ ID NO: 1211823 - RNA, 20 nt, Human
cggagacggagucccaccuu

SEQ ID NO: 1211824 - RNA, 17 nt, Human
cggagacggagucccac

SEQ ID NO: 1211825 - RNA, 23 nt, Human
cggagucccaccuuggcugcagg

SEQ ID NO: 1211826 - RNA, 22 nt, Human
cggagucccaccuuggcugcag

SEQ ID NO: 1211827 - RNA, 20 nt, Human
cgguggcucacgccuguaau

SEQ ID NO: 1211828 - RNA, 22 nt, Human
cguacacauuuuauuuuauuau

SEQ ID NO: 1211829 - RNA, 14 nt, Human
cggcucacugcagc

SEQ ID NO: 1211830 - RNA, 13 nt, Human
cgggcucugccuc

SEQ ID NO: 1211831 - RNA, 12 nt, Human
cgggcucugccu

SEQ ID NO: 1211832 - RNA, 18 nt, Human
cgcuggagugcagugagc

SEQ ID NO: 1211833 - RNA, 17 nt, Human
cgcuggagugcagugag

SEQ ID NO: 1211834 - RNA, 20 nt, Human
cgcugccccuggcagccccu

SEQ ID NO: 1211835 - RNA, 19 nt, Human
cgcugccccuggcagcccc

SEQ ID NO: 1211836 - RNA, 20 nt, Human
ccuuuucgcaggauucuucc

SEQ ID NO: 1211837 - RNA, 18 nt, Human
ccuuucaauaggaaaaac

SEQ ID NO: 1211838 - RNA, 17 nt, Human
ccuuucaauaggaaaaa

SEQ ID NO: 1211839 - RNA, 15 nt, Human
ccuuucaauaggaaa

SEQ ID NO: 1211840 - RNA, 21 nt, Human
ccuucuguccuacucuguguc

SEQ ID NO: 1211841 - RNA, 20 nt, Human
ccuucuguccuacucugugu

SEQ ID NO: 1211842 - RNA, 22 nt, Human
ccuucuguccuacucuguguca

SEQ ID NO: 1211843 - RNA, 16 nt, Human
ccuucucugaaggaca

SEQ ID NO: 1211844 - RNA, 14 nt, Human
ccuucucugaagga

SEQ ID NO: 1211845 - RNA, 23 nt, Human
ccuucucuccagccccuggaugc

SEQ ID NO: 1211846 - RNA, 21 nt, Human
ccuucucuccagccccuggau

SEQ ID NO: 1211847 - RNA, 20 nt, Human
ccuucucuccagccccugga

SEQ ID NO: 1211848 - RNA, 22 nt, Human
ccuuauggaacacucugagacu

SEQ ID NO: 1211849 - RNA, 20 nt, Human
ccuuauggaacacucugaga

SEQ ID NO: 1211850 - RNA, 19 nt, Human
ccuuauggaacacucugag

SEQ ID NO: 1211851 - RNA, 18 nt, Human
ccuuauggaacacucuga

SEQ ID NO: 1211852 - RNA, 17 nt, Human
ccuuauggaacacucug

SEQ ID NO: 1211853 - RNA, 16 nt, Human
ccuuauggaacacucu

SEQ ID NO: 1211854 - RNA, 14 nt, Human
ccuuauggaacacu

SEQ ID NO: 1211855 - RNA, 19 nt, Human
ccuucccaccucucucacu

SEQ ID NO: 1211856 - RNA, 14 nt, Human
ccuucccaccucuc

SEQ ID NO: 1211857 - RNA, 12 nt, Human
ccuucccaccuc

SEQ ID NO: 1211858 - RNA, 12 nt, Human
ccuuauggaaca

SEQ ID NO: 1211859 - RNA, 20 nt, Human
ccuuagcagggaaacagcua

SEQ ID NO: 1211860 - RNA, 19 nt, Human
ccuuagcagggaaacagcu

SEQ ID NO: 1211861 - RNA, 16 nt, Human
ccuuagcaaauucugu

SEQ ID NO: 1211862 - RNA, 23 nt, Human
ccuguugggccaggagccuccug

SEQ ID NO: 1211863 - RNA, 20 nt, Human
ccuguugggccaggagccuc

SEQ ID NO: 1211864 - RNA, 19 nt, Human
ccuguugggccaggagccu

SEQ ID NO: 1211865 - RNA, 18 nt, Human
ccuguugggccaggagcc

SEQ ID NO: 1211866 - RNA, 17 nt, Human
ccuguugggccaggagc

SEQ ID NO: 1211867 - RNA, 16 nt, Human
ccuguugggccaggag

SEQ ID NO: 1211868 - RNA, 23 nt, Human
ccuguucagcuccagcucaccag

SEQ ID NO: 1211869 - RNA, 21 nt, Human
ccuguucagcuccagcucacc

SEQ ID NO: 1211870 - RNA, 20 nt, Human
ccuguucagcuccagcucac

SEQ ID NO: 1211871 - RNA, 19 nt, Human
ccuguucagcuccagcuca

SEQ ID NO: 1211872 - RNA, 16 nt, Human
ccuguucagcuccagc

SEQ ID NO: 1211873 - RNA, 15 nt, Human
ccuguucagcuccag

SEQ ID NO: 1211874 - RNA, 14 nt, Human
ccuguucagcucca

SEQ ID NO: 1211875 - RNA, 17 nt, Human
ccuguucuggcagaguu

SEQ ID NO: 1211876 - RNA, 12 nt, Human
ccuguucuggca

SEQ ID NO: 1211877 - RNA, 18 nt, Human
ccuguucccaugagauga

SEQ ID NO: 1211878 - RNA, 13 nt, Human
ccuguucagcucc

SEQ ID NO: 1211879 - RNA, 18 nt, Human
ccagagacacaagccuuc

SEQ ID NO: 1211880 - RNA, 16 nt, Human
ccagagacacaagccu

SEQ ID NO: 1211881 - RNA, 13 nt, Human
ccagagagggugg

SEQ ID NO: 1211882 - RNA, 13 nt, Human
ccagaugcaccag

SEQ ID NO: 1211883 - RNA, 14 nt, Human
ccagaugcaccagc

SEQ ID NO: 1211884 - RNA, 15 nt, Human
ccagaugcaccagcc

SEQ ID NO: 1211885 - RNA, 17 nt, Human
ccagacccggcugcgug

SEQ ID NO: 1211886 - RNA, 22 nt, Human
ccacuuuuguucuugguuugua

SEQ ID NO: 1211887 - RNA, 21 nt, Human
ccacuuuuguucuugguuugu

SEQ ID NO: 1211888 - RNA, 15 nt, Human
ccacuuuuguucuug

SEQ ID NO: 1211889 - RNA, 14 nt, Human
ccacuuuuguucuu

SEQ ID NO: 1211890 - RNA, 20 nt, Human
ccacuuucuagccagaggag

SEQ ID NO: 1211891 - RNA, 19 nt, Human
ccacuuucuagccagagga

SEQ ID NO: 1211892 - RNA, 18 nt, Human
ccacuuucuagccagagg

SEQ ID NO: 1211893 - RNA, 13 nt, Human
ccacuuucuagcc

SEQ ID NO: 1211894 - RNA, 19 nt, Human
ccacugcaccgggccacag

SEQ ID NO: 1211895 - RNA, 17 nt, Human
ccacugcaccgggccac

SEQ ID NO: 1211896 - RNA, 14 nt, Human
ccacugcaccgggc

SEQ ID NO: 1211897 - RNA, 13 nt, Human
ccacugcaccggg

SEQ ID NO: 1211898 - RNA, 20 nt, Human
ccacugcacuauagccuagg

SEQ ID NO: 1211899 - RNA, 19 nt, Human
ccacugcacuauagccuag

SEQ ID NO: 1211900 - RNA, 18 nt, Human
ccacugcacuccagccug

SEQ ID NO: 1211901 - RNA, 19 nt, Human
ccaggaaaggcuccaggag

SEQ ID NO: 1211902 - RNA, 18 nt, Human
ccaggaaaggcuccagga

SEQ ID NO: 1211903 - RNA, 20 nt, Human
ccaggaaaggcuccaggagc

SEQ ID NO: 1211904 - RNA, 18 nt, Human
ccagccccuucugaccca

SEQ ID NO: 1211905 - RNA, 17 nt, Human
ccagccccuucugaccc

SEQ ID NO: 1211906 - RNA, 16 nt, Human
ccagccccuucugacc

SEQ ID NO: 1211907 - RNA, 15 nt, Human
ccagccccuucugac

SEQ ID NO: 1211908 - RNA, 18 nt, Human
ccagccccuggaugcagc

SEQ ID NO: 1211909 - RNA, 15 nt, Human
ccagccccuggaugc

SEQ ID NO: 1211910 - RNA, 14 nt, Human
ccagccccuggaug

SEQ ID NO: 1211911 - RNA, 13 nt, Human
ccagccccuggau

SEQ ID NO: 1211912 - RNA, 14 nt, Human
ccagcagccuggac

SEQ ID NO: 1211913 - RNA, 23 nt, Human
ccagccccauccucuguacagag

SEQ ID NO: 1211914 - RNA, 13 nt, Human
ccagcagccugga

SEQ ID NO: 1211915 - RNA, 22 nt, Human
ccagcagaaaugccuuacccuc

SEQ ID NO: 1211916 - RNA, 17 nt, Human
ccagcagaaaugccuua

SEQ ID NO: 1211917 - RNA, 16 nt, Human
ccagcagaaaugccuu

SEQ ID NO: 1211918 - RNA, 12 nt, Human
ccagcagccugg

SEQ ID NO: 1211919 - RNA, 11 nt, Human
ccagcagccug

SEQ ID NO: 1211920 - RNA, 19 nt, Human
ccagucaccccggccaccu

SEQ ID NO: 1211921 - RNA, 18 nt, Human
ccagucaccccggccacc

SEQ ID NO: 1211922 - RNA, 17 nt, Human
ccagucaccccggccac

SEQ ID NO: 1211923 - RNA, 16 nt, Human
ccagucaccccggcca

SEQ ID NO: 1211924 - RNA, 22 nt, Human
ccaguaucuugaagacuuuucu

SEQ ID NO: 1211925 - RNA, 19 nt, Human
ccaguaucuugaagacuuu

SEQ ID NO: 1211926 - RNA, 23 nt, Human
ccaggggugggacacccugugau

SEQ ID NO: 1211927 - RNA, 22 nt, Human
ccaggggugggacacccuguga

SEQ ID NO: 1211928 - RNA, 21 nt, Human
ccaggggugggacacccugug

SEQ ID NO: 1211929 - RNA, 20 nt, Human
ccaggggugggacacccugu

SEQ ID NO: 1211930 - RNA, 18 nt, Human
ccccggccaccugcggug

SEQ ID NO: 1211931 - RNA, 14 nt, Human
ccccggccaccugc

SEQ ID NO: 1211932 - RNA, 14 nt, Human
ccccgcccaggcuu

SEQ ID NO: 1211933 - RNA, 12 nt, Human
ccccgcccaggc

SEQ ID NO: 1211934 - RNA, 14 nt, Human
cccccuuccaugga

SEQ ID NO: 1211935 - RNA, 21 nt, Human
ccccaaaacucuccucugcug

SEQ ID NO: 1211936 - RNA, 20 nt, Human
ccccaaaacucuccucugcu

SEQ ID NO: 1211937 - RNA, 18 nt, Human
ccccaaaacucuccucug

SEQ ID NO: 1211938 - RNA, 12 nt, Human
ccccagccccaa

SEQ ID NO: 1211939 - RNA, 16 nt, Human
ccccagccccauccca

SEQ ID NO: 1211940 - RNA, 21 nt, Human
ccccauucugccugcccaggc

SEQ ID NO: 1211941 - RNA, 14 nt, Human
ccccagccccaaaa

SEQ ID NO: 1211942 - RNA, 14 nt, Human
ccccagccccaucc

SEQ ID NO: 1211943 - RNA, 14 nt, Human
cccauccucuguac

SEQ ID NO: 1211944 - RNA, 18 nt, Human
cccaggcuggcgugcagu

SEQ ID NO: 1211945 - RNA, 20 nt, Human
cccaggcuggcgugcagugg

SEQ ID NO: 1211946 - RNA, 19 nt, Human
cccaggcuggcgugcagug

SEQ ID NO: 1211947 - RNA, 21 nt, Human
cccaggcuggcgugcaguggu

SEQ ID NO: 1211948 - RNA, 19 nt, Human
cccauccucuguacagagc

SEQ ID NO: 1211949 - RNA, 15 nt, Human
cccauccucuguaca

SEQ ID NO: 1211950 - RNA, 20 nt, Human
cccauccucuguacagagcc

SEQ ID NO: 1211951 - RNA, 13 nt, Human
cccagccccaaug

SEQ ID NO: 1211952 - RNA, 23 nt, Human
cccagccccaaaacucuccucug

SEQ ID NO: 1211953 - RNA, 21 nt, Human
cccagccccaaaacucuccuc

SEQ ID NO: 1211954 - RNA, 19 nt, Human
cccagcccacuucugccau

SEQ ID NO: 1211955 - RNA, 18 nt, Human
cccacccaagggccuggc

SEQ ID NO: 1211956 - RNA, 15 nt, Human
cccacccaagggccu

SEQ ID NO: 1211957 - RNA, 12 nt, Human
cccaagcucugc

SEQ ID NO: 1211958 - RNA, 17 nt, Human
cccaagcucugcuccuc

SEQ ID NO: 1211959 - RNA, 18 nt, Human
cccaccgcagacaggacc

SEQ ID NO: 1211960 - RNA, 15 nt, Human
cccaccgcagacagg

SEQ ID NO: 1211961 - RNA, 18 nt, Human
ccaugaggaacaaggcaa

SEQ ID NO: 1211962 - RNA, 17 nt, Human
ccaugaggaacaaggca

SEQ ID NO: 1211963 - RNA, 16 nt, Human
ccaugaggaacaaggc

SEQ ID NO: 1211964 - RNA, 13 nt, Human
ccaugagccucag

SEQ ID NO: 1211965 - RNA, 15 nt, Human
ccugccucuucucua

SEQ ID NO: 1211966 - RNA, 22 nt, Human
ccugcugcaguugccagucacc

SEQ ID NO: 1211967 - RNA, 16 nt, Human
ccugcugcaguugcca

SEQ ID NO: 1211968 - RNA, 12 nt, Human
ccugcugcaguu

SEQ ID NO: 1211969 - RNA, 11 nt, Human
ccugcugcagu

SEQ ID NO: 1211970 - RNA, 23 nt, Human
ccugccuccuuugugaggaagcc

SEQ ID NO: 1211971 - RNA, 22 nt, Human
ccugccuccuuugugaggaagc

SEQ ID NO: 1211972 - RNA, 21 nt, Human
ccugccuccuuugugaggaag

SEQ ID NO: 1211973 - RNA, 20 nt, Human
ccugccuccuuugugaggaa

SEQ ID NO: 1211974 - RNA, 19 nt, Human
ccugccuccuuugugagga

SEQ ID NO: 1211975 - RNA, 15 nt, Human
ccugccuccuuugug

SEQ ID NO: 1211976 - RNA, 13 nt, Human
ccugccuccuuug

SEQ ID NO: 1211977 - RNA, 13 nt, Human
ccucuuggguuca

SEQ ID NO: 1211978 - RNA, 19 nt, Human
ccucuuuggucuacacugu

SEQ ID NO: 1211979 - RNA, 21 nt, Human
ccucugccugaagucacacag

SEQ ID NO: 1211980 - RNA, 17 nt, Human
ccugcaggcagccaggc

SEQ ID NO: 1211981 - RNA, 16 nt, Human
ccugcaggcagccagg

SEQ ID NO: 1211982 - RNA, 12 nt, Human
ccugcagagggc

SEQ ID NO: 1211983 - RNA, 21 nt, Human
ccugcaggcagccaggccaca

SEQ ID NO: 1211984 - RNA, 20 nt, Human
ccugcaggcagccaggccac

SEQ ID NO: 1211985 - RNA, 19 nt, Human
ccugcaggcagccaggcca

SEQ ID NO: 1211986 - RNA, 18 nt, Human
ccugcaggcagccaggcc

SEQ ID NO: 1211987 - RNA, 23 nt, Human
ccugcaggcagccaggccacaag

SEQ ID NO: 1211988 - RNA, 14 nt, Human
ccugcagagggcac

SEQ ID NO: 1211989 - RNA, 16 nt, Human
ccugaggggccucuua

SEQ ID NO: 1211990 - RNA, 12 nt, Human
ccugaggggccu

SEQ ID NO: 1211991 - RNA, 21 nt, Human
ccugaggcugggcucccuucc

SEQ ID NO: 1211992 - RNA, 19 nt, Human
ccugaggcugggcucccuu

SEQ ID NO: 1211993 - RNA, 17 nt, Human
ccugaggcugggcuccc

SEQ ID NO: 1211994 - RNA, 12 nt, Human
ccucucucacuc

SEQ ID NO: 1211995 - RNA, 20 nt, Human
ccucugccugaagucacaca

SEQ ID NO: 1211996 - RNA, 11 nt, Human
ccucugccuga

SEQ ID NO: 1211997 - RNA, 23 nt, Human
ccucugccucugacacacagcuc

SEQ ID NO: 1211998 - RNA, 21 nt, Human
ccucugccucugacacacagc

SEQ ID NO: 1211999 - RNA, 20 nt, Human
ccucugccucugacacacag

SEQ ID NO: 1212000 - RNA, 16 nt, Human
ccucgaacuggcugca

SEQ ID NO: 1212001 - RNA, 20 nt, Human
ccuccuuugugaggaagccg

SEQ ID NO: 1212002 - RNA, 19 nt, Human
ccuccuuugugaggaagcc

SEQ ID NO: 1212003 - RNA, 18 nt, Human
ccuccuuugugaggaagc

SEQ ID NO: 1212004 - RNA, 13 nt, Human
ccuccgccucuug

SEQ ID NO: 1212005 - RNA, 23 nt, Human
ccucccaacucaccccagcccca

SEQ ID NO: 1212006 - RNA, 21 nt, Human
ccucccaacucaccccagccc

SEQ ID NO: 1212007 - RNA, 20 nt, Human
ccucccaacucaccccagcc

SEQ ID NO: 1212008 - RNA, 17 nt, Human
ccucccaacucacccca

SEQ ID NO: 1212009 - RNA, 11 nt, Human
ccucaggcagg

SEQ ID NO: 1212010 - RNA, 16 nt, Human
cccugagcuuucugcu

SEQ ID NO: 1212011 - RNA, 17 nt, Human
cccugcccggcugcgga

SEQ ID NO: 1212012 - RNA, 14 nt, Human
cccugcccggcugc

SEQ ID NO: 1212013 - RNA, 22 nt, Human
cccugcccaccuggccucugca

SEQ ID NO: 1212014 - RNA, 21 nt, Human
cccuggaugcagccucacagu

SEQ ID NO: 1212015 - RNA, 17 nt, Human
cccuggaugcagccuca

SEQ ID NO: 1212016 - RNA, 13 nt, Human
cccuggaugcagc

SEQ ID NO: 1212017 - RNA, 11 nt, Human
cccugcccugu

SEQ ID NO: 1212018 - RNA, 12 nt, Human
cccugaaggccc

SEQ ID NO: 1212019 - RNA, 19 nt, Human
cccugaaggccccgcccag

SEQ ID NO: 1212020 - RNA, 16 nt, Human
cccugaaggccccgcc

SEQ ID NO: 1212021 - RNA, 14 nt, Human
cccugaaggccccg

SEQ ID NO: 1212022 - RNA, 13 nt, Human
cccugaaggcccc

SEQ ID NO: 1212023 - RNA, 22 nt, Human
cccugacaacacucauugaccu

SEQ ID NO: 1212024 - RNA, 16 nt, Human
cccugacaacacucau

SEQ ID NO: 1212025 - RNA, 14 nt, Human
cccugacaacacuc

SEQ ID NO: 1212026 - RNA, 22 nt, Human
cccugaaggccccgcccaggcu

SEQ ID NO: 1212027 - RNA, 20 nt, Human
cccugaaggccccgcccagg

SEQ ID NO: 1212028 - RNA, 18 nt, Human
cccugaaagcccugagcu

SEQ ID NO: 1212029 - RNA, 16 nt, Human
ccggccaccugcggug

SEQ ID NO: 1212030 - RNA, 16 nt, Human
ccgugaggccagagac

SEQ ID NO: 1212031 - RNA, 14 nt, Human
ccgugaggccagag

SEQ ID NO: 1212032 - RNA, 13 nt, Human
ccgugaggccaga

SEQ ID NO: 1212033 - RNA, 12 nt, Human
ccgugaggccag

SEQ ID NO: 1212034 - RNA, 17 nt, Human
ccgucuaccugaggggc

SEQ ID NO: 1212035 - RNA, 14 nt, Human
ccggcuccaggcuc

SEQ ID NO: 1212036 - RNA, 13 nt, Human
ccggcuccaggcu

SEQ ID NO: 1212037 - RNA, 15 nt, Human
ccgucuaccugaggg

SEQ ID NO: 1212038 - RNA, 14 nt, Human
ccgucuaccugagg

SEQ ID NO: 1212039 - RNA, 15 nt, Human
ccggcuccaggcucc

SEQ ID NO: 1212040 - RNA, 14 nt, Human
ccuaaucuucugaa

SEQ ID NO: 1212041 - RNA, 20 nt, Human
ccuagccugugccucuggga

SEQ ID NO: 1212042 - RNA, 21 nt, Human
ccuagcauacguacacauuuu

SEQ ID NO: 1212043 - RNA, 19 nt, Human
ccuagcauacguacacauu

SEQ ID NO: 1212044 - RNA, 23 nt, Human
cccugugauggggcccugccucc

SEQ ID NO: 1212045 - RNA, 22 nt, Human
cccugugauggggcccugccuc

SEQ ID NO: 1212046 - RNA, 21 nt, Human
cccugugauggggcccugccu

SEQ ID NO: 1212047 - RNA, 13 nt, Human
cccugucuaauga

SEQ ID NO: 1212048 - RNA, 17 nt, Human
ccgcagacaggaccagg

SEQ ID NO: 1212049 - RNA, 16 nt, Human
ccgcagacaggaccag

SEQ ID NO: 1212050 - RNA, 12 nt, Human
ccgcccaggcuu

SEQ ID NO: 1212051 - RNA, 19 nt, Human
ccgaaagggacuuggaagc

SEQ ID NO: 1212052 - RNA, 17 nt, Human
ccgaaaacguggcugcu

SEQ ID NO: 1212053 - RNA, 16 nt, Human
ccgaaaacguggcugc

SEQ ID NO: 1212054 - RNA, 15 nt, Human
cccuuccucuuucca

SEQ ID NO: 1212055 - RNA, 17 nt, Human
ccgaauagcugggacua

SEQ ID NO: 1212056 - RNA, 16 nt, Human
ccgaauagcugggacu

SEQ ID NO: 1212057 - RNA, 17 nt, Human
ccgaccagacaccuuga

SEQ ID NO: 1212058 - RNA, 13 nt, Human
ccgaccagacacc

SEQ ID NO: 1212059 - RNA, 18 nt, Human
ccgaccagacaccuugac

SEQ ID NO: 1212060 - RNA, 21 nt, Human
caucagcacgauuucuguuua

SEQ ID NO: 1212061 - RNA, 19 nt, Human
caucccaaacccuucagug

SEQ ID NO: 1212062 - RNA, 11 nt, Human
caucccagccc

SEQ ID NO: 1212063 - RNA, 20 nt, Human
caucccaaacccuucagugc

SEQ ID NO: 1212064 - RNA, 22 nt, Human
cauccucuguacagagcccacg

SEQ ID NO: 1212065 - RNA, 12 nt, Human
caucccagcccc

SEQ ID NO: 1212066 - RNA, 16 nt, Human
cauacaguuugcacuu

SEQ ID NO: 1212067 - RNA, 23 nt, Human
cauacaggaagguagaaauaucu

SEQ ID NO: 1212068 - RNA, 23 nt, Human
caguuuguuaguaugaggcauuu

SEQ ID NO: 1212069 - RNA, 22 nt, Human
caguuguuagugugucuuagug

SEQ ID NO: 1212070 - RNA, 22 nt, Human
cagucugauucccaagcucugc

SEQ ID NO: 1212071 - RNA, 21 nt, Human
cagucugauucccaagcucug

SEQ ID NO: 1212072 - RNA, 20 nt, Human
cagugguaugaucacggcuc

SEQ ID NO: 1212073 - RNA, 18 nt, Human
cagugggagcugccuguu

SEQ ID NO: 1212074 - RNA, 17 nt, Human
cagugggagcugccugu

SEQ ID NO: 1212075 - RNA, 16 nt, Human
cagugggagcugccug

SEQ ID NO: 1212076 - RNA, 22 nt, Human
cagugcccacaggaucagucug

SEQ ID NO: 1212077 - RNA, 21 nt, Human
cagugcccacaggaucagucu

SEQ ID NO: 1212078 - RNA, 23 nt, Human
cagucugauucccaagcucugcu

SEQ ID NO: 1212079 - RNA, 20 nt, Human
caguuacucagaauucucua

SEQ ID NO: 1212080 - RNA, 20 nt, Human
caguggugcgaucuggguuc

SEQ ID NO: 1212081 - RNA, 19 nt, Human
caguggugcgaucuggguu

SEQ ID NO: 1212082 - RNA, 21 nt, Human
cagugguaugaucacggcuca

SEQ ID NO: 1212083 - RNA, 14 nt, Human
ccaaugggagcuca

SEQ ID NO: 1212084 - RNA, 23 nt, Human
ccaauggacuaacuugucuuugg

SEQ ID NO: 1212085 - RNA, 17 nt, Human
ccaagcucugcuccucu

SEQ ID NO: 1212086 - RNA, 16 nt, Human
ccaagcucugcuccuc

SEQ ID NO: 1212087 - RNA, 15 nt, Human
ccaagcucugcuccu

SEQ ID NO: 1212088 - RNA, 14 nt, Human
ccaagcucugcucc

SEQ ID NO: 1212089 - RNA, 14 nt, Human
ccaacucaccccag

SEQ ID NO: 1212090 - RNA, 21 nt, Human
ccaacucaccccagccccaaa

SEQ ID NO: 1212091 - RNA, 13 nt, Human
ccaacucacccca

SEQ ID NO: 1212092 - RNA, 16 nt, Human
ccaaaucauaguggcu

SEQ ID NO: 1212093 - RNA, 23 nt, Human
ccaaaucagcugcuacuacuccu

SEQ ID NO: 1212094 - RNA, 15 nt, Human
ccaaaucagcugcua

SEQ ID NO: 1212095 - RNA, 14 nt, Human
ccaaagugcuggga

SEQ ID NO: 1212096 - RNA, 22 nt, Human
ccaaaguacacuguuucaaacu

SEQ ID NO: 1212097 - RNA, 18 nt, Human
cauuuaggugaggaagca

SEQ ID NO: 1212098 - RNA, 16 nt, Human
cauuuaggugaggaag

SEQ ID NO: 1212099 - RNA, 17 nt, Human
ccaaaaaaugcuugcuu

SEQ ID NO: 1212100 - RNA, 21 nt, Human
cauuuggugguuucagaaaug

SEQ ID NO: 1212101 - RNA, 17 nt, Human
cauuuguuugaacugau

SEQ ID NO: 1212102 - RNA, 23 nt, Human
cauuuuuuuuaagaaaaaggaug

SEQ ID NO: 1212103 - RNA, 15 nt, Human
caugcaaggucauuu

SEQ ID NO: 1212104 - RNA, 12 nt, Human
caugcaagguca

SEQ ID NO: 1212105 - RNA, 13 nt, Human
caugacaaagacu

SEQ ID NO: 1212106 - RNA, 16 nt, Human
caugcuccuggcccac

SEQ ID NO: 1212107 - RNA, 14 nt, Human
caugcuccuggccc

SEQ ID NO: 1212108 - RNA, 17 nt, Human
caugcuccuggcccacu

SEQ ID NO: 1212109 - RNA, 20 nt, Human
caugcuccuggcccacugca

SEQ ID NO: 1212110 - RNA, 22 nt, Human
cauggccucuucagaucucuaa

SEQ ID NO: 1212111 - RNA, 21 nt, Human
cauggccucuucagaucucua

SEQ ID NO: 1212112 - RNA, 18 nt, Human
caugggaaaggggaaguu

SEQ ID NO: 1212113 - RNA, 21 nt, Human
cauucuccaccugccagggac

SEQ ID NO: 1212114 - RNA, 19 nt, Human
cauucuccaccugccaggg

SEQ ID NO: 1212115 - RNA, 18 nt, Human
cauucuccaccugccagg

SEQ ID NO: 1212116 - RNA, 17 nt, Human
cauucuccaccugccag

SEQ ID NO: 1212117 - RNA, 12 nt, Human
cauuaucuagau

SEQ ID NO: 1212118 - RNA, 16 nt, Human
cauguucuuaauucuu

SEQ ID NO: 1212119 - RNA, 13 nt, Human
cauguucuuaauu

SEQ ID NO: 1212120 - RNA, 21 nt, Human
cauguuacauaagauaaaugu

SEQ ID NO: 1212121 - RNA, 17 nt, Human
cauguuacauaagauaa

SEQ ID NO: 1212122 - RNA, 16 nt, Human
cauguuacauaagaua

SEQ ID NO: 1212123 - RNA, 16 nt, Human
cauguccaagaagccc

SEQ ID NO: 1212124 - RNA, 15 nt, Human
cauguccaagaagcc

SEQ ID NO: 1212125 - RNA, 19 nt, Human
cauguuggccaggcugguc

SEQ ID NO: 1212126 - RNA, 18 nt, Human
cauguucuuaauucuuag

SEQ ID NO: 1212127 - RNA, 17 nt, Human
cauguuggccaggcugg

SEQ ID NO: 1212128 - RNA, 18 nt, Human
cauguuggccaggcuggu

SEQ ID NO: 1212129 - RNA, 15 nt, Human
cagcacgauuucugu

SEQ ID NO: 1212130 - RNA, 14 nt, Human
cagcacgauuucug

SEQ ID NO: 1212131 - RNA, 19 nt, Human
cagcaccaucucuccuccu

SEQ ID NO: 1212132 - RNA, 17 nt, Human
cagcaccaucucuccuc

SEQ ID NO: 1212133 - RNA, 19 nt, Human
cagauuugaacucuucaau

SEQ ID NO: 1212134 - RNA, 20 nt, Human
cagauuucacucuccuuggu

SEQ ID NO: 1212135 - RNA, 13 nt, Human
cagauuucacucu

SEQ ID NO: 1212136 - RNA, 20 nt, Human
cagauugcaacaggcugggc

SEQ ID NO: 1212137 - RNA, 19 nt, Human
cagauugcaacaggcuggg

SEQ ID NO: 1212138 - RNA, 21 nt, Human
cagauugcaacaggcugggcu

SEQ ID NO: 1212139 - RNA, 18 nt, Human
cagauugcaacaggcugg

SEQ ID NO: 1212140 - RNA, 19 nt, Human
cagauagauauaugcucug

SEQ ID NO: 1212141 - RNA, 19 nt, Human
cagauacuuggggggcuga

SEQ ID NO: 1212142 - RNA, 17 nt, Human
cagaggggguggccucc

SEQ ID NO: 1212143 - RNA, 16 nt, Human
cagaggggguggccuc

SEQ ID NO: 1212144 - RNA, 14 nt, Human
cagaggggguggcc

SEQ ID NO: 1212145 - RNA, 13 nt, Human
cagaggggguggc

SEQ ID NO: 1212146 - RNA, 20 nt, Human
cagaggaaagcaaaggagau

SEQ ID NO: 1212147 - RNA, 19 nt, Human
cagaggaaagcaaaggaga

SEQ ID NO: 1212148 - RNA, 17 nt, Human
cagaggaaagcaaagga

SEQ ID NO: 1212149 - RNA, 16 nt, Human
cagagcugccaccugc

SEQ ID NO: 1212150 - RNA, 13 nt, Human
cagagcugccacc

SEQ ID NO: 1212151 - RNA, 20 nt, Human
cagagagguuaaggugggua

SEQ ID NO: 1212152 - RNA, 23 nt, Human
cagagaggguggugaccucugcc

SEQ ID NO: 1212153 - RNA, 22 nt, Human
cagagaggguggugaccucugc

SEQ ID NO: 1212154 - RNA, 20 nt, Human
cagagaggguggugaccucu

SEQ ID NO: 1212155 - RNA, 17 nt, Human
cagagaggguggugacc

SEQ ID NO: 1212156 - RNA, 13 nt, Human
cagagaggguggg

SEQ ID NO: 1212157 - RNA, 12 nt, Human
cagagagggugg

SEQ ID NO: 1212158 - RNA, 21 nt, Human
cagacuggaagcacagcuuca

SEQ ID NO: 1212159 - RNA, 20 nt, Human
cagacuggaagcacagcuuc

SEQ ID NO: 1212160 - RNA, 18 nt, Human
cagacuggaagcacagcu

SEQ ID NO: 1212161 - RNA, 17 nt, Human
cagacuggaagcacagc

SEQ ID NO: 1212162 - RNA, 16 nt, Human
cagacuggaagcacag

SEQ ID NO: 1212163 - RNA, 14 nt, Human
cagacuggaagcac

SEQ ID NO: 1212164 - RNA, 13 nt, Human
cagacuggaagca

SEQ ID NO: 1212165 - RNA, 23 nt, Human
cagacucuacagaggccaugggc

SEQ ID NO: 1212166 - RNA, 21 nt, Human
cagacucuacagaggccaugg

SEQ ID NO: 1212167 - RNA, 20 nt, Human
cagacucuacagaggccaug

SEQ ID NO: 1212168 - RNA, 19 nt, Human
cagacucuacagaggccau

SEQ ID NO: 1212169 - RNA, 18 nt, Human
cagacucuacagaggcca

SEQ ID NO: 1212170 - RNA, 17 nt, Human
cagacucuacagaggcc

SEQ ID NO: 1212171 - RNA, 23 nt, Human
cagacaggcaagcaccuccugcc

SEQ ID NO: 1212172 - RNA, 22 nt, Human
cagacaggcaagcaccuccugc

SEQ ID NO: 1212173 - RNA, 21 nt, Human
cagacaggcaagcaccuccug

SEQ ID NO: 1212174 - RNA, 20 nt, Human
cagacaggcaagcaccuccu

SEQ ID NO: 1212175 - RNA, 18 nt, Human
cagacaggcaagcaccuc

SEQ ID NO: 1212176 - RNA, 13 nt, Human
cagacaggcaagc

SEQ ID NO: 1212177 - RNA, 11 nt, Human
cagacaggcaa

SEQ ID NO: 1212178 - RNA, 24 nt, Human
cagacaggaccagggauuuccaug

SEQ ID NO: 1212179 - RNA, 17 nt, Human
cagacaggaccagggau

SEQ ID NO: 1212180 - RNA, 16 nt, Human
cagacaggaccaggga

SEQ ID NO: 1212181 - RNA, 15 nt, Human
cagacaggaccaggg

SEQ ID NO: 1212182 - RNA, 13 nt, Human
cagacaggaccag

SEQ ID NO: 1212183 - RNA, 18 nt, Human
cagacagcugccugggau

SEQ ID NO: 1212184 - RNA, 17 nt, Human
cagacagcugccuggga

SEQ ID NO: 1212185 - RNA, 16 nt, Human
cagacagcugccuggg

SEQ ID NO: 1212186 - RNA, 15 nt, Human
cagacagcugccugg

SEQ ID NO: 1212187 - RNA, 14 nt, Human
cagacagcugccug

SEQ ID NO: 1212188 - RNA, 13 nt, Human
cagacagcugccu

SEQ ID NO: 1212189 - RNA, 17 nt, Human
caggcaaugcuggcugu

SEQ ID NO: 1212190 - RNA, 16 nt, Human
caggcaaugcuggcug

SEQ ID NO: 1212191 - RNA, 15 nt, Human
caggcaaugcuggcu

SEQ ID NO: 1212192 - RNA, 22 nt, Human
caggaggccagccuugaccauu

SEQ ID NO: 1212193 - RNA, 19 nt, Human
caggaggccagccuugacc

SEQ ID NO: 1212194 - RNA, 19 nt, Human
caggaggaucacuugaguc

SEQ ID NO: 1212195 - RNA, 23 nt, Human
caggaccucaggugagaagcaga

SEQ ID NO: 1212196 - RNA, 16 nt, Human
caggaccucaggugag

SEQ ID NO: 1212197 - RNA, 12 nt, Human
caggccaggccc

SEQ ID NO: 1212198 - RNA, 11 nt, Human
caggccaggcc

SEQ ID NO: 1212199 - RNA, 23 nt, Human
caggcugggagagccuuccaggg

SEQ ID NO: 1212200 - RNA, 22 nt, Human
caggcugggagagccuuccagg

SEQ ID NO: 1212201 - RNA, 16 nt, Human
caggggaaaagaggag

SEQ ID NO: 1212202 - RNA, 14 nt, Human
caggggaaaagagg

SEQ ID NO: 1212203 - RNA, 17 nt, Human
caggggaaaaucagccu

SEQ ID NO: 1212204 - RNA, 14 nt, Human
caggccuccuacag

SEQ ID NO: 1212205 - RNA, 21 nt, Human
caggcugggagagccuuccag

SEQ ID NO: 1212206 - RNA, 17 nt, Human
caggaaaggcuccagga

SEQ ID NO: 1212207 - RNA, 16 nt, Human
caggaaaggcuccagg

SEQ ID NO: 1212208 - RNA, 20 nt, Human
caggaaaggcuccaggagca

SEQ ID NO: 1212209 - RNA, 19 nt, Human
caggaaaggcuccaggagc

SEQ ID NO: 1212210 - RNA, 19 nt, Human
cagcugagggugagugggu

SEQ ID NO: 1212211 - RNA, 21 nt, Human
cagcugacuuuucuguccgag

SEQ ID NO: 1212212 - RNA, 19 nt, Human
cagccugcuccagcuguuc

SEQ ID NO: 1212213 - RNA, 17 nt, Human
cagccugcuccagcugu

SEQ ID NO: 1212214 - RNA, 16 nt, Human
cagccugcuccagcug

SEQ ID NO: 1212215 - RNA, 15 nt, Human
cagcuaacauggaag

SEQ ID NO: 1212216 - RNA, 18 nt, Human
cagcuaacauggaaguac

SEQ ID NO: 1212217 - RNA, 13 nt, Human
caccugccaggga

SEQ ID NO: 1212218 - RNA, 21 nt, Human
caccugccccucaacucuccu

SEQ ID NO: 1212219 - RNA, 18 nt, Human
caccugccccucaacucu

SEQ ID NO: 1212220 - RNA, 12 nt, Human
caccugccaggg

SEQ ID NO: 1212221 - RNA, 11 nt, Human
caccugccagg

SEQ ID NO: 1212222 - RNA, 12 nt, Human
cacccuccuuuc

SEQ ID NO: 1212223 - RNA, 12 nt, Human
cacccugcucuc

SEQ ID NO: 1212224 - RNA, 19 nt, Human
caccugcggugcuaucucc

SEQ ID NO: 1212225 - RNA, 17 nt, Human
caccugcggugcuaucu

SEQ ID NO: 1212226 - RNA, 16 nt, Human
caccugcggugcuauc

SEQ ID NO: 1212227 - RNA, 20 nt, Human
caccugcggugcuaucuccc

SEQ ID NO: 1212228 - RNA, 20 nt, Human
cacgcuggagugcagugagc

SEQ ID NO: 1212229 - RNA, 18 nt, Human
cacgcuggagugcaguga

SEQ ID NO: 1212230 - RNA, 17 nt, Human
cacgcuggagugcagug

SEQ ID NO: 1212231 - RNA, 16 nt, Human
cacgcuggagugcagu

SEQ ID NO: 1212232 - RNA, 21 nt, Human
cacgcuggagugcagugagcc

SEQ ID NO: 1212233 - RNA, 14 nt, Human
cacuacauucuguu

SEQ ID NO: 1212234 - RNA, 13 nt, Human
cacuacauucugu

SEQ ID NO: 1212235 - RNA, 22 nt, Human
cacggaagagccuugcggaagg

SEQ ID NO: 1212236 - RNA, 16 nt, Human
cacggaagagccuugc

SEQ ID NO: 1212237 - RNA, 15 nt, Human
cacuacauucuguua

SEQ ID NO: 1212238 - RNA, 21 nt, Human
caccagcccuuagcagggaaa

SEQ ID NO: 1212239 - RNA, 19 nt, Human
caccagcccuuagcaggga

SEQ ID NO: 1212240 - RNA, 22 nt, Human
caccagccccagugcccacagg

SEQ ID NO: 1212241 - RNA, 21 nt, Human
caccagccccagugcccacag

SEQ ID NO: 1212242 - RNA, 18 nt, Human
caccagccccagugccca

SEQ ID NO: 1212243 - RNA, 17 nt, Human
caccagccccagugccc

SEQ ID NO: 1212244 - RNA, 18 nt, Human
cacauuuauucugcucac

SEQ ID NO: 1212245 - RNA, 17 nt, Human
cacauuuauucugcuca

SEQ ID NO: 1212246 - RNA, 16 nt, Human
cacaucuugcucugcu

SEQ ID NO: 1212247 - RNA, 23 nt, Human
cacaucuugcucugcugacagac

SEQ ID NO: 1212248 - RNA, 16 nt, Human
cacccagcccacuucu

SEQ ID NO: 1212249 - RNA, 12 nt, Human
cacccagcccac

SEQ ID NO: 1212250 - RNA, 22 nt, Human
cacaucuugcucugcugacaga

SEQ ID NO: 1212251 - RNA, 21 nt, Human
cacaucuugcucugcugacag

SEQ ID NO: 1212252 - RNA, 20 nt, Human
cacaucuugcucugcugaca

SEQ ID NO: 1212253 - RNA, 15 nt, Human
cacaucuugcucugc

SEQ ID NO: 1212254 - RNA, 14 nt, Human
cacaucuugcucug

SEQ ID NO: 1212255 - RNA, 13 nt, Human
cacaucuugcucu

SEQ ID NO: 1212256 - RNA, 22 nt, Human
caaguauuauaccuuuuuuaga

SEQ ID NO: 1212257 - RNA, 17 nt, Human
caaguauuauaccuuuu

SEQ ID NO: 1212258 - RNA, 16 nt, Human
caaggcaaggcuguca

SEQ ID NO: 1212259 - RNA, 14 nt, Human
caaggcaaggcugu

SEQ ID NO: 1212260 - RNA, 20 nt, Human
caaggauugcuacuguccua

SEQ ID NO: 1212261 - RNA, 13 nt, Human
caagcugcacccu

SEQ ID NO: 1212262 - RNA, 16 nt, Human
caagcucugcuccucu

SEQ ID NO: 1212263 - RNA, 17 nt, Human
caagcucccaggcauuc

SEQ ID NO: 1212264 - RNA, 15 nt, Human
caagcucccaggcau

SEQ ID NO: 1212265 - RNA, 14 nt, Human
caagcucccaggca

SEQ ID NO: 1212266 - RNA, 12 nt, Human
caagcucccagg

SEQ ID NO: 1212267 - RNA, 18 nt, Human
caagcuccaagcucccag

SEQ ID NO: 1212268 - RNA, 21 nt, Human
caagcuccaagcucccaggca

SEQ ID NO: 1212269 - RNA, 19 nt, Human
caagcuccaagcucccagg

SEQ ID NO: 1212270 - RNA, 20 nt, Human
caauuuauuauggcacauca

SEQ ID NO: 1212271 - RNA, 16 nt, Human
caauggcagccuuggc

SEQ ID NO: 1212272 - RNA, 12 nt, Human
caaugcuggcug

SEQ ID NO: 1212273 - RNA, 15 nt, Human
caauggcagccuugg

SEQ ID NO: 1212274 - RNA, 14 nt, Human
caauggcagccuug

SEQ ID NO: 1212275 - RNA, 13 nt, Human
caauggcagccuu

SEQ ID NO: 1212276 - RNA, 14 nt, Human
caaucaaaucugcu

SEQ ID NO: 1212277 - RNA, 17 nt, Human
caaccccuucgcuccug

SEQ ID NO: 1212278 - RNA, 16 nt, Human
caaccccuucgcuccu

SEQ ID NO: 1212279 - RNA, 14 nt, Human
caaccccuucgcuc

SEQ ID NO: 1212280 - RNA, 14 nt, Human
caacccccagccug

SEQ ID NO: 1212281 - RNA, 17 nt, Human
caagaaggaugauucaa

SEQ ID NO: 1212282 - RNA, 18 nt, Human
caagaagcccaggaaagg

SEQ ID NO: 1212283 - RNA, 15 nt, Human
caagaagcccaggaa

SEQ ID NO: 1212284 - RNA, 16 nt, Human
caagaccacguuucua

SEQ ID NO: 1212285 - RNA, 14 nt, Human
caagaccacguuuc

SEQ ID NO: 1212286 - RNA, 13 nt, Human
caagcaccuccug

SEQ ID NO: 1212287 - RNA, 14 nt, Human
caagcaccuccugc

SEQ ID NO: 1212288 - RNA, 22 nt, Human
auuuuguuuuugucuuaaaaag

SEQ ID NO: 1212289 - RNA, 16 nt, Human
auuuuuauuaaauuau

SEQ ID NO: 1212290 - RNA, 12 nt, Human
auuuuuuuuucc

SEQ ID NO: 1212291 - RNA, 13 nt, Human
caaaagcauguga

SEQ ID NO: 1212292 - RNA, 19 nt, Human
caaaagcaucuaugugaga

SEQ ID NO: 1212293 - RNA, 20 nt, Human
caaaagguuaauaaaguaau

SEQ ID NO: 1212294 - RNA, 16 nt, Human
caaaccaucauugaaa

SEQ ID NO: 1212295 - RNA, 14 nt, Human
caaaccaucauuga

SEQ ID NO: 1212296 - RNA, 17 nt, Human
caaaccaucauugaaau

SEQ ID NO: 1212297 - RNA, 19 nt, Human
caaaccaucauugaaaucu

SEQ ID NO: 1212298 - RNA, 14 nt, Human
auuuguuauaauga

SEQ ID NO: 1212299 - RNA, 14 nt, Human
auuucacucuccuu

SEQ ID NO: 1212300 - RNA, 12 nt, Human
auuucacucucc

SEQ ID NO: 1212301 - RNA, 20 nt, Human
auuucuguuuagauaauaca

SEQ ID NO: 1212302 - RNA, 21 nt, Human
auuucuguuuagauaauacac

SEQ ID NO: 1212303 - RNA, 16 nt, Human
auucucuccuguaccu

SEQ ID NO: 1212304 - RNA, 15 nt, Human
auucucuuauccaac

SEQ ID NO: 1212305 - RNA, 14 nt, Human
auucucuuauccaa

SEQ ID NO: 1212306 - RNA, 12 nt, Human
auucucuuaucc

SEQ ID NO: 1212307 - RNA, 23 nt, Human
auucucuaguuugauuaaauucu

SEQ ID NO: 1212308 - RNA, 20 nt, Human
auucucuaguuugauuaaau

SEQ ID NO: 1212309 - RNA, 14 nt, Human
auucauauuuacuu

SEQ ID NO: 1212310 - RNA, 16 nt, Human
auuacaggugugaacc

SEQ ID NO: 1212311 - RNA, 17 nt, Human
ggccucccaacucaccc

SEQ ID NO: 1212312 - RNA, 14 nt, Human
ggccucccaacuca

SEQ ID NO: 1212313 - RNA, 13 nt, Human
ggccucccaacuc

SEQ ID NO: 1212314 - RNA, 14 nt, Human
ggcccuuccuuuuc

SEQ ID NO: 1212315 - RNA, 13 nt, Human
ggccaaaggaagc

SEQ ID NO: 1212316 - RNA, 12 nt, Human
ggccaaaggaag

SEQ ID NO: 1212317 - RNA, 15 nt, Human
ggccaaagccaaagc

SEQ ID NO: 1212318 - RNA, 12 nt, Human
ggcauuguggga

SEQ ID NO: 1212319 - RNA, 20 nt, Human
ggccagaugcaccagcccuu

SEQ ID NO: 1212320 - RNA, 19 nt, Human
ggccagaugcaccagcccu

SEQ ID NO: 1212321 - RNA, 23 nt, Human
ggccagagggagugacagaggca

SEQ ID NO: 1212322 - RNA, 13 nt, Human
ggccaagguggga

SEQ ID NO: 1212323 - RNA, 21 nt, Human
ggauuuugauccaagcugguc

SEQ ID NO: 1212324 - RNA, 23 nt, Human
ggauuaaacuuaaucuaaaugga

SEQ ID NO: 1212325 - RNA, 13 nt, Human
ggauguucuggga

SEQ ID NO: 1212326 - RNA, 22 nt, Human
ggaugagaaagguugaagcacc

SEQ ID NO: 1212327 - RNA, 12 nt, Human
ggaugagaaagg

SEQ ID NO: 1212328 - RNA, 21 nt, Human
ggaugaauuccaaauucugcu

SEQ ID NO: 1212329 - RNA, 17 nt, Human
ggcagccaggccacaag

SEQ ID NO: 1212330 - RNA, 15 nt, Human
ggcagccaggccaca

SEQ ID NO: 1212331 - RNA, 12 nt, Human
ggcagagcagag

SEQ ID NO: 1212332 - RNA, 10 nt, Human
ggcagagcag

SEQ ID NO: 1212333 - RNA, 12 nt, Human
ggcagaaggaag

SEQ ID NO: 1212334 - RNA, 16 nt, Human
ggaggucgaggcagga

SEQ ID NO: 1212335 - RNA, 15 nt, Human
ggaggucgaggcagg

SEQ ID NO: 1212336 - RNA, 18 nt, Human
ggaggucgaggcaggagg

SEQ ID NO: 1212337 - RNA, 16 nt, Human
ggagcugaguggggga

SEQ ID NO: 1212338 - RNA, 13 nt, Human
ggaggccagccuu

SEQ ID NO: 1212339 - RNA, 20 nt, Human
ggaggccaaggugggaggau

SEQ ID NO: 1212340 - RNA, 18 nt, Human
ggaggccaaggugggagg

SEQ ID NO: 1212341 - RNA, 21 nt, Human
ggaggcaugugaugagaggaa

SEQ ID NO: 1212342 - RNA, 19 nt, Human
ggaggaaggaaacccagcu

SEQ ID NO: 1212343 - RNA, 12 nt, Human
ggaggaagagaa

SEQ ID NO: 1212344 - RNA, 21 nt, Human
ggagcagccacauuccugaug

SEQ ID NO: 1212345 - RNA, 13 nt, Human
ggagcagccacau

SEQ ID NO: 1212346 - RNA, 19 nt, Human
gcuuguacauaaugcgugc

SEQ ID NO: 1212347 - RNA, 19 nt, Human
ggacccugaggcccagagg

SEQ ID NO: 1212348 - RNA, 18 nt, Human
ggacccugaggcccagag

SEQ ID NO: 1212349 - RNA, 15 nt, Human
ggacccugaggccca

SEQ ID NO: 1212350 - RNA, 14 nt, Human
ggacccugaggccc

SEQ ID NO: 1212351 - RNA, 17 nt, Human
ggagagcuagcagcagg

SEQ ID NO: 1212352 - RNA, 15 nt, Human
ggagagcuagcagca

SEQ ID NO: 1212353 - RNA, 22 nt, Human
ggagagccuuccagggguggga

SEQ ID NO: 1212354 - RNA, 18 nt, Human
ggagagccuuccaggggu

SEQ ID NO: 1212355 - RNA, 17 nt, Human
ggagagccuuccagggg

SEQ ID NO: 1212356 - RNA, 16 nt, Human
ggagagccuuccaggg

SEQ ID NO: 1212357 - RNA, 13 nt, Human
ggagagccuucca

SEQ ID NO: 1212358 - RNA, 17 nt, Human
ggacuuggaagcuccgc

SEQ ID NO: 1212359 - RNA, 19 nt, Human
ggagaaaauggacguguua

SEQ ID NO: 1212360 - RNA, 22 nt, Human
ggagaaccaaaaagaggcuaug

SEQ ID NO: 1212361 - RNA, 12 nt, Human
ggaccucaggcc

SEQ ID NO: 1212362 - RNA, 20 nt, Human
ggacuacaggugugagucac

SEQ ID NO: 1212363 - RNA, 22 nt, Human
ggacucaaugcacugacauugu

SEQ ID NO: 1212364 - RNA, 13 nt, Human
aaaaaaacacaaa

SEQ ID NO: 1212365 - RNA, 15 nt, Human
ggcuucaguggcagc

SEQ ID NO: 1212366 - RNA, 15 nt, Human
ggcugucaauuacag

SEQ ID NO: 1212367 - RNA, 23 nt, Human
ggcuguaucccaugagccucagc

SEQ ID NO: 1212368 - RNA, 22 nt, Human
ggcuguaucccaugagccucag

SEQ ID NO: 1212369 - RNA, 20 nt, Human
ggcuguaucccaugagccuc

SEQ ID NO: 1212370 - RNA, 16 nt, Human
ggcuggugucaccuga

SEQ ID NO: 1212371 - RNA, 19 nt, Human
ggcuguaucccaugagccu

SEQ ID NO: 1212372 - RNA, 23 nt, Human
gggaaaaucagccugcuccagcu

SEQ ID NO: 1212373 - RNA, 13 nt, Human
gggaaaaucagcc

SEQ ID NO: 1212374 - RNA, 17 nt, Human
ggcuucaguggcagcug

SEQ ID NO: 1212375 - RNA, 16 nt, Human
ggcuucaguggcagcu

SEQ ID NO: 1212376 - RNA, 20 nt, Human
ggcuggcgugcaguggugcg

SEQ ID NO: 1212377 - RNA, 16 nt, Human
ggcuggcgugcagugg

SEQ ID NO: 1212378 - RNA, 14 nt, Human
ggcuggcgugcagu

SEQ ID NO: 1212379 - RNA, 22 nt, Human
ggcuggccuggccccucagggu

SEQ ID NO: 1212380 - RNA, 17 nt, Human
ggcuggccuggccccuc

SEQ ID NO: 1212381 - RNA, 13 nt, Human
ggcugggagagcc

SEQ ID NO: 1212382 - RNA, 22 nt, Human
ggcucccuucccaccucucuca

SEQ ID NO: 1212383 - RNA, 20 nt, Human
ggcucccuucccaccucucu

SEQ ID NO: 1212384 - RNA, 18 nt, Human
ggcucccuucccaccucu

SEQ ID NO: 1212385 - RNA, 17 nt, Human
ggcucccuucccaccuc

SEQ ID NO: 1212386 - RNA, 16 nt, Human
ggcucccuucccaccu

SEQ ID NO: 1212387 - RNA, 22 nt, Human
ggcugcaugcgggcuuccuccu

SEQ ID NO: 1212388 - RNA, 20 nt, Human
ggcugcaugcgggcuuccuc

SEQ ID NO: 1212389 - RNA, 24 nt, Human
ggcucuuccaggcugggagagccu

SEQ ID NO: 1212390 - RNA, 23 nt, Human
ggcucuuccaggcugggagagcc

SEQ ID NO: 1212391 - RNA, 18 nt, Human
ggcucgagcaugccugga

SEQ ID NO: 1212392 - RNA, 14 nt, Human
gggcagaggaaagc

SEQ ID NO: 1212393 - RNA, 15 nt, Human
gggauuuccaugaug

SEQ ID NO: 1212394 - RNA, 18 nt, Human
aaaauaguggugugauuu

SEQ ID NO: 1212395 - RNA, 12 nt, Human
aaaauagccugc

SEQ ID NO: 1212396 - RNA, 15 nt, Human
aaaauaccagccagu

SEQ ID NO: 1212397 - RNA, 14 nt, Human
aaaauaccagccag

SEQ ID NO: 1212398 - RNA, 12 nt, Human
aaaauaaauuau

SEQ ID NO: 1212399 - RNA, 14 nt, Human
aaaagcugggcagg

SEQ ID NO: 1212400 - RNA, 19 nt, Human
gggaggccaaggugggagg

SEQ ID NO: 1212401 - RNA, 13 nt, Human
gggagggcuccag

SEQ ID NO: 1212402 - RNA, 11 nt, Human
gggagggcucc

SEQ ID NO: 1212403 - RNA, 20 nt, Human
aaaaaucucaaauuucuaaa

SEQ ID NO: 1212404 - RNA, 19 nt, Human
aaaaaucucaaauuucuaa

SEQ ID NO: 1212405 - RNA, 22 nt, Human
gggaacagacuggaagcacagc

SEQ ID NO: 1212406 - RNA, 14 nt, Human
gggaacagacugga

SEQ ID NO: 1212407 - RNA, 18 nt, Human
aaaacguggcugcuucaa

SEQ ID NO: 1212408 - RNA, 17 nt, Human
aaaacguggcugcuuca

SEQ ID NO: 1212409 - RNA, 16 nt, Human
aaaacguggcugcuuc

SEQ ID NO: 1212410 - RNA, 21 nt, Human
aaaaccaauguucucucuucu

SEQ ID NO: 1212411 - RNA, 15 nt, Human
aaaaccaauguucuc

SEQ ID NO: 1212412 - RNA, 20 nt, Human
aaaacugcugacuguuuucu

SEQ ID NO: 1212413 - RNA, 22 nt, Human
aaaacugauuuuuuuuuccuuc

SEQ ID NO: 1212414 - RNA, 18 nt, Human
aaaacugauuuuuuuuuc

SEQ ID NO: 1212415 - RNA, 21 nt, Human
aaaacguggcugcuucaagga

SEQ ID NO: 1212416 - RNA, 18 nt, Human
aaacaagaccacguuucu

SEQ ID NO: 1212417 - RNA, 21 nt, Human
aaaauggacguguuaugacuc

SEQ ID NO: 1212418 - RNA, 21 nt, Human
aaaauguaggguuauaauaau

SEQ ID NO: 1212419 - RNA, 22 nt, Human
aaacaugcuacacacugcaugu

SEQ ID NO: 1212420 - RNA, 23 nt, Human
ggggcccugccuccuuugugagg

SEQ ID NO: 1212421 - RNA, 19 nt, Human
ggggcccugccuccuuugu

SEQ ID NO: 1212422 - RNA, 16 nt, Human
ggggcccugccuccuu

SEQ ID NO: 1212423 - RNA, 19 nt, Human
ggggccaguuggucccccu

SEQ ID NO: 1212424 - RNA, 17 nt, Human
ggggccaguuggucccc

SEQ ID NO: 1212425 - RNA, 17 nt, Human
ggggaccucaggccugg

SEQ ID NO: 1212426 - RNA, 16 nt, Human
ggggaccucaggccug

SEQ ID NO: 1212427 - RNA, 15 nt, Human
ggggaccucaggccu

SEQ ID NO: 1212428 - RNA, 20 nt, Human
ggguaucaggugcugccauc

SEQ ID NO: 1212429 - RNA, 12 nt, Human
gggucucacucu

SEQ ID NO: 1212430 - RNA, 23 nt, Human
gggucucacuauguugcccaggc

SEQ ID NO: 1212431 - RNA, 22 nt, Human
gggucucacuauguugcccagg

SEQ ID NO: 1212432 - RNA, 20 nt, Human
aaacguggcugcuucaagga

SEQ ID NO: 1212433 - RNA, 17 nt, Human
aaacguggcugcuucaa

SEQ ID NO: 1212434 - RNA, 16 nt, Human
aaacguggcugcuuca

SEQ ID NO: 1212435 - RNA, 16 nt, Human
aaacuggauuaaacuu

SEQ ID NO: 1212436 - RNA, 14 nt, Human
aaagaugcuucuca

SEQ ID NO: 1212437 - RNA, 15 nt, Human
aaagaugagugagca

SEQ ID NO: 1212438 - RNA, 18 nt, Human
aaagaggcuaugugagca

SEQ ID NO: 1212439 - RNA, 13 nt, Human
aaagaggcuaugu

SEQ ID NO: 1212440 - RNA, 19 nt, Human
aaagacuuuuccaacccuc

SEQ ID NO: 1212441 - RNA, 15 nt, Human
aaagacuguacaaag

SEQ ID NO: 1212442 - RNA, 17 nt, Human
aaacuuuaccuuuuuua

SEQ ID NO: 1212443 - RNA, 14 nt, Human
aaacuuuaccuuuu

SEQ ID NO: 1212444 - RNA, 14 nt, Human
ggucccaccccaca

SEQ ID NO: 1212445 - RNA, 12 nt, Human
ggucccacccca

SEQ ID NO: 1212446 - RNA, 22 nt, Human
gguccacccaggagccccgagg

SEQ ID NO: 1212447 - RNA, 20 nt, Human
gguccacccaggagccccga

SEQ ID NO: 1212448 - RNA, 23 nt, Human
gguauuggcuagagguucaaaga

SEQ ID NO: 1212449 - RNA, 22 nt, Human
ggugcacaagcuccaagcuccc

SEQ ID NO: 1212450 - RNA, 22 nt, Human
ggucuugaacuccuggccucaa

SEQ ID NO: 1212451 - RNA, 19 nt, Human
ggucuguucuuuccaaagu

SEQ ID NO: 1212452 - RNA, 17 nt, Human
ggucuguucuuuccaaa

SEQ ID NO: 1212453 - RNA, 12 nt, Human
ggucuguucuuu

SEQ ID NO: 1212454 - RNA, 17 nt, Human
aaagcagugcaugcugu

SEQ ID NO: 1212455 - RNA, 18 nt, Human
aaagcuaggccuggccag

SEQ ID NO: 1212456 - RNA, 22 nt, Human
aaagcagugcaugcugucccuu

SEQ ID NO: 1212457 - RNA, 21 nt, Human
aaagcagugcaugcugucccu

SEQ ID NO: 1212458 - RNA, 15 nt, Human
aaagcuuguuaagau

SEQ ID NO: 1212459 - RNA, 22 nt, Human
aaaggaaagagggagguaagga

SEQ ID NO: 1212460 - RNA, 11 nt, Human
aaaggaaagag

SEQ ID NO: 1212461 - RNA, 13 nt, Human
gccuccuccagcc

SEQ ID NO: 1212462 - RNA, 14 nt, Human
gccucugggacugg

SEQ ID NO: 1212463 - RNA, 12 nt, Human
gccucugggacu

SEQ ID NO: 1212464 - RNA, 13 nt, Human
gccuccugugugu

SEQ ID NO: 1212465 - RNA, 20 nt, Human
gccugcccaggccccugcca

SEQ ID NO: 1212466 - RNA, 19 nt, Human
gccugcccaggccccugcc

SEQ ID NO: 1212467 - RNA, 18 nt, Human
gccugcccaggccccugc

SEQ ID NO: 1212468 - RNA, 23 nt, Human
gccucuucucuacucuagggaaa

SEQ ID NO: 1212469 - RNA, 12 nt, Human
gccucuucucua

SEQ ID NO: 1212470 - RNA, 17 nt, Human
gccuggccccucagggu

SEQ ID NO: 1212471 - RNA, 16 nt, Human
gccuggccccucaggg

SEQ ID NO: 1212472 - RNA, 15 nt, Human
gccuggccccucagg

SEQ ID NO: 1212473 - RNA, 21 nt, Human
gccugggaucccucauccuca

SEQ ID NO: 1212474 - RNA, 18 nt, Human
gccugggaucccucaucc

SEQ ID NO: 1212475 - RNA, 14 nt, Human
gccugggaucccuc

SEQ ID NO: 1212476 - RNA, 22 nt, Human
gccugggaggucaaggcugcag

SEQ ID NO: 1212477 - RNA, 21 nt, Human
gccugggaggucaaggcugca

SEQ ID NO: 1212478 - RNA, 10 nt, Human
gccuggccug

SEQ ID NO: 1212479 - RNA, 22 nt, Human
gccuggccccucagggucccug

SEQ ID NO: 1212480 - RNA, 20 nt, Human
gccuggccccucaggguccc

SEQ ID NO: 1212481 - RNA, 16 nt, Human
gccugccucuucucua

SEQ ID NO: 1212482 - RNA, 19 nt, Human
gcccacucccugcaaccug

SEQ ID NO: 1212483 - RNA, 15 nt, Human
gcccacucccugcaa

SEQ ID NO: 1212484 - RNA, 14 nt, Human
gcccacucccugca

SEQ ID NO: 1212485 - RNA, 13 nt, Human
gcccacucccugc

SEQ ID NO: 1212486 - RNA, 22 nt, Human
gcccuaaaguguauuuuuuuac

SEQ ID NO: 1212487 - RNA, 22 nt, Human
gccccuggaugcagccucacag

SEQ ID NO: 1212488 - RNA, 18 nt, Human
gccccuggaugcagccuc

SEQ ID NO: 1212489 - RNA, 16 nt, Human
gccccuggaugcagcc

SEQ ID NO: 1212490 - RNA, 15 nt, Human
gccccugcccggcug

SEQ ID NO: 1212491 - RNA, 19 nt, Human
gccccaaaacucuccucug

SEQ ID NO: 1212492 - RNA, 18 nt, Human
gccccaaaacucuccucu

SEQ ID NO: 1212493 - RNA, 14 nt, Human
gccccugcccggcu

SEQ ID NO: 1212494 - RNA, 13 nt, Human
gccccugcccggc

SEQ ID NO: 1212495 - RNA, 16 nt, Human
gccgccaugcuccugg

SEQ ID NO: 1212496 - RNA, 15 nt, Human
gccgccaugcuccug

SEQ ID NO: 1212497 - RNA, 21 nt, Human
gcccuuaccugccaggaagcc

SEQ ID NO: 1212498 - RNA, 20 nt, Human
gcccuuaccugccaggaagc

SEQ ID NO: 1212499 - RNA, 16 nt, Human
gcccuuaccugccagg

SEQ ID NO: 1212500 - RNA, 22 nt, Human
gcccugccuccuuugugaggaa

SEQ ID NO: 1212501 - RNA, 16 nt, Human
gcccugccuccuuugu

SEQ ID NO: 1212502 - RNA, 20 nt, Human
gccacauuccugaugcuucu

SEQ ID NO: 1212503 - RNA, 16 nt, Human
gccacauuccugaugc

SEQ ID NO: 1212504 - RNA, 21 nt, Human
gccaccaacauacucccaucu

SEQ ID NO: 1212505 - RNA, 20 nt, Human
gccaccaacauacucccauc

SEQ ID NO: 1212506 - RNA, 19 nt, Human
gccaccaacauacucccau

SEQ ID NO: 1212507 - RNA, 22 nt, Human
gccaccaacauacucccaucug

SEQ ID NO: 1212508 - RNA, 23 nt, Human
gccacugcaccgggccacagaga

SEQ ID NO: 1212509 - RNA, 19 nt, Human
gccacccuggggagaaagu

SEQ ID NO: 1212510 - RNA, 13 nt, Human
gccacccugggga

SEQ ID NO: 1212511 - RNA, 21 nt, Human
gccacugcacuauagccuagg

SEQ ID NO: 1212512 - RNA, 19 nt, Human
gccacugugaagagaacca

SEQ ID NO: 1212513 - RNA, 18 nt, Human
gccacugugaagagaacc

SEQ ID NO: 1212514 - RNA, 13 nt, Human
gccaggccagagg

SEQ ID NO: 1212515 - RNA, 17 nt, Human
gccaggcccucugccca

SEQ ID NO: 1212516 - RNA, 16 nt, Human
gccaggcccucugccc

SEQ ID NO: 1212517 - RNA, 21 nt, Human
gccaggcccucugcccacucc

SEQ ID NO: 1212518 - RNA, 20 nt, Human
gccaggcccucugcccacuc

SEQ ID NO: 1212519 - RNA, 19 nt, Human
gccaggcccucugcccacu

SEQ ID NO: 1212520 - RNA, 12 nt, Human
gccaggccagag

SEQ ID NO: 1212521 - RNA, 23 nt, Human
gccagcaggcucucaggccagcu

SEQ ID NO: 1212522 - RNA, 21 nt, Human
gccagcaggcucucaggccag

SEQ ID NO: 1212523 - RNA, 20 nt, Human
gccagcaggcucucaggcca

SEQ ID NO: 1212524 - RNA, 19 nt, Human
gccagcaggcucucaggcc

SEQ ID NO: 1212525 - RNA, 18 nt, Human
gccagcaggcucucaggc

SEQ ID NO: 1212526 - RNA, 17 nt, Human
gccagcaggcucucagg

SEQ ID NO: 1212527 - RNA, 16 nt, Human
gccagcaggcucucag

SEQ ID NO: 1212528 - RNA, 13 nt, Human
gccagcaggcucu

SEQ ID NO: 1212529 - RNA, 20 nt, Human
gccauauucuguuggccagu

SEQ ID NO: 1212530 - RNA, 19 nt, Human
gccauauucuguuggccag

SEQ ID NO: 1212531 - RNA, 18 nt, Human
gccauguuggccaggcug

SEQ ID NO: 1212532 - RNA, 17 nt, Human
gccauguuggccaggcu

SEQ ID NO: 1212533 - RNA, 16 nt, Human
gccauguuggccaggc

SEQ ID NO: 1212534 - RNA, 15 nt, Human
gccauguuggccagg

SEQ ID NO: 1212535 - RNA, 14 nt, Human
gccauguuggccag

SEQ ID NO: 1212536 - RNA, 18 nt, Human
gcccaccuuggcucaagu

SEQ ID NO: 1212537 - RNA, 14 nt, Human
gcccacgcccccac

SEQ ID NO: 1212538 - RNA, 13 nt, Human
gcccacgccccca

SEQ ID NO: 1212539 - RNA, 17 nt, Human
gcccacgcuggagugca

SEQ ID NO: 1212540 - RNA, 16 nt, Human
gcccacgcuggagugc

SEQ ID NO: 1212541 - RNA, 15 nt, Human
gcccacgcuggagug

SEQ ID NO: 1212542 - RNA, 15 nt, Human
gcccacgcccccacu

SEQ ID NO: 1212543 - RNA, 24 nt, Human
gccauguuggccaggcuggucuca

SEQ ID NO: 1212544 - RNA, 22 nt, Human
gccauguuggccaggcuggucu

SEQ ID NO: 1212545 - RNA, 20 nt, Human
gccauguuggccaggcuggu

SEQ ID NO: 1212546 - RNA, 19 nt, Human
gccauguuggccaggcugg

SEQ ID NO: 1212547 - RNA, 19 nt, Human
gcugccugggaucccucau

SEQ ID NO: 1212548 - RNA, 18 nt, Human
gcugccugggaucccuca

SEQ ID NO: 1212549 - RNA, 16 nt, Human
gcugccugggaucccu

SEQ ID NO: 1212550 - RNA, 13 nt, Human
gcugccugggauc

SEQ ID NO: 1212551 - RNA, 18 nt, Human
gcugagggugagugggug

SEQ ID NO: 1212552 - RNA, 23 nt, Human
gcugccauccagguucagcuugu

SEQ ID NO: 1212553 - RNA, 21 nt, Human
gcugccauccagguucagcuu

SEQ ID NO: 1212554 - RNA, 21 nt, Human
gcugccagccgagauagccaa

SEQ ID NO: 1212555 - RNA, 19 nt, Human
gcugccagccgagauagcc

SEQ ID NO: 1212556 - RNA, 22 nt, Human
gcugcaccggcuggccuggccc

SEQ ID NO: 1212557 - RNA, 19 nt, Human
gcugcaccggcuggccugg

SEQ ID NO: 1212558 - RNA, 18 nt, Human
gcugcaccggcuggccug

SEQ ID NO: 1212559 - RNA, 17 nt, Human
gcugcaccggcuggccu

SEQ ID NO: 1212560 - RNA, 16 nt, Human
gcugcaccggcuggcc

SEQ ID NO: 1212561 - RNA, 12 nt, Human
gcuggagugcag

SEQ ID NO: 1212562 - RNA, 15 nt, Human
gcuggguguggcgca

SEQ ID NO: 1212563 - RNA, 21 nt, Human
gcugggcucccuucccaccuc

SEQ ID NO: 1212564 - RNA, 14 nt, Human
gcugggcagguugg

SEQ ID NO: 1212565 - RNA, 20 nt, Human
gcugggcucccuucccaccu

SEQ ID NO: 1212566 - RNA, 17 nt, Human
gcugggcucccuuccca

SEQ ID NO: 1212567 - RNA, 16 nt, Human
gcugggcucccuuccc

SEQ ID NO: 1212568 - RNA, 19 nt, Human
gcugggcagaggaaagcaa

SEQ ID NO: 1212569 - RNA, 17 nt, Human
gcugggcagaggaaagc

SEQ ID NO: 1212570 - RNA, 16 nt, Human
gcugggcagaggaaag

SEQ ID NO: 1212571 - RNA, 15 nt, Human
gcugggcagaggaaa

SEQ ID NO: 1212572 - RNA, 14 nt, Human
gcugggcagaggaa

SEQ ID NO: 1212573 - RNA, 13 nt, Human
gcugggcagagga

SEQ ID NO: 1212574 - RNA, 19 nt, Human
gcugggauuacagguguga

SEQ ID NO: 1212575 - RNA, 18 nt, Human
gcugggauuacaggugug

SEQ ID NO: 1212576 - RNA, 17 nt, Human
gcuggccuggccccuca

SEQ ID NO: 1212577 - RNA, 17 nt, Human
gcuggagugcagugagc

SEQ ID NO: 1212578 - RNA, 15 nt, Human
gcuggagugcaguga

SEQ ID NO: 1212579 - RNA, 14 nt, Human
gcuggagugcagug

SEQ ID NO: 1212580 - RNA, 19 nt, Human
gcuggccuggccccucagg

SEQ ID NO: 1212581 - RNA, 18 nt, Human
gcuggccuggccccucag

SEQ ID NO: 1212582 - RNA, 16 nt, Human
gcugggauuacaggug

SEQ ID NO: 1212583 - RNA, 16 nt, Human
gcuuguacauaaugcg

SEQ ID NO: 1212584 - RNA, 14 nt, Human
gcuuguacauaaug

SEQ ID NO: 1212585 - RNA, 19 nt, Human
gcuugggcuucauccuccu

SEQ ID NO: 1212586 - RNA, 17 nt, Human
gcuggguucuacccagg

SEQ ID NO: 1212587 - RNA, 21 nt, Human
gcuggguuggaggguguccca

SEQ ID NO: 1212588 - RNA, 14 nt, Human
gcuggguuggaggg

SEQ ID NO: 1212589 - RNA, 15 nt, Human
gcuggguucugaucc

SEQ ID NO: 1212590 - RNA, 15 nt, Human
gcuggguucuaccca

SEQ ID NO: 1212591 - RNA, 23 nt, Human
gcuguaucccaugagccucagca

SEQ ID NO: 1212592 - RNA, 20 nt, Human
gcuguaucccaugagccuca

SEQ ID NO: 1212593 - RNA, 20 nt, Human
gcuucacggaagagccuugc

SEQ ID NO: 1212594 - RNA, 15 nt, Human
gcuucacggaagagc

SEQ ID NO: 1212595 - RNA, 14 nt, Human
gcuuaacuucacau

SEQ ID NO: 1212596 - RNA, 22 nt, Human
gcuucaaggauccugagccaga

SEQ ID NO: 1212597 - RNA, 22 nt, Human
gcuguuggcugggggccucagu

SEQ ID NO: 1212598 - RNA, 21 nt, Human
gcuguuggcugggggccucag

SEQ ID NO: 1212599 - RNA, 22 nt, Human
gcugugcugcccugcccaccug

SEQ ID NO: 1212600 - RNA, 19 nt, Human
gcugugcugcccugcccac

SEQ ID NO: 1212601 - RNA, 14 nt, Human
gcugugcugcccug

SEQ ID NO: 1212602 - RNA, 13 nt, Human
gcugugcugcccu

SEQ ID NO: 1212603 - RNA, 12 nt, Human
gcugugcugccc

SEQ ID NO: 1212604 - RNA, 21 nt, Human
gcugugcucuggacaggcaug

SEQ ID NO: 1212605 - RNA, 16 nt, Human
gcucucaggccagcug

SEQ ID NO: 1212606 - RNA, 15 nt, Human
gcucucaggccagcu

SEQ ID NO: 1212607 - RNA, 14 nt, Human
gcucucaggccagc

SEQ ID NO: 1212608 - RNA, 13 nt, Human
gcucucaggccag

SEQ ID NO: 1212609 - RNA, 14 nt, Human
gcuccccagcccca

SEQ ID NO: 1212610 - RNA, 23 nt, Human
gcucccaggcauuccccaggagg

SEQ ID NO: 1212611 - RNA, 22 nt, Human
gcucccaggcauuccccaggag

SEQ ID NO: 1212612 - RNA, 21 nt, Human
gcucccaggcauuccccagga

SEQ ID NO: 1212613 - RNA, 20 nt, Human
gcucccaggcauuccccagg

SEQ ID NO: 1212614 - RNA, 17 nt, Human
gcugacagacacaggcc

SEQ ID NO: 1212615 - RNA, 16 nt, Human
gcugacagacacaggc

SEQ ID NO: 1212616 - RNA, 15 nt, Human
gcugacagacacagg

SEQ ID NO: 1212617 - RNA, 14 nt, Human
gcugacagacacag

SEQ ID NO: 1212618 - RNA, 17 nt, Human
gcugaaugguuuucaaa

SEQ ID NO: 1212619 - RNA, 23 nt, Human
gcugaaggcucgagcaugccugg

SEQ ID NO: 1212620 - RNA, 20 nt, Human
gcugaaggcucgagcaugcc

SEQ ID NO: 1212621 - RNA, 12 nt, Human
gcugaaggcucg

SEQ ID NO: 1212622 - RNA, 18 nt, Human
gcucuuccaggcugggag

SEQ ID NO: 1212623 - RNA, 16 nt, Human
gcucuuccaggcuggg

SEQ ID NO: 1212624 - RNA, 15 nt, Human
gcucuuccaggcugg

SEQ ID NO: 1212625 - RNA, 12 nt, Human
gcucuuccaggc

SEQ ID NO: 1212626 - RNA, 15 nt, Human
gcucuguccugggag

SEQ ID NO: 1212627 - RNA, 16 nt, Human
gcucuguccugggagu

SEQ ID NO: 1212628 - RNA, 22 nt, Human
gcucagguggggucacucuggc

SEQ ID NO: 1212629 - RNA, 21 nt, Human
gcucagguggggucacucugg

SEQ ID NO: 1212630 - RNA, 23 nt, Human
gcucagguggggucacucuggca

SEQ ID NO: 1212631 - RNA, 17 nt, Human
gcucagggccuggcuca

SEQ ID NO: 1212632 - RNA, 16 nt, Human
gcucagggccuggcuc

SEQ ID NO: 1212633 - RNA, 13 nt, Human
gcucagggccugg

SEQ ID NO: 1212634 - RNA, 12 nt, Human
gcucagggccug

SEQ ID NO: 1212635 - RNA, 22 nt, Human
gcucagagagggugggaguggg

SEQ ID NO: 1212636 - RNA, 20 nt, Human
gcucagagagggugggagug

SEQ ID NO: 1212637 - RNA, 18 nt, Human
gcucagagagggugggag

SEQ ID NO: 1212638 - RNA, 15 nt, Human
gcucagagagggugg

SEQ ID NO: 1212639 - RNA, 14 nt, Human
gccuguucagcucc

SEQ ID NO: 1212640 - RNA, 20 nt, Human
gccuguucagcuccagcuca

SEQ ID NO: 1212641 - RNA, 19 nt, Human
gccuguucagcuccagcuc

SEQ ID NO: 1212642 - RNA, 21 nt, Human
gcuaggaacacuccuucacag

SEQ ID NO: 1212643 - RNA, 19 nt, Human
gcuaggaacacuccuucac

SEQ ID NO: 1212644 - RNA, 18 nt, Human
gcuaggaacacuccuuca

SEQ ID NO: 1212645 - RNA, 15 nt, Human
gcuaggccuggccag

SEQ ID NO: 1212646 - RNA, 14 nt, Human
gcuaggccuggcca

SEQ ID NO: 1212647 - RNA, 18 nt, Human
gauucuccugccucagcc

SEQ ID NO: 1212648 - RNA, 17 nt, Human
gauucuccugccucagc

SEQ ID NO: 1212649 - RNA, 15 nt, Human
gauucuccugccuca

SEQ ID NO: 1212650 - RNA, 12 nt, Human
gauucuucugcu

SEQ ID NO: 1212651 - RNA, 18 nt, Human
gauucuuccucccucccu

SEQ ID NO: 1212652 - RNA, 17 nt, Human
gauucuuccucccuccc

SEQ ID NO: 1212653 - RNA, 12 nt, Human
gauuauuggaaa

SEQ ID NO: 1212654 - RNA, 21 nt, Human
gaugaucuaggaagacuuugg

SEQ ID NO: 1212655 - RNA, 15 nt, Human
gaugaucuaggaaga

SEQ ID NO: 1212656 - RNA, 16 nt, Human
gaugagugagcaugcc

SEQ ID NO: 1212657 - RNA, 14 nt, Human
gaugaucuuugcag

SEQ ID NO: 1212658 - RNA, 14 nt, Human
gcacaccgggcacu

SEQ ID NO: 1212659 - RNA, 20 nt, Human
gcacaccgggcacucagaag

SEQ ID NO: 1212660 - RNA, 16 nt, Human
gauuuuuuuuuccuuc

SEQ ID NO: 1212661 - RNA, 22 nt, Human
gcacuccccugcuggguguggc

SEQ ID NO: 1212662 - RNA, 17 nt, Human
gcacuccccugcugggu

SEQ ID NO: 1212663 - RNA, 17 nt, Human
gcacucagaagacacug

SEQ ID NO: 1212664 - RNA, 16 nt, Human
gcacucagaagacacu

SEQ ID NO: 1212665 - RNA, 13 nt, Human
gcacucagaagac

SEQ ID NO: 1212666 - RNA, 23 nt, Human
gcaccgggccacagagaaaguac

SEQ ID NO: 1212667 - RNA, 23 nt, Human
gcacaucagcacgauuucuguuu

SEQ ID NO: 1212668 - RNA, 22 nt, Human
gcacaucagcacgauuucuguu

SEQ ID NO: 1212669 - RNA, 14 nt, Human
gcaccgggccacag

SEQ ID NO: 1212670 - RNA, 23 nt, Human
gaggugaccccagguuucuaugu

SEQ ID NO: 1212671 - RNA, 15 nt, Human
gaggucgaggcagga

SEQ ID NO: 1212672 - RNA, 22 nt, Human
gagucagaaguuucugccgcag

SEQ ID NO: 1212673 - RNA, 18 nt, Human
gagugacagaggcagccc

SEQ ID NO: 1212674 - RNA, 13 nt, Human
gagucccaccuug

SEQ ID NO: 1212675 - RNA, 12 nt, Human
gagucccaccuu

SEQ ID NO: 1212676 - RNA, 16 nt, Human
gagucaccaagcccag

SEQ ID NO: 1212677 - RNA, 17 nt, Human
gagucaccaagcccagu

SEQ ID NO: 1212678 - RNA, 17 nt, Human
gaguugauucagcucug

SEQ ID NO: 1212679 - RNA, 16 nt, Human
gaguugauucagcucu

SEQ ID NO: 1212680 - RNA, 15 nt, Human
gaguugauucagcuc

SEQ ID NO: 1212681 - RNA, 20 nt, Human
gagugacagaggcagcccca

SEQ ID NO: 1212682 - RNA, 18 nt, Human
gaguugauucagcucugc

SEQ ID NO: 1212683 - RNA, 20 nt, Human
gagccuuccaggggugggac

SEQ ID NO: 1212684 - RNA, 19 nt, Human
gagccuugaacuuugaccu

SEQ ID NO: 1212685 - RNA, 13 nt, Human
gagccuugaacuu

SEQ ID NO: 1212686 - RNA, 23 nt, Human
gagccuuccaggggugggacacc

SEQ ID NO: 1212687 - RNA, 14 nt, Human
gaggcagggucuca

SEQ ID NO: 1212688 - RNA, 18 nt, Human
gaggcagggucucacucu

SEQ ID NO: 1212689 - RNA, 15 nt, Human
gaggcagggucucac

SEQ ID NO: 1212690 - RNA, 22 nt, Human
gaggccaaggugggaggauugc

SEQ ID NO: 1212691 - RNA, 22 nt, Human
gaggcuagugugguguuuccug

SEQ ID NO: 1212692 - RNA, 19 nt, Human
gaggccagagacacaagcc

SEQ ID NO: 1212693 - RNA, 14 nt, Human
gaggccagagacac

SEQ ID NO: 1212694 - RNA, 13 nt, Human
gaggccagagaca

SEQ ID NO: 1212695 - RNA, 12 nt, Human
gaggggccucuu

SEQ ID NO: 1212696 - RNA, 19 nt, Human
gacgcuacccgggaagggg

SEQ ID NO: 1212697 - RNA, 18 nt, Human
gacgcuacccgggaaggg

SEQ ID NO: 1212698 - RNA, 16 nt, Human
gacgcuacccgggaag

SEQ ID NO: 1212699 - RNA, 19 nt, Human
gacgccaucccagccccaa

SEQ ID NO: 1212700 - RNA, 18 nt, Human
gacgccaucccagcccca

SEQ ID NO: 1212701 - RNA, 17 nt, Human
gacgccaucccagcccc

SEQ ID NO: 1212702 - RNA, 16 nt, Human
gacgccaucccagccc

SEQ ID NO: 1212703 - RNA, 14 nt, Human
gaccugaggcccuu

SEQ ID NO: 1212704 - RNA, 13 nt, Human
gaccugaggcccu

SEQ ID NO: 1212705 - RNA, 11 nt, Human
gaccugaggcc

SEQ ID NO: 1212706 - RNA, 14 nt, Human
gaccucugcagcaa

SEQ ID NO: 1212707 - RNA, 14 nt, Human
gaccaucccugaag

SEQ ID NO: 1212708 - RNA, 20 nt, Human
gaccaucccugaaggccccg

SEQ ID NO: 1212709 - RNA, 16 nt, Human
gacugaauuucuuuug

SEQ ID NO: 1212710 - RNA, 14 nt, Human
gacugaauuucuuu

SEQ ID NO: 1212711 - RNA, 16 nt, Human
gacacagcucuucucc

SEQ ID NO: 1212712 - RNA, 14 nt, Human
gacacagcucuucu

SEQ ID NO: 1212713 - RNA, 12 nt, Human
gacacaggcccg

SEQ ID NO: 1212714 - RNA, 23 nt, Human
gacacagcucuucuccaggcugu

SEQ ID NO: 1212715 - RNA, 22 nt, Human
gacacagcucuucuccaggcug

SEQ ID NO: 1212716 - RNA, 17 nt, Human
gacacagcucuucucca

SEQ ID NO: 1212717 - RNA, 17 nt, Human
gacagcccgggcucugc

SEQ ID NO: 1212718 - RNA, 18 nt, Human
gaccagggauuuccauga

SEQ ID NO: 1212719 - RNA, 19 nt, Human
gaccaucccugaaggcccc

SEQ ID NO: 1212720 - RNA, 13 nt, Human
gaccaucccugaa

SEQ ID NO: 1212721 - RNA, 12 nt, Human
gaccaucccuga

SEQ ID NO: 1212722 - RNA, 20 nt, Human
gaccagggauuuccaugaug

SEQ ID NO: 1212723 - RNA, 19 nt, Human
gacauuguuggccaaagcc

SEQ ID NO: 1212724 - RNA, 17 nt, Human
gacauugcggacagcca

SEQ ID NO: 1212725 - RNA, 15 nt, Human
gacauugcggacagc

SEQ ID NO: 1212726 - RNA, 14 nt, Human
gacauugcggacag

SEQ ID NO: 1212727 - RNA, 19 nt, Human
gacagcccgggcucugccu

SEQ ID NO: 1212728 - RNA, 18 nt, Human
gacagcccgggcucugcc

SEQ ID NO: 1212729 - RNA, 20 nt, Human
gacagcccgggcucugccuc

SEQ ID NO: 1212730 - RNA, 22 nt, Human
gaaggcuggguucugauccuag

SEQ ID NO: 1212731 - RNA, 20 nt, Human
gaaggcuggguucugauccu

SEQ ID NO: 1212732 - RNA, 19 nt, Human
gaaggcuggguucugaucc

SEQ ID NO: 1212733 - RNA, 15 nt, Human
gaaggcuggguucug

SEQ ID NO: 1212734 - RNA, 21 nt, Human
gaaggcucgagcaugccugga

SEQ ID NO: 1212735 - RNA, 19 nt, Human
gaaggccccgcccaggcuu

SEQ ID NO: 1212736 - RNA, 18 nt, Human
gaaggccccgcccaggcu

SEQ ID NO: 1212737 - RNA, 22 nt, Human
gaagcuccgcuuucuacccagc

SEQ ID NO: 1212738 - RNA, 22 nt, Human
gaaggggagauaaggguaucug

SEQ ID NO: 1212739 - RNA, 20 nt, Human
gaauauugcugauggugcaa

SEQ ID NO: 1212740 - RNA, 19 nt, Human
gaauauugcugauggugca

SEQ ID NO: 1212741 - RNA, 15 nt, Human
gaauauugcugaugg

SEQ ID NO: 1212742 - RNA, 14 nt, Human
gaauauugcugaug

SEQ ID NO: 1212743 - RNA, 15 nt, Human
gaagcagaggaagga

SEQ ID NO: 1212744 - RNA, 21 nt, Human
gaagcacaugccucucucagg

SEQ ID NO: 1212745 - RNA, 20 nt, Human
gaagcacaugccucucucag

SEQ ID NO: 1212746 - RNA, 17 nt, Human
gaagcacaugccucucu

SEQ ID NO: 1212747 - RNA, 15 nt, Human
gaagcacaugccucu

SEQ ID NO: 1212748 - RNA, 23 nt, Human
gaagacaaugugaaaagaaaaau

SEQ ID NO: 1212749 - RNA, 22 nt, Human
gaagacaaugacuuacuguaca

SEQ ID NO: 1212750 - RNA, 16 nt, Human
gaagacaaugacuuac

SEQ ID NO: 1212751 - RNA, 12 nt, Human
gaacuggcugca

SEQ ID NO: 1212752 - RNA, 11 nt, Human
gaacuggcugc

SEQ ID NO: 1212753 - RNA, 21 nt, Human
cuucuucagagacuccugcag

SEQ ID NO: 1212754 - RNA, 20 nt, Human
cuucuucagagacuccugca

SEQ ID NO: 1212755 - RNA, 23 nt, Human
cuucuucagagacuccugcaggc

SEQ ID NO: 1212756 - RNA, 22 nt, Human
cuucuucagagacuccugcagg

SEQ ID NO: 1212757 - RNA, 20 nt, Human
cuugaaugaugccaugagga

SEQ ID NO: 1212758 - RNA, 13 nt, Human
cuugcucugcuga

SEQ ID NO: 1212759 - RNA, 12 nt, Human
cuugcucugcug

SEQ ID NO: 1212760 - RNA, 23 nt, Human
cuugccgucuaccugaggggccu

SEQ ID NO: 1212761 - RNA, 20 nt, Human
cuugccgucuaccugagggg

SEQ ID NO: 1212762 - RNA, 12 nt, Human
cuugacagggca

SEQ ID NO: 1212763 - RNA, 23 nt, Human
cuugaaugaugccaugaggaaca

SEQ ID NO: 1212764 - RNA, 23 nt, Human
cuuucaauaggaaaaacugauuu

SEQ ID NO: 1212765 - RNA, 22 nt, Human
cuuucaauaggaaaaacugauu

SEQ ID NO: 1212766 - RNA, 21 nt, Human
cuuucaauaggaaaaacugau

SEQ ID NO: 1212767 - RNA, 20 nt, Human
cuuucaauaggaaaaacuga

SEQ ID NO: 1212768 - RNA, 16 nt, Human
cuuguggacacagcuc

SEQ ID NO: 1212769 - RNA, 15 nt, Human
cuuguggacacagcu

SEQ ID NO: 1212770 - RNA, 14 nt, Human
cuuguggacacagc

SEQ ID NO: 1212771 - RNA, 15 nt, Human
cuuuucaaaacauuu

SEQ ID NO: 1212772 - RNA, 20 nt, Human
cuuuggucuacacugugcug

SEQ ID NO: 1212773 - RNA, 16 nt, Human
cuuuggucuacacugu

SEQ ID NO: 1212774 - RNA, 15 nt, Human
cuuuuauaaacuuua

SEQ ID NO: 1212775 - RNA, 18 nt, Human
cuuuuauaaacuuuaccu

SEQ ID NO: 1212776 - RNA, 16 nt, Human
cuuuuauaaacuuuac

SEQ ID NO: 1212777 - RNA, 19 nt, Human
cuuuuauaaacuuuaccuu

SEQ ID NO: 1212778 - RNA, 22 nt, Human
cuuugacgccaucccagcccca

SEQ ID NO: 1212779 - RNA, 21 nt, Human
cuuugacgccaucccagcccc

SEQ ID NO: 1212780 - RNA, 19 nt, Human
cuuugacgccaucccagcc

SEQ ID NO: 1212781 - RNA, 14 nt, Human
cuguucagcuccag

SEQ ID NO: 1212782 - RNA, 13 nt, Human
cuguucagcucca

SEQ ID NO: 1212783 - RNA, 19 nt, Human
cugugucuugcaauggcag

SEQ ID NO: 1212784 - RNA, 16 nt, Human
cugugucuugcaaugg

SEQ ID NO: 1212785 - RNA, 20 nt, Human
cugugucuugcaauggcagc

SEQ ID NO: 1212786 - RNA, 14 nt, Human
cugugucuugcaau

SEQ ID NO: 1212787 - RNA, 19 nt, Human
cugugucucccuucauccu

SEQ ID NO: 1212788 - RNA, 14 nt, Human
cugugucucccuuc

SEQ ID NO: 1212789 - RNA, 22 nt, Human
cugugucagguggggcagcuug

SEQ ID NO: 1212790 - RNA, 21 nt, Human
cugugucagguggggcagcuu

SEQ ID NO: 1212791 - RNA, 19 nt, Human
cugugucagguggggcagc

SEQ ID NO: 1212792 - RNA, 20 nt, Human
cugugucagcauagaaguaa

SEQ ID NO: 1212793 - RNA, 11 nt, Human
cugugcugccc

SEQ ID NO: 1212794 - RNA, 22 nt, Human
cugugcugagucugaaggcugg

SEQ ID NO: 1212795 - RNA, 20 nt, Human
cugugcugagucugaaggcu

SEQ ID NO: 1212796 - RNA, 13 nt, Human
cuuaccugccagg

SEQ ID NO: 1212797 - RNA, 21 nt, Human
cuuaccucggugccuuccucu

SEQ ID NO: 1212798 - RNA, 19 nt, Human
cuuaccucggugccuuccu

SEQ ID NO: 1212799 - RNA, 19 nt, Human
cuuacccucauguucuuaa

SEQ ID NO: 1212800 - RNA, 18 nt, Human
cuuacccucauguucuua

SEQ ID NO: 1212801 - RNA, 17 nt, Human
cuuacccucauguucuu

SEQ ID NO: 1212802 - RNA, 13 nt, Human
cuuaccucggugc

SEQ ID NO: 1212803 - RNA, 20 nt, Human
cuguugggccaggagccucc

SEQ ID NO: 1212804 - RNA, 17 nt, Human
cuguugggccaggagcc

SEQ ID NO: 1212805 - RNA, 16 nt, Human
cuguugggccaggagc

SEQ ID NO: 1212806 - RNA, 20 nt, Human
cuuccagugaggcucugccc

SEQ ID NO: 1212807 - RNA, 19 nt, Human
cuuccagugaggcucugcc

SEQ ID NO: 1212808 - RNA, 18 nt, Human
cuuccagugaggcucugc

SEQ ID NO: 1212809 - RNA, 17 nt, Human
cuuccauggacuuuguu

SEQ ID NO: 1212810 - RNA, 16 nt, Human
cuuccauggacuuugu

SEQ ID NO: 1212811 - RNA, 22 nt, Human
cuucagagacuccugcaggcag

SEQ ID NO: 1212812 - RNA, 21 nt, Human
cuucagagacuccugcaggca

SEQ ID NO: 1212813 - RNA, 17 nt, Human
cuucagagacuccugca

SEQ ID NO: 1212814 - RNA, 16 nt, Human
cuucagagacuccugc

SEQ ID NO: 1212815 - RNA, 14 nt, Human
cuucaccuuugucc

SEQ ID NO: 1212816 - RNA, 18 nt, Human
cuuauugcccacgcugga

SEQ ID NO: 1212817 - RNA, 20 nt, Human
cuucaccuuuguccccaccg

SEQ ID NO: 1212818 - RNA, 17 nt, Human
cuucaccuuugucccca

SEQ ID NO: 1212819 - RNA, 16 nt, Human
cuucauccuccucaga

SEQ ID NO: 1212820 - RNA, 15 nt, Human
cuucauccuccucag

SEQ ID NO: 1212821 - RNA, 13 nt, Human
cuucaucccucug

SEQ ID NO: 1212822 - RNA, 24 nt, Human
cuucagagacuccugcaggcagcc

SEQ ID NO: 1212823 - RNA, 23 nt, Human
cuucagagacuccugcaggcagc

SEQ ID NO: 1212824 - RNA, 18 nt, Human
cuucaguggcagcugcuu

SEQ ID NO: 1212825 - RNA, 13 nt, Human
cuuauugcccacg

SEQ ID NO: 1212826 - RNA, 23 nt, Human
cuuaugggcuggguucuacccag

SEQ ID NO: 1212827 - RNA, 22 nt, Human
cuuaugggcuggguucuaccca

SEQ ID NO: 1212828 - RNA, 21 nt, Human
cuuaugggcuggguucuaccc

SEQ ID NO: 1212829 - RNA, 14 nt, Human
cuuaugggcugggu

SEQ ID NO: 1212830 - RNA, 21 nt, Human
cuuagcagggaaacagcuaau

SEQ ID NO: 1212831 - RNA, 18 nt, Human
cuuagcagggaaacagcu

SEQ ID NO: 1212832 - RNA, 17 nt, Human
cugcccuuaccugccag

SEQ ID NO: 1212833 - RNA, 16 nt, Human
cugcccuuaccugcca

SEQ ID NO: 1212834 - RNA, 12 nt, Human
cugcccuuaccu

SEQ ID NO: 1212835 - RNA, 19 nt, Human
cugccauccagguucagcu

SEQ ID NO: 1212836 - RNA, 18 nt, Human
cugccauccagguucagc

SEQ ID NO: 1212837 - RNA, 16 nt, Human
cugccauccagguuca

SEQ ID NO: 1212838 - RNA, 16 nt, Human
cugccauauucuguug

SEQ ID NO: 1212839 - RNA, 23 nt, Human
cugccagggacagaggggguggc

SEQ ID NO: 1212840 - RNA, 22 nt, Human
cugccagggacagagggggugg

SEQ ID NO: 1212841 - RNA, 20 nt, Human
cugccagggacagagggggu

SEQ ID NO: 1212842 - RNA, 18 nt, Human
cugcauuuaaaagauaca

SEQ ID NO: 1212843 - RNA, 17 nt, Human
cugcauuuaaaagauac

SEQ ID NO: 1212844 - RNA, 14 nt, Human
cugcauuuaaaaga

SEQ ID NO: 1212845 - RNA, 23 nt, Human
cugcaccgggccacagagaaagu

SEQ ID NO: 1212846 - RNA, 12 nt, Human
cugcaagggagu

SEQ ID NO: 1212847 - RNA, 20 nt, Human
cugcaagaauugaagcagga

SEQ ID NO: 1212848 - RNA, 20 nt, Human
cugcaaccuccgccucuugg

SEQ ID NO: 1212849 - RNA, 21 nt, Human
cugcaaccugauugugucucu

SEQ ID NO: 1212850 - RNA, 19 nt, Human
cugcaaccugauugugucu

SEQ ID NO: 1212851 - RNA, 14 nt, Human
cugcaaccugauug

SEQ ID NO: 1212852 - RNA, 22 nt, Human
cugcaaccuccgccucuugggu

SEQ ID NO: 1212853 - RNA, 18 nt, Human
cugcaagaauugaagcag

SEQ ID NO: 1212854 - RNA, 22 nt, Human
cugcaaccugauugugucucuu

SEQ ID NO: 1212855 - RNA, 14 nt, Human
cucuuaugggcugg

SEQ ID NO: 1212856 - RNA, 13 nt, Human
cucuuauugccca

SEQ ID NO: 1212857 - RNA, 15 nt, Human
cucuuaugggcuggg

SEQ ID NO: 1212858 - RNA, 17 nt, Human
cugaugcuucuucagag

SEQ ID NO: 1212859 - RNA, 16 nt, Human
cugaugcuucuucaga

SEQ ID NO: 1212860 - RNA, 21 nt, Human
cugaugggcaacccccagccu

SEQ ID NO: 1212861 - RNA, 18 nt, Human
cugaugggcaacccccag

SEQ ID NO: 1212862 - RNA, 20 nt, Human
cugaugcuucuucagagacu

SEQ ID NO: 1212863 - RNA, 19 nt, Human
cugaugcuucuucagagac

SEQ ID NO: 1212864 - RNA, 18 nt, Human
cugaugcuucuucagaga

SEQ ID NO: 1212865 - RNA, 24 nt, Human
cugaugggcaacccccagccugcu

SEQ ID NO: 1212866 - RNA, 23 nt, Human
cugaugggcaacccccagccugc

SEQ ID NO: 1212867 - RNA, 22 nt, Human
cugaugggcaacccccagccug

SEQ ID NO: 1212868 - RNA, 22 nt, Human
cugcaaaggguaucaggugcug

SEQ ID NO: 1212869 - RNA, 21 nt, Human
cugcaaaggguaucaggugcu

SEQ ID NO: 1212870 - RNA, 12 nt, Human
cugcagcuuugu

SEQ ID NO: 1212871 - RNA, 20 nt, Human
cugcaggcagccaggccaca

SEQ ID NO: 1212872 - RNA, 19 nt, Human
cugcaggcagccaggccac

SEQ ID NO: 1212873 - RNA, 18 nt, Human
cugcaggcagccaggcca

SEQ ID NO: 1212874 - RNA, 17 nt, Human
cugcaggcagccaggcc

SEQ ID NO: 1212875 - RNA, 16 nt, Human
cugcaggcagccaggc

SEQ ID NO: 1212876 - RNA, 15 nt, Human
cugcaggcagccagg

SEQ ID NO: 1212877 - RNA, 14 nt, Human
cugcaggcagccag

SEQ ID NO: 1212878 - RNA, 13 nt, Human
cugcaggcagcca

SEQ ID NO: 1212879 - RNA, 24 nt, Human
cugcagccucaaccuccugggcua

SEQ ID NO: 1212880 - RNA, 19 nt, Human
cugcacuccagccugggug

SEQ ID NO: 1212881 - RNA, 18 nt, Human
cugcacuccagccugggu

SEQ ID NO: 1212882 - RNA, 17 nt, Human
cugcacuccagccuggg

SEQ ID NO: 1212883 - RNA, 16 nt, Human
cugcacuccagccugg

SEQ ID NO: 1212884 - RNA, 20 nt, Human
cugcacuauagccuagguga

SEQ ID NO: 1212885 - RNA, 18 nt, Human
cugcacuauagccuaggu

SEQ ID NO: 1212886 - RNA, 17 nt, Human
cugcacuauagccuagg

SEQ ID NO: 1212887 - RNA, 16 nt, Human
cugcacuauagccuag

SEQ ID NO: 1212888 - RNA, 15 nt, Human
cugcacuccagccug

SEQ ID NO: 1212889 - RNA, 23 nt, Human
cugcacuauagccuaggugacag

SEQ ID NO: 1212890 - RNA, 22 nt, Human
cugcacuauagccuaggugaca

SEQ ID NO: 1212891 - RNA, 13 nt, Human
cugcacuccagcc

SEQ ID NO: 1212892 - RNA, 19 nt, Human
cugcucacauaucugucau

SEQ ID NO: 1212893 - RNA, 16 nt, Human
cugcucacauaucugu

SEQ ID NO: 1212894 - RNA, 12 nt, Human
cugcugacagug

SEQ ID NO: 1212895 - RNA, 15 nt, Human
cugcugaaggcucga

SEQ ID NO: 1212896 - RNA, 14 nt, Human
cugcugaaggcucg

SEQ ID NO: 1212897 - RNA, 13 nt, Human
cugcugaaggcuc

SEQ ID NO: 1212898 - RNA, 15 nt, Human
cugcugacaguguug

SEQ ID NO: 1212899 - RNA, 13 nt, Human
cugcugacagugu

SEQ ID NO: 1212900 - RNA, 18 nt, Human
cugcugaaggcucgagca

SEQ ID NO: 1212901 - RNA, 17 nt, Human
cuggaguucugguuccu

SEQ ID NO: 1212902 - RNA, 16 nt, Human
cuggaguucugguucc

SEQ ID NO: 1212903 - RNA, 15 nt, Human
cuggaguucugguuc

SEQ ID NO: 1212904 - RNA, 15 nt, Human
cuggaugcagccuca

SEQ ID NO: 1212905 - RNA, 15 nt, Human
cuggguguggcgcag

SEQ ID NO: 1212906 - RNA, 14 nt, Human
cuggguguggcgca

SEQ ID NO: 1212907 - RNA, 22 nt, Human
cuggguggcaccagcagccugg

SEQ ID NO: 1212908 - RNA, 21 nt, Human
cuggguggcaccagcagccug

SEQ ID NO: 1212909 - RNA, 20 nt, Human
cugggcagguuggugggggc

SEQ ID NO: 1212910 - RNA, 20 nt, Human
cugggcagaggaaagcaaag

SEQ ID NO: 1212911 - RNA, 16 nt, Human
cugggcagaggaaagc

SEQ ID NO: 1212912 - RNA, 13 nt, Human
cugggcagaggaa

SEQ ID NO: 1212913 - RNA, 20 nt, Human
cuggguggcaccagcagccu

SEQ ID NO: 1212914 - RNA, 18 nt, Human
cuggguggcaccagcagc

SEQ ID NO: 1212915 - RNA, 14 nt, Human
cuggggagaaagua

SEQ ID NO: 1212916 - RNA, 13 nt, Human
cuggggagaaagu

SEQ ID NO: 1212917 - RNA, 12 nt, Human
cuggcccuuccu

SEQ ID NO: 1212918 - RNA, 22 nt, Human
cuggcuaugcauuugaaaauuu

SEQ ID NO: 1212919 - RNA, 16 nt, Human
cuggcuaugcauuuga

SEQ ID NO: 1212920 - RNA, 15 nt, Human
cuggcuaugcauuug

SEQ ID NO: 1212921 - RNA, 14 nt, Human
cuggcuaugcauuu

SEQ ID NO: 1212922 - RNA, 13 nt, Human
cuggcuaugcauu

SEQ ID NO: 1212923 - RNA, 22 nt, Human
cugggagaaccaaaaagaggcu

SEQ ID NO: 1212924 - RNA, 16 nt, Human
cugggacuacaggcac

SEQ ID NO: 1212925 - RNA, 15 nt, Human
cugggacuacaggca

SEQ ID NO: 1212926 - RNA, 13 nt, Human
cugggacuacagg

SEQ ID NO: 1212927 - RNA, 22 nt, Human
cugggacaugggaaaggggaag

SEQ ID NO: 1212928 - RNA, 18 nt, Human
cugggacaugggaaaggg

SEQ ID NO: 1212929 - RNA, 14 nt, Human
cugggacaugggaa

SEQ ID NO: 1212930 - RNA, 17 nt, Human
auuguuuucaguguaca

SEQ ID NO: 1212931 - RNA, 14 nt, Human
auuuaaaaaaaauc

SEQ ID NO: 1212932 - RNA, 19 nt, Human
auuguuuucaguguacaug

SEQ ID NO: 1212933 - RNA, 18 nt, Human
auuguuuucaguguacau

SEQ ID NO: 1212934 - RNA, 20 nt, Human
auuuacuucuuauacauuug

SEQ ID NO: 1212935 - RNA, 19 nt, Human
auuuacuucuuauacauuu

SEQ ID NO: 1212936 - RNA, 16 nt, Human
auuucccaaagcagug

SEQ ID NO: 1212937 - RNA, 14 nt, Human
auuucccaaagcag

SEQ ID NO: 1212938 - RNA, 22 nt, Human
auuugaggucuguucuuuccaa

SEQ ID NO: 1212939 - RNA, 21 nt, Human
auuugaggucuguucuuucca

SEQ ID NO: 1212940 - RNA, 16 nt, Human
auuucuuccacaagag

SEQ ID NO: 1212941 - RNA, 18 nt, Human
auuugaggucuguucuuu

SEQ ID NO: 1212942 - RNA, 17 nt, Human
auuugaggucuguucuu

SEQ ID NO: 1212943 - RNA, 16 nt, Human
auuugagcagggcuca

SEQ ID NO: 1212944 - RNA, 15 nt, Human
auuugagcagggcuc

SEQ ID NO: 1212945 - RNA, 23 nt, Human
auuggcuagagguucaaagauau

SEQ ID NO: 1212946 - RNA, 22 nt, Human
auuggcuagagguucaaagaua

SEQ ID NO: 1212947 - RNA, 20 nt, Human
auuggcuagagguucaaaga

SEQ ID NO: 1212948 - RNA, 19 nt, Human
auuggcuagagguucaaag

SEQ ID NO: 1212949 - RNA, 12 nt, Human
auugcaccacug

SEQ ID NO: 1212950 - RNA, 19 nt, Human
auugcaacaggcugggcuu

SEQ ID NO: 1212951 - RNA, 18 nt, Human
auugcaacaggcugggcu

SEQ ID NO: 1212952 - RNA, 17 nt, Human
auugcaacaggcugggc

SEQ ID NO: 1212953 - RNA, 21 nt, Human
augugccagguuuuuggucug

SEQ ID NO: 1212954 - RNA, 21 nt, Human
uuuuaaaaaacugcugacugu

SEQ ID NO: 1212955 - RNA, 18 nt, Human
uuuuaaaaaacugcugac

SEQ ID NO: 1212956 - RNA, 19 nt, Human
auguuacauaagauaaaug

SEQ ID NO: 1212957 - RNA, 20 nt, Human
auguuacauaagauaaaugu

SEQ ID NO: 1212958 - RNA, 15 nt, Human
auguugcccaggcag

SEQ ID NO: 1212959 - RNA, 14 nt, Human
auguugcccaggca

SEQ ID NO: 1212960 - RNA, 13 nt, Human
auguugcccaggc

SEQ ID NO: 1212961 - RNA, 18 nt, Human
auguugaaagaucaaaag

SEQ ID NO: 1212962 - RNA, 12 nt, Human
auguugaaagau

SEQ ID NO: 1212963 - RNA, 17 nt, Human
uuuuagaguugauacua

SEQ ID NO: 1212964 - RNA, 21 nt, Human
uuuuagacccuauugcugcuu

SEQ ID NO: 1212965 - RNA, 13 nt, Human
auguuggccaggc

SEQ ID NO: 1212966 - RNA, 16 nt, Human
auguugcccaggcagg

SEQ ID NO: 1212967 - RNA, 14 nt, Human
uuuucaguguacau

SEQ ID NO: 1212968 - RNA, 12 nt, Human
uuuuauuaaauu

SEQ ID NO: 1212969 - RNA, 21 nt, Human
uuuuauggcuuuugugcauua

SEQ ID NO: 1212970 - RNA, 15 nt, Human
uuuuaguagagacag

SEQ ID NO: 1212971 - RNA, 23 nt, Human
uuuuagaguugauacuacaguuu

SEQ ID NO: 1212972 - RNA, 19 nt, Human
uuuuauggcuuuugugcau

SEQ ID NO: 1212973 - RNA, 18 nt, Human
uuuuauggcuuuugugca

SEQ ID NO: 1212974 - RNA, 19 nt, Human
auuaaaacacaacaucuuu

SEQ ID NO: 1212975 - RNA, 23 nt, Human
auuaaaaaucucaaauuucuaaa

SEQ ID NO: 1212976 - RNA, 17 nt, Human
auguuuuucuucucccu

SEQ ID NO: 1212977 - RNA, 13 nt, Human
uuuucuguucuuu

SEQ ID NO: 1212978 - RNA, 17 nt, Human
auguuggccaggcuggu

SEQ ID NO: 1212979 - RNA, 14 nt, Human
uuuguacagacaac

SEQ ID NO: 1212980 - RNA, 16 nt, Human
uuuguaauuuuuuuau

SEQ ID NO: 1212981 - RNA, 15 nt, Human
augugaugagaggaa

SEQ ID NO: 1212982 - RNA, 16 nt, Human
uuuguuucugaaaggg

SEQ ID NO: 1212983 - RNA, 14 nt, Human
uuuguuucugaaag

SEQ ID NO: 1212984 - RNA, 22 nt, Human
uuugugcauuaucuagauacug

SEQ ID NO: 1212985 - RNA, 19 nt, Human
uuugugcauuaucuagaua

SEQ ID NO: 1212986 - RNA, 22 nt, Human
uuugugauacaaugcugugccc

SEQ ID NO: 1212987 - RNA, 16 nt, Human
uuugugauacaaugcu

SEQ ID NO: 1212988 - RNA, 23 nt, Human
uuugucuuaaaaaguggaaaaau

SEQ ID NO: 1212989 - RNA, 14 nt, Human
uuugucuuaaaaag

SEQ ID NO: 1212990 - RNA, 13 nt, Human
uuugucuuaaaaa

SEQ ID NO: 1212991 - RNA, 18 nt, Human
auguccaagaagcccagg

SEQ ID NO: 1212992 - RNA, 17 nt, Human
auguccaagaagcccag

SEQ ID NO: 1212993 - RNA, 16 nt, Human
auguccaagaagccca

SEQ ID NO: 1212994 - RNA, 15 nt, Human
auguaucaaugagua

SEQ ID NO: 1212995 - RNA, 12 nt, Human
auguaucaauga

SEQ ID NO: 1212996 - RNA, 14 nt, Human
augugagacugguu

SEQ ID NO: 1212997 - RNA, 13 nt, Human
augugagaccauu

SEQ ID NO: 1212998 - RNA, 22 nt, Human
uuugggguacccacugcucugg

SEQ ID NO: 1212999 - RNA, 21 nt, Human
uuugggguacccacugcucug

SEQ ID NO: 1213000 - RNA, 13 nt, Human
uuuggggaagaac

SEQ ID NO: 1213001 - RNA, 13 nt, Human
uuuggcugcugaa

SEQ ID NO: 1213002 - RNA, 12 nt, Human
uuuggcugcuga

SEQ ID NO: 1213003 - RNA, 18 nt, Human
uuugauucagacagcugc

SEQ ID NO: 1213004 - RNA, 19 nt, Human
uuugcuggggccgaaagaa

SEQ ID NO: 1213005 - RNA, 22 nt, Human
uuugcuggggccgaaagaacag

SEQ ID NO: 1213006 - RNA, 22 nt, Human
uuuggauuggaugaauuccaaa

SEQ ID NO: 1213007 - RNA, 13 nt, Human
uuugagacagagu

SEQ ID NO: 1213008 - RNA, 15 nt, Human
uuugauucagacagc

SEQ ID NO: 1213009 - RNA, 15 nt, Human
uuugauccaagcugg

SEQ ID NO: 1213010 - RNA, 23 nt, Human
uuucccucccuuccucuuuccau

SEQ ID NO: 1213011 - RNA, 21 nt, Human
uuugaccucugcagcaauaaa

SEQ ID NO: 1213012 - RNA, 19 nt, Human
uuugaccucugcagcaaua

SEQ ID NO: 1213013 - RNA, 14 nt, Human
uuugacaaggggca

SEQ ID NO: 1213014 - RNA, 16 nt, Human
auucaguuguuagugu

SEQ ID NO: 1213015 - RNA, 22 nt, Human
auuccccaggaggccagccuug

SEQ ID NO: 1213016 - RNA, 20 nt, Human
auuccccaggaggccagccu

SEQ ID NO: 1213017 - RNA, 19 nt, Human
auucccaagcucugcuccu

SEQ ID NO: 1213018 - RNA, 18 nt, Human
auucccaagcucugcucc

SEQ ID NO: 1213019 - RNA, 13 nt, Human
auuagagaagaga

SEQ ID NO: 1213020 - RNA, 14 nt, Human
auuacuucugcuac

SEQ ID NO: 1213021 - RNA, 13 nt, Human
auuacuucugcua

SEQ ID NO: 1213022 - RNA, 16 nt, Human
uuuuguuuuugucuua

SEQ ID NO: 1213023 - RNA, 23 nt, Human
auuaaaacacaacaucuuuuucu

SEQ ID NO: 1213024 - RNA, 19 nt, Human
auuaaguacuauguaucaa

SEQ ID NO: 1213025 - RNA, 18 nt, Human
auuaaguacuauguauca

SEQ ID NO: 1213026 - RNA, 13 nt, Human
auuaaggaagaca

SEQ ID NO: 1213027 - RNA, 23 nt, Human
augaguccccuguuuguuucuga

SEQ ID NO: 1213028 - RNA, 13 nt, Human
augaguccccugu

SEQ ID NO: 1213029 - RNA, 21 nt, Human
uugucauauaagauucauauu

SEQ ID NO: 1213030 - RNA, 18 nt, Human
uugucacacacuuuggcu

SEQ ID NO: 1213031 - RNA, 17 nt, Human
uugucacacacuuuggc

SEQ ID NO: 1213032 - RNA, 22 nt, Human
augaggucagagccugcaguua

SEQ ID NO: 1213033 - RNA, 20 nt, Human
augaggucagagccugcagu

SEQ ID NO: 1213034 - RNA, 19 nt, Human
augaggucagagccugcag

SEQ ID NO: 1213035 - RNA, 18 nt, Human
augaggucagagccugca

SEQ ID NO: 1213036 - RNA, 16 nt, Human
augaggucagagccug

SEQ ID NO: 1213037 - RNA, 15 nt, Human
augaggucagagccu

SEQ ID NO: 1213038 - RNA, 21 nt, Human
uugugaggaagccgcuggggc

SEQ ID NO: 1213039 - RNA, 20 nt, Human
uugugauacaaugcugugcc

SEQ ID NO: 1213040 - RNA, 18 nt, Human
uugugaggaagccgcugg

SEQ ID NO: 1213041 - RNA, 17 nt, Human
uugugaggaagccgcug

SEQ ID NO: 1213042 - RNA, 13 nt, Human
uugugaggaagcc

SEQ ID NO: 1213043 - RNA, 16 nt, Human
uuguccccgacccuug

SEQ ID NO: 1213044 - RNA, 15 nt, Human
uuguccccgacccuu

SEQ ID NO: 1213045 - RNA, 20 nt, Human
uuguccccaccgcagacagg

SEQ ID NO: 1213046 - RNA, 18 nt, Human
uuguccccaccgcagaca

SEQ ID NO: 1213047 - RNA, 23 nt, Human
uuuaaaaauacagauagauauau

SEQ ID NO: 1213048 - RNA, 11 nt, Human
uuuaaaugcac

SEQ ID NO: 1213049 - RNA, 19 nt, Human
uuuaaggaugcuuguacau

SEQ ID NO: 1213050 - RNA, 21 nt, Human
uuuaagcuguuacugucuuca

SEQ ID NO: 1213051 - RNA, 14 nt, Human
uuuaagaggcaggg

SEQ ID NO: 1213052 - RNA, 12 nt, Human
uuuaagagaaau

SEQ ID NO: 1213053 - RNA, 22 nt, Human
uuuaaggaugcuuguacauaau

SEQ ID NO: 1213054 - RNA, 21 nt, Human
uuuaaggaugcuuguacauaa

SEQ ID NO: 1213055 - RNA, 20 nt, Human
uuuaaggaugcuuguacaua

SEQ ID NO: 1213056 - RNA, 16 nt, Human
uuuaaugaaagacugu

SEQ ID NO: 1213057 - RNA, 20 nt, Human
uuguucuugguuuguaaauu

SEQ ID NO: 1213058 - RNA, 19 nt, Human
uuguucuugguuuguaaau

SEQ ID NO: 1213059 - RNA, 17 nt, Human
uuguucuugguuuguaa

SEQ ID NO: 1213060 - RNA, 23 nt, Human
augcacuuuguucuggcucuucc

SEQ ID NO: 1213061 - RNA, 17 nt, Human
augcccagccccuucug

SEQ ID NO: 1213062 - RNA, 16 nt, Human
augcccagccccuucu

SEQ ID NO: 1213063 - RNA, 21 nt, Human
augccaugaggaacaaggcaa

SEQ ID NO: 1213064 - RNA, 23 nt, Human
uuuaaugaaagacuguacaaagu

SEQ ID NO: 1213065 - RNA, 21 nt, Human
uuuaaugaaagacuguacaaa

SEQ ID NO: 1213066 - RNA, 15 nt, Human
augccucucucaggc

SEQ ID NO: 1213067 - RNA, 14 nt, Human
augccucucucagg

SEQ ID NO: 1213068 - RNA, 13 nt, Human
augccucucucag

SEQ ID NO: 1213069 - RNA, 22 nt, Human
augcgugcauaccacuuuuguu

SEQ ID NO: 1213070 - RNA, 17 nt, Human
augccucucucaggcca

SEQ ID NO: 1213071 - RNA, 15 nt, Human
uuuacuucuuauaca

SEQ ID NO: 1213072 - RNA, 14 nt, Human
uuuacuucuuauac

SEQ ID NO: 1213073 - RNA, 13 nt, Human
uuuacuucuuaua

SEQ ID NO: 1213074 - RNA, 11 nt, Human
uuuacuuaaac

SEQ ID NO: 1213075 - RNA, 16 nt, Human
uuuacugcagcuuugu

SEQ ID NO: 1213076 - RNA, 22 nt, Human
uuuaccugaagucuuuguacag

SEQ ID NO: 1213077 - RNA, 18 nt, Human
uuuaccugaagucuuugu

SEQ ID NO: 1213078 - RNA, 15 nt, Human
uuucaaacuuuacua

SEQ ID NO: 1213079 - RNA, 12 nt, Human
uuucaaacuuua

SEQ ID NO: 1213080 - RNA, 13 nt, Human
uuucagaaaugug

SEQ ID NO: 1213081 - RNA, 12 nt, Human
uuucagaaaugu

SEQ ID NO: 1213082 - RNA, 11 nt, Human
uuucagaaaug

SEQ ID NO: 1213083 - RNA, 16 nt, Human
uuucccuauuagagaa

SEQ ID NO: 1213084 - RNA, 18 nt, Human
augcuggcuguuggcugg

SEQ ID NO: 1213085 - RNA, 19 nt, Human
augcuccuggcccacugca

SEQ ID NO: 1213086 - RNA, 14 nt, Human
augcuccuggccca

SEQ ID NO: 1213087 - RNA, 14 nt, Human
uuuaucagaauucu

SEQ ID NO: 1213088 - RNA, 22 nt, Human
augcuggcuguuggcugggggc

SEQ ID NO: 1213089 - RNA, 20 nt, Human
augcuggcuguuggcugggg

SEQ ID NO: 1213090 - RNA, 19 nt, Human
augcuggcuguuggcuggg

SEQ ID NO: 1213091 - RNA, 20 nt, Human
augcuucucacugccaugcc

SEQ ID NO: 1213092 - RNA, 16 nt, Human
augcuucucacugcca

SEQ ID NO: 1213093 - RNA, 18 nt, Human
auggaagacagcucuuau

SEQ ID NO: 1213094 - RNA, 17 nt, Human
auggaagacagcucuua

SEQ ID NO: 1213095 - RNA, 14 nt, Human
uugguuuguaaauu

SEQ ID NO: 1213096 - RNA, 19 nt, Human
uuggugucgggcaugacac

SEQ ID NO: 1213097 - RNA, 18 nt, Human
uuggugucgggcaugaca

SEQ ID NO: 1213098 - RNA, 17 nt, Human
uuggugucgggcaugac

SEQ ID NO: 1213099 - RNA, 19 nt, Human
uuggugguuucagaaaugu

SEQ ID NO: 1213100 - RNA, 18 nt, Human
uuggugguuucagaaaug

SEQ ID NO: 1213101 - RNA, 20 nt, Human
augaaugucagugugacuga

SEQ ID NO: 1213102 - RNA, 18 nt, Human
augaaugucagugugacu

SEQ ID NO: 1213103 - RNA, 16 nt, Human
augaaugucaguguga

SEQ ID NO: 1213104 - RNA, 23 nt, Human
augaaccacaucuugcucugcug

SEQ ID NO: 1213105 - RNA, 17 nt, Human
augaaugaaacauuuug

SEQ ID NO: 1213106 - RNA, 22 nt, Human
aucugucauuugagcagggcuc

SEQ ID NO: 1213107 - RNA, 17 nt, Human
aucugucauuugagcag

SEQ ID NO: 1213108 - RNA, 12 nt, Human
aucugucauuug

SEQ ID NO: 1213109 - RNA, 17 nt, Human
aucuugcucugcugaca

SEQ ID NO: 1213110 - RNA, 16 nt, Human
aucuugcucugcugac

SEQ ID NO: 1213111 - RNA, 15 nt, Human
aucuugcucugcuga

SEQ ID NO: 1213112 - RNA, 14 nt, Human
aucuugcucugcug

SEQ ID NO: 1213113 - RNA, 17 nt, Human
uuggaaaauaaauuauu

SEQ ID NO: 1213114 - RNA, 20 nt, Human
uugcuuugugauuuuuguaa

SEQ ID NO: 1213115 - RNA, 15 nt, Human
uugcuuugugauuuu

SEQ ID NO: 1213116 - RNA, 23 nt, Human
uugauguucuuucacccuuuucu

SEQ ID NO: 1213117 - RNA, 21 nt, Human
uugauuaaauucuugcaaagu

SEQ ID NO: 1213118 - RNA, 20 nt, Human
uugauuaaauucuugcaaag

SEQ ID NO: 1213119 - RNA, 16 nt, Human
uugauuaaauucuugc

SEQ ID NO: 1213120 - RNA, 15 nt, Human
uugauuaaauucuug

SEQ ID NO: 1213121 - RNA, 12 nt, Human
aucugaaaaugu

SEQ ID NO: 1213122 - RNA, 23 nt, Human
aucucacacaugagcaucaggcc

SEQ ID NO: 1213123 - RNA, 17 nt, Human
aucucaaauuucuaaau

SEQ ID NO: 1213124 - RNA, 16 nt, Human
aucucaaauuucuaaa

SEQ ID NO: 1213125 - RNA, 23 nt, Human
uugcccaggcuggcgugcagugg

SEQ ID NO: 1213126 - RNA, 14 nt, Human
uugcccaggcuggc

SEQ ID NO: 1213127 - RNA, 12 nt, Human
uugcccaggcug

SEQ ID NO: 1213128 - RNA, 11 nt, Human
uugcccaggcu

SEQ ID NO: 1213129 - RNA, 18 nt, Human
uugcccaggcaggucuug

SEQ ID NO: 1213130 - RNA, 16 nt, Human
uugcccaggcaggucu

SEQ ID NO: 1213131 - RNA, 14 nt, Human
uugcccaggcaggu

SEQ ID NO: 1213132 - RNA, 13 nt, Human
uugcccaggcagg

SEQ ID NO: 1213133 - RNA, 14 nt, Human
uugcaugaggcuag

SEQ ID NO: 1213134 - RNA, 21 nt, Human
uugcaccacugcacuccagcc

SEQ ID NO: 1213135 - RNA, 14 nt, Human
uugcaauggcagcc

SEQ ID NO: 1213136 - RNA, 14 nt, Human
aucucaaauuucua

SEQ ID NO: 1213137 - RNA, 23 nt, Human
aucucaaauaacuaaaagguaug

SEQ ID NO: 1213138 - RNA, 21 nt, Human
aucucaaauaacuaaaaggua

SEQ ID NO: 1213139 - RNA, 14 nt, Human
aucucaaauaacua

SEQ ID NO: 1213140 - RNA, 22 nt, Human
aucuaggaagacuuuggaaaga

SEQ ID NO: 1213141 - RNA, 19 nt, Human
aucuaggaagacuuuggaa

SEQ ID NO: 1213142 - RNA, 18 nt, Human
aucuaggaagacuuugga

SEQ ID NO: 1213143 - RNA, 17 nt, Human
aucuaggaagacuuugg

SEQ ID NO: 1213144 - RNA, 19 nt, Human
aucuagauacuguaucaug

SEQ ID NO: 1213145 - RNA, 18 nt, Human
aucuagauacuguaucau

SEQ ID NO: 1213146 - RNA, 23 nt, Human
aucuaauauguaacaagccaccc

SEQ ID NO: 1213147 - RNA, 18 nt, Human
uugauagcacagacccug

SEQ ID NO: 1213148 - RNA, 17 nt, Human
uugauacuacaguuugu

SEQ ID NO: 1213149 - RNA, 21 nt, Human
uugagugcugucuccauguuu

SEQ ID NO: 1213150 - RNA, 16 nt, Human
uugacaucaacugcau

SEQ ID NO: 1213151 - RNA, 19 nt, Human
uugacagggcacaccgggc

SEQ ID NO: 1213152 - RNA, 12 nt, Human
uugacagggcac

SEQ ID NO: 1213153 - RNA, 10 nt, Human
uugacagggc

SEQ ID NO: 1213154 - RNA, 19 nt, Human
uugacaggauuauuggaaa

SEQ ID NO: 1213155 - RNA, 17 nt, Human
uugaccauucuccaccu

SEQ ID NO: 1213156 - RNA, 16 nt, Human
uugagcagggcucagc

SEQ ID NO: 1213157 - RNA, 12 nt, Human
uugagcagggcu

SEQ ID NO: 1213158 - RNA, 12 nt, Human
uugagacagagu

SEQ ID NO: 1213159 - RNA, 11 nt, Human
uugagacagag

SEQ ID NO: 1213160 - RNA, 20 nt, Human
auauuguuuucaguguacau

SEQ ID NO: 1213161 - RNA, 21 nt, Human
auauugcugauggugcaauga

SEQ ID NO: 1213162 - RNA, 17 nt, Human
auauugcugauggugca

SEQ ID NO: 1213163 - RNA, 16 nt, Human
auauucuguuggccag

SEQ ID NO: 1213164 - RNA, 22 nt, Human
auauugauuuccguuaaaauac

SEQ ID NO: 1213165 - RNA, 21 nt, Human
auauugauuuccguuaaaaua

SEQ ID NO: 1213166 - RNA, 19 nt, Human
auauugauuuccguuaaaa

SEQ ID NO: 1213167 - RNA, 20 nt, Human
auauguuuuaagaggcaggg

SEQ ID NO: 1213168 - RNA, 18 nt, Human
auauguuuuaagaggcag

SEQ ID NO: 1213169 - RNA, 22 nt, Human
auauuaaggaagacaaugugaa

SEQ ID NO: 1213170 - RNA, 24 nt, Human
auauuaagaaagacuaucuaaaug

SEQ ID NO: 1213171 - RNA, 15 nt, Human
auauuaagaaagacu

SEQ ID NO: 1213172 - RNA, 15 nt, Human
uuccuucagugccuu

SEQ ID NO: 1213173 - RNA, 14 nt, Human
uuccuucagugccu

SEQ ID NO: 1213174 - RNA, 11 nt, Human
uuccuucagug

SEQ ID NO: 1213175 - RNA, 11 nt, Human
uuccucuuucc

SEQ ID NO: 1213176 - RNA, 17 nt, Human
uuccuguucccaugaga

SEQ ID NO: 1213177 - RNA, 17 nt, Human
uuccuaauccucuagga

SEQ ID NO: 1213178 - RNA, 15 nt, Human
uuccuaauccucuag

SEQ ID NO: 1213179 - RNA, 13 nt, Human
uuccuaauccucu

SEQ ID NO: 1213180 - RNA, 18 nt, Human
aucaaguauuauaccuuu

SEQ ID NO: 1213181 - RNA, 14 nt, Human
aucaaguauuauac

SEQ ID NO: 1213182 - RNA, 13 nt, Human
aucaaguauuaua

SEQ ID NO: 1213183 - RNA, 21 nt, Human
aucaagaugugacauguuuua

SEQ ID NO: 1213184 - RNA, 22 nt, Human
aucacggcucacugcagccuca

SEQ ID NO: 1213185 - RNA, 23 nt, Human
aucauaguggcuuaaaacaacac

SEQ ID NO: 1213186 - RNA, 15 nt, Human
aucauugaaaucuuu

SEQ ID NO: 1213187 - RNA, 14 nt, Human
aucauugaaaucuu

SEQ ID NO: 1213188 - RNA, 22 nt, Human
aucauuaaagccugaguuugcu

SEQ ID NO: 1213189 - RNA, 18 nt, Human
aucagcacgauuucuguu

SEQ ID NO: 1213190 - RNA, 17 nt, Human
aucagcacgauuucugu

SEQ ID NO: 1213191 - RNA, 16 nt, Human
aucagcacgauuucug

SEQ ID NO: 1213192 - RNA, 13 nt, Human
uucuaggccuggg

SEQ ID NO: 1213193 - RNA, 22 nt, Human
uucucagaaucucaaauaacua

SEQ ID NO: 1213194 - RNA, 19 nt, Human
uucucagaaucucaaauaa

SEQ ID NO: 1213195 - RNA, 23 nt, Human
uucucagaaucucaaauaacuaa

SEQ ID NO: 1213196 - RNA, 23 nt, Human
uucugccgcagcccugcagaggg

SEQ ID NO: 1213197 - RNA, 22 nt, Human
uucugggacacaguucaauucu

SEQ ID NO: 1213198 - RNA, 11 nt, Human
uucugggacac

SEQ ID NO: 1213199 - RNA, 10 nt, Human
uucugggaca

SEQ ID NO: 1213200 - RNA, 15 nt, Human
uucugaaagggacgc

SEQ ID NO: 1213201 - RNA, 20 nt, Human
aucauugaaaucuuuuugcu

SEQ ID NO: 1213202 - RNA, 19 nt, Human
aucauugaaaucuuuuugc

SEQ ID NO: 1213203 - RNA, 16 nt, Human
auccagguucagcuug

SEQ ID NO: 1213204 - RNA, 15 nt, Human
auccagguucagcuu

SEQ ID NO: 1213205 - RNA, 17 nt, Human
aucccauaugccugggc

SEQ ID NO: 1213206 - RNA, 16 nt, Human
aucccauaugccuggg

SEQ ID NO: 1213207 - RNA, 21 nt, Human
uucaaggauccugagccagau

SEQ ID NO: 1213208 - RNA, 19 nt, Human
uucaaggauccugagccag

SEQ ID NO: 1213209 - RNA, 18 nt, Human
uucaaggauccugagcca

SEQ ID NO: 1213210 - RNA, 16 nt, Human
uucaaggauccugagc

SEQ ID NO: 1213211 - RNA, 15 nt, Human
uucaaggauccugag

SEQ ID NO: 1213212 - RNA, 22 nt, Human
uucaccacaugugcacaugcac

SEQ ID NO: 1213213 - RNA, 17 nt, Human
uucacauauugauuucc

SEQ ID NO: 1213214 - RNA, 13 nt, Human
uucacaguucucu

SEQ ID NO: 1213215 - RNA, 18 nt, Human
auagccugccucuucucu

SEQ ID NO: 1213216 - RNA, 17 nt, Human
auaagauaaaugugcug

SEQ ID NO: 1213217 - RNA, 13 nt, Human
auaagauaaaugu

SEQ ID NO: 1213218 - RNA, 19 nt, Human
auagcucaggugucccugc

SEQ ID NO: 1213219 - RNA, 22 nt, Human
auagcucaggugucccugcacu

SEQ ID NO: 1213220 - RNA, 21 nt, Human
auagcucaggugucccugcac

SEQ ID NO: 1213221 - RNA, 20 nt, Human
auagcucaggugucccugca

SEQ ID NO: 1213222 - RNA, 12 nt, Human
auagcugggacu

SEQ ID NO: 1213223 - RNA, 22 nt, Human
uuauuuaaugaaagacuguaca

SEQ ID NO: 1213224 - RNA, 18 nt, Human
uuauuuaaugaaagacug

SEQ ID NO: 1213225 - RNA, 14 nt, Human
uuauuuaaauuuua

SEQ ID NO: 1213226 - RNA, 17 nt, Human
auagcugggacuacagg

SEQ ID NO: 1213227 - RNA, 22 nt, Human
auagcuggucuuauuuguaaag

SEQ ID NO: 1213228 - RNA, 23 nt, Human
auagcuggucuuauuuguaaagc

SEQ ID NO: 1213229 - RNA, 16 nt, Human
uuauuuaguuccuuga

SEQ ID NO: 1213230 - RNA, 21 nt, Human
uucaucauccuaagcuauuca

SEQ ID NO: 1213231 - RNA, 21 nt, Human
uucauauuuacuucuuauaca

SEQ ID NO: 1213232 - RNA, 16 nt, Human
uucauauuuacuucuu

SEQ ID NO: 1213233 - RNA, 14 nt, Human
uucaguaauaacuc

SEQ ID NO: 1213234 - RNA, 20 nt, Human
auaugauuuaaaucagccgu

SEQ ID NO: 1213235 - RNA, 14 nt, Human
auaugucaagccau

SEQ ID NO: 1213236 - RNA, 13 nt, Human
auaugcacacauu

SEQ ID NO: 1213237 - RNA, 19 nt, Human
uucagccaagaauucuuaa

SEQ ID NO: 1213238 - RNA, 14 nt, Human
uucagacagcugcc

SEQ ID NO: 1213239 - RNA, 17 nt, Human
uucagaucucuaacuuc

SEQ ID NO: 1213240 - RNA, 13 nt, Human
uuagacagagucu

SEQ ID NO: 1213241 - RNA, 11 nt, Human
uuagacagagu

SEQ ID NO: 1213242 - RNA, 14 nt, Human
uuagaaauauaauu

SEQ ID NO: 1213243 - RNA, 12 nt, Human
uuagaaauauaa

SEQ ID NO: 1213244 - RNA, 11 nt, Human
uuagaaauaua

SEQ ID NO: 1213245 - RNA, 23 nt, Human
uuacucagaauucucuaguuuga

SEQ ID NO: 1213246 - RNA, 18 nt, Human
uuacucagaauucucuag

SEQ ID NO: 1213247 - RNA, 15 nt, Human
uuacaggaaguacug

SEQ ID NO: 1213248 - RNA, 14 nt, Human
uuacaggaaguacu

SEQ ID NO: 1213249 - RNA, 14 nt, Human
uuaagugcugcauu

SEQ ID NO: 1213250 - RNA, 17 nt, Human
uuaaguacuauguauca

SEQ ID NO: 1213251 - RNA, 16 nt, Human
uuaagaggcagggucu

SEQ ID NO: 1213252 - RNA, 15 nt, Human
uuaagaggcaggguc

SEQ ID NO: 1213253 - RNA, 13 nt, Human
uuaagaggcaggg

SEQ ID NO: 1213254 - RNA, 15 nt, Human
uuaauucuuagcuca

SEQ ID NO: 1213255 - RNA, 23 nt, Human
uuaaugaaagacuguacaaagua

SEQ ID NO: 1213256 - RNA, 23 nt, Human
auaaacaagaccacguuucuaaa

SEQ ID NO: 1213257 - RNA, 22 nt, Human
auaaacaagaccacguuucuaa

SEQ ID NO: 1213258 - RNA, 15 nt, Human
auaaacaagaccacg

SEQ ID NO: 1213259 - RNA, 19 nt, Human
uuaauuuuuuugagacaga

SEQ ID NO: 1213260 - RNA, 13 nt, Human
uuaaauaauguga

SEQ ID NO: 1213261 - RNA, 23 nt, Human
aguuguuugauucagacagcugc

SEQ ID NO: 1213262 - RNA, 21 nt, Human
aguuguuugauucagacagcu

SEQ ID NO: 1213263 - RNA, 18 nt, Human
aguuggucccccuuccau

SEQ ID NO: 1213264 - RNA, 16 nt, Human
aguuggcuaggacccc

SEQ ID NO: 1213265 - RNA, 21 nt, Human
aguuggguggaugccuggugg

SEQ ID NO: 1213266 - RNA, 13 nt, Human
aguugggcuuccu

SEQ ID NO: 1213267 - RNA, 19 nt, Human
uguuuauugucaaaguggu

SEQ ID NO: 1213268 - RNA, 19 nt, Human
uguugcccaggcaggucuu

SEQ ID NO: 1213269 - RNA, 22 nt, Human
uguuugauucagacagcugccu

SEQ ID NO: 1213270 - RNA, 17 nt, Human
uguuugauucagacagc

SEQ ID NO: 1213271 - RNA, 14 nt, Human
aguucugguuccua

SEQ ID NO: 1213272 - RNA, 21 nt, Human
uguuuuauuuuaauucaguug

SEQ ID NO: 1213273 - RNA, 20 nt, Human
uguuuuccaugaguccccug

SEQ ID NO: 1213274 - RNA, 23 nt, Human
uguguguuuauugucaaaguggu

SEQ ID NO: 1213275 - RNA, 19 nt, Human
uguguguuuauugucaaag

SEQ ID NO: 1213276 - RNA, 21 nt, Human
ugugucuugcaauggcagccu

SEQ ID NO: 1213277 - RNA, 22 nt, Human
ugugucucuugguccugcugca

SEQ ID NO: 1213278 - RNA, 21 nt, Human
ugugucucuugguccugcugc

SEQ ID NO: 1213279 - RNA, 20 nt, Human
ugugucucuugguccugcug

SEQ ID NO: 1213280 - RNA, 17 nt, Human
ugugucucuugguccug

SEQ ID NO: 1213281 - RNA, 20 nt, Human
ugugguguuuccuggcacug

SEQ ID NO: 1213282 - RNA, 16 nt, Human
ugugguguuuccuggc

SEQ ID NO: 1213283 - RNA, 14 nt, Human
ugugguguuuccug

SEQ ID NO: 1213284 - RNA, 15 nt, Human
uguggucccacccca

SEQ ID NO: 1213285 - RNA, 13 nt, Human
uguggucccaccc

SEQ ID NO: 1213286 - RNA, 16 nt, Human
uguggucccaccccac

SEQ ID NO: 1213287 - RNA, 23 nt, Human
uguggguuucuaaagcugccagc

SEQ ID NO: 1213288 - RNA, 21 nt, Human
uguggguuucuaaagcugcca

SEQ ID NO: 1213289 - RNA, 21 nt, Human
agugcugggauuacaggugug

SEQ ID NO: 1213290 - RNA, 19 nt, Human
agugcugcauuuaaaagau

SEQ ID NO: 1213291 - RNA, 17 nt, Human
agugcugcauuuaaaag

SEQ ID NO: 1213292 - RNA, 16 nt, Human
agugcugcauuuaaaa

SEQ ID NO: 1213293 - RNA, 13 nt, Human
agugcugcauuua

SEQ ID NO: 1213294 - RNA, 12 nt, Human
agugcugcauuu

SEQ ID NO: 1213295 - RNA, 23 nt, Human
agugaguugauagcacagacccu

SEQ ID NO: 1213296 - RNA, 22 nt, Human
agugaguugauagcacagaccc

SEQ ID NO: 1213297 - RNA, 16 nt, Human
uguucugggacacagu

SEQ ID NO: 1213298 - RNA, 20 nt, Human
uguuccacaaguuaaauaaa

SEQ ID NO: 1213299 - RNA, 20 nt, Human
agugugucuuagugugugca

SEQ ID NO: 1213300 - RNA, 18 nt, Human
uguugcccaggcaggucu

SEQ ID NO: 1213301 - RNA, 17 nt, Human
uguugcccaggcagguc

SEQ ID NO: 1213302 - RNA, 16 nt, Human
uguugcccaggcaggu

SEQ ID NO: 1213303 - RNA, 15 nt, Human
uguugcccaggcagg

SEQ ID NO: 1213304 - RNA, 13 nt, Human
uguugcccaggca

SEQ ID NO: 1213305 - RNA, 20 nt, Human
agugugguguuuccuggcac

SEQ ID NO: 1213306 - RNA, 19 nt, Human
agugugguguuuccuggca

SEQ ID NO: 1213307 - RNA, 17 nt, Human
agugugguguuuccugg

SEQ ID NO: 1213308 - RNA, 20 nt, Human
agugugccugaagucccaga

SEQ ID NO: 1213309 - RNA, 16 nt, Human
agugugguguuuccug

SEQ ID NO: 1213310 - RNA, 23 nt, Human
aguggugguuuucuguucuuucu

SEQ ID NO: 1213311 - RNA, 21 nt, Human
aguggugguuuucuguucuuu

SEQ ID NO: 1213312 - RNA, 20 nt, Human
aguggugguuuucuguucuu

SEQ ID NO: 1213313 - RNA, 19 nt, Human
aguggugguuuucuguucu

SEQ ID NO: 1213314 - RNA, 18 nt, Human
aguggugguuuucuguuc

SEQ ID NO: 1213315 - RNA, 17 nt, Human
aguggugguuuucuguu

SEQ ID NO: 1213316 - RNA, 21 nt, Human
agugguggugaacagaacaaa

SEQ ID NO: 1213317 - RNA, 17 nt, Human
aguggugcgaucugggu

SEQ ID NO: 1213318 - RNA, 21 nt, Human
uguggaguucaucuugaauug

SEQ ID NO: 1213319 - RNA, 17 nt, Human
uguggaguucaucuuga

SEQ ID NO: 1213320 - RNA, 21 nt, Human
ugugcccccauguaagcaccc

SEQ ID NO: 1213321 - RNA, 17 nt, Human
agugaggcucugcccuu

SEQ ID NO: 1213322 - RNA, 16 nt, Human
agugaggcucugcccu

SEQ ID NO: 1213323 - RNA, 15 nt, Human
agugaggcucugccc

SEQ ID NO: 1213324 - RNA, 15 nt, Human
agugagucgaggaca

SEQ ID NO: 1213325 - RNA, 20 nt, Human
agugaggcucugcccuuggu

SEQ ID NO: 1213326 - RNA, 19 nt, Human
agugaggcucugcccuugg

SEQ ID NO: 1213327 - RNA, 21 nt, Human
agugaggcucugcccuugguu

SEQ ID NO: 1213328 - RNA, 16 nt, Human
ugugccaugugccagg

SEQ ID NO: 1213329 - RNA, 12 nt, Human
ugugccaugugc

SEQ ID NO: 1213330 - RNA, 20 nt, Human
ugugccagguuuuuggucug

SEQ ID NO: 1213331 - RNA, 20 nt, Human
ugugauggggcccugccucc

SEQ ID NO: 1213332 - RNA, 19 nt, Human
ugugauggggcccugccuc

SEQ ID NO: 1213333 - RNA, 18 nt, Human
ugugaugagaggaaauca

SEQ ID NO: 1213334 - RNA, 14 nt, Human
ugugaagagaacca

SEQ ID NO: 1213335 - RNA, 19 nt, Human
ugugaaccaccacacccag

SEQ ID NO: 1213336 - RNA, 21 nt, Human
ugugaaccaccacacccagcc

SEQ ID NO: 1213337 - RNA, 20 nt, Human
ugugaaccaccacacccagc

SEQ ID NO: 1213338 - RNA, 21 nt, Human
ugugaaaggaaagagggaggu

SEQ ID NO: 1213339 - RNA, 18 nt, Human
ugugaaaggaaagaggcu

SEQ ID NO: 1213340 - RNA, 15 nt, Human
ugugaaaggaaagag

SEQ ID NO: 1213341 - RNA, 15 nt, Human
ugugacugaauuucu

SEQ ID NO: 1213342 - RNA, 16 nt, Human
ugugacugaucucucg

SEQ ID NO: 1213343 - RNA, 16 nt, Human
ugugacugaauuucuu

SEQ ID NO: 1213344 - RNA, 14 nt, Human
agucuuuguacaga

SEQ ID NO: 1213345 - RNA, 17 nt, Human
uguaucaaugaguaaca

SEQ ID NO: 1213346 - RNA, 20 nt, Human
uguauucucuccuguaccuc

SEQ ID NO: 1213347 - RNA, 19 nt, Human
uguauucucuccuguaccu

SEQ ID NO: 1213348 - RNA, 18 nt, Human
aguauuacuucugcuaca

SEQ ID NO: 1213349 - RNA, 17 nt, Human
aguaugguggcuggguu

SEQ ID NO: 1213350 - RNA, 16 nt, Human
aguaugguggcugggu

SEQ ID NO: 1213351 - RNA, 15 nt, Human
aguaugguggcuggg

SEQ ID NO: 1213352 - RNA, 19 nt, Human
ugucaauuacaggaaguac

SEQ ID NO: 1213353 - RNA, 17 nt, Human
ugucaauuacaggaagu

SEQ ID NO: 1213354 - RNA, 15 nt, Human
ugucaauuacaggaa

SEQ ID NO: 1213355 - RNA, 14 nt, Human
ugucaauuacagga

SEQ ID NO: 1213356 - RNA, 23 nt, Human
agucacacagugagucgaggaca

SEQ ID NO: 1213357 - RNA, 15 nt, Human
agucacacagugagu

SEQ ID NO: 1213358 - RNA, 19 nt, Human
agucaccccggccaccugc

SEQ ID NO: 1213359 - RNA, 18 nt, Human
uguagagccagggucuca

SEQ ID NO: 1213360 - RNA, 16 nt, Human
uguagagccagggucu

SEQ ID NO: 1213361 - RNA, 17 nt, Human
aguaauaugcacacauu

SEQ ID NO: 1213362 - RNA, 15 nt, Human
aguaauaugcacaca

SEQ ID NO: 1213363 - RNA, 14 nt, Human
aguaauaugcacac

SEQ ID NO: 1213364 - RNA, 21 nt, Human
aguagaagucuuagauguaua

SEQ ID NO: 1213365 - RNA, 20 nt, Human
aguagaagucuuagauguau

SEQ ID NO: 1213366 - RNA, 19 nt, Human
aguagaagucuuagaugua

SEQ ID NO: 1213367 - RNA, 20 nt, Human
uguaggcauaaagucagggg

SEQ ID NO: 1213368 - RNA, 17 nt, Human
uguaggcauaaagucag

SEQ ID NO: 1213369 - RNA, 11 nt, Human
aguagagacag

SEQ ID NO: 1213370 - RNA, 16 nt, Human
uguaaauagcucaggu

SEQ ID NO: 1213371 - RNA, 15 nt, Human
uguaaauagcucagg

SEQ ID NO: 1213372 - RNA, 21 nt, Human
ugguuuguaaauuaacuuuua

SEQ ID NO: 1213373 - RNA, 17 nt, Human
ugguuuucaaaauaaaa

SEQ ID NO: 1213374 - RNA, 15 nt, Human
ugguuuucaaaauaa

SEQ ID NO: 1213375 - RNA, 14 nt, Human
ugguuuucaaaaua

SEQ ID NO: 1213376 - RNA, 15 nt, Human
ugguuuguaaauuaa

SEQ ID NO: 1213377 - RNA, 14 nt, Human
ugguuauggagagg

SEQ ID NO: 1213378 - RNA, 21 nt, Human
aggugauccacccaccucagc

SEQ ID NO: 1213379 - RNA, 20 nt, Human
aggugauccacccaccucag

SEQ ID NO: 1213380 - RNA, 14 nt, Human
aggugauccaccca

SEQ ID NO: 1213381 - RNA, 23 nt, Human
agguggggcagcuugaggguugg

SEQ ID NO: 1213382 - RNA, 18 nt, Human
aggugggauccuccaggu

SEQ ID NO: 1213383 - RNA, 17 nt, Human
aggugggauccuccagg

SEQ ID NO: 1213384 - RNA, 16 nt, Human
aggugggauccuccag

SEQ ID NO: 1213385 - RNA, 15 nt, Human
aggugggauccucca

SEQ ID NO: 1213386 - RNA, 18 nt, Human
aggugccucaagagaagg

SEQ ID NO: 1213387 - RNA, 14 nt, Human
agguuuaagcuguu

SEQ ID NO: 1213388 - RNA, 20 nt, Human
aggugugcucugaucaucca

SEQ ID NO: 1213389 - RNA, 15 nt, Human
aggugugcucugauc

SEQ ID NO: 1213390 - RNA, 17 nt, Human
aggugugaaccaccaca

SEQ ID NO: 1213391 - RNA, 23 nt, Human
agguggggucacucuggcagcuc

SEQ ID NO: 1213392 - RNA, 19 nt, Human
agguggggucacucuggca

SEQ ID NO: 1213393 - RNA, 23 nt, Human
aggugagaagcagaggaaggaga

SEQ ID NO: 1213394 - RNA, 21 nt, Human
aggugagaagcagaggaagga

SEQ ID NO: 1213395 - RNA, 16 nt, Human
aggugagaagcagagg

SEQ ID NO: 1213396 - RNA, 13 nt, Human
aggugaccccagg

SEQ ID NO: 1213397 - RNA, 22 nt, Human
aggugacagagugagacucugu

SEQ ID NO: 1213398 - RNA, 15 nt, Human
aggugacagagugag

SEQ ID NO: 1213399 - RNA, 13 nt, Human
aggugacagagug

SEQ ID NO: 1213400 - RNA, 18 nt, Human
aggucuugaacuccuggc

SEQ ID NO: 1213401 - RNA, 17 nt, Human
aggucuugaacuccugg

SEQ ID NO: 1213402 - RNA, 16 nt, Human
aggucuugaacuccug

SEQ ID NO: 1213403 - RNA, 18 nt, Human
aggucagagccugcaguu

SEQ ID NO: 1213404 - RNA, 17 nt, Human
aggucagagccugcagu

SEQ ID NO: 1213405 - RNA, 15 nt, Human
aggucagagccugca

SEQ ID NO: 1213406 - RNA, 14 nt, Human
aggucagagccugc

SEQ ID NO: 1213407 - RNA, 22 nt, Human
uggucagauuugaacucuucaa

SEQ ID NO: 1213408 - RNA, 16 nt, Human
uggucagauuugaacu

SEQ ID NO: 1213409 - RNA, 15 nt, Human
uggucagauuugaac

SEQ ID NO: 1213410 - RNA, 20 nt, Human
ugguuaggcauugugggaag

SEQ ID NO: 1213411 - RNA, 18 nt, Human
ugguuaggcauuguggga

SEQ ID NO: 1213412 - RNA, 12 nt, Human
ugguggcagugg

SEQ ID NO: 1213413 - RNA, 15 nt, Human
ugguggcagcugcgg

SEQ ID NO: 1213414 - RNA, 14 nt, Human
ugguggcagcugcg

SEQ ID NO: 1213415 - RNA, 17 nt, Human
uggugcgaucuggguuc

SEQ ID NO: 1213416 - RNA, 16 nt, Human
uggugcgaucuggguu

SEQ ID NO: 1213417 - RNA, 16 nt, Human
aggguggugaccucug

SEQ ID NO: 1213418 - RNA, 17 nt, Human
aggguggugaccucugc

SEQ ID NO: 1213419 - RNA, 22 nt, Human
uggguggcaccagcagccugga

SEQ ID NO: 1213420 - RNA, 21 nt, Human
uggguggcaccagcagccugg

SEQ ID NO: 1213421 - RNA, 20 nt, Human
uggguggcaccagcagccug

SEQ ID NO: 1213422 - RNA, 17 nt, Human
uggguggcaccagcagc

SEQ ID NO: 1213423 - RNA, 20 nt, Human
ugguagagugugccugaagu

SEQ ID NO: 1213424 - RNA, 21 nt, Human
aggggaauguuugccucugcc

SEQ ID NO: 1213425 - RNA, 20 nt, Human
aggggaauguuugccucugc

SEQ ID NO: 1213426 - RNA, 19 nt, Human
aggggaauguuugccucug

SEQ ID NO: 1213427 - RNA, 18 nt, Human
aggggugggacacccugu

SEQ ID NO: 1213428 - RNA, 13 nt, Human
agggggcugggac

SEQ ID NO: 1213429 - RNA, 20 nt, Human
aggggguggccucccaacuc

SEQ ID NO: 1213430 - RNA, 15 nt, Human
aggguaaggcugugg

SEQ ID NO: 1213431 - RNA, 15 nt, Human
agggucucacucugu

SEQ ID NO: 1213432 - RNA, 14 nt, Human
agggucucacucug

SEQ ID NO: 1213433 - RNA, 16 nt, Human
agggucucacucuguc

SEQ ID NO: 1213434 - RNA, 21 nt, Human
agggucucacucugucgccca

SEQ ID NO: 1213435 - RNA, 12 nt, Human
uggggcccugcc

SEQ ID NO: 1213436 - RNA, 23 nt, Human
uggggcugcaccggcuggccugg

SEQ ID NO: 1213437 - RNA, 17 nt, Human
uggggaccucaggccug

SEQ ID NO: 1213438 - RNA, 16 nt, Human
uggggaccucaggccu

SEQ ID NO: 1213439 - RNA, 15 nt, Human
uggggaccucaggcc

SEQ ID NO: 1213440 - RNA, 14 nt, Human
uggggaccucaggc

SEQ ID NO: 1213441 - RNA, 15 nt, Human
agggcuccagacaca

SEQ ID NO: 1213442 - RNA, 12 nt, Human
agggcuccagac

SEQ ID NO: 1213443 - RNA, 22 nt, Human
uggggucacucuggcagcucag

SEQ ID NO: 1213444 - RNA, 16 nt, Human
uggggucacucuggca

SEQ ID NO: 1213445 - RNA, 14 nt, Human
uggggucacucugg

SEQ ID NO: 1213446 - RNA, 13 nt, Human
uggggucacucug

SEQ ID NO: 1213447 - RNA, 20 nt, Human
ugggguacccacugcucugg

SEQ ID NO: 1213448 - RNA, 19 nt, Human
ugggguacccacugcucug

SEQ ID NO: 1213449 - RNA, 18 nt, Human
ugggguacccacugcucu

SEQ ID NO: 1213450 - RNA, 17 nt, Human
ugggguacccacugcuc

SEQ ID NO: 1213451 - RNA, 13 nt, Human
aggggaaaagagg

SEQ ID NO: 1213452 - RNA, 14 nt, Human
aggggaacagacug

SEQ ID NO: 1213453 - RNA, 22 nt, Human
aggggaaaaucagccugcucca

SEQ ID NO: 1213454 - RNA, 18 nt, Human
aggggaaaaucagccugc

SEQ ID NO: 1213455 - RNA, 13 nt, Human
aggggaauguuug

SEQ ID NO: 1213456 - RNA, 20 nt, Human
ugggacucaaugcacugaca

SEQ ID NO: 1213457 - RNA, 21 nt, Human
ugggagagaagagaaugcaca

SEQ ID NO: 1213458 - RNA, 19 nt, Human
ugggagagaagagaaugca

SEQ ID NO: 1213459 - RNA, 16 nt, Human
ugggagagccuuccag

SEQ ID NO: 1213460 - RNA, 16 nt, Human
ugggacuacaggcacc

SEQ ID NO: 1213461 - RNA, 15 nt, Human
ugggacuacaggcac

SEQ ID NO: 1213462 - RNA, 14 nt, Human
ugggacuacaggca

SEQ ID NO: 1213463 - RNA, 22 nt, Human
agggaaggauacaaaagcaugu

SEQ ID NO: 1213464 - RNA, 21 nt, Human
aggcccggcuccaggcuccuu

SEQ ID NO: 1213465 - RNA, 20 nt, Human
aggcccggcuccaggcuccu

SEQ ID NO: 1213466 - RNA, 18 nt, Human
aggcccggcuccaggcuc

SEQ ID NO: 1213467 - RNA, 17 nt, Human
agggagggagggcucca

SEQ ID NO: 1213468 - RNA, 15 nt, Human
agggagggagggcuc

SEQ ID NO: 1213469 - RNA, 21 nt, Human
ugggcccccaaauggaaaugg

SEQ ID NO: 1213470 - RNA, 16 nt, Human
ugggcccccaaaugga

SEQ ID NO: 1213471 - RNA, 13 nt, Human
ugggcagagcaga

SEQ ID NO: 1213472 - RNA, 18 nt, Human
ugggccaggagccuccug

SEQ ID NO: 1213473 - RNA, 12 nt, Human
ugggcagagcag

SEQ ID NO: 1213474 - RNA, 11 nt, Human
ugggcagagca

SEQ ID NO: 1213475 - RNA, 12 nt, Human
ugggcagaagga

SEQ ID NO: 1213476 - RNA, 20 nt, Human
ugggaggccaaggugggagg

SEQ ID NO: 1213477 - RNA, 19 nt, Human
ugggaggccaaggugggag

SEQ ID NO: 1213478 - RNA, 22 nt, Human
ugggaggaucucuugagccugg

SEQ ID NO: 1213479 - RNA, 21 nt, Human
ugggaggaucucuugagccug

SEQ ID NO: 1213480 - RNA, 20 nt, Human
ugggaggaucucuugagccu

SEQ ID NO: 1213481 - RNA, 23 nt, Human
agggcucagcggggacagcuccu

SEQ ID NO: 1213482 - RNA, 22 nt, Human
agggcucagcggggacagcucc

SEQ ID NO: 1213483 - RNA, 20 nt, Human
agggcucagcggggacagcu

SEQ ID NO: 1213484 - RNA, 19 nt, Human
agggcucagcggggacagc

SEQ ID NO: 1213485 - RNA, 17 nt, Human
agggagggcuccagaca

SEQ ID NO: 1213486 - RNA, 16 nt, Human
agggagggcuccagac

SEQ ID NO: 1213487 - RNA, 15 nt, Human
agggagggcuccaga

SEQ ID NO: 1213488 - RNA, 14 nt, Human
agggagggcuccag

SEQ ID NO: 1213489 - RNA, 18 nt, Human
ugcuaucucccccagccc

SEQ ID NO: 1213490 - RNA, 17 nt, Human
ugcuaucucccccagcc

SEQ ID NO: 1213491 - RNA, 14 nt, Human
ugcuaucuccccca

SEQ ID NO: 1213492 - RNA, 13 nt, Human
ugcuaucuccccc

SEQ ID NO: 1213493 - RNA, 16 nt, Human
aggaaaagcugcugac

SEQ ID NO: 1213494 - RNA, 19 nt, Human
ugcucugaucauccacugu

SEQ ID NO: 1213495 - RNA, 21 nt, Human
ugcuccagcuguucagcuggu

SEQ ID NO: 1213496 - RNA, 15 nt, Human
ugcucugcugacaga

SEQ ID NO: 1213497 - RNA, 14 nt, Human
ugcucugcugacag

SEQ ID NO: 1213498 - RNA, 16 nt, Human
ugcucugcugacagac

SEQ ID NO: 1213499 - RNA, 16 nt, Human
aggaagcucagggccu

SEQ ID NO: 1213500 - RNA, 15 nt, Human
aggaagcucagggcc

SEQ ID NO: 1213501 - RNA, 14 nt, Human
aggaagcucagggc

SEQ ID NO: 1213502 - RNA, 13 nt, Human
aggaagcucaggg

SEQ ID NO: 1213503 - RNA, 13 nt, Human
aggaagccagcag

SEQ ID NO: 1213504 - RNA, 15 nt, Human
ugcgguccacccagg

SEQ ID NO: 1213505 - RNA, 14 nt, Human
ugcgguccacccag

SEQ ID NO: 1213506 - RNA, 17 nt, Human
ugcgguccacccaggag

SEQ ID NO: 1213507 - RNA, 14 nt, Human
aggaaaagcugcug

SEQ ID NO: 1213508 - RNA, 23 nt, Human
agcuugaccgugaggccagagac

SEQ ID NO: 1213509 - RNA, 22 nt, Human
agcuugaccgugaggccagaga

SEQ ID NO: 1213510 - RNA, 20 nt, Human
agcuugaccgugaggccaga

SEQ ID NO: 1213511 - RNA, 15 nt, Human
agcuccuucuguccu

SEQ ID NO: 1213512 - RNA, 23 nt, Human
agcucccaggcauuccccaggag

SEQ ID NO: 1213513 - RNA, 13 nt, Human
agcucccaggcau

SEQ ID NO: 1213514 - RNA, 20 nt, Human
agcucugguccauagagagc

SEQ ID NO: 1213515 - RNA, 17 nt, Human
agcucugguccauagag

SEQ ID NO: 1213516 - RNA, 12 nt, Human
agcucuggucca

SEQ ID NO: 1213517 - RNA, 22 nt, Human
agcuccuucuguccuacucugu

SEQ ID NO: 1213518 - RNA, 21 nt, Human
agcuccuucuguccuacucug

SEQ ID NO: 1213519 - RNA, 16 nt, Human
agcuccuucuguccua

SEQ ID NO: 1213520 - RNA, 13 nt, Human
ugccucagccucc

SEQ ID NO: 1213521 - RNA, 12 nt, Human
ugccucagccuc

SEQ ID NO: 1213522 - RNA, 14 nt, Human
ugccgcagcccugc

SEQ ID NO: 1213523 - RNA, 12 nt, Human
ugccgcagcccu

SEQ ID NO: 1213524 - RNA, 19 nt, Human
ugcccuuaccugccaggaa

SEQ ID NO: 1213525 - RNA, 18 nt, Human
ugcccuuaccugccagga

SEQ ID NO: 1213526 - RNA, 20 nt, Human
agcugccagccgagauagcc

SEQ ID NO: 1213527 - RNA, 18 nt, Human
agcugcauacaguuugca

SEQ ID NO: 1213528 - RNA, 23 nt, Human
agcucuguccugggagugagcug

SEQ ID NO: 1213529 - RNA, 21 nt, Human
agcucuguccugggagugagc

SEQ ID NO: 1213530 - RNA, 16 nt, Human
agcucuguccugggag

SEQ ID NO: 1213531 - RNA, 18 nt, Human
agcuguuacugucuucag

SEQ ID NO: 1213532 - RNA, 19 nt, Human
agcugugcucuggacaggc

SEQ ID NO: 1213533 - RNA, 18 nt, Human
agcugugcucuggacagg

SEQ ID NO: 1213534 - RNA, 17 nt, Human
agcugugcucuggacag

SEQ ID NO: 1213535 - RNA, 17 nt, Human
agcugggacuacaggug

SEQ ID NO: 1213536 - RNA, 23 nt, Human
agcugggguggggaccucaggcc

SEQ ID NO: 1213537 - RNA, 22 nt, Human
agcugggguggggaccucaggc

SEQ ID NO: 1213538 - RNA, 20 nt, Human
agcugggguggggaccucag

SEQ ID NO: 1213539 - RNA, 16 nt, Human
agcugggacuacaggu

SEQ ID NO: 1213540 - RNA, 23 nt, Human
agcugggacuacaggcacccacc

SEQ ID NO: 1213541 - RNA, 20 nt, Human
agcugggacuacaggcaccc

SEQ ID NO: 1213542 - RNA, 16 nt, Human
ugccuuggggacaaga

SEQ ID NO: 1213543 - RNA, 21 nt, Human
ugccuuacccucauguucuua

SEQ ID NO: 1213544 - RNA, 20 nt, Human
ugccuuacccucauguucuu

SEQ ID NO: 1213545 - RNA, 19 nt, Human
ugccuguugggccaggagc

SEQ ID NO: 1213546 - RNA, 17 nt, Human
ugccuguugggccagga

SEQ ID NO: 1213547 - RNA, 16 nt, Human
ugccuguugggccagg

SEQ ID NO: 1213548 - RNA, 19 nt, Human
agcuguuacugucuucagu

SEQ ID NO: 1213549 - RNA, 19 nt, Human
agcugccuguucagcucca

SEQ ID NO: 1213550 - RNA, 18 nt, Human
agcugccuguucagcucc

SEQ ID NO: 1213551 - RNA, 16 nt, Human
agcugccuguucagcu

SEQ ID NO: 1213552 - RNA, 14 nt, Human
agcugccuguucag

SEQ ID NO: 1213553 - RNA, 21 nt, Human
ugccuggauggggcugcaccg

SEQ ID NO: 1213554 - RNA, 20 nt, Human
ugccuggauggggcugcacc

SEQ ID NO: 1213555 - RNA, 17 nt, Human
ugccuggauggggcugc

SEQ ID NO: 1213556 - RNA, 16 nt, Human
ugccuggauggggcug

SEQ ID NO: 1213557 - RNA, 20 nt, Human
agcugcuugggcuucauccu

SEQ ID NO: 1213558 - RNA, 16 nt, Human
agcugcuugggcuuca

SEQ ID NO: 1213559 - RNA, 20 nt, Human
ugccucugccucugacacac

SEQ ID NO: 1213560 - RNA, 18 nt, Human
ugccucugccucugacac

SEQ ID NO: 1213561 - RNA, 14 nt, Human
ugccucagccuccc

SEQ ID NO: 1213562 - RNA, 24 nt, Human
ugccugcccaggccccugccaccc

SEQ ID NO: 1213563 - RNA, 23 nt, Human
ugccugcccaggccccugccacc

SEQ ID NO: 1213564 - RNA, 22 nt, Human
ugccugcccaggccccugccac

SEQ ID NO: 1213565 - RNA, 22 nt, Human
aggauugcuacuguccuaccca

SEQ ID NO: 1213566 - RNA, 18 nt, Human
aggauugcuacuguccua

SEQ ID NO: 1213567 - RNA, 17 nt, Human
aggauugcuacuguccu

SEQ ID NO: 1213568 - RNA, 15 nt, Human
aggauugcuacuguc

SEQ ID NO: 1213569 - RNA, 17 nt, Human
aggcaaggcugucaauu

SEQ ID NO: 1213570 - RNA, 16 nt, Human
aggcaaggcugucaau

SEQ ID NO: 1213571 - RNA, 20 nt, Human
aggcaagcaccuccugccuc

SEQ ID NO: 1213572 - RNA, 19 nt, Human
aggcaagcaccuccugccu

SEQ ID NO: 1213573 - RNA, 18 nt, Human
aggcaagcaccuccugcc

SEQ ID NO: 1213574 - RNA, 18 nt, Human
aggcauugugggaagggg

SEQ ID NO: 1213575 - RNA, 22 nt, Human
aggcauaaagucagggguuccc

SEQ ID NO: 1213576 - RNA, 15 nt, Human
aggcauaaagucagg

SEQ ID NO: 1213577 - RNA, 17 nt, Human
aggcaggugggauggau

SEQ ID NO: 1213578 - RNA, 18 nt, Human
aggcagggucucacucug

SEQ ID NO: 1213579 - RNA, 12 nt, Human
aggcagggucuc

SEQ ID NO: 1213580 - RNA, 23 nt, Human
uggcacaucagcacgauuucugu

SEQ ID NO: 1213581 - RNA, 23 nt, Human
uggaugccugguggcagcugcgg

SEQ ID NO: 1213582 - RNA, 21 nt, Human
uggaugccugguggcagcugc

SEQ ID NO: 1213583 - RNA, 14 nt, Human
uggagugcagugag

SEQ ID NO: 1213584 - RNA, 20 nt, Human
aggcauuugcugaauacaga

SEQ ID NO: 1213585 - RNA, 16 nt, Human
aggcauuugcugaaua

SEQ ID NO: 1213586 - RNA, 12 nt, Human
aggccagcugcu

SEQ ID NO: 1213587 - RNA, 15 nt, Human
aggccagccuugacc

SEQ ID NO: 1213588 - RNA, 13 nt, Human
aggccagccuuga

SEQ ID NO: 1213589 - RNA, 13 nt, Human
uggcagcucagag

SEQ ID NO: 1213590 - RNA, 23 nt, Human
uggcagcucaccucucccuugga

SEQ ID NO: 1213591 - RNA, 22 nt, Human
uggcagcucaccucucccuugg

SEQ ID NO: 1213592 - RNA, 21 nt, Human
uggcagcucaccucucccuug

SEQ ID NO: 1213593 - RNA, 20 nt, Human
uggcacccggccccugcugg

SEQ ID NO: 1213594 - RNA, 19 nt, Human
uggcacccggccccugcug

SEQ ID NO: 1213595 - RNA, 18 nt, Human
uggcacccggccccugcu

SEQ ID NO: 1213596 - RNA, 15 nt, Human
aggcccagagggccu

SEQ ID NO: 1213597 - RNA, 13 nt, Human
aggcccagagggc

SEQ ID NO: 1213598 - RNA, 14 nt, Human
aggccccgcccagg

SEQ ID NO: 1213599 - RNA, 13 nt, Human
aggcccggcucca

SEQ ID NO: 1213600 - RNA, 14 nt, Human
aggcccggcuccag

SEQ ID NO: 1213601 - RNA, 16 nt, Human
uggaagacagcucuua

SEQ ID NO: 1213602 - RNA, 23 nt, Human
uggaaauuuguuauaaugaauga

SEQ ID NO: 1213603 - RNA, 21 nt, Human
uggaaauuuguuauaaugaau

SEQ ID NO: 1213604 - RNA, 23 nt, Human
ugcuuuuuaauauugauaugcuu

SEQ ID NO: 1213605 - RNA, 20 nt, Human
ugcuuuugucuaugggacuc

SEQ ID NO: 1213606 - RNA, 18 nt, Human
ugcuuuuggucuguguga

SEQ ID NO: 1213607 - RNA, 22 nt, Human
ugcuuugugauuuuuguaauuu

SEQ ID NO: 1213608 - RNA, 15 nt, Human
ugcuugagcucagga

SEQ ID NO: 1213609 - RNA, 17 nt, Human
aggagccuccugcccuu

SEQ ID NO: 1213610 - RNA, 13 nt, Human
aggaucagucuga

SEQ ID NO: 1213611 - RNA, 19 nt, Human
aggauucuuccucccuccc

SEQ ID NO: 1213612 - RNA, 17 nt, Human
aggauucuuccucccuc

SEQ ID NO: 1213613 - RNA, 22 nt, Human
aggaugcacagaguuguuacau

SEQ ID NO: 1213614 - RNA, 23 nt, Human
aggaugaucuaggaagacuuugg

SEQ ID NO: 1213615 - RNA, 22 nt, Human
aggaugaucuaggaagacuuug

SEQ ID NO: 1213616 - RNA, 16 nt, Human
aggagccuccugcccu

SEQ ID NO: 1213617 - RNA, 17 nt, Human
aggagccccgaggccuu

SEQ ID NO: 1213618 - RNA, 14 nt, Human
aggagcagccacau

SEQ ID NO: 1213619 - RNA, 13 nt, Human
aggagcagccaca

SEQ ID NO: 1213620 - RNA, 12 nt, Human
aggagcagccac

SEQ ID NO: 1213621 - RNA, 23 nt, Human
aggacuuuucuuuguggcuuccu

SEQ ID NO: 1213622 - RNA, 22 nt, Human
aggacuuuucuuuguggcuucc

SEQ ID NO: 1213623 - RNA, 19 nt, Human
aggacuuuucuuuguggcu

SEQ ID NO: 1213624 - RNA, 17 nt, Human
aggacuuuucuuugugg

SEQ ID NO: 1213625 - RNA, 22 nt, Human
ugauggggcccugccuccuuug

SEQ ID NO: 1213626 - RNA, 14 nt, Human
ugauggggcccugc

SEQ ID NO: 1213627 - RNA, 23 nt, Human
ugauguuuuccaugaguccccug

SEQ ID NO: 1213628 - RNA, 19 nt, Human
ugauguuuuccaugagucc

SEQ ID NO: 1213629 - RNA, 17 nt, Human
ugauguuuuccaugagu

SEQ ID NO: 1213630 - RNA, 21 nt, Human
ugauguuuuaaggaugcuugu

SEQ ID NO: 1213631 - RNA, 17 nt, Human
ugauuaaauucuugcaa

SEQ ID NO: 1213632 - RNA, 16 nt, Human
ugauuaaauucuugca

SEQ ID NO: 1213633 - RNA, 13 nt, Human
ugauuaaauucuu

SEQ ID NO: 1213634 - RNA, 22 nt, Human
ugaugaaaugaggucagagccu

SEQ ID NO: 1213635 - RNA, 15 nt, Human
ugaucuaggaagacu

SEQ ID NO: 1213636 - RNA, 14 nt, Human
ugaucuaggaagac

SEQ ID NO: 1213637 - RNA, 20 nt, Human
ugaugaucuuugcagacagg

SEQ ID NO: 1213638 - RNA, 19 nt, Human
ugaugaucuuugcagacag

SEQ ID NO: 1213639 - RNA, 23 nt, Human
ugaugaaaugaggucagagccug

SEQ ID NO: 1213640 - RNA, 13 nt, Human
ugauggggcccug

SEQ ID NO: 1213641 - RNA, 22 nt, Human
ugaugggcaacccccagccugc

SEQ ID NO: 1213642 - RNA, 22 nt, Human
ugaugaucuuugcagacaggca

SEQ ID NO: 1213643 - RNA, 21 nt, Human
ugaugaucuuugcagacaggc

SEQ ID NO: 1213644 - RNA, 18 nt, Human
ugauccucccaccucagc

SEQ ID NO: 1213645 - RNA, 20 nt, Human
ugauccucccaccucagccu

SEQ ID NO: 1213646 - RNA, 19 nt, Human
ugauccucccaccucagcc

SEQ ID NO: 1213647 - RNA, 13 nt, Human
ugaucuaggaaga

SEQ ID NO: 1213648 - RNA, 23 nt, Human
agcaucaggccaggcccucugcc

SEQ ID NO: 1213649 - RNA, 22 nt, Human
agcaucaggccaggcccucugc

SEQ ID NO: 1213650 - RNA, 12 nt, Human
agcaucaggcca

SEQ ID NO: 1213651 - RNA, 18 nt, Human
ugauacaaugcugugccc

SEQ ID NO: 1213652 - RNA, 21 nt, Human
agcauauucaggaagcucagg

SEQ ID NO: 1213653 - RNA, 19 nt, Human
agcauauucaggaagcuca

SEQ ID NO: 1213654 - RNA, 17 nt, Human
agcauauucaggaagcu

SEQ ID NO: 1213655 - RNA, 14 nt, Human
ugaucacggcucac

SEQ ID NO: 1213656 - RNA, 13 nt, Human
ugaucacggcuca

SEQ ID NO: 1213657 - RNA, 15 nt, Human
ugaucacggcucacu

SEQ ID NO: 1213658 - RNA, 18 nt, Human
ugaucacggcucacugca

SEQ ID NO: 1213659 - RNA, 15 nt, Human
agcauuuugcuaaau

SEQ ID NO: 1213660 - RNA, 22 nt, Human
agcauuuugcuaaaugugaaug

SEQ ID NO: 1213661 - RNA, 19 nt, Human
agcauggcugccaauggga

SEQ ID NO: 1213662 - RNA, 22 nt, Human
agcagggcucagcggggacagc

SEQ ID NO: 1213663 - RNA, 15 nt, Human
agcagggcucagcgg

SEQ ID NO: 1213664 - RNA, 14 nt, Human
agcagggcucagcg

SEQ ID NO: 1213665 - RNA, 13 nt, Human
agcagggcucagc

SEQ ID NO: 1213666 - RNA, 20 nt, Human
agcagggagggcuucugcca

SEQ ID NO: 1213667 - RNA, 19 nt, Human
agcaggcucucaggccagc

SEQ ID NO: 1213668 - RNA, 18 nt, Human
agcaggcucucaggccag

SEQ ID NO: 1213669 - RNA, 17 nt, Human
agcaggcucucaggcca

SEQ ID NO: 1213670 - RNA, 16 nt, Human
agcaggcucucaggcc

SEQ ID NO: 1213671 - RNA, 15 nt, Human
agcaggcucucaggc

SEQ ID NO: 1213672 - RNA, 14 nt, Human
agcaggcucucagg

SEQ ID NO: 1213673 - RNA, 13 nt, Human
agcaggcucucag

SEQ ID NO: 1213674 - RNA, 17 nt, Human
agcaggcucgggcuccc

SEQ ID NO: 1213675 - RNA, 23 nt, Human
agcaggcucucaggccagcugcu

SEQ ID NO: 1213676 - RNA, 22 nt, Human
agcaggcucucaggccagcugc

SEQ ID NO: 1213677 - RNA, 21 nt, Human
agcaggcucucaggccagcug

SEQ ID NO: 1213678 - RNA, 15 nt, Human
agcagggaaacagcu

SEQ ID NO: 1213679 - RNA, 14 nt, Human
agcagggaaacagc

SEQ ID NO: 1213680 - RNA, 13 nt, Human
agcagggaaacag

SEQ ID NO: 1213681 - RNA, 13 nt, Human
agcaggacaugga

SEQ ID NO: 1213682 - RNA, 15 nt, Human
agcagccacauuccu

SEQ ID NO: 1213683 - RNA, 11 nt, Human
agcagccacau

SEQ ID NO: 1213684 - RNA, 16 nt, Human
agcagcagggagggcu

SEQ ID NO: 1213685 - RNA, 20 nt, Human
ugacccaugcugcccuguga

SEQ ID NO: 1213686 - RNA, 19 nt, Human
ugacccaugcugcccugug

SEQ ID NO: 1213687 - RNA, 18 nt, Human
ugacccaugcugcccugu

SEQ ID NO: 1213688 - RNA, 23 nt, Human
ugagugggggaucacagccucug

SEQ ID NO: 1213689 - RNA, 21 nt, Human
ugagugggggaucacagccuc

SEQ ID NO: 1213690 - RNA, 15 nt, Human
ugauacaaugcugug

SEQ ID NO: 1213691 - RNA, 14 nt, Human
ugauacaaugcugu

SEQ ID NO: 1213692 - RNA, 16 nt, Human
ugagugccuuacacaa

SEQ ID NO: 1213693 - RNA, 14 nt, Human
ugagugccuuacac

SEQ ID NO: 1213694 - RNA, 13 nt, Human
ugagugccuuaca

SEQ ID NO: 1213695 - RNA, 17 nt, Human
ugagugcagcucuggag

SEQ ID NO: 1213696 - RNA, 13 nt, Human
ugaguccagaagu

SEQ ID NO: 1213697 - RNA, 14 nt, Human
ugaguacuacaguc

SEQ ID NO: 1213698 - RNA, 20 nt, Human
ugaguacguugugcauuugg

SEQ ID NO: 1213699 - RNA, 18 nt, Human
ugagucaccaagcccagu

SEQ ID NO: 1213700 - RNA, 19 nt, Human
ugaguacguugugcauuug

SEQ ID NO: 1213701 - RNA, 18 nt, Human
ugaguacguugugcauuu

SEQ ID NO: 1213702 - RNA, 17 nt, Human
ugaguacguugugcauu

SEQ ID NO: 1213703 - RNA, 16 nt, Human
ugaguacguugugcau

SEQ ID NO: 1213704 - RNA, 23 nt, Human
agcauaaaaauuagccaagugug

SEQ ID NO: 1213705 - RNA, 19 nt, Human
agcauaaaaauuagccaag

SEQ ID NO: 1213706 - RNA, 18 nt, Human
agccuccugcccuuaccu

SEQ ID NO: 1213707 - RNA, 14 nt, Human
agccuccugcccuu

SEQ ID NO: 1213708 - RNA, 13 nt, Human
agccuccugcccu

SEQ ID NO: 1213709 - RNA, 21 nt, Human
ugcagacaggcaagcaccucc

SEQ ID NO: 1213710 - RNA, 13 nt, Human
ugcagacaggcaa

SEQ ID NO: 1213711 - RNA, 12 nt, Human
ugcagacaggca

SEQ ID NO: 1213712 - RNA, 21 nt, Human
ugcagccucacaguccuuacc

SEQ ID NO: 1213713 - RNA, 18 nt, Human
ugcagccucacaguccuu

SEQ ID NO: 1213714 - RNA, 21 nt, Human
ugcauaccacuuuuguucuug

SEQ ID NO: 1213715 - RNA, 20 nt, Human
ugcauaccacuuuuguucuu

SEQ ID NO: 1213716 - RNA, 18 nt, Human
ugcauaccacuuuuguuc

SEQ ID NO: 1213717 - RNA, 16 nt, Human
ugcauaccacuuuugu

SEQ ID NO: 1213718 - RNA, 21 nt, Human
ugcaugcugucccuuacguga

SEQ ID NO: 1213719 - RNA, 19 nt, Human
ugcaugcugucccuuacgu

SEQ ID NO: 1213720 - RNA, 18 nt, Human
ugcaugcugucccuuacg

SEQ ID NO: 1213721 - RNA, 20 nt, Human
ugcaugaaguaauaugcaca

SEQ ID NO: 1213722 - RNA, 22 nt, Human
ugccagccgagauagccaaggc

SEQ ID NO: 1213723 - RNA, 17 nt, Human
ugccagccgagauagcc

SEQ ID NO: 1213724 - RNA, 18 nt, Human
ugccaaugggagcucaug

SEQ ID NO: 1213725 - RNA, 14 nt, Human
ugccaaugggagcu

SEQ ID NO: 1213726 - RNA, 13 nt, Human
ugccaauggacua

SEQ ID NO: 1213727 - RNA, 16 nt, Human
ugcauuuaaaagauac

SEQ ID NO: 1213728 - RNA, 19 nt, Human
agccugugccucugggacu

SEQ ID NO: 1213729 - RNA, 18 nt, Human
agccugugccucugggac

SEQ ID NO: 1213730 - RNA, 17 nt, Human
agccugugccucuggga

SEQ ID NO: 1213731 - RNA, 13 nt, Human
agccuugaacuuu

SEQ ID NO: 1213732 - RNA, 22 nt, Human
agccuuagaagucacacaguau

SEQ ID NO: 1213733 - RNA, 20 nt, Human
agccuuagaagucacacagu

SEQ ID NO: 1213734 - RNA, 19 nt, Human
agccuugcggaagguucua

SEQ ID NO: 1213735 - RNA, 21 nt, Human
agccuugaccauucuccaccu

SEQ ID NO: 1213736 - RNA, 19 nt, Human
agccuugaccauucuccac

SEQ ID NO: 1213737 - RNA, 18 nt, Human
agccuugaccauucucca

SEQ ID NO: 1213738 - RNA, 22 nt, Human
agccuugaccauucuccaccug

SEQ ID NO: 1213739 - RNA, 16 nt, Human
agccccgaggccuucu

SEQ ID NO: 1213740 - RNA, 14 nt, Human
agccccgaggccuu

SEQ ID NO: 1213741 - RNA, 21 nt, Human
agcccaggccuccuacagcuu

SEQ ID NO: 1213742 - RNA, 19 nt, Human
agcccaggccuccuacagc

SEQ ID NO: 1213743 - RNA, 14 nt, Human
agcccaggccuccu

SEQ ID NO: 1213744 - RNA, 16 nt, Human
agcccgggcucugccu

SEQ ID NO: 1213745 - RNA, 19 nt, Human
agcccugcagagggcacag

SEQ ID NO: 1213746 - RNA, 16 nt, Human
agcccugcagagggca

SEQ ID NO: 1213747 - RNA, 15 nt, Human
agcccugcagagggc

SEQ ID NO: 1213748 - RNA, 14 nt, Human
agcccugcagaggg

SEQ ID NO: 1213749 - RNA, 15 nt, Human
agcccgggcucugcc

SEQ ID NO: 1213750 - RNA, 14 nt, Human
agcccgggcucugc

SEQ ID NO: 1213751 - RNA, 19 nt, Human
agccccuucugacccaugc

SEQ ID NO: 1213752 - RNA, 16 nt, Human
agccccuucugaccca

SEQ ID NO: 1213753 - RNA, 15 nt, Human
agccccuucugaccc

SEQ ID NO: 1213754 - RNA, 14 nt, Human
agccccuucugacc

SEQ ID NO: 1213755 - RNA, 16 nt, Human
ugcacuccagccuggg

SEQ ID NO: 1213756 - RNA, 15 nt, Human
ugcacuccagccugg

SEQ ID NO: 1213757 - RNA, 14 nt, Human
ugcacuccagccug

SEQ ID NO: 1213758 - RNA, 18 nt, Human
ugcaccggcuggccuggc

SEQ ID NO: 1213759 - RNA, 16 nt, Human
ugcaccggcuggccug

SEQ ID NO: 1213760 - RNA, 15 nt, Human
ugcaccggcuggccu

SEQ ID NO: 1213761 - RNA, 14 nt, Human
ugcaccggcuggcc

SEQ ID NO: 1213762 - RNA, 13 nt, Human
ugcaccagcccuu

SEQ ID NO: 1213763 - RNA, 21 nt, Human
ugcaccacugcacuccagccu

SEQ ID NO: 1213764 - RNA, 12 nt, Human
agcccaggccuc

SEQ ID NO: 1213765 - RNA, 15 nt, Human
ugcaaggucauuuuu

SEQ ID NO: 1213766 - RNA, 13 nt, Human
ugcaacaggcugg

SEQ ID NO: 1213767 - RNA, 20 nt, Human
ugcaaaccaucauugaaauc

SEQ ID NO: 1213768 - RNA, 18 nt, Human
ugcaaaccaucauugaaa

SEQ ID NO: 1213769 - RNA, 20 nt, Human
ugcaaaguaucccuacugua

SEQ ID NO: 1213770 - RNA, 21 nt, Human
ugcaaaggguaucaggugcug

SEQ ID NO: 1213771 - RNA, 18 nt, Human
agccacggccaggccaga

SEQ ID NO: 1213772 - RNA, 17 nt, Human
agccacggccaggccag

SEQ ID NO: 1213773 - RNA, 18 nt, Human
ugauuuccguuaaaauac

SEQ ID NO: 1213774 - RNA, 13 nt, Human
ugcaaaccaucau

SEQ ID NO: 1213775 - RNA, 12 nt, Human
ugcaaaccauca

SEQ ID NO: 1213776 - RNA, 15 nt, Human
agaugcaccagcccu

SEQ ID NO: 1213777 - RNA, 14 nt, Human
agaugcaccagccc

SEQ ID NO: 1213778 - RNA, 16 nt, Human
agaugcuucucacugc

SEQ ID NO: 1213779 - RNA, 15 nt, Human
agaugcuucucacug

SEQ ID NO: 1213780 - RNA, 13 nt, Human
ugacccacugcuu

SEQ ID NO: 1213781 - RNA, 12 nt, Human
ugacccacugcu

SEQ ID NO: 1213782 - RNA, 15 nt, Human
agaucagccugggca

SEQ ID NO: 1213783 - RNA, 13 nt, Human
agaucagccuggg

SEQ ID NO: 1213784 - RNA, 18 nt, Human
ugaccaaugauggucacc

SEQ ID NO: 1213785 - RNA, 21 nt, Human
ugacauuguuggccaaagcca

SEQ ID NO: 1213786 - RNA, 20 nt, Human
ugacauuguuggccaaagcc

SEQ ID NO: 1213787 - RNA, 21 nt, Human
ugacagggcacaccgggcacu

SEQ ID NO: 1213788 - RNA, 20 nt, Human
ugacagggcacaccgggcac

SEQ ID NO: 1213789 - RNA, 16 nt, Human
ugacagggcacaccgg

SEQ ID NO: 1213790 - RNA, 11 nt, Human
ugacagggcac

SEQ ID NO: 1213791 - RNA, 20 nt, Human
ugacaggcaaugcuggcugu

SEQ ID NO: 1213792 - RNA, 21 nt, Human
ugacacacagcucuguccugg

SEQ ID NO: 1213793 - RNA, 19 nt, Human
ugaaugucagugugacuga

SEQ ID NO: 1213794 - RNA, 20 nt, Human
ugaaugguuuucaaaauaaa

SEQ ID NO: 1213795 - RNA, 16 nt, Human
agaguuguuacauuuu

SEQ ID NO: 1213796 - RNA, 12 nt, Human
agaguuguuaca

SEQ ID NO: 1213797 - RNA, 22 nt, Human
agaguugauacuacaguuuguu

SEQ ID NO: 1213798 - RNA, 20 nt, Human
agaguugauacuacaguuug

SEQ ID NO: 1213799 - RNA, 17 nt, Human
agaguugauacuacagu

SEQ ID NO: 1213800 - RNA, 12 nt, Human
agauaaaugugc

SEQ ID NO: 1213801 - RNA, 16 nt, Human
agaucacgccacugca

SEQ ID NO: 1213802 - RNA, 15 nt, Human
agaucacgccacugc

SEQ ID NO: 1213803 - RNA, 14 nt, Human
agaucacgccacug

SEQ ID NO: 1213804 - RNA, 15 nt, Human
ugaauuucuuuugcc

SEQ ID NO: 1213805 - RNA, 18 nt, Human
agaucacgccacugcacu

SEQ ID NO: 1213806 - RNA, 17 nt, Human
agaucacgccacugcac

SEQ ID NO: 1213807 - RNA, 19 nt, Human
agaggccaugggccuccug

SEQ ID NO: 1213808 - RNA, 21 nt, Human
agaggcagggucucacucugu

SEQ ID NO: 1213809 - RNA, 13 nt, Human
agaggcagggucu

SEQ ID NO: 1213810 - RNA, 10 nt, Human
agaggcaggg

SEQ ID NO: 1213811 - RNA, 21 nt, Human
agaggcagccccauucugccu

SEQ ID NO: 1213812 - RNA, 19 nt, Human
agaggcagccccauucugc

SEQ ID NO: 1213813 - RNA, 13 nt, Human
agaggcagcccca

SEQ ID NO: 1213814 - RNA, 16 nt, Human
ugaacuccuggccuca

SEQ ID NO: 1213815 - RNA, 22 nt, Human
ugaacuuugaccucugcagcaa

SEQ ID NO: 1213816 - RNA, 20 nt, Human
ugaacuuugaccucugcagc

SEQ ID NO: 1213817 - RNA, 19 nt, Human
ugaacuuugaccucugcag

SEQ ID NO: 1213818 - RNA, 15 nt, Human
ugaacuccuggccuc

SEQ ID NO: 1213819 - RNA, 14 nt, Human
ugaacuccuggccu

SEQ ID NO: 1213820 - RNA, 12 nt, Human
ugaacuccuggc

SEQ ID NO: 1213821 - RNA, 15 nt, Human
ugaaauuuuuauuaa

SEQ ID NO: 1213822 - RNA, 21 nt, Human
agagccuugcggaagguucua

SEQ ID NO: 1213823 - RNA, 11 nt, Human
agagccuugcg

SEQ ID NO: 1213824 - RNA, 20 nt, Human
agagcagagaccaucccuga

SEQ ID NO: 1213825 - RNA, 18 nt, Human
agagcagagaccaucccu

SEQ ID NO: 1213826 - RNA, 17 nt, Human
agagcagagaccauccc

SEQ ID NO: 1213827 - RNA, 12 nt, Human
agagcagagacc

SEQ ID NO: 1213828 - RNA, 21 nt, Human
agagcaccuuagacagucccu

SEQ ID NO: 1213829 - RNA, 21 nt, Human
ucuuuggacccugaggcccag

SEQ ID NO: 1213830 - RNA, 17 nt, Human
ucuuuggacccugaggc

SEQ ID NO: 1213831 - RNA, 18 nt, Human
agagcugccaccugccug

SEQ ID NO: 1213832 - RNA, 23 nt, Human
agaaccccaggguccuguagccc

SEQ ID NO: 1213833 - RNA, 21 nt, Human
agaauguguuuaaacuugguu

SEQ ID NO: 1213834 - RNA, 19 nt, Human
agaauuaguggcacuugcu

SEQ ID NO: 1213835 - RNA, 18 nt, Human
agaauucucuaguuugau

SEQ ID NO: 1213836 - RNA, 14 nt, Human
agaauucucuaguu

SEQ ID NO: 1213837 - RNA, 20 nt, Human
agaauucucagaaucucaaa

SEQ ID NO: 1213838 - RNA, 20 nt, Human
agaauuauaauuaguuccuc

SEQ ID NO: 1213839 - RNA, 23 nt, Human
ucuguuuagauaauacaccacua

SEQ ID NO: 1213840 - RNA, 19 nt, Human
ucuguuuagauaauacacc

SEQ ID NO: 1213841 - RNA, 16 nt, Human
ucuguuuagauaauac

SEQ ID NO: 1213842 - RNA, 14 nt, Human
agacagcugccugg

SEQ ID NO: 1213843 - RNA, 13 nt, Human
agacagcugccug

SEQ ID NO: 1213844 - RNA, 22 nt, Human
agacaccuugacagggcacacc

SEQ ID NO: 1213845 - RNA, 24 nt, Human
agacacauguccaagaagcccagg

SEQ ID NO: 1213846 - RNA, 22 nt, Human
agacacauguccaagaagccca

SEQ ID NO: 1213847 - RNA, 21 nt, Human
agacacauguccaagaagccc

SEQ ID NO: 1213848 - RNA, 23 nt, Human
agacacaggcccggcuccaggcu

SEQ ID NO: 1213849 - RNA, 22 nt, Human
agacacaggcccggcuccaggc

SEQ ID NO: 1213850 - RNA, 21 nt, Human
agacacaggcccggcuccagg

SEQ ID NO: 1213851 - RNA, 20 nt, Human
agacacaggcccggcuccag

SEQ ID NO: 1213852 - RNA, 19 nt, Human
agacacaggcccggcucca

SEQ ID NO: 1213853 - RNA, 17 nt, Human
agacacaggcccggcuc

SEQ ID NO: 1213854 - RNA, 14 nt, Human
agacacaagccuuc

SEQ ID NO: 1213855 - RNA, 13 nt, Human
agacacaagccuu

SEQ ID NO: 1213856 - RNA, 17 nt, Human
agaauucucuuauccaa

SEQ ID NO: 1213857 - RNA, 19 nt, Human
agaauucucuaguuugauu

SEQ ID NO: 1213858 - RNA, 14 nt, Human
ucuuagauguauau

SEQ ID NO: 1213859 - RNA, 12 nt, Human
ucuuagauguau

SEQ ID NO: 1213860 - RNA, 14 nt, Human
agacagucccugcc

SEQ ID NO: 1213861 - RNA, 13 nt, Human
agacagucccugc

SEQ ID NO: 1213862 - RNA, 12 nt, Human
agacagucccug

SEQ ID NO: 1213863 - RNA, 16 nt, Human
agacagcugccuggga

SEQ ID NO: 1213864 - RNA, 15 nt, Human
agacagcugccuggg

SEQ ID NO: 1213865 - RNA, 23 nt, Human
ucuucuguacgucugacaggcaa

SEQ ID NO: 1213866 - RNA, 22 nt, Human
ucuucuguacgucugacaggca

SEQ ID NO: 1213867 - RNA, 21 nt, Human
ucuucuguacgucugacaggc

SEQ ID NO: 1213868 - RNA, 22 nt, Human
ucuucugcuucagccucccgag

SEQ ID NO: 1213869 - RNA, 19 nt, Human
ucuugagccuugaacuuug

SEQ ID NO: 1213870 - RNA, 18 nt, Human
ucuugagccuugaacuuu

SEQ ID NO: 1213871 - RNA, 20 nt, Human
ucuugagccuugaacuuuga

SEQ ID NO: 1213872 - RNA, 17 nt, Human
ucuugagccuugaacuu

SEQ ID NO: 1213873 - RNA, 15 nt, Human
agacucauucuucug

SEQ ID NO: 1213874 - RNA, 14 nt, Human
agacccggcugcgu

SEQ ID NO: 1213875 - RNA, 16 nt, Human
agacuguacaaaguag

SEQ ID NO: 1213876 - RNA, 15 nt, Human
agacuguacaaagua

SEQ ID NO: 1213877 - RNA, 21 nt, Human
agacucgcgacaaugcaaacc

SEQ ID NO: 1213878 - RNA, 20 nt, Human
agacucgcgacaaugcaaac

SEQ ID NO: 1213879 - RNA, 15 nt, Human
agagacacaagccuu

SEQ ID NO: 1213880 - RNA, 22 nt, Human
agagaaaaaauauuuuccugcc

SEQ ID NO: 1213881 - RNA, 19 nt, Human
ucuuucuggcuaugcauuu

SEQ ID NO: 1213882 - RNA, 18 nt, Human
ucuuucuggcuaugcauu

SEQ ID NO: 1213883 - RNA, 13 nt, Human
ucuuucugcuuug

SEQ ID NO: 1213884 - RNA, 20 nt, Human
ucuuuauaauucuacuuuga

SEQ ID NO: 1213885 - RNA, 19 nt, Human
agacucgcgacaaugcaaa

SEQ ID NO: 1213886 - RNA, 18 nt, Human
agacucgcgacaaugcaa

SEQ ID NO: 1213887 - RNA, 17 nt, Human
agacucgcgacaaugca

SEQ ID NO: 1213888 - RNA, 15 nt, Human
agacucgcgacaaug

SEQ ID NO: 1213889 - RNA, 14 nt, Human
ucuugguuuguaaa

SEQ ID NO: 1213890 - RNA, 22 nt, Human
ucuuuaaugucacaggcagguc

SEQ ID NO: 1213891 - RNA, 20 nt, Human
ucuuuaaugucacaggcagg

SEQ ID NO: 1213892 - RNA, 16 nt, Human
ucuugguuuguaaauu

SEQ ID NO: 1213893 - RNA, 23 nt, Human
ucugagacucgcgacaaugcaaa

SEQ ID NO: 1213894 - RNA, 19 nt, Human
ucugcacuccccugcuggg

SEQ ID NO: 1213895 - RNA, 18 nt, Human
ucugcacuccccugcugg

SEQ ID NO: 1213896 - RNA, 18 nt, Human
ucugauucccaagcucug

SEQ ID NO: 1213897 - RNA, 22 nt, Human
ucugcacuccccugcugggugu

SEQ ID NO: 1213898 - RNA, 20 nt, Human
ucugcacuccccugcugggu

SEQ ID NO: 1213899 - RNA, 20 nt, Human
agaaauaucugaaaauguau

SEQ ID NO: 1213900 - RNA, 19 nt, Human
agaaauaucugaaaaugua

SEQ ID NO: 1213901 - RNA, 14 nt, Human
agaaauauaauuga

SEQ ID NO: 1213902 - RNA, 12 nt, Human
ucugacacacag

SEQ ID NO: 1213903 - RNA, 15 nt, Human
ucucucacuccuuga

SEQ ID NO: 1213904 - RNA, 13 nt, Human
ucucucacuccuu

SEQ ID NO: 1213905 - RNA, 18 nt, Human
acuuugaccucugcagca

SEQ ID NO: 1213906 - RNA, 14 nt, Human
acuuucugaaauaa

SEQ ID NO: 1213907 - RNA, 16 nt, Human
acuuugaccucugcag

SEQ ID NO: 1213908 - RNA, 15 nt, Human
acuuugaccucugca

SEQ ID NO: 1213909 - RNA, 19 nt, Human
ucucuccagccccuggaug

SEQ ID NO: 1213910 - RNA, 18 nt, Human
ucucuccagccccuggau

SEQ ID NO: 1213911 - RNA, 17 nt, Human
ucucuccagccccugga

SEQ ID NO: 1213912 - RNA, 17 nt, Human
ucucugcccuccaagac

SEQ ID NO: 1213913 - RNA, 16 nt, Human
ucucugcccuccaaga

SEQ ID NO: 1213914 - RNA, 15 nt, Human
ucucugcccuccaag

SEQ ID NO: 1213915 - RNA, 17 nt, Human
ucucuccuguaccucuu

SEQ ID NO: 1213916 - RNA, 16 nt, Human
ucucuccuguaccucu

SEQ ID NO: 1213917 - RNA, 14 nt, Human
ucucuccuguaccu

SEQ ID NO: 1213918 - RNA, 18 nt, Human
agaaaaaggaugcacaga

SEQ ID NO: 1213919 - RNA, 17 nt, Human
agaaaaaggaugcacag

SEQ ID NO: 1213920 - RNA, 13 nt, Human
agaaaaagaaaaa

SEQ ID NO: 1213921 - RNA, 21 nt, Human
ucucuuuaaugucacaggcag

SEQ ID NO: 1213922 - RNA, 20 nt, Human
ucucuuuaaugucacaggca

SEQ ID NO: 1213923 - RNA, 16 nt, Human
ucucuugguccugcug

SEQ ID NO: 1213924 - RNA, 16 nt, Human
ucucuugauucauaau

SEQ ID NO: 1213925 - RNA, 14 nt, Human
ucucuugauucaua

SEQ ID NO: 1213926 - RNA, 18 nt, Human
ucucuugagccugggagg

SEQ ID NO: 1213927 - RNA, 19 nt, Human
ucucagggccuggucguuu

SEQ ID NO: 1213928 - RNA, 15 nt, Human
ucucagggccugguc

SEQ ID NO: 1213929 - RNA, 14 nt, Human
ucucagggccuggu

SEQ ID NO: 1213930 - RNA, 13 nt, Human
ucucagggccugg

SEQ ID NO: 1213931 - RNA, 12 nt, Human
ucucagggccug

SEQ ID NO: 1213932 - RNA, 16 nt, Human
ucuccaggcuguaucc

SEQ ID NO: 1213933 - RNA, 15 nt, Human
ucuccaagcaggaca

SEQ ID NO: 1213934 - RNA, 22 nt, Human
ucuccaaaauaaaacuuuuuaa

SEQ ID NO: 1213935 - RNA, 19 nt, Human
ucuccaaaauaaaacuuuu

SEQ ID NO: 1213936 - RNA, 17 nt, Human
ucuccaaaauaaaacuu

SEQ ID NO: 1213937 - RNA, 17 nt, Human
acuuucuagccagagga

SEQ ID NO: 1213938 - RNA, 21 nt, Human
ucuccuccuuuucacaguucu

SEQ ID NO: 1213939 - RNA, 16 nt, Human
ucuccauguuugaugu

SEQ ID NO: 1213940 - RNA, 16 nt, Human
acuuguggacacagcu

SEQ ID NO: 1213941 - RNA, 18 nt, Human
acuuguggacacagcucu

SEQ ID NO: 1213942 - RNA, 17 nt, Human
acuuguggacacagcuc

SEQ ID NO: 1213943 - RNA, 19 nt, Human
acuugagcccagagugaac

SEQ ID NO: 1213944 - RNA, 18 nt, Human
acuucuccacccugcucu

SEQ ID NO: 1213945 - RNA, 16 nt, Human
acuucuccacccugcu

SEQ ID NO: 1213946 - RNA, 15 nt, Human
acuucuccacccugc

SEQ ID NO: 1213947 - RNA, 11 nt, Human
ucucacuccuu

SEQ ID NO: 1213948 - RNA, 16 nt, Human
acuucagcugacuuuu

SEQ ID NO: 1213949 - RNA, 11 nt, Human
acuucagcuga

SEQ ID NO: 1213950 - RNA, 14 nt, Human
acuucuccacccug

SEQ ID NO: 1213951 - RNA, 16 nt, Human
ucucacucugucgccc

SEQ ID NO: 1213952 - RNA, 12 nt, Human
ucucacucuguc

SEQ ID NO: 1213953 - RNA, 16 nt, Human
ucucacuauguugccc

SEQ ID NO: 1213954 - RNA, 13 nt, Human
ucucacuccuuga

SEQ ID NO: 1213955 - RNA, 15 nt, Human
uccuucagugccuua

SEQ ID NO: 1213956 - RNA, 20 nt, Human
uccuucagugccuuauggaa

SEQ ID NO: 1213957 - RNA, 17 nt, Human
uccuucagugccuuaug

SEQ ID NO: 1213958 - RNA, 16 nt, Human
uccuucagugccuuau

SEQ ID NO: 1213959 - RNA, 19 nt, Human
uccuuuagcgcccaguugg

SEQ ID NO: 1213960 - RNA, 15 nt, Human
uccuuuagcgcccag

SEQ ID NO: 1213961 - RNA, 23 nt, Human
uccuuguguuacuaaguuuuuau

SEQ ID NO: 1213962 - RNA, 14 nt, Human
uccuuguguuacua

SEQ ID NO: 1213963 - RNA, 23 nt, Human
uccuuuagcgcccaguugggugg

SEQ ID NO: 1213964 - RNA, 22 nt, Human
uccuuuagcgcccaguugggug

SEQ ID NO: 1213965 - RNA, 16 nt, Human
ucgagcaugccuggau

SEQ ID NO: 1213966 - RNA, 18 nt, Human
ucgagcaugccuggaugg

SEQ ID NO: 1213967 - RNA, 19 nt, Human
ucgcgacaaugcaaaccau

SEQ ID NO: 1213968 - RNA, 16 nt, Human
ucgcgacaaugcaaac

SEQ ID NO: 1213969 - RNA, 13 nt, Human
ucgaggacaggga

SEQ ID NO: 1213970 - RNA, 18 nt, Human
acugcuuaacuucacaua

SEQ ID NO: 1213971 - RNA, 22 nt, Human
acuggauuaaacuuaaucuaaa

SEQ ID NO: 1213972 - RNA, 15 nt, Human
acuggauuaaacuua

SEQ ID NO: 1213973 - RNA, 14 nt, Human
acugcuuuuggucu

SEQ ID NO: 1213974 - RNA, 17 nt, Human
acugcuuccagugaggc

SEQ ID NO: 1213975 - RNA, 20 nt, Human
acugcuuaacuucacauauu

SEQ ID NO: 1213976 - RNA, 16 nt, Human
acugcauaugaaagga

SEQ ID NO: 1213977 - RNA, 22 nt, Human
uccuagaaauuccccacccuga

SEQ ID NO: 1213978 - RNA, 21 nt, Human
uccuagaaauuccccacccug

SEQ ID NO: 1213979 - RNA, 16 nt, Human
acugcauguuugugau

SEQ ID NO: 1213980 - RNA, 15 nt, Human
acugcauguuuguga

SEQ ID NO: 1213981 - RNA, 22 nt, Human
acugcaucaagaugugacaugu

SEQ ID NO: 1213982 - RNA, 20 nt, Human
acugcaucaagaugugacau

SEQ ID NO: 1213983 - RNA, 14 nt, Human
acuguucucugccc

SEQ ID NO: 1213984 - RNA, 21 nt, Human
acuguucucugcccuccaaga

SEQ ID NO: 1213985 - RNA, 20 nt, Human
acuguucucugcccuccaag

SEQ ID NO: 1213986 - RNA, 15 nt, Human
acuguucucugcccu

SEQ ID NO: 1213987 - RNA, 16 nt, Human
ucuaaagcugccagcc

SEQ ID NO: 1213988 - RNA, 15 nt, Human
ucuaaagcugccagc

SEQ ID NO: 1213989 - RNA, 14 nt, Human
ucuaaagcugccag

SEQ ID NO: 1213990 - RNA, 13 nt, Human
ucuaaagcugcca

SEQ ID NO: 1213991 - RNA, 20 nt, Human
acuuaaauaaugugaaacug

SEQ ID NO: 1213992 - RNA, 18 nt, Human
acuuaaauaaugugaaac

SEQ ID NO: 1213993 - RNA, 17 nt, Human
acuuaaauaaugugaaa

SEQ ID NO: 1213994 - RNA, 16 nt, Human
acuuaaauaaugugaa

SEQ ID NO: 1213995 - RNA, 18 nt, Human
acuguugcccaggcuggc

SEQ ID NO: 1213996 - RNA, 17 nt, Human
acuguugcccaggcugg

SEQ ID NO: 1213997 - RNA, 14 nt, Human
acuguugcccaggc

SEQ ID NO: 1213998 - RNA, 13 nt, Human
acuguugcccagg

SEQ ID NO: 1213999 - RNA, 16 nt, Human
acuuaaucuaaaugga

SEQ ID NO: 1214000 - RNA, 15 nt, Human
acuuaaucuaaaugg

SEQ ID NO: 1214001 - RNA, 13 nt, Human
acuuaaucuaaau

SEQ ID NO: 1214002 - RNA, 23 nt, Human
acuguccuacccacccuccuuuc

SEQ ID NO: 1214003 - RNA, 18 nt, Human
acuguccuacccacccuc

SEQ ID NO: 1214004 - RNA, 17 nt, Human
acuguccuacccacccu

SEQ ID NO: 1214005 - RNA, 12 nt, Human
ucgggcaugaca

SEQ ID NO: 1214006 - RNA, 11 nt, Human
ucgggcaugac

SEQ ID NO: 1214007 - RNA, 21 nt, Human
ucgggaggucgaggcaggagg

SEQ ID NO: 1214008 - RNA, 19 nt, Human
ucgggaggucgaggcagga

SEQ ID NO: 1214009 - RNA, 14 nt, Human
acucauugaccuga

SEQ ID NO: 1214010 - RNA, 15 nt, Human
acucauucuucugua

SEQ ID NO: 1214011 - RNA, 17 nt, Human
acuccagaauuucccaa

SEQ ID NO: 1214012 - RNA, 15 nt, Human
acuccagaauuuccc

SEQ ID NO: 1214013 - RNA, 15 nt, Human
acucauugaccugag

SEQ ID NO: 1214014 - RNA, 13 nt, Human
acuccagccuggg

SEQ ID NO: 1214015 - RNA, 12 nt, Human
acuccagccugg

SEQ ID NO: 1214016 - RNA, 23 nt, Human
acuccagaauuucccaaagcagu

SEQ ID NO: 1214017 - RNA, 19 nt, Human
acuccugcaggcagccagg

SEQ ID NO: 1214018 - RNA, 18 nt, Human
acuccugcaggcagccag

SEQ ID NO: 1214019 - RNA, 17 nt, Human
ucccuuacgugaguccu

SEQ ID NO: 1214020 - RNA, 12 nt, Human
ucccugucccag

SEQ ID NO: 1214021 - RNA, 15 nt, Human
ucccugguggcagcu

SEQ ID NO: 1214022 - RNA, 21 nt, Human
acuccugcaggcagccaggcc

SEQ ID NO: 1214023 - RNA, 12 nt, Human
ucccuuuuccuu

SEQ ID NO: 1214024 - RNA, 17 nt, Human
uccggucccugucccag

SEQ ID NO: 1214025 - RNA, 16 nt, Human
uccuagaaauucccca

SEQ ID NO: 1214026 - RNA, 21 nt, Human
ucccucuuucccucccuuccu

SEQ ID NO: 1214027 - RNA, 15 nt, Human
ucccugaaggccccg

SEQ ID NO: 1214028 - RNA, 11 nt, Human
ucccugaaggc

SEQ ID NO: 1214029 - RNA, 20 nt, Human
ucccucuuucccucccuucc

SEQ ID NO: 1214030 - RNA, 18 nt, Human
ucccucuuucccucccuu

SEQ ID NO: 1214031 - RNA, 17 nt, Human
ucccugaaggccccgcc

SEQ ID NO: 1214032 - RNA, 16 nt, Human
ucccugaaggccccgc

SEQ ID NO: 1214033 - RNA, 17 nt, Human
acuacucccccaggugg

SEQ ID NO: 1214034 - RNA, 12 nt, Human
acucaccccagc

SEQ ID NO: 1214035 - RNA, 15 nt, Human
ucccgaguagcuggg

SEQ ID NO: 1214036 - RNA, 20 nt, Human
ucccgaauagcugggacuac

SEQ ID NO: 1214037 - RNA, 17 nt, Human
ucccgaguagcugggac

SEQ ID NO: 1214038 - RNA, 16 nt, Human
ucccgaguagcuggga

SEQ ID NO: 1214039 - RNA, 18 nt, Human
ucccgaguagcugggacu

SEQ ID NO: 1214040 - RNA, 20 nt, Human
ucccgaguagcugggacuac

SEQ ID NO: 1214041 - RNA, 17 nt, Human
acgguuuuacugcagcu

SEQ ID NO: 1214042 - RNA, 15 nt, Human
acgguuuuacugcag

SEQ ID NO: 1214043 - RNA, 20 nt, Human
ucccaccccacacacgccag

SEQ ID NO: 1214044 - RNA, 15 nt, Human
ucccaccccacacac

SEQ ID NO: 1214045 - RNA, 16 nt, Human
ucccacaaaggagagc

SEQ ID NO: 1214046 - RNA, 20 nt, Human
acgggaggguaaggcugugg

SEQ ID NO: 1214047 - RNA, 14 nt, Human
ucccaaagugcugg

SEQ ID NO: 1214048 - RNA, 13 nt, Human
ucccaaagugcug

SEQ ID NO: 1214049 - RNA, 21 nt, Human
ucccaaagcagugcaugcugu

SEQ ID NO: 1214050 - RNA, 18 nt, Human
ucccaaagcagugcaugc

SEQ ID NO: 1214051 - RNA, 17 nt, Human
ucccaaagcagugcaug

SEQ ID NO: 1214052 - RNA, 16 nt, Human
ucccaaagcagugcau

SEQ ID NO: 1214053 - RNA, 18 nt, Human
ucccaaacccuucagugc

SEQ ID NO: 1214054 - RNA, 23 nt, Human
acgccagauucuuuccugaggcu

SEQ ID NO: 1214055 - RNA, 22 nt, Human
acgccagauucuuuccugaggc

SEQ ID NO: 1214056 - RNA, 17 nt, Human
ucccagcugugcucugg

SEQ ID NO: 1214057 - RNA, 12 nt, Human
ucccagccccaa

SEQ ID NO: 1214058 - RNA, 15 nt, Human
acuacauucuguuaa

SEQ ID NO: 1214059 - RNA, 14 nt, Human
acuacauucuguua

SEQ ID NO: 1214060 - RNA, 13 nt, Human
acuacauucuguu

SEQ ID NO: 1214061 - RNA, 12 nt, Human
acuacauucugu

SEQ ID NO: 1214062 - RNA, 15 nt, Human
acuacaguuuguuag

SEQ ID NO: 1214063 - RNA, 14 nt, Human
acuacaguuuguua

SEQ ID NO: 1214064 - RNA, 13 nt, Human
acuacaguuuguu

SEQ ID NO: 1214065 - RNA, 23 nt, Human
acuacaggugugagucaccaagc

SEQ ID NO: 1214066 - RNA, 15 nt, Human
acuacaggcacccac

SEQ ID NO: 1214067 - RNA, 11 nt, Human
acuacaggcac

SEQ ID NO: 1214068 - RNA, 12 nt, Human
acuaaccacgcu

SEQ ID NO: 1214069 - RNA, 15 nt, Human
ucccaucacccgcua

SEQ ID NO: 1214070 - RNA, 22 nt, Human
ucccauaugccugggcagaagg

SEQ ID NO: 1214071 - RNA, 20 nt, Human
ucccagcugugcucuggaca

SEQ ID NO: 1214072 - RNA, 21 nt, Human
uccccaccgcagacaggacca

SEQ ID NO: 1214073 - RNA, 18 nt, Human
uccccaccgcagacagga

SEQ ID NO: 1214074 - RNA, 17 nt, Human
uccccaccgcagacagg

SEQ ID NO: 1214075 - RNA, 12 nt, Human
uccccacccuga

SEQ ID NO: 1214076 - RNA, 22 nt, Human
uccccaccgcagacaggaccag

SEQ ID NO: 1214077 - RNA, 20 nt, Human
accuuuugagugccuuacac

SEQ ID NO: 1214078 - RNA, 17 nt, Human
accuuuugagugccuua

SEQ ID NO: 1214079 - RNA, 14 nt, Human
accuuuugagugcc

SEQ ID NO: 1214080 - RNA, 13 nt, Human
uccagacacaugu

SEQ ID NO: 1214081 - RNA, 22 nt, Human
uccagaauuucccaaagcagug

SEQ ID NO: 1214082 - RNA, 20 nt, Human
uccagaauuucccaaagcag

SEQ ID NO: 1214083 - RNA, 19 nt, Human
uccagacccggcugcgugg

SEQ ID NO: 1214084 - RNA, 18 nt, Human
uccagacccggcugcgug

SEQ ID NO: 1214085 - RNA, 15 nt, Human
uccagacccggcugc

SEQ ID NO: 1214086 - RNA, 14 nt, Human
uccagccccuggau

SEQ ID NO: 1214087 - RNA, 13 nt, Human
uccagccccugga

SEQ ID NO: 1214088 - RNA, 12 nt, Human
uccagccccugg

SEQ ID NO: 1214089 - RNA, 22 nt, Human
accuuuuuuauacauaaacaag

SEQ ID NO: 1214090 - RNA, 21 nt, Human
accuuuuuuauacauaaacaa

SEQ ID NO: 1214091 - RNA, 20 nt, Human
accuuuuuuauacauaaaca

SEQ ID NO: 1214092 - RNA, 19 nt, Human
accuuuuuuauacauaaac

SEQ ID NO: 1214093 - RNA, 21 nt, Human
uccaggcuguaucccaugagc

SEQ ID NO: 1214094 - RNA, 19 nt, Human
acgccagauucuuuccuga

SEQ ID NO: 1214095 - RNA, 16 nt, Human
acgagcaggcuucuuc

SEQ ID NO: 1214096 - RNA, 23 nt, Human
uccaacccucaucaccaacgucu

SEQ ID NO: 1214097 - RNA, 17 nt, Human
uccaacccucaucacca

SEQ ID NO: 1214098 - RNA, 16 nt, Human
uccaacccucaucacc

SEQ ID NO: 1214099 - RNA, 14 nt, Human
uccaacccucauca

SEQ ID NO: 1214100 - RNA, 15 nt, Human
accugccaggaagcc

SEQ ID NO: 1214101 - RNA, 14 nt, Human
accugccaggaagc

SEQ ID NO: 1214102 - RNA, 12 nt, Human
accugccaggaa

SEQ ID NO: 1214103 - RNA, 20 nt, Human
uccaagcuggucccacucag

SEQ ID NO: 1214104 - RNA, 12 nt, Human
uccaagaagccc

SEQ ID NO: 1214105 - RNA, 21 nt, Human
uccaagcuggucccacucagu

SEQ ID NO: 1214106 - RNA, 17 nt, Human
accuggccucugcacuc

SEQ ID NO: 1214107 - RNA, 16 nt, Human
accuggccucugcacu

SEQ ID NO: 1214108 - RNA, 14 nt, Human
accuggccucugca

SEQ ID NO: 1214109 - RNA, 17 nt, Human
uccacccaggagccccg

SEQ ID NO: 1214110 - RNA, 15 nt, Human
uccacccaggagccc

SEQ ID NO: 1214111 - RNA, 14 nt, Human
uccacccaggagcc

SEQ ID NO: 1214112 - RNA, 12 nt, Human
uccacccaggag

SEQ ID NO: 1214113 - RNA, 19 nt, Human
uccacccaccucagccucc

SEQ ID NO: 1214114 - RNA, 18 nt, Human
uccacccaccucagccuc

SEQ ID NO: 1214115 - RNA, 23 nt, Human
accuggccucugcacuccccugc

SEQ ID NO: 1214116 - RNA, 20 nt, Human
accuggccucugcacucccc

SEQ ID NO: 1214117 - RNA, 18 nt, Human
accuggccucugcacucc

SEQ ID NO: 1214118 - RNA, 20 nt, Human
accuuagacagucccugcca

SEQ ID NO: 1214119 - RNA, 19 nt, Human
accuuagacagucccugcc

SEQ ID NO: 1214120 - RNA, 18 nt, Human
accuuagacagucccugc

SEQ ID NO: 1214121 - RNA, 19 nt, Human
accuguuucugcagccacu

SEQ ID NO: 1214122 - RNA, 16 nt, Human
ucaggaagcucagggc

SEQ ID NO: 1214123 - RNA, 15 nt, Human
ucaggaagcucaggg

SEQ ID NO: 1214124 - RNA, 14 nt, Human
ucaggaagcucagg

SEQ ID NO: 1214125 - RNA, 13 nt, Human
ucaggaagcucag

SEQ ID NO: 1214126 - RNA, 22 nt, Human
ucauccuucuggaauaaggaga

SEQ ID NO: 1214127 - RNA, 14 nt, Human
ucauccuucuggaa

SEQ ID NO: 1214128 - RNA, 19 nt, Human
ucauccuccucagaucuuc

SEQ ID NO: 1214129 - RNA, 13 nt, Human
ucauccuccucag

SEQ ID NO: 1214130 - RNA, 18 nt, Human
ucauccucauacccaccc

SEQ ID NO: 1214131 - RNA, 15 nt, Human
ucauccuaagcuauu

SEQ ID NO: 1214132 - RNA, 23 nt, Human
accuccugccucgaacuggcugc

SEQ ID NO: 1214133 - RNA, 13 nt, Human
accuccugccucg

SEQ ID NO: 1214134 - RNA, 14 nt, Human
accugaggcccuuc

SEQ ID NO: 1214135 - RNA, 18 nt, Human
accugauugugucucuug

SEQ ID NO: 1214136 - RNA, 17 nt, Human
accugauugugucucuu

SEQ ID NO: 1214137 - RNA, 15 nt, Human
accugauugugucuc

SEQ ID NO: 1214138 - RNA, 22 nt, Human
accugaggcccuucucuccagc

SEQ ID NO: 1214139 - RNA, 21 nt, Human
accugaggcccuucucuccag

SEQ ID NO: 1214140 - RNA, 20 nt, Human
accugaggcccuucucucca

SEQ ID NO: 1214141 - RNA, 16 nt, Human
accugaggcccuucuc

SEQ ID NO: 1214142 - RNA, 15 nt, Human
accugaggcccuucu

SEQ ID NO: 1214143 - RNA, 19 nt, Human
accucggugccuuccucuu

SEQ ID NO: 1214144 - RNA, 13 nt, Human
accuccugggcua

SEQ ID NO: 1214145 - RNA, 19 nt, Human
ucauugaccugaggcccuu

SEQ ID NO: 1214146 - RNA, 15 nt, Human
ucauugaccugaggc

SEQ ID NO: 1214147 - RNA, 14 nt, Human
ucauugaccugagg

SEQ ID NO: 1214148 - RNA, 12 nt, Human
ucauugaccuga

SEQ ID NO: 1214149 - RNA, 22 nt, Human
ucauugaaaucuuuuugcuuug

SEQ ID NO: 1214150 - RNA, 13 nt, Human
ucauugaaaucuu

SEQ ID NO: 1214151 - RNA, 12 nt, Human
ucauugaaaucu

SEQ ID NO: 1214152 - RNA, 12 nt, Human
ucauucuucugu

SEQ ID NO: 1214153 - RNA, 16 nt, Human
ucaaaagcugggcagg

SEQ ID NO: 1214154 - RNA, 18 nt, Human
ucaaauaacuaaaaggua

SEQ ID NO: 1214155 - RNA, 20 nt, Human
acaugagcaucaggccaggc

SEQ ID NO: 1214156 - RNA, 19 nt, Human
acaugaucuucuuuauaau

SEQ ID NO: 1214157 - RNA, 17 nt, Human
acaugaucuucuuuaua

SEQ ID NO: 1214158 - RNA, 15 nt, Human
acaugaucuucuuua

SEQ ID NO: 1214159 - RNA, 19 nt, Human
acaugagcaucaggccagg

SEQ ID NO: 1214160 - RNA, 18 nt, Human
acaugagcaucaggccag

SEQ ID NO: 1214161 - RNA, 17 nt, Human
acaugagcaucaggcca

SEQ ID NO: 1214162 - RNA, 23 nt, Human
ucaaguauuauaccuuuuuuaga

SEQ ID NO: 1214163 - RNA, 21 nt, Human
ucaaguauuauaccuuuuuua

SEQ ID NO: 1214164 - RNA, 16 nt, Human
ucaaguauuauaccuu

SEQ ID NO: 1214165 - RNA, 15 nt, Human
ucaaguauuauaccu

SEQ ID NO: 1214166 - RNA, 11 nt, Human
ucaaguauuau

SEQ ID NO: 1214167 - RNA, 16 nt, Human
ucaacagguuuuccug

SEQ ID NO: 1214168 - RNA, 17 nt, Human
ucaaauuucuaaaucuc

SEQ ID NO: 1214169 - RNA, 16 nt, Human
ucaaauuucuaaaucu

SEQ ID NO: 1214170 - RNA, 15 nt, Human
ucaaauuucuaaauc

SEQ ID NO: 1214171 - RNA, 15 nt, Human
acauucuguuaauca

SEQ ID NO: 1214172 - RNA, 12 nt, Human
acauucuguuaa

SEQ ID NO: 1214173 - RNA, 21 nt, Human
acauguccaagaagcccagga

SEQ ID NO: 1214174 - RNA, 22 nt, Human
uauuucccucaccuuucccauc

SEQ ID NO: 1214175 - RNA, 23 nt, Human
uauuuccuauauuguuuucagug

SEQ ID NO: 1214176 - RNA, 16 nt, Human
acaguugaaaaacagc

SEQ ID NO: 1214177 - RNA, 15 nt, Human
acaguugaaaaacag

SEQ ID NO: 1214178 - RNA, 20 nt, Human
acaguugaaaaacagcugag

SEQ ID NO: 1214179 - RNA, 20 nt, Human
acaguuuguuaguaugaggc

SEQ ID NO: 1214180 - RNA, 16 nt, Human
acaguuuguuaguaug

SEQ ID NO: 1214181 - RNA, 14 nt, Human
acauacucugcuua

SEQ ID NO: 1214182 - RNA, 17 nt, Human
acauacucccaucugug

SEQ ID NO: 1214183 - RNA, 13 nt, Human
acauacucccauc

SEQ ID NO: 1214184 - RNA, 22 nt, Human
acauacuaaccagcagaaaugc

SEQ ID NO: 1214185 - RNA, 21 nt, Human
acauacuaaccagcagaaaug

SEQ ID NO: 1214186 - RNA, 13 nt, Human
acauacuaaccag

SEQ ID NO: 1214187 - RNA, 22 nt, Human
acaugaaaacacauuuuucuua

SEQ ID NO: 1214188 - RNA, 22 nt, Human
acaucuugcucugcugacagac

SEQ ID NO: 1214189 - RNA, 19 nt, Human
acaugaaaacacauuuuuc

SEQ ID NO: 1214190 - RNA, 18 nt, Human
acaugaaaacacauuuuu

SEQ ID NO: 1214191 - RNA, 17 nt, Human
acaugaaaacacauuuu

SEQ ID NO: 1214192 - RNA, 21 nt, Human
acaucuugcucugcugacaga

SEQ ID NO: 1214193 - RNA, 19 nt, Human
acaucuugcucugcugaca

SEQ ID NO: 1214194 - RNA, 18 nt, Human
acaucuugcucugcugac

SEQ ID NO: 1214195 - RNA, 14 nt, Human
acaucuugcucugc

SEQ ID NO: 1214196 - RNA, 13 nt, Human
acaucuugcucug

SEQ ID NO: 1214197 - RNA, 18 nt, Human
acaucaacaucuugguca

SEQ ID NO: 1214198 - RNA, 16 nt, Human
acaucaacaucuuggu

SEQ ID NO: 1214199 - RNA, 23 nt, Human
acauauugauuuccguuaaaaua

SEQ ID NO: 1214200 - RNA, 22 nt, Human
acauauugauuuccguuaaaau

SEQ ID NO: 1214201 - RNA, 18 nt, Human
acauauugauuuccguua

SEQ ID NO: 1214202 - RNA, 16 nt, Human
acauauugauuuccgu

SEQ ID NO: 1214203 - RNA, 14 nt, Human
acauauugauuucc

SEQ ID NO: 1214204 - RNA, 16 nt, Human
accagagcccaccuug

SEQ ID NO: 1214205 - RNA, 14 nt, Human
accagagcccaccu

SEQ ID NO: 1214206 - RNA, 17 nt, Human
accagacaccuugacag

SEQ ID NO: 1214207 - RNA, 14 nt, Human
accagacaccuuga

SEQ ID NO: 1214208 - RNA, 22 nt, Human
accacuuuuguucuugguuugu

SEQ ID NO: 1214209 - RNA, 21 nt, Human
accacuuuuguucuugguuug

SEQ ID NO: 1214210 - RNA, 16 nt, Human
accacuuuuguucuug

SEQ ID NO: 1214211 - RNA, 15 nt, Human
accacuuuuguucuu

SEQ ID NO: 1214212 - RNA, 20 nt, Human
accacugcacuccagccugg

SEQ ID NO: 1214213 - RNA, 18 nt, Human
ucaccccggccaccugcg

SEQ ID NO: 1214214 - RNA, 17 nt, Human
ucaccccggccaccugc

SEQ ID NO: 1214215 - RNA, 22 nt, Human
ucaccccggccaccugcggugc

SEQ ID NO: 1214216 - RNA, 21 nt, Human
accacugcacuccagccuggg

SEQ ID NO: 1214217 - RNA, 20 nt, Human
ucacuauguugcccaggcag

SEQ ID NO: 1214218 - RNA, 19 nt, Human
ucacuauguugcccaggca

SEQ ID NO: 1214219 - RNA, 18 nt, Human
ucacuauguugcccaggc

SEQ ID NO: 1214220 - RNA, 16 nt, Human
ucaccugccccucaac

SEQ ID NO: 1214221 - RNA, 15 nt, Human
ucaccugccccucaa

SEQ ID NO: 1214222 - RNA, 13 nt, Human
ucaccugccccuc

SEQ ID NO: 1214223 - RNA, 16 nt, Human
ucaccugaagacucau

SEQ ID NO: 1214224 - RNA, 15 nt, Human
ucaccucucccuugg

SEQ ID NO: 1214225 - RNA, 17 nt, Human
accagagcccaccuugg

SEQ ID NO: 1214226 - RNA, 15 nt, Human
accaauguucucucu

SEQ ID NO: 1214227 - RNA, 22 nt, Human
accaacauacucccaucuguga

SEQ ID NO: 1214228 - RNA, 21 nt, Human
accaacauacucccaucugug

SEQ ID NO: 1214229 - RNA, 19 nt, Human
accaacauacucccaucug

SEQ ID NO: 1214230 - RNA, 15 nt, Human
ucaagugaaaaagga

SEQ ID NO: 1214231 - RNA, 22 nt, Human
ucaaguccucuuuucugagagg

SEQ ID NO: 1214232 - RNA, 23 nt, Human
ucaagugaaaaaggaggaagaga

SEQ ID NO: 1214233 - RNA, 15 nt, Human
ucaccccggccaccu

SEQ ID NO: 1214234 - RNA, 20 nt, Human
ucaccccagccccaaaacuc

SEQ ID NO: 1214235 - RNA, 14 nt, Human
ucaccccagcccca

SEQ ID NO: 1214236 - RNA, 13 nt, Human
ucaccccagcccc

SEQ ID NO: 1214237 - RNA, 15 nt, Human
ucacauaucugucau

SEQ ID NO: 1214238 - RNA, 12 nt, Human
ucacauaucugu

SEQ ID NO: 1214239 - RNA, 15 nt, Human
ucacaguucucuccu

SEQ ID NO: 1214240 - RNA, 23 nt, Human
ucacucuuauugcccacgcugga

SEQ ID NO: 1214241 - RNA, 21 nt, Human
ucacucuuauugcccacgcug

SEQ ID NO: 1214242 - RNA, 22 nt, Human
accauggucggaaaacaugcua

SEQ ID NO: 1214243 - RNA, 11 nt, Human
acccacugcuu

SEQ ID NO: 1214244 - RNA, 15 nt, Human
acccacugcucuggu

SEQ ID NO: 1214245 - RNA, 14 nt, Human
acccacugcucugg

SEQ ID NO: 1214246 - RNA, 13 nt, Human
acccacugcucug

SEQ ID NO: 1214247 - RNA, 11 nt, Human
acccacugcuc

SEQ ID NO: 1214248 - RNA, 10 nt, Human
acccacugcu

SEQ ID NO: 1214249 - RNA, 18 nt, Human
ucagagccugcaguuauu

SEQ ID NO: 1214250 - RNA, 15 nt, Human
ucagagccugcaguu

SEQ ID NO: 1214251 - RNA, 14 nt, Human
ucagagccugcagu

SEQ ID NO: 1214252 - RNA, 13 nt, Human
ucagagccugcag

SEQ ID NO: 1214253 - RNA, 12 nt, Human
ucagagccugca

SEQ ID NO: 1214254 - RNA, 23 nt, Human
ucagagagggugggagugggccc

SEQ ID NO: 1214255 - RNA, 21 nt, Human
ucagagagggugggagugggc

SEQ ID NO: 1214256 - RNA, 16 nt, Human
ucagagagggugggag

SEQ ID NO: 1214257 - RNA, 22 nt, Human
ucagagacuccugcaggcagcc

SEQ ID NO: 1214258 - RNA, 21 nt, Human
ucagagacuccugcaggcagc

SEQ ID NO: 1214259 - RNA, 20 nt, Human
ucagagacuccugcaggcag

SEQ ID NO: 1214260 - RNA, 17 nt, Human
ucagagacuccugcagg

SEQ ID NO: 1214261 - RNA, 23 nt, Human
ucagaaguuucugccgcagcccu

SEQ ID NO: 1214262 - RNA, 19 nt, Human
ucagaaucucaaauaacua

SEQ ID NO: 1214263 - RNA, 18 nt, Human
ucagaaucucaaauaacu

SEQ ID NO: 1214264 - RNA, 22 nt, Human
ucagaaguuucugccgcagccc

SEQ ID NO: 1214265 - RNA, 19 nt, Human
ucagaaguuucugccgcag

SEQ ID NO: 1214266 - RNA, 23 nt, Human
ucagccguguaaccauggaccca

SEQ ID NO: 1214267 - RNA, 23 nt, Human
acccagcgagcccugguggcagu

SEQ ID NO: 1214268 - RNA, 19 nt, Human
acccagcgagcccuggugg

SEQ ID NO: 1214269 - RNA, 22 nt, Human
ucagccaagaauucuuaaauau

SEQ ID NO: 1214270 - RNA, 24 nt, Human
acccagcgagcccugguggcagug

SEQ ID NO: 1214271 - RNA, 16 nt, Human
accccuucgcuccugu

SEQ ID NO: 1214272 - RNA, 15 nt, Human
accccuucgcuccug

SEQ ID NO: 1214273 - RNA, 14 nt, Human
accccuucgcuccu

SEQ ID NO: 1214274 - RNA, 12 nt, Human
acccccacccaa

SEQ ID NO: 1214275 - RNA, 20 nt, Human
ucagcuuguaaauagcucag

SEQ ID NO: 1214276 - RNA, 15 nt, Human
ucagcggggacagcu

SEQ ID NO: 1214277 - RNA, 14 nt, Human
ucagcggggacagc

SEQ ID NO: 1214278 - RNA, 15 nt, Human
uacaaaagcauguga

SEQ ID NO: 1214279 - RNA, 20 nt, Human
uacaaaaagcauaaaaauua

SEQ ID NO: 1214280 - RNA, 13 nt, Human
aaugcugugcccu

SEQ ID NO: 1214281 - RNA, 21 nt, Human
aaugcugugcccuaaagugua

SEQ ID NO: 1214282 - RNA, 20 nt, Human
aaugcugugcccuaaagugu

SEQ ID NO: 1214283 - RNA, 24 nt, Human
aaugcccagccccuucugacccau

SEQ ID NO: 1214284 - RNA, 23 nt, Human
aaugcccagccccuucugaccca

SEQ ID NO: 1214285 - RNA, 22 nt, Human
aaugcccagccccuucugaccc

SEQ ID NO: 1214286 - RNA, 20 nt, Human
aaugcccagccccuucugac

SEQ ID NO: 1214287 - RNA, 16 nt, Human
aauggacguguuauga

SEQ ID NO: 1214288 - RNA, 15 nt, Human
aaugcccagccccuu

SEQ ID NO: 1214289 - RNA, 14 nt, Human
aaugcccagccccu

SEQ ID NO: 1214290 - RNA, 18 nt, Human
uacagaggccaugggccu

SEQ ID NO: 1214291 - RNA, 20 nt, Human
uacaccacuacauucuguua

SEQ ID NO: 1214292 - RNA, 19 nt, Human
uacaccacuacauucuguu

SEQ ID NO: 1214293 - RNA, 18 nt, Human
uacaccacuacauucugu

SEQ ID NO: 1214294 - RNA, 17 nt, Human
uacaccacuacauucug

SEQ ID NO: 1214295 - RNA, 16 nt, Human
uacaccacuacauucu

SEQ ID NO: 1214296 - RNA, 15 nt, Human
uacaccacuacauuc

SEQ ID NO: 1214297 - RNA, 21 nt, Human
aauggacguguuaugacucca

SEQ ID NO: 1214298 - RNA, 18 nt, Human
aauguacugcauaugaaa

SEQ ID NO: 1214299 - RNA, 14 nt, Human
aauguacugcauau

SEQ ID NO: 1214300 - RNA, 19 nt, Human
aauguauguguaaguauuc

SEQ ID NO: 1214301 - RNA, 14 nt, Human
aauguauguguaag

SEQ ID NO: 1214302 - RNA, 12 nt, Human
aauguaugugua

SEQ ID NO: 1214303 - RNA, 17 nt, Human
uacauaaugcgugcaua

SEQ ID NO: 1214304 - RNA, 15 nt, Human
uacaguaucucaggg

SEQ ID NO: 1214305 - RNA, 20 nt, Human
uacauaaugcgugcauacca

SEQ ID NO: 1214306 - RNA, 19 nt, Human
uacauaaugcgugcauacc

SEQ ID NO: 1214307 - RNA, 21 nt, Human
uacauaaugcgugcauaccac

SEQ ID NO: 1214308 - RNA, 12 nt, Human
aauguacugcau

SEQ ID NO: 1214309 - RNA, 19 nt, Human
uaaugaaagacuguacaaa

SEQ ID NO: 1214310 - RNA, 18 nt, Human
uaaugaaagacuguacaa

SEQ ID NO: 1214311 - RNA, 17 nt, Human
uaaugaaagacuguaca

SEQ ID NO: 1214312 - RNA, 14 nt, Human
uaaugaaagacugu

SEQ ID NO: 1214313 - RNA, 23 nt, Human
uaaugaaagacuguacaaaguag

SEQ ID NO: 1214314 - RNA, 22 nt, Human
uaaugaaagacuguacaaagua

SEQ ID NO: 1214315 - RNA, 21 nt, Human
uaaugacuuaagcacacuuga

SEQ ID NO: 1214316 - RNA, 15 nt, Human
uaaugacuuaagcac

SEQ ID NO: 1214317 - RNA, 23 nt, Human
aaucuucugaacuuggcgcugcc

SEQ ID NO: 1214318 - RNA, 20 nt, Human
aaucuucugaacuuggcgcu

SEQ ID NO: 1214319 - RNA, 13 nt, Human
aaucuucugaacu

SEQ ID NO: 1214320 - RNA, 15 nt, Human
aaugagccuggcaag

SEQ ID NO: 1214321 - RNA, 18 nt, Human
aaugacuuacuguacaug

SEQ ID NO: 1214322 - RNA, 17 nt, Human
aaugacuuacuguacau

SEQ ID NO: 1214323 - RNA, 14 nt, Human
aaugacuuacugua

SEQ ID NO: 1214324 - RNA, 13 nt, Human
uaaugaggaaacu

SEQ ID NO: 1214325 - RNA, 18 nt, Human
aaucuaaauggaaccacu

SEQ ID NO: 1214326 - RNA, 15 nt, Human
aaucuaaauggaacc

SEQ ID NO: 1214327 - RNA, 13 nt, Human
aaucuaaauggaa

SEQ ID NO: 1214328 - RNA, 15 nt, Human
aaucucaaauuucua

SEQ ID NO: 1214329 - RNA, 14 nt, Human
aaucucaaauuucu

SEQ ID NO: 1214330 - RNA, 12 nt, Human
aaucucaaauuu

SEQ ID NO: 1214331 - RNA, 15 nt, Human
aaucucaaauaacua

SEQ ID NO: 1214332 - RNA, 20 nt, Human
uaaguuuuuauggcuuuugu

SEQ ID NO: 1214333 - RNA, 19 nt, Human
aauaggaaaaacugauuuu

SEQ ID NO: 1214334 - RNA, 18 nt, Human
aauaggaaaaacugauuu

SEQ ID NO: 1214335 - RNA, 17 nt, Human
aauaggaaaaacugauu

SEQ ID NO: 1214336 - RNA, 16 nt, Human
aauaggaaaaacugau

SEQ ID NO: 1214337 - RNA, 15 nt, Human
aauaggaaaaacuga

SEQ ID NO: 1214338 - RNA, 14 nt, Human
aauagcugggacua

SEQ ID NO: 1214339 - RNA, 13 nt, Human
aauagcugggacu

SEQ ID NO: 1214340 - RNA, 20 nt, Human
aauagccugccucuucucua

SEQ ID NO: 1214341 - RNA, 23 nt, Human
aauagacaauuuauuauggcaca

SEQ ID NO: 1214342 - RNA, 18 nt, Human
aauagacaauuuauuaug

SEQ ID NO: 1214343 - RNA, 16 nt, Human
uaacauggaaguacua

SEQ ID NO: 1214344 - RNA, 15 nt, Human
uaacauggaaguacu

SEQ ID NO: 1214345 - RNA, 15 nt, Human
uaacuaaaagguaug

SEQ ID NO: 1214346 - RNA, 14 nt, Human
uaacauggaaguac

SEQ ID NO: 1214347 - RNA, 19 nt, Human
uaacuuuuauaaacuuuac

SEQ ID NO: 1214348 - RNA, 18 nt, Human
uaacuuuuauaaacuuua

SEQ ID NO: 1214349 - RNA, 17 nt, Human
uaacuuuuauaaacuuu

SEQ ID NO: 1214350 - RNA, 15 nt, Human
uaacuuuuauaaacu

SEQ ID NO: 1214351 - RNA, 19 nt, Human
aauaucugaaaauguaugu

SEQ ID NO: 1214352 - RNA, 18 nt, Human
aauaucugaaaauguaug

SEQ ID NO: 1214353 - RNA, 17 nt, Human
aauaucugaaaauguau

SEQ ID NO: 1214354 - RNA, 16 nt, Human
aauaucugaaaaugua

SEQ ID NO: 1214355 - RNA, 20 nt, Human
aauaucugaaaauguaugug

SEQ ID NO: 1214356 - RNA, 22 nt, Human
aauauugcugauggugcaauga

SEQ ID NO: 1214357 - RNA, 21 nt, Human
aauauugcugauggugcaaug

SEQ ID NO: 1214358 - RNA, 18 nt, Human
aauauugcugauggugca

SEQ ID NO: 1214359 - RNA, 15 nt, Human
aauauugcugauggu

SEQ ID NO: 1214360 - RNA, 13 nt, Human
aauauugcugaug

SEQ ID NO: 1214361 - RNA, 12 nt, Human
aauauugcugau

SEQ ID NO: 1214362 - RNA, 11 nt, Human
aauauugcuga

SEQ ID NO: 1214363 - RNA, 18 nt, Human
aauauugauaugcuuaua

SEQ ID NO: 1214364 - RNA, 15 nt, Human
aauaugcacacauuu

SEQ ID NO: 1214365 - RNA, 19 nt, Human
uaaauaaugugaaacugga

SEQ ID NO: 1214366 - RNA, 18 nt, Human
uaaauuaacuuuuauaaa

SEQ ID NO: 1214367 - RNA, 17 nt, Human
uaaauuaacuuuuauaa

SEQ ID NO: 1214368 - RNA, 16 nt, Human
uaaauuaacuuuuaua

SEQ ID NO: 1214369 - RNA, 15 nt, Human
uaaauuaacuuuuau

SEQ ID NO: 1214370 - RNA, 14 nt, Human
uaaauuaacuuuua

SEQ ID NO: 1214371 - RNA, 12 nt, Human
uaaauuaacuuu

SEQ ID NO: 1214372 - RNA, 20 nt, Human
uaaauguugaaagaucaaaa

SEQ ID NO: 1214373 - RNA, 15 nt, Human
uaaauguugaaagau

SEQ ID NO: 1214374 - RNA, 23 nt, Human
uaaaugcaccuggaauauauaac

SEQ ID NO: 1214375 - RNA, 18 nt, Human
uaaaucuccaaaauaaaa

SEQ ID NO: 1214376 - RNA, 15 nt, Human
uaaaucuccaaaaua

SEQ ID NO: 1214377 - RNA, 14 nt, Human
uaaaucuccaaaau

SEQ ID NO: 1214378 - RNA, 20 nt, Human
aaguuuuuauggcuuuugug

SEQ ID NO: 1214379 - RNA, 16 nt, Human
aauaaaucauaaaacu

SEQ ID NO: 1214380 - RNA, 18 nt, Human
aauaaaacuuuuuaaaau

SEQ ID NO: 1214381 - RNA, 15 nt, Human
aauaaaacuuuuuaa

SEQ ID NO: 1214382 - RNA, 14 nt, Human
aauaaaacuuuuua

SEQ ID NO: 1214383 - RNA, 12 nt, Human
aauaaaacuuuu

SEQ ID NO: 1214384 - RNA, 19 nt, Human
acacccagcccacuucugc

SEQ ID NO: 1214385 - RNA, 18 nt, Human
acaccucugcacaagcug

SEQ ID NO: 1214386 - RNA, 16 nt, Human
acaccuugacagggca

SEQ ID NO: 1214387 - RNA, 15 nt, Human
acaccuugacagggc

SEQ ID NO: 1214388 - RNA, 14 nt, Human
acaccuugacaggg

SEQ ID NO: 1214389 - RNA, 19 nt, Human
acaccucugcacaagcugc

SEQ ID NO: 1214390 - RNA, 20 nt, Human
acacuaaccacgcuggaccu

SEQ ID NO: 1214391 - RNA, 19 nt, Human
acacuaaccacgcuggacc

SEQ ID NO: 1214392 - RNA, 17 nt, Human
acacuaaccacgcugga

SEQ ID NO: 1214393 - RNA, 16 nt, Human
acacuaaccacgcugg

SEQ ID NO: 1214394 - RNA, 22 nt, Human
uauaaccaguguuguggauuua

SEQ ID NO: 1214395 - RNA, 13 nt, Human
acacccagcccac

SEQ ID NO: 1214396 - RNA, 12 nt, Human
acacccagccca

SEQ ID NO: 1214397 - RNA, 13 nt, Human
acacauuuuauuu

SEQ ID NO: 1214398 - RNA, 22 nt, Human
acacauguccaagaagcccagg

SEQ ID NO: 1214399 - RNA, 21 nt, Human
acacauguccaagaagcccag

SEQ ID NO: 1214400 - RNA, 19 nt, Human
acacauguccaagaagccc

SEQ ID NO: 1214401 - RNA, 18 nt, Human
acacauguccaagaagcc

SEQ ID NO: 1214402 - RNA, 13 nt, Human
acacauguccaag

SEQ ID NO: 1214403 - RNA, 18 nt, Human
uaguucagguaacaggca

SEQ ID NO: 1214404 - RNA, 21 nt, Human
uagguuggcaaaaaggcagga

SEQ ID NO: 1214405 - RNA, 13 nt, Human
acacagugagucg

SEQ ID NO: 1214406 - RNA, 11 nt, Human
acacagugagu

SEQ ID NO: 1214407 - RNA, 13 nt, Human
uaguagagacagg

SEQ ID NO: 1214408 - RNA, 14 nt, Human
uaguagagacaggg

SEQ ID NO: 1214409 - RNA, 12 nt, Human
acacacagcucu

SEQ ID NO: 1214410 - RNA, 11 nt, Human
acacacagcuc

SEQ ID NO: 1214411 - RNA, 14 nt, Human
acacacacauacac

SEQ ID NO: 1214412 - RNA, 21 nt, Human
acaaugguuuucuuguguguu

SEQ ID NO: 1214413 - RNA, 15 nt, Human
acaaugguuuucuug

SEQ ID NO: 1214414 - RNA, 13 nt, Human
acacucugagacu

SEQ ID NO: 1214415 - RNA, 11 nt, Human
acacucugaga

SEQ ID NO: 1214416 - RNA, 23 nt, Human
acacuguucucugcccuccaaga

SEQ ID NO: 1214417 - RNA, 22 nt, Human
acacuguucucugcccuccaag

SEQ ID NO: 1214418 - RNA, 20 nt, Human
acacuguucucugcccucca

SEQ ID NO: 1214419 - RNA, 18 nt, Human
acacuguucucugcccuc

SEQ ID NO: 1214420 - RNA, 17 nt, Human
acacuguucucugcccu

SEQ ID NO: 1214421 - RNA, 16 nt, Human
acacuguucucugccc

SEQ ID NO: 1214422 - RNA, 15 nt, Human
acacuguucucugcc

SEQ ID NO: 1214423 - RNA, 14 nt, Human
acacuguucucugc

SEQ ID NO: 1214424 - RNA, 22 nt, Human
acagacuggaagcacagcuuca

SEQ ID NO: 1214425 - RNA, 21 nt, Human
acagacuggaagcacagcuuc

SEQ ID NO: 1214426 - RNA, 19 nt, Human
acagacuggaagcacagcu

SEQ ID NO: 1214427 - RNA, 22 nt, Human
acagacacaggcccggcuccag

SEQ ID NO: 1214428 - RNA, 18 nt, Human
acagacacaggcccggcu

SEQ ID NO: 1214429 - RNA, 17 nt, Human
acagacacaggcccggc

SEQ ID NO: 1214430 - RNA, 16 nt, Human
acacuguuucaaacuu

SEQ ID NO: 1214431 - RNA, 15 nt, Human
acacuguuucaaacu

SEQ ID NO: 1214432 - RNA, 20 nt, Human
acagauagauauaugcucug

SEQ ID NO: 1214433 - RNA, 20 nt, Human
acagauacuccuccaagguu

SEQ ID NO: 1214434 - RNA, 22 nt, Human
acagaguuguuacauuuuuaag

SEQ ID NO: 1214435 - RNA, 21 nt, Human
acagaguuguuacauuuuuaa

SEQ ID NO: 1214436 - RNA, 23 nt, Human
acagaugggugcuuggaggaagg

SEQ ID NO: 1214437 - RNA, 23 nt, Human
acagcccgggcucugccucccau

SEQ ID NO: 1214438 - RNA, 22 nt, Human
acagcccgggcucugccuccca

SEQ ID NO: 1214439 - RNA, 21 nt, Human
acagcccgggcucugccuccc

SEQ ID NO: 1214440 - RNA, 16 nt, Human
acagcaaggagauuua

SEQ ID NO: 1214441 - RNA, 20 nt, Human
acagaguuguuacauuuuua

SEQ ID NO: 1214442 - RNA, 19 nt, Human
acagaguuguuacauuuuu

SEQ ID NO: 1214443 - RNA, 18 nt, Human
acagaguuguuacauuuu

SEQ ID NO: 1214444 - RNA, 17 nt, Human
acagaguuguuacauuu

SEQ ID NO: 1214445 - RNA, 16 nt, Human
acagaguuguuacauu

SEQ ID NO: 1214446 - RNA, 14 nt, Human
acagagcccacgcc

SEQ ID NO: 1214447 - RNA, 21 nt, Human
acagagcaagugagacccugu

SEQ ID NO: 1214448 - RNA, 15 nt, Human
uaucucagggccugg

SEQ ID NO: 1214449 - RNA, 13 nt, Human
uaucucagggccu

SEQ ID NO: 1214450 - RNA, 20 nt, Human
uaucccuacuguaauuugug

SEQ ID NO: 1214451 - RNA, 19 nt, Human
uaucccuacuguaauuugu

SEQ ID NO: 1214452 - RNA, 17 nt, Human
uacuguaauuugugaua

SEQ ID NO: 1214453 - RNA, 16 nt, Human
uacuguaauuugugau

SEQ ID NO: 1214454 - RNA, 15 nt, Human
uacuguaauuuguga

SEQ ID NO: 1214455 - RNA, 18 nt, Human
uacuguacaugaaaacac

SEQ ID NO: 1214456 - RNA, 22 nt, Human
uacucuacccucuuagaaaaac

SEQ ID NO: 1214457 - RNA, 13 nt, Human
uacgugaguccug

SEQ ID NO: 1214458 - RNA, 18 nt, Human
uacgggaggguaaggcug

SEQ ID NO: 1214459 - RNA, 16 nt, Human
uacgucugacaggcaa

SEQ ID NO: 1214460 - RNA, 15 nt, Human
uacgucugacaggca

SEQ ID NO: 1214461 - RNA, 17 nt, Human
aauuuauuauggcacau

SEQ ID NO: 1214462 - RNA, 14 nt, Human
aauuuauuauggca

SEQ ID NO: 1214463 - RNA, 13 nt, Human
aauuuauuauggc

SEQ ID NO: 1214464 - RNA, 17 nt, Human
aauuuaccugaagucuu

SEQ ID NO: 1214465 - RNA, 15 nt, Human
aauuuacauacucug

SEQ ID NO: 1214466 - RNA, 16 nt, Human
uacuucuuauacauuu

SEQ ID NO: 1214467 - RNA, 15 nt, Human
uacuucuuauacauu

SEQ ID NO: 1214468 - RNA, 14 nt, Human
uacuucuuauacau

SEQ ID NO: 1214469 - RNA, 15 nt, Human
uacuucugcuacaua

SEQ ID NO: 1214470 - RNA, 20 nt, Human
uacuucuccacccugcucuc

SEQ ID NO: 1214471 - RNA, 18 nt, Human
uacuucuccacccugcuc

SEQ ID NO: 1214472 - RNA, 13 nt, Human
uacuucuccaccc

SEQ ID NO: 1214473 - RNA, 16 nt, Human
aauuuguuauaaugaa

SEQ ID NO: 1214474 - RNA, 22 nt, Human
aauuuuuuuaucgucacugcuu

SEQ ID NO: 1214475 - RNA, 14 nt, Human
acaaaacuuuucua

SEQ ID NO: 1214476 - RNA, 21 nt, Human
acaaagcgugguggacaugca

SEQ ID NO: 1214477 - RNA, 16 nt, Human
uagcucaggugucccu

SEQ ID NO: 1214478 - RNA, 19 nt, Human
acaagcuccaagcucccag

SEQ ID NO: 1214479 - RNA, 17 nt, Human
acaagcuccaagcuccc

SEQ ID NO: 1214480 - RNA, 16 nt, Human
acaagcuccaagcucc

SEQ ID NO: 1214481 - RNA, 15 nt, Human
acaagcuccaagcuc

SEQ ID NO: 1214482 - RNA, 22 nt, Human
acaagcuccaagcucccaggca

SEQ ID NO: 1214483 - RNA, 18 nt, Human
acaagcgugagccacugc

SEQ ID NO: 1214484 - RNA, 13 nt, Human
acaagcuccaagc

SEQ ID NO: 1214485 - RNA, 17 nt, Human
acaagcgugagccacug

SEQ ID NO: 1214486 - RNA, 22 nt, Human
acaagagcccaggccuccuaca

SEQ ID NO: 1214487 - RNA, 18 nt, Human
acaagaccacguuucuaa

SEQ ID NO: 1214488 - RNA, 17 nt, Human
acaagaccacguuucua

SEQ ID NO: 1214489 - RNA, 16 nt, Human
acaagaccacguuucu

SEQ ID NO: 1214490 - RNA, 17 nt, Human
acaacaucuuuuucuac

SEQ ID NO: 1214491 - RNA, 19 nt, Human
aaggcuaccuuuguauucu

SEQ ID NO: 1214492 - RNA, 18 nt, Human
aaggccaaaggaagcaca

SEQ ID NO: 1214493 - RNA, 21 nt, Human
guugcccaggcuggcgugcag

SEQ ID NO: 1214494 - RNA, 19 nt, Human
guugcccaggcaggucuug

SEQ ID NO: 1214495 - RNA, 18 nt, Human
guugcccaggcaggucuu

SEQ ID NO: 1214496 - RNA, 17 nt, Human
guugcccaggcaggucu

SEQ ID NO: 1214497 - RNA, 14 nt, Human
aaggcuccaggagc

SEQ ID NO: 1214498 - RNA, 16 nt, Human
aaggaugcuuguacau

SEQ ID NO: 1214499 - RNA, 15 nt, Human
aaggaugcuuguaca

SEQ ID NO: 1214500 - RNA, 22 nt, Human
aaggaugcacagaguuguuaca

SEQ ID NO: 1214501 - RNA, 20 nt, Human
aaggauccugagccagauuu

SEQ ID NO: 1214502 - RNA, 18 nt, Human
aaggaugcacagaguugu

SEQ ID NO: 1214503 - RNA, 19 nt, Human
aaggaugcuuguacauaau

SEQ ID NO: 1214504 - RNA, 17 nt, Human
aaggaugcuuguacaua

SEQ ID NO: 1214505 - RNA, 23 nt, Human
aaggaugaucuaggaagacuuug

SEQ ID NO: 1214506 - RNA, 18 nt, Human
aaggaugaucuaggaaga

SEQ ID NO: 1214507 - RNA, 17 nt, Human
aaggauccugagccaga

SEQ ID NO: 1214508 - RNA, 15 nt, Human
aaggauccugagcca

SEQ ID NO: 1214509 - RNA, 14 nt, Human
aaggauccugagcc

SEQ ID NO: 1214510 - RNA, 23 nt, Human
guugaugaucuuugcagacaggc

SEQ ID NO: 1214511 - RNA, 18 nt, Human
guuggucccccuuccaug

SEQ ID NO: 1214512 - RNA, 12 nt, Human
guuuucuguucu

SEQ ID NO: 1214513 - RNA, 11 nt, Human
guuuucuguuc

SEQ ID NO: 1214514 - RNA, 15 nt, Human
guuuuacugcagcuu

SEQ ID NO: 1214515 - RNA, 18 nt, Human
guuuggggaugagaaagg

SEQ ID NO: 1214516 - RNA, 16 nt, Human
guuugccucugccucu

SEQ ID NO: 1214517 - RNA, 13 nt, Human
guuugccucugcc

SEQ ID NO: 1214518 - RNA, 22 nt, Human
guuugauucagacagcugccug

SEQ ID NO: 1214519 - RNA, 23 nt, Human
guuucuaaaggcuaccuuuguau

SEQ ID NO: 1214520 - RNA, 22 nt, Human
guuucuaaaggcuaccuuugua

SEQ ID NO: 1214521 - RNA, 23 nt, Human
aaggggaauguuugccucugccu

SEQ ID NO: 1214522 - RNA, 22 nt, Human
aaggggaauguuugccucugcc

SEQ ID NO: 1214523 - RNA, 19 nt, Human
aagggccuggccugagcug

SEQ ID NO: 1214524 - RNA, 17 nt, Human
aagggccuggccugagc

SEQ ID NO: 1214525 - RNA, 14 nt, Human
aagggccuggccug

SEQ ID NO: 1214526 - RNA, 19 nt, Human
guuucuaaaggcuaccuuu

SEQ ID NO: 1214527 - RNA, 17 nt, Human
aaguaauaugcacacau

SEQ ID NO: 1214528 - RNA, 16 nt, Human
aaguaauaugcacaca

SEQ ID NO: 1214529 - RNA, 15 nt, Human
aaguaauaugcacac

SEQ ID NO: 1214530 - RNA, 12 nt, Human
aaguaauaugca

SEQ ID NO: 1214531 - RNA, 17 nt, Human
aaggguaucaggugcug

SEQ ID NO: 1214532 - RNA, 16 nt, Human
aaggguaucaggugcu

SEQ ID NO: 1214533 - RNA, 22 nt, Human
aagcuaggccuggccagaugca

SEQ ID NO: 1214534 - RNA, 18 nt, Human
aagcuaggccuggccaga

SEQ ID NO: 1214535 - RNA, 17 nt, Human
aagcuaggccuggccag

SEQ ID NO: 1214536 - RNA, 20 nt, Human
guucaggguuggccccugcc

SEQ ID NO: 1214537 - RNA, 19 nt, Human
guucaggguuggccccugc

SEQ ID NO: 1214538 - RNA, 18 nt, Human
guucaggguuggccccug

SEQ ID NO: 1214539 - RNA, 17 nt, Human
guucaggguuggccccu

SEQ ID NO: 1214540 - RNA, 18 nt, Human
guucagcuccagcucacc

SEQ ID NO: 1214541 - RNA, 17 nt, Human
guucagcuccagcucac

SEQ ID NO: 1214542 - RNA, 16 nt, Human
guucagcuccagcuca

SEQ ID NO: 1214543 - RNA, 20 nt, Human
guuaguaugaggcauuuguu

SEQ ID NO: 1214544 - RNA, 17 nt, Human
guuaguaugaggcauuu

SEQ ID NO: 1214545 - RNA, 18 nt, Human
guuaaugauagcuacugu

SEQ ID NO: 1214546 - RNA, 22 nt, Human
guugaugaucuuugcagacagg

SEQ ID NO: 1214547 - RNA, 21 nt, Human
guucuugguuuguaaauuaac

SEQ ID NO: 1214548 - RNA, 17 nt, Human
guucuuaguuugcaguu

SEQ ID NO: 1214549 - RNA, 13 nt, Human
guucucuccuucu

SEQ ID NO: 1214550 - RNA, 16 nt, Human
guucuacccaggugcu

SEQ ID NO: 1214551 - RNA, 22 nt, Human
guucccuuugacgccaucccag

SEQ ID NO: 1214552 - RNA, 21 nt, Human
guucccuuugacgccauccca

SEQ ID NO: 1214553 - RNA, 20 nt, Human
guucccuuugacgccauccc

SEQ ID NO: 1214554 - RNA, 21 nt, Human
aagcucuacugaggugcuaug

SEQ ID NO: 1214555 - RNA, 22 nt, Human
aagcuauucaguaauaacucua

SEQ ID NO: 1214556 - RNA, 20 nt, Human
guuccauggccucuucagau

SEQ ID NO: 1214557 - RNA, 16 nt, Human
guucccauuugcuccu

SEQ ID NO: 1214558 - RNA, 20 nt, Human
guucccauuugcuccuuucu

SEQ ID NO: 1214559 - RNA, 17 nt, Human
gugugacuacuccccca

SEQ ID NO: 1214560 - RNA, 18 nt, Human
gugucuuuuuucacuaca

SEQ ID NO: 1214561 - RNA, 19 nt, Human
gugucuugcaauggcagcc

SEQ ID NO: 1214562 - RNA, 18 nt, Human
gugucuugcaauggcagc

SEQ ID NO: 1214563 - RNA, 17 nt, Human
gugucuugcaauggcag

SEQ ID NO: 1214564 - RNA, 23 nt, Human
guguuuccuggcacugcuuccag

SEQ ID NO: 1214565 - RNA, 18 nt, Human
aagagguuuuaaaaaaau

SEQ ID NO: 1214566 - RNA, 17 nt, Human
gugguuuucuguucuuu

SEQ ID NO: 1214567 - RNA, 20 nt, Human
guggugguuuucuguucuuu

SEQ ID NO: 1214568 - RNA, 12 nt, Human
aagaugcagccg

SEQ ID NO: 1214569 - RNA, 15 nt, Human
aagauauuuugcuuu

SEQ ID NO: 1214570 - RNA, 13 nt, Human
aagcaaaggagau

SEQ ID NO: 1214571 - RNA, 12 nt, Human
aagcaaaggaga

SEQ ID NO: 1214572 - RNA, 16 nt, Human
aagaugcuucucacug

SEQ ID NO: 1214573 - RNA, 18 nt, Human
aagaugugacauguuuua

SEQ ID NO: 1214574 - RNA, 14 nt, Human
aagaugugacaugu

SEQ ID NO: 1214575 - RNA, 13 nt, Human
gugggauccucca

SEQ ID NO: 1214576 - RNA, 14 nt, Human
gugggagugggccc

SEQ ID NO: 1214577 - RNA, 13 nt, Human
gugggagugggcc

SEQ ID NO: 1214578 - RNA, 23 nt, Human
guggcgcagcauauucaggaagc

SEQ ID NO: 1214579 - RNA, 14 nt, Human
guggugguuuucug

SEQ ID NO: 1214580 - RNA, 16 nt, Human
gugguuucagaaaugu

SEQ ID NO: 1214581 - RNA, 20 nt, Human
gugggggaucacagccucug

SEQ ID NO: 1214582 - RNA, 14 nt, Human
guggguacgggagg

SEQ ID NO: 1214583 - RNA, 17 nt, Human
aagacuguacaaaguag

SEQ ID NO: 1214584 - RNA, 22 nt, Human
aagacugaguacguugugcauu

SEQ ID NO: 1214585 - RNA, 21 nt, Human
aagacugaguacguugugcau

SEQ ID NO: 1214586 - RNA, 17 nt, Human
aagacugaguacguugu

SEQ ID NO: 1214587 - RNA, 18 nt, Human
aagacuaucuaaauguug

SEQ ID NO: 1214588 - RNA, 17 nt, Human
aagacuaucuaaauguu

SEQ ID NO: 1214589 - RNA, 16 nt, Human
aagacuaucuaaaugu

SEQ ID NO: 1214590 - RNA, 22 nt, Human
aagacccuuguggucccacccc

SEQ ID NO: 1214591 - RNA, 21 nt, Human
aagacccuuguggucccaccc

SEQ ID NO: 1214592 - RNA, 18 nt, Human
aagacccuugugguccca

SEQ ID NO: 1214593 - RNA, 21 nt, Human
gugcuaucucccccagcccca

SEQ ID NO: 1214594 - RNA, 22 nt, Human
gugcuaggaacacuccuucaca

SEQ ID NO: 1214595 - RNA, 18 nt, Human
gugcuaggaacacuccuu

SEQ ID NO: 1214596 - RNA, 22 nt, Human
aagaaagacuaucuaaauguug

SEQ ID NO: 1214597 - RNA, 20 nt, Human
aagaaagacuaucuaaaugu

SEQ ID NO: 1214598 - RNA, 19 nt, Human
aagaaaaaggaugcacaga

SEQ ID NO: 1214599 - RNA, 18 nt, Human
aagaaaaaggaugcacag

SEQ ID NO: 1214600 - RNA, 17 nt, Human
aagaaaaaggaugcaca

SEQ ID NO: 1214601 - RNA, 15 nt, Human
aagaaaaaggaugca

SEQ ID NO: 1214602 - RNA, 13 nt, Human
aacuuuaccuuuu

SEQ ID NO: 1214603 - RNA, 22 nt, Human
aacuugucuuuggacccugagg

SEQ ID NO: 1214604 - RNA, 18 nt, Human
aacuugucuuuggacccu

SEQ ID NO: 1214605 - RNA, 21 nt, Human
gugaaccaccacacccagccc

SEQ ID NO: 1214606 - RNA, 15 nt, Human
gugccucaagagaag

SEQ ID NO: 1214607 - RNA, 23 nt, Human
gugccuuauggaacacucugaga

SEQ ID NO: 1214608 - RNA, 21 nt, Human
gugccuuauggaacacucuga

SEQ ID NO: 1214609 - RNA, 14 nt, Human
gugccuuauggaac

SEQ ID NO: 1214610 - RNA, 14 nt, Human
gugccucugggacu

SEQ ID NO: 1214611 - RNA, 13 nt, Human
gugccucugggac

SEQ ID NO: 1214612 - RNA, 12 nt, Human
gugccucuggga

SEQ ID NO: 1214613 - RNA, 20 nt, Human
gugcugggauuacaggugug

SEQ ID NO: 1214614 - RNA, 22 nt, Human
gugcugggauuacaagcgugag

SEQ ID NO: 1214615 - RNA, 21 nt, Human
gugcugggauuacaagcguga

SEQ ID NO: 1214616 - RNA, 12 nt, Human
gugcuauguucu

SEQ ID NO: 1214617 - RNA, 22 nt, Human
gugcuaucucccccagccccau

SEQ ID NO: 1214618 - RNA, 23 nt, Human
guggacacagcucuucuccaggc

SEQ ID NO: 1214619 - RNA, 22 nt, Human
guggacacagcucuucuccagg

SEQ ID NO: 1214620 - RNA, 18 nt, Human
guggacacagcucuucuc

SEQ ID NO: 1214621 - RNA, 21 nt, Human
guggaugccugguggcagcug

SEQ ID NO: 1214622 - RNA, 19 nt, Human
guggcaccagcagccugga

SEQ ID NO: 1214623 - RNA, 20 nt, Human
guggauuuaacagaaaugua

SEQ ID NO: 1214624 - RNA, 19 nt, Human
guggauuuaacagaaaugu

SEQ ID NO: 1214625 - RNA, 18 nt, Human
guggauuuaacagaaaug

SEQ ID NO: 1214626 - RNA, 20 nt, Human
guggcagcucaccucucccu

SEQ ID NO: 1214627 - RNA, 16 nt, Human
guggcagcucaccucu

SEQ ID NO: 1214628 - RNA, 14 nt, Human
guggcagcucaccu

SEQ ID NO: 1214629 - RNA, 16 nt, Human
aagaauugaagcagga

SEQ ID NO: 1214630 - RNA, 15 nt, Human
guaggaagacuuugg

SEQ ID NO: 1214631 - RNA, 18 nt, Human
guaggaagguuaauguuc

SEQ ID NO: 1214632 - RNA, 14 nt, Human
aaaggaugcacaga

SEQ ID NO: 1214633 - RNA, 17 nt, Human
aaaggagagcuagcagc

SEQ ID NO: 1214634 - RNA, 19 nt, Human
guagcugggacuacaggca

SEQ ID NO: 1214635 - RNA, 18 nt, Human
guagcugggacuacaggc

SEQ ID NO: 1214636 - RNA, 12 nt, Human
guagcugggacu

SEQ ID NO: 1214637 - RNA, 21 nt, Human
guagcugggacuacaggcacc

SEQ ID NO: 1214638 - RNA, 19 nt, Human
aaaucucaaauuucuaaau

SEQ ID NO: 1214639 - RNA, 17 nt, Human
aaaucucaaauuucuaa

SEQ ID NO: 1214640 - RNA, 16 nt, Human
aaaucucaaauuucua

SEQ ID NO: 1214641 - RNA, 15 nt, Human
aaaucucaaauuucu

SEQ ID NO: 1214642 - RNA, 17 nt, Human
aaaugaaaaucgugaca

SEQ ID NO: 1214643 - RNA, 18 nt, Human
aaaucccuuaccucggug

SEQ ID NO: 1214644 - RNA, 15 nt, Human
aaaucccauuuaaaa

SEQ ID NO: 1214645 - RNA, 13 nt, Human
aaaucgaugcagu

SEQ ID NO: 1214646 - RNA, 19 nt, Human
aaaugaggucagagccugc

SEQ ID NO: 1214647 - RNA, 17 nt, Human
aaaugaggucagagccu

SEQ ID NO: 1214648 - RNA, 23 nt, Human
aaaugagguacucuccuggaaau

SEQ ID NO: 1214649 - RNA, 16 nt, Human
aaaugagguacucucc

SEQ ID NO: 1214650 - RNA, 19 nt, Human
aaaugagccuggcaagaau

SEQ ID NO: 1214651 - RNA, 13 nt, Human
aaaugagccuggc

SEQ ID NO: 1214652 - RNA, 22 nt, Human
aaaugcaccuggaauauauaac

SEQ ID NO: 1214653 - RNA, 18 nt, Human
aaaugcaccuggaauaua

SEQ ID NO: 1214654 - RNA, 14 nt, Human
aaaugcaccuggaa

SEQ ID NO: 1214655 - RNA, 20 nt, Human
aaaugggcagagcagagacc

SEQ ID NO: 1214656 - RNA, 18 nt, Human
aaaugggcagagcagaga

SEQ ID NO: 1214657 - RNA, 15 nt, Human
aaaugggcagagcag

SEQ ID NO: 1214658 - RNA, 23 nt, Human
aaaugccuuacccucauguucuu

SEQ ID NO: 1214659 - RNA, 13 nt, Human
aaaugcccagcuu

SEQ ID NO: 1214660 - RNA, 18 nt, Human
aaaugcccagccccuucu

SEQ ID NO: 1214661 - RNA, 15 nt, Human
aaaugcccagccccu

SEQ ID NO: 1214662 - RNA, 14 nt, Human
aaaugcccagcccc

SEQ ID NO: 1214663 - RNA, 13 nt, Human
aaaugcccagccc

SEQ ID NO: 1214664 - RNA, 13 nt, Human
guaugguggcugg

SEQ ID NO: 1214665 - RNA, 15 nt, Human
guaugggagagaaga

SEQ ID NO: 1214666 - RNA, 15 nt, Human
guauucuuauuuaau

SEQ ID NO: 1214667 - RNA, 14 nt, Human
guaugggagagaag

SEQ ID NO: 1214668 - RNA, 15 nt, Human
guaucccuacuguaa

SEQ ID NO: 1214669 - RNA, 19 nt, Human
aaaugggggugcauuugag

SEQ ID NO: 1214670 - RNA, 18 nt, Human
aaaugggggugcauuuga

SEQ ID NO: 1214671 - RNA, 17 nt, Human
aaaugggggugcauuug

SEQ ID NO: 1214672 - RNA, 16 nt, Human
aaaugggggugcauuu

SEQ ID NO: 1214673 - RNA, 15 nt, Human
aaaugggggugcauu

SEQ ID NO: 1214674 - RNA, 22 nt, Human
guauuggcuagagguucaaaga

SEQ ID NO: 1214675 - RNA, 23 nt, Human
aaauuaacuuuuauaaacuuuac

SEQ ID NO: 1214676 - RNA, 22 nt, Human
aaauuaacuuuuauaaacuuua

SEQ ID NO: 1214677 - RNA, 21 nt, Human
aaauuaacuuuuauaaacuuu

SEQ ID NO: 1214678 - RNA, 14 nt, Human
aaauucaugcugcu

SEQ ID NO: 1214679 - RNA, 12 nt, Human
aaauuucuaaau

SEQ ID NO: 1214680 - RNA, 15 nt, Human
guauuuuuuuacuaa

SEQ ID NO: 1214681 - RNA, 14 nt, Human
guauuuuuuuacua

SEQ ID NO: 1214682 - RNA, 20 nt, Human
gucacacaguauuacuucug

SEQ ID NO: 1214683 - RNA, 16 nt, Human
gucacacacuuuggcu

SEQ ID NO: 1214684 - RNA, 19 nt, Human
gucaaaguggugagaggca

SEQ ID NO: 1214685 - RNA, 21 nt, Human
guauuuuuuuacuaauagaca

SEQ ID NO: 1214686 - RNA, 17 nt, Human
guauuuuuuuacuaaua

SEQ ID NO: 1214687 - RNA, 23 nt, Human
aaccaucauugaaaucuuuuugc

SEQ ID NO: 1214688 - RNA, 21 nt, Human
aaccaucauugaaaucuuuuu

SEQ ID NO: 1214689 - RNA, 20 nt, Human
aaccaucauugaaaucuuuu

SEQ ID NO: 1214690 - RNA, 19 nt, Human
aaccaucauugaaaucuuu

SEQ ID NO: 1214691 - RNA, 22 nt, Human
aaccacaucuugcucugcugac

SEQ ID NO: 1214692 - RNA, 20 nt, Human
aaccacaucuugcucugcug

SEQ ID NO: 1214693 - RNA, 14 nt, Human
aaccuccugggcua

SEQ ID NO: 1214694 - RNA, 17 nt, Human
aaccuccgccucuuggg

SEQ ID NO: 1214695 - RNA, 15 nt, Human
aacccccagccugcu

SEQ ID NO: 1214696 - RNA, 14 nt, Human
aacccccagccugc

SEQ ID NO: 1214697 - RNA, 13 nt, Human
aacccccagccug

SEQ ID NO: 1214698 - RNA, 17 nt, Human
aacccagcucuggucca

SEQ ID NO: 1214699 - RNA, 14 nt, Human
aacccagcucuggu

SEQ ID NO: 1214700 - RNA, 13 nt, Human
aacccagcucugg

SEQ ID NO: 1214701 - RNA, 11 nt, Human
aacccagcucu

SEQ ID NO: 1214702 - RNA, 19 nt, Human
gugaaccaccacacccagc

SEQ ID NO: 1214703 - RNA, 22 nt, Human
aacguggcugcuucaaggaucc

SEQ ID NO: 1214704 - RNA, 19 nt, Human
aacguggcugcuucaagga

SEQ ID NO: 1214705 - RNA, 16 nt, Human
aacguggcugcuucaa

SEQ ID NO: 1214706 - RNA, 24 nt, Human
gucuuuucuugcaugaggcuagug

SEQ ID NO: 1214707 - RNA, 19 nt, Human
gucuuuucuugcaugaggc

SEQ ID NO: 1214708 - RNA, 14 nt, Human
gucuuuucuugcau

SEQ ID NO: 1214709 - RNA, 18 nt, Human
gucuuuggacccugaggc

SEQ ID NO: 1214710 - RNA, 17 nt, Human
gucuuuggacccugagg

SEQ ID NO: 1214711 - RNA, 15 nt, Human
gucuuuggacccuga

SEQ ID NO: 1214712 - RNA, 14 nt, Human
gucuuuggacccug

SEQ ID NO: 1214713 - RNA, 15 nt, Human
gucuuagauguauau

SEQ ID NO: 1214714 - RNA, 20 nt, Human
aacacuguucucugcccucc

SEQ ID NO: 1214715 - RNA, 15 nt, Human
aacacuguucucugc

SEQ ID NO: 1214716 - RNA, 14 nt, Human
aacacucugagacu

SEQ ID NO: 1214717 - RNA, 13 nt, Human
aacacucugagac

SEQ ID NO: 1214718 - RNA, 12 nt, Human
aacacucugaga

SEQ ID NO: 1214719 - RNA, 11 nt, Human
aacacucugag

SEQ ID NO: 1214720 - RNA, 12 nt, Human
aacacuccuuca

SEQ ID NO: 1214721 - RNA, 21 nt, Human
aacacucauugaccugaggcc

SEQ ID NO: 1214722 - RNA, 22 nt, Human
gucauuugagcagggcucagcg

SEQ ID NO: 1214723 - RNA, 16 nt, Human
aacacuguucucugcc

SEQ ID NO: 1214724 - RNA, 21 nt, Human
aacacuguucucugcccucca

SEQ ID NO: 1214725 - RNA, 21 nt, Human
gucauuugagcagggcucagc

SEQ ID NO: 1214726 - RNA, 15 nt, Human
aacaaggcaaggcug

SEQ ID NO: 1214727 - RNA, 20 nt, Human
aacaagaccacguuucuaaa

SEQ ID NO: 1214728 - RNA, 19 nt, Human
aacaagaccacguuucuaa

SEQ ID NO: 1214729 - RNA, 17 nt, Human
aacaagaccacguuucu

SEQ ID NO: 1214730 - RNA, 16 nt, Human
aacaagaccacguuuc

SEQ ID NO: 1214731 - RNA, 21 nt, Human
gucacacaguauuacuucugc

SEQ ID NO: 1214732 - RNA, 16 nt, Human
gucacaggcaggucca

SEQ ID NO: 1214733 - RNA, 15 nt, Human
gucacaggcaggucc

SEQ ID NO: 1214734 - RNA, 13 nt, Human
gucacaggcaggu

SEQ ID NO: 1214735 - RNA, 23 nt, Human
aacaggcugggcuucaguggcag

SEQ ID NO: 1214736 - RNA, 22 nt, Human
aacaggcugggcuucaguggca

SEQ ID NO: 1214737 - RNA, 20 nt, Human
aacagacuggaagcacagcu

SEQ ID NO: 1214738 - RNA, 19 nt, Human
aacagacuggaagcacagc

SEQ ID NO: 1214739 - RNA, 21 nt, Human
aacagaaauguacagcaagga

SEQ ID NO: 1214740 - RNA, 11 nt, Human
aacagaaaugu

SEQ ID NO: 1214741 - RNA, 10 nt, Human
aacagaaaug

SEQ ID NO: 1214742 - RNA, 21 nt, Human
guccggucccugucccagugc

SEQ ID NO: 1214743 - RNA, 16 nt, Human
aacauacucccaucug

SEQ ID NO: 1214744 - RNA, 15 nt, Human
aacauacucccaucu

SEQ ID NO: 1214745 - RNA, 14 nt, Human
aacauacucccauc

SEQ ID NO: 1214746 - RNA, 17 nt, Human
caagagggucugaggaa

SEQ ID NO: 1214747 - RNA, 16 nt, Human
caagagggucugagga

SEQ ID NO: 1214748 - RNA, 12 nt, Human
caagagggucug

SEQ ID NO: 1214749 - RNA, 23 nt, Human
caagacgcugugcugcccugccc

SEQ ID NO: 1214750 - RNA, 22 nt, Human
caagacgcugugcugcccugcc

SEQ ID NO: 1214751 - RNA, 21 nt, Human
caagacgcugugcugcccugc

SEQ ID NO: 1214752 - RNA, 20 nt, Human
caagacgcugugcugcccug

SEQ ID NO: 1214753 - RNA, 14 nt, Human
caagaccuucuccu

SEQ ID NO: 1214754 - RNA, 13 nt, Human
caagaccuucucc

SEQ ID NO: 1214755 - RNA, 21 nt, Human
caaggcugucaauuacaggaa

SEQ ID NO: 1214756 - RNA, 14 nt, Human
caaggcugucaauu

SEQ ID NO: 1214757 - RNA, 13 nt, Human
caaggcugucaau

SEQ ID NO: 1214758 - RNA, 21 nt, Human
caaggcugggggaagaagcuc

SEQ ID NO: 1214759 - RNA, 17 nt, Human
caaggauccugagccag

SEQ ID NO: 1214760 - RNA, 16 nt, Human
caaggauccugagcca

SEQ ID NO: 1214761 - RNA, 15 nt, Human
caaggauccugagcc

SEQ ID NO: 1214762 - RNA, 14 nt, Human
caaggauccugagc

SEQ ID NO: 1214763 - RNA, 16 nt, Human
caagggccuggccuga

SEQ ID NO: 1214764 - RNA, 21 nt, Human
caagugauucuccugccucag

SEQ ID NO: 1214765 - RNA, 20 nt, Human
caagugauucuccugccuca

SEQ ID NO: 1214766 - RNA, 19 nt, Human
caagugauucuccugccuc

SEQ ID NO: 1214767 - RNA, 19 nt, Human
caagugagacccugucuca

SEQ ID NO: 1214768 - RNA, 15 nt, Human
caagugagacccugu

SEQ ID NO: 1214769 - RNA, 14 nt, Human
caagugagacccug

SEQ ID NO: 1214770 - RNA, 23 nt, Human
caagugaaaaaggaggaagagaa

SEQ ID NO: 1214771 - RNA, 22 nt, Human
caagugaaaaaggaggaagaga

SEQ ID NO: 1214772 - RNA, 13 nt, Human
caaggucauuuuu

SEQ ID NO: 1214773 - RNA, 17 nt, Human
caaggggcccaaauucu

SEQ ID NO: 1214774 - RNA, 23 nt, Human
caaggggaauguuugccucugcc

SEQ ID NO: 1214775 - RNA, 21 nt, Human
caaggggaauguuugccucug

SEQ ID NO: 1214776 - RNA, 15 nt, Human
caagggccuggccug

SEQ ID NO: 1214777 - RNA, 14 nt, Human
caagggccuggccu

SEQ ID NO: 1214778 - RNA, 13 nt, Human
caagggccuggcc

SEQ ID NO: 1214779 - RNA, 16 nt, Human
caacugcauuggcuuu

SEQ ID NO: 1214780 - RNA, 23 nt, Human
caacugcaucaagaugugacaug

SEQ ID NO: 1214781 - RNA, 20 nt, Human
caacugcaucaagaugugac

SEQ ID NO: 1214782 - RNA, 17 nt, Human
caacugcaucaagaugu

SEQ ID NO: 1214783 - RNA, 21 nt, Human
caaccugauugugucucuugg

SEQ ID NO: 1214784 - RNA, 19 nt, Human
caaccugauugugucucuu

SEQ ID NO: 1214785 - RNA, 17 nt, Human
caaccugauugugucuc

SEQ ID NO: 1214786 - RNA, 16 nt, Human
caacauacucccaucu

SEQ ID NO: 1214787 - RNA, 15 nt, Human
caacauacucccauc

SEQ ID NO: 1214788 - RNA, 14 nt, Human
caacauacucccau

SEQ ID NO: 1214789 - RNA, 17 nt, Human
caacaggcugggcuuca

SEQ ID NO: 1214790 - RNA, 14 nt, Human
caacaggcugggcu

SEQ ID NO: 1214791 - RNA, 20 nt, Human
caacaggcugggcuucagug

SEQ ID NO: 1214792 - RNA, 19 nt, Human
caaaguggugagaggcauc

SEQ ID NO: 1214793 - RNA, 17 nt, Human
caaaguggugagaggca

SEQ ID NO: 1214794 - RNA, 16 nt, Human
caaaguggugagaggc

SEQ ID NO: 1214795 - RNA, 23 nt, Human
caaaggguaucaggugcugccau

SEQ ID NO: 1214796 - RNA, 21 nt, Human
caaaggguaucaggugcugcc

SEQ ID NO: 1214797 - RNA, 20 nt, Human
caaaggguaucaggugcugc

SEQ ID NO: 1214798 - RNA, 20 nt, Human
caaaggagauuggaaggaac

SEQ ID NO: 1214799 - RNA, 14 nt, Human
caaaggagauugga

SEQ ID NO: 1214800 - RNA, 21 nt, Human
caaagagguuuuaaaaaaauc

SEQ ID NO: 1214801 - RNA, 14 nt, Human
caaagagguuuuaa

SEQ ID NO: 1214802 - RNA, 20 nt, Human
cacacccagcccacuucugc

SEQ ID NO: 1214803 - RNA, 14 nt, Human
cacacccagcccac

SEQ ID NO: 1214804 - RNA, 16 nt, Human
cacacagcucuguccu

SEQ ID NO: 1214805 - RNA, 22 nt, Human
cacaccagagcccaccuuggcu

SEQ ID NO: 1214806 - RNA, 21 nt, Human
cacaccagagcccaccuuggc

SEQ ID NO: 1214807 - RNA, 15 nt, Human
cacacagcucugucc

SEQ ID NO: 1214808 - RNA, 14 nt, Human
cacacagcucuguc

SEQ ID NO: 1214809 - RNA, 13 nt, Human
cacacagcucugu

SEQ ID NO: 1214810 - RNA, 14 nt, Human
cacacacuuuggcu

SEQ ID NO: 1214811 - RNA, 20 nt, Human
cacacaccagagcccaccuu

SEQ ID NO: 1214812 - RNA, 16 nt, Human
cacacaccagagccca

SEQ ID NO: 1214813 - RNA, 17 nt, Human
cacaaacgggcucagca

SEQ ID NO: 1214814 - RNA, 18 nt, Human
caaugguuuucuugugug

SEQ ID NO: 1214815 - RNA, 14 nt, Human
caaugcacuuuguu

SEQ ID NO: 1214816 - RNA, 13 nt, Human
caaugcacuuugu

SEQ ID NO: 1214817 - RNA, 14 nt, Human
caaugcacugacau

SEQ ID NO: 1214818 - RNA, 23 nt, Human
caaugcaaaccaucauugaaauc

SEQ ID NO: 1214819 - RNA, 22 nt, Human
caaugcaaaccaucauugaaau

SEQ ID NO: 1214820 - RNA, 21 nt, Human
caaugcaaaccaucauugaaa

SEQ ID NO: 1214821 - RNA, 14 nt, Human
caaugcaaaccauc

SEQ ID NO: 1214822 - RNA, 14 nt, Human
caaugauggucacc

SEQ ID NO: 1214823 - RNA, 13 nt, Human
caaugauggucac

SEQ ID NO: 1214824 - RNA, 21 nt, Human
caaugaccuuucaauaggaaa

SEQ ID NO: 1214825 - RNA, 16 nt, Human
caaugaccuuucaaua

SEQ ID NO: 1214826 - RNA, 15 nt, Human
caaugaccuuucaau

SEQ ID NO: 1214827 - RNA, 14 nt, Human
caaugaccuuucaa

SEQ ID NO: 1214828 - RNA, 22 nt, Human
cacacggacacucaaaagcugg

SEQ ID NO: 1214829 - RNA, 23 nt, Human
cacaguccuuaccagcagagcac

SEQ ID NO: 1214830 - RNA, 14 nt, Human
cacaggcccggcuc

SEQ ID NO: 1214831 - RNA, 21 nt, Human
cacagcucuucuccaggcugu

SEQ ID NO: 1214832 - RNA, 20 nt, Human
cacagcucuucuccaggcug

SEQ ID NO: 1214833 - RNA, 19 nt, Human
cacagcucuucuccaggcu

SEQ ID NO: 1214834 - RNA, 17 nt, Human
cacaugagcaucaggcc

SEQ ID NO: 1214835 - RNA, 13 nt, Human
cacaugagcauca

SEQ ID NO: 1214836 - RNA, 21 nt, Human
cacaugagcaucaggccaggc

SEQ ID NO: 1214837 - RNA, 20 nt, Human
cacaugagcaucaggccagg

SEQ ID NO: 1214838 - RNA, 19 nt, Human
cacaugagcaucaggccag

SEQ ID NO: 1214839 - RNA, 18 nt, Human
cacaugagcaucaggcca

SEQ ID NO: 1214840 - RNA, 19 nt, Human
cacaugcaaggucauuuuu

SEQ ID NO: 1214841 - RNA, 17 nt, Human
cacaugcaaggucauuu

SEQ ID NO: 1214842 - RNA, 18 nt, Human
cacaugcacgugugugca

SEQ ID NO: 1214843 - RNA, 20 nt, Human
cacaugcaaggucauuuuuu

SEQ ID NO: 1214844 - RNA, 17 nt, Human
cacauguccaagaagcc

SEQ ID NO: 1214845 - RNA, 16 nt, Human
cacauguccaagaagc

SEQ ID NO: 1214846 - RNA, 13 nt, Human
cacaugccucucu

SEQ ID NO: 1214847 - RNA, 21 nt, Human
cacaugccucucucaggccaa

SEQ ID NO: 1214848 - RNA, 20 nt, Human
cacaugccucucucaggcca

SEQ ID NO: 1214849 - RNA, 19 nt, Human
caccacacccagcccacuu

SEQ ID NO: 1214850 - RNA, 22 nt, Human
caccagagcccaccuuggcuca

SEQ ID NO: 1214851 - RNA, 20 nt, Human
caccagagcccaccuuggcu

SEQ ID NO: 1214852 - RNA, 18 nt, Human
caccagagcccaccuugg

SEQ ID NO: 1214853 - RNA, 17 nt, Human
caccagagcccaccuug

SEQ ID NO: 1214854 - RNA, 15 nt, Human
caccagagcccaccu

SEQ ID NO: 1214855 - RNA, 15 nt, Human
caccaagcccaguua

SEQ ID NO: 1214856 - RNA, 13 nt, Human
caccaagcccagu

SEQ ID NO: 1214857 - RNA, 12 nt, Human
caccaagcccag

SEQ ID NO: 1214858 - RNA, 23 nt, Human
cacauguccaagaagcccaggaa

SEQ ID NO: 1214859 - RNA, 17 nt, Human
caccaacgucugugcca

SEQ ID NO: 1214860 - RNA, 22 nt, Human
cacauguccaagaagcccagga

SEQ ID NO: 1214861 - RNA, 21 nt, Human
cacauguccaagaagcccagg

SEQ ID NO: 1214862 - RNA, 19 nt, Human
cacauguccaagaagccca

SEQ ID NO: 1214863 - RNA, 18 nt, Human
cacauguccaagaagccc

SEQ ID NO: 1214864 - RNA, 18 nt, Human
caccaucaugucuggcua

SEQ ID NO: 1214865 - RNA, 17 nt, Human
caccaucaugucuggcu

SEQ ID NO: 1214866 - RNA, 15 nt, Human
caccaucaugucugg

SEQ ID NO: 1214867 - RNA, 24 nt, Human
caccaucaagccaccaacauacuc

SEQ ID NO: 1214868 - RNA, 19 nt, Human
caccaucaagccaccaaca

SEQ ID NO: 1214869 - RNA, 17 nt, Human
caccaucaagccaccaa

SEQ ID NO: 1214870 - RNA, 16 nt, Human
caccaucaagccacca

SEQ ID NO: 1214871 - RNA, 12 nt, Human
caccagcagccu

SEQ ID NO: 1214872 - RNA, 15 nt, Human
caccaucaagccacc

SEQ ID NO: 1214873 - RNA, 14 nt, Human
caccaucaagccac

SEQ ID NO: 1214874 - RNA, 13 nt, Human
caccaucaagcca

SEQ ID NO: 1214875 - RNA, 21 nt, Human
caccauauuaccacagacaua

SEQ ID NO: 1214876 - RNA, 13 nt, Human
cacccaagggccu

SEQ ID NO: 1214877 - RNA, 15 nt, Human
uuuacuuuguguuca

SEQ ID NO: 1214878 - RNA, 20 nt, Human
uuguauuuuacuaauaaaau

SEQ ID NO: 1214879 - RNA, 18 nt, Human
uuuauaaacuuuaccuuu

SEQ ID NO: 1214880 - RNA, 21 nt, Human
uuuaucgucacugcuuaacuu

SEQ ID NO: 1214881 - RNA, 16 nt, Human
uuuauaaacuuuaccu

SEQ ID NO: 1214882 - RNA, 14 nt, Human
uuuauaaacuuuac

SEQ ID NO: 1214883 - RNA, 18 nt, Human
uuuagaguugauacuaca

SEQ ID NO: 1214884 - RNA, 16 nt, Human
uuuauugucaaagugg

SEQ ID NO: 1214885 - RNA, 14 nt, Human
uuuauugucaaagu

SEQ ID NO: 1214886 - RNA, 15 nt, Human
uuucuagccagagga

SEQ ID NO: 1214887 - RNA, 18 nt, Human
uuucuaaaggcuaccuuu

SEQ ID NO: 1214888 - RNA, 14 nt, Human
uuucuaaaggcuac

SEQ ID NO: 1214889 - RNA, 17 nt, Human
uuucuaaagcugccagc

SEQ ID NO: 1214890 - RNA, 21 nt, Human
uuuccucuuuggucuacacug

SEQ ID NO: 1214891 - RNA, 13 nt, Human
uuuccaggaaggc

SEQ ID NO: 1214892 - RNA, 15 nt, Human
uuuccaaaguacacu

SEQ ID NO: 1214893 - RNA, 12 nt, Human
uuuccaaaguac

SEQ ID NO: 1214894 - RNA, 22 nt, Human
uuucauugcugggcuugucugu

SEQ ID NO: 1214895 - RNA, 16 nt, Human
uuucagccaagaauuc

SEQ ID NO: 1214896 - RNA, 15 nt, Human
uuucagccaagaauu

SEQ ID NO: 1214897 - RNA, 22 nt, Human
uuucaauaggaaaaacugauuu

SEQ ID NO: 1214898 - RNA, 20 nt, Human
uuucaauaggaaaaacugau

SEQ ID NO: 1214899 - RNA, 13 nt, Human
uuugagugccuua

SEQ ID NO: 1214900 - RNA, 22 nt, Human
uuugaggucuguucuuuccaaa

SEQ ID NO: 1214901 - RNA, 15 nt, Human
uuugagcagggcuca

SEQ ID NO: 1214902 - RNA, 14 nt, Human
uuugcagacaggca

SEQ ID NO: 1214903 - RNA, 22 nt, Human
uuugccauguuggccaggcugg

SEQ ID NO: 1214904 - RNA, 18 nt, Human
uuugccauguuggccagg

SEQ ID NO: 1214905 - RNA, 22 nt, Human
uuuguaaauuaacuuuuauaaa

SEQ ID NO: 1214906 - RNA, 17 nt, Human
uuuguaaauuaacuuuu

SEQ ID NO: 1214907 - RNA, 16 nt, Human
uuuguaaauuaacuuu

SEQ ID NO: 1214908 - RNA, 15 nt, Human
uuuguaaauuaacuu

SEQ ID NO: 1214909 - RNA, 21 nt, Human
uuuguccccaccgcagacagg

SEQ ID NO: 1214910 - RNA, 13 nt, Human
uuuguccccaccg

SEQ ID NO: 1214911 - RNA, 19 nt, Human
uuuuaucgucacugcuuaa

SEQ ID NO: 1214912 - RNA, 18 nt, Human
uuuuaucgucacugcuua

SEQ ID NO: 1214913 - RNA, 19 nt, Human
uuuuccaugaguccccugu

SEQ ID NO: 1214914 - RNA, 18 nt, Human
uuuuccaugaguccccug

SEQ ID NO: 1214915 - RNA, 17 nt, Human
uuuucuugcaugaggcu

SEQ ID NO: 1214916 - RNA, 15 nt, Human
uuuuccuucagugcc

SEQ ID NO: 1214917 - RNA, 15 nt, Human
uuuucacaguucucu

SEQ ID NO: 1214918 - RNA, 18 nt, Human
uucaauucucauuuguca

SEQ ID NO: 1214919 - RNA, 21 nt, Human
uucaacagguuuuccugaaga

SEQ ID NO: 1214920 - RNA, 14 nt, Human
uuacgugaguccug

SEQ ID NO: 1214921 - RNA, 13 nt, Human
uuacgugaguccu

SEQ ID NO: 1214922 - RNA, 13 nt, Human
uucaaagauauuu

SEQ ID NO: 1214923 - RNA, 14 nt, Human
uucacucuccuugg

SEQ ID NO: 1214924 - RNA, 19 nt, Human
uucagagacuccugcaggc

SEQ ID NO: 1214925 - RNA, 15 nt, Human
uucagagacuccugc

SEQ ID NO: 1214926 - RNA, 16 nt, Human
uucaggaagcucaggg

SEQ ID NO: 1214927 - RNA, 21 nt, Human
uucagcugguugagguuucaa

SEQ ID NO: 1214928 - RNA, 17 nt, Human
uucagcugacuuuucug

SEQ ID NO: 1214929 - RNA, 18 nt, Human
uucagcugcauacaguuu

SEQ ID NO: 1214930 - RNA, 24 nt, Human
uucagcucugcaagaauugaagca

SEQ ID NO: 1214931 - RNA, 17 nt, Human
uucagcucugcaagaau

SEQ ID NO: 1214932 - RNA, 23 nt, Human
uucagcuccagcucaccagcccc

SEQ ID NO: 1214933 - RNA, 20 nt, Human
uucaggaagcucagggccug

SEQ ID NO: 1214934 - RNA, 19 nt, Human
uucaggaagcucagggccu

SEQ ID NO: 1214935 - RNA, 17 nt, Human
uucaggaagcucagggc

SEQ ID NO: 1214936 - RNA, 17 nt, Human
uuccaugaguccccugu

SEQ ID NO: 1214937 - RNA, 19 nt, Human
uucauuuaggugaggaagc

SEQ ID NO: 1214938 - RNA, 17 nt, Human
uucaucuugaauuguaa

SEQ ID NO: 1214939 - RNA, 12 nt, Human
uucaucuugaau

SEQ ID NO: 1214940 - RNA, 11 nt, Human
uucaucuugaa

SEQ ID NO: 1214941 - RNA, 20 nt, Human
uucaucuuccaacucaaacu

SEQ ID NO: 1214942 - RNA, 23 nt, Human
uucauaaugacuuaagcacacuu

SEQ ID NO: 1214943 - RNA, 13 nt, Human
uucauaaugacuu

SEQ ID NO: 1214944 - RNA, 13 nt, Human
uucaguggcagcu

SEQ ID NO: 1214945 - RNA, 21 nt, Human
uucagugccuuauggaacacu

SEQ ID NO: 1214946 - RNA, 19 nt, Human
uucagugccuuauggaaca

SEQ ID NO: 1214947 - RNA, 19 nt, Human
uucccuuugacgccauccc

SEQ ID NO: 1214948 - RNA, 22 nt, Human
uuccccacuugagaauuacccu

SEQ ID NO: 1214949 - RNA, 23 nt, Human
uuccucauaguaugguggcuggg

SEQ ID NO: 1214950 - RNA, 22 nt, Human
uuccucccucccucuuucccuc

SEQ ID NO: 1214951 - RNA, 21 nt, Human
uuccucccucccucuuucccu

SEQ ID NO: 1214952 - RNA, 19 nt, Human
uuccucccucccucuuucc

SEQ ID NO: 1214953 - RNA, 12 nt, Human
uuccucccuccc

SEQ ID NO: 1214954 - RNA, 19 nt, Human
uucuaaaggcuaccuuugu

SEQ ID NO: 1214955 - RNA, 18 nt, Human
uucuaaaggcuaccuuug

SEQ ID NO: 1214956 - RNA, 17 nt, Human
uucuaaaggcuaccuuu

SEQ ID NO: 1214957 - RNA, 16 nt, Human
uucuaaaggcuaccuu

SEQ ID NO: 1214958 - RNA, 19 nt, Human
uuccuucauucaacccacc

SEQ ID NO: 1214959 - RNA, 23 nt, Human
uuccuucagugccuuauggaaca

SEQ ID NO: 1214960 - RNA, 19 nt, Human
uuccuucagugccuuaugg

SEQ ID NO: 1214961 - RNA, 16 nt, Human
uuccuucagugccuua

SEQ ID NO: 1214962 - RNA, 22 nt, Human
uucugacccaugcugcccugug

SEQ ID NO: 1214963 - RNA, 21 nt, Human
uucugacccaugcugcccugu

SEQ ID NO: 1214964 - RNA, 20 nt, Human
uucugacccaugcugcccug

SEQ ID NO: 1214965 - RNA, 18 nt, Human
uucugacccaugcugccc

SEQ ID NO: 1214966 - RNA, 18 nt, Human
uucucuccagccccugga

SEQ ID NO: 1214967 - RNA, 11 nt, Human
uucuccaggcu

SEQ ID NO: 1214968 - RNA, 16 nt, Human
uucuccacccugcucu

SEQ ID NO: 1214969 - RNA, 13 nt, Human
uucuccacccugc

SEQ ID NO: 1214970 - RNA, 16 nt, Human
uucuccaagcaggaca

SEQ ID NO: 1214971 - RNA, 17 nt, Human
uucuaugacacaugcaa

SEQ ID NO: 1214972 - RNA, 16 nt, Human
uucuaugacacaugca

SEQ ID NO: 1214973 - RNA, 14 nt, Human
uucuauuguuucuu

SEQ ID NO: 1214974 - RNA, 16 nt, Human
uugaacugauaaagau

SEQ ID NO: 1214975 - RNA, 19 nt, Human
uugaacucuucaaucucuu

SEQ ID NO: 1214976 - RNA, 22 nt, Human
uugaacuuugaccucugcagca

SEQ ID NO: 1214977 - RNA, 19 nt, Human
uugaagacuuuucuuucag

SEQ ID NO: 1214978 - RNA, 17 nt, Human
uugaagacagagcuaca

SEQ ID NO: 1214979 - RNA, 22 nt, Human
uugaaaacacuguucucugccc

SEQ ID NO: 1214980 - RNA, 21 nt, Human
uugaaaacacuguucucugcc

SEQ ID NO: 1214981 - RNA, 19 nt, Human
uugaaaacacuguucucug

SEQ ID NO: 1214982 - RNA, 18 nt, Human
uucuuuauaauucuacuu

SEQ ID NO: 1214983 - RNA, 23 nt, Human
uucuugguuuguaaauuaacuuu

SEQ ID NO: 1214984 - RNA, 18 nt, Human
uucuugguuuguaaauua

SEQ ID NO: 1214985 - RNA, 17 nt, Human
uucuugguuuguaaauu

SEQ ID NO: 1214986 - RNA, 16 nt, Human
uucuugguuuguaaau

SEQ ID NO: 1214987 - RNA, 13 nt, Human
uucuugguuugua

SEQ ID NO: 1214988 - RNA, 23 nt, Human
uucuuauuuaaugaaagacugua

SEQ ID NO: 1214989 - RNA, 19 nt, Human
uucuuauuuaaugaaagac

SEQ ID NO: 1214990 - RNA, 11 nt, Human
uucuguucuuu

SEQ ID NO: 1214991 - RNA, 21 nt, Human
uucuguccgagcuuugaaaau

SEQ ID NO: 1214992 - RNA, 17 nt, Human
uucuguccgagcuuuga

SEQ ID NO: 1214993 - RNA, 19 nt, Human
uucuguccuacucuguguc

SEQ ID NO: 1214994 - RNA, 17 nt, Human
uucuguccuacucugug

SEQ ID NO: 1214995 - RNA, 23 nt, Human
uucuguggguuucuaaagcugcc

SEQ ID NO: 1214996 - RNA, 21 nt, Human
uugaccucaggugauccaccc

SEQ ID NO: 1214997 - RNA, 15 nt, Human
uugaccucaggugau

SEQ ID NO: 1214998 - RNA, 21 nt, Human
uugaccgugaggccagagaca

SEQ ID NO: 1214999 - RNA, 20 nt, Human
uugaccgugaggccagagac

SEQ ID NO: 1215000 - RNA, 22 nt, Human
uugacgccaucccagccccaau

SEQ ID NO: 1215001 - RNA, 15 nt, Human
uugacgccaucccag

SEQ ID NO: 1215002 - RNA, 14 nt, Human
uugacgccauccca

SEQ ID NO: 1215003 - RNA, 19 nt, Human
uugaccugaggcccuucuc

SEQ ID NO: 1215004 - RNA, 12 nt, Human
uugaccugaggc

SEQ ID NO: 1215005 - RNA, 22 nt, Human
uugaccugaggcccuucucucc

SEQ ID NO: 1215006 - RNA, 20 nt, Human
uugauagcacagacccugcc

SEQ ID NO: 1215007 - RNA, 19 nt, Human
uugauagcacagacccugc

SEQ ID NO: 1215008 - RNA, 23 nt, Human
uugauagcacagacccugcccug

SEQ ID NO: 1215009 - RNA, 21 nt, Human
uugauagcacagacccugccc

SEQ ID NO: 1215010 - RNA, 18 nt, Human
uugauuuccguuaaaaua

SEQ ID NO: 1215011 - RNA, 17 nt, Human
uugcaacaggcugggcu

SEQ ID NO: 1215012 - RNA, 14 nt, Human
uugcaacaggcugg

SEQ ID NO: 1215013 - RNA, 16 nt, Human
uugcagacaggcaagc

SEQ ID NO: 1215014 - RNA, 22 nt, Human
uugcagacaggcaagcaccucc

SEQ ID NO: 1215015 - RNA, 15 nt, Human
uuggacccugaggcc

SEQ ID NO: 1215016 - RNA, 17 nt, Human
uuggcaaaaaggcagga

SEQ ID NO: 1215017 - RNA, 14 nt, Human
uuggauuguccccg

SEQ ID NO: 1215018 - RNA, 19 nt, Human
uuggaaggaacguccccug

SEQ ID NO: 1215019 - RNA, 20 nt, Human
uugcuggggccgaaagaaca

SEQ ID NO: 1215020 - RNA, 22 nt, Human
uugcugauggugcaaugaccuu

SEQ ID NO: 1215021 - RNA, 20 nt, Human
uugcugauggugcaaugacc

SEQ ID NO: 1215022 - RNA, 18 nt, Human
uugccucugccucugaca

SEQ ID NO: 1215023 - RNA, 16 nt, Human
uugccucugccucuga

SEQ ID NO: 1215024 - RNA, 14 nt, Human
uugccucugccucu

SEQ ID NO: 1215025 - RNA, 11 nt, Human
uugccucugcc

SEQ ID NO: 1215026 - RNA, 11 nt, Human
uugcccaggca

SEQ ID NO: 1215027 - RNA, 18 nt, Human
uugccagucaccccggcc

SEQ ID NO: 1215028 - RNA, 13 nt, Human
uuggcauucccca

SEQ ID NO: 1215029 - RNA, 24 nt, Human
uuggccaaagccaaagcuaggccu

SEQ ID NO: 1215030 - RNA, 14 nt, Human
uuggccaggcuggu

SEQ ID NO: 1215031 - RNA, 22 nt, Human
uuggcugggggccucagugcca

SEQ ID NO: 1215032 - RNA, 21 nt, Human
uuggcugggggccucagugcc

SEQ ID NO: 1215033 - RNA, 18 nt, Human
uuggcugggggccucagu

SEQ ID NO: 1215034 - RNA, 16 nt, Human
uuggguggaugccugg

SEQ ID NO: 1215035 - RNA, 16 nt, Human
uugggaggccauuugu

SEQ ID NO: 1215036 - RNA, 22 nt, Human
uuggcuuuggguugcaggaccu

SEQ ID NO: 1215037 - RNA, 13 nt, Human
uugguccugcugc

SEQ ID NO: 1215038 - RNA, 12 nt, Human
uugguccugcug

SEQ ID NO: 1215039 - RNA, 22 nt, Human
uuggucccccuuccauggacuu

SEQ ID NO: 1215040 - RNA, 13 nt, Human
uuguacagacaac

SEQ ID NO: 1215041 - RNA, 12 nt, Human
uuguacagacaa

SEQ ID NO: 1215042 - RNA, 14 nt, Human
uuguacauaaugcg

SEQ ID NO: 1215043 - RNA, 15 nt, Human
uuguagagccagggu

SEQ ID NO: 1215044 - RNA, 14 nt, Human
uuguagagccaggg

SEQ ID NO: 1215045 - RNA, 17 nt, Human
uguaaauuaacuuuuau

SEQ ID NO: 1215046 - RNA, 16 nt, Human
uguaaauuaacuuuua

SEQ ID NO: 1215047 - RNA, 15 nt, Human
uguaaauuaacuuuu

SEQ ID NO: 1215048 - RNA, 14 nt, Human
uguaaauuaacuuu

SEQ ID NO: 1215049 - RNA, 13 nt, Human
uguaaauuaacuu

SEQ ID NO: 1215050 - RNA, 23 nt, Human
uguaccucuugagccuugaacuu

SEQ ID NO: 1215051 - RNA, 22 nt, Human
uguaccucuugagccuugaacu

SEQ ID NO: 1215052 - RNA, 19 nt, Human
uguacugcauaugaaagga

SEQ ID NO: 1215053 - RNA, 17 nt, Human
uguacgucugacaggca

SEQ ID NO: 1215054 - RNA, 23 nt, Human
ugucccaaaaagaaaggagggga

SEQ ID NO: 1215055 - RNA, 14 nt, Human
ugucagugugacug

SEQ ID NO: 1215056 - RNA, 20 nt, Human
ugucagugugacugaucucu

SEQ ID NO: 1215057 - RNA, 12 nt, Human
ugucagugugac

SEQ ID NO: 1215058 - RNA, 23 nt, Human
uguaucccaugagccucagcauc

SEQ ID NO: 1215059 - RNA, 19 nt, Human
uguaucccaugagccucag

SEQ ID NO: 1215060 - RNA, 18 nt, Human
ugugaguacuacaguccu

SEQ ID NO: 1215061 - RNA, 23 nt, Human
ugugaguacuacaguccucccau

SEQ ID NO: 1215062 - RNA, 20 nt, Human
ugugaguacuacaguccucc

SEQ ID NO: 1215063 - RNA, 19 nt, Human
ugugaguacuacaguccuc

SEQ ID NO: 1215064 - RNA, 21 nt, Human
ugugauacaaugcugugcccu

SEQ ID NO: 1215065 - RNA, 15 nt, Human
ugugagucaccaagc

SEQ ID NO: 1215066 - RNA, 15 nt, Human
ugugacauguuuuau

SEQ ID NO: 1215067 - RNA, 21 nt, Human
ugugacaaggauugcuacugu

SEQ ID NO: 1215068 - RNA, 13 nt, Human
uguccccaccgca

SEQ ID NO: 1215069 - RNA, 14 nt, Human
ugugaaaggaaaga

SEQ ID NO: 1215070 - RNA, 13 nt, Human
ugugaaaggaaag

SEQ ID NO: 1215071 - RNA, 22 nt, Human
ugucuuuggacccugaggccca

SEQ ID NO: 1215072 - RNA, 19 nt, Human
ugucuuuggacccugaggc

SEQ ID NO: 1215073 - RNA, 18 nt, Human
ugucuuuggacccugagg

SEQ ID NO: 1215074 - RNA, 12 nt, Human
ugugggaagggg

SEQ ID NO: 1215075 - RNA, 14 nt, Human
uguggacacagcuc

SEQ ID NO: 1215076 - RNA, 16 nt, Human
uguggacacagcucuu

SEQ ID NO: 1215077 - RNA, 15 nt, Human
uguggacacagcucu

SEQ ID NO: 1215078 - RNA, 21 nt, Human
uguggagaagcggcuggcagc

SEQ ID NO: 1215079 - RNA, 12 nt, Human
uguggagaagcg

SEQ ID NO: 1215080 - RNA, 20 nt, Human
ugugcgugcauguguguuca

SEQ ID NO: 1215081 - RNA, 17 nt, Human
ugugccucugggacugg

SEQ ID NO: 1215082 - RNA, 14 nt, Human
ugugcacguacaca

SEQ ID NO: 1215083 - RNA, 22 nt, Human
ugugcacaugcacgugugugca

SEQ ID NO: 1215084 - RNA, 16 nt, Human
ugugccucugggacug

SEQ ID NO: 1215085 - RNA, 15 nt, Human
ugugccucugggacu

SEQ ID NO: 1215086 - RNA, 13 nt, Human
ugugccucuggga

SEQ ID NO: 1215087 - RNA, 14 nt, Human
uguuggccaggcug

SEQ ID NO: 1215088 - RNA, 11 nt, Human
uguuggccagg

SEQ ID NO: 1215089 - RNA, 12 nt, Human
uguucucugccc

SEQ ID NO: 1215090 - RNA, 18 nt, Human
uguucucugaggacacua

SEQ ID NO: 1215091 - RNA, 16 nt, Human
uguucucugaggacac

SEQ ID NO: 1215092 - RNA, 11 nt, Human
uguugaaagau

SEQ ID NO: 1215093 - RNA, 23 nt, Human
uguucuuucuggcuaugcauuug

SEQ ID NO: 1215094 - RNA, 22 nt, Human
uguucuuucuggcuaugcauuu

SEQ ID NO: 1215095 - RNA, 20 nt, Human
uguucuuucuggcuaugcau

SEQ ID NO: 1215096 - RNA, 15 nt, Human
uguucugacccugcu

SEQ ID NO: 1215097 - RNA, 19 nt, Human
uguucucugcccuccaaga

SEQ ID NO: 1215098 - RNA, 18 nt, Human
uguucugacccugcuuca

SEQ ID NO: 1215099 - RNA, 14 nt, Human
uguucuuucuggcu

SEQ ID NO: 1215100 - RNA, 13 nt, Human
uguguuuauuguc

SEQ ID NO: 1215101 - RNA, 19 nt, Human
ugugucagcauagaaguaa

SEQ ID NO: 1215102 - RNA, 11 nt, Human
uguucagcugg

SEQ ID NO: 1215103 - RNA, 18 nt, Human
uguucagcuccagcucac

SEQ ID NO: 1215104 - RNA, 16 nt, Human
uguucagcuccagcuc

SEQ ID NO: 1215105 - RNA, 15 nt, Human
uguucagcuccagcu

SEQ ID NO: 1215106 - RNA, 16 nt, Human
uguuacugucuucagu

SEQ ID NO: 1215107 - RNA, 15 nt, Human
uguuacugucuucag

SEQ ID NO: 1215108 - RNA, 22 nt, Human
uguuacauuuuuaagugcugca

SEQ ID NO: 1215109 - RNA, 13 nt, Human
uguuacauuuuua

SEQ ID NO: 1215110 - RNA, 20 nt, Human
uuacgguuuuccagguuuaa

SEQ ID NO: 1215111 - RNA, 22 nt, Human
uuaccuuuuuuauacauaaaca

SEQ ID NO: 1215112 - RNA, 20 nt, Human
uuaccuuuuuuauacauaaa

SEQ ID NO: 1215113 - RNA, 19 nt, Human
uuaccuuuuuuauacauaa

SEQ ID NO: 1215114 - RNA, 14 nt, Human
uuaccagcagagca

SEQ ID NO: 1215115 - RNA, 23 nt, Human
uuacauuuuuaagugcugcauuu

SEQ ID NO: 1215116 - RNA, 22 nt, Human
uuacauuuuuaagugcugcauu

SEQ ID NO: 1215117 - RNA, 21 nt, Human
uuacauuuuuaagugcugcau

SEQ ID NO: 1215118 - RNA, 20 nt, Human
uuacauuuuuaagugcugca

SEQ ID NO: 1215119 - RNA, 18 nt, Human
uuaaugucacaggcaggu

SEQ ID NO: 1215120 - RNA, 17 nt, Human
uuaaugucacaggcagg

SEQ ID NO: 1215121 - RNA, 22 nt, Human
uuaaggaugcuuguacauaaug

SEQ ID NO: 1215122 - RNA, 20 nt, Human
uuaaggaugcuuguacauaa

SEQ ID NO: 1215123 - RNA, 19 nt, Human
uuaaggaugcuuguacaua

SEQ ID NO: 1215124 - RNA, 18 nt, Human
uuaaggaugcuuguacau

SEQ ID NO: 1215125 - RNA, 17 nt, Human
uuaaggaugcuuguaca

SEQ ID NO: 1215126 - RNA, 21 nt, Human
uuaaggaagacaaugugaaaa

SEQ ID NO: 1215127 - RNA, 18 nt, Human
uuaaaugcaccuggaaua

SEQ ID NO: 1215128 - RNA, 17 nt, Human
uuaaaugcaccuggaau

SEQ ID NO: 1215129 - RNA, 16 nt, Human
uuaaaugcaccuggaa

SEQ ID NO: 1215130 - RNA, 18 nt, Human
uuaaaugcccagccccuu

SEQ ID NO: 1215131 - RNA, 13 nt, Human
uuaaaugcccagc

SEQ ID NO: 1215132 - RNA, 18 nt, Human
uuaaacuuaaucuaaaug

SEQ ID NO: 1215133 - RNA, 16 nt, Human
uuaaacuuaaucuaaa

SEQ ID NO: 1215134 - RNA, 14 nt, Human
uuaaaacccaagug

SEQ ID NO: 1215135 - RNA, 22 nt, Human
uuaaacuuaaucuaaauggaac

SEQ ID NO: 1215136 - RNA, 20 nt, Human
uuaaacuuaaucuaaaugga

SEQ ID NO: 1215137 - RNA, 23 nt, Human
uguuuccuggcacugcuuccagu

SEQ ID NO: 1215138 - RNA, 22 nt, Human
uguuuccuggcacugcuuccag

SEQ ID NO: 1215139 - RNA, 21 nt, Human
uguuuccuggcacugcuucca

SEQ ID NO: 1215140 - RNA, 20 nt, Human
uguuuccuggcacugcuucc

SEQ ID NO: 1215141 - RNA, 17 nt, Human
uguuuguugucagcuga

SEQ ID NO: 1215142 - RNA, 17 nt, Human
ugggguggggaccucag

SEQ ID NO: 1215143 - RNA, 16 nt, Human
uggguucacugcaacc

SEQ ID NO: 1215144 - RNA, 23 nt, Human
uggguucaagcgauucuucugcu

SEQ ID NO: 1215145 - RNA, 14 nt, Human
uggguguggcgcag

SEQ ID NO: 1215146 - RNA, 23 nt, Human
ugggugucaagagggucugagga

SEQ ID NO: 1215147 - RNA, 21 nt, Human
ugggugucaagagggucugag

SEQ ID NO: 1215148 - RNA, 15 nt, Human
uggguucuacccagg

SEQ ID NO: 1215149 - RNA, 14 nt, Human
ugggccuccugugu

SEQ ID NO: 1215150 - RNA, 22 nt, Human
ugggccuccugugugugcgccu

SEQ ID NO: 1215151 - RNA, 16 nt, Human
ugggccuccugugugu

SEQ ID NO: 1215152 - RNA, 24 nt, Human
ugggagcugccuguucagcuccag

SEQ ID NO: 1215153 - RNA, 16 nt, Human
uggggcagcuugaggg

SEQ ID NO: 1215154 - RNA, 22 nt, Human
ugggcuuggggaccagagcugc

SEQ ID NO: 1215155 - RNA, 21 nt, Human
ugggcuuggggaccagagcug

SEQ ID NO: 1215156 - RNA, 19 nt, Human
ugggcuuggggaccagagc

SEQ ID NO: 1215157 - RNA, 20 nt, Human
ugggcuucaguggcagcugc

SEQ ID NO: 1215158 - RNA, 21 nt, Human
ugggcuucaguggcagcugcu

SEQ ID NO: 1215159 - RNA, 19 nt, Human
ugggcuucaguggcagcug

SEQ ID NO: 1215160 - RNA, 18 nt, Human
ugggcuucaguggcagcu

SEQ ID NO: 1215161 - RNA, 16 nt, Human
ugggacaugggaaagg

SEQ ID NO: 1215162 - RNA, 15 nt, Human
uggcugggggccuca

SEQ ID NO: 1215163 - RNA, 22 nt, Human
uggcugguuagagguucccuuu

SEQ ID NO: 1215164 - RNA, 14 nt, Human
uggcugggggccuc

SEQ ID NO: 1215165 - RNA, 22 nt, Human
ugggaaugaaugucagugugac

SEQ ID NO: 1215166 - RNA, 22 nt, Human
uggcgugcaguggugcgaucug

SEQ ID NO: 1215167 - RNA, 15 nt, Human
uggcgcugccccugg

SEQ ID NO: 1215168 - RNA, 14 nt, Human
uggcgcugccccug

SEQ ID NO: 1215169 - RNA, 15 nt, Human
uggccagaugcacca

SEQ ID NO: 1215170 - RNA, 12 nt, Human
uggcugggggcc

SEQ ID NO: 1215171 - RNA, 19 nt, Human
uggcucuuccaggcuggga

SEQ ID NO: 1215172 - RNA, 16 nt, Human
uggcucuuccaggcug

SEQ ID NO: 1215173 - RNA, 15 nt, Human
uggcucuuccaggcu

SEQ ID NO: 1215174 - RNA, 13 nt, Human
uggcucuuccagg

SEQ ID NO: 1215175 - RNA, 14 nt, Human
uggcuaaauucaug

SEQ ID NO: 1215176 - RNA, 22 nt, Human
uggcucagguggggucacucug

SEQ ID NO: 1215177 - RNA, 20 nt, Human
uggcucagguggggucacuc

SEQ ID NO: 1215178 - RNA, 15 nt, Human
uggaagacagcucuu

SEQ ID NO: 1215179 - RNA, 14 nt, Human
uggaagacagcucu

SEQ ID NO: 1215180 - RNA, 12 nt, Human
uggaagacagcu

SEQ ID NO: 1215181 - RNA, 11 nt, Human
uggaagacagc

SEQ ID NO: 1215182 - RNA, 16 nt, Human
uggaaaauaaauuauu

SEQ ID NO: 1215183 - RNA, 15 nt, Human
uggaaaauaaauuau

SEQ ID NO: 1215184 - RNA, 17 nt, Human
uggaaaaauagccugcc

SEQ ID NO: 1215185 - RNA, 12 nt, Human
ugcuucucacug

SEQ ID NO: 1215186 - RNA, 16 nt, Human
ugcuucuucagagacu

SEQ ID NO: 1215187 - RNA, 21 nt, Human
ugcuuccagugaggcucugcc

SEQ ID NO: 1215188 - RNA, 20 nt, Human
ugcuuccagugaggcucugc

SEQ ID NO: 1215189 - RNA, 19 nt, Human
ugcuuccagugaggcucug

SEQ ID NO: 1215190 - RNA, 18 nt, Human
ugcuuccagugaggcucu

SEQ ID NO: 1215191 - RNA, 16 nt, Human
uggacaggcauguucu

SEQ ID NO: 1215192 - RNA, 12 nt, Human
uggacaggcaug

SEQ ID NO: 1215193 - RNA, 17 nt, Human
uggacaggcauguucuc

SEQ ID NO: 1215194 - RNA, 22 nt, Human
uggaggcaugugaugagaggaa

SEQ ID NO: 1215195 - RNA, 23 nt, Human
uggcagcugcgguccacccagga

SEQ ID NO: 1215196 - RNA, 22 nt, Human
uggcagcugcgguccacccagg

SEQ ID NO: 1215197 - RNA, 21 nt, Human
uggcagcugcgguccacccag

SEQ ID NO: 1215198 - RNA, 18 nt, Human
uggcacugcuuccaguga

SEQ ID NO: 1215199 - RNA, 16 nt, Human
uggcacugcuuccagu

SEQ ID NO: 1215200 - RNA, 14 nt, Human
uggcacugcuucca

SEQ ID NO: 1215201 - RNA, 15 nt, Human
uggaugccugguggc

SEQ ID NO: 1215202 - RNA, 14 nt, Human
uggaugccuggugg

SEQ ID NO: 1215203 - RNA, 19 nt, Human
uggcagugggagcugccug

SEQ ID NO: 1215204 - RNA, 16 nt, Human
uggcagugggagcugc

SEQ ID NO: 1215205 - RNA, 15 nt, Human
uggcagugggagcug

SEQ ID NO: 1215206 - RNA, 14 nt, Human
uggcagugggagcu

SEQ ID NO: 1215207 - RNA, 20 nt, Human
uggcagugggagcugccugu

SEQ ID NO: 1215208 - RNA, 14 nt, Human
ugcaggaccucagg

SEQ ID NO: 1215209 - RNA, 18 nt, Human
ugcaggaccucaggugag

SEQ ID NO: 1215210 - RNA, 16 nt, Human
ugcaggaccucaggug

SEQ ID NO: 1215211 - RNA, 15 nt, Human
ugcaggaccucaggu

SEQ ID NO: 1215212 - RNA, 20 nt, Human
ugcagcaauaaagcagcguu

SEQ ID NO: 1215213 - RNA, 16 nt, Human
ugcagcaauaaagcag

SEQ ID NO: 1215214 - RNA, 15 nt, Human
ugcagcaauaaagca

SEQ ID NO: 1215215 - RNA, 14 nt, Human
ugcagcaauaaagc

SEQ ID NO: 1215216 - RNA, 20 nt, Human
ugcacuuuguucuggcucuu

SEQ ID NO: 1215217 - RNA, 19 nt, Human
ugcacuuuguucuggcucu

SEQ ID NO: 1215218 - RNA, 18 nt, Human
ugcacuuuguucuggcuc

SEQ ID NO: 1215219 - RNA, 15 nt, Human
ugcacuuuguucugg

SEQ ID NO: 1215220 - RNA, 21 nt, Human
ugcacuugcagacucuacaga

SEQ ID NO: 1215221 - RNA, 19 nt, Human
ugcacguacacacacauac

SEQ ID NO: 1215222 - RNA, 16 nt, Human
ugcacguacacacaca

SEQ ID NO: 1215223 - RNA, 22 nt, Human
ugaagucuuuguacagacaaca

SEQ ID NO: 1215224 - RNA, 20 nt, Human
ugaagucuuuguacagacaa

SEQ ID NO: 1215225 - RNA, 17 nt, Human
ugaagucuuuguacaga

SEQ ID NO: 1215226 - RNA, 16 nt, Human
ugaaggcuggguucug

SEQ ID NO: 1215227 - RNA, 22 nt, Human
ugcacagaguuguuacauuuuu

SEQ ID NO: 1215228 - RNA, 21 nt, Human
ugcacagaguuguuacauuuu

SEQ ID NO: 1215229 - RNA, 23 nt, Human
ugcacagaguuguuacauuuuua

SEQ ID NO: 1215230 - RNA, 17 nt, Human
ugcacagcuaacaugga

SEQ ID NO: 1215231 - RNA, 20 nt, Human
ugcacagcuaacauggaagu

SEQ ID NO: 1215232 - RNA, 18 nt, Human
ugcacagcuaacauggaa

SEQ ID NO: 1215233 - RNA, 23 nt, Human
ugcacagcuaacauggaaguacu

SEQ ID NO: 1215234 - RNA, 10 nt, Human
ugcccagccc

SEQ ID NO: 1215235 - RNA, 19 nt, Human
ugcccaccuggccucugca

SEQ ID NO: 1215236 - RNA, 18 nt, Human
ugcccaccuggccucugc

SEQ ID NO: 1215237 - RNA, 17 nt, Human
ugcccaccuggccucug

SEQ ID NO: 1215238 - RNA, 15 nt, Human
ugcccaccuggccuc

SEQ ID NO: 1215239 - RNA, 14 nt, Human
ugccagucaccccg

SEQ ID NO: 1215240 - RNA, 22 nt, Human
ugccagggacagaggggguggc

SEQ ID NO: 1215241 - RNA, 11 nt, Human
ugccagggaca

SEQ ID NO: 1215242 - RNA, 19 nt, Human
ugcauguuacauaagauaa

SEQ ID NO: 1215243 - RNA, 19 nt, Human
ugcaggcagccaggccaca

SEQ ID NO: 1215244 - RNA, 18 nt, Human
ugcaggcagccaggccac

SEQ ID NO: 1215245 - RNA, 17 nt, Human
ugcaggcagccaggcca

SEQ ID NO: 1215246 - RNA, 16 nt, Human
ugcaggcagccaggcc

SEQ ID NO: 1215247 - RNA, 17 nt, Human
ugcaucguuucaucuuc

SEQ ID NO: 1215248 - RNA, 15 nt, Human
ugcaucguuucaucu

SEQ ID NO: 1215249 - RNA, 16 nt, Human
ugcugcaguugccagu

SEQ ID NO: 1215250 - RNA, 15 nt, Human
ugcugcaguugccag

SEQ ID NO: 1215251 - RNA, 23 nt, Human
ugcugauggugcaaugaccuuuc

SEQ ID NO: 1215252 - RNA, 20 nt, Human
ugcugauggugcaaugaccu

SEQ ID NO: 1215253 - RNA, 19 nt, Human
ugcugacagacacaggccc

SEQ ID NO: 1215254 - RNA, 16 nt, Human
ugcugacagacacagg

SEQ ID NO: 1215255 - RNA, 15 nt, Human
ugcugacagacacag

SEQ ID NO: 1215256 - RNA, 22 nt, Human
ugcugaaugguuuucaaaauaa

SEQ ID NO: 1215257 - RNA, 18 nt, Human
ugcugaaugguuuucaaa

SEQ ID NO: 1215258 - RNA, 17 nt, Human
ugcugaaugguuuucaa

SEQ ID NO: 1215259 - RNA, 23 nt, Human
ugcugaauacagaggcaacugca

SEQ ID NO: 1215260 - RNA, 18 nt, Human
ugcugaauacagaggcaa

SEQ ID NO: 1215261 - RNA, 19 nt, Human
ugcuccuggcccacugcau

SEQ ID NO: 1215262 - RNA, 19 nt, Human
ugcuccucuccccagcaag

SEQ ID NO: 1215263 - RNA, 20 nt, Human
ugcuaggaacacuccuucac

SEQ ID NO: 1215264 - RNA, 19 nt, Human
ugcuaggaacacuccuuca

SEQ ID NO: 1215265 - RNA, 17 nt, Human
ugcuaggaacacuccuu

SEQ ID NO: 1215266 - RNA, 16 nt, Human
ugcuaggaacacuccu

SEQ ID NO: 1215267 - RNA, 23 nt, Human
ugcggugcuaucucccccagccc

SEQ ID NO: 1215268 - RNA, 13 nt, Human
ugcgccuacagga

SEQ ID NO: 1215269 - RNA, 22 nt, Human
ugccuuauggaacacucugaga

SEQ ID NO: 1215270 - RNA, 21 nt, Human
ugccuuauggaacacucugag

SEQ ID NO: 1215271 - RNA, 20 nt, Human
ugccuuauggaacacucuga

SEQ ID NO: 1215272 - RNA, 18 nt, Human
ugccuuauggaacacucu

SEQ ID NO: 1215273 - RNA, 22 nt, Human
ugccugaagucacacagugagu

SEQ ID NO: 1215274 - RNA, 18 nt, Human
ugccugaagucacacagu

SEQ ID NO: 1215275 - RNA, 20 nt, Human
ugccuccuuugugaggaagc

SEQ ID NO: 1215276 - RNA, 18 nt, Human
ugccuccuuugugaggaa

SEQ ID NO: 1215277 - RNA, 17 nt, Human
ugccuccuuugugagga

SEQ ID NO: 1215278 - RNA, 16 nt, Human
ugccuccuuugugagg

SEQ ID NO: 1215279 - RNA, 23 nt, Human
ugcccaggcuggcgugcaguggu

SEQ ID NO: 1215280 - RNA, 12 nt, Human
ugcccagccccu

SEQ ID NO: 1215281 - RNA, 11 nt, Human
ugcccagcccc

SEQ ID NO: 1215282 - RNA, 23 nt, Human
ucuguggguuucuaaagcugcca

SEQ ID NO: 1215283 - RNA, 18 nt, Human
ucuguacgucugacaggc

SEQ ID NO: 1215284 - RNA, 17 nt, Human
ucuguacgucugacagg

SEQ ID NO: 1215285 - RNA, 19 nt, Human
ucuguccgagcuuugaaaa

SEQ ID NO: 1215286 - RNA, 22 nt, Human
ucuguggguuucuaaagcugcc

SEQ ID NO: 1215287 - RNA, 14 nt, Human
ucuguccuacucug

SEQ ID NO: 1215288 - RNA, 18 nt, Human
ucuuaaaaaguggaaaaa

SEQ ID NO: 1215289 - RNA, 13 nt, Human
ucugggacacagu

SEQ ID NO: 1215290 - RNA, 12 nt, Human
ucugggacacag

SEQ ID NO: 1215291 - RNA, 18 nt, Human
ucuggcucuuccaggcug

SEQ ID NO: 1215292 - RNA, 17 nt, Human
ucuggcucuuccaggcu

SEQ ID NO: 1215293 - RNA, 16 nt, Human
ucuggcucuuccaggc

SEQ ID NO: 1215294 - RNA, 15 nt, Human
ucuggcucuuccagg

SEQ ID NO: 1215295 - RNA, 17 nt, Human
ucuggcuaugcauuuga

SEQ ID NO: 1215296 - RNA, 14 nt, Human
ucuggcuaugcauu

SEQ ID NO: 1215297 - RNA, 18 nt, Human
ucuggagguacgaaaaga

SEQ ID NO: 1215298 - RNA, 21 nt, Human
ucuugaauuguaaggaaugau

SEQ ID NO: 1215299 - RNA, 18 nt, Human
ucuugaacuccuggccuc

SEQ ID NO: 1215300 - RNA, 17 nt, Human
ucuugaacuccuggccu

SEQ ID NO: 1215301 - RNA, 16 nt, Human
ucuugaacuccuggcc

SEQ ID NO: 1215302 - RNA, 15 nt, Human
ucuucuccaggcugu

SEQ ID NO: 1215303 - RNA, 14 nt, Human
ucuucuccaggcug

SEQ ID NO: 1215304 - RNA, 13 nt, Human
ucuucuccaggcu

SEQ ID NO: 1215305 - RNA, 12 nt, Human
ucuucuccaggc

SEQ ID NO: 1215306 - RNA, 13 nt, Human
ucuugcucugcug

SEQ ID NO: 1215307 - RNA, 12 nt, Human
ucuugcucugcu

SEQ ID NO: 1215308 - RNA, 11 nt, Human
ucuugcucugc

SEQ ID NO: 1215309 - RNA, 15 nt, Human
ucuucaguaagccgu

SEQ ID NO: 1215310 - RNA, 13 nt, Human
ucuuaugggcugg

SEQ ID NO: 1215311 - RNA, 14 nt, Human
ucuuagugugugca

SEQ ID NO: 1215312 - RNA, 15 nt, Human
ucuuauacauuugau

SEQ ID NO: 1215313 - RNA, 14 nt, Human
ucuuccaggcuggg

SEQ ID NO: 1215314 - RNA, 16 nt, Human
ucuucaguaagccgug

SEQ ID NO: 1215315 - RNA, 21 nt, Human
ucuuccacaagagcccaggcc

SEQ ID NO: 1215316 - RNA, 21 nt, Human
ucuucuccacuuucuagccag

SEQ ID NO: 1215317 - RNA, 19 nt, Human
ucuucuccacuuucuagcc

SEQ ID NO: 1215318 - RNA, 19 nt, Human
ucuuuugccguuauuaaaa

SEQ ID NO: 1215319 - RNA, 17 nt, Human
ucuuuugccguuauuaa

SEQ ID NO: 1215320 - RNA, 15 nt, Human
ugaaaagaaaaauga

SEQ ID NO: 1215321 - RNA, 16 nt, Human
ucuuuuugcuuugcuu

SEQ ID NO: 1215322 - RNA, 16 nt, Human
ugaaacgcaaccacca

SEQ ID NO: 1215323 - RNA, 12 nt, Human
ugaaaggaaaga

SEQ ID NO: 1215324 - RNA, 17 nt, Human
ugaaaggaaagaggcuc

SEQ ID NO: 1215325 - RNA, 23 nt, Human
ugaaaugaggucagagccugcag

SEQ ID NO: 1215326 - RNA, 22 nt, Human
ugaaaugaggucagagccugca

SEQ ID NO: 1215327 - RNA, 21 nt, Human
ugaaaugaggucagagccugc

SEQ ID NO: 1215328 - RNA, 20 nt, Human
ugaaaugaggucagagccug

SEQ ID NO: 1215329 - RNA, 19 nt, Human
ugaaaugaggucagagccu

SEQ ID NO: 1215330 - RNA, 17 nt, Human
ugaaaucuuuuugcuuu

SEQ ID NO: 1215331 - RNA, 18 nt, Human
ugaaagggcccagagagg

SEQ ID NO: 1215332 - RNA, 17 nt, Human
ugaaagggcccagagag

SEQ ID NO: 1215333 - RNA, 16 nt, Human
ugaaagggcccagaga

SEQ ID NO: 1215334 - RNA, 13 nt, Human
ugaacugauaaag

SEQ ID NO: 1215335 - RNA, 15 nt, Human
ugaacugauaaagau

SEQ ID NO: 1215336 - RNA, 15 nt, Human
ugaacucuucaaucu

SEQ ID NO: 1215337 - RNA, 22 nt, Human
ugaaccacaucuugcucugcug

SEQ ID NO: 1215338 - RNA, 21 nt, Human
ugaaccacaucuugcucugcu

SEQ ID NO: 1215339 - RNA, 20 nt, Human
ugaaccacaucuugcucugc

SEQ ID NO: 1215340 - RNA, 18 nt, Human
ugaacucuucaaucucuu

SEQ ID NO: 1215341 - RNA, 21 nt, Human
ugaaggcucgagcaugccugg

SEQ ID NO: 1215342 - RNA, 20 nt, Human
ugaaggcucgagcaugccug

SEQ ID NO: 1215343 - RNA, 12 nt, Human
ugaacuugguuc

SEQ ID NO: 1215344 - RNA, 14 nt, Human
ugaacuuggcgcug

SEQ ID NO: 1215345 - RNA, 19 nt, Human
ugaacuggguacuugugga

SEQ ID NO: 1215346 - RNA, 16 nt, Human
ugaagacagagcuaca

SEQ ID NO: 1215347 - RNA, 14 nt, Human
ugaagacagagcua

SEQ ID NO: 1215348 - RNA, 23 nt, Human
ugaacuggguacuuguggacaca

SEQ ID NO: 1215349 - RNA, 14 nt, Human
ugaagacuuuucuu

SEQ ID NO: 1215350 - RNA, 22 nt, Human
ugaagacuuuucuuucagccaa

SEQ ID NO: 1215351 - RNA, 17 nt, Human
ugaagacuuuucuuuca

SEQ ID NO: 1215352 - RNA, 14 nt, Human
uccuuaccagcaga

SEQ ID NO: 1215353 - RNA, 19 nt, Human
uccuucuguccuacucugu

SEQ ID NO: 1215354 - RNA, 12 nt, Human
uccuucuguccu

SEQ ID NO: 1215355 - RNA, 17 nt, Human
uccuggcccacugcauc

SEQ ID NO: 1215356 - RNA, 22 nt, Human
uccuggcaugggaaugaauguc

SEQ ID NO: 1215357 - RNA, 10 nt, Human
ucccucccuu

SEQ ID NO: 1215358 - RNA, 15 nt, Human
uccugguguggaaga

SEQ ID NO: 1215359 - RNA, 17 nt, Human
ucgaguuacagacaaag

SEQ ID NO: 1215360 - RNA, 15 nt, Human
ucgaguuacagacaa

SEQ ID NO: 1215361 - RNA, 22 nt, Human
ucuaacuucaccauauuaccac

SEQ ID NO: 1215362 - RNA, 16 nt, Human
ucuaacuucaccauau

SEQ ID NO: 1215363 - RNA, 15 nt, Human
ucuaacuucaccaua

SEQ ID NO: 1215364 - RNA, 22 nt, Human
ucuagggaaaaaccagcgugug

SEQ ID NO: 1215365 - RNA, 22 nt, Human
ucuacugaggugcuauguucuu

SEQ ID NO: 1215366 - RNA, 19 nt, Human
ucuacugaggugcuauguu

SEQ ID NO: 1215367 - RNA, 18 nt, Human
ucuacugaggugcuaugu

SEQ ID NO: 1215368 - RNA, 21 nt, Human
ucuacacugugcugagucuga

SEQ ID NO: 1215369 - RNA, 15 nt, Human
ucuacacugugcuga

SEQ ID NO: 1215370 - RNA, 14 nt, Human
ucuacacugugcug

SEQ ID NO: 1215371 - RNA, 12 nt, Human
ucuacacugugc

SEQ ID NO: 1215372 - RNA, 21 nt, Human
ucucagaaucucaaauaacua

SEQ ID NO: 1215373 - RNA, 17 nt, Human
ucucagaaucucaaaua

SEQ ID NO: 1215374 - RNA, 21 nt, Human
ucucacuguugcccaggcugg

SEQ ID NO: 1215375 - RNA, 20 nt, Human
ucucacuguugcccaggcug

SEQ ID NO: 1215376 - RNA, 19 nt, Human
ucucacuguugcccaggcu

SEQ ID NO: 1215377 - RNA, 18 nt, Human
ucucacuguugcccaggc

SEQ ID NO: 1215378 - RNA, 22 nt, Human
ucucacucugucgcccagucug

SEQ ID NO: 1215379 - RNA, 18 nt, Human
ucucacucugucgcccag

SEQ ID NO: 1215380 - RNA, 17 nt, Human
ucucacucugucgccca

SEQ ID NO: 1215381 - RNA, 22 nt, Human
ucucaaacucuugaccucaggu

SEQ ID NO: 1215382 - RNA, 21 nt, Human
ucucaaacucuugaccucagg

SEQ ID NO: 1215383 - RNA, 13 nt, Human
ucucaaacucuug

SEQ ID NO: 1215384 - RNA, 17 nt, Human
ucucccccagccccauc

SEQ ID NO: 1215385 - RNA, 15 nt, Human
ucucccccagcccca

SEQ ID NO: 1215386 - RNA, 14 nt, Human
ucucccccagcccc

SEQ ID NO: 1215387 - RNA, 22 nt, Human
ucucccccagccccauccucug

SEQ ID NO: 1215388 - RNA, 20 nt, Human
ucucccccagccccauccuc

SEQ ID NO: 1215389 - RNA, 18 nt, Human
ucucccccagccccaucc

SEQ ID NO: 1215390 - RNA, 22 nt, Human
ucuccugccucagccucccaaa

SEQ ID NO: 1215391 - RNA, 14 nt, Human
ucucugaggacacu

SEQ ID NO: 1215392 - RNA, 13 nt, Human
ucucugaggacac

SEQ ID NO: 1215393 - RNA, 19 nt, Human
ucucuaguuugauuaaauu

SEQ ID NO: 1215394 - RNA, 18 nt, Human
ucucuaguuugauuaaau

SEQ ID NO: 1215395 - RNA, 13 nt, Human
ucuccuguaccuc

SEQ ID NO: 1215396 - RNA, 15 nt, Human
ucucuacaaaaagca

SEQ ID NO: 1215397 - RNA, 13 nt, Human
ucugaaagggacg

SEQ ID NO: 1215398 - RNA, 23 nt, Human
ucugaaaauguauguguaaguau

SEQ ID NO: 1215399 - RNA, 16 nt, Human
ucugaaaauguaugug

SEQ ID NO: 1215400 - RNA, 16 nt, Human
ucucuuuucaaaacau

SEQ ID NO: 1215401 - RNA, 15 nt, Human
ucucuuuucaaaaca

SEQ ID NO: 1215402 - RNA, 23 nt, Human
ucugauucccaagcucugcuccu

SEQ ID NO: 1215403 - RNA, 14 nt, Human
ucugcacaagcugc

SEQ ID NO: 1215404 - RNA, 19 nt, Human
ucugcacaagcugcacccu

SEQ ID NO: 1215405 - RNA, 23 nt, Human
ucugaggacacuaaccacgcugg

SEQ ID NO: 1215406 - RNA, 20 nt, Human
ucugaggacacuaaccacgc

SEQ ID NO: 1215407 - RNA, 17 nt, Human
ucugaggaauccagacc

SEQ ID NO: 1215408 - RNA, 16 nt, Human
ucugaggaauccagac

SEQ ID NO: 1215409 - RNA, 14 nt, Human
ucugacccaugcug

SEQ ID NO: 1215410 - RNA, 21 nt, Human
ucugaacuuggcgcugccccu

SEQ ID NO: 1215411 - RNA, 20 nt, Human
ucugaacuuggcgcugcccc

SEQ ID NO: 1215412 - RNA, 18 nt, Human
ucugacccaugcugcccu

SEQ ID NO: 1215413 - RNA, 17 nt, Human
ucugacccaugcugccc

SEQ ID NO: 1215414 - RNA, 16 nt, Human
ucugacccaugcugcc

SEQ ID NO: 1215415 - RNA, 15 nt, Human
ucugacccaugcugc

SEQ ID NO: 1215416 - RNA, 19 nt, Human
ucugacccaugcugcccug

SEQ ID NO: 1215417 - RNA, 15 nt, Human
ucagucuggcccuuc

SEQ ID NO: 1215418 - RNA, 24 nt, Human
ucagucugauucccaagcucugcu

SEQ ID NO: 1215419 - RNA, 17 nt, Human
ucagugugacugaucuc

SEQ ID NO: 1215420 - RNA, 13 nt, Human
ucagugugacuga

SEQ ID NO: 1215421 - RNA, 11 nt, Human
ucaguguacau

SEQ ID NO: 1215422 - RNA, 23 nt, Human
ucagugguuggcaauuguuucaa

SEQ ID NO: 1215423 - RNA, 13 nt, Human
ucauacccacccc

SEQ ID NO: 1215424 - RNA, 17 nt, Human
ucaguuguuaguguguc

SEQ ID NO: 1215425 - RNA, 22 nt, Human
ucauuaggugugacugaauuuc

SEQ ID NO: 1215426 - RNA, 21 nt, Human
ucauuaggugugacugaauuu

SEQ ID NO: 1215427 - RNA, 18 nt, Human
ucauuaggugugacugaa

SEQ ID NO: 1215428 - RNA, 16 nt, Human
ucauuaggugugacug

SEQ ID NO: 1215429 - RNA, 21 nt, Human
ucauacccacccccacccaag

SEQ ID NO: 1215430 - RNA, 20 nt, Human
ucauacccacccccacccaa

SEQ ID NO: 1215431 - RNA, 15 nt, Human
ucauacccaccccca

SEQ ID NO: 1215432 - RNA, 14 nt, Human
ucauacccaccccc

SEQ ID NO: 1215433 - RNA, 18 nt, Human
uccaaaauaaaacuuuuu

SEQ ID NO: 1215434 - RNA, 17 nt, Human
uccaaaauaaaacuuuu

SEQ ID NO: 1215435 - RNA, 16 nt, Human
uccaaaauaaaacuuu

SEQ ID NO: 1215436 - RNA, 20 nt, Human
uccaagaagcccaggaaagg

SEQ ID NO: 1215437 - RNA, 22 nt, Human
uccaagaagcccaggaaaggcu

SEQ ID NO: 1215438 - RNA, 19 nt, Human
uccaagaccuucuccuuca

SEQ ID NO: 1215439 - RNA, 23 nt, Human
uccagccaaagccuccuccagcc

SEQ ID NO: 1215440 - RNA, 15 nt, Human
uccaccugccaggga

SEQ ID NO: 1215441 - RNA, 13 nt, Human
uccaccugccagg

SEQ ID NO: 1215442 - RNA, 12 nt, Human
uccaccugccag

SEQ ID NO: 1215443 - RNA, 15 nt, Human
uccacaagagcccag

SEQ ID NO: 1215444 - RNA, 14 nt, Human
uccacaagagccca

SEQ ID NO: 1215445 - RNA, 21 nt, Human
ucccaucugugaaaggaaaga

SEQ ID NO: 1215446 - RNA, 23 nt, Human
ucccaucucacacaugagcauca

SEQ ID NO: 1215447 - RNA, 20 nt, Human
ucccaucucacacaugagca

SEQ ID NO: 1215448 - RNA, 21 nt, Human
ucccaggcauuccccaggagg

SEQ ID NO: 1215449 - RNA, 20 nt, Human
ucccaggcauuccccaggag

SEQ ID NO: 1215450 - RNA, 22 nt, Human
ucccaggcauuccccaggaggc

SEQ ID NO: 1215451 - RNA, 23 nt, Human
ucccaggcauuccccaggaggcc

SEQ ID NO: 1215452 - RNA, 16 nt, Human
ucccaccucagccucc

SEQ ID NO: 1215453 - RNA, 15 nt, Human
ucccaccucagccuc

SEQ ID NO: 1215454 - RNA, 14 nt, Human
ucccaccucagccu

SEQ ID NO: 1215455 - RNA, 13 nt, Human
ucccaccucagcc

SEQ ID NO: 1215456 - RNA, 16 nt, Human
ucccaacucaccccag

SEQ ID NO: 1215457 - RNA, 15 nt, Human
ucccaacucacccca

SEQ ID NO: 1215458 - RNA, 14 nt, Human
ucccaacucacccc

SEQ ID NO: 1215459 - RNA, 15 nt, Human
ucccaagcucugcuc

SEQ ID NO: 1215460 - RNA, 14 nt, Human
ucccaagcucugcu

SEQ ID NO: 1215461 - RNA, 13 nt, Human
ucccaagcucugc

SEQ ID NO: 1215462 - RNA, 12 nt, Human
ucccaagcucug

SEQ ID NO: 1215463 - RNA, 17 nt, Human
ucccaacucaccccagc

SEQ ID NO: 1215464 - RNA, 17 nt, Human
ucccaagcucugcuccu

SEQ ID NO: 1215465 - RNA, 15 nt, Human
uccauggacuuuguu

SEQ ID NO: 1215466 - RNA, 14 nt, Human
uccauggacuuugu

SEQ ID NO: 1215467 - RNA, 23 nt, Human
uccagcucaccagccccagugcc

SEQ ID NO: 1215468 - RNA, 13 nt, Human
uccccaggaggcc

SEQ ID NO: 1215469 - RNA, 20 nt, Human
uccccgcacugggcuugggg

SEQ ID NO: 1215470 - RNA, 15 nt, Human
ucccuacuguaauuu

SEQ ID NO: 1215471 - RNA, 17 nt, Human
ucccucccucuuucccu

SEQ ID NO: 1215472 - RNA, 15 nt, Human
ucccucccucuuucc

SEQ ID NO: 1215473 - RNA, 18 nt, Human
uccccuguuuguuucuga

SEQ ID NO: 1215474 - RNA, 21 nt, Human
uccccugcuggguguggcgca

SEQ ID NO: 1215475 - RNA, 20 nt, Human
uccccugcuggguguggcgc

SEQ ID NO: 1215476 - RNA, 15 nt, Human
uccccugcugggugu

SEQ ID NO: 1215477 - RNA, 14 nt, Human
uccccugcugggug

SEQ ID NO: 1215478 - RNA, 19 nt, Human
uccccuguagagugggagc

SEQ ID NO: 1215479 - RNA, 24 nt, Human
uccccugcuggguguggcgcagca

SEQ ID NO: 1215480 - RNA, 23 nt, Human
uccccuguccccgcacugggcuu

SEQ ID NO: 1215481 - RNA, 22 nt, Human
uccccuguagagugggagcuga

SEQ ID NO: 1215482 - RNA, 16 nt, Human
ucacgccacugcacua

SEQ ID NO: 1215483 - RNA, 14 nt, Human
ucacgccacugcac

SEQ ID NO: 1215484 - RNA, 13 nt, Human
ucacgccacugca

SEQ ID NO: 1215485 - RNA, 20 nt, Human
ucacgccuguaauccuagca

SEQ ID NO: 1215486 - RNA, 19 nt, Human
ucacgccuguaauccuagc

SEQ ID NO: 1215487 - RNA, 22 nt, Human
ucaccuuuguccccaccgcaga

SEQ ID NO: 1215488 - RNA, 18 nt, Human
ucaccuuuguccccaccg

SEQ ID NO: 1215489 - RNA, 17 nt, Human
ucaccuuuguccccacc

SEQ ID NO: 1215490 - RNA, 15 nt, Human
ucaccuuugucccca

SEQ ID NO: 1215491 - RNA, 14 nt, Human
ucaccuuugucccc

SEQ ID NO: 1215492 - RNA, 12 nt, Human
ucaccuuugucc

SEQ ID NO: 1215493 - RNA, 14 nt, Human
ucaccuuucccauc

SEQ ID NO: 1215494 - RNA, 15 nt, Human
ucacaggcaggucca

SEQ ID NO: 1215495 - RNA, 12 nt, Human
ucacaggcaggu

SEQ ID NO: 1215496 - RNA, 16 nt, Human
ucacaggcagguccag

SEQ ID NO: 1215497 - RNA, 22 nt, Human
ucacucuggcagcucagagagg

SEQ ID NO: 1215498 - RNA, 20 nt, Human
ucacucuggcagcucagaga

SEQ ID NO: 1215499 - RNA, 19 nt, Human
ucacucuggcagcucagag

SEQ ID NO: 1215500 - RNA, 18 nt, Human
ucacucuggcagcucaga

SEQ ID NO: 1215501 - RNA, 17 nt, Human
ucacucuggcagcucag

SEQ ID NO: 1215502 - RNA, 16 nt, Human
ucacucuggcagcuca

SEQ ID NO: 1215503 - RNA, 15 nt, Human
ucacucuggcagcuc

SEQ ID NO: 1215504 - RNA, 14 nt, Human
ucacucuggcagcu

SEQ ID NO: 1215505 - RNA, 13 nt, Human
ucacucuggcagc

SEQ ID NO: 1215506 - RNA, 12 nt, Human
ucacucuggcag

SEQ ID NO: 1215507 - RNA, 23 nt, Human
ucacucuccuuggugucgggcau

SEQ ID NO: 1215508 - RNA, 14 nt, Human
ucacucuccuuggu

SEQ ID NO: 1215509 - RNA, 12 nt, Human
ucacucuccuug

SEQ ID NO: 1215510 - RNA, 20 nt, Human
ucacggcucacugcagccuc

SEQ ID NO: 1215511 - RNA, 15 nt, Human
ucacggcucacugca

SEQ ID NO: 1215512 - RNA, 13 nt, Human
ucacggcucacug

SEQ ID NO: 1215513 - RNA, 17 nt, Human
ucacggaagagccuugc

SEQ ID NO: 1215514 - RNA, 16 nt, Human
ucacggaagagccuug

SEQ ID NO: 1215515 - RNA, 14 nt, Human
ucacggaagagccu

SEQ ID NO: 1215516 - RNA, 13 nt, Human
ucacuccuugaaa

SEQ ID NO: 1215517 - RNA, 20 nt, Human
ucagacagcugccugggauc

SEQ ID NO: 1215518 - RNA, 19 nt, Human
ucagacagcugccugggau

SEQ ID NO: 1215519 - RNA, 18 nt, Human
ucagacagcugccuggga

SEQ ID NO: 1215520 - RNA, 17 nt, Human
ucagacagcugccuggg

SEQ ID NO: 1215521 - RNA, 16 nt, Human
ucagacagcugccugg

SEQ ID NO: 1215522 - RNA, 15 nt, Human
ucagacagcugccug

SEQ ID NO: 1215523 - RNA, 19 nt, Human
ucagcacgauuucuguuua

SEQ ID NO: 1215524 - RNA, 20 nt, Human
ucacugcuuaacuucacaua

SEQ ID NO: 1215525 - RNA, 18 nt, Human
ucacugcuuaacuucaca

SEQ ID NO: 1215526 - RNA, 17 nt, Human
ucacugcuuaacuucac

SEQ ID NO: 1215527 - RNA, 15 nt, Human
ucacugcuuaacuuc

SEQ ID NO: 1215528 - RNA, 22 nt, Human
ucacucugucgcccagucugga

SEQ ID NO: 1215529 - RNA, 19 nt, Human
ucacucugucgcccagucu

SEQ ID NO: 1215530 - RNA, 16 nt, Human
ucacucugucgcccag

SEQ ID NO: 1215531 - RNA, 12 nt, Human
ucacucugucgc

SEQ ID NO: 1215532 - RNA, 14 nt, Human
ucaaacucuuaaaa

SEQ ID NO: 1215533 - RNA, 22 nt, Human
ucaaaacgguuuuacugcagcu

SEQ ID NO: 1215534 - RNA, 23 nt, Human
uauuuauuaaaugcccagccccu

SEQ ID NO: 1215535 - RNA, 20 nt, Human
uaucugaaaauguaugugua

SEQ ID NO: 1215536 - RNA, 15 nt, Human
uaucugaaaauguau

SEQ ID NO: 1215537 - RNA, 14 nt, Human
uaucugaaaaugua

SEQ ID NO: 1215538 - RNA, 22 nt, Human
ucaagugauucuccugccucag

SEQ ID NO: 1215539 - RNA, 23 nt, Human
ucaaggauccugagccagauuuc

SEQ ID NO: 1215540 - RNA, 20 nt, Human
ucaaggauccugagccagau

SEQ ID NO: 1215541 - RNA, 19 nt, Human
ucaaggauccugagccaga

SEQ ID NO: 1215542 - RNA, 18 nt, Human
ucaaggauccugagccag

SEQ ID NO: 1215543 - RNA, 17 nt, Human
ucaagcgauucuucugc

SEQ ID NO: 1215544 - RNA, 16 nt, Human
ucaagcgauucuucug

SEQ ID NO: 1215545 - RNA, 14 nt, Human
ucaaccuccugggc

SEQ ID NO: 1215546 - RNA, 13 nt, Human
ucaaccuccuggg

SEQ ID NO: 1215547 - RNA, 16 nt, Human
ucaaacuuuacuaugg

SEQ ID NO: 1215548 - RNA, 15 nt, Human
ucaaacuuuacuaug

SEQ ID NO: 1215549 - RNA, 22 nt, Human
ucaaacucuugaccucagguga

SEQ ID NO: 1215550 - RNA, 11 nt, Human
ucacaggcagg

SEQ ID NO: 1215551 - RNA, 22 nt, Human
ucacacaugagcaucaggccag

SEQ ID NO: 1215552 - RNA, 21 nt, Human
ucacacaugagcaucaggcca

SEQ ID NO: 1215553 - RNA, 23 nt, Human
ucacacagugagucgaggacagg

SEQ ID NO: 1215554 - RNA, 22 nt, Human
ucacacagugagucgaggacag

SEQ ID NO: 1215555 - RNA, 13 nt, Human
ucacacagugagu

SEQ ID NO: 1215556 - RNA, 22 nt, Human
ucacacaguauuacuucugcua

SEQ ID NO: 1215557 - RNA, 21 nt, Human
ucacacaguauuacuucugcu

SEQ ID NO: 1215558 - RNA, 20 nt, Human
ucaauuacaggaaguacugg

SEQ ID NO: 1215559 - RNA, 19 nt, Human
ucaauuacaggaaguacug

SEQ ID NO: 1215560 - RNA, 14 nt, Human
ucaaugcacugaca

SEQ ID NO: 1215561 - RNA, 17 nt, Human
ucaauaggaaaaacuga

SEQ ID NO: 1215562 - RNA, 14 nt, Human
ucaauaggaaaaac

SEQ ID NO: 1215563 - RNA, 13 nt, Human
ucaauaggaaaaa

SEQ ID NO: 1215564 - RNA, 18 nt, Human
ucaauuacaggaaguacu

SEQ ID NO: 1215565 - RNA, 13 nt, Human
ucaauuacaggaa

SEQ ID NO: 1215566 - RNA, 18 nt, Human
ucaaugcacugacauugu

SEQ ID NO: 1215567 - RNA, 21 nt, Human
gguuggccccugcccggcugc

SEQ ID NO: 1215568 - RNA, 18 nt, Human
guuucagaaauguguuau

SEQ ID NO: 1215569 - RNA, 22 nt, Human
guuuccuggcacugcuuccagu

SEQ ID NO: 1215570 - RNA, 21 nt, Human
guuuccuggcacugcuuccag

SEQ ID NO: 1215571 - RNA, 20 nt, Human
guuuccuggcacugcuucca

SEQ ID NO: 1215572 - RNA, 16 nt, Human
guuuccuggcacugcu

SEQ ID NO: 1215573 - RNA, 16 nt, Human
guuugaaccaagaacu

SEQ ID NO: 1215574 - RNA, 20 nt, Human
guuucuaaagcugccagccg

SEQ ID NO: 1215575 - RNA, 16 nt, Human
guuucuaaagcugcca

SEQ ID NO: 1215576 - RNA, 15 nt, Human
guuucuaaagcugcc

SEQ ID NO: 1215577 - RNA, 14 nt, Human
guuucuaaagcugc

SEQ ID NO: 1215578 - RNA, 23 nt, Human
guuugauuaaauucuugcaaagu

SEQ ID NO: 1215579 - RNA, 22 nt, Human
guuugauuaaauucuugcaaag

SEQ ID NO: 1215580 - RNA, 19 nt, Human
guuugauuaaauucuugca

SEQ ID NO: 1215581 - RNA, 17 nt, Human
guuugauuaaauucuug

SEQ ID NO: 1215582 - RNA, 20 nt, Human
guuuguaaauuaacuuuuau

SEQ ID NO: 1215583 - RNA, 19 nt, Human
guuuguaaauuaacuuuua

SEQ ID NO: 1215584 - RNA, 17 nt, Human
guuuguaaauuaacuuu

SEQ ID NO: 1215585 - RNA, 23 nt, Human
uaaaaaacugcugacuguuuucu

SEQ ID NO: 1215586 - RNA, 20 nt, Human
uaaaaaacugcugacuguuu

SEQ ID NO: 1215587 - RNA, 23 nt, Human
guuuuuauggcuuuugugcauua

SEQ ID NO: 1215588 - RNA, 22 nt, Human
guuuuuauggcuuuugugcauu

SEQ ID NO: 1215589 - RNA, 19 nt, Human
guuuuuauggcuuuugugc

SEQ ID NO: 1215590 - RNA, 19 nt, Human
guuuucucuugagagggug

SEQ ID NO: 1215591 - RNA, 12 nt, Human
guuuucucuuga

SEQ ID NO: 1215592 - RNA, 20 nt, Human
guuuuccagguuuaagcugu

SEQ ID NO: 1215593 - RNA, 17 nt, Human
guuuucaguguacaugg

SEQ ID NO: 1215594 - RNA, 16 nt, Human
guuuucaguguacaug

SEQ ID NO: 1215595 - RNA, 18 nt, Human
guuuguuucugaaaggga

SEQ ID NO: 1215596 - RNA, 18 nt, Human
uaaacaagaccacguuuc

SEQ ID NO: 1215597 - RNA, 19 nt, Human
uaaacaagaccacguuucu

SEQ ID NO: 1215598 - RNA, 22 nt, Human
uaaacuuuaccuuuuuuauaca

SEQ ID NO: 1215599 - RNA, 16 nt, Human
uaaacuuuaccuuuuu

SEQ ID NO: 1215600 - RNA, 19 nt, Human
uaaacuuaaucuaaaugga

SEQ ID NO: 1215601 - RNA, 18 nt, Human
uaaacuuaaucuaaaugg

SEQ ID NO: 1215602 - RNA, 14 nt, Human
uaaacuuaaucuaa

SEQ ID NO: 1215603 - RNA, 19 nt, Human
uaaaucagccguguaacca

SEQ ID NO: 1215604 - RNA, 23 nt, Human
uaaaguguauuuuuuuacuaaua

SEQ ID NO: 1215605 - RNA, 22 nt, Human
uaaaguguauuuuuuuacuaau

SEQ ID NO: 1215606 - RNA, 21 nt, Human
uaaaguguauuuuuuuacuaa

SEQ ID NO: 1215607 - RNA, 13 nt, Human
uaaaguuucuguu

SEQ ID NO: 1215608 - RNA, 22 nt, Human
uaauugacaggauuauuggaaa

SEQ ID NO: 1215609 - RNA, 20 nt, Human
uaauugacaggauuauugga

SEQ ID NO: 1215610 - RNA, 18 nt, Human
uaauucuuagcucauucu

SEQ ID NO: 1215611 - RNA, 17 nt, Human
uaauuaaaacacaacau

SEQ ID NO: 1215612 - RNA, 14 nt, Human
uaaugcgugcauac

SEQ ID NO: 1215613 - RNA, 18 nt, Human
uaauuugugauacaaugc

SEQ ID NO: 1215614 - RNA, 15 nt, Human
uaauuugugauacaa

SEQ ID NO: 1215615 - RNA, 14 nt, Human
uaauuugugauaca

SEQ ID NO: 1215616 - RNA, 22 nt, Human
uaauuugugauacaaugcugug

SEQ ID NO: 1215617 - RNA, 19 nt, Human
uaauuugugauacaaugcu

SEQ ID NO: 1215618 - RNA, 14 nt, Human
uaauacaccacuac

SEQ ID NO: 1215619 - RNA, 21 nt, Human
uaauaguucagguaacaggca

SEQ ID NO: 1215620 - RNA, 20 nt, Human
uaagugguacuaacuuuccu

SEQ ID NO: 1215621 - RNA, 12 nt, Human
uaaucuaaaugg

SEQ ID NO: 1215622 - RNA, 11 nt, Human
uaaucuaaaug

SEQ ID NO: 1215623 - RNA, 15 nt, Human
uaacagaaauguaca

SEQ ID NO: 1215624 - RNA, 14 nt, Human
uaacagaaauguac

SEQ ID NO: 1215625 - RNA, 13 nt, Human
uaacagaaaugua

SEQ ID NO: 1215626 - RNA, 19 nt, Human
uaaccagcagaaaugccuu

SEQ ID NO: 1215627 - RNA, 16 nt, Human
uaaccagcagaaaugc

SEQ ID NO: 1215628 - RNA, 14 nt, Human
uaaccagcagaaau

SEQ ID NO: 1215629 - RNA, 19 nt, Human
uaacaggcagauacaggaa

SEQ ID NO: 1215630 - RNA, 20 nt, Human
uaacuuuuauaaacuuuacc

SEQ ID NO: 1215631 - RNA, 16 nt, Human
uaaggauguucuagca

SEQ ID NO: 1215632 - RNA, 23 nt, Human
uaaggaugcuuguacauaaugcg

SEQ ID NO: 1215633 - RNA, 22 nt, Human
uaaggaugcuuguacauaaugc

SEQ ID NO: 1215634 - RNA, 21 nt, Human
uaaggaugcuuguacauaaug

SEQ ID NO: 1215635 - RNA, 20 nt, Human
uaaggaugcuuguacauaau

SEQ ID NO: 1215636 - RNA, 19 nt, Human
uaaggaugcuuguacauaa

SEQ ID NO: 1215637 - RNA, 22 nt, Human
uaacuuuuauaaacuuuaccuu

SEQ ID NO: 1215638 - RNA, 21 nt, Human
uaacuuuuauaaacuuuaccu

SEQ ID NO: 1215639 - RNA, 17 nt, Human
uaagauaaaugugcuga

SEQ ID NO: 1215640 - RNA, 16 nt, Human
uaagauaaaugugcug

SEQ ID NO: 1215641 - RNA, 14 nt, Human
uaagauaaaugugc

SEQ ID NO: 1215642 - RNA, 23 nt, Human
uaagagggagggagggcuccaga

SEQ ID NO: 1215643 - RNA, 22 nt, Human
uaagagggagggagggcuccag

SEQ ID NO: 1215644 - RNA, 12 nt, Human
uaagagggaggg

SEQ ID NO: 1215645 - RNA, 12 nt, Human
uagauguauaua

SEQ ID NO: 1215646 - RNA, 18 nt, Human
uagauaauacaccacuac

SEQ ID NO: 1215647 - RNA, 23 nt, Human
uagcagagaaugaaagggcccag

SEQ ID NO: 1215648 - RNA, 19 nt, Human
uagcagagaaugaaagggc

SEQ ID NO: 1215649 - RNA, 21 nt, Human
uagagguucaaagauauuuug

SEQ ID NO: 1215650 - RNA, 19 nt, Human
uagagguucaaagauauuu

SEQ ID NO: 1215651 - RNA, 16 nt, Human
uagagagagaccacuu

SEQ ID NO: 1215652 - RNA, 21 nt, Human
uaggaacuuaaauaaugugaa

SEQ ID NO: 1215653 - RNA, 17 nt, Human
uaggaacacuccuucac

SEQ ID NO: 1215654 - RNA, 14 nt, Human
uaggaacacuccuu

SEQ ID NO: 1215655 - RNA, 13 nt, Human
uaggaacacuccu

SEQ ID NO: 1215656 - RNA, 17 nt, Human
uaggaagacuuuggaaa

SEQ ID NO: 1215657 - RNA, 16 nt, Human
uaggaagacuuuggaa

SEQ ID NO: 1215658 - RNA, 15 nt, Human
uaggaagacuuugga

SEQ ID NO: 1215659 - RNA, 14 nt, Human
uaggaagacuuugg

SEQ ID NO: 1215660 - RNA, 13 nt, Human
uaggaagacuuug

SEQ ID NO: 1215661 - RNA, 14 nt, Human
uaggccuggccaga

SEQ ID NO: 1215662 - RNA, 13 nt, Human
uaggccuggccag

SEQ ID NO: 1215663 - RNA, 15 nt, Human
uaggaagguuaaugu

SEQ ID NO: 1215664 - RNA, 14 nt, Human
uagcccaaaaccaa

SEQ ID NO: 1215665 - RNA, 16 nt, Human
uagcauacguacacau

SEQ ID NO: 1215666 - RNA, 17 nt, Human
uagccugccucuucucu

SEQ ID NO: 1215667 - RNA, 21 nt, Human
uagcucuaggagggcuggcaa

SEQ ID NO: 1215668 - RNA, 11 nt, Human
uagcugggacu

SEQ ID NO: 1215669 - RNA, 20 nt, Human
uagcugggacuacaggcacc

SEQ ID NO: 1215670 - RNA, 12 nt, Human
uagcugggacua

SEQ ID NO: 1215671 - RNA, 18 nt, Human
uagcugggacuacaggug

SEQ ID NO: 1215672 - RNA, 12 nt, Human
uaguuugcaguu

SEQ ID NO: 1215673 - RNA, 23 nt, Human
uaguuugauuaaauucuugcaaa

SEQ ID NO: 1215674 - RNA, 13 nt, Human
uaguuucuccaag

SEQ ID NO: 1215675 - RNA, 15 nt, Human
uaguggauguucuga

SEQ ID NO: 1215676 - RNA, 20 nt, Human
uauaaugaaugaaacauuuu

SEQ ID NO: 1215677 - RNA, 18 nt, Human
uauaaugaaugaaacauu

SEQ ID NO: 1215678 - RNA, 17 nt, Human
uauaauucuacuuugag

SEQ ID NO: 1215679 - RNA, 20 nt, Human
uauaauguaagcucuacuga

SEQ ID NO: 1215680 - RNA, 19 nt, Human
uauaauguaagcucuacug

SEQ ID NO: 1215681 - RNA, 14 nt, Human
uauaauguaagcuc

SEQ ID NO: 1215682 - RNA, 20 nt, Human
uauaugcucugcauguuaca

SEQ ID NO: 1215683 - RNA, 16 nt, Human
uaucuaaauguugaaa

SEQ ID NO: 1215684 - RNA, 15 nt, Human
uaucuaaauguugaa

SEQ ID NO: 1215685 - RNA, 19 nt, Human
uaucgucacugcuuaacuu

SEQ ID NO: 1215686 - RNA, 17 nt, Human
uaucaggugcugccauc

SEQ ID NO: 1215687 - RNA, 16 nt, Human
uaucaugacaaagacu

SEQ ID NO: 1215688 - RNA, 17 nt, Human
uaucaugacaaagacug

SEQ ID NO: 1215689 - RNA, 22 nt, Human
uacagcuugaccgugaggccag

SEQ ID NO: 1215690 - RNA, 18 nt, Human
uacaggaaaagcugcuga

SEQ ID NO: 1215691 - RNA, 17 nt, Human
uacaggaaaagcugcug

SEQ ID NO: 1215692 - RNA, 23 nt, Human
uacagcuugaccgugaggccaga

SEQ ID NO: 1215693 - RNA, 16 nt, Human
uacaggcacccaccau

SEQ ID NO: 1215694 - RNA, 19 nt, Human
uacaggaaaagcugcugac

SEQ ID NO: 1215695 - RNA, 13 nt, Human
uacacuuuaugca

SEQ ID NO: 1215696 - RNA, 19 nt, Human
uacacuguuucaaacuuua

SEQ ID NO: 1215697 - RNA, 18 nt, Human
uacacuguuucaaacuuu

SEQ ID NO: 1215698 - RNA, 17 nt, Human
uacacuguuucaaacuu

SEQ ID NO: 1215699 - RNA, 16 nt, Human
uacacugugcugaguc

SEQ ID NO: 1215700 - RNA, 14 nt, Human
uacacuguuucaaa

SEQ ID NO: 1215701 - RNA, 22 nt, Human
uacacacugcauguuugugauu

SEQ ID NO: 1215702 - RNA, 15 nt, Human
uacacacacauacac

SEQ ID NO: 1215703 - RNA, 21 nt, Human
uacacacacacgcgugcacac

SEQ ID NO: 1215704 - RNA, 23 nt, Human
uacacaaugguuuucuugugugu

SEQ ID NO: 1215705 - RNA, 21 nt, Human
uacacaaugguuuucuugugu

SEQ ID NO: 1215706 - RNA, 17 nt, Human
uacacaaugguuuucuu

SEQ ID NO: 1215707 - RNA, 15 nt, Human
uacccacccccaccc

SEQ ID NO: 1215708 - RNA, 12 nt, Human
uacccaccccca

SEQ ID NO: 1215709 - RNA, 23 nt, Human
uacccacccccacccaagggccu

SEQ ID NO: 1215710 - RNA, 19 nt, Human
uacccacccccacccaagg

SEQ ID NO: 1215711 - RNA, 17 nt, Human
uacccacccccacccaa

SEQ ID NO: 1215712 - RNA, 22 nt, Human
uacccaggugcuaggaacacuc

SEQ ID NO: 1215713 - RNA, 18 nt, Human
uacccagcgagcccuggu

SEQ ID NO: 1215714 - RNA, 15 nt, Human
uacccacugcucugg

SEQ ID NO: 1215715 - RNA, 14 nt, Human
uacccacugcucug

SEQ ID NO: 1215716 - RNA, 13 nt, Human
uacccacugcucu

SEQ ID NO: 1215717 - RNA, 12 nt, Human
uacccacugcuc

SEQ ID NO: 1215718 - RNA, 11 nt, Human
uacccacugcu

SEQ ID NO: 1215719 - RNA, 13 nt, Human
uaccacagacaua

SEQ ID NO: 1215720 - RNA, 23 nt, Human
uaccauuuugggguacccacugc

SEQ ID NO: 1215721 - RNA, 22 nt, Human
uacauaagauaaaugugcugaa

SEQ ID NO: 1215722 - RNA, 19 nt, Human
uacauaagauaaaugugcu

SEQ ID NO: 1215723 - RNA, 18 nt, Human
uacauaagauaaaugugc

SEQ ID NO: 1215724 - RNA, 23 nt, Human
uacaguuacucagaauucucuag

SEQ ID NO: 1215725 - RNA, 19 nt, Human
uacaguuacucagaauucu

SEQ ID NO: 1215726 - RNA, 17 nt, Human
uacuacaguccucccau

SEQ ID NO: 1215727 - RNA, 12 nt, Human
uacuacaguccu

SEQ ID NO: 1215728 - RNA, 20 nt, Human
uacuaauagacaauuuauua

SEQ ID NO: 1215729 - RNA, 17 nt, Human
uacuaauagacaauuua

SEQ ID NO: 1215730 - RNA, 15 nt, Human
uacuaauagacaauu

SEQ ID NO: 1215731 - RNA, 13 nt, Human
uacuaacuuuccu

SEQ ID NO: 1215732 - RNA, 19 nt, Human
uacuaaccagcagaaaugc

SEQ ID NO: 1215733 - RNA, 18 nt, Human
uacuaaccagcagaaaug

SEQ ID NO: 1215734 - RNA, 22 nt, Human
uaccuuuuuuauacauaaacaa

SEQ ID NO: 1215735 - RNA, 20 nt, Human
uaccuuuuuuauacauaaac

SEQ ID NO: 1215736 - RNA, 19 nt, Human
uaccuuuuuuauacauaaa

SEQ ID NO: 1215737 - RNA, 18 nt, Human
uaccuuuuuuauacauaa

SEQ ID NO: 1215738 - RNA, 20 nt, Human
uaccuuuguauucucuccug

SEQ ID NO: 1215739 - RNA, 22 nt, Human
uacccaucccauaugccugggc

SEQ ID NO: 1215740 - RNA, 22 nt, Human
uacucagaauucucuaguuuga

SEQ ID NO: 1215741 - RNA, 16 nt, Human
uacucagaauucucua

SEQ ID NO: 1215742 - RNA, 14 nt, Human
uacucaccucaccc

SEQ ID NO: 1215743 - RNA, 12 nt, Human
uacucaccucac

SEQ ID NO: 1215744 - RNA, 13 nt, Human
uacuacuccugua

SEQ ID NO: 1215745 - RNA, 20 nt, Human
uacuacaguccucccaucuc

SEQ ID NO: 1215746 - RNA, 17 nt, Human
uacucccaucugugaaa

SEQ ID NO: 1215747 - RNA, 16 nt, Human
uacucccaucugugaa

SEQ ID NO: 1215748 - RNA, 14 nt, Human
uacucccaucugug

SEQ ID NO: 1215749 - RNA, 15 nt, Human
uacugaggugcuaug

SEQ ID NO: 1215750 - RNA, 18 nt, Human
uacucgaguuacagacaa

SEQ ID NO: 1215751 - RNA, 23 nt, Human
uagaaauaucugaaaauguaugu

SEQ ID NO: 1215752 - RNA, 21 nt, Human
uagaaauaucugaaaauguau

SEQ ID NO: 1215753 - RNA, 20 nt, Human
uagaaauaucugaaaaugua

SEQ ID NO: 1215754 - RNA, 15 nt, Human
uagaaauauaauuga

SEQ ID NO: 1215755 - RNA, 19 nt, Human
uacuuguggacacagcucu

SEQ ID NO: 1215756 - RNA, 18 nt, Human
uacuuguggacacagcuc

SEQ ID NO: 1215757 - RNA, 15 nt, Human
uacuuguggacacag

SEQ ID NO: 1215758 - RNA, 17 nt, Human
uacugcauaugaaagga

SEQ ID NO: 1215759 - RNA, 21 nt, Human
uacuguaucaugacaaagacu

SEQ ID NO: 1215760 - RNA, 16 nt, Human
gguggugaccucugcc

SEQ ID NO: 1215761 - RNA, 15 nt, Human
gguggugaccucugc

SEQ ID NO: 1215762 - RNA, 14 nt, Human
gguggugaccucug

SEQ ID NO: 1215763 - RNA, 12 nt, Human
gguggcuggguu

SEQ ID NO: 1215764 - RNA, 21 nt, Human
ggugguuauggagaggguguc

SEQ ID NO: 1215765 - RNA, 18 nt, Human
ggugguuucagaaaugug

SEQ ID NO: 1215766 - RNA, 17 nt, Human
ggugguuucagaaaugu

SEQ ID NO: 1215767 - RNA, 18 nt, Human
ggugguuuucuguucuuu

SEQ ID NO: 1215768 - RNA, 15 nt, Human
ggugguuuucuguuc

SEQ ID NO: 1215769 - RNA, 19 nt, Human
ggugucaccugaagacuca

SEQ ID NO: 1215770 - RNA, 19 nt, Human
ggugucaagagggucugag

SEQ ID NO: 1215771 - RNA, 17 nt, Human
ggugucaagagggucug

SEQ ID NO: 1215772 - RNA, 21 nt, Human
gguuacccaguuagcucucaa

SEQ ID NO: 1215773 - RNA, 17 nt, Human
gguuaggcauuguggga

SEQ ID NO: 1215774 - RNA, 13 nt, Human
gguuauggagagg

SEQ ID NO: 1215775 - RNA, 20 nt, Human
gguucacugcaaccuccgcc

SEQ ID NO: 1215776 - RNA, 13 nt, Human
gguugagguuuca

SEQ ID NO: 1215777 - RNA, 21 nt, Human
gguucaaagauauuuugcuuu

SEQ ID NO: 1215778 - RNA, 13 nt, Human
gguucaaagauau

SEQ ID NO: 1215779 - RNA, 22 nt, Human
ggugaccagcaccaucucuccu

SEQ ID NO: 1215780 - RNA, 14 nt, Human
ggucugacccacug

SEQ ID NO: 1215781 - RNA, 23 nt, Human
ggucucacucugucgcccagucu

SEQ ID NO: 1215782 - RNA, 22 nt, Human
ggucucacucugucgcccaguc

SEQ ID NO: 1215783 - RNA, 21 nt, Human
ggucucacuauguugcccagg

SEQ ID NO: 1215784 - RNA, 22 nt, Human
ggucccaccccacacacgccag

SEQ ID NO: 1215785 - RNA, 17 nt, Human
ggucccaccccacacac

SEQ ID NO: 1215786 - RNA, 20 nt, Human
ggugcuaucucccccagccc

SEQ ID NO: 1215787 - RNA, 19 nt, Human
ggugcuaucucccccagcc

SEQ ID NO: 1215788 - RNA, 17 nt, Human
ggugcuaucucccccag

SEQ ID NO: 1215789 - RNA, 16 nt, Human
ggugcuaucuccccca

SEQ ID NO: 1215790 - RNA, 15 nt, Human
ggugcgaucuggguu

SEQ ID NO: 1215791 - RNA, 16 nt, Human
ggugagaggggaacag

SEQ ID NO: 1215792 - RNA, 15 nt, Human
ggugagaagcagagg

SEQ ID NO: 1215793 - RNA, 22 nt, Human
gguggcagugggagcugccugu

SEQ ID NO: 1215794 - RNA, 19 nt, Human
gguggcagugggagcugcc

SEQ ID NO: 1215795 - RNA, 21 nt, Human
ggugcugccauccagguucag

SEQ ID NO: 1215796 - RNA, 15 nt, Human
ggugcugccauccag

SEQ ID NO: 1215797 - RNA, 21 nt, Human
ggugcuaucucccccagcccc

SEQ ID NO: 1215798 - RNA, 23 nt, Human
gguggccucccaacucaccccag

SEQ ID NO: 1215799 - RNA, 22 nt, Human
gguggccucccaacucacccca

SEQ ID NO: 1215800 - RNA, 22 nt, Human
gggggaggugggauccuccagg

SEQ ID NO: 1215801 - RNA, 23 nt, Human
ggggcugcaccggcuggccuggc

SEQ ID NO: 1215802 - RNA, 22 nt, Human
ggggcugcaccggcuggccugg

SEQ ID NO: 1215803 - RNA, 21 nt, Human
ggggcugcaccggcuggccug

SEQ ID NO: 1215804 - RNA, 12 nt, Human
ggggcugcaccg

SEQ ID NO: 1215805 - RNA, 19 nt, Human
ggggcugaggugggaggau

SEQ ID NO: 1215806 - RNA, 17 nt, Human
gggguggggaccucagg

SEQ ID NO: 1215807 - RNA, 12 nt, Human
gggguggccucc

SEQ ID NO: 1215808 - RNA, 17 nt, Human
gggggaucacagccucu

SEQ ID NO: 1215809 - RNA, 21 nt, Human
gggucugaggaauccagaccc

SEQ ID NO: 1215810 - RNA, 12 nt, Human
gggucugaggaa

SEQ ID NO: 1215811 - RNA, 14 nt, Human
gggucucacucugu

SEQ ID NO: 1215812 - RNA, 17 nt, Human
ggguaagugagagaggg

SEQ ID NO: 1215813 - RNA, 16 nt, Human
ggggcaacccugguga

SEQ ID NO: 1215814 - RNA, 17 nt, Human
ggggcugaggugggagg

SEQ ID NO: 1215815 - RNA, 19 nt, Human
ggggaaaaucagccugcuc

SEQ ID NO: 1215816 - RNA, 17 nt, Human
ggggaaaaucagccugc

SEQ ID NO: 1215817 - RNA, 16 nt, Human
ggggaaaaucagccug

SEQ ID NO: 1215818 - RNA, 24 nt, Human
ggggaaaaucagccugcuccagcu

SEQ ID NO: 1215819 - RNA, 21 nt, Human
ggggaaaaucagccugcucca

SEQ ID NO: 1215820 - RNA, 19 nt, Human
gggugacagagcaagugag

SEQ ID NO: 1215821 - RNA, 17 nt, Human
gggugaagugaagacaa

SEQ ID NO: 1215822 - RNA, 23 nt, Human
ggguucaagcgauucuucugcuu

SEQ ID NO: 1215823 - RNA, 22 nt, Human
ggguucaagcgauucuucugcu

SEQ ID NO: 1215824 - RNA, 16 nt, Human
ggguuggccccugccc

SEQ ID NO: 1215825 - RNA, 17 nt, Human
ggguucuacccaggugc

SEQ ID NO: 1215826 - RNA, 12 nt, Human
ggguucuaccca

SEQ ID NO: 1215827 - RNA, 22 nt, Human
gguagaagcccuucuaccuucc

SEQ ID NO: 1215828 - RNA, 23 nt, Human
gguagaaauaucugaaaauguau

SEQ ID NO: 1215829 - RNA, 20 nt, Human
gguacuuguggacacagcuc

SEQ ID NO: 1215830 - RNA, 17 nt, Human
gguacuuguggacacag

SEQ ID NO: 1215831 - RNA, 16 nt, Human
gguacuuguggacaca

SEQ ID NO: 1215832 - RNA, 16 nt, Human
gguacccacugcucug

SEQ ID NO: 1215833 - RNA, 13 nt, Human
gguacccacugcu

SEQ ID NO: 1215834 - RNA, 11 nt, Human
gguacccacug

SEQ ID NO: 1215835 - RNA, 16 nt, Human
ggucccaccccacaca

SEQ ID NO: 1215836 - RNA, 15 nt, Human
ggucccaccccacac

SEQ ID NO: 1215837 - RNA, 11 nt, Human
ggucagagccu

SEQ ID NO: 1215838 - RNA, 12 nt, Human
ggucacucuggc

SEQ ID NO: 1215839 - RNA, 19 nt, Human
gggccuggccugagcuggg

SEQ ID NO: 1215840 - RNA, 13 nt, Human
gggccuggcuccc

SEQ ID NO: 1215841 - RNA, 18 nt, Human
gggccuggccugagcugg

SEQ ID NO: 1215842 - RNA, 14 nt, Human
gggccuggccugag

SEQ ID NO: 1215843 - RNA, 13 nt, Human
gggccuggccuga

SEQ ID NO: 1215844 - RNA, 13 nt, Human
gggcccugccucc

SEQ ID NO: 1215845 - RNA, 12 nt, Human
gggcaugacacg

SEQ ID NO: 1215846 - RNA, 17 nt, Human
gggcccagagagggugg

SEQ ID NO: 1215847 - RNA, 23 nt, Human
gggccacagagaaaguacuucuc

SEQ ID NO: 1215848 - RNA, 16 nt, Human
gggccacagagaaagu

SEQ ID NO: 1215849 - RNA, 13 nt, Human
gggauagagagag

SEQ ID NO: 1215850 - RNA, 21 nt, Human
gggauaugauuuaaaucagcc

SEQ ID NO: 1215851 - RNA, 16 nt, Human
gggauccuccaggugc

SEQ ID NO: 1215852 - RNA, 15 nt, Human
gggauccuccaggug

SEQ ID NO: 1215853 - RNA, 18 nt, Human
gggcaacccuggugacca

SEQ ID NO: 1215854 - RNA, 23 nt, Human
gggauccuggaguucugguuccu

SEQ ID NO: 1215855 - RNA, 14 nt, Human
gggagugagcuggu

SEQ ID NO: 1215856 - RNA, 11 nt, Human
gggagugagcu

SEQ ID NO: 1215857 - RNA, 18 nt, Human
gggagugacagaggcagc

SEQ ID NO: 1215858 - RNA, 20 nt, Human
gggaggugggauccuccagg

SEQ ID NO: 1215859 - RNA, 17 nt, Human
gggaggugggauccucc

SEQ ID NO: 1215860 - RNA, 16 nt, Human
gggaggugaccccagg

SEQ ID NO: 1215861 - RNA, 17 nt, Human
gggcagguugguggggg

SEQ ID NO: 1215862 - RNA, 12 nt, Human
gggcagagcaga

SEQ ID NO: 1215863 - RNA, 11 nt, Human
gggcagagcag

SEQ ID NO: 1215864 - RNA, 18 nt, Human
gggcagaaggaagacuuc

SEQ ID NO: 1215865 - RNA, 14 nt, Human
gggcagaaggaaga

SEQ ID NO: 1215866 - RNA, 20 nt, Human
gggcacucagaagacacuga

SEQ ID NO: 1215867 - RNA, 21 nt, Human
gggcacagaaaauggaagaca

SEQ ID NO: 1215868 - RNA, 20 nt, Human
gggcacagaaaauggaagac

SEQ ID NO: 1215869 - RNA, 18 nt, Human
gggcacagaaaauggaag

SEQ ID NO: 1215870 - RNA, 23 nt, Human
gggcacaccgggcacucagaaga

SEQ ID NO: 1215871 - RNA, 16 nt, Human
gggcacagggucucua

SEQ ID NO: 1215872 - RNA, 13 nt, Human
gggcacagggucu

SEQ ID NO: 1215873 - RNA, 19 nt, Human
gggcacucagaagacacug

SEQ ID NO: 1215874 - RNA, 16 nt, Human
gggcacucagaagaca

SEQ ID NO: 1215875 - RNA, 23 nt, Human
gggaaggauacaaaagcauguga

SEQ ID NO: 1215876 - RNA, 21 nt, Human
gggaaggauacaaaagcaugu

SEQ ID NO: 1215877 - RNA, 14 nt, Human
ggcuuuugugcauu

SEQ ID NO: 1215878 - RNA, 17 nt, Human
gggaagggggcugggac

SEQ ID NO: 1215879 - RNA, 16 nt, Human
gggaagggggcuggga

SEQ ID NO: 1215880 - RNA, 14 nt, Human
gggaagggggcugg

SEQ ID NO: 1215881 - RNA, 16 nt, Human
gggacucaaugcacug

SEQ ID NO: 1215882 - RNA, 17 nt, Human
gggacuacaggcaccca

SEQ ID NO: 1215883 - RNA, 15 nt, Human
gggaccucaggccug

SEQ ID NO: 1215884 - RNA, 13 nt, Human
gggaccucaggcc

SEQ ID NO: 1215885 - RNA, 12 nt, Human
gggaccucaggc

SEQ ID NO: 1215886 - RNA, 21 nt, Human
ggcuuggggaccagagcugcc

SEQ ID NO: 1215887 - RNA, 10 nt, Human
ggcuuuugug

SEQ ID NO: 1215888 - RNA, 18 nt, Human
ggcugggcuucaguggca

SEQ ID NO: 1215889 - RNA, 17 nt, Human
ggcugggcuucaguggc

SEQ ID NO: 1215890 - RNA, 13 nt, Human
ggcugggcuucag

SEQ ID NO: 1215891 - RNA, 12 nt, Human
ggcugggcuuca

SEQ ID NO: 1215892 - RNA, 18 nt, Human
ggcugggcucccuuccca

SEQ ID NO: 1215893 - RNA, 17 nt, Human
ggcugggcucccuuccc

SEQ ID NO: 1215894 - RNA, 21 nt, Human
ggcuuagucacugagacagcc

SEQ ID NO: 1215895 - RNA, 23 nt, Human
ggcugcuucaaggauccugagcc

SEQ ID NO: 1215896 - RNA, 19 nt, Human
ggcugggagagccuuccag

SEQ ID NO: 1215897 - RNA, 19 nt, Human
ggcugggcagaggaaagca

SEQ ID NO: 1215898 - RNA, 15 nt, Human
ggcugggcagaggaa

SEQ ID NO: 1215899 - RNA, 23 nt, Human
ggcugggagagccuuccaggggu

SEQ ID NO: 1215900 - RNA, 20 nt, Human
ggcugggagagccuuccagg

SEQ ID NO: 1215901 - RNA, 14 nt, Human
ggcugggcagagga

SEQ ID NO: 1215902 - RNA, 13 nt, Human
ggcugggcagagg

SEQ ID NO: 1215903 - RNA, 22 nt, Human
ggcugcuucaaggauccugagc

SEQ ID NO: 1215904 - RNA, 14 nt, Human
ggcugcuucaagga

SEQ ID NO: 1215905 - RNA, 12 nt, Human
ggcugcuucaag

SEQ ID NO: 1215906 - RNA, 11 nt, Human
ggcugcuucaa

SEQ ID NO: 1215907 - RNA, 17 nt, Human
ggcugcagggaguccga

SEQ ID NO: 1215908 - RNA, 18 nt, Human
ggcugcugaaggcucgag

SEQ ID NO: 1215909 - RNA, 17 nt, Human
ggcugcugaaggcucga

SEQ ID NO: 1215910 - RNA, 15 nt, Human
ggcugcugaaggcuc

SEQ ID NO: 1215911 - RNA, 14 nt, Human
ggcugcugaaggcu

SEQ ID NO: 1215912 - RNA, 13 nt, Human
ggcugcagggagu

SEQ ID NO: 1215913 - RNA, 12 nt, Human
ggcugcagggag

SEQ ID NO: 1215914 - RNA, 20 nt, Human
ggccccugcccggcugcgga

SEQ ID NO: 1215915 - RNA, 17 nt, Human
ggccccugcccggcugc

SEQ ID NO: 1215916 - RNA, 16 nt, Human
ggccccugcccggcug

SEQ ID NO: 1215917 - RNA, 15 nt, Human
ggcugaggugggagg

SEQ ID NO: 1215918 - RNA, 13 nt, Human
ggcugagguggga

SEQ ID NO: 1215919 - RNA, 19 nt, Human
ggcugcaccggcuggccug

SEQ ID NO: 1215920 - RNA, 18 nt, Human
ggcugcaccggcuggccu

SEQ ID NO: 1215921 - RNA, 17 nt, Human
ggcugcaccggcuggcc

SEQ ID NO: 1215922 - RNA, 24 nt, Human
ggcugcaaaggguaucaggugcug

SEQ ID NO: 1215923 - RNA, 23 nt, Human
ggcugcaaaggguaucaggugcu

SEQ ID NO: 1215924 - RNA, 22 nt, Human
ggcugcaaaggguaucaggugc

SEQ ID NO: 1215925 - RNA, 18 nt, Human
ggcugcaaaggguaucag

SEQ ID NO: 1215926 - RNA, 17 nt, Human
ggcagguuggugggggc

SEQ ID NO: 1215927 - RNA, 15 nt, Human
ggcagguuggugggg

SEQ ID NO: 1215928 - RNA, 23 nt, Human
ggcauguucucugaggacacuaa

SEQ ID NO: 1215929 - RNA, 22 nt, Human
ggccaccugcggugcuaucucc

SEQ ID NO: 1215930 - RNA, 16 nt, Human
ggccaccugcggugcu

SEQ ID NO: 1215931 - RNA, 17 nt, Human
ggccacaagacccuugu

SEQ ID NO: 1215932 - RNA, 16 nt, Human
ggccacaagacccuug

SEQ ID NO: 1215933 - RNA, 16 nt, Human
ggcauuccccaggagg

SEQ ID NO: 1215934 - RNA, 15 nt, Human
ggcauuccccaggag

SEQ ID NO: 1215935 - RNA, 16 nt, Human
ggccaggagccuccug

SEQ ID NO: 1215936 - RNA, 20 nt, Human
ggccacugugaagagaacca

SEQ ID NO: 1215937 - RNA, 14 nt, Human
ggccaggagccucc

SEQ ID NO: 1215938 - RNA, 16 nt, Human
ggccacugugaagaga

SEQ ID NO: 1215939 - RNA, 11 nt, Human
ggccacuguga

SEQ ID NO: 1215940 - RNA, 16 nt, Human
ggccaggccagaggga

SEQ ID NO: 1215941 - RNA, 14 nt, Human
ggccaggccagagg

SEQ ID NO: 1215942 - RNA, 11 nt, Human
ggccaggcugg

SEQ ID NO: 1215943 - RNA, 12 nt, Human
ggccccugccac

SEQ ID NO: 1215944 - RNA, 16 nt, Human
ggccccugccacccug

SEQ ID NO: 1215945 - RNA, 13 nt, Human
ggccccugccacc

SEQ ID NO: 1215946 - RNA, 13 nt, Human
ggccccugcccgg

SEQ ID NO: 1215947 - RNA, 18 nt, Human
ggccccugccacccuggg

SEQ ID NO: 1215948 - RNA, 17 nt, Human
ggccccugccacccugg

SEQ ID NO: 1215949 - RNA, 21 nt, Human
ggccccucagggucccuggug

SEQ ID NO: 1215950 - RNA, 20 nt, Human
ggccccucagggucccuggu

SEQ ID NO: 1215951 - RNA, 19 nt, Human
ggccccucagggucccugg

SEQ ID NO: 1215952 - RNA, 16 nt, Human
ggccccucaggguccc

SEQ ID NO: 1215953 - RNA, 16 nt, Human
ggccaugggccuccug

SEQ ID NO: 1215954 - RNA, 13 nt, Human
ggccaugggccuc

SEQ ID NO: 1215955 - RNA, 14 nt, Human
ggccaggcccucug

SEQ ID NO: 1215956 - RNA, 12 nt, Human
ggccaggcuggu

SEQ ID NO: 1215957 - RNA, 21 nt, Human
ggaucagucugauucccaagc

SEQ ID NO: 1215958 - RNA, 18 nt, Human
ggcaacugcauuggcuuu

SEQ ID NO: 1215959 - RNA, 19 nt, Human
ggcaacugcauuggcuuug

SEQ ID NO: 1215960 - RNA, 22 nt, Human
ggcagagcagagaccaucccug

SEQ ID NO: 1215961 - RNA, 20 nt, Human
ggcagagcagagaccauccc

SEQ ID NO: 1215962 - RNA, 16 nt, Human
ggcagagcagagacca

SEQ ID NO: 1215963 - RNA, 15 nt, Human
ggcagagcagagacc

SEQ ID NO: 1215964 - RNA, 17 nt, Human
ggcacccggccccugcu

SEQ ID NO: 1215965 - RNA, 16 nt, Human
ggcacccggccccugc

SEQ ID NO: 1215966 - RNA, 15 nt, Human
ggcacccggccccug

SEQ ID NO: 1215967 - RNA, 16 nt, Human
ggcaaggcugucaauu

SEQ ID NO: 1215968 - RNA, 23 nt, Human
ggcaggucuugaacuccuggccu

SEQ ID NO: 1215969 - RNA, 13 nt, Human
ggcagguccaggg

SEQ ID NO: 1215970 - RNA, 21 nt, Human
ggcagcuugaggguugggcug

SEQ ID NO: 1215971 - RNA, 21 nt, Human
ggcagcugcgguccacccagg

SEQ ID NO: 1215972 - RNA, 19 nt, Human
ggcagcugcgguccaccca

SEQ ID NO: 1215973 - RNA, 13 nt, Human
ggcagcucagaga

SEQ ID NO: 1215974 - RNA, 22 nt, Human
ggcagcucaccucucccuugga

SEQ ID NO: 1215975 - RNA, 21 nt, Human
ggcagcucaccucucccuugg

SEQ ID NO: 1215976 - RNA, 18 nt, Human
ggcagcucaccucucccu

SEQ ID NO: 1215977 - RNA, 23 nt, Human
ggcagauacaggaaaagcugcug

SEQ ID NO: 1215978 - RNA, 23 nt, Human
ggcagaguugaagacagagcuac

SEQ ID NO: 1215979 - RNA, 17 nt, Human
ggcagaggaaagcaaag

SEQ ID NO: 1215980 - RNA, 23 nt, Human
ggagugaguugauagcacagacc

SEQ ID NO: 1215981 - RNA, 16 nt, Human
ggaucacagccucuga

SEQ ID NO: 1215982 - RNA, 21 nt, Human
ggagugaguugauagcacaga

SEQ ID NO: 1215983 - RNA, 14 nt, Human
ggagugagcugguu

SEQ ID NO: 1215984 - RNA, 12 nt, Human
ggagugagcugg

SEQ ID NO: 1215985 - RNA, 21 nt, Human
ggagugacagaggcagcccca

SEQ ID NO: 1215986 - RNA, 19 nt, Human
ggagugacagaggcagccc

SEQ ID NO: 1215987 - RNA, 18 nt, Human
ggagugacagaggcagcc

SEQ ID NO: 1215988 - RNA, 17 nt, Human
ggagugacagaggcagc

SEQ ID NO: 1215989 - RNA, 16 nt, Human
ggagugacagaggcag

SEQ ID NO: 1215990 - RNA, 11 nt, Human
ggagugacaga

SEQ ID NO: 1215991 - RNA, 21 nt, Human
ggagucccaccuuggcugcag

SEQ ID NO: 1215992 - RNA, 20 nt, Human
ggagucccaccuuggcugca

SEQ ID NO: 1215993 - RNA, 17 nt, Human
ggagggcuccagacaca

SEQ ID NO: 1215994 - RNA, 15 nt, Human
ggagggcuccagaca

SEQ ID NO: 1215995 - RNA, 14 nt, Human
ggagggcuccagac

SEQ ID NO: 1215996 - RNA, 12 nt, Human
ggagggagggcu

SEQ ID NO: 1215997 - RNA, 13 nt, Human
ggagggcuccaga

SEQ ID NO: 1215998 - RNA, 12 nt, Human
ggagggcuccag

SEQ ID NO: 1215999 - RNA, 15 nt, Human
ggaggauguucuggg

SEQ ID NO: 1216000 - RNA, 21 nt, Human
ggaggaucucuugagccuggg

SEQ ID NO: 1216001 - RNA, 17 nt, Human
ggaggaucucuugagcc

SEQ ID NO: 1216002 - RNA, 23 nt, Human
ggaggaucacuugaguccagaag

SEQ ID NO: 1216003 - RNA, 20 nt, Human
ggaagccagcaggcucucag

SEQ ID NO: 1216004 - RNA, 20 nt, Human
ggagcaaaaucgaugcagug

SEQ ID NO: 1216005 - RNA, 20 nt, Human
ggagauuuacaacuggggga

SEQ ID NO: 1216006 - RNA, 15 nt, Human
ggagaggggcacagg

SEQ ID NO: 1216007 - RNA, 21 nt, Human
ggagagcuagcagcagggagg

SEQ ID NO: 1216008 - RNA, 13 nt, Human
ggaagagccuugc

SEQ ID NO: 1216009 - RNA, 17 nt, Human
ggaagcacaugccucuc

SEQ ID NO: 1216010 - RNA, 15 nt, Human
ggaagcacaugccuc

SEQ ID NO: 1216011 - RNA, 14 nt, Human
ggaagcacaugccu

SEQ ID NO: 1216012 - RNA, 13 nt, Human
ggaagcacaugcc

SEQ ID NO: 1216013 - RNA, 17 nt, Human
ggaagcacagcuucauu

SEQ ID NO: 1216014 - RNA, 18 nt, Human
ggaagccagcaggcucuc

SEQ ID NO: 1216015 - RNA, 17 nt, Human
ggaagccagcaggcucu

SEQ ID NO: 1216016 - RNA, 16 nt, Human
ggaagccagcaggcuc

SEQ ID NO: 1216017 - RNA, 15 nt, Human
ggaagccagcaggcu

SEQ ID NO: 1216018 - RNA, 14 nt, Human
ggaagccagcaggc

SEQ ID NO: 1216019 - RNA, 13 nt, Human
ggaagccagcagg

SEQ ID NO: 1216020 - RNA, 23 nt, Human
ggaagcacaugccucucucaggc

SEQ ID NO: 1216021 - RNA, 22 nt, Human
ggaagcacaugccucucucagg

SEQ ID NO: 1216022 - RNA, 21 nt, Human
ggaagcacaugccucucucag

SEQ ID NO: 1216023 - RNA, 20 nt, Human
ggaacagacuggaagcacag

SEQ ID NO: 1216024 - RNA, 19 nt, Human
ggaacagacuggaagcaca

SEQ ID NO: 1216025 - RNA, 15 nt, Human
ggaaaaucagccugc

SEQ ID NO: 1216026 - RNA, 14 nt, Human
ggaaaauaaauuau

SEQ ID NO: 1216027 - RNA, 22 nt, Human
gcuuccagugaggcucugcccu

SEQ ID NO: 1216028 - RNA, 17 nt, Human
gcuucucacugccaugc

SEQ ID NO: 1216029 - RNA, 21 nt, Human
gcuuccagugaggcucugccc

SEQ ID NO: 1216030 - RNA, 20 nt, Human
gcuuccagugaggcucugcc

SEQ ID NO: 1216031 - RNA, 19 nt, Human
gcuuccagugaggcucugc

SEQ ID NO: 1216032 - RNA, 13 nt, Human
gcuguucagcugg

SEQ ID NO: 1216033 - RNA, 15 nt, Human
gcuuggaggaaggaa

SEQ ID NO: 1216034 - RNA, 14 nt, Human
gcuuggaggaagga

SEQ ID NO: 1216035 - RNA, 13 nt, Human
gcuuggaggaagg

SEQ ID NO: 1216036 - RNA, 13 nt, Human
ggaaaaauagccu

SEQ ID NO: 1216037 - RNA, 14 nt, Human
ggaaaaacugauuu

SEQ ID NO: 1216038 - RNA, 15 nt, Human
ggaaaaauagccugc

SEQ ID NO: 1216039 - RNA, 14 nt, Human
gcuuuuacuuaaac

SEQ ID NO: 1216040 - RNA, 17 nt, Human
gcugggcuucaguggca

SEQ ID NO: 1216041 - RNA, 22 nt, Human
gcugggagagccuuccaggggu

SEQ ID NO: 1216042 - RNA, 19 nt, Human
gcugggagagccuuccagg

SEQ ID NO: 1216043 - RNA, 18 nt, Human
gcugggagagccuuccag

SEQ ID NO: 1216044 - RNA, 17 nt, Human
gcugggagagccuucca

SEQ ID NO: 1216045 - RNA, 13 nt, Human
gcugggagagccu

SEQ ID NO: 1216046 - RNA, 12 nt, Human
gcugggagagcc

SEQ ID NO: 1216047 - RNA, 19 nt, Human
gcuggucccacucagucca

SEQ ID NO: 1216048 - RNA, 15 nt, Human
gcuggucccacucag

SEQ ID NO: 1216049 - RNA, 13 nt, Human
gcugggggccuca

SEQ ID NO: 1216050 - RNA, 20 nt, Human
gcugggggccucagugccac

SEQ ID NO: 1216051 - RNA, 19 nt, Human
gcugggggccucagugcca

SEQ ID NO: 1216052 - RNA, 23 nt, Human
gcugggggaagaagcucucuccu

SEQ ID NO: 1216053 - RNA, 12 nt, Human
gcuggggccagu

SEQ ID NO: 1216054 - RNA, 19 nt, Human
gcugggcuucaguggcagc

SEQ ID NO: 1216055 - RNA, 18 nt, Human
gcugggcuucaguggcag

SEQ ID NO: 1216056 - RNA, 22 nt, Human
gcugucccuuacgugaguccug

SEQ ID NO: 1216057 - RNA, 21 nt, Human
gcugucccuuacgugaguccu

SEQ ID NO: 1216058 - RNA, 19 nt, Human
gcugucccuuacgugaguc

SEQ ID NO: 1216059 - RNA, 23 nt, Human
gcugucaauuacaggaaguacug

SEQ ID NO: 1216060 - RNA, 22 nt, Human
gcugucaauuacaggaaguacu

SEQ ID NO: 1216061 - RNA, 19 nt, Human
gcugucaauuacaggaagu

SEQ ID NO: 1216062 - RNA, 17 nt, Human
gcugucaauuacaggaa

SEQ ID NO: 1216063 - RNA, 16 nt, Human
gcugucaauuacagga

SEQ ID NO: 1216064 - RNA, 22 nt, Human
gcugguucaggguuggccccug

SEQ ID NO: 1216065 - RNA, 15 nt, Human
gcugguucaggguug

SEQ ID NO: 1216066 - RNA, 21 nt, Human
gcugguuagagguucccuuug

SEQ ID NO: 1216067 - RNA, 18 nt, Human
gcuggugucaccugaaga

SEQ ID NO: 1216068 - RNA, 20 nt, Human
gcuggucccacucaguccau

SEQ ID NO: 1216069 - RNA, 12 nt, Human
gcuggccuggcc

SEQ ID NO: 1216070 - RNA, 20 nt, Human
gcugggacaugggaaagggg

SEQ ID NO: 1216071 - RNA, 19 nt, Human
gcugggacuacagguguga

SEQ ID NO: 1216072 - RNA, 20 nt, Human
gcugggacuacaggcaccca

SEQ ID NO: 1216073 - RNA, 19 nt, Human
gcugggacuacaggcaccc

SEQ ID NO: 1216074 - RNA, 18 nt, Human
gcugggacuacaggcacc

SEQ ID NO: 1216075 - RNA, 13 nt, Human
gcugggacuacag

SEQ ID NO: 1216076 - RNA, 22 nt, Human
gcuggaccuugaacuggguacu

SEQ ID NO: 1216077 - RNA, 21 nt, Human
gcuggaccuugaacuggguac

SEQ ID NO: 1216078 - RNA, 18 nt, Human
gcuggaccuugaacuggg

SEQ ID NO: 1216079 - RNA, 22 nt, Human
gcugcuugggcuucauccuccu

SEQ ID NO: 1216080 - RNA, 17 nt, Human
gcugcuugggcuucauc

SEQ ID NO: 1216081 - RNA, 14 nt, Human
gcugcccugugagu

SEQ ID NO: 1216082 - RNA, 12 nt, Human
gcugcccuguga

SEQ ID NO: 1216083 - RNA, 11 nt, Human
gcugcccugug

SEQ ID NO: 1216084 - RNA, 22 nt, Human
gcuagcagcagggagggcuucu

SEQ ID NO: 1216085 - RNA, 16 nt, Human
gcugcuugggcuucau

SEQ ID NO: 1216086 - RNA, 23 nt, Human
gcugcuucaaggauccugagcca

SEQ ID NO: 1216087 - RNA, 22 nt, Human
gcugcuucaaggauccugagcc

SEQ ID NO: 1216088 - RNA, 21 nt, Human
gcugcuucaaggauccugagc

SEQ ID NO: 1216089 - RNA, 13 nt, Human
gcugcuucaagga

SEQ ID NO: 1216090 - RNA, 19 nt, Human
gcugcgguccacccaggag

SEQ ID NO: 1216091 - RNA, 18 nt, Human
gcugcgguccacccagga

SEQ ID NO: 1216092 - RNA, 17 nt, Human
gcugcgguccacccagg

SEQ ID NO: 1216093 - RNA, 19 nt, Human
gccgcagcccugcagaggg

SEQ ID NO: 1216094 - RNA, 17 nt, Human
gccgcagcccugcagag

SEQ ID NO: 1216095 - RNA, 16 nt, Human
gccgcagcccugcaga

SEQ ID NO: 1216096 - RNA, 15 nt, Human
gccgcagcccugcag

SEQ ID NO: 1216097 - RNA, 19 nt, Human
gccgagauagccaaggcca

SEQ ID NO: 1216098 - RNA, 17 nt, Human
gccgagauagccaaggc

SEQ ID NO: 1216099 - RNA, 16 nt, Human
gccgagauagccaagg

SEQ ID NO: 1216100 - RNA, 13 nt, Human
gcccuucucucca

SEQ ID NO: 1216101 - RNA, 21 nt, Human
gccucagcauccuggcacccg

SEQ ID NO: 1216102 - RNA, 18 nt, Human
gccucagcauccuggcac

SEQ ID NO: 1216103 - RNA, 24 nt, Human
gccucaagugauucuccugccuca

SEQ ID NO: 1216104 - RNA, 23 nt, Human
gccgucuaccugaggggccucuu

SEQ ID NO: 1216105 - RNA, 22 nt, Human
gccgucuaccugaggggccucu

SEQ ID NO: 1216106 - RNA, 20 nt, Human
gccgucuaccugaggggccu

SEQ ID NO: 1216107 - RNA, 12 nt, Human
gccugcccaggc

SEQ ID NO: 1216108 - RNA, 11 nt, Human
gccugcccagg

SEQ ID NO: 1216109 - RNA, 20 nt, Human
gccucugcacuccccugcug

SEQ ID NO: 1216110 - RNA, 19 nt, Human
gccucugcacuccccugcu

SEQ ID NO: 1216111 - RNA, 18 nt, Human
gccucugcacuccccugc

SEQ ID NO: 1216112 - RNA, 17 nt, Human
gccucugcacuccccug

SEQ ID NO: 1216113 - RNA, 16 nt, Human
gccucugcacuccccu

SEQ ID NO: 1216114 - RNA, 16 nt, Human
gccucugacacacagc

SEQ ID NO: 1216115 - RNA, 15 nt, Human
gccucugacacacag

SEQ ID NO: 1216116 - RNA, 15 nt, Human
gccugaagucacaca

SEQ ID NO: 1216117 - RNA, 21 nt, Human
gccucugcacuccccugcugg

SEQ ID NO: 1216118 - RNA, 15 nt, Human
gccucucccaucacu

SEQ ID NO: 1216119 - RNA, 23 nt, Human
gccucccgaguagcugggacuac

SEQ ID NO: 1216120 - RNA, 21 nt, Human
gccucccgaguagcugggacu

SEQ ID NO: 1216121 - RNA, 21 nt, Human
gccucccgaauagcugggacu

SEQ ID NO: 1216122 - RNA, 20 nt, Human
gccucccgaauagcugggac

SEQ ID NO: 1216123 - RNA, 19 nt, Human
gccucccgaauagcuggga

SEQ ID NO: 1216124 - RNA, 18 nt, Human
gccucccgaauagcuggg

SEQ ID NO: 1216125 - RNA, 22 nt, Human
gccucagccucccaaagugcug

SEQ ID NO: 1216126 - RNA, 14 nt, Human
gccucagccuccca

SEQ ID NO: 1216127 - RNA, 12 nt, Human
gccucagccucc

SEQ ID NO: 1216128 - RNA, 18 nt, Human
gcuaacauggaaguacua

SEQ ID NO: 1216129 - RNA, 17 nt, Human
gcuaacauggaaguacu

SEQ ID NO: 1216130 - RNA, 14 nt, Human
gcgugagccacugc

SEQ ID NO: 1216131 - RNA, 15 nt, Human
gcgugagccacugca

SEQ ID NO: 1216132 - RNA, 16 nt, Human
gcgugagccacugcac

SEQ ID NO: 1216133 - RNA, 22 nt, Human
gcuagacgagcaggcuucuucc

SEQ ID NO: 1216134 - RNA, 21 nt, Human
gcuagacgagcaggcuucuuc

SEQ ID NO: 1216135 - RNA, 23 nt, Human
gcgguccacccaggagccccgag

SEQ ID NO: 1216136 - RNA, 23 nt, Human
gcggggacagcuccuucuguccu

SEQ ID NO: 1216137 - RNA, 19 nt, Human
gcggggacagcuccuucug

SEQ ID NO: 1216138 - RNA, 23 nt, Human
gcggacagccacggccaggccag

SEQ ID NO: 1216139 - RNA, 19 nt, Human
gcggacagccacggccagg

SEQ ID NO: 1216140 - RNA, 19 nt, Human
gcggaaugaaccacaucuu

SEQ ID NO: 1216141 - RNA, 21 nt, Human
gcgccuacaggagugagcacu

SEQ ID NO: 1216142 - RNA, 20 nt, Human
gcgccuacaggagugagcac

SEQ ID NO: 1216143 - RNA, 14 nt, Human
gcgcugccccuggc

SEQ ID NO: 1216144 - RNA, 17 nt, Human
gcgcugccccuggcagc

SEQ ID NO: 1216145 - RNA, 17 nt, Human
gccugguggcagcugcg

SEQ ID NO: 1216146 - RNA, 16 nt, Human
gccugguggcagcugc

SEQ ID NO: 1216147 - RNA, 15 nt, Human
gccugguggcagcug

SEQ ID NO: 1216148 - RNA, 23 nt, Human
gccuuauggaacacucugagacu

SEQ ID NO: 1216149 - RNA, 22 nt, Human
gccuuauggaacacucugagac

SEQ ID NO: 1216150 - RNA, 21 nt, Human
gccuuauggaacacucugaga

SEQ ID NO: 1216151 - RNA, 14 nt, Human
gccccgcccaggcu

SEQ ID NO: 1216152 - RNA, 23 nt, Human
gccccgaggccuucucugaagga

SEQ ID NO: 1216153 - RNA, 23 nt, Human
gccccauucugccugcccaggcc

SEQ ID NO: 1216154 - RNA, 22 nt, Human
gccccauucugccugcccaggc

SEQ ID NO: 1216155 - RNA, 21 nt, Human
gccccucagggucccuggugg

SEQ ID NO: 1216156 - RNA, 19 nt, Human
gccccucagggucccuggu

SEQ ID NO: 1216157 - RNA, 23 nt, Human
gccccucaacucuccuccagagu

SEQ ID NO: 1216158 - RNA, 23 nt, Human
gccccuggcagccccuguucugg

SEQ ID NO: 1216159 - RNA, 18 nt, Human
gcccgggcucugccuccc

SEQ ID NO: 1216160 - RNA, 15 nt, Human
gcccgggcucugccu

SEQ ID NO: 1216161 - RNA, 14 nt, Human
gcccgggcucugcc

SEQ ID NO: 1216162 - RNA, 13 nt, Human
gcccgggcucugc

SEQ ID NO: 1216163 - RNA, 15 nt, Human
gcccggcuccaggcu

SEQ ID NO: 1216164 - RNA, 14 nt, Human
gcccggcuccaggc

SEQ ID NO: 1216165 - RNA, 13 nt, Human
gcccggcuccagg

SEQ ID NO: 1216166 - RNA, 20 nt, Human
gccccuucugacccaugcug

SEQ ID NO: 1216167 - RNA, 19 nt, Human
gccccuucugacccaugcu

SEQ ID NO: 1216168 - RNA, 22 nt, Human
gcccucugcccacucccugcaa

SEQ ID NO: 1216169 - RNA, 21 nt, Human
gcccgggcucugccucccauc

SEQ ID NO: 1216170 - RNA, 20 nt, Human
gcccgggcucugccucccau

SEQ ID NO: 1216171 - RNA, 19 nt, Human
gcccgggcucugccuccca

SEQ ID NO: 1216172 - RNA, 21 nt, Human
gccccauucugccugcccagg

SEQ ID NO: 1216173 - RNA, 20 nt, Human
gccccauucugccugcccag

SEQ ID NO: 1216174 - RNA, 18 nt, Human
gccccauucugccugccc

SEQ ID NO: 1216175 - RNA, 17 nt, Human
gccccauucugccugcc

SEQ ID NO: 1216176 - RNA, 23 nt, Human
gccccauccucuguacagagccc

SEQ ID NO: 1216177 - RNA, 21 nt, Human
gccccagugcccacaggauca

SEQ ID NO: 1216178 - RNA, 17 nt, Human
gccccagugcccacagg

SEQ ID NO: 1216179 - RNA, 16 nt, Human
gccccagugcccacag

SEQ ID NO: 1216180 - RNA, 15 nt, Human
gcccaguugggugga

SEQ ID NO: 1216181 - RNA, 22 nt, Human
gcccagucuggaaugcaguggu

SEQ ID NO: 1216182 - RNA, 16 nt, Human
gcccaggcuggcgugc

SEQ ID NO: 1216183 - RNA, 15 nt, Human
gcccaggcuggcgug

SEQ ID NO: 1216184 - RNA, 14 nt, Human
gcccaggcuggcgu

SEQ ID NO: 1216185 - RNA, 18 nt, Human
gcccaggccuccuacagc

SEQ ID NO: 1216186 - RNA, 16 nt, Human
gcccaggaaaggcucc

SEQ ID NO: 1216187 - RNA, 15 nt, Human
gcccaggaaaggcuc

SEQ ID NO: 1216188 - RNA, 12 nt, Human
gcccaggaaagg

SEQ ID NO: 1216189 - RNA, 11 nt, Human
gcccaggcugg

SEQ ID NO: 1216190 - RNA, 19 nt, Human
gccacugcaccgggccaca

SEQ ID NO: 1216191 - RNA, 18 nt, Human
gccacugcaccgggccac

SEQ ID NO: 1216192 - RNA, 17 nt, Human
gccacugcaccgggcca

SEQ ID NO: 1216193 - RNA, 18 nt, Human
gccagagggagugacaga

SEQ ID NO: 1216194 - RNA, 15 nt, Human
gccagagacacaagc

SEQ ID NO: 1216195 - RNA, 12 nt, Human
gccagagacaca

SEQ ID NO: 1216196 - RNA, 21 nt, Human
gccacuauuguuagucucuug

SEQ ID NO: 1216197 - RNA, 17 nt, Human
gccacggccaggccaga

SEQ ID NO: 1216198 - RNA, 16 nt, Human
gccacggccaggccag

SEQ ID NO: 1216199 - RNA, 15 nt, Human
gccacggccaggcca

SEQ ID NO: 1216200 - RNA, 14 nt, Human
gccacggccaggcc

SEQ ID NO: 1216201 - RNA, 13 nt, Human
gccaaagccaaag

SEQ ID NO: 1216202 - RNA, 16 nt, Human
gccagcugcuugggcu

SEQ ID NO: 1216203 - RNA, 15 nt, Human
gccagcugcuugggc

SEQ ID NO: 1216204 - RNA, 14 nt, Human
gccagcugcuuggg

SEQ ID NO: 1216205 - RNA, 22 nt, Human
gccagccuugaccauucuccac

SEQ ID NO: 1216206 - RNA, 21 nt, Human
gccagccuugaccauucucca

SEQ ID NO: 1216207 - RNA, 20 nt, Human
gccagccuugaccauucucc

SEQ ID NO: 1216208 - RNA, 14 nt, Human
gccagccuugacca

SEQ ID NO: 1216209 - RNA, 12 nt, Human
gccagccuugac

SEQ ID NO: 1216210 - RNA, 21 nt, Human
gccagccgagauagccaaggc

SEQ ID NO: 1216211 - RNA, 20 nt, Human
gccagccgagauagccaagg

SEQ ID NO: 1216212 - RNA, 19 nt, Human
gccagauucuuuccugagg

SEQ ID NO: 1216213 - RNA, 17 nt, Human
gccagauucuuuccuga

SEQ ID NO: 1216214 - RNA, 16 nt, Human
gccagauucuuuccug

SEQ ID NO: 1216215 - RNA, 20 nt, Human
gccagagggagugacagagg

SEQ ID NO: 1216216 - RNA, 19 nt, Human
gccagagggagugacagag

SEQ ID NO: 1216217 - RNA, 15 nt, Human
gcccaccccucaaca

SEQ ID NO: 1216218 - RNA, 19 nt, Human
gcccacaggaucagucuga

SEQ ID NO: 1216219 - RNA, 18 nt, Human
gcccacaggaucagucug

SEQ ID NO: 1216220 - RNA, 13 nt, Human
gcccacaggauca

SEQ ID NO: 1216221 - RNA, 16 nt, Human
gccauuuguguuuaua

SEQ ID NO: 1216222 - RNA, 16 nt, Human
gcccaaagaugcagcc

SEQ ID NO: 1216223 - RNA, 22 nt, Human
gccauuucuuccacaagagccc

SEQ ID NO: 1216224 - RNA, 20 nt, Human
gccauuucuuccacaagagc

SEQ ID NO: 1216225 - RNA, 17 nt, Human
gccauuucuuccacaag

SEQ ID NO: 1216226 - RNA, 23 nt, Human
gccaggggaaaaucagccugcuc

SEQ ID NO: 1216227 - RNA, 22 nt, Human
gccaggggaaaaucagccugcu

SEQ ID NO: 1216228 - RNA, 21 nt, Human
gccaggggaaaaucagccugc

SEQ ID NO: 1216229 - RNA, 17 nt, Human
gccaggggaaaaucagc

SEQ ID NO: 1216230 - RNA, 20 nt, Human
gccaggaagccagcaggcuc

SEQ ID NO: 1216231 - RNA, 19 nt, Human
gccaggaagccagcaggcu

SEQ ID NO: 1216232 - RNA, 18 nt, Human
gccaggaagccagcaggc

SEQ ID NO: 1216233 - RNA, 17 nt, Human
gccaggaagccagcagg

SEQ ID NO: 1216234 - RNA, 11 nt, Human
gccaggaagcc

SEQ ID NO: 1216235 - RNA, 17 nt, Human
gccaucccagccccaau

SEQ ID NO: 1216236 - RNA, 16 nt, Human
gccaucccagccccaa

SEQ ID NO: 1216237 - RNA, 15 nt, Human
gccaucccagcccca

SEQ ID NO: 1216238 - RNA, 14 nt, Human
gccaucccagcccc

SEQ ID NO: 1216239 - RNA, 13 nt, Human
gccaucccagccc

SEQ ID NO: 1216240 - RNA, 20 nt, Human
gccauccagguucagcuugu

SEQ ID NO: 1216241 - RNA, 19 nt, Human
gccauccagguucagcuug

SEQ ID NO: 1216242 - RNA, 20 nt, Human
gcaggaggaucacuugaguc

SEQ ID NO: 1216243 - RNA, 14 nt, Human
gcagccuggacccu

SEQ ID NO: 1216244 - RNA, 22 nt, Human
gcagccucaaccuccugggcua

SEQ ID NO: 1216245 - RNA, 21 nt, Human
gcagccucaaccuccugggcu

SEQ ID NO: 1216246 - RNA, 15 nt, Human
gcagccucacagucc

SEQ ID NO: 1216247 - RNA, 20 nt, Human
gcagccucaaccuccugggc

SEQ ID NO: 1216248 - RNA, 19 nt, Human
gcagccucaaccuccuggg

SEQ ID NO: 1216249 - RNA, 20 nt, Human
gcagaguugaagacagagcu

SEQ ID NO: 1216250 - RNA, 19 nt, Human
gcagaguugaagacagagc

SEQ ID NO: 1216251 - RNA, 17 nt, Human
gcagaguugaagacaga

SEQ ID NO: 1216252 - RNA, 16 nt, Human
gcagaguugaagacag

SEQ ID NO: 1216253 - RNA, 12 nt, Human
gcagcaauaaag

SEQ ID NO: 1216254 - RNA, 15 nt, Human
gcagaguugaagaca

SEQ ID NO: 1216255 - RNA, 19 nt, Human
gcagagaccaucccugaag

SEQ ID NO: 1216256 - RNA, 17 nt, Human
gcagagaccaucccuga

SEQ ID NO: 1216257 - RNA, 15 nt, Human
gcagagaccaucccu

SEQ ID NO: 1216258 - RNA, 14 nt, Human
gcagagaccauccc

SEQ ID NO: 1216259 - RNA, 21 nt, Human
gcagagaauucucuuauccaa

SEQ ID NO: 1216260 - RNA, 23 nt, Human
gcagagaaugaaagggcccagag

SEQ ID NO: 1216261 - RNA, 22 nt, Human
gcagagaaugaaagggcccaga

SEQ ID NO: 1216262 - RNA, 21 nt, Human
gcagagaaugaaagggcccag

SEQ ID NO: 1216263 - RNA, 20 nt, Human
gcagagaaugaaagggccca

SEQ ID NO: 1216264 - RNA, 19 nt, Human
gcagagaaugaaagggccc

SEQ ID NO: 1216265 - RNA, 18 nt, Human
gcagaaggaagacuucau

SEQ ID NO: 1216266 - RNA, 19 nt, Human
gcacagcuaacauggaagu

SEQ ID NO: 1216267 - RNA, 15 nt, Human
gcaaugaccuuucaa

SEQ ID NO: 1216268 - RNA, 14 nt, Human
gcaaugaccuuuca

SEQ ID NO: 1216269 - RNA, 13 nt, Human
gcaaugaccuuuc

SEQ ID NO: 1216270 - RNA, 21 nt, Human
gcacagcuucauuuccugugu

SEQ ID NO: 1216271 - RNA, 16 nt, Human
gcacagcuucauuucc

SEQ ID NO: 1216272 - RNA, 15 nt, Human
gcaccuccugccucg

SEQ ID NO: 1216273 - RNA, 14 nt, Human
gcaccuccugccuc

SEQ ID NO: 1216274 - RNA, 17 nt, Human
gcacccggccccugcug

SEQ ID NO: 1216275 - RNA, 15 nt, Human
gcacccggccccugc

SEQ ID NO: 1216276 - RNA, 20 nt, Human
gcaccacugcacuccagccu

SEQ ID NO: 1216277 - RNA, 19 nt, Human
gcaccacugcacuccagcc

SEQ ID NO: 1216278 - RNA, 14 nt, Human
gcagaaggaagacu

SEQ ID NO: 1216279 - RNA, 13 nt, Human
gcagaaggaagac

SEQ ID NO: 1216280 - RNA, 12 nt, Human
gcagaaggaaga

SEQ ID NO: 1216281 - RNA, 23 nt, Human
gcacugggcuuggggaccagagc

SEQ ID NO: 1216282 - RNA, 22 nt, Human
gcacugggcuuggggaccagag

SEQ ID NO: 1216283 - RNA, 17 nt, Human
gcacuaaggugugcucu

SEQ ID NO: 1216284 - RNA, 18 nt, Human
gcacccggccccugcugg

SEQ ID NO: 1216285 - RNA, 19 nt, Human
gcacuaaggugugcucuga

SEQ ID NO: 1216286 - RNA, 18 nt, Human
gcacuaaggugugcucug

SEQ ID NO: 1216287 - RNA, 16 nt, Human
gcagugggagcugccu

SEQ ID NO: 1216288 - RNA, 23 nt, Human
gcagugcuuccaaggauggacca

SEQ ID NO: 1216289 - RNA, 14 nt, Human
gcagggcucagcgg

SEQ ID NO: 1216290 - RNA, 12 nt, Human
gcagggcucagc

SEQ ID NO: 1216291 - RNA, 16 nt, Human
gcagggagggcuucug

SEQ ID NO: 1216292 - RNA, 20 nt, Human
gcaggauucuuccucccucc

SEQ ID NO: 1216293 - RNA, 18 nt, Human
gcagugggagcugccugu

SEQ ID NO: 1216294 - RNA, 17 nt, Human
gcagugggagcugccug

SEQ ID NO: 1216295 - RNA, 21 nt, Human
gcaucaagaugugacauguuu

SEQ ID NO: 1216296 - RNA, 20 nt, Human
gcauauucaggaagcucagg

SEQ ID NO: 1216297 - RNA, 18 nt, Human
gcauauucaggaagcuca

SEQ ID NO: 1216298 - RNA, 17 nt, Human
gcauauucaggaagcuc

SEQ ID NO: 1216299 - RNA, 15 nt, Human
gcauauucaggaagc

SEQ ID NO: 1216300 - RNA, 17 nt, Human
gcauguuugugauugac

SEQ ID NO: 1216301 - RNA, 15 nt, Human
gcaugcugucccuua

SEQ ID NO: 1216302 - RNA, 22 nt, Human
gcaugccuggauggggcugcac

SEQ ID NO: 1216303 - RNA, 17 nt, Human
gcaugccuggauggggc

SEQ ID NO: 1216304 - RNA, 20 nt, Human
gcaugacacgaauauugcug

SEQ ID NO: 1216305 - RNA, 18 nt, Human
gcaucaggccaggcccuc

SEQ ID NO: 1216306 - RNA, 17 nt, Human
gcaucaggccaggcccu

SEQ ID NO: 1216307 - RNA, 16 nt, Human
gcaucaggccaggccc

SEQ ID NO: 1216308 - RNA, 15 nt, Human
gcaucaggccaggcc

SEQ ID NO: 1216309 - RNA, 20 nt, Human
gccaaaggaagcacaugccu

SEQ ID NO: 1216310 - RNA, 16 nt, Human
gccaaaggaagcacau

SEQ ID NO: 1216311 - RNA, 14 nt, Human
gccaaaggaagcac

SEQ ID NO: 1216312 - RNA, 21 nt, Human
gccaaacucaccugccccuca

SEQ ID NO: 1216313 - RNA, 22 nt, Human
gcauuuugcuaaaugugaauga

SEQ ID NO: 1216314 - RNA, 21 nt, Human
gcauuuggugguuucagaaau

SEQ ID NO: 1216315 - RNA, 23 nt, Human
gcauuugcugaauacagaggcaa

SEQ ID NO: 1216316 - RNA, 12 nt, Human
gcauuccccagg

SEQ ID NO: 1216317 - RNA, 12 nt, Human
gcauuccccacu

SEQ ID NO: 1216318 - RNA, 20 nt, Human
gaguucauacccuguuacca

SEQ ID NO: 1216319 - RNA, 24 nt, Human
gauaauacaccacuacauucuguu

SEQ ID NO: 1216320 - RNA, 23 nt, Human
gauaauacaccacuacauucugu

SEQ ID NO: 1216321 - RNA, 14 nt, Human
gauaauacaccacu

SEQ ID NO: 1216322 - RNA, 12 nt, Human
gauaauacacca

SEQ ID NO: 1216323 - RNA, 13 nt, Human
gaguucugguucc

SEQ ID NO: 1216324 - RNA, 23 nt, Human
gaucacggcucacugcagccuca

SEQ ID NO: 1216325 - RNA, 18 nt, Human
gauauaugcucugcaugu

SEQ ID NO: 1216326 - RNA, 20 nt, Human
gauagugucccacggugccu

SEQ ID NO: 1216327 - RNA, 17 nt, Human
gauacaaaagcauguga

SEQ ID NO: 1216328 - RNA, 16 nt, Human
gauacaaaagcaugug

SEQ ID NO: 1216329 - RNA, 16 nt, Human
gaugccugguggcagc

SEQ ID NO: 1216330 - RNA, 15 nt, Human
gaugccugguggcag

SEQ ID NO: 1216331 - RNA, 14 nt, Human
gaugcagugcuucc

SEQ ID NO: 1216332 - RNA, 16 nt, Human
gaugagaggaaaucac

SEQ ID NO: 1216333 - RNA, 23 nt, Human
gaugcaccagcccuuagcaggga

SEQ ID NO: 1216334 - RNA, 15 nt, Human
gaugcaccagcccuu

SEQ ID NO: 1216335 - RNA, 14 nt, Human
gaugagaggaaauc

SEQ ID NO: 1216336 - RNA, 20 nt, Human
gaugaccuugaaugaugcca

SEQ ID NO: 1216337 - RNA, 18 nt, Human
gaugaccuugaaugaugc

SEQ ID NO: 1216338 - RNA, 21 nt, Human
gaugaaaugaggucagagccu

SEQ ID NO: 1216339 - RNA, 15 nt, Human
gaugaaaugagguca

SEQ ID NO: 1216340 - RNA, 19 nt, Human
gaucuucuuuauaauucua

SEQ ID NO: 1216341 - RNA, 22 nt, Human
gaucuucuguggguuucuaaag

SEQ ID NO: 1216342 - RNA, 20 nt, Human
gaucuaggaagacuuuggaa

SEQ ID NO: 1216343 - RNA, 18 nt, Human
gaucuaggaagacuuugg

SEQ ID NO: 1216344 - RNA, 14 nt, Human
gaucuaggaagacu

SEQ ID NO: 1216345 - RNA, 13 nt, Human
gaucuaggaagac

SEQ ID NO: 1216346 - RNA, 13 nt, Human
gauccugagccag

SEQ ID NO: 1216347 - RNA, 12 nt, Human
gauccugagcca

SEQ ID NO: 1216348 - RNA, 16 nt, Human
gaucauccacugugcc

SEQ ID NO: 1216349 - RNA, 13 nt, Human
gaucauccacugu

SEQ ID NO: 1216350 - RNA, 18 nt, Human
gauccucccaccucagcc

SEQ ID NO: 1216351 - RNA, 17 nt, Human
gauccucccaccucagc

SEQ ID NO: 1216352 - RNA, 16 nt, Human
gauccucccaccucag

SEQ ID NO: 1216353 - RNA, 14 nt, Human
gauccuccaggugc

SEQ ID NO: 1216354 - RNA, 18 nt, Human
gauccuaggcauuugcug

SEQ ID NO: 1216355 - RNA, 12 nt, Human
gauuuaaaucag

SEQ ID NO: 1216356 - RNA, 22 nt, Human
gauuucuguuuagauaauacac

SEQ ID NO: 1216357 - RNA, 18 nt, Human
gauugcuugagcucagga

SEQ ID NO: 1216358 - RNA, 18 nt, Human
gauugcaacaggcugggc

SEQ ID NO: 1216359 - RNA, 17 nt, Human
gauugcaacaggcuggg

SEQ ID NO: 1216360 - RNA, 16 nt, Human
gauugcaacaggcugg

SEQ ID NO: 1216361 - RNA, 22 nt, Human
gauucuuuccugaggcugggcu

SEQ ID NO: 1216362 - RNA, 20 nt, Human
gauucuuuccugaggcuggg

SEQ ID NO: 1216363 - RNA, 18 nt, Human
gauucccaagcucugcuc

SEQ ID NO: 1216364 - RNA, 19 nt, Human
gauucuuuccugaggcugg

SEQ ID NO: 1216365 - RNA, 17 nt, Human
gauucccaagcucugcu

SEQ ID NO: 1216366 - RNA, 16 nt, Human
gauucccaagcucugc

SEQ ID NO: 1216367 - RNA, 15 nt, Human
gauucccaagcucug

SEQ ID NO: 1216368 - RNA, 18 nt, Human
gauucagacagcugccug

SEQ ID NO: 1216369 - RNA, 17 nt, Human
gauucagacagcugccu

SEQ ID NO: 1216370 - RNA, 14 nt, Human
gauucagacagcug

SEQ ID NO: 1216371 - RNA, 13 nt, Human
gauucagacagcu

SEQ ID NO: 1216372 - RNA, 21 nt, Human
gauuacaagcgugagccacug

SEQ ID NO: 1216373 - RNA, 13 nt, Human
gauuacaagcgug

SEQ ID NO: 1216374 - RNA, 21 nt, Human
gauguuuuaaggaugcuugua

SEQ ID NO: 1216375 - RNA, 14 nt, Human
gauguucugggaca

SEQ ID NO: 1216376 - RNA, 18 nt, Human
gauguucuagcauggcug

SEQ ID NO: 1216377 - RNA, 17 nt, Human
gaugccugguggcagcu

SEQ ID NO: 1216378 - RNA, 17 nt, Human
gcaauccugcaagaaca

SEQ ID NO: 1216379 - RNA, 18 nt, Human
gcaaggcugucaauuaca

SEQ ID NO: 1216380 - RNA, 14 nt, Human
gcaaggcugucaau

SEQ ID NO: 1216381 - RNA, 20 nt, Human
gcaagcaccuccugccucga

SEQ ID NO: 1216382 - RNA, 18 nt, Human
gcaagcaccuccugccuc

SEQ ID NO: 1216383 - RNA, 16 nt, Human
gcaagcaccuccugcc

SEQ ID NO: 1216384 - RNA, 15 nt, Human
gcaagcaccuccugc

SEQ ID NO: 1216385 - RNA, 21 nt, Human
gcaaaccaucauugaaaucuu

SEQ ID NO: 1216386 - RNA, 20 nt, Human
gcaaaccaucauugaaaucu

SEQ ID NO: 1216387 - RNA, 19 nt, Human
gcaaaccaucauugaaauc

SEQ ID NO: 1216388 - RNA, 17 nt, Human
gcaaaccaucauugaaa

SEQ ID NO: 1216389 - RNA, 16 nt, Human
gcaaaccaucauugaa

SEQ ID NO: 1216390 - RNA, 18 nt, Human
gcaacugcauuggcuuug

SEQ ID NO: 1216391 - RNA, 19 nt, Human
gaagagaaugcacaaacag

SEQ ID NO: 1216392 - RNA, 17 nt, Human
gaagacuuuggaaagag

SEQ ID NO: 1216393 - RNA, 14 nt, Human
gaagacuuuggaaa

SEQ ID NO: 1216394 - RNA, 20 nt, Human
gaagacuuuucuuucagcca

SEQ ID NO: 1216395 - RNA, 13 nt, Human
gaagacuuuggaa

SEQ ID NO: 1216396 - RNA, 11 nt, Human
gaagacuuugg

SEQ ID NO: 1216397 - RNA, 23 nt, Human
gaacuuugaccucugcagcaaua

SEQ ID NO: 1216398 - RNA, 20 nt, Human
gaagauaauauuaaggaaga

SEQ ID NO: 1216399 - RNA, 18 nt, Human
gaagcauuuacuuugugu

SEQ ID NO: 1216400 - RNA, 17 nt, Human
gaagcauuuacuuugug

SEQ ID NO: 1216401 - RNA, 23 nt, Human
gaagcccuucuaccuuccugcaa

SEQ ID NO: 1216402 - RNA, 23 nt, Human
gaagccagcaggcucucaggcca

SEQ ID NO: 1216403 - RNA, 19 nt, Human
gaagcccaggaaaggcucc

SEQ ID NO: 1216404 - RNA, 16 nt, Human
gaagcccaggaaaggc

SEQ ID NO: 1216405 - RNA, 15 nt, Human
gaagcccaggaaagg

SEQ ID NO: 1216406 - RNA, 13 nt, Human
gaagcccaggaaa

SEQ ID NO: 1216407 - RNA, 22 nt, Human
gaagccagcaggcucucaggcc

SEQ ID NO: 1216408 - RNA, 21 nt, Human
gaagccagcaggcucucaggc

SEQ ID NO: 1216409 - RNA, 20 nt, Human
gaagccagcaggcucucagg

SEQ ID NO: 1216410 - RNA, 15 nt, Human
gaacacucugagacu

SEQ ID NO: 1216411 - RNA, 14 nt, Human
gaacacucugagac

SEQ ID NO: 1216412 - RNA, 13 nt, Human
gaacacucugaga

SEQ ID NO: 1216413 - RNA, 21 nt, Human
gaaccuuuugagugccuuaca

SEQ ID NO: 1216414 - RNA, 19 nt, Human
gaaccuuuugagugccuua

SEQ ID NO: 1216415 - RNA, 18 nt, Human
gaaccuuuugagugccuu

SEQ ID NO: 1216416 - RNA, 22 nt, Human
gaaccuuuugagugccuuacac

SEQ ID NO: 1216417 - RNA, 19 nt, Human
gaagggggcugggacaugg

SEQ ID NO: 1216418 - RNA, 16 nt, Human
gaagggggcugggaca

SEQ ID NO: 1216419 - RNA, 15 nt, Human
gaaguacuggagaaa

SEQ ID NO: 1216420 - RNA, 18 nt, Human
gaaguacuauaauuuacc

SEQ ID NO: 1216421 - RNA, 22 nt, Human
gaaguaauaugcacacauuuuu

SEQ ID NO: 1216422 - RNA, 18 nt, Human
gaagucuuagauguauau

SEQ ID NO: 1216423 - RNA, 21 nt, Human
gaaguuucugccgcagcccug

SEQ ID NO: 1216424 - RNA, 15 nt, Human
gaagucuuagaugua

SEQ ID NO: 1216425 - RNA, 22 nt, Human
gaauagcugggacuacaggugu

SEQ ID NO: 1216426 - RNA, 23 nt, Human
gaauagcugggacuacaggugug

SEQ ID NO: 1216427 - RNA, 13 nt, Human
gaauaccuguccc

SEQ ID NO: 1216428 - RNA, 15 nt, Human
gaauaccuguccccc

SEQ ID NO: 1216429 - RNA, 19 nt, Human
gaauaacauguaauuaagu

SEQ ID NO: 1216430 - RNA, 18 nt, Human
gaauaacauguaauuaag

SEQ ID NO: 1216431 - RNA, 20 nt, Human
gaaguuugagaucagccugg

SEQ ID NO: 1216432 - RNA, 17 nt, Human
gaauaauacaguaucuc

SEQ ID NO: 1216433 - RNA, 21 nt, Human
gaauacagaggcaacugcauu

SEQ ID NO: 1216434 - RNA, 23 nt, Human
gaaugaaccacaucuugcucugc

SEQ ID NO: 1216435 - RNA, 22 nt, Human
gaaugaaccacaucuugcucug

SEQ ID NO: 1216436 - RNA, 22 nt, Human
gaaugguuuucaaaauaaaaau

SEQ ID NO: 1216437 - RNA, 14 nt, Human
gaaugucaguguga

SEQ ID NO: 1216438 - RNA, 22 nt, Human
gaauuguaaggaaugauuaauu

SEQ ID NO: 1216439 - RNA, 15 nt, Human
gaauuucccaaagca

SEQ ID NO: 1216440 - RNA, 14 nt, Human
gaauugaagcagga

SEQ ID NO: 1216441 - RNA, 14 nt, Human
gaauugaaaaacca

SEQ ID NO: 1216442 - RNA, 19 nt, Human
gaauucucuaguuugauua

SEQ ID NO: 1216443 - RNA, 17 nt, Human
gaauucucuaguuugau

SEQ ID NO: 1216444 - RNA, 17 nt, Human
gaauucucagaaucuca

SEQ ID NO: 1216445 - RNA, 21 nt, Human
gaaugucagugugacugaucu

SEQ ID NO: 1216446 - RNA, 20 nt, Human
gaaugucagugugacugauc

SEQ ID NO: 1216447 - RNA, 12 nt, Human
gacccugaggcc

SEQ ID NO: 1216448 - RNA, 11 nt, Human
gacccugaggc

SEQ ID NO: 1216449 - RNA, 22 nt, Human
gacccugcccugugggccccca

SEQ ID NO: 1216450 - RNA, 20 nt, Human
gacccugcccugugggcccc

SEQ ID NO: 1216451 - RNA, 18 nt, Human
gacccugaggcccagagg

SEQ ID NO: 1216452 - RNA, 16 nt, Human
gacccugaggcccaga

SEQ ID NO: 1216453 - RNA, 20 nt, Human
gacccaugcugcccugugag

SEQ ID NO: 1216454 - RNA, 19 nt, Human
gacccaugcugcccuguga

SEQ ID NO: 1216455 - RNA, 18 nt, Human
gacccaugcugcccugug

SEQ ID NO: 1216456 - RNA, 13 nt, Human
gacccaugcugcc

SEQ ID NO: 1216457 - RNA, 21 nt, Human
gaccagcaccaucucuccucc

SEQ ID NO: 1216458 - RNA, 20 nt, Human
gaccagcaccaucucuccuc

SEQ ID NO: 1216459 - RNA, 21 nt, Human
gaccagagcugccaccugccu

SEQ ID NO: 1216460 - RNA, 24 nt, Human
gaccagacaccuugacagggcaca

SEQ ID NO: 1216461 - RNA, 23 nt, Human
gaccagacaccuugacagggcac

SEQ ID NO: 1216462 - RNA, 22 nt, Human
gaccagacaccuugacagggca

SEQ ID NO: 1216463 - RNA, 18 nt, Human
gaccacaaaacuuuucua

SEQ ID NO: 1216464 - RNA, 21 nt, Human
gacaggcauguucucugagga

SEQ ID NO: 1216465 - RNA, 24 nt, Human
gacaggcaaugcuggcuguuggcu

SEQ ID NO: 1216466 - RNA, 23 nt, Human
gacaggcaaugcuggcuguuggc

SEQ ID NO: 1216467 - RNA, 19 nt, Human
gacaggcaaugcuggcugu

SEQ ID NO: 1216468 - RNA, 21 nt, Human
gacaggcaagcaccuccugcc

SEQ ID NO: 1216469 - RNA, 20 nt, Human
gacaggcaagcaccuccugc

SEQ ID NO: 1216470 - RNA, 18 nt, Human
gacaggcaagcaccuccu

SEQ ID NO: 1216471 - RNA, 17 nt, Human
gacaggcaagcaccucc

SEQ ID NO: 1216472 - RNA, 13 nt, Human
gacaggcaagcac

SEQ ID NO: 1216473 - RNA, 23 nt, Human
gacaucaacugcaucaagaugug

SEQ ID NO: 1216474 - RNA, 16 nt, Human
gacaucaacugcauca

SEQ ID NO: 1216475 - RNA, 22 nt, Human
gacaggcauguucucugaggac

SEQ ID NO: 1216476 - RNA, 22 nt, Human
gacagacacaggcccggcucca

SEQ ID NO: 1216477 - RNA, 20 nt, Human
gacagacacaggcccggcuc

SEQ ID NO: 1216478 - RNA, 16 nt, Human
gacacuagaagauuuu

SEQ ID NO: 1216479 - RNA, 22 nt, Human
gacacgaauauugcugauggug

SEQ ID NO: 1216480 - RNA, 22 nt, Human
gaauuucccaaagcagugcaug

SEQ ID NO: 1216481 - RNA, 18 nt, Human
gaauuucccaaagcagug

SEQ ID NO: 1216482 - RNA, 16 nt, Human
gaauuucccaaagcag

SEQ ID NO: 1216483 - RNA, 19 nt, Human
gacagagugagacucuguc

SEQ ID NO: 1216484 - RNA, 16 nt, Human
gacagagugagacucu

SEQ ID NO: 1216485 - RNA, 21 nt, Human
gacagagucucacuguugccc

SEQ ID NO: 1216486 - RNA, 13 nt, Human
gacagagggggug

SEQ ID NO: 1216487 - RNA, 23 nt, Human
gacagaggcagccccauucugcc

SEQ ID NO: 1216488 - RNA, 12 nt, Human
gacagaggcagc

SEQ ID NO: 1216489 - RNA, 20 nt, Human
gacagagcuacacaggggaa

SEQ ID NO: 1216490 - RNA, 23 nt, Human
gacuaacuugucuuuggacccug

SEQ ID NO: 1216491 - RNA, 16 nt, Human
gacuaacuugucuuug

SEQ ID NO: 1216492 - RNA, 15 nt, Human
gacguguuaugacuc

SEQ ID NO: 1216493 - RNA, 14 nt, Human
gacguguuaugacu

SEQ ID NO: 1216494 - RNA, 11 nt, Human
gacguguuaug

SEQ ID NO: 1216495 - RNA, 14 nt, Human
gacggagucccacc

SEQ ID NO: 1216496 - RNA, 13 nt, Human
gacggagucccac

SEQ ID NO: 1216497 - RNA, 22 nt, Human
gacgcugugcugcccugcccac

SEQ ID NO: 1216498 - RNA, 20 nt, Human
gaccuuucaauaggaaaaac

SEQ ID NO: 1216499 - RNA, 19 nt, Human
gaccuuucaauaggaaaaa

SEQ ID NO: 1216500 - RNA, 11 nt, Human
gaccuuucaau

SEQ ID NO: 1216501 - RNA, 23 nt, Human
gaccuugaacuggguacuugugg

SEQ ID NO: 1216502 - RNA, 14 nt, Human
gaccuugaacuggg

SEQ ID NO: 1216503 - RNA, 21 nt, Human
gaccuucuccuucaccuuugu

SEQ ID NO: 1216504 - RNA, 20 nt, Human
gaccuucuccuucaccuuug

SEQ ID NO: 1216505 - RNA, 16 nt, Human
gaccuucuccuucacc

SEQ ID NO: 1216506 - RNA, 15 nt, Human
gaccuucuccuucac

SEQ ID NO: 1216507 - RNA, 14 nt, Human
gaccuucuccuuca

SEQ ID NO: 1216508 - RNA, 15 nt, Human
gacccuugugguccc

SEQ ID NO: 1216509 - RNA, 23 nt, Human
gacccuugccgucuaccugaggg

SEQ ID NO: 1216510 - RNA, 20 nt, Human
gacccuugccgucuaccuga

SEQ ID NO: 1216511 - RNA, 19 nt, Human
gacccuugccgucuaccug

SEQ ID NO: 1216512 - RNA, 23 nt, Human
gacuggccaagguuuggggaaga

SEQ ID NO: 1216513 - RNA, 23 nt, Human
gacuuacuguacaugaaaacaca

SEQ ID NO: 1216514 - RNA, 18 nt, Human
gacuuacuguacaugaaa

SEQ ID NO: 1216515 - RNA, 16 nt, Human
gacuuacuguacauga

SEQ ID NO: 1216516 - RNA, 15 nt, Human
gacuuacuguacaug

SEQ ID NO: 1216517 - RNA, 12 nt, Human
gacuuacuguac

SEQ ID NO: 1216518 - RNA, 20 nt, Human
gacuucaucccucuggggcu

SEQ ID NO: 1216519 - RNA, 12 nt, Human
gacuucaucccu

SEQ ID NO: 1216520 - RNA, 21 nt, Human
gacucuacagaggccaugggc

SEQ ID NO: 1216521 - RNA, 15 nt, Human
gacucuacagaggcc

SEQ ID NO: 1216522 - RNA, 21 nt, Human
gacuccugcaggcagccaggc

SEQ ID NO: 1216523 - RNA, 20 nt, Human
gacuccugcaggcagccagg

SEQ ID NO: 1216524 - RNA, 19 nt, Human
gacuccugcaggcagccag

SEQ ID NO: 1216525 - RNA, 13 nt, Human
gacuacaggugug

SEQ ID NO: 1216526 - RNA, 18 nt, Human
gacuccugcaggcagcca

SEQ ID NO: 1216527 - RNA, 18 nt, Human
gacuacaggcacccacca

SEQ ID NO: 1216528 - RNA, 15 nt, Human
gacuacaggcaccca

SEQ ID NO: 1216529 - RNA, 13 nt, Human
gacuacaggcacc

SEQ ID NO: 1216530 - RNA, 18 nt, Human
gacugaguacguugugca

SEQ ID NO: 1216531 - RNA, 15 nt, Human
cuucgcuccuguguc

SEQ ID NO: 1216532 - RNA, 14 nt, Human
cuucgcuccugugu

SEQ ID NO: 1216533 - RNA, 13 nt, Human
cuucgcuccugug

SEQ ID NO: 1216534 - RNA, 16 nt, Human
cuucgcuccugugucu

SEQ ID NO: 1216535 - RNA, 21 nt, Human
cuucgggaggucgaggcagga

SEQ ID NO: 1216536 - RNA, 20 nt, Human
cuucgggaggucgaggcagg

SEQ ID NO: 1216537 - RNA, 18 nt, Human
cuucugcuucagccuccc

SEQ ID NO: 1216538 - RNA, 17 nt, Human
cuucugcuucagccucc

SEQ ID NO: 1216539 - RNA, 16 nt, Human
cuucugcuucagccuc

SEQ ID NO: 1216540 - RNA, 20 nt, Human
cuucugccauuucugagauc

SEQ ID NO: 1216541 - RNA, 21 nt, Human
cuucugccauauucuguuggc

SEQ ID NO: 1216542 - RNA, 17 nt, Human
cuucugccauauucugu

SEQ ID NO: 1216543 - RNA, 12 nt, Human
cuucucuccagc

SEQ ID NO: 1216544 - RNA, 17 nt, Human
cuucuccaggcuguauc

SEQ ID NO: 1216545 - RNA, 16 nt, Human
cuucuccacccugcuc

SEQ ID NO: 1216546 - RNA, 15 nt, Human
cuucuccacccugcu

SEQ ID NO: 1216547 - RNA, 14 nt, Human
cuucuccacccugc

SEQ ID NO: 1216548 - RNA, 22 nt, Human
cuucuccuucaccuuugucccc

SEQ ID NO: 1216549 - RNA, 23 nt, Human
cuuccacaagagcccaggccucc

SEQ ID NO: 1216550 - RNA, 18 nt, Human
cuucauuuccugugucuu

SEQ ID NO: 1216551 - RNA, 14 nt, Human
cuucagugccuuau

SEQ ID NO: 1216552 - RNA, 13 nt, Human
cuucagugccuua

SEQ ID NO: 1216553 - RNA, 12 nt, Human
cuucagugccuu

SEQ ID NO: 1216554 - RNA, 11 nt, Human
cuucagugccu

SEQ ID NO: 1216555 - RNA, 11 nt, Human
cuucagcugac

SEQ ID NO: 1216556 - RNA, 17 nt, Human
cuuccagugaggcucug

SEQ ID NO: 1216557 - RNA, 15 nt, Human
cuuccagugaggcuc

SEQ ID NO: 1216558 - RNA, 14 nt, Human
cuuccagugaggcu

SEQ ID NO: 1216559 - RNA, 24 nt, Human
cuuccaggggugggacacccugug

SEQ ID NO: 1216560 - RNA, 22 nt, Human
cuuccaggggugggacacccug

SEQ ID NO: 1216561 - RNA, 14 nt, Human
cuguuuagauaaua

SEQ ID NO: 1216562 - RNA, 12 nt, Human
cuguuuagauaa

SEQ ID NO: 1216563 - RNA, 18 nt, Human
cuguuuguuucugaaagg

SEQ ID NO: 1216564 - RNA, 17 nt, Human
cuguuuucucuugagag

SEQ ID NO: 1216565 - RNA, 14 nt, Human
cuguuuucucuuga

SEQ ID NO: 1216566 - RNA, 21 nt, Human
cuguuuuauuuuaauucaguu

SEQ ID NO: 1216567 - RNA, 23 nt, Human
cuguuuguuucugaaagggacgc

SEQ ID NO: 1216568 - RNA, 21 nt, Human
cuguuuguuucugaaagggac

SEQ ID NO: 1216569 - RNA, 22 nt, Human
cuuaacuucacauauugauuuc

SEQ ID NO: 1216570 - RNA, 17 nt, Human
cuuaacuucacauauug

SEQ ID NO: 1216571 - RNA, 16 nt, Human
cuuaacuucacauauu

SEQ ID NO: 1216572 - RNA, 15 nt, Human
cuuaacuucacauau

SEQ ID NO: 1216573 - RNA, 14 nt, Human
cuuaacuucacaua

SEQ ID NO: 1216574 - RNA, 12 nt, Human
cuuaacuucaca

SEQ ID NO: 1216575 - RNA, 16 nt, Human
cuuaaucuaaauggaa

SEQ ID NO: 1216576 - RNA, 14 nt, Human
cuuaaucuaaaugg

SEQ ID NO: 1216577 - RNA, 15 nt, Human
cuuauuuaaugaaag

SEQ ID NO: 1216578 - RNA, 15 nt, Human
cuuauacauuugaua

SEQ ID NO: 1216579 - RNA, 21 nt, Human
cuuagguuggcaaaaaggcag

SEQ ID NO: 1216580 - RNA, 17 nt, Human
cuuagguuggcaaaaag

SEQ ID NO: 1216581 - RNA, 16 nt, Human
cuuacuguacaugaaa

SEQ ID NO: 1216582 - RNA, 15 nt, Human
cuuacgugaguccug

SEQ ID NO: 1216583 - RNA, 19 nt, Human
cuuagacagucccugccaa

SEQ ID NO: 1216584 - RNA, 18 nt, Human
cuuagacagucccugcca

SEQ ID NO: 1216585 - RNA, 17 nt, Human
cuuagacagucccugcc

SEQ ID NO: 1216586 - RNA, 16 nt, Human
cuuagacagucccugc

SEQ ID NO: 1216587 - RNA, 15 nt, Human
cuuagacagucccug

SEQ ID NO: 1216588 - RNA, 14 nt, Human
cuuagacagucccu

SEQ ID NO: 1216589 - RNA, 15 nt, Human
cuuagaagucacaca

SEQ ID NO: 1216590 - RNA, 20 nt, Human
cuuggaagcuccgcuuucua

SEQ ID NO: 1216591 - RNA, 22 nt, Human
cuugcucugcugacagacacag

SEQ ID NO: 1216592 - RNA, 17 nt, Human
cuugcaugaggcuagug

SEQ ID NO: 1216593 - RNA, 14 nt, Human
cuugcaugaggcua

SEQ ID NO: 1216594 - RNA, 13 nt, Human
cuugcaugaggcu

SEQ ID NO: 1216595 - RNA, 21 nt, Human
cuugcagacucuacagaggcc

SEQ ID NO: 1216596 - RNA, 18 nt, Human
cuugcaauggcagccuug

SEQ ID NO: 1216597 - RNA, 17 nt, Human
cuugcaauggcagccuu

SEQ ID NO: 1216598 - RNA, 16 nt, Human
cuugcaauggcagccu

SEQ ID NO: 1216599 - RNA, 15 nt, Human
cuugcaauggcagcc

SEQ ID NO: 1216600 - RNA, 21 nt, Human
cuugaguugauucagcucugc

SEQ ID NO: 1216601 - RNA, 20 nt, Human
cuugaguugauucagcucug

SEQ ID NO: 1216602 - RNA, 19 nt, Human
cuugaguugauucagcucu

SEQ ID NO: 1216603 - RNA, 17 nt, Human
cuugaggguugggcugg

SEQ ID NO: 1216604 - RNA, 15 nt, Human
cuugaggguugggcu

SEQ ID NO: 1216605 - RNA, 16 nt, Human
cuugagccugggaggu

SEQ ID NO: 1216606 - RNA, 15 nt, Human
cuugagccugggagg

SEQ ID NO: 1216607 - RNA, 12 nt, Human
cuugagccuggg

SEQ ID NO: 1216608 - RNA, 20 nt, Human
cuugggccacugugaagaga

SEQ ID NO: 1216609 - RNA, 12 nt, Human
cuuguacauaau

SEQ ID NO: 1216610 - RNA, 20 nt, Human
cuugguuuguaaauuaacuu

SEQ ID NO: 1216611 - RNA, 15 nt, Human
cuugguuuguaaauu

SEQ ID NO: 1216612 - RNA, 14 nt, Human
cuugguuuguaaau

SEQ ID NO: 1216613 - RNA, 16 nt, Human
cuuguuaagauaguua

SEQ ID NO: 1216614 - RNA, 19 nt, Human
cuuguggucccaccccaca

SEQ ID NO: 1216615 - RNA, 16 nt, Human
cuuguggucccacccc

SEQ ID NO: 1216616 - RNA, 15 nt, Human
cuuguggucccaccc

SEQ ID NO: 1216617 - RNA, 22 nt, Human
cuuuaccuuuuuuauacauaaa

SEQ ID NO: 1216618 - RNA, 20 nt, Human
cuuuaccuuuuuuauacaua

SEQ ID NO: 1216619 - RNA, 19 nt, Human
cuuuaccuuuuuuauacau

SEQ ID NO: 1216620 - RNA, 17 nt, Human
cuuuaccuuuuuuauac

SEQ ID NO: 1216621 - RNA, 16 nt, Human
cuuuccucuuuggucu

SEQ ID NO: 1216622 - RNA, 13 nt, Human
cuuucugaaauaa

SEQ ID NO: 1216623 - RNA, 21 nt, Human
cuuuguucuggcucuuccagg

SEQ ID NO: 1216624 - RNA, 16 nt, Human
cuuuguucuggcucuu

SEQ ID NO: 1216625 - RNA, 13 nt, Human
cuuuguggcuucc

SEQ ID NO: 1216626 - RNA, 12 nt, Human
cuuugugauuuu

SEQ ID NO: 1216627 - RNA, 23 nt, Human
cuuugugaggaagccgcuggggc

SEQ ID NO: 1216628 - RNA, 17 nt, Human
cuuugggccuggcuccc

SEQ ID NO: 1216629 - RNA, 23 nt, Human
cuuuggaaagacuuuuccaaccc

SEQ ID NO: 1216630 - RNA, 12 nt, Human
cuuuggaaagac

SEQ ID NO: 1216631 - RNA, 14 nt, Human
cuuugcuugaaaga

SEQ ID NO: 1216632 - RNA, 13 nt, Human
cuuugaccucugc

SEQ ID NO: 1216633 - RNA, 18 nt, Human
gaaaacaugcuacacacu

SEQ ID NO: 1216634 - RNA, 21 nt, Human
gaaaacacuguucucugcccu

SEQ ID NO: 1216635 - RNA, 20 nt, Human
gaaaacacuguucucugccc

SEQ ID NO: 1216636 - RNA, 19 nt, Human
gaaaacacuguucucugcc

SEQ ID NO: 1216637 - RNA, 16 nt, Human
cuuuuuuagaguugau

SEQ ID NO: 1216638 - RNA, 14 nt, Human
gaaaacguggcugc

SEQ ID NO: 1216639 - RNA, 22 nt, Human
gaaaacacuguucucugcccuc

SEQ ID NO: 1216640 - RNA, 19 nt, Human
gaaaacaugcuacacacug

SEQ ID NO: 1216641 - RNA, 22 nt, Human
cuuuuguucuugguuuguaaau

SEQ ID NO: 1216642 - RNA, 18 nt, Human
cuuuucuugcaugaggcu

SEQ ID NO: 1216643 - RNA, 15 nt, Human
cuuuucuguuugcua

SEQ ID NO: 1216644 - RNA, 21 nt, Human
cuuuguuuguugucagcugaa

SEQ ID NO: 1216645 - RNA, 14 nt, Human
cuggcacugcuucc

SEQ ID NO: 1216646 - RNA, 13 nt, Human
cuggcacugcuuc

SEQ ID NO: 1216647 - RNA, 23 nt, Human
cuggcacuauaauguaagcucua

SEQ ID NO: 1216648 - RNA, 23 nt, Human
cuggauuaaacuuaaucuaaaug

SEQ ID NO: 1216649 - RNA, 13 nt, Human
cuggauuaaacuu

SEQ ID NO: 1216650 - RNA, 16 nt, Human
cuggauggggcugcac

SEQ ID NO: 1216651 - RNA, 15 nt, Human
cuggauggggcugca

SEQ ID NO: 1216652 - RNA, 22 nt, Human
cuggccucaagugauucuccug

SEQ ID NO: 1216653 - RNA, 23 nt, Human
cuggccuagcauacguacacauu

SEQ ID NO: 1216654 - RNA, 17 nt, Human
cuggccuagcauacgua

SEQ ID NO: 1216655 - RNA, 13 nt, Human
cuggcccacugca

SEQ ID NO: 1216656 - RNA, 12 nt, Human
cuggcccacugc

SEQ ID NO: 1216657 - RNA, 22 nt, Human
cuggccagaugcaccagcccuu

SEQ ID NO: 1216658 - RNA, 21 nt, Human
cuggccagaugcaccagcccu

SEQ ID NO: 1216659 - RNA, 20 nt, Human
cuggccagaugcaccagccc

SEQ ID NO: 1216660 - RNA, 19 nt, Human
cuggccagaugcaccagcc

SEQ ID NO: 1216661 - RNA, 18 nt, Human
cuggccagaugcaccagc

SEQ ID NO: 1216662 - RNA, 17 nt, Human
cuggccagaugcaccag

SEQ ID NO: 1216663 - RNA, 16 nt, Human
cuggccagaugcacca

SEQ ID NO: 1216664 - RNA, 18 nt, Human
cuggcacugcuuccagug

SEQ ID NO: 1216665 - RNA, 17 nt, Human
cuggcacugcuuccagu

SEQ ID NO: 1216666 - RNA, 16 nt, Human
cuggcacugcuuccag

SEQ ID NO: 1216667 - RNA, 15 nt, Human
cuggcacugcuucca

SEQ ID NO: 1216668 - RNA, 14 nt, Human
cuggacaggcaugu

SEQ ID NO: 1216669 - RNA, 15 nt, Human
cuggaaugcaguggu

SEQ ID NO: 1216670 - RNA, 18 nt, Human
cuggaagcacagcuucau

SEQ ID NO: 1216671 - RNA, 15 nt, Human
cuggaagcacagcuu

SEQ ID NO: 1216672 - RNA, 18 nt, Human
cugggaggucaaggcugc

SEQ ID NO: 1216673 - RNA, 20 nt, Human
cugggcaaugugauaaaacc

SEQ ID NO: 1216674 - RNA, 16 nt, Human
cugggagugagcuggu

SEQ ID NO: 1216675 - RNA, 13 nt, Human
cugggagugagcu

SEQ ID NO: 1216676 - RNA, 19 nt, Human
cuggcuguuggcugggggc

SEQ ID NO: 1216677 - RNA, 22 nt, Human
cuggcuggguggcaccagcagc

SEQ ID NO: 1216678 - RNA, 21 nt, Human
cuggcuggguggcaccagcag

SEQ ID NO: 1216679 - RNA, 20 nt, Human
cuggcuguuggcugggggcc

SEQ ID NO: 1216680 - RNA, 20 nt, Human
cuggcucuuccaggcuggga

SEQ ID NO: 1216681 - RNA, 19 nt, Human
cuggcucuuccaggcuggg

SEQ ID NO: 1216682 - RNA, 18 nt, Human
cuggcucuuccaggcugg

SEQ ID NO: 1216683 - RNA, 15 nt, Human
cuggccugagcuggg

SEQ ID NO: 1216684 - RNA, 17 nt, Human
cuggcucuuccaggcug

SEQ ID NO: 1216685 - RNA, 13 nt, Human
cuggccugagcug

SEQ ID NO: 1216686 - RNA, 23 nt, Human
cuggguacuuguggacacagcuc

SEQ ID NO: 1216687 - RNA, 21 nt, Human
cuggguacuuguggacacagc

SEQ ID NO: 1216688 - RNA, 20 nt, Human
cuggguacuuguggacacag

SEQ ID NO: 1216689 - RNA, 23 nt, Human
cugggguggggaccucaggccug

SEQ ID NO: 1216690 - RNA, 22 nt, Human
cugggguggggaccucaggccu

SEQ ID NO: 1216691 - RNA, 21 nt, Human
cugggguggggaccucaggcc

SEQ ID NO: 1216692 - RNA, 19 nt, Human
cugggguggggaccucagg

SEQ ID NO: 1216693 - RNA, 18 nt, Human
cugggguggggaccucag

SEQ ID NO: 1216694 - RNA, 17 nt, Human
cugggguggggaccuca

SEQ ID NO: 1216695 - RNA, 18 nt, Human
cugggggccucagugcca

SEQ ID NO: 1216696 - RNA, 17 nt, Human
cugggggccucagugcc

SEQ ID NO: 1216697 - RNA, 13 nt, Human
cugggggccucag

SEQ ID NO: 1216698 - RNA, 19 nt, Human
cugggcucccuucccaccu

SEQ ID NO: 1216699 - RNA, 21 nt, Human
cugggcuuggggaccagagcu

SEQ ID NO: 1216700 - RNA, 20 nt, Human
cugggcuuggggaccagagc

SEQ ID NO: 1216701 - RNA, 17 nt, Human
cugggcuuggggaccag

SEQ ID NO: 1216702 - RNA, 23 nt, Human
cugggcuucaguggcagcugcuu

SEQ ID NO: 1216703 - RNA, 22 nt, Human
cugggcuucaguggcagcugcu

SEQ ID NO: 1216704 - RNA, 21 nt, Human
cugggcuucaguggcagcugc

SEQ ID NO: 1216705 - RNA, 20 nt, Human
cugggcuucaguggcagcug

SEQ ID NO: 1216706 - RNA, 19 nt, Human
cugggcuucaguggcagcu

SEQ ID NO: 1216707 - RNA, 18 nt, Human
cugggcuucaguggcagc

SEQ ID NO: 1216708 - RNA, 23 nt, Human
cugguggcagugggagcugccug

SEQ ID NO: 1216709 - RNA, 18 nt, Human
cuggucccacucagucca

SEQ ID NO: 1216710 - RNA, 15 nt, Human
cuggucccacucagu

SEQ ID NO: 1216711 - RNA, 21 nt, Human
cugguccauagagagcaagac

SEQ ID NO: 1216712 - RNA, 18 nt, Human
cugguccauagagagcaa

SEQ ID NO: 1216713 - RNA, 17 nt, Human
cugguccauagagagca

SEQ ID NO: 1216714 - RNA, 15 nt, Human
cugguccauagagag

SEQ ID NO: 1216715 - RNA, 13 nt, Human
cuggguuggaggg

SEQ ID NO: 1216716 - RNA, 15 nt, Human
cugcccggcugcgga

SEQ ID NO: 1216717 - RNA, 11 nt, Human
cugcccggcug

SEQ ID NO: 1216718 - RNA, 16 nt, Human
cugcccugcccaccug

SEQ ID NO: 1216719 - RNA, 15 nt, Human
cugcccugcccaccu

SEQ ID NO: 1216720 - RNA, 14 nt, Human
cugcccugcccacc

SEQ ID NO: 1216721 - RNA, 13 nt, Human
cugcccugcccac

SEQ ID NO: 1216722 - RNA, 17 nt, Human
cugccccuggcagcccc

SEQ ID NO: 1216723 - RNA, 16 nt, Human
cugccccuggcagccc

SEQ ID NO: 1216724 - RNA, 15 nt, Human
cugccccuggcagcc

SEQ ID NO: 1216725 - RNA, 14 nt, Human
cugccccuggcagc

SEQ ID NO: 1216726 - RNA, 13 nt, Human
cugcccaggcccc

SEQ ID NO: 1216727 - RNA, 19 nt, Human
cugccaugccagcuuaucu

SEQ ID NO: 1216728 - RNA, 17 nt, Human
cugccaugccagcuuau

SEQ ID NO: 1216729 - RNA, 19 nt, Human
cugccaggaagccagcagg

SEQ ID NO: 1216730 - RNA, 18 nt, Human
cugccaggaagccagcag

SEQ ID NO: 1216731 - RNA, 16 nt, Human
cugccaggaagccagc

SEQ ID NO: 1216732 - RNA, 15 nt, Human
cugccaggaagccag

SEQ ID NO: 1216733 - RNA, 19 nt, Human
cugccagccgagauagcca

SEQ ID NO: 1216734 - RNA, 20 nt, Human
cugccacccuggggagaaag

SEQ ID NO: 1216735 - RNA, 16 nt, Human
cugccacccuggggag

SEQ ID NO: 1216736 - RNA, 15 nt, Human
cugccacccugggga

SEQ ID NO: 1216737 - RNA, 18 nt, Human
cugcuccucuccccagca

SEQ ID NO: 1216738 - RNA, 17 nt, Human
cugcuccucuccccagc

SEQ ID NO: 1216739 - RNA, 16 nt, Human
cugcuccucuccccag

SEQ ID NO: 1216740 - RNA, 15 nt, Human
cugcuccagcuguuc

SEQ ID NO: 1216741 - RNA, 14 nt, Human
cugcuccagcuguu

SEQ ID NO: 1216742 - RNA, 17 nt, Human
cugcgguccacccagga

SEQ ID NO: 1216743 - RNA, 16 nt, Human
cugcgguccacccagg

SEQ ID NO: 1216744 - RNA, 15 nt, Human
cugcgguccacccag

SEQ ID NO: 1216745 - RNA, 21 nt, Human
cugcggaaugaaccacaucuu

SEQ ID NO: 1216746 - RNA, 20 nt, Human
cugcggaaugaaccacaucu

SEQ ID NO: 1216747 - RNA, 15 nt, Human
cugccugcccaggcc

SEQ ID NO: 1216748 - RNA, 14 nt, Human
cugccugcccaggc

SEQ ID NO: 1216749 - RNA, 13 nt, Human
cugccugcccagg

SEQ ID NO: 1216750 - RNA, 14 nt, Human
cugccucuucucua

SEQ ID NO: 1216751 - RNA, 13 nt, Human
cugccucuucucu

SEQ ID NO: 1216752 - RNA, 14 nt, Human
cugccucagccucc

SEQ ID NO: 1216753 - RNA, 13 nt, Human
cugccucagccuc

SEQ ID NO: 1216754 - RNA, 17 nt, Human
cugcccugcccaccugg

SEQ ID NO: 1216755 - RNA, 21 nt, Human
cugauaaagaugagugagcau

SEQ ID NO: 1216756 - RNA, 14 nt, Human
cugaucucucguga

SEQ ID NO: 1216757 - RNA, 22 nt, Human
cugauucccaagcucugcuccu

SEQ ID NO: 1216758 - RNA, 20 nt, Human
cugauucccaagcucugcuc

SEQ ID NO: 1216759 - RNA, 19 nt, Human
cugauucccaagcucugcu

SEQ ID NO: 1216760 - RNA, 18 nt, Human
cugauucccaagcucugc

SEQ ID NO: 1216761 - RNA, 17 nt, Human
cugauucccaagcucug

SEQ ID NO: 1216762 - RNA, 15 nt, Human
cugauucccaagcuc

SEQ ID NO: 1216763 - RNA, 13 nt, Human
cugacccaugcug

SEQ ID NO: 1216764 - RNA, 12 nt, Human
cugacccacugc

SEQ ID NO: 1216765 - RNA, 13 nt, Human
cugauaaagauga

SEQ ID NO: 1216766 - RNA, 22 nt, Human
cugagugggggaucacagccuc

SEQ ID NO: 1216767 - RNA, 16 nt, Human
cugagucugaaggcug

SEQ ID NO: 1216768 - RNA, 15 nt, Human
cugagucugaaggcu

SEQ ID NO: 1216769 - RNA, 14 nt, Human
cugagucugaaggc

SEQ ID NO: 1216770 - RNA, 13 nt, Human
cugagucugaagg

SEQ ID NO: 1216771 - RNA, 17 nt, Human
cugagucugaaggcugg

SEQ ID NO: 1216772 - RNA, 17 nt, Human
cugcacuugcagacucu

SEQ ID NO: 1216773 - RNA, 16 nt, Human
cugcacuugcagacuc

SEQ ID NO: 1216774 - RNA, 14 nt, Human
cugcacuugcagac

SEQ ID NO: 1216775 - RNA, 20 nt, Human
cugcaccggcuggccuggcc

SEQ ID NO: 1216776 - RNA, 19 nt, Human
cugcaccggcuggccuggc

SEQ ID NO: 1216777 - RNA, 18 nt, Human
cugcaccggcuggccugg

SEQ ID NO: 1216778 - RNA, 17 nt, Human
cugcaccggcuggccug

SEQ ID NO: 1216779 - RNA, 11 nt, Human
cugcagccuca

SEQ ID NO: 1216780 - RNA, 23 nt, Human
cugcagccucaaccuccugggcu

SEQ ID NO: 1216781 - RNA, 22 nt, Human
cugcagccucaaccuccugggc

SEQ ID NO: 1216782 - RNA, 20 nt, Human
cugcagccucaaccuccugg

SEQ ID NO: 1216783 - RNA, 19 nt, Human
cugcagccucaaccuccug

SEQ ID NO: 1216784 - RNA, 22 nt, Human
cugcagggaguccgaaagggac

SEQ ID NO: 1216785 - RNA, 18 nt, Human
cugcacccucaggcaggu

SEQ ID NO: 1216786 - RNA, 17 nt, Human
cugcacccucaggcagg

SEQ ID NO: 1216787 - RNA, 16 nt, Human
cugcacaagcugcacc

SEQ ID NO: 1216788 - RNA, 15 nt, Human
cugcacaagcugcac

SEQ ID NO: 1216789 - RNA, 14 nt, Human
cugcacaagcugca

SEQ ID NO: 1216790 - RNA, 13 nt, Human
cugcacaagcugc

SEQ ID NO: 1216791 - RNA, 18 nt, Human
cugcacaagcugcacccu

SEQ ID NO: 1216792 - RNA, 21 nt, Human
cugaagacucauucuucugua

SEQ ID NO: 1216793 - RNA, 21 nt, Human
cugaacuuggcgcugccccug

SEQ ID NO: 1216794 - RNA, 16 nt, Human
cugaacuuggcgcugc

SEQ ID NO: 1216795 - RNA, 15 nt, Human
cugaacuuggcgcug

SEQ ID NO: 1216796 - RNA, 21 nt, Human
cugaaccuggguaacuaggga

SEQ ID NO: 1216797 - RNA, 21 nt, Human
cucuuuggucuacacugugcu

SEQ ID NO: 1216798 - RNA, 19 nt, Human
cucuuuggucuacacugug

SEQ ID NO: 1216799 - RNA, 18 nt, Human
cucuuugggccuggcucc

SEQ ID NO: 1216800 - RNA, 16 nt, Human
cugaauacagaggcaa

SEQ ID NO: 1216801 - RNA, 14 nt, Human
cugaagucacacag

SEQ ID NO: 1216802 - RNA, 15 nt, Human
cugaagucacacagu

SEQ ID NO: 1216803 - RNA, 16 nt, Human
cugaagucacacagug

SEQ ID NO: 1216804 - RNA, 11 nt, Human
cugacaggcaa

SEQ ID NO: 1216805 - RNA, 21 nt, Human
cugacagacacaggcccggcu

SEQ ID NO: 1216806 - RNA, 17 nt, Human
cugacauuguuggccaa

SEQ ID NO: 1216807 - RNA, 21 nt, Human
cugacaggcaaugcuggcugu

SEQ ID NO: 1216808 - RNA, 20 nt, Human
cugacaggcaaugcuggcug

SEQ ID NO: 1216809 - RNA, 19 nt, Human
cugacaggcaaugcuggcu

SEQ ID NO: 1216810 - RNA, 18 nt, Human
cugacaggcaaugcuggc

SEQ ID NO: 1216811 - RNA, 17 nt, Human
cugacaggcaaugcugg

SEQ ID NO: 1216812 - RNA, 16 nt, Human
cugacaggcaaugcug

SEQ ID NO: 1216813 - RNA, 11 nt, Human
cugacccacug

SEQ ID NO: 1216814 - RNA, 21 nt, Human
cugacauuguuggccaaagcc

SEQ ID NO: 1216815 - RNA, 19 nt, Human
cucuugguccugcugcagu

SEQ ID NO: 1216816 - RNA, 18 nt, Human
cucuugguccugcugcag

SEQ ID NO: 1216817 - RNA, 13 nt, Human
cucuugagccugg

SEQ ID NO: 1216818 - RNA, 16 nt, Human
cucuugaccucaggug

SEQ ID NO: 1216819 - RNA, 15 nt, Human
cucuugaccucaggu

SEQ ID NO: 1216820 - RNA, 13 nt, Human
cucuugaccucag

SEQ ID NO: 1216821 - RNA, 18 nt, Human
cucuuuggacacucacac

SEQ ID NO: 1216822 - RNA, 15 nt, Human
cucuuuggacacuca

SEQ ID NO: 1216823 - RNA, 13 nt, Human
cucuuucccuccc

SEQ ID NO: 1216824 - RNA, 17 nt, Human
cucuuuccaucuacccu

SEQ ID NO: 1216825 - RNA, 23 nt, Human
cucuuccaggcugggagagccuu

SEQ ID NO: 1216826 - RNA, 22 nt, Human
cucuuccaggcugggagagccu

SEQ ID NO: 1216827 - RNA, 12 nt, Human
cucuucuccagg

SEQ ID NO: 1216828 - RNA, 13 nt, Human
cucuucuccaggc

SEQ ID NO: 1216829 - RNA, 24 nt, Human
cucuuaaaacccaagugccuuagc

SEQ ID NO: 1216830 - RNA, 18 nt, Human
cucuggcagcucagagag

SEQ ID NO: 1216831 - RNA, 17 nt, Human
cucuggcagcucagaga

SEQ ID NO: 1216832 - RNA, 20 nt, Human
cucuggcagcucagagaggg

SEQ ID NO: 1216833 - RNA, 19 nt, Human
cucuggcagcucagagagg

SEQ ID NO: 1216834 - RNA, 23 nt, Human
cucucaggccagcugcuugggcu

SEQ ID NO: 1216835 - RNA, 20 nt, Human
cucucccaucacuucccuac

SEQ ID NO: 1216836 - RNA, 18 nt, Human
cucucccaucacuucccu

SEQ ID NO: 1216837 - RNA, 14 nt, Human
cucucccaucacuu

SEQ ID NO: 1216838 - RNA, 13 nt, Human
cucucccaucacu

SEQ ID NO: 1216839 - RNA, 13 nt, Human
cucuccagccccu

SEQ ID NO: 1216840 - RNA, 12 nt, Human
cucuccagcccc

SEQ ID NO: 1216841 - RNA, 13 nt, Human
cucucucaggcca

SEQ ID NO: 1216842 - RNA, 12 nt, Human
cucucucaggcc

SEQ ID NO: 1216843 - RNA, 16 nt, Human
cucucucacuccuuga

SEQ ID NO: 1216844 - RNA, 15 nt, Human
cucucucacuccuug

SEQ ID NO: 1216845 - RNA, 22 nt, Human
cucuccuguaccucuugagccu

SEQ ID NO: 1216846 - RNA, 18 nt, Human
cucuccuguaccucuuga

SEQ ID NO: 1216847 - RNA, 17 nt, Human
cucuccuguaccucuug

SEQ ID NO: 1216848 - RNA, 15 nt, Human
cucuccuguaccucu

SEQ ID NO: 1216849 - RNA, 14 nt, Human
cucuccuguaccuc

SEQ ID NO: 1216850 - RNA, 13 nt, Human
cucuccuguaccu

SEQ ID NO: 1216851 - RNA, 13 nt, Human
cucuccccagcaa

SEQ ID NO: 1216852 - RNA, 14 nt, Human
cucuggacaggcau

SEQ ID NO: 1216853 - RNA, 16 nt, Human
cucugccucugacaca

SEQ ID NO: 1216854 - RNA, 14 nt, Human
cucugccucugaca

SEQ ID NO: 1216855 - RNA, 23 nt, Human
cucugcccuccaagaccuucucc

SEQ ID NO: 1216856 - RNA, 16 nt, Human
cucugcccuccaagac

SEQ ID NO: 1216857 - RNA, 15 nt, Human
cucugcccuccaaga

SEQ ID NO: 1216858 - RNA, 14 nt, Human
cucugcccuccaag

SEQ ID NO: 1216859 - RNA, 12 nt, Human
cucugcccuugg

SEQ ID NO: 1216860 - RNA, 10 nt, Human
cucugcacaa

SEQ ID NO: 1216861 - RNA, 22 nt, Human
cucugcaagaauugaagcagga

SEQ ID NO: 1216862 - RNA, 20 nt, Human
cucugagacucgcgacaaug

SEQ ID NO: 1216863 - RNA, 14 nt, Human
cucauucuucugua

SEQ ID NO: 1216864 - RNA, 13 nt, Human
cucauucuucugu

SEQ ID NO: 1216865 - RNA, 16 nt, Human
cucauugaccugaggc

SEQ ID NO: 1216866 - RNA, 15 nt, Human
cucauugaccugagg

SEQ ID NO: 1216867 - RNA, 13 nt, Human
cucauugaccuga

SEQ ID NO: 1216868 - RNA, 23 nt, Human
cucauucuucuguacgucugaca

SEQ ID NO: 1216869 - RNA, 21 nt, Human
cucauuagcauuuugcuaaau

SEQ ID NO: 1216870 - RNA, 14 nt, Human
cucaggugagaagc

SEQ ID NO: 1216871 - RNA, 19 nt, Human
cucaggugucccugcacuu

SEQ ID NO: 1216872 - RNA, 18 nt, Human
cucaggugucccugcacu

SEQ ID NO: 1216873 - RNA, 17 nt, Human
cucaggugucccugcac

SEQ ID NO: 1216874 - RNA, 20 nt, Human
cucauaguaugguggcuggg

SEQ ID NO: 1216875 - RNA, 19 nt, Human
cucauaguaugguggcugg

SEQ ID NO: 1216876 - RNA, 18 nt, Human
cucauaguaugguggcug

SEQ ID NO: 1216877 - RNA, 15 nt, Human
cucauacccaccccc

SEQ ID NO: 1216878 - RNA, 12 nt, Human
cucagggucccu

SEQ ID NO: 1216879 - RNA, 23 nt, Human
cuaaaagguaugcaaucaaaucu

SEQ ID NO: 1216880 - RNA, 16 nt, Human
cucaggugucccugca

SEQ ID NO: 1216881 - RNA, 15 nt, Human
cucaggugucccugc

SEQ ID NO: 1216882 - RNA, 23 nt, Human
cucagguggggucacucuggcag

SEQ ID NO: 1216883 - RNA, 22 nt, Human
cucagguggggucacucuggca

SEQ ID NO: 1216884 - RNA, 14 nt, Human
cucagggucccugg

SEQ ID NO: 1216885 - RNA, 22 nt, Human
cucccaaggggcccaaauucuu

SEQ ID NO: 1216886 - RNA, 21 nt, Human
cucccaaggggcccaaauucu

SEQ ID NO: 1216887 - RNA, 21 nt, Human
cucccaggcauuccccaggag

SEQ ID NO: 1216888 - RNA, 20 nt, Human
cucccaggcauuccccagga

SEQ ID NO: 1216889 - RNA, 19 nt, Human
cucccaggcauuccccagg

SEQ ID NO: 1216890 - RNA, 17 nt, Human
cucccaggcauucccca

SEQ ID NO: 1216891 - RNA, 22 nt, Human
cucccaggcauuccccaggagg

SEQ ID NO: 1216892 - RNA, 19 nt, Human
cuccagcuguucagcuggu

SEQ ID NO: 1216893 - RNA, 18 nt, Human
cuccagcuguucagcugg

SEQ ID NO: 1216894 - RNA, 13 nt, Human
cuccagcuguuca

SEQ ID NO: 1216895 - RNA, 15 nt, Human
cuccaggcuccuuua

SEQ ID NO: 1216896 - RNA, 11 nt, Human
cuccaggcucc

SEQ ID NO: 1216897 - RNA, 21 nt, Human
cuccaccugccagggacagag

SEQ ID NO: 1216898 - RNA, 18 nt, Human
cuccaccugccagggaca

SEQ ID NO: 1216899 - RNA, 17 nt, Human
cuccaccugccagggac

SEQ ID NO: 1216900 - RNA, 12 nt, Human
cuccacccugcu

SEQ ID NO: 1216901 - RNA, 11 nt, Human
cuccacccugc

SEQ ID NO: 1216902 - RNA, 20 nt, Human
cuccagcucaccagccccag

SEQ ID NO: 1216903 - RNA, 19 nt, Human
cuccagcucaccagcccca

SEQ ID NO: 1216904 - RNA, 14 nt, Human
cuccugugugugcg

SEQ ID NO: 1216905 - RNA, 21 nt, Human
cuccuucaccuuuguccccac

SEQ ID NO: 1216906 - RNA, 19 nt, Human
cuccuucaccuuugucccc

SEQ ID NO: 1216907 - RNA, 16 nt, Human
cuccuucaccuuuguc

SEQ ID NO: 1216908 - RNA, 14 nt, Human
cuccuucaccuuug

SEQ ID NO: 1216909 - RNA, 16 nt, Human
cuccugcaggcagcca

SEQ ID NO: 1216910 - RNA, 22 nt, Human
cuccugcaggcagccaggccac

SEQ ID NO: 1216911 - RNA, 15 nt, Human
cuccugcaggcagcc

SEQ ID NO: 1216912 - RNA, 11 nt, Human
cuccugugugu

SEQ ID NO: 1216913 - RNA, 23 nt, Human
cuccugugucuugcaauggcagc

SEQ ID NO: 1216914 - RNA, 21 nt, Human
cuccuugaaaacacuguucuc

SEQ ID NO: 1216915 - RNA, 11 nt, Human
cuccuucuucc

SEQ ID NO: 1216916 - RNA, 20 nt, Human
cuccuucuguccuacucugu

SEQ ID NO: 1216917 - RNA, 15 nt, Human
cuccuucuguccuac

SEQ ID NO: 1216918 - RNA, 14 nt, Human
cuccuucuguccua

SEQ ID NO: 1216919 - RNA, 20 nt, Human
cucgaguuacagacaaagcg

SEQ ID NO: 1216920 - RNA, 16 nt, Human
cucgaguuacagacaa

SEQ ID NO: 1216921 - RNA, 15 nt, Human
cucgcgacaaugcaa

SEQ ID NO: 1216922 - RNA, 14 nt, Human
cuccugcaggcagc

SEQ ID NO: 1216923 - RNA, 13 nt, Human
cuccugcaggcag

SEQ ID NO: 1216924 - RNA, 14 nt, Human
cuccucagaucuuc

SEQ ID NO: 1216925 - RNA, 12 nt, Human
cuccucagaucu

SEQ ID NO: 1216926 - RNA, 17 nt, Human
cucccuuucuucccuac

SEQ ID NO: 1216927 - RNA, 20 nt, Human
cucccuuggauuguccccga

SEQ ID NO: 1216928 - RNA, 17 nt, Human
cucccuuggauuguccc

SEQ ID NO: 1216929 - RNA, 14 nt, Human
cucccuuccucuuu

SEQ ID NO: 1216930 - RNA, 13 nt, Human
cucccuuccucuu

SEQ ID NO: 1216931 - RNA, 10 nt, Human
cucccuuccu

SEQ ID NO: 1216932 - RNA, 21 nt, Human
cucccaucucacacaugagca

SEQ ID NO: 1216933 - RNA, 18 nt, Human
cucccaucucacacauga

SEQ ID NO: 1216934 - RNA, 15 nt, Human
cucccaucucacaca

SEQ ID NO: 1216935 - RNA, 14 nt, Human
cucccaucucacac

SEQ ID NO: 1216936 - RNA, 14 nt, Human
cucccaucacccgc

SEQ ID NO: 1216937 - RNA, 23 nt, Human
cggugcuaucucccccagcccca

SEQ ID NO: 1216938 - RNA, 23 nt, Human
cgugcauaccacuuuuguucuug

SEQ ID NO: 1216939 - RNA, 19 nt, Human
cgugcauaccacuuuuguu

SEQ ID NO: 1216940 - RNA, 18 nt, Human
cgugcauaccacuuuugu

SEQ ID NO: 1216941 - RNA, 14 nt, Human
cgugcauaccacuu

SEQ ID NO: 1216942 - RNA, 22 nt, Human
cgugcacacaccagagcccacc

SEQ ID NO: 1216943 - RNA, 21 nt, Human
cgugcacacaccagagcccac

SEQ ID NO: 1216944 - RNA, 20 nt, Human
cgugcacacaccagagccca

SEQ ID NO: 1216945 - RNA, 12 nt, Human
cgugacaacacu

SEQ ID NO: 1216946 - RNA, 14 nt, Human
cgucugacaggcaa

SEQ ID NO: 1216947 - RNA, 13 nt, Human
cgucugacaggca

SEQ ID NO: 1216948 - RNA, 16 nt, Human
cgucuaccugaggggc

SEQ ID NO: 1216949 - RNA, 14 nt, Human
cgucuaccugaggg

SEQ ID NO: 1216950 - RNA, 14 nt, Human
cguccccugucccc

SEQ ID NO: 1216951 - RNA, 11 nt, Human
cguccccuguc

SEQ ID NO: 1216952 - RNA, 20 nt, Human
cguuucuaugacacaugcaa

SEQ ID NO: 1216953 - RNA, 21 nt, Human
cguuucuaaaggcuaccuuug

SEQ ID NO: 1216954 - RNA, 19 nt, Human
cguuucuaaaggcuaccuu

SEQ ID NO: 1216955 - RNA, 17 nt, Human
cguggcugcuucaagga

SEQ ID NO: 1216956 - RNA, 15 nt, Human
cguggcugcuucaag

SEQ ID NO: 1216957 - RNA, 14 nt, Human
cguggcugcuucaa

SEQ ID NO: 1216958 - RNA, 12 nt, Human
cguggcugcuuc

SEQ ID NO: 1216959 - RNA, 21 nt, Human
cgauucuucugcuucagccuc

SEQ ID NO: 1216960 - RNA, 19 nt, Human
cgauucuucugcuucagcc

SEQ ID NO: 1216961 - RNA, 13 nt, Human
cgauucuucugcu

SEQ ID NO: 1216962 - RNA, 19 nt, Human
cgaucuggguucacugcaa

SEQ ID NO: 1216963 - RNA, 12 nt, Human
cgauuucuguuu

SEQ ID NO: 1216964 - RNA, 20 nt, Human
cgauuucuguuuagauaaua

SEQ ID NO: 1216965 - RNA, 19 nt, Human
cgaggccuucucugaagga

SEQ ID NO: 1216966 - RNA, 18 nt, Human
cgaggccuucucugaagg

SEQ ID NO: 1216967 - RNA, 14 nt, Human
cgaggacagggagg

SEQ ID NO: 1216968 - RNA, 13 nt, Human
cgaggacagggag

SEQ ID NO: 1216969 - RNA, 12 nt, Human
cgaggacaggga

SEQ ID NO: 1216970 - RNA, 20 nt, Human
ccuuuguauucucuccugua

SEQ ID NO: 1216971 - RNA, 18 nt, Human
ccuuuguauucucuccug

SEQ ID NO: 1216972 - RNA, 15 nt, Human
ccuuuguauucucuc

SEQ ID NO: 1216973 - RNA, 14 nt, Human
ccuuuaagagaaau

SEQ ID NO: 1216974 - RNA, 13 nt, Human
ccuuuaagagaaa

SEQ ID NO: 1216975 - RNA, 14 nt, Human
ccuuggcugcaggg

SEQ ID NO: 1216976 - RNA, 20 nt, Human
ccuuguggucccaccccaca

SEQ ID NO: 1216977 - RNA, 19 nt, Human
ccuuguggucccaccccac

SEQ ID NO: 1216978 - RNA, 16 nt, Human
ccuuguggucccaccc

SEQ ID NO: 1216979 - RNA, 13 nt, Human
ccuuggcugcagg

SEQ ID NO: 1216980 - RNA, 12 nt, Human
ccuuggcugcag

SEQ ID NO: 1216981 - RNA, 16 nt, Human
ccuuugcuugaaagaa

SEQ ID NO: 1216982 - RNA, 21 nt, Human
cgcuaagagggagggagggcu

SEQ ID NO: 1216983 - RNA, 16 nt, Human
cgcuaagagggaggga

SEQ ID NO: 1216984 - RNA, 15 nt, Human
cgcuaagagggaggg

SEQ ID NO: 1216985 - RNA, 14 nt, Human
cgcuaagagggagg

SEQ ID NO: 1216986 - RNA, 20 nt, Human
cgcgugcacacaccagagcc

SEQ ID NO: 1216987 - RNA, 19 nt, Human
cgcgugcacacaccagagc

SEQ ID NO: 1216988 - RNA, 16 nt, Human
cgcgugcacacaccag

SEQ ID NO: 1216989 - RNA, 17 nt, Human
cgcgacaaugcaaacca

SEQ ID NO: 1216990 - RNA, 16 nt, Human
cgcgacaaugcaaacc

SEQ ID NO: 1216991 - RNA, 14 nt, Human
cgcagacaggacca

SEQ ID NO: 1216992 - RNA, 13 nt, Human
cgcagacaggacc

SEQ ID NO: 1216993 - RNA, 15 nt, Human
cgcccccacugguga

SEQ ID NO: 1216994 - RNA, 21 nt, Human
cgggaggauguucugggacac

SEQ ID NO: 1216995 - RNA, 20 nt, Human
cgggaggauguucugggaca

SEQ ID NO: 1216996 - RNA, 15 nt, Human
cgggcaugacacgaa

SEQ ID NO: 1216997 - RNA, 12 nt, Human
cgggcaugacac

SEQ ID NO: 1216998 - RNA, 17 nt, Human
cgggaggucgaggcagg

SEQ ID NO: 1216999 - RNA, 16 nt, Human
cgggaggucgaggcag

SEQ ID NO: 1217000 - RNA, 19 nt, Human
cggcuggccuggccccuca

SEQ ID NO: 1217001 - RNA, 18 nt, Human
cggcuggccuggccccuc

SEQ ID NO: 1217002 - RNA, 16 nt, Human
cggcuggccuggcccc

SEQ ID NO: 1217003 - RNA, 15 nt, Human
cggcuggccuggccc

SEQ ID NO: 1217004 - RNA, 15 nt, Human
cggccuuuggcuuca

SEQ ID NO: 1217005 - RNA, 18 nt, Human
cggacagccacggccagg

SEQ ID NO: 1217006 - RNA, 16 nt, Human
cggacagccacggcca

SEQ ID NO: 1217007 - RNA, 15 nt, Human
cggacagccacggcc

SEQ ID NO: 1217008 - RNA, 20 nt, Human
cggaaugaaccacaucuugc

SEQ ID NO: 1217009 - RNA, 13 nt, Human
cgcuccugugucu

SEQ ID NO: 1217010 - RNA, 20 nt, Human
cggacagccacggccaggcc

SEQ ID NO: 1217011 - RNA, 14 nt, Human
ccuggacccugugg

SEQ ID NO: 1217012 - RNA, 13 nt, Human
ccuggacccugug

SEQ ID NO: 1217013 - RNA, 20 nt, Human
ccuggcacugcuuccaguga

SEQ ID NO: 1217014 - RNA, 16 nt, Human
ccuggcagccccuguu

SEQ ID NO: 1217015 - RNA, 21 nt, Human
ccuggcacugcuuccagugag

SEQ ID NO: 1217016 - RNA, 17 nt, Human
ccuggcaugggaaugaa

SEQ ID NO: 1217017 - RNA, 16 nt, Human
ccuggcaugggaauga

SEQ ID NO: 1217018 - RNA, 23 nt, Human
ccuggcaugggaaugaaugucag

SEQ ID NO: 1217019 - RNA, 18 nt, Human
ccuggcaugggaaugaau

SEQ ID NO: 1217020 - RNA, 16 nt, Human
ccuggccccucagggu

SEQ ID NO: 1217021 - RNA, 14 nt, Human
ccuggccccucagg

SEQ ID NO: 1217022 - RNA, 15 nt, Human
ccugggcagaaggaa

SEQ ID NO: 1217023 - RNA, 14 nt, Human
ccugggcagaagga

SEQ ID NO: 1217024 - RNA, 12 nt, Human
ccugggcagaag

SEQ ID NO: 1217025 - RNA, 20 nt, Human
ccugggaucccucauccuca

SEQ ID NO: 1217026 - RNA, 16 nt, Human
ccugggaucccucauc

SEQ ID NO: 1217027 - RNA, 20 nt, Human
ccugggaggucaaggcugca

SEQ ID NO: 1217028 - RNA, 22 nt, Human
ccugcuccagcuguucagcugg

SEQ ID NO: 1217029 - RNA, 14 nt, Human
ccugcuccagcugu

SEQ ID NO: 1217030 - RNA, 13 nt, Human
ccugcuccagcug

SEQ ID NO: 1217031 - RNA, 12 nt, Human
ccugcuccagcu

SEQ ID NO: 1217032 - RNA, 17 nt, Human
ccugcuaauuccccaga

SEQ ID NO: 1217033 - RNA, 23 nt, Human
ccugcgucucauacucaccucac

SEQ ID NO: 1217034 - RNA, 21 nt, Human
ccugcaaccugauugugucuc

SEQ ID NO: 1217035 - RNA, 16 nt, Human
ccugcaaccugauugu

SEQ ID NO: 1217036 - RNA, 19 nt, Human
ccugcaacaccuuguuucc

SEQ ID NO: 1217037 - RNA, 18 nt, Human
ccugcaacaccuuguuuc

SEQ ID NO: 1217038 - RNA, 19 nt, Human
ccugcugguucaggguugg

SEQ ID NO: 1217039 - RNA, 13 nt, Human
ccugcugguucag

SEQ ID NO: 1217040 - RNA, 20 nt, Human
ccugugaguacuacaguccu

SEQ ID NO: 1217041 - RNA, 18 nt, Human
ccuguccccgcacugggc

SEQ ID NO: 1217042 - RNA, 17 nt, Human
ccugucccccugacaac

SEQ ID NO: 1217043 - RNA, 22 nt, Human
ccugugauggggcccugccucc

SEQ ID NO: 1217044 - RNA, 21 nt, Human
ccugugauggggcccugccuc

SEQ ID NO: 1217045 - RNA, 20 nt, Human
ccugugauggggcccugccu

SEQ ID NO: 1217046 - RNA, 19 nt, Human
ccugugauggggcccugcc

SEQ ID NO: 1217047 - RNA, 18 nt, Human
ccugugauggggcccugc

SEQ ID NO: 1217048 - RNA, 17 nt, Human
ccugugauggggcccug

SEQ ID NO: 1217049 - RNA, 19 nt, Human
ccugugccucugggacugg

SEQ ID NO: 1217050 - RNA, 17 nt, Human
ccugugccucugggacu

SEQ ID NO: 1217051 - RNA, 15 nt, Human
ccugugccucuggga

SEQ ID NO: 1217052 - RNA, 23 nt, Human
ccuguagagugggagcugagugg

SEQ ID NO: 1217053 - RNA, 21 nt, Human
ccuguagagugggagcugagu

SEQ ID NO: 1217054 - RNA, 20 nt, Human
ccuguaauccuagcacuuug

SEQ ID NO: 1217055 - RNA, 18 nt, Human
ccugguggcagcucaccu

SEQ ID NO: 1217056 - RNA, 17 nt, Human
ccugguggcagcucacc

SEQ ID NO: 1217057 - RNA, 16 nt, Human
ccugguggcagcucac

SEQ ID NO: 1217058 - RNA, 14 nt, Human
ccugguggcagcuc

SEQ ID NO: 1217059 - RNA, 13 nt, Human
ccugguggcagcu

SEQ ID NO: 1217060 - RNA, 12 nt, Human
ccugguggcagc

SEQ ID NO: 1217061 - RNA, 14 nt, Human
ccuugacagggcac

SEQ ID NO: 1217062 - RNA, 20 nt, Human
ccuugaccauucuccaccug

SEQ ID NO: 1217063 - RNA, 19 nt, Human
ccuugaccauucuccaccu

SEQ ID NO: 1217064 - RNA, 17 nt, Human
ccuugacagggcacacc

SEQ ID NO: 1217065 - RNA, 15 nt, Human
ccuugacagggcaca

SEQ ID NO: 1217066 - RNA, 23 nt, Human
ccuugaguugauucagcucugca

SEQ ID NO: 1217067 - RNA, 22 nt, Human
ccuugaguugauucagcucugc

SEQ ID NO: 1217068 - RNA, 22 nt, Human
ccuugaccauucuccaccugcc

SEQ ID NO: 1217069 - RNA, 21 nt, Human
ccuugaccauucuccaccugc

SEQ ID NO: 1217070 - RNA, 19 nt, Human
ccuugaacuuugaccucug

SEQ ID NO: 1217071 - RNA, 17 nt, Human
ccuugaacuuugaccuc

SEQ ID NO: 1217072 - RNA, 16 nt, Human
ccuugaacuggguacu

SEQ ID NO: 1217073 - RNA, 14 nt, Human
ccuugaacugggua

SEQ ID NO: 1217074 - RNA, 22 nt, Human
ccuugaaaacacuguucucugc

SEQ ID NO: 1217075 - RNA, 21 nt, Human
ccuugaaaacacuguucucug

SEQ ID NO: 1217076 - RNA, 19 nt, Human
ccuugaaaacacuguucuc

SEQ ID NO: 1217077 - RNA, 18 nt, Human
ccuucgcuccugugucuu

SEQ ID NO: 1217078 - RNA, 15 nt, Human
ccuucgcuccugugu

SEQ ID NO: 1217079 - RNA, 14 nt, Human
ccuucgcuccugug

SEQ ID NO: 1217080 - RNA, 13 nt, Human
ccuucgcuccugu

SEQ ID NO: 1217081 - RNA, 15 nt, Human
ccuugaaaacacugu

SEQ ID NO: 1217082 - RNA, 13 nt, Human
ccuugacagggca

SEQ ID NO: 1217083 - RNA, 11 nt, Human
ccuuuggcuuc

SEQ ID NO: 1217084 - RNA, 19 nt, Human
ccuucagugccuuauggaa

SEQ ID NO: 1217085 - RNA, 20 nt, Human
ccuucagugccuuauggaac

SEQ ID NO: 1217086 - RNA, 15 nt, Human
ccuucagugccuuau

SEQ ID NO: 1217087 - RNA, 14 nt, Human
ccuucagugccuua

SEQ ID NO: 1217088 - RNA, 13 nt, Human
ccuucagugccuu

SEQ ID NO: 1217089 - RNA, 10 nt, Human
ccuucagugc

SEQ ID NO: 1217090 - RNA, 14 nt, Human
ccuuccucuuucca

SEQ ID NO: 1217091 - RNA, 16 nt, Human
ccuuccagggguggga

SEQ ID NO: 1217092 - RNA, 15 nt, Human
ccuuccagggguggg

SEQ ID NO: 1217093 - RNA, 22 nt, Human
ccuuccaggggugggacacccu

SEQ ID NO: 1217094 - RNA, 18 nt, Human
ccuuccaggggugggaca

SEQ ID NO: 1217095 - RNA, 14 nt, Human
ccuuaccugccagg

SEQ ID NO: 1217096 - RNA, 20 nt, Human
ccuuaccucggugccuuccu

SEQ ID NO: 1217097 - RNA, 17 nt, Human
ccuuaccagcagagcac

SEQ ID NO: 1217098 - RNA, 16 nt, Human
ccuuaccagcagagca

SEQ ID NO: 1217099 - RNA, 15 nt, Human
ccuuaccagcagagc

SEQ ID NO: 1217100 - RNA, 14 nt, Human
ccuuaccagcagag

SEQ ID NO: 1217101 - RNA, 21 nt, Human
ccuuagacagucccugccaau

SEQ ID NO: 1217102 - RNA, 19 nt, Human
ccuuagacagucccugcca

SEQ ID NO: 1217103 - RNA, 18 nt, Human
ccuuagacagucccugcc

SEQ ID NO: 1217104 - RNA, 17 nt, Human
ccuuagacagucccugc

SEQ ID NO: 1217105 - RNA, 16 nt, Human
ccuuagacagucccug

SEQ ID NO: 1217106 - RNA, 23 nt, Human
ccuccugugugugcgccuacagg

SEQ ID NO: 1217107 - RNA, 12 nt, Human
ccucucccauca

SEQ ID NO: 1217108 - RNA, 16 nt, Human
ccucugacacacagcu

SEQ ID NO: 1217109 - RNA, 23 nt, Human
ccucugaaaaccaauguucucuc

SEQ ID NO: 1217110 - RNA, 22 nt, Human
ccucugcacuccccugcugggu

SEQ ID NO: 1217111 - RNA, 21 nt, Human
ccucugcacuccccugcuggg

SEQ ID NO: 1217112 - RNA, 20 nt, Human
ccucugcacuccccugcugg

SEQ ID NO: 1217113 - RNA, 15 nt, Human
ccucugcacuccccu

SEQ ID NO: 1217114 - RNA, 14 nt, Human
ccucugcacucccc

SEQ ID NO: 1217115 - RNA, 20 nt, Human
ccucugcacaagcugcaccc

SEQ ID NO: 1217116 - RNA, 19 nt, Human
ccucugcacaagcugcacc

SEQ ID NO: 1217117 - RNA, 17 nt, Human
ccucugcacaagcugca

SEQ ID NO: 1217118 - RNA, 15 nt, Human
ccucugcacaagcug

SEQ ID NO: 1217119 - RNA, 18 nt, Human
ccucugacacacagcucu

SEQ ID NO: 1217120 - RNA, 17 nt, Human
ccucugacacacagcuc

SEQ ID NO: 1217121 - RNA, 12 nt, Human
ccucugggacug

SEQ ID NO: 1217122 - RNA, 13 nt, Human
ccuccugccucga

SEQ ID NO: 1217123 - RNA, 22 nt, Human
ccuccugugugugcgccuacag

SEQ ID NO: 1217124 - RNA, 15 nt, Human
ccuccugugugugcg

SEQ ID NO: 1217125 - RNA, 13 nt, Human
ccuccugugugug

SEQ ID NO: 1217126 - RNA, 13 nt, Human
ccuccugggcuaa

SEQ ID NO: 1217127 - RNA, 16 nt, Human
ccucccucccucuuuc

SEQ ID NO: 1217128 - RNA, 15 nt, Human
ccucccucccucuuu

SEQ ID NO: 1217129 - RNA, 13 nt, Human
ccucccucccucu

SEQ ID NO: 1217130 - RNA, 15 nt, Human
ccucagucuggcccu

SEQ ID NO: 1217131 - RNA, 19 nt, Human
ccucagucuggcccuuccu

SEQ ID NO: 1217132 - RNA, 17 nt, Human
ccucaggugagaagcag

SEQ ID NO: 1217133 - RNA, 22 nt, Human
ccucaggugauccacccaccuc

SEQ ID NO: 1217134 - RNA, 19 nt, Human
ccucaggugauccacccac

SEQ ID NO: 1217135 - RNA, 17 nt, Human
ccucaggugauccaccc

SEQ ID NO: 1217136 - RNA, 16 nt, Human
ccucaggugagaagca

SEQ ID NO: 1217137 - RNA, 15 nt, Human
ccucagggucccugg

SEQ ID NO: 1217138 - RNA, 14 nt, Human
ccucagggucccug

SEQ ID NO: 1217139 - RNA, 23 nt, Human
ccucaggccugggggcugggcag

SEQ ID NO: 1217140 - RNA, 21 nt, Human
ccucaggccugggggcugggc

SEQ ID NO: 1217141 - RNA, 14 nt, Human
ccucaggccugggg

SEQ ID NO: 1217142 - RNA, 11 nt, Human
ccucaggccug

SEQ ID NO: 1217143 - RNA, 17 nt, Human
ccucagcauccuggcac

SEQ ID NO: 1217144 - RNA, 16 nt, Human
ccucagcauccuggca

SEQ ID NO: 1217145 - RNA, 21 nt, Human
ccugaagacucauucuucugu

SEQ ID NO: 1217146 - RNA, 17 nt, Human
ccugaagucacacagug

SEQ ID NO: 1217147 - RNA, 16 nt, Human
ccugaagucacacagu

SEQ ID NO: 1217148 - RNA, 15 nt, Human
ccugaagucacacag

SEQ ID NO: 1217149 - RNA, 13 nt, Human
ccugaaggccccg

SEQ ID NO: 1217150 - RNA, 19 nt, Human
ccugaagucacacagugag

SEQ ID NO: 1217151 - RNA, 14 nt, Human
ccugaaggccccgc

SEQ ID NO: 1217152 - RNA, 17 nt, Human
ccucuuaugggcugggu

SEQ ID NO: 1217153 - RNA, 22 nt, Human
ccucuuuggucuacacugugcu

SEQ ID NO: 1217154 - RNA, 16 nt, Human
ccucuuaugggcuggg

SEQ ID NO: 1217155 - RNA, 15 nt, Human
ccucuuaugggcugg

SEQ ID NO: 1217156 - RNA, 14 nt, Human
ccucuuaugggcug

SEQ ID NO: 1217157 - RNA, 14 nt, Human
ccucuuagaaaaac

SEQ ID NO: 1217158 - RNA, 23 nt, Human
ccucuguacagagcccacgcccc

SEQ ID NO: 1217159 - RNA, 18 nt, Human
ccucuguacagagcccac

SEQ ID NO: 1217160 - RNA, 17 nt, Human
ccucuguacagagccca

SEQ ID NO: 1217161 - RNA, 16 nt, Human
ccucuguacagagccc

SEQ ID NO: 1217162 - RNA, 15 nt, Human
ccucuguacagagcc

SEQ ID NO: 1217163 - RNA, 14 nt, Human
ccucuguacagagc

SEQ ID NO: 1217164 - RNA, 12 nt, Human
ccugaggcccag

SEQ ID NO: 1217165 - RNA, 14 nt, Human
ccugaggcccagag

SEQ ID NO: 1217166 - RNA, 13 nt, Human
ccugaggcccaga

SEQ ID NO: 1217167 - RNA, 16 nt, Human
ccugacaacacucauu

SEQ ID NO: 1217168 - RNA, 15 nt, Human
ccugacaacacucau

SEQ ID NO: 1217169 - RNA, 14 nt, Human
ccugacaacacuca

SEQ ID NO: 1217170 - RNA, 12 nt, Human
ccugacaacacu

SEQ ID NO: 1217171 - RNA, 23 nt, Human
ccugaggcccuucucuccagccc

SEQ ID NO: 1217172 - RNA, 22 nt, Human
ccugaggcccuucucuccagcc

SEQ ID NO: 1217173 - RNA, 21 nt, Human
ccugaggcccuucucuccagc

SEQ ID NO: 1217174 - RNA, 20 nt, Human
ccugaggcccuucucuccag

SEQ ID NO: 1217175 - RNA, 19 nt, Human
ccugaggcccuucucucca

SEQ ID NO: 1217176 - RNA, 17 nt, Human
ccugaggcccuucucuc

SEQ ID NO: 1217177 - RNA, 16 nt, Human
ccugaggcccuucucu

SEQ ID NO: 1217178 - RNA, 23 nt, Human
ccugauugugucucuugguccug

SEQ ID NO: 1217179 - RNA, 19 nt, Human
ccugaugcuucuucagaga

SEQ ID NO: 1217180 - RNA, 18 nt, Human
ccugaugcuucuucagag

SEQ ID NO: 1217181 - RNA, 17 nt, Human
ccugaugcuucuucaga

SEQ ID NO: 1217182 - RNA, 14 nt, Human
ccugaugcuucuuc

SEQ ID NO: 1217183 - RNA, 23 nt, Human
ccugacaacacucauugaccuga

SEQ ID NO: 1217184 - RNA, 19 nt, Human
cccuuuuuuggcugcugaa

SEQ ID NO: 1217185 - RNA, 22 nt, Human
ccgagauagccaaggccaaagg

SEQ ID NO: 1217186 - RNA, 19 nt, Human
ccgagauagccaaggccaa

SEQ ID NO: 1217187 - RNA, 17 nt, Human
ccgagaaggaagccucc

SEQ ID NO: 1217188 - RNA, 18 nt, Human
cccuuuuuuggcugcuga

SEQ ID NO: 1217189 - RNA, 17 nt, Human
cccuuuuuuggcugcug

SEQ ID NO: 1217190 - RNA, 13 nt, Human
cccuuuucuguuu

SEQ ID NO: 1217191 - RNA, 11 nt, Human
cccuuuuccuu

SEQ ID NO: 1217192 - RNA, 18 nt, Human
ccgagaucacgccacugc

SEQ ID NO: 1217193 - RNA, 20 nt, Human
cccuuguggucccaccccac

SEQ ID NO: 1217194 - RNA, 18 nt, Human
cccuuguggucccacccc

SEQ ID NO: 1217195 - RNA, 16 nt, Human
cccuuguggucccacc

SEQ ID NO: 1217196 - RNA, 14 nt, Human
cccuugugguccca

SEQ ID NO: 1217197 - RNA, 18 nt, Human
cccuuggggagcaggcuc

SEQ ID NO: 1217198 - RNA, 20 nt, Human
cccuuugacgccaucccagc

SEQ ID NO: 1217199 - RNA, 22 nt, Human
cccuugccgucuaccugagggg

SEQ ID NO: 1217200 - RNA, 18 nt, Human
cccuugccgucuaccuga

SEQ ID NO: 1217201 - RNA, 17 nt, Human
cccuugccgucuaccug

SEQ ID NO: 1217202 - RNA, 19 nt, Human
cccuuaccucggugccuuc

SEQ ID NO: 1217203 - RNA, 16 nt, Human
cccuguuuguuucuga

SEQ ID NO: 1217204 - RNA, 15 nt, Human
cccuguuuguuucug

SEQ ID NO: 1217205 - RNA, 18 nt, Human
cccugugggcccccaaau

SEQ ID NO: 1217206 - RNA, 16 nt, Human
cccugugggcccccaa

SEQ ID NO: 1217207 - RNA, 21 nt, Human
cccuguagagugggagcugag

SEQ ID NO: 1217208 - RNA, 20 nt, Human
ccccucagggucccuggugg

SEQ ID NO: 1217209 - RNA, 18 nt, Human
ccccucagggucccuggu

SEQ ID NO: 1217210 - RNA, 17 nt, Human
ccccucagggucccugg

SEQ ID NO: 1217211 - RNA, 19 nt, Human
cccugguggcagugggagc

SEQ ID NO: 1217212 - RNA, 16 nt, Human
cccugguggcaguggg

SEQ ID NO: 1217213 - RNA, 21 nt, Human
cccugguggcagugggagcug

SEQ ID NO: 1217214 - RNA, 21 nt, Human
cccccgcugucagccauuccu

SEQ ID NO: 1217215 - RNA, 12 nt, Human
cccccagcccca

SEQ ID NO: 1217216 - RNA, 14 nt, Human
ccccacuggugaca

SEQ ID NO: 1217217 - RNA, 13 nt, Human
ccccacuggugac

SEQ ID NO: 1217218 - RNA, 12 nt, Human
ccccacugguga

SEQ ID NO: 1217219 - RNA, 22 nt, Human
ccccaggaggccagccuugacc

SEQ ID NO: 1217220 - RNA, 21 nt, Human
ccccaggaggccagccuugac

SEQ ID NO: 1217221 - RNA, 15 nt, Human
ccccaggaggccagc

SEQ ID NO: 1217222 - RNA, 14 nt, Human
ccccaggaggccag

SEQ ID NO: 1217223 - RNA, 17 nt, Human
ccucaccuuucccaucu

SEQ ID NO: 1217224 - RNA, 15 nt, Human
ccucaccccacugug

SEQ ID NO: 1217225 - RNA, 12 nt, Human
ccucaccccacu

SEQ ID NO: 1217226 - RNA, 22 nt, Human
ccucacaguccuuaccagcaga

SEQ ID NO: 1217227 - RNA, 20 nt, Human
ccucacaguccuuaccagca

SEQ ID NO: 1217228 - RNA, 17 nt, Human
ccucacaguccuuacca

SEQ ID NO: 1217229 - RNA, 14 nt, Human
ccuaaaguguauuu

SEQ ID NO: 1217230 - RNA, 20 nt, Human
ccgggcacucagaagacacu

SEQ ID NO: 1217231 - RNA, 15 nt, Human
ccgggcacucagaag

SEQ ID NO: 1217232 - RNA, 15 nt, Human
ccggcuggccuggcc

SEQ ID NO: 1217233 - RNA, 13 nt, Human
ccggcuggccugg

SEQ ID NO: 1217234 - RNA, 12 nt, Human
ccggcuggccug

SEQ ID NO: 1217235 - RNA, 23 nt, Human
cccaagggccuggccugagcugg

SEQ ID NO: 1217236 - RNA, 19 nt, Human
cccaagggccuggccugag

SEQ ID NO: 1217237 - RNA, 18 nt, Human
cccaagggccuggccuga

SEQ ID NO: 1217238 - RNA, 18 nt, Human
cccagcaagugagagcug

SEQ ID NO: 1217239 - RNA, 22 nt, Human
cccagauugcaacaggcugggc

SEQ ID NO: 1217240 - RNA, 21 nt, Human
cccagauugcaacaggcuggg

SEQ ID NO: 1217241 - RNA, 20 nt, Human
cccagauugcaacaggcugg

SEQ ID NO: 1217242 - RNA, 20 nt, Human
cccagagggccugcaaggga

SEQ ID NO: 1217243 - RNA, 23 nt, Human
cccagcgagcccugguggcagug

SEQ ID NO: 1217244 - RNA, 19 nt, Human
cccagcgagcccugguggc

SEQ ID NO: 1217245 - RNA, 18 nt, Human
cccagcgagcccuggugg

SEQ ID NO: 1217246 - RNA, 17 nt, Human
cccagcgagcccuggug

SEQ ID NO: 1217247 - RNA, 12 nt, Human
cccagccugcua

SEQ ID NO: 1217248 - RNA, 18 nt, Human
cccagccccuucugaccc

SEQ ID NO: 1217249 - RNA, 11 nt, Human
cccagccccuu

SEQ ID NO: 1217250 - RNA, 23 nt, Human
cccagauugcaacaggcugggcu

SEQ ID NO: 1217251 - RNA, 23 nt, Human
cccagcaagugagagcugggugu

SEQ ID NO: 1217252 - RNA, 22 nt, Human
cccagcaagugagagcugggug

SEQ ID NO: 1217253 - RNA, 21 nt, Human
cccagcaagugagagcugggu

SEQ ID NO: 1217254 - RNA, 20 nt, Human
cccagcaagugagagcuggg

SEQ ID NO: 1217255 - RNA, 19 nt, Human
cccagcaagugagagcugg

SEQ ID NO: 1217256 - RNA, 22 nt, Human
cccaggccccugccacccuggg

SEQ ID NO: 1217257 - RNA, 21 nt, Human
cccaggccccugccacccugg

SEQ ID NO: 1217258 - RNA, 18 nt, Human
cccaggccccugccaccc

SEQ ID NO: 1217259 - RNA, 16 nt, Human
cccaggccccugccac

SEQ ID NO: 1217260 - RNA, 11 nt, Human
cccaggccccu

SEQ ID NO: 1217261 - RNA, 23 nt, Human
cccaggcauuccccaggaggcca

SEQ ID NO: 1217262 - RNA, 22 nt, Human
cccaggcauuccccaggaggcc

SEQ ID NO: 1217263 - RNA, 21 nt, Human
cccaggcauuccccaggaggc

SEQ ID NO: 1217264 - RNA, 20 nt, Human
cccaggcauuccccaggagg

SEQ ID NO: 1217265 - RNA, 17 nt, Human
cccaggcaggucuugaa

SEQ ID NO: 1217266 - RNA, 13 nt, Human
cccaggcaggucu

SEQ ID NO: 1217267 - RNA, 11 nt, Human
cccaggcaggu

SEQ ID NO: 1217268 - RNA, 22 nt, Human
cccaggaggccagccuugacca

SEQ ID NO: 1217269 - RNA, 13 nt, Human
cccaggaggccag

SEQ ID NO: 1217270 - RNA, 21 nt, Human
cccaggagccccgaggccuuc

SEQ ID NO: 1217271 - RNA, 13 nt, Human
cccagugcccaca

SEQ ID NO: 1217272 - RNA, 20 nt, Human
cccagucuggaaugcagugg

SEQ ID NO: 1217273 - RNA, 23 nt, Human
cccaggugcuaggaacacuccuu

SEQ ID NO: 1217274 - RNA, 22 nt, Human
cccaggugcuaggaacacuccu

SEQ ID NO: 1217275 - RNA, 18 nt, Human
cccaggccuccuacagcu

SEQ ID NO: 1217276 - RNA, 17 nt, Human
cccaggccuccuacagc

SEQ ID NO: 1217277 - RNA, 22 nt, Human
ccccucagggucccugguggca

SEQ ID NO: 1217278 - RNA, 17 nt, Human
ccccaggaggccagccu

SEQ ID NO: 1217279 - RNA, 18 nt, Human
cccaugcugcccugugag

SEQ ID NO: 1217280 - RNA, 17 nt, Human
cccaugcugcccuguga

SEQ ID NO: 1217281 - RNA, 16 nt, Human
cccaugcugcccugug

SEQ ID NO: 1217282 - RNA, 15 nt, Human
cccaugcugcccugu

SEQ ID NO: 1217283 - RNA, 18 nt, Human
cccagugccgagaaggaa

SEQ ID NO: 1217284 - RNA, 21 nt, Human
cccagugcccacaggaucagu

SEQ ID NO: 1217285 - RNA, 20 nt, Human
cccagugcccacaggaucag

SEQ ID NO: 1217286 - RNA, 15 nt, Human
cccagugcccacagg

SEQ ID NO: 1217287 - RNA, 22 nt, Human
ccccaaauggaaaugggcagag

SEQ ID NO: 1217288 - RNA, 13 nt, Human
cccauucugccug

SEQ ID NO: 1217289 - RNA, 21 nt, Human
ccccacccaagggccuggccu

SEQ ID NO: 1217290 - RNA, 20 nt, Human
ccccacccaagggccuggcc

SEQ ID NO: 1217291 - RNA, 14 nt, Human
ccccacccaagggc

SEQ ID NO: 1217292 - RNA, 22 nt, Human
ccaucauugaaaucuuuuugcu

SEQ ID NO: 1217293 - RNA, 18 nt, Human
ccauccagguucagcuug

SEQ ID NO: 1217294 - RNA, 19 nt, Human
ccauccucuguacagagcc

SEQ ID NO: 1217295 - RNA, 12 nt, Human
ccauccucugua

SEQ ID NO: 1217296 - RNA, 13 nt, Human
ccaucaccagaca

SEQ ID NO: 1217297 - RNA, 13 nt, Human
ccauaugccuggg

SEQ ID NO: 1217298 - RNA, 20 nt, Human
ccagugaggcucugcccuug

SEQ ID NO: 1217299 - RNA, 19 nt, Human
ccagugaggcucugcccuu

SEQ ID NO: 1217300 - RNA, 18 nt, Human
ccagugaggcucugcccu

SEQ ID NO: 1217301 - RNA, 15 nt, Human
ccaugcugcccugug

SEQ ID NO: 1217302 - RNA, 14 nt, Human
ccaugcugcccugu

SEQ ID NO: 1217303 - RNA, 13 nt, Human
ccaugcugcccug

SEQ ID NO: 1217304 - RNA, 11 nt, Human
ccaugcugccc

SEQ ID NO: 1217305 - RNA, 13 nt, Human
ccaugcuccuggc

SEQ ID NO: 1217306 - RNA, 21 nt, Human
ccaugauuaaccacuucagcu

SEQ ID NO: 1217307 - RNA, 19 nt, Human
ccaugauuaaccacuucag

SEQ ID NO: 1217308 - RNA, 18 nt, Human
ccaugauguuuuccauga

SEQ ID NO: 1217309 - RNA, 20 nt, Human
ccauccucuguacagagccc

SEQ ID NO: 1217310 - RNA, 16 nt, Human
cccaaagcagugcaug

SEQ ID NO: 1217311 - RNA, 15 nt, Human
cccaaagaugcagcc

SEQ ID NO: 1217312 - RNA, 12 nt, Human
cccaaagaugca

SEQ ID NO: 1217313 - RNA, 22 nt, Human
ccauuuugggguacccacugcu

SEQ ID NO: 1217314 - RNA, 20 nt, Human
ccauuuugggguacccacug

SEQ ID NO: 1217315 - RNA, 21 nt, Human
ccauuuuguauuuuacuaaua

SEQ ID NO: 1217316 - RNA, 21 nt, Human
ccauucugccugcccaggccc

SEQ ID NO: 1217317 - RNA, 20 nt, Human
ccauucugccugcccaggcc

SEQ ID NO: 1217318 - RNA, 19 nt, Human
ccauucugccugcccaggc

SEQ ID NO: 1217319 - RNA, 18 nt, Human
ccauucugccugcccagg

SEQ ID NO: 1217320 - RNA, 17 nt, Human
ccauucugccugcccag

SEQ ID NO: 1217321 - RNA, 18 nt, Human
ccauucuccaccugccag

SEQ ID NO: 1217322 - RNA, 17 nt, Human
ccauucuccaccugcca

SEQ ID NO: 1217323 - RNA, 16 nt, Human
ccauucuccaccugcc

SEQ ID NO: 1217324 - RNA, 15 nt, Human
ccauucuccaccugc

SEQ ID NO: 1217325 - RNA, 14 nt, Human
ccauggacuuuguu

SEQ ID NO: 1217326 - RNA, 13 nt, Human
ccauggacuuugu

SEQ ID NO: 1217327 - RNA, 21 nt, Human
cccacaaaggagagcuagcag

SEQ ID NO: 1217328 - RNA, 13 nt, Human
ccagcugcuuggg

SEQ ID NO: 1217329 - RNA, 23 nt, Human
ccagcugcuugggcuucauccuc

SEQ ID NO: 1217330 - RNA, 22 nt, Human
ccagcucugguccauagagagc

SEQ ID NO: 1217331 - RNA, 21 nt, Human
ccagcucugguccauagagag

SEQ ID NO: 1217332 - RNA, 17 nt, Human
ccagcucugguccauag

SEQ ID NO: 1217333 - RNA, 14 nt, Human
ccagcucuggucca

SEQ ID NO: 1217334 - RNA, 13 nt, Human
ccagcucuggucc

SEQ ID NO: 1217335 - RNA, 12 nt, Human
ccagcucugguc

SEQ ID NO: 1217336 - RNA, 11 nt, Human
ccagcucuggu

SEQ ID NO: 1217337 - RNA, 21 nt, Human
ccagcgagcccugguggcagu

SEQ ID NO: 1217338 - RNA, 16 nt, Human
ccagcgagcccuggug

SEQ ID NO: 1217339 - RNA, 15 nt, Human
ccagcgagcccuggu

SEQ ID NO: 1217340 - RNA, 14 nt, Human
ccagcgagcccugg

SEQ ID NO: 1217341 - RNA, 22 nt, Human
ccagccuugaccauucuccacc

SEQ ID NO: 1217342 - RNA, 20 nt, Human
ccagccuugaccauucucca

SEQ ID NO: 1217343 - RNA, 19 nt, Human
ccagccuugaccauucucc

SEQ ID NO: 1217344 - RNA, 22 nt, Human
ccagagcccaccuuggcucaag

SEQ ID NO: 1217345 - RNA, 16 nt, Human
ccagagcccaccuugg

SEQ ID NO: 1217346 - RNA, 22 nt, Human
ccaggaagccagcaggcucuca

SEQ ID NO: 1217347 - RNA, 21 nt, Human
ccaggccacaagacccuugug

SEQ ID NO: 1217348 - RNA, 24 nt, Human
ccaggcauuccccaggaggccagc

SEQ ID NO: 1217349 - RNA, 23 nt, Human
ccaggcauuccccaggaggccag

SEQ ID NO: 1217350 - RNA, 17 nt, Human
ccaggcauuccccagga

SEQ ID NO: 1217351 - RNA, 14 nt, Human
ccaggcauucccca

SEQ ID NO: 1217352 - RNA, 13 nt, Human
ccaggcauggugg

SEQ ID NO: 1217353 - RNA, 14 nt, Human
ccaggaggccagcc

SEQ ID NO: 1217354 - RNA, 13 nt, Human
ccaggaggccagc

SEQ ID NO: 1217355 - RNA, 12 nt, Human
ccaggaggccag

SEQ ID NO: 1217356 - RNA, 19 nt, Human
ccaggagccuccugcccuu

SEQ ID NO: 1217357 - RNA, 16 nt, Human
ccaggagccccgaggc

SEQ ID NO: 1217358 - RNA, 18 nt, Human
ccaggagccuccugcccu

SEQ ID NO: 1217359 - RNA, 14 nt, Human
ccaggagccuccug

SEQ ID NO: 1217360 - RNA, 13 nt, Human
ccaggagccuccu

SEQ ID NO: 1217361 - RNA, 15 nt, Human
ccaggagccccgagg

SEQ ID NO: 1217362 - RNA, 16 nt, Human
ccaggagcagccacau

SEQ ID NO: 1217363 - RNA, 19 nt, Human
ccaggugcuaggaacacuc

SEQ ID NO: 1217364 - RNA, 18 nt, Human
ccaggugcacaagcucca

SEQ ID NO: 1217365 - RNA, 14 nt, Human
ccagguucagcuug

SEQ ID NO: 1217366 - RNA, 21 nt, Human
ccaggugcuaggaacacuccu

SEQ ID NO: 1217367 - RNA, 15 nt, Human
ccagguucagcuugu

SEQ ID NO: 1217368 - RNA, 13 nt, Human
ccaguaucuugaa

SEQ ID NO: 1217369 - RNA, 24 nt, Human
ccaggcuguaucccaugagccuca

SEQ ID NO: 1217370 - RNA, 13 nt, Human
ccaggccccugcc

SEQ ID NO: 1217371 - RNA, 20 nt, Human
ccaggcuguaucccaugagc

SEQ ID NO: 1217372 - RNA, 19 nt, Human
ccaggcuggucucaaacuc

SEQ ID NO: 1217373 - RNA, 22 nt, Human
ccacacccagcccacuucugcc

SEQ ID NO: 1217374 - RNA, 21 nt, Human
ccacacccagcccacuucugc

SEQ ID NO: 1217375 - RNA, 20 nt, Human
ccacacccagcccacuucug

SEQ ID NO: 1217376 - RNA, 16 nt, Human
ccacaggaucagucug

SEQ ID NO: 1217377 - RNA, 21 nt, Human
ccaccaacauacucccaucug

SEQ ID NO: 1217378 - RNA, 16 nt, Human
ccacauuccugaugcu

SEQ ID NO: 1217379 - RNA, 16 nt, Human
ccacaugugcacaugc

SEQ ID NO: 1217380 - RNA, 20 nt, Human
ccacaucuugcucugcugac

SEQ ID NO: 1217381 - RNA, 19 nt, Human
ccacaucuugcucugcuga

SEQ ID NO: 1217382 - RNA, 18 nt, Human
ccacaucuugcucugcug

SEQ ID NO: 1217383 - RNA, 17 nt, Human
ccacccccacccaaggg

SEQ ID NO: 1217384 - RNA, 23 nt, Human
ccacccaggagccccgaggccuu

SEQ ID NO: 1217385 - RNA, 14 nt, Human
ccacuacauucugu

SEQ ID NO: 1217386 - RNA, 23 nt, Human
ccacggccaggccagagggagug

SEQ ID NO: 1217387 - RNA, 18 nt, Human
ccacggccaggccagagg

SEQ ID NO: 1217388 - RNA, 16 nt, Human
ccacggccaggccaga

SEQ ID NO: 1217389 - RNA, 19 nt, Human
ccacgcuggagugcaguga

SEQ ID NO: 1217390 - RNA, 18 nt, Human
ccacgcuggagugcagug

SEQ ID NO: 1217391 - RNA, 16 nt, Human
ccacgcuggagugcag

SEQ ID NO: 1217392 - RNA, 15 nt, Human
ccacccccacccaag

SEQ ID NO: 1217393 - RNA, 15 nt, Human
ccaccccacacacgc

SEQ ID NO: 1217394 - RNA, 18 nt, Human
ccacucaguccauagcag

SEQ ID NO: 1217395 - RNA, 15 nt, Human
ccacuacauucuguu

SEQ ID NO: 1217396 - RNA, 11 nt, Human
ccacuacauuc

SEQ ID NO: 1217397 - RNA, 17 nt, Human
ccacuacauucuguuaa

SEQ ID NO: 1217398 - RNA, 16 nt, Human
ccacuacauucuguua

SEQ ID NO: 1217399 - RNA, 22 nt, Human
ccagaaguuugagaucagccug

SEQ ID NO: 1217400 - RNA, 23 nt, Human
ccagaaguuugagaucagccugg

SEQ ID NO: 1217401 - RNA, 18 nt, Human
ccagaauuucccaaagca

SEQ ID NO: 1217402 - RNA, 14 nt, Human
ccacuucagcugac

SEQ ID NO: 1217403 - RNA, 13 nt, Human
ccacuucagcuga

SEQ ID NO: 1217404 - RNA, 21 nt, Human
ccagacaccuugacagggcac

SEQ ID NO: 1217405 - RNA, 21 nt, Human
ccagaauuucccaaagcagug

SEQ ID NO: 1217406 - RNA, 19 nt, Human
ccagaauuucccaaagcag

SEQ ID NO: 1217407 - RNA, 12 nt, Human
ccagaauuuccc

SEQ ID NO: 1217408 - RNA, 17 nt, Human
ccaaggccaaaggaagc

SEQ ID NO: 1217409 - RNA, 22 nt, Human
ccaagcucccaggcauucccca

SEQ ID NO: 1217410 - RNA, 16 nt, Human
ccaagcucccaggcau

SEQ ID NO: 1217411 - RNA, 15 nt, Human
ccaagcucccaggca

SEQ ID NO: 1217412 - RNA, 22 nt, Human
ccaaggggaauguuugccucug

SEQ ID NO: 1217413 - RNA, 19 nt, Human
ccaagggccuggccugagc

SEQ ID NO: 1217414 - RNA, 18 nt, Human
ccaagggccuggccugag

SEQ ID NO: 1217415 - RNA, 16 nt, Human
ccaagggccuggccug

SEQ ID NO: 1217416 - RNA, 15 nt, Human
ccaagggccuggccu

SEQ ID NO: 1217417 - RNA, 21 nt, Human
ccaaggccaaaggaagcacau

SEQ ID NO: 1217418 - RNA, 18 nt, Human
ccaaggccaaaggaagca

SEQ ID NO: 1217419 - RNA, 20 nt, Human
ccaagucaagugaaaaagga

SEQ ID NO: 1217420 - RNA, 23 nt, Human
ccaagguuuggggaagaacgaag

SEQ ID NO: 1217421 - RNA, 18 nt, Human
ccaaggugggaggauugc

SEQ ID NO: 1217422 - RNA, 13 nt, Human
ccaaggugggagg

SEQ ID NO: 1217423 - RNA, 20 nt, Human
ccaaaguacacuguuucaaa

SEQ ID NO: 1217424 - RNA, 18 nt, Human
ccaaaguacacuguuuca

SEQ ID NO: 1217425 - RNA, 15 nt, Human
ccaaaguacacuguu

SEQ ID NO: 1217426 - RNA, 20 nt, Human
ccaacauacucccaucugug

SEQ ID NO: 1217427 - RNA, 19 nt, Human
ccaacauacucccaucugu

SEQ ID NO: 1217428 - RNA, 18 nt, Human
ccaacauacucccaucug

SEQ ID NO: 1217429 - RNA, 17 nt, Human
ccaacauacucccaucu

SEQ ID NO: 1217430 - RNA, 22 nt, Human
ccaacauacucccaucugugaa

SEQ ID NO: 1217431 - RNA, 21 nt, Human
ccaacauacucccaucuguga

SEQ ID NO: 1217432 - RNA, 13 nt, Human
ccaacaucaacau

SEQ ID NO: 1217433 - RNA, 22 nt, Human
ccaaagccuccuccagccgcca

SEQ ID NO: 1217434 - RNA, 17 nt, Human
ccaaagccuccuccagc

SEQ ID NO: 1217435 - RNA, 19 nt, Human
ccaaagccaaagcuaggcc

SEQ ID NO: 1217436 - RNA, 23 nt, Human
ccaaagcagugcaugcugucccu

SEQ ID NO: 1217437 - RNA, 20 nt, Human
ccaaacucaccugccccuca

SEQ ID NO: 1217438 - RNA, 15 nt, Human
ccaaagcuaggccug

SEQ ID NO: 1217439 - RNA, 17 nt, Human
ccaaagcuaggccuggc

SEQ ID NO: 1217440 - RNA, 16 nt, Human
ccaaagcuaggccugg

SEQ ID NO: 1217441 - RNA, 21 nt, Human
ccaaagcuaggccuggccaga

SEQ ID NO: 1217442 - RNA, 23 nt, Human
ccaaaggaagcacaugccucucu

SEQ ID NO: 1217443 - RNA, 15 nt, Human
ccaaaggaagcacau

SEQ ID NO: 1217444 - RNA, 23 nt, Human
ccaagcagagguugggaggccau

SEQ ID NO: 1217445 - RNA, 20 nt, Human
ccaagaagcccaggaaaggc

SEQ ID NO: 1217446 - RNA, 19 nt, Human
ccaagaagcccaggaaagg

SEQ ID NO: 1217447 - RNA, 13 nt, Human
ccaacccucauca

SEQ ID NO: 1217448 - RNA, 12 nt, Human
ccaacccucauc

SEQ ID NO: 1217449 - RNA, 18 nt, Human
cauuguuggccaaagcca

SEQ ID NO: 1217450 - RNA, 17 nt, Human
cauuguuggccaaagcc

SEQ ID NO: 1217451 - RNA, 13 nt, Human
cauugugggaagg

SEQ ID NO: 1217452 - RNA, 15 nt, Human
cacccaagggccugg

SEQ ID NO: 1217453 - RNA, 14 nt, Human
cacccaagggccug

SEQ ID NO: 1217454 - RNA, 13 nt, Human
cauuuccuguguc

SEQ ID NO: 1217455 - RNA, 12 nt, Human
cauuuccugugu

SEQ ID NO: 1217456 - RNA, 21 nt, Human
cauuuaaaagauacaguuacu

SEQ ID NO: 1217457 - RNA, 16 nt, Human
cauuuaaaagauacag

SEQ ID NO: 1217458 - RNA, 15 nt, Human
cauuuaaaagauaca

SEQ ID NO: 1217459 - RNA, 12 nt, Human
cauuuaaaagau

SEQ ID NO: 1217460 - RNA, 16 nt, Human
cacccaagggccuggc

SEQ ID NO: 1217461 - RNA, 23 nt, Human
cauuuuucuuagggaaggauaca

SEQ ID NO: 1217462 - RNA, 22 nt, Human
cauuuguuugaacugauaaaga

SEQ ID NO: 1217463 - RNA, 20 nt, Human
cauuuguuugaacugauaaa

SEQ ID NO: 1217464 - RNA, 13 nt, Human
cauuugcugaaua

SEQ ID NO: 1217465 - RNA, 14 nt, Human
cauuugcuccuuuc

SEQ ID NO: 1217466 - RNA, 13 nt, Human
cauuugcuccuuu

SEQ ID NO: 1217467 - RNA, 20 nt, Human
cauuugagcagggcucagcg

SEQ ID NO: 1217468 - RNA, 18 nt, Human
cauuugagcagggcucag

SEQ ID NO: 1217469 - RNA, 17 nt, Human
cauuugagcagggcuca

SEQ ID NO: 1217470 - RNA, 22 nt, Human
cauuugaaaauuuugauguuuu

SEQ ID NO: 1217471 - RNA, 18 nt, Human
cugaaggccccgcccagg

SEQ ID NO: 1217472 - RNA, 17 nt, Human
cugaaggccccgcccag

SEQ ID NO: 1217473 - RNA, 14 nt, Human
cugaaggccccgcc

SEQ ID NO: 1217474 - RNA, 13 nt, Human
cugaaggccccgc

SEQ ID NO: 1217475 - RNA, 21 nt, Human
cugaaggacauugcggacagc

SEQ ID NO: 1217476 - RNA, 20 nt, Human
cugaaggacauugcggacag

SEQ ID NO: 1217477 - RNA, 19 nt, Human
cugaaggacauugcggaca

SEQ ID NO: 1217478 - RNA, 16 nt, Human
cugaaaauguaugugu

SEQ ID NO: 1217479 - RNA, 20 nt, Human
cugacccaugcugcccugug

SEQ ID NO: 1217480 - RNA, 19 nt, Human
cugacccaugcugcccugu

SEQ ID NO: 1217481 - RNA, 18 nt, Human
cugacccaugcugcccug

SEQ ID NO: 1217482 - RNA, 15 nt, Human
cugacagacacaggc

SEQ ID NO: 1217483 - RNA, 14 nt, Human
cugacagacacagg

SEQ ID NO: 1217484 - RNA, 12 nt, Human
cugacagacaca

SEQ ID NO: 1217485 - RNA, 20 nt, Human
cuccgcuuucuacccagcga

SEQ ID NO: 1217486 - RNA, 15 nt, Human
cucucacuccuugaa

SEQ ID NO: 1217487 - RNA, 19 nt, Human
cucucagauuguaccauug

SEQ ID NO: 1217488 - RNA, 14 nt, Human
cucucacuccuuga

SEQ ID NO: 1217489 - RNA, 12 nt, Human
cucucacuccuu

SEQ ID NO: 1217490 - RNA, 15 nt, Human
cucugaaggacauug

SEQ ID NO: 1217491 - RNA, 12 nt, Human
cucuccuccaga

SEQ ID NO: 1217492 - RNA, 22 nt, Human
cucugaaggacauugcggacag

SEQ ID NO: 1217493 - RNA, 23 nt, Human
cucugcagcaauaaagcagcguu

SEQ ID NO: 1217494 - RNA, 19 nt, Human
cucugcagcaauaaagcag

SEQ ID NO: 1217495 - RNA, 18 nt, Human
cucugcagcaauaaagca

SEQ ID NO: 1217496 - RNA, 14 nt, Human
cucugcacuccccu

SEQ ID NO: 1217497 - RNA, 21 nt, Human
cucuguacagagcccacgccc

SEQ ID NO: 1217498 - RNA, 13 nt, Human
cucuguacagagc

SEQ ID NO: 1217499 - RNA, 17 nt, Human
cucuguacagagcccac

SEQ ID NO: 1217500 - RNA, 20 nt, Human
cucugcugacagacacaggc

SEQ ID NO: 1217501 - RNA, 19 nt, Human
cucugcugacagacacagg

SEQ ID NO: 1217502 - RNA, 18 nt, Human
cucugcugacagacacag

SEQ ID NO: 1217503 - RNA, 17 nt, Human
cucugcugacagacaca

SEQ ID NO: 1217504 - RNA, 18 nt, Human
cucugguccauagagagc

SEQ ID NO: 1217505 - RNA, 16 nt, Human
cucugguccauagaga

SEQ ID NO: 1217506 - RNA, 19 nt, Human
cucugguccauagagagca

SEQ ID NO: 1217507 - RNA, 13 nt, Human
cucagugccacua

SEQ ID NO: 1217508 - RNA, 20 nt, Human
cucagucuggcccuuccuuu

SEQ ID NO: 1217509 - RNA, 18 nt, Human
cucagucuggcccuuccu

SEQ ID NO: 1217510 - RNA, 17 nt, Human
cucagucuggcccuucc

SEQ ID NO: 1217511 - RNA, 19 nt, Human
cucauguucuuaauucuua

SEQ ID NO: 1217512 - RNA, 18 nt, Human
cucauguucuuaauucuu

SEQ ID NO: 1217513 - RNA, 14 nt, Human
cucauguucuuaau

SEQ ID NO: 1217514 - RNA, 20 nt, Human
cucaggccugggggcugggc

SEQ ID NO: 1217515 - RNA, 14 nt, Human
cucaggccuggggg

SEQ ID NO: 1217516 - RNA, 21 nt, Human
cucaggccugggggcugggca

SEQ ID NO: 1217517 - RNA, 22 nt, Human
cucaggccugggggcugggcag

SEQ ID NO: 1217518 - RNA, 22 nt, Human
cucaggccagcugcuugggcuu

SEQ ID NO: 1217519 - RNA, 21 nt, Human
cucaggccagcugcuugggcu

SEQ ID NO: 1217520 - RNA, 15 nt, Human
cucaggccagcugcu

SEQ ID NO: 1217521 - RNA, 14 nt, Human
cucaggccagcugc

SEQ ID NO: 1217522 - RNA, 13 nt, Human
cucaggccagcug

SEQ ID NO: 1217523 - RNA, 13 nt, Human
cucagcggggaca

SEQ ID NO: 1217524 - RNA, 13 nt, Human
cucagccucccga

SEQ ID NO: 1217525 - RNA, 22 nt, Human
cucagccucccaaagugcuggg

SEQ ID NO: 1217526 - RNA, 16 nt, Human
cucagccucccaaagu

SEQ ID NO: 1217527 - RNA, 14 nt, Human
cucagccucccaaa

SEQ ID NO: 1217528 - RNA, 21 nt, Human
cucagccucccaaagugcugg

SEQ ID NO: 1217529 - RNA, 13 nt, Human
cucagccucccaa

SEQ ID NO: 1217530 - RNA, 13 nt, Human
cucccaccucagc

SEQ ID NO: 1217531 - RNA, 12 nt, Human
cucccaccucag

SEQ ID NO: 1217532 - RNA, 19 nt, Human
cuccgcuuucuacccagcg

SEQ ID NO: 1217533 - RNA, 11 nt, Human
cuccaggugca

SEQ ID NO: 1217534 - RNA, 19 nt, Human
cuccagacacauguccaag

SEQ ID NO: 1217535 - RNA, 17 nt, Human
cuccagacacaugucca

SEQ ID NO: 1217536 - RNA, 21 nt, Human
cuccagaauuucccaaagcag

SEQ ID NO: 1217537 - RNA, 18 nt, Human
cuccagaauuucccaaag

SEQ ID NO: 1217538 - RNA, 15 nt, Human
cuccagaauuuccca

SEQ ID NO: 1217539 - RNA, 22 nt, Human
cuccacuuucuagccagaggag

SEQ ID NO: 1217540 - RNA, 21 nt, Human
cuccaagaccuucuccuucac

SEQ ID NO: 1217541 - RNA, 18 nt, Human
cuccaagaccuucuccuu

SEQ ID NO: 1217542 - RNA, 17 nt, Human
cuccaagaccuucuccu

SEQ ID NO: 1217543 - RNA, 16 nt, Human
cuccaagaccuucucc

SEQ ID NO: 1217544 - RNA, 15 nt, Human
cuaacuucaccauau

SEQ ID NO: 1217545 - RNA, 16 nt, Human
cuaacuucaccauauu

SEQ ID NO: 1217546 - RNA, 19 nt, Human
cuacaguugaaaaacagcu

SEQ ID NO: 1217547 - RNA, 13 nt, Human
cuacaguugaaaa

SEQ ID NO: 1217548 - RNA, 18 nt, Human
cuacaguccucccaucuc

SEQ ID NO: 1217549 - RNA, 17 nt, Human
cuacaguccucccaucu

SEQ ID NO: 1217550 - RNA, 16 nt, Human
cuacaguccucccauc

SEQ ID NO: 1217551 - RNA, 15 nt, Human
cuacaguccucccau

SEQ ID NO: 1217552 - RNA, 18 nt, Human
cuacauacaauuccaaac

SEQ ID NO: 1217553 - RNA, 22 nt, Human
cuaagugauccucccaccucag

SEQ ID NO: 1217554 - RNA, 20 nt, Human
cuaagugauccucccaccuc

SEQ ID NO: 1217555 - RNA, 18 nt, Human
cuaagugaggaugaaaaa

SEQ ID NO: 1217556 - RNA, 17 nt, Human
cuagcauggcugccaau

SEQ ID NO: 1217557 - RNA, 23 nt, Human
cuagcagcagggagggcuucugc

SEQ ID NO: 1217558 - RNA, 22 nt, Human
cuagcagcagggagggcuucug

SEQ ID NO: 1217559 - RNA, 19 nt, Human
cuagaaauuccccacccug

SEQ ID NO: 1217560 - RNA, 14 nt, Human
cuaccugaggggcc

SEQ ID NO: 1217561 - RNA, 11 nt, Human
cuaccugaggg

SEQ ID NO: 1217562 - RNA, 15 nt, Human
cuaccugaggggccu

SEQ ID NO: 1217563 - RNA, 20 nt, Human
cuaguuccaccaucaagcca

SEQ ID NO: 1217564 - RNA, 18 nt, Human
cuaguuccaccaucaagc

SEQ ID NO: 1217565 - RNA, 21 nt, Human
cuagggaaaaaccagcgugug

SEQ ID NO: 1217566 - RNA, 19 nt, Human
cuagggaaaaaccagcgug

SEQ ID NO: 1217567 - RNA, 19 nt, Human
cuagccugugccucuggga

SEQ ID NO: 1217568 - RNA, 22 nt, Human
cuaguuguuugauucagacagc

SEQ ID NO: 1217569 - RNA, 22 nt, Human
cuaguuccaccaucaagccacc

SEQ ID NO: 1217570 - RNA, 18 nt, Human
cggcucacugcagccuca

SEQ ID NO: 1217571 - RNA, 19 nt, Human
cggcucacugcagccucaa

SEQ ID NO: 1217572 - RNA, 14 nt, Human
cggagucccaccuu

SEQ ID NO: 1217573 - RNA, 16 nt, Human
cgaguagcugggacua

SEQ ID NO: 1217574 - RNA, 15 nt, Human
cgaguagcugggacu

SEQ ID NO: 1217575 - RNA, 14 nt, Human
cgaguagcugggac

SEQ ID NO: 1217576 - RNA, 18 nt, Human
cgaguuacagacaaagcg

SEQ ID NO: 1217577 - RNA, 17 nt, Human
cgaguuacagacaaagc

SEQ ID NO: 1217578 - RNA, 14 nt, Human
cgccuacaggagug

SEQ ID NO: 1217579 - RNA, 16 nt, Human
cgccaaggcuggggga

SEQ ID NO: 1217580 - RNA, 13 nt, Human
cgccaaggcuggg

SEQ ID NO: 1217581 - RNA, 23 nt, Human
cgccaaggcugggggaagaagcu

SEQ ID NO: 1217582 - RNA, 12 nt, Human
cgccaaggcugg

SEQ ID NO: 1217583 - RNA, 22 nt, Human
ccuucuggaauaaggagaauga

SEQ ID NO: 1217584 - RNA, 23 nt, Human
ccuucugacccaugcugcccugu

SEQ ID NO: 1217585 - RNA, 22 nt, Human
ccuucugacccaugcugcccug

SEQ ID NO: 1217586 - RNA, 21 nt, Human
ccuucugacccaugcugcccu

SEQ ID NO: 1217587 - RNA, 20 nt, Human
ccuucugacccaugcugccc

SEQ ID NO: 1217588 - RNA, 17 nt, Human
ccuucugacccaugcug

SEQ ID NO: 1217589 - RNA, 16 nt, Human
ccuucugacccaugcu

SEQ ID NO: 1217590 - RNA, 12 nt, Human
ccuucugaccca

SEQ ID NO: 1217591 - RNA, 20 nt, Human
ccuggccugagcugggauga

SEQ ID NO: 1217592 - RNA, 15 nt, Human
ccuggccugagcugg

SEQ ID NO: 1217593 - RNA, 14 nt, Human
ccuggccugagcug

SEQ ID NO: 1217594 - RNA, 20 nt, Human
ccuugccgucuaccugaggg

SEQ ID NO: 1217595 - RNA, 20 nt, Human
ccuuuagcgcccaguugggu

SEQ ID NO: 1217596 - RNA, 14 nt, Human
ccuuuagcgcccag

SEQ ID NO: 1217597 - RNA, 12 nt, Human
ccuuuuuuauac

SEQ ID NO: 1217598 - RNA, 18 nt, Human
ccuuuuuuauacauaaac

SEQ ID NO: 1217599 - RNA, 17 nt, Human
ccuuuuuuauacauaaa

SEQ ID NO: 1217600 - RNA, 19 nt, Human
ccuuuuuuauacauaaaca

SEQ ID NO: 1217601 - RNA, 23 nt, Human
cgaccagacaccuugacagggca

SEQ ID NO: 1217602 - RNA, 20 nt, Human
ccagagggccugcaagggag

SEQ ID NO: 1217603 - RNA, 19 nt, Human
ccagagggccugcaaggga

SEQ ID NO: 1217604 - RNA, 18 nt, Human
ccagagggccugcaaggg

SEQ ID NO: 1217605 - RNA, 17 nt, Human
ccagagggccugcaagg

SEQ ID NO: 1217606 - RNA, 16 nt, Human
ccaccuuggcucaagu

SEQ ID NO: 1217607 - RNA, 17 nt, Human
ccagaugcaccagcccu

SEQ ID NO: 1217608 - RNA, 18 nt, Human
ccagaugcaccagcccuu

SEQ ID NO: 1217609 - RNA, 23 nt, Human
ccagaugcaccagcccuuagcag

SEQ ID NO: 1217610 - RNA, 16 nt, Human
ccagcuuaucucaggg

SEQ ID NO: 1217611 - RNA, 19 nt, Human
ccagcuuaaaggggcuaga

SEQ ID NO: 1217612 - RNA, 17 nt, Human
ccagcuguucagcuggu

SEQ ID NO: 1217613 - RNA, 22 nt, Human
ccagcucaccagccccagugcc

SEQ ID NO: 1217614 - RNA, 16 nt, Human
ccagcucaccagcccc

SEQ ID NO: 1217615 - RNA, 15 nt, Human
ccagcucaccagccc

SEQ ID NO: 1217616 - RNA, 12 nt, Human
ccagccccugga

SEQ ID NO: 1217617 - RNA, 11 nt, Human
ccagccccugg

SEQ ID NO: 1217618 - RNA, 17 nt, Human
ccaggaaaggcuccagg

SEQ ID NO: 1217619 - RNA, 16 nt, Human
ccaggaaaggcuccag

SEQ ID NO: 1217620 - RNA, 15 nt, Human
ccaggaaaggcucca

SEQ ID NO: 1217621 - RNA, 14 nt, Human
ccaggaaaggcucc

SEQ ID NO: 1217622 - RNA, 12 nt, Human
ccaggaagccag

SEQ ID NO: 1217623 - RNA, 13 nt, Human
ccaggaagccagc

SEQ ID NO: 1217624 - RNA, 14 nt, Human
ccaggaagccagca

SEQ ID NO: 1217625 - RNA, 15 nt, Human
ccagcaggcucucag

SEQ ID NO: 1217626 - RNA, 13 nt, Human
ccagcaggcucuc

SEQ ID NO: 1217627 - RNA, 23 nt, Human
ccaugagccucagcauccuggca

SEQ ID NO: 1217628 - RNA, 21 nt, Human
ccaugagccucagcauccugg

SEQ ID NO: 1217629 - RNA, 20 nt, Human
ccauggucggaaaacaugcu

SEQ ID NO: 1217630 - RNA, 20 nt, Human
ccaucccugaaggccccgcc

SEQ ID NO: 1217631 - RNA, 17 nt, Human
ccaucccugaaggcccc

SEQ ID NO: 1217632 - RNA, 15 nt, Human
ccaucccugaaggcc

SEQ ID NO: 1217633 - RNA, 14 nt, Human
ccaucccugaaggc

SEQ ID NO: 1217634 - RNA, 15 nt, Human
ccaucccagccccaa

SEQ ID NO: 1217635 - RNA, 14 nt, Human
ccaucccagcccca

SEQ ID NO: 1217636 - RNA, 23 nt, Human
ccaguuggucccccuuccaugga

SEQ ID NO: 1217637 - RNA, 23 nt, Human
ccaguuggguggaugccuggugg

SEQ ID NO: 1217638 - RNA, 20 nt, Human
ccaguuggguggaugccugg

SEQ ID NO: 1217639 - RNA, 19 nt, Human
ccaguuggguggaugccug

SEQ ID NO: 1217640 - RNA, 17 nt, Human
ccaguuggguggaugcc

SEQ ID NO: 1217641 - RNA, 19 nt, Human
ccaggggugggacacccug

SEQ ID NO: 1217642 - RNA, 21 nt, Human
ccaggggaaaaucagccugcu

SEQ ID NO: 1217643 - RNA, 17 nt, Human
ccaggggugggacaccc

SEQ ID NO: 1217644 - RNA, 14 nt, Human
ccaggggugggaca

SEQ ID NO: 1217645 - RNA, 13 nt, Human
ccaggggugggac

SEQ ID NO: 1217646 - RNA, 20 nt, Human
ccaggggaaaaucagccugc

SEQ ID NO: 1217647 - RNA, 19 nt, Human
ccaggggaaaaucagccug

SEQ ID NO: 1217648 - RNA, 19 nt, Human
ccaggcuggcgugcagugg

SEQ ID NO: 1217649 - RNA, 18 nt, Human
ccaggcuggcgugcagug

SEQ ID NO: 1217650 - RNA, 17 nt, Human
ccaggcuggcgugcagu

SEQ ID NO: 1217651 - RNA, 21 nt, Human
ccaggcuccuuuagcgcccag

SEQ ID NO: 1217652 - RNA, 20 nt, Human
ccaggcuccuuuagcgccca

SEQ ID NO: 1217653 - RNA, 23 nt, Human
ccccgaggccuucucugaaggac

SEQ ID NO: 1217654 - RNA, 13 nt, Human
ccccggccaccug

SEQ ID NO: 1217655 - RNA, 23 nt, Human
ccccaaaacucuccucugcugcu

SEQ ID NO: 1217656 - RNA, 22 nt, Human
ccccaaaacucuccucugcugc

SEQ ID NO: 1217657 - RNA, 22 nt, Human
cccccaaauggaaaugggcaga

SEQ ID NO: 1217658 - RNA, 22 nt, Human
ccccagcaagugagagcugggu

SEQ ID NO: 1217659 - RNA, 17 nt, Human
cccggccaccugcggug

SEQ ID NO: 1217660 - RNA, 18 nt, Human
cccuauuagagaagagau

SEQ ID NO: 1217661 - RNA, 16 nt, Human
cccggcuccaggcucc

SEQ ID NO: 1217662 - RNA, 15 nt, Human
cccggcuccaggcuc

SEQ ID NO: 1217663 - RNA, 14 nt, Human
cccggcuccaggcu

SEQ ID NO: 1217664 - RNA, 13 nt, Human
cccggcuccaggc

SEQ ID NO: 1217665 - RNA, 12 nt, Human
cccggcuccagg

SEQ ID NO: 1217666 - RNA, 14 nt, Human
cccggccaccugcg

SEQ ID NO: 1217667 - RNA, 13 nt, Human
cccggccaccugc

SEQ ID NO: 1217668 - RNA, 16 nt, Human
cccgaauagcugggac

SEQ ID NO: 1217669 - RNA, 14 nt, Human
cccgaauagcuggg

SEQ ID NO: 1217670 - RNA, 23 nt, Human
cccagcucugguccauagagagc

SEQ ID NO: 1217671 - RNA, 13 nt, Human
cccauccucugua

SEQ ID NO: 1217672 - RNA, 17 nt, Human
cccaggcuggcgugcag

SEQ ID NO: 1217673 - RNA, 13 nt, Human
cccaggcuggcgu

SEQ ID NO: 1217674 - RNA, 15 nt, Human
cccaggaaaggcucc

SEQ ID NO: 1217675 - RNA, 12 nt, Human
cccacuucugcc

SEQ ID NO: 1217676 - RNA, 18 nt, Human
cccacccugaaagcccug

SEQ ID NO: 1217677 - RNA, 15 nt, Human
cccacccccacccaa

SEQ ID NO: 1217678 - RNA, 17 nt, Human
cccacccccacccaagg

SEQ ID NO: 1217679 - RNA, 22 nt, Human
cccacccaagggccuggccuga

SEQ ID NO: 1217680 - RNA, 21 nt, Human
cccacccaagggccuggccug

SEQ ID NO: 1217681 - RNA, 20 nt, Human
cccacccaagggccuggccu

SEQ ID NO: 1217682 - RNA, 22 nt, Human
cccacugcuuuuggucugugug

SEQ ID NO: 1217683 - RNA, 19 nt, Human
cccacugcuuuuggucugu

SEQ ID NO: 1217684 - RNA, 13 nt, Human
cccacugcucugg

SEQ ID NO: 1217685 - RNA, 12 nt, Human
cccacugcucug

SEQ ID NO: 1217686 - RNA, 12 nt, Human
cccacucccugc

SEQ ID NO: 1217687 - RNA, 19 nt, Human
ccucuugagccuugaacuu

SEQ ID NO: 1217688 - RNA, 13 nt, Human
ccucuugagccuu

SEQ ID NO: 1217689 - RNA, 22 nt, Human
ccugcacuugcagacucuacag

SEQ ID NO: 1217690 - RNA, 14 nt, Human
ccucucucaggcca

SEQ ID NO: 1217691 - RNA, 12 nt, Human
ccucucucaggc

SEQ ID NO: 1217692 - RNA, 17 nt, Human
ccucucucacuccuuga

SEQ ID NO: 1217693 - RNA, 15 nt, Human
ccucucucacuccuu

SEQ ID NO: 1217694 - RNA, 14 nt, Human
ccucucucacuccu

SEQ ID NO: 1217695 - RNA, 13 nt, Human
ccucucucacucc

SEQ ID NO: 1217696 - RNA, 18 nt, Human
ccucugcugcuggcuggu

SEQ ID NO: 1217697 - RNA, 17 nt, Human
ccucugcugcuggcugg

SEQ ID NO: 1217698 - RNA, 16 nt, Human
ccucugcugcuggcug

SEQ ID NO: 1217699 - RNA, 15 nt, Human
ccucugcugcuggcu

SEQ ID NO: 1217700 - RNA, 14 nt, Human
ccucugcugcuggc

SEQ ID NO: 1217701 - RNA, 13 nt, Human
ccucugcugcugg

SEQ ID NO: 1217702 - RNA, 22 nt, Human
ccucugccugaagucacacagu

SEQ ID NO: 1217703 - RNA, 13 nt, Human
ccuggccugagcu

SEQ ID NO: 1217704 - RNA, 16 nt, Human
ccuggccucugcacuc

SEQ ID NO: 1217705 - RNA, 15 nt, Human
ccuggccucugcacu

SEQ ID NO: 1217706 - RNA, 14 nt, Human
ccuggccucugcac

SEQ ID NO: 1217707 - RNA, 12 nt, Human
ccuggccucugc

SEQ ID NO: 1217708 - RNA, 21 nt, Human
ccugcuggguguggcgcagca

SEQ ID NO: 1217709 - RNA, 20 nt, Human
ccugcuggguguggcgcagc

SEQ ID NO: 1217710 - RNA, 14 nt, Human
ccugcugggugugg

SEQ ID NO: 1217711 - RNA, 12 nt, Human
ccugcugggugu

SEQ ID NO: 1217712 - RNA, 18 nt, Human
ccugcccaggccccugcc

SEQ ID NO: 1217713 - RNA, 16 nt, Human
ccugcccaggccccug

SEQ ID NO: 1217714 - RNA, 15 nt, Human
ccugcccaggccccu

SEQ ID NO: 1217715 - RNA, 14 nt, Human
ccugcccaggcccc

SEQ ID NO: 1217716 - RNA, 17 nt, Human
ccuggaguucugguucc

SEQ ID NO: 1217717 - RNA, 16 nt, Human
ccuggaguucugguuc

SEQ ID NO: 1217718 - RNA, 15 nt, Human
ccuggaguucugguu

SEQ ID NO: 1217719 - RNA, 19 nt, Human
ccuggaugcagccucacag

SEQ ID NO: 1217720 - RNA, 17 nt, Human
ccuggaugcagccucac

SEQ ID NO: 1217721 - RNA, 14 nt, Human
ccuggaugcagccu

SEQ ID NO: 1217722 - RNA, 13 nt, Human
ccuggaugcagcc

SEQ ID NO: 1217723 - RNA, 18 nt, Human
ccuggcacccggccccug

SEQ ID NO: 1217724 - RNA, 23 nt, Human
cccuucugacccaugcugcccug

SEQ ID NO: 1217725 - RNA, 22 nt, Human
cccuucugacccaugcugcccu

SEQ ID NO: 1217726 - RNA, 21 nt, Human
cccuucugacccaugcugccc

SEQ ID NO: 1217727 - RNA, 18 nt, Human
cccuucgcuccugugucu

SEQ ID NO: 1217728 - RNA, 16 nt, Human
cccuucgcuccugugu

SEQ ID NO: 1217729 - RNA, 16 nt, Human
cccuucuaccuuccug

SEQ ID NO: 1217730 - RNA, 17 nt, Human
ccgccaaggcuggggga

SEQ ID NO: 1217731 - RNA, 16 nt, Human
ccgacccuugccgucu

SEQ ID NO: 1217732 - RNA, 20 nt, Human
ccgaauagcugggacuacag

SEQ ID NO: 1217733 - RNA, 20 nt, Human
ccgcccaggcuuagucacug

SEQ ID NO: 1217734 - RNA, 16 nt, Human
ccgccaugcuccuggc

SEQ ID NO: 1217735 - RNA, 16 nt, Human
cccuggcagccccugu

SEQ ID NO: 1217736 - RNA, 14 nt, Human
cccuggcagccccu

SEQ ID NO: 1217737 - RNA, 13 nt, Human
cccuggcagcccc

SEQ ID NO: 1217738 - RNA, 12 nt, Human
cccuggcagccc

SEQ ID NO: 1217739 - RNA, 21 nt, Human
cccugcccugugggcccccaa

SEQ ID NO: 1217740 - RNA, 20 nt, Human
cccugcccugugggccccca

SEQ ID NO: 1217741 - RNA, 16 nt, Human
cccugcccugugggcc

SEQ ID NO: 1217742 - RNA, 15 nt, Human
cccugcccugugggc

SEQ ID NO: 1217743 - RNA, 14 nt, Human
cccugcccuguggg

SEQ ID NO: 1217744 - RNA, 13 nt, Human
cccugcccugugg

SEQ ID NO: 1217745 - RNA, 12 nt, Human
cccugcccugug

SEQ ID NO: 1217746 - RNA, 17 nt, Human
ccuagcacuuugggagg

SEQ ID NO: 1217747 - RNA, 23 nt, Human
ccuaggcauuugcugaauacaga

SEQ ID NO: 1217748 - RNA, 12 nt, Human
ccggcuccaggc

SEQ ID NO: 1217749 - RNA, 22 nt, Human
ccucagccucccaaagugcugg

SEQ ID NO: 1217750 - RNA, 11 nt, Human
ccucagccucc

SEQ ID NO: 1217751 - RNA, 19 nt, Human
ccucaacucuccuccagag

SEQ ID NO: 1217752 - RNA, 15 nt, Human
ccucaagagaaggca

SEQ ID NO: 1217753 - RNA, 15 nt, Human
ccucaacucuccucc

SEQ ID NO: 1217754 - RNA, 22 nt, Human
ccucccaaggggcccaaauucu

SEQ ID NO: 1217755 - RNA, 19 nt, Human
ccucauguucuuaauucuu

SEQ ID NO: 1217756 - RNA, 18 nt, Human
ccucauuagcauuuugcu

SEQ ID NO: 1217757 - RNA, 13 nt, Human
ccucauguucuua

SEQ ID NO: 1217758 - RNA, 22 nt, Human
ccucagccucccgaauagcugg

SEQ ID NO: 1217759 - RNA, 23 nt, Human
ccucagccucccaaagugcuggg

SEQ ID NO: 1217760 - RNA, 11 nt, Human
auucuuuccug

SEQ ID NO: 1217761 - RNA, 14 nt, Human
auucuucugcuuca

SEQ ID NO: 1217762 - RNA, 12 nt, Human
auucuucugcuu

SEQ ID NO: 1217763 - RNA, 11 nt, Human
auucuucugcu

SEQ ID NO: 1217764 - RNA, 13 nt, Human
auucuuuccugag

SEQ ID NO: 1217765 - RNA, 22 nt, Human
auugcuacuguccuacccaccc

SEQ ID NO: 1217766 - RNA, 20 nt, Human
auugcuacuguccuacccac

SEQ ID NO: 1217767 - RNA, 15 nt, Human
auugcuacuguccua

SEQ ID NO: 1217768 - RNA, 17 nt, Human
auugauaugcuuauaca

SEQ ID NO: 1217769 - RNA, 21 nt, Human
auugauaagaaccuuuugagu

SEQ ID NO: 1217770 - RNA, 16 nt, Human
auuguuagucucuuga

SEQ ID NO: 1217771 - RNA, 23 nt, Human
auugugucucuugguccugcugc

SEQ ID NO: 1217772 - RNA, 21 nt, Human
auugugucucuugguccugcu

SEQ ID NO: 1217773 - RNA, 18 nt, Human
auugcuugagcucaggag

SEQ ID NO: 1217774 - RNA, 14 nt, Human
auugcuugagcuca

SEQ ID NO: 1217775 - RNA, 12 nt, Human
auugcugcuuga

SEQ ID NO: 1217776 - RNA, 23 nt, Human
auugcugauggugcaaugaccuu

SEQ ID NO: 1217777 - RNA, 19 nt, Human
auugcugauggugcaauga

SEQ ID NO: 1217778 - RNA, 18 nt, Human
auugcugauggugcaaug

SEQ ID NO: 1217779 - RNA, 16 nt, Human
auugcugauggugcaa

SEQ ID NO: 1217780 - RNA, 15 nt, Human
auugcugauggugca

SEQ ID NO: 1217781 - RNA, 17 nt, Human
auuacaggaaguacugg

SEQ ID NO: 1217782 - RNA, 22 nt, Human
auuacaagcgugagccacugca

SEQ ID NO: 1217783 - RNA, 18 nt, Human
auguuugccucugccucu

SEQ ID NO: 1217784 - RNA, 23 nt, Human
auuaugcaugaaguaauaugcac

SEQ ID NO: 1217785 - RNA, 21 nt, Human
auuaggugugacugaauuucu

SEQ ID NO: 1217786 - RNA, 18 nt, Human
auuaggugugacugaauu

SEQ ID NO: 1217787 - RNA, 16 nt, Human
auuaggugugacugaa

SEQ ID NO: 1217788 - RNA, 19 nt, Human
auucauaaugacuuaagca

SEQ ID NO: 1217789 - RNA, 15 nt, Human
auucauaaugacuua

SEQ ID NO: 1217790 - RNA, 14 nt, Human
auucauaaugacuu

SEQ ID NO: 1217791 - RNA, 23 nt, Human
auuuguuugaacugauaaagaug

SEQ ID NO: 1217792 - RNA, 22 nt, Human
auuuguuugaacugauaaagau

SEQ ID NO: 1217793 - RNA, 17 nt, Human
auuugugauacaaugcu

SEQ ID NO: 1217794 - RNA, 20 nt, Human
auuugugauacaaugcugug

SEQ ID NO: 1217795 - RNA, 13 nt, Human
auuugcuccuuuc

SEQ ID NO: 1217796 - RNA, 21 nt, Human
caaaccaucauugaaaucuuu

SEQ ID NO: 1217797 - RNA, 18 nt, Human
caaaagaugcuucucacu

SEQ ID NO: 1217798 - RNA, 16 nt, Human
caaaagaugcuucuca

SEQ ID NO: 1217799 - RNA, 20 nt, Human
caaagauauuuugcuuugug

SEQ ID NO: 1217800 - RNA, 20 nt, Human
caacaccucugcacaagcug

SEQ ID NO: 1217801 - RNA, 22 nt, Human
caaauggaaaugggcagagcag

SEQ ID NO: 1217802 - RNA, 21 nt, Human
caaauggaaaugggcagagca

SEQ ID NO: 1217803 - RNA, 20 nt, Human
caaauggaaaugggcagagc

SEQ ID NO: 1217804 - RNA, 22 nt, Human
caacacucacauuuauucugcu

SEQ ID NO: 1217805 - RNA, 13 nt, Human
caaagugcuggga

SEQ ID NO: 1217806 - RNA, 22 nt, Human
caaaguagaagucuuagaugua

SEQ ID NO: 1217807 - RNA, 21 nt, Human
caaaguagaagucuuagaugu

SEQ ID NO: 1217808 - RNA, 14 nt, Human
caaaguagaagucu

SEQ ID NO: 1217809 - RNA, 17 nt, Human
caaagcagugcaugcug

SEQ ID NO: 1217810 - RNA, 15 nt, Human
caaagcagugcaugc

SEQ ID NO: 1217811 - RNA, 23 nt, Human
caaagauauuuugcuuugugauu

SEQ ID NO: 1217812 - RNA, 22 nt, Human
caaagauauuuugcuuugugau

SEQ ID NO: 1217813 - RNA, 14 nt, Human
cacugcagccucaa

SEQ ID NO: 1217814 - RNA, 13 nt, Human
cacugcagccuca

SEQ ID NO: 1217815 - RNA, 16 nt, Human
cacugcauguuuguga

SEQ ID NO: 1217816 - RNA, 12 nt, Human
cacugcagccuc

SEQ ID NO: 1217817 - RNA, 20 nt, Human
cacugcacuccagccugggu

SEQ ID NO: 1217818 - RNA, 19 nt, Human
cacugcacuccagccuggg

SEQ ID NO: 1217819 - RNA, 18 nt, Human
cacugcacuccagccugg

SEQ ID NO: 1217820 - RNA, 16 nt, Human
cacugcacuccagccu

SEQ ID NO: 1217821 - RNA, 15 nt, Human
cacugcacuccagcc

SEQ ID NO: 1217822 - RNA, 18 nt, Human
cacuuacacuuuaugcac

SEQ ID NO: 1217823 - RNA, 16 nt, Human
cacuuacacuuuaugc

SEQ ID NO: 1217824 - RNA, 15 nt, Human
cacuccccugcuggg

SEQ ID NO: 1217825 - RNA, 14 nt, Human
cacuccccugcugg

SEQ ID NO: 1217826 - RNA, 13 nt, Human
cacuccccugcug

SEQ ID NO: 1217827 - RNA, 12 nt, Human
cacuccccugcu

SEQ ID NO: 1217828 - RNA, 16 nt, Human
cacuccagccugggug

SEQ ID NO: 1217829 - RNA, 11 nt, Human
caccccagccc

SEQ ID NO: 1217830 - RNA, 12 nt, Human
caccccagcccc

SEQ ID NO: 1217831 - RNA, 16 nt, Human
caccugccccucaacu

SEQ ID NO: 1217832 - RNA, 15 nt, Human
caccugccccucaac

SEQ ID NO: 1217833 - RNA, 14 nt, Human
caccugccccucaa

SEQ ID NO: 1217834 - RNA, 14 nt, Human
caccucagccuccc

SEQ ID NO: 1217835 - RNA, 13 nt, Human
caccucagccucc

SEQ ID NO: 1217836 - RNA, 17 nt, Human
cacccuggggagaaagu

SEQ ID NO: 1217837 - RNA, 16 nt, Human
cacccuggggagaaag

SEQ ID NO: 1217838 - RNA, 15 nt, Human
cacccuggggagaaa

SEQ ID NO: 1217839 - RNA, 17 nt, Human
cacccugaaagcccuga

SEQ ID NO: 1217840 - RNA, 14 nt, Human
cacccucaggcagg

SEQ ID NO: 1217841 - RNA, 24 nt, Human
caccugccuguugggccaggagcc

SEQ ID NO: 1217842 - RNA, 19 nt, Human
caccugccuguugggccag

SEQ ID NO: 1217843 - RNA, 17 nt, Human
caccugccuguugggcc

SEQ ID NO: 1217844 - RNA, 13 nt, Human
caccuuggcugca

SEQ ID NO: 1217845 - RNA, 15 nt, Human
caccuuggcucaagu

SEQ ID NO: 1217846 - RNA, 14 nt, Human
caccuuggcugcag

SEQ ID NO: 1217847 - RNA, 13 nt, Human
cacagacccugcc

SEQ ID NO: 1217848 - RNA, 11 nt, Human
cacagccucug

SEQ ID NO: 1217849 - RNA, 21 nt, Human
cacagacauacuaaccagcag

SEQ ID NO: 1217850 - RNA, 19 nt, Human
cacagacauacuaaccagc

SEQ ID NO: 1217851 - RNA, 19 nt, Human
cacagaaaauucuucucca

SEQ ID NO: 1217852 - RNA, 23 nt, Human
cacagaaaauggaagacagcucu

SEQ ID NO: 1217853 - RNA, 22 nt, Human
cacagaaaauggaagacagcuc

SEQ ID NO: 1217854 - RNA, 20 nt, Human
cacagaaaauggaagacagc

SEQ ID NO: 1217855 - RNA, 19 nt, Human
cacagaaaauggaagacag

SEQ ID NO: 1217856 - RNA, 18 nt, Human
cacagaaaauggaagaca

SEQ ID NO: 1217857 - RNA, 22 nt, Human
cacacaugagcaucaggccagg

SEQ ID NO: 1217858 - RNA, 21 nt, Human
cacacaugagcaucaggccag

SEQ ID NO: 1217859 - RNA, 20 nt, Human
cacacaugagcaucaggcca

SEQ ID NO: 1217860 - RNA, 15 nt, Human
cacacauacacacac

SEQ ID NO: 1217861 - RNA, 23 nt, Human
cacacagugagucgaggacaggg

SEQ ID NO: 1217862 - RNA, 21 nt, Human
cacacagugagucgaggacag

SEQ ID NO: 1217863 - RNA, 18 nt, Human
cacacagugagucgagga

SEQ ID NO: 1217864 - RNA, 23 nt, Human
cacacaguauuacuucugcuaca

SEQ ID NO: 1217865 - RNA, 20 nt, Human
cacacaguauuacuucugcu

SEQ ID NO: 1217866 - RNA, 21 nt, Human
cacaguauuacuucugcuaca

SEQ ID NO: 1217867 - RNA, 20 nt, Human
cacaguauuacuucugcuac

SEQ ID NO: 1217868 - RNA, 19 nt, Human
cacaggggaaaagaggagu

SEQ ID NO: 1217869 - RNA, 18 nt, Human
cacaggggaaaagaggag

SEQ ID NO: 1217870 - RNA, 17 nt, Human
cacaggggaaaagagga

SEQ ID NO: 1217871 - RNA, 20 nt, Human
cacacagcucuguccuggga

SEQ ID NO: 1217872 - RNA, 17 nt, Human
cacacagcucuguccug

SEQ ID NO: 1217873 - RNA, 23 nt, Human
cacaagcugcacccucaggcagg

SEQ ID NO: 1217874 - RNA, 17 nt, Human
cacaagcugcacccuca

SEQ ID NO: 1217875 - RNA, 23 nt, Human
cacaagcuccaagcucccaggca

SEQ ID NO: 1217876 - RNA, 17 nt, Human
cacaagcuccaagcucc

SEQ ID NO: 1217877 - RNA, 17 nt, Human
cacaagagcccaggccu

SEQ ID NO: 1217878 - RNA, 15 nt, Human
cacaagcuccaagcu

SEQ ID NO: 1217879 - RNA, 14 nt, Human
cacaagcuccaagc

SEQ ID NO: 1217880 - RNA, 16 nt, Human
cacaagagcccaggcc

SEQ ID NO: 1217881 - RNA, 14 nt, Human
cacaagagcccagg

SEQ ID NO: 1217882 - RNA, 13 nt, Human
caauuuauuaugg

SEQ ID NO: 1217883 - RNA, 12 nt, Human
caauggcagccu

SEQ ID NO: 1217884 - RNA, 11 nt, Human
caauggcagcc

SEQ ID NO: 1217885 - RNA, 19 nt, Human
caauaaagcagcguuucua

SEQ ID NO: 1217886 - RNA, 17 nt, Human
caagucaagugaaaaag

SEQ ID NO: 1217887 - RNA, 13 nt, Human
caagucaagugaa

SEQ ID NO: 1217888 - RNA, 16 nt, Human
caaggccaaaggaagc

SEQ ID NO: 1217889 - RNA, 15 nt, Human
caaggccaaaggaag

SEQ ID NO: 1217890 - RNA, 18 nt, Human
caaggccaaaggaagcac

SEQ ID NO: 1217891 - RNA, 17 nt, Human
caaggccaaaggaagca

SEQ ID NO: 1217892 - RNA, 20 nt, Human
caagcugcacccucaggcag

SEQ ID NO: 1217893 - RNA, 18 nt, Human
caagcugcacccucaggc

SEQ ID NO: 1217894 - RNA, 14 nt, Human
caagcugcacccuc

SEQ ID NO: 1217895 - RNA, 15 nt, Human
caagcucugcuccuc

SEQ ID NO: 1217896 - RNA, 14 nt, Human
caagcucugcuccu

SEQ ID NO: 1217897 - RNA, 17 nt, Human
caagcuccaagcuccca

SEQ ID NO: 1217898 - RNA, 12 nt, Human
caagcuccaagc

SEQ ID NO: 1217899 - RNA, 13 nt, Human
caagcucugcucc

SEQ ID NO: 1217900 - RNA, 17 nt, Human
cagucaccccggccacc

SEQ ID NO: 1217901 - RNA, 16 nt, Human
cagucaccccggccac

SEQ ID NO: 1217902 - RNA, 20 nt, Human
caguaaaugggggugcauuu

SEQ ID NO: 1217903 - RNA, 19 nt, Human
caguaaaugggggugcauu

SEQ ID NO: 1217904 - RNA, 18 nt, Human
caguaaaugggggugcau

SEQ ID NO: 1217905 - RNA, 14 nt, Human
caggugcugccauc

SEQ ID NO: 1217906 - RNA, 13 nt, Human
caggugcugccau

SEQ ID NO: 1217907 - RNA, 21 nt, Human
caggguuggccccugcccggc

SEQ ID NO: 1217908 - RNA, 17 nt, Human
caggguuggccccugcc

SEQ ID NO: 1217909 - RNA, 23 nt, Human
cagguuuuuggucugacccacug

SEQ ID NO: 1217910 - RNA, 16 nt, Human
caggguuggccccugc

SEQ ID NO: 1217911 - RNA, 15 nt, Human
caggguuggccccug

SEQ ID NO: 1217912 - RNA, 21 nt, Human
cagggucucuaccauccccug

SEQ ID NO: 1217913 - RNA, 23 nt, Human
cagggucucacucugucgcccag

SEQ ID NO: 1217914 - RNA, 20 nt, Human
caggcugggagagccuucca

SEQ ID NO: 1217915 - RNA, 19 nt, Human
caggcugggagagccuucc

SEQ ID NO: 1217916 - RNA, 18 nt, Human
caggcugggagagccuuc

SEQ ID NO: 1217917 - RNA, 16 nt, Human
caggcugggagagccu

SEQ ID NO: 1217918 - RNA, 19 nt, Human
caggcuggcgugcaguggu

SEQ ID NO: 1217919 - RNA, 18 nt, Human
caggcuggcgugcagugg

SEQ ID NO: 1217920 - RNA, 17 nt, Human
caggcuggcgugcagug

SEQ ID NO: 1217921 - RNA, 23 nt, Human
caggccugggggcugggcagagg

SEQ ID NO: 1217922 - RNA, 22 nt, Human
caggccugggggcugggcagag

SEQ ID NO: 1217923 - RNA, 20 nt, Human
caggccugggggcugggcag

SEQ ID NO: 1217924 - RNA, 15 nt, Human
caggcugggcuucag

SEQ ID NO: 1217925 - RNA, 14 nt, Human
caggcugggcuuca

SEQ ID NO: 1217926 - RNA, 15 nt, Human
cagggcucagcgggg

SEQ ID NO: 1217927 - RNA, 12 nt, Human
cagggcucagcg

SEQ ID NO: 1217928 - RNA, 20 nt, Human
cagggcucagcggggacagc

SEQ ID NO: 1217929 - RNA, 16 nt, Human
cagggagggcuucugc

SEQ ID NO: 1217930 - RNA, 23 nt, Human
caggaaaggcuccaggagcagcc

SEQ ID NO: 1217931 - RNA, 22 nt, Human
caggaaaggcuccaggagcagc

SEQ ID NO: 1217932 - RNA, 21 nt, Human
caggaaaggcuccaggagcag

SEQ ID NO: 1217933 - RNA, 20 nt, Human
caggaaaagcugcugacagu

SEQ ID NO: 1217934 - RNA, 19 nt, Human
caggaaaagcugcugacag

SEQ ID NO: 1217935 - RNA, 19 nt, Human
cagcuguucagcugguuga

SEQ ID NO: 1217936 - RNA, 16 nt, Human
cagcuguucagcuggu

SEQ ID NO: 1217937 - RNA, 15 nt, Human
cagcuguucagcugg

SEQ ID NO: 1217938 - RNA, 13 nt, Human
caggaccucaggu

SEQ ID NO: 1217939 - RNA, 21 nt, Human
caggaccagggauuuccauga

SEQ ID NO: 1217940 - RNA, 13 nt, Human
caggaccagggau

SEQ ID NO: 1217941 - RNA, 16 nt, Human
caggccaggcccucug

SEQ ID NO: 1217942 - RNA, 15 nt, Human
caggccaggcccucu

SEQ ID NO: 1217943 - RNA, 14 nt, Human
caggccaggcccuc

SEQ ID NO: 1217944 - RNA, 13 nt, Human
caggccaggcccu

SEQ ID NO: 1217945 - RNA, 17 nt, Human
caggccagcugcuuggg

SEQ ID NO: 1217946 - RNA, 15 nt, Human
caggccagcugcuug

SEQ ID NO: 1217947 - RNA, 13 nt, Human
caggccagcugcu

SEQ ID NO: 1217948 - RNA, 20 nt, Human
caggcaaugcuggcuguugg

SEQ ID NO: 1217949 - RNA, 19 nt, Human
caggcaaugcuggcuguug

SEQ ID NO: 1217950 - RNA, 13 nt, Human
caggaggccagcc

SEQ ID NO: 1217951 - RNA, 12 nt, Human
caggaggccagc

SEQ ID NO: 1217952 - RNA, 14 nt, Human
caggaggccagccu

SEQ ID NO: 1217953 - RNA, 21 nt, Human
caggcaaugcuggcuguuggc

SEQ ID NO: 1217954 - RNA, 23 nt, Human
cagccgccaugcuccuggcccac

SEQ ID NO: 1217955 - RNA, 15 nt, Human
cagcccuuagcaggg

SEQ ID NO: 1217956 - RNA, 13 nt, Human
cagcccuuagcag

SEQ ID NO: 1217957 - RNA, 17 nt, Human
cagccucugaaaaccaa

SEQ ID NO: 1217958 - RNA, 14 nt, Human
cagcggggacagcu

SEQ ID NO: 1217959 - RNA, 19 nt, Human
cagcguuucuaugacacau

SEQ ID NO: 1217960 - RNA, 16 nt, Human
cagcguuucuaugaca

SEQ ID NO: 1217961 - RNA, 14 nt, Human
cagcguuucuauga

SEQ ID NO: 1217962 - RNA, 24 nt, Human
cagccccauucugccugcccaggc

SEQ ID NO: 1217963 - RNA, 23 nt, Human
cagccccauucugccugcccagg

SEQ ID NO: 1217964 - RNA, 22 nt, Human
cagccccauucugccugcccag

SEQ ID NO: 1217965 - RNA, 20 nt, Human
cagccccauucugccugccc

SEQ ID NO: 1217966 - RNA, 19 nt, Human
cagccccauucugccugcc

SEQ ID NO: 1217967 - RNA, 18 nt, Human
cagcauauucaggaagcu

SEQ ID NO: 1217968 - RNA, 17 nt, Human
cagcauauucaggaagc

SEQ ID NO: 1217969 - RNA, 16 nt, Human
cagcauauucaggaag

SEQ ID NO: 1217970 - RNA, 19 nt, Human
cagauuucacucuccuugg

SEQ ID NO: 1217971 - RNA, 18 nt, Human
cagauuucacucuccuug

SEQ ID NO: 1217972 - RNA, 16 nt, Human
cagauuucacucuccu

SEQ ID NO: 1217973 - RNA, 15 nt, Human
cagauuucacucucc

SEQ ID NO: 1217974 - RNA, 22 nt, Human
cagagcuacacaggggaaaaga

SEQ ID NO: 1217975 - RNA, 17 nt, Human
cagagcuacacagggga

SEQ ID NO: 1217976 - RNA, 23 nt, Human
cagagagggugggagugggccca

SEQ ID NO: 1217977 - RNA, 14 nt, Human
cagagccugcaguu

SEQ ID NO: 1217978 - RNA, 22 nt, Human
cagagagggugggagugggccc

SEQ ID NO: 1217979 - RNA, 20 nt, Human
cagagagggugggagugggc

SEQ ID NO: 1217980 - RNA, 16 nt, Human
cagagagggugggagu

SEQ ID NO: 1217981 - RNA, 22 nt, Human
cagagacuccugcaggcagcca

SEQ ID NO: 1217982 - RNA, 21 nt, Human
cagagacuccugcaggcagcc

SEQ ID NO: 1217983 - RNA, 23 nt, Human
cagagacuccugcaggcagccag

SEQ ID NO: 1217984 - RNA, 20 nt, Human
cagagacuccugcaggcagc

SEQ ID NO: 1217985 - RNA, 17 nt, Human
cauaaugcgugcauacc

SEQ ID NO: 1217986 - RNA, 14 nt, Human
cauaaugcgugcau

SEQ ID NO: 1217987 - RNA, 21 nt, Human
caguuuguuaguaugaggcau

SEQ ID NO: 1217988 - RNA, 21 nt, Human
cauauuaccacagacauacua

SEQ ID NO: 1217989 - RNA, 20 nt, Human
cauauuaccacagacauacu

SEQ ID NO: 1217990 - RNA, 17 nt, Human
cauauuaccacagacau

SEQ ID NO: 1217991 - RNA, 22 nt, Human
cauauuaccacagacauacuaa

SEQ ID NO: 1217992 - RNA, 15 nt, Human
cauacaauuccaaac

SEQ ID NO: 1217993 - RNA, 23 nt, Human
cauaaugcgugcauaccacuuuu

SEQ ID NO: 1217994 - RNA, 21 nt, Human
cauaaugcgugcauaccacuu

SEQ ID NO: 1217995 - RNA, 18 nt, Human
cagucaccccggccaccu

SEQ ID NO: 1217996 - RNA, 19 nt, Human
cagucaccccggccaccug

SEQ ID NO: 1217997 - RNA, 17 nt, Human
caucccagccccaauga

SEQ ID NO: 1217998 - RNA, 16 nt, Human
caucccagccccaaug

SEQ ID NO: 1217999 - RNA, 14 nt, Human
caucccagccccaa

SEQ ID NO: 1218000 - RNA, 13 nt, Human
caucccagcccca

SEQ ID NO: 1218001 - RNA, 23 nt, Human
caucaggccaggcccucugccca

SEQ ID NO: 1218002 - RNA, 22 nt, Human
caucaggccaggcccucugccc

SEQ ID NO: 1218003 - RNA, 21 nt, Human
caucaggccaggcccucugcc

SEQ ID NO: 1218004 - RNA, 14 nt, Human
caucaggccaggcc

SEQ ID NO: 1218005 - RNA, 13 nt, Human
caucaggccaggc

SEQ ID NO: 1218006 - RNA, 19 nt, Human
caucagcacgauuucuguu

SEQ ID NO: 1218007 - RNA, 18 nt, Human
caucagcacgauuucugu

SEQ ID NO: 1218008 - RNA, 17 nt, Human
caucagcacgauuucug

SEQ ID NO: 1218009 - RNA, 22 nt, Human
caucuuagguuggcaaaaaggc

SEQ ID NO: 1218010 - RNA, 21 nt, Human
caucuuagguuggcaaaaagg

SEQ ID NO: 1218011 - RNA, 19 nt, Human
caucugugaaaggaaagag

SEQ ID NO: 1218012 - RNA, 18 nt, Human
caucugugaaaggaaaga

SEQ ID NO: 1218013 - RNA, 18 nt, Human
caugacacgaauauugcu

SEQ ID NO: 1218014 - RNA, 17 nt, Human
caugacacgaauauugc

SEQ ID NO: 1218015 - RNA, 14 nt, Human
caugacacgaauau

SEQ ID NO: 1218016 - RNA, 22 nt, Human
caugcaaggucauuuuuuuuaa

SEQ ID NO: 1218017 - RNA, 18 nt, Human
caugcaaggucauuuuuu

SEQ ID NO: 1218018 - RNA, 17 nt, Human
caugcaaggucauuuuu

SEQ ID NO: 1218019 - RNA, 18 nt, Human
caugcugcccugugagua

SEQ ID NO: 1218020 - RNA, 16 nt, Human
caugcugcccugugag

SEQ ID NO: 1218021 - RNA, 19 nt, Human
cauggccuuugcuugaaag

SEQ ID NO: 1218022 - RNA, 22 nt, Human
cauggccuuugcuugaaagaaa

SEQ ID NO: 1218023 - RNA, 16 nt, Human
cauuuauucugcucac

SEQ ID NO: 1218024 - RNA, 17 nt, Human
ccaaaacucuccucugc

SEQ ID NO: 1218025 - RNA, 23 nt, Human
cauuuggugguuucagaaaugug

SEQ ID NO: 1218026 - RNA, 22 nt, Human
cauuuggugguuucagaaaugu

SEQ ID NO: 1218027 - RNA, 18 nt, Human
cauugcugggcuugucug

SEQ ID NO: 1218028 - RNA, 21 nt, Human
cauugcggacagccacggcca

SEQ ID NO: 1218029 - RNA, 17 nt, Human
cauugcggacagccacg

SEQ ID NO: 1218030 - RNA, 15 nt, Human
cauugcggacagcca

SEQ ID NO: 1218031 - RNA, 14 nt, Human
cauugcggacagcc

SEQ ID NO: 1218032 - RNA, 22 nt, Human
cauggcugccaaugggagcuca

SEQ ID NO: 1218033 - RNA, 17 nt, Human
cauuaucuagauacugu

SEQ ID NO: 1218034 - RNA, 16 nt, Human
cauuaucuagauacug

SEQ ID NO: 1218035 - RNA, 15 nt, Human
cauguucucugagga

SEQ ID NO: 1218036 - RNA, 20 nt, Human
cauucuccuuguguuacuaa

SEQ ID NO: 1218037 - RNA, 16 nt, Human
cauucuccuuguguua

SEQ ID NO: 1218038 - RNA, 18 nt, Human
cauuaucuagauacugua

SEQ ID NO: 1218039 - RNA, 20 nt, Human
ccaaaacucuccucugcugc

SEQ ID NO: 1218040 - RNA, 23 nt, Human
ccaaugcacuuuguucuggcucu

SEQ ID NO: 1218041 - RNA, 22 nt, Human
ccaaugcacuuuguucuggcuc

SEQ ID NO: 1218042 - RNA, 20 nt, Human
ccaaugcacuuuguucuggc

SEQ ID NO: 1218043 - RNA, 20 nt, Human
ccaauguucucucuucucca

SEQ ID NO: 1218044 - RNA, 17 nt, Human
ccaccaucaagccacca

SEQ ID NO: 1218045 - RNA, 16 nt, Human
ccaccaucaagccacc

SEQ ID NO: 1218046 - RNA, 17 nt, Human
ccaccgcagacaggacc

SEQ ID NO: 1218047 - RNA, 14 nt, Human
ccaccgcagacagg

SEQ ID NO: 1218048 - RNA, 18 nt, Human
ccaccaucaccagacagg

SEQ ID NO: 1218049 - RNA, 20 nt, Human
ccaccaucaagccaccaaca

SEQ ID NO: 1218050 - RNA, 15 nt, Human
ccaccuuggcucaag

SEQ ID NO: 1218051 - RNA, 14 nt, Human
ccaccuuggcucaa

SEQ ID NO: 1218052 - RNA, 19 nt, Human
ccaccgcagacaggaccag

SEQ ID NO: 1218053 - RNA, 18 nt, Human
ccaccgcagacaggacca

SEQ ID NO: 1218054 - RNA, 23 nt, Human
ggcucagcggggacagcuccuuc

SEQ ID NO: 1218055 - RNA, 22 nt, Human
ggcucagcggggacagcuccuu

SEQ ID NO: 1218056 - RNA, 21 nt, Human
ggcucagcggggacagcuccu

SEQ ID NO: 1218057 - RNA, 23 nt, Human
ggcucagcaaaagaugcuucuca

SEQ ID NO: 1218058 - RNA, 19 nt, Human
ggcgugcaguggugcgauc

SEQ ID NO: 1218059 - RNA, 16 nt, Human
ggcucacugcagccuc

SEQ ID NO: 1218060 - RNA, 17 nt, Human
ggcucacugcagccuca

SEQ ID NO: 1218061 - RNA, 15 nt, Human
ggccugagcugggau

SEQ ID NO: 1218062 - RNA, 14 nt, Human
ggccuuuggcuuca

SEQ ID NO: 1218063 - RNA, 16 nt, Human
ggccuucucugaagga

SEQ ID NO: 1218064 - RNA, 15 nt, Human
ggccuucucugaagg

SEQ ID NO: 1218065 - RNA, 13 nt, Human
ggccuuuggcuuc

SEQ ID NO: 1218066 - RNA, 12 nt, Human
ggccuucucuga

SEQ ID NO: 1218067 - RNA, 21 nt, Human
ggccugugucuaguuguuuga

SEQ ID NO: 1218068 - RNA, 21 nt, Human
ggccuggccagaugcaccagc

SEQ ID NO: 1218069 - RNA, 17 nt, Human
ggcccuucucuccagcc

SEQ ID NO: 1218070 - RNA, 16 nt, Human
ggcccuucucuccagc

SEQ ID NO: 1218071 - RNA, 18 nt, Human
ggcccuucucuccagccc

SEQ ID NO: 1218072 - RNA, 19 nt, Human
ggcccuucucuccagcccc

SEQ ID NO: 1218073 - RNA, 17 nt, Human
ggcagugggagcugccu

SEQ ID NO: 1218074 - RNA, 24 nt, Human
ggcacugcuuccagugaggcucug

SEQ ID NO: 1218075 - RNA, 16 nt, Human
ggcaccagcagccugg

SEQ ID NO: 1218076 - RNA, 15 nt, Human
ggcaccagcagccug

SEQ ID NO: 1218077 - RNA, 18 nt, Human
ggcauccaguaucuugaa

SEQ ID NO: 1218078 - RNA, 19 nt, Human
ggcagugggagcugccugu

SEQ ID NO: 1218079 - RNA, 18 nt, Human
ggcagugggagcugccug

SEQ ID NO: 1218080 - RNA, 16 nt, Human
ggccagugugacaagg

SEQ ID NO: 1218081 - RNA, 18 nt, Human
ggccaggcuggucucaaa

SEQ ID NO: 1218082 - RNA, 16 nt, Human
ggccaggcuggucuca

SEQ ID NO: 1218083 - RNA, 14 nt, Human
ggccaggcuggucu

SEQ ID NO: 1218084 - RNA, 21 nt, Human
ggccaaacucaccugccccuc

SEQ ID NO: 1218085 - RNA, 17 nt, Human
ggccaaacucaccugcc

SEQ ID NO: 1218086 - RNA, 16 nt, Human
ggaggggggagguggg

SEQ ID NO: 1218087 - RNA, 14 nt, Human
ggaggugaccccag

SEQ ID NO: 1218088 - RNA, 14 nt, Human
ggaggucgaggcag

SEQ ID NO: 1218089 - RNA, 20 nt, Human
ggaggucaaggcugcaguga

SEQ ID NO: 1218090 - RNA, 12 nt, Human
ggaggccagccu

SEQ ID NO: 1218091 - RNA, 11 nt, Human
ggaggccagcc

SEQ ID NO: 1218092 - RNA, 23 nt, Human
ggaggaaggaaacccagcucugg

SEQ ID NO: 1218093 - RNA, 20 nt, Human
ggaggaaggaaacccagcuc

SEQ ID NO: 1218094 - RNA, 22 nt, Human
ggagcugccuguucagcuccag

SEQ ID NO: 1218095 - RNA, 21 nt, Human
ggagcugccuguucagcucca

SEQ ID NO: 1218096 - RNA, 12 nt, Human
ggagcugccugu

SEQ ID NO: 1218097 - RNA, 22 nt, Human
ggagccccgaggccuucucuga

SEQ ID NO: 1218098 - RNA, 16 nt, Human
ggagccccgaggccuu

SEQ ID NO: 1218099 - RNA, 14 nt, Human
ggauccugagccag

SEQ ID NO: 1218100 - RNA, 13 nt, Human
ggauccugagcca

SEQ ID NO: 1218101 - RNA, 15 nt, Human
ggauccuccaggugc

SEQ ID NO: 1218102 - RNA, 18 nt, Human
ggauggauuuccagccaa

SEQ ID NO: 1218103 - RNA, 16 nt, Human
ggauggggcugcaccg

SEQ ID NO: 1218104 - RNA, 15 nt, Human
ggaguucugguuccu

SEQ ID NO: 1218105 - RNA, 14 nt, Human
ggaguggccacaga

SEQ ID NO: 1218106 - RNA, 15 nt, Human
ggauguucugggaca

SEQ ID NO: 1218107 - RNA, 16 nt, Human
ggauguucugggacac

SEQ ID NO: 1218108 - RNA, 24 nt, Human
ggcacagaaaauggaagacagcuc

SEQ ID NO: 1218109 - RNA, 14 nt, Human
aaauaaugugaaac

SEQ ID NO: 1218110 - RNA, 13 nt, Human
aaauaaugugaaa

SEQ ID NO: 1218111 - RNA, 12 nt, Human
aaauaaugugaa

SEQ ID NO: 1218112 - RNA, 23 nt, Human
aaaguuucucuuuucaaaacauu

SEQ ID NO: 1218113 - RNA, 21 nt, Human
aaaguuucucuuuucaaaaca

SEQ ID NO: 1218114 - RNA, 21 nt, Human
gguucccuuugacgccauccc

SEQ ID NO: 1218115 - RNA, 22 nt, Human
gguucccuuugacgccauccca

SEQ ID NO: 1218116 - RNA, 22 nt, Human
gguucaggguuggccccugccc

SEQ ID NO: 1218117 - RNA, 21 nt, Human
gguucaggguuggccccugcc

SEQ ID NO: 1218118 - RNA, 18 nt, Human
gguucaggguuggccccu

SEQ ID NO: 1218119 - RNA, 12 nt, Human
gguguggagaag

SEQ ID NO: 1218120 - RNA, 12 nt, Human
gguguggaagag

SEQ ID NO: 1218121 - RNA, 13 nt, Human
ggugugcucugau

SEQ ID NO: 1218122 - RNA, 21 nt, Human
ggugugcggccuuuggcuuca

SEQ ID NO: 1218123 - RNA, 15 nt, Human
gguuucagaaaugug

SEQ ID NO: 1218124 - RNA, 14 nt, Human
gguuucagaaaugu

SEQ ID NO: 1218125 - RNA, 13 nt, Human
gguuucagaaaug

SEQ ID NO: 1218126 - RNA, 12 nt, Human
gguuucagaaau

SEQ ID NO: 1218127 - RNA, 20 nt, Human
ggugggaggauugcuugagc

SEQ ID NO: 1218128 - RNA, 15 nt, Human
ggugggauccuccag

SEQ ID NO: 1218129 - RNA, 14 nt, Human
ggugggauccucca

SEQ ID NO: 1218130 - RNA, 17 nt, Human
gguggggcagcuugagg

SEQ ID NO: 1218131 - RNA, 13 nt, Human
gguggggcagcuu

SEQ ID NO: 1218132 - RNA, 19 nt, Human
ggugggauccuccaggugc

SEQ ID NO: 1218133 - RNA, 18 nt, Human
ggugugagucaccaagcc

SEQ ID NO: 1218134 - RNA, 16 nt, Human
ggugugacugaauuuc

SEQ ID NO: 1218135 - RNA, 16 nt, Human
ggugucgggcaugaca

SEQ ID NO: 1218136 - RNA, 13 nt, Human
ggugucgggcaug

SEQ ID NO: 1218137 - RNA, 23 nt, Human
gguggggucacucuggcagcuca

SEQ ID NO: 1218138 - RNA, 15 nt, Human
gguggggucacucug

SEQ ID NO: 1218139 - RNA, 17 nt, Human
ggucuacacugugcuga

SEQ ID NO: 1218140 - RNA, 14 nt, Human
ggucggaaaacaug

SEQ ID NO: 1218141 - RNA, 13 nt, Human
ggucggaaaacau

SEQ ID NO: 1218142 - RNA, 13 nt, Human
aaagcaaaggaga

SEQ ID NO: 1218143 - RNA, 23 nt, Human
gguccugcugcaguugccaguca

SEQ ID NO: 1218144 - RNA, 21 nt, Human
gguccugcugcaguugccagu

SEQ ID NO: 1218145 - RNA, 20 nt, Human
ggugcaaugaccuuucaaua

SEQ ID NO: 1218146 - RNA, 19 nt, Human
ggugcaaugaccuuucaau

SEQ ID NO: 1218147 - RNA, 18 nt, Human
ggugcaaugaccuuucaa

SEQ ID NO: 1218148 - RNA, 16 nt, Human
ggugcacaagcuccaa

SEQ ID NO: 1218149 - RNA, 21 nt, Human
ggucuugaacuccuggccuca

SEQ ID NO: 1218150 - RNA, 14 nt, Human
gguggaugccuggu

SEQ ID NO: 1218151 - RNA, 21 nt, Human
gguggaugccugguggcagcu

SEQ ID NO: 1218152 - RNA, 22 nt, Human
aaagcagcguuucuaugacaca

SEQ ID NO: 1218153 - RNA, 18 nt, Human
aaagcagcguuucuauga

SEQ ID NO: 1218154 - RNA, 16 nt, Human
aaagcagcguuucuau

SEQ ID NO: 1218155 - RNA, 14 nt, Human
gguaugcaaucaaa

SEQ ID NO: 1218156 - RNA, 22 nt, Human
gguaugaucacggcucacugca

SEQ ID NO: 1218157 - RNA, 19 nt, Human
gguccacccaggagccccg

SEQ ID NO: 1218158 - RNA, 17 nt, Human
gguccacccaggagccc

SEQ ID NO: 1218159 - RNA, 16 nt, Human
gguccacccaggagcc

SEQ ID NO: 1218160 - RNA, 15 nt, Human
gguccacccaggagc

SEQ ID NO: 1218161 - RNA, 13 nt, Human
gguccacccagga

SEQ ID NO: 1218162 - RNA, 12 nt, Human
gguccacccagg

SEQ ID NO: 1218163 - RNA, 17 nt, Human
aaagacuaucuaaaugu

SEQ ID NO: 1218164 - RNA, 22 nt, Human
aaacuuuaccuuuuuuauacau

SEQ ID NO: 1218165 - RNA, 15 nt, Human
gguccauagagagca

SEQ ID NO: 1218166 - RNA, 18 nt, Human
aaacuuuacuauggcccu

SEQ ID NO: 1218167 - RNA, 12 nt, Human
aaacuuuacuau

SEQ ID NO: 1218168 - RNA, 17 nt, Human
ggguguggcgcagcaua

SEQ ID NO: 1218169 - RNA, 12 nt, Human
ggguggugaccu

SEQ ID NO: 1218170 - RNA, 20 nt, Human
ggguggggaccucaggccug

SEQ ID NO: 1218171 - RNA, 19 nt, Human
ggguggcaccagcagccug

SEQ ID NO: 1218172 - RNA, 15 nt, Human
ggguggcaccagcag

SEQ ID NO: 1218173 - RNA, 17 nt, Human
ggguggaugccuggugg

SEQ ID NO: 1218174 - RNA, 13 nt, Human
ggguggaugccug

SEQ ID NO: 1218175 - RNA, 18 nt, Human
gguaacuagggaagauaa

SEQ ID NO: 1218176 - RNA, 20 nt, Human
gguaacaggcagauacagga

SEQ ID NO: 1218177 - RNA, 14 nt, Human
gguaacaggcagau

SEQ ID NO: 1218178 - RNA, 17 nt, Human
ggguuucuaaagcugcc

SEQ ID NO: 1218179 - RNA, 18 nt, Human
gggcugcaugcgggcuuc

SEQ ID NO: 1218180 - RNA, 21 nt, Human
gggcugcaugcgggcuuccuc

SEQ ID NO: 1218181 - RNA, 18 nt, Human
gggcucagcaaaagaugc

SEQ ID NO: 1218182 - RNA, 22 nt, Human
gggcugcaccggcuggccuggc

SEQ ID NO: 1218183 - RNA, 10 nt, Human
gggcucagca

SEQ ID NO: 1218184 - RNA, 20 nt, Human
gggcuggguucuacccaggu

SEQ ID NO: 1218185 - RNA, 12 nt, Human
gggcugggcaga

SEQ ID NO: 1218186 - RNA, 22 nt, Human
gggcuggguucuacccaggugc

SEQ ID NO: 1218187 - RNA, 20 nt, Human
aaacaagaccacguuucuaa

SEQ ID NO: 1218188 - RNA, 16 nt, Human
aaacacauuuuucuua

SEQ ID NO: 1218189 - RNA, 16 nt, Human
aaacaugcuacacacu

SEQ ID NO: 1218190 - RNA, 20 nt, Human
ggggacagcuccuucugucc

SEQ ID NO: 1218191 - RNA, 14 nt, Human
ggggacagcuccuu

SEQ ID NO: 1218192 - RNA, 12 nt, Human
ggggacagcucc

SEQ ID NO: 1218193 - RNA, 23 nt, Human
gggccaguuggucccccuuccau

SEQ ID NO: 1218194 - RNA, 22 nt, Human
gggccaguuggucccccuucca

SEQ ID NO: 1218195 - RNA, 18 nt, Human
gggccaguuggucccccu

SEQ ID NO: 1218196 - RNA, 14 nt, Human
gggccaguuggucc

SEQ ID NO: 1218197 - RNA, 15 nt, Human
gggcgggaggauguu

SEQ ID NO: 1218198 - RNA, 20 nt, Human
gggccucuuaugggcugggu

SEQ ID NO: 1218199 - RNA, 13 nt, Human
gggccuccugugu

SEQ ID NO: 1218200 - RNA, 15 nt, Human
gggccuccugugugu

SEQ ID NO: 1218201 - RNA, 12 nt, Human
gggccaggagcc

SEQ ID NO: 1218202 - RNA, 11 nt, Human
gggccaggagc

SEQ ID NO: 1218203 - RNA, 21 nt, Human
aaaaugagccuggcaagaaug

SEQ ID NO: 1218204 - RNA, 14 nt, Human
aaaaugagccuggc

SEQ ID NO: 1218205 - RNA, 19 nt, Human
gggaggucgaggcaggagg

SEQ ID NO: 1218206 - RNA, 18 nt, Human
gggaggucgaggcaggag

SEQ ID NO: 1218207 - RNA, 17 nt, Human
gggaggucgaggcagga

SEQ ID NO: 1218208 - RNA, 18 nt, Human
gggagggcuccagacaca

SEQ ID NO: 1218209 - RNA, 17 nt, Human
gggagggcuccagacac

SEQ ID NO: 1218210 - RNA, 15 nt, Human
gggagggcuccagac

SEQ ID NO: 1218211 - RNA, 14 nt, Human
gggagggcuccaga

SEQ ID NO: 1218212 - RNA, 19 nt, Human
aaaagguaugcaaucaaau

SEQ ID NO: 1218213 - RNA, 15 nt, Human
gggauuacaggugug

SEQ ID NO: 1218214 - RNA, 16 nt, Human
gggcagagcagagacc

SEQ ID NO: 1218215 - RNA, 20 nt, Human
gggcaacccccagccugcua

SEQ ID NO: 1218216 - RNA, 18 nt, Human
gggcaacccccagccugc

SEQ ID NO: 1218217 - RNA, 16 nt, Human
gggcaacccccagccu

SEQ ID NO: 1218218 - RNA, 22 nt, Human
gggcagagcagagaccaucccu

SEQ ID NO: 1218219 - RNA, 17 nt, Human
gggcagagcagagacca

SEQ ID NO: 1218220 - RNA, 23 nt, Human
gggcagagcagagaccaucccug

SEQ ID NO: 1218221 - RNA, 23 nt, Human
gggacagaggggguggccuccca

SEQ ID NO: 1218222 - RNA, 22 nt, Human
gggacagaggggguggccuccc

SEQ ID NO: 1218223 - RNA, 13 nt, Human
gggacagaggggg

SEQ ID NO: 1218224 - RNA, 16 nt, Human
gggaaggauacaaaag

SEQ ID NO: 1218225 - RNA, 13 nt, Human
gggaaggauacaa

SEQ ID NO: 1218226 - RNA, 21 nt, Human
gggacagcuccuucuguccua

SEQ ID NO: 1218227 - RNA, 13 nt, Human
aaaagaugcuucu

SEQ ID NO: 1218228 - RNA, 23 nt, Human
aaaacugcugacuguuuucucuu

SEQ ID NO: 1218229 - RNA, 22 nt, Human
aaaacugcugacuguuuucucu

SEQ ID NO: 1218230 - RNA, 17 nt, Human
aaaaaucucaaauuucu

SEQ ID NO: 1218231 - RNA, 14 nt, Human
aaaaaucucaaauu

SEQ ID NO: 1218232 - RNA, 16 nt, Human
gcugcacccucaggca

SEQ ID NO: 1218233 - RNA, 15 nt, Human
gcugcacccucaggc

SEQ ID NO: 1218234 - RNA, 13 nt, Human
gcugcacccucag

SEQ ID NO: 1218235 - RNA, 13 nt, Human
gcugccauccagg

SEQ ID NO: 1218236 - RNA, 12 nt, Human
gcugccauccag

SEQ ID NO: 1218237 - RNA, 17 nt, Human
gcugccccuggcagccc

SEQ ID NO: 1218238 - RNA, 16 nt, Human
gcugccccuggcagcc

SEQ ID NO: 1218239 - RNA, 15 nt, Human
gcugccccuggcagc

SEQ ID NO: 1218240 - RNA, 13 nt, Human
gcugccccuggca

SEQ ID NO: 1218241 - RNA, 17 nt, Human
gcugccauccagguuca

SEQ ID NO: 1218242 - RNA, 12 nt, Human
gcugcugacagu

SEQ ID NO: 1218243 - RNA, 23 nt, Human
gcucugaucauccacugugccau

SEQ ID NO: 1218244 - RNA, 22 nt, Human
gcucugaucauccacugugcca

SEQ ID NO: 1218245 - RNA, 21 nt, Human
gcucugaucauccacugugcc

SEQ ID NO: 1218246 - RNA, 20 nt, Human
gcucugaucauccacugugc

SEQ ID NO: 1218247 - RNA, 13 nt, Human
gcugacagacaca

SEQ ID NO: 1218248 - RNA, 22 nt, Human
gcugaauacagaggcaacugca

SEQ ID NO: 1218249 - RNA, 17 nt, Human
gcugaauacagaggcaa

SEQ ID NO: 1218250 - RNA, 14 nt, Human
gcucuguccuggga

SEQ ID NO: 1218251 - RNA, 20 nt, Human
gcucucaggccagcugcuug

SEQ ID NO: 1218252 - RNA, 19 nt, Human
gcucucaggccagcugcuu

SEQ ID NO: 1218253 - RNA, 18 nt, Human
gcucucaggccagcugcu

SEQ ID NO: 1218254 - RNA, 17 nt, Human
gcucucaggccagcugc

SEQ ID NO: 1218255 - RNA, 18 nt, Human
gcucucaaguuaucaggg

SEQ ID NO: 1218256 - RNA, 19 nt, Human
gcucuacugaggugcuaug

SEQ ID NO: 1218257 - RNA, 19 nt, Human
gcuccucuccccagcaagu

SEQ ID NO: 1218258 - RNA, 16 nt, Human
gcuccucuccccagca

SEQ ID NO: 1218259 - RNA, 15 nt, Human
gcuccucuccccagc

SEQ ID NO: 1218260 - RNA, 17 nt, Human
gcuccagcucaccagcc

SEQ ID NO: 1218261 - RNA, 14 nt, Human
gcuccagcucacca

SEQ ID NO: 1218262 - RNA, 13 nt, Human
gcuccagcucacc

SEQ ID NO: 1218263 - RNA, 9 nt, Human
gcuccagac

SEQ ID NO: 1218264 - RNA, 23 nt, Human
gcuccagacacauguccaagaag

SEQ ID NO: 1218265 - RNA, 21 nt, Human
gcuccagacacauguccaaga

SEQ ID NO: 1218266 - RNA, 18 nt, Human
gcuccagacacaugucca

SEQ ID NO: 1218267 - RNA, 17 nt, Human
gcuuugaucccuucuua

SEQ ID NO: 1218268 - RNA, 14 nt, Human
gcuuugaucccuuc

SEQ ID NO: 1218269 - RNA, 18 nt, Human
gcuuuugucuaugggacu

SEQ ID NO: 1218270 - RNA, 15 nt, Human
gcuuuuggucugugu

SEQ ID NO: 1218271 - RNA, 18 nt, Human
ggaaaauuuuaaaaauac

SEQ ID NO: 1218272 - RNA, 16 nt, Human
ggaaacccagcucugg

SEQ ID NO: 1218273 - RNA, 12 nt, Human
gcuuuugugcau

SEQ ID NO: 1218274 - RNA, 20 nt, Human
ggaagacuucaucccucugg

SEQ ID NO: 1218275 - RNA, 17 nt, Human
ggaagacuucaucccuc

SEQ ID NO: 1218276 - RNA, 22 nt, Human
ggaagacaaugugaaaagaaaa

SEQ ID NO: 1218277 - RNA, 12 nt, Human
ggaagacuuugg

SEQ ID NO: 1218278 - RNA, 16 nt, Human
ggaagacaaugugaaa

SEQ ID NO: 1218279 - RNA, 14 nt, Human
ggaagacaauguga

SEQ ID NO: 1218280 - RNA, 19 nt, Human
ggaacacuccuucacagau

SEQ ID NO: 1218281 - RNA, 15 nt, Human
ggaacacuccuucac

SEQ ID NO: 1218282 - RNA, 23 nt, Human
ggaacaaggcaaggcugucaauu

SEQ ID NO: 1218283 - RNA, 13 nt, Human
ggaacaccuccuc

SEQ ID NO: 1218284 - RNA, 22 nt, Human
ggaaaugggcagagcagagacc

SEQ ID NO: 1218285 - RNA, 18 nt, Human
ggaaaugggcagagcaga

SEQ ID NO: 1218286 - RNA, 17 nt, Human
ggaaaugggcagagcag

SEQ ID NO: 1218287 - RNA, 16 nt, Human
ggaaaugggcagagca

SEQ ID NO: 1218288 - RNA, 14 nt, Human
ggaaaugggcagag

SEQ ID NO: 1218289 - RNA, 21 nt, Human
ggaacaaggcaaggcugucaa

SEQ ID NO: 1218290 - RNA, 17 nt, Human
ggaacaaggcaaggcug

SEQ ID NO: 1218291 - RNA, 15 nt, Human
ggaacaaggcaaggc

SEQ ID NO: 1218292 - RNA, 15 nt, Human
gcuucaguggcagcu

SEQ ID NO: 1218293 - RNA, 14 nt, Human
gcuucaguggcagc

SEQ ID NO: 1218294 - RNA, 18 nt, Human
gcuucaaggauccugagc

SEQ ID NO: 1218295 - RNA, 14 nt, Human
gcuucaaggauccu

SEQ ID NO: 1218296 - RNA, 14 nt, Human
gcuguuggcugggg

SEQ ID NO: 1218297 - RNA, 13 nt, Human
gcuguuggcuggg

SEQ ID NO: 1218298 - RNA, 23 nt, Human
gcugguucaggguuggccccugc

SEQ ID NO: 1218299 - RNA, 17 nt, Human
gcuuguaaauagcucag

SEQ ID NO: 1218300 - RNA, 22 nt, Human
gcuugaccuuuaagagaaauga

SEQ ID NO: 1218301 - RNA, 16 nt, Human
gcuugaccgugaggcc

SEQ ID NO: 1218302 - RNA, 18 nt, Human
gcuugaccuuuaagagaa

SEQ ID NO: 1218303 - RNA, 23 nt, Human
gcuugaccgugaggccagagaca

SEQ ID NO: 1218304 - RNA, 19 nt, Human
gcuuguaaauagcucaggu

SEQ ID NO: 1218305 - RNA, 18 nt, Human
gcuuguaaauagcucagg

SEQ ID NO: 1218306 - RNA, 15 nt, Human
gcuucuucagagacu

SEQ ID NO: 1218307 - RNA, 12 nt, Human
gcuucuucagag

SEQ ID NO: 1218308 - RNA, 23 nt, Human
gcuuccagugaggcucugcccuu

SEQ ID NO: 1218309 - RNA, 21 nt, Human
gccuccuuugugaggaagccg

SEQ ID NO: 1218310 - RNA, 20 nt, Human
gccuccuuugugaggaagcc

SEQ ID NO: 1218311 - RNA, 19 nt, Human
gccuccuuugugaggaagc

SEQ ID NO: 1218312 - RNA, 13 nt, Human
gccugcuccagcu

SEQ ID NO: 1218313 - RNA, 23 nt, Human
gccugcuaauuccccagauugca

SEQ ID NO: 1218314 - RNA, 17 nt, Human
gccugcuaauuccccag

SEQ ID NO: 1218315 - RNA, 13 nt, Human
gcgauucuucugc

SEQ ID NO: 1218316 - RNA, 15 nt, Human
gcgagcccugguggc

SEQ ID NO: 1218317 - RNA, 17 nt, Human
gcgauucuucugcuuca

SEQ ID NO: 1218318 - RNA, 14 nt, Human
gcgauucuucugcu

SEQ ID NO: 1218319 - RNA, 16 nt, Human
gcggccuuuggcuuca

SEQ ID NO: 1218320 - RNA, 20 nt, Human
gcgugguggacaugcacagc

SEQ ID NO: 1218321 - RNA, 19 nt, Human
gcgugcacacaccagagcc

SEQ ID NO: 1218322 - RNA, 18 nt, Human
gcgugcacacaccagagc

SEQ ID NO: 1218323 - RNA, 14 nt, Human
gcgugcacacacca

SEQ ID NO: 1218324 - RNA, 20 nt, Human
gcuacuguccuacccacccu

SEQ ID NO: 1218325 - RNA, 19 nt, Human
gcuacuguccuacccaccc

SEQ ID NO: 1218326 - RNA, 16 nt, Human
gcuaauuuuucauuuu

SEQ ID NO: 1218327 - RNA, 17 nt, Human
gcguuucuaugacacau

SEQ ID NO: 1218328 - RNA, 18 nt, Human
gcccaggccccugccacc

SEQ ID NO: 1218329 - RNA, 17 nt, Human
gcccaggccccugccac

SEQ ID NO: 1218330 - RNA, 15 nt, Human
gcccaggccccugcc

SEQ ID NO: 1218331 - RNA, 16 nt, Human
gcccaggcaggucuug

SEQ ID NO: 1218332 - RNA, 14 nt, Human
gcccaggcaggucu

SEQ ID NO: 1218333 - RNA, 13 nt, Human
gcccaggcagguc

SEQ ID NO: 1218334 - RNA, 14 nt, Human
gccaugugccaggu

SEQ ID NO: 1218335 - RNA, 22 nt, Human
gccccugcugguucaggguugg

SEQ ID NO: 1218336 - RNA, 15 nt, Human
gccccuggaugcagc

SEQ ID NO: 1218337 - RNA, 13 nt, Human
gccagugugacaa

SEQ ID NO: 1218338 - RNA, 13 nt, Human
gccaguugguccc

SEQ ID NO: 1218339 - RNA, 23 nt, Human
gccaguuggucccccuuccaugg

SEQ ID NO: 1218340 - RNA, 22 nt, Human
gccaguuggucccccuuccaug

SEQ ID NO: 1218341 - RNA, 21 nt, Human
gccaguuggucccccuuccau

SEQ ID NO: 1218342 - RNA, 20 nt, Human
gccaguuggucccccuucca

SEQ ID NO: 1218343 - RNA, 18 nt, Human
gccaguuggucccccuuc

SEQ ID NO: 1218344 - RNA, 16 nt, Human
gccaguuggucccccu

SEQ ID NO: 1218345 - RNA, 15 nt, Human
gccaggcccucugcc

SEQ ID NO: 1218346 - RNA, 14 nt, Human
gccaggcccucugc

SEQ ID NO: 1218347 - RNA, 13 nt, Human
gccaggcccucug

SEQ ID NO: 1218348 - RNA, 23 nt, Human
gccaggccacaagacccuugugg

SEQ ID NO: 1218349 - RNA, 22 nt, Human
gccaggccagagggagugacag

SEQ ID NO: 1218350 - RNA, 15 nt, Human
gccaggccagaggga

SEQ ID NO: 1218351 - RNA, 21 nt, Human
gccaggccacaagacccuugu

SEQ ID NO: 1218352 - RNA, 18 nt, Human
gccaggccacaagacccu

SEQ ID NO: 1218353 - RNA, 13 nt, Human
gccaggccacaag

SEQ ID NO: 1218354 - RNA, 17 nt, Human
gcagccccauucugccu

SEQ ID NO: 1218355 - RNA, 16 nt, Human
gcagccaggccacaag

SEQ ID NO: 1218356 - RNA, 14 nt, Human
gcagccaggccaca

SEQ ID NO: 1218357 - RNA, 13 nt, Human
gcagccaggccac

SEQ ID NO: 1218358 - RNA, 12 nt, Human
gcagccaggcca

SEQ ID NO: 1218359 - RNA, 14 nt, Human
gcagccacuauugu

SEQ ID NO: 1218360 - RNA, 16 nt, Human
gcagccacauuccuga

SEQ ID NO: 1218361 - RNA, 20 nt, Human
gcauaccacuuuuguucuug

SEQ ID NO: 1218362 - RNA, 17 nt, Human
gcauaccacuuuuguuc

SEQ ID NO: 1218363 - RNA, 14 nt, Human
gcauacguacacau

SEQ ID NO: 1218364 - RNA, 13 nt, Human
gcagggaaacagc

SEQ ID NO: 1218365 - RNA, 22 nt, Human
gcaggcucucaggccagcugcu

SEQ ID NO: 1218366 - RNA, 20 nt, Human
gcaggcucucaggccagcug

SEQ ID NO: 1218367 - RNA, 19 nt, Human
gcagcugcgguccacccag

SEQ ID NO: 1218368 - RNA, 17 nt, Human
gcagcugcgguccaccc

SEQ ID NO: 1218369 - RNA, 23 nt, Human
gcaggcucucaggccagcugcuu

SEQ ID NO: 1218370 - RNA, 12 nt, Human
gcacugacauug

SEQ ID NO: 1218371 - RNA, 20 nt, Human
gcagagcagagaccaucccu

SEQ ID NO: 1218372 - RNA, 19 nt, Human
gcagagcagagaccauccc

SEQ ID NO: 1218373 - RNA, 15 nt, Human
gcagagcagagacca

SEQ ID NO: 1218374 - RNA, 14 nt, Human
gcagagcagagacc

SEQ ID NO: 1218375 - RNA, 12 nt, Human
gcagagcagaga

SEQ ID NO: 1218376 - RNA, 24 nt, Human
gcagagcaccuuagacagucccug

SEQ ID NO: 1218377 - RNA, 23 nt, Human
gcagagcaccuuagacagucccu

SEQ ID NO: 1218378 - RNA, 22 nt, Human
gcagagcaccuuagacaguccc

SEQ ID NO: 1218379 - RNA, 19 nt, Human
gcagagcaccuuagacagu

SEQ ID NO: 1218380 - RNA, 14 nt, Human
gcacaagcugcacc

SEQ ID NO: 1218381 - RNA, 23 nt, Human
gcacaagcuccaagcucccaggc

SEQ ID NO: 1218382 - RNA, 22 nt, Human
gcacaagcuccaagcucccagg

SEQ ID NO: 1218383 - RNA, 23 nt, Human
gcaauaaggggagaguaacccug

SEQ ID NO: 1218384 - RNA, 15 nt, Human
gcaagugagagcugg

SEQ ID NO: 1218385 - RNA, 13 nt, Human
gcaagugagagcu

SEQ ID NO: 1218386 - RNA, 23 nt, Human
gcaccggcuggccuggccccuca

SEQ ID NO: 1218387 - RNA, 21 nt, Human
gcaccggcuggccuggccccu

SEQ ID NO: 1218388 - RNA, 19 nt, Human
gcaccggcuggccuggccc

SEQ ID NO: 1218389 - RNA, 22 nt, Human
gcacaugccucucucaggccaa

SEQ ID NO: 1218390 - RNA, 21 nt, Human
gcacaugccucucucaggcca

SEQ ID NO: 1218391 - RNA, 20 nt, Human
gcacaugccucucucaggcc

SEQ ID NO: 1218392 - RNA, 19 nt, Human
gcacaugccucucucaggc

SEQ ID NO: 1218393 - RNA, 18 nt, Human
gcacaugccucucucagg

SEQ ID NO: 1218394 - RNA, 17 nt, Human
gcacaugccucucucag

SEQ ID NO: 1218395 - RNA, 14 nt, Human
gcacaugccucucu

SEQ ID NO: 1218396 - RNA, 13 nt, Human
gcacaugccucuc

SEQ ID NO: 1218397 - RNA, 21 nt, Human
gcacaucagcacgauuucugu

SEQ ID NO: 1218398 - RNA, 20 nt, Human
gcacaucagcacgauuucug

SEQ ID NO: 1218399 - RNA, 19 nt, Human
gcacaucagcacgauuucu

SEQ ID NO: 1218400 - RNA, 22 nt, Human
gcacaagcugcacccucaggca

SEQ ID NO: 1218401 - RNA, 16 nt, Human
gauacuacaguuuguu

SEQ ID NO: 1218402 - RNA, 11 nt, Human
gauacuacagu

SEQ ID NO: 1218403 - RNA, 14 nt, Human
gauacccaucccau

SEQ ID NO: 1218404 - RNA, 13 nt, Human
gauacccauccca

SEQ ID NO: 1218405 - RNA, 22 nt, Human
gaguuguuacauuuuuaagugc

SEQ ID NO: 1218406 - RNA, 20 nt, Human
gaguuguuacauuuuuaagu

SEQ ID NO: 1218407 - RNA, 16 nt, Human
gaguuguuacauuuuu

SEQ ID NO: 1218408 - RNA, 13 nt, Human
gagugcagugagc

SEQ ID NO: 1218409 - RNA, 20 nt, Human
gaguuugggguaugggagag

SEQ ID NO: 1218410 - RNA, 12 nt, Human
gagugcagugag

SEQ ID NO: 1218411 - RNA, 11 nt, Human
gagugcaguga

SEQ ID NO: 1218412 - RNA, 12 nt, Human
gagugagcuggu

SEQ ID NO: 1218413 - RNA, 21 nt, Human
gagucccaccuuggcugcagg

SEQ ID NO: 1218414 - RNA, 20 nt, Human
gagucccaccuuggcugcag

SEQ ID NO: 1218415 - RNA, 16 nt, Human
gagucccaccuuggcu

SEQ ID NO: 1218416 - RNA, 15 nt, Human
gagucaccaagccca

SEQ ID NO: 1218417 - RNA, 14 nt, Human
gagucaccaagccc

SEQ ID NO: 1218418 - RNA, 13 nt, Human
gagucaccaagcc

SEQ ID NO: 1218419 - RNA, 13 nt, Human
gaggugggauccu

SEQ ID NO: 1218420 - RNA, 12 nt, Human
gaggugggaucc

SEQ ID NO: 1218421 - RNA, 11 nt, Human
gaggugggagg

SEQ ID NO: 1218422 - RNA, 14 nt, Human
gaggucuguucuuu

SEQ ID NO: 1218423 - RNA, 13 nt, Human
gaggucuguucuu

SEQ ID NO: 1218424 - RNA, 21 nt, Human
gaugaugaaaugaggucagag

SEQ ID NO: 1218425 - RNA, 21 nt, Human
gaugaucuuugcagacaggca

SEQ ID NO: 1218426 - RNA, 20 nt, Human
gaugaucuuugcagacaggc

SEQ ID NO: 1218427 - RNA, 16 nt, Human
gaucucuugagccugg

SEQ ID NO: 1218428 - RNA, 12 nt, Human
gaucucuugagc

SEQ ID NO: 1218429 - RNA, 17 nt, Human
gaucucuugagccuggg

SEQ ID NO: 1218430 - RNA, 18 nt, Human
gaucucuugagccuggga

SEQ ID NO: 1218431 - RNA, 15 nt, Human
gaucucuaacuucac

SEQ ID NO: 1218432 - RNA, 17 nt, Human
gauauuuuuuucuuuuc

SEQ ID NO: 1218433 - RNA, 15 nt, Human
gauauuuuuuucuuu

SEQ ID NO: 1218434 - RNA, 16 nt, Human
gauauuuugcuuugug

SEQ ID NO: 1218435 - RNA, 22 nt, Human
gacuaucuaaauguugaaagau

SEQ ID NO: 1218436 - RNA, 19 nt, Human
gacucugucucaaaaaaac

SEQ ID NO: 1218437 - RNA, 12 nt, Human
gacucugucuca

SEQ ID NO: 1218438 - RNA, 16 nt, Human
gagaagcggcuggcag

SEQ ID NO: 1218439 - RNA, 15 nt, Human
gagaagcggcuggca

SEQ ID NO: 1218440 - RNA, 13 nt, Human
gagaagcggcugg

SEQ ID NO: 1218441 - RNA, 12 nt, Human
gagaaggaagcc

SEQ ID NO: 1218442 - RNA, 21 nt, Human
gagacccugucucaaaaaaag

SEQ ID NO: 1218443 - RNA, 21 nt, Human
gacuuuucuuuguggcuuccu

SEQ ID NO: 1218444 - RNA, 23 nt, Human
gacuuuucuuucagccaagaauu

SEQ ID NO: 1218445 - RNA, 22 nt, Human
gagaggcauccaguaucuugaa

SEQ ID NO: 1218446 - RNA, 21 nt, Human
gagaugaugccaugggcccuc

SEQ ID NO: 1218447 - RNA, 14 nt, Human
gagaggcauccagu

SEQ ID NO: 1218448 - RNA, 18 nt, Human
gagacuccugcaggcagc

SEQ ID NO: 1218449 - RNA, 17 nt, Human
gagacuccugcaggcag

SEQ ID NO: 1218450 - RNA, 16 nt, Human
gagacuccugcaggca

SEQ ID NO: 1218451 - RNA, 15 nt, Human
gagacuccugcaggc

SEQ ID NO: 1218452 - RNA, 13 nt, Human
gagauuuacaacu

SEQ ID NO: 1218453 - RNA, 21 nt, Human
gagauugcaccacugcacucc

SEQ ID NO: 1218454 - RNA, 18 nt, Human
gagauugcaccacugcac

SEQ ID NO: 1218455 - RNA, 14 nt, Human
gagcagggcucagc

SEQ ID NO: 1218456 - RNA, 13 nt, Human
gagcaucaggcca

SEQ ID NO: 1218457 - RNA, 22 nt, Human
gagcaugccuggauggggcugc

SEQ ID NO: 1218458 - RNA, 12 nt, Human
gagcaucaggcc

SEQ ID NO: 1218459 - RNA, 21 nt, Human
gagcagggcucagcggggaca

SEQ ID NO: 1218460 - RNA, 18 nt, Human
gagcugggugucaagagg

SEQ ID NO: 1218461 - RNA, 22 nt, Human
gagcugccuguucagcuccagc

SEQ ID NO: 1218462 - RNA, 21 nt, Human
gagcugccuguucagcuccag

SEQ ID NO: 1218463 - RNA, 21 nt, Human
gagcggagaaaggaagggcug

SEQ ID NO: 1218464 - RNA, 18 nt, Human
gagcggagaaaggaaggg

SEQ ID NO: 1218465 - RNA, 13 nt, Human
gagccccgaggcc

SEQ ID NO: 1218466 - RNA, 22 nt, Human
gagccuugaacuuugaccucug

SEQ ID NO: 1218467 - RNA, 17 nt, Human
gagccuuccaggggugg

SEQ ID NO: 1218468 - RNA, 16 nt, Human
gagccuuccaggggug

SEQ ID NO: 1218469 - RNA, 15 nt, Human
gagccuuccaggggu

SEQ ID NO: 1218470 - RNA, 14 nt, Human
gagccuuccagggg

SEQ ID NO: 1218471 - RNA, 22 nt, Human
gaaugaaugucagugugacuga

SEQ ID NO: 1218472 - RNA, 18 nt, Human
gaaugaaugucaguguga

SEQ ID NO: 1218473 - RNA, 14 nt, Human
gaaugaaugucagu

SEQ ID NO: 1218474 - RNA, 11 nt, Human
gaaugaauguc

SEQ ID NO: 1218475 - RNA, 23 nt, Human
gaagcucagggccuggcucaggu

SEQ ID NO: 1218476 - RNA, 21 nt, Human
gaagcucagggccuggcucag

SEQ ID NO: 1218477 - RNA, 20 nt, Human
gaagcucagggccuggcuca

SEQ ID NO: 1218478 - RNA, 19 nt, Human
gaagcucagggccuggcuc

SEQ ID NO: 1218479 - RNA, 18 nt, Human
gaagcucagggccuggcu

SEQ ID NO: 1218480 - RNA, 17 nt, Human
gaagcucagggccuggc

SEQ ID NO: 1218481 - RNA, 16 nt, Human
gaagcucagggccugg

SEQ ID NO: 1218482 - RNA, 15 nt, Human
gaagcucagggccug

SEQ ID NO: 1218483 - RNA, 14 nt, Human
gaagcucagggccu

SEQ ID NO: 1218484 - RNA, 18 nt, Human
gaagucuuuguacagaca

SEQ ID NO: 1218485 - RNA, 20 nt, Human
gaagucuuuguacagacaac

SEQ ID NO: 1218486 - RNA, 19 nt, Human
gaagucuuuguacagacaa

SEQ ID NO: 1218487 - RNA, 19 nt, Human
gaaggcucgagcaugccug

SEQ ID NO: 1218488 - RNA, 17 nt, Human
gaaggcucgagcaugcc

SEQ ID NO: 1218489 - RNA, 16 nt, Human
gaaggcucgagcaugc

SEQ ID NO: 1218490 - RNA, 19 nt, Human
gaagcuccgcuuucuaccc

SEQ ID NO: 1218491 - RNA, 21 nt, Human
gacacacagcucuguccuggg

SEQ ID NO: 1218492 - RNA, 19 nt, Human
gaauuuuggcugugucucc

SEQ ID NO: 1218493 - RNA, 14 nt, Human
gacacacagcucug

SEQ ID NO: 1218494 - RNA, 19 nt, Human
gacacacagcucuguccug

SEQ ID NO: 1218495 - RNA, 18 nt, Human
gacacacagcucuguccu

SEQ ID NO: 1218496 - RNA, 17 nt, Human
gacacacagcucugucc

SEQ ID NO: 1218497 - RNA, 15 nt, Human
gacacacagcucugu

SEQ ID NO: 1218498 - RNA, 21 nt, Human
gaauuuugugcccccauguaa

SEQ ID NO: 1218499 - RNA, 20 nt, Human
gaauuuugugcccccaugua

SEQ ID NO: 1218500 - RNA, 23 nt, Human
gaauuuuggcugugucucccuuc

SEQ ID NO: 1218501 - RNA, 22 nt, Human
gacaggguuuugccauguuggc

SEQ ID NO: 1218502 - RNA, 20 nt, Human
gacaggguuuugccauguug

SEQ ID NO: 1218503 - RNA, 11 nt, Human
gacagcuccuu

SEQ ID NO: 1218504 - RNA, 23 nt, Human
gacagcccgggcucugccuccca

SEQ ID NO: 1218505 - RNA, 22 nt, Human
gacagcccgggcucugccuccc

SEQ ID NO: 1218506 - RNA, 21 nt, Human
gacagcccgggcucugccucc

SEQ ID NO: 1218507 - RNA, 12 nt, Human
gacagacacagg

SEQ ID NO: 1218508 - RNA, 15 nt, Human
gacacugaugggcaa

SEQ ID NO: 1218509 - RNA, 13 nt, Human
gacacugaugggc

SEQ ID NO: 1218510 - RNA, 22 nt, Human
cuuuccugaggcugggcucccu

SEQ ID NO: 1218511 - RNA, 23 nt, Human
cuuucagccaagaauucuuaaau

SEQ ID NO: 1218512 - RNA, 14 nt, Human
cuuuuauaaacuuu

SEQ ID NO: 1218513 - RNA, 13 nt, Human
cuuuuauaaacuu

SEQ ID NO: 1218514 - RNA, 15 nt, Human
cuuucuagccagagg

SEQ ID NO: 1218515 - RNA, 16 nt, Human
cuuucuagccagagga

SEQ ID NO: 1218516 - RNA, 21 nt, Human
gaaaggcuccaggagcagcca

SEQ ID NO: 1218517 - RNA, 22 nt, Human
gaaaggcuccaggagcagccac

SEQ ID NO: 1218518 - RNA, 21 nt, Human
gaaagaaaauaccaaggaaca

SEQ ID NO: 1218519 - RNA, 19 nt, Human
gaaagggacuuggaagcuc

SEQ ID NO: 1218520 - RNA, 20 nt, Human
gaaagggacgcuacccggga

SEQ ID NO: 1218521 - RNA, 22 nt, Human
gaaagggacuuggaagcuccgc

SEQ ID NO: 1218522 - RNA, 23 nt, Human
cuuuugcccacacuugggagcaa

SEQ ID NO: 1218523 - RNA, 16 nt, Human
cuuuugccguuauuaa

SEQ ID NO: 1218524 - RNA, 18 nt, Human
cuuuugucuaugggacuc

SEQ ID NO: 1218525 - RNA, 13 nt, Human
cuuuugugcauua

SEQ ID NO: 1218526 - RNA, 12 nt, Human
cuuuugugcauu

SEQ ID NO: 1218527 - RNA, 23 nt, Human
cuuuuuuggcugcugaaggcucg

SEQ ID NO: 1218528 - RNA, 14 nt, Human
gaaaauuuuaaaaa

SEQ ID NO: 1218529 - RNA, 15 nt, Human
gaaaauguaugugua

SEQ ID NO: 1218530 - RNA, 23 nt, Human
gaaaauggacguguuaugacucc

SEQ ID NO: 1218531 - RNA, 19 nt, Human
gaaaauggacguguuauga

SEQ ID NO: 1218532 - RNA, 14 nt, Human
gaaaaacugauuuu

SEQ ID NO: 1218533 - RNA, 18 nt, Human
gaaaagaaaaaugagccu

SEQ ID NO: 1218534 - RNA, 21 nt, Human
gaaaauggaagacagcucuua

SEQ ID NO: 1218535 - RNA, 20 nt, Human
cuuggcgcugccccuggcag

SEQ ID NO: 1218536 - RNA, 17 nt, Human
cuuggcgcugccccugg

SEQ ID NO: 1218537 - RNA, 14 nt, Human
cuuggcgcugcccc

SEQ ID NO: 1218538 - RNA, 12 nt, Human
cuuggcgcugcc

SEQ ID NO: 1218539 - RNA, 13 nt, Human
cuugacagggcac

SEQ ID NO: 1218540 - RNA, 15 nt, Human
cuugacagggcacac

SEQ ID NO: 1218541 - RNA, 14 nt, Human
cuugacagggcaca

SEQ ID NO: 1218542 - RNA, 19 nt, Human
cuugaauuguaaggaauga

SEQ ID NO: 1218543 - RNA, 20 nt, Human
cuugacagggcacaccgggc

SEQ ID NO: 1218544 - RNA, 17 nt, Human
cuugauauccucuuuga

SEQ ID NO: 1218545 - RNA, 23 nt, Human
cuucugacccaugcugcccugug

SEQ ID NO: 1218546 - RNA, 22 nt, Human
cuucugacccaugcugcccugu

SEQ ID NO: 1218547 - RNA, 21 nt, Human
cuucugacccaugcugcccug

SEQ ID NO: 1218548 - RNA, 15 nt, Human
cuucugccauauucu

SEQ ID NO: 1218549 - RNA, 17 nt, Human
cuuccugcaacaccuug

SEQ ID NO: 1218550 - RNA, 23 nt, Human
cuucccaccucucucacuccuug

SEQ ID NO: 1218551 - RNA, 21 nt, Human
cuucccaccucucucacuccu

SEQ ID NO: 1218552 - RNA, 11 nt, Human
cuucccaccuc

SEQ ID NO: 1218553 - RNA, 20 nt, Human
cuucagagacuccugcaggc

SEQ ID NO: 1218554 - RNA, 19 nt, Human
cuucagagacuccugcagg

SEQ ID NO: 1218555 - RNA, 18 nt, Human
cuucagagacuccugcag

SEQ ID NO: 1218556 - RNA, 23 nt, Human
cuuccagugaggcucugcccuug

SEQ ID NO: 1218557 - RNA, 22 nt, Human
cuuccagugaggcucugcccuu

SEQ ID NO: 1218558 - RNA, 21 nt, Human
cuuccagugaggcucugcccu

SEQ ID NO: 1218559 - RNA, 19 nt, Human
cugugcugagucugaaggc

SEQ ID NO: 1218560 - RNA, 14 nt, Human
cugugcugagucug

SEQ ID NO: 1218561 - RNA, 12 nt, Human
cugugcugaguc

SEQ ID NO: 1218562 - RNA, 21 nt, Human
cuucaccuuuguccccaccgc

SEQ ID NO: 1218563 - RNA, 22 nt, Human
cuucaccuuuguccccaccgca

SEQ ID NO: 1218564 - RNA, 19 nt, Human
cuucacggaagagccuugc

SEQ ID NO: 1218565 - RNA, 15 nt, Human
cuucacggaagagcc

SEQ ID NO: 1218566 - RNA, 12 nt, Human
cuuauugcccac

SEQ ID NO: 1218567 - RNA, 21 nt, Human
cuuauggaacacucugagacu

SEQ ID NO: 1218568 - RNA, 20 nt, Human
cuuauggaacacucugagac

SEQ ID NO: 1218569 - RNA, 19 nt, Human
cuuauggaacacucugaga

SEQ ID NO: 1218570 - RNA, 17 nt, Human
cuuauggaacacucuga

SEQ ID NO: 1218571 - RNA, 16 nt, Human
cuuauggaacacucug

SEQ ID NO: 1218572 - RNA, 13 nt, Human
cuuauggaacacu

SEQ ID NO: 1218573 - RNA, 11 nt, Human
cugcugacagu

SEQ ID NO: 1218574 - RNA, 23 nt, Human
cugcugacagacacaggcccggc

SEQ ID NO: 1218575 - RNA, 21 nt, Human
cugcugacagacacaggcccg

SEQ ID NO: 1218576 - RNA, 20 nt, Human
cugcugacagacacaggccc

SEQ ID NO: 1218577 - RNA, 19 nt, Human
cugcugacagacacaggcc

SEQ ID NO: 1218578 - RNA, 18 nt, Human
cugcugacagacacaggc

SEQ ID NO: 1218579 - RNA, 15 nt, Human
cugcugacagacaca

SEQ ID NO: 1218580 - RNA, 17 nt, Human
cuggaacacuaaugagg

SEQ ID NO: 1218581 - RNA, 16 nt, Human
cuggaaauauuaagaa

SEQ ID NO: 1218582 - RNA, 23 nt, Human
cugcuucagccucccgaguagcu

SEQ ID NO: 1218583 - RNA, 22 nt, Human
cugcuuuuuaaagaaugcucuu

SEQ ID NO: 1218584 - RNA, 16 nt, Human
cugcuucagccucccg

SEQ ID NO: 1218585 - RNA, 14 nt, Human
cugcuucagccucc

SEQ ID NO: 1218586 - RNA, 13 nt, Human
cugcuucagccuc

SEQ ID NO: 1218587 - RNA, 20 nt, Human
cugcuuaacuucacauauug

SEQ ID NO: 1218588 - RNA, 17 nt, Human
cugcuuaacuucacaua

SEQ ID NO: 1218589 - RNA, 15 nt, Human
cugcuuaacuucaca

SEQ ID NO: 1218590 - RNA, 13 nt, Human
cugcuuaacuuca

SEQ ID NO: 1218591 - RNA, 19 nt, Human
cugcccugugggcccccaa

SEQ ID NO: 1218592 - RNA, 15 nt, Human
cugccuguucagcuc

SEQ ID NO: 1218593 - RNA, 14 nt, Human
cugccuguucagcu

SEQ ID NO: 1218594 - RNA, 23 nt, Human
cugccugggaucccucauccuca

SEQ ID NO: 1218595 - RNA, 19 nt, Human
cugccucgaacuggcugca

SEQ ID NO: 1218596 - RNA, 18 nt, Human
cugccucgaacuggcugc

SEQ ID NO: 1218597 - RNA, 17 nt, Human
cugccucgaacuggcug

SEQ ID NO: 1218598 - RNA, 15 nt, Human
cugccucgaacuggc

SEQ ID NO: 1218599 - RNA, 15 nt, Human
cugcuacagagcaga

SEQ ID NO: 1218600 - RNA, 16 nt, Human
cugcuaauuccccaga

SEQ ID NO: 1218601 - RNA, 19 nt, Human
cugccuguugggccaggag

SEQ ID NO: 1218602 - RNA, 18 nt, Human
cugccuguugggccagga

SEQ ID NO: 1218603 - RNA, 16 nt, Human
cugccuguugggccag

SEQ ID NO: 1218604 - RNA, 20 nt, Human
cugagacucgcgacaaugca

SEQ ID NO: 1218605 - RNA, 19 nt, Human
cugagacucgcgacaaugc

SEQ ID NO: 1218606 - RNA, 17 nt, Human
cugagacucgcgacaau

SEQ ID NO: 1218607 - RNA, 15 nt, Human
cugcauguuugugau

SEQ ID NO: 1218608 - RNA, 13 nt, Human
cugcauguuacau

SEQ ID NO: 1218609 - RNA, 22 nt, Human
cugcauuuaaaagauacaguua

SEQ ID NO: 1218610 - RNA, 20 nt, Human
cugcauuuaaaagauacagu

SEQ ID NO: 1218611 - RNA, 13 nt, Human
cugcauuggcuuu

SEQ ID NO: 1218612 - RNA, 17 nt, Human
cugccaaugggagcuca

SEQ ID NO: 1218613 - RNA, 15 nt, Human
cugccaaugggagcu

SEQ ID NO: 1218614 - RNA, 12 nt, Human
cugccauccagg

SEQ ID NO: 1218615 - RNA, 23 nt, Human
cugccauauucuguuggccagug

SEQ ID NO: 1218616 - RNA, 22 nt, Human
cugccauauucuguuggccagu

SEQ ID NO: 1218617 - RNA, 21 nt, Human
cugccauauucuguuggccag

SEQ ID NO: 1218618 - RNA, 20 nt, Human
cugccauauucuguuggcca

SEQ ID NO: 1218619 - RNA, 15 nt, Human
cugccagggacagag

SEQ ID NO: 1218620 - RNA, 12 nt, Human
cugccagggaca

SEQ ID NO: 1218621 - RNA, 11 nt, Human
cugccagggac

SEQ ID NO: 1218622 - RNA, 18 nt, Human
cugcccugugggccccca

SEQ ID NO: 1218623 - RNA, 16 nt, Human
cugcccugugggcccc

SEQ ID NO: 1218624 - RNA, 15 nt, Human
cugcccugugggccc

SEQ ID NO: 1218625 - RNA, 13 nt, Human
cugcccugugagu

SEQ ID NO: 1218626 - RNA, 12 nt, Human
cugcccugugag

SEQ ID NO: 1218627 - RNA, 22 nt, Human
cugccccucaacucuccuccag

SEQ ID NO: 1218628 - RNA, 14 nt, Human
cugccccucaacuc

SEQ ID NO: 1218629 - RNA, 21 nt, Human
cuguaggaagguuaauguuca

SEQ ID NO: 1218630 - RNA, 18 nt, Human
cugucagccauuccuguu

SEQ ID NO: 1218631 - RNA, 18 nt, Human
cugucauuugagcagggc

SEQ ID NO: 1218632 - RNA, 17 nt, Human
cugucauuugagcaggg

SEQ ID NO: 1218633 - RNA, 20 nt, Human
cugucauuugagcagggcuc

SEQ ID NO: 1218634 - RNA, 15 nt, Human
cugugcucuggacag

SEQ ID NO: 1218635 - RNA, 14 nt, Human
cugugcucuggaca

SEQ ID NO: 1218636 - RNA, 15 nt, Human
cugugaagagaacca

SEQ ID NO: 1218637 - RNA, 15 nt, Human
cugucgcccagucug

SEQ ID NO: 1218638 - RNA, 13 nt, Human
cugucgcccaguc

SEQ ID NO: 1218639 - RNA, 23 nt, Human
cuggugacuuuccucuuuggucu

SEQ ID NO: 1218640 - RNA, 17 nt, Human
cuggguguggcgcagca

SEQ ID NO: 1218641 - RNA, 16 nt, Human
cuggguguggcgcagc

SEQ ID NO: 1218642 - RNA, 23 nt, Human
cuggguggcaccagcagccugga

SEQ ID NO: 1218643 - RNA, 21 nt, Human
cuggugacuuuccucuuuggu

SEQ ID NO: 1218644 - RNA, 20 nt, Human
cuggugacuuuccucuuugg

SEQ ID NO: 1218645 - RNA, 15 nt, Human
cuggugacuuuccuc

SEQ ID NO: 1218646 - RNA, 14 nt, Human
cuggguucuaccca

SEQ ID NO: 1218647 - RNA, 15 nt, Human
cuggguucacugcaa

SEQ ID NO: 1218648 - RNA, 14 nt, Human
cuggguucacugca

SEQ ID NO: 1218649 - RNA, 17 nt, Human
cugggcagaaggaagac

SEQ ID NO: 1218650 - RNA, 18 nt, Human
cugggcagaaggaagacu

SEQ ID NO: 1218651 - RNA, 12 nt, Human
cugggcagagga

SEQ ID NO: 1218652 - RNA, 16 nt, Human
cuggggccgaaagaac

SEQ ID NO: 1218653 - RNA, 13 nt, Human
cugggacacaguu

SEQ ID NO: 1218654 - RNA, 12 nt, Human
cugggacacagu

SEQ ID NO: 1218655 - RNA, 21 nt, Human
cuggccccucagggucccugg

SEQ ID NO: 1218656 - RNA, 20 nt, Human
cuggccccucagggucccug

SEQ ID NO: 1218657 - RNA, 18 nt, Human
cuggccccucaggguccc

SEQ ID NO: 1218658 - RNA, 17 nt, Human
cuggccccucagggucc

SEQ ID NO: 1218659 - RNA, 12 nt, Human
cuggcagcucag

SEQ ID NO: 1218660 - RNA, 14 nt, Human
cuggcagcucagag

SEQ ID NO: 1218661 - RNA, 13 nt, Human
cuggcagcucaga

SEQ ID NO: 1218662 - RNA, 13 nt, Human
cuggccccucagg

SEQ ID NO: 1218663 - RNA, 15 nt, Human
cuggcagcucagaga

SEQ ID NO: 1218664 - RNA, 16 nt, Human
augucagugugacuga

SEQ ID NO: 1218665 - RNA, 21 nt, Human
augucagugugacugaucucu

SEQ ID NO: 1218666 - RNA, 23 nt, Human
auguccaagaagcccaggaaagg

SEQ ID NO: 1218667 - RNA, 19 nt, Human
auguccaagaagcccagga

SEQ ID NO: 1218668 - RNA, 15 nt, Human
auguauguguaagua

SEQ ID NO: 1218669 - RNA, 12 nt, Human
auguauguguaa

SEQ ID NO: 1218670 - RNA, 15 nt, Human
auguaucugagcagg

SEQ ID NO: 1218671 - RNA, 22 nt, Human
uuugggggaaaauuuagaaaua

SEQ ID NO: 1218672 - RNA, 14 nt, Human
uuuggggauauuuu

SEQ ID NO: 1218673 - RNA, 22 nt, Human
uuugggaggccaaggugggagg

SEQ ID NO: 1218674 - RNA, 13 nt, Human
uuuguagagccag

SEQ ID NO: 1218675 - RNA, 14 nt, Human
uuuguuugaacuga

SEQ ID NO: 1218676 - RNA, 13 nt, Human
uuuguuugaacug

SEQ ID NO: 1218677 - RNA, 12 nt, Human
uuuguuugaacu

SEQ ID NO: 1218678 - RNA, 15 nt, Human
uuugugauacaaugc

SEQ ID NO: 1218679 - RNA, 19 nt, Human
uuugugaggaagccgcugg

SEQ ID NO: 1218680 - RNA, 18 nt, Human
uuugugaggaagccgcug

SEQ ID NO: 1218681 - RNA, 16 nt, Human
uuuuaagaggcagggu

SEQ ID NO: 1218682 - RNA, 15 nt, Human
uuuuaagaggcaggg

SEQ ID NO: 1218683 - RNA, 15 nt, Human
uuuuaagugcugcau

SEQ ID NO: 1218684 - RNA, 18 nt, Human
uuuguuugaacugauaaa

SEQ ID NO: 1218685 - RNA, 14 nt, Human
auguuuuccaugag

SEQ ID NO: 1218686 - RNA, 18 nt, Human
auguuuuucuucucccuc

SEQ ID NO: 1218687 - RNA, 14 nt, Human
auuaagaaagacua

SEQ ID NO: 1218688 - RNA, 13 nt, Human
auuaagaaagacu

SEQ ID NO: 1218689 - RNA, 23 nt, Human
auuaacuuuuauaaacuuuaccu

SEQ ID NO: 1218690 - RNA, 20 nt, Human
auuaacuuuuauaaacuuua

SEQ ID NO: 1218691 - RNA, 19 nt, Human
auuaacuuuuauaaacuuu

SEQ ID NO: 1218692 - RNA, 17 nt, Human
auuaacuuuuauaaacu

SEQ ID NO: 1218693 - RNA, 16 nt, Human
auuaacuuuuauaaac

SEQ ID NO: 1218694 - RNA, 12 nt, Human
auuaacuuuuau

SEQ ID NO: 1218695 - RNA, 20 nt, Human
auuaaccacuucagcugacu

SEQ ID NO: 1218696 - RNA, 18 nt, Human
auuaaccacuucagcuga

SEQ ID NO: 1218697 - RNA, 17 nt, Human
auuaaccacuucagcug

SEQ ID NO: 1218698 - RNA, 21 nt, Human
auuaaacuuaaucuaaaugga

SEQ ID NO: 1218699 - RNA, 19 nt, Human
auuaaacuuaaucuaaaug

SEQ ID NO: 1218700 - RNA, 17 nt, Human
auuaaacuuaaucuaaa

SEQ ID NO: 1218701 - RNA, 19 nt, Human
uuuuccagguuuaagcugu

SEQ ID NO: 1218702 - RNA, 19 nt, Human
uuuuauaaacuuuaccuuu

SEQ ID NO: 1218703 - RNA, 17 nt, Human
uuuuauaaacuuuaccu

SEQ ID NO: 1218704 - RNA, 14 nt, Human
uuuuauaaacuuua

SEQ ID NO: 1218705 - RNA, 13 nt, Human
uuuuauaaacuuu

SEQ ID NO: 1218706 - RNA, 12 nt, Human
uuuuauaaacuu

SEQ ID NO: 1218707 - RNA, 14 nt, Human
auguuggccaggcu

SEQ ID NO: 1218708 - RNA, 16 nt, Human
auguuggccaggcugg

SEQ ID NO: 1218709 - RNA, 21 nt, Human
uuuuaagugcugcauuuaaaa

SEQ ID NO: 1218710 - RNA, 17 nt, Human
uuuuaagugcugcauuu

SEQ ID NO: 1218711 - RNA, 16 nt, Human
uuuuaagugcugcauu

SEQ ID NO: 1218712 - RNA, 21 nt, Human
auguucaucauccuaagcuau

SEQ ID NO: 1218713 - RNA, 23 nt, Human
auuauuuauuaaaugcccagccc

SEQ ID NO: 1218714 - RNA, 22 nt, Human
auuaccugaauuuuggcugugu

SEQ ID NO: 1218715 - RNA, 19 nt, Human
auuaccacagacauacuaa

SEQ ID NO: 1218716 - RNA, 19 nt, Human
auuccccaggaggccagcc

SEQ ID NO: 1218717 - RNA, 16 nt, Human
auuccccaggaggcca

SEQ ID NO: 1218718 - RNA, 20 nt, Human
auuccccagauugcaacagg

SEQ ID NO: 1218719 - RNA, 21 nt, Human
auucaguuguuagugugucuu

SEQ ID NO: 1218720 - RNA, 23 nt, Human
auucaggaagcucagggccuggc

SEQ ID NO: 1218721 - RNA, 22 nt, Human
auucaggaagcucagggccugg

SEQ ID NO: 1218722 - RNA, 21 nt, Human
auucaggaagcucagggccug

SEQ ID NO: 1218723 - RNA, 18 nt, Human
auucagcucugcaagaau

SEQ ID NO: 1218724 - RNA, 14 nt, Human
auucagcucugcaa

SEQ ID NO: 1218725 - RNA, 21 nt, Human
auugcaacaggcugggcuuca

SEQ ID NO: 1218726 - RNA, 16 nt, Human
auugcaacaggcuggg

SEQ ID NO: 1218727 - RNA, 15 nt, Human
auugcaacaggcugg

SEQ ID NO: 1218728 - RNA, 17 nt, Human
auugaccugaggcccuu

SEQ ID NO: 1218729 - RNA, 13 nt, Human
auugaccugaggc

SEQ ID NO: 1218730 - RNA, 18 nt, Human
auugacaggauuauugga

SEQ ID NO: 1218731 - RNA, 19 nt, Human
auugcggacagccacggcc

SEQ ID NO: 1218732 - RNA, 18 nt, Human
auugcggacagccacggc

SEQ ID NO: 1218733 - RNA, 16 nt, Human
auugcggacagccacg

SEQ ID NO: 1218734 - RNA, 21 nt, Human
auugcccacgcuggagugcag

SEQ ID NO: 1218735 - RNA, 17 nt, Human
auugcccacgcuggagu

SEQ ID NO: 1218736 - RNA, 23 nt, Human
auugccauuucuuccacaagagc

SEQ ID NO: 1218737 - RNA, 14 nt, Human
auucucagaaucuc

SEQ ID NO: 1218738 - RNA, 16 nt, Human
auucuacuuugagugc

SEQ ID NO: 1218739 - RNA, 13 nt, Human
auucuacuuugag

SEQ ID NO: 1218740 - RNA, 17 nt, Human
auucuccaccugccagg

SEQ ID NO: 1218741 - RNA, 16 nt, Human
auucuccaccugccag

SEQ ID NO: 1218742 - RNA, 13 nt, Human
auucuccaccugc

SEQ ID NO: 1218743 - RNA, 20 nt, Human
auucucagaaucucaaauaa

SEQ ID NO: 1218744 - RNA, 18 nt, Human
auucucagaaucucaaau

SEQ ID NO: 1218745 - RNA, 18 nt, Human
auucuccaccugccaggg

SEQ ID NO: 1218746 - RNA, 14 nt, Human
auugcuacuguccu

SEQ ID NO: 1218747 - RNA, 21 nt, Human
auuguuuggggaugagaaagg

SEQ ID NO: 1218748 - RNA, 16 nt, Human
auuuaacagaaaugua

SEQ ID NO: 1218749 - RNA, 20 nt, Human
auuuaacagaaauguacagc

SEQ ID NO: 1218750 - RNA, 19 nt, Human
auuuaacagaaauguacag

SEQ ID NO: 1218751 - RNA, 17 nt, Human
auuuaacagaaauguac

SEQ ID NO: 1218752 - RNA, 23 nt, Human
auuuaauuuuuuugagacagagu

SEQ ID NO: 1218753 - RNA, 19 nt, Human
auuuaauuuuuuugagaca

SEQ ID NO: 1218754 - RNA, 22 nt, Human
auuuacaacugggggaggguga

SEQ ID NO: 1218755 - RNA, 23 nt, Human
auuggcuuuggguugcaggaccu

SEQ ID NO: 1218756 - RNA, 13 nt, Human
auuuaaaagauac

SEQ ID NO: 1218757 - RNA, 16 nt, Human
auuuauuauggcacau

SEQ ID NO: 1218758 - RNA, 14 nt, Human
auuuccugugucuu

SEQ ID NO: 1218759 - RNA, 21 nt, Human
auuucuaaaucuccaaaauaa

SEQ ID NO: 1218760 - RNA, 13 nt, Human
auuucuaaaucuc

SEQ ID NO: 1218761 - RNA, 12 nt, Human
auuucuaaaucu

SEQ ID NO: 1218762 - RNA, 13 nt, Human
auuuauuauggca

SEQ ID NO: 1218763 - RNA, 22 nt, Human
auuuauuaaaugcccagccccu

SEQ ID NO: 1218764 - RNA, 20 nt, Human
auuuauuaaaugcccagccc

SEQ ID NO: 1218765 - RNA, 20 nt, Human
auuucuuuugccguuauuaa

SEQ ID NO: 1218766 - RNA, 23 nt, Human
auuugaggucuguucuuuccaaa

SEQ ID NO: 1218767 - RNA, 15 nt, Human
auuugaggucuguuc

SEQ ID NO: 1218768 - RNA, 17 nt, Human
auuugagcagggcucag

SEQ ID NO: 1218769 - RNA, 21 nt, Human
auuuggugguuucagaaaugu

SEQ ID NO: 1218770 - RNA, 20 nt, Human
auuuggugguuucagaaaug

SEQ ID NO: 1218771 - RNA, 18 nt, Human
auuuggugguuucagaaa

SEQ ID NO: 1218772 - RNA, 17 nt, Human
auuuggugguuucagaa

SEQ ID NO: 1218773 - RNA, 17 nt, Human
auuuuauuaugcaugaa

SEQ ID NO: 1218774 - RNA, 15 nt, Human
auuuuauuaugcaug

SEQ ID NO: 1218775 - RNA, 14 nt, Human
auuuuauuaugcau

SEQ ID NO: 1218776 - RNA, 13 nt, Human
auuuuauuaugca

SEQ ID NO: 1218777 - RNA, 21 nt, Human
auuuuacuuuaaaaggagcca

SEQ ID NO: 1218778 - RNA, 23 nt, Human
auuucuuuugccguuauuaaaaa

SEQ ID NO: 1218779 - RNA, 19 nt, Human
aucuggguucacugcaacc

SEQ ID NO: 1218780 - RNA, 19 nt, Human
aucuugcucugcugacaga

SEQ ID NO: 1218781 - RNA, 18 nt, Human
aucuugaauuguaaggaa

SEQ ID NO: 1218782 - RNA, 14 nt, Human
uugccguuauuaaa

SEQ ID NO: 1218783 - RNA, 19 nt, Human
uugccgucuaccugagggg

SEQ ID NO: 1218784 - RNA, 18 nt, Human
uugccgucuaccugaggg

SEQ ID NO: 1218785 - RNA, 15 nt, Human
uugccgucuaccuga

SEQ ID NO: 1218786 - RNA, 13 nt, Human
uugccgucuaccu

SEQ ID NO: 1218787 - RNA, 13 nt, Human
aucuccaaaauaa

SEQ ID NO: 1218788 - RNA, 14 nt, Human
aucucccccagccc

SEQ ID NO: 1218789 - RNA, 13 nt, Human
aucucccccagcc

SEQ ID NO: 1218790 - RNA, 12 nt, Human
aucucccccagc

SEQ ID NO: 1218791 - RNA, 16 nt, Human
aucucacacaugagca

SEQ ID NO: 1218792 - RNA, 15 nt, Human
aucucacacaugagc

SEQ ID NO: 1218793 - RNA, 19 nt, Human
auccuaguuccaccaucaa

SEQ ID NO: 1218794 - RNA, 15 nt, Human
auccuaguuccacca

SEQ ID NO: 1218795 - RNA, 14 nt, Human
aucucagggccugg

SEQ ID NO: 1218796 - RNA, 12 nt, Human
uugcaugaggcu

SEQ ID NO: 1218797 - RNA, 14 nt, Human
uugcaccacugcac

SEQ ID NO: 1218798 - RNA, 16 nt, Human
uugauucagacagcug

SEQ ID NO: 1218799 - RNA, 15 nt, Human
uugauucagacagcu

SEQ ID NO: 1218800 - RNA, 14 nt, Human
uugauucagacagc

SEQ ID NO: 1218801 - RNA, 15 nt, Human
augaaagggcccaga

SEQ ID NO: 1218802 - RNA, 22 nt, Human
uuggggggcugaggugggagga

SEQ ID NO: 1218803 - RNA, 18 nt, Human
uuggcuagagguucaaag

SEQ ID NO: 1218804 - RNA, 23 nt, Human
uuggcgcugccccuggcagcccc

SEQ ID NO: 1218805 - RNA, 13 nt, Human
uuggcugcaggga

SEQ ID NO: 1218806 - RNA, 22 nt, Human
augacacaugcaaggucauuuu

SEQ ID NO: 1218807 - RNA, 14 nt, Human
augacacaugcaag

SEQ ID NO: 1218808 - RNA, 22 nt, Human
augagaaagguugaagcaccaa

SEQ ID NO: 1218809 - RNA, 21 nt, Human
augagaaagguugaagcacca

SEQ ID NO: 1218810 - RNA, 17 nt, Human
augacuuacuguacaug

SEQ ID NO: 1218811 - RNA, 16 nt, Human
augacuuacuguacau

SEQ ID NO: 1218812 - RNA, 18 nt, Human
augacacgaauauugcug

SEQ ID NO: 1218813 - RNA, 14 nt, Human
augacuuacuguac

SEQ ID NO: 1218814 - RNA, 22 nt, Human
augacuuaagcacacuugacau

SEQ ID NO: 1218815 - RNA, 24 nt, Human
uuuauggcuuuugugcauuaucua

SEQ ID NO: 1218816 - RNA, 23 nt, Human
augcugucccuuacgugaguccu

SEQ ID NO: 1218817 - RNA, 19 nt, Human
augcugucccuuacgugag

SEQ ID NO: 1218818 - RNA, 15 nt, Human
auggaacacucugag

SEQ ID NO: 1218819 - RNA, 14 nt, Human
auggaacacucuga

SEQ ID NO: 1218820 - RNA, 15 nt, Human
auggaagacagcucu

SEQ ID NO: 1218821 - RNA, 17 nt, Human
auggaacacucugagac

SEQ ID NO: 1218822 - RNA, 16 nt, Human
auggaacacucugaga

SEQ ID NO: 1218823 - RNA, 15 nt, Human
augcucugcauguua

SEQ ID NO: 1218824 - RNA, 22 nt, Human
augcuguaacuuucugaaauaa

SEQ ID NO: 1218825 - RNA, 16 nt, Human
auggaagacagcucuu

SEQ ID NO: 1218826 - RNA, 19 nt, Human
auggacaugaucuucuuua

SEQ ID NO: 1218827 - RNA, 14 nt, Human
auggacaugaucuu

SEQ ID NO: 1218828 - RNA, 20 nt, Human
auggccuuugcuugaaagaa

SEQ ID NO: 1218829 - RNA, 21 nt, Human
auggccgggcgcgguggcuca

SEQ ID NO: 1218830 - RNA, 19 nt, Human
auggacuaacuugucuuug

SEQ ID NO: 1218831 - RNA, 23 nt, Human
auggacguguuaugacuccagaa

SEQ ID NO: 1218832 - RNA, 18 nt, Human
auggauuuccagccaaag

SEQ ID NO: 1218833 - RNA, 20 nt, Human
auggacguguuaugacucca

SEQ ID NO: 1218834 - RNA, 19 nt, Human
auggacguguuaugacucc

SEQ ID NO: 1218835 - RNA, 23 nt, Human
auggcacaucagcacgauuucug

SEQ ID NO: 1218836 - RNA, 17 nt, Human
auggcacaucagcacga

SEQ ID NO: 1218837 - RNA, 21 nt, Human
augauucaacagguuuuccug

SEQ ID NO: 1218838 - RNA, 19 nt, Human
augauuaaccacuucagcu

SEQ ID NO: 1218839 - RNA, 21 nt, Human
augauuaaccacuucagcuga

SEQ ID NO: 1218840 - RNA, 20 nt, Human
augauuaaccacuucagcug

SEQ ID NO: 1218841 - RNA, 12 nt, Human
augcacuuuguu

SEQ ID NO: 1218842 - RNA, 14 nt, Human
augcaccagcccuu

SEQ ID NO: 1218843 - RNA, 13 nt, Human
augcaccagcccu

SEQ ID NO: 1218844 - RNA, 19 nt, Human
uugugauacaaugcugugc

SEQ ID NO: 1218845 - RNA, 18 nt, Human
uugugauacaaugcugug

SEQ ID NO: 1218846 - RNA, 22 nt, Human
uuguucuggcucuuccaggcug

SEQ ID NO: 1218847 - RNA, 20 nt, Human
uuguucuggcucuuccaggc

SEQ ID NO: 1218848 - RNA, 19 nt, Human
uuguucuggcucuuccagg

SEQ ID NO: 1218849 - RNA, 17 nt, Human
uuguguguuuauuguca

SEQ ID NO: 1218850 - RNA, 13 nt, Human
uugugguuaaucu

SEQ ID NO: 1218851 - RNA, 16 nt, Human
uuguuuucaguguaca

SEQ ID NO: 1218852 - RNA, 13 nt, Human
uuguuuucagugu

SEQ ID NO: 1218853 - RNA, 16 nt, Human
augcacuuuguucugg

SEQ ID NO: 1218854 - RNA, 15 nt, Human
augcacuuuguucug

SEQ ID NO: 1218855 - RNA, 16 nt, Human
uuuaagugcugcauuu

SEQ ID NO: 1218856 - RNA, 15 nt, Human
uuuaagugcugcauu

SEQ ID NO: 1218857 - RNA, 19 nt, Human
uuuaagugcugcauuuaaa

SEQ ID NO: 1218858 - RNA, 17 nt, Human
uuuaagugcugcauuua

SEQ ID NO: 1218859 - RNA, 11 nt, Human
augcccagccc

SEQ ID NO: 1218860 - RNA, 17 nt, Human
augcagccucacagucc

SEQ ID NO: 1218861 - RNA, 15 nt, Human
augcagccucacagu

SEQ ID NO: 1218862 - RNA, 14 nt, Human
augcagccucacag

SEQ ID NO: 1218863 - RNA, 13 nt, Human
augcagccucaca

SEQ ID NO: 1218864 - RNA, 19 nt, Human
uuuaauuuuuuugagacag

SEQ ID NO: 1218865 - RNA, 13 nt, Human
augcagugcuucc

SEQ ID NO: 1218866 - RNA, 21 nt, Human
uucucacugccaugccagcuu

SEQ ID NO: 1218867 - RNA, 14 nt, Human
aucaggccaggccc

SEQ ID NO: 1218868 - RNA, 13 nt, Human
aucaggccaggcc

SEQ ID NO: 1218869 - RNA, 13 nt, Human
uucucagaaucuc

SEQ ID NO: 1218870 - RNA, 19 nt, Human
uucuaaaucuccaaaauaa

SEQ ID NO: 1218871 - RNA, 13 nt, Human
uucgcuccugugu

SEQ ID NO: 1218872 - RNA, 21 nt, Human
uucgcaggauucuuccucccu

SEQ ID NO: 1218873 - RNA, 20 nt, Human
uucccuuuuuuggcugcuga

SEQ ID NO: 1218874 - RNA, 19 nt, Human
uucccuuuuuuggcugcug

SEQ ID NO: 1218875 - RNA, 18 nt, Human
uucccuuuuuuggcugcu

SEQ ID NO: 1218876 - RNA, 15 nt, Human
uucccuauuagagaa

SEQ ID NO: 1218877 - RNA, 20 nt, Human
aucaaccccuucgcuccugu

SEQ ID NO: 1218878 - RNA, 19 nt, Human
aucaaccccuucgcuccug

SEQ ID NO: 1218879 - RNA, 22 nt, Human
aucaaccccuucgcuccugugu

SEQ ID NO: 1218880 - RNA, 21 nt, Human
aucauugaaaucuuuuugcuu

SEQ ID NO: 1218881 - RNA, 23 nt, Human
aucaggccaggcccucugcccac

SEQ ID NO: 1218882 - RNA, 22 nt, Human
aucaggccaggcccucugccca

SEQ ID NO: 1218883 - RNA, 21 nt, Human
aucaggccaggcccucugccc

SEQ ID NO: 1218884 - RNA, 16 nt, Human
uucucuuuucaaaaca

SEQ ID NO: 1218885 - RNA, 17 nt, Human
uucucuacucuagggaa

SEQ ID NO: 1218886 - RNA, 13 nt, Human
uucugccgcagcc

SEQ ID NO: 1218887 - RNA, 19 nt, Human
uucugcagccacuauuguu

SEQ ID NO: 1218888 - RNA, 14 nt, Human
uucugacccaugcu

SEQ ID NO: 1218889 - RNA, 16 nt, Human
uucugacccaugcugc

SEQ ID NO: 1218890 - RNA, 15 nt, Human
uucuggcucuuccag

SEQ ID NO: 1218891 - RNA, 16 nt, Human
uucugccgcagcccug

SEQ ID NO: 1218892 - RNA, 20 nt, Human
uucuggcuaugcauuugaaa

SEQ ID NO: 1218893 - RNA, 18 nt, Human
uucuggcuaugcauuuga

SEQ ID NO: 1218894 - RNA, 15 nt, Human
uucugccgcagcccu

SEQ ID NO: 1218895 - RNA, 14 nt, Human
uucugccgcagccc

SEQ ID NO: 1218896 - RNA, 13 nt, Human
auccuaguuccac

SEQ ID NO: 1218897 - RNA, 21 nt, Human
auccuaggcauuugcugaaua

SEQ ID NO: 1218898 - RNA, 21 nt, Human
uugaaauuuuuauuaaauuau

SEQ ID NO: 1218899 - RNA, 11 nt, Human
uugaaaucuuu

SEQ ID NO: 1218900 - RNA, 20 nt, Human
uugaaauauaggaacuuaaa

SEQ ID NO: 1218901 - RNA, 13 nt, Human
uucuugcaaagua

SEQ ID NO: 1218902 - RNA, 12 nt, Human
uucuugcaaagu

SEQ ID NO: 1218903 - RNA, 22 nt, Human
uucuuucuggcuaugcauuuga

SEQ ID NO: 1218904 - RNA, 13 nt, Human
uucuuaauucuua

SEQ ID NO: 1218905 - RNA, 20 nt, Human
uucuguuuuucuaggccugg

SEQ ID NO: 1218906 - RNA, 21 nt, Human
uucuguuggccagugugacaa

SEQ ID NO: 1218907 - RNA, 18 nt, Human
uucuguucuuucuggcua

SEQ ID NO: 1218908 - RNA, 17 nt, Human
auaggaaaaacugauuu

SEQ ID NO: 1218909 - RNA, 16 nt, Human
auaggaaaaacugauu

SEQ ID NO: 1218910 - RNA, 14 nt, Human
auaggaaaaacuga

SEQ ID NO: 1218911 - RNA, 12 nt, Human
auaggaaaaacu

SEQ ID NO: 1218912 - RNA, 19 nt, Human
auaggaacuuaaauaaugu

SEQ ID NO: 1218913 - RNA, 20 nt, Human
uucacaguucucuccuucuu

SEQ ID NO: 1218914 - RNA, 15 nt, Human
uucacaguucucucc

SEQ ID NO: 1218915 - RNA, 20 nt, Human
uucacagaugggugcuugga

SEQ ID NO: 1218916 - RNA, 18 nt, Human
uuauuuuuagacagaguc

SEQ ID NO: 1218917 - RNA, 17 nt, Human
uuauuuuuagacagagu

SEQ ID NO: 1218918 - RNA, 17 nt, Human
uucaaaauaaaaaugag

SEQ ID NO: 1218919 - RNA, 21 nt, Human
uucaagcgauucuucugcuuc

SEQ ID NO: 1218920 - RNA, 13 nt, Human
auauauaaccagu

SEQ ID NO: 1218921 - RNA, 12 nt, Human
auauauaaccag

SEQ ID NO: 1218922 - RNA, 22 nt, Human
auaguuggcuaggaccccucca

SEQ ID NO: 1218923 - RNA, 22 nt, Human
auaguuaagcgugcauaaguua

SEQ ID NO: 1218924 - RNA, 15 nt, Human
auaguggugugauuu

SEQ ID NO: 1218925 - RNA, 17 nt, Human
auaguggcuuaaaacaa

SEQ ID NO: 1218926 - RNA, 18 nt, Human
uucauuuaggugaggaag

SEQ ID NO: 1218927 - RNA, 17 nt, Human
uuccaaggguacuaagg

SEQ ID NO: 1218928 - RNA, 15 nt, Human
uuccaaggguacuaa

SEQ ID NO: 1218929 - RNA, 16 nt, Human
auauguggaguucauc

SEQ ID NO: 1218930 - RNA, 15 nt, Human
auauguggaguucau

SEQ ID NO: 1218931 - RNA, 19 nt, Human
uuccaccaucaagccacca

SEQ ID NO: 1218932 - RNA, 22 nt, Human
uucccaccucucucacuccuug

SEQ ID NO: 1218933 - RNA, 12 nt, Human
uucccaccucuc

SEQ ID NO: 1218934 - RNA, 18 nt, Human
uucccaagcucugcuccu

SEQ ID NO: 1218935 - RNA, 16 nt, Human
uucccaagcucugcuc

SEQ ID NO: 1218936 - RNA, 15 nt, Human
uucccaagcucugcu

SEQ ID NO: 1218937 - RNA, 14 nt, Human
uucccaagcucugc

SEQ ID NO: 1218938 - RNA, 13 nt, Human
uucccaagcucug

SEQ ID NO: 1218939 - RNA, 22 nt, Human
uuccagugaggcucugcccuug

SEQ ID NO: 1218940 - RNA, 21 nt, Human
uuccagugaggcucugcccuu

SEQ ID NO: 1218941 - RNA, 20 nt, Human
uuccagugaggcucugcccu

SEQ ID NO: 1218942 - RNA, 19 nt, Human
uuccagugaggcucugccc

SEQ ID NO: 1218943 - RNA, 13 nt, Human
uuccaggcuggga

SEQ ID NO: 1218944 - RNA, 21 nt, Human
uuccaggggugggacacccug

SEQ ID NO: 1218945 - RNA, 23 nt, Human
uucccaaagcagugcaugcuguc

SEQ ID NO: 1218946 - RNA, 17 nt, Human
uuccagguuuaagcugu

SEQ ID NO: 1218947 - RNA, 22 nt, Human
auaucugaaaauguauguguaa

SEQ ID NO: 1218948 - RNA, 20 nt, Human
auaucugaaaauguaugugu

SEQ ID NO: 1218949 - RNA, 17 nt, Human
auaucugaaaauguaug

SEQ ID NO: 1218950 - RNA, 16 nt, Human
auaucugaaaauguau

SEQ ID NO: 1218951 - RNA, 22 nt, Human
auaugcacacauuuuuuaaaug

SEQ ID NO: 1218952 - RNA, 16 nt, Human
auaugcacacauuuuu

SEQ ID NO: 1218953 - RNA, 15 nt, Human
auaugcacacauuuu

SEQ ID NO: 1218954 - RNA, 14 nt, Human
auaugcacacauuu

SEQ ID NO: 1218955 - RNA, 17 nt, Human
auauguaacaagccacc

SEQ ID NO: 1218956 - RNA, 16 nt, Human
auauguaacaagccac

SEQ ID NO: 1218957 - RNA, 18 nt, Human
uucagugccuuauggaac

SEQ ID NO: 1218958 - RNA, 13 nt, Human
uucagugccuuau

SEQ ID NO: 1218959 - RNA, 12 nt, Human
uucagugccuua

SEQ ID NO: 1218960 - RNA, 13 nt, Human
uucagaaaugugu

SEQ ID NO: 1218961 - RNA, 11 nt, Human
uucagaaaugu

SEQ ID NO: 1218962 - RNA, 21 nt, Human
uucaucccucuggggcuguuc

SEQ ID NO: 1218963 - RNA, 17 nt, Human
uucaucccucuggggcu

SEQ ID NO: 1218964 - RNA, 14 nt, Human
uuagcggagacgga

SEQ ID NO: 1218965 - RNA, 18 nt, Human
uuagccaagugugguaga

SEQ ID NO: 1218966 - RNA, 18 nt, Human
auaauuuaccugaagucu

SEQ ID NO: 1218967 - RNA, 18 nt, Human
uuagcaaauucuguuuuu

SEQ ID NO: 1218968 - RNA, 22 nt, Human
uuaguuugcaguuacacuaaaa

SEQ ID NO: 1218969 - RNA, 15 nt, Human
uuaguuucuccaagc

SEQ ID NO: 1218970 - RNA, 21 nt, Human
uuaggugugacugaauuucuu

SEQ ID NO: 1218971 - RNA, 16 nt, Human
uuaggugugacugaau

SEQ ID NO: 1218972 - RNA, 16 nt, Human
uuaggugaggaagcaa

SEQ ID NO: 1218973 - RNA, 20 nt, Human
uuagggaaggauacaaaagc

SEQ ID NO: 1218974 - RNA, 21 nt, Human
auaauacaccacuacauucug

SEQ ID NO: 1218975 - RNA, 20 nt, Human
auaauacaccacuacauucu

SEQ ID NO: 1218976 - RNA, 18 nt, Human
auaauacaccacuacauu

SEQ ID NO: 1218977 - RNA, 12 nt, Human
auaauacaccac

SEQ ID NO: 1218978 - RNA, 14 nt, Human
uuagacagucccug

SEQ ID NO: 1218979 - RNA, 22 nt, Human
auaauugacaggauuauuggaa

SEQ ID NO: 1218980 - RNA, 20 nt, Human
auaaugcgugcauaccacuu

SEQ ID NO: 1218981 - RNA, 15 nt, Human
auaaugcgugcauac

SEQ ID NO: 1218982 - RNA, 15 nt, Human
auaaugaaugaaaca

SEQ ID NO: 1218983 - RNA, 11 nt, Human
auaaauuauuu

SEQ ID NO: 1218984 - RNA, 16 nt, Human
auaacuaaaagguaug

SEQ ID NO: 1218985 - RNA, 13 nt, Human
uuagacagucccu

SEQ ID NO: 1218986 - RNA, 20 nt, Human
uuagacagagucucacuguu

SEQ ID NO: 1218987 - RNA, 19 nt, Human
uuacccucauguucuuaau

SEQ ID NO: 1218988 - RNA, 17 nt, Human
aguuggguggaugccug

SEQ ID NO: 1218989 - RNA, 19 nt, Human
aguugggcuuccucauagu

SEQ ID NO: 1218990 - RNA, 23 nt, Human
aguugccagucaccccggccacc

SEQ ID NO: 1218991 - RNA, 13 nt, Human
uuaaaaaaaaucc

SEQ ID NO: 1218992 - RNA, 17 nt, Human
aguuggucccccuucca

SEQ ID NO: 1218993 - RNA, 13 nt, Human
aguuggucccccu

SEQ ID NO: 1218994 - RNA, 11 nt, Human
aguuggucccc

SEQ ID NO: 1218995 - RNA, 20 nt, Human
uuaacagaaauguacagcaa

SEQ ID NO: 1218996 - RNA, 19 nt, Human
uuaacagaaauguacagca

SEQ ID NO: 1218997 - RNA, 19 nt, Human
uuaaauaaugugaaacugg

SEQ ID NO: 1218998 - RNA, 18 nt, Human
uuaaauaaugugaaacug

SEQ ID NO: 1218999 - RNA, 16 nt, Human
uuaaauaaugugaaac

SEQ ID NO: 1219000 - RNA, 17 nt, Human
uuaaaaaucucaaauuu

SEQ ID NO: 1219001 - RNA, 16 nt, Human
uuaaaaaucucaaauu

SEQ ID NO: 1219002 - RNA, 15 nt, Human
uuaaaaaucucaaau

SEQ ID NO: 1219003 - RNA, 14 nt, Human
uuaaaaaucucaaa

SEQ ID NO: 1219004 - RNA, 15 nt, Human
uuaaauaaugugaaa

SEQ ID NO: 1219005 - RNA, 21 nt, Human
uuaagaaaaaggaugcacaga

SEQ ID NO: 1219006 - RNA, 20 nt, Human
uuaagaaaaaggaugcacag

SEQ ID NO: 1219007 - RNA, 23 nt, Human
aguuuuuauggcuuuugugcauu

SEQ ID NO: 1219008 - RNA, 22 nt, Human
uuaagugcugcauuuaaaagau

SEQ ID NO: 1219009 - RNA, 19 nt, Human
uuaagugcugcauuuaaaa

SEQ ID NO: 1219010 - RNA, 16 nt, Human
uuaagugcugcauuua

SEQ ID NO: 1219011 - RNA, 15 nt, Human
uuaagugcugcauuu

SEQ ID NO: 1219012 - RNA, 9 nt, Human
uuaaggugg

SEQ ID NO: 1219013 - RNA, 22 nt, Human
uuaagaaagacuaucuaaaugu

SEQ ID NO: 1219014 - RNA, 20 nt, Human
uuaaugaaagacuguacaaa

SEQ ID NO: 1219015 - RNA, 19 nt, Human
uuaaugaaagacuguacaa

SEQ ID NO: 1219016 - RNA, 18 nt, Human
uuaaugaaagacuguaca

SEQ ID NO: 1219017 - RNA, 22 nt, Human
uuaaucugguuuauuuuuguuc

SEQ ID NO: 1219018 - RNA, 23 nt, Human
uuaaucauuaggugugacugaau

SEQ ID NO: 1219019 - RNA, 22 nt, Human
uuaaucauuaggugugacugaa

SEQ ID NO: 1219020 - RNA, 13 nt, Human
uuaaucauuaggu

SEQ ID NO: 1219021 - RNA, 18 nt, Human
uguucuuaguuugcaguu

SEQ ID NO: 1219022 - RNA, 18 nt, Human
uguucuagcauggcugcc

SEQ ID NO: 1219023 - RNA, 20 nt, Human
uguugcccaggcuggcgugc

SEQ ID NO: 1219024 - RNA, 15 nt, Human
uguugcccaggcugg

SEQ ID NO: 1219025 - RNA, 13 nt, Human
uguugcccaggcu

SEQ ID NO: 1219026 - RNA, 19 nt, Human
uguucuuucacccuuuucu

SEQ ID NO: 1219027 - RNA, 22 nt, Human
uguucuugguuuguaaauuaac

SEQ ID NO: 1219028 - RNA, 20 nt, Human
uguucuugguuuguaaauua

SEQ ID NO: 1219029 - RNA, 17 nt, Human
uguuuauugucaaagug

SEQ ID NO: 1219030 - RNA, 14 nt, Human
uguuuauugucaaa

SEQ ID NO: 1219031 - RNA, 12 nt, Human
aguucucuccuu

SEQ ID NO: 1219032 - RNA, 16 nt, Human
aguucaauucucauuu

SEQ ID NO: 1219033 - RNA, 23 nt, Human
aguuccucauuagcauuuugcua

SEQ ID NO: 1219034 - RNA, 14 nt, Human
uguguuaugaagca

SEQ ID NO: 1219035 - RNA, 16 nt, Human
ugugucucuugguccu

SEQ ID NO: 1219036 - RNA, 13 nt, Human
ugugucucuuggu

SEQ ID NO: 1219037 - RNA, 20 nt, Human
ugugucagguggggcagcuu

SEQ ID NO: 1219038 - RNA, 19 nt, Human
ugugucagguggggcagcu

SEQ ID NO: 1219039 - RNA, 17 nt, Human
ugugucagguggggcag

SEQ ID NO: 1219040 - RNA, 19 nt, Human
aguggaaaaauagccugcc

SEQ ID NO: 1219041 - RNA, 18 nt, Human
aguggaaaaauagccugc

SEQ ID NO: 1219042 - RNA, 11 nt, Human
aguggaaaaau

SEQ ID NO: 1219043 - RNA, 19 nt, Human
uguuaaugauagcuacugu

SEQ ID NO: 1219044 - RNA, 21 nt, Human
uguuaacauggacaugaucuu

SEQ ID NO: 1219045 - RNA, 12 nt, Human
ugugguuucauu

SEQ ID NO: 1219046 - RNA, 16 nt, Human
agugcuuccaaggaug

SEQ ID NO: 1219047 - RNA, 17 nt, Human
agugccuuacacaaugg

SEQ ID NO: 1219048 - RNA, 20 nt, Human
agugcugcauuuaaaagaua

SEQ ID NO: 1219049 - RNA, 15 nt, Human
agugccuuacacaau

SEQ ID NO: 1219050 - RNA, 20 nt, Human
agugcugggauuacaagcgu

SEQ ID NO: 1219051 - RNA, 22 nt, Human
agugcugcauuuaaaagauaca

SEQ ID NO: 1219052 - RNA, 20 nt, Human
agugcugggauuacaggugu

SEQ ID NO: 1219053 - RNA, 19 nt, Human
agugcugggauuacaggug

SEQ ID NO: 1219054 - RNA, 15 nt, Human
ugugcugcccugccc

SEQ ID NO: 1219055 - RNA, 14 nt, Human
ugugcugcccugcc

SEQ ID NO: 1219056 - RNA, 13 nt, Human
ugugcugcccugc

SEQ ID NO: 1219057 - RNA, 19 nt, Human
ugugcucuggacaggcaug

SEQ ID NO: 1219058 - RNA, 18 nt, Human
ugugcucuggacaggcau

SEQ ID NO: 1219059 - RNA, 16 nt, Human
ugugcucuggacaggc

SEQ ID NO: 1219060 - RNA, 21 nt, Human
ugugcccuaaaguguauuuuu

SEQ ID NO: 1219061 - RNA, 20 nt, Human
ugugcccuaaaguguauuuu

SEQ ID NO: 1219062 - RNA, 21 nt, Human
agucucacuguugcccaggcu

SEQ ID NO: 1219063 - RNA, 20 nt, Human
agucucacuguugcccaggc

SEQ ID NO: 1219064 - RNA, 19 nt, Human
agucucacuguugcccagg

SEQ ID NO: 1219065 - RNA, 18 nt, Human
agucucacuguugcccag

SEQ ID NO: 1219066 - RNA, 15 nt, Human
ugugcucuggacagg

SEQ ID NO: 1219067 - RNA, 23 nt, Human
ugugcucugaucauccacugugc

SEQ ID NO: 1219068 - RNA, 22 nt, Human
ugugcucugaucauccacugug

SEQ ID NO: 1219069 - RNA, 14 nt, Human
agugcccacaggau

SEQ ID NO: 1219070 - RNA, 14 nt, Human
agugcaugcugucc

SEQ ID NO: 1219071 - RNA, 16 nt, Human
agugccaaaaacaaca

SEQ ID NO: 1219072 - RNA, 21 nt, Human
agugaguugauagcacagacc

SEQ ID NO: 1219073 - RNA, 24 nt, Human
agugauucuccugccucagccucc

SEQ ID NO: 1219074 - RNA, 22 nt, Human
agugauucuccugccucagccu

SEQ ID NO: 1219075 - RNA, 16 nt, Human
agugagucgaggacag

SEQ ID NO: 1219076 - RNA, 17 nt, Human
aggugguuauggagagg

SEQ ID NO: 1219077 - RNA, 14 nt, Human
agguuggugggggc

SEQ ID NO: 1219078 - RNA, 17 nt, Human
uguaacuuucugaaaua

SEQ ID NO: 1219079 - RNA, 22 nt, Human
uguaagcucuacugaggugcua

SEQ ID NO: 1219080 - RNA, 23 nt, Human
aggucuugaacuccuggccucaa

SEQ ID NO: 1219081 - RNA, 20 nt, Human
aggugcacaagcuccaagcu

SEQ ID NO: 1219082 - RNA, 18 nt, Human
aggugcacaagcuccaag

SEQ ID NO: 1219083 - RNA, 17 nt, Human
aggugcacaagcuccaa

SEQ ID NO: 1219084 - RNA, 16 nt, Human
aggugcacaagcucca

SEQ ID NO: 1219085 - RNA, 15 nt, Human
aggugcacaagcucc

SEQ ID NO: 1219086 - RNA, 20 nt, Human
aggugggauccuccaggugc

SEQ ID NO: 1219087 - RNA, 21 nt, Human
aggugcacaagcuccaagcuc

SEQ ID NO: 1219088 - RNA, 14 nt, Human
uguaauuugugaua

SEQ ID NO: 1219089 - RNA, 14 nt, Human
uguagagugggagc

SEQ ID NO: 1219090 - RNA, 13 nt, Human
uguagagugggag

SEQ ID NO: 1219091 - RNA, 20 nt, Human
aguaauaugcacacauuuuu

SEQ ID NO: 1219092 - RNA, 19 nt, Human
aguaauaugcacacauuuu

SEQ ID NO: 1219093 - RNA, 18 nt, Human
aguaauaugcacacauuu

SEQ ID NO: 1219094 - RNA, 11 nt, Human
agguuuuccug

SEQ ID NO: 1219095 - RNA, 20 nt, Human
aguacacuguuucaaacuuu

SEQ ID NO: 1219096 - RNA, 16 nt, Human
aguacacuguuucaaa

SEQ ID NO: 1219097 - RNA, 14 nt, Human
aguacacuguuuca

SEQ ID NO: 1219098 - RNA, 17 nt, Human
aguagaagucuuagaug

SEQ ID NO: 1219099 - RNA, 12 nt, Human
aguagagacagg

SEQ ID NO: 1219100 - RNA, 20 nt, Human
uguaggaagguuaauguuca

SEQ ID NO: 1219101 - RNA, 16 nt, Human
ugucagguggggcagc

SEQ ID NO: 1219102 - RNA, 19 nt, Human
ugucagcugaaccugggua

SEQ ID NO: 1219103 - RNA, 19 nt, Human
agucacugagacagcccgg

SEQ ID NO: 1219104 - RNA, 16 nt, Human
ugucagcugaaccugg

SEQ ID NO: 1219105 - RNA, 14 nt, Human
agucaccaagccca

SEQ ID NO: 1219106 - RNA, 13 nt, Human
agucaccaagccc

SEQ ID NO: 1219107 - RNA, 16 nt, Human
uguauuuuuuuacuaa

SEQ ID NO: 1219108 - RNA, 14 nt, Human
uguauuuuuuuacu

SEQ ID NO: 1219109 - RNA, 15 nt, Human
ugucaagccauaauu

SEQ ID NO: 1219110 - RNA, 19 nt, Human
ugucaagagggucugagga

SEQ ID NO: 1219111 - RNA, 22 nt, Human
aguaggaagacuuuggaaagac

SEQ ID NO: 1219112 - RNA, 19 nt, Human
aguaggaagacuuuggaaa

SEQ ID NO: 1219113 - RNA, 18 nt, Human
aguaggaagacuuuggaa

SEQ ID NO: 1219114 - RNA, 17 nt, Human
aguaggaagacuuugga

SEQ ID NO: 1219115 - RNA, 16 nt, Human
aguaggaagacuuugg

SEQ ID NO: 1219116 - RNA, 12 nt, Human
agucccugccaa

SEQ ID NO: 1219117 - RNA, 19 nt, Human
agucagggguucccuuuuu

SEQ ID NO: 1219118 - RNA, 17 nt, Human
agucucacuguugccca

SEQ ID NO: 1219119 - RNA, 16 nt, Human
agucucacuguugccc

SEQ ID NO: 1219120 - RNA, 23 nt, Human
aguccgaaagggacuuggaagcu

SEQ ID NO: 1219121 - RNA, 15 nt, Human
ugucgggcaugacac

SEQ ID NO: 1219122 - RNA, 14 nt, Human
ugucgggcaugaca

SEQ ID NO: 1219123 - RNA, 15 nt, Human
ugucgcccagucugg

SEQ ID NO: 1219124 - RNA, 14 nt, Human
ugucgcccagucug

SEQ ID NO: 1219125 - RNA, 12 nt, Human
ugucgggcauga

SEQ ID NO: 1219126 - RNA, 14 nt, Human
uguccgagcuuuga

SEQ ID NO: 1219127 - RNA, 13 nt, Human
uguccgagcuuug

SEQ ID NO: 1219128 - RNA, 16 nt, Human
uguccuacccacccuc

SEQ ID NO: 1219129 - RNA, 16 nt, Human
ugguacuaacuuuccu

SEQ ID NO: 1219130 - RNA, 15 nt, Human
agggugggagugggc

SEQ ID NO: 1219131 - RNA, 22 nt, Human
ugggugcuuggaggaaggaaac

SEQ ID NO: 1219132 - RNA, 19 nt, Human
ugggugcuuggaggaagga

SEQ ID NO: 1219133 - RNA, 15 nt, Human
ugggugcuuggagga

SEQ ID NO: 1219134 - RNA, 22 nt, Human
agggucucacucugucgcccag

SEQ ID NO: 1219135 - RNA, 20 nt, Human
uggggucacucuggcagcuc

SEQ ID NO: 1219136 - RNA, 19 nt, Human
uggggucacucuggcagcu

SEQ ID NO: 1219137 - RNA, 23 nt, Human
aggggagcaaaaucgaugcagug

SEQ ID NO: 1219138 - RNA, 23 nt, Human
agggucucacuauguugcccagg

SEQ ID NO: 1219139 - RNA, 22 nt, Human
agggucucacuauguugcccag

SEQ ID NO: 1219140 - RNA, 21 nt, Human
agggucucacuauguugccca

SEQ ID NO: 1219141 - RNA, 24 nt, Human
agggguucccuuuuuuggcugcug

SEQ ID NO: 1219142 - RNA, 22 nt, Human
aggggugggacacccugugaug

SEQ ID NO: 1219143 - RNA, 20 nt, Human
aggggugggacacccuguga

SEQ ID NO: 1219144 - RNA, 18 nt, Human
aggggguggccucccaac

SEQ ID NO: 1219145 - RNA, 17 nt, Human
aggggguggccucccaa

SEQ ID NO: 1219146 - RNA, 15 nt, Human
aggggguggccuccc

SEQ ID NO: 1219147 - RNA, 23 nt, Human
uggucucaaacucuugaccucag

SEQ ID NO: 1219148 - RNA, 17 nt, Human
uggucucaaacucuuga

SEQ ID NO: 1219149 - RNA, 13 nt, Human
uggucccacucag

SEQ ID NO: 1219150 - RNA, 16 nt, Human
uggucccaccccacac

SEQ ID NO: 1219151 - RNA, 16 nt, Human
uggucucaaacucuug

SEQ ID NO: 1219152 - RNA, 20 nt, Human
uggucaccaaaucagcugcu

SEQ ID NO: 1219153 - RNA, 18 nt, Human
uggucaccaaaucagcug

SEQ ID NO: 1219154 - RNA, 15 nt, Human
uggucccaccccaca

SEQ ID NO: 1219155 - RNA, 14 nt, Human
uggucccaccccac

SEQ ID NO: 1219156 - RNA, 13 nt, Human
aggguuauaauaa

SEQ ID NO: 1219157 - RNA, 22 nt, Human
aggguguccggucccuguccca

SEQ ID NO: 1219158 - RNA, 18 nt, Human
uggucugacccacugcuu

SEQ ID NO: 1219159 - RNA, 17 nt, Human
uggucugacccacugcu

SEQ ID NO: 1219160 - RNA, 16 nt, Human
uggucugacccacugc

SEQ ID NO: 1219161 - RNA, 20 nt, Human
aggucauuuuuuuuaagaaa

SEQ ID NO: 1219162 - RNA, 17 nt, Human
aggucauuuuuuuuaag

SEQ ID NO: 1219163 - RNA, 13 nt, Human
aggucagagccug

SEQ ID NO: 1219164 - RNA, 12 nt, Human
aggucagagccu

SEQ ID NO: 1219165 - RNA, 23 nt, Human
aggguuggccccugcccggcugc

SEQ ID NO: 1219166 - RNA, 18 nt, Human
aggguuggccccugcccg

SEQ ID NO: 1219167 - RNA, 13 nt, Human
aggguugggcugg

SEQ ID NO: 1219168 - RNA, 19 nt, Human
agguagaaauaucugaaaa

SEQ ID NO: 1219169 - RNA, 17 nt, Human
agguagaaauaucugaa

SEQ ID NO: 1219170 - RNA, 23 nt, Human
agguagaaauaucugaaaaugua

SEQ ID NO: 1219171 - RNA, 21 nt, Human
agguaugcaaucaaaucugcu

SEQ ID NO: 1219172 - RNA, 22 nt, Human
uggggcugcaccggcuggccug

SEQ ID NO: 1219173 - RNA, 20 nt, Human
uggggcugcaccggcuggcc

SEQ ID NO: 1219174 - RNA, 14 nt, Human
ugggguacccacug

SEQ ID NO: 1219175 - RNA, 15 nt, Human
ugggguaugggagag

SEQ ID NO: 1219176 - RNA, 18 nt, Human
uggggucacucuggcagc

SEQ ID NO: 1219177 - RNA, 17 nt, Human
uggggucacucuggcag

SEQ ID NO: 1219178 - RNA, 16 nt, Human
ugggguacccacugcu

SEQ ID NO: 1219179 - RNA, 15 nt, Human
ugggguacccacugc

SEQ ID NO: 1219180 - RNA, 14 nt, Human
uggggcccugccuc

SEQ ID NO: 1219181 - RNA, 12 nt, Human
uggggagaaagu

SEQ ID NO: 1219182 - RNA, 23 nt, Human
uggggaccucaggccugggggcu

SEQ ID NO: 1219183 - RNA, 16 nt, Human
uggggcccugccuccu

SEQ ID NO: 1219184 - RNA, 15 nt, Human
uggggcccugccucc

SEQ ID NO: 1219185 - RNA, 18 nt, Human
uggggcggugagagggga

SEQ ID NO: 1219186 - RNA, 15 nt, Human
uggggaccagagcug

SEQ ID NO: 1219187 - RNA, 14 nt, Human
uggggaccagagcu

SEQ ID NO: 1219188 - RNA, 13 nt, Human
uggggaccucagg

SEQ ID NO: 1219189 - RNA, 18 nt, Human
uggggaccagagcugcca

SEQ ID NO: 1219190 - RNA, 17 nt, Human
uggggaccagagcugcc

SEQ ID NO: 1219191 - RNA, 23 nt, Human
ugggcuggguucuacccaggugc

SEQ ID NO: 1219192 - RNA, 19 nt, Human
ugggcuggguucuacccag

SEQ ID NO: 1219193 - RNA, 18 nt, Human
ugggcuggguucuaccca

SEQ ID NO: 1219194 - RNA, 19 nt, Human
ugggcucccuucccaccuc

SEQ ID NO: 1219195 - RNA, 18 nt, Human
ugggcucccuucccaccu

SEQ ID NO: 1219196 - RNA, 23 nt, Human
agggcuucugccauuucugagau

SEQ ID NO: 1219197 - RNA, 21 nt, Human
ugggcucccuucccaccucuc

SEQ ID NO: 1219198 - RNA, 20 nt, Human
ugggcucccuucccaccucu

SEQ ID NO: 1219199 - RNA, 23 nt, Human
agggcccagagaggguggugacc

SEQ ID NO: 1219200 - RNA, 20 nt, Human
agggagugacagaggcagcc

SEQ ID NO: 1219201 - RNA, 19 nt, Human
agggagugacagaggcagc

SEQ ID NO: 1219202 - RNA, 18 nt, Human
agggagugacagaggcag

SEQ ID NO: 1219203 - RNA, 17 nt, Human
agggagugacagaggca

SEQ ID NO: 1219204 - RNA, 17 nt, Human
agggaggugaccccagg

SEQ ID NO: 1219205 - RNA, 23 nt, Human
ugggaggucaaggcugcagugag

SEQ ID NO: 1219206 - RNA, 20 nt, Human
ugggaggucaaggcugcagu

SEQ ID NO: 1219207 - RNA, 19 nt, Human
ugggaggucaaggcugcag

SEQ ID NO: 1219208 - RNA, 18 nt, Human
ugggaggucaaggcugca

SEQ ID NO: 1219209 - RNA, 20 nt, Human
ugggcccaaugcacuuuguu

SEQ ID NO: 1219210 - RNA, 16 nt, Human
ugggccaggagccucc

SEQ ID NO: 1219211 - RNA, 14 nt, Human
ugggccaggagccu

SEQ ID NO: 1219212 - RNA, 13 nt, Human
ugggccaggagcc

SEQ ID NO: 1219213 - RNA, 21 nt, Human
ugggcaacccccagccugcua

SEQ ID NO: 1219214 - RNA, 20 nt, Human
ugggcaacccccagccugcu

SEQ ID NO: 1219215 - RNA, 17 nt, Human
ugggcaacccccagccu

SEQ ID NO: 1219216 - RNA, 21 nt, Human
ugcuugaggcaacucaucuua

SEQ ID NO: 1219217 - RNA, 13 nt, Human
ugcuuguacauaa

SEQ ID NO: 1219218 - RNA, 12 nt, Human
ugcuuguacaua

SEQ ID NO: 1219219 - RNA, 16 nt, Human
ugcuuggaggaaggaa

SEQ ID NO: 1219220 - RNA, 15 nt, Human
ugcuuggaggaagga

SEQ ID NO: 1219221 - RNA, 14 nt, Human
ugcuuggaggaagg

SEQ ID NO: 1219222 - RNA, 17 nt, Human
ugcuuuuggucugugug

SEQ ID NO: 1219223 - RNA, 14 nt, Human
ugcuuuuggucugu

SEQ ID NO: 1219224 - RNA, 17 nt, Human
ugcuuugugauuuuugu

SEQ ID NO: 1219225 - RNA, 16 nt, Human
ugcuuugugauuuuug

SEQ ID NO: 1219226 - RNA, 14 nt, Human
ugcuuugugauuuu

SEQ ID NO: 1219227 - RNA, 12 nt, Human
ugcuuugugauu

SEQ ID NO: 1219228 - RNA, 22 nt, Human
ugcuuguacauaaugcgugcau

SEQ ID NO: 1219229 - RNA, 16 nt, Human
ugcuuguacauaaugc

SEQ ID NO: 1219230 - RNA, 14 nt, Human
ugcuuguacauaau

SEQ ID NO: 1219231 - RNA, 14 nt, Human
aggauccugagcca

SEQ ID NO: 1219232 - RNA, 13 nt, Human
aggauccugagcc

SEQ ID NO: 1219233 - RNA, 18 nt, Human
uggaaguacuauaauuua

SEQ ID NO: 1219234 - RNA, 16 nt, Human
uggaagcacagcuuca

SEQ ID NO: 1219235 - RNA, 18 nt, Human
uggaaaugggcagagcag

SEQ ID NO: 1219236 - RNA, 17 nt, Human
uggaaaugggcagagca

SEQ ID NO: 1219237 - RNA, 19 nt, Human
aggaucucuugagccuggg

SEQ ID NO: 1219238 - RNA, 18 nt, Human
aggaucucuugagccugg

SEQ ID NO: 1219239 - RNA, 17 nt, Human
aggaucucuugagccug

SEQ ID NO: 1219240 - RNA, 22 nt, Human
uggacacagcucuucuccaggc

SEQ ID NO: 1219241 - RNA, 14 nt, Human
uggacacagcucuu

SEQ ID NO: 1219242 - RNA, 13 nt, Human
uggacacagcucu

SEQ ID NO: 1219243 - RNA, 20 nt, Human
uggaccuugaacuggguacu

SEQ ID NO: 1219244 - RNA, 23 nt, Human
uggacccuguggaugauaaaaca

SEQ ID NO: 1219245 - RNA, 21 nt, Human
uggacccugaggcccagaggg

SEQ ID NO: 1219246 - RNA, 20 nt, Human
uggacccugaggcccagagg

SEQ ID NO: 1219247 - RNA, 19 nt, Human
uggacccugaggcccagag

SEQ ID NO: 1219248 - RNA, 18 nt, Human
uggacccugaggcccaga

SEQ ID NO: 1219249 - RNA, 16 nt, Human
uggacccugaggccca

SEQ ID NO: 1219250 - RNA, 23 nt, Human
uggacacagcucuucuccaggcu

SEQ ID NO: 1219251 - RNA, 22 nt, Human
aggcacccaccaucaugucugg

SEQ ID NO: 1219252 - RNA, 21 nt, Human
aggcacccaccaucaugucug

SEQ ID NO: 1219253 - RNA, 20 nt, Human
aggcacccaccaucaugucu

SEQ ID NO: 1219254 - RNA, 14 nt, Human
aggcaaugcuggcu

SEQ ID NO: 1219255 - RNA, 22 nt, Human
uggagaagcggcuggcagccca

SEQ ID NO: 1219256 - RNA, 13 nt, Human
uggagaagcggcu

SEQ ID NO: 1219257 - RNA, 11 nt, Human
uggacuuuguu

SEQ ID NO: 1219258 - RNA, 21 nt, Human
uggccuggccccucagggucc

SEQ ID NO: 1219259 - RNA, 18 nt, Human
uggccuggccccucaggg

SEQ ID NO: 1219260 - RNA, 18 nt, Human
uggccugagcugggauga

SEQ ID NO: 1219261 - RNA, 20 nt, Human
aggccugggggcugggcaga

SEQ ID NO: 1219262 - RNA, 18 nt, Human
aggccugggggcugggca

SEQ ID NO: 1219263 - RNA, 12 nt, Human
aggccuggggac

SEQ ID NO: 1219264 - RNA, 13 nt, Human
uggccucuucaga

SEQ ID NO: 1219265 - RNA, 13 nt, Human
uggcccacgcacu

SEQ ID NO: 1219266 - RNA, 12 nt, Human
aggccccugcca

SEQ ID NO: 1219267 - RNA, 17 nt, Human
aggccccgcccaggcuu

SEQ ID NO: 1219268 - RNA, 23 nt, Human
uggccagugugacaaggauugcu

SEQ ID NO: 1219269 - RNA, 23 nt, Human
uggccaaagccaaagcuaggccu

SEQ ID NO: 1219270 - RNA, 21 nt, Human
uggccaaagccaaagcuaggc

SEQ ID NO: 1219271 - RNA, 21 nt, Human
aggcccagagggccugcaagg

SEQ ID NO: 1219272 - RNA, 20 nt, Human
aggccagagggagugacaga

SEQ ID NO: 1219273 - RNA, 16 nt, Human
aggccccgcccaggcu

SEQ ID NO: 1219274 - RNA, 14 nt, Human
aggccagagggagu

SEQ ID NO: 1219275 - RNA, 19 nt, Human
aggccacaagacccuugug

SEQ ID NO: 1219276 - RNA, 18 nt, Human
aggccacaagacccuugu

SEQ ID NO: 1219277 - RNA, 17 nt, Human
aggccacaagacccuug

SEQ ID NO: 1219278 - RNA, 19 nt, Human
uggcagcucaccucucccu

SEQ ID NO: 1219279 - RNA, 15 nt, Human
uggcagcucaccucu

SEQ ID NO: 1219280 - RNA, 17 nt, Human
uggcagccuuggcaaac

SEQ ID NO: 1219281 - RNA, 20 nt, Human
uggagguacgaaaagagggg

SEQ ID NO: 1219282 - RNA, 18 nt, Human
aggccaaggugggaggau

SEQ ID NO: 1219283 - RNA, 16 nt, Human
aggccaaggugggagg

SEQ ID NO: 1219284 - RNA, 20 nt, Human
aggccaaaggaagcacaugc

SEQ ID NO: 1219285 - RNA, 19 nt, Human
aggccaaaggaagcacaug

SEQ ID NO: 1219286 - RNA, 18 nt, Human
aggccaaaggaagcacau

SEQ ID NO: 1219287 - RNA, 16 nt, Human
aggccaaaggaagcac

SEQ ID NO: 1219288 - RNA, 17 nt, Human
aggcagccccauucugc

SEQ ID NO: 1219289 - RNA, 16 nt, Human
aggcagccccauucug

SEQ ID NO: 1219290 - RNA, 21 nt, Human
uggauuguccccgacccuugc

SEQ ID NO: 1219291 - RNA, 13 nt, Human
uggauuguccccg

SEQ ID NO: 1219292 - RNA, 14 nt, Human
uggaguauauguca

SEQ ID NO: 1219293 - RNA, 20 nt, Human
ugcuaucucccccagcccca

SEQ ID NO: 1219294 - RNA, 19 nt, Human
ugcuaucucccccagcccc

SEQ ID NO: 1219295 - RNA, 14 nt, Human
ugcucuggacaggc

SEQ ID NO: 1219296 - RNA, 16 nt, Human
ugcucuggacaggcau

SEQ ID NO: 1219297 - RNA, 15 nt, Human
ugcucuggacaggca

SEQ ID NO: 1219298 - RNA, 17 nt, Human
ugcucuggacaggcaug

SEQ ID NO: 1219299 - RNA, 23 nt, Human
aggaaggaaacccagcucugguc

SEQ ID NO: 1219300 - RNA, 22 nt, Human
aggaaggaaacccagcucuggu

SEQ ID NO: 1219301 - RNA, 20 nt, Human
aggaaggaaacccagcucug

SEQ ID NO: 1219302 - RNA, 12 nt, Human
aggaagcucagg

SEQ ID NO: 1219303 - RNA, 20 nt, Human
aggaagccgcuggggccagu

SEQ ID NO: 1219304 - RNA, 19 nt, Human
aggaagccgcuggggccag

SEQ ID NO: 1219305 - RNA, 18 nt, Human
aggaagccgcuggggcca

SEQ ID NO: 1219306 - RNA, 23 nt, Human
aggaagccagcaggcucucaggc

SEQ ID NO: 1219307 - RNA, 22 nt, Human
aggaagccagcaggcucucagg

SEQ ID NO: 1219308 - RNA, 21 nt, Human
aggaagccagcaggcucucag

SEQ ID NO: 1219309 - RNA, 22 nt, Human
aggaagcacaugccucucucag

SEQ ID NO: 1219310 - RNA, 19 nt, Human
aggaaaucaccgaaaacgu

SEQ ID NO: 1219311 - RNA, 15 nt, Human
aggaaaucaccgaaa

SEQ ID NO: 1219312 - RNA, 17 nt, Human
aggaagcacaugccucu

SEQ ID NO: 1219313 - RNA, 16 nt, Human
aggaagcacaugccuc

SEQ ID NO: 1219314 - RNA, 11 nt, Human
aggaagcacau

SEQ ID NO: 1219315 - RNA, 16 nt, Human
aggaaaggcuccagga

SEQ ID NO: 1219316 - RNA, 15 nt, Human
aggaaaggcuccagg

SEQ ID NO: 1219317 - RNA, 14 nt, Human
aggaaaggcuccag

SEQ ID NO: 1219318 - RNA, 13 nt, Human
aggaaaggcucca

SEQ ID NO: 1219319 - RNA, 16 nt, Human
ugcugacuguuuucuc

SEQ ID NO: 1219320 - RNA, 17 nt, Human
ugcugggauuacaggug

SEQ ID NO: 1219321 - RNA, 21 nt, Human
ugcugggauuacaagcgugag

SEQ ID NO: 1219322 - RNA, 20 nt, Human
ugcugggauuacagguguga

SEQ ID NO: 1219323 - RNA, 19 nt, Human
ugcugggauuacaagcgug

SEQ ID NO: 1219324 - RNA, 21 nt, Human
ugcuggcuguuggcugggggc

SEQ ID NO: 1219325 - RNA, 19 nt, Human
ugcuggcuguuggcugggg

SEQ ID NO: 1219326 - RNA, 12 nt, Human
ugcugcccugug

SEQ ID NO: 1219327 - RNA, 11 nt, Human
ugcugcccugu

SEQ ID NO: 1219328 - RNA, 21 nt, Human
ugcugcccugcccaccuggcc

SEQ ID NO: 1219329 - RNA, 19 nt, Human
ugcugcccugcccaccugg

SEQ ID NO: 1219330 - RNA, 18 nt, Human
ugcugcccugcccaccug

SEQ ID NO: 1219331 - RNA, 17 nt, Human
ugcugcccugcccaccu

SEQ ID NO: 1219332 - RNA, 16 nt, Human
ugcugcccugcccacc

SEQ ID NO: 1219333 - RNA, 13 nt, Human
ugcugcccugccc

SEQ ID NO: 1219334 - RNA, 23 nt, Human
ugcuucaaggauccugagccaga

SEQ ID NO: 1219335 - RNA, 21 nt, Human
ugcuucaaggauccugagcca

SEQ ID NO: 1219336 - RNA, 12 nt, Human
ugcuucaaggau

SEQ ID NO: 1219337 - RNA, 18 nt, Human
aggacacuaaccacgcug

SEQ ID NO: 1219338 - RNA, 16 nt, Human
ugcuuccagugaggcu

SEQ ID NO: 1219339 - RNA, 19 nt, Human
aggacacuaaccacgcugg

SEQ ID NO: 1219340 - RNA, 15 nt, Human
ugcugucccuuuucc

SEQ ID NO: 1219341 - RNA, 19 nt, Human
ugcugucccuuacgugagu

SEQ ID NO: 1219342 - RNA, 17 nt, Human
ugcugucccuuuuccuu

SEQ ID NO: 1219343 - RNA, 15 nt, Human
agcugggacuacagg

SEQ ID NO: 1219344 - RNA, 23 nt, Human
agcugugcucuggacaggcaugu

SEQ ID NO: 1219345 - RNA, 21 nt, Human
agcugugcucuggacaggcau

SEQ ID NO: 1219346 - RNA, 20 nt, Human
agcugugcucuggacaggca

SEQ ID NO: 1219347 - RNA, 14 nt, Human
agcuguuacugucu

SEQ ID NO: 1219348 - RNA, 20 nt, Human
ugccuguucagcuccagcuc

SEQ ID NO: 1219349 - RNA, 18 nt, Human
ugccuguucagcuccagc

SEQ ID NO: 1219350 - RNA, 14 nt, Human
agcuguucagcugg

SEQ ID NO: 1219351 - RNA, 13 nt, Human
agcuguucagcug

SEQ ID NO: 1219352 - RNA, 16 nt, Human
ugccuuauggaacacu

SEQ ID NO: 1219353 - RNA, 15 nt, Human
ugccuuauggaacac

SEQ ID NO: 1219354 - RNA, 20 nt, Human
ugccuguugggccaggagcc

SEQ ID NO: 1219355 - RNA, 21 nt, Human
ugccuguucagcuccagcuca

SEQ ID NO: 1219356 - RNA, 22 nt, Human
agcugcuuuugucuaugggacu

SEQ ID NO: 1219357 - RNA, 21 nt, Human
agcugcuuuugucuaugggac

SEQ ID NO: 1219358 - RNA, 21 nt, Human
agcugcuugggcuucauccuc

SEQ ID NO: 1219359 - RNA, 22 nt, Human
agcugccuguucagcuccagcu

SEQ ID NO: 1219360 - RNA, 21 nt, Human
agcugccuguucagcuccagc

SEQ ID NO: 1219361 - RNA, 20 nt, Human
agcugccuguucagcuccag

SEQ ID NO: 1219362 - RNA, 15 nt, Human
ugccuggauggggcu

SEQ ID NO: 1219363 - RNA, 14 nt, Human
ugccuggauggggc

SEQ ID NO: 1219364 - RNA, 16 nt, Human
ugccugcccaggcccc

SEQ ID NO: 1219365 - RNA, 15 nt, Human
ugccugcccaggccc

SEQ ID NO: 1219366 - RNA, 14 nt, Human
ugccugcccaggcc

SEQ ID NO: 1219367 - RNA, 17 nt, Human
ugccucugccucugaca

SEQ ID NO: 1219368 - RNA, 15 nt, Human
ugccucugccucuga

SEQ ID NO: 1219369 - RNA, 14 nt, Human
ugccucugccucug

SEQ ID NO: 1219370 - RNA, 13 nt, Human
ugccucugccucu

SEQ ID NO: 1219371 - RNA, 14 nt, Human
ugcccaggcagguc

SEQ ID NO: 1219372 - RNA, 13 nt, Human
ugcccaggcaggu

SEQ ID NO: 1219373 - RNA, 12 nt, Human
ugcccaggcagg

SEQ ID NO: 1219374 - RNA, 18 nt, Human
agcuuguaaauagcucag

SEQ ID NO: 1219375 - RNA, 22 nt, Human
agcuugaggguugggcuggugu

SEQ ID NO: 1219376 - RNA, 18 nt, Human
agcuugaggguugggcug

SEQ ID NO: 1219377 - RNA, 14 nt, Human
agcuugaggguugg

SEQ ID NO: 1219378 - RNA, 19 nt, Human
agcuugaccgugaggccag

SEQ ID NO: 1219379 - RNA, 11 nt, Human
ugcuacacacu

SEQ ID NO: 1219380 - RNA, 23 nt, Human
ugcggacagccacggccaggcca

SEQ ID NO: 1219381 - RNA, 22 nt, Human
ugcggacagccacggccaggcc

SEQ ID NO: 1219382 - RNA, 20 nt, Human
ugcgggcuuccuccuggugu

SEQ ID NO: 1219383 - RNA, 19 nt, Human
ugcggccuuuggcuucacg

SEQ ID NO: 1219384 - RNA, 17 nt, Human
ugcggccuuuggcuuca

SEQ ID NO: 1219385 - RNA, 21 nt, Human
ugcggugcuaucucccccagc

SEQ ID NO: 1219386 - RNA, 17 nt, Human
ugcggugcuaucucccc

SEQ ID NO: 1219387 - RNA, 18 nt, Human
ugcgguccacccaggagc

SEQ ID NO: 1219388 - RNA, 18 nt, Human
agcucaggugucccugca

SEQ ID NO: 1219389 - RNA, 22 nt, Human
agcucaggugucccugcacuug

SEQ ID NO: 1219390 - RNA, 21 nt, Human
agcucaggugucccugcacuu

SEQ ID NO: 1219391 - RNA, 20 nt, Human
agcucaggugucccugcacu

SEQ ID NO: 1219392 - RNA, 16 nt, Human
agcuaggccuggccag

SEQ ID NO: 1219393 - RNA, 15 nt, Human
agcuaggccuggcca

SEQ ID NO: 1219394 - RNA, 14 nt, Human
agcuaggccuggcc

SEQ ID NO: 1219395 - RNA, 12 nt, Human
agcuaggccugg

SEQ ID NO: 1219396 - RNA, 21 nt, Human
ugcccagccccuucugaccca

SEQ ID NO: 1219397 - RNA, 20 nt, Human
ugcccacaggaucagucuga

SEQ ID NO: 1219398 - RNA, 19 nt, Human
ugcccacaggaucagucug

SEQ ID NO: 1219399 - RNA, 21 nt, Human
agcucauucuccuuguguuac

SEQ ID NO: 1219400 - RNA, 20 nt, Human
agcucauucuccuuguguua

SEQ ID NO: 1219401 - RNA, 15 nt, Human
agcgugcauaaguua

SEQ ID NO: 1219402 - RNA, 22 nt, Human
agcgugagccacugcaccgggc

SEQ ID NO: 1219403 - RNA, 19 nt, Human
agcgugagccacugcaccg

SEQ ID NO: 1219404 - RNA, 18 nt, Human
agcuagacgagcaggcuu

SEQ ID NO: 1219405 - RNA, 22 nt, Human
agccugggugacagagcaagug

SEQ ID NO: 1219406 - RNA, 22 nt, Human
agccugcuccagcuguucagcu

SEQ ID NO: 1219407 - RNA, 19 nt, Human
agccugcuccagcuguuca

SEQ ID NO: 1219408 - RNA, 17 nt, Human
agccugcuccagcuguu

SEQ ID NO: 1219409 - RNA, 16 nt, Human
agccugcuccagcugu

SEQ ID NO: 1219410 - RNA, 15 nt, Human
agccugcuccagcug

SEQ ID NO: 1219411 - RNA, 14 nt, Human
ugcauaccacuuuu

SEQ ID NO: 1219412 - RNA, 12 nt, Human
ugcauaccacuu

SEQ ID NO: 1219413 - RNA, 21 nt, Human
agccugugccucugggacugg

SEQ ID NO: 1219414 - RNA, 20 nt, Human
ugcauuaucuagauacugua

SEQ ID NO: 1219415 - RNA, 18 nt, Human
agcggagacggaguccca

SEQ ID NO: 1219416 - RNA, 20 nt, Human
agcggagaaaggaagggcug

SEQ ID NO: 1219417 - RNA, 16 nt, Human
agcggagaaaggaagg

SEQ ID NO: 1219418 - RNA, 17 nt, Human
agccuuccagggguggg

SEQ ID NO: 1219419 - RNA, 16 nt, Human
agccuuccaggggugg

SEQ ID NO: 1219420 - RNA, 14 nt, Human
agccuuccaggggu

SEQ ID NO: 1219421 - RNA, 11 nt, Human
agccuuccagg

SEQ ID NO: 1219422 - RNA, 22 nt, Human
ugcauuaucuagauacuguauc

SEQ ID NO: 1219423 - RNA, 21 nt, Human
ugcauuaucuagauacuguau

SEQ ID NO: 1219424 - RNA, 17 nt, Human
agccucccaaagugcug

SEQ ID NO: 1219425 - RNA, 17 nt, Human
ugcagccucacaguccu

SEQ ID NO: 1219426 - RNA, 16 nt, Human
ugcagccucacagucc

SEQ ID NO: 1219427 - RNA, 15 nt, Human
ugcagccucacaguc

SEQ ID NO: 1219428 - RNA, 13 nt, Human
ugcagccucacag

SEQ ID NO: 1219429 - RNA, 17 nt, Human
ugcauaaguuaacuucc

SEQ ID NO: 1219430 - RNA, 14 nt, Human
ugcauaaguuaacu

SEQ ID NO: 1219431 - RNA, 21 nt, Human
agccucagcauccuggcaccc

SEQ ID NO: 1219432 - RNA, 20 nt, Human
agccucagcauccuggcacc

SEQ ID NO: 1219433 - RNA, 19 nt, Human
agccucagcauccuggcac

SEQ ID NO: 1219434 - RNA, 17 nt, Human
agccucagcauccuggc

SEQ ID NO: 1219435 - RNA, 23 nt, Human
agccucagcauccuggcacccgg

SEQ ID NO: 1219436 - RNA, 22 nt, Human
agccucagcauccuggcacccg

SEQ ID NO: 1219437 - RNA, 16 nt, Human
agccucccaaagugcu

SEQ ID NO: 1219438 - RNA, 23 nt, Human
agcccuucuaccuuccugcaaca

SEQ ID NO: 1219439 - RNA, 23 nt, Human
ugcacuauagccuaggugacaga

SEQ ID NO: 1219440 - RNA, 20 nt, Human
agccgagauagccaaggcca

SEQ ID NO: 1219441 - RNA, 20 nt, Human
ugauucuccugccucagccu

SEQ ID NO: 1219442 - RNA, 19 nt, Human
ugauucuccugccucagcc

SEQ ID NO: 1219443 - RNA, 15 nt, Human
ugauucuccugccuc

SEQ ID NO: 1219444 - RNA, 22 nt, Human
agccccaaaacucuccucugcu

SEQ ID NO: 1219445 - RNA, 21 nt, Human
agccccaaaacucuccucugc

SEQ ID NO: 1219446 - RNA, 20 nt, Human
agccccaaaacucuccucug

SEQ ID NO: 1219447 - RNA, 22 nt, Human
agccccgaggccuucucugaag

SEQ ID NO: 1219448 - RNA, 17 nt, Human
agccccgaggccuucuc

SEQ ID NO: 1219449 - RNA, 24 nt, Human
agccccaaaacucuccucugcugc

SEQ ID NO: 1219450 - RNA, 22 nt, Human
agccccuggaugcagccucaca

SEQ ID NO: 1219451 - RNA, 19 nt, Human
agccccuggaugcagccuc

SEQ ID NO: 1219452 - RNA, 18 nt, Human
agccccuggaugcagccu

SEQ ID NO: 1219453 - RNA, 17 nt, Human
agccccuggaugcagcc

SEQ ID NO: 1219454 - RNA, 15 nt, Human
ugcacgugugugcac

SEQ ID NO: 1219455 - RNA, 14 nt, Human
ugcacgugugugca

SEQ ID NO: 1219456 - RNA, 17 nt, Human
ugcacccucaggcaggu

SEQ ID NO: 1219457 - RNA, 16 nt, Human
ugcacccucaggcagg

SEQ ID NO: 1219458 - RNA, 11 nt, Human
ugcacacauuu

SEQ ID NO: 1219459 - RNA, 10 nt, Human
ugcacacauu

SEQ ID NO: 1219460 - RNA, 15 nt, Human
ugcacaagcugcacc

SEQ ID NO: 1219461 - RNA, 23 nt, Human
agcccugguggcagugggagcug

SEQ ID NO: 1219462 - RNA, 22 nt, Human
agcccugguggcagugggagcu

SEQ ID NO: 1219463 - RNA, 21 nt, Human
ugcacaagcugcacccucagg

SEQ ID NO: 1219464 - RNA, 18 nt, Human
ugcacaagcugcacccuc

SEQ ID NO: 1219465 - RNA, 24 nt, Human
agccccuucugacccaugcugccc

SEQ ID NO: 1219466 - RNA, 20 nt, Human
agccccuucugacccaugcu

SEQ ID NO: 1219467 - RNA, 21 nt, Human
ugagugggugaauaauacagu

SEQ ID NO: 1219468 - RNA, 20 nt, Human
ugagugccuuacacaauggu

SEQ ID NO: 1219469 - RNA, 17 nt, Human
ugagugccuuacacaau

SEQ ID NO: 1219470 - RNA, 17 nt, Human
ugagucaccaagcccag

SEQ ID NO: 1219471 - RNA, 16 nt, Human
ugagucaccaagccca

SEQ ID NO: 1219472 - RNA, 14 nt, Human
ugagucaccaagcc

SEQ ID NO: 1219473 - RNA, 18 nt, Human
ugaguucauacccuguua

SEQ ID NO: 1219474 - RNA, 17 nt, Human
ugaguucauacccuguu

SEQ ID NO: 1219475 - RNA, 21 nt, Human
ugauacaaugcugugcccuaa

SEQ ID NO: 1219476 - RNA, 20 nt, Human
ugauacaaugcugugcccua

SEQ ID NO: 1219477 - RNA, 17 nt, Human
ugauacuacaguuuguu

SEQ ID NO: 1219478 - RNA, 14 nt, Human
ugauacuacaguuu

SEQ ID NO: 1219479 - RNA, 21 nt, Human
agcauacguacacauuuuauu

SEQ ID NO: 1219480 - RNA, 20 nt, Human
agcauacguacacauuuuau

SEQ ID NO: 1219481 - RNA, 19 nt, Human
agcauacguacacauuuua

SEQ ID NO: 1219482 - RNA, 18 nt, Human
agcauacguacacauuuu

SEQ ID NO: 1219483 - RNA, 17 nt, Human
agcauacguacacauuu

SEQ ID NO: 1219484 - RNA, 16 nt, Human
agcauacguacacauu

SEQ ID NO: 1219485 - RNA, 15 nt, Human
agcauacguacacau

SEQ ID NO: 1219486 - RNA, 16 nt, Human
agcauauucaggaagc

SEQ ID NO: 1219487 - RNA, 14 nt, Human
agcauauucaggaa

SEQ ID NO: 1219488 - RNA, 15 nt, Human
ugaguacuacagucc

SEQ ID NO: 1219489 - RNA, 23 nt, Human
ugaguacuacaguccucccaucu

SEQ ID NO: 1219490 - RNA, 22 nt, Human
ugaguacuacaguccucccauc

SEQ ID NO: 1219491 - RNA, 21 nt, Human
ugaguacuacaguccucccau

SEQ ID NO: 1219492 - RNA, 17 nt, Human
ugaguacuacaguccuc

SEQ ID NO: 1219493 - RNA, 19 nt, Human
ugaucacggcucacugcag

SEQ ID NO: 1219494 - RNA, 21 nt, Human
ugaucacggcucacugcagcc

SEQ ID NO: 1219495 - RNA, 20 nt, Human
ugaucacggcucacugcagc

SEQ ID NO: 1219496 - RNA, 22 nt, Human
agcauauucaggaagcucaggg

SEQ ID NO: 1219497 - RNA, 13 nt, Human
agcaucaggccag

SEQ ID NO: 1219498 - RNA, 20 nt, Human
agcaucaggccaggcccucu

SEQ ID NO: 1219499 - RNA, 19 nt, Human
agcaucaggccaggcccuc

SEQ ID NO: 1219500 - RNA, 18 nt, Human
agcaucaggccaggcccu

SEQ ID NO: 1219501 - RNA, 17 nt, Human
agcaucaggccaggccc

SEQ ID NO: 1219502 - RNA, 16 nt, Human
agcaucaggccaggcc

SEQ ID NO: 1219503 - RNA, 14 nt, Human
agcaucaggccagg

SEQ ID NO: 1219504 - RNA, 13 nt, Human
agcauggcugcca

SEQ ID NO: 1219505 - RNA, 21 nt, Human
agcaucaggccaggcccucug

SEQ ID NO: 1219506 - RNA, 12 nt, Human
agcauggcugcc

SEQ ID NO: 1219507 - RNA, 16 nt, Human
agccacggccaggcca

SEQ ID NO: 1219508 - RNA, 15 nt, Human
agccacggccaggcc

SEQ ID NO: 1219509 - RNA, 23 nt, Human
agccaccaacauacucccaucug

SEQ ID NO: 1219510 - RNA, 20 nt, Human
agccaccaacauacucccau

SEQ ID NO: 1219511 - RNA, 19 nt, Human
agccaccaacauacuccca

SEQ ID NO: 1219512 - RNA, 18 nt, Human
agccacauuccugaugcu

SEQ ID NO: 1219513 - RNA, 14 nt, Human
agccacauuccuga

SEQ ID NO: 1219514 - RNA, 14 nt, Human
agccacggccaggc

SEQ ID NO: 1219515 - RNA, 23 nt, Human
ugauggugcaaugaccuuucaau

SEQ ID NO: 1219516 - RNA, 17 nt, Human
ugauggugcaaugaccu

SEQ ID NO: 1219517 - RNA, 16 nt, Human
ugauggugcaaugacc

SEQ ID NO: 1219518 - RNA, 20 nt, Human
ugaugauccuaggcauuugc

SEQ ID NO: 1219519 - RNA, 14 nt, Human
ugaugauccuaggc

SEQ ID NO: 1219520 - RNA, 18 nt, Human
ugauguuuuaaggaugcu

SEQ ID NO: 1219521 - RNA, 17 nt, Human
ugauguuuuaaggaugc

SEQ ID NO: 1219522 - RNA, 22 nt, Human
agccacugcaccgggccacaga

SEQ ID NO: 1219523 - RNA, 21 nt, Human
agccacugcaccgggccacag

SEQ ID NO: 1219524 - RNA, 16 nt, Human
agccacugcaccgggc

SEQ ID NO: 1219525 - RNA, 13 nt, Human
agccacugcaccg

SEQ ID NO: 1219526 - RNA, 22 nt, Human
agccaggccacaagacccuugu

SEQ ID NO: 1219527 - RNA, 21 nt, Human
agccaggccacaagacccuug

SEQ ID NO: 1219528 - RNA, 12 nt, Human
agccagggucuc

SEQ ID NO: 1219529 - RNA, 23 nt, Human
agccaguaaaugggggugcauuu

SEQ ID NO: 1219530 - RNA, 14 nt, Human
agccaggccacaag

SEQ ID NO: 1219531 - RNA, 12 nt, Human
agccaggccaca

SEQ ID NO: 1219532 - RNA, 21 nt, Human
ugauucccaagcucugcuccu

SEQ ID NO: 1219533 - RNA, 19 nt, Human
ugauucccaagcucugcuc

SEQ ID NO: 1219534 - RNA, 18 nt, Human
ugauucccaagcucugcu

SEQ ID NO: 1219535 - RNA, 16 nt, Human
ugauucccaagcucug

SEQ ID NO: 1219536 - RNA, 15 nt, Human
ugauucccaagcucu

SEQ ID NO: 1219537 - RNA, 15 nt, Human
ugauucauaaugacu

SEQ ID NO: 1219538 - RNA, 14 nt, Human
ugauucagcucugc

SEQ ID NO: 1219539 - RNA, 13 nt, Human
ugauucagcucug

SEQ ID NO: 1219540 - RNA, 24 nt, Human
agcccaggaaaggcuccaggagca

SEQ ID NO: 1219541 - RNA, 23 nt, Human
agcccaggaaaggcuccaggagc

SEQ ID NO: 1219542 - RNA, 22 nt, Human
agcccaggaaaggcuccaggag

SEQ ID NO: 1219543 - RNA, 21 nt, Human
agcccaggaaaggcuccagga

SEQ ID NO: 1219544 - RNA, 20 nt, Human
agcccaggaaaggcuccagg

SEQ ID NO: 1219545 - RNA, 19 nt, Human
agcccaggaaaggcuccag

SEQ ID NO: 1219546 - RNA, 19 nt, Human
ugaccugaggcccuucucu

SEQ ID NO: 1219547 - RNA, 18 nt, Human
ugaccugaggcccuucuc

SEQ ID NO: 1219548 - RNA, 16 nt, Human
ugacuuacuguacaug

SEQ ID NO: 1219549 - RNA, 15 nt, Human
ugacuuacuguacau

SEQ ID NO: 1219550 - RNA, 13 nt, Human
ugacuuacuguac

SEQ ID NO: 1219551 - RNA, 21 nt, Human
ugacccaugcugcccugugag

SEQ ID NO: 1219552 - RNA, 17 nt, Human
ugacccaugcugcccug

SEQ ID NO: 1219553 - RNA, 16 nt, Human
ugacccaugcugcccu

SEQ ID NO: 1219554 - RNA, 15 nt, Human
ugacccaugcugccc

SEQ ID NO: 1219555 - RNA, 14 nt, Human
ugacccaugcugcc

SEQ ID NO: 1219556 - RNA, 16 nt, Human
agaugccgcauuugga

SEQ ID NO: 1219557 - RNA, 20 nt, Human
ugagaagcagaggaaggaga

SEQ ID NO: 1219558 - RNA, 23 nt, Human
agcaagacgcugugcugcccugc

SEQ ID NO: 1219559 - RNA, 22 nt, Human
agcaagacgcugugcugcccug

SEQ ID NO: 1219560 - RNA, 21 nt, Human
agcaagacgcugugcugcccu

SEQ ID NO: 1219561 - RNA, 20 nt, Human
agcaagacgcugugcugccc

SEQ ID NO: 1219562 - RNA, 17 nt, Human
agcaagacgcugugcug

SEQ ID NO: 1219563 - RNA, 16 nt, Human
agcaagacgcugugcu

SEQ ID NO: 1219564 - RNA, 13 nt, Human
agcaagacgcugu

SEQ ID NO: 1219565 - RNA, 21 nt, Human
agauuuugaaauuuuuauuaa

SEQ ID NO: 1219566 - RNA, 17 nt, Human
agauuugaacucuucaa

SEQ ID NO: 1219567 - RNA, 13 nt, Human
agauuggaaggaa

SEQ ID NO: 1219568 - RNA, 19 nt, Human
ugacuuacuguacaugaaa

SEQ ID NO: 1219569 - RNA, 22 nt, Human
agauucauauuuacuucuuaua

SEQ ID NO: 1219570 - RNA, 16 nt, Human
agagguggggagcaga

SEQ ID NO: 1219571 - RNA, 13 nt, Human
agagguucaaaga

SEQ ID NO: 1219572 - RNA, 15 nt, Human
agagguuaagguggg

SEQ ID NO: 1219573 - RNA, 20 nt, Human
agagggagggagggcuccag

SEQ ID NO: 1219574 - RNA, 16 nt, Human
agagggagggagggcu

SEQ ID NO: 1219575 - RNA, 14 nt, Human
ugaagucacacagu

SEQ ID NO: 1219576 - RNA, 22 nt, Human
agauauuuugcuuugugauuuu

SEQ ID NO: 1219577 - RNA, 18 nt, Human
agaucaaaagguuaauaa

SEQ ID NO: 1219578 - RNA, 21 nt, Human
agauauuuugcuuugugauuu

SEQ ID NO: 1219579 - RNA, 20 nt, Human
agauauuuugcuuugugauu

SEQ ID NO: 1219580 - RNA, 16 nt, Human
agauacuguaucauga

SEQ ID NO: 1219581 - RNA, 15 nt, Human
agauacuguaucaug

SEQ ID NO: 1219582 - RNA, 11 nt, Human
agauacuguau

SEQ ID NO: 1219583 - RNA, 22 nt, Human
agauacaguuacucagaauucu

SEQ ID NO: 1219584 - RNA, 13 nt, Human
agauacaguuacu

SEQ ID NO: 1219585 - RNA, 20 nt, Human
agauacaggaaaagcugcug

SEQ ID NO: 1219586 - RNA, 22 nt, Human
agauaauauuaaggaagacaau

SEQ ID NO: 1219587 - RNA, 18 nt, Human
agauaauauuaaggaaga

SEQ ID NO: 1219588 - RNA, 17 nt, Human
agauaaggguaucuggu

SEQ ID NO: 1219589 - RNA, 21 nt, Human
agaguuguuacauuuuuaagu

SEQ ID NO: 1219590 - RNA, 20 nt, Human
agaguuguuacauuuuuaag

SEQ ID NO: 1219591 - RNA, 19 nt, Human
agaguuguuacauuuuuaa

SEQ ID NO: 1219592 - RNA, 17 nt, Human
agaguuguuacauuuuu

SEQ ID NO: 1219593 - RNA, 22 nt, Human
agagucagaaguuucugccgca

SEQ ID NO: 1219594 - RNA, 15 nt, Human
agagucacuggaaca

SEQ ID NO: 1219595 - RNA, 20 nt, Human
ugacacaugcaaggucauuu

SEQ ID NO: 1219596 - RNA, 12 nt, Human
ugacacaugcaa

SEQ ID NO: 1219597 - RNA, 20 nt, Human
ugacacacagcucuguccug

SEQ ID NO: 1219598 - RNA, 19 nt, Human
ugacacacagcucuguccu

SEQ ID NO: 1219599 - RNA, 18 nt, Human
ugacacacagcucugucc

SEQ ID NO: 1219600 - RNA, 16 nt, Human
ugacacacagcucugu

SEQ ID NO: 1219601 - RNA, 19 nt, Human
ugacaaagacugaguacgu

SEQ ID NO: 1219602 - RNA, 23 nt, Human
ugaauuucuuuugccguuauuaa

SEQ ID NO: 1219603 - RNA, 15 nt, Human
ugaaagacuguacaa

SEQ ID NO: 1219604 - RNA, 13 nt, Human
ugaaagacuguac

SEQ ID NO: 1219605 - RNA, 22 nt, Human
agagacuccugcaggcagccag

SEQ ID NO: 1219606 - RNA, 21 nt, Human
agagacuccugcaggcagcca

SEQ ID NO: 1219607 - RNA, 20 nt, Human
agagacuccugcaggcagcc

SEQ ID NO: 1219608 - RNA, 19 nt, Human
agagacuccugcaggcagc

SEQ ID NO: 1219609 - RNA, 18 nt, Human
agagacuccugcaggcag

SEQ ID NO: 1219610 - RNA, 17 nt, Human
agagacuccugcaggca

SEQ ID NO: 1219611 - RNA, 11 nt, Human
agagacuccug

SEQ ID NO: 1219612 - RNA, 23 nt, Human
agagcaagacgcugugcugcccu

SEQ ID NO: 1219613 - RNA, 19 nt, Human
agagcaagacgcugugcug

SEQ ID NO: 1219614 - RNA, 22 nt, Human
agagaucaaccccuucgcuccu

SEQ ID NO: 1219615 - RNA, 23 nt, Human
agagacuccugcaggcagccagg

SEQ ID NO: 1219616 - RNA, 14 nt, Human
agagcugccaccug

SEQ ID NO: 1219617 - RNA, 20 nt, Human
agagcuagcagcagggaggg

SEQ ID NO: 1219618 - RNA, 13 nt, Human
agagccagggucu

SEQ ID NO: 1219619 - RNA, 22 nt, Human
agagccuuccaggggugggaca

SEQ ID NO: 1219620 - RNA, 17 nt, Human
agagccuuccaggggug

SEQ ID NO: 1219621 - RNA, 15 nt, Human
agagccuuccagggg

SEQ ID NO: 1219622 - RNA, 13 nt, Human
agagccuuccagg

SEQ ID NO: 1219623 - RNA, 23 nt, Human
agagcaccuuagacagucccugc

SEQ ID NO: 1219624 - RNA, 22 nt, Human
agagcaccuuagacagucccug

SEQ ID NO: 1219625 - RNA, 17 nt, Human
ugaaaauguauguguaa

SEQ ID NO: 1219626 - RNA, 19 nt, Human
ugaaaaucgugacaacacu

SEQ ID NO: 1219627 - RNA, 22 nt, Human
ugaaaaaggaggaagagaaaaa

SEQ ID NO: 1219628 - RNA, 20 nt, Human
ugaaaaaggaggaagagaaa

SEQ ID NO: 1219629 - RNA, 16 nt, Human
ugaaaaaggaggaaga

SEQ ID NO: 1219630 - RNA, 22 nt, Human
ucuuuggucuacacugugcuga

SEQ ID NO: 1219631 - RNA, 21 nt, Human
ucuuucuggcuaugcauuuga

SEQ ID NO: 1219632 - RNA, 20 nt, Human
ucuuucuggcuaugcauuug

SEQ ID NO: 1219633 - RNA, 14 nt, Human
ucuugguccugcug

SEQ ID NO: 1219634 - RNA, 17 nt, Human
ucuuggucagauuugaa

SEQ ID NO: 1219635 - RNA, 23 nt, Human
ucuugcaauggcagccuuggcaa

SEQ ID NO: 1219636 - RNA, 22 nt, Human
ucuugcaauggcagccuuggca

SEQ ID NO: 1219637 - RNA, 19 nt, Human
ucuugcaauggcagccuug

SEQ ID NO: 1219638 - RNA, 19 nt, Human
ucuugguccugcugcaguu

SEQ ID NO: 1219639 - RNA, 17 nt, Human
ucuugguccugcugcag

SEQ ID NO: 1219640 - RNA, 15 nt, Human
ucuugguccugcugc

SEQ ID NO: 1219641 - RNA, 17 nt, Human
ucuuuccugaggcuggg

SEQ ID NO: 1219642 - RNA, 13 nt, Human
ucuugauucauaa

SEQ ID NO: 1219643 - RNA, 16 nt, Human
ucuugagccuugaacu

SEQ ID NO: 1219644 - RNA, 16 nt, Human
ucuugagccugggagg

SEQ ID NO: 1219645 - RNA, 13 nt, Human
ucuugagccuggg

SEQ ID NO: 1219646 - RNA, 23 nt, Human
agaccuucuccuucaccuuuguc

SEQ ID NO: 1219647 - RNA, 21 nt, Human
agaccuucuccuucaccuuug

SEQ ID NO: 1219648 - RNA, 18 nt, Human
agaccuucuccuucaccu

SEQ ID NO: 1219649 - RNA, 15 nt, Human
agaccuucuccuuca

SEQ ID NO: 1219650 - RNA, 11 nt, Human
agaccuucucc

SEQ ID NO: 1219651 - RNA, 23 nt, Human
agacauacuaaccagcagaaaug

SEQ ID NO: 1219652 - RNA, 19 nt, Human
agacauacuaaccagcaga

SEQ ID NO: 1219653 - RNA, 19 nt, Human
ucuucugcuucagccuccc

SEQ ID NO: 1219654 - RNA, 12 nt, Human
ucuucugcuuca

SEQ ID NO: 1219655 - RNA, 21 nt, Human
ucuucugaacuuggcgcugcc

SEQ ID NO: 1219656 - RNA, 20 nt, Human
ucuucuguggguuucuaaag

SEQ ID NO: 1219657 - RNA, 20 nt, Human
ucuucuguacgucugacagg

SEQ ID NO: 1219658 - RNA, 15 nt, Human
ucuucuguacgucug

SEQ ID NO: 1219659 - RNA, 14 nt, Human
ucuuccucccuccc

SEQ ID NO: 1219660 - RNA, 22 nt, Human
ucuucccuacaguugaaaaaca

SEQ ID NO: 1219661 - RNA, 19 nt, Human
ucuucccuacaguugaaaa

SEQ ID NO: 1219662 - RNA, 15 nt, Human
ucuuccucccucccu

SEQ ID NO: 1219663 - RNA, 20 nt, Human
ucuuccaggcugggagagcc

SEQ ID NO: 1219664 - RNA, 17 nt, Human
ucuuccaggcugggaga

SEQ ID NO: 1219665 - RNA, 15 nt, Human
ucuuccaggcuggga

SEQ ID NO: 1219666 - RNA, 20 nt, Human
ucuucagagacuccugcagg

SEQ ID NO: 1219667 - RNA, 21 nt, Human
ucuuccaggcugggagagccu

SEQ ID NO: 1219668 - RNA, 18 nt, Human
ucuucagagacuccugca

SEQ ID NO: 1219669 - RNA, 17 nt, Human
ucuucagagacuccugc

SEQ ID NO: 1219670 - RNA, 17 nt, Human
ucuggcagcucagagag

SEQ ID NO: 1219671 - RNA, 23 nt, Human
ucuggcagaguugaagacagagc

SEQ ID NO: 1219672 - RNA, 20 nt, Human
ucuggcagaguugaagacag

SEQ ID NO: 1219673 - RNA, 21 nt, Human
ucuggcagcucagagagggug

SEQ ID NO: 1219674 - RNA, 18 nt, Human
ucuggcagcucagagagg

SEQ ID NO: 1219675 - RNA, 19 nt, Human
ucuggaauaaggagaauga

SEQ ID NO: 1219676 - RNA, 23 nt, Human
ucugcuuuuuaaagaaugcucuu

SEQ ID NO: 1219677 - RNA, 22 nt, Human
ucugcuuugggguuuaucagaa

SEQ ID NO: 1219678 - RNA, 22 nt, Human
agaaguuugagaucagccuggg

SEQ ID NO: 1219679 - RNA, 23 nt, Human
agaaccuuuugagugccuuacac

SEQ ID NO: 1219680 - RNA, 19 nt, Human
agaaccuuuugagugccuu

SEQ ID NO: 1219681 - RNA, 23 nt, Human
ucugcccuugguuaggcauugug

SEQ ID NO: 1219682 - RNA, 12 nt, Human
ucugcccuuggu

SEQ ID NO: 1219683 - RNA, 16 nt, Human
agaagcagaggaagga

SEQ ID NO: 1219684 - RNA, 12 nt, Human
ucucucaggcca

SEQ ID NO: 1219685 - RNA, 21 nt, Human
ucucucaggccaaacucaccu

SEQ ID NO: 1219686 - RNA, 23 nt, Human
ucuccuuggugucgggcaugaca

SEQ ID NO: 1219687 - RNA, 21 nt, Human
ucuccuuggugucgggcauga

SEQ ID NO: 1219688 - RNA, 18 nt, Human
acuuuguguucaccuugu

SEQ ID NO: 1219689 - RNA, 16 nt, Human
acuuuguguucaccuu

SEQ ID NO: 1219690 - RNA, 23 nt, Human
acuuuggaaagaguaggaagacu

SEQ ID NO: 1219691 - RNA, 14 nt, Human
acuuuggaaagagu

SEQ ID NO: 1219692 - RNA, 13 nt, Human
acuuuggaaagag

SEQ ID NO: 1219693 - RNA, 12 nt, Human
acuuuggaaaga

SEQ ID NO: 1219694 - RNA, 14 nt, Human
acuuguggacacag

SEQ ID NO: 1219695 - RNA, 18 nt, Human
acuugucuuuggacccug

SEQ ID NO: 1219696 - RNA, 16 nt, Human
acuuuaaaaggagcca

SEQ ID NO: 1219697 - RNA, 15 nt, Human
acuuguggacacagc

SEQ ID NO: 1219698 - RNA, 18 nt, Human
ucugaaggcuggguucug

SEQ ID NO: 1219699 - RNA, 22 nt, Human
agaaagacuaucuaaauguuga

SEQ ID NO: 1219700 - RNA, 20 nt, Human
agaaagacuaucuaaauguu

SEQ ID NO: 1219701 - RNA, 18 nt, Human
ucucuugguccugcugca

SEQ ID NO: 1219702 - RNA, 17 nt, Human
ucucuugguccugcugc

SEQ ID NO: 1219703 - RNA, 23 nt, Human
agaaaaaauauuuuccugccagg

SEQ ID NO: 1219704 - RNA, 17 nt, Human
agaaaaaauauuuuccu

SEQ ID NO: 1219705 - RNA, 18 nt, Human
agaaaaaugagccuggca

SEQ ID NO: 1219706 - RNA, 19 nt, Human
ucuaccugaggggccucuu

SEQ ID NO: 1219707 - RNA, 12 nt, Human
ucuaccugaggg

SEQ ID NO: 1219708 - RNA, 20 nt, Human
acuuagagguggggagcaga

SEQ ID NO: 1219709 - RNA, 15 nt, Human
acuuacuguacauga

SEQ ID NO: 1219710 - RNA, 14 nt, Human
acuuacuguacaug

SEQ ID NO: 1219711 - RNA, 13 nt, Human
acuuacuguacau

SEQ ID NO: 1219712 - RNA, 16 nt, Human
acuuacuguacaugaa

SEQ ID NO: 1219713 - RNA, 17 nt, Human
acuuccacugccauccu

SEQ ID NO: 1219714 - RNA, 18 nt, Human
acuuccaauuuacauacu

SEQ ID NO: 1219715 - RNA, 23 nt, Human
ucuaguuugauuaaauucuugca

SEQ ID NO: 1219716 - RNA, 24 nt, Human
ucuagauacuguaucaugacaaag

SEQ ID NO: 1219717 - RNA, 19 nt, Human
acuugagaauuacccuuuu

SEQ ID NO: 1219718 - RNA, 14 nt, Human
acuuggaagcuccg

SEQ ID NO: 1219719 - RNA, 14 nt, Human
acuugucuuuggac

SEQ ID NO: 1219720 - RNA, 22 nt, Human
acuucgggaggucgaggcagga

SEQ ID NO: 1219721 - RNA, 20 nt, Human
acuucgggaggucgaggcag

SEQ ID NO: 1219722 - RNA, 17 nt, Human
acuucgggaggucgagg

SEQ ID NO: 1219723 - RNA, 16 nt, Human
ucucaaaaaaagaaaa

SEQ ID NO: 1219724 - RNA, 16 nt, Human
ucuauuguuucuuuca

SEQ ID NO: 1219725 - RNA, 22 nt, Human
acugggcuuggggaccagagcu

SEQ ID NO: 1219726 - RNA, 21 nt, Human
acugggcuuggggaccagagc

SEQ ID NO: 1219727 - RNA, 15 nt, Human
acuggguacuugugg

SEQ ID NO: 1219728 - RNA, 23 nt, Human
ucgcugugucagcauagaaguaa

SEQ ID NO: 1219729 - RNA, 20 nt, Human
acuguaucaugacaaagacu

SEQ ID NO: 1219730 - RNA, 16 nt, Human
acuguaucaugacaaa

SEQ ID NO: 1219731 - RNA, 19 nt, Human
acuguacaugaaaacacau

SEQ ID NO: 1219732 - RNA, 22 nt, Human
acuguacaaaguagaagucuua

SEQ ID NO: 1219733 - RNA, 16 nt, Human
acuguacaaaguagaa

SEQ ID NO: 1219734 - RNA, 18 nt, Human
acuggguacuuguggaca

SEQ ID NO: 1219735 - RNA, 17 nt, Human
acuggguacuuguggac

SEQ ID NO: 1219736 - RNA, 14 nt, Human
acuguaucaugaca

SEQ ID NO: 1219737 - RNA, 21 nt, Human
acuguacaugaaaacacauuu

SEQ ID NO: 1219738 - RNA, 20 nt, Human
acuguacaugaaaacacauu

SEQ ID NO: 1219739 - RNA, 17 nt, Human
ucgggaggucgaggcag

SEQ ID NO: 1219740 - RNA, 23 nt, Human
ucgucacugcuuaacuucacaua

SEQ ID NO: 1219741 - RNA, 21 nt, Human
acuguuaauaguucagguaac

SEQ ID NO: 1219742 - RNA, 17 nt, Human
acuguuaauaguucagg

SEQ ID NO: 1219743 - RNA, 14 nt, Human
ucuacccuggcacu

SEQ ID NO: 1219744 - RNA, 21 nt, Human
ucuacccucuuagaaaaacca

SEQ ID NO: 1219745 - RNA, 17 nt, Human
ucuaaaggcuaccuuug

SEQ ID NO: 1219746 - RNA, 16 nt, Human
ucuaaaggcuaccuuu

SEQ ID NO: 1219747 - RNA, 13 nt, Human
ucuaaaggcuacc

SEQ ID NO: 1219748 - RNA, 17 nt, Human
ucuaaagcugccagccg

SEQ ID NO: 1219749 - RNA, 16 nt, Human
acaucuugcucugcug

SEQ ID NO: 1219750 - RNA, 15 nt, Human
acaucuugcucugcu

SEQ ID NO: 1219751 - RNA, 19 nt, Human
acaucuuggucagauuuga

SEQ ID NO: 1219752 - RNA, 17 nt, Human
acaucuugcucugcuga

SEQ ID NO: 1219753 - RNA, 16 nt, Human
acaugaaaacacauuu

SEQ ID NO: 1219754 - RNA, 15 nt, Human
acaugaaaacacauu

SEQ ID NO: 1219755 - RNA, 20 nt, Human
uauuuugcuuugugauuuuu

SEQ ID NO: 1219756 - RNA, 15 nt, Human
uauuuugcuuuguga

SEQ ID NO: 1219757 - RNA, 13 nt, Human
uauuuugcuuugu

SEQ ID NO: 1219758 - RNA, 17 nt, Human
uauuuuuguagagccag

SEQ ID NO: 1219759 - RNA, 23 nt, Human
acaugaaaacacauuuuucuuag

SEQ ID NO: 1219760 - RNA, 13 nt, Human
acaugagcaucag

SEQ ID NO: 1219761 - RNA, 22 nt, Human
ucaaagauauuuugcuuuguga

SEQ ID NO: 1219762 - RNA, 20 nt, Human
ucaaagauauuuugcuuugu

SEQ ID NO: 1219763 - RNA, 13 nt, Human
ucaaagauauuuu

SEQ ID NO: 1219764 - RNA, 14 nt, Human
acauggccuuugcu

SEQ ID NO: 1219765 - RNA, 19 nt, Human
acauggaguauaugucaag

SEQ ID NO: 1219766 - RNA, 15 nt, Human
acauggaguauaugu

SEQ ID NO: 1219767 - RNA, 20 nt, Human
acauggaauaacauguaauu

SEQ ID NO: 1219768 - RNA, 18 nt, Human
acauggaauaacauguaa

SEQ ID NO: 1219769 - RNA, 23 nt, Human
acaugagcaucaggccaggcccu

SEQ ID NO: 1219770 - RNA, 21 nt, Human
acaugucuuuucuugcaugag

SEQ ID NO: 1219771 - RNA, 22 nt, Human
acauugcggacagccacggcca

SEQ ID NO: 1219772 - RNA, 21 nt, Human
acauugcggacagccacggcc

SEQ ID NO: 1219773 - RNA, 23 nt, Human
acauuuuucuuagggaaggauac

SEQ ID NO: 1219774 - RNA, 13 nt, Human
acauuuuucuuag

SEQ ID NO: 1219775 - RNA, 19 nt, Human
acauuuuuaagugcugcau

SEQ ID NO: 1219776 - RNA, 18 nt, Human
acauuuuuaagugcugca

SEQ ID NO: 1219777 - RNA, 15 nt, Human
acauuuuuaagugcu

SEQ ID NO: 1219778 - RNA, 14 nt, Human
acauuuuauuuuau

SEQ ID NO: 1219779 - RNA, 22 nt, Human
ucaauaggaaaaacugauuuuu

SEQ ID NO: 1219780 - RNA, 19 nt, Human
ucaauaggaaaaacugauu

SEQ ID NO: 1219781 - RNA, 18 nt, Human
ucaauaggaaaaacugau

SEQ ID NO: 1219782 - RNA, 18 nt, Human
ucaagugauucuccugcc

SEQ ID NO: 1219783 - RNA, 17 nt, Human
ucaagugauucuccugc

SEQ ID NO: 1219784 - RNA, 16 nt, Human
ucaagugauucuccug

SEQ ID NO: 1219785 - RNA, 17 nt, Human
ucaagagggucugagga

SEQ ID NO: 1219786 - RNA, 15 nt, Human
ucacagaugggugcu

SEQ ID NO: 1219787 - RNA, 14 nt, Human
ucacagaugggugc

SEQ ID NO: 1219788 - RNA, 17 nt, Human
ucaccagccccagugcc

SEQ ID NO: 1219789 - RNA, 20 nt, Human
ucacauauugauuuccguua

SEQ ID NO: 1219790 - RNA, 18 nt, Human
ucacauauugauuuccgu

SEQ ID NO: 1219791 - RNA, 16 nt, Human
ucacauauugauuucc

SEQ ID NO: 1219792 - RNA, 20 nt, Human
accaaccacugcgaccacaa

SEQ ID NO: 1219793 - RNA, 17 nt, Human
accaacauacucccauc

SEQ ID NO: 1219794 - RNA, 16 nt, Human
accaacauacucccau

SEQ ID NO: 1219795 - RNA, 19 nt, Human
accaaaucagcugcuacua

SEQ ID NO: 1219796 - RNA, 16 nt, Human
accaaaucagcugcua

SEQ ID NO: 1219797 - RNA, 23 nt, Human
accacacccagcccacuucugcc

SEQ ID NO: 1219798 - RNA, 21 nt, Human
accacacccagcccacuucug

SEQ ID NO: 1219799 - RNA, 20 nt, Human
accacacccagcccacuucu

SEQ ID NO: 1219800 - RNA, 16 nt, Human
accacacccagcccac

SEQ ID NO: 1219801 - RNA, 15 nt, Human
accacacccagccca

SEQ ID NO: 1219802 - RNA, 17 nt, Human
accacacagaggcugcc

SEQ ID NO: 1219803 - RNA, 23 nt, Human
ucacugagacagcccgggcucug

SEQ ID NO: 1219804 - RNA, 22 nt, Human
ucaccagccccagugcccacag

SEQ ID NO: 1219805 - RNA, 21 nt, Human
ucacuauguugcccaggcagg

SEQ ID NO: 1219806 - RNA, 16 nt, Human
ucacuguugcccaggc

SEQ ID NO: 1219807 - RNA, 15 nt, Human
ucacuguugcccagg

SEQ ID NO: 1219808 - RNA, 14 nt, Human
ucacuguugcccag

SEQ ID NO: 1219809 - RNA, 18 nt, Human
ucacugcaaccuccgccu

SEQ ID NO: 1219810 - RNA, 22 nt, Human
accauuuugggguacccacugc

SEQ ID NO: 1219811 - RNA, 20 nt, Human
acccacugcuuuuggucugu

SEQ ID NO: 1219812 - RNA, 21 nt, Human
accauuuugggguacccacug

SEQ ID NO: 1219813 - RNA, 23 nt, Human
accauuuugcugucccuuuuccu

SEQ ID NO: 1219814 - RNA, 22 nt, Human
accauuuugcugucccuuuucc

SEQ ID NO: 1219815 - RNA, 21 nt, Human
accauucuccaccugccaggg

SEQ ID NO: 1219816 - RNA, 20 nt, Human
accauucuccaccugccagg

SEQ ID NO: 1219817 - RNA, 19 nt, Human
accauucuccaccugccag

SEQ ID NO: 1219818 - RNA, 13 nt, Human
accccagguuucu

SEQ ID NO: 1219819 - RNA, 23 nt, Human
acccaggugcuaggaacacuccu

SEQ ID NO: 1219820 - RNA, 11 nt, Human
acccaggugcu

SEQ ID NO: 1219821 - RNA, 19 nt, Human
acccaggagccccgaggcc

SEQ ID NO: 1219822 - RNA, 15 nt, Human
acccaggagccccga

SEQ ID NO: 1219823 - RNA, 13 nt, Human
acccaggagcccc

SEQ ID NO: 1219824 - RNA, 17 nt, Human
acccagcgagcccuggu

SEQ ID NO: 1219825 - RNA, 16 nt, Human
acccagcgagcccugg

SEQ ID NO: 1219826 - RNA, 13 nt, Human
acccagcgagccc

SEQ ID NO: 1219827 - RNA, 16 nt, Human
ucagaauucucuaguu

SEQ ID NO: 1219828 - RNA, 20 nt, Human
ucagaauucucagaaucuca

SEQ ID NO: 1219829 - RNA, 12 nt, Human
ucagaauucuca

SEQ ID NO: 1219830 - RNA, 10 nt, Human
ucagaauucu

SEQ ID NO: 1219831 - RNA, 15 nt, Human
acccagcccacuucu

SEQ ID NO: 1219832 - RNA, 16 nt, Human
ucagaucucuaacuuc

SEQ ID NO: 1219833 - RNA, 16 nt, Human
ucagagacuccugcag

SEQ ID NO: 1219834 - RNA, 23 nt, Human
ucagagacuccugcaggcagcca

SEQ ID NO: 1219835 - RNA, 21 nt, Human
acccuccuuucaccacaugug

SEQ ID NO: 1219836 - RNA, 17 nt, Human
acccucauguucuuaau

SEQ ID NO: 1219837 - RNA, 15 nt, Human
acccucauguucuua

SEQ ID NO: 1219838 - RNA, 14 nt, Human
acccucauguucuu

SEQ ID NO: 1219839 - RNA, 22 nt, Human
acccgggaagggggcugggaca

SEQ ID NO: 1219840 - RNA, 20 nt, Human
acccgggaagggggcuggga

SEQ ID NO: 1219841 - RNA, 19 nt, Human
acccgggaagggggcuggg

SEQ ID NO: 1219842 - RNA, 23 nt, Human
acccugaggcccagagggccugc

SEQ ID NO: 1219843 - RNA, 21 nt, Human
acccugaggcccagagggccu

SEQ ID NO: 1219844 - RNA, 19 nt, Human
acccugaggcccagagggc

SEQ ID NO: 1219845 - RNA, 13 nt, Human
acccugaggccca

SEQ ID NO: 1219846 - RNA, 11 nt, Human
acccugaggcc

SEQ ID NO: 1219847 - RNA, 23 nt, Human
ucaggggugugcggccuuuggcu

SEQ ID NO: 1219848 - RNA, 19 nt, Human
ucaggggugugcggccuuu

SEQ ID NO: 1219849 - RNA, 12 nt, Human
ucaggggugugc

SEQ ID NO: 1219850 - RNA, 20 nt, Human
ucaggccaggcccucugccc

SEQ ID NO: 1219851 - RNA, 19 nt, Human
ucaggccaggcccucugcc

SEQ ID NO: 1219852 - RNA, 18 nt, Human
ucaggccaggcccucugc

SEQ ID NO: 1219853 - RNA, 17 nt, Human
ucaggccaggcccucug

SEQ ID NO: 1219854 - RNA, 19 nt, Human
acccgcuaagagggaggga

SEQ ID NO: 1219855 - RNA, 19 nt, Human
ucaggguuggccccugccc

SEQ ID NO: 1219856 - RNA, 18 nt, Human
ucaggguuggccccugcc

SEQ ID NO: 1219857 - RNA, 23 nt, Human
ucaggguuggccccugcccggcu

SEQ ID NO: 1219858 - RNA, 18 nt, Human
ucaggcaggugggaugga

SEQ ID NO: 1219859 - RNA, 17 nt, Human
ucaggcaggugggaugg

SEQ ID NO: 1219860 - RNA, 14 nt, Human
acccccagccugcu

SEQ ID NO: 1219861 - RNA, 13 nt, Human
acccccagccugc

SEQ ID NO: 1219862 - RNA, 12 nt, Human
acccccagccug

SEQ ID NO: 1219863 - RNA, 16 nt, Human
ucaggccaggcccucu

SEQ ID NO: 1219864 - RNA, 15 nt, Human
ucaggccaggcccuc

SEQ ID NO: 1219865 - RNA, 14 nt, Human
ucaggccaggcccu

SEQ ID NO: 1219866 - RNA, 13 nt, Human
ucaggccaggccc

SEQ ID NO: 1219867 - RNA, 14 nt, Human
ucaggccagcugcu

SEQ ID NO: 1219868 - RNA, 13 nt, Human
ucaggccagcugc

SEQ ID NO: 1219869 - RNA, 22 nt, Human
ucagguggggucacucuggcag

SEQ ID NO: 1219870 - RNA, 22 nt, Human
accgaaaacguggcugcuucaa

SEQ ID NO: 1219871 - RNA, 21 nt, Human
accgaaaacguggcugcuuca

SEQ ID NO: 1219872 - RNA, 18 nt, Human
ucaggugucccugcacuu

SEQ ID NO: 1219873 - RNA, 17 nt, Human
ucaggugucccugcacu

SEQ ID NO: 1219874 - RNA, 15 nt, Human
ucaggugucccugca

SEQ ID NO: 1219875 - RNA, 23 nt, Human
ucagguggggucacucuggcagc

SEQ ID NO: 1219876 - RNA, 15 nt, Human
acccuugugguccca

SEQ ID NO: 1219877 - RNA, 20 nt, Human
acccuugccgucuaccugag

SEQ ID NO: 1219878 - RNA, 13 nt, Human
ucaguaauaacuc

SEQ ID NO: 1219879 - RNA, 13 nt, Human
ucaguaagccgug

SEQ ID NO: 1219880 - RNA, 22 nt, Human
ucaggugucccugcacuugcag

SEQ ID NO: 1219881 - RNA, 19 nt, Human
ucaguuguuagugugucuu

SEQ ID NO: 1219882 - RNA, 23 nt, Human
ucagugccuuauggaacacucug

SEQ ID NO: 1219883 - RNA, 22 nt, Human
ucagugccuuauggaacacucu

SEQ ID NO: 1219884 - RNA, 20 nt, Human
ucagugccuuauggaacacu

SEQ ID NO: 1219885 - RNA, 19 nt, Human
ucagugccuuauggaacac

SEQ ID NO: 1219886 - RNA, 16 nt, Human
ucaguggcagcugcuu

SEQ ID NO: 1219887 - RNA, 15 nt, Human
ucaguggcagcugcu

SEQ ID NO: 1219888 - RNA, 14 nt, Human
ucaguggcagcugc

SEQ ID NO: 1219889 - RNA, 12 nt, Human
uccucugcugcu

SEQ ID NO: 1219890 - RNA, 15 nt, Human
uccugaagaauugaa

SEQ ID NO: 1219891 - RNA, 21 nt, Human
uccucccaccucagccucccg

SEQ ID NO: 1219892 - RNA, 20 nt, Human
uccucccaccucagccuccc

SEQ ID NO: 1219893 - RNA, 18 nt, Human
uccucccaccucagccuc

SEQ ID NO: 1219894 - RNA, 16 nt, Human
uccucccaccucagcc

SEQ ID NO: 1219895 - RNA, 15 nt, Human
uccucccaccucagc

SEQ ID NO: 1219896 - RNA, 14 nt, Human
uccucccaccucag

SEQ ID NO: 1219897 - RNA, 17 nt, Human
acucgcgacaaugcaaa

SEQ ID NO: 1219898 - RNA, 16 nt, Human
acucgcgacaaugcaa

SEQ ID NO: 1219899 - RNA, 15 nt, Human
acucgcgacaaugca

SEQ ID NO: 1219900 - RNA, 21 nt, Human
acucuuauugcccacgcugga

SEQ ID NO: 1219901 - RNA, 20 nt, Human
acucuggcagcucagagagg

SEQ ID NO: 1219902 - RNA, 19 nt, Human
acucuggcagcucagagag

SEQ ID NO: 1219903 - RNA, 17 nt, Human
acucuggcagcucagag

SEQ ID NO: 1219904 - RNA, 16 nt, Human
acucuggcagcucaga

SEQ ID NO: 1219905 - RNA, 12 nt, Human
uccuacucugug

SEQ ID NO: 1219906 - RNA, 21 nt, Human
uccuagccugugccucuggga

SEQ ID NO: 1219907 - RNA, 16 nt, Human
acucgaguuacagaca

SEQ ID NO: 1219908 - RNA, 15 nt, Human
uccguuaaaauacca

SEQ ID NO: 1219909 - RNA, 13 nt, Human
uccguuaaaauac

SEQ ID NO: 1219910 - RNA, 22 nt, Human
acucauugaccugaggcccuuc

SEQ ID NO: 1219911 - RNA, 18 nt, Human
acucauugaccugaggcc

SEQ ID NO: 1219912 - RNA, 17 nt, Human
acucauugaccugaggc

SEQ ID NO: 1219913 - RNA, 16 nt, Human
acucauugaccugagg

SEQ ID NO: 1219914 - RNA, 12 nt, Human
acucaucuuagg

SEQ ID NO: 1219915 - RNA, 22 nt, Human
acucagaauucucuaguuugau

SEQ ID NO: 1219916 - RNA, 21 nt, Human
acucagaauucucuaguuuga

SEQ ID NO: 1219917 - RNA, 14 nt, Human
acucagaauucucu

SEQ ID NO: 1219918 - RNA, 18 nt, Human
acucagaagacacugaug

SEQ ID NO: 1219919 - RNA, 17 nt, Human
acucagaagacacugau

SEQ ID NO: 1219920 - RNA, 16 nt, Human
acucagaagacacuga

SEQ ID NO: 1219921 - RNA, 15 nt, Human
acucagaagacacug

SEQ ID NO: 1219922 - RNA, 14 nt, Human
acucagaagacacu

SEQ ID NO: 1219923 - RNA, 21 nt, Human
acucaccugccccucaacucu

SEQ ID NO: 1219924 - RNA, 19 nt, Human
acucaccugccccucaacu

SEQ ID NO: 1219925 - RNA, 14 nt, Human
acucaccugccccu

SEQ ID NO: 1219926 - RNA, 13 nt, Human
ucccucuuucccu

SEQ ID NO: 1219927 - RNA, 11 nt, Human
ucccucuuucc

SEQ ID NO: 1219928 - RNA, 20 nt, Human
ucccucagucuggcccuucc

SEQ ID NO: 1219929 - RNA, 18 nt, Human
ucccucagucuggcccuu

SEQ ID NO: 1219930 - RNA, 22 nt, Human
ucccugaaggccccgcccaggc

SEQ ID NO: 1219931 - RNA, 21 nt, Human
ucccugaaggccccgcccagg

SEQ ID NO: 1219932 - RNA, 18 nt, Human
ucccugaaggccccgccc

SEQ ID NO: 1219933 - RNA, 14 nt, Human
ucccucuuucccuc

SEQ ID NO: 1219934 - RNA, 23 nt, Human
ucccugaaggccccgcccaggcu

SEQ ID NO: 1219935 - RNA, 17 nt, Human
acucaccccagccccaa

SEQ ID NO: 1219936 - RNA, 18 nt, Human
acuacggaauaguuggcu

SEQ ID NO: 1219937 - RNA, 11 nt, Human
ucccccagccc

SEQ ID NO: 1219938 - RNA, 22 nt, Human
uccccacuugagaauuacccuu

SEQ ID NO: 1219939 - RNA, 14 nt, Human
acguacacauuuua

SEQ ID NO: 1219940 - RNA, 13 nt, Human
acguacacauuuu

SEQ ID NO: 1219941 - RNA, 12 nt, Human
acguacacauuu

SEQ ID NO: 1219942 - RNA, 13 nt, Human
acguacacacaca

SEQ ID NO: 1219943 - RNA, 21 nt, Human
acucacauuuauucugcucac

SEQ ID NO: 1219944 - RNA, 20 nt, Human
acucacauuuauucugcuca

SEQ ID NO: 1219945 - RNA, 19 nt, Human
acucacauuuauucugcuc

SEQ ID NO: 1219946 - RNA, 14 nt, Human
acucaaugcacuga

SEQ ID NO: 1219947 - RNA, 12 nt, Human
acuauguaucaa

SEQ ID NO: 1219948 - RNA, 14 nt, Human
acuauaauguaagc

SEQ ID NO: 1219949 - RNA, 13 nt, Human
acuauaauguaag

SEQ ID NO: 1219950 - RNA, 12 nt, Human
acuauaauguaa

SEQ ID NO: 1219951 - RNA, 21 nt, Human
acuauaauguaagcucuacug

SEQ ID NO: 1219952 - RNA, 20 nt, Human
uccagugaggcucugcccuu

SEQ ID NO: 1219953 - RNA, 19 nt, Human
uccagugaggcucugcccu

SEQ ID NO: 1219954 - RNA, 18 nt, Human
uccagugaggcucugccc

SEQ ID NO: 1219955 - RNA, 15 nt, Human
acggcucacugcagc

SEQ ID NO: 1219956 - RNA, 14 nt, Human
acggcucacugcag

SEQ ID NO: 1219957 - RNA, 17 nt, Human
uccaugaguccccuguu

SEQ ID NO: 1219958 - RNA, 16 nt, Human
uccaugaguccccugu

SEQ ID NO: 1219959 - RNA, 15 nt, Human
uccaugaguccccug

SEQ ID NO: 1219960 - RNA, 14 nt, Human
ucccaccccacaca

SEQ ID NO: 1219961 - RNA, 11 nt, Human
ucccaccccac

SEQ ID NO: 1219962 - RNA, 14 nt, Human
ucccacaaaggaga

SEQ ID NO: 1219963 - RNA, 21 nt, Human
ucccaaagugcugggauuaca

SEQ ID NO: 1219964 - RNA, 15 nt, Human
ucccaaagugcuggg

SEQ ID NO: 1219965 - RNA, 16 nt, Human
ucccaaagugcuggga

SEQ ID NO: 1219966 - RNA, 16 nt, Human
acggccaggccagagg

SEQ ID NO: 1219967 - RNA, 21 nt, Human
acggagucccaccuuggcugc

SEQ ID NO: 1219968 - RNA, 19 nt, Human
acggagucccaccuuggcu

SEQ ID NO: 1219969 - RNA, 18 nt, Human
acgcuacccgggaagggg

SEQ ID NO: 1219970 - RNA, 17 nt, Human
acgcuacccgggaaggg

SEQ ID NO: 1219971 - RNA, 13 nt, Human
acgcuacccggga

SEQ ID NO: 1219972 - RNA, 23 nt, Human
acgcgugcacacaccagagccca

SEQ ID NO: 1219973 - RNA, 14 nt, Human
acgcccccacuggu

SEQ ID NO: 1219974 - RNA, 14 nt, Human
acgaauauugcuga

SEQ ID NO: 1219975 - RNA, 18 nt, Human
uccaggcugggagagccu

SEQ ID NO: 1219976 - RNA, 17 nt, Human
uccaggcugggagagcc

SEQ ID NO: 1219977 - RNA, 14 nt, Human
uccaggcugggaga

SEQ ID NO: 1219978 - RNA, 18 nt, Human
acgccaucccagccccaa

SEQ ID NO: 1219979 - RNA, 17 nt, Human
acgccaucccagcccca

SEQ ID NO: 1219980 - RNA, 16 nt, Human
acgccaucccagcccc

SEQ ID NO: 1219981 - RNA, 15 nt, Human
acgccaucccagccc

SEQ ID NO: 1219982 - RNA, 14 nt, Human
acgccaucccagcc

SEQ ID NO: 1219983 - RNA, 11 nt, Human
acgccauccca

SEQ ID NO: 1219984 - RNA, 23 nt, Human
acgccaggggaaaaucagccugc

SEQ ID NO: 1219985 - RNA, 18 nt, Human
acgccaggggaaaaucag

SEQ ID NO: 1219986 - RNA, 15 nt, Human
acgacugcccggcag

SEQ ID NO: 1219987 - RNA, 13 nt, Human
accuggccucugc

SEQ ID NO: 1219988 - RNA, 12 nt, Human
accuggccucug

SEQ ID NO: 1219989 - RNA, 20 nt, Human
uccacccaggagccccgagg

SEQ ID NO: 1219990 - RNA, 17 nt, Human
uccacccaccucagccu

SEQ ID NO: 1219991 - RNA, 13 nt, Human
uccacccaccuca

SEQ ID NO: 1219992 - RNA, 12 nt, Human
uccacccaccuc

SEQ ID NO: 1219993 - RNA, 18 nt, Human
uccaaggguacuaaggaa

SEQ ID NO: 1219994 - RNA, 21 nt, Human
accuggguaacuagggaagau

SEQ ID NO: 1219995 - RNA, 18 nt, Human
accuuuuuuauacauaaa

SEQ ID NO: 1219996 - RNA, 17 nt, Human
accuuuuuuauacauaa

SEQ ID NO: 1219997 - RNA, 16 nt, Human
accuuuuuuauacaua

SEQ ID NO: 1219998 - RNA, 16 nt, Human
accuuuguccccaccg

SEQ ID NO: 1219999 - RNA, 15 nt, Human
accuuuguccccacc

SEQ ID NO: 1220000 - RNA, 14 nt, Human
accuuuguccccac

SEQ ID NO: 1220001 - RNA, 22 nt, Human
accuucuccuucaccuuugucc

SEQ ID NO: 1220002 - RNA, 16 nt, Human
ucauuugucacacacu

SEQ ID NO: 1220003 - RNA, 14 nt, Human
ucauuugucacaca

SEQ ID NO: 1220004 - RNA, 19 nt, Human
ucauuuuuaguagagacag

SEQ ID NO: 1220005 - RNA, 18 nt, Human
ucauuuuuuuuaagaaaa

SEQ ID NO: 1220006 - RNA, 18 nt, Human
accugcggugcuaucucc

SEQ ID NO: 1220007 - RNA, 21 nt, Human
accugcgucucauacucaccu

SEQ ID NO: 1220008 - RNA, 16 nt, Human
accugcggugcuaucu

SEQ ID NO: 1220009 - RNA, 23 nt, Human
accugccuguugggccaggagcc

SEQ ID NO: 1220010 - RNA, 20 nt, Human
accuggaauauauaaccagu

SEQ ID NO: 1220011 - RNA, 14 nt, Human
accugauugugucu

SEQ ID NO: 1220012 - RNA, 16 nt, Human
accugaggggccucuu

SEQ ID NO: 1220013 - RNA, 14 nt, Human
accugaggggccuc

SEQ ID NO: 1220014 - RNA, 17 nt, Human
accugccaggaagccag

SEQ ID NO: 1220015 - RNA, 16 nt, Human
accugccaggaagcca

SEQ ID NO: 1220016 - RNA, 19 nt, Human
accugccaggaagccagca

SEQ ID NO: 1220017 - RNA, 18 nt, Human
accugccaggaagccagc

SEQ ID NO: 1220018 - RNA, 19 nt, Human
accugaauuuuggcugugu

SEQ ID NO: 1220019 - RNA, 18 nt, Human
accugaagacucauucuu

SEQ ID NO: 1220020 - RNA, 13 nt, Human
ucauaaugacuua

SEQ ID NO: 1220021 - RNA, 12 nt, Human
ucauaaugacuu

SEQ ID NO: 1220022 - RNA, 23 nt, Human
accugaggcccuucucuccagcc

SEQ ID NO: 1220023 - RNA, 21 nt, Human
uagacagagucucacuguugc

SEQ ID NO: 1220024 - RNA, 21 nt, Human
uagacagucccugccaaugga

SEQ ID NO: 1220025 - RNA, 17 nt, Human
uagacagucccugccaa

SEQ ID NO: 1220026 - RNA, 20 nt, Human
aauuugugauacaaugcugu

SEQ ID NO: 1220027 - RNA, 18 nt, Human
aauuugugauacaaugcu

SEQ ID NO: 1220028 - RNA, 17 nt, Human
aauuugugauacaaugc

SEQ ID NO: 1220029 - RNA, 14 nt, Human
aauuugugauacaa

SEQ ID NO: 1220030 - RNA, 18 nt, Human
aauuugggggaaaauuua

SEQ ID NO: 1220031 - RNA, 15 nt, Human
uagaagucacacagu

SEQ ID NO: 1220032 - RNA, 10 nt, Human
uagacagagu

SEQ ID NO: 1220033 - RNA, 22 nt, Human
uagagcggagaaaggaagggcu

SEQ ID NO: 1220034 - RNA, 14 nt, Human
uagagccagggucu

SEQ ID NO: 1220035 - RNA, 21 nt, Human
uagcacagacccugcccugug

SEQ ID NO: 1220036 - RNA, 20 nt, Human
uagcacagacccugcccugu

SEQ ID NO: 1220037 - RNA, 16 nt, Human
uagcacagacccugcc

SEQ ID NO: 1220038 - RNA, 15 nt, Human
uagcacagacccugc

SEQ ID NO: 1220039 - RNA, 14 nt, Human
uagcacagacccug

SEQ ID NO: 1220040 - RNA, 14 nt, Human
uagccaaggccaaa

SEQ ID NO: 1220041 - RNA, 13 nt, Human
uagccaaggccaa

SEQ ID NO: 1220042 - RNA, 12 nt, Human
uagccaaggcca

SEQ ID NO: 1220043 - RNA, 16 nt, Human
uagcacuuugggaggc

SEQ ID NO: 1220044 - RNA, 24 nt, Human
uagcacagacccugcccugugggc

SEQ ID NO: 1220045 - RNA, 22 nt, Human
uagcacagacccugcccugugg

SEQ ID NO: 1220046 - RNA, 14 nt, Human
uaggaaaaacugau

SEQ ID NO: 1220047 - RNA, 13 nt, Human
uaggaaaaacuga

SEQ ID NO: 1220048 - RNA, 20 nt, Human
uagccuuagaagucacacag

SEQ ID NO: 1220049 - RNA, 14 nt, Human
uagcgcccaguugg

SEQ ID NO: 1220050 - RNA, 21 nt, Human
uagccuuagaagucacacagu

SEQ ID NO: 1220051 - RNA, 17 nt, Human
uagcgcccaguugggug

SEQ ID NO: 1220052 - RNA, 17 nt, Human
uaggaaaaacugauuuu

SEQ ID NO: 1220053 - RNA, 16 nt, Human
uaggaaaaacugauuu

SEQ ID NO: 1220054 - RNA, 21 nt, Human
uagggaaggauacaaaagcau

SEQ ID NO: 1220055 - RNA, 13 nt, Human
uagggaagauaau

SEQ ID NO: 1220056 - RNA, 14 nt, Human
uaggcauuguggga

SEQ ID NO: 1220057 - RNA, 22 nt, Human
uaguagagacaggguuuugcca

SEQ ID NO: 1220058 - RNA, 15 nt, Human
uaguagagacagggu

SEQ ID NO: 1220059 - RNA, 14 nt, Human
uagucacugagaca

SEQ ID NO: 1220060 - RNA, 16 nt, Human
acacaguauuacuucu

SEQ ID NO: 1220061 - RNA, 24 nt, Human
acacaggcccggcuccaggcuccu

SEQ ID NO: 1220062 - RNA, 23 nt, Human
acacaggcccggcuccaggcucc

SEQ ID NO: 1220063 - RNA, 22 nt, Human
acacaggcccggcuccaggcuc

SEQ ID NO: 1220064 - RNA, 21 nt, Human
acacaggcccggcuccaggcu

SEQ ID NO: 1220065 - RNA, 20 nt, Human
acacaggcccggcuccaggc

SEQ ID NO: 1220066 - RNA, 19 nt, Human
acacaggcccggcuccagg

SEQ ID NO: 1220067 - RNA, 18 nt, Human
acacaggcccggcuccag

SEQ ID NO: 1220068 - RNA, 17 nt, Human
acacaggcccggcucca

SEQ ID NO: 1220069 - RNA, 16 nt, Human
acacaggcccggcucc

SEQ ID NO: 1220070 - RNA, 23 nt, Human
acaaugcaaaccaucauugaaau

SEQ ID NO: 1220071 - RNA, 21 nt, Human
acaaugcaaaccaucauugaa

SEQ ID NO: 1220072 - RNA, 19 nt, Human
acaaugcaaaccaucauug

SEQ ID NO: 1220073 - RNA, 18 nt, Human
acaaugcaaaccaucauu

SEQ ID NO: 1220074 - RNA, 17 nt, Human
acaaugcaaaccaucau

SEQ ID NO: 1220075 - RNA, 16 nt, Human
acaaugcaaaccauca

SEQ ID NO: 1220076 - RNA, 11 nt, Human
acaaugcaaac

SEQ ID NO: 1220077 - RNA, 22 nt, Human
acaaugacuuacuguacaugaa

SEQ ID NO: 1220078 - RNA, 20 nt, Human
acaaugacuuacuguacaug

SEQ ID NO: 1220079 - RNA, 17 nt, Human
uaggguuauaauaaugu

SEQ ID NO: 1220080 - RNA, 15 nt, Human
uaggguuauaauaau

SEQ ID NO: 1220081 - RNA, 19 nt, Human
uaggguaagugagagaggg

SEQ ID NO: 1220082 - RNA, 17 nt, Human
uaucagaauucucagaa

SEQ ID NO: 1220083 - RNA, 19 nt, Human
uauccaacaucaacaucuu

SEQ ID NO: 1220084 - RNA, 22 nt, Human
uaucacccagaagaaaauagug

SEQ ID NO: 1220085 - RNA, 19 nt, Human
uaucacccagaagaaaaua

SEQ ID NO: 1220086 - RNA, 19 nt, Human
acagacauacuaaccagca

SEQ ID NO: 1220087 - RNA, 18 nt, Human
acagacauacuaaccagc

SEQ ID NO: 1220088 - RNA, 13 nt, Human
acagaaauguaca

SEQ ID NO: 1220089 - RNA, 16 nt, Human
acacuuacacuuuaug

SEQ ID NO: 1220090 - RNA, 23 nt, Human
acacuguuucaaacuuuacuaug

SEQ ID NO: 1220091 - RNA, 20 nt, Human
acacuguuucaaacuuuacu

SEQ ID NO: 1220092 - RNA, 18 nt, Human
acacuguuucaaacuuua

SEQ ID NO: 1220093 - RNA, 17 nt, Human
acacuguuucaaacuuu

SEQ ID NO: 1220094 - RNA, 19 nt, Human
acacucauugaccugaggc

SEQ ID NO: 1220095 - RNA, 17 nt, Human
acacucauugaccugag

SEQ ID NO: 1220096 - RNA, 21 nt, Human
acacuuacacuuuaugcacaa

SEQ ID NO: 1220097 - RNA, 18 nt, Human
acacuuacacuuuaugca

SEQ ID NO: 1220098 - RNA, 16 nt, Human
acacucauugaccuga

SEQ ID NO: 1220099 - RNA, 18 nt, Human
uauagccuaggugacaga

SEQ ID NO: 1220100 - RNA, 23 nt, Human
uauaggaacuuaaauaaugugaa

SEQ ID NO: 1220101 - RNA, 22 nt, Human
uauacacuuacacuuuaugcac

SEQ ID NO: 1220102 - RNA, 21 nt, Human
uauaauuuaccugaagucuuu

SEQ ID NO: 1220103 - RNA, 18 nt, Human
uauaauuuaccugaaguc

SEQ ID NO: 1220104 - RNA, 21 nt, Human
acacucaaaagcugggcaggu

SEQ ID NO: 1220105 - RNA, 22 nt, Human
acacuaaugaggaaacugcacu

SEQ ID NO: 1220106 - RNA, 15 nt, Human
acacuaaugaggaaa

SEQ ID NO: 1220107 - RNA, 20 nt, Human
uagucacugagacagcccgg

SEQ ID NO: 1220108 - RNA, 17 nt, Human
uagucacugagacagcc

SEQ ID NO: 1220109 - RNA, 10 nt, Human
uaugggagag

SEQ ID NO: 1220110 - RNA, 23 nt, Human
uaugggacucaaugcacugacau

SEQ ID NO: 1220111 - RNA, 16 nt, Human
uaugggacucaaugca

SEQ ID NO: 1220112 - RNA, 22 nt, Human
uauggcccuggccuagcauacg

SEQ ID NO: 1220113 - RNA, 21 nt, Human
uauggcccuggccuagcauac

SEQ ID NO: 1220114 - RNA, 20 nt, Human
uauggcccuggccuagcaua

SEQ ID NO: 1220115 - RNA, 14 nt, Human
uaugcucugcaugu

SEQ ID NO: 1220116 - RNA, 14 nt, Human
uaugaucacggcuc

SEQ ID NO: 1220117 - RNA, 22 nt, Human
uaugcaugaaguaauaugcaca

SEQ ID NO: 1220118 - RNA, 15 nt, Human
acagcccgggcucug

SEQ ID NO: 1220119 - RNA, 16 nt, Human
acagcccgggcucugc

SEQ ID NO: 1220120 - RNA, 23 nt, Human
uaugaggcauuuguuugaacuga

SEQ ID NO: 1220121 - RNA, 21 nt, Human
uaugaggcauuuguuugaacu

SEQ ID NO: 1220122 - RNA, 15 nt, Human
uaugaggcauuuguu

SEQ ID NO: 1220123 - RNA, 14 nt, Human
uaugaggcauuugu

SEQ ID NO: 1220124 - RNA, 21 nt, Human
acaggaaaagcugcugacagu

SEQ ID NO: 1220125 - RNA, 20 nt, Human
acaggaaaagcugcugacag

SEQ ID NO: 1220126 - RNA, 19 nt, Human
acaggaaaagcugcugaca

SEQ ID NO: 1220127 - RNA, 23 nt, Human
acagcuugaccgugaggccagag

SEQ ID NO: 1220128 - RNA, 22 nt, Human
acagcuugaccgugaggccaga

SEQ ID NO: 1220129 - RNA, 21 nt, Human
acagcuugaccgugaggccag

SEQ ID NO: 1220130 - RNA, 20 nt, Human
acagcuugaccgugaggcca

SEQ ID NO: 1220131 - RNA, 17 nt, Human
acagcuugaccgugagg

SEQ ID NO: 1220132 - RNA, 21 nt, Human
acagcuucauuuccugugucu

SEQ ID NO: 1220133 - RNA, 19 nt, Human
acagcuucauuuccugugu

SEQ ID NO: 1220134 - RNA, 17 nt, Human
acagcuucauuuccugu

SEQ ID NO: 1220135 - RNA, 19 nt, Human
acagcuaaugggacacuaa

SEQ ID NO: 1220136 - RNA, 17 nt, Human
acagcuaaugggacacu

SEQ ID NO: 1220137 - RNA, 16 nt, Human
acagcuaaugggacac

SEQ ID NO: 1220138 - RNA, 15 nt, Human
acagcuaaugggaca

SEQ ID NO: 1220139 - RNA, 22 nt, Human
acaggcccggcuccaggcuccu

SEQ ID NO: 1220140 - RNA, 21 nt, Human
acaggcccggcuccaggcucc

SEQ ID NO: 1220141 - RNA, 20 nt, Human
acaggcccggcuccaggcuc

SEQ ID NO: 1220142 - RNA, 18 nt, Human
acaggcccggcuccaggc

SEQ ID NO: 1220143 - RNA, 17 nt, Human
acaggcccggcuccagg

SEQ ID NO: 1220144 - RNA, 16 nt, Human
acaggcccggcuccag

SEQ ID NO: 1220145 - RNA, 13 nt, Human
acaggcaggucca

SEQ ID NO: 1220146 - RNA, 20 nt, Human
acaggaaaauuuuaaaaaua

SEQ ID NO: 1220147 - RNA, 13 nt, Human
aaugcaccuggaa

SEQ ID NO: 1220148 - RNA, 14 nt, Human
aaugcaaaccauca

SEQ ID NO: 1220149 - RNA, 12 nt, Human
aaugcaaaccau

SEQ ID NO: 1220150 - RNA, 11 nt, Human
aaugcaaacca

SEQ ID NO: 1220151 - RNA, 11 nt, Human
aaugagccugg

SEQ ID NO: 1220152 - RNA, 21 nt, Human
aaugaccuuucaauaggaaaa

SEQ ID NO: 1220153 - RNA, 18 nt, Human
aaugaggucagagccugc

SEQ ID NO: 1220154 - RNA, 16 nt, Human
aaugaggucagagccu

SEQ ID NO: 1220155 - RNA, 14 nt, Human
aaugagccuggcaa

SEQ ID NO: 1220156 - RNA, 13 nt, Human
aaugagccuggca

SEQ ID NO: 1220157 - RNA, 12 nt, Human
aaugagccuggc

SEQ ID NO: 1220158 - RNA, 22 nt, Human
uacagagcccacgcccccacug

SEQ ID NO: 1220159 - RNA, 19 nt, Human
uacagagcccacgccccca

SEQ ID NO: 1220160 - RNA, 23 nt, Human
uacagagcagacaguuaagagaa

SEQ ID NO: 1220161 - RNA, 19 nt, Human
uacagacaaagcguggugg

SEQ ID NO: 1220162 - RNA, 15 nt, Human
uacagacaaagcgug

SEQ ID NO: 1220163 - RNA, 14 nt, Human
uacagacaaagcgu

SEQ ID NO: 1220164 - RNA, 13 nt, Human
uacagacaaagcg

SEQ ID NO: 1220165 - RNA, 14 nt, Human
aaugguuuucaaaa

SEQ ID NO: 1220166 - RNA, 18 nt, Human
aauggaagacagcucuua

SEQ ID NO: 1220167 - RNA, 16 nt, Human
aauggaagacagcucu

SEQ ID NO: 1220168 - RNA, 16 nt, Human
aaugguuuucuugugu

SEQ ID NO: 1220169 - RNA, 16 nt, Human
aaugguuuucaaaaua

SEQ ID NO: 1220170 - RNA, 13 nt, Human
aauggaagacagc

SEQ ID NO: 1220171 - RNA, 22 nt, Human
aaugcuggcuguuggcuggggg

SEQ ID NO: 1220172 - RNA, 16 nt, Human
uacaaugcugugcccu

SEQ ID NO: 1220173 - RNA, 14 nt, Human
uacaaugcugugcc

SEQ ID NO: 1220174 - RNA, 13 nt, Human
uacaaugcugugc

SEQ ID NO: 1220175 - RNA, 18 nt, Human
uaauuuuuuugagacaga

SEQ ID NO: 1220176 - RNA, 23 nt, Human
uaccucuugagccuugaacuuug

SEQ ID NO: 1220177 - RNA, 22 nt, Human
uaccucuugagccuugaacuuu

SEQ ID NO: 1220178 - RNA, 15 nt, Human
uacccucauguucuu

SEQ ID NO: 1220179 - RNA, 23 nt, Human
uacccgggaagggggcugggaca

SEQ ID NO: 1220180 - RNA, 14 nt, Human
uaccugaagucuuu

SEQ ID NO: 1220181 - RNA, 13 nt, Human
uaccugaagucuu

SEQ ID NO: 1220182 - RNA, 15 nt, Human
uaccugaggggccuc

SEQ ID NO: 1220183 - RNA, 13 nt, Human
uaccugaggggcc

SEQ ID NO: 1220184 - RNA, 16 nt, Human
uaccugaagucuuugu

SEQ ID NO: 1220185 - RNA, 20 nt, Human
aauuacaggaaguacuggag

SEQ ID NO: 1220186 - RNA, 19 nt, Human
aauuacaggaaguacugga

SEQ ID NO: 1220187 - RNA, 17 nt, Human
aauuacaggaaguacug

SEQ ID NO: 1220188 - RNA, 16 nt, Human
uaccugccaggaagcc

SEQ ID NO: 1220189 - RNA, 16 nt, Human
uaccugaggggccucu

SEQ ID NO: 1220190 - RNA, 22 nt, Human
aauuauuuauuaaaugcccagc

SEQ ID NO: 1220191 - RNA, 22 nt, Human
aauucaguuguuagugugucuu

SEQ ID NO: 1220192 - RNA, 17 nt, Human
aauucaguuguuagugu

SEQ ID NO: 1220193 - RNA, 11 nt, Human
aauucaguugu

SEQ ID NO: 1220194 - RNA, 21 nt, Human
aauuauuuauuaaaugcccag

SEQ ID NO: 1220195 - RNA, 23 nt, Human
uacagagcccacgcccccacugg

SEQ ID NO: 1220196 - RNA, 17 nt, Human
aauuaaguacuauguau

SEQ ID NO: 1220197 - RNA, 16 nt, Human
aauuaaguacuaugua

SEQ ID NO: 1220198 - RNA, 16 nt, Human
aauuaacuuuuauaaa

SEQ ID NO: 1220199 - RNA, 15 nt, Human
aauuaacuuuuauaa

SEQ ID NO: 1220200 - RNA, 13 nt, Human
aauuaacuuuuau

SEQ ID NO: 1220201 - RNA, 12 nt, Human
aauuaacuuuua

SEQ ID NO: 1220202 - RNA, 21 nt, Human
aauguucucucuucuccaccu

SEQ ID NO: 1220203 - RNA, 18 nt, Human
uaccagccaguaaauggg

SEQ ID NO: 1220204 - RNA, 22 nt, Human
uaccagcagagcaccuuagaca

SEQ ID NO: 1220205 - RNA, 14 nt, Human
uaccagcagagcac

SEQ ID NO: 1220206 - RNA, 13 nt, Human
uaccagcagagca

SEQ ID NO: 1220207 - RNA, 12 nt, Human
uaccagcagagc

SEQ ID NO: 1220208 - RNA, 12 nt, Human
uacauucuguua

SEQ ID NO: 1220209 - RNA, 20 nt, Human
uaacuugucuuuggacccug

SEQ ID NO: 1220210 - RNA, 16 nt, Human
uaacuugucuuuggac

SEQ ID NO: 1220211 - RNA, 14 nt, Human
uaacuaaaagguau

SEQ ID NO: 1220212 - RNA, 13 nt, Human
uaacuucacauau

SEQ ID NO: 1220213 - RNA, 19 nt, Human
uaacauguaauuaaguacu

SEQ ID NO: 1220214 - RNA, 21 nt, Human
aauaguucagguaacaggcag

SEQ ID NO: 1220215 - RNA, 16 nt, Human
aauaguggugugauuu

SEQ ID NO: 1220216 - RNA, 19 nt, Human
aauaccagccaguaaaugg

SEQ ID NO: 1220217 - RNA, 17 nt, Human
aauaccagccaguaaau

SEQ ID NO: 1220218 - RNA, 12 nt, Human
aauaccaaggaa

SEQ ID NO: 1220219 - RNA, 18 nt, Human
aauaccugucccccugac

SEQ ID NO: 1220220 - RNA, 15 nt, Human
aauaccugucccccu

SEQ ID NO: 1220221 - RNA, 19 nt, Human
aauaccugucccccugaca

SEQ ID NO: 1220222 - RNA, 21 nt, Human
aauaccugucccccugacaac

SEQ ID NO: 1220223 - RNA, 13 nt, Human
aauacagaggcaa

SEQ ID NO: 1220224 - RNA, 11 nt, Human
uaaauuauuuu

SEQ ID NO: 1220225 - RNA, 22 nt, Human
uaaauuaacuuuuauaaacuuu

SEQ ID NO: 1220226 - RNA, 21 nt, Human
uaaauuaacuuuuauaaacuu

SEQ ID NO: 1220227 - RNA, 18 nt, Human
uaaaugaaaaucgugaca

SEQ ID NO: 1220228 - RNA, 21 nt, Human
aaguguauuuuuuuacuaaua

SEQ ID NO: 1220229 - RNA, 18 nt, Human
aaguguauuuuuuuacua

SEQ ID NO: 1220230 - RNA, 20 nt, Human
uaaauuaacuuuuauaaacu

SEQ ID NO: 1220231 - RNA, 19 nt, Human
uaaauuaacuuuuauaaac

SEQ ID NO: 1220232 - RNA, 13 nt, Human
aaucucaaauaac

SEQ ID NO: 1220233 - RNA, 12 nt, Human
aaucuaaaugga

SEQ ID NO: 1220234 - RNA, 17 nt, Human
aaucccauuuaaaaaaa

SEQ ID NO: 1220235 - RNA, 18 nt, Human
uaaggaugcuuguacaua

SEQ ID NO: 1220236 - RNA, 18 nt, Human
uaaggaauaccugucccc

SEQ ID NO: 1220237 - RNA, 17 nt, Human
uaaggaauaccuguccc

SEQ ID NO: 1220238 - RNA, 9 nt, Human
uaaggaaua

SEQ ID NO: 1220239 - RNA, 13 nt, Human
uaaggaagacaau

SEQ ID NO: 1220240 - RNA, 21 nt, Human
uaagcuauucaguaauaacuc

SEQ ID NO: 1220241 - RNA, 14 nt, Human
uaagauucauauuu

SEQ ID NO: 1220242 - RNA, 19 nt, Human
aaucagccugcuccagcug

SEQ ID NO: 1220243 - RNA, 18 nt, Human
aaucagccugcuccagcu

SEQ ID NO: 1220244 - RNA, 13 nt, Human
aaucagccugcuc

SEQ ID NO: 1220245 - RNA, 11 nt, Human
aaucagccugc

SEQ ID NO: 1220246 - RNA, 22 nt, Human
aaggggcccaaauucuuucagu

SEQ ID NO: 1220247 - RNA, 20 nt, Human
aagguagaaauaucugaaaa

SEQ ID NO: 1220248 - RNA, 18 nt, Human
aaggucauuuuuuuuaag

SEQ ID NO: 1220249 - RNA, 12 nt, Human
aaggucauuuuu

SEQ ID NO: 1220250 - RNA, 18 nt, Human
guuucugaaagggacgcu

SEQ ID NO: 1220251 - RNA, 19 nt, Human
guuucuauguguagggcgg

SEQ ID NO: 1220252 - RNA, 13 nt, Human
guuuauugucaaa

SEQ ID NO: 1220253 - RNA, 13 nt, Human
guugggcuggugu

SEQ ID NO: 1220254 - RNA, 17 nt, Human
guugggccaggagccuc

SEQ ID NO: 1220255 - RNA, 15 nt, Human
guugggccaggagcc

SEQ ID NO: 1220256 - RNA, 15 nt, Human
guugggcugguguca

SEQ ID NO: 1220257 - RNA, 22 nt, Human
aaggcucgagcaugccuggaug

SEQ ID NO: 1220258 - RNA, 20 nt, Human
aaggcucgagcaugccugga

SEQ ID NO: 1220259 - RNA, 19 nt, Human
aaggcucgagcaugccugg

SEQ ID NO: 1220260 - RNA, 18 nt, Human
aaggcucgagcaugccug

SEQ ID NO: 1220261 - RNA, 16 nt, Human
aaggcucgagcaugcc

SEQ ID NO: 1220262 - RNA, 22 nt, Human
aaggcuccaggagcagccacau

SEQ ID NO: 1220263 - RNA, 19 nt, Human
aaggcuccaggagcagcca

SEQ ID NO: 1220264 - RNA, 18 nt, Human
aaggcuccaggagcagcc

SEQ ID NO: 1220265 - RNA, 16 nt, Human
aaggcuccaggagcag

SEQ ID NO: 1220266 - RNA, 17 nt, Human
guuucaaacuuuacuau

SEQ ID NO: 1220267 - RNA, 15 nt, Human
aaggcuccaggagca

SEQ ID NO: 1220268 - RNA, 16 nt, Human
guuucaaacuuuacua

SEQ ID NO: 1220269 - RNA, 14 nt, Human
guuucaaacuuuac

SEQ ID NO: 1220270 - RNA, 13 nt, Human
guuucaaacuuua

SEQ ID NO: 1220271 - RNA, 15 nt, Human
aaggaaagagggagg

SEQ ID NO: 1220272 - RNA, 13 nt, Human
aaggaagcacaug

SEQ ID NO: 1220273 - RNA, 15 nt, Human
aaggaagacuucauc

SEQ ID NO: 1220274 - RNA, 14 nt, Human
aaggaagacuucau

SEQ ID NO: 1220275 - RNA, 16 nt, Human
aaggaagcacaugccu

SEQ ID NO: 1220276 - RNA, 17 nt, Human
aaggaauaccugucccc

SEQ ID NO: 1220277 - RNA, 20 nt, Human
aaggaggggauagagagaga

SEQ ID NO: 1220278 - RNA, 18 nt, Human
aaggaggaagagaaaaaa

SEQ ID NO: 1220279 - RNA, 17 nt, Human
aaggagauuuacaacug

SEQ ID NO: 1220280 - RNA, 14 nt, Human
aaggagauuuacaa

SEQ ID NO: 1220281 - RNA, 11 nt, Human
aaggagagcua

SEQ ID NO: 1220282 - RNA, 18 nt, Human
aaggaauaccuguccccc

SEQ ID NO: 1220283 - RNA, 16 nt, Human
aaggccaaaggaagca

SEQ ID NO: 1220284 - RNA, 21 nt, Human
aaggauacaaaagcaugugag

SEQ ID NO: 1220285 - RNA, 13 nt, Human
aaggauacaaaag

SEQ ID NO: 1220286 - RNA, 14 nt, Human
guugcccaggcugg

SEQ ID NO: 1220287 - RNA, 13 nt, Human
guugcccaggcug

SEQ ID NO: 1220288 - RNA, 12 nt, Human
guugcccaggcu

SEQ ID NO: 1220289 - RNA, 23 nt, Human
guugcccaggcaggucuugaacu

SEQ ID NO: 1220290 - RNA, 22 nt, Human
uaaaacuugauguguuaucucu

SEQ ID NO: 1220291 - RNA, 20 nt, Human
uaaaacuugauguguuaucu

SEQ ID NO: 1220292 - RNA, 21 nt, Human
uaaaaaucucaaauuucuaaa

SEQ ID NO: 1220293 - RNA, 20 nt, Human
uaaaaaucucaaauuucuaa

SEQ ID NO: 1220294 - RNA, 19 nt, Human
uaaaaaucucaaauuucua

SEQ ID NO: 1220295 - RNA, 17 nt, Human
uaaaaaucucaaauuuc

SEQ ID NO: 1220296 - RNA, 16 nt, Human
uaaaaaucucaaauuu

SEQ ID NO: 1220297 - RNA, 15 nt, Human
uaaaaaucucaaauu

SEQ ID NO: 1220298 - RNA, 15 nt, Human
uaaaaaguggaaaaa

SEQ ID NO: 1220299 - RNA, 15 nt, Human
guuuuucuucucccu

SEQ ID NO: 1220300 - RNA, 22 nt, Human
uaaaauaccagccaguaaaugg

SEQ ID NO: 1220301 - RNA, 18 nt, Human
aagugauucuccugccuc

SEQ ID NO: 1220302 - RNA, 17 nt, Human
aagugauucuccugccu

SEQ ID NO: 1220303 - RNA, 16 nt, Human
aagugauucuccugcc

SEQ ID NO: 1220304 - RNA, 15 nt, Human
aagugauucuccugc

SEQ ID NO: 1220305 - RNA, 19 nt, Human
aagugauucuccugccuca

SEQ ID NO: 1220306 - RNA, 20 nt, Human
aagugauucuccugccucag

SEQ ID NO: 1220307 - RNA, 16 nt, Human
aagugaggaugaaaaa

SEQ ID NO: 1220308 - RNA, 23 nt, Human
aaguacacuguuucaaacuuuac

SEQ ID NO: 1220309 - RNA, 20 nt, Human
aaguacacuguuucaaacuu

SEQ ID NO: 1220310 - RNA, 19 nt, Human
aaguacacuguuucaaacu

SEQ ID NO: 1220311 - RNA, 18 nt, Human
aaguacacuguuucaaac

SEQ ID NO: 1220312 - RNA, 13 nt, Human
aaguacacuguuu

SEQ ID NO: 1220313 - RNA, 22 nt, Human
guuuugccauguuggccaggcu

SEQ ID NO: 1220314 - RNA, 21 nt, Human
guuuugccauguuggccaggc

SEQ ID NO: 1220315 - RNA, 20 nt, Human
guuuugccauguuggccagg

SEQ ID NO: 1220316 - RNA, 16 nt, Human
guuuugccauguuggc

SEQ ID NO: 1220317 - RNA, 18 nt, Human
guuucugccgcagcccug

SEQ ID NO: 1220318 - RNA, 15 nt, Human
guuucugccgcagcc

SEQ ID NO: 1220319 - RNA, 14 nt, Human
guuucugccgcagc

SEQ ID NO: 1220320 - RNA, 15 nt, Human
aagugagagcugggu

SEQ ID NO: 1220321 - RNA, 14 nt, Human
aagugagagcuggg

SEQ ID NO: 1220322 - RNA, 12 nt, Human
aagugagagagg

SEQ ID NO: 1220323 - RNA, 19 nt, Human
aagugaagacaaugacuua

SEQ ID NO: 1220324 - RNA, 17 nt, Human
aagugaagacaaugacu

SEQ ID NO: 1220325 - RNA, 21 nt, Human
aagugaaaaaggaggaagaga

SEQ ID NO: 1220326 - RNA, 21 nt, Human
gugugugcgccuacaggagug

SEQ ID NO: 1220327 - RNA, 12 nt, Human
aagcagugcaug

SEQ ID NO: 1220328 - RNA, 20 nt, Human
aagcagugcaugcugucccu

SEQ ID NO: 1220329 - RNA, 15 nt, Human
aagcagugcaugcug

SEQ ID NO: 1220330 - RNA, 14 nt, Human
aagcagugcaugcu

SEQ ID NO: 1220331 - RNA, 17 nt, Human
aagcccaggaaaggcuc

SEQ ID NO: 1220332 - RNA, 14 nt, Human
aagcccaggaaagg

SEQ ID NO: 1220333 - RNA, 22 nt, Human
aagccaaagcuaggccuggcca

SEQ ID NO: 1220334 - RNA, 22 nt, Human
aagcccaggaaaggcuccagga

SEQ ID NO: 1220335 - RNA, 19 nt, Human
aagcccaggaaaggcucca

SEQ ID NO: 1220336 - RNA, 19 nt, Human
aagcccugagcuuucugcu

SEQ ID NO: 1220337 - RNA, 20 nt, Human
aagccgcuggggccaguugg

SEQ ID NO: 1220338 - RNA, 18 nt, Human
guuaagagaaaugagcuu

SEQ ID NO: 1220339 - RNA, 12 nt, Human
guuaagagaaau

SEQ ID NO: 1220340 - RNA, 11 nt, Human
guuaagagaaa

SEQ ID NO: 1220341 - RNA, 20 nt, Human
guuaggcauugugggaaggg

SEQ ID NO: 1220342 - RNA, 19 nt, Human
guuaggcauugugggaagg

SEQ ID NO: 1220343 - RNA, 18 nt, Human
guucaagcgauucuucug

SEQ ID NO: 1220344 - RNA, 22 nt, Human
guucaaagauauuuugcuuugu

SEQ ID NO: 1220345 - RNA, 21 nt, Human
guucaaagauauuuugcuuug

SEQ ID NO: 1220346 - RNA, 20 nt, Human
guucaaagauauuuugcuuu

SEQ ID NO: 1220347 - RNA, 23 nt, Human
guuauuuuuauuuauuuaaauuu

SEQ ID NO: 1220348 - RNA, 18 nt, Human
aagcuccaagcucccagg

SEQ ID NO: 1220349 - RNA, 17 nt, Human
aagcuccaagcucccag

SEQ ID NO: 1220350 - RNA, 20 nt, Human
aagcucagggccuggcucag

SEQ ID NO: 1220351 - RNA, 19 nt, Human
aagcucagggccuggcuca

SEQ ID NO: 1220352 - RNA, 18 nt, Human
aagcucagggccuggcuc

SEQ ID NO: 1220353 - RNA, 17 nt, Human
aagcucagggccuggcu

SEQ ID NO: 1220354 - RNA, 16 nt, Human
aagcucagggccuggc

SEQ ID NO: 1220355 - RNA, 13 nt, Human
aagcucagggccu

SEQ ID NO: 1220356 - RNA, 12 nt, Human
aagcucagggcc

SEQ ID NO: 1220357 - RNA, 16 nt, Human
aagcuaggccuggcca

SEQ ID NO: 1220358 - RNA, 12 nt, Human
aagcuaggccug

SEQ ID NO: 1220359 - RNA, 20 nt, Human
aagccugaguuugcuuucaa

SEQ ID NO: 1220360 - RNA, 15 nt, Human
guucagcuccagcuc

SEQ ID NO: 1220361 - RNA, 13 nt, Human
guucagcuccagc

SEQ ID NO: 1220362 - RNA, 22 nt, Human
guggggucacucuggcagcuca

SEQ ID NO: 1220363 - RNA, 21 nt, Human
guggggucacucuggcagcuc

SEQ ID NO: 1220364 - RNA, 20 nt, Human
guggggucacucuggcagcu

SEQ ID NO: 1220365 - RNA, 17 nt, Human
guggggucacucuggca

SEQ ID NO: 1220366 - RNA, 23 nt, Human
aagagggagggagggcuccagac

SEQ ID NO: 1220367 - RNA, 12 nt, Human
aagaguaggaag

SEQ ID NO: 1220368 - RNA, 22 nt, Human
aagagggucugaggaauccaga

SEQ ID NO: 1220369 - RNA, 14 nt, Human
aagaguaggaagac

SEQ ID NO: 1220370 - RNA, 13 nt, Human
aagaguaggaaga

SEQ ID NO: 1220371 - RNA, 17 nt, Human
aagaugcuucucacugc

SEQ ID NO: 1220372 - RNA, 19 nt, Human
aagaugcuucucacugcca

SEQ ID NO: 1220373 - RNA, 16 nt, Human
gugugguagagugugc

SEQ ID NO: 1220374 - RNA, 22 nt, Human
gugugacaaggauugcuacugu

SEQ ID NO: 1220375 - RNA, 16 nt, Human
gugucagcauagaagu

SEQ ID NO: 1220376 - RNA, 20 nt, Human
gugucaagagggucugagga

SEQ ID NO: 1220377 - RNA, 23 nt, Human
guguauuuuuuuacuaauagaca

SEQ ID NO: 1220378 - RNA, 17 nt, Human
guguauuuuuuuacuaa

SEQ ID NO: 1220379 - RNA, 22 nt, Human
guggccucccaacucaccccag

SEQ ID NO: 1220380 - RNA, 21 nt, Human
guggccucccaacucacccca

SEQ ID NO: 1220381 - RNA, 15 nt, Human
gugggacacccugug

SEQ ID NO: 1220382 - RNA, 14 nt, Human
gugggagcugccug

SEQ ID NO: 1220383 - RNA, 13 nt, Human
gugggacacccug

SEQ ID NO: 1220384 - RNA, 22 nt, Human
guggcgcagcauauucaggaag

SEQ ID NO: 1220385 - RNA, 15 nt, Human
guggggucacucugg

SEQ ID NO: 1220386 - RNA, 18 nt, Human
gugggagcugccuguuca

SEQ ID NO: 1220387 - RNA, 15 nt, Human
gugggagcugccugu

SEQ ID NO: 1220388 - RNA, 22 nt, Human
gugggacacccugugauggggc

SEQ ID NO: 1220389 - RNA, 23 nt, Human
gugggaggaucucuugagccugg

SEQ ID NO: 1220390 - RNA, 16 nt, Human
aagacuuuggaaagac

SEQ ID NO: 1220391 - RNA, 23 nt, Human
aagacugaguacguugugcauuu

SEQ ID NO: 1220392 - RNA, 20 nt, Human
aagacgcugugcugcccugc

SEQ ID NO: 1220393 - RNA, 19 nt, Human
aagaccuucuccuucaccu

SEQ ID NO: 1220394 - RNA, 18 nt, Human
aagaccuucuccuucacc

SEQ ID NO: 1220395 - RNA, 15 nt, Human
aagaccuucuccuuc

SEQ ID NO: 1220396 - RNA, 11 nt, Human
gugccuuaugg

SEQ ID NO: 1220397 - RNA, 19 nt, Human
aagacgcugugcugcccug

SEQ ID NO: 1220398 - RNA, 18 nt, Human
aagacgcugugcugcccu

SEQ ID NO: 1220399 - RNA, 17 nt, Human
aagacgcugugcugccc

SEQ ID NO: 1220400 - RNA, 15 nt, Human
aagacgcugugcugc

SEQ ID NO: 1220401 - RNA, 13 nt, Human
aagacgcugugcu

SEQ ID NO: 1220402 - RNA, 22 nt, Human
guauuuuguuuuugucuuaaaa

SEQ ID NO: 1220403 - RNA, 18 nt, Human
gucaaaguggugagaggc

SEQ ID NO: 1220404 - RNA, 24 nt, Human
aaaugucuaguuguaacaccauga

SEQ ID NO: 1220405 - RNA, 19 nt, Human
aaaugucuaguuguaacac

SEQ ID NO: 1220406 - RNA, 21 nt, Human
guaucccaugagccucagcau

SEQ ID NO: 1220407 - RNA, 14 nt, Human
guaugguggcuggg

SEQ ID NO: 1220408 - RNA, 16 nt, Human
guaugguggcuggguu

SEQ ID NO: 1220409 - RNA, 15 nt, Human
guaugguggcugggu

SEQ ID NO: 1220410 - RNA, 19 nt, Human
guaucccaugagccucagc

SEQ ID NO: 1220411 - RNA, 22 nt, Human
guaucaggugcugccauccagg

SEQ ID NO: 1220412 - RNA, 18 nt, Human
guaucaggugcugccauc

SEQ ID NO: 1220413 - RNA, 16 nt, Human
guaucaggugcugcca

SEQ ID NO: 1220414 - RNA, 12 nt, Human
guaacaggcaga

SEQ ID NO: 1220415 - RNA, 22 nt, Human
guaacaggaaaauuuuaaaaau

SEQ ID NO: 1220416 - RNA, 18 nt, Human
aaauuuguuauaaugaau

SEQ ID NO: 1220417 - RNA, 22 nt, Human
gucacacaguauuacuucugcu

SEQ ID NO: 1220418 - RNA, 23 nt, Human
aaauuuugauguuuuaaggaugc

SEQ ID NO: 1220419 - RNA, 18 nt, Human
aaauuuugauguuuuaag

SEQ ID NO: 1220420 - RNA, 16 nt, Human
aacaaggcaaggcugu

SEQ ID NO: 1220421 - RNA, 23 nt, Human
aacaaggcaaggcugucaauuac

SEQ ID NO: 1220422 - RNA, 21 nt, Human
aacaaggcaaggcugucaauu

SEQ ID NO: 1220423 - RNA, 18 nt, Human
aacaaggcaaggcuguca

SEQ ID NO: 1220424 - RNA, 13 nt, Human
guccuacucugug

SEQ ID NO: 1220425 - RNA, 15 nt, Human
aacagaaauguacag

SEQ ID NO: 1220426 - RNA, 14 nt, Human
aacagaaauguaca

SEQ ID NO: 1220427 - RNA, 13 nt, Human
aacagaaauguac

SEQ ID NO: 1220428 - RNA, 12 nt, Human
aacagaaaugua

SEQ ID NO: 1220429 - RNA, 12 nt, Human
guccuacucugu

SEQ ID NO: 1220430 - RNA, 16 nt, Human
guccuacccacccucc

SEQ ID NO: 1220431 - RNA, 18 nt, Human
gucccccuuccauggacu

SEQ ID NO: 1220432 - RNA, 16 nt, Human
gucccccuuccaugga

SEQ ID NO: 1220433 - RNA, 14 nt, Human
gucccccuuccaug

SEQ ID NO: 1220434 - RNA, 16 nt, Human
gucccaccuuggcugc

SEQ ID NO: 1220435 - RNA, 15 nt, Human
gucccaccuuggcug

SEQ ID NO: 1220436 - RNA, 14 nt, Human
gucccaccuuggcu

SEQ ID NO: 1220437 - RNA, 21 nt, Human
gucccaccccacacacgccag

SEQ ID NO: 1220438 - RNA, 14 nt, Human
guccauagagagca

SEQ ID NO: 1220439 - RNA, 13 nt, Human
guccauagagagc

SEQ ID NO: 1220440 - RNA, 20 nt, Human
guccaagaagcccaggaaag

SEQ ID NO: 1220441 - RNA, 18 nt, Human
guccaagaagcccaggaa

SEQ ID NO: 1220442 - RNA, 17 nt, Human
guccaagaagcccagga

SEQ ID NO: 1220443 - RNA, 16 nt, Human
guccaagaagcccagg

SEQ ID NO: 1220444 - RNA, 15 nt, Human
guccaagaagcccag

SEQ ID NO: 1220445 - RNA, 13 nt, Human
guccaagaagccc

SEQ ID NO: 1220446 - RNA, 21 nt, Human
gucauuuuuuuuaagaaaaag

SEQ ID NO: 1220447 - RNA, 19 nt, Human
gucauuuuuuuuaagaaaa

SEQ ID NO: 1220448 - RNA, 14 nt, Human
gucuggcccuuccu

SEQ ID NO: 1220449 - RNA, 16 nt, Human
gucuuuuuucacuaca

SEQ ID NO: 1220450 - RNA, 23 nt, Human
gugaaccaccacacccagcccac

SEQ ID NO: 1220451 - RNA, 22 nt, Human
gugaaccaccacacccagccca

SEQ ID NO: 1220452 - RNA, 17 nt, Human
aacucuccucugcugcu

SEQ ID NO: 1220453 - RNA, 16 nt, Human
aacucuccucugcugc

SEQ ID NO: 1220454 - RNA, 18 nt, Human
aacucuccuccagaguca

SEQ ID NO: 1220455 - RNA, 15 nt, Human
aacucuccuccagag

SEQ ID NO: 1220456 - RNA, 12 nt, Human
aaccugugucuc

SEQ ID NO: 1220457 - RNA, 19 nt, Human
aaccaccacacccagccca

SEQ ID NO: 1220458 - RNA, 15 nt, Human
aaccaagucaaguga

SEQ ID NO: 1220459 - RNA, 21 nt, Human
aaccaccacacccagcccacu

SEQ ID NO: 1220460 - RNA, 12 nt, Human
aaccaucauuga

SEQ ID NO: 1220461 - RNA, 18 nt, Human
aaccaucauugaaaucuu

SEQ ID NO: 1220462 - RNA, 17 nt, Human
aaccaucauugaaaucu

SEQ ID NO: 1220463 - RNA, 23 nt, Human
aaccauuuugcugucccuuuucc

SEQ ID NO: 1220464 - RNA, 10 nt, Human
aacccagcuc

SEQ ID NO: 1220465 - RNA, 22 nt, Human
gugagucgaggacagggaggug

SEQ ID NO: 1220466 - RNA, 21 nt, Human
aacucuucaaucucuugcacu

SEQ ID NO: 1220467 - RNA, 22 nt, Human
gugaggccagagacacaagccu

SEQ ID NO: 1220468 - RNA, 17 nt, Human
gugaggccagagacaca

SEQ ID NO: 1220469 - RNA, 15 nt, Human
gugagcaauccugca

SEQ ID NO: 1220470 - RNA, 19 nt, Human
gugaacuugggccacugug

SEQ ID NO: 1220471 - RNA, 17 nt, Human
gugaacuugggccacug

SEQ ID NO: 1220472 - RNA, 21 nt, Human
aacuggguacuuguggacaca

SEQ ID NO: 1220473 - RNA, 16 nt, Human
aacuggguacuugugg

SEQ ID NO: 1220474 - RNA, 22 nt, Human
aacugggggagggugaagugaa

SEQ ID NO: 1220475 - RNA, 21 nt, Human
aacugggggagggugaaguga

SEQ ID NO: 1220476 - RNA, 11 nt, Human
aacuggcugca

SEQ ID NO: 1220477 - RNA, 16 nt, Human
aacuggauuaaacuua

SEQ ID NO: 1220478 - RNA, 15 nt, Human
aacuggauuaaacuu

SEQ ID NO: 1220479 - RNA, 23 nt, Human
aacugcugacuguuuucucuuga

SEQ ID NO: 1220480 - RNA, 21 nt, Human
aacugcugacuguuuucucuu

SEQ ID NO: 1220481 - RNA, 20 nt, Human
aacugcugacuguuuucucu

SEQ ID NO: 1220482 - RNA, 15 nt, Human
aacugcugacuguuu

SEQ ID NO: 1220483 - RNA, 19 nt, Human
gugauggggcccugccucc

SEQ ID NO: 1220484 - RNA, 21 nt, Human
gugcacacaccagagcccacc

SEQ ID NO: 1220485 - RNA, 23 nt, Human
gugcauuaucuagauacuguauc

SEQ ID NO: 1220486 - RNA, 19 nt, Human
gugcauuaucuagauacug

SEQ ID NO: 1220487 - RNA, 15 nt, Human
gugcauuaucuagau

SEQ ID NO: 1220488 - RNA, 19 nt, Human
gugcauguguguucaugca

SEQ ID NO: 1220489 - RNA, 18 nt, Human
gugauggggcccugccuc

SEQ ID NO: 1220490 - RNA, 17 nt, Human
gugauggggcccugccu

SEQ ID NO: 1220491 - RNA, 16 nt, Human
gugauggggcccugcc

SEQ ID NO: 1220492 - RNA, 14 nt, Human
gugauggggcccug

SEQ ID NO: 1220493 - RNA, 22 nt, Human
gugaugcgcaugucacggaggg

SEQ ID NO: 1220494 - RNA, 16 nt, Human
gugaugagaggaaauc

SEQ ID NO: 1220495 - RNA, 14 nt, Human
gugaugagaggaaa

SEQ ID NO: 1220496 - RNA, 13 nt, Human
aacuuccaauuua

SEQ ID NO: 1220497 - RNA, 16 nt, Human
accaucccugaaggcc

SEQ ID NO: 1220498 - RNA, 23 nt, Human
accaucauugaaaucuuuuugcu

SEQ ID NO: 1220499 - RNA, 15 nt, Human
accaucauugaaauc

SEQ ID NO: 1220500 - RNA, 15 nt, Human
accaucaagccacca

SEQ ID NO: 1220501 - RNA, 14 nt, Human
accaucaagccacc

SEQ ID NO: 1220502 - RNA, 13 nt, Human
acccaugcugccc

SEQ ID NO: 1220503 - RNA, 15 nt, Human
acccacccuccuuuc

SEQ ID NO: 1220504 - RNA, 17 nt, Human
acccacccccacccaag

SEQ ID NO: 1220505 - RNA, 15 nt, Human
acccacccccaccca

SEQ ID NO: 1220506 - RNA, 14 nt, Human
acauuuauucugcu

SEQ ID NO: 1220507 - RNA, 23 nt, Human
acaugucuuuucuugcaugaggc

SEQ ID NO: 1220508 - RNA, 20 nt, Human
acaugccucucucaggccaa

SEQ ID NO: 1220509 - RNA, 19 nt, Human
acaugccucucucaggcca

SEQ ID NO: 1220510 - RNA, 17 nt, Human
accagccccagugccca

SEQ ID NO: 1220511 - RNA, 16 nt, Human
accagccccagugccc

SEQ ID NO: 1220512 - RNA, 13 nt, Human
accagcagccugg

SEQ ID NO: 1220513 - RNA, 13 nt, Human
accagcagagcac

SEQ ID NO: 1220514 - RNA, 12 nt, Human
accagcagagca

SEQ ID NO: 1220515 - RNA, 20 nt, Human
accagccccagugcccacag

SEQ ID NO: 1220516 - RNA, 19 nt, Human
accagccccagugcccaca

SEQ ID NO: 1220517 - RNA, 18 nt, Human
accagccccagugcccac

SEQ ID NO: 1220518 - RNA, 23 nt, Human
acagugagucgaggacagggagg

SEQ ID NO: 1220519 - RNA, 14 nt, Human
acaggcaaugcugg

SEQ ID NO: 1220520 - RNA, 23 nt, Human
acaggugugagucaccaagccca

SEQ ID NO: 1220521 - RNA, 19 nt, Human
acaggugugaaccaccaca

SEQ ID NO: 1220522 - RNA, 22 nt, Human
acagugagucgaggacagggag

SEQ ID NO: 1220523 - RNA, 14 nt, Human
acagcucuguccug

SEQ ID NO: 1220524 - RNA, 23 nt, Human
acagcuccuucuguccuacucug

SEQ ID NO: 1220525 - RNA, 18 nt, Human
acagcuccuucuguccua

SEQ ID NO: 1220526 - RNA, 16 nt, Human
acagcuccuucugucc

SEQ ID NO: 1220527 - RNA, 21 nt, Human
acagaggggguggccucccaa

SEQ ID NO: 1220528 - RNA, 19 nt, Human
acagaggggguggccuccc

SEQ ID NO: 1220529 - RNA, 18 nt, Human
acagaggggguggccucc

SEQ ID NO: 1220530 - RNA, 17 nt, Human
acagaggggguggccuc

SEQ ID NO: 1220531 - RNA, 17 nt, Human
acagcucuguccuggga

SEQ ID NO: 1220532 - RNA, 16 nt, Human
acagcucuguccuggg

SEQ ID NO: 1220533 - RNA, 23 nt, Human
acaggcaagcaccuccugccucg

SEQ ID NO: 1220534 - RNA, 20 nt, Human
acaggcaagcaccuccugcc

SEQ ID NO: 1220535 - RNA, 13 nt, Human
acagcugccuggg

SEQ ID NO: 1220536 - RNA, 18 nt, Human
acaugccucucucaggcc

SEQ ID NO: 1220537 - RNA, 17 nt, Human
acaugccucucucaggc

SEQ ID NO: 1220538 - RNA, 16 nt, Human
acaugccucucucagg

SEQ ID NO: 1220539 - RNA, 15 nt, Human
acaugccucucucag

SEQ ID NO: 1220540 - RNA, 18 nt, Human
acaugcaaggucauuuuu

SEQ ID NO: 1220541 - RNA, 17 nt, Human
acaugcaaggucauuuu

SEQ ID NO: 1220542 - RNA, 16 nt, Human
acaugcaaggucauuu

SEQ ID NO: 1220543 - RNA, 16 nt, Human
acauaagauaaaugug

SEQ ID NO: 1220544 - RNA, 20 nt, Human
aauuuauuuaugggauccug

SEQ ID NO: 1220545 - RNA, 19 nt, Human
aaugucacaggcaggucca

SEQ ID NO: 1220546 - RNA, 16 nt, Human
aaugucacaggcaggu

SEQ ID NO: 1220547 - RNA, 16 nt, Human
aauuguaaggaaugau

SEQ ID NO: 1220548 - RNA, 12 nt, Human
aauuguaaggaa

SEQ ID NO: 1220549 - RNA, 22 nt, Human
acaaaaugaaacgcaaccacca

SEQ ID NO: 1220550 - RNA, 13 nt, Human
acaaaaugaaacg

SEQ ID NO: 1220551 - RNA, 16 nt, Human
aauuuugugcccccau

SEQ ID NO: 1220552 - RNA, 14 nt, Human
aauuuugauguuuu

SEQ ID NO: 1220553 - RNA, 13 nt, Human
acagaggcagccc

SEQ ID NO: 1220554 - RNA, 23 nt, Human
acagaggccaugggccuccugug

SEQ ID NO: 1220555 - RNA, 21 nt, Human
acagaggccaugggccuccug

SEQ ID NO: 1220556 - RNA, 17 nt, Human
acagaggccaugggccu

SEQ ID NO: 1220557 - RNA, 14 nt, Human
acagaggcagcccc

SEQ ID NO: 1220558 - RNA, 14 nt, Human
acagacaaagcgug

SEQ ID NO: 1220559 - RNA, 22 nt, Human
acacugugcugagucugaaggc

SEQ ID NO: 1220560 - RNA, 21 nt, Human
acaccacuacauucuguuaau

SEQ ID NO: 1220561 - RNA, 21 nt, Human
acacgaauauugcugauggug

SEQ ID NO: 1220562 - RNA, 15 nt, Human
acacgaauauugcug

SEQ ID NO: 1220563 - RNA, 14 nt, Human
acacgaauauugcu

SEQ ID NO: 1220564 - RNA, 20 nt, Human
acaccacuacauucuguuaa

SEQ ID NO: 1220565 - RNA, 17 nt, Human
acaccacuacauucugu

SEQ ID NO: 1220566 - RNA, 15 nt, Human
acaccacuacauucu

SEQ ID NO: 1220567 - RNA, 19 nt, Human
acacauuuuuuaaaugcac

SEQ ID NO: 1220568 - RNA, 18 nt, Human
acacauuuuuuaaaugca

SEQ ID NO: 1220569 - RNA, 16 nt, Human
acacauuuuuuaaaug

SEQ ID NO: 1220570 - RNA, 14 nt, Human
acacauuuuuuaaa

SEQ ID NO: 1220571 - RNA, 22 nt, Human
acacagcucuucuccaggcugu

SEQ ID NO: 1220572 - RNA, 21 nt, Human
acacagcucuucuccaggcug

SEQ ID NO: 1220573 - RNA, 20 nt, Human
acacagcucuucuccaggcu

SEQ ID NO: 1220574 - RNA, 19 nt, Human
acacaaaaguuucucuuuu

SEQ ID NO: 1220575 - RNA, 14 nt, Human
acaauuuauuaugg

SEQ ID NO: 1220576 - RNA, 13 nt, Human
acaauuuauuaug

SEQ ID NO: 1220577 - RNA, 16 nt, Human
acaaggauugcuacug

SEQ ID NO: 1220578 - RNA, 20 nt, Human
acaaggaugaucuaggaaga

SEQ ID NO: 1220579 - RNA, 16 nt, Human
acuauuguuagucucu

SEQ ID NO: 1220580 - RNA, 17 nt, Human
acuagggaagauaauau

SEQ ID NO: 1220581 - RNA, 11 nt, Human
accugugucuc

SEQ ID NO: 1220582 - RNA, 16 nt, Human
acggaagagccuugcg

SEQ ID NO: 1220583 - RNA, 15 nt, Human
acggaagagccuugc

SEQ ID NO: 1220584 - RNA, 15 nt, Human
acggaauaguuggcu

SEQ ID NO: 1220585 - RNA, 19 nt, Human
acgcuggagugcagugagc

SEQ ID NO: 1220586 - RNA, 12 nt, Human
acgucugugcca

SEQ ID NO: 1220587 - RNA, 23 nt, Human
acgucugacaggcaaugcuggcu

SEQ ID NO: 1220588 - RNA, 15 nt, Human
acuaauagacaauuu

SEQ ID NO: 1220589 - RNA, 11 nt, Human
acguggcugcu

SEQ ID NO: 1220590 - RNA, 21 nt, Human
accucuugagccuugaacuuu

SEQ ID NO: 1220591 - RNA, 20 nt, Human
accucuugagccuugaacuu

SEQ ID NO: 1220592 - RNA, 19 nt, Human
accucuugagccuugaacu

SEQ ID NO: 1220593 - RNA, 17 nt, Human
accucuugagccuugaa

SEQ ID NO: 1220594 - RNA, 18 nt, Human
accugccagggacagagg

SEQ ID NO: 1220595 - RNA, 16 nt, Human
accugccagggacaga

SEQ ID NO: 1220596 - RNA, 15 nt, Human
accugccagggacag

SEQ ID NO: 1220597 - RNA, 13 nt, Human
accugccagggac

SEQ ID NO: 1220598 - RNA, 12 nt, Human
accugccaggga

SEQ ID NO: 1220599 - RNA, 11 nt, Human
accugccaggg

SEQ ID NO: 1220600 - RNA, 14 nt, Human
accgugaggccaga

SEQ ID NO: 1220601 - RNA, 20 nt, Human
accgggccacagagaaagua

SEQ ID NO: 1220602 - RNA, 19 nt, Human
accgggccacagagaaagu

SEQ ID NO: 1220603 - RNA, 15 nt, Human
accgggccacagaga

SEQ ID NO: 1220604 - RNA, 19 nt, Human
accggcuggccuggccccu

SEQ ID NO: 1220605 - RNA, 18 nt, Human
accggcuggccuggcccc

SEQ ID NO: 1220606 - RNA, 17 nt, Human
accggcuggccuggccc

SEQ ID NO: 1220607 - RNA, 15 nt, Human
accggcuggccuggc

SEQ ID NO: 1220608 - RNA, 14 nt, Human
accggcuggccugg

SEQ ID NO: 1220609 - RNA, 22 nt, Human
acccugugauggggcccugccu

SEQ ID NO: 1220610 - RNA, 16 nt, Human
accccacacacgccag

SEQ ID NO: 1220611 - RNA, 16 nt, Human
acccaugcugcccugu

SEQ ID NO: 1220612 - RNA, 15 nt, Human
acccaugcugcccug

SEQ ID NO: 1220613 - RNA, 14 nt, Human
acccaugcugcccu

SEQ ID NO: 1220614 - RNA, 17 nt, Human
acccuguuaccauuuug

SEQ ID NO: 1220615 - RNA, 13 nt, Human
accucaggccugg

SEQ ID NO: 1220616 - RNA, 12 nt, Human
accucaggccug

SEQ ID NO: 1220617 - RNA, 17 nt, Human
accgugaggccagagac

SEQ ID NO: 1220618 - RNA, 16 nt, Human
accgugaggccagaga

SEQ ID NO: 1220619 - RNA, 22 nt, Human
accucaggccugggggcugggc

SEQ ID NO: 1220620 - RNA, 14 nt, Human
accucaggccuggg

SEQ ID NO: 1220621 - RNA, 18 nt, Human
accucaggugagaagcag

SEQ ID NO: 1220622 - RNA, 18 nt, Human
acuucuuauacauuugau

SEQ ID NO: 1220623 - RNA, 17 nt, Human
acuucuuauacauuuga

SEQ ID NO: 1220624 - RNA, 20 nt, Human
acuucugccauauucuguug

SEQ ID NO: 1220625 - RNA, 15 nt, Human
acuuaaauaauguga

SEQ ID NO: 1220626 - RNA, 14 nt, Human
acuuaaauaaugug

SEQ ID NO: 1220627 - RNA, 23 nt, Human
acugauuuuuuuuuccuucagug

SEQ ID NO: 1220628 - RNA, 22 nt, Human
acugauuuuuuuuuccuucagu

SEQ ID NO: 1220629 - RNA, 21 nt, Human
acugauuuuuuuuuccuucag

SEQ ID NO: 1220630 - RNA, 23 nt, Human
acugaugggcaacccccagccug

SEQ ID NO: 1220631 - RNA, 22 nt, Human
acugaugggcaacccccagccu

SEQ ID NO: 1220632 - RNA, 12 nt, Human
acugaugggcaa

SEQ ID NO: 1220633 - RNA, 22 nt, Human
acugauggcuaauguacugcau

SEQ ID NO: 1220634 - RNA, 13 nt, Human
acugaucucucgu

SEQ ID NO: 1220635 - RNA, 23 nt, Human
acugacauuguuggccaaagcca

SEQ ID NO: 1220636 - RNA, 21 nt, Human
acucugugucagguggggcag

SEQ ID NO: 1220637 - RNA, 19 nt, Human
acucugucucaaaaaaaca

SEQ ID NO: 1220638 - RNA, 20 nt, Human
acugcuuuuggucuguguga

SEQ ID NO: 1220639 - RNA, 16 nt, Human
acugcuuuuggucugu

SEQ ID NO: 1220640 - RNA, 15 nt, Human
acugcuuuuggucug

SEQ ID NO: 1220641 - RNA, 14 nt, Human
acugccaugccagc

SEQ ID NO: 1220642 - RNA, 22 nt, Human
acugcccggcaggguccuagaa

SEQ ID NO: 1220643 - RNA, 15 nt, Human
acugcccggcagggu

SEQ ID NO: 1220644 - RNA, 17 nt, Human
aagacuuuuccaacccu

SEQ ID NO: 1220645 - RNA, 16 nt, Human
aagacuuuggaaagag

SEQ ID NO: 1220646 - RNA, 20 nt, Human
aagauucauauuuacuucuu

SEQ ID NO: 1220647 - RNA, 19 nt, Human
aagccaccaacauacuccc

SEQ ID NO: 1220648 - RNA, 19 nt, Human
aagauuuugaaauuuuuau

SEQ ID NO: 1220649 - RNA, 20 nt, Human
aagggacuuggaagcuccgc

SEQ ID NO: 1220650 - RNA, 17 nt, Human
aagcgauucuucugcuu

SEQ ID NO: 1220651 - RNA, 16 nt, Human
aagcgauucuucugcu

SEQ ID NO: 1220652 - RNA, 15 nt, Human
aagcgauucuucugc

SEQ ID NO: 1220653 - RNA, 21 nt, Human
aagccaccaacauacucccau

SEQ ID NO: 1220654 - RNA, 15 nt, Human
aagccagcaggcucu

SEQ ID NO: 1220655 - RNA, 18 nt, Human
aagccagcaggcucucag

SEQ ID NO: 1220656 - RNA, 19 nt, Human
aagccagcaggcucucagg

SEQ ID NO: 1220657 - RNA, 23 nt, Human
aaggaaugauuaauuaaaacaca

SEQ ID NO: 1220658 - RNA, 16 nt, Human
aagcugcugacagugu

SEQ ID NO: 1220659 - RNA, 22 nt, Human
aagcugccagccgagauagcca

SEQ ID NO: 1220660 - RNA, 14 nt, Human
aagcugcugacagu

SEQ ID NO: 1220661 - RNA, 12 nt, Human
aagcugccagcc

SEQ ID NO: 1220662 - RNA, 11 nt, Human
aagcugccagc

SEQ ID NO: 1220663 - RNA, 20 nt, Human
aagcgugagccacugcaccg

SEQ ID NO: 1220664 - RNA, 17 nt, Human
aagcgugagccacugca

SEQ ID NO: 1220665 - RNA, 21 nt, Human
aagcgugagccacugcaccgg

SEQ ID NO: 1220666 - RNA, 13 nt, Human
aaggacacuagaa

SEQ ID NO: 1220667 - RNA, 14 nt, Human
aagugcugcauuua

SEQ ID NO: 1220668 - RNA, 13 nt, Human
aagugcugcauuu

SEQ ID NO: 1220669 - RNA, 16 nt, Human
aauauaggaacuuaaa

SEQ ID NO: 1220670 - RNA, 17 nt, Human
aauccagacccggcugc

SEQ ID NO: 1220671 - RNA, 13 nt, Human
aaugauuaauuaa

SEQ ID NO: 1220672 - RNA, 12 nt, Human
aaugauuaauua

SEQ ID NO: 1220673 - RNA, 16 nt, Human
aaugauuaauuaaaac

SEQ ID NO: 1220674 - RNA, 15 nt, Human
aaugauagcuacugu

SEQ ID NO: 1220675 - RNA, 13 nt, Human
aaugggcagagca

SEQ ID NO: 1220676 - RNA, 17 nt, Human
aaugggggugcauuuga

SEQ ID NO: 1220677 - RNA, 15 nt, Human
aaugggggugcauuu

SEQ ID NO: 1220678 - RNA, 14 nt, Human
aaugggagcucaug

SEQ ID NO: 1220679 - RNA, 13 nt, Human
aaugggacacuaa

SEQ ID NO: 1220680 - RNA, 23 nt, Human
aaugcucuuuacuucauggacuu

SEQ ID NO: 1220681 - RNA, 23 nt, Human
aaugcgugcauaccacuuuuguu

SEQ ID NO: 1220682 - RNA, 21 nt, Human
aaugcgugcauaccacuuuug

SEQ ID NO: 1220683 - RNA, 11 nt, Human
aaauaaauuau

SEQ ID NO: 1220684 - RNA, 22 nt, Human
aaaggcuccaggagcagccaca

SEQ ID NO: 1220685 - RNA, 21 nt, Human
aaaggcuccaggagcagccac

SEQ ID NO: 1220686 - RNA, 15 nt, Human
aaaggcuccaggagc

SEQ ID NO: 1220687 - RNA, 14 nt, Human
aaaggcuccaggag

SEQ ID NO: 1220688 - RNA, 17 nt, Human
aaaggcuaccuuuguau

SEQ ID NO: 1220689 - RNA, 15 nt, Human
aaagccaaagcuagg

SEQ ID NO: 1220690 - RNA, 15 nt, Human
aaagauacaguuacu

SEQ ID NO: 1220691 - RNA, 11 nt, Human
aaagagguuuu

SEQ ID NO: 1220692 - RNA, 22 nt, Human
aaacugauuuuuuuuuccuuca

SEQ ID NO: 1220693 - RNA, 20 nt, Human
aaacugauuuuuuuuuccuu

SEQ ID NO: 1220694 - RNA, 19 nt, Human
aaacugauuuuuuuuuccu

SEQ ID NO: 1220695 - RNA, 13 nt, Human
aaacugauuuuuu

SEQ ID NO: 1220696 - RNA, 17 nt, Human
aaacucuugaccucagg

SEQ ID NO: 1220697 - RNA, 14 nt, Human
aaacccuucagugc

SEQ ID NO: 1220698 - RNA, 17 nt, Human
aaaccccaucucuacaa

SEQ ID NO: 1220699 - RNA, 17 nt, Human
aaacagcuaaugggaca

SEQ ID NO: 1220700 - RNA, 15 nt, Human
aaaauuagccaagug

SEQ ID NO: 1220701 - RNA, 22 nt, Human
aaaaucccuuaccucggugccu

SEQ ID NO: 1220702 - RNA, 16 nt, Human
aacagcuaaugggaca

SEQ ID NO: 1220703 - RNA, 15 nt, Human
aacauggaaguacua

SEQ ID NO: 1220704 - RNA, 19 nt, Human
aaccaguguuguggauuua

SEQ ID NO: 1220705 - RNA, 13 nt, Human
aacccuucagugc

SEQ ID NO: 1220706 - RNA, 18 nt, Human
aacucaccccagccccaa

SEQ ID NO: 1220707 - RNA, 17 nt, Human
aacucaccccagcccca

SEQ ID NO: 1220708 - RNA, 16 nt, Human
aacucaccccagcccc

SEQ ID NO: 1220709 - RNA, 17 nt, Human
aacucaaacucuuaaaa

SEQ ID NO: 1220710 - RNA, 13 nt, Human
aacgucugugcca

SEQ ID NO: 1220711 - RNA, 19 nt, Human
aaauuaacuuuuauaaacu

SEQ ID NO: 1220712 - RNA, 14 nt, Human
aaauuaacuuuuau

SEQ ID NO: 1220713 - RNA, 13 nt, Human
aaauuaacuuuua

SEQ ID NO: 1220714 - RNA, 12 nt, Human
aaauuaacuuuu

SEQ ID NO: 1220715 - RNA, 19 nt, Human
aacaccucugcacaagcug

SEQ ID NO: 1220716 - RNA, 22 nt, Human
aacaaaccuguuucugcagcca

SEQ ID NO: 1220717 - RNA, 21 nt, Human
aacacauacaggaagguagaa

SEQ ID NO: 1220718 - RNA, 18 nt, Human
aaaucugcuuuuuaaaga

SEQ ID NO: 1220719 - RNA, 22 nt, Human
aaaucuccaaaauaaaacuuuu

SEQ ID NO: 1220720 - RNA, 17 nt, Human
aaauggacguguuauga

SEQ ID NO: 1220721 - RNA, 15 nt, Human
aaauggacguguuau

SEQ ID NO: 1220722 - RNA, 14 nt, Human
aaauggacguguua

SEQ ID NO: 1220723 - RNA, 16 nt, Human
agagggccugcaaggg

SEQ ID NO: 1220724 - RNA, 13 nt, Human
agagggccugcaa

SEQ ID NO: 1220725 - RNA, 19 nt, Human
agaggggguggccucccaa

SEQ ID NO: 1220726 - RNA, 17 nt, Human
agaggggguggccuccc

SEQ ID NO: 1220727 - RNA, 22 nt, Human
agaggacuuuucuuuguggcuu

SEQ ID NO: 1220728 - RNA, 21 nt, Human
agaggacuuuucuuuguggcu

SEQ ID NO: 1220729 - RNA, 23 nt, Human
agaggacuuuucuuuguggcuuc

SEQ ID NO: 1220730 - RNA, 13 nt, Human
agagcccaccuug

SEQ ID NO: 1220731 - RNA, 16 nt, Human
agacuggaagcacagc

SEQ ID NO: 1220732 - RNA, 16 nt, Human
agagagaccacuuuuc

SEQ ID NO: 1220733 - RNA, 18 nt, Human
agacucugucucaaaaaa

SEQ ID NO: 1220734 - RNA, 23 nt, Human
agacugaguacguugugcauuug

SEQ ID NO: 1220735 - RNA, 22 nt, Human
agacugaguacguugugcauuu

SEQ ID NO: 1220736 - RNA, 20 nt, Human
agacugaguacguugugcau

SEQ ID NO: 1220737 - RNA, 16 nt, Human
agacgcugugcugccc

SEQ ID NO: 1220738 - RNA, 14 nt, Human
agaaguaacuuacu

SEQ ID NO: 1220739 - RNA, 21 nt, Human
agaagagauugugguuucauu

SEQ ID NO: 1220740 - RNA, 21 nt, Human
agaagacacugaugggcaacc

SEQ ID NO: 1220741 - RNA, 13 nt, Human
agaagacacugau

SEQ ID NO: 1220742 - RNA, 21 nt, Human
acuuuccucuuuggucuacac

SEQ ID NO: 1220743 - RNA, 18 nt, Human
agaaugaaagggcccaga

SEQ ID NO: 1220744 - RNA, 22 nt, Human
agaaugcacaaacagaggccgc

SEQ ID NO: 1220745 - RNA, 19 nt, Human
agaaugcacaaacagaggc

SEQ ID NO: 1220746 - RNA, 23 nt, Human
agacagagucucacuguugccca

SEQ ID NO: 1220747 - RNA, 21 nt, Human
agacagagucucacuguugcc

SEQ ID NO: 1220748 - RNA, 20 nt, Human
agacagagucucacuguugc

SEQ ID NO: 1220749 - RNA, 19 nt, Human
agacagagucucacuguug

SEQ ID NO: 1220750 - RNA, 11 nt, Human
agacagagucu

SEQ ID NO: 1220751 - RNA, 15 nt, Human
agacagagcuacaca

SEQ ID NO: 1220752 - RNA, 23 nt, Human
agacaaugacuuacuguacauga

SEQ ID NO: 1220753 - RNA, 22 nt, Human
agacaaugacuuacuguacaug

SEQ ID NO: 1220754 - RNA, 21 nt, Human
agacaaugacuuacuguacau

SEQ ID NO: 1220755 - RNA, 20 nt, Human
agacaaugacuuacuguaca

SEQ ID NO: 1220756 - RNA, 14 nt, Human
agaugagugagcau

SEQ ID NO: 1220757 - RNA, 23 nt, Human
agaggggguggccucccaacuca

SEQ ID NO: 1220758 - RNA, 18 nt, Human
agcaaaagaugcuucuca

SEQ ID NO: 1220759 - RNA, 23 nt, Human
agauugcaacaggcugggcuuca

SEQ ID NO: 1220760 - RNA, 21 nt, Human
agauugcaacaggcugggcuu

SEQ ID NO: 1220761 - RNA, 20 nt, Human
agauugcaacaggcugggcu

SEQ ID NO: 1220762 - RNA, 21 nt, Human
agauucuuuccugaggcuggg

SEQ ID NO: 1220763 - RNA, 19 nt, Human
agauucuuuccugaggcug

SEQ ID NO: 1220764 - RNA, 20 nt, Human
agcaaaggagauuggaagga

SEQ ID NO: 1220765 - RNA, 15 nt, Human
agcacagacccugcc

SEQ ID NO: 1220766 - RNA, 14 nt, Human
agcacagacccugc

SEQ ID NO: 1220767 - RNA, 21 nt, Human
agcacgauuucuguuuagaua

SEQ ID NO: 1220768 - RNA, 19 nt, Human
agcacgauuucuguuuaga

SEQ ID NO: 1220769 - RNA, 16 nt, Human
agcacagacccugccc

SEQ ID NO: 1220770 - RNA, 17 nt, Human
agcacagacccugcccu

SEQ ID NO: 1220771 - RNA, 14 nt, Human
agccagcaggcucu

SEQ ID NO: 1220772 - RNA, 18 nt, Human
agccagaggagagaggac

SEQ ID NO: 1220773 - RNA, 17 nt, Human
agccagaggagagagga

SEQ ID NO: 1220774 - RNA, 15 nt, Human
agccagaggagagag

SEQ ID NO: 1220775 - RNA, 13 nt, Human
agccagaggagag

SEQ ID NO: 1220776 - RNA, 20 nt, Human
agccaaggccaaaggaagca

SEQ ID NO: 1220777 - RNA, 18 nt, Human
agccaaagcuaggccugg

SEQ ID NO: 1220778 - RNA, 16 nt, Human
agccaaagcuaggccu

SEQ ID NO: 1220779 - RNA, 18 nt, Human
agcauccuggcacccggc

SEQ ID NO: 1220780 - RNA, 17 nt, Human
agcauccuggcacccgg

SEQ ID NO: 1220781 - RNA, 14 nt, Human
agcauccuggcacc

SEQ ID NO: 1220782 - RNA, 16 nt, Human
agcccaccuuggcuca

SEQ ID NO: 1220783 - RNA, 15 nt, Human
agcccaccccucaac

SEQ ID NO: 1220784 - RNA, 17 nt, Human
agccagcaggcucucag

SEQ ID NO: 1220785 - RNA, 16 nt, Human
agccagcaggcucuca

SEQ ID NO: 1220786 - RNA, 23 nt, Human
agcccacgcccccacuggugaca

SEQ ID NO: 1220787 - RNA, 15 nt, Human
agcccacgcccccac

SEQ ID NO: 1220788 - RNA, 14 nt, Human
agcccacgccccca

SEQ ID NO: 1220789 - RNA, 13 nt, Human
agcauccuggcac

SEQ ID NO: 1220790 - RNA, 19 nt, Human
agccccauucugccugccc

SEQ ID NO: 1220791 - RNA, 18 nt, Human
agccccauucugccugcc

SEQ ID NO: 1220792 - RNA, 17 nt, Human
agccccauucugccugc

SEQ ID NO: 1220793 - RNA, 23 nt, Human
agccccauccucuguacagagcc

SEQ ID NO: 1220794 - RNA, 17 nt, Human
agccccauccucuguac

SEQ ID NO: 1220795 - RNA, 15 nt, Human
agccccauccucugu

SEQ ID NO: 1220796 - RNA, 21 nt, Human
agcccgggcucugccucccau

SEQ ID NO: 1220797 - RNA, 20 nt, Human
agcccgggcucugccuccca

SEQ ID NO: 1220798 - RNA, 18 nt, Human
agcccgggcucugccucc

SEQ ID NO: 1220799 - RNA, 17 nt, Human
agcccgggcucugccuc

SEQ ID NO: 1220800 - RNA, 20 nt, Human
agccccauucugccugccca

SEQ ID NO: 1220801 - RNA, 21 nt, Human
aggaacuuaaauaaugugaaa

SEQ ID NO: 1220802 - RNA, 23 nt, Human
aggaacaaggcaaggcugucaau

SEQ ID NO: 1220803 - RNA, 20 nt, Human
aggaacaaggcaaggcuguc

SEQ ID NO: 1220804 - RNA, 19 nt, Human
aggaacaaggcaaggcugu

SEQ ID NO: 1220805 - RNA, 17 nt, Human
aggaacaaggcaaggcu

SEQ ID NO: 1220806 - RNA, 16 nt, Human
aggaacaaggcaaggc

SEQ ID NO: 1220807 - RNA, 13 nt, Human
aggaacaaggcaa

SEQ ID NO: 1220808 - RNA, 12 nt, Human
aggaacaaggca

SEQ ID NO: 1220809 - RNA, 22 nt, Human
aggaauaccugucccccugaca

SEQ ID NO: 1220810 - RNA, 18 nt, Human
aggaauaccugucccccu

SEQ ID NO: 1220811 - RNA, 15 nt, Human
aggaauaccuguccc

SEQ ID NO: 1220812 - RNA, 23 nt, Human
aggaacuuaaauaaugugaaacu

SEQ ID NO: 1220813 - RNA, 18 nt, Human
agcuucauuuccuguguc

SEQ ID NO: 1220814 - RNA, 19 nt, Human
agcuucauuuccugugucu

SEQ ID NO: 1220815 - RNA, 23 nt, Human
agcuuuguuuguugucagcugaa

SEQ ID NO: 1220816 - RNA, 16 nt, Human
agcucaccagccccag

SEQ ID NO: 1220817 - RNA, 18 nt, Human
agcucagagaggguggga

SEQ ID NO: 1220818 - RNA, 14 nt, Human
agcucagagagggu

SEQ ID NO: 1220819 - RNA, 12 nt, Human
agcucagagagg

SEQ ID NO: 1220820 - RNA, 19 nt, Human
agcucaccucucccuugga

SEQ ID NO: 1220821 - RNA, 18 nt, Human
agcucaccucucccuugg

SEQ ID NO: 1220822 - RNA, 15 nt, Human
agcucaccucucccu

SEQ ID NO: 1220823 - RNA, 12 nt, Human
agcucaccucuc

SEQ ID NO: 1220824 - RNA, 20 nt, Human
agcucaccagccccagugcc

SEQ ID NO: 1220825 - RNA, 19 nt, Human
agcucaccagccccagugc

SEQ ID NO: 1220826 - RNA, 20 nt, Human
agccugggaggucaaggcug

SEQ ID NO: 1220827 - RNA, 12 nt, Human
agccugggaggu

SEQ ID NO: 1220828 - RNA, 19 nt, Human
agcgagcccugguggcagu

SEQ ID NO: 1220829 - RNA, 13 nt, Human
agcgagcccuggu

SEQ ID NO: 1220830 - RNA, 15 nt, Human
agcugaaccugggua

SEQ ID NO: 1220831 - RNA, 22 nt, Human
agcugguuuuuagcggagacgg

SEQ ID NO: 1220832 - RNA, 19 nt, Human
agcuggucccacucagucc

SEQ ID NO: 1220833 - RNA, 18 nt, Human
agcuggucccacucaguc

SEQ ID NO: 1220834 - RNA, 17 nt, Human
agcuggucccacucagu

SEQ ID NO: 1220835 - RNA, 14 nt, Human
agcugcugacagug

SEQ ID NO: 1220836 - RNA, 13 nt, Human
agcugcugacagu

SEQ ID NO: 1220837 - RNA, 12 nt, Human
agcugcugacag

SEQ ID NO: 1220838 - RNA, 21 nt, Human
agcugcgguccacccaggagc

SEQ ID NO: 1220839 - RNA, 20 nt, Human
agcugcgguccacccaggag

SEQ ID NO: 1220840 - RNA, 19 nt, Human
agcugcgguccacccagga

SEQ ID NO: 1220841 - RNA, 18 nt, Human
agcugcgguccacccagg

SEQ ID NO: 1220842 - RNA, 17 nt, Human
agcugcgguccacccag

SEQ ID NO: 1220843 - RNA, 16 nt, Human
agcugcgguccaccca

SEQ ID NO: 1220844 - RNA, 13 nt, Human
agcugcgguccac

SEQ ID NO: 1220845 - RNA, 14 nt, Human
agggccuggccuga

SEQ ID NO: 1220846 - RNA, 22 nt, Human
aggggcccaaauucuuucagug

SEQ ID NO: 1220847 - RNA, 22 nt, Human
agggucccugguggcagcucac

SEQ ID NO: 1220848 - RNA, 20 nt, Human
agggucccugguggcagcuc

SEQ ID NO: 1220849 - RNA, 17 nt, Human
agggucccugguggcag

SEQ ID NO: 1220850 - RNA, 16 nt, Human
agggucccugguggca

SEQ ID NO: 1220851 - RNA, 14 nt, Human
agggucccuggugg

SEQ ID NO: 1220852 - RNA, 12 nt, Human
agggucccuggu

SEQ ID NO: 1220853 - RNA, 13 nt, Human
aggguauuccaga

SEQ ID NO: 1220854 - RNA, 21 nt, Human
aggguaucuggugacuuuccu

SEQ ID NO: 1220855 - RNA, 13 nt, Human
agggccuggccug

SEQ ID NO: 1220856 - RNA, 12 nt, Human
agggccuggccu

SEQ ID NO: 1220857 - RNA, 15 nt, Human
agggccugcaaggga

SEQ ID NO: 1220858 - RNA, 14 nt, Human
agggccugcaaggg

SEQ ID NO: 1220859 - RNA, 20 nt, Human
agggucucacuauguugccc

SEQ ID NO: 1220860 - RNA, 23 nt, Human
aggguuuugccauguuggccagg

SEQ ID NO: 1220861 - RNA, 22 nt, Human
aggguuuugccauguuggccag

SEQ ID NO: 1220862 - RNA, 16 nt, Human
agguaacaggcagaua

SEQ ID NO: 1220863 - RNA, 14 nt, Human
agguaacaggcaga

SEQ ID NO: 1220864 - RNA, 13 nt, Human
agguaacaggcag

SEQ ID NO: 1220865 - RNA, 14 nt, Human
agguacucuccugg

SEQ ID NO: 1220866 - RNA, 13 nt, Human
agguacucuccug

SEQ ID NO: 1220867 - RNA, 21 nt, Human
aggcuuagucacugagacagc

SEQ ID NO: 1220868 - RNA, 18 nt, Human
aggcuuagucacugagac

SEQ ID NO: 1220869 - RNA, 15 nt, Human
agggacccuccacca

SEQ ID NO: 1220870 - RNA, 17 nt, Human
aggcuuagucacugaga

SEQ ID NO: 1220871 - RNA, 23 nt, Human
aggcuguaucccaugagccucag

SEQ ID NO: 1220872 - RNA, 22 nt, Human
aggcuguaucccaugagccuca

SEQ ID NO: 1220873 - RNA, 21 nt, Human
aggcuguaucccaugagccuc

SEQ ID NO: 1220874 - RNA, 20 nt, Human
aggcuguaucccaugagccu

SEQ ID NO: 1220875 - RNA, 15 nt, Human
aggcuaccuuuguau

SEQ ID NO: 1220876 - RNA, 14 nt, Human
aggcuaccuuugua

SEQ ID NO: 1220877 - RNA, 13 nt, Human
aggcuaccuuugu

SEQ ID NO: 1220878 - RNA, 18 nt, Human
aggcuggguucugauccu

SEQ ID NO: 1220879 - RNA, 18 nt, Human
aggcauuccccaggaggc

SEQ ID NO: 1220880 - RNA, 19 nt, Human
aggcauguucucugaggac

SEQ ID NO: 1220881 - RNA, 18 nt, Human
aggcauguucucugagga

SEQ ID NO: 1220882 - RNA, 17 nt, Human
aggcauguucucugagg

SEQ ID NO: 1220883 - RNA, 21 nt, Human
aggcaugugaugagaggaaau

SEQ ID NO: 1220884 - RNA, 20 nt, Human
aggcaugugaugagaggaaa

SEQ ID NO: 1220885 - RNA, 19 nt, Human
aggcaugugaugagaggaa

SEQ ID NO: 1220886 - RNA, 17 nt, Human
aggcaugugaugagagg

SEQ ID NO: 1220887 - RNA, 15 nt, Human
aggcaugguggccca

SEQ ID NO: 1220888 - RNA, 14 nt, Human
aggagaggggcaca

SEQ ID NO: 1220889 - RNA, 16 nt, Human
aggccaggcccucugc

SEQ ID NO: 1220890 - RNA, 15 nt, Human
aggccaggcccucug

SEQ ID NO: 1220891 - RNA, 14 nt, Human
aggccaggcccucu

SEQ ID NO: 1220892 - RNA, 13 nt, Human
aggccaggcccuc

SEQ ID NO: 1220893 - RNA, 20 nt, Human
aggcauuccccaggaggcca

SEQ ID NO: 1220894 - RNA, 19 nt, Human
aggcauuccccaggaggcc

SEQ ID NO: 1220895 - RNA, 23 nt, Human
aggcccucugcccacucccugca

SEQ ID NO: 1220896 - RNA, 22 nt, Human
aggcccucugcccacucccugc

SEQ ID NO: 1220897 - RNA, 19 nt, Human
aggcccuucucuccagccc

SEQ ID NO: 1220898 - RNA, 15 nt, Human
aggcccuucucucca

SEQ ID NO: 1220899 - RNA, 12 nt, Human
aggcccuucucu

SEQ ID NO: 1220900 - RNA, 18 nt, Human
augcacaaacagaggccg

SEQ ID NO: 1220901 - RNA, 18 nt, Human
augaugaaaugaggucag

SEQ ID NO: 1220902 - RNA, 23 nt, Human
augaugaaaugaggucagagccu

SEQ ID NO: 1220903 - RNA, 15 nt, Human
augaugauccuaggc

SEQ ID NO: 1220904 - RNA, 21 nt, Human
augaucuuugcagacaggcaa

SEQ ID NO: 1220905 - RNA, 19 nt, Human
augaucuuugcagacaggc

SEQ ID NO: 1220906 - RNA, 18 nt, Human
augaucuuugcagacagg

SEQ ID NO: 1220907 - RNA, 17 nt, Human
augaucuuugcagacag

SEQ ID NO: 1220908 - RNA, 20 nt, Human
augccuggauggggcugcac

SEQ ID NO: 1220909 - RNA, 19 nt, Human
augccuggauggggcugca

SEQ ID NO: 1220910 - RNA, 23 nt, Human
augcacagaguuguuacauuuuu

SEQ ID NO: 1220911 - RNA, 22 nt, Human
augcacagaguuguuacauuuu

SEQ ID NO: 1220912 - RNA, 21 nt, Human
augcacagaguuguuacauuu

SEQ ID NO: 1220913 - RNA, 19 nt, Human
augcacagaguuguuacau

SEQ ID NO: 1220914 - RNA, 15 nt, Human
augcacacauuuuuu

SEQ ID NO: 1220915 - RNA, 14 nt, Human
augcacacauuuuu

SEQ ID NO: 1220916 - RNA, 13 nt, Human
augcacacauuuu

SEQ ID NO: 1220917 - RNA, 17 nt, Human
auggcuuuugugcauua

SEQ ID NO: 1220918 - RNA, 16 nt, Human
auggcuuuugugcauu

SEQ ID NO: 1220919 - RNA, 18 nt, Human
auggcuuuugugcauuau

SEQ ID NO: 1220920 - RNA, 16 nt, Human
augcuuguacauaaug

SEQ ID NO: 1220921 - RNA, 15 nt, Human
augcugcccugugag

SEQ ID NO: 1220922 - RNA, 14 nt, Human
augcugcccuguga

SEQ ID NO: 1220923 - RNA, 13 nt, Human
augcugcccugug

SEQ ID NO: 1220924 - RNA, 16 nt, Human
augcugcccugugagu

SEQ ID NO: 1220925 - RNA, 14 nt, Human
auguguaaguauuc

SEQ ID NO: 1220926 - RNA, 13 nt, Human
auguguaaguauu

SEQ ID NO: 1220927 - RNA, 17 nt, Human
auguuugccucugccuc

SEQ ID NO: 1220928 - RNA, 15 nt, Human
auguuugccucugcc

SEQ ID NO: 1220929 - RNA, 14 nt, Human
auguucuuaauucu

SEQ ID NO: 1220930 - RNA, 15 nt, Human
auguucugggacaca

SEQ ID NO: 1220931 - RNA, 14 nt, Human
auguucugggacac

SEQ ID NO: 1220932 - RNA, 17 nt, Human
auguucucugaggacac

SEQ ID NO: 1220933 - RNA, 13 nt, Human
auguucucugagg

SEQ ID NO: 1220934 - RNA, 17 nt, Human
auguucucucuucucca

SEQ ID NO: 1220935 - RNA, 19 nt, Human
augucacaggcagguccag

SEQ ID NO: 1220936 - RNA, 14 nt, Human
augucacaggcagg

SEQ ID NO: 1220937 - RNA, 13 nt, Human
augucacaggcag

SEQ ID NO: 1220938 - RNA, 23 nt, Human
augggugcuuggaggaaggaaac

SEQ ID NO: 1220939 - RNA, 21 nt, Human
augggugcuuggaggaaggaa

SEQ ID NO: 1220940 - RNA, 19 nt, Human
aucccaugagccucagcau

SEQ ID NO: 1220941 - RNA, 19 nt, Human
auccagacccggcugcgug

SEQ ID NO: 1220942 - RNA, 17 nt, Human
auccucauacccacccc

SEQ ID NO: 1220943 - RNA, 15 nt, Human
aucccuacuguaauu

SEQ ID NO: 1220944 - RNA, 23 nt, Human
aucaaagagguuuuaaaaaaauc

SEQ ID NO: 1220945 - RNA, 20 nt, Human
aucaaagagguuuuaaaaaa

SEQ ID NO: 1220946 - RNA, 23 nt, Human
aucacccgcuaagagggagggag

SEQ ID NO: 1220947 - RNA, 13 nt, Human
aucaccagacagg

SEQ ID NO: 1220948 - RNA, 13 nt, Human
aucacagccucug

SEQ ID NO: 1220949 - RNA, 14 nt, Human
aucaugucuggcua

SEQ ID NO: 1220950 - RNA, 17 nt, Human
aucuggguucacugcaa

SEQ ID NO: 1220951 - RNA, 22 nt, Human
augaggcauuuguuugaacuga

SEQ ID NO: 1220952 - RNA, 21 nt, Human
augaggcauuuguuugaacug

SEQ ID NO: 1220953 - RNA, 14 nt, Human
augaggcauuuguu

SEQ ID NO: 1220954 - RNA, 13 nt, Human
augaggcauuugu

SEQ ID NO: 1220955 - RNA, 16 nt, Human
augaaaacacauuuuu

SEQ ID NO: 1220956 - RNA, 15 nt, Human
augaaaacacauuuu

SEQ ID NO: 1220957 - RNA, 14 nt, Human
augaaaacacauuu

SEQ ID NO: 1220958 - RNA, 20 nt, Human
aguccuuaccagcagagcac

SEQ ID NO: 1220959 - RNA, 22 nt, Human
aguccucuuuucugagaggacu

SEQ ID NO: 1220960 - RNA, 19 nt, Human
aguccucuuuucugagagg

SEQ ID NO: 1220961 - RNA, 23 nt, Human
aguaugaggcauuuguuugaacu

SEQ ID NO: 1220962 - RNA, 21 nt, Human
aguaugaggcauuuguuugaa

SEQ ID NO: 1220963 - RNA, 20 nt, Human
aguaugaggcauuuguuuga

SEQ ID NO: 1220964 - RNA, 15 nt, Human
aguaucucagggccu

SEQ ID NO: 1220965 - RNA, 23 nt, Human
agucacacaguauuacuucugcu

SEQ ID NO: 1220966 - RNA, 22 nt, Human
agucacacaguauuacuucugc

SEQ ID NO: 1220967 - RNA, 12 nt, Human
aguacuucuuuu

SEQ ID NO: 1220968 - RNA, 19 nt, Human
aguacuucuccacccugcu

SEQ ID NO: 1220969 - RNA, 17 nt, Human
aguacuucuccacccug

SEQ ID NO: 1220970 - RNA, 14 nt, Human
aguacuauguauca

SEQ ID NO: 1220971 - RNA, 12 nt, Human
aguacuauguau

SEQ ID NO: 1220972 - RNA, 20 nt, Human
aguaagccgugauuuucauu

SEQ ID NO: 1220973 - RNA, 14 nt, Human
aguacuauaauuua

SEQ ID NO: 1220974 - RNA, 22 nt, Human
aguacuacaguccucccaucuc

SEQ ID NO: 1220975 - RNA, 19 nt, Human
aguacuacaguccucccau

SEQ ID NO: 1220976 - RNA, 18 nt, Human
aguacguugugcauuugg

SEQ ID NO: 1220977 - RNA, 17 nt, Human
aguacguugugcauuug

SEQ ID NO: 1220978 - RNA, 16 nt, Human
aguacguugugcauuu

SEQ ID NO: 1220979 - RNA, 15 nt, Human
aguacguugugcauu

SEQ ID NO: 1220980 - RNA, 18 nt, Human
aguaaaugggggugcauu

SEQ ID NO: 1220981 - RNA, 18 nt, Human
aggucuguucuuuccaaa

SEQ ID NO: 1220982 - RNA, 16 nt, Human
aggucuguucuuucca

SEQ ID NO: 1220983 - RNA, 15 nt, Human
aggucuguucuuucc

SEQ ID NO: 1220984 - RNA, 13 nt, Human
aggucuguucuuu

SEQ ID NO: 1220985 - RNA, 22 nt, Human
agugggcccaaugcacuuuguu

SEQ ID NO: 1220986 - RNA, 18 nt, Human
agugccuuauggaacacu

SEQ ID NO: 1220987 - RNA, 16 nt, Human
agugccuuauggaaca

SEQ ID NO: 1220988 - RNA, 15 nt, Human
agugccuuauggaac

SEQ ID NO: 1220989 - RNA, 14 nt, Human
agugccuuauggaa

SEQ ID NO: 1220990 - RNA, 13 nt, Human
agugccuuaugga

SEQ ID NO: 1220991 - RNA, 10 nt, Human
agugccuuau

SEQ ID NO: 1220992 - RNA, 24 nt, Human
agugauccucccaccucagccucc

SEQ ID NO: 1220993 - RNA, 19 nt, Human
agugauccucccaccucag

SEQ ID NO: 1220994 - RNA, 18 nt, Human
agugauccucccaccuca

SEQ ID NO: 1220995 - RNA, 15 nt, Human
agugauccucccacc

SEQ ID NO: 1220996 - RNA, 14 nt, Human
agugauccucccac

SEQ ID NO: 1220997 - RNA, 18 nt, Human
agugccuuacacaauggu

SEQ ID NO: 1220998 - RNA, 17 nt, Human
agugauucuccugccuc

SEQ ID NO: 1220999 - RNA, 15 nt, Human
agugauucuccugcc

SEQ ID NO: 1221000 - RNA, 14 nt, Human
agugauucuccugc

SEQ ID NO: 1221001 - RNA, 19 nt, Human
aguucaucuugaauuguaa

SEQ ID NO: 1221002 - RNA, 15 nt, Human
aguucaucuugaauu

SEQ ID NO: 1221003 - RNA, 13 nt, Human
aguucaucuugaa

SEQ ID NO: 1221004 - RNA, 18 nt, Human
aguucagguaacaggcag

SEQ ID NO: 1221005 - RNA, 14 nt, Human
aguugauagcacag

SEQ ID NO: 1221006 - RNA, 16 nt, Human
aguugauacuacaguu

SEQ ID NO: 1221007 - RNA, 22 nt, Human
aguucaucuugaauuguaagga

SEQ ID NO: 1221008 - RNA, 17 nt, Human
auagccuaggugacaga

SEQ ID NO: 1221009 - RNA, 15 nt, Human
auagccuaggugaca

SEQ ID NO: 1221010 - RNA, 18 nt, Human
auagcacagacccugccc

SEQ ID NO: 1221011 - RNA, 17 nt, Human
auagcacagacccugcc

SEQ ID NO: 1221012 - RNA, 19 nt, Human
auauucaggaagcucaggg

SEQ ID NO: 1221013 - RNA, 17 nt, Human
auaugcucugcauguua

SEQ ID NO: 1221014 - RNA, 20 nt, Human
auaugcucugcauguuacau

SEQ ID NO: 1221015 - RNA, 17 nt, Human
auacccacccccaccca

SEQ ID NO: 1221016 - RNA, 16 nt, Human
auacccacccccaccc

SEQ ID NO: 1221017 - RNA, 14 nt, Human
auacccacccccac

SEQ ID NO: 1221018 - RNA, 13 nt, Human
auacccaccccca

SEQ ID NO: 1221019 - RNA, 22 nt, Human
auacacuuacacuuuaugcaca

SEQ ID NO: 1221020 - RNA, 13 nt, Human
auacacuuacacu

SEQ ID NO: 1221021 - RNA, 17 nt, Human
auacaaugcugugcccu

SEQ ID NO: 1221022 - RNA, 14 nt, Human
auacaaugcugugc

SEQ ID NO: 1221023 - RNA, 16 nt, Human
auaccugucccccuga

SEQ ID NO: 1221024 - RNA, 15 nt, Human
auaccugucccccug

SEQ ID NO: 1221025 - RNA, 14 nt, Human
auaccugucccccu

SEQ ID NO: 1221026 - RNA, 17 nt, Human
auaccugucccccugac

SEQ ID NO: 1221027 - RNA, 18 nt, Human
auaaggguaucuggugac

SEQ ID NO: 1221028 - RNA, 14 nt, Human
auaauguaagcucu

SEQ ID NO: 1221029 - RNA, 23 nt, Human
aguuugauuaaauucuugcaaag

SEQ ID NO: 1221030 - RNA, 11 nt, Human
auaaaacuuuu

SEQ ID NO: 1221031 - RNA, 22 nt, Human
aguuugauuaaauucuugcaaa

SEQ ID NO: 1221032 - RNA, 20 nt, Human
aguuugauuaaauucuugca

SEQ ID NO: 1221033 - RNA, 18 nt, Human
aguuugauuaaauucuug

SEQ ID NO: 1221034 - RNA, 17 nt, Human
aguuugauuaaauucuu

SEQ ID NO: 1221035 - RNA, 20 nt, Human
aguuugagaucagccugggc

SEQ ID NO: 1221036 - RNA, 19 nt, Human
aguuugagaucagccuggg

SEQ ID NO: 1221037 - RNA, 18 nt, Human
aguuugagaucagccugg

SEQ ID NO: 1221038 - RNA, 22 nt, Human
aguuguuacauuuuuaagugcu

SEQ ID NO: 1221039 - RNA, 20 nt, Human
aguuguuacauuuuuaagug

SEQ ID NO: 1221040 - RNA, 18 nt, Human
auaacauguaauuaagua

SEQ ID NO: 1221041 - RNA, 13 nt, Human
auaacauguaauu

SEQ ID NO: 1221042 - RNA, 12 nt, Human
auaacauguaau

SEQ ID NO: 1221043 - RNA, 20 nt, Human
auaacauguaauuaaguacu

SEQ ID NO: 1221044 - RNA, 19 nt, Human
caagcgauucuucugcuuc

SEQ ID NO: 1221045 - RNA, 22 nt, Human
caagcugcacccucaggcaggu

SEQ ID NO: 1221046 - RNA, 21 nt, Human
caagcuggucccacucagucc

SEQ ID NO: 1221047 - RNA, 21 nt, Human
caagcugcacccucaggcagg

SEQ ID NO: 1221048 - RNA, 18 nt, Human
caagcgauucuucugcuu

SEQ ID NO: 1221049 - RNA, 17 nt, Human
caagcgauucuucugcu

SEQ ID NO: 1221050 - RNA, 15 nt, Human
caagcgauucuucug

SEQ ID NO: 1221051 - RNA, 23 nt, Human
caagcuggucccacucaguccau

SEQ ID NO: 1221052 - RNA, 22 nt, Human
caagcuggucccacucagucca

SEQ ID NO: 1221053 - RNA, 19 nt, Human
caaggauccugagccagau

SEQ ID NO: 1221054 - RNA, 18 nt, Human
caaggauccugagccaga

SEQ ID NO: 1221055 - RNA, 16 nt, Human
caaggagauuuacaac

SEQ ID NO: 1221056 - RNA, 22 nt, Human
caaggcugcagugagccgagau

SEQ ID NO: 1221057 - RNA, 17 nt, Human
caaggcugcagugagcc

SEQ ID NO: 1221058 - RNA, 20 nt, Human
caaggauccugagccagauu

SEQ ID NO: 1221059 - RNA, 22 nt, Human
caaggauccugagccagauuuc

SEQ ID NO: 1221060 - RNA, 18 nt, Human
caaggcugggggaagaag

SEQ ID NO: 1221061 - RNA, 17 nt, Human
caauaggaaaaacugau

SEQ ID NO: 1221062 - RNA, 16 nt, Human
caauaggaaaaacuga

SEQ ID NO: 1221063 - RNA, 15 nt, Human
caauaggaaaaacug

SEQ ID NO: 1221064 - RNA, 18 nt, Human
caauaggaaaaacugauu

SEQ ID NO: 1221065 - RNA, 22 nt, Human
caaugugaaaagaaaaaugagc

SEQ ID NO: 1221066 - RNA, 15 nt, Human
cacaaacagaggccg

SEQ ID NO: 1221067 - RNA, 14 nt, Human
cacaaacagaggcc

SEQ ID NO: 1221068 - RNA, 13 nt, Human
cacaaacagaggc

SEQ ID NO: 1221069 - RNA, 18 nt, Human
caauuacaggaaguacug

SEQ ID NO: 1221070 - RNA, 17 nt, Human
cacacacgcgugcacac

SEQ ID NO: 1221071 - RNA, 13 nt, Human
cacaaaggagagc

SEQ ID NO: 1221072 - RNA, 17 nt, Human
cacaaagguagcuuuuc

SEQ ID NO: 1221073 - RNA, 22 nt, Human
cacagaguuguuacauuuuuaa

SEQ ID NO: 1221074 - RNA, 13 nt, Human
cacagaggcugcc

SEQ ID NO: 1221075 - RNA, 21 nt, Human
cacagagaaaguacuucucca

SEQ ID NO: 1221076 - RNA, 20 nt, Human
cacagagaaaguacuucucc

SEQ ID NO: 1221077 - RNA, 19 nt, Human
cacagagaaaguacuucuc

SEQ ID NO: 1221078 - RNA, 15 nt, Human
caagacgcugugcug

SEQ ID NO: 1221079 - RNA, 13 nt, Human
caagacgcugugc

SEQ ID NO: 1221080 - RNA, 23 nt, Human
caagaccuucuccuucaccuuug

SEQ ID NO: 1221081 - RNA, 21 nt, Human
caagaccuucuccuucaccuu

SEQ ID NO: 1221082 - RNA, 13 nt, Human
caagagcccaggc

SEQ ID NO: 1221083 - RNA, 14 nt, Human
caagaagcccagga

SEQ ID NO: 1221084 - RNA, 13 nt, Human
caagaagcccagg

SEQ ID NO: 1221085 - RNA, 22 nt, Human
caaauuucuaaaucuccaaaau

SEQ ID NO: 1221086 - RNA, 15 nt, Human
caaauuucuaaaucu

SEQ ID NO: 1221087 - RNA, 19 nt, Human
caacauacucccaucugug

SEQ ID NO: 1221088 - RNA, 17 nt, Human
caacauacucccaucug

SEQ ID NO: 1221089 - RNA, 12 nt, Human
caacaggcuggg

SEQ ID NO: 1221090 - RNA, 20 nt, Human
caacauacucccaucuguga

SEQ ID NO: 1221091 - RNA, 23 nt, Human
caaauggaaaugggcagagcaga

SEQ ID NO: 1221092 - RNA, 19 nt, Human
caaagugcugggauuacaa

SEQ ID NO: 1221093 - RNA, 23 nt, Human
caaagugcugggauuacaagcgu

SEQ ID NO: 1221094 - RNA, 13 nt, Human
caacaggcugggc

SEQ ID NO: 1221095 - RNA, 14 nt, Human
caaaaguuucucuu

SEQ ID NO: 1221096 - RNA, 19 nt, Human
caaaacucuccucugcugc

SEQ ID NO: 1221097 - RNA, 16 nt, Human
caaaacucuccucugc

SEQ ID NO: 1221098 - RNA, 15 nt, Human
caaaacucuccucug

SEQ ID NO: 1221099 - RNA, 21 nt, Human
caaaacgguuuuacugcagcu

SEQ ID NO: 1221100 - RNA, 15 nt, Human
caaaacgguuuuacu

SEQ ID NO: 1221101 - RNA, 18 nt, Human
auuuuauuuuauuaugca

SEQ ID NO: 1221102 - RNA, 20 nt, Human
caaaauaaaacuuuuuaaaa

SEQ ID NO: 1221103 - RNA, 16 nt, Human
caaaauaaaacuuuuu

SEQ ID NO: 1221104 - RNA, 21 nt, Human
caaaaucgaugcagugcuucc

SEQ ID NO: 1221105 - RNA, 21 nt, Human
caaacucuugaccucagguga

SEQ ID NO: 1221106 - RNA, 20 nt, Human
caaacucuugaccucaggug

SEQ ID NO: 1221107 - RNA, 19 nt, Human
caaacucuugaccucaggu

SEQ ID NO: 1221108 - RNA, 17 nt, Human
caaacucuugaccucag

SEQ ID NO: 1221109 - RNA, 15 nt, Human
caaacagaggccgcc

SEQ ID NO: 1221110 - RNA, 13 nt, Human
caaacagaggccg

SEQ ID NO: 1221111 - RNA, 22 nt, Human
caaaaugaaacgcaaccaccac

SEQ ID NO: 1221112 - RNA, 11 nt, Human
caaaaugaaac

SEQ ID NO: 1221113 - RNA, 17 nt, Human
cacaguucaauucucau

SEQ ID NO: 1221114 - RNA, 19 nt, Human
ugugugcacguacacacac

SEQ ID NO: 1221115 - RNA, 16 nt, Human
uguguuuauugucaaa

SEQ ID NO: 1221116 - RNA, 14 nt, Human
uguucagcuccagc

SEQ ID NO: 1221117 - RNA, 22 nt, Human
uguucagcuccagcucaccagc

SEQ ID NO: 1221118 - RNA, 21 nt, Human
uguucagcuccagcucaccag

SEQ ID NO: 1221119 - RNA, 20 nt, Human
uguucagcuccagcucacca

SEQ ID NO: 1221120 - RNA, 20 nt, Human
uguuaguaugaggcauuugu

SEQ ID NO: 1221121 - RNA, 19 nt, Human
uguuaguaugaggcauuug

SEQ ID NO: 1221122 - RNA, 17 nt, Human
uguuaguaugaggcauu

SEQ ID NO: 1221123 - RNA, 14 nt, Human
uguuacuaaguuuu

SEQ ID NO: 1221124 - RNA, 20 nt, Human
uguucuggcucuuccaggcu

SEQ ID NO: 1221125 - RNA, 17 nt, Human
uguucuggcucuuccag

SEQ ID NO: 1221126 - RNA, 21 nt, Human
uguucuggcucuuccaggcug

SEQ ID NO: 1221127 - RNA, 12 nt, Human
uguucugggaca

SEQ ID NO: 1221128 - RNA, 19 nt, Human
uguucaucauccuaagcua

SEQ ID NO: 1221129 - RNA, 16 nt, Human
uguucucucuucucca

SEQ ID NO: 1221130 - RNA, 15 nt, Human
uguucucucuucucc

SEQ ID NO: 1221131 - RNA, 16 nt, Human
uguucuggcucuucca

SEQ ID NO: 1221132 - RNA, 13 nt, Human
uguucuggcucuu

SEQ ID NO: 1221133 - RNA, 12 nt, Human
uguucuggcucu

SEQ ID NO: 1221134 - RNA, 13 nt, Human
uguucucugagga

SEQ ID NO: 1221135 - RNA, 16 nt, Human
uguucucugcccucca

SEQ ID NO: 1221136 - RNA, 15 nt, Human
uguucucugcccucc

SEQ ID NO: 1221137 - RNA, 14 nt, Human
uguucucugcccuc

SEQ ID NO: 1221138 - RNA, 13 nt, Human
uguucucugcccu

SEQ ID NO: 1221139 - RNA, 19 nt, Human
uguuggcugggggccucag

SEQ ID NO: 1221140 - RNA, 17 nt, Human
uguuggcugggggccuc

SEQ ID NO: 1221141 - RNA, 16 nt, Human
uguuggccaggcuggu

SEQ ID NO: 1221142 - RNA, 15 nt, Human
uguuggccaggcugg

SEQ ID NO: 1221143 - RNA, 15 nt, Human
uguuggccaaagcca

SEQ ID NO: 1221144 - RNA, 15 nt, Human
uguuuccuggcacug

SEQ ID NO: 1221145 - RNA, 16 nt, Human
uguuuuaagaggcagg

SEQ ID NO: 1221146 - RNA, 16 nt, Human
uguuuguugucagcug

SEQ ID NO: 1221147 - RNA, 13 nt, Human
uguuuuugucuua

SEQ ID NO: 1221148 - RNA, 23 nt, Human
uguuuuaaggaugcuuguacaua

SEQ ID NO: 1221149 - RNA, 22 nt, Human
uguuuuaaggaugcuuguacau

SEQ ID NO: 1221150 - RNA, 20 nt, Human
uguuuuaagaggcagggucu

SEQ ID NO: 1221151 - RNA, 17 nt, Human
uguuuuaagaggcaggg

SEQ ID NO: 1221152 - RNA, 16 nt, Human
uuaaaugcccagcccc

SEQ ID NO: 1221153 - RNA, 15 nt, Human
uuaaaugcccagccc

SEQ ID NO: 1221154 - RNA, 14 nt, Human
uuaaaugcccagcc

SEQ ID NO: 1221155 - RNA, 11 nt, Human
uuaaaugcacc

SEQ ID NO: 1221156 - RNA, 14 nt, Human
uuaacuuuuauaaa

SEQ ID NO: 1221157 - RNA, 13 nt, Human
uuaacuuuuauaa

SEQ ID NO: 1221158 - RNA, 12 nt, Human
uuaacuuuuaua

SEQ ID NO: 1221159 - RNA, 17 nt, Human
uuaaaugcccagccccu

SEQ ID NO: 1221160 - RNA, 17 nt, Human
uuacauuuuuaagugcu

SEQ ID NO: 1221161 - RNA, 12 nt, Human
uuacauuuuuaa

SEQ ID NO: 1221162 - RNA, 20 nt, Human
uuacacuuuaugcacaaaau

SEQ ID NO: 1221163 - RNA, 13 nt, Human
uuacacuuuaugc

SEQ ID NO: 1221164 - RNA, 22 nt, Human
ugugggcuaguugggcuuccuc

SEQ ID NO: 1221165 - RNA, 16 nt, Human
uguguagggcgggagg

SEQ ID NO: 1221166 - RNA, 12 nt, Human
uguguagggcgg

SEQ ID NO: 1221167 - RNA, 23 nt, Human
uguggcgcagcauauucaggaag

SEQ ID NO: 1221168 - RNA, 18 nt, Human
uguggacacagcucuucu

SEQ ID NO: 1221169 - RNA, 13 nt, Human
uguggacacagcu

SEQ ID NO: 1221170 - RNA, 19 nt, Human
uguggacacagcucuucuc

SEQ ID NO: 1221171 - RNA, 14 nt, Human
ugugcgccuacagg

SEQ ID NO: 1221172 - RNA, 19 nt, Human
ugugcgccuacaggaguga

SEQ ID NO: 1221173 - RNA, 23 nt, Human
ugugcauuuggugguuucagaaa

SEQ ID NO: 1221174 - RNA, 23 nt, Human
ugugcauuaucuagauacuguau

SEQ ID NO: 1221175 - RNA, 21 nt, Human
ugugcauuaucuagauacugu

SEQ ID NO: 1221176 - RNA, 20 nt, Human
ugugcauuaucuagauacug

SEQ ID NO: 1221177 - RNA, 19 nt, Human
ugugcauuaucuagauacu

SEQ ID NO: 1221178 - RNA, 16 nt, Human
ugugcauuaucuagau

SEQ ID NO: 1221179 - RNA, 14 nt, Human
ugugcauuaucuag

SEQ ID NO: 1221180 - RNA, 16 nt, Human
ugugcacaugcacgug

SEQ ID NO: 1221181 - RNA, 16 nt, Human
ugucuuuggacccuga

SEQ ID NO: 1221182 - RNA, 14 nt, Human
ugucuuuggacccu

SEQ ID NO: 1221183 - RNA, 23 nt, Human
ugugaaaagaaaaaugagccugg

SEQ ID NO: 1221184 - RNA, 17 nt, Human
ugucuuuggacccugag

SEQ ID NO: 1221185 - RNA, 23 nt, Human
ugucuuuucuugcaugaggcuag

SEQ ID NO: 1221186 - RNA, 16 nt, Human
ugucuuuuuucacuac

SEQ ID NO: 1221187 - RNA, 21 nt, Human
ugugagucaccaagcccaguu

SEQ ID NO: 1221188 - RNA, 19 nt, Human
ugugagucaccaagcccag

SEQ ID NO: 1221189 - RNA, 17 nt, Human
ugugagucaccaagccc

SEQ ID NO: 1221190 - RNA, 20 nt, Human
ugugaggaagccgcuggggc

SEQ ID NO: 1221191 - RNA, 18 nt, Human
ugugaggaagccgcuggg

SEQ ID NO: 1221192 - RNA, 13 nt, Human
ugugaggaagccg

SEQ ID NO: 1221193 - RNA, 14 nt, Human
uguaccucuugagc

SEQ ID NO: 1221194 - RNA, 15 nt, Human
uguacgucugacagg

SEQ ID NO: 1221195 - RNA, 16 nt, Human
uguacgucugacaggc

SEQ ID NO: 1221196 - RNA, 21 nt, Human
uguacagagcccacgccccca

SEQ ID NO: 1221197 - RNA, 18 nt, Human
uguacagagcccacgccc

SEQ ID NO: 1221198 - RNA, 17 nt, Human
uguacagagcccacgcc

SEQ ID NO: 1221199 - RNA, 16 nt, Human
uguacagagcccacgc

SEQ ID NO: 1221200 - RNA, 17 nt, Human
uguaauuaaguacuaug

SEQ ID NO: 1221201 - RNA, 13 nt, Human
ugucacaggcagg

SEQ ID NO: 1221202 - RNA, 12 nt, Human
ugucacaggcag

SEQ ID NO: 1221203 - RNA, 17 nt, Human
ugucacacacuuuggcu

SEQ ID NO: 1221204 - RNA, 22 nt, Human
uguauucucuccuguaccucuu

SEQ ID NO: 1221205 - RNA, 13 nt, Human
ugucaccugaaga

SEQ ID NO: 1221206 - RNA, 19 nt, Human
ugucauuugagcagggcuc

SEQ ID NO: 1221207 - RNA, 16 nt, Human
ugucauuugagcaggg

SEQ ID NO: 1221208 - RNA, 17 nt, Human
uguccuacucuguguca

SEQ ID NO: 1221209 - RNA, 12 nt, Human
uguccuacucug

SEQ ID NO: 1221210 - RNA, 20 nt, Human
uguccuacccacccuccuuu

SEQ ID NO: 1221211 - RNA, 17 nt, Human
uguccccgacccuugcc

SEQ ID NO: 1221212 - RNA, 16 nt, Human
uguccccgacccuugc

SEQ ID NO: 1221213 - RNA, 22 nt, Human
uguccccaccgcagacaggacc

SEQ ID NO: 1221214 - RNA, 19 nt, Human
uguccccaccgcagacagg

SEQ ID NO: 1221215 - RNA, 18 nt, Human
uguccccaccgcagacag

SEQ ID NO: 1221216 - RNA, 18 nt, Human
ugggggcugggcagagga

SEQ ID NO: 1221217 - RNA, 17 nt, Human
ugggggcugggcagagg

SEQ ID NO: 1221218 - RNA, 19 nt, Human
ugggggcugggcagaggaa

SEQ ID NO: 1221219 - RNA, 15 nt, Human
ugggggugcauuuga

SEQ ID NO: 1221220 - RNA, 12 nt, Human
ugggggugcauu

SEQ ID NO: 1221221 - RNA, 21 nt, Human
ugggggaucacagccucugaa

SEQ ID NO: 1221222 - RNA, 20 nt, Human
ugggggaucacagccucuga

SEQ ID NO: 1221223 - RNA, 17 nt, Human
ugggcuucaguggcagc

SEQ ID NO: 1221224 - RNA, 15 nt, Human
ugggcuucaguggca

SEQ ID NO: 1221225 - RNA, 17 nt, Human
ugggcuggugucaccug

SEQ ID NO: 1221226 - RNA, 16 nt, Human
ugggcuaguugggcuu

SEQ ID NO: 1221227 - RNA, 22 nt, Human
ugggcuaagugauccucccacc

SEQ ID NO: 1221228 - RNA, 16 nt, Human
ugggcagaggaaagca

SEQ ID NO: 1221229 - RNA, 16 nt, Human
uggguaacuagggaag

SEQ ID NO: 1221230 - RNA, 19 nt, Human
ugggguuuaucagaauucu

SEQ ID NO: 1221231 - RNA, 16 nt, Human
uggguucuacccaggu

SEQ ID NO: 1221232 - RNA, 22 nt, Human
uggguucuacccaggugcuagg

SEQ ID NO: 1221233 - RNA, 23 nt, Human
ugguauuggcuagagguucaaag

SEQ ID NO: 1221234 - RNA, 18 nt, Human
ugguaugaucacggcuca

SEQ ID NO: 1221235 - RNA, 21 nt, Human
uggguuucuaaagcugccagc

SEQ ID NO: 1221236 - RNA, 18 nt, Human
uggguuucuaaagcugcc

SEQ ID NO: 1221237 - RNA, 17 nt, Human
uggguuucuaaagcugc

SEQ ID NO: 1221238 - RNA, 15 nt, Human
ugggauccuccaggu

SEQ ID NO: 1221239 - RNA, 15 nt, Human
ugggagugagcuggu

SEQ ID NO: 1221240 - RNA, 23 nt, Human
ugggagcugccuguucagcucca

SEQ ID NO: 1221241 - RNA, 22 nt, Human
ugggagcugccuguucagcucc

SEQ ID NO: 1221242 - RNA, 21 nt, Human
ugggagcugccuguucagcuc

SEQ ID NO: 1221243 - RNA, 17 nt, Human
ugggagcugccuguuca

SEQ ID NO: 1221244 - RNA, 16 nt, Human
ugggauuacaggugug

SEQ ID NO: 1221245 - RNA, 13 nt, Human
ugggauccuggag

SEQ ID NO: 1221246 - RNA, 18 nt, Human
ugggauccuccaggugca

SEQ ID NO: 1221247 - RNA, 15 nt, Human
ugggcagaggaaagc

SEQ ID NO: 1221248 - RNA, 12 nt, Human
ugggacacccug

SEQ ID NO: 1221249 - RNA, 15 nt, Human
uggcuuuugugcauu

SEQ ID NO: 1221250 - RNA, 13 nt, Human
ugggacacccugu

SEQ ID NO: 1221251 - RNA, 13 nt, Human
ugggagcaaaaga

SEQ ID NO: 1221252 - RNA, 14 nt, Human
ugggagcugccugu

SEQ ID NO: 1221253 - RNA, 13 nt, Human
ugggagcugccug

SEQ ID NO: 1221254 - RNA, 12 nt, Human
ugggagcugccu

SEQ ID NO: 1221255 - RNA, 21 nt, Human
uggcugcuucaaggauccuga

SEQ ID NO: 1221256 - RNA, 21 nt, Human
uggcugggggccucagugcca

SEQ ID NO: 1221257 - RNA, 14 nt, Human
uggcuuuugugcau

SEQ ID NO: 1221258 - RNA, 19 nt, Human
uggacaugcacagcuaaca

SEQ ID NO: 1221259 - RNA, 13 nt, Human
uggacaugcacag

SEQ ID NO: 1221260 - RNA, 19 nt, Human
uggaauaacauguaauuaa

SEQ ID NO: 1221261 - RNA, 15 nt, Human
uggaauaacauguaa

SEQ ID NO: 1221262 - RNA, 14 nt, Human
uggaauaacaugua

SEQ ID NO: 1221263 - RNA, 16 nt, Human
uggaauauauaaccag

SEQ ID NO: 1221264 - RNA, 15 nt, Human
uggaauauauaacca

SEQ ID NO: 1221265 - RNA, 17 nt, Human
uggaauaaggagaauga

SEQ ID NO: 1221266 - RNA, 21 nt, Human
uggaaagacuuuuccaacccu

SEQ ID NO: 1221267 - RNA, 20 nt, Human
uggaaagaguaggaagacuu

SEQ ID NO: 1221268 - RNA, 20 nt, Human
uggaaaaauagccugccucu

SEQ ID NO: 1221269 - RNA, 21 nt, Human
uggccagaugcaccagcccuu

SEQ ID NO: 1221270 - RNA, 13 nt, Human
uggcagugggagc

SEQ ID NO: 1221271 - RNA, 21 nt, Human
uggcacccggccccugcuggu

SEQ ID NO: 1221272 - RNA, 13 nt, Human
uggcagcugcuuu

SEQ ID NO: 1221273 - RNA, 24 nt, Human
uggauuuaacagaaauguacagca

SEQ ID NO: 1221274 - RNA, 20 nt, Human
uggauuuaacagaaauguac

SEQ ID NO: 1221275 - RNA, 20 nt, Human
uggaggaaggaaacccagcu

SEQ ID NO: 1221276 - RNA, 18 nt, Human
uggaggaaggaaacccag

SEQ ID NO: 1221277 - RNA, 12 nt, Human
uggaggaaggaa

SEQ ID NO: 1221278 - RNA, 22 nt, Human
ugccagguuuuuggucugaccc

SEQ ID NO: 1221279 - RNA, 19 nt, Human
ugccagguuuuuggucuga

SEQ ID NO: 1221280 - RNA, 18 nt, Human
ugccagguuuuuggucug

SEQ ID NO: 1221281 - RNA, 10 nt, Human
ugccaggcau

SEQ ID NO: 1221282 - RNA, 19 nt, Human
ugccacccuggggagaaag

SEQ ID NO: 1221283 - RNA, 22 nt, Human
ugccacuacggaauaguuggcu

SEQ ID NO: 1221284 - RNA, 20 nt, Human
ugccacccuggggagaaagu

SEQ ID NO: 1221285 - RNA, 19 nt, Human
ugcaucaagaugugacaug

SEQ ID NO: 1221286 - RNA, 14 nt, Human
ugcaucaagaugug

SEQ ID NO: 1221287 - RNA, 21 nt, Human
ugccauccagguucagcuugu

SEQ ID NO: 1221288 - RNA, 24 nt, Human
ugccagguuuuuggucugacccac

SEQ ID NO: 1221289 - RNA, 14 nt, Human
ugcccaccuggccu

SEQ ID NO: 1221290 - RNA, 13 nt, Human
ugcccaccuggcc

SEQ ID NO: 1221291 - RNA, 13 nt, Human
ugcccaggcuggc

SEQ ID NO: 1221292 - RNA, 21 nt, Human
ugcccacucccugcaaccuga

SEQ ID NO: 1221293 - RNA, 11 nt, Human
ugcccaggcug

SEQ ID NO: 1221294 - RNA, 16 nt, Human
ugcccacucccugcaa

SEQ ID NO: 1221295 - RNA, 15 nt, Human
ugcccacucccugca

SEQ ID NO: 1221296 - RNA, 14 nt, Human
ugcccacucccugc

SEQ ID NO: 1221297 - RNA, 23 nt, Human
ugccccucaacucuccuccagag

SEQ ID NO: 1221298 - RNA, 20 nt, Human
ugaguccccuguuuguuucu

SEQ ID NO: 1221299 - RNA, 22 nt, Human
ugcaccgggccacagagaaagu

SEQ ID NO: 1221300 - RNA, 17 nt, Human
ugcaccgggccacagag

SEQ ID NO: 1221301 - RNA, 15 nt, Human
ugcaccgggccacag

SEQ ID NO: 1221302 - RNA, 14 nt, Human
ugcaccgggccaca

SEQ ID NO: 1221303 - RNA, 23 nt, Human
ugcaccggcuggccuggccccuc

SEQ ID NO: 1221304 - RNA, 19 nt, Human
ugaguccccuguuuguuuc

SEQ ID NO: 1221305 - RNA, 23 nt, Human
ugcagcaauaaagcagcguuucu

SEQ ID NO: 1221306 - RNA, 14 nt, Human
ugcacuuuguucug

SEQ ID NO: 1221307 - RNA, 12 nt, Human
ugcacuuuguuc

SEQ ID NO: 1221308 - RNA, 16 nt, Human
ugcagugcuuccaagg

SEQ ID NO: 1221309 - RNA, 15 nt, Human
ugcaggcagccaggc

SEQ ID NO: 1221310 - RNA, 14 nt, Human
ugcaggcagccagg

SEQ ID NO: 1221311 - RNA, 13 nt, Human
ugcaggcagccag

SEQ ID NO: 1221312 - RNA, 20 nt, Human
ugcaguggugcgaucugggu

SEQ ID NO: 1221313 - RNA, 22 nt, Human
ugcagugguaugaucacggcuc

SEQ ID NO: 1221314 - RNA, 14 nt, Human
ugcaguugccaguc

SEQ ID NO: 1221315 - RNA, 13 nt, Human
ugcaguugccagu

SEQ ID NO: 1221316 - RNA, 15 nt, Human
ugcaguugccaguca

SEQ ID NO: 1221317 - RNA, 18 nt, Human
ugcuccuuucuuguuuua

SEQ ID NO: 1221318 - RNA, 18 nt, Human
ugcuccucuccccagcaa

SEQ ID NO: 1221319 - RNA, 17 nt, Human
ugcuccucuccccagca

SEQ ID NO: 1221320 - RNA, 14 nt, Human
ugcuccucucccca

SEQ ID NO: 1221321 - RNA, 17 nt, Human
ugcucacauaucuguca

SEQ ID NO: 1221322 - RNA, 16 nt, Human
ugcucacauaucuguc

SEQ ID NO: 1221323 - RNA, 15 nt, Human
ugcucacauaucugu

SEQ ID NO: 1221324 - RNA, 13 nt, Human
ugcugcuggcugg

SEQ ID NO: 1221325 - RNA, 14 nt, Human
ugcugcauuuaaaa

SEQ ID NO: 1221326 - RNA, 23 nt, Human
ugcugcaguugccagucaccccg

SEQ ID NO: 1221327 - RNA, 18 nt, Human
ugcugcaguugccaguca

SEQ ID NO: 1221328 - RNA, 18 nt, Human
ugcugauggugcaaugac

SEQ ID NO: 1221329 - RNA, 17 nt, Human
ugcugauggugcaauga

SEQ ID NO: 1221330 - RNA, 15 nt, Human
ugcugauggugcaau

SEQ ID NO: 1221331 - RNA, 13 nt, Human
ugcugauggugca

SEQ ID NO: 1221332 - RNA, 23 nt, Human
ugcugacagacacaggcccggcu

SEQ ID NO: 1221333 - RNA, 22 nt, Human
ugcugacagacacaggcccggc

SEQ ID NO: 1221334 - RNA, 21 nt, Human
ugcugaaggcucgagcaugcc

SEQ ID NO: 1221335 - RNA, 13 nt, Human
ugcugaaggcucg

SEQ ID NO: 1221336 - RNA, 12 nt, Human
ugcugaaggcuc

SEQ ID NO: 1221337 - RNA, 15 nt, Human
ugcgugcauaccacu

SEQ ID NO: 1221338 - RNA, 22 nt, Human
ugcgccuacaggagugagcacu

SEQ ID NO: 1221339 - RNA, 16 nt, Human
ugcgccuacaggagug

SEQ ID NO: 1221340 - RNA, 14 nt, Human
ugcgccuacaggag

SEQ ID NO: 1221341 - RNA, 15 nt, Human
ugcuaaaugugaaug

SEQ ID NO: 1221342 - RNA, 21 nt, Human
ugcgaucuggguucacugcaa

SEQ ID NO: 1221343 - RNA, 20 nt, Human
ugcgaucuggguucacugca

SEQ ID NO: 1221344 - RNA, 19 nt, Human
ugcgaucuggguucacugc

SEQ ID NO: 1221345 - RNA, 15 nt, Human
ugcgaucuggguuca

SEQ ID NO: 1221346 - RNA, 14 nt, Human
ugcgaucuggguuc

SEQ ID NO: 1221347 - RNA, 17 nt, Human
ugccugaagucacacag

SEQ ID NO: 1221348 - RNA, 20 nt, Human
ugccucgaacuggcugcaaa

SEQ ID NO: 1221349 - RNA, 19 nt, Human
ugccucgaacuggcugcaa

SEQ ID NO: 1221350 - RNA, 18 nt, Human
ugccucgaacuggcugca

SEQ ID NO: 1221351 - RNA, 18 nt, Human
ugccccuggcagccccug

SEQ ID NO: 1221352 - RNA, 18 nt, Human
ugccugggcagaaggaag

SEQ ID NO: 1221353 - RNA, 21 nt, Human
ugccugggaucccucauccuc

SEQ ID NO: 1221354 - RNA, 16 nt, Human
ugccugguggcagcug

SEQ ID NO: 1221355 - RNA, 15 nt, Human
ugccugguggcagcu

SEQ ID NO: 1221356 - RNA, 14 nt, Human
ugccugguggcagc

SEQ ID NO: 1221357 - RNA, 20 nt, Human
ugaaggccccgcccaggcuu

SEQ ID NO: 1221358 - RNA, 19 nt, Human
ugaaggccccgcccaggcu

SEQ ID NO: 1221359 - RNA, 18 nt, Human
ugaaggccccgcccaggc

SEQ ID NO: 1221360 - RNA, 20 nt, Human
ugaagacucauucuucugua

SEQ ID NO: 1221361 - RNA, 19 nt, Human
ugaagacucauucuucugu

SEQ ID NO: 1221362 - RNA, 21 nt, Human
ugaaggcuggguucugauccu

SEQ ID NO: 1221363 - RNA, 20 nt, Human
ugaaggcuggguucugaucc

SEQ ID NO: 1221364 - RNA, 13 nt, Human
ugacaacacucau

SEQ ID NO: 1221365 - RNA, 23 nt, Human
ugacaacacucauugaccugagg

SEQ ID NO: 1221366 - RNA, 21 nt, Human
ugaauuguaaggaaugauuaa

SEQ ID NO: 1221367 - RNA, 13 nt, Human
ugaauuguaagga

SEQ ID NO: 1221368 - RNA, 16 nt, Human
ugacagacacaggccc

SEQ ID NO: 1221369 - RNA, 14 nt, Human
ugacagacacaggc

SEQ ID NO: 1221370 - RNA, 13 nt, Human
ugacagacacagg

SEQ ID NO: 1221371 - RNA, 15 nt, Human
ugacacacagcucug

SEQ ID NO: 1221372 - RNA, 14 nt, Human
ugacacacagcucu

SEQ ID NO: 1221373 - RNA, 23 nt, Human
ugacaaggauugcuacuguccua

SEQ ID NO: 1221374 - RNA, 13 nt, Human
ugacauguuuuau

SEQ ID NO: 1221375 - RNA, 23 nt, Human
ugacaucaacugcaucaagaugu

SEQ ID NO: 1221376 - RNA, 22 nt, Human
ugacagagcaagugagacccug

SEQ ID NO: 1221377 - RNA, 18 nt, Human
ugacagacacaggcccgg

SEQ ID NO: 1221378 - RNA, 17 nt, Human
ugacagacacaggcccg

SEQ ID NO: 1221379 - RNA, 13 nt, Human
ugacagaggcagc

SEQ ID NO: 1221380 - RNA, 21 nt, Human
ugacucuuucuauuguuucuu

SEQ ID NO: 1221381 - RNA, 16 nt, Human
ugacuuuccucuuugg

SEQ ID NO: 1221382 - RNA, 14 nt, Human
ugaccauucuccac

SEQ ID NO: 1221383 - RNA, 13 nt, Human
ugaccauucucca

SEQ ID NO: 1221384 - RNA, 22 nt, Human
ugacuuuucuguccgagcuuug

SEQ ID NO: 1221385 - RNA, 15 nt, Human
ugagaaauaaaguuu

SEQ ID NO: 1221386 - RNA, 12 nt, Human
ugagcagggcuc

SEQ ID NO: 1221387 - RNA, 19 nt, Human
ugagaggggaacagacugg

SEQ ID NO: 1221388 - RNA, 18 nt, Human
ugagaggggaacagacug

SEQ ID NO: 1221389 - RNA, 14 nt, Human
ugagaggggaacag

SEQ ID NO: 1221390 - RNA, 14 nt, Human
ugagaccaaccugg

SEQ ID NO: 1221391 - RNA, 16 nt, Human
ugaggcugggcucccu

SEQ ID NO: 1221392 - RNA, 15 nt, Human
ugaggcugggcuccc

SEQ ID NO: 1221393 - RNA, 18 nt, Human
ugaggcucugcccuuggu

SEQ ID NO: 1221394 - RNA, 16 nt, Human
ugaggcucugcccuug

SEQ ID NO: 1221395 - RNA, 19 nt, Human
ugaggucagagccugcagu

SEQ ID NO: 1221396 - RNA, 18 nt, Human
ugaggucagagccugcag

SEQ ID NO: 1221397 - RNA, 21 nt, Human
ugaggcugggcucccuuccca

SEQ ID NO: 1221398 - RNA, 15 nt, Human
ugaggugcuauguuc

SEQ ID NO: 1221399 - RNA, 22 nt, Human
ugaggaugaaaaaauaacacug

SEQ ID NO: 1221400 - RNA, 23 nt, Human
ugagccgagaucacgccacugca

SEQ ID NO: 1221401 - RNA, 22 nt, Human
ugagccgagaucacgccacugc

SEQ ID NO: 1221402 - RNA, 23 nt, Human
ugagcagggcucagcggggacag

SEQ ID NO: 1221403 - RNA, 22 nt, Human
ugagcagggcucagcggggaca

SEQ ID NO: 1221404 - RNA, 20 nt, Human
ugagcagggcucagcgggga

SEQ ID NO: 1221405 - RNA, 19 nt, Human
ugagcucaggaguuugaga

SEQ ID NO: 1221406 - RNA, 11 nt, Human
ugagcucagga

SEQ ID NO: 1221407 - RNA, 15 nt, Human
ucuucagaucucuaa

SEQ ID NO: 1221408 - RNA, 14 nt, Human
ucuucagaucucua

SEQ ID NO: 1221409 - RNA, 21 nt, Human
ucuucagagacuccugcaggc

SEQ ID NO: 1221410 - RNA, 22 nt, Human
ucuuauccaacaucaacaucuu

SEQ ID NO: 1221411 - RNA, 14 nt, Human
ucuuauacauuuga

SEQ ID NO: 1221412 - RNA, 16 nt, Human
ucuuaguggauguucu

SEQ ID NO: 1221413 - RNA, 15 nt, Human
ucuuagauguauaua

SEQ ID NO: 1221414 - RNA, 22 nt, Human
ucugugucagguggggcagcuu

SEQ ID NO: 1221415 - RNA, 20 nt, Human
ucugugucagguggggcagc

SEQ ID NO: 1221416 - RNA, 17 nt, Human
ucugugucagguggggc

SEQ ID NO: 1221417 - RNA, 23 nt, Human
ucuuagguuggcaaaaaggcagg

SEQ ID NO: 1221418 - RNA, 20 nt, Human
ucuuagguuggcaaaaaggc

SEQ ID NO: 1221419 - RNA, 21 nt, Human
ucuugaaauauaggaacuuaa

SEQ ID NO: 1221420 - RNA, 20 nt, Human
ucuugaaauauaggaacuua

SEQ ID NO: 1221421 - RNA, 22 nt, Human
ucuugaagacuuuucuuucagc

SEQ ID NO: 1221422 - RNA, 13 nt, Human
ucuugaagacuuu

SEQ ID NO: 1221423 - RNA, 23 nt, Human
ucuugcucugcugacagacacag

SEQ ID NO: 1221424 - RNA, 15 nt, Human
ucuugcucugcugac

SEQ ID NO: 1221425 - RNA, 14 nt, Human
ucuugcucugcuga

SEQ ID NO: 1221426 - RNA, 12 nt, Human
ucuuucccuccc

SEQ ID NO: 1221427 - RNA, 23 nt, Human
ucuuucccucccuuccucuuucc

SEQ ID NO: 1221428 - RNA, 13 nt, Human
ucuuucccucccu

SEQ ID NO: 1221429 - RNA, 23 nt, Human
ucuuuccaaaguacacuguuuca

SEQ ID NO: 1221430 - RNA, 13 nt, Human
ucuuguguguuua

SEQ ID NO: 1221431 - RNA, 16 nt, Human
ucuuuggacccugagg

SEQ ID NO: 1221432 - RNA, 15 nt, Human
ucuuuggacccugag

SEQ ID NO: 1221433 - RNA, 14 nt, Human
ucuuuggacccuga

SEQ ID NO: 1221434 - RNA, 13 nt, Human
ucuuuggacccug

SEQ ID NO: 1221435 - RNA, 17 nt, Human
ucuuugcagacaggcaa

SEQ ID NO: 1221436 - RNA, 14 nt, Human
ucuuugcagacagg

SEQ ID NO: 1221437 - RNA, 13 nt, Human
ucuuugcagacag

SEQ ID NO: 1221438 - RNA, 23 nt, Human
ucuuugagugaagcugggagaac

SEQ ID NO: 1221439 - RNA, 23 nt, Human
ugaaaacacuguucucugcccuc

SEQ ID NO: 1221440 - RNA, 22 nt, Human
ugaaaacacuguucucugcccu

SEQ ID NO: 1221441 - RNA, 21 nt, Human
ugaaaacacuguucucugccc

SEQ ID NO: 1221442 - RNA, 20 nt, Human
ugaaaacacuguucucugcc

SEQ ID NO: 1221443 - RNA, 17 nt, Human
ugaaaacacuguucucu

SEQ ID NO: 1221444 - RNA, 21 nt, Human
ugaaaacacauuuuucuuagg

SEQ ID NO: 1221445 - RNA, 12 nt, Human
ugaaaauuuuga

SEQ ID NO: 1221446 - RNA, 14 nt, Human
ugaaaauucagugg

SEQ ID NO: 1221447 - RNA, 19 nt, Human
ugaaaagaaaaaugagccu

SEQ ID NO: 1221448 - RNA, 22 nt, Human
ugaaaagaaaaaugagccuggc

SEQ ID NO: 1221449 - RNA, 20 nt, Human
ugaaaagaaaaaugagccug

SEQ ID NO: 1221450 - RNA, 16 nt, Human
ucuggugacuuuccuc

SEQ ID NO: 1221451 - RNA, 13 nt, Human
ucugucuaggaau

SEQ ID NO: 1221452 - RNA, 21 nt, Human
ucuguccugggagugagcugg

SEQ ID NO: 1221453 - RNA, 17 nt, Human
ucugucgcccagucugg

SEQ ID NO: 1221454 - RNA, 12 nt, Human
ucuguccuggga

SEQ ID NO: 1221455 - RNA, 23 nt, Human
ucuguacagagcccacgccccca

SEQ ID NO: 1221456 - RNA, 15 nt, Human
ucuguacagagccca

SEQ ID NO: 1221457 - RNA, 14 nt, Human
ucuguacagagccc

SEQ ID NO: 1221458 - RNA, 17 nt, Human
ucugcugcuggcugguu

SEQ ID NO: 1221459 - RNA, 15 nt, Human
ucugcugcuggcugg

SEQ ID NO: 1221460 - RNA, 14 nt, Human
ucugcugcuggcug

SEQ ID NO: 1221461 - RNA, 20 nt, Human
ucugccugcccaggccccug

SEQ ID NO: 1221462 - RNA, 18 nt, Human
ucugccugcccaggcccc

SEQ ID NO: 1221463 - RNA, 17 nt, Human
ucugccugcccaggccc

SEQ ID NO: 1221464 - RNA, 13 nt, Human
ucugccugcccag

SEQ ID NO: 1221465 - RNA, 13 nt, Human
ucugcugcuggcu

SEQ ID NO: 1221466 - RNA, 11 nt, Human
ucugcugcugg

SEQ ID NO: 1221467 - RNA, 17 nt, Human
ucugcugacagacacag

SEQ ID NO: 1221468 - RNA, 13 nt, Human
ucugcacuccccu

SEQ ID NO: 1221469 - RNA, 23 nt, Human
ucugaggaauccagacccggcug

SEQ ID NO: 1221470 - RNA, 22 nt, Human
ucugaggaauccagacccggcu

SEQ ID NO: 1221471 - RNA, 21 nt, Human
ucugaggaauccagacccggc

SEQ ID NO: 1221472 - RNA, 18 nt, Human
ucugaggaauccagaccc

SEQ ID NO: 1221473 - RNA, 24 nt, Human
ucugagaucaaaacgguuuuacug

SEQ ID NO: 1221474 - RNA, 18 nt, Human
ucugagaggacuuuucuu

SEQ ID NO: 1221475 - RNA, 23 nt, Human
ucugacccaugcugcccugugag

SEQ ID NO: 1221476 - RNA, 22 nt, Human
ucugacccaugcugcccuguga

SEQ ID NO: 1221477 - RNA, 20 nt, Human
ucugacccaugcugcccugu

SEQ ID NO: 1221478 - RNA, 15 nt, Human
ucugccucccaucac

SEQ ID NO: 1221479 - RNA, 13 nt, Human
ucugccucccauc

SEQ ID NO: 1221480 - RNA, 12 nt, Human
ucugccucccau

SEQ ID NO: 1221481 - RNA, 16 nt, Human
ucugcccacucccugc

SEQ ID NO: 1221482 - RNA, 14 nt, Human
ucugcccacucccu

SEQ ID NO: 1221483 - RNA, 13 nt, Human
ucugcccacuccc

SEQ ID NO: 1221484 - RNA, 12 nt, Human
ucugcccacucc

SEQ ID NO: 1221485 - RNA, 23 nt, Human
ucugccauauucuguuggccagu

SEQ ID NO: 1221486 - RNA, 22 nt, Human
ucugccauauucuguuggccag

SEQ ID NO: 1221487 - RNA, 20 nt, Human
ucugccugaagucacacagu

SEQ ID NO: 1221488 - RNA, 19 nt, Human
ucugccugaagucacacag

SEQ ID NO: 1221489 - RNA, 23 nt, Human
ucugccucugacacacagcucug

SEQ ID NO: 1221490 - RNA, 22 nt, Human
ucugccucugacacacagcucu

SEQ ID NO: 1221491 - RNA, 21 nt, Human
ucugccucugacacacagcuc

SEQ ID NO: 1221492 - RNA, 21 nt, Human
ucugccucccaucacccgcua

SEQ ID NO: 1221493 - RNA, 20 nt, Human
ucugccucccaucacccgcu

SEQ ID NO: 1221494 - RNA, 17 nt, Human
ucugccucccaucaccc

SEQ ID NO: 1221495 - RNA, 16 nt, Human
ucugccucccaucacc

SEQ ID NO: 1221496 - RNA, 18 nt, Human
ucugccucugacacacag

SEQ ID NO: 1221497 - RNA, 15 nt, Human
ucugccucugacaca

SEQ ID NO: 1221498 - RNA, 21 nt, Human
uccuuaccagcagagcaccuu

SEQ ID NO: 1221499 - RNA, 23 nt, Human
uccuugaaaacacuguucucugc

SEQ ID NO: 1221500 - RNA, 22 nt, Human
uccuugaaaacacuguucucug

SEQ ID NO: 1221501 - RNA, 22 nt, Human
uccuuugugaggaagccgcugg

SEQ ID NO: 1221502 - RNA, 18 nt, Human
uccuuugugaggaagccg

SEQ ID NO: 1221503 - RNA, 17 nt, Human
uccuuugugaggaagcc

SEQ ID NO: 1221504 - RNA, 22 nt, Human
uccuuggugucgggcaugacac

SEQ ID NO: 1221505 - RNA, 21 nt, Human
uccuuggugucgggcaugaca

SEQ ID NO: 1221506 - RNA, 18 nt, Human
uccuuggugucgggcaug

SEQ ID NO: 1221507 - RNA, 18 nt, Human
ucggaaaacaugcuacac

SEQ ID NO: 1221508 - RNA, 15 nt, Human
ucggaaaacaugcua

SEQ ID NO: 1221509 - RNA, 23 nt, Human
ucgcccagucuggaaugcagugg

SEQ ID NO: 1221510 - RNA, 19 nt, Human
ucgcccagucuggaaugca

SEQ ID NO: 1221511 - RNA, 14 nt, Human
ucgcccagucugga

SEQ ID NO: 1221512 - RNA, 23 nt, Human
ucgcaggauucuuccucccuccc

SEQ ID NO: 1221513 - RNA, 21 nt, Human
ucgcaggauucuuccucccuc

SEQ ID NO: 1221514 - RNA, 17 nt, Human
ucgcaggauucuuccuc

SEQ ID NO: 1221515 - RNA, 22 nt, Human
uccuuuucgcaggauucuuccu

SEQ ID NO: 1221516 - RNA, 19 nt, Human
ucuagggaaaaaccagcgu

SEQ ID NO: 1221517 - RNA, 12 nt, Human
ucuagggaaaaa

SEQ ID NO: 1221518 - RNA, 18 nt, Human
ucuacucuagggaaaaac

SEQ ID NO: 1221519 - RNA, 21 nt, Human
ucuacucgaguuacagacaaa

SEQ ID NO: 1221520 - RNA, 20 nt, Human
ucuacucgaguuacagacaa

SEQ ID NO: 1221521 - RNA, 17 nt, Human
ucucacuguugcccagg

SEQ ID NO: 1221522 - RNA, 15 nt, Human
ucucacuguugccca

SEQ ID NO: 1221523 - RNA, 14 nt, Human
ucucacuguugccc

SEQ ID NO: 1221524 - RNA, 16 nt, Human
ucucacacaugagcau

SEQ ID NO: 1221525 - RNA, 18 nt, Human
ucucaaauuucuaaaucu

SEQ ID NO: 1221526 - RNA, 23 nt, Human
ucucacucugucgcccagucugg

SEQ ID NO: 1221527 - RNA, 21 nt, Human
ucucacacaugagcaucaggc

SEQ ID NO: 1221528 - RNA, 20 nt, Human
ucucacugccaugccagcuu

SEQ ID NO: 1221529 - RNA, 23 nt, Human
ucucacacaugagcaucaggcca

SEQ ID NO: 1221530 - RNA, 16 nt, Human
ucucaaauuucuaaau

SEQ ID NO: 1221531 - RNA, 14 nt, Human
ucucaaauuucuaa

SEQ ID NO: 1221532 - RNA, 13 nt, Human
ucucaaauuucua

SEQ ID NO: 1221533 - RNA, 21 nt, Human
uccucuaggaggucucuaaga

SEQ ID NO: 1221534 - RNA, 21 nt, Human
uccuccuuuucacaguucucu

SEQ ID NO: 1221535 - RNA, 15 nt, Human
uccucuguacagagc

SEQ ID NO: 1221536 - RNA, 13 nt, Human
uccucuguacaga

SEQ ID NO: 1221537 - RNA, 15 nt, Human
uccucuggccugugu

SEQ ID NO: 1221538 - RNA, 19 nt, Human
uccugaggcugggcucccu

SEQ ID NO: 1221539 - RNA, 17 nt, Human
uccugaggcugggcucc

SEQ ID NO: 1221540 - RNA, 16 nt, Human
uccugaggcugggcuc

SEQ ID NO: 1221541 - RNA, 15 nt, Human
uccugaggcugggcu

SEQ ID NO: 1221542 - RNA, 12 nt, Human
uccugaggcugg

SEQ ID NO: 1221543 - RNA, 19 nt, Human
uccugagccagauuucacu

SEQ ID NO: 1221544 - RNA, 18 nt, Human
uccugagccagauuucac

SEQ ID NO: 1221545 - RNA, 21 nt, Human
uccugagccagauuucacucu

SEQ ID NO: 1221546 - RNA, 23 nt, Human
uccucuguacagagcccacgccc

SEQ ID NO: 1221547 - RNA, 17 nt, Human
uccugagccagauuuca

SEQ ID NO: 1221548 - RNA, 12 nt, Human
uccuccucagau

SEQ ID NO: 1221549 - RNA, 22 nt, Human
uccuccaggugcacaagcucca

SEQ ID NO: 1221550 - RNA, 20 nt, Human
uccuccaggugcacaagcuc

SEQ ID NO: 1221551 - RNA, 18 nt, Human
uccuccaggugcacaagc

SEQ ID NO: 1221552 - RNA, 14 nt, Human
uccuccaggugcac

SEQ ID NO: 1221553 - RNA, 13 nt, Human
uccuccaggugca

SEQ ID NO: 1221554 - RNA, 12 nt, Human
uccuccaggugc

SEQ ID NO: 1221555 - RNA, 17 nt, Human
uccuaguuccaccauca

SEQ ID NO: 1221556 - RNA, 14 nt, Human
uccuaguuccacca

SEQ ID NO: 1221557 - RNA, 18 nt, Human
uccuaagcuauucaguaa

SEQ ID NO: 1221558 - RNA, 16 nt, Human
uccuaagcuauucagu

SEQ ID NO: 1221559 - RNA, 22 nt, Human
uccuaguuccaccaucaagcca

SEQ ID NO: 1221560 - RNA, 21 nt, Human
uccuaguuccaccaucaagcc

SEQ ID NO: 1221561 - RNA, 22 nt, Human
ucccaugagccucagcauccug

SEQ ID NO: 1221562 - RNA, 17 nt, Human
ucccaugagccucagca

SEQ ID NO: 1221563 - RNA, 18 nt, Human
ucccucccuuccucuuuc

SEQ ID NO: 1221564 - RNA, 16 nt, Human
ucccugccaauggacu

SEQ ID NO: 1221565 - RNA, 14 nt, Human
ucccugccaaugga

SEQ ID NO: 1221566 - RNA, 17 nt, Human
ucccucuggggcuguuc

SEQ ID NO: 1221567 - RNA, 13 nt, Human
ucccucuggggcu

SEQ ID NO: 1221568 - RNA, 21 nt, Human
uccgcuuucuacccagcgagc

SEQ ID NO: 1221569 - RNA, 22 nt, Human
uccgaaagggacuuggaagcuc

SEQ ID NO: 1221570 - RNA, 21 nt, Human
uccgaaagggacuuggaagcu

SEQ ID NO: 1221571 - RNA, 21 nt, Human
ucccuucccacuggaggcaug

SEQ ID NO: 1221572 - RNA, 17 nt, Human
ucccuucccaccucucu

SEQ ID NO: 1221573 - RNA, 16 nt, Human
ucccuucccaccucuc

SEQ ID NO: 1221574 - RNA, 18 nt, Human
ucccaacucaccccagcc

SEQ ID NO: 1221575 - RNA, 13 nt, Human
ucccaacucaccc

SEQ ID NO: 1221576 - RNA, 21 nt, Human
ucccaacucaccccagcccca

SEQ ID NO: 1221577 - RNA, 19 nt, Human
ucccaacucaccccagccc

SEQ ID NO: 1221578 - RNA, 20 nt, Human
uccauagagagcaagacgcu

SEQ ID NO: 1221579 - RNA, 17 nt, Human
uccauagagagcaagac

SEQ ID NO: 1221580 - RNA, 14 nt, Human
ucccacucagucca

SEQ ID NO: 1221581 - RNA, 21 nt, Human
ucccaccuuggcugcagggag

SEQ ID NO: 1221582 - RNA, 19 nt, Human
ucccaccuuggcugcaggg

SEQ ID NO: 1221583 - RNA, 20 nt, Human
ucccaccucucucacuccuu

SEQ ID NO: 1221584 - RNA, 18 nt, Human
ucccaccucucucacucc

SEQ ID NO: 1221585 - RNA, 17 nt, Human
ucccaccucucucacuc

SEQ ID NO: 1221586 - RNA, 14 nt, Human
ucccaccucucuca

SEQ ID NO: 1221587 - RNA, 18 nt, Human
ucccaccucagccucccg

SEQ ID NO: 1221588 - RNA, 18 nt, Human
ucccaggcauuccccagg

SEQ ID NO: 1221589 - RNA, 17 nt, Human
ucccaggcauuccccag

SEQ ID NO: 1221590 - RNA, 16 nt, Human
ucccaugagccucagc

SEQ ID NO: 1221591 - RNA, 15 nt, Human
ucccaugagccucag

SEQ ID NO: 1221592 - RNA, 19 nt, Human
ucccaggcauuccccagga

SEQ ID NO: 1221593 - RNA, 19 nt, Human
uccacuuucuagccagagg

SEQ ID NO: 1221594 - RNA, 14 nt, Human
uccacuuucuagcc

SEQ ID NO: 1221595 - RNA, 21 nt, Human
uccacccugcucuccgaccag

SEQ ID NO: 1221596 - RNA, 14 nt, Human
uccacccugcucuc

SEQ ID NO: 1221597 - RNA, 22 nt, Human
uccacugugccaugugccaggu

SEQ ID NO: 1221598 - RNA, 20 nt, Human
uccaagaccuucuccuucac

SEQ ID NO: 1221599 - RNA, 19 nt, Human
uccaagaagcccaggaaag

SEQ ID NO: 1221600 - RNA, 22 nt, Human
uccaagcaggacauggacaagg

SEQ ID NO: 1221601 - RNA, 14 nt, Human
uccaagcaggacau

SEQ ID NO: 1221602 - RNA, 16 nt, Human
uccaagaagcccagga

SEQ ID NO: 1221603 - RNA, 15 nt, Human
uccaagaagcccagg

SEQ ID NO: 1221604 - RNA, 14 nt, Human
uccaagaagcccag

SEQ ID NO: 1221605 - RNA, 21 nt, Human
uccacaagagcccaggccucc

SEQ ID NO: 1221606 - RNA, 20 nt, Human
uccacaagagcccaggccuc

SEQ ID NO: 1221607 - RNA, 15 nt, Human
ucagaucucuaacuu

SEQ ID NO: 1221608 - RNA, 13 nt, Human
ucagccucccaaa

SEQ ID NO: 1221609 - RNA, 12 nt, Human
ucagccucccaa

SEQ ID NO: 1221610 - RNA, 18 nt, Human
ucagcauccuggcacccg

SEQ ID NO: 1221611 - RNA, 17 nt, Human
ucagcauccuggcaccc

SEQ ID NO: 1221612 - RNA, 16 nt, Human
ucagcauccuggcacc

SEQ ID NO: 1221613 - RNA, 15 nt, Human
ucagcauccuggcac

SEQ ID NO: 1221614 - RNA, 18 nt, Human
ucagcacgauuucuguuu

SEQ ID NO: 1221615 - RNA, 17 nt, Human
ucagcacgauuucuguu

SEQ ID NO: 1221616 - RNA, 16 nt, Human
ucagcacgauuucugu

SEQ ID NO: 1221617 - RNA, 15 nt, Human
ucagcacgauuucug

SEQ ID NO: 1221618 - RNA, 22 nt, Human
ucagccucccaaagugcuggga

SEQ ID NO: 1221619 - RNA, 20 nt, Human
ucagccucccgaauagcugg

SEQ ID NO: 1221620 - RNA, 12 nt, Human
ucagccucccga

SEQ ID NO: 1221621 - RNA, 16 nt, Human
ucagccugcuccagcu

SEQ ID NO: 1221622 - RNA, 22 nt, Human
ucagcuccagcucaccagcccc

SEQ ID NO: 1221623 - RNA, 21 nt, Human
ucagcuccagcucaccagccc

SEQ ID NO: 1221624 - RNA, 18 nt, Human
ucagcuccagcucaccag

SEQ ID NO: 1221625 - RNA, 15 nt, Human
ucagcugcuacuacu

SEQ ID NO: 1221626 - RNA, 14 nt, Human
ucaucauccuaagc

SEQ ID NO: 1221627 - RNA, 18 nt, Human
ucagugugacugaucucu

SEQ ID NO: 1221628 - RNA, 19 nt, Human
ucagucugauucccaagcu

SEQ ID NO: 1221629 - RNA, 17 nt, Human
ucagucugauucccaag

SEQ ID NO: 1221630 - RNA, 17 nt, Human
ucagguggggcagcuug

SEQ ID NO: 1221631 - RNA, 16 nt, Human
ucagguggggcagcuu

SEQ ID NO: 1221632 - RNA, 15 nt, Human
ucagguggggcagcu

SEQ ID NO: 1221633 - RNA, 14 nt, Human
ucagguggggcagc

SEQ ID NO: 1221634 - RNA, 20 nt, Human
ucaggugcugccauccaggu

SEQ ID NO: 1221635 - RNA, 18 nt, Human
ucaggugcugccauccag

SEQ ID NO: 1221636 - RNA, 21 nt, Human
ucagguggggucacucuggca

SEQ ID NO: 1221637 - RNA, 20 nt, Human
ucagguggggucacucuggc

SEQ ID NO: 1221638 - RNA, 17 nt, Human
ucagguggggucacucu

SEQ ID NO: 1221639 - RNA, 15 nt, Human
ucaguccauagcaga

SEQ ID NO: 1221640 - RNA, 20 nt, Human
uaucaggugcugccauccag

SEQ ID NO: 1221641 - RNA, 19 nt, Human
uaucaggugcugccaucca

SEQ ID NO: 1221642 - RNA, 21 nt, Human
uaguuugauuaaauucuugca

SEQ ID NO: 1221643 - RNA, 16 nt, Human
uaguuugauuaaauuc

SEQ ID NO: 1221644 - RNA, 15 nt, Human
uaguuugauuaaauu

SEQ ID NO: 1221645 - RNA, 11 nt, Human
uauaaacuuua

SEQ ID NO: 1221646 - RNA, 14 nt, Human
uauaaacuuuaccu

SEQ ID NO: 1221647 - RNA, 13 nt, Human
uauaaacuuuacc

SEQ ID NO: 1221648 - RNA, 18 nt, Human
uauaaacuuuaccuuuuu

SEQ ID NO: 1221649 - RNA, 17 nt, Human
uauaaacuuuaccuuuu

SEQ ID NO: 1221650 - RNA, 16 nt, Human
uauaaacuuuaccuuu

SEQ ID NO: 1221651 - RNA, 15 nt, Human
uauaaacuuuaccuu

SEQ ID NO: 1221652 - RNA, 16 nt, Human
uaguaugguggcuggg

SEQ ID NO: 1221653 - RNA, 20 nt, Human
uaguggcuuaaaacaacacu

SEQ ID NO: 1221654 - RNA, 22 nt, Human
uaguuguuugauucagacagcu

SEQ ID NO: 1221655 - RNA, 21 nt, Human
uaguuguuugauucagacagc

SEQ ID NO: 1221656 - RNA, 20 nt, Human
uaguuguuugauucagacag

SEQ ID NO: 1221657 - RNA, 16 nt, Human
uaggugacagagugag

SEQ ID NO: 1221658 - RNA, 11 nt, Human
uaggugacaga

SEQ ID NO: 1221659 - RNA, 11 nt, Human
uagggaaaaac

SEQ ID NO: 1221660 - RNA, 22 nt, Human
uagcuggucuuauuuguaaagc

SEQ ID NO: 1221661 - RNA, 23 nt, Human
uaggugugacugaauuucuuuug

SEQ ID NO: 1221662 - RNA, 21 nt, Human
uaggugugacugaauuucuuu

SEQ ID NO: 1221663 - RNA, 19 nt, Human
uaggugugacugaauuucu

SEQ ID NO: 1221664 - RNA, 17 nt, Human
uaggugugggggaagca

SEQ ID NO: 1221665 - RNA, 13 nt, Human
uagguguggggga

SEQ ID NO: 1221666 - RNA, 18 nt, Human
uaguaugaggcauuuguu

SEQ ID NO: 1221667 - RNA, 17 nt, Human
uaguaugaggcauuugu

SEQ ID NO: 1221668 - RNA, 19 nt, Human
uagcauacguacacauuuu

SEQ ID NO: 1221669 - RNA, 18 nt, Human
uagcauacguacacauuu

SEQ ID NO: 1221670 - RNA, 17 nt, Human
uagcauacguacacauu

SEQ ID NO: 1221671 - RNA, 11 nt, Human
uagcagggaaa

SEQ ID NO: 1221672 - RNA, 16 nt, Human
uagauacuguaucaug

SEQ ID NO: 1221673 - RNA, 16 nt, Human
uagccuaggugacaga

SEQ ID NO: 1221674 - RNA, 12 nt, Human
uagcucauucuc

SEQ ID NO: 1221675 - RNA, 21 nt, Human
uagcucaggugucccugcacu

SEQ ID NO: 1221676 - RNA, 20 nt, Human
uagcucaggugucccugcac

SEQ ID NO: 1221677 - RNA, 20 nt, Human
uagccugugccucugggacu

SEQ ID NO: 1221678 - RNA, 18 nt, Human
uagccugugccucuggga

SEQ ID NO: 1221679 - RNA, 19 nt, Human
uagcugggacuacaggcac

SEQ ID NO: 1221680 - RNA, 17 nt, Human
uagcugggacuacaggc

SEQ ID NO: 1221681 - RNA, 15 nt, Human
uagcugggacuacag

SEQ ID NO: 1221682 - RNA, 22 nt, Human
uagcucauucuccuuguguuac

SEQ ID NO: 1221683 - RNA, 14 nt, Human
uacuuguggacaca

SEQ ID NO: 1221684 - RNA, 23 nt, Human
uagaauuaguggcacuugcuuuu

SEQ ID NO: 1221685 - RNA, 17 nt, Human
uagaguugauacuacag

SEQ ID NO: 1221686 - RNA, 14 nt, Human
uagaguugauacua

SEQ ID NO: 1221687 - RNA, 12 nt, Human
uagagugggagc

SEQ ID NO: 1221688 - RNA, 16 nt, Human
uagagguucaaagaua

SEQ ID NO: 1221689 - RNA, 15 nt, Human
uagagguucaaagau

SEQ ID NO: 1221690 - RNA, 14 nt, Human
uagagguucaaaga

SEQ ID NO: 1221691 - RNA, 11 nt, Human
uagagacaggg

SEQ ID NO: 1221692 - RNA, 14 nt, Human
uacauuuuuaagug

SEQ ID NO: 1221693 - RNA, 22 nt, Human
uacauuuuuaagugcugcauuu

SEQ ID NO: 1221694 - RNA, 19 nt, Human
uacauuuuuaagugcugca

SEQ ID NO: 1221695 - RNA, 22 nt, Human
uacauggaauaacauguaauua

SEQ ID NO: 1221696 - RNA, 19 nt, Human
uacauggaauaacauguaa

SEQ ID NO: 1221697 - RNA, 18 nt, Human
uacauggaauaacaugua

SEQ ID NO: 1221698 - RNA, 14 nt, Human
uacauggaauaaca

SEQ ID NO: 1221699 - RNA, 23 nt, Human
uacaugaaaacacauuuuucuua

SEQ ID NO: 1221700 - RNA, 19 nt, Human
uacaugaaaacacauuuuu

SEQ ID NO: 1221701 - RNA, 18 nt, Human
uacaugaaaacacauuuu

SEQ ID NO: 1221702 - RNA, 17 nt, Human
uacaugaaaacacauuu

SEQ ID NO: 1221703 - RNA, 16 nt, Human
uacaugaaaacacauu

SEQ ID NO: 1221704 - RNA, 17 nt, Human
uacauaagauaaaugug

SEQ ID NO: 1221705 - RNA, 16 nt, Human
uacauaagauaaaugu

SEQ ID NO: 1221706 - RNA, 16 nt, Human
uacauaaacaaguccu

SEQ ID NO: 1221707 - RNA, 21 nt, Human
uacaguuuguuaguaugaggc

SEQ ID NO: 1221708 - RNA, 19 nt, Human
uacaguuuguuaguaugag

SEQ ID NO: 1221709 - RNA, 18 nt, Human
uacaguuuguuaguauga

SEQ ID NO: 1221710 - RNA, 20 nt, Human
uacaguugaaaaacagcuga

SEQ ID NO: 1221711 - RNA, 19 nt, Human
uacaguugaaaaacagcug

SEQ ID NO: 1221712 - RNA, 17 nt, Human
uacaguugaaaaacagc

SEQ ID NO: 1221713 - RNA, 21 nt, Human
uacagcuugaccgugaggcca

SEQ ID NO: 1221714 - RNA, 15 nt, Human
uacaggagugagcac

SEQ ID NO: 1221715 - RNA, 22 nt, Human
uacaggaaguacuggagaaaau

SEQ ID NO: 1221716 - RNA, 15 nt, Human
uacaggaaguacugg

SEQ ID NO: 1221717 - RNA, 14 nt, Human
uacaggaaguacug

SEQ ID NO: 1221718 - RNA, 13 nt, Human
uacaggaaguacu

SEQ ID NO: 1221719 - RNA, 18 nt, Human
uacaggaagguagaaaua

SEQ ID NO: 1221720 - RNA, 20 nt, Human
uacagcuugaccgugaggcc

SEQ ID NO: 1221721 - RNA, 20 nt, Human
uacacuguuucaaacuuuac

SEQ ID NO: 1221722 - RNA, 23 nt, Human
uacacugugcugagucugaaggc

SEQ ID NO: 1221723 - RNA, 22 nt, Human
uacacugugcugagucugaagg

SEQ ID NO: 1221724 - RNA, 16 nt, Human
uacacuuacacuuuau

SEQ ID NO: 1221725 - RNA, 22 nt, Human
uacacuguuucaaacuuuacua

SEQ ID NO: 1221726 - RNA, 21 nt, Human
uacacugugcugagucugaag

SEQ ID NO: 1221727 - RNA, 19 nt, Human
uacacauuuuauuuuauua

SEQ ID NO: 1221728 - RNA, 17 nt, Human
uacacacugcauguuug

SEQ ID NO: 1221729 - RNA, 15 nt, Human
uacacacugcauguu

SEQ ID NO: 1221730 - RNA, 11 nt, Human
uacacacacac

SEQ ID NO: 1221731 - RNA, 18 nt, Human
uacaaaguagaagucuua

SEQ ID NO: 1221732 - RNA, 14 nt, Human
uacaaaguagaagu

SEQ ID NO: 1221733 - RNA, 23 nt, Human
uacauuuuuaagugcugcauuua

SEQ ID NO: 1221734 - RNA, 16 nt, Human
uacccagcgagcccug

SEQ ID NO: 1221735 - RNA, 15 nt, Human
uaccuacauacaauu

SEQ ID NO: 1221736 - RNA, 21 nt, Human
uacuaauagacaauuuauuau

SEQ ID NO: 1221737 - RNA, 22 nt, Human
uacuaauaaaauuuaaaagucu

SEQ ID NO: 1221738 - RNA, 14 nt, Human
uacuaaggaaucuu

SEQ ID NO: 1221739 - RNA, 17 nt, Human
uacuaaccagcagaaau

SEQ ID NO: 1221740 - RNA, 21 nt, Human
uacgaaaagaggggaagagac

SEQ ID NO: 1221741 - RNA, 18 nt, Human
uacgaaaagaggggaaga

SEQ ID NO: 1221742 - RNA, 17 nt, Human
uaccuuuuuuauacaua

SEQ ID NO: 1221743 - RNA, 16 nt, Human
uaccuuuuuuauacau

SEQ ID NO: 1221744 - RNA, 13 nt, Human
uaccuuuuuuaua

SEQ ID NO: 1221745 - RNA, 21 nt, Human
uaccucuugagccuugaacuu

SEQ ID NO: 1221746 - RNA, 18 nt, Human
uaccucggugccuuccuc

SEQ ID NO: 1221747 - RNA, 22 nt, Human
uaccuuuuuuagaguugauacu

SEQ ID NO: 1221748 - RNA, 19 nt, Human
uaccuuuuuuagaguugau

SEQ ID NO: 1221749 - RNA, 13 nt, Human
uaccuuuuuuaga

SEQ ID NO: 1221750 - RNA, 21 nt, Human
uacugucuucaguaagccgug

SEQ ID NO: 1221751 - RNA, 16 nt, Human
uacuguccuacccacc

SEQ ID NO: 1221752 - RNA, 13 nt, Human
uacuuguggacac

SEQ ID NO: 1221753 - RNA, 16 nt, Human
uacucuacccucuuag

SEQ ID NO: 1221754 - RNA, 20 nt, Human
uacuacaguuuguuaguaug

SEQ ID NO: 1221755 - RNA, 14 nt, Human
uacuacaguuuguu

SEQ ID NO: 1221756 - RNA, 13 nt, Human
uacuacaguuugu

SEQ ID NO: 1221757 - RNA, 22 nt, Human
uacuacaguccucccaucucac

SEQ ID NO: 1221758 - RNA, 12 nt, Human
uacucccaucug

SEQ ID NO: 1221759 - RNA, 22 nt, Human
uacucgaguuacagacaaagcg

SEQ ID NO: 1221760 - RNA, 14 nt, Human
uaagugcugcauuu

SEQ ID NO: 1221761 - RNA, 23 nt, Human
uaagugaggaugaaaaaauaaca

SEQ ID NO: 1221762 - RNA, 12 nt, Human
uaagugagagag

SEQ ID NO: 1221763 - RNA, 22 nt, Human
uaagugcugcauuuaaaagaua

SEQ ID NO: 1221764 - RNA, 18 nt, Human
uaagugcugcauuuaaaa

SEQ ID NO: 1221765 - RNA, 16 nt, Human
uaagugcugcauuuaa

SEQ ID NO: 1221766 - RNA, 15 nt, Human
uaagugcugcauuua

SEQ ID NO: 1221767 - RNA, 14 nt, Human
uaagcuauucagua

SEQ ID NO: 1221768 - RNA, 22 nt, Human
uaagaggcagggucucacucug

SEQ ID NO: 1221769 - RNA, 15 nt, Human
uaagaggcagggucu

SEQ ID NO: 1221770 - RNA, 12 nt, Human
uaagaggcaggg

SEQ ID NO: 1221771 - RNA, 17 nt, Human
uaaggguaucuggugac

SEQ ID NO: 1221772 - RNA, 15 nt, Human
uaaggugugcucuga

SEQ ID NO: 1221773 - RNA, 20 nt, Human
uaagguggguacgggagggu

SEQ ID NO: 1221774 - RNA, 19 nt, Human
uaauaugcacacauuuuuu

SEQ ID NO: 1221775 - RNA, 18 nt, Human
uaauaugcacacauuuuu

SEQ ID NO: 1221776 - RNA, 17 nt, Human
uaauaugcacacauuuu

SEQ ID NO: 1221777 - RNA, 16 nt, Human
uaauaugcacacauuu

SEQ ID NO: 1221778 - RNA, 15 nt, Human
uaauaugcacacauu

SEQ ID NO: 1221779 - RNA, 13 nt, Human
uaaucuaaaugga

SEQ ID NO: 1221780 - RNA, 20 nt, Human
uaauccucuaggaggucucu

SEQ ID NO: 1221781 - RNA, 20 nt, Human
uaauauuaaggaagacaaug

SEQ ID NO: 1221782 - RNA, 15 nt, Human
uaauggggcggugag

SEQ ID NO: 1221783 - RNA, 23 nt, Human
uaaugcgugcauaccacuuuugu

SEQ ID NO: 1221784 - RNA, 22 nt, Human
uaaugcgugcauaccacuuuug

SEQ ID NO: 1221785 - RNA, 19 nt, Human
uaaugcgugcauaccacuu

SEQ ID NO: 1221786 - RNA, 15 nt, Human
uaaugcgugcauacc

SEQ ID NO: 1221787 - RNA, 20 nt, Human
uaauuaaguacuauguauca

SEQ ID NO: 1221788 - RNA, 17 nt, Human
uaauuaaguacuaugua

SEQ ID NO: 1221789 - RNA, 14 nt, Human
uaauuaaguacuau

SEQ ID NO: 1221790 - RNA, 18 nt, Human
uaacaccaugauuaacca

SEQ ID NO: 1221791 - RNA, 22 nt, Human
uaaauucuugcaaaguaucccu

SEQ ID NO: 1221792 - RNA, 18 nt, Human
uaaauucuugcaaaguau

SEQ ID NO: 1221793 - RNA, 17 nt, Human
uaaauucuugcaaagua

SEQ ID NO: 1221794 - RNA, 16 nt, Human
uaaauucuugcaaagu

SEQ ID NO: 1221795 - RNA, 22 nt, Human
uaaaugucucuuuaaugucaca

SEQ ID NO: 1221796 - RNA, 20 nt, Human
uaaaugucuaguuguaacac

SEQ ID NO: 1221797 - RNA, 19 nt, Human
uaaaugggggugcauuuga

SEQ ID NO: 1221798 - RNA, 18 nt, Human
uaaaugggggugcauuug

SEQ ID NO: 1221799 - RNA, 17 nt, Human
uaaaugggggugcauuu

SEQ ID NO: 1221800 - RNA, 14 nt, Human
uaaaugggggugca

SEQ ID NO: 1221801 - RNA, 16 nt, Human
uaaauggaaccacucu

SEQ ID NO: 1221802 - RNA, 17 nt, Human
uaaaugcccagccccuu

SEQ ID NO: 1221803 - RNA, 16 nt, Human
uaaaugcccagccccu

SEQ ID NO: 1221804 - RNA, 15 nt, Human
uaaaugcccagcccc

SEQ ID NO: 1221805 - RNA, 14 nt, Human
uaaaugcccagccc

SEQ ID NO: 1221806 - RNA, 13 nt, Human
uaaaugcccagcc

SEQ ID NO: 1221807 - RNA, 22 nt, Human
uaagaaccuuuugagugccuua

SEQ ID NO: 1221808 - RNA, 19 nt, Human
uaagaaccuuuugagugcc

SEQ ID NO: 1221809 - RNA, 24 nt, Human
uaagaaagacuaucuaaauguuga

SEQ ID NO: 1221810 - RNA, 23 nt, Human
uaagaaaaaggaugcacagaguu

SEQ ID NO: 1221811 - RNA, 19 nt, Human
uaagaaaaaggaugcacag

SEQ ID NO: 1221812 - RNA, 18 nt, Human
uaagaaaaaggaugcaca

SEQ ID NO: 1221813 - RNA, 16 nt, Human
uaagaaaaaggaugca

SEQ ID NO: 1221814 - RNA, 23 nt, Human
uaaccaguguuguggauuuaaca

SEQ ID NO: 1221815 - RNA, 16 nt, Human
uaaccacuucagcuga

SEQ ID NO: 1221816 - RNA, 12 nt, Human
uaacagaaaugu

SEQ ID NO: 1221817 - RNA, 11 nt, Human
uaacagaaaug

SEQ ID NO: 1221818 - RNA, 15 nt, Human
guuuagauaauacac

SEQ ID NO: 1221819 - RNA, 14 nt, Human
guuuagauaauaca

SEQ ID NO: 1221820 - RNA, 20 nt, Human
guuguuugauucagacagcu

SEQ ID NO: 1221821 - RNA, 15 nt, Human
guuguuacauuuuua

SEQ ID NO: 1221822 - RNA, 14 nt, Human
guuguuacauuuuu

SEQ ID NO: 1221823 - RNA, 14 nt, Human
guugugguuaaucu

SEQ ID NO: 1221824 - RNA, 22 nt, Human
guuguggauuuaacagaaaugu

SEQ ID NO: 1221825 - RNA, 12 nt, Human
guugucagcuga

SEQ ID NO: 1221826 - RNA, 23 nt, Human
guuggcugggggccucagugcca

SEQ ID NO: 1221827 - RNA, 19 nt, Human
guuggcugggggccucagu

SEQ ID NO: 1221828 - RNA, 20 nt, Human
guuggccccugcccggcugc

SEQ ID NO: 1221829 - RNA, 14 nt, Human
guuggccccugccc

SEQ ID NO: 1221830 - RNA, 13 nt, Human
guuggccccugcc

SEQ ID NO: 1221831 - RNA, 12 nt, Human
guuggcuggggg

SEQ ID NO: 1221832 - RNA, 12 nt, Human
guuuucacucuu

SEQ ID NO: 1221833 - RNA, 11 nt, Human
guuuucacucu

SEQ ID NO: 1221834 - RNA, 17 nt, Human
guuuucaaaauaaaaau

SEQ ID NO: 1221835 - RNA, 20 nt, Human
guuuguuucugaaagggacg

SEQ ID NO: 1221836 - RNA, 13 nt, Human
guuuuccugaaga

SEQ ID NO: 1221837 - RNA, 20 nt, Human
guuuuccaugaguccccugu

SEQ ID NO: 1221838 - RNA, 19 nt, Human
guuuuccaugaguccccug

SEQ ID NO: 1221839 - RNA, 18 nt, Human
guuugagaucagccuggg

SEQ ID NO: 1221840 - RNA, 17 nt, Human
guuugagaucagccugg

SEQ ID NO: 1221841 - RNA, 21 nt, Human
guuugauucagacagcugccu

SEQ ID NO: 1221842 - RNA, 20 nt, Human
guuugauucagacagcugcc

SEQ ID NO: 1221843 - RNA, 16 nt, Human
guuugauucagacagc

SEQ ID NO: 1221844 - RNA, 14 nt, Human
uaaaagauacaguu

SEQ ID NO: 1221845 - RNA, 20 nt, Human
uaaaagauacaguuacucag

SEQ ID NO: 1221846 - RNA, 17 nt, Human
uaaaagauacaguuacu

SEQ ID NO: 1221847 - RNA, 21 nt, Human
uaaaagauacaguuacucaga

SEQ ID NO: 1221848 - RNA, 19 nt, Human
uaaaaggugaccaaugaug

SEQ ID NO: 1221849 - RNA, 12 nt, Human
uaaaaggugacc

SEQ ID NO: 1221850 - RNA, 21 nt, Human
uaaaagguaugcaaucaaauc

SEQ ID NO: 1221851 - RNA, 12 nt, Human
uaaaaggagcca

SEQ ID NO: 1221852 - RNA, 15 nt, Human
uaaaacaacacucac

SEQ ID NO: 1221853 - RNA, 23 nt, Human
uaaaacacaacaucuuuuucuac

SEQ ID NO: 1221854 - RNA, 22 nt, Human
uaaaacacaacaucuuuuucua

SEQ ID NO: 1221855 - RNA, 17 nt, Human
uaaaacacaacaucuuu

SEQ ID NO: 1221856 - RNA, 15 nt, Human
uaaaggcuaccuuug

SEQ ID NO: 1221857 - RNA, 20 nt, Human
uaaagccugaguuugcuuuc

SEQ ID NO: 1221858 - RNA, 17 nt, Human
uaaaggcuaccuuugua

SEQ ID NO: 1221859 - RNA, 19 nt, Human
uaaagcagcguuucuauga

SEQ ID NO: 1221860 - RNA, 17 nt, Human
uaaagcagcguuucuau

SEQ ID NO: 1221861 - RNA, 16 nt, Human
uaaagcagcguuucua

SEQ ID NO: 1221862 - RNA, 12 nt, Human
uaaagaaaacug

SEQ ID NO: 1221863 - RNA, 22 nt, Human
uaaacuugguuuuuaaaaaacu

SEQ ID NO: 1221864 - RNA, 13 nt, Human
uaaacuuaaucua

SEQ ID NO: 1221865 - RNA, 23 nt, Human
uaaacaagaccacguuucuaaag

SEQ ID NO: 1221866 - RNA, 22 nt, Human
uaaacaagaccacguuucuaaa

SEQ ID NO: 1221867 - RNA, 21 nt, Human
uaaacaagaccacguuucuaa

SEQ ID NO: 1221868 - RNA, 20 nt, Human
uaaacaagaccacguuucua

SEQ ID NO: 1221869 - RNA, 19 nt, Human
guucugauccuaguuccac

SEQ ID NO: 1221870 - RNA, 18 nt, Human
guucuuucacccuuuucu

SEQ ID NO: 1221871 - RNA, 23 nt, Human
guucugggacacaguucaauucu

SEQ ID NO: 1221872 - RNA, 16 nt, Human
guucugggacacaguu

SEQ ID NO: 1221873 - RNA, 15 nt, Human
guucugggacacagu

SEQ ID NO: 1221874 - RNA, 14 nt, Human
guucugggacacag

SEQ ID NO: 1221875 - RNA, 12 nt, Human
guucugggacac

SEQ ID NO: 1221876 - RNA, 11 nt, Human
guucugggaca

SEQ ID NO: 1221877 - RNA, 20 nt, Human
guucuggcucuuccaggcug

SEQ ID NO: 1221878 - RNA, 16 nt, Human
guucuggcucuuccag

SEQ ID NO: 1221879 - RNA, 12 nt, Human
guucuggcucuu

SEQ ID NO: 1221880 - RNA, 23 nt, Human
guucuggcagaguugaagacaga

SEQ ID NO: 1221881 - RNA, 17 nt, Human
guugaaaaacagcugag

SEQ ID NO: 1221882 - RNA, 20 nt, Human
guucuuuccaaaguacacug

SEQ ID NO: 1221883 - RNA, 18 nt, Human
guucuuuccaaaguacac

SEQ ID NO: 1221884 - RNA, 14 nt, Human
guucuuuccaaagu

SEQ ID NO: 1221885 - RNA, 13 nt, Human
guucuuuccaaag

SEQ ID NO: 1221886 - RNA, 16 nt, Human
guugaagacagagcua

SEQ ID NO: 1221887 - RNA, 15 nt, Human
guugcaggaccucag

SEQ ID NO: 1221888 - RNA, 15 nt, Human
guugcccaggcaggu

SEQ ID NO: 1221889 - RNA, 14 nt, Human
guugcccaggcagg

SEQ ID NO: 1221890 - RNA, 12 nt, Human
guugcccaggca

SEQ ID NO: 1221891 - RNA, 23 nt, Human
guugccagucaccccggccaccu

SEQ ID NO: 1221892 - RNA, 18 nt, Human
guugccagucaccccggc

SEQ ID NO: 1221893 - RNA, 17 nt, Human
guugccagucaccccgg

SEQ ID NO: 1221894 - RNA, 16 nt, Human
guugccagucaccccg

SEQ ID NO: 1221895 - RNA, 14 nt, Human
guugccagucaccc

SEQ ID NO: 1221896 - RNA, 13 nt, Human
guugccagucacc

SEQ ID NO: 1221897 - RNA, 23 nt, Human
guuggccaaagccaaagcuaggc

SEQ ID NO: 1221898 - RNA, 18 nt, Human
guuggcaaaaaggcagga

SEQ ID NO: 1221899 - RNA, 14 nt, Human
guuggcaaaaaggc

SEQ ID NO: 1221900 - RNA, 14 nt, Human
guuggccaguguga

SEQ ID NO: 1221901 - RNA, 19 nt, Human
guuggccaggcuggucuca

SEQ ID NO: 1221902 - RNA, 17 nt, Human
guuggccaggcuggucu

SEQ ID NO: 1221903 - RNA, 15 nt, Human
guuggccaggcuggu

SEQ ID NO: 1221904 - RNA, 14 nt, Human
guuggccaggcugg

SEQ ID NO: 1221905 - RNA, 13 nt, Human
guuggccaggcug

SEQ ID NO: 1221906 - RNA, 23 nt, Human
guuaccauuuugggguacccacu

SEQ ID NO: 1221907 - RNA, 21 nt, Human
guuacauuuuuaagugcugca

SEQ ID NO: 1221908 - RNA, 19 nt, Human
guuacauaagauaaaugug

SEQ ID NO: 1221909 - RNA, 18 nt, Human
guuacauaagauaaaugu

SEQ ID NO: 1221910 - RNA, 17 nt, Human
guuacagacaaagcgug

SEQ ID NO: 1221911 - RNA, 15 nt, Human
guuacagacaaagcg

SEQ ID NO: 1221912 - RNA, 22 nt, Human
guuaguuucuccaagcaggaca

SEQ ID NO: 1221913 - RNA, 19 nt, Human
guuaguuucuccaagcagg

SEQ ID NO: 1221914 - RNA, 16 nt, Human
guuaguuucuccaagc

SEQ ID NO: 1221915 - RNA, 22 nt, Human
guuacuaaguuuuuauggcuuu

SEQ ID NO: 1221916 - RNA, 15 nt, Human
guuacucagaauucu

SEQ ID NO: 1221917 - RNA, 21 nt, Human
guuaugacuccagaauuuccc

SEQ ID NO: 1221918 - RNA, 19 nt, Human
guuauuaaaaaucucaaau

SEQ ID NO: 1221919 - RNA, 19 nt, Human
guucaagcgauucuucugc

SEQ ID NO: 1221920 - RNA, 23 nt, Human
guucaauucucauuugucacaca

SEQ ID NO: 1221921 - RNA, 16 nt, Human
guucaauucucauuug

SEQ ID NO: 1221922 - RNA, 20 nt, Human
guucaagcgauucuucugcu

SEQ ID NO: 1221923 - RNA, 19 nt, Human
guucacugcaaccuccgcc

SEQ ID NO: 1221924 - RNA, 18 nt, Human
guucaucuugaauuguaa

SEQ ID NO: 1221925 - RNA, 13 nt, Human
guucaucuugaau

SEQ ID NO: 1221926 - RNA, 12 nt, Human
guucaucuugaa

SEQ ID NO: 1221927 - RNA, 17 nt, Human
guucaucauccuaagcu

SEQ ID NO: 1221928 - RNA, 20 nt, Human
guuccaccaucaagccacca

SEQ ID NO: 1221929 - RNA, 17 nt, Human
guuccaccaucaagcca

SEQ ID NO: 1221930 - RNA, 14 nt, Human
guuccuaauccucu

SEQ ID NO: 1221931 - RNA, 22 nt, Human
guuccucauuagcauuuugcua

SEQ ID NO: 1221932 - RNA, 21 nt, Human
guguggagaagcggcuggcag

SEQ ID NO: 1221933 - RNA, 13 nt, Human
guguggagaagcg

SEQ ID NO: 1221934 - RNA, 22 nt, Human
gugugcucugaucauccacugu

SEQ ID NO: 1221935 - RNA, 15 nt, Human
gugugcucugaucau

SEQ ID NO: 1221936 - RNA, 12 nt, Human
gugugcucugau

SEQ ID NO: 1221937 - RNA, 22 nt, Human
gugucucuugguccugcugcag

SEQ ID NO: 1221938 - RNA, 21 nt, Human
gugucucuugguccugcugca

SEQ ID NO: 1221939 - RNA, 20 nt, Human
gugucucuugguccugcugc

SEQ ID NO: 1221940 - RNA, 19 nt, Human
gugucucuugguccugcug

SEQ ID NO: 1221941 - RNA, 18 nt, Human
gugucucuugguccugcu

SEQ ID NO: 1221942 - RNA, 15 nt, Human
gugucgggcaugaca

SEQ ID NO: 1221943 - RNA, 14 nt, Human
guguccggucccug

SEQ ID NO: 1221944 - RNA, 23 nt, Human
gugucccugcacuugcagacucu

SEQ ID NO: 1221945 - RNA, 14 nt, Human
gugucucuuggucc

SEQ ID NO: 1221946 - RNA, 17 nt, Human
gugucucccuucauccu

SEQ ID NO: 1221947 - RNA, 22 nt, Human
guuaaaauaccagccaguaaau

SEQ ID NO: 1221948 - RNA, 13 nt, Human
guuacagacaaag

SEQ ID NO: 1221949 - RNA, 16 nt, Human
guuacacuaaaaggug

SEQ ID NO: 1221950 - RNA, 15 nt, Human
guuacacuaaaaggu

SEQ ID NO: 1221951 - RNA, 18 nt, Human
guguuaugacuccagaau

SEQ ID NO: 1221952 - RNA, 14 nt, Human
guguuacuaaguuu

SEQ ID NO: 1221953 - RNA, 12 nt, Human
guguuacuaagu

SEQ ID NO: 1221954 - RNA, 17 nt, Human
guguacauggaauaaca

SEQ ID NO: 1221955 - RNA, 22 nt, Human
guguacauggaauaacauguaa

SEQ ID NO: 1221956 - RNA, 18 nt, Human
gugucccugcacuugcag

SEQ ID NO: 1221957 - RNA, 16 nt, Human
gugucccugcacuugc

SEQ ID NO: 1221958 - RNA, 13 nt, Human
gugucccugcacu

SEQ ID NO: 1221959 - RNA, 19 nt, Human
guggugcgaucuggguuca

SEQ ID NO: 1221960 - RNA, 21 nt, Human
guguaaguauucuuauuuaau

SEQ ID NO: 1221961 - RNA, 21 nt, Human
guggugagaggcauccaguau

SEQ ID NO: 1221962 - RNA, 17 nt, Human
guggugaccucugccug

SEQ ID NO: 1221963 - RNA, 14 nt, Human
guggugaccucugc

SEQ ID NO: 1221964 - RNA, 18 nt, Human
gugguccuaaucuucuga

SEQ ID NO: 1221965 - RNA, 17 nt, Human
guggucccaccccacac

SEQ ID NO: 1221966 - RNA, 16 nt, Human
guggucccaccccaca

SEQ ID NO: 1221967 - RNA, 15 nt, Human
guggucccaccccac

SEQ ID NO: 1221968 - RNA, 14 nt, Human
guggucccacccca

SEQ ID NO: 1221969 - RNA, 17 nt, Human
gugguagagugugccug

SEQ ID NO: 1221970 - RNA, 19 nt, Human
gugguaugaucacggcuca

SEQ ID NO: 1221971 - RNA, 18 nt, Human
guggggaccucaggccug

SEQ ID NO: 1221972 - RNA, 15 nt, Human
guggggaccucaggc

SEQ ID NO: 1221973 - RNA, 17 nt, Human
guggggcagcuugaggg

SEQ ID NO: 1221974 - RNA, 13 nt, Human
guggggcagcuug

SEQ ID NO: 1221975 - RNA, 23 nt, Human
guggguuucuaaagcugccagcc

SEQ ID NO: 1221976 - RNA, 17 nt, Human
gugggcccaaugcacuu

SEQ ID NO: 1221977 - RNA, 15 nt, Human
gugggcuaguugggc

SEQ ID NO: 1221978 - RNA, 23 nt, Human
guggcugcuucaaggauccugag

SEQ ID NO: 1221979 - RNA, 19 nt, Human
guggcuggguuggagggug

SEQ ID NO: 1221980 - RNA, 22 nt, Human
guggcugcuucaaggauccuga

SEQ ID NO: 1221981 - RNA, 19 nt, Human
guggcugcuucaaggaucc

SEQ ID NO: 1221982 - RNA, 16 nt, Human
guggcugcuucaagga

SEQ ID NO: 1221983 - RNA, 15 nt, Human
guggcugcuucaagg

SEQ ID NO: 1221984 - RNA, 22 nt, Human
guggcuuaaaacaacacucaca

SEQ ID NO: 1221985 - RNA, 14 nt, Human
guggcugcuucaag

SEQ ID NO: 1221986 - RNA, 12 nt, Human
guggcugcuuca

SEQ ID NO: 1221987 - RNA, 14 nt, Human
guggcucacgccug

SEQ ID NO: 1221988 - RNA, 18 nt, Human
gugauuuuuguaauuuuu

SEQ ID NO: 1221989 - RNA, 13 nt, Human
gugauuuuuguaa

SEQ ID NO: 1221990 - RNA, 12 nt, Human
gugauuuucauu

SEQ ID NO: 1221991 - RNA, 24 nt, Human
gugauccacccaccucagccuccc

SEQ ID NO: 1221992 - RNA, 23 nt, Human
gugauccacccaccucagccucc

SEQ ID NO: 1221993 - RNA, 23 nt, Human
gugcaguggugcgaucuggguuc

SEQ ID NO: 1221994 - RNA, 20 nt, Human
gugcaguggugcgaucuggg

SEQ ID NO: 1221995 - RNA, 22 nt, Human
gugcauaccacuuuuguucuug

SEQ ID NO: 1221996 - RNA, 20 nt, Human
gugccagguuuuuggucuga

SEQ ID NO: 1221997 - RNA, 16 nt, Human
gugccaugugccaggu

SEQ ID NO: 1221998 - RNA, 14 nt, Human
gugccaugugccag

SEQ ID NO: 1221999 - RNA, 21 nt, Human
gugcgaucuggguucacugca

SEQ ID NO: 1222000 - RNA, 14 nt, Human
gugcggccuuuggc

SEQ ID NO: 1222001 - RNA, 14 nt, Human
gugcgccuacagga

SEQ ID NO: 1222002 - RNA, 17 nt, Human
gugaggaugaaaaaaua

SEQ ID NO: 1222003 - RNA, 19 nt, Human
gugagccgagaucacgcca

SEQ ID NO: 1222004 - RNA, 20 nt, Human
gugagccacugcaccgggcc

SEQ ID NO: 1222005 - RNA, 15 nt, Human
gugagccacugcacc

SEQ ID NO: 1222006 - RNA, 17 nt, Human
gugauacaaugcugugc

SEQ ID NO: 1222007 - RNA, 15 nt, Human
gugauacaaugcugu

SEQ ID NO: 1222008 - RNA, 17 nt, Human
gugaguugauagcacag

SEQ ID NO: 1222009 - RNA, 15 nt, Human
gugaccucugccuga

SEQ ID NO: 1222010 - RNA, 14 nt, Human
gugaccucugccug

SEQ ID NO: 1222011 - RNA, 13 nt, Human
gugaccucugccu

SEQ ID NO: 1222012 - RNA, 15 nt, Human
gugacagaggcagcc

SEQ ID NO: 1222013 - RNA, 14 nt, Human
gugacagaggcagc

SEQ ID NO: 1222014 - RNA, 13 nt, Human
gugacagaggcag

SEQ ID NO: 1222015 - RNA, 12 nt, Human
gugacagaggca

SEQ ID NO: 1222016 - RNA, 20 nt, Human
gugacaaggauugcuacugu

SEQ ID NO: 1222017 - RNA, 21 nt, Human
gugaaugaugauccuaggcau

SEQ ID NO: 1222018 - RNA, 17 nt, Human
gucuguucuuuccaaag

SEQ ID NO: 1222019 - RNA, 14 nt, Human
gucuguucuuucca

SEQ ID NO: 1222020 - RNA, 18 nt, Human
gucugugccauuuuguau

SEQ ID NO: 1222021 - RNA, 23 nt, Human
gucuugcaauggcagccuuggca

SEQ ID NO: 1222022 - RNA, 21 nt, Human
gucuugcaauggcagccuugg

SEQ ID NO: 1222023 - RNA, 20 nt, Human
gucuugcaauggcagccuug

SEQ ID NO: 1222024 - RNA, 19 nt, Human
gucuugcaauggcagccuu

SEQ ID NO: 1222025 - RNA, 18 nt, Human
gucuugcaauggcagccu

SEQ ID NO: 1222026 - RNA, 17 nt, Human
gucuugcaauggcagcc

SEQ ID NO: 1222027 - RNA, 16 nt, Human
gucuugcaauggcagc

SEQ ID NO: 1222028 - RNA, 21 nt, Human
gucuugaacuccuggccucaa

SEQ ID NO: 1222029 - RNA, 20 nt, Human
gucuugaacuccuggccuca

SEQ ID NO: 1222030 - RNA, 18 nt, Human
gucuugaacuccuggccu

SEQ ID NO: 1222031 - RNA, 17 nt, Human
gucuugaacuccuggcc

SEQ ID NO: 1222032 - RNA, 16 nt, Human
gucuugaacuccuggc

SEQ ID NO: 1222033 - RNA, 21 nt, Human
gucuuaaaaaguggaaaaaua

SEQ ID NO: 1222034 - RNA, 19 nt, Human
guccuuaccagcagagcac

SEQ ID NO: 1222035 - RNA, 21 nt, Human
guccuuaccagcagagcaccu

SEQ ID NO: 1222036 - RNA, 15 nt, Human
gucccugccaaugga

SEQ ID NO: 1222037 - RNA, 14 nt, Human
gucccugccaaugg

SEQ ID NO: 1222038 - RNA, 11 nt, Human
gucccugccaa

SEQ ID NO: 1222039 - RNA, 16 nt, Human
gucgggcaugacacga

SEQ ID NO: 1222040 - RNA, 21 nt, Human
gucggaaaacaugcuacacac

SEQ ID NO: 1222041 - RNA, 19 nt, Human
gucucacuauguugcccag

SEQ ID NO: 1222042 - RNA, 18 nt, Human
gucucacuauguugccca

SEQ ID NO: 1222043 - RNA, 19 nt, Human
gucucacucugucgcccag

SEQ ID NO: 1222044 - RNA, 18 nt, Human
gucucacucugucgccca

SEQ ID NO: 1222045 - RNA, 16 nt, Human
gucucacucugucgcc

SEQ ID NO: 1222046 - RNA, 15 nt, Human
gucucacucugucgc

SEQ ID NO: 1222047 - RNA, 22 nt, Human
gucucacucugucgcccagucu

SEQ ID NO: 1222048 - RNA, 13 nt, Human
gucucacuguugc

SEQ ID NO: 1222049 - RNA, 13 nt, Human
gucucuugguccu

SEQ ID NO: 1222050 - RNA, 16 nt, Human
gucccugcacuugcag

SEQ ID NO: 1222051 - RNA, 21 nt, Human
gucccugcacuugcagacucu

SEQ ID NO: 1222052 - RNA, 19 nt, Human
gucccugcacuugcagacu

SEQ ID NO: 1222053 - RNA, 17 nt, Human
guccccaccgcagacag

SEQ ID NO: 1222054 - RNA, 23 nt, Human
gucccaccuuggcugcagggagu

SEQ ID NO: 1222055 - RNA, 21 nt, Human
gucccaccuuggcugcaggga

SEQ ID NO: 1222056 - RNA, 23 nt, Human
guccacccaggagccccgaggcc

SEQ ID NO: 1222057 - RNA, 13 nt, Human
guccacccaggag

SEQ ID NO: 1222058 - RNA, 12 nt, Human
guccacccagga

SEQ ID NO: 1222059 - RNA, 14 nt, Human
guauuuuacuaaua

SEQ ID NO: 1222060 - RNA, 15 nt, Human
gucaagugaaaaagg

SEQ ID NO: 1222061 - RNA, 19 nt, Human
guauuuuguuuuugucuua

SEQ ID NO: 1222062 - RNA, 22 nt, Human
gucacucuggcagcucagagag

SEQ ID NO: 1222063 - RNA, 19 nt, Human
gucacucuggcagcucaga

SEQ ID NO: 1222064 - RNA, 17 nt, Human
gucacucuggcagcuca

SEQ ID NO: 1222065 - RNA, 16 nt, Human
gucacucuggcagcuc

SEQ ID NO: 1222066 - RNA, 14 nt, Human
gucacucuggcagc

SEQ ID NO: 1222067 - RNA, 13 nt, Human
gucacucuggcag

SEQ ID NO: 1222068 - RNA, 12 nt, Human
gucacucuggca

SEQ ID NO: 1222069 - RNA, 22 nt, Human
gucaccccggccaccugcggug

SEQ ID NO: 1222070 - RNA, 18 nt, Human
gucaccccggccaccugc

SEQ ID NO: 1222071 - RNA, 17 nt, Human
gucaccccggccaccug

SEQ ID NO: 1222072 - RNA, 16 nt, Human
gucagagccugcaguu

SEQ ID NO: 1222073 - RNA, 15 nt, Human
gucagagccugcagu

SEQ ID NO: 1222074 - RNA, 14 nt, Human
gucagagccugcag

SEQ ID NO: 1222075 - RNA, 14 nt, Human
guagucaggugccu

SEQ ID NO: 1222076 - RNA, 16 nt, Human
guaggguuauaauaau

SEQ ID NO: 1222077 - RNA, 23 nt, Human
guagggcgggaggauguucuggg

SEQ ID NO: 1222078 - RNA, 22 nt, Human
guagggcgggaggauguucugg

SEQ ID NO: 1222079 - RNA, 21 nt, Human
guagggcgggaggauguucug

SEQ ID NO: 1222080 - RNA, 16 nt, Human
guagggcgggaggaug

SEQ ID NO: 1222081 - RNA, 20 nt, Human
guaugaggcauuuguuugaa

SEQ ID NO: 1222082 - RNA, 17 nt, Human
guaugaggcauuuguuu

SEQ ID NO: 1222083 - RNA, 20 nt, Human
guaugaucacggcucacugc

SEQ ID NO: 1222084 - RNA, 21 nt, Human
guaugaucacggcucacugca

SEQ ID NO: 1222085 - RNA, 22 nt, Human
guaugaucacggcucacugcag

SEQ ID NO: 1222086 - RNA, 15 nt, Human
guaugaggcauuugu

SEQ ID NO: 1222087 - RNA, 13 nt, Human
guaugaggcauuu

SEQ ID NO: 1222088 - RNA, 19 nt, Human
guaucuggugacuuuccuc

SEQ ID NO: 1222089 - RNA, 12 nt, Human
guaucuggugac

SEQ ID NO: 1222090 - RNA, 12 nt, Human
guaucugagcag

SEQ ID NO: 1222091 - RNA, 22 nt, Human
guauaugucaagccauaauugu

SEQ ID NO: 1222092 - RNA, 20 nt, Human
uuucuguucuuucuggcuau

SEQ ID NO: 1222093 - RNA, 21 nt, Human
uuucuaaaggcuaccuuugua

SEQ ID NO: 1222094 - RNA, 20 nt, Human
uuucuaaaggcuaccuuugu

SEQ ID NO: 1222095 - RNA, 17 nt, Human
uuaccacagacauacua

SEQ ID NO: 1222096 - RNA, 14 nt, Human
uuaccacagacaua

SEQ ID NO: 1222097 - RNA, 16 nt, Human
uuuccugaggcugggc

SEQ ID NO: 1222098 - RNA, 22 nt, Human
uuugaagaugccgcauuuggau

SEQ ID NO: 1222099 - RNA, 19 nt, Human
uuugaacugauaaagauga

SEQ ID NO: 1222100 - RNA, 17 nt, Human
uuugaacugauaaagau

SEQ ID NO: 1222101 - RNA, 15 nt, Human
uuugaacugauaaag

SEQ ID NO: 1222102 - RNA, 14 nt, Human
uuugaacucuucaa

SEQ ID NO: 1222103 - RNA, 23 nt, Human
uuucuuagggaaggauacaaaag

SEQ ID NO: 1222104 - RNA, 18 nt, Human
uuucuuagggaaggauac

SEQ ID NO: 1222105 - RNA, 13 nt, Human
uuucuucucccuc

SEQ ID NO: 1222106 - RNA, 12 nt, Human
uuucuucucccu

SEQ ID NO: 1222107 - RNA, 21 nt, Human
uuuggaauuuugugcccccau

SEQ ID NO: 1222108 - RNA, 19 nt, Human
uuuggugguuucagaaaug

SEQ ID NO: 1222109 - RNA, 14 nt, Human
uuuggaauuuugug

SEQ ID NO: 1222110 - RNA, 12 nt, Human
uuuggaaaauaa

SEQ ID NO: 1222111 - RNA, 16 nt, Human
uuugcuuugugauuuu

SEQ ID NO: 1222112 - RNA, 15 nt, Human
uuugcuuugugauuu

SEQ ID NO: 1222113 - RNA, 17 nt, Human
uuuuaaagaaugcucuu

SEQ ID NO: 1222114 - RNA, 21 nt, Human
uuuguucuggcucuuccaggc

SEQ ID NO: 1222115 - RNA, 21 nt, Human
uuuuaaaugcaccuggaauau

SEQ ID NO: 1222116 - RNA, 12 nt, Human
uuuuaaaugcac

SEQ ID NO: 1222117 - RNA, 11 nt, Human
uuuuaaaugca

SEQ ID NO: 1222118 - RNA, 19 nt, Human
uuuuuccuucagugccuua

SEQ ID NO: 1222119 - RNA, 11 nt, Human
uuuuuaaaugc

SEQ ID NO: 1222120 - RNA, 11 nt, Human
uuuuuccuuca

SEQ ID NO: 1222121 - RNA, 16 nt, Human
uuuugucauauaagau

SEQ ID NO: 1222122 - RNA, 19 nt, Human
uuuuguagagccagggucu

SEQ ID NO: 1222123 - RNA, 15 nt, Human
uuuuggucuguguga

SEQ ID NO: 1222124 - RNA, 14 nt, Human
uuuuggcugcugaa

SEQ ID NO: 1222125 - RNA, 20 nt, Human
uuuugacaaggggcaguggu

SEQ ID NO: 1222126 - RNA, 13 nt, Human
gcggacagccacg

SEQ ID NO: 1222127 - RNA, 11 nt, Human
gcggacagcca

SEQ ID NO: 1222128 - RNA, 18 nt, Human
gcgccuacaggagugagc

SEQ ID NO: 1222129 - RNA, 15 nt, Human
gcgccuacaggagug

SEQ ID NO: 1222130 - RNA, 19 nt, Human
gcgucucauacucaccuca

SEQ ID NO: 1222131 - RNA, 16 nt, Human
gcggacagccacggcc

SEQ ID NO: 1222132 - RNA, 15 nt, Human
gcggacagccacggc

SEQ ID NO: 1222133 - RNA, 13 nt, Human
gcuaagagggagg

SEQ ID NO: 1222134 - RNA, 22 nt, Human
gcuacacaggggaaaagaggag

SEQ ID NO: 1222135 - RNA, 14 nt, Human
gcuacacaggggaa

SEQ ID NO: 1222136 - RNA, 20 nt, Human
gcuacacacugcauguuugu

SEQ ID NO: 1222137 - RNA, 13 nt, Human
gcuacacacugca

SEQ ID NO: 1222138 - RNA, 21 nt, Human
gcuaagagggagggagggcuc

SEQ ID NO: 1222139 - RNA, 20 nt, Human
gcuaagagggagggagggcu

SEQ ID NO: 1222140 - RNA, 20 nt, Human
gcuaccuuuguauucucucc

SEQ ID NO: 1222141 - RNA, 16 nt, Human
gcuaccuuuguauucu

SEQ ID NO: 1222142 - RNA, 16 nt, Human
gcuaggaacacuccuu

SEQ ID NO: 1222143 - RNA, 15 nt, Human
gcuaggaacacuccu

SEQ ID NO: 1222144 - RNA, 23 nt, Human
gcgacaaugcaaaccaucauuga

SEQ ID NO: 1222145 - RNA, 13 nt, Human
gccuuuggcuuca

SEQ ID NO: 1222146 - RNA, 21 nt, Human
gccuuccaggggugggacacc

SEQ ID NO: 1222147 - RNA, 16 nt, Human
gccuuccagggguggg

SEQ ID NO: 1222148 - RNA, 15 nt, Human
gccuuccaggggugg

SEQ ID NO: 1222149 - RNA, 20 nt, Human
gccuuauggaacacucugag

SEQ ID NO: 1222150 - RNA, 19 nt, Human
gccuuauggaacacucuga

SEQ ID NO: 1222151 - RNA, 18 nt, Human
gccuuauggaacacucug

SEQ ID NO: 1222152 - RNA, 16 nt, Human
gccuuauggaacacuc

SEQ ID NO: 1222153 - RNA, 12 nt, Human
gccuuccagggg

SEQ ID NO: 1222154 - RNA, 22 nt, Human
gccugggggcugggcagaggaa

SEQ ID NO: 1222155 - RNA, 21 nt, Human
gccugguggcagcugcggucc

SEQ ID NO: 1222156 - RNA, 19 nt, Human
gccugguggcagcugcggu

SEQ ID NO: 1222157 - RNA, 14 nt, Human
gccugguggcagcu

SEQ ID NO: 1222158 - RNA, 18 nt, Human
gccugguggcagcugcgg

SEQ ID NO: 1222159 - RNA, 13 nt, Human
gccugguggcagc

SEQ ID NO: 1222160 - RNA, 14 nt, Human
gccuuauggaacac

SEQ ID NO: 1222161 - RNA, 10 nt, Human
gccuuaugga

SEQ ID NO: 1222162 - RNA, 20 nt, Human
gccuuagaagucacacagua

SEQ ID NO: 1222163 - RNA, 19 nt, Human
gccuuacccucauguucuu

SEQ ID NO: 1222164 - RNA, 19 nt, Human
gccuuagaagucacacagu

SEQ ID NO: 1222165 - RNA, 18 nt, Human
gccuuagaagucacacag

SEQ ID NO: 1222166 - RNA, 17 nt, Human
gccuuagaagucacaca

SEQ ID NO: 1222167 - RNA, 18 nt, Human
gccuuacccucauguucu

SEQ ID NO: 1222168 - RNA, 21 nt, Human
gccuuacacaaugguuuucuu

SEQ ID NO: 1222169 - RNA, 20 nt, Human
gccuuacacaaugguuuucu

SEQ ID NO: 1222170 - RNA, 20 nt, Human
gccucccgaguagcugggac

SEQ ID NO: 1222171 - RNA, 19 nt, Human
gccucccgaguagcuggga

SEQ ID NO: 1222172 - RNA, 18 nt, Human
gccucccgaguagcuggg

SEQ ID NO: 1222173 - RNA, 17 nt, Human
gccucccaucacccgcu

SEQ ID NO: 1222174 - RNA, 16 nt, Human
gccucccaucacccgc

SEQ ID NO: 1222175 - RNA, 14 nt, Human
gccucccaucaccc

SEQ ID NO: 1222176 - RNA, 21 nt, Human
gccucccaacucaccccagcc

SEQ ID NO: 1222177 - RNA, 19 nt, Human
gccucccaacucaccccag

SEQ ID NO: 1222178 - RNA, 18 nt, Human
gccucccaacucacccca

SEQ ID NO: 1222179 - RNA, 17 nt, Human
gccucccaacucacccc

SEQ ID NO: 1222180 - RNA, 16 nt, Human
gccucccaacucaccc

SEQ ID NO: 1222181 - RNA, 13 nt, Human
gccucccaacuca

SEQ ID NO: 1222182 - RNA, 19 nt, Human
gccucccaaagugcuggga

SEQ ID NO: 1222183 - RNA, 17 nt, Human
gccucagcauccuggca

SEQ ID NO: 1222184 - RNA, 18 nt, Human
gccucccaaagugcuggg

SEQ ID NO: 1222185 - RNA, 16 nt, Human
gccucagcauccuggc

SEQ ID NO: 1222186 - RNA, 15 nt, Human
gccucagcauccugg

SEQ ID NO: 1222187 - RNA, 21 nt, Human
gccucacaguccuuaccagca

SEQ ID NO: 1222188 - RNA, 18 nt, Human
gccucacaguccuuacca

SEQ ID NO: 1222189 - RNA, 14 nt, Human
gccucucucaggcc

SEQ ID NO: 1222190 - RNA, 13 nt, Human
gccucucucaggc

SEQ ID NO: 1222191 - RNA, 18 nt, Human
gccucugacacacagcuc

SEQ ID NO: 1222192 - RNA, 17 nt, Human
gccucugacacacagcu

SEQ ID NO: 1222193 - RNA, 16 nt, Human
gccucucucaggccaa

SEQ ID NO: 1222194 - RNA, 14 nt, Human
gccucugcacuccc

SEQ ID NO: 1222195 - RNA, 21 nt, Human
gccucugacacacagcucugu

SEQ ID NO: 1222196 - RNA, 20 nt, Human
gccucugacacacagcucug

SEQ ID NO: 1222197 - RNA, 19 nt, Human
gccucugacacacagcucu

SEQ ID NO: 1222198 - RNA, 15 nt, Human
gccugcaagggagug

SEQ ID NO: 1222199 - RNA, 13 nt, Human
gccugcaagggag

SEQ ID NO: 1222200 - RNA, 18 nt, Human
gccucugccucugacaca

SEQ ID NO: 1222201 - RNA, 13 nt, Human
gccucugccucug

SEQ ID NO: 1222202 - RNA, 12 nt, Human
gccucugccucu

SEQ ID NO: 1222203 - RNA, 15 nt, Human
gccucugcacucccc

SEQ ID NO: 1222204 - RNA, 17 nt, Human
gccucacaguccuuacc

SEQ ID NO: 1222205 - RNA, 13 nt, Human
gccucacaguccu

SEQ ID NO: 1222206 - RNA, 19 nt, Human
gccucaaccuccugggcua

SEQ ID NO: 1222207 - RNA, 18 nt, Human
gccucaaccuccugggcu

SEQ ID NO: 1222208 - RNA, 17 nt, Human
gccgucuaccugagggg

SEQ ID NO: 1222209 - RNA, 16 nt, Human
gccgucuaccugaggg

SEQ ID NO: 1222210 - RNA, 15 nt, Human
gccgucuaccugagg

SEQ ID NO: 1222211 - RNA, 20 nt, Human
gccguguaaccauggaccca

SEQ ID NO: 1222212 - RNA, 18 nt, Human
gccgucuaccugaggggc

SEQ ID NO: 1222213 - RNA, 18 nt, Human
gcccuucucuccagcccc

SEQ ID NO: 1222214 - RNA, 17 nt, Human
gcccuucucuccagccc

SEQ ID NO: 1222215 - RNA, 16 nt, Human
gcccuucucuccagcc

SEQ ID NO: 1222216 - RNA, 14 nt, Human
gcccuucucuccag

SEQ ID NO: 1222217 - RNA, 13 nt, Human
gccgcagcccugc

SEQ ID NO: 1222218 - RNA, 12 nt, Human
gccgcagcccug

SEQ ID NO: 1222219 - RNA, 11 nt, Human
gccgcagcccu

SEQ ID NO: 1222220 - RNA, 17 nt, Human
gccgagauugcaccacu

SEQ ID NO: 1222221 - RNA, 22 nt, Human
gccgagaucacgccacugcacu

SEQ ID NO: 1222222 - RNA, 21 nt, Human
gccgagaucacgccacugcac

SEQ ID NO: 1222223 - RNA, 20 nt, Human
gccgagaucacgccacugca

SEQ ID NO: 1222224 - RNA, 21 nt, Human
gccgggcgcgguggcucacgc

SEQ ID NO: 1222225 - RNA, 14 nt, Human
gccauccagguuca

SEQ ID NO: 1222226 - RNA, 14 nt, Human
gccaugcuccuggc

SEQ ID NO: 1222227 - RNA, 23 nt, Human
gccaguaaaugggggugcauuug

SEQ ID NO: 1222228 - RNA, 15 nt, Human
gccaggcuggucuca

SEQ ID NO: 1222229 - RNA, 13 nt, Human
gccaggcuggucu

SEQ ID NO: 1222230 - RNA, 17 nt, Human
gcccaccuuggcucaag

SEQ ID NO: 1222231 - RNA, 16 nt, Human
gcccaccuuggcucaa

SEQ ID NO: 1222232 - RNA, 15 nt, Human
gcccaccuuggcuca

SEQ ID NO: 1222233 - RNA, 13 nt, Human
gcccaccuuggcu

SEQ ID NO: 1222234 - RNA, 24 nt, Human
gcccaccuggccucugcacucccc

SEQ ID NO: 1222235 - RNA, 21 nt, Human
gcccaccuggccucugcacuc

SEQ ID NO: 1222236 - RNA, 20 nt, Human
gcccaccuggccucugcacu

SEQ ID NO: 1222237 - RNA, 17 nt, Human
gcccaccuggccucugc

SEQ ID NO: 1222238 - RNA, 16 nt, Human
gcccaccuggccucug

SEQ ID NO: 1222239 - RNA, 15 nt, Human
gcccaccuggccucu

SEQ ID NO: 1222240 - RNA, 16 nt, Human
gccaugggccuccugu

SEQ ID NO: 1222241 - RNA, 15 nt, Human
gccaugggccuccug

SEQ ID NO: 1222242 - RNA, 24 nt, Human
gccaugcuccuggcccacugcauc

SEQ ID NO: 1222243 - RNA, 20 nt, Human
gccaggagccuccugcccuu

SEQ ID NO: 1222244 - RNA, 19 nt, Human
gccaggagccuccugcccu

SEQ ID NO: 1222245 - RNA, 16 nt, Human
gccaggagccuccugc

SEQ ID NO: 1222246 - RNA, 14 nt, Human
gccaggagccuccu

SEQ ID NO: 1222247 - RNA, 15 nt, Human
gccaggaagccagca

SEQ ID NO: 1222248 - RNA, 14 nt, Human
gccaggaagccagc

SEQ ID NO: 1222249 - RNA, 13 nt, Human
gccaggaagccag

SEQ ID NO: 1222250 - RNA, 12 nt, Human
gccaggaagcca

SEQ ID NO: 1222251 - RNA, 20 nt, Human
gccagcugcuugggcuucau

SEQ ID NO: 1222252 - RNA, 18 nt, Human
gccagcugcuugggcuuc

SEQ ID NO: 1222253 - RNA, 17 nt, Human
gccagcugcuugggcuu

SEQ ID NO: 1222254 - RNA, 22 nt, Human
gccagccgagauagccaaggcc

SEQ ID NO: 1222255 - RNA, 16 nt, Human
gccagauuucacucuc

SEQ ID NO: 1222256 - RNA, 13 nt, Human
gccagauuucacu

SEQ ID NO: 1222257 - RNA, 24 nt, Human
gccagauucuuuccugaggcuggg

SEQ ID NO: 1222258 - RNA, 20 nt, Human
gccagauucuuuccugaggc

SEQ ID NO: 1222259 - RNA, 15 nt, Human
gccagaugcaccagc

SEQ ID NO: 1222260 - RNA, 14 nt, Human
gccagaugcaccag

SEQ ID NO: 1222261 - RNA, 17 nt, Human
gccagagggagugacag

SEQ ID NO: 1222262 - RNA, 22 nt, Human
gccagagacacaagccuucggc

SEQ ID NO: 1222263 - RNA, 21 nt, Human
gccagagacacaagccuucgg

SEQ ID NO: 1222264 - RNA, 22 nt, Human
gccacugcaccgggccacagag

SEQ ID NO: 1222265 - RNA, 21 nt, Human
gccacugcaccgggccacaga

SEQ ID NO: 1222266 - RNA, 20 nt, Human
gccacugcaccgggccacag

SEQ ID NO: 1222267 - RNA, 20 nt, Human
gccaaggccaaaggaagcac

SEQ ID NO: 1222268 - RNA, 24 nt, Human
gccaaggccaaaggaagcacaugc

SEQ ID NO: 1222269 - RNA, 21 nt, Human
gcccuccaagaccuucuccuu

SEQ ID NO: 1222270 - RNA, 19 nt, Human
gcccuccaagaccuucucc

SEQ ID NO: 1222271 - RNA, 12 nt, Human
gcccgggcucug

SEQ ID NO: 1222272 - RNA, 23 nt, Human
gcccuccaagaccuucuccuuca

SEQ ID NO: 1222273 - RNA, 22 nt, Human
gcccuccaagaccuucuccuuc

SEQ ID NO: 1222274 - RNA, 16 nt, Human
gcccugcagagggcac

SEQ ID NO: 1222275 - RNA, 15 nt, Human
gcccugcagagggca

SEQ ID NO: 1222276 - RNA, 14 nt, Human
gcccugcagagggc

SEQ ID NO: 1222277 - RNA, 13 nt, Human
gcccugcagaggg

SEQ ID NO: 1222278 - RNA, 14 nt, Human
gcccugagcuuucu

SEQ ID NO: 1222279 - RNA, 19 nt, Human
gcccucugcccacucccug

SEQ ID NO: 1222280 - RNA, 18 nt, Human
gcccucugcccacucccu

SEQ ID NO: 1222281 - RNA, 16 nt, Human
gcccucugcccacucc

SEQ ID NO: 1222282 - RNA, 13 nt, Human
gcccucugcccac

SEQ ID NO: 1222283 - RNA, 17 nt, Human
gccccuguucuggcaga

SEQ ID NO: 1222284 - RNA, 14 nt, Human
gccccucagggucc

SEQ ID NO: 1222285 - RNA, 22 nt, Human
gccccgaggccuucucugaagg

SEQ ID NO: 1222286 - RNA, 18 nt, Human
gccccgaggccuucucug

SEQ ID NO: 1222287 - RNA, 15 nt, Human
gccccgaggccuucu

SEQ ID NO: 1222288 - RNA, 18 nt, Human
gccccucagggucccugg

SEQ ID NO: 1222289 - RNA, 16 nt, Human
gccccucagggucccu

SEQ ID NO: 1222290 - RNA, 15 nt, Human
gccccauucugccug

SEQ ID NO: 1222291 - RNA, 14 nt, Human
gccccauucugccu

SEQ ID NO: 1222292 - RNA, 22 nt, Human
gccccauccucuguacagagcc

SEQ ID NO: 1222293 - RNA, 14 nt, Human
gccccauccucugu

SEQ ID NO: 1222294 - RNA, 13 nt, Human
gccccauccucug

SEQ ID NO: 1222295 - RNA, 12 nt, Human
gccccagugccc

SEQ ID NO: 1222296 - RNA, 15 nt, Human
gccccagugcccaca

SEQ ID NO: 1222297 - RNA, 14 nt, Human
gccccagugcccac

SEQ ID NO: 1222298 - RNA, 13 nt, Human
gccccagugccca

SEQ ID NO: 1222299 - RNA, 18 nt, Human
gccccaucccaaacccuu

SEQ ID NO: 1222300 - RNA, 12 nt, Human
gcccaggcuggc

SEQ ID NO: 1222301 - RNA, 23 nt, Human
gcccaggccccugccacccuggg

SEQ ID NO: 1222302 - RNA, 21 nt, Human
gcccagagaggguggugaccu

SEQ ID NO: 1222303 - RNA, 13 nt, Human
gcccaggccuccu

SEQ ID NO: 1222304 - RNA, 17 nt, Human
gcauuaucuagauacug

SEQ ID NO: 1222305 - RNA, 19 nt, Human
gcauuaucuagauacugua

SEQ ID NO: 1222306 - RNA, 16 nt, Human
gcauuuguuugaacug

SEQ ID NO: 1222307 - RNA, 17 nt, Human
gcauuugcugaauacag

SEQ ID NO: 1222308 - RNA, 14 nt, Human
gcauuugcugaaua

SEQ ID NO: 1222309 - RNA, 13 nt, Human
gcauuugcugaau

SEQ ID NO: 1222310 - RNA, 12 nt, Human
gccaaaggaagc

SEQ ID NO: 1222311 - RNA, 22 nt, Human
gccaaagcuaggccuggccaga

SEQ ID NO: 1222312 - RNA, 16 nt, Human
gccaaagcuaggccug

SEQ ID NO: 1222313 - RNA, 19 nt, Human
gccaaagccuccuccagcc

SEQ ID NO: 1222314 - RNA, 16 nt, Human
gccaaagccuccucca

SEQ ID NO: 1222315 - RNA, 20 nt, Human
gccaaagccaaagcuaggcc

SEQ ID NO: 1222316 - RNA, 19 nt, Human
gccaaacucaccugccccu

SEQ ID NO: 1222317 - RNA, 16 nt, Human
gccaaacucaccugcc

SEQ ID NO: 1222318 - RNA, 14 nt, Human
gccaaacucaccug

SEQ ID NO: 1222319 - RNA, 18 nt, Human
gcauuuguuugaacugau

SEQ ID NO: 1222320 - RNA, 18 nt, Human
gcaugaaguaauaugcac

SEQ ID NO: 1222321 - RNA, 18 nt, Human
gcaugcgggcuuccuccu

SEQ ID NO: 1222322 - RNA, 22 nt, Human
gcauguucucugaggacacuaa

SEQ ID NO: 1222323 - RNA, 21 nt, Human
gcauguucucugaggacacua

SEQ ID NO: 1222324 - RNA, 15 nt, Human
gcauguucucugagg

SEQ ID NO: 1222325 - RNA, 22 nt, Human
gcagggcucagcggggacagcu

SEQ ID NO: 1222326 - RNA, 18 nt, Human
gcagggucucacucuguc

SEQ ID NO: 1222327 - RNA, 21 nt, Human
gcagggcucagcggggacagc

SEQ ID NO: 1222328 - RNA, 19 nt, Human
gcagggcucagcggggaca

SEQ ID NO: 1222329 - RNA, 17 nt, Human
gcaggcagccaggccac

SEQ ID NO: 1222330 - RNA, 16 nt, Human
gcaggcagccaggcca

SEQ ID NO: 1222331 - RNA, 15 nt, Human
gcaggcagccaggcc

SEQ ID NO: 1222332 - RNA, 20 nt, Human
gcaggucuugaacuccuggc

SEQ ID NO: 1222333 - RNA, 19 nt, Human
gcaggucuugaacuccugg

SEQ ID NO: 1222334 - RNA, 22 nt, Human
gcagguccaggguuugaguuca

SEQ ID NO: 1222335 - RNA, 16 nt, Human
gcagugcaugcugucc

SEQ ID NO: 1222336 - RNA, 15 nt, Human
gcagugcaugcuguc

SEQ ID NO: 1222337 - RNA, 23 nt, Human
gcaguggugguuuucuguucuuu

SEQ ID NO: 1222338 - RNA, 15 nt, Human
gcagugggagcugcc

SEQ ID NO: 1222339 - RNA, 14 nt, Human
gcagugggagcugc

SEQ ID NO: 1222340 - RNA, 13 nt, Human
gcagugggagcug

SEQ ID NO: 1222341 - RNA, 17 nt, Human
gcaguuauuaacacuaa

SEQ ID NO: 1222342 - RNA, 22 nt, Human
gcagauacaggaaaagcugcug

SEQ ID NO: 1222343 - RNA, 21 nt, Human
gcagaguugaagacagagcua

SEQ ID NO: 1222344 - RNA, 17 nt, Human
gcagacaguuaagagaa

SEQ ID NO: 1222345 - RNA, 24 nt, Human
gcagccccauucugccugcccagg

SEQ ID NO: 1222346 - RNA, 21 nt, Human
gcagccccauucugccugccc

SEQ ID NO: 1222347 - RNA, 19 nt, Human
gcagccccauucugccugc

SEQ ID NO: 1222348 - RNA, 18 nt, Human
gcagccccauucugccug

SEQ ID NO: 1222349 - RNA, 23 nt, Human
gcagcaauaaagcagcguuucua

SEQ ID NO: 1222350 - RNA, 16 nt, Human
gcagcaauaaagcagc

SEQ ID NO: 1222351 - RNA, 13 nt, Human
gcagcccugcaga

SEQ ID NO: 1222352 - RNA, 21 nt, Human
gcagccccuguucuggcagag

SEQ ID NO: 1222353 - RNA, 20 nt, Human
gcagccccuguucuggcaga

SEQ ID NO: 1222354 - RNA, 14 nt, Human
gcaggcagccaggc

SEQ ID NO: 1222355 - RNA, 13 nt, Human
gcaggcagccagg

SEQ ID NO: 1222356 - RNA, 12 nt, Human
gcaggcagccag

SEQ ID NO: 1222357 - RNA, 23 nt, Human
gcaggaggaucacuugaguccag

SEQ ID NO: 1222358 - RNA, 15 nt, Human
gcagcucaccucucc

SEQ ID NO: 1222359 - RNA, 14 nt, Human
gcagcucaccucuc

SEQ ID NO: 1222360 - RNA, 15 nt, Human
gcagccuuggcaaac

SEQ ID NO: 1222361 - RNA, 17 nt, Human
gcagcccugcagagggc

SEQ ID NO: 1222362 - RNA, 16 nt, Human
gcagcccugcagaggg

SEQ ID NO: 1222363 - RNA, 15 nt, Human
gcagcccugcagagg

SEQ ID NO: 1222364 - RNA, 14 nt, Human
gcagcccugcagag

SEQ ID NO: 1222365 - RNA, 12 nt, Human
gcacgauuucug

SEQ ID NO: 1222366 - RNA, 19 nt, Human
gcaccuuagacagucccug

SEQ ID NO: 1222367 - RNA, 18 nt, Human
gcaccuuagacagucccu

SEQ ID NO: 1222368 - RNA, 17 nt, Human
gcaccuuagacaguccc

SEQ ID NO: 1222369 - RNA, 14 nt, Human
gcaccuuagacagu

SEQ ID NO: 1222370 - RNA, 22 nt, Human
gcaccuggaauauauaaccagu

SEQ ID NO: 1222371 - RNA, 21 nt, Human
gcaccuggaauauauaaccag

SEQ ID NO: 1222372 - RNA, 18 nt, Human
gcaccuggaauauauaac

SEQ ID NO: 1222373 - RNA, 15 nt, Human
gcacccucaggcagg

SEQ ID NO: 1222374 - RNA, 19 nt, Human
gcacccggccccugcuggu

SEQ ID NO: 1222375 - RNA, 22 nt, Human
gcacccaccaucaugucuggcu

SEQ ID NO: 1222376 - RNA, 16 nt, Human
gcaccagcagccugga

SEQ ID NO: 1222377 - RNA, 15 nt, Human
gcaccagcagccugg

SEQ ID NO: 1222378 - RNA, 22 nt, Human
gcaccacugcacuccagccugg

SEQ ID NO: 1222379 - RNA, 21 nt, Human
gcaccacugcacuccagccug

SEQ ID NO: 1222380 - RNA, 14 nt, Human
gcaauggcagccuu

SEQ ID NO: 1222381 - RNA, 13 nt, Human
gcaauggcagccu

SEQ ID NO: 1222382 - RNA, 12 nt, Human
gcaauggcagcc

SEQ ID NO: 1222383 - RNA, 23 nt, Human
gcagacaggcaagcaccuccugc

SEQ ID NO: 1222384 - RNA, 19 nt, Human
gcagacaggcaagcaccuc

SEQ ID NO: 1222385 - RNA, 18 nt, Human
gcagacaggaccagggau

SEQ ID NO: 1222386 - RNA, 15 nt, Human
gcagacaggaccagg

SEQ ID NO: 1222387 - RNA, 13 nt, Human
gcagacaggacca

SEQ ID NO: 1222388 - RNA, 12 nt, Human
gcagacaggacc

SEQ ID NO: 1222389 - RNA, 18 nt, Human
gcacugcuuccagugagg

SEQ ID NO: 1222390 - RNA, 16 nt, Human
gcacugcuuccaguga

SEQ ID NO: 1222391 - RNA, 20 nt, Human
gcacugcuuccagugaggcu

SEQ ID NO: 1222392 - RNA, 22 nt, Human
gcacugcuuccagugaggcucu

SEQ ID NO: 1222393 - RNA, 18 nt, Human
gauuuccguuaaaauacc

SEQ ID NO: 1222394 - RNA, 15 nt, Human
gauuuccguuaaaau

SEQ ID NO: 1222395 - RNA, 21 nt, Human
gauuucuguuuagauaauaca

SEQ ID NO: 1222396 - RNA, 19 nt, Human
gauuucuguuuagauaaua

SEQ ID NO: 1222397 - RNA, 11 nt, Human
gauuucuguuu

SEQ ID NO: 1222398 - RNA, 19 nt, Human
gauuuguuaaugauagcua

SEQ ID NO: 1222399 - RNA, 19 nt, Human
gauucauauuuacuucuua

SEQ ID NO: 1222400 - RNA, 18 nt, Human
gauucauauuuacuucuu

SEQ ID NO: 1222401 - RNA, 17 nt, Human
gauucauauuuacuucu

SEQ ID NO: 1222402 - RNA, 15 nt, Human
gauucagcucugcaa

SEQ ID NO: 1222403 - RNA, 13 nt, Human
gauucagcucugc

SEQ ID NO: 1222404 - RNA, 19 nt, Human
gauucagacagcugccugg

SEQ ID NO: 1222405 - RNA, 23 nt, Human
gauggggcugcaccggcuggccu

SEQ ID NO: 1222406 - RNA, 24 nt, Human
gauggggcccugccuccuuuguga

SEQ ID NO: 1222407 - RNA, 23 nt, Human
gauugcaccacugcacuccagcc

SEQ ID NO: 1222408 - RNA, 16 nt, Human
gauugcaccacugcac

SEQ ID NO: 1222409 - RNA, 21 nt, Human
gauugcaacaggcugggcuuc

SEQ ID NO: 1222410 - RNA, 20 nt, Human
gauugcaacaggcugggcuu

SEQ ID NO: 1222411 - RNA, 18 nt, Human
gauucuuuccugaggcug

SEQ ID NO: 1222412 - RNA, 17 nt, Human
gauucuuuccugaggcu

SEQ ID NO: 1222413 - RNA, 16 nt, Human
gauucuuuccugaggc

SEQ ID NO: 1222414 - RNA, 21 nt, Human
gauucccaagcucugcuccuc

SEQ ID NO: 1222415 - RNA, 20 nt, Human
gauucccaagcucugcuccu

SEQ ID NO: 1222416 - RNA, 19 nt, Human
gauucccaagcucugcucc

SEQ ID NO: 1222417 - RNA, 16 nt, Human
gcaaaguaucccuacu

SEQ ID NO: 1222418 - RNA, 17 nt, Human
gcaagaauugaagcagg

SEQ ID NO: 1222419 - RNA, 23 nt, Human
gcaagacgcugugcugcccugcc

SEQ ID NO: 1222420 - RNA, 22 nt, Human
gcaagacgcugugcugcccugc

SEQ ID NO: 1222421 - RNA, 21 nt, Human
gcaagacgcugugcugcccug

SEQ ID NO: 1222422 - RNA, 20 nt, Human
gcaagacgcugugcugcccu

SEQ ID NO: 1222423 - RNA, 14 nt, Human
gcaagacgcugugc

SEQ ID NO: 1222424 - RNA, 23 nt, Human
gcaaugcuggcuguuggcugggg

SEQ ID NO: 1222425 - RNA, 22 nt, Human
gcaaugcuggcuguuggcuggg

SEQ ID NO: 1222426 - RNA, 14 nt, Human
gcaaugcuggcugu

SEQ ID NO: 1222427 - RNA, 13 nt, Human
gcaaugcuggcug

SEQ ID NO: 1222428 - RNA, 23 nt, Human
gcaaugaccuuucaauaggaaaa

SEQ ID NO: 1222429 - RNA, 22 nt, Human
gcaaugaccuuucaauaggaaa

SEQ ID NO: 1222430 - RNA, 20 nt, Human
gcaaugaccuuucaauagga

SEQ ID NO: 1222431 - RNA, 17 nt, Human
gcaaugaccuuucaaua

SEQ ID NO: 1222432 - RNA, 17 nt, Human
gcaaucaaaucugcuuu

SEQ ID NO: 1222433 - RNA, 15 nt, Human
gcaaucaaaucugcu

SEQ ID NO: 1222434 - RNA, 14 nt, Human
gcaaggucauuuuu

SEQ ID NO: 1222435 - RNA, 13 nt, Human
gcaaggcugucaa

SEQ ID NO: 1222436 - RNA, 11 nt, Human
gcaaggcuguc

SEQ ID NO: 1222437 - RNA, 18 nt, Human
gcaaggagauuuacaacu

SEQ ID NO: 1222438 - RNA, 18 nt, Human
gaucuuugcagacaggca

SEQ ID NO: 1222439 - RNA, 22 nt, Human
gauccugagccagauuucacuc

SEQ ID NO: 1222440 - RNA, 16 nt, Human
gaucccucauccucau

SEQ ID NO: 1222441 - RNA, 15 nt, Human
gaucccucauccuca

SEQ ID NO: 1222442 - RNA, 22 nt, Human
gauggauuuccagccaaagccu

SEQ ID NO: 1222443 - RNA, 20 nt, Human
gaugccugguggcagcugcg

SEQ ID NO: 1222444 - RNA, 19 nt, Human
gaugccugguggcagcugc

SEQ ID NO: 1222445 - RNA, 18 nt, Human
gaugccugguggcagcug

SEQ ID NO: 1222446 - RNA, 22 nt, Human
gauggggcccugccuccuuugu

SEQ ID NO: 1222447 - RNA, 14 nt, Human
gauggggcccugcc

SEQ ID NO: 1222448 - RNA, 13 nt, Human
gauggggcccugc

SEQ ID NO: 1222449 - RNA, 19 nt, Human
gaugcagccucacaguccu

SEQ ID NO: 1222450 - RNA, 14 nt, Human
gaugcagccucaca

SEQ ID NO: 1222451 - RNA, 12 nt, Human
gaugcagccuca

SEQ ID NO: 1222452 - RNA, 14 nt, Human
gaugcaccagcccu

SEQ ID NO: 1222453 - RNA, 13 nt, Human
gaugcaccagccc

SEQ ID NO: 1222454 - RNA, 22 nt, Human
gaugcacagaguuguuacauuu

SEQ ID NO: 1222455 - RNA, 19 nt, Human
gauacaggaaaagcugcug

SEQ ID NO: 1222456 - RNA, 18 nt, Human
gauacaggaaaagcugcu

SEQ ID NO: 1222457 - RNA, 22 nt, Human
gauagcacagacccugcccugu

SEQ ID NO: 1222458 - RNA, 21 nt, Human
gauagcacagacccugcccug

SEQ ID NO: 1222459 - RNA, 22 nt, Human
gauaauacaccacuacauucug

SEQ ID NO: 1222460 - RNA, 21 nt, Human
gauaauacaccacuacauucu

SEQ ID NO: 1222461 - RNA, 18 nt, Human
gauaauacaccacuacau

SEQ ID NO: 1222462 - RNA, 21 nt, Human
gaggaaggaaacccagcucug

SEQ ID NO: 1222463 - RNA, 20 nt, Human
gaggaaggaaacccagcucu

SEQ ID NO: 1222464 - RNA, 19 nt, Human
gaggaaggaaacccagcuc

SEQ ID NO: 1222465 - RNA, 13 nt, Human
gaggaaggaaacc

SEQ ID NO: 1222466 - RNA, 21 nt, Human
gaucauccacugugccaugug

SEQ ID NO: 1222467 - RNA, 19 nt, Human
gaucauccacugugccaug

SEQ ID NO: 1222468 - RNA, 17 nt, Human
gaucauccacugugcca

SEQ ID NO: 1222469 - RNA, 18 nt, Human
gaucacgccacugcacua

SEQ ID NO: 1222470 - RNA, 22 nt, Human
gaucagucugauucccaagcuc

SEQ ID NO: 1222471 - RNA, 15 nt, Human
gaucagccugggcaa

SEQ ID NO: 1222472 - RNA, 12 nt, Human
gaucagccuggg

SEQ ID NO: 1222473 - RNA, 12 nt, Human
gaucacggcuca

SEQ ID NO: 1222474 - RNA, 17 nt, Human
gagcuagcagcagggag

SEQ ID NO: 1222475 - RNA, 15 nt, Human
gagcuagcagcaggg

SEQ ID NO: 1222476 - RNA, 15 nt, Human
gagccugcaguuauu

SEQ ID NO: 1222477 - RNA, 15 nt, Human
gagcugaguggggga

SEQ ID NO: 1222478 - RNA, 17 nt, Human
gaggaaagcaaaggaga

SEQ ID NO: 1222479 - RNA, 16 nt, Human
gaggaaagcaaaggag

SEQ ID NO: 1222480 - RNA, 20 nt, Human
gagcuuugaaaauucagugg

SEQ ID NO: 1222481 - RNA, 22 nt, Human
gagcuuucugcuaucaaagagg

SEQ ID NO: 1222482 - RNA, 15 nt, Human
gagcugccuguucag

SEQ ID NO: 1222483 - RNA, 18 nt, Human
gaggaagccgcuggggcc

SEQ ID NO: 1222484 - RNA, 17 nt, Human
gaggaagccgcuggggc

SEQ ID NO: 1222485 - RNA, 14 nt, Human
gaggaagccgcugg

SEQ ID NO: 1222486 - RNA, 13 nt, Human
gaggaagccgcug

SEQ ID NO: 1222487 - RNA, 17 nt, Human
gaggaagagaaaaaaua

SEQ ID NO: 1222488 - RNA, 16 nt, Human
gaggaacaaggcaagg

SEQ ID NO: 1222489 - RNA, 14 nt, Human
gaggaacaaggcaa

SEQ ID NO: 1222490 - RNA, 12 nt, Human
gagccugcaguu

SEQ ID NO: 1222491 - RNA, 13 nt, Human
gagccuccugccc

SEQ ID NO: 1222492 - RNA, 13 nt, Human
gagccucagcauc

SEQ ID NO: 1222493 - RNA, 15 nt, Human
gagccucagcauccu

SEQ ID NO: 1222494 - RNA, 14 nt, Human
gagccucagcaucc

SEQ ID NO: 1222495 - RNA, 17 nt, Human
gagccucagcauccugg

SEQ ID NO: 1222496 - RNA, 22 nt, Human
gagccgagaucacgccacugca

SEQ ID NO: 1222497 - RNA, 21 nt, Human
gagccgagaucacgccacugc

SEQ ID NO: 1222498 - RNA, 20 nt, Human
gagccgagaucacgccacug

SEQ ID NO: 1222499 - RNA, 19 nt, Human
gagccgagaucacgccacu

SEQ ID NO: 1222500 - RNA, 11 nt, Human
gagcccacgcc

SEQ ID NO: 1222501 - RNA, 17 nt, Human
gagcccaccuuggcuca

SEQ ID NO: 1222502 - RNA, 15 nt, Human
gagcccaccuuggcu

SEQ ID NO: 1222503 - RNA, 13 nt, Human
gagcccaccuugg

SEQ ID NO: 1222504 - RNA, 20 nt, Human
gagccagauuucacucuccu

SEQ ID NO: 1222505 - RNA, 19 nt, Human
gagccagauuucacucucc

SEQ ID NO: 1222506 - RNA, 18 nt, Human
gagccagauuucacucuc

SEQ ID NO: 1222507 - RNA, 15 nt, Human
gagccagauuucacu

SEQ ID NO: 1222508 - RNA, 20 nt, Human
gagccacugcaccgggccac

SEQ ID NO: 1222509 - RNA, 19 nt, Human
gagccacugcaccgggcca

SEQ ID NO: 1222510 - RNA, 18 nt, Human
gagccacugcaccgggcc

SEQ ID NO: 1222511 - RNA, 22 nt, Human
gagcagccacauuccugaugcu

SEQ ID NO: 1222512 - RNA, 23 nt, Human
gagcagagaccaucccugaaggc

SEQ ID NO: 1222513 - RNA, 21 nt, Human
gagcagagaccaucccugaag

SEQ ID NO: 1222514 - RNA, 19 nt, Human
gagcagagaccaucccuga

SEQ ID NO: 1222515 - RNA, 18 nt, Human
gagcagagaccaucccug

SEQ ID NO: 1222516 - RNA, 17 nt, Human
gagcagagaccaucccu

SEQ ID NO: 1222517 - RNA, 21 nt, Human
gagauagccaaggccaaagga

SEQ ID NO: 1222518 - RNA, 20 nt, Human
gagauagccaaggccaaagg

SEQ ID NO: 1222519 - RNA, 22 nt, Human
gagaaugcacaaacagaggccg

SEQ ID NO: 1222520 - RNA, 21 nt, Human
gagaaugcacaaacagaggcc

SEQ ID NO: 1222521 - RNA, 20 nt, Human
gagaaugcacaaacagaggc

SEQ ID NO: 1222522 - RNA, 12 nt, Human
gagacagcccgg

SEQ ID NO: 1222523 - RNA, 19 nt, Human
gagacagaguuuucacucu

SEQ ID NO: 1222524 - RNA, 17 nt, Human
gagacacaagccuucgg

SEQ ID NO: 1222525 - RNA, 15 nt, Human
gagacacaagccuuc

SEQ ID NO: 1222526 - RNA, 21 nt, Human
gagaaaauggacguguuauga

SEQ ID NO: 1222527 - RNA, 16 nt, Human
gacuuggaagcuccgc

SEQ ID NO: 1222528 - RNA, 15 nt, Human
gacuuggaagcuccg

SEQ ID NO: 1222529 - RNA, 14 nt, Human
gacuuggaagcucc

SEQ ID NO: 1222530 - RNA, 19 nt, Human
gacucgcgacaaugcaaac

SEQ ID NO: 1222531 - RNA, 17 nt, Human
gacuccugcaggcagcc

SEQ ID NO: 1222532 - RNA, 23 nt, Human
gagaaaguacuucuccacccugc

SEQ ID NO: 1222533 - RNA, 17 nt, Human
gagagaagagaaugcac

SEQ ID NO: 1222534 - RNA, 21 nt, Human
gagagggugggagugggccca

SEQ ID NO: 1222535 - RNA, 18 nt, Human
gagaggggaacagacugg

SEQ ID NO: 1222536 - RNA, 13 nt, Human
gagaggggaacag

SEQ ID NO: 1222537 - RNA, 14 nt, Human
gagagccuuccagg

SEQ ID NO: 1222538 - RNA, 13 nt, Human
gagagccuuccag

SEQ ID NO: 1222539 - RNA, 24 nt, Human
gagacagcccgggcucugccuccc

SEQ ID NO: 1222540 - RNA, 23 nt, Human
gagacagcccgggcucugccucc

SEQ ID NO: 1222541 - RNA, 22 nt, Human
gagacagcccgggcucugccuc

SEQ ID NO: 1222542 - RNA, 21 nt, Human
gagacagcccgggcucugccu

SEQ ID NO: 1222543 - RNA, 20 nt, Human
gagacagcccgggcucugcc

SEQ ID NO: 1222544 - RNA, 19 nt, Human
gagacagcccgggcucugc

SEQ ID NO: 1222545 - RNA, 18 nt, Human
gagacagcccgggcucug

SEQ ID NO: 1222546 - RNA, 17 nt, Human
gagacagcccgggcucu

SEQ ID NO: 1222547 - RNA, 14 nt, Human
gagacagcccgggc

SEQ ID NO: 1222548 - RNA, 18 nt, Human
gagacucgcgacaaugca

SEQ ID NO: 1222549 - RNA, 16 nt, Human
gagacucgcgacaaug

SEQ ID NO: 1222550 - RNA, 12 nt, Human
gagaccaucccu

SEQ ID NO: 1222551 - RNA, 14 nt, Human
gagacucugucuca

SEQ ID NO: 1222552 - RNA, 21 nt, Human
gaccuuucaauaggaaaaacu

SEQ ID NO: 1222553 - RNA, 22 nt, Human
gaccuuuaagagaaaugagcug

SEQ ID NO: 1222554 - RNA, 20 nt, Human
gacguguuaugacuccagaa

SEQ ID NO: 1222555 - RNA, 17 nt, Human
gacguguuaugacucca

SEQ ID NO: 1222556 - RNA, 18 nt, Human
gacggagucccaccuugg

SEQ ID NO: 1222557 - RNA, 23 nt, Human
gacggagucccaccuuggcugca

SEQ ID NO: 1222558 - RNA, 21 nt, Human
gacggagucccaccuuggcug

SEQ ID NO: 1222559 - RNA, 17 nt, Human
gacuacucccccaggug

SEQ ID NO: 1222560 - RNA, 12 nt, Human
gacuacaggcac

SEQ ID NO: 1222561 - RNA, 22 nt, Human
gacguguuaugacuccagaauu

SEQ ID NO: 1222562 - RNA, 16 nt, Human
gacuccugcaggcagc

SEQ ID NO: 1222563 - RNA, 15 nt, Human
gacuccugcaggcag

SEQ ID NO: 1222564 - RNA, 14 nt, Human
gacucauucuucug

SEQ ID NO: 1222565 - RNA, 15 nt, Human
gaccgugaggccaga

SEQ ID NO: 1222566 - RNA, 14 nt, Human
gaccgugaggccag

SEQ ID NO: 1222567 - RNA, 17 nt, Human
gacccugcccugugggc

SEQ ID NO: 1222568 - RNA, 21 nt, Human
gaccugaggcccuucucucca

SEQ ID NO: 1222569 - RNA, 18 nt, Human
gaccugaggcccuucucu

SEQ ID NO: 1222570 - RNA, 15 nt, Human
gaccugaggcccuuc

SEQ ID NO: 1222571 - RNA, 13 nt, Human
gaccucaggccug

SEQ ID NO: 1222572 - RNA, 12 nt, Human
gaccucaggccu

SEQ ID NO: 1222573 - RNA, 11 nt, Human
gaccucaggcc

SEQ ID NO: 1222574 - RNA, 17 nt, Human
gacccaugcugcccugu

SEQ ID NO: 1222575 - RNA, 16 nt, Human
gacccaugcugcccug

SEQ ID NO: 1222576 - RNA, 15 nt, Human
gacccaugcugcccu

SEQ ID NO: 1222577 - RNA, 14 nt, Human
gacccaugcugccc

SEQ ID NO: 1222578 - RNA, 12 nt, Human
gacccacugcuu

SEQ ID NO: 1222579 - RNA, 11 nt, Human
gacccacugcu

SEQ ID NO: 1222580 - RNA, 16 nt, Human
gacccugcccuguggg

SEQ ID NO: 1222581 - RNA, 15 nt, Human
gacccugcccugugg

SEQ ID NO: 1222582 - RNA, 13 nt, Human
gacccugcccugu

SEQ ID NO: 1222583 - RNA, 22 nt, Human
gacccugaggcccagagggccu

SEQ ID NO: 1222584 - RNA, 21 nt, Human
gacccugaggcccagagggcc

SEQ ID NO: 1222585 - RNA, 20 nt, Human
gacccugaggcccagagggc

SEQ ID NO: 1222586 - RNA, 19 nt, Human
gacccugaggcccagaggg

SEQ ID NO: 1222587 - RNA, 13 nt, Human
gaccccuccaugu

SEQ ID NO: 1222588 - RNA, 23 nt, Human
gacacccugugauggggcccugc

SEQ ID NO: 1222589 - RNA, 22 nt, Human
gacacccugugauggggcccug

SEQ ID NO: 1222590 - RNA, 13 nt, Human
gacacccugugau

SEQ ID NO: 1222591 - RNA, 12 nt, Human
gacacccuguga

SEQ ID NO: 1222592 - RNA, 18 nt, Human
gacacaggcccggcucca

SEQ ID NO: 1222593 - RNA, 18 nt, Human
gacacuaaccacgcugga

SEQ ID NO: 1222594 - RNA, 17 nt, Human
gacacuaaccacgcugg

SEQ ID NO: 1222595 - RNA, 16 nt, Human
gacacuaaccacgcug

SEQ ID NO: 1222596 - RNA, 15 nt, Human
gacacuaaccacgcu

SEQ ID NO: 1222597 - RNA, 19 nt, Human
gacacgaauauugcugaug

SEQ ID NO: 1222598 - RNA, 18 nt, Human
gacacgaauauugcugau

SEQ ID NO: 1222599 - RNA, 17 nt, Human
gacacgaauauugcuga

SEQ ID NO: 1222600 - RNA, 15 nt, Human
gacacgaauauugcu

SEQ ID NO: 1222601 - RNA, 20 nt, Human
gacaccuugacagggcacac

SEQ ID NO: 1222602 - RNA, 18 nt, Human
gacaccuugacagggcac

SEQ ID NO: 1222603 - RNA, 17 nt, Human
gacaccuugacagggca

SEQ ID NO: 1222604 - RNA, 15 nt, Human
gacaccuugacaggg

SEQ ID NO: 1222605 - RNA, 17 nt, Human
gacacaggcccggcucc

SEQ ID NO: 1222606 - RNA, 15 nt, Human
gacacaggcccggcu

SEQ ID NO: 1222607 - RNA, 13 nt, Human
gacacacagcucu

SEQ ID NO: 1222608 - RNA, 19 nt, Human
gacaauuuauuauggcaca

SEQ ID NO: 1222609 - RNA, 13 nt, Human
gacaauuuauuau

SEQ ID NO: 1222610 - RNA, 12 nt, Human
gacaauuuauua

SEQ ID NO: 1222611 - RNA, 18 nt, Human
gacaaugcaaaccaucau

SEQ ID NO: 1222612 - RNA, 16 nt, Human
gacaaugcaaaccauc

SEQ ID NO: 1222613 - RNA, 12 nt, Human
gacaaugcaaac

SEQ ID NO: 1222614 - RNA, 21 nt, Human
gacaaugacuuacuguacaug

SEQ ID NO: 1222615 - RNA, 20 nt, Human
gacaaugacuuacuguacau

SEQ ID NO: 1222616 - RNA, 17 nt, Human
gacaaugacuuacugua

SEQ ID NO: 1222617 - RNA, 16 nt, Human
gacaaugacccagugg

SEQ ID NO: 1222618 - RNA, 22 nt, Human
gacaaggauugcuacuguccua

SEQ ID NO: 1222619 - RNA, 16 nt, Human
gaagucuuuguacaga

SEQ ID NO: 1222620 - RNA, 14 nt, Human
gaagucuuuguaca

SEQ ID NO: 1222621 - RNA, 21 nt, Human
gacaugucuuuucuugcauga

SEQ ID NO: 1222622 - RNA, 17 nt, Human
gacaugucuuuucuugc

SEQ ID NO: 1222623 - RNA, 23 nt, Human
gacauacuaaccagcagaaaugc

SEQ ID NO: 1222624 - RNA, 16 nt, Human
gacauacuaaccagca

SEQ ID NO: 1222625 - RNA, 15 nt, Human
gacauacuaaccagc

SEQ ID NO: 1222626 - RNA, 20 nt, Human
gacaggcauguucucugagg

SEQ ID NO: 1222627 - RNA, 19 nt, Human
gacaggcauguucucugag

SEQ ID NO: 1222628 - RNA, 18 nt, Human
gacaggcauguucucuga

SEQ ID NO: 1222629 - RNA, 18 nt, Human
gacaggcaaugcuggcug

SEQ ID NO: 1222630 - RNA, 17 nt, Human
gacaggcaaugcuggcu

SEQ ID NO: 1222631 - RNA, 16 nt, Human
gacaggcaaugcuggc

SEQ ID NO: 1222632 - RNA, 14 nt, Human
gacaggcaaugcug

SEQ ID NO: 1222633 - RNA, 15 nt, Human
gacagcugccuggga

SEQ ID NO: 1222634 - RNA, 14 nt, Human
gacagcugccuggg

SEQ ID NO: 1222635 - RNA, 13 nt, Human
gacagcugccugg

SEQ ID NO: 1222636 - RNA, 12 nt, Human
gacagcugccug

SEQ ID NO: 1222637 - RNA, 13 nt, Human
gacagccacggcc

SEQ ID NO: 1222638 - RNA, 14 nt, Human
gacagacacaggcc

SEQ ID NO: 1222639 - RNA, 21 nt, Human
gacacuaaccacgcuggaccu

SEQ ID NO: 1222640 - RNA, 20 nt, Human
gacacuaaccacgcuggacc

SEQ ID NO: 1222641 - RNA, 16 nt, Human
gacagacacaggcccg

SEQ ID NO: 1222642 - RNA, 15 nt, Human
gacagacacaggccc

SEQ ID NO: 1222643 - RNA, 17 nt, Human
gacagacacaggcccgg

SEQ ID NO: 1222644 - RNA, 16 nt, Human
gaagacuucaucccuc

SEQ ID NO: 1222645 - RNA, 15 nt, Human
gaagacuucaucccu

SEQ ID NO: 1222646 - RNA, 12 nt, Human
gaagagccuugc

SEQ ID NO: 1222647 - RNA, 19 nt, Human
gaagacuucaucccucugg

SEQ ID NO: 1222648 - RNA, 17 nt, Human
gaagacuucaucccucu

SEQ ID NO: 1222649 - RNA, 23 nt, Human
gaagauuuugaaauuuuuauuaa

SEQ ID NO: 1222650 - RNA, 22 nt, Human
gaacuuugaccucugcagcaau

SEQ ID NO: 1222651 - RNA, 16 nt, Human
gaacuuugaccucugc

SEQ ID NO: 1222652 - RNA, 17 nt, Human
gaacuugggccacugug

SEQ ID NO: 1222653 - RNA, 18 nt, Human
gaacuuggcgcugccccu

SEQ ID NO: 1222654 - RNA, 17 nt, Human
gaacuuuccaggaaggc

SEQ ID NO: 1222655 - RNA, 12 nt, Human
gaacuugguucc

SEQ ID NO: 1222656 - RNA, 17 nt, Human
gaacuuaaauaauguga

SEQ ID NO: 1222657 - RNA, 14 nt, Human
gaacuuaaauaaug

SEQ ID NO: 1222658 - RNA, 20 nt, Human
gaaccacaucuugcucugcu

SEQ ID NO: 1222659 - RNA, 18 nt, Human
gaaccacaucuugcucug

SEQ ID NO: 1222660 - RNA, 13 nt, Human
gaagggggcuggg

SEQ ID NO: 1222661 - RNA, 15 nt, Human
gaagggggcugggac

SEQ ID NO: 1222662 - RNA, 13 nt, Human
gaagucacacagu

SEQ ID NO: 1222663 - RNA, 21 nt, Human
gaaguaauaugcacacauuuu

SEQ ID NO: 1222664 - RNA, 20 nt, Human
gaaguaauaugcacacauuu

SEQ ID NO: 1222665 - RNA, 19 nt, Human
gaaguaauaugcacacauu

SEQ ID NO: 1222666 - RNA, 15 nt, Human
gaaggaacguccccu

SEQ ID NO: 1222667 - RNA, 22 nt, Human
gaaggaaacccagcucuggucc

SEQ ID NO: 1222668 - RNA, 21 nt, Human
gaaggaaacccagcucugguc

SEQ ID NO: 1222669 - RNA, 19 nt, Human
gaaggaagacuucaucccu

SEQ ID NO: 1222670 - RNA, 21 nt, Human
gaaggacauugcggacagcca

SEQ ID NO: 1222671 - RNA, 20 nt, Human
gaaggacauugcggacagcc

SEQ ID NO: 1222672 - RNA, 19 nt, Human
gaaggacauugcggacagc

SEQ ID NO: 1222673 - RNA, 20 nt, Human
gaaggaaacccagcucuggu

SEQ ID NO: 1222674 - RNA, 21 nt, Human
gaagccgcuggggccaguugg

SEQ ID NO: 1222675 - RNA, 20 nt, Human
gaagccgcuggggccaguug

SEQ ID NO: 1222676 - RNA, 18 nt, Human
gaagccgcuggggccagu

SEQ ID NO: 1222677 - RNA, 14 nt, Human
gaagccgcuggggc

SEQ ID NO: 1222678 - RNA, 20 nt, Human
gaaauaucugaaaauguaug

SEQ ID NO: 1222679 - RNA, 19 nt, Human
gaaauaucugaaaauguau

SEQ ID NO: 1222680 - RNA, 18 nt, Human
gaaauaucugaaaaugua

SEQ ID NO: 1222681 - RNA, 17 nt, Human
gaaauguacagcaagga

SEQ ID NO: 1222682 - RNA, 19 nt, Human
gaaaugggcagagcagaga

SEQ ID NO: 1222683 - RNA, 17 nt, Human
gaaaugggcagagcaga

SEQ ID NO: 1222684 - RNA, 16 nt, Human
gaaaugggcagagcag

SEQ ID NO: 1222685 - RNA, 18 nt, Human
gaaaugaggucagagccu

SEQ ID NO: 1222686 - RNA, 11 nt, Human
gaaaugagcug

SEQ ID NO: 1222687 - RNA, 16 nt, Human
gaacacuccuucacag

SEQ ID NO: 1222688 - RNA, 15 nt, Human
gaacacuccuucaca

SEQ ID NO: 1222689 - RNA, 20 nt, Human
gaacagacuggaagcacagc

SEQ ID NO: 1222690 - RNA, 17 nt, Human
gaacacuccuucacaga

SEQ ID NO: 1222691 - RNA, 22 nt, Human
gaacagacuggaagcacagcuu

SEQ ID NO: 1222692 - RNA, 16 nt, Human
gaaaggaaagaggcuc

SEQ ID NO: 1222693 - RNA, 11 nt, Human
gaaaggaaaga

SEQ ID NO: 1222694 - RNA, 16 nt, Human
gaaaaaugagccuggc

SEQ ID NO: 1222695 - RNA, 17 nt, Human
gaaagacuguacaaagu

SEQ ID NO: 1222696 - RNA, 16 nt, Human
gaaagaucaaaagguu

SEQ ID NO: 1222697 - RNA, 21 nt, Human
cuuuucgcaggauucuuccuc

SEQ ID NO: 1222698 - RNA, 20 nt, Human
cuuuucgcaggauucuuccu

SEQ ID NO: 1222699 - RNA, 23 nt, Human
cuuuuccaacccucaucaccaac

SEQ ID NO: 1222700 - RNA, 13 nt, Human
cuuuuccaacccu

SEQ ID NO: 1222701 - RNA, 22 nt, Human
cuuuucauuuaggugaggaagc

SEQ ID NO: 1222702 - RNA, 17 nt, Human
cuuuucuuucagccaag

SEQ ID NO: 1222703 - RNA, 13 nt, Human
cuuuucuuuucuu

SEQ ID NO: 1222704 - RNA, 22 nt, Human
cuuuuuaauauugauaugcuua

SEQ ID NO: 1222705 - RNA, 16 nt, Human
gaaaaagaaaaaauau

SEQ ID NO: 1222706 - RNA, 11 nt, Human
gaaaaagaaaa

SEQ ID NO: 1222707 - RNA, 15 nt, Human
cuuuuuucacuacau

SEQ ID NO: 1222708 - RNA, 18 nt, Human
cuuuuuuauacauaaaca

SEQ ID NO: 1222709 - RNA, 17 nt, Human
cuuuuuuauacauaaac

SEQ ID NO: 1222710 - RNA, 16 nt, Human
cuuuuuuauacauaaa

SEQ ID NO: 1222711 - RNA, 15 nt, Human
cuuuuuuauacauaa

SEQ ID NO: 1222712 - RNA, 21 nt, Human
cuuuccugaggcugggcuccc

SEQ ID NO: 1222713 - RNA, 20 nt, Human
cuuuccugaggcugggcucc

SEQ ID NO: 1222714 - RNA, 17 nt, Human
cuuuccugaggcugggc

SEQ ID NO: 1222715 - RNA, 23 nt, Human
cuuuggaaagaguaggaagacuu

SEQ ID NO: 1222716 - RNA, 19 nt, Human
cuuuggaaagaguaggaag

SEQ ID NO: 1222717 - RNA, 16 nt, Human
cuuugcagacaggcaa

SEQ ID NO: 1222718 - RNA, 15 nt, Human
cuuugcagacaggca

SEQ ID NO: 1222719 - RNA, 14 nt, Human
cuuugcagacaggc

SEQ ID NO: 1222720 - RNA, 14 nt, Human
cuuuccaggaaggc

SEQ ID NO: 1222721 - RNA, 16 nt, Human
cuuuccaaaugcccag

SEQ ID NO: 1222722 - RNA, 22 nt, Human
cuuuccaaaguacacuguuuca

SEQ ID NO: 1222723 - RNA, 16 nt, Human
cuuuccaaaguacacu

SEQ ID NO: 1222724 - RNA, 15 nt, Human
cuuuccaggaaggcu

SEQ ID NO: 1222725 - RNA, 20 nt, Human
cuuguguguuuauugucaaa

SEQ ID NO: 1222726 - RNA, 21 nt, Human
cuuguggacacagcucuucuc

SEQ ID NO: 1222727 - RNA, 18 nt, Human
cuuguggacacagcucuu

SEQ ID NO: 1222728 - RNA, 17 nt, Human
cuuguggacacagcucu

SEQ ID NO: 1222729 - RNA, 20 nt, Human
cuuggggaccagagcugcca

SEQ ID NO: 1222730 - RNA, 19 nt, Human
cuuggggaccagagcugcc

SEQ ID NO: 1222731 - RNA, 18 nt, Human
cuuggggaccagagcugc

SEQ ID NO: 1222732 - RNA, 17 nt, Human
cuuggggaccagagcug

SEQ ID NO: 1222733 - RNA, 14 nt, Human
cuuggcugcaggga

SEQ ID NO: 1222734 - RNA, 13 nt, Human
cuuggcugcaggg

SEQ ID NO: 1222735 - RNA, 12 nt, Human
cuuggcugcagg

SEQ ID NO: 1222736 - RNA, 23 nt, Human
cuuggcucaaguccucuuuucug

SEQ ID NO: 1222737 - RNA, 14 nt, Human
cuuggauugucccc

SEQ ID NO: 1222738 - RNA, 13 nt, Human
cuuggauuguccc

SEQ ID NO: 1222739 - RNA, 13 nt, Human
cuugcuugcuuuu

SEQ ID NO: 1222740 - RNA, 16 nt, Human
cuugaacuggguacuu

SEQ ID NO: 1222741 - RNA, 19 nt, Human
cuugaacuccuggccucaa

SEQ ID NO: 1222742 - RNA, 15 nt, Human
cuugaacuuugaccu

SEQ ID NO: 1222743 - RNA, 20 nt, Human
cuugaacuggguacuugugg

SEQ ID NO: 1222744 - RNA, 18 nt, Human
cuugaacuggguacuugu

SEQ ID NO: 1222745 - RNA, 18 nt, Human
cuugaacuccuggccuca

SEQ ID NO: 1222746 - RNA, 17 nt, Human
cuugaacuccuggccuc

SEQ ID NO: 1222747 - RNA, 15 nt, Human
cuugaacuccuggcc

SEQ ID NO: 1222748 - RNA, 14 nt, Human
cuugaacuccuggc

SEQ ID NO: 1222749 - RNA, 19 nt, Human
cuugaaauauaggaacuua

SEQ ID NO: 1222750 - RNA, 13 nt, Human
cuugagcucagga

SEQ ID NO: 1222751 - RNA, 22 nt, Human
cuugagccuugaacuuugaccu

SEQ ID NO: 1222752 - RNA, 20 nt, Human
cuugagccuugaacuuugac

SEQ ID NO: 1222753 - RNA, 19 nt, Human
cuugagccuugaacuuuga

SEQ ID NO: 1222754 - RNA, 21 nt, Human
cuugaccauucuccaccugcc

SEQ ID NO: 1222755 - RNA, 14 nt, Human
cuugagagggugga

SEQ ID NO: 1222756 - RNA, 20 nt, Human
cuugaccauucuccaccugc

SEQ ID NO: 1222757 - RNA, 17 nt, Human
cuugaccauucuccacc

SEQ ID NO: 1222758 - RNA, 14 nt, Human
cuugcaauggcagc

SEQ ID NO: 1222759 - RNA, 18 nt, Human
cuugaguugauucagcuc

SEQ ID NO: 1222760 - RNA, 22 nt, Human
cuugcaaaguaucccuacugua

SEQ ID NO: 1222761 - RNA, 21 nt, Human
cuugcaugaggcuaguguggu

SEQ ID NO: 1222762 - RNA, 20 nt, Human
cuugcagacucuacagaggc

SEQ ID NO: 1222763 - RNA, 18 nt, Human
cuugcagacucuacagag

SEQ ID NO: 1222764 - RNA, 22 nt, Human
cuguaccucuugagccuugaac

SEQ ID NO: 1222765 - RNA, 15 nt, Human
cuguaucccaugagc

SEQ ID NO: 1222766 - RNA, 19 nt, Human
cuguaucccaugagccuca

SEQ ID NO: 1222767 - RNA, 18 nt, Human
cuguaucccaugagccuc

SEQ ID NO: 1222768 - RNA, 22 nt, Human
cugucccagugccgagaaggaa

SEQ ID NO: 1222769 - RNA, 20 nt, Human
cuguccuacucugugucagg

SEQ ID NO: 1222770 - RNA, 18 nt, Human
cuguccuacucuguguca

SEQ ID NO: 1222771 - RNA, 17 nt, Human
cuguccuacucuguguc

SEQ ID NO: 1222772 - RNA, 16 nt, Human
cuguccuacucugugu

SEQ ID NO: 1222773 - RNA, 17 nt, Human
cuguccccgcacugggc

SEQ ID NO: 1222774 - RNA, 14 nt, Human
cugucccccugaca

SEQ ID NO: 1222775 - RNA, 13 nt, Human
cugucccccugac

SEQ ID NO: 1222776 - RNA, 22 nt, Human
cugucucaaaaaaagaaaaaga

SEQ ID NO: 1222777 - RNA, 14 nt, Human
cuguccgagcuuug

SEQ ID NO: 1222778 - RNA, 21 nt, Human
cuguccuacucugugucaggu

SEQ ID NO: 1222779 - RNA, 23 nt, Human
cuggucucaaacucuugaccuca

SEQ ID NO: 1222780 - RNA, 14 nt, Human
cuggucccacucag

SEQ ID NO: 1222781 - RNA, 13 nt, Human
cuggucccacuca

SEQ ID NO: 1222782 - RNA, 19 nt, Human
cuggguacuuguggacaca

SEQ ID NO: 1222783 - RNA, 18 nt, Human
cuggguacuuguggacac

SEQ ID NO: 1222784 - RNA, 16 nt, Human
cuggguacuuguggac

SEQ ID NO: 1222785 - RNA, 22 nt, Human
cugggcucccuucccaccucuc

SEQ ID NO: 1222786 - RNA, 21 nt, Human
cugggcucccuucccaccucu

SEQ ID NO: 1222787 - RNA, 20 nt, Human
cugggcucccuucccaccuc

SEQ ID NO: 1222788 - RNA, 15 nt, Human
cuggguuggagggug

SEQ ID NO: 1222789 - RNA, 21 nt, Human
cuguaccucuugagccuugaa

SEQ ID NO: 1222790 - RNA, 23 nt, Human
cuguacaugaaaacacauuuuuc

SEQ ID NO: 1222791 - RNA, 22 nt, Human
cuguacaugaaaacacauuuuu

SEQ ID NO: 1222792 - RNA, 23 nt, Human
cuguacagagcccacgcccccac

SEQ ID NO: 1222793 - RNA, 22 nt, Human
cuguaauuugugauacaaugcu

SEQ ID NO: 1222794 - RNA, 21 nt, Human
cuguaauuugugauacaaugc

SEQ ID NO: 1222795 - RNA, 18 nt, Human
cuguaauuugugauacaa

SEQ ID NO: 1222796 - RNA, 16 nt, Human
cugguuccauggccuc

SEQ ID NO: 1222797 - RNA, 20 nt, Human
cugguucaggguuggccccu

SEQ ID NO: 1222798 - RNA, 16 nt, Human
cugguggcagcucacc

SEQ ID NO: 1222799 - RNA, 14 nt, Human
cugguggcagcuca

SEQ ID NO: 1222800 - RNA, 13 nt, Human
cugguggcagcuc

SEQ ID NO: 1222801 - RNA, 12 nt, Human
cugguggcagcu

SEQ ID NO: 1222802 - RNA, 21 nt, Human
cugggaggucaaggcugcagu

SEQ ID NO: 1222803 - RNA, 19 nt, Human
cugggaggucaaggcugca

SEQ ID NO: 1222804 - RNA, 18 nt, Human
cugggaugauuggagggg

SEQ ID NO: 1222805 - RNA, 20 nt, Human
cugggaucccucauccucau

SEQ ID NO: 1222806 - RNA, 12 nt, Human
cugggagugagc

SEQ ID NO: 1222807 - RNA, 17 nt, Human
cugggauuacaggugug

SEQ ID NO: 1222808 - RNA, 20 nt, Human
cugggauuacaggugugaac

SEQ ID NO: 1222809 - RNA, 17 nt, Human
cuggcuguuggcugggg

SEQ ID NO: 1222810 - RNA, 16 nt, Human
cuggcuguuggcuggg

SEQ ID NO: 1222811 - RNA, 20 nt, Human
cuggcugguuagagguuccc

SEQ ID NO: 1222812 - RNA, 21 nt, Human
cugggagagccuuccaggggu

SEQ ID NO: 1222813 - RNA, 20 nt, Human
cugggagagccuuccagggg

SEQ ID NO: 1222814 - RNA, 19 nt, Human
cugggagagccuuccaggg

SEQ ID NO: 1222815 - RNA, 18 nt, Human
cugggagagccuuccagg

SEQ ID NO: 1222816 - RNA, 17 nt, Human
cugggagagccuuccag

SEQ ID NO: 1222817 - RNA, 18 nt, Human
cuggcuguuggcuggggg

SEQ ID NO: 1222818 - RNA, 19 nt, Human
cuggcacccggccccugcu

SEQ ID NO: 1222819 - RNA, 18 nt, Human
cuggcacccggccccugc

SEQ ID NO: 1222820 - RNA, 17 nt, Human
cuggcacccggccccug

SEQ ID NO: 1222821 - RNA, 16 nt, Human
cuggcacccggccccu

SEQ ID NO: 1222822 - RNA, 14 nt, Human
cuggcaagaaugug

SEQ ID NO: 1222823 - RNA, 14 nt, Human
cuggaaugcagugg

SEQ ID NO: 1222824 - RNA, 18 nt, Human
cuggaauauauaaccagu

SEQ ID NO: 1222825 - RNA, 24 nt, Human
cuggcaugggaaugaaugucagug

SEQ ID NO: 1222826 - RNA, 22 nt, Human
cuggcaugggaaugaaugucag

SEQ ID NO: 1222827 - RNA, 19 nt, Human
cuggcaugggaaugaaugu

SEQ ID NO: 1222828 - RNA, 18 nt, Human
cuggcaugggaaugaaug

SEQ ID NO: 1222829 - RNA, 16 nt, Human
cuggcaugggaaugaa

SEQ ID NO: 1222830 - RNA, 22 nt, Human
cuggcacuauaauguaagcucu

SEQ ID NO: 1222831 - RNA, 16 nt, Human
cuggcacuauaaugua

SEQ ID NO: 1222832 - RNA, 15 nt, Human
cuggcacuauaaugu

SEQ ID NO: 1222833 - RNA, 19 nt, Human
cuggccuggccccucaggg

SEQ ID NO: 1222834 - RNA, 17 nt, Human
cuggccuggccccucag

SEQ ID NO: 1222835 - RNA, 16 nt, Human
cuggccuggccccuca

SEQ ID NO: 1222836 - RNA, 14 nt, Human
cuggccuggccccu

SEQ ID NO: 1222837 - RNA, 18 nt, Human
cuggccugagcugggaug

SEQ ID NO: 1222838 - RNA, 16 nt, Human
cuggccugagcuggga

SEQ ID NO: 1222839 - RNA, 16 nt, Human
cuggccucugcacucc

SEQ ID NO: 1222840 - RNA, 14 nt, Human
cuggccucugcacu

SEQ ID NO: 1222841 - RNA, 13 nt, Human
cuggccucugcac

SEQ ID NO: 1222842 - RNA, 12 nt, Human
cuggccucugca

SEQ ID NO: 1222843 - RNA, 23 nt, Human
cuggccucaagugauucuccugc

SEQ ID NO: 1222844 - RNA, 22 nt, Human
cugccaggaagccagcaggcuc

SEQ ID NO: 1222845 - RNA, 15 nt, Human
cugccauccucccaa

SEQ ID NO: 1222846 - RNA, 21 nt, Human
cugccauccagguucagcuug

SEQ ID NO: 1222847 - RNA, 21 nt, Human
cugccaggaagccagcaggcu

SEQ ID NO: 1222848 - RNA, 20 nt, Human
cugccaggaagccagcaggc

SEQ ID NO: 1222849 - RNA, 14 nt, Human
cugccaggaagcca

SEQ ID NO: 1222850 - RNA, 13 nt, Human
cugccaggaagcc

SEQ ID NO: 1222851 - RNA, 21 nt, Human
cugccacccuggggagaaagu

SEQ ID NO: 1222852 - RNA, 14 nt, Human
cugccacccugggg

SEQ ID NO: 1222853 - RNA, 12 nt, Human
cugccacccugg

SEQ ID NO: 1222854 - RNA, 20 nt, Human
cugcaucaagaugugacaug

SEQ ID NO: 1222855 - RNA, 15 nt, Human
cugcauaugaaagga

SEQ ID NO: 1222856 - RNA, 20 nt, Human
cugcccggcaggguccuaga

SEQ ID NO: 1222857 - RNA, 13 nt, Human
cugcccggcaggg

SEQ ID NO: 1222858 - RNA, 19 nt, Human
cugccccuggcagccccug

SEQ ID NO: 1222859 - RNA, 18 nt, Human
cugccccuggcagccccu

SEQ ID NO: 1222860 - RNA, 15 nt, Human
cugcccaggccccug

SEQ ID NO: 1222861 - RNA, 14 nt, Human
cugcccaggccccu

SEQ ID NO: 1222862 - RNA, 13 nt, Human
cugcccaccuggc

SEQ ID NO: 1222863 - RNA, 12 nt, Human
cugcccaccugg

SEQ ID NO: 1222864 - RNA, 16 nt, Human
cugccauuucugagau

SEQ ID NO: 1222865 - RNA, 15 nt, Human
cugccauuucugaga

SEQ ID NO: 1222866 - RNA, 20 nt, Human
cugcccaggccccugccacc

SEQ ID NO: 1222867 - RNA, 19 nt, Human
cugcccaggccccugccac

SEQ ID NO: 1222868 - RNA, 18 nt, Human
cugcccaggccccugcca

SEQ ID NO: 1222869 - RNA, 16 nt, Human
cugcccaggccccugc

SEQ ID NO: 1222870 - RNA, 17 nt, Human
cugcaguugccagucac

SEQ ID NO: 1222871 - RNA, 16 nt, Human
cugcaguugccaguca

SEQ ID NO: 1222872 - RNA, 13 nt, Human
cugcaguugccag

SEQ ID NO: 1222873 - RNA, 17 nt, Human
cugcagcaauaaagcag

SEQ ID NO: 1222874 - RNA, 16 nt, Human
cugcagcaauaaagca

SEQ ID NO: 1222875 - RNA, 15 nt, Human
cugcagcaauaaagc

SEQ ID NO: 1222876 - RNA, 13 nt, Human
cugcagagggcac

SEQ ID NO: 1222877 - RNA, 10 nt, Human
cugcagaggg

SEQ ID NO: 1222878 - RNA, 21 nt, Human
cugcacuccccugcugggugu

SEQ ID NO: 1222879 - RNA, 20 nt, Human
cugcacuccccugcugggug

SEQ ID NO: 1222880 - RNA, 19 nt, Human
cugcacuccccugcugggu

SEQ ID NO: 1222881 - RNA, 14 nt, Human
cugcacuccccugc

SEQ ID NO: 1222882 - RNA, 13 nt, Human
cugcacuccccug

SEQ ID NO: 1222883 - RNA, 20 nt, Human
cugcacuccagccuggguga

SEQ ID NO: 1222884 - RNA, 20 nt, Human
cugcaccgggccacagagaa

SEQ ID NO: 1222885 - RNA, 18 nt, Human
cugcaccgggccacagag

SEQ ID NO: 1222886 - RNA, 15 nt, Human
cugcaccgggccaca

SEQ ID NO: 1222887 - RNA, 16 nt, Human
cugcaccggcuggccu

SEQ ID NO: 1222888 - RNA, 15 nt, Human
cugcaccggcuggcc

SEQ ID NO: 1222889 - RNA, 23 nt, Human
cugaggcccuucucuccagcccc

SEQ ID NO: 1222890 - RNA, 22 nt, Human
cugaggcccuucucuccagccc

SEQ ID NO: 1222891 - RNA, 14 nt, Human
cugcaccggcuggc

SEQ ID NO: 1222892 - RNA, 24 nt, Human
cugaggcccuucucuccagccccu

SEQ ID NO: 1222893 - RNA, 12 nt, Human
cugcucugguua

SEQ ID NO: 1222894 - RNA, 15 nt, Human
cugcugcaguugcca

SEQ ID NO: 1222895 - RNA, 14 nt, Human
cugcugcaguugcc

SEQ ID NO: 1222896 - RNA, 13 nt, Human
cugcugcaguugc

SEQ ID NO: 1222897 - RNA, 10 nt, Human
cugcugcagu

SEQ ID NO: 1222898 - RNA, 19 nt, Human
cugcucuccgaccagacac

SEQ ID NO: 1222899 - RNA, 15 nt, Human
cugcucuccgaccag

SEQ ID NO: 1222900 - RNA, 23 nt, Human
cugcuccucuccccagcaaguga

SEQ ID NO: 1222901 - RNA, 20 nt, Human
cugcuccucuccccagcaag

SEQ ID NO: 1222902 - RNA, 19 nt, Human
cugcuccucuccccagcaa

SEQ ID NO: 1222903 - RNA, 23 nt, Human
cugcggugcuaucucccccagcc

SEQ ID NO: 1222904 - RNA, 22 nt, Human
cugcggugcuaucucccccagc

SEQ ID NO: 1222905 - RNA, 21 nt, Human
cugcggugcuaucucccccag

SEQ ID NO: 1222906 - RNA, 20 nt, Human
cugcggugcuaucuccccca

SEQ ID NO: 1222907 - RNA, 19 nt, Human
cugcggugcuaucuccccc

SEQ ID NO: 1222908 - RNA, 18 nt, Human
cugcggugcuaucucccc

SEQ ID NO: 1222909 - RNA, 23 nt, Human
cugcgguccacccaggagccccg

SEQ ID NO: 1222910 - RNA, 18 nt, Human
cugccugaagucacacag

SEQ ID NO: 1222911 - RNA, 21 nt, Human
cugcccugcccaccuggccuc

SEQ ID NO: 1222912 - RNA, 20 nt, Human
cugcccugcccaccuggccu

SEQ ID NO: 1222913 - RNA, 23 nt, Human
cugccugaagucacacagugagu

SEQ ID NO: 1222914 - RNA, 19 nt, Human
cugccugaagucacacagu

SEQ ID NO: 1222915 - RNA, 19 nt, Human
cugcuugugaaaggaaaga

SEQ ID NO: 1222916 - RNA, 19 nt, Human
cugcuugggcuucauccuc

SEQ ID NO: 1222917 - RNA, 18 nt, Human
cugcuugggcuucauccu

SEQ ID NO: 1222918 - RNA, 17 nt, Human
cugcuugggcuucaucc

SEQ ID NO: 1222919 - RNA, 15 nt, Human
cugcuugggcuucau

SEQ ID NO: 1222920 - RNA, 13 nt, Human
cugcuugggcuuc

SEQ ID NO: 1222921 - RNA, 20 nt, Human
cugcuugcuugcuuuuuaau

SEQ ID NO: 1222922 - RNA, 22 nt, Human
cugcuugaggcaacucaucuua

SEQ ID NO: 1222923 - RNA, 19 nt, Human
cugcuuuugucuaugggac

SEQ ID NO: 1222924 - RNA, 17 nt, Human
cugcuuuuggucugugu

SEQ ID NO: 1222925 - RNA, 15 nt, Human
cugcuuuuggucugu

SEQ ID NO: 1222926 - RNA, 21 nt, Human
cugcuugaggcaacucaucuu

SEQ ID NO: 1222927 - RNA, 20 nt, Human
cugcuugaggcaacucaucu

SEQ ID NO: 1222928 - RNA, 13 nt, Human
cugcuugaggcaa

SEQ ID NO: 1222929 - RNA, 17 nt, Human
cugcuggguguggcgca

SEQ ID NO: 1222930 - RNA, 15 nt, Human
cugcuggguguggcg

SEQ ID NO: 1222931 - RNA, 14 nt, Human
cugcuggguguggc

SEQ ID NO: 1222932 - RNA, 13 nt, Human
cugcugcuggcug

SEQ ID NO: 1222933 - RNA, 12 nt, Human
cugcugcuggcu

SEQ ID NO: 1222934 - RNA, 14 nt, Human
cugcugcuggcugg

SEQ ID NO: 1222935 - RNA, 21 nt, Human
cucuuggguucaagcgauucu

SEQ ID NO: 1222936 - RNA, 19 nt, Human
cucuuggguucaagcgauu

SEQ ID NO: 1222937 - RNA, 22 nt, Human
cucuugaaauauaggaacuuaa

SEQ ID NO: 1222938 - RNA, 21 nt, Human
cucuuccaggcugggagagcc

SEQ ID NO: 1222939 - RNA, 17 nt, Human
cucuuucccucccuucc

SEQ ID NO: 1222940 - RNA, 23 nt, Human
cucuuuaaugucacaggcagguc

SEQ ID NO: 1222941 - RNA, 22 nt, Human
cucuuuaaugucacaggcaggu

SEQ ID NO: 1222942 - RNA, 21 nt, Human
cucuuuaaugucacaggcagg

SEQ ID NO: 1222943 - RNA, 20 nt, Human
cucuuuaaugucacaggcag

SEQ ID NO: 1222944 - RNA, 18 nt, Human
cucuuuaaugucacaggc

SEQ ID NO: 1222945 - RNA, 17 nt, Human
cucuugguccugcugca

SEQ ID NO: 1222946 - RNA, 16 nt, Human
cucuugguccugcugc

SEQ ID NO: 1222947 - RNA, 15 nt, Human
cucuugguccugcug

SEQ ID NO: 1222948 - RNA, 13 nt, Human
cucuugguccugc

SEQ ID NO: 1222949 - RNA, 23 nt, Human
cugaaagcccugagcuuucugcu

SEQ ID NO: 1222950 - RNA, 19 nt, Human
cugaaagcccugagcuuuc

SEQ ID NO: 1222951 - RNA, 18 nt, Human
cugaaagcccugagcuuu

SEQ ID NO: 1222952 - RNA, 17 nt, Human
cugaaagcccugagcuu

SEQ ID NO: 1222953 - RNA, 16 nt, Human
cugaaagcccugagcu

SEQ ID NO: 1222954 - RNA, 15 nt, Human
cugaaagcccugagc

SEQ ID NO: 1222955 - RNA, 17 nt, Human
cucuuucuauuguuucu

SEQ ID NO: 1222956 - RNA, 19 nt, Human
cugaagaauugaaaaacca

SEQ ID NO: 1222957 - RNA, 15 nt, Human
cucuuccaggcuggg

SEQ ID NO: 1222958 - RNA, 14 nt, Human
cucuuccaggcugg

SEQ ID NO: 1222959 - RNA, 13 nt, Human
cucuuccaggcug

SEQ ID NO: 1222960 - RNA, 15 nt, Human
cucuuagaaaaacca

SEQ ID NO: 1222961 - RNA, 13 nt, Human
cucuuagaaaaac

SEQ ID NO: 1222962 - RNA, 19 nt, Human
cucugugucagguggggca

SEQ ID NO: 1222963 - RNA, 15 nt, Human
cucugugucaggugg

SEQ ID NO: 1222964 - RNA, 15 nt, Human
cucuggacaggcaug

SEQ ID NO: 1222965 - RNA, 22 nt, Human
cucugccugaagucacacagug

SEQ ID NO: 1222966 - RNA, 21 nt, Human
cucugccugaagucacacagu

SEQ ID NO: 1222967 - RNA, 13 nt, Human
cucucuccucccu

SEQ ID NO: 1222968 - RNA, 14 nt, Human
cucuggcagcucag

SEQ ID NO: 1222969 - RNA, 12 nt, Human
cucuggcagcuc

SEQ ID NO: 1222970 - RNA, 22 nt, Human
cucuggacaggcauguucucug

SEQ ID NO: 1222971 - RNA, 16 nt, Human
cucuggacaggcaugu

SEQ ID NO: 1222972 - RNA, 16 nt, Human
cucuggcagcucagag

SEQ ID NO: 1222973 - RNA, 15 nt, Human
cucuggcagcucaga

SEQ ID NO: 1222974 - RNA, 20 nt, Human
cugaggcccuucucuccagc

SEQ ID NO: 1222975 - RNA, 19 nt, Human
cugaggcccuucucuccag

SEQ ID NO: 1222976 - RNA, 18 nt, Human
cugaggcccuucucucca

SEQ ID NO: 1222977 - RNA, 15 nt, Human
cugaggcccuucucu

SEQ ID NO: 1222978 - RNA, 14 nt, Human
cugaggcccuucuc

SEQ ID NO: 1222979 - RNA, 23 nt, Human
cugaggcccagagggccugcaag

SEQ ID NO: 1222980 - RNA, 21 nt, Human
cugaggcccagagggccugca

SEQ ID NO: 1222981 - RNA, 19 nt, Human
cugaggcccagagggccug

SEQ ID NO: 1222982 - RNA, 18 nt, Human
cugaggcccagagggccu

SEQ ID NO: 1222983 - RNA, 17 nt, Human
cugaggcccagagggcc

SEQ ID NO: 1222984 - RNA, 16 nt, Human
cugaggcccagagggc

SEQ ID NO: 1222985 - RNA, 15 nt, Human
cugaggcccagaggg

SEQ ID NO: 1222986 - RNA, 14 nt, Human
cugaggcccagagg

SEQ ID NO: 1222987 - RNA, 13 nt, Human
cugaggcccagag

SEQ ID NO: 1222988 - RNA, 12 nt, Human
cugaggcccaga

SEQ ID NO: 1222989 - RNA, 21 nt, Human
cugagccagauuucacucucc

SEQ ID NO: 1222990 - RNA, 20 nt, Human
cugagccagauuucacucuc

SEQ ID NO: 1222991 - RNA, 19 nt, Human
cugagccagauuucacucu

SEQ ID NO: 1222992 - RNA, 18 nt, Human
cugagccagauuucacuc

SEQ ID NO: 1222993 - RNA, 17 nt, Human
cugagccagauuucacu

SEQ ID NO: 1222994 - RNA, 18 nt, Human
cugagacagcccgggcuc

SEQ ID NO: 1222995 - RNA, 17 nt, Human
cugagacagcccgggcu

SEQ ID NO: 1222996 - RNA, 16 nt, Human
cugagacagcccgggc

SEQ ID NO: 1222997 - RNA, 19 nt, Human
cugagacagcccgggcucu

SEQ ID NO: 1222998 - RNA, 15 nt, Human
cugagacagcccggg

SEQ ID NO: 1222999 - RNA, 14 nt, Human
cugagacagcccgg

SEQ ID NO: 1223000 - RNA, 18 nt, Human
cugacuguuuucucuuga

SEQ ID NO: 1223001 - RNA, 16 nt, Human
cugacuguuuucucuu

SEQ ID NO: 1223002 - RNA, 17 nt, Human
cugacccaugcugcccu

SEQ ID NO: 1223003 - RNA, 16 nt, Human
cugacccaugcugccc

SEQ ID NO: 1223004 - RNA, 15 nt, Human
cugacccaugcugcc

SEQ ID NO: 1223005 - RNA, 14 nt, Human
cugacccaugcugc

SEQ ID NO: 1223006 - RNA, 14 nt, Human
cugacccacugcuu

SEQ ID NO: 1223007 - RNA, 13 nt, Human
cugacccacugcu

SEQ ID NO: 1223008 - RNA, 22 nt, Human
cugacauuguuggccaaagcca

SEQ ID NO: 1223009 - RNA, 19 nt, Human
cugaagacucauucuucug

SEQ ID NO: 1223010 - RNA, 14 nt, Human
cucucucacuccuu

SEQ ID NO: 1223011 - RNA, 12 nt, Human
cucucucacucc

SEQ ID NO: 1223012 - RNA, 18 nt, Human
cucuccucugcugcuggc

SEQ ID NO: 1223013 - RNA, 15 nt, Human
cucuccucugcugcu

SEQ ID NO: 1223014 - RNA, 14 nt, Human
cucuccucugcugc

SEQ ID NO: 1223015 - RNA, 13 nt, Human
cucuccucugcug

SEQ ID NO: 1223016 - RNA, 24 nt, Human
cucuccccagcaagugagagcugg

SEQ ID NO: 1223017 - RNA, 12 nt, Human
cucuccucugcu

SEQ ID NO: 1223018 - RNA, 22 nt, Human
cucuccccagcaagugagagcu

SEQ ID NO: 1223019 - RNA, 14 nt, Human
cucuccccagcaag

SEQ ID NO: 1223020 - RNA, 19 nt, Human
cucuccagccccuggaugc

SEQ ID NO: 1223021 - RNA, 14 nt, Human
cucuccagccccug

SEQ ID NO: 1223022 - RNA, 18 nt, Human
cucuccagccccuggaug

SEQ ID NO: 1223023 - RNA, 17 nt, Human
cucuccagccccuggau

SEQ ID NO: 1223024 - RNA, 16 nt, Human
cucuccagccccugga

SEQ ID NO: 1223025 - RNA, 15 nt, Human
cucuccagccccugg

SEQ ID NO: 1223026 - RNA, 22 nt, Human
cucucaggccagcugcuugggc

SEQ ID NO: 1223027 - RNA, 21 nt, Human
cucucaggccagcugcuuggg

SEQ ID NO: 1223028 - RNA, 19 nt, Human
cucucaggccagcugcuug

SEQ ID NO: 1223029 - RNA, 18 nt, Human
cucucaggccagcugcuu

SEQ ID NO: 1223030 - RNA, 17 nt, Human
cucucaggccagcugcu

SEQ ID NO: 1223031 - RNA, 15 nt, Human
cucucaggccagcug

SEQ ID NO: 1223032 - RNA, 13 nt, Human
cucucaggccagc

SEQ ID NO: 1223033 - RNA, 23 nt, Human
cucucaggccaaacucaccugcc

SEQ ID NO: 1223034 - RNA, 22 nt, Human
cucucaggccaaacucaccugc

SEQ ID NO: 1223035 - RNA, 21 nt, Human
cucucaggccaaacucaccug

SEQ ID NO: 1223036 - RNA, 20 nt, Human
cucucaggccaaacucaccu

SEQ ID NO: 1223037 - RNA, 12 nt, Human
cucucaggccaa

SEQ ID NO: 1223038 - RNA, 21 nt, Human
cucuaguuugauuaaauucuu

SEQ ID NO: 1223039 - RNA, 20 nt, Human
cucuaguuugauuaaauucu

SEQ ID NO: 1223040 - RNA, 19 nt, Human
cucuaguuugauuaaauuc

SEQ ID NO: 1223041 - RNA, 15 nt, Human
cucuaguuugauuaa

SEQ ID NO: 1223042 - RNA, 13 nt, Human
cucuacccuggca

SEQ ID NO: 1223043 - RNA, 20 nt, Human
cucuaccauccccuguagag

SEQ ID NO: 1223044 - RNA, 23 nt, Human
cucuagggaaaaaccagcgugug

SEQ ID NO: 1223045 - RNA, 13 nt, Human
cucuacaaaaagc

SEQ ID NO: 1223046 - RNA, 13 nt, Human
cucuacagaggcc

SEQ ID NO: 1223047 - RNA, 16 nt, Human
cucuacagaggccaug

SEQ ID NO: 1223048 - RNA, 14 nt, Human
cucuacagaggcca

SEQ ID NO: 1223049 - RNA, 19 nt, Human
cucuacagaggccaugggc

SEQ ID NO: 1223050 - RNA, 13 nt, Human
cuccuucaccuuu

SEQ ID NO: 1223051 - RNA, 19 nt, Human
cuccuucacagaugggugc

SEQ ID NO: 1223052 - RNA, 17 nt, Human
cuccuucacagaugggu

SEQ ID NO: 1223053 - RNA, 16 nt, Human
cuccuucacagauggg

SEQ ID NO: 1223054 - RNA, 15 nt, Human
cuccugugucuugca

SEQ ID NO: 1223055 - RNA, 20 nt, Human
cuccugugugugcgccuaca

SEQ ID NO: 1223056 - RNA, 15 nt, Human
cuccgaccagacacc

SEQ ID NO: 1223057 - RNA, 14 nt, Human
cuccugccucagcc

SEQ ID NO: 1223058 - RNA, 13 nt, Human
cuccugccucagc

SEQ ID NO: 1223059 - RNA, 11 nt, Human
cuccugcccuu

SEQ ID NO: 1223060 - RNA, 21 nt, Human
cuccugcaggcagccaggcca

SEQ ID NO: 1223061 - RNA, 20 nt, Human
cuccugcaggcagccaggcc

SEQ ID NO: 1223062 - RNA, 18 nt, Human
cuccugcaggcagccagg

SEQ ID NO: 1223063 - RNA, 17 nt, Human
cuccugcaggcagccag

SEQ ID NO: 1223064 - RNA, 12 nt, Human
cuccugcaggca

SEQ ID NO: 1223065 - RNA, 11 nt, Human
cuccugcaggc

SEQ ID NO: 1223066 - RNA, 19 nt, Human
cuccugugugugcgccuac

SEQ ID NO: 1223067 - RNA, 16 nt, Human
cuccugugugugcgcc

SEQ ID NO: 1223068 - RNA, 15 nt, Human
cuccugccucagccu

SEQ ID NO: 1223069 - RNA, 16 nt, Human
cuccugccucagccuc

SEQ ID NO: 1223070 - RNA, 18 nt, Human
cucacuauguugcccagg

SEQ ID NO: 1223071 - RNA, 13 nt, Human
cuccaugugggcu

SEQ ID NO: 1223072 - RNA, 17 nt, Human
cucccaaagugcuggga

SEQ ID NO: 1223073 - RNA, 23 nt, Human
cucccaucugugaaaggaaagag

SEQ ID NO: 1223074 - RNA, 18 nt, Human
cucccaucugugaaagga

SEQ ID NO: 1223075 - RNA, 15 nt, Human
cucccaucugugaaa

SEQ ID NO: 1223076 - RNA, 14 nt, Human
cucccaucugugaa

SEQ ID NO: 1223077 - RNA, 11 nt, Human
cucccaucugu

SEQ ID NO: 1223078 - RNA, 22 nt, Human
cucccaacucaccccagcccca

SEQ ID NO: 1223079 - RNA, 17 nt, Human
cucccaacucaccccag

SEQ ID NO: 1223080 - RNA, 23 nt, Human
cucccaaagugcugggauuacag

SEQ ID NO: 1223081 - RNA, 14 nt, Human
cuccaugugggcua

SEQ ID NO: 1223082 - RNA, 18 nt, Human
cucccaaagugcugggau

SEQ ID NO: 1223083 - RNA, 12 nt, Human
cuccccugcugg

SEQ ID NO: 1223084 - RNA, 21 nt, Human
cuccccagcaagugagagcug

SEQ ID NO: 1223085 - RNA, 20 nt, Human
cuccccagcaagugagagcu

SEQ ID NO: 1223086 - RNA, 12 nt, Human
cuccccagcaag

SEQ ID NO: 1223087 - RNA, 17 nt, Human
cucccgaguagcuggga

SEQ ID NO: 1223088 - RNA, 16 nt, Human
cucccgaguagcuggg

SEQ ID NO: 1223089 - RNA, 18 nt, Human
cucccgaauagcugggac

SEQ ID NO: 1223090 - RNA, 17 nt, Human
cucccgaauagcuggga

SEQ ID NO: 1223091 - RNA, 14 nt, Human
cuccccugcugggu

SEQ ID NO: 1223092 - RNA, 13 nt, Human
cuccccugcuggg

SEQ ID NO: 1223093 - RNA, 18 nt, Human
cucccgaguagcugggac

SEQ ID NO: 1223094 - RNA, 19 nt, Human
cucccgaauagcugggacu

SEQ ID NO: 1223095 - RNA, 12 nt, Human
cuacccaggugc

SEQ ID NO: 1223096 - RNA, 20 nt, Human
cuacccagcgagcccuggug

SEQ ID NO: 1223097 - RNA, 22 nt, Human
cuacccacccuccuuucaccac

SEQ ID NO: 1223098 - RNA, 17 nt, Human
cuacccacccuccuuuc

SEQ ID NO: 1223099 - RNA, 18 nt, Human
cuaccauccccuguagag

SEQ ID NO: 1223100 - RNA, 17 nt, Human
cuacagaggccaugggc

SEQ ID NO: 1223101 - RNA, 15 nt, Human
cuacagaggccaugg

SEQ ID NO: 1223102 - RNA, 21 nt, Human
cuacacacugcauguuuguga

SEQ ID NO: 1223103 - RNA, 15 nt, Human
cuacacacugcaugu

SEQ ID NO: 1223104 - RNA, 13 nt, Human
cuacacacugcau

SEQ ID NO: 1223105 - RNA, 16 nt, Human
cuaauguacugcauau

SEQ ID NO: 1223106 - RNA, 14 nt, Human
cuaauguacugcau

SEQ ID NO: 1223107 - RNA, 21 nt, Human
cuaauaaaauuuaaaagucuu

SEQ ID NO: 1223108 - RNA, 16 nt, Human
cuaaggugugcucuga

SEQ ID NO: 1223109 - RNA, 17 nt, Human
cuaaccagcagaaaugc

SEQ ID NO: 1223110 - RNA, 16 nt, Human
cuaaccagcagaaaug

SEQ ID NO: 1223111 - RNA, 17 nt, Human
cuaaccacgcuggaccu

SEQ ID NO: 1223112 - RNA, 21 nt, Human
cuaagcuauucaguaauaacu

SEQ ID NO: 1223113 - RNA, 19 nt, Human
cuaagcuauucaguaauaa

SEQ ID NO: 1223114 - RNA, 15 nt, Human
cuaaggugugcucug

SEQ ID NO: 1223115 - RNA, 17 nt, Human
cuacuguaauuugugau

SEQ ID NO: 1223116 - RNA, 16 nt, Human
cuacuguaauuuguga

SEQ ID NO: 1223117 - RNA, 14 nt, Human
cuacugaggugcua

SEQ ID NO: 1223118 - RNA, 21 nt, Human
cuacucugugucagguggggc

SEQ ID NO: 1223119 - RNA, 16 nt, Human
cuacucugugucaggu

SEQ ID NO: 1223120 - RNA, 21 nt, Human
cuacccgggaagggggcuggg

SEQ ID NO: 1223121 - RNA, 20 nt, Human
cuacccgggaagggggcugg

SEQ ID NO: 1223122 - RNA, 15 nt, Human
cuacccgggaagggg

SEQ ID NO: 1223123 - RNA, 14 nt, Human
cuacccgggaaggg

SEQ ID NO: 1223124 - RNA, 17 nt, Human
cuagcacuuugggaggc

SEQ ID NO: 1223125 - RNA, 21 nt, Human
cuagagugaacuugggccacu

SEQ ID NO: 1223126 - RNA, 17 nt, Human
cuagagugaacuugggc

SEQ ID NO: 1223127 - RNA, 15 nt, Human
cuagagguucaaaga

SEQ ID NO: 1223128 - RNA, 21 nt, Human
cuagacgagcaggcuucuucc

SEQ ID NO: 1223129 - RNA, 20 nt, Human
cuagacgagcaggcuucuuc

SEQ ID NO: 1223130 - RNA, 21 nt, Human
cuacuguaauuugugauacaa

SEQ ID NO: 1223131 - RNA, 22 nt, Human
cuaggaccccuccaugugggcu

SEQ ID NO: 1223132 - RNA, 17 nt, Human
cuaggaggucucuaaga

SEQ ID NO: 1223133 - RNA, 12 nt, Human
cuagcagcaggg

SEQ ID NO: 1223134 - RNA, 21 nt, Human
cuaggaagacuuuggaaagag

SEQ ID NO: 1223135 - RNA, 15 nt, Human
cuaggaacacuccuu

SEQ ID NO: 1223136 - RNA, 13 nt, Human
cuaggaacacucc

SEQ ID NO: 1223137 - RNA, 21 nt, Human
cuaggcauuugcugaauacag

SEQ ID NO: 1223138 - RNA, 19 nt, Human
cuagugugguguuuccugg

SEQ ID NO: 1223139 - RNA, 22 nt, Human
cuagugugguguuuccuggcac

SEQ ID NO: 1223140 - RNA, 21 nt, Human
cuagugugguguuuccuggca

SEQ ID NO: 1223141 - RNA, 23 nt, Human
cuagugugguguuuccuggcacu

SEQ ID NO: 1223142 - RNA, 20 nt, Human
cuaucaaguauuauaccuuu

SEQ ID NO: 1223143 - RNA, 14 nt, Human
cuaugacacaugca

SEQ ID NO: 1223144 - RNA, 23 nt, Human
cuauauuguuuucaguguacaug

SEQ ID NO: 1223145 - RNA, 22 nt, Human
cuauauuguuuucaguguacau

SEQ ID NO: 1223146 - RNA, 14 nt, Human
cuaguuccaccauc

SEQ ID NO: 1223147 - RNA, 21 nt, Human
cuaugcauuugaaaauuuuga

SEQ ID NO: 1223148 - RNA, 12 nt, Human
cuaugcauuuga

SEQ ID NO: 1223149 - RNA, 11 nt, Human
cuaugcauuug

SEQ ID NO: 1223150 - RNA, 21 nt, Human
cucaagugauucuccugccuc

SEQ ID NO: 1223151 - RNA, 20 nt, Human
cucaagugauucuccugccu

SEQ ID NO: 1223152 - RNA, 19 nt, Human
cucaagugauucuccugcc

SEQ ID NO: 1223153 - RNA, 18 nt, Human
cucaagugauucuccugc

SEQ ID NO: 1223154 - RNA, 21 nt, Human
cucaccagccccagugcccac

SEQ ID NO: 1223155 - RNA, 20 nt, Human
cucaccagccccagugccca

SEQ ID NO: 1223156 - RNA, 14 nt, Human
cucaccccagcccc

SEQ ID NO: 1223157 - RNA, 13 nt, Human
cucaccccagccc

SEQ ID NO: 1223158 - RNA, 12 nt, Human
cucaccccagcc

SEQ ID NO: 1223159 - RNA, 17 nt, Human
cucacuauguugcccag

SEQ ID NO: 1223160 - RNA, 16 nt, Human
cucacuauguugccca

SEQ ID NO: 1223161 - RNA, 14 nt, Human
cuaugcauuugaaa

SEQ ID NO: 1223162 - RNA, 21 nt, Human
cucaacucuccuccagaguca

SEQ ID NO: 1223163 - RNA, 20 nt, Human
cucaacucuccuccagaguc

SEQ ID NO: 1223164 - RNA, 13 nt, Human
cucaaauuucuaa

SEQ ID NO: 1223165 - RNA, 17 nt, Human
cuaacauggaaguacua

SEQ ID NO: 1223166 - RNA, 15 nt, Human
cuaacauggaaguac

SEQ ID NO: 1223167 - RNA, 16 nt, Human
cuaaauucaugcugcu

SEQ ID NO: 1223168 - RNA, 16 nt, Human
cuaaauguugaaagau

SEQ ID NO: 1223169 - RNA, 18 nt, Human
cuaaauggaaccacucua

SEQ ID NO: 1223170 - RNA, 17 nt, Human
cuaaauggaaccacucu

SEQ ID NO: 1223171 - RNA, 16 nt, Human
cuaaauggaaccacuc

SEQ ID NO: 1223172 - RNA, 15 nt, Human
cuaaauggaaccacu

SEQ ID NO: 1223173 - RNA, 20 nt, Human
cuaaaucuccaaaauaaaac

SEQ ID NO: 1223174 - RNA, 22 nt, Human
cgugcaguggugcgaucugggu

SEQ ID NO: 1223175 - RNA, 21 nt, Human
cgugcaguggugcgaucuggg

SEQ ID NO: 1223176 - RNA, 19 nt, Human
cgugcacacaccagagccc

SEQ ID NO: 1223177 - RNA, 18 nt, Human
cgugcacacaccagagcc

SEQ ID NO: 1223178 - RNA, 16 nt, Human
cgugcacacaccagag

SEQ ID NO: 1223179 - RNA, 22 nt, Human
cgucugacaggcaaugcuggcu

SEQ ID NO: 1223180 - RNA, 21 nt, Human
cgucugacaggcaaugcuggc

SEQ ID NO: 1223181 - RNA, 20 nt, Human
cgucugacaggcaaugcugg

SEQ ID NO: 1223182 - RNA, 22 nt, Human
cggugcuaucucccccagcccc

SEQ ID NO: 1223183 - RNA, 21 nt, Human
cggugcuaucucccccagccc

SEQ ID NO: 1223184 - RNA, 20 nt, Human
cggugcuaucucccccagcc

SEQ ID NO: 1223185 - RNA, 18 nt, Human
cggugcuaucucccccag

SEQ ID NO: 1223186 - RNA, 16 nt, Human
cgucucauacucaccu

SEQ ID NO: 1223187 - RNA, 20 nt, Human
cgguccacccaggagccccg

SEQ ID NO: 1223188 - RNA, 16 nt, Human
cgguccacccaggagc

SEQ ID NO: 1223189 - RNA, 15 nt, Human
cgguccacccaggag

SEQ ID NO: 1223190 - RNA, 14 nt, Human
cgguccacccagga

SEQ ID NO: 1223191 - RNA, 21 nt, Human
cggugagaggggaacagacug

SEQ ID NO: 1223192 - RNA, 20 nt, Human
cggugagaggggaacagacu

SEQ ID NO: 1223193 - RNA, 15 nt, Human
cgggggcagagaggg

SEQ ID NO: 1223194 - RNA, 23 nt, Human
cggggacagcuccuucuguccua

SEQ ID NO: 1223195 - RNA, 23 nt, Human
cggcuggccuggccccucagggu

SEQ ID NO: 1223196 - RNA, 22 nt, Human
cggcuggccuggccccucaggg

SEQ ID NO: 1223197 - RNA, 14 nt, Human
cggcuggcagccca

SEQ ID NO: 1223198 - RNA, 22 nt, Human
cgggcacucagaagacacugau

SEQ ID NO: 1223199 - RNA, 14 nt, Human
cgggcacucagaag

SEQ ID NO: 1223200 - RNA, 20 nt, Human
cgggaggucgaggcaggagg

SEQ ID NO: 1223201 - RNA, 18 nt, Human
cgggaggucgaggcagga

SEQ ID NO: 1223202 - RNA, 19 nt, Human
cggccccugcugguucagg

SEQ ID NO: 1223203 - RNA, 18 nt, Human
cggccccugcugguucag

SEQ ID NO: 1223204 - RNA, 13 nt, Human
cggccccugcugg

SEQ ID NO: 1223205 - RNA, 17 nt, Human
cggccaccugcggugcu

SEQ ID NO: 1223206 - RNA, 16 nt, Human
cggccaccugcggugc

SEQ ID NO: 1223207 - RNA, 15 nt, Human
cggccaccugcggug

SEQ ID NO: 1223208 - RNA, 11 nt, Human
cggccaccugc

SEQ ID NO: 1223209 - RNA, 14 nt, Human
cggaauaguuggcu

SEQ ID NO: 1223210 - RNA, 13 nt, Human
cggaagagccuug

SEQ ID NO: 1223211 - RNA, 22 nt, Human
cgcuaagagggagggagggcuc

SEQ ID NO: 1223212 - RNA, 16 nt, Human
cgcuacccgggaaggg

SEQ ID NO: 1223213 - RNA, 17 nt, Human
cgcuacccgggaagggg

SEQ ID NO: 1223214 - RNA, 20 nt, Human
cggaaaacaugcuacacacu

SEQ ID NO: 1223215 - RNA, 15 nt, Human
cggaaaacaugcuac

SEQ ID NO: 1223216 - RNA, 18 nt, Human
cgcugugcugcccugccc

SEQ ID NO: 1223217 - RNA, 17 nt, Human
cgcugugcugcccugcc

SEQ ID NO: 1223218 - RNA, 16 nt, Human
cgcugugcugcccugc

SEQ ID NO: 1223219 - RNA, 15 nt, Human
cgcugugcugcccug

SEQ ID NO: 1223220 - RNA, 22 nt, Human
cgcugucagccauuccuguucc

SEQ ID NO: 1223221 - RNA, 17 nt, Human
cgccaucccagccccaa

SEQ ID NO: 1223222 - RNA, 16 nt, Human
cgccaucccagcccca

SEQ ID NO: 1223223 - RNA, 14 nt, Human
cgccaucccagccc

SEQ ID NO: 1223224 - RNA, 23 nt, Human
cgccaggggaaaaucagccugcu

SEQ ID NO: 1223225 - RNA, 20 nt, Human
ccucugcccacucccugcaa

SEQ ID NO: 1223226 - RNA, 19 nt, Human
ccucugcccacucccugca

SEQ ID NO: 1223227 - RNA, 17 nt, Human
ccucugcccacucccug

SEQ ID NO: 1223228 - RNA, 22 nt, Human
cgcccaggcuuagucacugaga

SEQ ID NO: 1223229 - RNA, 12 nt, Human
cgcccagucugg

SEQ ID NO: 1223230 - RNA, 22 nt, Human
cagugguuccuaauccucuagg

SEQ ID NO: 1223231 - RNA, 16 nt, Human
caguggcagcugcuuu

SEQ ID NO: 1223232 - RNA, 15 nt, Human
caguggcagcugcuu

SEQ ID NO: 1223233 - RNA, 14 nt, Human
caguggcagcugcu

SEQ ID NO: 1223234 - RNA, 13 nt, Human
caguggcagcugc

SEQ ID NO: 1223235 - RNA, 12 nt, Human
caguggcagcug

SEQ ID NO: 1223236 - RNA, 12 nt, Human
cagugugacuga

SEQ ID NO: 1223237 - RNA, 14 nt, Human
cagugugacaagga

SEQ ID NO: 1223238 - RNA, 23 nt, Human
caguguacauggaauaacaugua

SEQ ID NO: 1223239 - RNA, 20 nt, Human
caguguacauggaauaacau

SEQ ID NO: 1223240 - RNA, 16 nt, Human
caguguacauggaaua

SEQ ID NO: 1223241 - RNA, 22 nt, Human
caguguuguggauuuaacagaa

SEQ ID NO: 1223242 - RNA, 20 nt, Human
caguguuguggauuuaacag

SEQ ID NO: 1223243 - RNA, 19 nt, Human
caguguuguggauuuaaca

SEQ ID NO: 1223244 - RNA, 14 nt, Human
caguuacucagaau

SEQ ID NO: 1223245 - RNA, 14 nt, Human
caguuaagagaaau

SEQ ID NO: 1223246 - RNA, 13 nt, Human
caguuaagagaaa

SEQ ID NO: 1223247 - RNA, 22 nt, Human
caguucucuccuucuucccccc

SEQ ID NO: 1223248 - RNA, 15 nt, Human
caguucucuccuucu

SEQ ID NO: 1223249 - RNA, 14 nt, Human
caguucucuccuuc

SEQ ID NO: 1223250 - RNA, 13 nt, Human
caguucucuccuu

SEQ ID NO: 1223251 - RNA, 19 nt, Human
caguugaaaaacagcugag

SEQ ID NO: 1223252 - RNA, 18 nt, Human
caguugaaaaacagcuga

SEQ ID NO: 1223253 - RNA, 12 nt, Human
caguugaaaaac

SEQ ID NO: 1223254 - RNA, 18 nt, Human
cauaccacuuuuguucuu

SEQ ID NO: 1223255 - RNA, 15 nt, Human
cauaccacuuuuguu

SEQ ID NO: 1223256 - RNA, 14 nt, Human
cauaccacuuuugu

SEQ ID NO: 1223257 - RNA, 13 nt, Human
cauaccacuuuug

SEQ ID NO: 1223258 - RNA, 12 nt, Human
cauacccacccc

SEQ ID NO: 1223259 - RNA, 11 nt, Human
cauacccaccc

SEQ ID NO: 1223260 - RNA, 19 nt, Human
cauaccacuuuuguucuug

SEQ ID NO: 1223261 - RNA, 14 nt, Human
cauaagauaaaugu

SEQ ID NO: 1223262 - RNA, 16 nt, Human
cauaaccuagccuuag

SEQ ID NO: 1223263 - RNA, 22 nt, Human
cauaaacaagaccacguuucua

SEQ ID NO: 1223264 - RNA, 21 nt, Human
cauaaacaagaccacguuucu

SEQ ID NO: 1223265 - RNA, 20 nt, Human
cauaaacaagaccacguuuc

SEQ ID NO: 1223266 - RNA, 21 nt, Human
cauaaaaauuagccaagugug

SEQ ID NO: 1223267 - RNA, 18 nt, Human
caguuguuagugugucuu

SEQ ID NO: 1223268 - RNA, 17 nt, Human
caguuguuagugugucu

SEQ ID NO: 1223269 - RNA, 22 nt, Human
caguuggucccccuuccaugga

SEQ ID NO: 1223270 - RNA, 21 nt, Human
caguuggucccccuuccaugg

SEQ ID NO: 1223271 - RNA, 20 nt, Human
caguuggucccccuuccaug

SEQ ID NO: 1223272 - RNA, 19 nt, Human
caguuggucccccuuccau

SEQ ID NO: 1223273 - RNA, 18 nt, Human
caguuggucccccuucca

SEQ ID NO: 1223274 - RNA, 19 nt, Human
caguuggguggaugccugg

SEQ ID NO: 1223275 - RNA, 18 nt, Human
caguuggguggaugccug

SEQ ID NO: 1223276 - RNA, 16 nt, Human
caguuggguggaugcc

SEQ ID NO: 1223277 - RNA, 23 nt, Human
caguugccagucaccccggccac

SEQ ID NO: 1223278 - RNA, 21 nt, Human
cauacccacccccacccaagg

SEQ ID NO: 1223279 - RNA, 18 nt, Human
cauacccacccccaccca

SEQ ID NO: 1223280 - RNA, 17 nt, Human
cauacccacccccaccc

SEQ ID NO: 1223281 - RNA, 14 nt, Human
cauacccaccccca

SEQ ID NO: 1223282 - RNA, 21 nt, Human
cauacuaaccagcagaaaugc

SEQ ID NO: 1223283 - RNA, 14 nt, Human
cauacuaaccagca

SEQ ID NO: 1223284 - RNA, 18 nt, Human
cauacguacacauuuuau

SEQ ID NO: 1223285 - RNA, 17 nt, Human
cauacguacacauuuua

SEQ ID NO: 1223286 - RNA, 16 nt, Human
cauacguacacauuuu

SEQ ID NO: 1223287 - RNA, 15 nt, Human
cauacguacacauuu

SEQ ID NO: 1223288 - RNA, 13 nt, Human
cauacguacacau

SEQ ID NO: 1223289 - RNA, 15 nt, Human
cauacucccaucugu

SEQ ID NO: 1223290 - RNA, 14 nt, Human
caucaagaugugac

SEQ ID NO: 1223291 - RNA, 20 nt, Human
cauauuuacuucuuauacau

SEQ ID NO: 1223292 - RNA, 17 nt, Human
cauauuuacuucuuaua

SEQ ID NO: 1223293 - RNA, 16 nt, Human
cauauuuacuucuuau

SEQ ID NO: 1223294 - RNA, 14 nt, Human
cauauuuacuucuu

SEQ ID NO: 1223295 - RNA, 13 nt, Human
cauaugccugggc

SEQ ID NO: 1223296 - RNA, 11 nt, Human
cauacucugcu

SEQ ID NO: 1223297 - RNA, 20 nt, Human
cauacucccaucugugaaag

SEQ ID NO: 1223298 - RNA, 18 nt, Human
cauacucccaucugugaa

SEQ ID NO: 1223299 - RNA, 16 nt, Human
cauacucccaucugug

SEQ ID NO: 1223300 - RNA, 21 nt, Human
cauagagagcaagacgcugug

SEQ ID NO: 1223301 - RNA, 19 nt, Human
cauagagagcaagacgcug

SEQ ID NO: 1223302 - RNA, 23 nt, Human
cauagagagcaagacgcugugcu

SEQ ID NO: 1223303 - RNA, 23 nt, Human
cauauauauguuuuaagaggcag

SEQ ID NO: 1223304 - RNA, 22 nt, Human
cauauauauguuuuaagaggca

SEQ ID NO: 1223305 - RNA, 19 nt, Human
cauaguaugguggcugggu

SEQ ID NO: 1223306 - RNA, 18 nt, Human
cauaguaugguggcuggg

SEQ ID NO: 1223307 - RNA, 20 nt, Human
cauaguaugguggcuggguu

SEQ ID NO: 1223308 - RNA, 22 nt, Human
cauaguggcuuaaaacaacacu

SEQ ID NO: 1223309 - RNA, 20 nt, Human
caucuugcucugcugacaga

SEQ ID NO: 1223310 - RNA, 15 nt, Human
caucuugcucugcug

SEQ ID NO: 1223311 - RNA, 14 nt, Human
caucuugcucugcu

SEQ ID NO: 1223312 - RNA, 13 nt, Human
caucuugcucugc

SEQ ID NO: 1223313 - RNA, 22 nt, Human
caucuuccaaggguacuaagga

SEQ ID NO: 1223314 - RNA, 15 nt, Human
caucuacccuccgau

SEQ ID NO: 1223315 - RNA, 21 nt, Human
cauccucuguacagagcccac

SEQ ID NO: 1223316 - RNA, 19 nt, Human
cauccucuguacagagccc

SEQ ID NO: 1223317 - RNA, 18 nt, Human
cauccucuguacagagcc

SEQ ID NO: 1223318 - RNA, 15 nt, Human
cauccucuguacaga

SEQ ID NO: 1223319 - RNA, 17 nt, Human
caucucacacaugagca

SEQ ID NO: 1223320 - RNA, 16 nt, Human
caucucacacaugagc

SEQ ID NO: 1223321 - RNA, 20 nt, Human
caucucacacaugagcauca

SEQ ID NO: 1223322 - RNA, 13 nt, Human
cauccucccaagg

SEQ ID NO: 1223323 - RNA, 22 nt, Human
cauccucauacccacccccacc

SEQ ID NO: 1223324 - RNA, 21 nt, Human
cauccucauacccacccccac

SEQ ID NO: 1223325 - RNA, 18 nt, Human
cauccucauacccacccc

SEQ ID NO: 1223326 - RNA, 17 nt, Human
cauccucauacccaccc

SEQ ID NO: 1223327 - RNA, 19 nt, Human
cauccuccucagaucuucu

SEQ ID NO: 1223328 - RNA, 18 nt, Human
cauccuccucagaucuuc

SEQ ID NO: 1223329 - RNA, 16 nt, Human
cauccuccucagaucu

SEQ ID NO: 1223330 - RNA, 15 nt, Human
cauccuccucagauc

SEQ ID NO: 1223331 - RNA, 12 nt, Human
cauccuccucag

SEQ ID NO: 1223332 - RNA, 11 nt, Human
cauccuccuca

SEQ ID NO: 1223333 - RNA, 16 nt, Human
cauccucauacccacc

SEQ ID NO: 1223334 - RNA, 15 nt, Human
cauccucauacccac

SEQ ID NO: 1223335 - RNA, 21 nt, Human
caucccugaaggccccgccca

SEQ ID NO: 1223336 - RNA, 19 nt, Human
caucccugaaggccccgcc

SEQ ID NO: 1223337 - RNA, 18 nt, Human
caucccugaaggccccgc

SEQ ID NO: 1223338 - RNA, 17 nt, Human
caucccugaaggccccg

SEQ ID NO: 1223339 - RNA, 22 nt, Human
caucccugaaggccccgcccag

SEQ ID NO: 1223340 - RNA, 21 nt, Human
caucauugaaaucuuuuugcu

SEQ ID NO: 1223341 - RNA, 20 nt, Human
caucauugaaaucuuuuugc

SEQ ID NO: 1223342 - RNA, 15 nt, Human
caucauugaaaucuu

SEQ ID NO: 1223343 - RNA, 14 nt, Human
caucauugaaaucu

SEQ ID NO: 1223344 - RNA, 13 nt, Human
caucauugaaauc

SEQ ID NO: 1223345 - RNA, 20 nt, Human
caucaccaacgucugugcca

SEQ ID NO: 1223346 - RNA, 15 nt, Human
caucaccaacgucug

SEQ ID NO: 1223347 - RNA, 13 nt, Human
caucccugaaggc

SEQ ID NO: 1223348 - RNA, 11 nt, Human
caucccugaag

SEQ ID NO: 1223349 - RNA, 19 nt, Human
caucccucuggggcuguuc

SEQ ID NO: 1223350 - RNA, 17 nt, Human
cauccagguucagcuug

SEQ ID NO: 1223351 - RNA, 15 nt, Human
cauccagguucagcu

SEQ ID NO: 1223352 - RNA, 15 nt, Human
cauguuuuguuuacg

SEQ ID NO: 1223353 - RNA, 21 nt, Human
cauuaaagccugaguuugcuu

SEQ ID NO: 1223354 - RNA, 18 nt, Human
cauguuuuucuucucccu

SEQ ID NO: 1223355 - RNA, 16 nt, Human
cauggucggaaaacau

SEQ ID NO: 1223356 - RNA, 23 nt, Human
caugucuuuucuugcaugaggcu

SEQ ID NO: 1223357 - RNA, 21 nt, Human
caugucuuuucuugcaugagg

SEQ ID NO: 1223358 - RNA, 19 nt, Human
caugucuuuucuugcauga

SEQ ID NO: 1223359 - RNA, 14 nt, Human
caugucuuuucuug

SEQ ID NO: 1223360 - RNA, 21 nt, Human
cauguaauuaaguacuaugua

SEQ ID NO: 1223361 - RNA, 18 nt, Human
cauguaauuaaguacuau

SEQ ID NO: 1223362 - RNA, 23 nt, Human
cauguuugauguaucugagcagg

SEQ ID NO: 1223363 - RNA, 22 nt, Human
caugugccagguuuuuggucug

SEQ ID NO: 1223364 - RNA, 21 nt, Human
caugugccagguuuuuggucu

SEQ ID NO: 1223365 - RNA, 15 nt, Human
caugugcacaugcac

SEQ ID NO: 1223366 - RNA, 17 nt, Human
caugggccuccugugug

SEQ ID NO: 1223367 - RNA, 16 nt, Human
caugggccuccugugu

SEQ ID NO: 1223368 - RNA, 15 nt, Human
caugggccuccugug

SEQ ID NO: 1223369 - RNA, 22 nt, Human
caugggaaugaaugucagugug

SEQ ID NO: 1223370 - RNA, 17 nt, Human
cauggucggaaaacaug

SEQ ID NO: 1223371 - RNA, 17 nt, Human
cauggagguuugaagau

SEQ ID NO: 1223372 - RNA, 13 nt, Human
cauggacuuuguu

SEQ ID NO: 1223373 - RNA, 11 nt, Human
cauggacuuug

SEQ ID NO: 1223374 - RNA, 18 nt, Human
caugggaaugaaugucag

SEQ ID NO: 1223375 - RNA, 16 nt, Human
cauggaguauauguca

SEQ ID NO: 1223376 - RNA, 18 nt, Human
cauggacaugaucuucuu

SEQ ID NO: 1223377 - RNA, 16 nt, Human
cauggaauaacaugua

SEQ ID NO: 1223378 - RNA, 22 nt, Human
cauggaaguacuauaauuuacc

SEQ ID NO: 1223379 - RNA, 20 nt, Human
cauggaaguacuauaauuua

SEQ ID NO: 1223380 - RNA, 22 nt, Human
caugcugucccuuacgugaguc

SEQ ID NO: 1223381 - RNA, 23 nt, Human
caugccuggauggggcugcaccg

SEQ ID NO: 1223382 - RNA, 21 nt, Human
caugccuggauggggcugcac

SEQ ID NO: 1223383 - RNA, 18 nt, Human
caugccuggauggggcug

SEQ ID NO: 1223384 - RNA, 13 nt, Human
caugccuggaugg

SEQ ID NO: 1223385 - RNA, 19 nt, Human
caugccucucucaggccaa

SEQ ID NO: 1223386 - RNA, 18 nt, Human
caugccucucucaggcca

SEQ ID NO: 1223387 - RNA, 17 nt, Human
caugccucucucaggcc

SEQ ID NO: 1223388 - RNA, 16 nt, Human
caugccucucucaggc

SEQ ID NO: 1223389 - RNA, 15 nt, Human
caugccucucucagg

SEQ ID NO: 1223390 - RNA, 14 nt, Human
caugccucucucag

SEQ ID NO: 1223391 - RNA, 13 nt, Human
caugccccugaac

SEQ ID NO: 1223392 - RNA, 20 nt, Human
caugccagcuuaucucaggg

SEQ ID NO: 1223393 - RNA, 19 nt, Human
caugccagcuuaucucagg

SEQ ID NO: 1223394 - RNA, 16 nt, Human
ccaacaucaacaucuu

SEQ ID NO: 1223395 - RNA, 16 nt, Human
ccaacauacucccauc

SEQ ID NO: 1223396 - RNA, 14 nt, Human
ccaacauacuccca

SEQ ID NO: 1223397 - RNA, 19 nt, Human
ccaaagcagugcaugcugu

SEQ ID NO: 1223398 - RNA, 22 nt, Human
ccaaauucuuucaguggcuacc

SEQ ID NO: 1223399 - RNA, 15 nt, Human
ccaaauucuuucagu

SEQ ID NO: 1223400 - RNA, 15 nt, Human
ccaagaccuucuccu

SEQ ID NO: 1223401 - RNA, 15 nt, Human
ccaacccucaucacc

SEQ ID NO: 1223402 - RNA, 14 nt, Human
ccaaagaugcagcc

SEQ ID NO: 1223403 - RNA, 13 nt, Human
ccaaagaugcagc

SEQ ID NO: 1223404 - RNA, 14 nt, Human
ccaagcaggacaug

SEQ ID NO: 1223405 - RNA, 14 nt, Human
ccaagcucccaggc

SEQ ID NO: 1223406 - RNA, 13 nt, Human
ccaagcucccagg

SEQ ID NO: 1223407 - RNA, 12 nt, Human
ccaagcucccag

SEQ ID NO: 1223408 - RNA, 13 nt, Human
ccacaagagccca

SEQ ID NO: 1223409 - RNA, 16 nt, Human
ccacaagacccuugug

SEQ ID NO: 1223410 - RNA, 18 nt, Human
ccacaaaggagagcuagc

SEQ ID NO: 1223411 - RNA, 14 nt, Human
ccaaggcuggggga

SEQ ID NO: 1223412 - RNA, 20 nt, Human
ccacaaguuaaauaaaucau

SEQ ID NO: 1223413 - RNA, 15 nt, Human
ccacaaguuaaauaa

SEQ ID NO: 1223414 - RNA, 21 nt, Human
ccacaagagcccaggccuccu

SEQ ID NO: 1223415 - RNA, 20 nt, Human
ccacaagagcccaggccucc

SEQ ID NO: 1223416 - RNA, 19 nt, Human
ccacaagagcccaggccuc

SEQ ID NO: 1223417 - RNA, 18 nt, Human
ccacaagagcccaggccu

SEQ ID NO: 1223418 - RNA, 17 nt, Human
ccacaagagcccaggcc

SEQ ID NO: 1223419 - RNA, 16 nt, Human
ccacaagagcccaggc

SEQ ID NO: 1223420 - RNA, 14 nt, Human
cauugaccugaggc

SEQ ID NO: 1223421 - RNA, 22 nt, Human
cauugaccugaggcccuucucu

SEQ ID NO: 1223422 - RNA, 13 nt, Human
cauugaccugagg

SEQ ID NO: 1223423 - RNA, 19 nt, Human
cauugaaaucuuuuugcuu

SEQ ID NO: 1223424 - RNA, 21 nt, Human
cauuucuuccacaagagccca

SEQ ID NO: 1223425 - RNA, 21 nt, Human
cauuuacuuuguguucaccuu

SEQ ID NO: 1223426 - RNA, 17 nt, Human
cauuuacuuuguguuca

SEQ ID NO: 1223427 - RNA, 19 nt, Human
cauuugaggucuguucuuu

SEQ ID NO: 1223428 - RNA, 18 nt, Human
cauuugaggucuguucuu

SEQ ID NO: 1223429 - RNA, 17 nt, Human
cauuugaggucuguucu

SEQ ID NO: 1223430 - RNA, 16 nt, Human
cauuugagcagggcuc

SEQ ID NO: 1223431 - RNA, 14 nt, Human
cauuugagcagggc

SEQ ID NO: 1223432 - RNA, 23 nt, Human
cauuucuuccacaagagcccagg

SEQ ID NO: 1223433 - RNA, 17 nt, Human
ccaaacucaccugcccc

SEQ ID NO: 1223434 - RNA, 21 nt, Human
ccaaaauaaaacuuuuuaaaa

SEQ ID NO: 1223435 - RNA, 18 nt, Human
ccaaaauaaaacuuuuua

SEQ ID NO: 1223436 - RNA, 20 nt, Human
cauuuuuaguagagacaggg

SEQ ID NO: 1223437 - RNA, 19 nt, Human
cauuuuuaguagagacagg

SEQ ID NO: 1223438 - RNA, 21 nt, Human
cauuuuuaagugcugcauuua

SEQ ID NO: 1223439 - RNA, 20 nt, Human
cauuuuuaagugcugcauuu

SEQ ID NO: 1223440 - RNA, 15 nt, Human
cauuuuuaagugcug

SEQ ID NO: 1223441 - RNA, 23 nt, Human
cauuuugggguacccacugcucu

SEQ ID NO: 1223442 - RNA, 22 nt, Human
cauuuugggguacccacugcuc

SEQ ID NO: 1223443 - RNA, 21 nt, Human
cauuuugggguacccacugcu

SEQ ID NO: 1223444 - RNA, 20 nt, Human
cauuuugggguacccacugc

SEQ ID NO: 1223445 - RNA, 24 nt, Human
cauuuugcuaaaugugaaugauga

SEQ ID NO: 1223446 - RNA, 21 nt, Human
cauuuugcuaaaugugaauga

SEQ ID NO: 1223447 - RNA, 18 nt, Human
cauuuugcuaaaugugaa

SEQ ID NO: 1223448 - RNA, 22 nt, Human
cauuugaggucuguucuuucca

SEQ ID NO: 1223449 - RNA, 22 nt, Human
cauuuuauuuuauuaugcauga

SEQ ID NO: 1223450 - RNA, 21 nt, Human
cauuuuauuuuauuaugcaug

SEQ ID NO: 1223451 - RNA, 19 nt, Human
cauuuuauuuuauuaugca

SEQ ID NO: 1223452 - RNA, 16 nt, Human
ccaucaugucuggcua

SEQ ID NO: 1223453 - RNA, 14 nt, Human
ccaucaugucuggc

SEQ ID NO: 1223454 - RNA, 21 nt, Human
ccauccucuguacagagccca

SEQ ID NO: 1223455 - RNA, 12 nt, Human
ccaucacccgcu

SEQ ID NO: 1223456 - RNA, 12 nt, Human
ccaucaagccac

SEQ ID NO: 1223457 - RNA, 19 nt, Human
ccauauucuguuggccagu

SEQ ID NO: 1223458 - RNA, 18 nt, Human
ccauauucuguuggccag

SEQ ID NO: 1223459 - RNA, 15 nt, Human
ccauauucuguuggc

SEQ ID NO: 1223460 - RNA, 23 nt, Human
ccauagagagcaagacgcugugc

SEQ ID NO: 1223461 - RNA, 22 nt, Human
ccagugguuccuaauccucuag

SEQ ID NO: 1223462 - RNA, 23 nt, Human
ccagggacagaggggguggccuc

SEQ ID NO: 1223463 - RNA, 14 nt, Human
ccagggacagaggg

SEQ ID NO: 1223464 - RNA, 19 nt, Human
ccaggccuccuacagcuug

SEQ ID NO: 1223465 - RNA, 18 nt, Human
ccaggccuccuacagcuu

SEQ ID NO: 1223466 - RNA, 13 nt, Human
ccaggccuccuac

SEQ ID NO: 1223467 - RNA, 20 nt, Human
ccaggcccucugcccacucc

SEQ ID NO: 1223468 - RNA, 19 nt, Human
ccaggcccucugcccacuc

SEQ ID NO: 1223469 - RNA, 18 nt, Human
ccaggcccucugcccacu

SEQ ID NO: 1223470 - RNA, 17 nt, Human
ccaggcccucugcccac

SEQ ID NO: 1223471 - RNA, 23 nt, Human
ccaggccccugccacccugggga

SEQ ID NO: 1223472 - RNA, 21 nt, Human
ccaggccccugccacccuggg

SEQ ID NO: 1223473 - RNA, 21 nt, Human
ccaggccagagggagugacag

SEQ ID NO: 1223474 - RNA, 14 nt, Human
ccaggccagaggga

SEQ ID NO: 1223475 - RNA, 15 nt, Human
ccaggagcagccaca

SEQ ID NO: 1223476 - RNA, 14 nt, Human
ccaggagcagccac

SEQ ID NO: 1223477 - RNA, 13 nt, Human
ccaggagcagcca

SEQ ID NO: 1223478 - RNA, 12 nt, Human
ccaggagcagcc

SEQ ID NO: 1223479 - RNA, 20 nt, Human
ccaggaagccagcaggcucu

SEQ ID NO: 1223480 - RNA, 19 nt, Human
ccaggaagccagcaggcuc

SEQ ID NO: 1223481 - RNA, 17 nt, Human
ccaggaagccagcaggc

SEQ ID NO: 1223482 - RNA, 15 nt, Human
ccaggaagccagcag

SEQ ID NO: 1223483 - RNA, 16 nt, Human
ccagcuguucagcugg

SEQ ID NO: 1223484 - RNA, 23 nt, Human
ccagcugugcucuggacaggcau

SEQ ID NO: 1223485 - RNA, 22 nt, Human
ccagcugugcucuggacaggca

SEQ ID NO: 1223486 - RNA, 21 nt, Human
ccagcugugcucuggacaggc

SEQ ID NO: 1223487 - RNA, 20 nt, Human
ccagcugugcucuggacagg

SEQ ID NO: 1223488 - RNA, 18 nt, Human
ccagcugugcucuggaca

SEQ ID NO: 1223489 - RNA, 15 nt, Human
ccagcugcuugggcu

SEQ ID NO: 1223490 - RNA, 18 nt, Human
ccagcugcuugggcuuca

SEQ ID NO: 1223491 - RNA, 16 nt, Human
ccagcugcuugggcuu

SEQ ID NO: 1223492 - RNA, 20 nt, Human
ccagcugcuugggcuucauc

SEQ ID NO: 1223493 - RNA, 15 nt, Human
cccagcgagcccugg

SEQ ID NO: 1223494 - RNA, 14 nt, Human
cccagcgagcccug

SEQ ID NO: 1223495 - RNA, 18 nt, Human
cccagcucugguccauag

SEQ ID NO: 1223496 - RNA, 16 nt, Human
cccagcucugguccau

SEQ ID NO: 1223497 - RNA, 15 nt, Human
cccagcucuggucca

SEQ ID NO: 1223498 - RNA, 14 nt, Human
cccagcucuggucc

SEQ ID NO: 1223499 - RNA, 13 nt, Human
cccagcucugguc

SEQ ID NO: 1223500 - RNA, 12 nt, Human
cccagcucuggu

SEQ ID NO: 1223501 - RNA, 14 nt, Human
cccaggaggccagc

SEQ ID NO: 1223502 - RNA, 18 nt, Human
cccaggagccccgaggcc

SEQ ID NO: 1223503 - RNA, 14 nt, Human
cccaggagccccga

SEQ ID NO: 1223504 - RNA, 13 nt, Human
cccaggagccccg

SEQ ID NO: 1223505 - RNA, 15 nt, Human
cccagccccauccuc

SEQ ID NO: 1223506 - RNA, 14 nt, Human
cccagccccauccu

SEQ ID NO: 1223507 - RNA, 14 nt, Human
cccagccccauccc

SEQ ID NO: 1223508 - RNA, 13 nt, Human
cccagccccaucc

SEQ ID NO: 1223509 - RNA, 19 nt, Human
cccagccccauccucugua

SEQ ID NO: 1223510 - RNA, 18 nt, Human
cccagccccauccucugu

SEQ ID NO: 1223511 - RNA, 12 nt, Human
cccagccccauc

SEQ ID NO: 1223512 - RNA, 11 nt, Human
cccagccccau

SEQ ID NO: 1223513 - RNA, 17 nt, Human
cccagccccaaugaaca

SEQ ID NO: 1223514 - RNA, 16 nt, Human
cccagcaagugagagc

SEQ ID NO: 1223515 - RNA, 18 nt, Human
cccaggaggccagccuug

SEQ ID NO: 1223516 - RNA, 15 nt, Human
cccacgcccccacug

SEQ ID NO: 1223517 - RNA, 14 nt, Human
cccacgcccccacu

SEQ ID NO: 1223518 - RNA, 13 nt, Human
cccacgcccccac

SEQ ID NO: 1223519 - RNA, 20 nt, Human
cccaccuuggcugcagggag

SEQ ID NO: 1223520 - RNA, 19 nt, Human
cccaccuuggcugcaggga

SEQ ID NO: 1223521 - RNA, 17 nt, Human
cccaccuuggcugcagg

SEQ ID NO: 1223522 - RNA, 16 nt, Human
cccaccuggccucugc

SEQ ID NO: 1223523 - RNA, 15 nt, Human
cccaccuggccucug

SEQ ID NO: 1223524 - RNA, 12 nt, Human
cccaccuggccu

SEQ ID NO: 1223525 - RNA, 21 nt, Human
ccauguuggccaggcuggucu

SEQ ID NO: 1223526 - RNA, 19 nt, Human
ccauguuggccaggcuggu

SEQ ID NO: 1223527 - RNA, 15 nt, Human
ccauguuggccaggc

SEQ ID NO: 1223528 - RNA, 16 nt, Human
ccauguuggccaggcu

SEQ ID NO: 1223529 - RNA, 14 nt, Human
ccauguuggccagg

SEQ ID NO: 1223530 - RNA, 13 nt, Human
ccauguuggccag

SEQ ID NO: 1223531 - RNA, 13 nt, Human
ccaugugccaggu

SEQ ID NO: 1223532 - RNA, 18 nt, Human
ccaugcuccuggcccacu

SEQ ID NO: 1223533 - RNA, 15 nt, Human
ccaugcuccuggccc

SEQ ID NO: 1223534 - RNA, 17 nt, Human
ccaugcugcccugugag

SEQ ID NO: 1223535 - RNA, 16 nt, Human
ccaugcugcccuguga

SEQ ID NO: 1223536 - RNA, 13 nt, Human
ccccaggaggcca

SEQ ID NO: 1223537 - RNA, 22 nt, Human
cccaugagccucagcauccugg

SEQ ID NO: 1223538 - RNA, 14 nt, Human
cccaugcugcccug

SEQ ID NO: 1223539 - RNA, 13 nt, Human
cccaugcugcccu

SEQ ID NO: 1223540 - RNA, 12 nt, Human
cccaugcugccc

SEQ ID NO: 1223541 - RNA, 20 nt, Human
cccaugagccucagcauccu

SEQ ID NO: 1223542 - RNA, 16 nt, Human
cccaugagccucagca

SEQ ID NO: 1223543 - RNA, 15 nt, Human
cccaugagccucagc

SEQ ID NO: 1223544 - RNA, 20 nt, Human
cccaucugugaaaggaaaga

SEQ ID NO: 1223545 - RNA, 18 nt, Human
cccaucucacacaugagc

SEQ ID NO: 1223546 - RNA, 13 nt, Human
cccaucucacaca

SEQ ID NO: 1223547 - RNA, 21 nt, Human
ccccaaauggaaaugggcaga

SEQ ID NO: 1223548 - RNA, 14 nt, Human
cccaguuagcucuc

SEQ ID NO: 1223549 - RNA, 20 nt, Human
cccagugguuccuaauccuc

SEQ ID NO: 1223550 - RNA, 17 nt, Human
cccagugccgagaagga

SEQ ID NO: 1223551 - RNA, 15 nt, Human
cccagugccgagaag

SEQ ID NO: 1223552 - RNA, 19 nt, Human
cccagucuggaaugcagug

SEQ ID NO: 1223553 - RNA, 18 nt, Human
cccagucuggaaugcagu

SEQ ID NO: 1223554 - RNA, 10 nt, Human
cccagucugg

SEQ ID NO: 1223555 - RNA, 15 nt, Human
cccaggcauucccca

SEQ ID NO: 1223556 - RNA, 23 nt, Human
cccaggcaggucuugaacuccug

SEQ ID NO: 1223557 - RNA, 16 nt, Human
cccaggaggccagccu

SEQ ID NO: 1223558 - RNA, 15 nt, Human
cccaggaggccagcc

SEQ ID NO: 1223559 - RNA, 18 nt, Human
cccaggcauuccccagga

SEQ ID NO: 1223560 - RNA, 17 nt, Human
cccaggcauuccccagg

SEQ ID NO: 1223561 - RNA, 13 nt, Human
cccagguuucuau

SEQ ID NO: 1223562 - RNA, 17 nt, Human
ccuccaggugcacaagc

SEQ ID NO: 1223563 - RNA, 12 nt, Human
ccuccaggugca

SEQ ID NO: 1223564 - RNA, 11 nt, Human
ccuccaggugc

SEQ ID NO: 1223565 - RNA, 14 nt, Human
ccucccaacucacc

SEQ ID NO: 1223566 - RNA, 17 nt, Human
ccucccaaagugcuggg

SEQ ID NO: 1223567 - RNA, 15 nt, Human
ccuccaugugggcua

SEQ ID NO: 1223568 - RNA, 12 nt, Human
ccuccauguggg

SEQ ID NO: 1223569 - RNA, 12 nt, Human
ccucauacccac

SEQ ID NO: 1223570 - RNA, 20 nt, Human
ccucaggugagaagcagagg

SEQ ID NO: 1223571 - RNA, 18 nt, Human
ccucaggugagaagcaga

SEQ ID NO: 1223572 - RNA, 14 nt, Human
ccuccucagaucuu

SEQ ID NO: 1223573 - RNA, 12 nt, Human
ccuccuccagcc

SEQ ID NO: 1223574 - RNA, 11 nt, Human
ccuccucagau

SEQ ID NO: 1223575 - RNA, 13 nt, Human
ccucccucuuucc

SEQ ID NO: 1223576 - RNA, 19 nt, Human
ccucccgaguagcugggac

SEQ ID NO: 1223577 - RNA, 18 nt, Human
ccucccgaguagcuggga

SEQ ID NO: 1223578 - RNA, 17 nt, Human
ccucccgaguagcuggg

SEQ ID NO: 1223579 - RNA, 20 nt, Human
ccucccgaauagcugggacu

SEQ ID NO: 1223580 - RNA, 19 nt, Human
ccucccgaauagcugggac

SEQ ID NO: 1223581 - RNA, 15 nt, Human
ccucccaacucaccc

SEQ ID NO: 1223582 - RNA, 18 nt, Human
ccucccgaauagcuggga

SEQ ID NO: 1223583 - RNA, 21 nt, Human
ccucccgaauagcugggacua

SEQ ID NO: 1223584 - RNA, 15 nt, Human
ccucuccccagcaag

SEQ ID NO: 1223585 - RNA, 22 nt, Human
ccucucccuuggauuguccccg

SEQ ID NO: 1223586 - RNA, 13 nt, Human
ccucucccuugga

SEQ ID NO: 1223587 - RNA, 20 nt, Human
ccucuccccagcaagugaga

SEQ ID NO: 1223588 - RNA, 21 nt, Human
ccuccuccagccgccaugcuc

SEQ ID NO: 1223589 - RNA, 21 nt, Human
ccucugacacacagcucuguc

SEQ ID NO: 1223590 - RNA, 20 nt, Human
ccucugacacacagcucugu

SEQ ID NO: 1223591 - RNA, 19 nt, Human
ccucugacacacagcucug

SEQ ID NO: 1223592 - RNA, 15 nt, Human
ccucugacacacagc

SEQ ID NO: 1223593 - RNA, 14 nt, Human
ccucugacacacag

SEQ ID NO: 1223594 - RNA, 13 nt, Human
ccucugacacaca

SEQ ID NO: 1223595 - RNA, 16 nt, Human
ccucugcccacucccu

SEQ ID NO: 1223596 - RNA, 13 nt, Human
ccucugcccacuc

SEQ ID NO: 1223597 - RNA, 19 nt, Human
ccucugcacuccccugcug

SEQ ID NO: 1223598 - RNA, 19 nt, Human
ccucugcagcaauaaagca

SEQ ID NO: 1223599 - RNA, 18 nt, Human
ccucugcagcaauaaagc

SEQ ID NO: 1223600 - RNA, 14 nt, Human
ccucugcagcaaua

SEQ ID NO: 1223601 - RNA, 18 nt, Human
ccucugcacuccccugcu

SEQ ID NO: 1223602 - RNA, 23 nt, Human
ccucugcacuccccugcugggug

SEQ ID NO: 1223603 - RNA, 17 nt, Human
ccucugcacuccccugc

SEQ ID NO: 1223604 - RNA, 16 nt, Human
ccucugcacuccccug

SEQ ID NO: 1223605 - RNA, 11 nt, Human
ccucugcacaa

SEQ ID NO: 1223606 - RNA, 14 nt, Human
ccucagcauccugg

SEQ ID NO: 1223607 - RNA, 16 nt, Human
ccucagaucuucugug

SEQ ID NO: 1223608 - RNA, 22 nt, Human
ccucagggucccugguggcagc

SEQ ID NO: 1223609 - RNA, 20 nt, Human
ccucagggucccugguggca

SEQ ID NO: 1223610 - RNA, 17 nt, Human
ccucagggucccuggug

SEQ ID NO: 1223611 - RNA, 16 nt, Human
ccucagggucccuggu

SEQ ID NO: 1223612 - RNA, 16 nt, Human
ccuauuagagaagaga

SEQ ID NO: 1223613 - RNA, 17 nt, Human
ccuauuagagaagagau

SEQ ID NO: 1223614 - RNA, 24 nt, Human
ccucacaguccuuaccagcagagc

SEQ ID NO: 1223615 - RNA, 23 nt, Human
ccucacaguccuuaccagcagag

SEQ ID NO: 1223616 - RNA, 18 nt, Human
ccuaggugacagagugag

SEQ ID NO: 1223617 - RNA, 15 nt, Human
ccuaggugacagagu

SEQ ID NO: 1223618 - RNA, 22 nt, Human
ccucaggugagaagcagaggaa

SEQ ID NO: 1223619 - RNA, 20 nt, Human
ccgggaagggggcugggaca

SEQ ID NO: 1223620 - RNA, 17 nt, Human
ccgggaagggggcuggg

SEQ ID NO: 1223621 - RNA, 13 nt, Human
cccuucccaccuc

SEQ ID NO: 1223622 - RNA, 12 nt, Human
cccuucccaccu

SEQ ID NO: 1223623 - RNA, 22 nt, Human
cccuuguggucccaccccacac

SEQ ID NO: 1223624 - RNA, 23 nt, Human
cccuugguuaggcauugugggaa

SEQ ID NO: 1223625 - RNA, 22 nt, Human
cccuugguuaggcauuguggga

SEQ ID NO: 1223626 - RNA, 17 nt, Human
cccuuggauuguccccg

SEQ ID NO: 1223627 - RNA, 19 nt, Human
ccuacagcuugaccgugag

SEQ ID NO: 1223628 - RNA, 22 nt, Human
ccuacaguugaaaaacagcuga

SEQ ID NO: 1223629 - RNA, 16 nt, Human
ccuaaaauucagugga

SEQ ID NO: 1223630 - RNA, 19 nt, Human
ccuacuguaauuugugaua

SEQ ID NO: 1223631 - RNA, 18 nt, Human
ccuacccacccuccuuuc

SEQ ID NO: 1223632 - RNA, 13 nt, Human
ccuacccacccuc

SEQ ID NO: 1223633 - RNA, 18 nt, Human
ccuacaggagugagcacu

SEQ ID NO: 1223634 - RNA, 13 nt, Human
ccuaggugacaga

SEQ ID NO: 1223635 - RNA, 21 nt, Human
ccuagaaauuccccacccuga

SEQ ID NO: 1223636 - RNA, 12 nt, Human
ccguuauuaaaa

SEQ ID NO: 1223637 - RNA, 13 nt, Human
cccugcccaccug

SEQ ID NO: 1223638 - RNA, 23 nt, Human
cccugccuccuuugugaggaagc

SEQ ID NO: 1223639 - RNA, 16 nt, Human
cccugccuccuuugug

SEQ ID NO: 1223640 - RNA, 18 nt, Human
cccugccacccuggggag

SEQ ID NO: 1223641 - RNA, 17 nt, Human
cccugccacccugggga

SEQ ID NO: 1223642 - RNA, 15 nt, Human
cccugccacccuggg

SEQ ID NO: 1223643 - RNA, 14 nt, Human
cccugccacccugg

SEQ ID NO: 1223644 - RNA, 12 nt, Human
cccugccacccu

SEQ ID NO: 1223645 - RNA, 20 nt, Human
cccugcagagggcacagaaa

SEQ ID NO: 1223646 - RNA, 18 nt, Human
cccugcagagggcacaga

SEQ ID NO: 1223647 - RNA, 12 nt, Human
cccugcagaggg

SEQ ID NO: 1223648 - RNA, 22 nt, Human
cccugcaaccugauugugucuc

SEQ ID NO: 1223649 - RNA, 13 nt, Human
cccugcugguuca

SEQ ID NO: 1223650 - RNA, 20 nt, Human
cccugcugguucaggguugg

SEQ ID NO: 1223651 - RNA, 19 nt, Human
cccugcugguucaggguug

SEQ ID NO: 1223652 - RNA, 22 nt, Human
cccugguggcagugggagcugc

SEQ ID NO: 1223653 - RNA, 14 nt, Human
cccugguggcagcu

SEQ ID NO: 1223654 - RNA, 22 nt, Human
cccucauccucauacccacccc

SEQ ID NO: 1223655 - RNA, 21 nt, Human
cccuccaagaccuucuccuuc

SEQ ID NO: 1223656 - RNA, 20 nt, Human
cccucauccucauacccacc

SEQ ID NO: 1223657 - RNA, 17 nt, Human
cccucauccucauaccc

SEQ ID NO: 1223658 - RNA, 22 nt, Human
cccucaucaccaacgucugugc

SEQ ID NO: 1223659 - RNA, 20 nt, Human
cccucagucuggcccuuccu

SEQ ID NO: 1223660 - RNA, 21 nt, Human
cccucagggucccugguggca

SEQ ID NO: 1223661 - RNA, 13 nt, Human
cccucccucuuuc

SEQ ID NO: 1223662 - RNA, 23 nt, Human
cccucccucuuucccucccuucc

SEQ ID NO: 1223663 - RNA, 17 nt, Human
cccuccaugugggcuag

SEQ ID NO: 1223664 - RNA, 19 nt, Human
cccucagggucccuggugg

SEQ ID NO: 1223665 - RNA, 18 nt, Human
cccucagggucccuggug

SEQ ID NO: 1223666 - RNA, 17 nt, Human
cccucagggucccuggu

SEQ ID NO: 1223667 - RNA, 16 nt, Human
cccucagggucccugg

SEQ ID NO: 1223668 - RNA, 15 nt, Human
cccucagggucccug

SEQ ID NO: 1223669 - RNA, 22 nt, Human
cccuaaaguguauuuuuuuacu

SEQ ID NO: 1223670 - RNA, 17 nt, Human
cccuaaaguguauuuuu

SEQ ID NO: 1223671 - RNA, 16 nt, Human
cccggcaggguccuag

SEQ ID NO: 1223672 - RNA, 15 nt, Human
ccccagccccauccu

SEQ ID NO: 1223673 - RNA, 13 nt, Human
ccccagccugcua

SEQ ID NO: 1223674 - RNA, 15 nt, Human
ccccuggcagccccu

SEQ ID NO: 1223675 - RNA, 14 nt, Human
ccccuggcagcccc

SEQ ID NO: 1223676 - RNA, 12 nt, Human
ccccuggcagcc

SEQ ID NO: 1223677 - RNA, 22 nt, Human
ccccaggugguuauggagaggg

SEQ ID NO: 1223678 - RNA, 12 nt, Human
ccccaggaggcc

SEQ ID NO: 1223679 - RNA, 21 nt, Human
cccgaggccuucucugaagga

SEQ ID NO: 1223680 - RNA, 20 nt, Human
cccgaggccuucucugaagg

SEQ ID NO: 1223681 - RNA, 15 nt, Human
cccgaggccuucucu

SEQ ID NO: 1223682 - RNA, 22 nt, Human
cccgcuaagagggagggagggc

SEQ ID NO: 1223683 - RNA, 22 nt, Human
ccccuguccccgcacugggcuu

SEQ ID NO: 1223684 - RNA, 18 nt, Human
gcaucaagaugugacaug

SEQ ID NO: 1223685 - RNA, 14 nt, Human
aucucucgugauug

SEQ ID NO: 1223686 - RNA, 21 nt, Hepatitis A virus
aauuucugagguuuguuuauu

SEQ ID NO: 1223687 - RNA, 14 nt, Hepatitis A virus
acaaauuuucuuaa

SEQ ID NO: 1223688 - RNA, 12 nt, Hepatitis A virus
uuuucuuaaaau

SEQ ID NO: 1223689 - RNA, 18 nt, Hepatitis A virus
uucugagguuuguuuauu

SEQ ID NO: 1223690 - RNA, 21 nt, Hepatitis A virus
uuuucuuaaaauuucugaggu

SEQ ID NO: 1223691 - RNA, 13 nt, Hepatitis A virus
uuuuaucaguaaa

SEQ ID NO: 1223692 - RNA, 13 nt, Hepatitis A virus
aaacaaauuuucu

SEQ ID NO: 1223693 - RNA, 17 nt, Hepatitis A virus
uucuuaaaauuucugag

SEQ ID NO: 1223694 - RNA, 13 nt, Hepatitis A virus
ucuuaaaauuucu

SEQ ID NO: 1223695 - RNA, 13 nt, Hepatitis A virus
uuaaaauuucuga

SEQ ID NO: 1223696 - RNA, 15 nt, Hepatitis A virus
ucuuaaaauuucuga

SEQ ID NO: 1223697 - RNA, 15 nt, Hepatitis A virus
cuuaaaauuucugag

SEQ ID NO: 1223698 - RNA, 14 nt, Hepatitis A virus
cuuuuaucaguaaa

SEQ ID NO: 1223699 - RNA, 16 nt, Hepatitis A virus
cugagguuuguuuauu

SEQ ID NO: 1223700 - RNA, 17 nt, Hepatitis A virus
uauuucuuuuaucagua

SEQ ID NO: 1223701 - RNA, 19 nt, Hepatitis A virus
cuuaaaauuucugagguuu

SEQ ID NO: 1223702 - RNA, 21 nt, Hepatitis A virus
uaaacaaauuuucuuaaaauu

SEQ ID NO: 1223703 - RNA, 22 nt, Hepatitis A virus
acaaauuuucuuaaaauuucug

SEQ ID NO: 1223704 - RNA, 15 nt, Hepatitis A virus
cuuuuaucaguaaau

SEQ ID NO: 1223705 - RNA, 13 nt, Hepatitis A virus
aauuucugagguu

SEQ ID NO: 1223706 - RNA, 20 nt, Hepatitis A virus
uguuuaaacaaauuuucuua

SEQ ID NO: 1223707 - RNA, 15 nt, Hepatitis A virus
uguuuauuucuuuua

SEQ ID NO: 1223708 - RNA, 22 nt, Hepatitis A virus
uguuuaaacaaauuuucuuaaa

SEQ ID NO: 1223709 - RNA, 23 nt, Hepatitis A virus
caaauuuucuuaaaauuucugag

SEQ ID NO: 1223710 - RNA, 20 nt, Hepatitis A virus
uuuaaacaaauuuucuuaaa

SEQ ID NO: 1223711 - RNA, 24 nt, Hepatitis A virus
uguuuaaacaaauuuucuuaaaau

SEQ ID NO: 1223712 - RNA, 15 nt, Hepatitis A virus
guuuauuucuuuuau

SEQ ID NO: 1223713 - RNA, 18 nt, Hepatitis A virus
auuucuuuuaucaguaaa

SEQ ID NO: 1223714 - RNA, 20 nt, Hepatitis A virus
aauuuucuuaaaauuucuga

SEQ ID NO: 1223715 - RNA, 23 nt, Hepatitis A virus
guuuauuucuuuuaucaguaaau

SEQ ID NO: 1223716 - RNA, 21 nt, Hepatitis A virus
auuuucuuaaaauuucugagg

SEQ ID NO: 1223717 - RNA, 16 nt, Human
aauauauaucaaauau

SEQ ID NO: 1223718 - RNA, 20 nt, Human
aaugaauacuuuauaaagga

SEQ ID NO: 1223719 - RNA, 20 nt, Human
aaugaagauacugaaauaaa

SEQ ID NO: 1223720 - RNA, 14 nt, Human
aaugaagcaaugcu

SEQ ID NO: 1223721 - RNA, 16 nt, Human
aaucucaauauuucag

SEQ ID NO: 1223722 - RNA, 17 nt, Human
aaucucaauucuucccu

SEQ ID NO: 1223723 - RNA, 11 nt, Human
aauaaagcaau

SEQ ID NO: 1223724 - RNA, 12 nt, Human
aauaaagcaauu

SEQ ID NO: 1223725 - RNA, 14 nt, Human
aaguugaauuuauu

SEQ ID NO: 1223726 - RNA, 15 nt, Human
aaguugaauuuauug

SEQ ID NO: 1223727 - RNA, 17 nt, Human
aaguugaauuuauuggc

SEQ ID NO: 1223728 - RNA, 12 nt, Human
aaguugaauuuu

SEQ ID NO: 1223729 - RNA, 23 nt, Human
aaguugaauuuauuggcuuuucu

SEQ ID NO: 1223730 - RNA, 24 nt, Human
aaguugaauuuauuggcuuuucug

SEQ ID NO: 1223731 - RNA, 19 nt, Human
aauaaacacucuugaaaaa

SEQ ID NO: 1223732 - RNA, 15 nt, Human
aaguuuaauauuaaa

SEQ ID NO: 1223733 - RNA, 17 nt, Human
aaguuuaauauuaaagc

SEQ ID NO: 1223734 - RNA, 18 nt, Human
aaguuuaauauuaaagcc

SEQ ID NO: 1223735 - RNA, 11 nt, Human
aauaaacacuc

SEQ ID NO: 1223736 - RNA, 16 nt, Human
aauaaacacucuugaa

SEQ ID NO: 1223737 - RNA, 22 nt, Human
aagacaagaacuccccuuuuuu

SEQ ID NO: 1223738 - RNA, 15 nt, Human
aagaagacugcauua

SEQ ID NO: 1223739 - RNA, 20 nt, Human
aagaagacugcauuauauuu

SEQ ID NO: 1223740 - RNA, 21 nt, Human
aagacaaggaaaaaauaacaa

SEQ ID NO: 1223741 - RNA, 15 nt, Human
aagaacugaaaucau

SEQ ID NO: 1223742 - RNA, 13 nt, Human
aagaacugaaauc

SEQ ID NO: 1223743 - RNA, 12 nt, Human
aagaacugaaau

SEQ ID NO: 1223744 - RNA, 11 nt, Human
aagaacugaaa

SEQ ID NO: 1223745 - RNA, 14 nt, Human
aagaacggaagaag

SEQ ID NO: 1223746 - RNA, 15 nt, Human
aagagaucaggaaga

SEQ ID NO: 1223747 - RNA, 16 nt, Human
aagagaucaggaagag

SEQ ID NO: 1223748 - RNA, 22 nt, Human
aagagaucaggaagagaaggag

SEQ ID NO: 1223749 - RNA, 19 nt, Human
aaggcagggaggaggcaga

SEQ ID NO: 1223750 - RNA, 23 nt, Human
aaggacuuguuagaucuaguuca

SEQ ID NO: 1223751 - RNA, 15 nt, Human
aaggacuuguuagau

SEQ ID NO: 1223752 - RNA, 21 nt, Human
aaggacuuguuagaucuaguu

SEQ ID NO: 1223753 - RNA, 13 nt, Human
aagcuacuuauug

SEQ ID NO: 1223754 - RNA, 22 nt, Human
aaaccgaacugauguaaguaaa

SEQ ID NO: 1223755 - RNA, 14 nt, Human
aaaccaguauugua

SEQ ID NO: 1223756 - RNA, 16 nt, Human
aaaccaguauuguaca

SEQ ID NO: 1223757 - RNA, 17 nt, Human
aaaccaguauuguacaa

SEQ ID NO: 1223758 - RNA, 18 nt, Human
aaaccaguauuguacaaa

SEQ ID NO: 1223759 - RNA, 22 nt, Human
aaaccaguauuguacaaaguau

SEQ ID NO: 1223760 - RNA, 14 nt, Human
aaagccauguuuau

SEQ ID NO: 1223761 - RNA, 16 nt, Human
aaagccauguuuauua

SEQ ID NO: 1223762 - RNA, 17 nt, Human
aaagccauguuuauuac

SEQ ID NO: 1223763 - RNA, 18 nt, Human
aaagccauguuuauuaca

SEQ ID NO: 1223764 - RNA, 23 nt, Human
aaagccauguuuauuacaguaua

SEQ ID NO: 1223765 - RNA, 20 nt, Human
aaaaguuuaauauuaaagcc

SEQ ID NO: 1223766 - RNA, 18 nt, Human
aaaaguuuaauauuaaag

SEQ ID NO: 1223767 - RNA, 18 nt, Human
aaaaguugaauuuuacau

SEQ ID NO: 1223768 - RNA, 14 nt, Human
aaaaguuuaauauu

SEQ ID NO: 1223769 - RNA, 16 nt, Human
aaaaguuuaauauuaa

SEQ ID NO: 1223770 - RNA, 11 nt, Human
aaaagaaugau

SEQ ID NO: 1223771 - RNA, 20 nt, Human
aaaagacaaggaaaaaauaa

SEQ ID NO: 1223772 - RNA, 15 nt, Human
aaaagaaaauuuuug

SEQ ID NO: 1223773 - RNA, 16 nt, Human
aaaucucaauucuucc

SEQ ID NO: 1223774 - RNA, 18 nt, Human
aaaucucaauauuucaga

SEQ ID NO: 1223775 - RNA, 14 nt, Human
aaaugaaaaaauau

SEQ ID NO: 1223776 - RNA, 21 nt, Human
aaauggacuguggugacuuug

SEQ ID NO: 1223777 - RNA, 23 nt, Human
aaauggacuguggugacuuugga

SEQ ID NO: 1223778 - RNA, 13 nt, Human
aaauauuuauuuu

SEQ ID NO: 1223779 - RNA, 22 nt, Human
aaauauuguuuuacaauaguuc

SEQ ID NO: 1223780 - RNA, 23 nt, Human
aaauguugacaugggacauuugc

SEQ ID NO: 1223781 - RNA, 22 nt, Human
aaauguugacaugggacauuug

SEQ ID NO: 1223782 - RNA, 18 nt, Human
aaccuuuguuugcaucug

SEQ ID NO: 1223783 - RNA, 12 nt, Human
aacaucuuuaag

SEQ ID NO: 1223784 - RNA, 18 nt, Human
aacaucuuuaaggggagg

SEQ ID NO: 1223785 - RNA, 21 nt, Human
acacgcacggcagccacagcu

SEQ ID NO: 1223786 - RNA, 11 nt, Human
aauuguaauag

SEQ ID NO: 1223787 - RNA, 14 nt, Human
aauuguaauuauau

SEQ ID NO: 1223788 - RNA, 15 nt, Human
aauuguaauuauauc

SEQ ID NO: 1223789 - RNA, 16 nt, Human
aauuguaauuauaucu

SEQ ID NO: 1223790 - RNA, 17 nt, Human
aauuguaauuauaucug

SEQ ID NO: 1223791 - RNA, 15 nt, Human
aauuuccugggagcu

SEQ ID NO: 1223792 - RNA, 12 nt, Human
aauuuccuggga

SEQ ID NO: 1223793 - RNA, 17 nt, Human
aauuuccugggagcuuu

SEQ ID NO: 1223794 - RNA, 23 nt, Human
aauucuaccaaggucuucuuaau

SEQ ID NO: 1223795 - RNA, 15 nt, Human
aauuggggauucuua

SEQ ID NO: 1223796 - RNA, 12 nt, Human
aauucuguauag

SEQ ID NO: 1223797 - RNA, 13 nt, Human
aauucuguauaga

SEQ ID NO: 1223798 - RNA, 14 nt, Human
aauucuguauagau

SEQ ID NO: 1223799 - RNA, 20 nt, Human
aauucuguauagauuagaga

SEQ ID NO: 1223800 - RNA, 18 nt, Human
aauuaugaaacuuuugga

SEQ ID NO: 1223801 - RNA, 23 nt, Human
aauuaucuauagcuaaguacaca

SEQ ID NO: 1223802 - RNA, 15 nt, Human
aauuaugaaacuuuu

SEQ ID NO: 1223803 - RNA, 13 nt, Human
aauuaugaaacuu

SEQ ID NO: 1223804 - RNA, 12 nt, Human
aauuaugaaacu

SEQ ID NO: 1223805 - RNA, 15 nt, Human
aauuaucuauagcua

SEQ ID NO: 1223806 - RNA, 22 nt, Human
aauuaucuauagcuaaguacac

SEQ ID NO: 1223807 - RNA, 20 nt, Human
aauuauaucugaggaauucu

SEQ ID NO: 1223808 - RNA, 22 nt, Human
aauuauaucugaggaauucugu

SEQ ID NO: 1223809 - RNA, 23 nt, Human
aauuauaucugaggaauucugua

SEQ ID NO: 1223810 - RNA, 19 nt, Human
aauuauaugcuauuucuau

SEQ ID NO: 1223811 - RNA, 20 nt, Human
aauuauaugcuauuucuaua

SEQ ID NO: 1223812 - RNA, 21 nt, Human
aauuauaugcuauuucuauau

SEQ ID NO: 1223813 - RNA, 14 nt, Human
acauguuaaaccau

SEQ ID NO: 1223814 - RNA, 16 nt, Human
acauguuaaaccaugg

SEQ ID NO: 1223815 - RNA, 21 nt, Human
acauguuaaaccaugggauaa

SEQ ID NO: 1223816 - RNA, 23 nt, Human
acauguuaaaccaugggauaaau

SEQ ID NO: 1223817 - RNA, 20 nt, Human
acauaaguauuuaauucaug

SEQ ID NO: 1223818 - RNA, 20 nt, Human
acaucccuuaccugggaaag

SEQ ID NO: 1223819 - RNA, 21 nt, Human
acauuuguauaaaauaauuuu

SEQ ID NO: 1223820 - RNA, 19 nt, Human
acauuuguauaaaauaauu

SEQ ID NO: 1223821 - RNA, 16 nt, Human
acauuuguauaaaaua

SEQ ID NO: 1223822 - RNA, 16 nt, Human
acauuugcucauggaa

SEQ ID NO: 1223823 - RNA, 15 nt, Human
acauuugcucaugga

SEQ ID NO: 1223824 - RNA, 24 nt, Human
acaggaugguucccuugaugaaga

SEQ ID NO: 1223825 - RNA, 23 nt, Human
acagugaucaaguuauuuuuaau

SEQ ID NO: 1223826 - RNA, 13 nt, Human
acuguaagaaaau

SEQ ID NO: 1223827 - RNA, 22 nt, Human
acugucuuuuuucuaaaguaaa

SEQ ID NO: 1223828 - RNA, 23 nt, Human
acugucuuuuuucuaaaguaaaa

SEQ ID NO: 1223829 - RNA, 16 nt, Human
acugucuuuuuucuaa

SEQ ID NO: 1223830 - RNA, 15 nt, Human
acugccuauuuuaau

SEQ ID NO: 1223831 - RNA, 17 nt, Human
acuguaaaauaauaacu

SEQ ID NO: 1223832 - RNA, 20 nt, Human
acuggugacugauucuucag

SEQ ID NO: 1223833 - RNA, 18 nt, Human
acuggugacugauucuuc

SEQ ID NO: 1223834 - RNA, 19 nt, Human
acuggugacugauucuuca

SEQ ID NO: 1223835 - RNA, 19 nt, Human
acuucaaauccuugaagau

SEQ ID NO: 1223836 - RNA, 18 nt, Human
acuucaaauccuugaaga

SEQ ID NO: 1223837 - RNA, 17 nt, Human
acuucaaauccuugaag

SEQ ID NO: 1223838 - RNA, 21 nt, Human
acuucuuuuuucaaaagaaag

SEQ ID NO: 1223839 - RNA, 22 nt, Human
acuucuuuuuucaaaagaaagu

SEQ ID NO: 1223840 - RNA, 23 nt, Human
acuucuuuuuucaaaagaaaguc

SEQ ID NO: 1223841 - RNA, 12 nt, Human
acuugaaaauua

SEQ ID NO: 1223842 - RNA, 14 nt, Human
acuugaaaauuaac

SEQ ID NO: 1223843 - RNA, 16 nt, Human
acuugaaaauuaacau

SEQ ID NO: 1223844 - RNA, 17 nt, Human
acuucagcgguuuauau

SEQ ID NO: 1223845 - RNA, 18 nt, Human
acuucuuuaauuuuggaa

SEQ ID NO: 1223846 - RNA, 19 nt, Human
acuucuuuaauuuuggaau

SEQ ID NO: 1223847 - RNA, 20 nt, Human
acuucuuuaauuuuggaauu

SEQ ID NO: 1223848 - RNA, 20 nt, Human
acuccgugcuuaaccaaaga

SEQ ID NO: 1223849 - RNA, 19 nt, Human
acucguuaauuuguagugu

SEQ ID NO: 1223850 - RNA, 14 nt, Human
acucguuaauuugu

SEQ ID NO: 1223851 - RNA, 22 nt, Human
acugauuugacauagucuggcu

SEQ ID NO: 1223852 - RNA, 19 nt, Human
acugauaugggucuugaua

SEQ ID NO: 1223853 - RNA, 14 nt, Human
acugauuacugccu

SEQ ID NO: 1223854 - RNA, 20 nt, Human
acugaauuaugaaacuuuug

SEQ ID NO: 1223855 - RNA, 15 nt, Human
acugaauuaugaaac

SEQ ID NO: 1223856 - RNA, 14 nt, Human
acugaauuaugaaa

SEQ ID NO: 1223857 - RNA, 13 nt, Human
acugaauuaugaa

SEQ ID NO: 1223858 - RNA, 20 nt, Human
accuguggaacauaaaaagg

SEQ ID NO: 1223859 - RNA, 23 nt, Human
accuguggaacauaaaaaggaca

SEQ ID NO: 1223860 - RNA, 20 nt, Human
acuaauguguaagacaaaaa

SEQ ID NO: 1223861 - RNA, 18 nt, Human
acgugcucugugggucuc

SEQ ID NO: 1223862 - RNA, 14 nt, Human
acgucuuaaauauu

SEQ ID NO: 1223863 - RNA, 13 nt, Human
acgucuuaaauau

SEQ ID NO: 1223864 - RNA, 15 nt, Human
acccucacacuggga

SEQ ID NO: 1223865 - RNA, 16 nt, Human
acccuaaauaauaaaa

SEQ ID NO: 1223866 - RNA, 20 nt, Human
acccuaaauaauaaaaauaa

SEQ ID NO: 1223867 - RNA, 13 nt, Human
acccuaaccaagu

SEQ ID NO: 1223868 - RNA, 14 nt, Human
acccuaaccaaguu

SEQ ID NO: 1223869 - RNA, 15 nt, Human
acccuaaccaaguuc

SEQ ID NO: 1223870 - RNA, 16 nt, Human
acccuaaccaaguucc

SEQ ID NO: 1223871 - RNA, 17 nt, Human
acccuaaccaaguuccu

SEQ ID NO: 1223872 - RNA, 13 nt, Human
acccuagcaaaag

SEQ ID NO: 1223873 - RNA, 13 nt, Human
acccucaugcugu

SEQ ID NO: 1223874 - RNA, 12 nt, Human
acccucaugcug

SEQ ID NO: 1223875 - RNA, 14 nt, Human
auacaauuuuguuu

SEQ ID NO: 1223876 - RNA, 16 nt, Human
auacaauuuuguuucu

SEQ ID NO: 1223877 - RNA, 17 nt, Human
auacaauuuuguuucug

SEQ ID NO: 1223878 - RNA, 18 nt, Human
auacaauuuuguuucugu

SEQ ID NO: 1223879 - RNA, 18 nt, Human
auaagcuuaugcuuaaau

SEQ ID NO: 1223880 - RNA, 17 nt, Human
agugcucauuucaggau

SEQ ID NO: 1223881 - RNA, 20 nt, Human
aguggcaucaucucagcuca

SEQ ID NO: 1223882 - RNA, 19 nt, Human
aguggcaucaucucagcuc

SEQ ID NO: 1223883 - RNA, 11 nt, Human
aguguuucuuu

SEQ ID NO: 1223884 - RNA, 15 nt, Human
aguuaacuauugcau

SEQ ID NO: 1223885 - RNA, 17 nt, Human
aguuaacuauugcauuu

SEQ ID NO: 1223886 - RNA, 19 nt, Human
aguuaacuauugcauuuau

SEQ ID NO: 1223887 - RNA, 24 nt, Human
aguuaacuauugcauuuauaugua

SEQ ID NO: 1223888 - RNA, 20 nt, Human
aguuaacuauugcauuuaua

SEQ ID NO: 1223889 - RNA, 16 nt, Human
auaaaagacagugaaa

SEQ ID NO: 1223890 - RNA, 16 nt, Human
auaaaaaauuaugaca

SEQ ID NO: 1223891 - RNA, 13 nt, Human
auaaaaagaauga

SEQ ID NO: 1223892 - RNA, 17 nt, Human
aguaacuacaguuaggg

SEQ ID NO: 1223893 - RNA, 19 nt, Human
aguaacuacaguuagggcu

SEQ ID NO: 1223894 - RNA, 22 nt, Human
aguauauugauccagaaagaaa

SEQ ID NO: 1223895 - RNA, 19 nt, Human
agucuggcuguacccagga

SEQ ID NO: 1223896 - RNA, 21 nt, Human
agucuggcuguacccaggaau

SEQ ID NO: 1223897 - RNA, 24 nt, Human
augcauauuauuuuauguugcaua

SEQ ID NO: 1223898 - RNA, 23 nt, Human
auggcuuccuggcaauagucaaa

SEQ ID NO: 1223899 - RNA, 15 nt, Human
auggcuuuguauaga

SEQ ID NO: 1223900 - RNA, 16 nt, Human
auggcuuuguauagaa

SEQ ID NO: 1223901 - RNA, 18 nt, Human
auggcuuuguauagaacc

SEQ ID NO: 1223902 - RNA, 20 nt, Human
augggacauuugcucaugga

SEQ ID NO: 1223903 - RNA, 21 nt, Human
augggacauuugcucauggaa

SEQ ID NO: 1223904 - RNA, 11 nt, Human
aucuaggauuu

SEQ ID NO: 1223905 - RNA, 19 nt, Human
aucuaggauuuuaagggaa

SEQ ID NO: 1223906 - RNA, 12 nt, Human
augaggccagac

SEQ ID NO: 1223907 - RNA, 13 nt, Human
augaggccagacc

SEQ ID NO: 1223908 - RNA, 14 nt, Human
augaggccagacca

SEQ ID NO: 1223909 - RNA, 17 nt, Human
augaggccagaccaugg

SEQ ID NO: 1223910 - RNA, 21 nt, Human
augaauacauuuccaaaaugg

SEQ ID NO: 1223911 - RNA, 14 nt, Human
augaauacauuucc

SEQ ID NO: 1223912 - RNA, 20 nt, Human
augaagccuccuuagaaaaa

SEQ ID NO: 1223913 - RNA, 16 nt, Human
augaaacuuuuggaag

SEQ ID NO: 1223914 - RNA, 18 nt, Human
augaaacuuguguaaaua

SEQ ID NO: 1223915 - RNA, 18 nt, Human
auauuuuuuucugaaauu

SEQ ID NO: 1223916 - RNA, 16 nt, Human
auauuuuuuucugaaa

SEQ ID NO: 1223917 - RNA, 14 nt, Human
auauuuuuuucuga

SEQ ID NO: 1223918 - RNA, 19 nt, Human
auauuuuuuucugaaauuu

SEQ ID NO: 1223919 - RNA, 23 nt, Human
auccacuuuaucuugaauaaugu

SEQ ID NO: 1223920 - RNA, 23 nt, Human
auccagccuaacuuacauucuua

SEQ ID NO: 1223921 - RNA, 19 nt, Human
auccagccuggggcugagg

SEQ ID NO: 1223922 - RNA, 18 nt, Human
auccagcagauuauucac

SEQ ID NO: 1223923 - RNA, 21 nt, Human
auccagccuggggcugaggcu

SEQ ID NO: 1223924 - RNA, 14 nt, Human
auccaggccggcuu

SEQ ID NO: 1223925 - RNA, 23 nt, Human
auccaggccggcuugccacaccc

SEQ ID NO: 1223926 - RNA, 12 nt, Human
auccuugaagau

SEQ ID NO: 1223927 - RNA, 17 nt, Human
auccagggggcaagagg

SEQ ID NO: 1223928 - RNA, 12 nt, Human
aucccccagaaa

SEQ ID NO: 1223929 - RNA, 17 nt, Human
aucccccagaaaagaaa

SEQ ID NO: 1223930 - RNA, 13 nt, Human
agaacaucccucc

SEQ ID NO: 1223931 - RNA, 17 nt, Human
agaacaucccuccuggg

SEQ ID NO: 1223932 - RNA, 17 nt, Human
agaaugauuaugaauua

SEQ ID NO: 1223933 - RNA, 21 nt, Human
agaagacugcauuauauuuau

SEQ ID NO: 1223934 - RNA, 19 nt, Human
agacaaggaaaaaauaaca

SEQ ID NO: 1223935 - RNA, 23 nt, Human
agacaauugagguaaguuuuuug

SEQ ID NO: 1223936 - RNA, 12 nt, Human
agaccaccucuc

SEQ ID NO: 1223937 - RNA, 17 nt, Human
agaccaccucucaauau

SEQ ID NO: 1223938 - RNA, 12 nt, Human
agaccauggaca

SEQ ID NO: 1223939 - RNA, 21 nt, Human
agaccauggacacuacaccca

SEQ ID NO: 1223940 - RNA, 22 nt, Human
agaccauggacacuacacccag

SEQ ID NO: 1223941 - RNA, 23 nt, Human
agaccauggacacuacacccagc

SEQ ID NO: 1223942 - RNA, 18 nt, Human
agacgaaacauuuguucu

SEQ ID NO: 1223943 - RNA, 13 nt, Human
agcaauuuaaaug

SEQ ID NO: 1223944 - RNA, 16 nt, Human
agcaauuuaaauguua

SEQ ID NO: 1223945 - RNA, 17 nt, Human
agcaauuuaaauguuau

SEQ ID NO: 1223946 - RNA, 19 nt, Human
agcaauuuaaauguuauga

SEQ ID NO: 1223947 - RNA, 17 nt, Human
agccaacuauggccugu

SEQ ID NO: 1223948 - RNA, 13 nt, Human
agaucugccuaag

SEQ ID NO: 1223949 - RNA, 18 nt, Human
agaucugccuaaggacuu

SEQ ID NO: 1223950 - RNA, 12 nt, Human
agcaacaauaaa

SEQ ID NO: 1223951 - RNA, 13 nt, Human
agcaacaauaaau

SEQ ID NO: 1223952 - RNA, 18 nt, Human
agcaacaauaaauagaca

SEQ ID NO: 1223953 - RNA, 23 nt, Human
agcaaaauuuuuucucuaggaaa

SEQ ID NO: 1223954 - RNA, 17 nt, Human
agauugagauguguuca

SEQ ID NO: 1223955 - RNA, 20 nt, Human
agauagauaggucagugcaa

SEQ ID NO: 1223956 - RNA, 16 nt, Human
agauaugauucaaaug

SEQ ID NO: 1223957 - RNA, 15 nt, Human
agauaugauucaaau

SEQ ID NO: 1223958 - RNA, 14 nt, Human
agauaugauucaaa

SEQ ID NO: 1223959 - RNA, 17 nt, Human
agccugcugccugcuuu

SEQ ID NO: 1223960 - RNA, 13 nt, Human
agcuacaaaugca

SEQ ID NO: 1223961 - RNA, 24 nt, Human
agcgauucuccugccucagccucc

SEQ ID NO: 1223962 - RNA, 23 nt, Human
agcuuuuuucucugauacagaaa

SEQ ID NO: 1223963 - RNA, 22 nt, Human
agcuuuuuucucugauacagaa

SEQ ID NO: 1223964 - RNA, 20 nt, Human
agcuuuuuucucugauacag

SEQ ID NO: 1223965 - RNA, 19 nt, Human
agcuuuuuucucugauaca

SEQ ID NO: 1223966 - RNA, 18 nt, Human
aggaaaaaauaacaauga

SEQ ID NO: 1223967 - RNA, 18 nt, Human
agcuguaugauucccagc

SEQ ID NO: 1223968 - RNA, 17 nt, Human
agcuguaugauucccag

SEQ ID NO: 1223969 - RNA, 22 nt, Human
aggcucuggagcccacuguacu

SEQ ID NO: 1223970 - RNA, 17 nt, Human
agggacugagaaauuua

SEQ ID NO: 1223971 - RNA, 15 nt, Human
agggacugagaaauu

SEQ ID NO: 1223972 - RNA, 13 nt, Human
agggacugagaaa

SEQ ID NO: 1223973 - RNA, 14 nt, Human
agggacugagaaau

SEQ ID NO: 1223974 - RNA, 22 nt, Human
aggcagaacucaucuagguaaa

SEQ ID NO: 1223975 - RNA, 23 nt, Human
aggcaugugucaccaugcccagc

SEQ ID NO: 1223976 - RNA, 18 nt, Human
aggaguuucguuuucaaa

SEQ ID NO: 1223977 - RNA, 21 nt, Human
gccagccacggggacucagcc

SEQ ID NO: 1223978 - RNA, 13 nt, Human
gccagaccaugga

SEQ ID NO: 1223979 - RNA, 16 nt, Human
gccagaccauggacac

SEQ ID NO: 1223980 - RNA, 17 nt, Human
gccagaccauggacacu

SEQ ID NO: 1223981 - RNA, 11 nt, Human
gccauguuuau

SEQ ID NO: 1223982 - RNA, 20 nt, Human
gccauucuccugccucagcc

SEQ ID NO: 1223983 - RNA, 13 nt, Human
gccacccucaugc

SEQ ID NO: 1223984 - RNA, 15 nt, Human
gccacccucaugcug

SEQ ID NO: 1223985 - RNA, 16 nt, Human
gccacccucaugcugu

SEQ ID NO: 1223986 - RNA, 18 nt, Human
gcccugcugcugccugcc

SEQ ID NO: 1223987 - RNA, 22 nt, Human
gcccccaguaucucuucagucu

SEQ ID NO: 1223988 - RNA, 22 nt, Human
gccugccuccccugccucacca

SEQ ID NO: 1223989 - RNA, 14 nt, Human
gcucaggagcccug

SEQ ID NO: 1223990 - RNA, 21 nt, Human
gcucaggagcccugggaggcu

SEQ ID NO: 1223991 - RNA, 15 nt, Human
gcucaggagcccugg

SEQ ID NO: 1223992 - RNA, 18 nt, Human
gcucaggagcccugggag

SEQ ID NO: 1223993 - RNA, 23 nt, Human
gcucuggagcccacuguacuugc

SEQ ID NO: 1223994 - RNA, 19 nt, Human
gcuugaaacccguggcgcu

SEQ ID NO: 1223995 - RNA, 14 nt, Human
gcuucccuuuccug

SEQ ID NO: 1223996 - RNA, 14 nt, Human
gcuggagugcagug

SEQ ID NO: 1223997 - RNA, 16 nt, Human
gcugggucgcccugga

SEQ ID NO: 1223998 - RNA, 17 nt, Human
gcugggucgcccuggac

SEQ ID NO: 1223999 - RNA, 18 nt, Human
gcugggucgcccuggacu

SEQ ID NO: 1224000 - RNA, 19 nt, Human
gcugggucgcccuggacug

SEQ ID NO: 1224001 - RNA, 12 nt, Human
gcuggagugcag

SEQ ID NO: 1224002 - RNA, 12 nt, Human
gcugcugccugc

SEQ ID NO: 1224003 - RNA, 16 nt, Human
gcugcugccugccugg

SEQ ID NO: 1224004 - RNA, 15 nt, Human
aaaggaaagaaaaca

SEQ ID NO: 1224005 - RNA, 16 nt, Human
aaaggaaagaaaacau

SEQ ID NO: 1224006 - RNA, 13 nt, Human
aaaggaauuuaaa

SEQ ID NO: 1224007 - RNA, 14 nt, Human
aaaggacaucagca

SEQ ID NO: 1224008 - RNA, 16 nt, Human
aaaggacaucagcaaa

SEQ ID NO: 1224009 - RNA, 15 nt, Human
aaaggacaucagcaa

SEQ ID NO: 1224010 - RNA, 17 nt, Human
aaagcuauauaagacaa

SEQ ID NO: 1224011 - RNA, 17 nt, Human
aaagcuacuuauuguag

SEQ ID NO: 1224012 - RNA, 16 nt, Human
aaagcuacuuauugua

SEQ ID NO: 1224013 - RNA, 17 nt, Human
ggugcacuggccccacc

SEQ ID NO: 1224014 - RNA, 17 nt, Human
gguauucguuaucuaau

SEQ ID NO: 1224015 - RNA, 17 nt, Human
aaacuuguguaaauaca

SEQ ID NO: 1224016 - RNA, 13 nt, Human
aaacuuuucugau

SEQ ID NO: 1224017 - RNA, 14 nt, Human
aaacuuuucugaua

SEQ ID NO: 1224018 - RNA, 16 nt, Human
aaacuuuucugauaga

SEQ ID NO: 1224019 - RNA, 17 nt, Human
aaacuuuucugauagag

SEQ ID NO: 1224020 - RNA, 18 nt, Human
aaagagaacuuccagauc

SEQ ID NO: 1224021 - RNA, 15 nt, Human
aaacuacauauugua

SEQ ID NO: 1224022 - RNA, 21 nt, Human
aaaccacauuggagauguuua

SEQ ID NO: 1224023 - RNA, 16 nt, Human
aaacggaugauuucua

SEQ ID NO: 1224024 - RNA, 18 nt, Human
aaacggaugauuucuaug

SEQ ID NO: 1224025 - RNA, 19 nt, Human
aaacauguuuccacuauug

SEQ ID NO: 1224026 - RNA, 19 nt, Human
aaacauguuucuuuguaau

SEQ ID NO: 1224027 - RNA, 22 nt, Human
aaacauguuucuuuguaaugaa

SEQ ID NO: 1224028 - RNA, 23 nt, Human
aaacauguuucuuuguaaugaaa

SEQ ID NO: 1224029 - RNA, 18 nt, Human
aaaccaaaucacugaacu

SEQ ID NO: 1224030 - RNA, 23 nt, Human
ggggucucuucugaauaaagcaa

SEQ ID NO: 1224031 - RNA, 16 nt, Human
ggggccaggcuggguc

SEQ ID NO: 1224032 - RNA, 14 nt, Human
ggggccaggcuggg

SEQ ID NO: 1224033 - RNA, 21 nt, Human
aaacauauauaacaaugcugu

SEQ ID NO: 1224034 - RNA, 19 nt, Human
aaacauauauaacaaugcu

SEQ ID NO: 1224035 - RNA, 16 nt, Human
aaacauauauaacaau

SEQ ID NO: 1224036 - RNA, 13 nt, Human
aaacauauauaac

SEQ ID NO: 1224037 - RNA, 19 nt, Human
aaacaagucagucauucag

SEQ ID NO: 1224038 - RNA, 14 nt, Human
aaacacaacuauau

SEQ ID NO: 1224039 - RNA, 21 nt, Human
aaaauuggggauucuuaaagu

SEQ ID NO: 1224040 - RNA, 23 nt, Human
aaaauuggggauucuuaaaguug

SEQ ID NO: 1224041 - RNA, 12 nt, Human
aaaauggaauac

SEQ ID NO: 1224042 - RNA, 22 nt, Human
aaaauggacuguggugacuuug

SEQ ID NO: 1224043 - RNA, 17 nt, Human
aaacaaggaugaauuaa

SEQ ID NO: 1224044 - RNA, 13 nt, Human
aaacaaagaaauu

SEQ ID NO: 1224045 - RNA, 16 nt, Human
aaaauuuuuaaucuuu

SEQ ID NO: 1224046 - RNA, 22 nt, Human
aaaauuuuuucucuaggaaaua

SEQ ID NO: 1224047 - RNA, 19 nt, Human
aaaauuuuuucucuaggaa

SEQ ID NO: 1224048 - RNA, 19 nt, Human
aaaauuuuuaaucuuuaau

SEQ ID NO: 1224049 - RNA, 17 nt, Human
aaaacuacuucuuuuuu

SEQ ID NO: 1224050 - RNA, 19 nt, Human
aaaacugcucauaugaugu

SEQ ID NO: 1224051 - RNA, 19 nt, Human
aaaaauuaucuauagcuaa

SEQ ID NO: 1224052 - RNA, 21 nt, Human
aaaaauuaaaccggaccaucu

SEQ ID NO: 1224053 - RNA, 17 nt, Human
gggacugcggaggaagg

SEQ ID NO: 1224054 - RNA, 22 nt, Human
aaaagcuccauuuuuagugaaa

SEQ ID NO: 1224055 - RNA, 16 nt, Human
aaaagccuguuuaaga

SEQ ID NO: 1224056 - RNA, 18 nt, Human
aaaagccuguuuaagaga

SEQ ID NO: 1224057 - RNA, 23 nt, Human
aaaauaauuuuuauauuugaaau

SEQ ID NO: 1224058 - RNA, 21 nt, Human
aaaauaauuuuuauauuugaa

SEQ ID NO: 1224059 - RNA, 13 nt, Human
aaaauauauacua

SEQ ID NO: 1224060 - RNA, 17 nt, Human
aaaauauauacuaaaca

SEQ ID NO: 1224061 - RNA, 18 nt, Human
aaaauauauaucaaauau

SEQ ID NO: 1224062 - RNA, 14 nt, Human
aaaauauauacuaa

SEQ ID NO: 1224063 - RNA, 16 nt, Human
gggcagcaauuuaaau

SEQ ID NO: 1224064 - RNA, 13 nt, Human
gggcagagccagg

SEQ ID NO: 1224065 - RNA, 14 nt, Human
gggcagagccagga

SEQ ID NO: 1224066 - RNA, 16 nt, Human
gggcagagccaggaag

SEQ ID NO: 1224067 - RNA, 15 nt, Human
gggauucuuaaaguu

SEQ ID NO: 1224068 - RNA, 20 nt, Human
gggauucuuaaaguugaauu

SEQ ID NO: 1224069 - RNA, 16 nt, Human
aaaagggacugagaaa

SEQ ID NO: 1224070 - RNA, 19 nt, Human
aaaagggacugagaaauuu

SEQ ID NO: 1224071 - RNA, 17 nt, Human
ggcuccuauucaacaca

SEQ ID NO: 1224072 - RNA, 23 nt, Human
ggcuccuccaggguggcagcaac

SEQ ID NO: 1224073 - RNA, 21 nt, Human
ggcugggaauggaggggcaga

SEQ ID NO: 1224074 - RNA, 22 nt, Human
ggcugggaauggaggggcagag

SEQ ID NO: 1224075 - RNA, 16 nt, Human
aaaaaggacaucagca

SEQ ID NO: 1224076 - RNA, 22 nt, Human
ggacugugugcucaggagcccu

SEQ ID NO: 1224077 - RNA, 23 nt, Human
ggacugugugcucaggagcccug

SEQ ID NO: 1224078 - RNA, 12 nt, Human
ggacuuguuaga

SEQ ID NO: 1224079 - RNA, 18 nt, Human
ggacuucuuuaauuuugg

SEQ ID NO: 1224080 - RNA, 17 nt, Human
ggaccccagccauccag

SEQ ID NO: 1224081 - RNA, 23 nt, Human
ggagcagagcugauggagaagga

SEQ ID NO: 1224082 - RNA, 15 nt, Human
ggagcccacuguacu

SEQ ID NO: 1224083 - RNA, 19 nt, Human
ggagcagagcugauggaga

SEQ ID NO: 1224084 - RNA, 19 nt, Human
ggaggaaccagagugcuga

SEQ ID NO: 1224085 - RNA, 17 nt, Human
ggaggcucuggagccca

SEQ ID NO: 1224086 - RNA, 20 nt, Human
ggaggcucuggagcccacug

SEQ ID NO: 1224087 - RNA, 18 nt, Human
ggagcccacuguacuugc

SEQ ID NO: 1224088 - RNA, 22 nt, Human
ggagcccacuguacuugcucuu

SEQ ID NO: 1224089 - RNA, 21 nt, Human
ggaggcucuggagcccacugu

SEQ ID NO: 1224090 - RNA, 20 nt, Human
ggcagagaagaaagaacgga

SEQ ID NO: 1224091 - RNA, 23 nt, Human
ggaugguucccuugaugaagaag

SEQ ID NO: 1224092 - RNA, 22 nt, Human
ggaugguucccuugaugaagaa

SEQ ID NO: 1224093 - RNA, 23 nt, Human
cuucaugcugucuacacuaagag

SEQ ID NO: 1224094 - RNA, 23 nt, Human
cuucaugcauggaaauucccuuc

SEQ ID NO: 1224095 - RNA, 11 nt, Human
cuuaaaguuga

SEQ ID NO: 1224096 - RNA, 13 nt, Human
cuuaaaguugaau

SEQ ID NO: 1224097 - RNA, 14 nt, Human
cuuaaaguugaauu

SEQ ID NO: 1224098 - RNA, 23 nt, Human
cuugugauccacucgccucagcc

SEQ ID NO: 1224099 - RNA, 20 nt, Human
cuuuaaggggaggaaccaga

SEQ ID NO: 1224100 - RNA, 13 nt, Human
cuuuaauuuugga

SEQ ID NO: 1224101 - RNA, 14 nt, Human
cuuuaauuuuggaa

SEQ ID NO: 1224102 - RNA, 15 nt, Human
cuuuaauuuuggaau

SEQ ID NO: 1224103 - RNA, 16 nt, Human
cuuuaauuuuggaauu

SEQ ID NO: 1224104 - RNA, 13 nt, Human
cuuucagauacug

SEQ ID NO: 1224105 - RNA, 15 nt, Human
cuuggccaugcagaa

SEQ ID NO: 1224106 - RNA, 18 nt, Human
cuuggccaugcagaaagc

SEQ ID NO: 1224107 - RNA, 20 nt, Human
cuucuguuuuauaauuuugu

SEQ ID NO: 1224108 - RNA, 15 nt, Human
cuucuguuuuauaau

SEQ ID NO: 1224109 - RNA, 12 nt, Human
cugcuuaauuca

SEQ ID NO: 1224110 - RNA, 13 nt, Human
cugcuuaauucaa

SEQ ID NO: 1224111 - RNA, 22 nt, Human
cuggacugugugcucaggagcc

SEQ ID NO: 1224112 - RNA, 23 nt, Human
cuggacugugugcucaggagccc

SEQ ID NO: 1224113 - RNA, 15 nt, Human
cugcugugaaagaag

SEQ ID NO: 1224114 - RNA, 17 nt, Human
cugggagaaaugaaaaa

SEQ ID NO: 1224115 - RNA, 16 nt, Human
cugggagaaaugaaaa

SEQ ID NO: 1224116 - RNA, 14 nt, Human
cugcacggugaaug

SEQ ID NO: 1224117 - RNA, 15 nt, Human
cugcacggugaaugg

SEQ ID NO: 1224118 - RNA, 17 nt, Human
cugcacggugaauggcu

SEQ ID NO: 1224119 - RNA, 20 nt, Human
cugcacggugaauggcuuug

SEQ ID NO: 1224120 - RNA, 13 nt, Human
cugauggagaagg

SEQ ID NO: 1224121 - RNA, 14 nt, Human
cugauggagaagga

SEQ ID NO: 1224122 - RNA, 15 nt, Human
cugauggagaaggaa

SEQ ID NO: 1224123 - RNA, 16 nt, Human
cugauggagaaggaag

SEQ ID NO: 1224124 - RNA, 17 nt, Human
cugauggagaaggaagg

SEQ ID NO: 1224125 - RNA, 18 nt, Human
cucuuauaucuauauuuu

SEQ ID NO: 1224126 - RNA, 15 nt, Human
cucuuauaucuauau

SEQ ID NO: 1224127 - RNA, 14 nt, Human
cugcaaccuccacc

SEQ ID NO: 1224128 - RNA, 16 nt, Human
cugcaaccuccaccuc

SEQ ID NO: 1224129 - RNA, 20 nt, Human
gaacccuaaauaauaaaaau

SEQ ID NO: 1224130 - RNA, 14 nt, Human
gaacugaaaucaua

SEQ ID NO: 1224131 - RNA, 14 nt, Human
gaagcaaaauuuuu

SEQ ID NO: 1224132 - RNA, 20 nt, Human
gaagcaaguaaaaaggcuaa

SEQ ID NO: 1224133 - RNA, 20 nt, Human
gaagcaaugcuucaucccuu

SEQ ID NO: 1224134 - RNA, 21 nt, Human
gaaguugacuuauaguacaug

SEQ ID NO: 1224135 - RNA, 23 nt, Human
gaaguugacuuauaguacaugau

SEQ ID NO: 1224136 - RNA, 20 nt, Human
gaagcuaucguaaaauuaag

SEQ ID NO: 1224137 - RNA, 23 nt, Human
gacauugaccuauuuccagaaau

SEQ ID NO: 1224138 - RNA, 17 nt, Human
gacauuugcucauggaa

SEQ ID NO: 1224139 - RNA, 16 nt, Human
gacauuugcucaugga

SEQ ID NO: 1224140 - RNA, 22 nt, Human
gaccagcuuuucccaaaagccc

SEQ ID NO: 1224141 - RNA, 16 nt, Human
gacacacugaagaagc

SEQ ID NO: 1224142 - RNA, 15 nt, Human
gacacacugaagaag

SEQ ID NO: 1224143 - RNA, 14 nt, Human
gacugaauuaugaa

SEQ ID NO: 1224144 - RNA, 20 nt, Human
gacugaauuaugaaacuuuu

SEQ ID NO: 1224145 - RNA, 17 nt, Human
gacuguggugacuuugg

SEQ ID NO: 1224146 - RNA, 13 nt, Human
gacuguggugacu

SEQ ID NO: 1224147 - RNA, 14 nt, Human
gacuguggugacuu

SEQ ID NO: 1224148 - RNA, 22 nt, Human
gacugugugcucaggagcccug

SEQ ID NO: 1224149 - RNA, 21 nt, Human
gacucuuaagaagacugcauu

SEQ ID NO: 1224150 - RNA, 15 nt, Human
gacucuuaagaagac

SEQ ID NO: 1224151 - RNA, 14 nt, Human
gacucuuaagaaga

SEQ ID NO: 1224152 - RNA, 12 nt, Human
gaggccagacca

SEQ ID NO: 1224153 - RNA, 18 nt, Human
gaggccagaccauggaca

SEQ ID NO: 1224154 - RNA, 20 nt, Human
gagcuggagaugaggccaga

SEQ ID NO: 1224155 - RNA, 21 nt, Human
gagcuggagaugaggccagac

SEQ ID NO: 1224156 - RNA, 16 nt, Human
gaguuuaaauuguaau

SEQ ID NO: 1224157 - RNA, 21 nt, Human
gagugaguuggguguauugug

SEQ ID NO: 1224158 - RNA, 17 nt, Human
gagucacuacgccuggc

SEQ ID NO: 1224159 - RNA, 16 nt, Human
gaggugagaccaccuc

SEQ ID NO: 1224160 - RNA, 15 nt, Human
gaggugagaccaccu

SEQ ID NO: 1224161 - RNA, 18 nt, Human
gauuuuuuuguuguuugu

SEQ ID NO: 1224162 - RNA, 21 nt, Human
gauuuuuuuguuguuuguuua

SEQ ID NO: 1224163 - RNA, 21 nt, Human
gauuuuuuucccaauugagaa

SEQ ID NO: 1224164 - RNA, 18 nt, Human
gcaagucagaauagaaau

SEQ ID NO: 1224165 - RNA, 12 nt, Human
gauggagaagga

SEQ ID NO: 1224166 - RNA, 13 nt, Human
gauggagaaggaa

SEQ ID NO: 1224167 - RNA, 14 nt, Human
gauggagaaggaag

SEQ ID NO: 1224168 - RNA, 16 nt, Human
gauggagaaggaaggc

SEQ ID NO: 1224169 - RNA, 15 nt, Human
gauggagaaggaagg

SEQ ID NO: 1224170 - RNA, 18 nt, Human
gaucugccuaaggacuuc

SEQ ID NO: 1224171 - RNA, 20 nt, Human
gaucugccuaaggacuucuu

SEQ ID NO: 1224172 - RNA, 21 nt, Human
gaucugccuaaggacuucuuu

SEQ ID NO: 1224173 - RNA, 23 nt, Human
gaucugccuaaggacuucuuuaa

SEQ ID NO: 1224174 - RNA, 22 nt, Human
gauuauucacugauuugacaua

SEQ ID NO: 1224175 - RNA, 14 nt, Human
gauuauauuaugaa

SEQ ID NO: 1224176 - RNA, 15 nt, Human
gauuuaccacuugug

SEQ ID NO: 1224177 - RNA, 23 nt, Human
gauucuucagcaaaaauauuuua

SEQ ID NO: 1224178 - RNA, 16 nt, Human
gauuuaccacuugugu

SEQ ID NO: 1224179 - RNA, 13 nt, Human
auuauguaaaucc

SEQ ID NO: 1224180 - RNA, 14 nt, Human
auuauguaaauccc

SEQ ID NO: 1224181 - RNA, 15 nt, Human
auuauguaaauccca

SEQ ID NO: 1224182 - RNA, 17 nt, Human
auuauguaaaucccauu

SEQ ID NO: 1224183 - RNA, 22 nt, Human
auuauguaaaucccauuauuca

SEQ ID NO: 1224184 - RNA, 23 nt, Human
auuauguaaaucccauuauucaa

SEQ ID NO: 1224185 - RNA, 13 nt, Human
auuaugugacauu

SEQ ID NO: 1224186 - RNA, 19 nt, Human
auuaugugacauuuuacau

SEQ ID NO: 1224187 - RNA, 13 nt, Human
auuaugugccaga

SEQ ID NO: 1224188 - RNA, 21 nt, Human
auuaugugccagauuuaugca

SEQ ID NO: 1224189 - RNA, 23 nt, Human
auuaugugccagauuuaugcaua

SEQ ID NO: 1224190 - RNA, 20 nt, Human
auuaugugacauuuuacauu

SEQ ID NO: 1224191 - RNA, 12 nt, Human
auucaauaaagc

SEQ ID NO: 1224192 - RNA, 13 nt, Human
auucaauaaagcu

SEQ ID NO: 1224193 - RNA, 12 nt, Human
auucauuccauu

SEQ ID NO: 1224194 - RNA, 17 nt, Human
auucauuccauucugga

SEQ ID NO: 1224195 - RNA, 19 nt, Human
auucauuccauucuggaag

SEQ ID NO: 1224196 - RNA, 18 nt, Human
auucauuccauucuggaa

SEQ ID NO: 1224197 - RNA, 17 nt, Human
auucguuaucuaauagg

SEQ ID NO: 1224198 - RNA, 22 nt, Human
auugaggacacugauauggguc

SEQ ID NO: 1224199 - RNA, 21 nt, Human
auuaacaugaauauuuagugu

SEQ ID NO: 1224200 - RNA, 17 nt, Human
auuaaauuuuuuuuaca

SEQ ID NO: 1224201 - RNA, 18 nt, Human
auuaaauuuuuuuuacau

SEQ ID NO: 1224202 - RNA, 19 nt, Human
auuaaauuuuuuuuacauu

SEQ ID NO: 1224203 - RNA, 20 nt, Human
auuaaauuuuuuuuacauuu

SEQ ID NO: 1224204 - RNA, 22 nt, Human
auuuaauagguuuggacaaaau

SEQ ID NO: 1224205 - RNA, 15 nt, Human
auuuaauaauuauau

SEQ ID NO: 1224206 - RNA, 18 nt, Human
auuuaauaauuauaugcu

SEQ ID NO: 1224207 - RNA, 14 nt, Human
auugagguaaguuu

SEQ ID NO: 1224208 - RNA, 16 nt, Human
auugagguaaguuuuu

SEQ ID NO: 1224209 - RNA, 22 nt, Human
auuuguguugaagagguuuuaa

SEQ ID NO: 1224210 - RNA, 18 nt, Human
auuuguguugaagagguu

SEQ ID NO: 1224211 - RNA, 15 nt, Human
auuuguguugaagag

SEQ ID NO: 1224212 - RNA, 14 nt, Human
auuuguguugaaga

SEQ ID NO: 1224213 - RNA, 19 nt, Human
auuuguucuauagcuuuuc

SEQ ID NO: 1224214 - RNA, 17 nt, Human
auuuucuauaauuuaaa

SEQ ID NO: 1224215 - RNA, 18 nt, Human
auuuucuauaauuuaaau

SEQ ID NO: 1224216 - RNA, 19 nt, Human
auuuucuauaauuuaaaua

SEQ ID NO: 1224217 - RNA, 13 nt, Human
auuuugaaaaacu

SEQ ID NO: 1224218 - RNA, 15 nt, Human
auuuugaaaaacugc

SEQ ID NO: 1224219 - RNA, 15 nt, Human
caaaagcccauucau

SEQ ID NO: 1224220 - RNA, 19 nt, Human
caaaagcccauucauucca

SEQ ID NO: 1224221 - RNA, 20 nt, Human
caaaagcccauucauuccau

SEQ ID NO: 1224222 - RNA, 14 nt, Human
auuuuuuuuacauu

SEQ ID NO: 1224223 - RNA, 19 nt, Human
auuuuuuucccaauugaga

SEQ ID NO: 1224224 - RNA, 17 nt, Human
auuuuuuucugaaauuu

SEQ ID NO: 1224225 - RNA, 16 nt, Human
auuuuuuucugaaauu

SEQ ID NO: 1224226 - RNA, 15 nt, Human
auuuuuuucugaauu

SEQ ID NO: 1224227 - RNA, 19 nt, Human
auuuuuauauuugaaauau

SEQ ID NO: 1224228 - RNA, 14 nt, Human
caagcaaguauuag

SEQ ID NO: 1224229 - RNA, 14 nt, Human
caagcaauccuccc

SEQ ID NO: 1224230 - RNA, 15 nt, Human
caagcaaaugugaau

SEQ ID NO: 1224231 - RNA, 17 nt, Human
caagcaaaugugaauca

SEQ ID NO: 1224232 - RNA, 19 nt, Human
caagcaaaugugaaucauu

SEQ ID NO: 1224233 - RNA, 12 nt, Human
caacuccagaaa

SEQ ID NO: 1224234 - RNA, 14 nt, Human
caacuauggccugu

SEQ ID NO: 1224235 - RNA, 21 nt, Human
caacuaucucauuuccaagca

SEQ ID NO: 1224236 - RNA, 13 nt, Human
caacuauggccug

SEQ ID NO: 1224237 - RNA, 19 nt, Human
caacuaucucauuuccaag

SEQ ID NO: 1224238 - RNA, 19 nt, Human
caacuauauuguuugcuaa

SEQ ID NO: 1224239 - RNA, 17 nt, Human
caaucagccuaguugau

SEQ ID NO: 1224240 - RNA, 10 nt, Human
caaguaaaaa

SEQ ID NO: 1224241 - RNA, 15 nt, Human
caaguaaaaaggcua

SEQ ID NO: 1224242 - RNA, 20 nt, Human
caaguuauuuuuaauuuggu

SEQ ID NO: 1224243 - RNA, 21 nt, Human
caaguuccuuggccaugcaga

SEQ ID NO: 1224244 - RNA, 16 nt, Human
cacccagcaauagaga

SEQ ID NO: 1224245 - RNA, 20 nt, Human
cacccaggcuggacugcaau

SEQ ID NO: 1224246 - RNA, 20 nt, Human
cacccagguuggagugcagu

SEQ ID NO: 1224247 - RNA, 13 nt, Human
cacccagcaauag

SEQ ID NO: 1224248 - RNA, 16 nt, Human
cacaugaaguccaagc

SEQ ID NO: 1224249 - RNA, 23 nt, Human
cacugaagaagcaccaaucauga

SEQ ID NO: 1224250 - RNA, 14 nt, Human
caccugcccugccc

SEQ ID NO: 1224251 - RNA, 16 nt, Human
caccugcccugcccug

SEQ ID NO: 1224252 - RNA, 17 nt, Human
caccugcccugcccugc

SEQ ID NO: 1224253 - RNA, 17 nt, Human
cacccucguggacaccu

SEQ ID NO: 1224254 - RNA, 18 nt, Human
cacccucguggacaccug

SEQ ID NO: 1224255 - RNA, 19 nt, Human
cacccucguggacaccugc

SEQ ID NO: 1224256 - RNA, 20 nt, Human
cacccucguggacaccugcc

SEQ ID NO: 1224257 - RNA, 12 nt, Human
caccugcccugc

SEQ ID NO: 1224258 - RNA, 13 nt, Human
caccugcccugcc

SEQ ID NO: 1224259 - RNA, 20 nt, Human
caggaaagagaacuuccaga

SEQ ID NO: 1224260 - RNA, 16 nt, Human
caggaaagagaacuuc

SEQ ID NO: 1224261 - RNA, 20 nt, Human
cagcuuauugucuagugaaa

SEQ ID NO: 1224262 - RNA, 14 nt, Human
cagcuuauugucua

SEQ ID NO: 1224263 - RNA, 20 nt, Human
cagcuguaugauucccagcc

SEQ ID NO: 1224264 - RNA, 20 nt, Human
caggccggcuugccacaccc

SEQ ID NO: 1224265 - RNA, 22 nt, Human
cagggagacuggguaggaaaga

SEQ ID NO: 1224266 - RNA, 17 nt, Human
cagagacuuuagggggu

SEQ ID NO: 1224267 - RNA, 20 nt, Human
cagagcugauggagaaggaa

SEQ ID NO: 1224268 - RNA, 21 nt, Human
cagagcugauggagaaggaag

SEQ ID NO: 1224269 - RNA, 19 nt, Human
cagagcugauggagaagga

SEQ ID NO: 1224270 - RNA, 22 nt, Human
cagagcugauggagaaggaagg

SEQ ID NO: 1224271 - RNA, 14 nt, Human
cagauacuggauug

SEQ ID NO: 1224272 - RNA, 18 nt, Human
cagauacuggauuguacu

SEQ ID NO: 1224273 - RNA, 15 nt, Human
cagauaugauucaaa

SEQ ID NO: 1224274 - RNA, 14 nt, Human
cagauaugauucaa

SEQ ID NO: 1224275 - RNA, 13 nt, Human
cagauuuaugcau

SEQ ID NO: 1224276 - RNA, 14 nt, Human
cagauuuccagccu

SEQ ID NO: 1224277 - RNA, 14 nt, Human
cagauuucugagga

SEQ ID NO: 1224278 - RNA, 15 nt, Human
cagauuucugaggaa

SEQ ID NO: 1224279 - RNA, 17 nt, Human
cagauuucugaggaaau

SEQ ID NO: 1224280 - RNA, 14 nt, Human
cauuauucaaaguu

SEQ ID NO: 1224281 - RNA, 15 nt, Human
cauuauucaaaguug

SEQ ID NO: 1224282 - RNA, 16 nt, Human
cauuauucaaaguugc

SEQ ID NO: 1224283 - RNA, 16 nt, Human
cauggcccugccaugc

SEQ ID NO: 1224284 - RNA, 21 nt, Human
caugaauauuuaguguucaua

SEQ ID NO: 1224285 - RNA, 16 nt, Human
cauuuguauaaaauaa

SEQ ID NO: 1224286 - RNA, 14 nt, Human
cauuuguauaaaau

SEQ ID NO: 1224287 - RNA, 17 nt, Human
cauuuguauaaaauaau

SEQ ID NO: 1224288 - RNA, 12 nt, Human
ccaaaaaacuac

SEQ ID NO: 1224289 - RNA, 17 nt, Human
cauugguguuguacuca

SEQ ID NO: 1224290 - RNA, 16 nt, Human
cauuggagauguuuag

SEQ ID NO: 1224291 - RNA, 19 nt, Human
ccaaaguccugggauuaca

SEQ ID NO: 1224292 - RNA, 16 nt, Human
ccaacuauggccugug

SEQ ID NO: 1224293 - RNA, 14 nt, Human
ccaacuauggccug

SEQ ID NO: 1224294 - RNA, 15 nt, Human
ccaacuauggccugu

SEQ ID NO: 1224295 - RNA, 20 nt, Human
ccaaaucacugaacuuugcu

SEQ ID NO: 1224296 - RNA, 21 nt, Human
ccaacuccagaaagugacaag

SEQ ID NO: 1224297 - RNA, 17 nt, Human
caguuauuauauuuaca

SEQ ID NO: 1224298 - RNA, 21 nt, Human
caguuauuauauuuacaaaug

SEQ ID NO: 1224299 - RNA, 19 nt, Human
cagucucuauaccaauaaa

SEQ ID NO: 1224300 - RNA, 20 nt, Human
cagucucuauaccaauaaag

SEQ ID NO: 1224301 - RNA, 21 nt, Human
cagucucuauaccaauaaagu

SEQ ID NO: 1224302 - RNA, 22 nt, Human
cagucucuauaccaauaaagug

SEQ ID NO: 1224303 - RNA, 23 nt, Human
cagucucuauaccaauaaaguga

SEQ ID NO: 1224304 - RNA, 17 nt, Human
cagucucuauaccaaua

SEQ ID NO: 1224305 - RNA, 22 nt, Human
caguuauuauauuuacaaaugg

SEQ ID NO: 1224306 - RNA, 15 nt, Human
caguucaaagcagga

SEQ ID NO: 1224307 - RNA, 18 nt, Human
caguuuauuugaaccaau

SEQ ID NO: 1224308 - RNA, 19 nt, Human
caguuuauuugaaccaaua

SEQ ID NO: 1224309 - RNA, 18 nt, Human
cauaauuauuauuuggcc

SEQ ID NO: 1224310 - RNA, 16 nt, Human
cauagguuuaauaauu

SEQ ID NO: 1224311 - RNA, 21 nt, Human
cauauuauuuuauguugcaua

SEQ ID NO: 1224312 - RNA, 16 nt, Human
caucuggauuccagag

SEQ ID NO: 1224313 - RNA, 19 nt, Human
caucagaaacacccucaca

SEQ ID NO: 1224314 - RNA, 17 nt, Human
caucagaaacacccuca

SEQ ID NO: 1224315 - RNA, 23 nt, Human
ccgaaggugaggagcuugaaacc

SEQ ID NO: 1224316 - RNA, 11 nt, Human
ccuaaggacuu

SEQ ID NO: 1224317 - RNA, 12 nt, Human
ccuaaggacuuc

SEQ ID NO: 1224318 - RNA, 16 nt, Human
ccuaaggacuucuuua

SEQ ID NO: 1224319 - RNA, 17 nt, Human
ccuaaggacuucuuuaa

SEQ ID NO: 1224320 - RNA, 18 nt, Human
ccuaaggacuucuuuaau

SEQ ID NO: 1224321 - RNA, 23 nt, Human
ccuaaggacuucuuuaauuuugg

SEQ ID NO: 1224322 - RNA, 20 nt, Human
cccugaauuuaaauagcuuu

SEQ ID NO: 1224323 - RNA, 15 nt, Human
cccugcccugccacc

SEQ ID NO: 1224324 - RNA, 17 nt, Human
cccugcccugccaccug

SEQ ID NO: 1224325 - RNA, 18 nt, Human
cccugcccugccaccugu

SEQ ID NO: 1224326 - RNA, 20 nt, Human
ccucucugcaggucccuaau

SEQ ID NO: 1224327 - RNA, 18 nt, Human
ccucucugcaggucccua

SEQ ID NO: 1224328 - RNA, 19 nt, Human
ccucucugcaggucccuaa

SEQ ID NO: 1224329 - RNA, 16 nt, Human
ccucucugcagguccc

SEQ ID NO: 1224330 - RNA, 17 nt, Human
ccucucugcaggucccu

SEQ ID NO: 1224331 - RNA, 18 nt, Human
ccucgccggaucugaggg

SEQ ID NO: 1224332 - RNA, 19 nt, Human
ccucgccggaucugaggga

SEQ ID NO: 1224333 - RNA, 20 nt, Human
ccugccucucugcagguccc

SEQ ID NO: 1224334 - RNA, 21 nt, Human
ccugccucucugcaggucccu

SEQ ID NO: 1224335 - RNA, 23 nt, Human
ccugccuggacuuggccccugcc

SEQ ID NO: 1224336 - RNA, 19 nt, Human
ccaugggauaaaugccauc

SEQ ID NO: 1224337 - RNA, 18 nt, Human
ccaugggcacugugggua

SEQ ID NO: 1224338 - RNA, 13 nt, Human
cccaccccuagga

SEQ ID NO: 1224339 - RNA, 19 nt, Human
cccacuguacuugcucuug

SEQ ID NO: 1224340 - RNA, 23 nt, Human
cccacuguacuugcucuugaugc

SEQ ID NO: 1224341 - RNA, 20 nt, Human
ccauugugccuaaguccagu

SEQ ID NO: 1224342 - RNA, 22 nt, Human
cccagcuggggccaggcugggu

SEQ ID NO: 1224343 - RNA, 23 nt, Human
cccagcuggggccaggcuggguc

SEQ ID NO: 1224344 - RNA, 17 nt, Human
ccccagccauccagggg

SEQ ID NO: 1224345 - RNA, 14 nt, Human
ccaguauuguacaa

SEQ ID NO: 1224346 - RNA, 15 nt, Human
ccaggggccaugaau

SEQ ID NO: 1224347 - RNA, 20 nt, Human
ccaguauuguacaaaguauu

SEQ ID NO: 1224348 - RNA, 18 nt, Human
ccaggcaggagcccuucu

SEQ ID NO: 1224349 - RNA, 15 nt, Human
ccacucuuucuuuca

SEQ ID NO: 1224350 - RNA, 14 nt, Human
ccagagacuuuagg

SEQ ID NO: 1224351 - RNA, 15 nt, Human
ccugcugcugccugc

SEQ ID NO: 1224352 - RNA, 16 nt, Human
ccugcugcugccugcc

SEQ ID NO: 1224353 - RNA, 17 nt, Human
ccugcugcugccugccu

SEQ ID NO: 1224354 - RNA, 18 nt, Human
ccugcugcugccugccug

SEQ ID NO: 1224355 - RNA, 13 nt, Human
ccuucccugcugu

SEQ ID NO: 1224356 - RNA, 14 nt, Human
ccuugcauaauggu

SEQ ID NO: 1224357 - RNA, 12 nt, Human
ccuuuucccaac

SEQ ID NO: 1224358 - RNA, 15 nt, Human
cgagugcucauuuca

SEQ ID NO: 1224359 - RNA, 19 nt, Human
cgcugauaagcguucaugg

SEQ ID NO: 1224360 - RNA, 19 nt, Human
cuaaguccaguguuucuuu

SEQ ID NO: 1224361 - RNA, 20 nt, Human
cuaaguacacaauaagcaaa

SEQ ID NO: 1224362 - RNA, 19 nt, Human
cuaaguacacaauaagcaa

SEQ ID NO: 1224363 - RNA, 23 nt, Human
cuaaaguaaaaacaaagaaauua

SEQ ID NO: 1224364 - RNA, 21 nt, Human
cguucauggaacgcguugaaa

SEQ ID NO: 1224365 - RNA, 23 nt, Human
cguuaucuaauagggcaauuaau

SEQ ID NO: 1224366 - RNA, 18 nt, Human
cuaucucauuuccaagca

SEQ ID NO: 1224367 - RNA, 17 nt, Human
cuaucguaaaauuaaga

SEQ ID NO: 1224368 - RNA, 14 nt, Human
cucaauucuucccu

SEQ ID NO: 1224369 - RNA, 16 nt, Human
cucagccucucgaagu

SEQ ID NO: 1224370 - RNA, 12 nt, Human
cucguggacacc

SEQ ID NO: 1224371 - RNA, 14 nt, Human
cucguggacaccug

SEQ ID NO: 1224372 - RNA, 15 nt, Human
cucguggacaccugc

SEQ ID NO: 1224373 - RNA, 16 nt, Human
cucguggacaccugcc

SEQ ID NO: 1224374 - RNA, 16 nt, Human
cucuccccaugauguu

SEQ ID NO: 1224375 - RNA, 13 nt, Human
cucugcagguccc

SEQ ID NO: 1224376 - RNA, 18 nt, Human
aacauuugguaaggggaa

SEQ ID NO: 1224377 - RNA, 20 nt, Human
aacauuuguucuauagcuuu

SEQ ID NO: 1224378 - RNA, 22 nt, Human
aacauuuguucuauagcuuuuc

SEQ ID NO: 1224379 - RNA, 19 nt, Human
aacaguuguguuugaagca

SEQ ID NO: 1224380 - RNA, 23 nt, Human
aaauuuuuaaucuuuaauuuuac

SEQ ID NO: 1224381 - RNA, 17 nt, Human
aaauuuuuguaguagcg

SEQ ID NO: 1224382 - RNA, 15 nt, Human
aacaaggaugaauua

SEQ ID NO: 1224383 - RNA, 18 nt, Human
aacaagucagucauucag

SEQ ID NO: 1224384 - RNA, 15 nt, Human
aacaagucagucauu

SEQ ID NO: 1224385 - RNA, 14 nt, Human
aacaaugcuguauu

SEQ ID NO: 1224386 - RNA, 21 nt, Human
guccaagcauuuagauguaua

SEQ ID NO: 1224387 - RNA, 19 nt, Human
gucuuauauauuguagaua

SEQ ID NO: 1224388 - RNA, 14 nt, Human
gucuuccucugucu

SEQ ID NO: 1224389 - RNA, 16 nt, Human
aaccucuuugucuaca

SEQ ID NO: 1224390 - RNA, 18 nt, Human
aacucguuaauuuguagu

SEQ ID NO: 1224391 - RNA, 21 nt, Human
aacuccagaaagugacaagcu

SEQ ID NO: 1224392 - RNA, 14 nt, Human
aacuccagaaagug

SEQ ID NO: 1224393 - RNA, 21 nt, Human
aaccaugggauaaaugccauc

SEQ ID NO: 1224394 - RNA, 20 nt, Human
aaccuagggugauauuaacc

SEQ ID NO: 1224395 - RNA, 20 nt, Human
aaccacauuggagauguuua

SEQ ID NO: 1224396 - RNA, 15 nt, Human
aaccaugggauaaau

SEQ ID NO: 1224397 - RNA, 17 nt, Human
aaccaugggauaaaugc

SEQ ID NO: 1224398 - RNA, 18 nt, Human
aaccaugggauaaaugcc

SEQ ID NO: 1224399 - RNA, 20 nt, Human
aaccaugggauaaaugccau

SEQ ID NO: 1224400 - RNA, 10 nt, Human
aaccaaguuc

SEQ ID NO: 1224401 - RNA, 20 nt, Human
gucuccuaagcuggagugca

SEQ ID NO: 1224402 - RNA, 14 nt, Human
gucaaaaauuaaac

SEQ ID NO: 1224403 - RNA, 13 nt, Human
gucaaaaauuaaa

SEQ ID NO: 1224404 - RNA, 23 nt, Human
gucaaaaauuaaaccggaccauc

SEQ ID NO: 1224405 - RNA, 19 nt, Human
gucaacucauauuuucaug

SEQ ID NO: 1224406 - RNA, 16 nt, Human
gucaaauugugugaaa

SEQ ID NO: 1224407 - RNA, 22 nt, Human
aaauuuccugggagcuuuugua

SEQ ID NO: 1224408 - RNA, 20 nt, Human
aaauuuaguauuuuguuuca

SEQ ID NO: 1224409 - RNA, 18 nt, Human
aaauucccuucaucugga

SEQ ID NO: 1224410 - RNA, 17 nt, Human
aaauuucagcagcugca

SEQ ID NO: 1224411 - RNA, 18 nt, Human
aaauuucagcagcugcag

SEQ ID NO: 1224412 - RNA, 16 nt, Human
aaauucccuucaucug

SEQ ID NO: 1224413 - RNA, 19 nt, Human
aaauucccuucaucuggaa

SEQ ID NO: 1224414 - RNA, 22 nt, Human
aaauguuaugacuauguaaacu

SEQ ID NO: 1224415 - RNA, 14 nt, Human
aaauuaagaaagga

SEQ ID NO: 1224416 - RNA, 20 nt, Human
guauuuaauagguuuggaca

SEQ ID NO: 1224417 - RNA, 16 nt, Human
guauuuaauucauguu

SEQ ID NO: 1224418 - RNA, 17 nt, Human
guauaaaagccuguuua

SEQ ID NO: 1224419 - RNA, 18 nt, Human
guauaaaagccuguuuaa

SEQ ID NO: 1224420 - RNA, 21 nt, Human
guauaaaagccuguuuaagag

SEQ ID NO: 1224421 - RNA, 18 nt, Human
guauaaaagggacugaga

SEQ ID NO: 1224422 - RNA, 17 nt, Human
guauauuacaaugauca

SEQ ID NO: 1224423 - RNA, 18 nt, Human
guauauuacaaugaucac

SEQ ID NO: 1224424 - RNA, 22 nt, Human
guauauugauccagaaagaaaa

SEQ ID NO: 1224425 - RNA, 14 nt, Human
guaugauucccagc

SEQ ID NO: 1224426 - RNA, 13 nt, Human
guaugugugaagu

SEQ ID NO: 1224427 - RNA, 17 nt, Human
guaugugugaagugagu

SEQ ID NO: 1224428 - RNA, 21 nt, Human
guaugugugaagugagugagu

SEQ ID NO: 1224429 - RNA, 21 nt, Human
guauggguuagggaaaacauu

SEQ ID NO: 1224430 - RNA, 14 nt, Human
aaaugcauuucuaa

SEQ ID NO: 1224431 - RNA, 19 nt, Human
aaauggcuuccuggcaaua

SEQ ID NO: 1224432 - RNA, 13 nt, Human
aaaugcauguugc

SEQ ID NO: 1224433 - RNA, 13 nt, Human
aaaugagaaaucu

SEQ ID NO: 1224434 - RNA, 14 nt, Human
aaaugagaaaucua

SEQ ID NO: 1224435 - RNA, 16 nt, Human
aaaugagaaaucuaaa

SEQ ID NO: 1224436 - RNA, 11 nt, Human
aaaugagaaau

SEQ ID NO: 1224437 - RNA, 14 nt, Human
aaauccuugaagau

SEQ ID NO: 1224438 - RNA, 19 nt, Human
aaaucccauuauucaaagu

SEQ ID NO: 1224439 - RNA, 20 nt, Human
aaaucccauuauucaaaguu

SEQ ID NO: 1224440 - RNA, 21 nt, Human
aaaucccauuauucaaaguug

SEQ ID NO: 1224441 - RNA, 22 nt, Human
aaaucccauuauucaaaguugc

SEQ ID NO: 1224442 - RNA, 18 nt, Human
aaauccauuuggaaaucu

SEQ ID NO: 1224443 - RNA, 21 nt, Human
aaauccauuuggaaaucuuua

SEQ ID NO: 1224444 - RNA, 22 nt, Human
aaauccauuuggaaaucuuuaa

SEQ ID NO: 1224445 - RNA, 23 nt, Human
aaauccauuuggaaaucuuuaaa

SEQ ID NO: 1224446 - RNA, 13 nt, Human
aaaucccauuauu

SEQ ID NO: 1224447 - RNA, 15 nt, Human
aaaucccauuauuca

SEQ ID NO: 1224448 - RNA, 16 nt, Human
aaaucccauuauucaa

SEQ ID NO: 1224449 - RNA, 17 nt, Human
aaaucccauuauucaaa

SEQ ID NO: 1224450 - RNA, 13 nt, Human
aaaggacuguaau

SEQ ID NO: 1224451 - RNA, 16 nt, Human
guaggaaagaggaagc

SEQ ID NO: 1224452 - RNA, 14 nt, Human
aaauccauuuggaa

SEQ ID NO: 1224453 - RNA, 15 nt, Human
aaauccauuuggaaa

SEQ ID NO: 1224454 - RNA, 16 nt, Human
aaauccauuuggaaau

SEQ ID NO: 1224455 - RNA, 19 nt, Human
aagaaugguccgugcuaag

SEQ ID NO: 1224456 - RNA, 22 nt, Human
aagaaugguccgugcuaaggac

SEQ ID NO: 1224457 - RNA, 18 nt, Human
aagaaugauuaugaauua

SEQ ID NO: 1224458 - RNA, 23 nt, Human
aagacaaaaagcuacuuauugua

SEQ ID NO: 1224459 - RNA, 20 nt, Human
aagacaaaaagcuacuuauu

SEQ ID NO: 1224460 - RNA, 16 nt, Human
aagaaugauuaugaau

SEQ ID NO: 1224461 - RNA, 15 nt, Human
gugcucaggagcccu

SEQ ID NO: 1224462 - RNA, 16 nt, Human
gugcucaggagcccug

SEQ ID NO: 1224463 - RNA, 16 nt, Human
aacuuguauuaugugu

SEQ ID NO: 1224464 - RNA, 21 nt, Human
aagaaacuggggcuccuccag

SEQ ID NO: 1224465 - RNA, 17 nt, Human
aagaaacuuguccuucc

SEQ ID NO: 1224466 - RNA, 16 nt, Human
aagaaagaacggaaga

SEQ ID NO: 1224467 - RNA, 13 nt, Human
aagaaauauaccu

SEQ ID NO: 1224468 - RNA, 18 nt, Human
gugcuaguaauuggaaag

SEQ ID NO: 1224469 - RNA, 13 nt, Human
aagaggaagcaaa

SEQ ID NO: 1224470 - RNA, 14 nt, Human
aagaggaagcaaau

SEQ ID NO: 1224471 - RNA, 14 nt, Human
guggguagacacac

SEQ ID NO: 1224472 - RNA, 19 nt, Human
guggcgcgaucucagcuca

SEQ ID NO: 1224473 - RNA, 21 nt, Human
gugggacagucaccucaugga

SEQ ID NO: 1224474 - RNA, 19 nt, Human
guggcgugaucucagcuca

SEQ ID NO: 1224475 - RNA, 17 nt, Human
gugggaggugagaccac

SEQ ID NO: 1224476 - RNA, 18 nt, Human
aagagguuuuaaagcuuc

SEQ ID NO: 1224477 - RNA, 14 nt, Human
aagagguuuuaaag

SEQ ID NO: 1224478 - RNA, 19 nt, Human
guguuguacucaauuuuaa

SEQ ID NO: 1224479 - RNA, 17 nt, Human
aagcuaucguaaaauua

SEQ ID NO: 1224480 - RNA, 23 nt, Human
guucugguaugaacuugaggaca

SEQ ID NO: 1224481 - RNA, 16 nt, Human
guucuuacugcuuaau

SEQ ID NO: 1224482 - RNA, 18 nt, Human
guugacaugggacauuug

SEQ ID NO: 1224483 - RNA, 14 nt, Human
guugacaugggaca

SEQ ID NO: 1224484 - RNA, 18 nt, Human
guguuuuaaaaugagaaa

SEQ ID NO: 1224485 - RNA, 12 nt, Human
guuagaucuagu

SEQ ID NO: 1224486 - RNA, 19 nt, Human
aagccuccuuagaaaaaaa

SEQ ID NO: 1224487 - RNA, 13 nt, Human
aagguacuucaaa

SEQ ID NO: 1224488 - RNA, 22 nt, Human
aaguaaaaacaaagaaauuaug

SEQ ID NO: 1224489 - RNA, 13 nt, Human
aaguaaaaacaaa

SEQ ID NO: 1224490 - RNA, 20 nt, Human
aaguaaaaacaaagaaauua

SEQ ID NO: 1224491 - RNA, 17 nt, Human
aaggggaauugaggaca

SEQ ID NO: 1224492 - RNA, 21 nt, Human
guuucaaacauauauaacaau

SEQ ID NO: 1224493 - RNA, 20 nt, Human
guuucuguacuuuuuggcau

SEQ ID NO: 1224494 - RNA, 11 nt, Human
guuuuacaaua

SEQ ID NO: 1224495 - RNA, 13 nt, Human
guuuuacaauagu

SEQ ID NO: 1224496 - RNA, 16 nt, Human
guuuuacaauaguucu

SEQ ID NO: 1224497 - RNA, 20 nt, Human
guuuuacaauaguucugugg

SEQ ID NO: 1224498 - RNA, 20 nt, Human
guuuucuuaaccagaucauu

SEQ ID NO: 1224499 - RNA, 17 nt, Human
guugccuaaauccauuu

SEQ ID NO: 1224500 - RNA, 14 nt, Human
guugccuaaaucca

SEQ ID NO: 1224501 - RNA, 15 nt, Human
guugccuaaauccau

SEQ ID NO: 1224502 - RNA, 16 nt, Human
guugccuaaauccauu

SEQ ID NO: 1224503 - RNA, 15 nt, Human
acaacagcuggugcc

SEQ ID NO: 1224504 - RNA, 21 nt, Human
acaaauucugucucuggauua

SEQ ID NO: 1224505 - RNA, 15 nt, Human
uagcuagacugguga

SEQ ID NO: 1224506 - RNA, 18 nt, Human
uagcuagacuggugacug

SEQ ID NO: 1224507 - RNA, 16 nt, Human
uagcuacuaauuuuaa

SEQ ID NO: 1224508 - RNA, 20 nt, Human
acaaaguauuaagcauauau

SEQ ID NO: 1224509 - RNA, 21 nt, Human
uagaugcaguucugaagaaga

SEQ ID NO: 1224510 - RNA, 14 nt, Human
uagaucuaguucac

SEQ ID NO: 1224511 - RNA, 22 nt, Human
uagauaggucagugcaaauacu

SEQ ID NO: 1224512 - RNA, 12 nt, Human
aauuuuuuuuac

SEQ ID NO: 1224513 - RNA, 16 nt, Human
aauuuuuuuuacauuu

SEQ ID NO: 1224514 - RNA, 13 nt, Human
aauuuuuguagua

SEQ ID NO: 1224515 - RNA, 16 nt, Human
aauuuuguuucuguac

SEQ ID NO: 1224516 - RNA, 22 nt, Human
aauuuuuaaucuuuaauuuuac

SEQ ID NO: 1224517 - RNA, 21 nt, Human
aauuugguuuucacauuggaa

SEQ ID NO: 1224518 - RNA, 15 nt, Human
aauuugguuuucaca

SEQ ID NO: 1224519 - RNA, 13 nt, Human
aauuugguuuuca

SEQ ID NO: 1224520 - RNA, 16 nt, Human
uacuuugugcuggggu

SEQ ID NO: 1224521 - RNA, 22 nt, Human
uacuuugugcugggguuaucug

SEQ ID NO: 1224522 - RNA, 14 nt, Human
uacuuuuuggcaua

SEQ ID NO: 1224523 - RNA, 19 nt, Human
uacuuuuuggcauaacaua

SEQ ID NO: 1224524 - RNA, 20 nt, Human
uacuuuuuggcauaacauaa

SEQ ID NO: 1224525 - RNA, 15 nt, Human
aauuugaaacacuuu

SEQ ID NO: 1224526 - RNA, 19 nt, Human
uacuucuuaggguuaugau

SEQ ID NO: 1224527 - RNA, 20 nt, Human
uacuucuuuuuucaaaagaa

SEQ ID NO: 1224528 - RNA, 22 nt, Human
uacuucuuuuuucaaaagaaag

SEQ ID NO: 1224529 - RNA, 15 nt, Human
uacuugaaaauuaac

SEQ ID NO: 1224530 - RNA, 13 nt, Human
aauuuaguauuuu

SEQ ID NO: 1224531 - RNA, 15 nt, Human
aauuggagcucgugg

SEQ ID NO: 1224532 - RNA, 13 nt, Human
aauuuaaauguua

SEQ ID NO: 1224533 - RNA, 11 nt, Human
aauuuaaaugu

SEQ ID NO: 1224534 - RNA, 17 nt, Human
aauuucuaggacugaau

SEQ ID NO: 1224535 - RNA, 22 nt, Human
aauuucuaggacugaauuauga

SEQ ID NO: 1224536 - RNA, 18 nt, Human
aauuucuaggacugaauu

SEQ ID NO: 1224537 - RNA, 23 nt, Human
aauuucuaggacugaauuaugaa

SEQ ID NO: 1224538 - RNA, 22 nt, Human
aauuuauaaacuuuuuucuuac

SEQ ID NO: 1224539 - RNA, 15 nt, Human
uacuaaaauggacug

SEQ ID NO: 1224540 - RNA, 18 nt, Human
uacuagggaaaugccuuu

SEQ ID NO: 1224541 - RNA, 19 nt, Human
aauugagaaaaauauauac

SEQ ID NO: 1224542 - RNA, 23 nt, Human
aauugagaaaaauauauacuaaa

SEQ ID NO: 1224543 - RNA, 18 nt, Human
aauugaggacacugauau

SEQ ID NO: 1224544 - RNA, 19 nt, Human
uacuguacagacagaaaaa

SEQ ID NO: 1224545 - RNA, 23 nt, Human
uacuguacagacagaaaaaacug

SEQ ID NO: 1224546 - RNA, 22 nt, Human
uacugaaauaaacgucuuaaau

SEQ ID NO: 1224547 - RNA, 19 nt, Human
uacugaaauaaacgucuua

SEQ ID NO: 1224548 - RNA, 20 nt, Human
uauauuuauuacuguaagaa

SEQ ID NO: 1224549 - RNA, 19 nt, Human
uauauuuauuacuguaaga

SEQ ID NO: 1224550 - RNA, 15 nt, Human
uauauuuauuacugu

SEQ ID NO: 1224551 - RNA, 23 nt, Human
acagagcuggagaugaggccaga

SEQ ID NO: 1224552 - RNA, 21 nt, Human
acagcccuucuuuccacagaa

SEQ ID NO: 1224553 - RNA, 20 nt, Human
acagcccuucuuuccacaga

SEQ ID NO: 1224554 - RNA, 12 nt, Human
uauauuuacaaa

SEQ ID NO: 1224555 - RNA, 14 nt, Human
acacugaagaagca

SEQ ID NO: 1224556 - RNA, 12 nt, Human
acacugaagaag

SEQ ID NO: 1224557 - RNA, 18 nt, Human
acaaugcuguauuuuaaa

SEQ ID NO: 1224558 - RNA, 17 nt, Human
acaaugcuguauuuuaa

SEQ ID NO: 1224559 - RNA, 14 nt, Human
acaaugcuguauuu

SEQ ID NO: 1224560 - RNA, 17 nt, Human
acacaacuauauuguuu

SEQ ID NO: 1224561 - RNA, 13 nt, Human
acacacugaagaa

SEQ ID NO: 1224562 - RNA, 17 nt, Human
uaguguuggagaagaac

SEQ ID NO: 1224563 - RNA, 16 nt, Human
uaguguuggagaagaa

SEQ ID NO: 1224564 - RNA, 12 nt, Human
uaguguuggaga

SEQ ID NO: 1224565 - RNA, 17 nt, Human
uagucuugucucagauu

SEQ ID NO: 1224566 - RNA, 22 nt, Human
uagucuugucucagauuuuauu

SEQ ID NO: 1224567 - RNA, 14 nt, Human
acacacugaagaag

SEQ ID NO: 1224568 - RNA, 22 nt, Human
uagguuuggacaaaauggaaua

SEQ ID NO: 1224569 - RNA, 21 nt, Human
uauaaaaauaaaaaacacugg

SEQ ID NO: 1224570 - RNA, 19 nt, Human
acacaugcuucccuuuccu

SEQ ID NO: 1224571 - RNA, 21 nt, Human
acacaugcuucccuuuccuga

SEQ ID NO: 1224572 - RNA, 23 nt, Human
acacaugcuucccuuuccugagu

SEQ ID NO: 1224573 - RNA, 23 nt, Human
acacuacacccagcaauagagac

SEQ ID NO: 1224574 - RNA, 17 nt, Human
acacuacacccagcaau

SEQ ID NO: 1224575 - RNA, 17 nt, Human
acacuaagagagaauga

SEQ ID NO: 1224576 - RNA, 13 nt, Human
acacuacacccag

SEQ ID NO: 1224577 - RNA, 14 nt, Human
acacuacacccagc

SEQ ID NO: 1224578 - RNA, 15 nt, Human
acacuacacccagca

SEQ ID NO: 1224579 - RNA, 19 nt, Human
acacuaagagagaaugaga

SEQ ID NO: 1224580 - RNA, 18 nt, Human
acacuaagagagaaugag

SEQ ID NO: 1224581 - RNA, 13 nt, Human
acaccugcccugc

SEQ ID NO: 1224582 - RNA, 14 nt, Human
acaccugcccugcc

SEQ ID NO: 1224583 - RNA, 12 nt, Human
acaccugcccug

SEQ ID NO: 1224584 - RNA, 15 nt, Human
acaccugcccugccc

SEQ ID NO: 1224585 - RNA, 17 nt, Human
acaccugcccugcccug

SEQ ID NO: 1224586 - RNA, 18 nt, Human
acaccugcccugcccugc

SEQ ID NO: 1224587 - RNA, 20 nt, Human
acaccugcccugcccugcca

SEQ ID NO: 1224588 - RNA, 22 nt, Human
acaccugcccugcccugccacc

SEQ ID NO: 1224589 - RNA, 23 nt, Human
acaccugcccugcccugccaccu

SEQ ID NO: 1224590 - RNA, 23 nt, Human
acacccagcaauagagacgggac

SEQ ID NO: 1224591 - RNA, 13 nt, Human
acacccagcaaua

SEQ ID NO: 1224592 - RNA, 12 nt, Human
aauaaagugacc

SEQ ID NO: 1224593 - RNA, 15 nt, Human
aauaacgauaaaaga

SEQ ID NO: 1224594 - RNA, 21 nt, Human
aauaacaaugaaaguugauaa

SEQ ID NO: 1224595 - RNA, 22 nt, Human
uaaagguucaugcaaacuuuau

SEQ ID NO: 1224596 - RNA, 19 nt, Human
uaaaguaaaaacaaagaaa

SEQ ID NO: 1224597 - RNA, 21 nt, Human
uaaaguaaaaacaaagaaauu

SEQ ID NO: 1224598 - RNA, 22 nt, Human
uaaaguaaaaacaaagaaauua

SEQ ID NO: 1224599 - RNA, 19 nt, Human
uaaauagcuagacugguga

SEQ ID NO: 1224600 - RNA, 18 nt, Human
uaaauagcuagacuggug

SEQ ID NO: 1224601 - RNA, 15 nt, Human
uaaauagacacgcac

SEQ ID NO: 1224602 - RNA, 15 nt, Human
uaaaucugugaacuu

SEQ ID NO: 1224603 - RNA, 16 nt, Human
uaaaucugugaacuug

SEQ ID NO: 1224604 - RNA, 17 nt, Human
uaaaucugugaacuuga

SEQ ID NO: 1224605 - RNA, 18 nt, Human
uaaaucugugaacuugaa

SEQ ID NO: 1224606 - RNA, 19 nt, Human
uaaaucugugaacuugaaa

SEQ ID NO: 1224607 - RNA, 21 nt, Human
uaaaucugugaacuugaaauu

SEQ ID NO: 1224608 - RNA, 22 nt, Human
uaaaucugugaacuugaaauuu

SEQ ID NO: 1224609 - RNA, 22 nt, Human
uaaauguuaugacuauguaaac

SEQ ID NO: 1224610 - RNA, 23 nt, Human
uaaauguuaugacuauguaaacu

SEQ ID NO: 1224611 - RNA, 15 nt, Human
uaaauguugacaugg

SEQ ID NO: 1224612 - RNA, 24 nt, Human
uaaauguuuuuuuuuaaagacuuu

SEQ ID NO: 1224613 - RNA, 20 nt, Human
aauaauuuuuauauuugaaa

SEQ ID NO: 1224614 - RNA, 12 nt, Human
uaaauaaaguuu

SEQ ID NO: 1224615 - RNA, 21 nt, Human
uaaauaaaguuuguugaaaca

SEQ ID NO: 1224616 - RNA, 17 nt, Human
uaaauaaauaaauagcu

SEQ ID NO: 1224617 - RNA, 14 nt, Human
uaaauaaauagcua

SEQ ID NO: 1224618 - RNA, 19 nt, Human
aauaauuuuuauauuugaa

SEQ ID NO: 1224619 - RNA, 17 nt, Human
aauaauuuuuauauuug

SEQ ID NO: 1224620 - RNA, 16 nt, Human
aauaauuuuuauauuu

SEQ ID NO: 1224621 - RNA, 11 nt, Human
aauaauuuuau

SEQ ID NO: 1224622 - RNA, 14 nt, Human
aauaauuuuaucuc

SEQ ID NO: 1224623 - RNA, 15 nt, Human
aauauuucagauaau

SEQ ID NO: 1224624 - RNA, 18 nt, Human
aauauuguuuuacaauag

SEQ ID NO: 1224625 - RNA, 17 nt, Human
aauauuguuuuacaaua

SEQ ID NO: 1224626 - RNA, 17 nt, Human
aauauuuuaugauccag

SEQ ID NO: 1224627 - RNA, 18 nt, Human
aauauuuuaugauccagc

SEQ ID NO: 1224628 - RNA, 21 nt, Human
aauaucuccgucaacucauau

SEQ ID NO: 1224629 - RNA, 16 nt, Human
aauaucuccgucaacu

SEQ ID NO: 1224630 - RNA, 14 nt, Human
uaacaugauuuggg

SEQ ID NO: 1224631 - RNA, 15 nt, Human
uaacauaaaucugug

SEQ ID NO: 1224632 - RNA, 16 nt, Human
uaacauaaaucuguga

SEQ ID NO: 1224633 - RNA, 17 nt, Human
uaacauaaaucugugaa

SEQ ID NO: 1224634 - RNA, 18 nt, Human
uaacauaaaucugugaac

SEQ ID NO: 1224635 - RNA, 20 nt, Human
uaacauaaaucugugaacuu

SEQ ID NO: 1224636 - RNA, 16 nt, Human
uaaccucuaaauucuu

SEQ ID NO: 1224637 - RNA, 20 nt, Human
aauaucacuugucaauaaaa

SEQ ID NO: 1224638 - RNA, 15 nt, Human
aauaucacuugucaa

SEQ ID NO: 1224639 - RNA, 12 nt, Human
aauaucacuugu

SEQ ID NO: 1224640 - RNA, 24 nt, Human
aauagcuuuuuucucugauacaga

SEQ ID NO: 1224641 - RNA, 18 nt, Human
aauaggcguaacuaauuu

SEQ ID NO: 1224642 - RNA, 18 nt, Human
uaaguuuuuuuuuaaaaa

SEQ ID NO: 1224643 - RNA, 14 nt, Human
aaucagacuaugaa

SEQ ID NO: 1224644 - RNA, 17 nt, Human
aaucagacuaugaaguu

SEQ ID NO: 1224645 - RNA, 23 nt, Human
aaucaugaauuaguuuuauaugc

SEQ ID NO: 1224646 - RNA, 19 nt, Human
aaucaugaauuaguuuuau

SEQ ID NO: 1224647 - RNA, 17 nt, Human
aaucauggugcucagag

SEQ ID NO: 1224648 - RNA, 15 nt, Human
aaucaucaagucuuu

SEQ ID NO: 1224649 - RNA, 14 nt, Human
aaucuuauaauuua

SEQ ID NO: 1224650 - RNA, 16 nt, Human
aaucuuauaauuuaaa

SEQ ID NO: 1224651 - RNA, 13 nt, Human
aaucugugaacuu

SEQ ID NO: 1224652 - RNA, 15 nt, Human
aaucugugaacuuga

SEQ ID NO: 1224653 - RNA, 17 nt, Human
aaucugugaacuugaaa

SEQ ID NO: 1224654 - RNA, 18 nt, Human
aaucugugaacuugaaau

SEQ ID NO: 1224655 - RNA, 19 nt, Human
aaucugugaacuugaaauu

SEQ ID NO: 1224656 - RNA, 13 nt, Human
aauccuugaagau

SEQ ID NO: 1224657 - RNA, 20 nt, Human
aauccucaguuuuugugaaa

SEQ ID NO: 1224658 - RNA, 16 nt, Human
uaaugauaacuggaaa

SEQ ID NO: 1224659 - RNA, 19 nt, Human
aaucuuuaaaaaaaaaauu

SEQ ID NO: 1224660 - RNA, 20 nt, Human
aaucuuuaaaaaaaaaauug

SEQ ID NO: 1224661 - RNA, 21 nt, Human
aaugagagacacacugaagaa

SEQ ID NO: 1224662 - RNA, 13 nt, Human
aaugagacaucca

SEQ ID NO: 1224663 - RNA, 14 nt, Human
aaugagacauccag

SEQ ID NO: 1224664 - RNA, 15 nt, Human
aaugagacauccagc

SEQ ID NO: 1224665 - RNA, 15 nt, Human
aaugaaaaccacauu

SEQ ID NO: 1224666 - RNA, 14 nt, Human
uaauagguuuggac

SEQ ID NO: 1224667 - RNA, 19 nt, Human
uaauagguuuggacaaaau

SEQ ID NO: 1224668 - RNA, 20 nt, Human
uaauagggcaauuaauuccu

SEQ ID NO: 1224669 - RNA, 19 nt, Human
uacauauaagugauugcug

SEQ ID NO: 1224670 - RNA, 22 nt, Human
uacauauaagugauugcugguu

SEQ ID NO: 1224671 - RNA, 18 nt, Human
uacaguauaauuaacaug

SEQ ID NO: 1224672 - RNA, 19 nt, Human
uacaguauaauuaacaugu

SEQ ID NO: 1224673 - RNA, 23 nt, Human
uacaguauaauuaacauguuaaa

SEQ ID NO: 1224674 - RNA, 20 nt, Human
aauggacuguggugacuuug

SEQ ID NO: 1224675 - RNA, 19 nt, Human
aauggacuuuuguacauag

SEQ ID NO: 1224676 - RNA, 19 nt, Human
uacacuaagagagaaugag

SEQ ID NO: 1224677 - RNA, 14 nt, Human
uacaccauuaugug

SEQ ID NO: 1224678 - RNA, 14 nt, Human
uacaguauaauuaa

SEQ ID NO: 1224679 - RNA, 16 nt, Human
uacaguauaauuaaca

SEQ ID NO: 1224680 - RNA, 17 nt, Human
uacaguauaauuaacau

SEQ ID NO: 1224681 - RNA, 21 nt, Human
aaugccccugaauuuaaauag

SEQ ID NO: 1224682 - RNA, 12 nt, Human
ucagcucaugga

SEQ ID NO: 1224683 - RNA, 19 nt, Human
ucaggaaagagaacuucca

SEQ ID NO: 1224684 - RNA, 13 nt, Human
ucaggaaagagaa

SEQ ID NO: 1224685 - RNA, 23 nt, Human
accccagcuggggccaggcuggg

SEQ ID NO: 1224686 - RNA, 23 nt, Human
accauuucuugagguaaaagcau

SEQ ID NO: 1224687 - RNA, 21 nt, Human
acccagauaaagguucaugca

SEQ ID NO: 1224688 - RNA, 19 nt, Human
accaugggauaaaugccau

SEQ ID NO: 1224689 - RNA, 19 nt, Human
ucacccaggcuggacugca

SEQ ID NO: 1224690 - RNA, 19 nt, Human
ucacccagguuggagugca

SEQ ID NO: 1224691 - RNA, 15 nt, Human
accaaucaugaauua

SEQ ID NO: 1224692 - RNA, 13 nt, Human
accaaucaugaau

SEQ ID NO: 1224693 - RNA, 15 nt, Human
ucaauucuugccaaa

SEQ ID NO: 1224694 - RNA, 17 nt, Human
ucaauucuucccuaucu

SEQ ID NO: 1224695 - RNA, 19 nt, Human
ucaauucuucccuaucuuu

SEQ ID NO: 1224696 - RNA, 23 nt, Human
ucaauucuucccuaucuuugcca

SEQ ID NO: 1224697 - RNA, 18 nt, Human
accacuuguguuuugcaa

SEQ ID NO: 1224698 - RNA, 13 nt, Human
accacuuuuugca

SEQ ID NO: 1224699 - RNA, 14 nt, Human
accacuuuuugcag

SEQ ID NO: 1224700 - RNA, 15 nt, Human
accacuuuuugcagc

SEQ ID NO: 1224701 - RNA, 16 nt, Human
accacuuuuugcagcu

SEQ ID NO: 1224702 - RNA, 17 nt, Human
accacuuuuugcagcuu

SEQ ID NO: 1224703 - RNA, 18 nt, Human
accacuuuuugcagcuuu

SEQ ID NO: 1224704 - RNA, 20 nt, Human
accacuuuuugcagcuuucu

SEQ ID NO: 1224705 - RNA, 19 nt, Human
acauauauaacaaugcugu

SEQ ID NO: 1224706 - RNA, 20 nt, Human
acauagugggacccugucuc

SEQ ID NO: 1224707 - RNA, 20 nt, Human
acauagucuggcuguaccca

SEQ ID NO: 1224708 - RNA, 14 nt, Human
acauagucuggcug

SEQ ID NO: 1224709 - RNA, 15 nt, Human
acauagucuggcugu

SEQ ID NO: 1224710 - RNA, 12 nt, Human
acaucagcaaac

SEQ ID NO: 1224711 - RNA, 14 nt, Human
acauaaaaaggaca

SEQ ID NO: 1224712 - RNA, 16 nt, Human
uauuucuauauuuuca

SEQ ID NO: 1224713 - RNA, 17 nt, Human
uauuucuauauuuucau

SEQ ID NO: 1224714 - RNA, 18 nt, Human
uauuucuauauuuucauu

SEQ ID NO: 1224715 - RNA, 21 nt, Human
uaugaaauauuauguuaaaac

SEQ ID NO: 1224716 - RNA, 20 nt, Human
uaugaacuugaggacacaug

SEQ ID NO: 1224717 - RNA, 21 nt, Human
uaugaacuugaggacacaugu

SEQ ID NO: 1224718 - RNA, 23 nt, Human
uaugaacuugaggacacaugucc

SEQ ID NO: 1224719 - RNA, 22 nt, Human
uaugaacuugaggacacauguc

SEQ ID NO: 1224720 - RNA, 21 nt, Human
acauguccagugggaggugag

SEQ ID NO: 1224721 - RNA, 22 nt, Human
acauuaaauuuuuuuuacauuu

SEQ ID NO: 1224722 - RNA, 13 nt, Human
acauuccauccuu

SEQ ID NO: 1224723 - RNA, 22 nt, Human
ucaagaacacagcccugcuucu

SEQ ID NO: 1224724 - RNA, 20 nt, Human
ucaaauacgugggcauucaa

SEQ ID NO: 1224725 - RNA, 16 nt, Human
acaugaaguccaagca

SEQ ID NO: 1224726 - RNA, 14 nt, Human
ucaaagcugaaaug

SEQ ID NO: 1224727 - RNA, 19 nt, Human
ucaaaguugccuaaaucca

SEQ ID NO: 1224728 - RNA, 21 nt, Human
ucaaaguugccuaaauccauu

SEQ ID NO: 1224729 - RNA, 22 nt, Human
ucaaaguugccuaaauccauuu

SEQ ID NO: 1224730 - RNA, 21 nt, Human
ucaaaauaugccccauucaac

SEQ ID NO: 1224731 - RNA, 16 nt, Human
ucaaaauuguuacaaa

SEQ ID NO: 1224732 - RNA, 19 nt, Human
ucaaaauuguuacaaauug

SEQ ID NO: 1224733 - RNA, 16 nt, Human
uauuuuuauauuuacu

SEQ ID NO: 1224734 - RNA, 21 nt, Human
ucaugaauuaguuuuauaugc

SEQ ID NO: 1224735 - RNA, 17 nt, Human
accucgugauccacccg

SEQ ID NO: 1224736 - RNA, 14 nt, Human
accucuaaauucuu

SEQ ID NO: 1224737 - RNA, 19 nt, Human
accucucaauauucaauaa

SEQ ID NO: 1224738 - RNA, 20 nt, Human
accucucaauauucaauaaa

SEQ ID NO: 1224739 - RNA, 21 nt, Human
accucucaauauucaauaaag

SEQ ID NO: 1224740 - RNA, 23 nt, Human
accucucaauauucaauaaagcu

SEQ ID NO: 1224741 - RNA, 16 nt, Human
accucuccagccucag

SEQ ID NO: 1224742 - RNA, 18 nt, Human
accucuccagccucagcu

SEQ ID NO: 1224743 - RNA, 20 nt, Human
accucuccagccucagcucu

SEQ ID NO: 1224744 - RNA, 22 nt, Human
accucuccagccucagcucuca

SEQ ID NO: 1224745 - RNA, 19 nt, Human
accucccucaaccucaucc

SEQ ID NO: 1224746 - RNA, 22 nt, Human
ucauccucuccacagcugccuc

SEQ ID NO: 1224747 - RNA, 18 nt, Human
ucaucuagguaaauuaca

SEQ ID NO: 1224748 - RNA, 16 nt, Human
ucaugaauuaguuuua

SEQ ID NO: 1224749 - RNA, 13 nt, Human
ucaucucagcuca

SEQ ID NO: 1224750 - RNA, 18 nt, Human
ucaucucagcucacugca

SEQ ID NO: 1224751 - RNA, 21 nt, Human
accuagggugauauuaaccag

SEQ ID NO: 1224752 - RNA, 13 nt, Human
uccaacccuagca

SEQ ID NO: 1224753 - RNA, 14 nt, Human
uccaacccuagcaa

SEQ ID NO: 1224754 - RNA, 15 nt, Human
uccaacccuagcaaa

SEQ ID NO: 1224755 - RNA, 14 nt, Human
acgagaaaacaaua

SEQ ID NO: 1224756 - RNA, 20 nt, Human
accuuuuggucuggagggaa

SEQ ID NO: 1224757 - RNA, 12 nt, Human
ucccaucccugc

SEQ ID NO: 1224758 - RNA, 14 nt, Human
ucccaucccugcgu

SEQ ID NO: 1224759 - RNA, 20 nt, Human
acuacaggcacacaccacca

SEQ ID NO: 1224760 - RNA, 15 nt, Human
acuacaguuagggcu

SEQ ID NO: 1224761 - RNA, 20 nt, Human
uccauccuugagucaaaaaa

SEQ ID NO: 1224762 - RNA, 20 nt, Human
uccaucucuuguuuaaauuc

SEQ ID NO: 1224763 - RNA, 12 nt, Human
uccauucuggaa

SEQ ID NO: 1224764 - RNA, 13 nt, Human
uccauucuggaag

SEQ ID NO: 1224765 - RNA, 14 nt, Human
uccauucuggaagu

SEQ ID NO: 1224766 - RNA, 18 nt, Human
uccauuuaauaauuauau

SEQ ID NO: 1224767 - RNA, 21 nt, Human
ucccaaagaaguucugguaug

SEQ ID NO: 1224768 - RNA, 14 nt, Human
ucccaaaaaacuac

SEQ ID NO: 1224769 - RNA, 20 nt, Human
ucccaaaagcccauucauuc

SEQ ID NO: 1224770 - RNA, 21 nt, Human
ucccaaaguccugggauuaca

SEQ ID NO: 1224771 - RNA, 20 nt, Human
ucccaaguagcugagacuac

SEQ ID NO: 1224772 - RNA, 18 nt, Human
acgggacugcggaggaag

SEQ ID NO: 1224773 - RNA, 15 nt, Human
acggggacucagccc

SEQ ID NO: 1224774 - RNA, 22 nt, Human
acguauaaaagccuguuuaaga

SEQ ID NO: 1224775 - RNA, 20 nt, Human
acgugggcauucaaauguau

SEQ ID NO: 1224776 - RNA, 17 nt, Human
acgugggcauucaaaug

SEQ ID NO: 1224777 - RNA, 21 nt, Human
acuacuagggaaaugccuuug

SEQ ID NO: 1224778 - RNA, 19 nt, Human
uccuaaauauauuuuaaga

SEQ ID NO: 1224779 - RNA, 22 nt, Human
ucguuuucaaaauuguuacaaa

SEQ ID NO: 1224780 - RNA, 16 nt, Human
ucguaaaauuaagaaa

SEQ ID NO: 1224781 - RNA, 13 nt, Human
ucguaaaauuaag

SEQ ID NO: 1224782 - RNA, 18 nt, Human
acugggacaggggagaac

SEQ ID NO: 1224783 - RNA, 16 nt, Human
acugggagaaaugaaa

SEQ ID NO: 1224784 - RNA, 17 nt, Human
acugggagaaaugaaaa

SEQ ID NO: 1224785 - RNA, 18 nt, Human
acuguggguagacacaca

SEQ ID NO: 1224786 - RNA, 12 nt, Human
acuguggugacu

SEQ ID NO: 1224787 - RNA, 14 nt, Human
acuguggugacuuu

SEQ ID NO: 1224788 - RNA, 15 nt, Human
acuguggugacuuug

SEQ ID NO: 1224789 - RNA, 18 nt, Human
acuguggugacuuuggau

SEQ ID NO: 1224790 - RNA, 20 nt, Human
acuguggugacuuuggauaa

SEQ ID NO: 1224791 - RNA, 21 nt, Human
acuguggugacuuuggauaau

SEQ ID NO: 1224792 - RNA, 12 nt, Human
acugugugcuca

SEQ ID NO: 1224793 - RNA, 15 nt, Human
acugugugcucagga

SEQ ID NO: 1224794 - RNA, 19 nt, Human
acugugugcucaggagccc

SEQ ID NO: 1224795 - RNA, 20 nt, Human
acugugugcucaggagcccu

SEQ ID NO: 1224796 - RNA, 21 nt, Human
acugugugcucaggagcccug

SEQ ID NO: 1224797 - RNA, 14 nt, Human
acuuauaguacaug

SEQ ID NO: 1224798 - RNA, 15 nt, Human
acuuauaguacauga

SEQ ID NO: 1224799 - RNA, 17 nt, Human
acuuauaguacaugaua

SEQ ID NO: 1224800 - RNA, 18 nt, Human
acuuauaguacaugauaa

SEQ ID NO: 1224801 - RNA, 19 nt, Human
acuguuguagaagacaaaa

SEQ ID NO: 1224802 - RNA, 20 nt, Human
ucuaaagccauuguaguccu

SEQ ID NO: 1224803 - RNA, 14 nt, Human
acugcauccagccu

SEQ ID NO: 1224804 - RNA, 15 nt, Human
acugcauccagccug

SEQ ID NO: 1224805 - RNA, 14 nt, Human
acugcauuauauuu

SEQ ID NO: 1224806 - RNA, 15 nt, Human
acugcauuauauuua

SEQ ID NO: 1224807 - RNA, 16 nt, Human
acugccuauuuuaaua

SEQ ID NO: 1224808 - RNA, 21 nt, Human
acugccuauuuuaauaaacac

SEQ ID NO: 1224809 - RNA, 16 nt, Human
acugcuuaauucaaau

SEQ ID NO: 1224810 - RNA, 13 nt, Human
acugcuuaauuca

SEQ ID NO: 1224811 - RNA, 15 nt, Human
acugcucuccuccac

SEQ ID NO: 1224812 - RNA, 20 nt, Human
acugccuucucaacuccaaa

SEQ ID NO: 1224813 - RNA, 19 nt, Human
acugccuucucaacuccaa

SEQ ID NO: 1224814 - RNA, 13 nt, Human
acugccuucucaa

SEQ ID NO: 1224815 - RNA, 12 nt, Human
ucgaagugcuga

SEQ ID NO: 1224816 - RNA, 13 nt, Human
ucgaagugcugag

SEQ ID NO: 1224817 - RNA, 12 nt, Human
acuggccccacc

SEQ ID NO: 1224818 - RNA, 13 nt, Human
acuggccccaccc

SEQ ID NO: 1224819 - RNA, 21 nt, Human
ucucacagcuccaagaauuuc

SEQ ID NO: 1224820 - RNA, 19 nt, Human
acuugaaauuugaauuuug

SEQ ID NO: 1224821 - RNA, 20 nt, Human
acuugaaauuugaauuuugu

SEQ ID NO: 1224822 - RNA, 11 nt, Human
acuugaggaca

SEQ ID NO: 1224823 - RNA, 12 nt, Human
acuugaggacac

SEQ ID NO: 1224824 - RNA, 13 nt, Human
acuugaggacaca

SEQ ID NO: 1224825 - RNA, 14 nt, Human
acuugaggacacau

SEQ ID NO: 1224826 - RNA, 15 nt, Human
acuugaggacacaug

SEQ ID NO: 1224827 - RNA, 16 nt, Human
acuugaggacacaugu

SEQ ID NO: 1224828 - RNA, 14 nt, Human
acuugcucuugaug

SEQ ID NO: 1224829 - RNA, 20 nt, Human
ucuccauggcccugccaugc

SEQ ID NO: 1224830 - RNA, 24 nt, Human
ucuccauggcccugccaugcucuc

SEQ ID NO: 1224831 - RNA, 16 nt, Human
ucuccauggcccugcc

SEQ ID NO: 1224832 - RNA, 17 nt, Human
ucuccauggcccugcca

SEQ ID NO: 1224833 - RNA, 19 nt, Human
ucuccuaagcuggagugca

SEQ ID NO: 1224834 - RNA, 16 nt, Human
acuuguguuuugcaag

SEQ ID NO: 1224835 - RNA, 14 nt, Human
acuuguuagaucua

SEQ ID NO: 1224836 - RNA, 15 nt, Human
acuuguuagaucuag

SEQ ID NO: 1224837 - RNA, 23 nt, Human
acuuguuagaucuaguucacucu

SEQ ID NO: 1224838 - RNA, 14 nt, Human
ucuccaaaccacuu

SEQ ID NO: 1224839 - RNA, 18 nt, Human
ucucagcucacugcaacc

SEQ ID NO: 1224840 - RNA, 15 nt, Human
ucucagcucacugca

SEQ ID NO: 1224841 - RNA, 16 nt, Human
ucucagcucacugcaa

SEQ ID NO: 1224842 - RNA, 18 nt, Human
ucucuuuaaaaggaaaga

SEQ ID NO: 1224843 - RNA, 19 nt, Human
ucucuuuaaaaggaaagaa

SEQ ID NO: 1224844 - RNA, 21 nt, Human
ucucuuuaaaaggaaagaaaa

SEQ ID NO: 1224845 - RNA, 21 nt, Human
agaaaacuuguauuaugugug

SEQ ID NO: 1224846 - RNA, 19 nt, Human
ucucuggaauuugaaacac

SEQ ID NO: 1224847 - RNA, 15 nt, Human
ucucuggaauuugaa

SEQ ID NO: 1224848 - RNA, 15 nt, Human
ucucucauacccucc

SEQ ID NO: 1224849 - RNA, 21 nt, Human
ucucucacuuguuuuauuuaa

SEQ ID NO: 1224850 - RNA, 17 nt, Human
ucucucacuuguuuuau

SEQ ID NO: 1224851 - RNA, 15 nt, Human
ucugaagucagaucu

SEQ ID NO: 1224852 - RNA, 19 nt, Human
ucugaagucagaucugccu

SEQ ID NO: 1224853 - RNA, 12 nt, Human
ucugaagaagau

SEQ ID NO: 1224854 - RNA, 18 nt, Human
agaaaugaaaaaauauau

SEQ ID NO: 1224855 - RNA, 23 nt, Human
agaaaugaaaaaauauauaucaa

SEQ ID NO: 1224856 - RNA, 12 nt, Human
agaaaucuaaaa

SEQ ID NO: 1224857 - RNA, 15 nt, Human
agaaaucuaaaaaac

SEQ ID NO: 1224858 - RNA, 17 nt, Human
agaaaugaaaaaauaua

SEQ ID NO: 1224859 - RNA, 15 nt, Human
ucugcaggucccuaa

SEQ ID NO: 1224860 - RNA, 16 nt, Human
ucugcaggucccuaau

SEQ ID NO: 1224861 - RNA, 17 nt, Human
ucugcaggucccuaaua

SEQ ID NO: 1224862 - RNA, 18 nt, Human
ucugcaggucccuaauaa

SEQ ID NO: 1224863 - RNA, 19 nt, Human
ucugcaggucccuaauaaa

SEQ ID NO: 1224864 - RNA, 13 nt, Human
agaaauuaugugc

SEQ ID NO: 1224865 - RNA, 21 nt, Human
agaaauuaugugccagauuua

SEQ ID NO: 1224866 - RNA, 22 nt, Human
agaaauuaugugccagauuuau

SEQ ID NO: 1224867 - RNA, 16 nt, Human
agaaauuuauaaacuu

SEQ ID NO: 1224868 - RNA, 17 nt, Human
agaaauuuauaaacuuu

SEQ ID NO: 1224869 - RNA, 13 nt, Human
ucugauacagaaa

SEQ ID NO: 1224870 - RNA, 14 nt, Human
ucuuuaauuuuaca

SEQ ID NO: 1224871 - RNA, 13 nt, Human
ucuuuaauuuugg

SEQ ID NO: 1224872 - RNA, 18 nt, Human
agacuggguaggaaagag

SEQ ID NO: 1224873 - RNA, 22 nt, Human
agacuggguaggaaagaggaag

SEQ ID NO: 1224874 - RNA, 12 nt, Human
agacuggugacu

SEQ ID NO: 1224875 - RNA, 13 nt, Human
agacuggugacug

SEQ ID NO: 1224876 - RNA, 14 nt, Human
agacuggugacuga

SEQ ID NO: 1224877 - RNA, 16 nt, Human
agacuggugacugauu

SEQ ID NO: 1224878 - RNA, 17 nt, Human
agacuggugacugauuc

SEQ ID NO: 1224879 - RNA, 19 nt, Human
agacuggugacugauucuu

SEQ ID NO: 1224880 - RNA, 20 nt, Human
agacauuuuaaaaaaugguc

SEQ ID NO: 1224881 - RNA, 15 nt, Human
agaccgaucggcggc

SEQ ID NO: 1224882 - RNA, 17 nt, Human
ucuucugaauaaagcaa

SEQ ID NO: 1224883 - RNA, 18 nt, Human
ucuucugaauaaagcaau

SEQ ID NO: 1224884 - RNA, 19 nt, Human
agacauuuuaaaaaauggu

SEQ ID NO: 1224885 - RNA, 22 nt, Human
agacauuuuaaaaaauggucac

SEQ ID NO: 1224886 - RNA, 23 nt, Human
ucuuagaugcaguucugaagaag

SEQ ID NO: 1224887 - RNA, 22 nt, Human
ucuuacugcuuaauucaaauaa

SEQ ID NO: 1224888 - RNA, 19 nt, Human
ucuuacugucuuuuuucua

SEQ ID NO: 1224889 - RNA, 12 nt, Human
agaauucuguau

SEQ ID NO: 1224890 - RNA, 17 nt, Human
agacacacugaagaagc

SEQ ID NO: 1224891 - RNA, 16 nt, Human
agacacacugaagaag

SEQ ID NO: 1224892 - RNA, 13 nt, Human
agacacgcacggc

SEQ ID NO: 1224893 - RNA, 15 nt, Human
agacacgcacggcag

SEQ ID NO: 1224894 - RNA, 20 nt, Human
agacacgcacggcagccaca

SEQ ID NO: 1224895 - RNA, 21 nt, Human
agacacgcacggcagccacag

SEQ ID NO: 1224896 - RNA, 22 nt, Human
agacacgcacggcagccacagc

SEQ ID NO: 1224897 - RNA, 12 nt, Human
agacagaaaaaa

SEQ ID NO: 1224898 - RNA, 13 nt, Human
ucuguacuuuuug

SEQ ID NO: 1224899 - RNA, 14 nt, Human
ucuguacuuuuugg

SEQ ID NO: 1224900 - RNA, 17 nt, Human
ucuguacuuuuuggcau

SEQ ID NO: 1224901 - RNA, 22 nt, Human
ucugguaugaacuugaggacac

SEQ ID NO: 1224902 - RNA, 23 nt, Human
ucugguaugaacuugaggacaca

SEQ ID NO: 1224903 - RNA, 19 nt, Human
ucugugaacuugaaauuug

SEQ ID NO: 1224904 - RNA, 22 nt, Human
ucugugaacuugaaauuugaau

SEQ ID NO: 1224905 - RNA, 18 nt, Human
ugaaauauuauguuaaaa

SEQ ID NO: 1224906 - RNA, 15 nt, Human
ugaaauuguauuaca

SEQ ID NO: 1224907 - RNA, 21 nt, Human
ugaaauuguaauuauaucuga

SEQ ID NO: 1224908 - RNA, 14 nt, Human
ugaaauuugaauuu

SEQ ID NO: 1224909 - RNA, 15 nt, Human
ugaaauuugaauuuu

SEQ ID NO: 1224910 - RNA, 16 nt, Human
ugaaauuugaauuuug

SEQ ID NO: 1224911 - RNA, 17 nt, Human
ugaaauuugaauuuugu

SEQ ID NO: 1224912 - RNA, 22 nt, Human
agagauuuuuuuguuguuuguu

SEQ ID NO: 1224913 - RNA, 23 nt, Human
agagauuuuuuuguuguuuguuu

SEQ ID NO: 1224914 - RNA, 12 nt, Human
agagcacugcuc

SEQ ID NO: 1224915 - RNA, 16 nt, Human
agagcacugcuccagu

SEQ ID NO: 1224916 - RNA, 21 nt, Human
ugaacuaggauuguaguccca

SEQ ID NO: 1224917 - RNA, 11 nt, Human
ugaacuuugcu

SEQ ID NO: 1224918 - RNA, 15 nt, Human
ugaacuuugcugagc

SEQ ID NO: 1224919 - RNA, 16 nt, Human
ugaacuuugcugagcc

SEQ ID NO: 1224920 - RNA, 21 nt, Human
agagcuggagaugaggccaga

SEQ ID NO: 1224921 - RNA, 23 nt, Human
agagcuggagaugaggccagacc

SEQ ID NO: 1224922 - RNA, 22 nt, Human
agagcuggagaugaggccagac

SEQ ID NO: 1224923 - RNA, 22 nt, Human
ugaagcacagugaucaaguuau

SEQ ID NO: 1224924 - RNA, 12 nt, Human
agagguuuuaaa

SEQ ID NO: 1224925 - RNA, 21 nt, Human
ugaauuuauuggcuuuucuga

SEQ ID NO: 1224926 - RNA, 16 nt, Human
ugaauuuuacauggcu

SEQ ID NO: 1224927 - RNA, 22 nt, Human
ugaauuuauuggcuuuucugau

SEQ ID NO: 1224928 - RNA, 23 nt, Human
ugaauuuauuggcuuuucugauc

SEQ ID NO: 1224929 - RNA, 14 nt, Human
agauacuggauugu

SEQ ID NO: 1224930 - RNA, 17 nt, Human
agauaaagguucaugca

SEQ ID NO: 1224931 - RNA, 15 nt, Human
agauacugaaauaaa

SEQ ID NO: 1224932 - RNA, 13 nt, Human
agauacugaaaua

SEQ ID NO: 1224933 - RNA, 12 nt, Human
agauacugaaau

SEQ ID NO: 1224934 - RNA, 20 nt, Human
agaguugaugguuguacaua

SEQ ID NO: 1224935 - RNA, 17 nt, Human
agaguuuagcuggaaaa

SEQ ID NO: 1224936 - RNA, 16 nt, Human
agaguuuagcuggaaa

SEQ ID NO: 1224937 - RNA, 13 nt, Human
agaucaggaagag

SEQ ID NO: 1224938 - RNA, 17 nt, Human
agaucaggaagagaagg

SEQ ID NO: 1224939 - RNA, 18 nt, Human
agaucaggaagagaagga

SEQ ID NO: 1224940 - RNA, 19 nt, Human
agaucaggaagagaaggag

SEQ ID NO: 1224941 - RNA, 12 nt, Human
agaucauuguga

SEQ ID NO: 1224942 - RNA, 20 nt, Human
agaugcaguucugaagaaga

SEQ ID NO: 1224943 - RNA, 19 nt, Human
agaugcaguucugaagaag

SEQ ID NO: 1224944 - RNA, 18 nt, Human
agaugcaguucugaagaa

SEQ ID NO: 1224945 - RNA, 23 nt, Human
ugauuugacauagucuggcugua

SEQ ID NO: 1224946 - RNA, 19 nt, Human
agccacggggacucagccc

SEQ ID NO: 1224947 - RNA, 15 nt, Human
agccacgguguucug

SEQ ID NO: 1224948 - RNA, 12 nt, Human
ugcaaauuucau

SEQ ID NO: 1224949 - RNA, 21 nt, Human
ugcaagccagauuuuccugaa

SEQ ID NO: 1224950 - RNA, 15 nt, Human
ugcaagccagauuuu

SEQ ID NO: 1224951 - RNA, 21 nt, Human
ugcaaggccugguguuucuug

SEQ ID NO: 1224952 - RNA, 23 nt, Human
ugcaaggccugguguuucuugau

SEQ ID NO: 1224953 - RNA, 18 nt, Human
agcccugggaggcucugg

SEQ ID NO: 1224954 - RNA, 20 nt, Human
agcccugggaggcucuggag

SEQ ID NO: 1224955 - RNA, 19 nt, Human
ugcauggaaauucccuuca

SEQ ID NO: 1224956 - RNA, 23 nt, Human
ugcauggaaauucccuucaucug

SEQ ID NO: 1224957 - RNA, 11 nt, Human
ugcauggaaau

SEQ ID NO: 1224958 - RNA, 17 nt, Human
ugcauagaauaaaauuu

SEQ ID NO: 1224959 - RNA, 11 nt, Human
ugcaggucccu

SEQ ID NO: 1224960 - RNA, 22 nt, Human
ugcaggucccuaauaaagcugu

SEQ ID NO: 1224961 - RNA, 17 nt, Human
agccuccuuagaaaaaa

SEQ ID NO: 1224962 - RNA, 19 nt, Human
agcagucaggaaagagaac

SEQ ID NO: 1224963 - RNA, 18 nt, Human
agcagucaggaaagagaa

SEQ ID NO: 1224964 - RNA, 17 nt, Human
agcagucaggaaagaga

SEQ ID NO: 1224965 - RNA, 15 nt, Human
agcauauauuuuuau

SEQ ID NO: 1224966 - RNA, 18 nt, Human
agcauauauuuuuauauu

SEQ ID NO: 1224967 - RNA, 20 nt, Human
agcauauauuuuuauauuua

SEQ ID NO: 1224968 - RNA, 22 nt, Human
agcauauauuuuuauauuuacu

SEQ ID NO: 1224969 - RNA, 22 nt, Human
agcauuuagauguauagguuga

SEQ ID NO: 1224970 - RNA, 18 nt, Human
agcauuuguguugaagag

SEQ ID NO: 1224971 - RNA, 17 nt, Human
agcauuuguguugaaga

SEQ ID NO: 1224972 - RNA, 17 nt, Human
ugaucaccgacugaaaa

SEQ ID NO: 1224973 - RNA, 19 nt, Human
ugaucaccgacugaaaaua

SEQ ID NO: 1224974 - RNA, 13 nt, Human
agcauccuggaau

SEQ ID NO: 1224975 - RNA, 15 nt, Human
agcauccuggaauau

SEQ ID NO: 1224976 - RNA, 14 nt, Human
agcauccuggaaua

SEQ ID NO: 1224977 - RNA, 15 nt, Human
agcaucccucaccca

SEQ ID NO: 1224978 - RNA, 13 nt, Human
ugauccagaaaga

SEQ ID NO: 1224979 - RNA, 23 nt, Human
ugauccagaaagaaaacuuguau

SEQ ID NO: 1224980 - RNA, 19 nt, Human
ugauccagcagauuauuca

SEQ ID NO: 1224981 - RNA, 20 nt, Human
ugauccagcagauuauucac

SEQ ID NO: 1224982 - RNA, 16 nt, Human
ugauuaaguaaugaua

SEQ ID NO: 1224983 - RNA, 15 nt, Human
ugauuaaguaaugau

SEQ ID NO: 1224984 - RNA, 16 nt, Human
aggacuucuuuaauuu

SEQ ID NO: 1224985 - RNA, 21 nt, Human
aggacuucuuuaauuuuggaa

SEQ ID NO: 1224986 - RNA, 22 nt, Human
aggacuucuuuaauuuuggaau

SEQ ID NO: 1224987 - RNA, 23 nt, Human
aggacuucuuuaauuuuggaauu

SEQ ID NO: 1224988 - RNA, 14 nt, Human
aggacuucuuuaau

SEQ ID NO: 1224989 - RNA, 23 nt, Human
aggagcccuucuauacccaccca

SEQ ID NO: 1224990 - RNA, 13 nt, Human
aggaauucuguau

SEQ ID NO: 1224991 - RNA, 14 nt, Human
aggaauucuguaua

SEQ ID NO: 1224992 - RNA, 15 nt, Human
aggaauucuguauag

SEQ ID NO: 1224993 - RNA, 15 nt, Human
aggaucaguuaacua

SEQ ID NO: 1224994 - RNA, 23 nt, Human
aggaucaguuaacuauugcauuu

SEQ ID NO: 1224995 - RNA, 17 nt, Human
aggaucaguuaacuauu

SEQ ID NO: 1224996 - RNA, 11 nt, Human
aggauccaggc

SEQ ID NO: 1224997 - RNA, 12 nt, Human
aggaggacccag

SEQ ID NO: 1224998 - RNA, 13 nt, Human
aggaggacccagg

SEQ ID NO: 1224999 - RNA, 14 nt, Human
aggaggacccagga

SEQ ID NO: 1225000 - RNA, 15 nt, Human
aggaggacccaggac

SEQ ID NO: 1225001 - RNA, 16 nt, Human
aggaggacccaggaca

SEQ ID NO: 1225002 - RNA, 17 nt, Human
aggaggacccaggacag

SEQ ID NO: 1225003 - RNA, 18 nt, Human
aggaggacccaggacagg

SEQ ID NO: 1225004 - RNA, 16 nt, Human
ugcuuuuuauggccug

SEQ ID NO: 1225005 - RNA, 14 nt, Human
uggaguugaaaauc

SEQ ID NO: 1225006 - RNA, 13 nt, Human
uggagugcagugg

SEQ ID NO: 1225007 - RNA, 12 nt, Human
uggauuccagag

SEQ ID NO: 1225008 - RNA, 23 nt, Human
aggcacacaccaccacgccuggc

SEQ ID NO: 1225009 - RNA, 21 nt, Human
uggagcucgugggacagucac

SEQ ID NO: 1225010 - RNA, 21 nt, Human
uggagcucguggaacaguuac

SEQ ID NO: 1225011 - RNA, 17 nt, Human
uggagcucguggaacag

SEQ ID NO: 1225012 - RNA, 22 nt, Human
ugccugcuuuuuauggccugug

SEQ ID NO: 1225013 - RNA, 20 nt, Human
ugccugcuuuuuauggccug

SEQ ID NO: 1225014 - RNA, 21 nt, Human
ugccugcuuuuuauggccugu

SEQ ID NO: 1225015 - RNA, 14 nt, Human
ugccaucaauaaaa

SEQ ID NO: 1225016 - RNA, 22 nt, Human
ugccaucaauaaaaaauuauga

SEQ ID NO: 1225017 - RNA, 19 nt, Human
ugccuuuucccaacuccag

SEQ ID NO: 1225018 - RNA, 16 nt, Human
ugcuaauuuugaaaaa

SEQ ID NO: 1225019 - RNA, 18 nt, Human
ugcuaauuuugaaaaacu

SEQ ID NO: 1225020 - RNA, 19 nt, Human
ugcuaauuuugaaaaacug

SEQ ID NO: 1225021 - RNA, 20 nt, Human
ugcuaauuuugaaaaacugc

SEQ ID NO: 1225022 - RNA, 19 nt, Human
aggaagcaaauagaagaga

SEQ ID NO: 1225023 - RNA, 18 nt, Human
aggaagaucccccagaaa

SEQ ID NO: 1225024 - RNA, 17 nt, Human
aggaagaucccccagaa

SEQ ID NO: 1225025 - RNA, 22 nt, Human
aggaaggaggacccaggacagg

SEQ ID NO: 1225026 - RNA, 16 nt, Human
aggaaggcagggagga

SEQ ID NO: 1225027 - RNA, 18 nt, Human
aggaaggcagggaggagg

SEQ ID NO: 1225028 - RNA, 20 nt, Human
aggaaggcagggaggaggca

SEQ ID NO: 1225029 - RNA, 22 nt, Human
aggaaggcagggaggaggcaga

SEQ ID NO: 1225030 - RNA, 16 nt, Human
aggaauuacgugcucu

SEQ ID NO: 1225031 - RNA, 23 nt, Human
ugcugagccuguaaaauaaaagg

SEQ ID NO: 1225032 - RNA, 16 nt, Human
aggaagaucccccaga

SEQ ID NO: 1225033 - RNA, 17 nt, Human
ugcucuugaugccuggc

SEQ ID NO: 1225034 - RNA, 23 nt, Human
aggaaaccaguuaggucucaaua

SEQ ID NO: 1225035 - RNA, 22 nt, Human
ugcuauuucuauauuuucauuc

SEQ ID NO: 1225036 - RNA, 19 nt, Human
ugggccccauguuaacccc

SEQ ID NO: 1225037 - RNA, 20 nt, Human
ugggccccugccucucugca

SEQ ID NO: 1225038 - RNA, 15 nt, Human
ugggccccugccucu

SEQ ID NO: 1225039 - RNA, 19 nt, Human
ugggccccugccucucugc

SEQ ID NO: 1225040 - RNA, 20 nt, Human
agggaggaggcagagaagaa

SEQ ID NO: 1225041 - RNA, 23 nt, Human
uggggcuccuccaggguggcagc

SEQ ID NO: 1225042 - RNA, 16 nt, Human
aggggaauugaggaca

SEQ ID NO: 1225043 - RNA, 20 nt, Human
uggucacguuuggugcuucu

SEQ ID NO: 1225044 - RNA, 16 nt, Human
ugggucgcccuggacu

SEQ ID NO: 1225045 - RNA, 18 nt, Human
ugggucgcccuggacugu

SEQ ID NO: 1225046 - RNA, 21 nt, Human
ugggucgcccuggacugugug

SEQ ID NO: 1225047 - RNA, 16 nt, Human
uggugcccugcuuuca

SEQ ID NO: 1225048 - RNA, 19 nt, Human
uggugcccugcuuucagau

SEQ ID NO: 1225049 - RNA, 20 nt, Human
uggugcccugcuuucagaua

SEQ ID NO: 1225050 - RNA, 23 nt, Human
uggugcuucucagauuucugagg

SEQ ID NO: 1225051 - RNA, 19 nt, Human
aggucuucuuaauauguuc

SEQ ID NO: 1225052 - RNA, 14 nt, Human
aggugagaccaccu

SEQ ID NO: 1225053 - RNA, 15 nt, Human
aggugagaccaccuc

SEQ ID NO: 1225054 - RNA, 16 nt, Human
aggugagaccaccucu

SEQ ID NO: 1225055 - RNA, 15 nt, Human
uguaaauacaauuuu

SEQ ID NO: 1225056 - RNA, 18 nt, Human
aguagcguuuuuuaaaug

SEQ ID NO: 1225057 - RNA, 19 nt, Human
aguagcguuuuuuaaaugu

SEQ ID NO: 1225058 - RNA, 20 nt, Human
aguagcguuuuuuaaaugua

SEQ ID NO: 1225059 - RNA, 16 nt, Human
uguaguagcguuuuuu

SEQ ID NO: 1225060 - RNA, 21 nt, Human
uguaguagcguuuuuuaaaug

SEQ ID NO: 1225061 - RNA, 22 nt, Human
uguaguagcguuuuuuaaaugu

SEQ ID NO: 1225062 - RNA, 23 nt, Human
uguaguagcguuuuuuaaaugua

SEQ ID NO: 1225063 - RNA, 22 nt, Human
aguacaugauaaaugauagaca

SEQ ID NO: 1225064 - RNA, 17 nt, Human
aguaaaauaauaauuuu

SEQ ID NO: 1225065 - RNA, 17 nt, Human
aguaaugauaacuggaa

SEQ ID NO: 1225066 - RNA, 20 nt, Human
aguaaugauaacuggaaacu

SEQ ID NO: 1225067 - RNA, 18 nt, Human
aguaaugauaacuggaaa

SEQ ID NO: 1225068 - RNA, 13 nt, Human
aguaaaauccaca

SEQ ID NO: 1225069 - RNA, 22 nt, Human
uguacuugcucuugaugccugg

SEQ ID NO: 1225070 - RNA, 23 nt, Human
uguacuugcucuugaugccuggc

SEQ ID NO: 1225071 - RNA, 17 nt, Human
agucaccucauggaauu

SEQ ID NO: 1225072 - RNA, 15 nt, Human
agucaccucauggaa

SEQ ID NO: 1225073 - RNA, 14 nt, Human
agucaccucaugga

SEQ ID NO: 1225074 - RNA, 21 nt, Human
aguauuagaauaccacaggaa

SEQ ID NO: 1225075 - RNA, 22 nt, Human
aguauuucuaugaaauauuaug

SEQ ID NO: 1225076 - RNA, 18 nt, Human
aguauuucuaugaaauau

SEQ ID NO: 1225077 - RNA, 17 nt, Human
aguauuucuaugaaaua

SEQ ID NO: 1225078 - RNA, 21 nt, Human
ugucaauaaaauccauacauu

SEQ ID NO: 1225079 - RNA, 18 nt, Human
aguauuagaauaccacag

SEQ ID NO: 1225080 - RNA, 13 nt, Human
uguauuacaaauc

SEQ ID NO: 1225081 - RNA, 22 nt, Human
uguauuacaaauccaaugaaau

SEQ ID NO: 1225082 - RNA, 16 nt, Human
uguaguguuggagaag

SEQ ID NO: 1225083 - RNA, 15 nt, Human
uguaguguuggagaa

SEQ ID NO: 1225084 - RNA, 14 nt, Human
uguaguguuggaga

SEQ ID NO: 1225085 - RNA, 17 nt, Human
agucuuuggaacccuaa

SEQ ID NO: 1225086 - RNA, 15 nt, Human
agucucuauaccaau

SEQ ID NO: 1225087 - RNA, 17 nt, Human
agucucuauaccaauaa

SEQ ID NO: 1225088 - RNA, 19 nt, Human
agucucuauaccaauaaag

SEQ ID NO: 1225089 - RNA, 20 nt, Human
agucucuauaccaauaaagu

SEQ ID NO: 1225090 - RNA, 21 nt, Human
agucucuauaccaauaaagug

SEQ ID NO: 1225091 - RNA, 22 nt, Human
agucucuauaccaauaaaguga

SEQ ID NO: 1225092 - RNA, 12 nt, Human
ugugaaauuauu

SEQ ID NO: 1225093 - RNA, 20 nt, Human
ugugaacaguuguguuugaa

SEQ ID NO: 1225094 - RNA, 22 nt, Human
ugugaacaguuguguuugaagc

SEQ ID NO: 1225095 - RNA, 12 nt, Human
ugugaacuugaa

SEQ ID NO: 1225096 - RNA, 14 nt, Human
ugugaacuugaaau

SEQ ID NO: 1225097 - RNA, 15 nt, Human
ugugaacuugaaauu

SEQ ID NO: 1225098 - RNA, 16 nt, Human
ugugaacuugaaauuu

SEQ ID NO: 1225099 - RNA, 15 nt, Human
agugaaagaaaauaa

SEQ ID NO: 1225100 - RNA, 17 nt, Human
agugaaagaaaauaaca

SEQ ID NO: 1225101 - RNA, 20 nt, Human
ugugccagauuuaugcauau

SEQ ID NO: 1225102 - RNA, 18 nt, Human
ugugccagauuuaugcau

SEQ ID NO: 1225103 - RNA, 18 nt, Human
ugugcugggguuaucuga

SEQ ID NO: 1225104 - RNA, 19 nt, Human
ugugcugggguuaucugaa

SEQ ID NO: 1225105 - RNA, 14 nt, Human
uguuacaaauugua

SEQ ID NO: 1225106 - RNA, 13 nt, Human
aguggacaggagu

SEQ ID NO: 1225107 - RNA, 15 nt, Human
uguucugugauauaa

SEQ ID NO: 1225108 - RNA, 18 nt, Human
uguucugugauauaagug

SEQ ID NO: 1225109 - RNA, 15 nt, Human
uguuauaaucuuuca

SEQ ID NO: 1225110 - RNA, 19 nt, Human
agugaguuggguguauugu

SEQ ID NO: 1225111 - RNA, 20 nt, Human
agugaguuggguguauugug

SEQ ID NO: 1225112 - RNA, 15 nt, Human
agugcugaauuuccc

SEQ ID NO: 1225113 - RNA, 19 nt, Human
agugcugaauuucccucuc

SEQ ID NO: 1225114 - RNA, 18 nt, Human
uguguaagacaaaaagcu

SEQ ID NO: 1225115 - RNA, 13 nt, Human
uguguaaguagau

SEQ ID NO: 1225116 - RNA, 20 nt, Human
ugugugaaagguacuucaaa

SEQ ID NO: 1225117 - RNA, 13 nt, Human
uguguugaagagg

SEQ ID NO: 1225118 - RNA, 21 nt, Human
uguuuuauuuaaccucuaaau

SEQ ID NO: 1225119 - RNA, 19 nt, Human
uguuuggaccaaaaaccag

SEQ ID NO: 1225120 - RNA, 19 nt, Human
aguucuuacugcuuaauuc

SEQ ID NO: 1225121 - RNA, 23 nt, Human
aguucuuacugcuuaauucaaau

SEQ ID NO: 1225122 - RNA, 14 nt, Human
uguuuugcaagcca

SEQ ID NO: 1225123 - RNA, 18 nt, Human
uguuucuuuguaaugaaa

SEQ ID NO: 1225124 - RNA, 19 nt, Human
uguuucuuuguaaugaaaa

SEQ ID NO: 1225125 - RNA, 19 nt, Human
uguugccuugcauaauggu

SEQ ID NO: 1225126 - RNA, 22 nt, Human
uguuuagucuugucucagauuu

SEQ ID NO: 1225127 - RNA, 23 nt, Human
uguuuagucuugucucagauuuu

SEQ ID NO: 1225128 - RNA, 14 nt, Human
uguuuauuacagua

SEQ ID NO: 1225129 - RNA, 18 nt, Human
uguuuauuacaguauaau

SEQ ID NO: 1225130 - RNA, 16 nt, Human
aguuggguguauugug

SEQ ID NO: 1225131 - RNA, 22 nt, Human
aguugcauagguuuaauaauuu

SEQ ID NO: 1225132 - RNA, 10 nt, Human
aguugcagcc

SEQ ID NO: 1225133 - RNA, 22 nt, Human
aguugccuaaauccauuuggaa

SEQ ID NO: 1225134 - RNA, 23 nt, Human
aguugccuaaauccauuuggaaa

SEQ ID NO: 1225135 - RNA, 17 nt, Human
aguuggguguauugugc

SEQ ID NO: 1225136 - RNA, 20 nt, Human
aguuggguguauugugcgcu

SEQ ID NO: 1225137 - RNA, 20 nt, Human
aguuuaauauuaaagccaug

SEQ ID NO: 1225138 - RNA, 15 nt, Human
aguuuaauauuaaag

SEQ ID NO: 1225139 - RNA, 16 nt, Human
aguuuaauauuaaagc

SEQ ID NO: 1225140 - RNA, 18 nt, Human
aguuuaauauuaaagcca

SEQ ID NO: 1225141 - RNA, 19 nt, Human
aguuuaauauuaaagccau

SEQ ID NO: 1225142 - RNA, 18 nt, Human
uuaaauuuuuuuuacauu

SEQ ID NO: 1225143 - RNA, 19 nt, Human
uuaaauuuuuuuuacauuu

SEQ ID NO: 1225144 - RNA, 20 nt, Human
uuaaauuuuuuuuacauuuu

SEQ ID NO: 1225145 - RNA, 14 nt, Human
uuaacaacagcugg

SEQ ID NO: 1225146 - RNA, 16 nt, Human
uuaaaauuacaacuaa

SEQ ID NO: 1225147 - RNA, 20 nt, Human
auaaaauuuuuaaucuuuaa

SEQ ID NO: 1225148 - RNA, 13 nt, Human
uuaauaaacacuc

SEQ ID NO: 1225149 - RNA, 17 nt, Human
uuaauaaacacucuuga

SEQ ID NO: 1225150 - RNA, 17 nt, Human
uuaauuccuucagcacu

SEQ ID NO: 1225151 - RNA, 19 nt, Human
uuaauuccuucagcacuuu

SEQ ID NO: 1225152 - RNA, 20 nt, Human
uuaauuccuucagcacuuua

SEQ ID NO: 1225153 - RNA, 22 nt, Human
uuaagaagacugcauuauauuu

SEQ ID NO: 1225154 - RNA, 18 nt, Human
uuaaguaaggaauuuuau

SEQ ID NO: 1225155 - RNA, 18 nt, Human
uuaaguaaugauaacugg

SEQ ID NO: 1225156 - RNA, 19 nt, Human
auaaaauccauacauuugu

SEQ ID NO: 1225157 - RNA, 18 nt, Human
auaaaauccauacauuug

SEQ ID NO: 1225158 - RNA, 22 nt, Human
auaaaauaauuuuuauauuuga

SEQ ID NO: 1225159 - RNA, 21 nt, Human
auaaaauaauuuuuauauuug

SEQ ID NO: 1225160 - RNA, 16 nt, Human
auaaaauaauuuuuau

SEQ ID NO: 1225161 - RNA, 20 nt, Human
auaaaaggucggaccagcuu

SEQ ID NO: 1225162 - RNA, 13 nt, Human
uuacaguauaauu

SEQ ID NO: 1225163 - RNA, 16 nt, Human
uuacaguauaauuaac

SEQ ID NO: 1225164 - RNA, 17 nt, Human
uuacaguauaauuaaca

SEQ ID NO: 1225165 - RNA, 18 nt, Human
uuacaguauaauuaacau

SEQ ID NO: 1225166 - RNA, 19 nt, Human
uuacaguauaauuaacaug

SEQ ID NO: 1225167 - RNA, 20 nt, Human
uuacaguauaauuaacaugu

SEQ ID NO: 1225168 - RNA, 20 nt, Human
auaaaucugugaacuugaaa

SEQ ID NO: 1225169 - RNA, 21 nt, Human
auaaaucugugaacuugaaau

SEQ ID NO: 1225170 - RNA, 22 nt, Human
auaaaucugugaacuugaaauu

SEQ ID NO: 1225171 - RNA, 16 nt, Human
auaaauagcuagacug

SEQ ID NO: 1225172 - RNA, 18 nt, Human
auaaauagcuagacuggu

SEQ ID NO: 1225173 - RNA, 21 nt, Human
auaaauagcuagacuggugac

SEQ ID NO: 1225174 - RNA, 18 nt, Human
auaaacacucuugaaaaa

SEQ ID NO: 1225175 - RNA, 15 nt, Human
uuacuguaagaaaau

SEQ ID NO: 1225176 - RNA, 21 nt, Human
uucagcaaaaauauuuuauga

SEQ ID NO: 1225177 - RNA, 18 nt, Human
auagucaaauugugugaa

SEQ ID NO: 1225178 - RNA, 19 nt, Human
auauauaacaaugcuguau

SEQ ID NO: 1225179 - RNA, 18 nt, Human
auauauaacaaugcugua

SEQ ID NO: 1225180 - RNA, 17 nt, Human
auauauaacaaugcugu

SEQ ID NO: 1225181 - RNA, 15 nt, Human
auauaacaaugcugu

SEQ ID NO: 1225182 - RNA, 12 nt, Human
auauaacaaugc

SEQ ID NO: 1225183 - RNA, 19 nt, Human
auauaagcuuguauuccuu

SEQ ID NO: 1225184 - RNA, 17 nt, Human
auauaacaaugcuguau

SEQ ID NO: 1225185 - RNA, 13 nt, Human
auaugugaacagu

SEQ ID NO: 1225186 - RNA, 22 nt, Human
auaugauucaaaugucuauaaa

SEQ ID NO: 1225187 - RNA, 13 nt, Human
auaugauucaaau

SEQ ID NO: 1225188 - RNA, 15 nt, Human
auaucugaggaauuc

SEQ ID NO: 1225189 - RNA, 16 nt, Human
auaucugaggaauucu

SEQ ID NO: 1225190 - RNA, 17 nt, Human
auaucugaggaauucug

SEQ ID NO: 1225191 - RNA, 18 nt, Human
auaucugaggaauucugu

SEQ ID NO: 1225192 - RNA, 19 nt, Human
auaucugaggaauucugua

SEQ ID NO: 1225193 - RNA, 20 nt, Human
auaucugaggaauucuguau

SEQ ID NO: 1225194 - RNA, 21 nt, Human
auaucugaggaauucuguaua

SEQ ID NO: 1225195 - RNA, 22 nt, Human
auaucugaggaauucuguauag

SEQ ID NO: 1225196 - RNA, 23 nt, Human
auaucugaggaauucuguauaga

SEQ ID NO: 1225197 - RNA, 22 nt, Human
auaucuauauuuuacauaaauu

SEQ ID NO: 1225198 - RNA, 20 nt, Human
auaucuauauuuuacauaaa

SEQ ID NO: 1225199 - RNA, 17 nt, Human
auaucuauauuuuacau

SEQ ID NO: 1225200 - RNA, 18 nt, Human
auauauucagccuggcuu

SEQ ID NO: 1225201 - RNA, 12 nt, Human
uuauuucaauau

SEQ ID NO: 1225202 - RNA, 18 nt, Human
auagcuagacuggugacu

SEQ ID NO: 1225203 - RNA, 19 nt, Human
auagcuagacuggugacug

SEQ ID NO: 1225204 - RNA, 23 nt, Human
auagcuagacuggugacugauuc

SEQ ID NO: 1225205 - RNA, 18 nt, Human
auagcuacuaauuuuaaa

SEQ ID NO: 1225206 - RNA, 14 nt, Human
auagcuagacuggu

SEQ ID NO: 1225207 - RNA, 15 nt, Human
auagcuagacuggug

SEQ ID NO: 1225208 - RNA, 16 nt, Human
auagcuagacugguga

SEQ ID NO: 1225209 - RNA, 14 nt, Human
auagcuacuaauuu

SEQ ID NO: 1225210 - RNA, 17 nt, Human
auagcuacuaauuuuaa

SEQ ID NO: 1225211 - RNA, 13 nt, Human
auagcuaaguaca

SEQ ID NO: 1225212 - RNA, 14 nt, Human
auagcuaaguacac

SEQ ID NO: 1225213 - RNA, 15 nt, Human
auagcuaaguacaca

SEQ ID NO: 1225214 - RNA, 18 nt, Human
auagcuaaguacacaaua

SEQ ID NO: 1225215 - RNA, 13 nt, Human
uucaauaaagcug

SEQ ID NO: 1225216 - RNA, 12 nt, Human
uucaauaaagcu

SEQ ID NO: 1225217 - RNA, 19 nt, Human
uucacauuguauucagagu

SEQ ID NO: 1225218 - RNA, 14 nt, Human
uucacauuggaaac

SEQ ID NO: 1225219 - RNA, 17 nt, Human
auaggcacaggaaacca

SEQ ID NO: 1225220 - RNA, 21 nt, Human
auagggcaauuaauuccuuca

SEQ ID NO: 1225221 - RNA, 22 nt, Human
auagggcaauuaauuccuucag

SEQ ID NO: 1225222 - RNA, 23 nt, Human
auagggcaauuaauuccuucagc

SEQ ID NO: 1225223 - RNA, 18 nt, Human
uucaagugcuucuccagc

SEQ ID NO: 1225224 - RNA, 15 nt, Human
uucaaacauauauaa

SEQ ID NO: 1225225 - RNA, 16 nt, Human
uucaaaauuguuacaa

SEQ ID NO: 1225226 - RNA, 13 nt, Human
uucuguacuuuuu

SEQ ID NO: 1225227 - RNA, 20 nt, Human
aucauuuuaccuuugacaaa

SEQ ID NO: 1225228 - RNA, 21 nt, Human
uucugaaauuuccugggagcu

SEQ ID NO: 1225229 - RNA, 13 nt, Human
uucugaagaagau

SEQ ID NO: 1225230 - RNA, 12 nt, Human
uucugaagaaga

SEQ ID NO: 1225231 - RNA, 14 nt, Human
uucugaagaagaug

SEQ ID NO: 1225232 - RNA, 21 nt, Human
uucugguaugaacuugaggac

SEQ ID NO: 1225233 - RNA, 22 nt, Human
uucugguaugaacuugaggaca

SEQ ID NO: 1225234 - RNA, 20 nt, Human
uucucacagcuccaagaauu

SEQ ID NO: 1225235 - RNA, 18 nt, Human
uucucaacuccaaacuga

SEQ ID NO: 1225236 - RNA, 14 nt, Human
uucucaacuccaaa

SEQ ID NO: 1225237 - RNA, 14 nt, Human
aucauucauuuucu

SEQ ID NO: 1225238 - RNA, 13 nt, Human
auauuuucauucu

SEQ ID NO: 1225239 - RNA, 14 nt, Human
auauuuuaagacga

SEQ ID NO: 1225240 - RNA, 12 nt, Human
auauuuuaugau

SEQ ID NO: 1225241 - RNA, 13 nt, Human
auauuuuaugauc

SEQ ID NO: 1225242 - RNA, 17 nt, Human
auauuuuaugauccagc

SEQ ID NO: 1225243 - RNA, 22 nt, Human
auauuuuaugauccagcagauu

SEQ ID NO: 1225244 - RNA, 18 nt, Human
uuccucugucuccuaagc

SEQ ID NO: 1225245 - RNA, 15 nt, Human
uuccugggagcuuuu

SEQ ID NO: 1225246 - RNA, 16 nt, Human
uuccugggagcuuuug

SEQ ID NO: 1225247 - RNA, 19 nt, Human
uuccuucagcacuuuagaa

SEQ ID NO: 1225248 - RNA, 16 nt, Human
uuccuucagcacuuua

SEQ ID NO: 1225249 - RNA, 21 nt, Human
auauuuucaugcuguucauga

SEQ ID NO: 1225250 - RNA, 18 nt, Human
auauuuucaugcuguuca

SEQ ID NO: 1225251 - RNA, 15 nt, Human
auauuaaagccaugu

SEQ ID NO: 1225252 - RNA, 18 nt, Human
auauuaaagccauguuua

SEQ ID NO: 1225253 - RNA, 23 nt, Human
auauuaaagccauguuuauuaca

SEQ ID NO: 1225254 - RNA, 22 nt, Human
auauugauccagaaagaaaacu

SEQ ID NO: 1225255 - RNA, 23 nt, Human
auauucucacagcuccaagaauu

SEQ ID NO: 1225256 - RNA, 22 nt, Human
auauucucacagcuccaagaau

SEQ ID NO: 1225257 - RNA, 13 nt, Human
auauuugaaauau

SEQ ID NO: 1225258 - RNA, 23 nt, Human
auauuugaaauauugacuuuuua

SEQ ID NO: 1225259 - RNA, 19 nt, Human
auauuugaaauauugacuu

SEQ ID NO: 1225260 - RNA, 14 nt, Human
auauuugaaauauu

SEQ ID NO: 1225261 - RNA, 12 nt, Human
uugacuuuuuau

SEQ ID NO: 1225262 - RNA, 11 nt, Human
uugagaaaaau

SEQ ID NO: 1225263 - RNA, 19 nt, Human
uugagaaaaauauauacua

SEQ ID NO: 1225264 - RNA, 13 nt, Human
uugacaugggaca

SEQ ID NO: 1225265 - RNA, 16 nt, Human
aucucuuguuuaaauu

SEQ ID NO: 1225266 - RNA, 16 nt, Human
aucugaagucagaucu

SEQ ID NO: 1225267 - RNA, 17 nt, Human
aucugaagucagaucug

SEQ ID NO: 1225268 - RNA, 18 nt, Human
aucugaagucagaucugc

SEQ ID NO: 1225269 - RNA, 23 nt, Human
aucugaagucagaucugccuaag

SEQ ID NO: 1225270 - RNA, 22 nt, Human
uugcaagccagauuuuccugaa

SEQ ID NO: 1225271 - RNA, 18 nt, Human
uugcaacuuuguauaaaa

SEQ ID NO: 1225272 - RNA, 16 nt, Human
uugcaacuuuguauaa

SEQ ID NO: 1225273 - RNA, 17 nt, Human
uugcaacuuuguauaaa

SEQ ID NO: 1225274 - RNA, 14 nt, Human
uugcucuugaugcc

SEQ ID NO: 1225275 - RNA, 17 nt, Human
uugcucuugaugccugg

SEQ ID NO: 1225276 - RNA, 18 nt, Human
uugcucuugaugccuggc

SEQ ID NO: 1225277 - RNA, 20 nt, Human
uugcuuuguauuguauauua

SEQ ID NO: 1225278 - RNA, 16 nt, Human
uugcuuuuaaaaucca

SEQ ID NO: 1225279 - RNA, 15 nt, Human
uuggagaagaacuga

SEQ ID NO: 1225280 - RNA, 22 nt, Human
uuggagaagaacugaaaucaua

SEQ ID NO: 1225281 - RNA, 17 nt, Human
uuggagaagaacugaaa

SEQ ID NO: 1225282 - RNA, 16 nt, Human
aucuuauaauuuaaaa

SEQ ID NO: 1225283 - RNA, 15 nt, Human
aucuuauaauuuaaa

SEQ ID NO: 1225284 - RNA, 15 nt, Human
augaagcaaugcuuc

SEQ ID NO: 1225285 - RNA, 14 nt, Human
augaagcaaugcuu

SEQ ID NO: 1225286 - RNA, 13 nt, Human
augaaauauuaug

SEQ ID NO: 1225287 - RNA, 13 nt, Human
uuggccaugcaga

SEQ ID NO: 1225288 - RNA, 19 nt, Human
uuggccaugcagaaagcau

SEQ ID NO: 1225289 - RNA, 20 nt, Human
uugguuuucacauuggaaac

SEQ ID NO: 1225290 - RNA, 22 nt, Human
uuguaagcaugcacaaauucug

SEQ ID NO: 1225291 - RNA, 12 nt, Human
uuguaaugaaaa

SEQ ID NO: 1225292 - RNA, 21 nt, Human
augcuucuguuuuauaauuuu

SEQ ID NO: 1225293 - RNA, 22 nt, Human
augcuguauuuuaaaagaauga

SEQ ID NO: 1225294 - RNA, 23 nt, Human
augcuguauuuuaaaagaaugau

SEQ ID NO: 1225295 - RNA, 21 nt, Human
uuucaugcuguucaugaaaga

SEQ ID NO: 1225296 - RNA, 19 nt, Human
uuucaaacauauauaacaa

SEQ ID NO: 1225297 - RNA, 19 nt, Human
uuucacauuggaaacaagu

SEQ ID NO: 1225298 - RNA, 14 nt, Human
uuucacauuggaaa

SEQ ID NO: 1225299 - RNA, 13 nt, Human
uuucacauuggaa

SEQ ID NO: 1225300 - RNA, 17 nt, Human
uuuagggguagcauuug

SEQ ID NO: 1225301 - RNA, 21 nt, Human
uuuauaugcuucuguuuuaua

SEQ ID NO: 1225302 - RNA, 21 nt, Human
uuuauauguaccguaggcuuu

SEQ ID NO: 1225303 - RNA, 17 nt, Human
uuuagucuugucucaga

SEQ ID NO: 1225304 - RNA, 23 nt, Human
uuuagucuugucucagauuuuau

SEQ ID NO: 1225305 - RNA, 19 nt, Human
augcgagugcucauuucag

SEQ ID NO: 1225306 - RNA, 22 nt, Human
augccuuuucccaacuccagaa

SEQ ID NO: 1225307 - RNA, 20 nt, Human
augccuuuucccaacuccag

SEQ ID NO: 1225308 - RNA, 14 nt, Human
augccaucaauaaa

SEQ ID NO: 1225309 - RNA, 20 nt, Human
augccccugaauuuaaauag

SEQ ID NO: 1225310 - RNA, 15 nt, Human
augccccugaauuua

SEQ ID NO: 1225311 - RNA, 16 nt, Human
augcagaaagcauccc

SEQ ID NO: 1225312 - RNA, 15 nt, Human
augcagaaagcaucc

SEQ ID NO: 1225313 - RNA, 18 nt, Human
uuuaaaaaaauuccaagu

SEQ ID NO: 1225314 - RNA, 14 nt, Human
uuuaagagacagcc

SEQ ID NO: 1225315 - RNA, 12 nt, Human
uuuaaauguaua

SEQ ID NO: 1225316 - RNA, 13 nt, Human
uuuaaauguauac

SEQ ID NO: 1225317 - RNA, 21 nt, Human
uuuaaauauaugcuaagucuu

SEQ ID NO: 1225318 - RNA, 20 nt, Human
uuuaaaaaagaaacauuugg

SEQ ID NO: 1225319 - RNA, 18 nt, Human
uuguagcauccuggaaua

SEQ ID NO: 1225320 - RNA, 16 nt, Human
uuguagcauccuggaa

SEQ ID NO: 1225321 - RNA, 20 nt, Human
uugucaauaaaauccauaca

SEQ ID NO: 1225322 - RNA, 23 nt, Human
uuuuuggcauaacauaaaucugu

SEQ ID NO: 1225323 - RNA, 24 nt, Human
uuuuuggcauaacauaaaucugug

SEQ ID NO: 1225324 - RNA, 20 nt, Human
uuuuugggcagcaauuuaaa

SEQ ID NO: 1225325 - RNA, 21 nt, Human
uuuuugggcagcaauuuaaau

SEQ ID NO: 1225326 - RNA, 23 nt, Human
uuuuugggcagcaauuuaaaugu

SEQ ID NO: 1225327 - RNA, 11 nt, Human
uuuuuguagua

SEQ ID NO: 1225328 - RNA, 17 nt, Human
uuuuuauauuugaaaua

SEQ ID NO: 1225329 - RNA, 13 nt, Human
uuuuucaaaagaa

SEQ ID NO: 1225330 - RNA, 16 nt, Human
uuuuugagacagaguc

SEQ ID NO: 1225331 - RNA, 15 nt, Human
uuuuggaauuuuccu

SEQ ID NO: 1225332 - RNA, 14 nt, Human
uuuugugaagcaaa

SEQ ID NO: 1225333 - RNA, 12 nt, Human
uuuuuacauuuu

SEQ ID NO: 1225334 - RNA, 11 nt, Human
uuuuuacauuu

SEQ ID NO: 1225335 - RNA, 20 nt, Human
uuuuuauauuuacuaaaaug

SEQ ID NO: 1225336 - RNA, 16 nt, Human
auuacuguaagaaaau

SEQ ID NO: 1225337 - RNA, 15 nt, Human
auuacuguaagaaaa

SEQ ID NO: 1225338 - RNA, 17 nt, Human
auuauaugcuauuucua

SEQ ID NO: 1225339 - RNA, 17 nt, Human
auuccaagugauugaaa

SEQ ID NO: 1225340 - RNA, 12 nt, Human
auucacugauuu

SEQ ID NO: 1225341 - RNA, 17 nt, Human
auucacugauuugacau

SEQ ID NO: 1225342 - RNA, 14 nt, Human
auucagccuggcuu

SEQ ID NO: 1225343 - RNA, 20 nt, Human
auuauauggcuugaguuuaa

SEQ ID NO: 1225344 - RNA, 18 nt, Human
auuauaugcuauuucuau

SEQ ID NO: 1225345 - RNA, 19 nt, Human
auuauaugcuauuucuaua

SEQ ID NO: 1225346 - RNA, 18 nt, Human
auuauucaaaguugccua

SEQ ID NO: 1225347 - RNA, 19 nt, Human
auuauucaaaguugccuaa

SEQ ID NO: 1225348 - RNA, 22 nt, Human
auuauucaaaguugccuaaauc

SEQ ID NO: 1225349 - RNA, 24 nt, Human
auuauucaaaguugccuaaaucca

SEQ ID NO: 1225350 - RNA, 19 nt, Human
auuauucacugauuugaca

SEQ ID NO: 1225351 - RNA, 18 nt, Human
auuauaucugaggaauuc

SEQ ID NO: 1225352 - RNA, 19 nt, Human
auuauaucugaggaauucu

SEQ ID NO: 1225353 - RNA, 20 nt, Human
auuauaucugaggaauucug

SEQ ID NO: 1225354 - RNA, 21 nt, Human
auuauaucugaggaauucugu

SEQ ID NO: 1225355 - RNA, 22 nt, Human
auuauaucugaggaauucugua

SEQ ID NO: 1225356 - RNA, 16 nt, Human
auuauaugcuauuucu

SEQ ID NO: 1225357 - RNA, 16 nt, Human
auucaaaaauuaucua

SEQ ID NO: 1225358 - RNA, 23 nt, Human
auucaaaaauuaucuauagcuaa

SEQ ID NO: 1225359 - RNA, 15 nt, Human
auucagccuggcuuc

SEQ ID NO: 1225360 - RNA, 18 nt, Human
uuugacaaagguaaauca

SEQ ID NO: 1225361 - RNA, 12 nt, Human
uuugaauuuugu

SEQ ID NO: 1225362 - RNA, 14 nt, Human
uuugaauuuugugu

SEQ ID NO: 1225363 - RNA, 20 nt, Human
uuugagacagagucuuccuc

SEQ ID NO: 1225364 - RNA, 19 nt, Human
uuugcuaagcauuccaacu

SEQ ID NO: 1225365 - RNA, 21 nt, Human
uuugggcagcaauuuaaaugu

SEQ ID NO: 1225366 - RNA, 19 nt, Human
auguauacuauaguaccag

SEQ ID NO: 1225367 - RNA, 23 nt, Human
augucgucaaagcugaaauggac

SEQ ID NO: 1225368 - RNA, 17 nt, Human
uuuguaguagcguuuuu

SEQ ID NO: 1225369 - RNA, 17 nt, Human
uuuguaguguuggagaa

SEQ ID NO: 1225370 - RNA, 19 nt, Human
uuuguaguagcguuuuuua

SEQ ID NO: 1225371 - RNA, 15 nt, Human
uuuguaguagcguuu

SEQ ID NO: 1225372 - RNA, 12 nt, Human
auguuuauuaca

SEQ ID NO: 1225373 - RNA, 21 nt, Human
uuuucuuaaccagaucauugu

SEQ ID NO: 1225374 - RNA, 15 nt, Human
auguuuauuacagua

SEQ ID NO: 1225375 - RNA, 16 nt, Human
auguuuauuacaguau

SEQ ID NO: 1225376 - RNA, 18 nt, Human
auguuuauuacaguauaa

SEQ ID NO: 1225377 - RNA, 19 nt, Human
auguuuauuacaguauaau

SEQ ID NO: 1225378 - RNA, 22 nt, Human
auguuuauuacaguauaauuaa

SEQ ID NO: 1225379 - RNA, 23 nt, Human
auguuuauuacaguauaauuaac

SEQ ID NO: 1225380 - RNA, 15 nt, Human
auguuuuuuuuuaaa

SEQ ID NO: 1225381 - RNA, 19 nt, Human
uuuuaguugcaacuuugua

SEQ ID NO: 1225382 - RNA, 20 nt, Human
uuuucaggcuagauguaugu

SEQ ID NO: 1225383 - RNA, 17 nt, Human
uuuucucugauacagaa

SEQ ID NO: 1225384 - RNA, 16 nt, Human
uuuucuauaauuuaaa

SEQ ID NO: 1225385 - RNA, 20 nt, Human
auguucuuuuaaaugauuga

SEQ ID NO: 1225386 - RNA, 18 nt, Human
auguuaugacuauguaaa

SEQ ID NO: 1225387 - RNA, 24 nt, Human
auguuaugacuauguaaacuacuu

SEQ ID NO: 1225388 - RNA, 21 nt, Human
augugcuaguaauuggaaagg

SEQ ID NO: 1225389 - RNA, 15 nt, Human
auguguguuuuaaaa

SEQ ID NO: 1225390 - RNA, 19 nt, Human
auuggagcucgugggacag

SEQ ID NO: 1225391 - RNA, 17 nt, Human
auuggagcucgugggac

SEQ ID NO: 1225392 - RNA, 16 nt, Human
auuggagcucguggaa

SEQ ID NO: 1225393 - RNA, 14 nt, Human
auuggggauucuua

SEQ ID NO: 1225394 - RNA, 15 nt, Human
auuggggauucuuaa

SEQ ID NO: 1225395 - RNA, 16 nt, Human
auuggggauucuuaaa

SEQ ID NO: 1225396 - RNA, 20 nt, Human
auuggggauucuuaaaguug

SEQ ID NO: 1225397 - RNA, 21 nt, Human
auuggggauucuuaaaguuga

SEQ ID NO: 1225398 - RNA, 22 nt, Human
auuggggauucuuaaaguugaa

SEQ ID NO: 1225399 - RNA, 14 nt, Human
auuggaaacaaguc

SEQ ID NO: 1225400 - RNA, 15 nt, Human
auuugaauuuugugu

SEQ ID NO: 1225401 - RNA, 13 nt, Human
auuugaauuuugu

SEQ ID NO: 1225402 - RNA, 19 nt, Human
auuugauaugugaacaguu

SEQ ID NO: 1225403 - RNA, 18 nt, Human
auuugauaugugaacagu

SEQ ID NO: 1225404 - RNA, 15 nt, Human
auuugguuuucacau

SEQ ID NO: 1225405 - RNA, 14 nt, Human
auuugguuuucaca

SEQ ID NO: 1225406 - RNA, 12 nt, Human
auuugguuuuca

SEQ ID NO: 1225407 - RNA, 14 nt, Human
auuuccuaaauaua

SEQ ID NO: 1225408 - RNA, 21 nt, Human
auuuccuaaauauauuuuaag

SEQ ID NO: 1225409 - RNA, 22 nt, Human
auuuccugggagcuuuuguaga

SEQ ID NO: 1225410 - RNA, 20 nt, Human
auuuauuggcuuuucugauc

SEQ ID NO: 1225411 - RNA, 23 nt, Human
auuuauuggcuuuucugauccag

SEQ ID NO: 1225412 - RNA, 20 nt, Human
auuuauuacuguaagaaaau

SEQ ID NO: 1225413 - RNA, 19 nt, Human
auuuauuacuguaagaaaa

SEQ ID NO: 1225414 - RNA, 14 nt, Human
auuuauuggcuuuu

SEQ ID NO: 1225415 - RNA, 18 nt, Human
auuuauuggcuuuucuga

SEQ ID NO: 1225416 - RNA, 16 nt, Human
auuuaguguucauaaa

SEQ ID NO: 1225417 - RNA, 16 nt, Human
auuuaguuguaaacca

SEQ ID NO: 1225418 - RNA, 17 nt, Human
auuuaguguucauaaau

SEQ ID NO: 1225419 - RNA, 15 nt, Human
auuuauaaacuuuuu

SEQ ID NO: 1225420 - RNA, 20 nt, Human
auuguagcauccuggaauau

SEQ ID NO: 1225421 - RNA, 17 nt, Human
auuguagcauccuggaa

SEQ ID NO: 1225422 - RNA, 15 nt, Human
auuguacuuugugcu

SEQ ID NO: 1225423 - RNA, 16 nt, Human
auuguaguccuguaau

SEQ ID NO: 1225424 - RNA, 16 nt, Human
auuuaaauagcuuuuu

SEQ ID NO: 1225425 - RNA, 23 nt, Human
auuuaaauguuaugacuauguaa

SEQ ID NO: 1225426 - RNA, 22 nt, Human
auuuaccacuuguguuuugcaa

SEQ ID NO: 1225427 - RNA, 15 nt, Human
auuuaccacuugugu

SEQ ID NO: 1225428 - RNA, 16 nt, Human
auuuacuaaaauggac

SEQ ID NO: 1225429 - RNA, 19 nt, Human
auuuacuaaaauggacugu

SEQ ID NO: 1225430 - RNA, 20 nt, Human
auuuacuaaaauggacugug

SEQ ID NO: 1225431 - RNA, 20 nt, Human
caccauguuggccaggcuug

SEQ ID NO: 1225432 - RNA, 21 nt, Human
caccauauuggccagucuggu

SEQ ID NO: 1225433 - RNA, 20 nt, Human
cacaugcuucccuuuccuga

SEQ ID NO: 1225434 - RNA, 20 nt, Human
cacaugaaguccaagcauuu

SEQ ID NO: 1225435 - RNA, 17 nt, Human
cacaugaaguccaagca

SEQ ID NO: 1225436 - RNA, 14 nt, Human
caauauucaauaaa

SEQ ID NO: 1225437 - RNA, 15 nt, Human
caauauucaauaaag

SEQ ID NO: 1225438 - RNA, 16 nt, Human
caauauucaauaaagc

SEQ ID NO: 1225439 - RNA, 17 nt, Human
caauauucaauaaagcu

SEQ ID NO: 1225440 - RNA, 13 nt, Human
caauuuuguuucu

SEQ ID NO: 1225441 - RNA, 14 nt, Human
caauuuuguuucug

SEQ ID NO: 1225442 - RNA, 16 nt, Human
caauuuuguuucugua

SEQ ID NO: 1225443 - RNA, 17 nt, Human
caauuuuguuucuguac

SEQ ID NO: 1225444 - RNA, 22 nt, Human
cacaccuacuagucaccagaga

SEQ ID NO: 1225445 - RNA, 12 nt, Human
caaagaaauuau

SEQ ID NO: 1225446 - RNA, 13 nt, Human
caaagaaauuaug

SEQ ID NO: 1225447 - RNA, 15 nt, Human
caaagaaauuaugug

SEQ ID NO: 1225448 - RNA, 19 nt, Human
auuuuaauaauguuucaaa

SEQ ID NO: 1225449 - RNA, 18 nt, Human
auuuuaauaauguuucaa

SEQ ID NO: 1225450 - RNA, 17 nt, Human
auuuuaacaacagcugg

SEQ ID NO: 1225451 - RNA, 14 nt, Human
caaaguugccuaaa

SEQ ID NO: 1225452 - RNA, 15 nt, Human
caaaguugccuaaau

SEQ ID NO: 1225453 - RNA, 17 nt, Human
caaaguugccuaaaucc

SEQ ID NO: 1225454 - RNA, 17 nt, Human
caaauuguaagcaugca

SEQ ID NO: 1225455 - RNA, 18 nt, Human
caaaguugccuaaaucca

SEQ ID NO: 1225456 - RNA, 15 nt, Human
caaccucauccucuc

SEQ ID NO: 1225457 - RNA, 20 nt, Human
caaccuccgcauccgggguu

SEQ ID NO: 1225458 - RNA, 19 nt, Human
caagcauuuagauguauag

SEQ ID NO: 1225459 - RNA, 16 nt, Human
caagcauuuagaugua

SEQ ID NO: 1225460 - RNA, 16 nt, Human
caagaccgaucggcgg

SEQ ID NO: 1225461 - RNA, 14 nt, Human
cauuugcucaugga

SEQ ID NO: 1225462 - RNA, 13 nt, Human
cauuugcucaugg

SEQ ID NO: 1225463 - RNA, 19 nt, Human
cauuuuagggguagcauuu

SEQ ID NO: 1225464 - RNA, 12 nt, Human
cauuuaauaauu

SEQ ID NO: 1225465 - RNA, 14 nt, Human
cauuuaauaauuau

SEQ ID NO: 1225466 - RNA, 15 nt, Human
cauuuaauaauuaua

SEQ ID NO: 1225467 - RNA, 16 nt, Human
cauuuaauaauuauau

SEQ ID NO: 1225468 - RNA, 17 nt, Human
cauuuaauaauuauaug

SEQ ID NO: 1225469 - RNA, 19 nt, Human
cauuuaauaauuauaugcu

SEQ ID NO: 1225470 - RNA, 23 nt, Human
cauuuaauaauuauaugcuauuu

SEQ ID NO: 1225471 - RNA, 23 nt, Human
cauuguauucagaguugaugguu

SEQ ID NO: 1225472 - RNA, 12 nt, Human
ccaacccuagca

SEQ ID NO: 1225473 - RNA, 22 nt, Human
ccaaacugacucuuaagaagac

SEQ ID NO: 1225474 - RNA, 21 nt, Human
ccaacaagauugcuuaauaaa

SEQ ID NO: 1225475 - RNA, 16 nt, Human
ccaaggucuucuuaau

SEQ ID NO: 1225476 - RNA, 20 nt, Human
ccaaguaacugggauuacag

SEQ ID NO: 1225477 - RNA, 20 nt, Human
ccaaguagcugagacuacag

SEQ ID NO: 1225478 - RNA, 17 nt, Human
ccaagcuauucaauucu

SEQ ID NO: 1225479 - RNA, 17 nt, Human
ccaagcauuuagaugua

SEQ ID NO: 1225480 - RNA, 14 nt, Human
ccaagcaaguauua

SEQ ID NO: 1225481 - RNA, 20 nt, Human
ccaagcaccugggauuacaa

SEQ ID NO: 1225482 - RNA, 14 nt, Human
ccacuucagccucc

SEQ ID NO: 1225483 - RNA, 22 nt, Human
ccaccugucugucugucugucc

SEQ ID NO: 1225484 - RNA, 11 nt, Human
ccaccugucug

SEQ ID NO: 1225485 - RNA, 12 nt, Human
ccaccugucugu

SEQ ID NO: 1225486 - RNA, 14 nt, Human
ccaccugucugucu

SEQ ID NO: 1225487 - RNA, 16 nt, Human
ccaccugucugucugu

SEQ ID NO: 1225488 - RNA, 17 nt, Human
ccacggggacucagccc

SEQ ID NO: 1225489 - RNA, 14 nt, Human
ccacgguguucugu

SEQ ID NO: 1225490 - RNA, 16 nt, Human
ccaccauggccagcua

SEQ ID NO: 1225491 - RNA, 20 nt, Human
ccacaggaaccacaagacug

SEQ ID NO: 1225492 - RNA, 19 nt, Human
ccaggcuuuuuuaucaugu

SEQ ID NO: 1225493 - RNA, 18 nt, Human
ccaguaucucuucagucu

SEQ ID NO: 1225494 - RNA, 20 nt, Human
ccaguaucucuucagucucu

SEQ ID NO: 1225495 - RNA, 20 nt, Human
ccaguaggggcuuauaauaa

SEQ ID NO: 1225496 - RNA, 15 nt, Human
ccaguaucucuucag

SEQ ID NO: 1225497 - RNA, 16 nt, Human
ccaguaucucuucagu

SEQ ID NO: 1225498 - RNA, 20 nt, Human
ccaggaauggagccugcacg

SEQ ID NO: 1225499 - RNA, 17 nt, Human
ccagcuggggccaggcu

SEQ ID NO: 1225500 - RNA, 18 nt, Human
ccagcuggggccaggcug

SEQ ID NO: 1225501 - RNA, 19 nt, Human
ccagcuggggccaggcugg

SEQ ID NO: 1225502 - RNA, 20 nt, Human
ccagcuggggccaggcuggg

SEQ ID NO: 1225503 - RNA, 21 nt, Human
ccagcuggggccaggcugggu

SEQ ID NO: 1225504 - RNA, 22 nt, Human
ccagcuggggccaggcuggguc

SEQ ID NO: 1225505 - RNA, 23 nt, Human
ccagcuggggccaggcugggucg

SEQ ID NO: 1225506 - RNA, 15 nt, Human
ccaggacaggaucca

SEQ ID NO: 1225507 - RNA, 17 nt, Human
ccaggacaggauccagg

SEQ ID NO: 1225508 - RNA, 19 nt, Human
ccaggacaggauccaggcc

SEQ ID NO: 1225509 - RNA, 13 nt, Human
ccaggacaggauc

SEQ ID NO: 1225510 - RNA, 19 nt, Human
ccauucuggaagugacuuu

SEQ ID NO: 1225511 - RNA, 12 nt, Human
ccauucuggaag

SEQ ID NO: 1225512 - RNA, 15 nt, Human
ccauucuggaaguga

SEQ ID NO: 1225513 - RNA, 16 nt, Human
ccaugauguuuagaaa

SEQ ID NO: 1225514 - RNA, 11 nt, Human
ccaugcagaaa

SEQ ID NO: 1225515 - RNA, 15 nt, Human
ccaugcagaaagcau

SEQ ID NO: 1225516 - RNA, 14 nt, Human
ccaugcagaaagca

SEQ ID NO: 1225517 - RNA, 19 nt, Human
ccaucaauaaaaaauuaug

SEQ ID NO: 1225518 - RNA, 20 nt, Human
ccaucaauaaaaaauuauga

SEQ ID NO: 1225519 - RNA, 23 nt, Human
ccaucagaaacacccucacacug

SEQ ID NO: 1225520 - RNA, 18 nt, Human
cccagguuggagugcagu

SEQ ID NO: 1225521 - RNA, 19 nt, Human
cccagguuggagugcagug

SEQ ID NO: 1225522 - RNA, 15 nt, Human
cccaguaucucuuca

SEQ ID NO: 1225523 - RNA, 16 nt, Human
cccaguaucucuucag

SEQ ID NO: 1225524 - RNA, 15 nt, Human
cccaauugagaaaaa

SEQ ID NO: 1225525 - RNA, 13 nt, Human
ccgugcuaaggac

SEQ ID NO: 1225526 - RNA, 14 nt, Human
ccgugcuaaggacu

SEQ ID NO: 1225527 - RNA, 18 nt, Human
ccuaaaagaaacccugca

SEQ ID NO: 1225528 - RNA, 15 nt, Human
ccuacccuaaccaag

SEQ ID NO: 1225529 - RNA, 16 nt, Human
ccuacccuaaccaagu

SEQ ID NO: 1225530 - RNA, 18 nt, Human
ccuacccuaaccaaguuc

SEQ ID NO: 1225531 - RNA, 21 nt, Human
ccucacccacccuuuuuuaaa

SEQ ID NO: 1225532 - RNA, 18 nt, Human
cccccaguaucucuucag

SEQ ID NO: 1225533 - RNA, 20 nt, Human
ccccuaaaagaaacccugca

SEQ ID NO: 1225534 - RNA, 16 nt, Human
cccuugaugaagaagu

SEQ ID NO: 1225535 - RNA, 16 nt, Human
cccuuuccugaguccc

SEQ ID NO: 1225536 - RNA, 13 nt, Human
ccugauuaaagaa

SEQ ID NO: 1225537 - RNA, 12 nt, Human
ccugauuaaaga

SEQ ID NO: 1225538 - RNA, 23 nt, Human
ccucuuagaugcaguucugaaga

SEQ ID NO: 1225539 - RNA, 22 nt, Human
ccugaagcuaucguaaaauuaa

SEQ ID NO: 1225540 - RNA, 23 nt, Human
ccugaagcuaucguaaaauuaag

SEQ ID NO: 1225541 - RNA, 20 nt, Human
ccugaacaggauauucucac

SEQ ID NO: 1225542 - RNA, 20 nt, Human
ccucagaaaacaaggaugaa

SEQ ID NO: 1225543 - RNA, 22 nt, Human
ccucccuacccuaaccaaguuc

SEQ ID NO: 1225544 - RNA, 17 nt, Human
ccucccucaaccucauc

SEQ ID NO: 1225545 - RNA, 21 nt, Human
ccucccucaaccucauccucu

SEQ ID NO: 1225546 - RNA, 17 nt, Human
ccuccugggaaugaagc

SEQ ID NO: 1225547 - RNA, 16 nt, Human
ccucugcagucucuau

SEQ ID NO: 1225548 - RNA, 17 nt, Human
ccucugcagucucuaua

SEQ ID NO: 1225549 - RNA, 23 nt, Human
ccucugcagucucuauaccaaua

SEQ ID NO: 1225550 - RNA, 19 nt, Human
ccuguggaacauaaaaagg

SEQ ID NO: 1225551 - RNA, 23 nt, Human
ccuguggaacauaaaaaggacau

SEQ ID NO: 1225552 - RNA, 24 nt, Human
ccuguggaacauaaaaaggacauc

SEQ ID NO: 1225553 - RNA, 13 nt, Human
ccuucaucuggaa

SEQ ID NO: 1225554 - RNA, 20 nt, Human
ccuucaucuggauuccagag

SEQ ID NO: 1225555 - RNA, 14 nt, Human
ccuucaucuggaac

SEQ ID NO: 1225556 - RNA, 13 nt, Human
ccuuccacccagu

SEQ ID NO: 1225557 - RNA, 14 nt, Human
ccuugaugaagaag

SEQ ID NO: 1225558 - RNA, 22 nt, Human
ccugugagcuaggaauuguguu

SEQ ID NO: 1225559 - RNA, 21 nt, Human
ccugcuuucagauacuggauu

SEQ ID NO: 1225560 - RNA, 14 nt, Human
ccuggaaaccuucc

SEQ ID NO: 1225561 - RNA, 15 nt, Human
ccugcuuucagauac

SEQ ID NO: 1225562 - RNA, 16 nt, Human
ccugcuuucagauacu

SEQ ID NO: 1225563 - RNA, 13 nt, Human
ccugggaggcucu

SEQ ID NO: 1225564 - RNA, 21 nt, Human
ccugggaggcucuggagccca

SEQ ID NO: 1225565 - RNA, 13 nt, Human
ccugggauuacag

SEQ ID NO: 1225566 - RNA, 12 nt, Human
ccuggcggggug

SEQ ID NO: 1225567 - RNA, 19 nt, Human
ccuggacuuggccccugcc

SEQ ID NO: 1225568 - RNA, 17 nt, Human
ccuggacugugugcuca

SEQ ID NO: 1225569 - RNA, 20 nt, Human
ccuggacugugugcucagga

SEQ ID NO: 1225570 - RNA, 17 nt, Human
ccuggaaaccuuccacc

SEQ ID NO: 1225571 - RNA, 18 nt, Human
ccuggaaaccuuccaccc

SEQ ID NO: 1225572 - RNA, 20 nt, Human
ccuggaaaccuuccacccag

SEQ ID NO: 1225573 - RNA, 15 nt, Human
cggaccccagccauc

SEQ ID NO: 1225574 - RNA, 13 nt, Human
cggaugauuucua

SEQ ID NO: 1225575 - RNA, 14 nt, Human
cggaugauuucuau

SEQ ID NO: 1225576 - RNA, 21 nt, Human
cggaagaagagaucaggaaga

SEQ ID NO: 1225577 - RNA, 22 nt, Human
cggaagaagagaucaggaagag

SEQ ID NO: 1225578 - RNA, 13 nt, Human
cgcagaaggaagg

SEQ ID NO: 1225579 - RNA, 13 nt, Human
cgcguugaaauug

SEQ ID NO: 1225580 - RNA, 14 nt, Human
cgcgaucucagcuc

SEQ ID NO: 1225581 - RNA, 15 nt, Human
cgcgaucucagcuca

SEQ ID NO: 1225582 - RNA, 17 nt, Human
cgcguugaaauuguaau

SEQ ID NO: 1225583 - RNA, 21 nt, Human
cgcguugaaauuguaauuaua

SEQ ID NO: 1225584 - RNA, 22 nt, Human
cgcguugaaauuguaauuauau

SEQ ID NO: 1225585 - RNA, 18 nt, Human
ccuuuggcaggugcagcc

SEQ ID NO: 1225586 - RNA, 19 nt, Human
ccuuuggcaggugcagccc

SEQ ID NO: 1225587 - RNA, 20 nt, Human
ccuuuggcaggugcagcccc

SEQ ID NO: 1225588 - RNA, 14 nt, Human
ccuuugacaaaggu

SEQ ID NO: 1225589 - RNA, 15 nt, Human
ccuuugaccugccuc

SEQ ID NO: 1225590 - RNA, 15 nt, Human
ccuuggccaugcaga

SEQ ID NO: 1225591 - RNA, 17 nt, Human
ccuuggccaugcagaaa

SEQ ID NO: 1225592 - RNA, 16 nt, Human
ccuuucucuuucguua

SEQ ID NO: 1225593 - RNA, 12 nt, Human
cgcagaaggaag

SEQ ID NO: 1225594 - RNA, 20 nt, Human
cgaucuugguucacugcaac

SEQ ID NO: 1225595 - RNA, 13 nt, Human
cgaucucagcuca

SEQ ID NO: 1225596 - RNA, 22 nt, Human
cguucauggaacgcguugaaau

SEQ ID NO: 1225597 - RNA, 23 nt, Human
cguucauggaacgcguugaaauu

SEQ ID NO: 1225598 - RNA, 13 nt, Human
cguugaaauugua

SEQ ID NO: 1225599 - RNA, 18 nt, Human
cguugaaauuguaauuau

SEQ ID NO: 1225600 - RNA, 16 nt, Human
cguauaaaagccuguu

SEQ ID NO: 1225601 - RNA, 17 nt, Human
cguauaaaagccuguuu

SEQ ID NO: 1225602 - RNA, 21 nt, Human
cguauaaaagccuguuuaaga

SEQ ID NO: 1225603 - RNA, 22 nt, Human
cguauaaaagccuguuuaagag

SEQ ID NO: 1225604 - RNA, 20 nt, Human
cgucaacucauauuuucaug

SEQ ID NO: 1225605 - RNA, 16 nt, Human
cgucaacucauauuuu

SEQ ID NO: 1225606 - RNA, 18 nt, Human
cuccuaucaccugucuug

SEQ ID NO: 1225607 - RNA, 17 nt, Human
cucuaaauucuuucauu

SEQ ID NO: 1225608 - RNA, 13 nt, Human
cucuaaauucuuu

SEQ ID NO: 1225609 - RNA, 13 nt, Human
cucuaacauuucc

SEQ ID NO: 1225610 - RNA, 14 nt, Human
cuccuuagaaaaaa

SEQ ID NO: 1225611 - RNA, 13 nt, Human
cuccuuagaaaaa

SEQ ID NO: 1225612 - RNA, 12 nt, Human
cuccagccucag

SEQ ID NO: 1225613 - RNA, 15 nt, Human
cuccagccucagccu

SEQ ID NO: 1225614 - RNA, 17 nt, Human
cuccagccucagccucc

SEQ ID NO: 1225615 - RNA, 14 nt, Human
cuccagccucagcu

SEQ ID NO: 1225616 - RNA, 14 nt, Human
cuccacucuuucuu

SEQ ID NO: 1225617 - RNA, 15 nt, Human
cuccacagcugccuc

SEQ ID NO: 1225618 - RNA, 17 nt, Human
cguuuuuuaaauguaua

SEQ ID NO: 1225619 - RNA, 17 nt, Human
cucaucuccccaucauu

SEQ ID NO: 1225620 - RNA, 21 nt, Human
cucaucuagguaaauuacagu

SEQ ID NO: 1225621 - RNA, 14 nt, Human
cucauauuuucaug

SEQ ID NO: 1225622 - RNA, 20 nt, Human
cucugaggggcuaccaggaa

SEQ ID NO: 1225623 - RNA, 21 nt, Human
cucugaggggcuaccaggaaa

SEQ ID NO: 1225624 - RNA, 22 nt, Human
cucugcagucucuauaccaaua

SEQ ID NO: 1225625 - RNA, 23 nt, Human
cucugcaggucccuaauaaagcu

SEQ ID NO: 1225626 - RNA, 14 nt, Human
cucugcagucucua

SEQ ID NO: 1225627 - RNA, 14 nt, Human
cucuggaauuugaa

SEQ ID NO: 1225628 - RNA, 12 nt, Human
cucuggagccca

SEQ ID NO: 1225629 - RNA, 12 nt, Human
cucucugcaggu

SEQ ID NO: 1225630 - RNA, 13 nt, Human
cucucugcagguc

SEQ ID NO: 1225631 - RNA, 14 nt, Human
cucucugcaggucc

SEQ ID NO: 1225632 - RNA, 16 nt, Human
cucucugcaggucccu

SEQ ID NO: 1225633 - RNA, 17 nt, Human
cucucugcaggucccua

SEQ ID NO: 1225634 - RNA, 19 nt, Human
cucucugcaggucccuaau

SEQ ID NO: 1225635 - RNA, 22 nt, Human
cucucugcaggucccuaauaaa

SEQ ID NO: 1225636 - RNA, 13 nt, Human
cucuccauuuaau

SEQ ID NO: 1225637 - RNA, 13 nt, Human
cucucccaaaaaa

SEQ ID NO: 1225638 - RNA, 17 nt, Human
cucuccacagcugccuc

SEQ ID NO: 1225639 - RNA, 15 nt, Human
cucucaguugcagcc

SEQ ID NO: 1225640 - RNA, 19 nt, Human
cucucaguugcagcccugc

SEQ ID NO: 1225641 - RNA, 22 nt, Human
cucucaguugcagcccugcugc

SEQ ID NO: 1225642 - RNA, 15 nt, Human
cucucauacccuccc

SEQ ID NO: 1225643 - RNA, 15 nt, Human
cucuggagcccacug

SEQ ID NO: 1225644 - RNA, 19 nt, Human
cucuggagcccacuguacu

SEQ ID NO: 1225645 - RNA, 21 nt, Human
cucuguugccaggcuggagug

SEQ ID NO: 1225646 - RNA, 13 nt, Human
cucuuaagaagac

SEQ ID NO: 1225647 - RNA, 13 nt, Human
cucuucagucucu

SEQ ID NO: 1225648 - RNA, 23 nt, Human
cugaauuuaaauagcuuuuuucu

SEQ ID NO: 1225649 - RNA, 13 nt, Human
cugaauuucccuc

SEQ ID NO: 1225650 - RNA, 18 nt, Human
cugaauuuaaauagcuuu

SEQ ID NO: 1225651 - RNA, 14 nt, Human
cugaauuuaaauag

SEQ ID NO: 1225652 - RNA, 14 nt, Human
cugaagucagaucu

SEQ ID NO: 1225653 - RNA, 15 nt, Human
cugaagucagaucug

SEQ ID NO: 1225654 - RNA, 16 nt, Human
cugaagucagaucugc

SEQ ID NO: 1225655 - RNA, 21 nt, Human
cugaagucagaucugccuaag

SEQ ID NO: 1225656 - RNA, 15 nt, Human
cugauucuucagcaa

SEQ ID NO: 1225657 - RNA, 13 nt, Human
cugagucccaucc

SEQ ID NO: 1225658 - RNA, 20 nt, Human
cugauagaggaagccugauu

SEQ ID NO: 1225659 - RNA, 20 nt, Human
cugauccaguuuuguuugga

SEQ ID NO: 1225660 - RNA, 20 nt, Human
cugccuaaggacuucuuuaa

SEQ ID NO: 1225661 - RNA, 21 nt, Human
cugccuaaggacuucuuuaau

SEQ ID NO: 1225662 - RNA, 22 nt, Human
cugccuaaggacuucuuuaauu

SEQ ID NO: 1225663 - RNA, 18 nt, Human
cugccucuucccucuucc

SEQ ID NO: 1225664 - RNA, 19 nt, Human
cugccucuucccucuuccu

SEQ ID NO: 1225665 - RNA, 12 nt, Human
cugccucucugc

SEQ ID NO: 1225666 - RNA, 13 nt, Human
cugccucucugca

SEQ ID NO: 1225667 - RNA, 14 nt, Human
cugccucucugcag

SEQ ID NO: 1225668 - RNA, 11 nt, Human
cugcccugcca

SEQ ID NO: 1225669 - RNA, 13 nt, Human
cugcccugccacc

SEQ ID NO: 1225670 - RNA, 14 nt, Human
cugcccugccaccu

SEQ ID NO: 1225671 - RNA, 15 nt, Human
cugcccugccaccug

SEQ ID NO: 1225672 - RNA, 16 nt, Human
cugcccugccaccugu

SEQ ID NO: 1225673 - RNA, 17 nt, Human
cugcccugccaccuguc

SEQ ID NO: 1225674 - RNA, 18 nt, Human
cugcccugccaccugucu

SEQ ID NO: 1225675 - RNA, 20 nt, Human
cugcccugccaccugucugu

SEQ ID NO: 1225676 - RNA, 21 nt, Human
cugcccugccaccugucuguc

SEQ ID NO: 1225677 - RNA, 11 nt, Human
cugcccugccc

SEQ ID NO: 1225678 - RNA, 19 nt, Human
cuggguaggaaagaggaag

SEQ ID NO: 1225679 - RNA, 19 nt, Human
cugggccccugccucucug

SEQ ID NO: 1225680 - RNA, 14 nt, Human
cuggguaggaaaga

SEQ ID NO: 1225681 - RNA, 15 nt, Human
cuggguaggaaagag

SEQ ID NO: 1225682 - RNA, 17 nt, Human
cuggguaggaaagagga

SEQ ID NO: 1225683 - RNA, 12 nt, Human
cugggccccugc

SEQ ID NO: 1225684 - RNA, 16 nt, Human
cugggccccugccucu

SEQ ID NO: 1225685 - RNA, 17 nt, Human
cugggccccugccucuc

SEQ ID NO: 1225686 - RNA, 17 nt, Human
cugggaggcucuggagc

SEQ ID NO: 1225687 - RNA, 15 nt, Human
cugggaggcucugga

SEQ ID NO: 1225688 - RNA, 16 nt, Human
cugggaggcucuggag

SEQ ID NO: 1225689 - RNA, 16 nt, Human
cugggagcuuuuguag

SEQ ID NO: 1225690 - RNA, 23 nt, Human
cuggaauaauccuaaacauauga

SEQ ID NO: 1225691 - RNA, 18 nt, Human
cugcuuucagauacugga

SEQ ID NO: 1225692 - RNA, 21 nt, Human
cugcuuucagauacuggauug

SEQ ID NO: 1225693 - RNA, 22 nt, Human
cuggagcuagaauuugauaugu

SEQ ID NO: 1225694 - RNA, 17 nt, Human
cuggagcuagaauuuga

SEQ ID NO: 1225695 - RNA, 16 nt, Human
cuggagcuagaauuug

SEQ ID NO: 1225696 - RNA, 21 nt, Human
cuggagcccacuguacuugcu

SEQ ID NO: 1225697 - RNA, 13 nt, Human
cuggagcccacug

SEQ ID NO: 1225698 - RNA, 15 nt, Human
cuggagcccacugua

SEQ ID NO: 1225699 - RNA, 16 nt, Human
cuggagcccacuguac

SEQ ID NO: 1225700 - RNA, 17 nt, Human
cuggagcccacuguacu

SEQ ID NO: 1225701 - RNA, 20 nt, Human
cuggagcccacuguacuugc

SEQ ID NO: 1225702 - RNA, 17 nt, Human
cuggauuauauuaugaa

SEQ ID NO: 1225703 - RNA, 21 nt, Human
cuggauuccagagcacugcuc

SEQ ID NO: 1225704 - RNA, 13 nt, Human
cuggauuccagag

SEQ ID NO: 1225705 - RNA, 19 nt, Human
cuggauuguacuuugugcu

SEQ ID NO: 1225706 - RNA, 20 nt, Human
cuggauuguacuuugugcug

SEQ ID NO: 1225707 - RNA, 11 nt, Human
cuuuucugauc

SEQ ID NO: 1225708 - RNA, 14 nt, Human
cuuuucugauccag

SEQ ID NO: 1225709 - RNA, 15 nt, Human
cuuuucugauccagu

SEQ ID NO: 1225710 - RNA, 16 nt, Human
cuuuucugauccaguu

SEQ ID NO: 1225711 - RNA, 18 nt, Human
cuuuucugauccaguuuu

SEQ ID NO: 1225712 - RNA, 12 nt, Human
cuuuuucauuau

SEQ ID NO: 1225713 - RNA, 13 nt, Human
cuuuuucauuauu

SEQ ID NO: 1225714 - RNA, 14 nt, Human
cuuuuucauuauuu

SEQ ID NO: 1225715 - RNA, 21 nt, Human
cuuuuucauuauuuuauuaug

SEQ ID NO: 1225716 - RNA, 12 nt, Human
cuuuuugcagcu

SEQ ID NO: 1225717 - RNA, 13 nt, Human
cuuuuugcagcuu

SEQ ID NO: 1225718 - RNA, 14 nt, Human
cuuuuugcagcuuu

SEQ ID NO: 1225719 - RNA, 15 nt, Human
cuuuuuuaaauaaau

SEQ ID NO: 1225720 - RNA, 13 nt, Human
gaaaacauuccau

SEQ ID NO: 1225721 - RNA, 17 nt, Human
gaaaacauuccauccuu

SEQ ID NO: 1225722 - RNA, 20 nt, Human
gaaaaguauguuagugcaaa

SEQ ID NO: 1225723 - RNA, 14 nt, Human
gaaaaguauguuag

SEQ ID NO: 1225724 - RNA, 19 nt, Human
gaaaauaacaauaaaagac

SEQ ID NO: 1225725 - RNA, 19 nt, Human
gaaaaauauauacuaaaca

SEQ ID NO: 1225726 - RNA, 14 nt, Human
gaaaacaaggauga

SEQ ID NO: 1225727 - RNA, 19 nt, Human
cuuugacaaagguaaauca

SEQ ID NO: 1225728 - RNA, 16 nt, Human
cuuugccacccucaug

SEQ ID NO: 1225729 - RNA, 17 nt, Human
cuuugccacccucaugc

SEQ ID NO: 1225730 - RNA, 18 nt, Human
cuuugccacccucaugcu

SEQ ID NO: 1225731 - RNA, 16 nt, Human
cuuuggauaauaagga

SEQ ID NO: 1225732 - RNA, 13 nt, Human
cuuuggcaggugc

SEQ ID NO: 1225733 - RNA, 24 nt, Human
cuuuggcaggugcagcccccacug

SEQ ID NO: 1225734 - RNA, 17 nt, Human
cuuugacaaagguaaau

SEQ ID NO: 1225735 - RNA, 13 nt, Human
cuuguuucauauu

SEQ ID NO: 1225736 - RNA, 13 nt, Human
cuuguuagaucua

SEQ ID NO: 1225737 - RNA, 16 nt, Human
cuuguuagaucuaguu

SEQ ID NO: 1225738 - RNA, 18 nt, Human
cuuggggcugaugcaguu

SEQ ID NO: 1225739 - RNA, 16 nt, Human
cuuggggcugaugcag

SEQ ID NO: 1225740 - RNA, 13 nt, Human
cuugccacacccc

SEQ ID NO: 1225741 - RNA, 19 nt, Human
cuugccacaccccccaccc

SEQ ID NO: 1225742 - RNA, 23 nt, Human
cuugccacaccccccaccccuag

SEQ ID NO: 1225743 - RNA, 17 nt, Human
cuugcucuugaugccug

SEQ ID NO: 1225744 - RNA, 18 nt, Human
cuugcucuugaugccugg

SEQ ID NO: 1225745 - RNA, 19 nt, Human
cuugcucuugaugccuggc

SEQ ID NO: 1225746 - RNA, 20 nt, Human
cuugcuugauuguauggugg

SEQ ID NO: 1225747 - RNA, 20 nt, Human
cuuagaugcaguucugaaga

SEQ ID NO: 1225748 - RNA, 19 nt, Human
cuuagaugcaguucugaag

SEQ ID NO: 1225749 - RNA, 21 nt, Human
cuuaggguuaugauuaaguaa

SEQ ID NO: 1225750 - RNA, 13 nt, Human
cuuauaauuuaaa

SEQ ID NO: 1225751 - RNA, 14 nt, Human
cuuauaauaaagga

SEQ ID NO: 1225752 - RNA, 16 nt, Human
cuuauaauaaaggacu

SEQ ID NO: 1225753 - RNA, 20 nt, Human
cuuauaauaaaggacuguaa

SEQ ID NO: 1225754 - RNA, 17 nt, Human
cuuauaauaaaggacug

SEQ ID NO: 1225755 - RNA, 14 nt, Human
cuuauaauuuaaaa

SEQ ID NO: 1225756 - RNA, 13 nt, Human
cuuauaguacaug

SEQ ID NO: 1225757 - RNA, 17 nt, Human
cuuauaguacaugauaa

SEQ ID NO: 1225758 - RNA, 19 nt, Human
cuuauaguacaugauaaau

SEQ ID NO: 1225759 - RNA, 21 nt, Human
cuuaagaagacugcauuauau

SEQ ID NO: 1225760 - RNA, 14 nt, Human
cuguuuuuuuguua

SEQ ID NO: 1225761 - RNA, 19 nt, Human
cuguuuuauaauuuuguga

SEQ ID NO: 1225762 - RNA, 22 nt, Human
cuucccucuuccuucccugcug

SEQ ID NO: 1225763 - RNA, 18 nt, Human
cuucagcgguuuauauaa

SEQ ID NO: 1225764 - RNA, 17 nt, Human
cuucuccauggcccugc

SEQ ID NO: 1225765 - RNA, 19 nt, Human
cuucuccauggcccugcca

SEQ ID NO: 1225766 - RNA, 14 nt, Human
cuucucagauuucu

SEQ ID NO: 1225767 - RNA, 19 nt, Human
cuucucagauuucugagga

SEQ ID NO: 1225768 - RNA, 22 nt, Human
cuucucagauuucugaggaaau

SEQ ID NO: 1225769 - RNA, 16 nt, Human
cuuccuucccugcugu

SEQ ID NO: 1225770 - RNA, 13 nt, Human
gacugagaaauuu

SEQ ID NO: 1225771 - RNA, 13 nt, Human
gacugauucuuca

SEQ ID NO: 1225772 - RNA, 16 nt, Human
gacugauucuucagca

SEQ ID NO: 1225773 - RNA, 11 nt, Human
gacugagaaau

SEQ ID NO: 1225774 - RNA, 16 nt, Human
gacuuauaguacauga

SEQ ID NO: 1225775 - RNA, 17 nt, Human
gacuuauaguacaugau

SEQ ID NO: 1225776 - RNA, 18 nt, Human
gacuuauaguacaugaua

SEQ ID NO: 1225777 - RNA, 15 nt, Human
gacugcggaggaagg

SEQ ID NO: 1225778 - RNA, 23 nt, Human
gacugcggaggaaggaggaccca

SEQ ID NO: 1225779 - RNA, 14 nt, Human
gaauuucccucucu

SEQ ID NO: 1225780 - RNA, 14 nt, Human
gacacgcacggcag

SEQ ID NO: 1225781 - RNA, 19 nt, Human
gacacgcacggcagccaca

SEQ ID NO: 1225782 - RNA, 20 nt, Human
gacacgcacggcagccacag

SEQ ID NO: 1225783 - RNA, 21 nt, Human
gacacgcacggcagccacagc

SEQ ID NO: 1225784 - RNA, 22 nt, Human
gacacgcacggcagccacagcu

SEQ ID NO: 1225785 - RNA, 14 nt, Human
gacacuacacccag

SEQ ID NO: 1225786 - RNA, 15 nt, Human
gacacuacacccagc

SEQ ID NO: 1225787 - RNA, 16 nt, Human
gacacuacacccagca

SEQ ID NO: 1225788 - RNA, 17 nt, Human
gacacuacacccagcaa

SEQ ID NO: 1225789 - RNA, 18 nt, Human
gacacuacacccagcaau

SEQ ID NO: 1225790 - RNA, 19 nt, Human
gacacuacacccagcaaua

SEQ ID NO: 1225791 - RNA, 20 nt, Human
gacacuacacccagcaauag

SEQ ID NO: 1225792 - RNA, 14 nt, Human
gacaucagcaaaca

SEQ ID NO: 1225793 - RNA, 13 nt, Human
gacauccagcaga

SEQ ID NO: 1225794 - RNA, 22 nt, Human
gacauccagcagauuuccagcc

SEQ ID NO: 1225795 - RNA, 15 nt, Human
gaccccagccaucca

SEQ ID NO: 1225796 - RNA, 11 nt, Human
gaauucuguau

SEQ ID NO: 1225797 - RNA, 19 nt, Human
gaauucuuuaaaauuacaa

SEQ ID NO: 1225798 - RNA, 22 nt, Human
gaauuuauuggcuuuucugauc

SEQ ID NO: 1225799 - RNA, 14 nt, Human
gaauuuauuggcuu

SEQ ID NO: 1225800 - RNA, 16 nt, Human
gaauuuauuggcuuuu

SEQ ID NO: 1225801 - RNA, 20 nt, Human
gaauuuauuggcuuuucuga

SEQ ID NO: 1225802 - RNA, 21 nt, Human
gaauuuauuggcuuuucugau

SEQ ID NO: 1225803 - RNA, 22 nt, Human
gaauuuaaauagcuuuuuucuc

SEQ ID NO: 1225804 - RNA, 15 nt, Human
gaauuguguuuauaa

SEQ ID NO: 1225805 - RNA, 23 nt, Human
gaauuguguuuauaauuuuaaau

SEQ ID NO: 1225806 - RNA, 15 nt, Human
gaauggaggggcaga

SEQ ID NO: 1225807 - RNA, 16 nt, Human
gaauggaggggcagag

SEQ ID NO: 1225808 - RNA, 20 nt, Human
gaauggaggggcagagccag

SEQ ID NO: 1225809 - RNA, 21 nt, Human
gaauggaggggcagagccagg

SEQ ID NO: 1225810 - RNA, 22 nt, Human
gaauggaggggcagagccagga

SEQ ID NO: 1225811 - RNA, 20 nt, Human
gaaugguccgugcuaaggac

SEQ ID NO: 1225812 - RNA, 22 nt, Human
gaaugguccgugcuaaggacuu

SEQ ID NO: 1225813 - RNA, 23 nt, Human
gaaugguccgugcuaaggacuug

SEQ ID NO: 1225814 - RNA, 19 nt, Human
gaaugaagauacugaaaua

SEQ ID NO: 1225815 - RNA, 21 nt, Human
gaaugaagauacugaaauaaa

SEQ ID NO: 1225816 - RNA, 18 nt, Human
gaaugaagauacugaaau

SEQ ID NO: 1225817 - RNA, 17 nt, Human
gaaugaagauacugaaa

SEQ ID NO: 1225818 - RNA, 20 nt, Human
gaauaauccuaaacauauga

SEQ ID NO: 1225819 - RNA, 20 nt, Human
gaauacucuuauaucuauau

SEQ ID NO: 1225820 - RNA, 22 nt, Human
gaaguccaagcauuuagaugua

SEQ ID NO: 1225821 - RNA, 12 nt, Human
gaaguccaagca

SEQ ID NO: 1225822 - RNA, 15 nt, Human
gaacgcguugaaauu

SEQ ID NO: 1225823 - RNA, 21 nt, Human
gaacuagaguuuagcuggaaa

SEQ ID NO: 1225824 - RNA, 14 nt, Human
gaacuacugaggau

SEQ ID NO: 1225825 - RNA, 14 nt, Human
gaacaucccuccug

SEQ ID NO: 1225826 - RNA, 18 nt, Human
gaaauuguauuacaaauc

SEQ ID NO: 1225827 - RNA, 16 nt, Human
gaaauuuauaaacuuu

SEQ ID NO: 1225828 - RNA, 17 nt, Human
gaaauuuauaaacuuuu

SEQ ID NO: 1225829 - RNA, 16 nt, Human
gaaauuguauuacaaa

SEQ ID NO: 1225830 - RNA, 14 nt, Human
gaacauaaaaagga

SEQ ID NO: 1225831 - RNA, 16 nt, Human
gaacauaaaaaggaca

SEQ ID NO: 1225832 - RNA, 18 nt, Human
gaacauaaaaaggacauc

SEQ ID NO: 1225833 - RNA, 22 nt, Human
gaacauaaaaaggacaucagca

SEQ ID NO: 1225834 - RNA, 20 nt, Human
gaagagguuuuaaagcuucc

SEQ ID NO: 1225835 - RNA, 15 nt, Human
gaagauacugaaaua

SEQ ID NO: 1225836 - RNA, 21 nt, Human
gaacucaucuagguaaauuac

SEQ ID NO: 1225837 - RNA, 20 nt, Human
gaacucaucuagguaaauua

SEQ ID NO: 1225838 - RNA, 22 nt, Human
gaacucaucuagguaaauuaca

SEQ ID NO: 1225839 - RNA, 19 nt, Human
gaacuuugcugagccugua

SEQ ID NO: 1225840 - RNA, 19 nt, Human
gaagacugcauuauauuua

SEQ ID NO: 1225841 - RNA, 12 nt, Human
gaagaacugaaa

SEQ ID NO: 1225842 - RNA, 12 nt, Human
gaagagaaggag

SEQ ID NO: 1225843 - RNA, 13 nt, Human
gaagagaaggagc

SEQ ID NO: 1225844 - RNA, 14 nt, Human
gaagagaaggagca

SEQ ID NO: 1225845 - RNA, 15 nt, Human
gaagagaaggagcag

SEQ ID NO: 1225846 - RNA, 17 nt, Human
gaagagaucaggaagag

SEQ ID NO: 1225847 - RNA, 16 nt, Human
gaagagaucaggaaga

SEQ ID NO: 1225848 - RNA, 12 nt, Human
gcaaaugugaau

SEQ ID NO: 1225849 - RNA, 23 nt, Human
gcaaaugugaaucauuuuaccuu

SEQ ID NO: 1225850 - RNA, 20 nt, Human
gcaaacuuuauuuuguguuu

SEQ ID NO: 1225851 - RNA, 18 nt, Human
gcaaacuuuauuuugugu

SEQ ID NO: 1225852 - RNA, 22 nt, Human
gcaacuuuguauaaaagggacu

SEQ ID NO: 1225853 - RNA, 23 nt, Human
gcaagauggggagugagaggcug

SEQ ID NO: 1225854 - RNA, 20 nt, Human
gcaaguauuagaauaccaca

SEQ ID NO: 1225855 - RNA, 23 nt, Human
gcaauccucccacuucagccucc

SEQ ID NO: 1225856 - RNA, 14 nt, Human
gauuaaguaaugau

SEQ ID NO: 1225857 - RNA, 22 nt, Human
gauuaaguaaugauaacuggaa

SEQ ID NO: 1225858 - RNA, 16 nt, Human
gauugggaauccgccc

SEQ ID NO: 1225859 - RNA, 14 nt, Human
gauccuggaaauca

SEQ ID NO: 1225860 - RNA, 17 nt, Human
gaucuaguucacucucc

SEQ ID NO: 1225861 - RNA, 18 nt, Human
gaugcaguucugaagaag

SEQ ID NO: 1225862 - RNA, 17 nt, Human
gauaggucagugcaaau

SEQ ID NO: 1225863 - RNA, 23 nt, Human
gaucagcuuauugucuagugaaa

SEQ ID NO: 1225864 - RNA, 12 nt, Human
gaucaggaagag

SEQ ID NO: 1225865 - RNA, 15 nt, Human
gaucaggaagagaag

SEQ ID NO: 1225866 - RNA, 16 nt, Human
gaucaggaagagaagg

SEQ ID NO: 1225867 - RNA, 18 nt, Human
gaucaggaagagaaggag

SEQ ID NO: 1225868 - RNA, 17 nt, Human
gaucaggaagagaagga

SEQ ID NO: 1225869 - RNA, 16 nt, Human
gauaucaugcaaauuu

SEQ ID NO: 1225870 - RNA, 23 nt, Human
gaucaccgacugaaaauauuguu

SEQ ID NO: 1225871 - RNA, 22 nt, Human
gauaauaaggaaaaguuuaaua

SEQ ID NO: 1225872 - RNA, 20 nt, Human
gauaauaaggaaaaguuuaa

SEQ ID NO: 1225873 - RNA, 21 nt, Human
gauaauaaggaaaaguuuaau

SEQ ID NO: 1225874 - RNA, 12 nt, Human
gaguguugaaac

SEQ ID NO: 1225875 - RNA, 16 nt, Human
gcauuuuacuguacag

SEQ ID NO: 1225876 - RNA, 17 nt, Human
gcauuuuacuguacaga

SEQ ID NO: 1225877 - RNA, 15 nt, Human
gcaugaauuugugaa

SEQ ID NO: 1225878 - RNA, 17 nt, Human
gcaugaauuugugaagg

SEQ ID NO: 1225879 - RNA, 15 nt, Human
gcaugccuucaaauc

SEQ ID NO: 1225880 - RNA, 23 nt, Human
gcauggaaauucccuucaucugg

SEQ ID NO: 1225881 - RNA, 15 nt, Human
gcauuauaaaaagaa

SEQ ID NO: 1225882 - RNA, 23 nt, Human
gcauauuauuuuauguugcauag

SEQ ID NO: 1225883 - RNA, 18 nt, Human
gcauauuauuuuauguug

SEQ ID NO: 1225884 - RNA, 11 nt, Human
gcauauauuuu

SEQ ID NO: 1225885 - RNA, 14 nt, Human
gcauauauuuuuau

SEQ ID NO: 1225886 - RNA, 15 nt, Human
gcauauauuuuuaua

SEQ ID NO: 1225887 - RNA, 16 nt, Human
gcauauauuuuuauau

SEQ ID NO: 1225888 - RNA, 20 nt, Human
gcauauauuuuuauauuuac

SEQ ID NO: 1225889 - RNA, 19 nt, Human
gcauauuuauaaaaauaaa

SEQ ID NO: 1225890 - RNA, 14 nt, Human
gcaguucugaagaa

SEQ ID NO: 1225891 - RNA, 13 nt, Human
gcaguucugaaga

SEQ ID NO: 1225892 - RNA, 12 nt, Human
gcaggucccuaa

SEQ ID NO: 1225893 - RNA, 13 nt, Human
gcaggucccuaau

SEQ ID NO: 1225894 - RNA, 10 nt, Human
gcaggucccu

SEQ ID NO: 1225895 - RNA, 11 nt, Human
gcaggucccua

SEQ ID NO: 1225896 - RNA, 20 nt, Human
gcacagccucuuagaugcag

SEQ ID NO: 1225897 - RNA, 11 nt, Human
gcagcaacaau

SEQ ID NO: 1225898 - RNA, 16 nt, Human
gcagcaacaauaaaua

SEQ ID NO: 1225899 - RNA, 20 nt, Human
gcaggaguuucguuuucaaa

SEQ ID NO: 1225900 - RNA, 21 nt, Human
gcaggaguuucguuuucaaaa

SEQ ID NO: 1225901 - RNA, 19 nt, Human
gccaggaagaucccccaga

SEQ ID NO: 1225902 - RNA, 16 nt, Human
gcccacagcuguauga

SEQ ID NO: 1225903 - RNA, 22 nt, Human
gcccaucugggggccucuucug

SEQ ID NO: 1225904 - RNA, 13 nt, Human
gccuucaaaucaa

SEQ ID NO: 1225905 - RNA, 18 nt, Human
gccuuggggcugaugcag

SEQ ID NO: 1225906 - RNA, 12 nt, Human
gccuuuuucauu

SEQ ID NO: 1225907 - RNA, 16 nt, Human
gccuuuuucauuauuu

SEQ ID NO: 1225908 - RNA, 20 nt, Human
gccuuuuucauuauuuuauu

SEQ ID NO: 1225909 - RNA, 22 nt, Human
gccuuuuucauuauuuuauuau

SEQ ID NO: 1225910 - RNA, 23 nt, Human
gccuuuuucauuauuuuauuaug

SEQ ID NO: 1225911 - RNA, 18 nt, Human
gcgccuccaacccuagca

SEQ ID NO: 1225912 - RNA, 13 nt, Human
gcuagacugguga

SEQ ID NO: 1225913 - RNA, 15 nt, Human
gcuagacuggugacu

SEQ ID NO: 1225914 - RNA, 16 nt, Human
gcuagacuggugacug

SEQ ID NO: 1225915 - RNA, 19 nt, Human
gcuagacuggugacugauu

SEQ ID NO: 1225916 - RNA, 20 nt, Human
gcuagacuggugacugauuc

SEQ ID NO: 1225917 - RNA, 22 nt, Human
gcuagacuggugacugauucuu

SEQ ID NO: 1225918 - RNA, 13 nt, Human
gcuaccaggaaag

SEQ ID NO: 1225919 - RNA, 16 nt, Human
gcuacagaagaaacug

SEQ ID NO: 1225920 - RNA, 14 nt, Human
gccucccauguuca

SEQ ID NO: 1225921 - RNA, 10 nt, Human
gccucucugc

SEQ ID NO: 1225922 - RNA, 14 nt, Human
gccucucugcaggu

SEQ ID NO: 1225923 - RNA, 16 nt, Human
gccucucugcaggucc

SEQ ID NO: 1225924 - RNA, 17 nt, Human
gccucucugcagguccc

SEQ ID NO: 1225925 - RNA, 18 nt, Human
gccucucugcaggucccu

SEQ ID NO: 1225926 - RNA, 11 nt, Human
gccuaaaucca

SEQ ID NO: 1225927 - RNA, 18 nt, Human
gccuaaggacuucuuuaa

SEQ ID NO: 1225928 - RNA, 14 nt, Human
gccuaaggacuucu

SEQ ID NO: 1225929 - RNA, 15 nt, Human
gccuaaggacuucuu

SEQ ID NO: 1225930 - RNA, 12 nt, Human
gccuaaggacuu

SEQ ID NO: 1225931 - RNA, 13 nt, Human
gccuaaggacuuc

SEQ ID NO: 1225932 - RNA, 17 nt, Human
gccuauuuuaauaaaca

SEQ ID NO: 1225933 - RNA, 20 nt, Human
gcccuucuauacccacccag

SEQ ID NO: 1225934 - RNA, 19 nt, Human
gcccuucuuuccacagaag

SEQ ID NO: 1225935 - RNA, 21 nt, Human
gcccuucuauacccacccaga

SEQ ID NO: 1225936 - RNA, 22 nt, Human
gcccuucuauacccacccagaa

SEQ ID NO: 1225937 - RNA, 18 nt, Human
gcuagauguauguacuuc

SEQ ID NO: 1225938 - RNA, 12 nt, Human
gcuagcaaauag

SEQ ID NO: 1225939 - RNA, 16 nt, Human
gcuagcaaauaguaau

SEQ ID NO: 1225940 - RNA, 24 nt, Human
gcuggugcccugcuuucagauacu

SEQ ID NO: 1225941 - RNA, 16 nt, Human
gcuggggccaggcugg

SEQ ID NO: 1225942 - RNA, 19 nt, Human
gcuggggccaggcuggguc

SEQ ID NO: 1225943 - RNA, 20 nt, Human
ggaaaaaauaacaaugaaag

SEQ ID NO: 1225944 - RNA, 19 nt, Human
ggaaaaguuuaauauuaaa

SEQ ID NO: 1225945 - RNA, 18 nt, Human
ggaaauauuuauuuuaau

SEQ ID NO: 1225946 - RNA, 17 nt, Human
ggaaauauuuauuuuaa

SEQ ID NO: 1225947 - RNA, 15 nt, Human
ggaaauauuuauuuu

SEQ ID NO: 1225948 - RNA, 13 nt, Human
ggaaauauuuauu

SEQ ID NO: 1225949 - RNA, 12 nt, Human
ggaaauauuuau

SEQ ID NO: 1225950 - RNA, 21 nt, Human
ggaacgcguugaaauuguaau

SEQ ID NO: 1225951 - RNA, 17 nt, Human
ggaacgcguugaaauug

SEQ ID NO: 1225952 - RNA, 18 nt, Human
ggaagaucccccagaaaa

SEQ ID NO: 1225953 - RNA, 22 nt, Human
ggaagaucccccagaaaagaaa

SEQ ID NO: 1225954 - RNA, 14 nt, Human
ggaagaucccccag

SEQ ID NO: 1225955 - RNA, 15 nt, Human
ggacugcggaggaag

SEQ ID NO: 1225956 - RNA, 16 nt, Human
ggacugcggaggaagg

SEQ ID NO: 1225957 - RNA, 12 nt, Human
ggagcccuggga

SEQ ID NO: 1225958 - RNA, 13 nt, Human
ggagcccugggag

SEQ ID NO: 1225959 - RNA, 16 nt, Human
ggaaggaggacccagg

SEQ ID NO: 1225960 - RNA, 19 nt, Human
ggaaggaggacccaggaca

SEQ ID NO: 1225961 - RNA, 15 nt, Human
ggaccagcuuuuccc

SEQ ID NO: 1225962 - RNA, 17 nt, Human
ggaccagcuuuucccaa

SEQ ID NO: 1225963 - RNA, 22 nt, Human
ggaccagcuuuucccaaaagcc

SEQ ID NO: 1225964 - RNA, 10 nt, Human
ggacccagga

SEQ ID NO: 1225965 - RNA, 13 nt, Human
ggacccaggacag

SEQ ID NO: 1225966 - RNA, 17 nt, Human
ggaggaggcagagaaga

SEQ ID NO: 1225967 - RNA, 18 nt, Human
ggaggaggcagagaagaa

SEQ ID NO: 1225968 - RNA, 16 nt, Human
ggcagcaauuuaaaug

SEQ ID NO: 1225969 - RNA, 17 nt, Human
ggcagcaacaauaaaua

SEQ ID NO: 1225970 - RNA, 22 nt, Human
ggcagcaacaauaaauagacac

SEQ ID NO: 1225971 - RNA, 15 nt, Human
ggcagcaauuuaaau

SEQ ID NO: 1225972 - RNA, 15 nt, Human
ggcagcaacaauaaa

SEQ ID NO: 1225973 - RNA, 21 nt, Human
ggaucaguuaacuauugcauu

SEQ ID NO: 1225974 - RNA, 18 nt, Human
ggccaggcugggucgccc

SEQ ID NO: 1225975 - RNA, 22 nt, Human
ggccaggcugggucgcccugga

SEQ ID NO: 1225976 - RNA, 20 nt, Human
ggccaggcaggagcccuucu

SEQ ID NO: 1225977 - RNA, 16 nt, Human
ggcucuggagcccacu

SEQ ID NO: 1225978 - RNA, 13 nt, Human
ggccccugccucu

SEQ ID NO: 1225979 - RNA, 20 nt, Human
ggccccugccaccuccugcc

SEQ ID NO: 1225980 - RNA, 13 nt, Human
ggcucuggagccc

SEQ ID NO: 1225981 - RNA, 14 nt, Human
ggcucuggagccca

SEQ ID NO: 1225982 - RNA, 15 nt, Human
ggcugcugcuacaau

SEQ ID NO: 1225983 - RNA, 13 nt, Human
ggcuuuucugauc

SEQ ID NO: 1225984 - RNA, 16 nt, Human
ggcuuuucugauccag

SEQ ID NO: 1225985 - RNA, 12 nt, Human
ggcuuuucugau

SEQ ID NO: 1225986 - RNA, 22 nt, Human
ggcuugaguuuaaauuguaaua

SEQ ID NO: 1225987 - RNA, 20 nt, Human
gggaccggcggaccccagcc

SEQ ID NO: 1225988 - RNA, 22 nt, Human
gggacguucgugguccugcgcu

SEQ ID NO: 1225989 - RNA, 13 nt, Human
gggaaugaagaua

SEQ ID NO: 1225990 - RNA, 17 nt, Human
ggcuuuucugauccagu

SEQ ID NO: 1225991 - RNA, 15 nt, Human
gggacugagaaauuu

SEQ ID NO: 1225992 - RNA, 18 nt, Human
gggaggugagaccaccuc

SEQ ID NO: 1225993 - RNA, 12 nt, Human
gggacucagccc

SEQ ID NO: 1225994 - RNA, 13 nt, Human
gggacugagaaau

SEQ ID NO: 1225995 - RNA, 13 nt, Human
gggcaagaggaau

SEQ ID NO: 1225996 - RNA, 20 nt, Human
gggcaauuaauuccuucagc

SEQ ID NO: 1225997 - RNA, 21 nt, Human
gggcaauuaauuccuucagca

SEQ ID NO: 1225998 - RNA, 22 nt, Human
gggccccugccucucugcaggu

SEQ ID NO: 1225999 - RNA, 13 nt, Human
gggccccugccuc

SEQ ID NO: 1226000 - RNA, 15 nt, Human
gggccccugccucuc

SEQ ID NO: 1226001 - RNA, 17 nt, Human
gggccccugccucucug

SEQ ID NO: 1226002 - RNA, 18 nt, Human
gggccccugccucucugc

SEQ ID NO: 1226003 - RNA, 19 nt, Human
gggccccugccucucugca

SEQ ID NO: 1226004 - RNA, 21 nt, Human
gggccccugccucucugcagg

SEQ ID NO: 1226005 - RNA, 20 nt, Human
ggucacguuuggugcuucuc

SEQ ID NO: 1226006 - RNA, 18 nt, Human
gguagcauuuguguugaa

SEQ ID NO: 1226007 - RNA, 17 nt, Human
gggugcugggccccugc

SEQ ID NO: 1226008 - RNA, 18 nt, Human
gggugcugggccccugcc

SEQ ID NO: 1226009 - RNA, 11 nt, Human
ggggauucuua

SEQ ID NO: 1226010 - RNA, 15 nt, Human
ggggauucuuaaagu

SEQ ID NO: 1226011 - RNA, 14 nt, Human
ggggcuaccaggaa

SEQ ID NO: 1226012 - RNA, 18 nt, Human
ggggugcugggccccugc

SEQ ID NO: 1226013 - RNA, 20 nt, Human
gggguggggggggugcuggg

SEQ ID NO: 1226014 - RNA, 14 nt, Human
ggugagaccaccuc

SEQ ID NO: 1226015 - RNA, 15 nt, Human
ggugagaccaccucu

SEQ ID NO: 1226016 - RNA, 20 nt, Human
ggucucuucugaauaaagca

SEQ ID NO: 1226017 - RNA, 21 nt, Human
ggucucuucugaauaaagcaa

SEQ ID NO: 1226018 - RNA, 22 nt, Human
ggucucuucugaauaaagcaau

SEQ ID NO: 1226019 - RNA, 14 nt, Human
ggugacuuuggaua

SEQ ID NO: 1226020 - RNA, 18 nt, Human
ggugacuuuggauaauaa

SEQ ID NO: 1226021 - RNA, 19 nt, Human
ggugacuuuggauaauaag

SEQ ID NO: 1226022 - RNA, 20 nt, Human
ggugacuuuggauaauaagg

SEQ ID NO: 1226023 - RNA, 21 nt, Human
ggugacuuuggauaauaagga

SEQ ID NO: 1226024 - RNA, 20 nt, Human
gguuaucugaagucagaucu

SEQ ID NO: 1226025 - RNA, 16 nt, Human
gguuagggaaaacauu

SEQ ID NO: 1226026 - RNA, 16 nt, Human
gguguaugugugaagu

SEQ ID NO: 1226027 - RNA, 13 nt, Human
uacuugcucuuga

SEQ ID NO: 1226028 - RNA, 21 nt, Human
uacuugcucuugaugccuggc

SEQ ID NO: 1226029 - RNA, 11 nt, Human
uagaaagcuau

SEQ ID NO: 1226030 - RNA, 15 nt, Human
uacuccccuccuuga

SEQ ID NO: 1226031 - RNA, 19 nt, Human
uaccuuugacaaagguaaa

SEQ ID NO: 1226032 - RNA, 21 nt, Human
uacaguuagggcuccuauuca

SEQ ID NO: 1226033 - RNA, 18 nt, Human
uacaguuccuagguauaa

SEQ ID NO: 1226034 - RNA, 11 nt, Human
uacauuugugu

SEQ ID NO: 1226035 - RNA, 17 nt, Human
uacauuuguauaaaaua

SEQ ID NO: 1226036 - RNA, 16 nt, Human
uacauuuguauaaaau

SEQ ID NO: 1226037 - RNA, 18 nt, Human
uaccaccagucugacugu

SEQ ID NO: 1226038 - RNA, 23 nt, Human
uaccacaggaaccacaagacugc

SEQ ID NO: 1226039 - RNA, 18 nt, Human
uaccaaggucuucuuaau

SEQ ID NO: 1226040 - RNA, 12 nt, Human
uaccaauaaagu

SEQ ID NO: 1226041 - RNA, 13 nt, Human
uaccaauaaagug

SEQ ID NO: 1226042 - RNA, 17 nt, Human
uaccaauaaagugaccc

SEQ ID NO: 1226043 - RNA, 14 nt, Human
uaccaauaaaguga

SEQ ID NO: 1226044 - RNA, 12 nt, Human
uacccacccaga

SEQ ID NO: 1226045 - RNA, 15 nt, Human
uacccaaauuaagag

SEQ ID NO: 1226046 - RNA, 14 nt, Human
uacacaauaagcaa

SEQ ID NO: 1226047 - RNA, 15 nt, Human
uacacaauaagcaaa

SEQ ID NO: 1226048 - RNA, 13 nt, Human
uaauuuugugaag

SEQ ID NO: 1226049 - RNA, 12 nt, Human
uaauuuuggaau

SEQ ID NO: 1226050 - RNA, 13 nt, Human
uaauuuuggaauu

SEQ ID NO: 1226051 - RNA, 13 nt, Human
uaauuuugaaaaa

SEQ ID NO: 1226052 - RNA, 17 nt, Human
uaauuuugaaaaacugc

SEQ ID NO: 1226053 - RNA, 19 nt, Human
uacaauuuuguuucuguac

SEQ ID NO: 1226054 - RNA, 21 nt, Human
uacaauuuuguuucuguacuu

SEQ ID NO: 1226055 - RNA, 22 nt, Human
uacagaaaaguugaauuuuaca

SEQ ID NO: 1226056 - RNA, 18 nt, Human
uacagaaaaguugaauuu

SEQ ID NO: 1226057 - RNA, 13 nt, Human
uacagaauuuuau

SEQ ID NO: 1226058 - RNA, 11 nt, Human
uacagaacuac

SEQ ID NO: 1226059 - RNA, 14 nt, Human
uacagaagaaacug

SEQ ID NO: 1226060 - RNA, 19 nt, Human
uauauuuuuauauuuacua

SEQ ID NO: 1226061 - RNA, 12 nt, Human
uaucucuucagu

SEQ ID NO: 1226062 - RNA, 13 nt, Human
uaucucuucaguc

SEQ ID NO: 1226063 - RNA, 14 nt, Human
uaucucuucagucu

SEQ ID NO: 1226064 - RNA, 16 nt, Human
uaucucuucagucucu

SEQ ID NO: 1226065 - RNA, 17 nt, Human
uaucaugugaaaucauu

SEQ ID NO: 1226066 - RNA, 22 nt, Human
uaucaugugaaaucauucauuu

SEQ ID NO: 1226067 - RNA, 18 nt, Human
uauaugcuauuucuauau

SEQ ID NO: 1226068 - RNA, 16 nt, Human
uauaugcuauuucuau

SEQ ID NO: 1226069 - RNA, 23 nt, Human
uauauuuauuacuguaagaaaau

SEQ ID NO: 1226070 - RNA, 19 nt, Human
uauauguaccguaggcuuu

SEQ ID NO: 1226071 - RNA, 20 nt, Human
uauauuugaaauauugacuu

SEQ ID NO: 1226072 - RNA, 14 nt, Human
uauauuugaaauau

SEQ ID NO: 1226073 - RNA, 13 nt, Human
uauauuugaaaua

SEQ ID NO: 1226074 - RNA, 13 nt, Human
uauauuuuaagac

SEQ ID NO: 1226075 - RNA, 14 nt, Human
uauauuuuaagacg

SEQ ID NO: 1226076 - RNA, 15 nt, Human
uauaauucaccuucu

SEQ ID NO: 1226077 - RNA, 15 nt, Human
uauacccacccagaa

SEQ ID NO: 1226078 - RNA, 22 nt, Human
uauacccacccagaaugagaca

SEQ ID NO: 1226079 - RNA, 20 nt, Human
uauacuauaguaccaguagg

SEQ ID NO: 1226080 - RNA, 18 nt, Human
uauaacaaugcuguauuu

SEQ ID NO: 1226081 - RNA, 15 nt, Human
uaguuuuauaugcuu

SEQ ID NO: 1226082 - RNA, 18 nt, Human
uaguuguaaaccaaguga

SEQ ID NO: 1226083 - RNA, 18 nt, Human
uagucaaauugugugaaa

SEQ ID NO: 1226084 - RNA, 17 nt, Human
uaggaaguugacuuaua

SEQ ID NO: 1226085 - RNA, 14 nt, Human
uaggaauuguguuu

SEQ ID NO: 1226086 - RNA, 22 nt, Human
uaggaaguugacuuauaguaca

SEQ ID NO: 1226087 - RNA, 16 nt, Human
uaggaauuguguuuau

SEQ ID NO: 1226088 - RNA, 14 nt, Human
uagagaguguugaa

SEQ ID NO: 1226089 - RNA, 15 nt, Human
uagagaguguugaaa

SEQ ID NO: 1226090 - RNA, 18 nt, Human
uagaguuuagcuggaaaa

SEQ ID NO: 1226091 - RNA, 17 nt, Human
uagaguuuagcuggaaa

SEQ ID NO: 1226092 - RNA, 13 nt, Human
uagacuggugacu

SEQ ID NO: 1226093 - RNA, 14 nt, Human
uagacuggugacug

SEQ ID NO: 1226094 - RNA, 17 nt, Human
uagacuggugacugauu

SEQ ID NO: 1226095 - RNA, 18 nt, Human
uagacuggugacugauuc

SEQ ID NO: 1226096 - RNA, 20 nt, Human
uagauguauguacuucaugc

SEQ ID NO: 1226097 - RNA, 16 nt, Human
uagauguauguacuuc

SEQ ID NO: 1226098 - RNA, 17 nt, Human
uaagagagucuauuuac

SEQ ID NO: 1226099 - RNA, 15 nt, Human
uaaggcaaucauggu

SEQ ID NO: 1226100 - RNA, 19 nt, Human
uaagcauauauuuuuauau

SEQ ID NO: 1226101 - RNA, 21 nt, Human
uaagcauauauuuuuauauuu

SEQ ID NO: 1226102 - RNA, 22 nt, Human
uaagcauauauuuuuauauuua

SEQ ID NO: 1226103 - RNA, 23 nt, Human
uaagcauauauuuuuauauuuac

SEQ ID NO: 1226104 - RNA, 15 nt, Human
uaagcaugcacaaau

SEQ ID NO: 1226105 - RNA, 20 nt, Human
uaagcauuccaacuaucuca

SEQ ID NO: 1226106 - RNA, 18 nt, Human
uaagcauuccaacuaucu

SEQ ID NO: 1226107 - RNA, 16 nt, Human
uaagcauuccaacuau

SEQ ID NO: 1226108 - RNA, 17 nt, Human
uaacauguuaaaccaug

SEQ ID NO: 1226109 - RNA, 18 nt, Human
uaacauguuaaaccaugg

SEQ ID NO: 1226110 - RNA, 11 nt, Human
uaaccaaguuc

SEQ ID NO: 1226111 - RNA, 12 nt, Human
uaaccaaguucc

SEQ ID NO: 1226112 - RNA, 17 nt, Human
uaaccaggggccaugaa

SEQ ID NO: 1226113 - RNA, 22 nt, Human
uaaauuuaguauuuuguuucag

SEQ ID NO: 1226114 - RNA, 14 nt, Human
uaaauuuaguauuu

SEQ ID NO: 1226115 - RNA, 18 nt, Human
uaaauccauuuggaaauc

SEQ ID NO: 1226116 - RNA, 19 nt, Human
uaaauccauuuggaaaucu

SEQ ID NO: 1226117 - RNA, 22 nt, Human
uaaauccauuuggaaaucuuua

SEQ ID NO: 1226118 - RNA, 23 nt, Human
uaaauccauuuggaaaucuuuaa

SEQ ID NO: 1226119 - RNA, 16 nt, Human
uaaaucccauuauuca

SEQ ID NO: 1226120 - RNA, 17 nt, Human
uaaaucccauuauucaa

SEQ ID NO: 1226121 - RNA, 19 nt, Human
uaaaucccauuauucaaag

SEQ ID NO: 1226122 - RNA, 15 nt, Human
uaaucuuauuuagga

SEQ ID NO: 1226123 - RNA, 15 nt, Human
uaaucuucaauaguu

SEQ ID NO: 1226124 - RNA, 15 nt, Human
uaauauuaaagccau

SEQ ID NO: 1226125 - RNA, 12 nt, Human
uaauauuaaagc

SEQ ID NO: 1226126 - RNA, 13 nt, Human
uaauauuaaagcc

SEQ ID NO: 1226127 - RNA, 14 nt, Human
uaauauuaaagcca

SEQ ID NO: 1226128 - RNA, 20 nt, Human
uaauauguucuuuuaaauga

SEQ ID NO: 1226129 - RNA, 11 nt, Human
uaauaaagcug

SEQ ID NO: 1226130 - RNA, 20 nt, Human
uaauaaggaaaaguuuaaua

SEQ ID NO: 1226131 - RNA, 20 nt, Human
uaauaauuuuuaagaaauaa

SEQ ID NO: 1226132 - RNA, 15 nt, Human
uaauaauguuucaaa

SEQ ID NO: 1226133 - RNA, 15 nt, Human
uaauaauuauaugcu

SEQ ID NO: 1226134 - RNA, 16 nt, Human
uaauaauuauaugcua

SEQ ID NO: 1226135 - RNA, 19 nt, Human
uaauaauuauaugcuauuu

SEQ ID NO: 1226136 - RNA, 20 nt, Human
uaauaauuauaugcuauuuc

SEQ ID NO: 1226137 - RNA, 22 nt, Human
uaauaauuauaugcuauuucua

SEQ ID NO: 1226138 - RNA, 23 nt, Human
uaauaauuauaugcuauuucuau

SEQ ID NO: 1226139 - RNA, 23 nt, Human
uaauuuguaguguuggagaagaa

SEQ ID NO: 1226140 - RNA, 17 nt, Human
uaauuugguuuucacau

SEQ ID NO: 1226141 - RNA, 15 nt, Human
uaauuugguuuucac

SEQ ID NO: 1226142 - RNA, 18 nt, Human
uaauuugguuuucacauu

SEQ ID NO: 1226143 - RNA, 20 nt, Human
uaauuuguaguguuggagaa

SEQ ID NO: 1226144 - RNA, 22 nt, Human
uaauuggaaaggcagcucuaaa

SEQ ID NO: 1226145 - RNA, 22 nt, Human
uaauguuucaaacauauauaac

SEQ ID NO: 1226146 - RNA, 15 nt, Human
uaauguuucaaacau

SEQ ID NO: 1226147 - RNA, 14 nt, Human
uaauguuucaaaca

SEQ ID NO: 1226148 - RNA, 12 nt, Human
uaauuaacaugu

SEQ ID NO: 1226149 - RNA, 14 nt, Human
uaauuaacauguua

SEQ ID NO: 1226150 - RNA, 15 nt, Human
uaauuaacauguuaa

SEQ ID NO: 1226151 - RNA, 17 nt, Human
uaauuaacauguuaaac

SEQ ID NO: 1226152 - RNA, 18 nt, Human
uaauuaacauguuaaacc

SEQ ID NO: 1226153 - RNA, 19 nt, Human
uaauuaacauguuaaacca

SEQ ID NO: 1226154 - RNA, 20 nt, Human
uaauuaacauguuaaaccau

SEQ ID NO: 1226155 - RNA, 14 nt, Human
uaaaguuuguugaa

SEQ ID NO: 1226156 - RNA, 17 nt, Human
uaaauaaaaauaauccu

SEQ ID NO: 1226157 - RNA, 13 nt, Human
uaaaguugaauuu

SEQ ID NO: 1226158 - RNA, 14 nt, Human
uaaaguugaauuua

SEQ ID NO: 1226159 - RNA, 15 nt, Human
uaaaguugaauuuau

SEQ ID NO: 1226160 - RNA, 17 nt, Human
uaaaguugaauuuauug

SEQ ID NO: 1226161 - RNA, 19 nt, Human
uaaaguugaauuuauuggc

SEQ ID NO: 1226162 - RNA, 21 nt, Human
uaaaguugaauuuauuggcuu

SEQ ID NO: 1226163 - RNA, 23 nt, Human
uaaaguugaauuuauuggcuuuu

SEQ ID NO: 1226164 - RNA, 12 nt, Human
uaaaggacugua

SEQ ID NO: 1226165 - RNA, 14 nt, Human
uaaaggacuguaau

SEQ ID NO: 1226166 - RNA, 13 nt, Human
uaaacuuuucuga

SEQ ID NO: 1226167 - RNA, 14 nt, Human
uaaacuuuucugau

SEQ ID NO: 1226168 - RNA, 15 nt, Human
uaaacuuuucugaua

SEQ ID NO: 1226169 - RNA, 20 nt, Human
uaaacuuuuuucuuacuguc

SEQ ID NO: 1226170 - RNA, 20 nt, Human
uaaaucagacuaugaaguuu

SEQ ID NO: 1226171 - RNA, 14 nt, Human
uaaauccauuugga

SEQ ID NO: 1226172 - RNA, 15 nt, Human
uaaauccauuuggaa

SEQ ID NO: 1226173 - RNA, 16 nt, Human
uaaauccauuuggaaa

SEQ ID NO: 1226174 - RNA, 18 nt, Human
uaaauauaugcuaagucu

SEQ ID NO: 1226175 - RNA, 16 nt, Human
uaaauauauuuuaaga

SEQ ID NO: 1226176 - RNA, 22 nt, Human
uaaauauauuuuaagacgaaac

SEQ ID NO: 1226177 - RNA, 21 nt, Human
uaaacacucuugaaaaaugca

SEQ ID NO: 1226178 - RNA, 22 nt, Human
uaaaaauggaaacuauauugac

SEQ ID NO: 1226179 - RNA, 17 nt, Human
uaaaagggacugagaaa

SEQ ID NO: 1226180 - RNA, 19 nt, Human
uaaaagggacugagaaauu

SEQ ID NO: 1226181 - RNA, 20 nt, Human
uaaaagggacugagaaauuu

SEQ ID NO: 1226182 - RNA, 21 nt, Human
uaaaagggacugagaaauuua

SEQ ID NO: 1226183 - RNA, 19 nt, Human
uaaaauccauacauuugug

SEQ ID NO: 1226184 - RNA, 15 nt, Human
uaaaaggaaagaaaa

SEQ ID NO: 1226185 - RNA, 13 nt, Human
uaaaaugagaaau

SEQ ID NO: 1226186 - RNA, 15 nt, Human
uaaaaugagaaaucu

SEQ ID NO: 1226187 - RNA, 16 nt, Human
uaaaaugagaaaucua

SEQ ID NO: 1226188 - RNA, 12 nt, Human
guuuguuuaguc

SEQ ID NO: 1226189 - RNA, 18 nt, Human
guuuucaggcuagaugua

SEQ ID NO: 1226190 - RNA, 12 nt, Human
uaaaaaacacug

SEQ ID NO: 1226191 - RNA, 16 nt, Human
uaaaaaagaaacauuu

SEQ ID NO: 1226192 - RNA, 14 nt, Human
uaaaaaauggucac

SEQ ID NO: 1226193 - RNA, 17 nt, Human
uaaaaacaaagaaauua

SEQ ID NO: 1226194 - RNA, 11 nt, Human
uaaaaaacacu

SEQ ID NO: 1226195 - RNA, 23 nt, Human
guuugugcugguguaugugugaa

SEQ ID NO: 1226196 - RNA, 14 nt, Human
guuucuuuguaaug

SEQ ID NO: 1226197 - RNA, 17 nt, Human
guuucuuuguaaugaaa

SEQ ID NO: 1226198 - RNA, 18 nt, Human
guuucuuuguaaugaaaa

SEQ ID NO: 1226199 - RNA, 16 nt, Human
guuuccuuauauuaug

SEQ ID NO: 1226200 - RNA, 20 nt, Human
guuuagcuggaaaaguaugu

SEQ ID NO: 1226201 - RNA, 16 nt, Human
guuuaguaaucauauu

SEQ ID NO: 1226202 - RNA, 14 nt, Human
guuuagucuugucu

SEQ ID NO: 1226203 - RNA, 18 nt, Human
guuuagucuugucucaga

SEQ ID NO: 1226204 - RNA, 23 nt, Human
ucacaggacagcccuucuuucca

SEQ ID NO: 1226205 - RNA, 11 nt, Human
ucaaccucauc

SEQ ID NO: 1226206 - RNA, 19 nt, Human
ucaacuccaaacugacucu

SEQ ID NO: 1226207 - RNA, 16 nt, Human
uaucugaggaauucug

SEQ ID NO: 1226208 - RNA, 17 nt, Human
uaucugaagucagaucu

SEQ ID NO: 1226209 - RNA, 18 nt, Human
uaucugaagucagaucug

SEQ ID NO: 1226210 - RNA, 15 nt, Human
uaucugaggaauucu

SEQ ID NO: 1226211 - RNA, 22 nt, Human
uauuucuaugaaauauuauguu

SEQ ID NO: 1226212 - RNA, 13 nt, Human
uauuuauuacugu

SEQ ID NO: 1226213 - RNA, 18 nt, Human
ucaaacuacauauuguaa

SEQ ID NO: 1226214 - RNA, 17 nt, Human
uauuuuuuucugaaauu

SEQ ID NO: 1226215 - RNA, 16 nt, Human
uauuuuuuucugaaau

SEQ ID NO: 1226216 - RNA, 22 nt, Human
uauuuuuuucugaauuauuuuc

SEQ ID NO: 1226217 - RNA, 17 nt, Human
uauuuuauguugcauag

SEQ ID NO: 1226218 - RNA, 12 nt, Human
uauuuuaugauc

SEQ ID NO: 1226219 - RNA, 15 nt, Human
uauuuuauguugcau

SEQ ID NO: 1226220 - RNA, 16 nt, Human
uauuuuauguugcaua

SEQ ID NO: 1226221 - RNA, 17 nt, Human
ucacuugucaauaaaau

SEQ ID NO: 1226222 - RNA, 22 nt, Human
ucagaguugaugguuguacaua

SEQ ID NO: 1226223 - RNA, 21 nt, Human
ucagcaaacaggaucaguuaa

SEQ ID NO: 1226224 - RNA, 18 nt, Human
ucacucuccauuuaauaa

SEQ ID NO: 1226225 - RNA, 11 nt, Human
ucccuaauaaa

SEQ ID NO: 1226226 - RNA, 12 nt, Human
ucccuaauaaag

SEQ ID NO: 1226227 - RNA, 13 nt, Human
ucccuaauaaagc

SEQ ID NO: 1226228 - RNA, 14 nt, Human
ucccuaauaaagcu

SEQ ID NO: 1226229 - RNA, 14 nt, Human
uccauggcccugcc

SEQ ID NO: 1226230 - RNA, 20 nt, Human
ucccaaguaacugggauuac

SEQ ID NO: 1226231 - RNA, 21 nt, Human
ucccaaguaacugggauuaca

SEQ ID NO: 1226232 - RNA, 20 nt, Human
uccaagcauuuagauguaua

SEQ ID NO: 1226233 - RNA, 15 nt, Human
uccaagcaaauguga

SEQ ID NO: 1226234 - RNA, 14 nt, Human
uccaccucaacucc

SEQ ID NO: 1226235 - RNA, 15 nt, Human
uccaccgcagaagga

SEQ ID NO: 1226236 - RNA, 16 nt, Human
uccaccgcagaaggaa

SEQ ID NO: 1226237 - RNA, 17 nt, Human
uccaccgcagaaggaag

SEQ ID NO: 1226238 - RNA, 18 nt, Human
uccaccgcagaaggaagg

SEQ ID NO: 1226239 - RNA, 20 nt, Human
uccagcagauuauucacuga

SEQ ID NO: 1226240 - RNA, 22 nt, Human
uccagcagauuauucacugauu

SEQ ID NO: 1226241 - RNA, 22 nt, Human
uccagcagauuuccagccuucu

SEQ ID NO: 1226242 - RNA, 17 nt, Human
uccagauccuggaaauc

SEQ ID NO: 1226243 - RNA, 16 nt, Human
uccagauccuggaaau

SEQ ID NO: 1226244 - RNA, 17 nt, Human
uccaagcauuuagaugu

SEQ ID NO: 1226245 - RNA, 13 nt, Human
uccaagcaaaugu

SEQ ID NO: 1226246 - RNA, 14 nt, Human
uccaagaauuucua

SEQ ID NO: 1226247 - RNA, 23 nt, Human
uccaaacugacucuuaagaagac

SEQ ID NO: 1226248 - RNA, 22 nt, Human
ucauucagauaugauucaaaug

SEQ ID NO: 1226249 - RNA, 13 nt, Human
ucauuauuuuauu

SEQ ID NO: 1226250 - RNA, 14 nt, Human
ucauuauuuuauua

SEQ ID NO: 1226251 - RNA, 15 nt, Human
ucauuauuuuauuau

SEQ ID NO: 1226252 - RNA, 16 nt, Human
ucauuauuuuauuaug

SEQ ID NO: 1226253 - RNA, 18 nt, Human
ucauuauuuuauuaugaa

SEQ ID NO: 1226254 - RNA, 19 nt, Human
ucauuauuuuauuaugaaa

SEQ ID NO: 1226255 - RNA, 22 nt, Human
ucauuauuuuauuaugaaacuu

SEQ ID NO: 1226256 - RNA, 15 nt, Human
ucauaauuauuauuu

SEQ ID NO: 1226257 - RNA, 12 nt, Human
ucaguugcagcc

SEQ ID NO: 1226258 - RNA, 21 nt, Human
ucagcacuuuagaauaugccu

SEQ ID NO: 1226259 - RNA, 20 nt, Human
ucugaggaauucuguauaga

SEQ ID NO: 1226260 - RNA, 14 nt, Human
ucugaaauuuccug

SEQ ID NO: 1226261 - RNA, 13 nt, Human
ucucuucagucuc

SEQ ID NO: 1226262 - RNA, 17 nt, Human
ucucuucagucucuaua

SEQ ID NO: 1226263 - RNA, 11 nt, Human
ucucugcaggu

SEQ ID NO: 1226264 - RNA, 19 nt, Human
ucucuucugaauaaagcaa

SEQ ID NO: 1226265 - RNA, 20 nt, Human
ucucuucugaauaaagcaau

SEQ ID NO: 1226266 - RNA, 19 nt, Human
ucucuaggaaauauuuauu

SEQ ID NO: 1226267 - RNA, 13 nt, Human
ucucuaggaaaua

SEQ ID NO: 1226268 - RNA, 14 nt, Human
ucucuauaccaaua

SEQ ID NO: 1226269 - RNA, 16 nt, Human
ucucuauaccaauaaa

SEQ ID NO: 1226270 - RNA, 17 nt, Human
ucucuauaccaauaaag

SEQ ID NO: 1226271 - RNA, 19 nt, Human
ucucuauaccaauaaagug

SEQ ID NO: 1226272 - RNA, 15 nt, Human
ucucucgugaguaua

SEQ ID NO: 1226273 - RNA, 21 nt, Human
ucucaguugcagcccugcugc

SEQ ID NO: 1226274 - RNA, 14 nt, Human
ucucaguugcagcc

SEQ ID NO: 1226275 - RNA, 16 nt, Human
ucucaaacuccugacc

SEQ ID NO: 1226276 - RNA, 15 nt, Human
ucucaacuccaaacu

SEQ ID NO: 1226277 - RNA, 21 nt, Human
ucuacacuaagagagaaugag

SEQ ID NO: 1226278 - RNA, 16 nt, Human
ucuaaauucuuucauu

SEQ ID NO: 1226279 - RNA, 10 nt, Human
ucggaccagc

SEQ ID NO: 1226280 - RNA, 22 nt, Human
ugaacuuguaaaggaauuuaaa

SEQ ID NO: 1226281 - RNA, 22 nt, Human
ugaaguccaagcauuuagaugu

SEQ ID NO: 1226282 - RNA, 21 nt, Human
ugaaguccaagcauuuagaug

SEQ ID NO: 1226283 - RNA, 19 nt, Human
ugaagagguuuuaaagcuu

SEQ ID NO: 1226284 - RNA, 19 nt, Human
ugaaauggacuuuuguaca

SEQ ID NO: 1226285 - RNA, 13 nt, Human
ugaaagauucaau

SEQ ID NO: 1226286 - RNA, 16 nt, Human
ucuuuuuucaaaagaa

SEQ ID NO: 1226287 - RNA, 17 nt, Human
ucuuucacauuuaaaua

SEQ ID NO: 1226288 - RNA, 15 nt, Human
ucuugccuuuuucau

SEQ ID NO: 1226289 - RNA, 18 nt, Human
ucuuuaaaaaaaaaauug

SEQ ID NO: 1226290 - RNA, 19 nt, Human
ucuuuaaaaaaaaaauugg

SEQ ID NO: 1226291 - RNA, 16 nt, Human
ucuuuaaaaggaaaga

SEQ ID NO: 1226292 - RNA, 18 nt, Human
ucuuuaaaaggaaagaaa

SEQ ID NO: 1226293 - RNA, 19 nt, Human
ucuugucucagauuuuauu

SEQ ID NO: 1226294 - RNA, 14 nt, Human
ucuguaaaacuaag

SEQ ID NO: 1226295 - RNA, 21 nt, Human
ucuguaaaacuaagaaacuua

SEQ ID NO: 1226296 - RNA, 22 nt, Human
ucuguuuuauaauuuugugaag

SEQ ID NO: 1226297 - RNA, 22 nt, Human
ugccuaaguccaguguuucuuu

SEQ ID NO: 1226298 - RNA, 23 nt, Human
ugccuaaggacuucuuuaauuuu

SEQ ID NO: 1226299 - RNA, 15 nt, Human
ugccuggcggggugg

SEQ ID NO: 1226300 - RNA, 21 nt, Human
ugcgcccuuaacugcauccag

SEQ ID NO: 1226301 - RNA, 22 nt, Human
ugccuucucaacuccaaacuga

SEQ ID NO: 1226302 - RNA, 14 nt, Human
ugcuaguaauugga

SEQ ID NO: 1226303 - RNA, 14 nt, Human
ugcucaggagcccu

SEQ ID NO: 1226304 - RNA, 11 nt, Human
ugcucauggaa

SEQ ID NO: 1226305 - RNA, 15 nt, Human
ugcucaggagcccug

SEQ ID NO: 1226306 - RNA, 15 nt, Human
ugcugaguuugugcu

SEQ ID NO: 1226307 - RNA, 17 nt, Human
ugcugaguuugugcugg

SEQ ID NO: 1226308 - RNA, 21 nt, Human
ugcauccagccuggggcugag

SEQ ID NO: 1226309 - RNA, 21 nt, Human
ugcauuauauuuauuacugua

SEQ ID NO: 1226310 - RNA, 20 nt, Human
ugcauuauauuuauuacugu

SEQ ID NO: 1226311 - RNA, 15 nt, Human
ugcauuauauuuauu

SEQ ID NO: 1226312 - RNA, 20 nt, Human
ugccaggcuggagugcagug

SEQ ID NO: 1226313 - RNA, 15 nt, Human
ugcacaucaaaauau

SEQ ID NO: 1226314 - RNA, 22 nt, Human
ugcacggugaauggcuuuguau

SEQ ID NO: 1226315 - RNA, 23 nt, Human
ugcacggugaauggcuuuguaua

SEQ ID NO: 1226316 - RNA, 15 nt, Human
uggcauaacauaaau

SEQ ID NO: 1226317 - RNA, 17 nt, Human
uggcauaacauaaaucu

SEQ ID NO: 1226318 - RNA, 19 nt, Human
uggagaugaggccagacca

SEQ ID NO: 1226319 - RNA, 22 nt, Human
uggagaugaggccagaccaugg

SEQ ID NO: 1226320 - RNA, 24 nt, Human
uggagaugaggccagaccauggac

SEQ ID NO: 1226321 - RNA, 13 nt, Human
uggagauguuuag

SEQ ID NO: 1226322 - RNA, 17 nt, Human
ugcuucuguuuuauaau

SEQ ID NO: 1226323 - RNA, 14 nt, Human
ugcuucuguuuuau

SEQ ID NO: 1226324 - RNA, 12 nt, Human
ugcuuucagaua

SEQ ID NO: 1226325 - RNA, 16 nt, Human
ugcuuucagauacugg

SEQ ID NO: 1226326 - RNA, 17 nt, Human
ugcuuucagauacugga

SEQ ID NO: 1226327 - RNA, 20 nt, Human
ugcuuucagauacuggauug

SEQ ID NO: 1226328 - RNA, 21 nt, Human
ugcuuucagauacuggauugu

SEQ ID NO: 1226329 - RNA, 19 nt, Human
uggaacccuaaauaauaaa

SEQ ID NO: 1226330 - RNA, 16 nt, Human
uggaauacucuuauau

SEQ ID NO: 1226331 - RNA, 18 nt, Human
uggcgcgaucucagcuca

SEQ ID NO: 1226332 - RNA, 17 nt, Human
ugggaauggaggggcag

SEQ ID NO: 1226333 - RNA, 19 nt, Human
ugggaauggaggggcagag

SEQ ID NO: 1226334 - RNA, 21 nt, Human
ugggacagucaccucauggaa

SEQ ID NO: 1226335 - RNA, 20 nt, Human
ugggacagucaccucaugga

SEQ ID NO: 1226336 - RNA, 18 nt, Human
ugggacagucaccucaug

SEQ ID NO: 1226337 - RNA, 23 nt, Human
ugggaauggaggggcagagccag

SEQ ID NO: 1226338 - RNA, 15 nt, Human
uggcuguacccagga

SEQ ID NO: 1226339 - RNA, 14 nt, Human
uggcuuuguauaga

SEQ ID NO: 1226340 - RNA, 22 nt, Human
uggcuuuguauagaaccucuuu

SEQ ID NO: 1226341 - RNA, 20 nt, Human
ugggacauuugcucauggaa

SEQ ID NO: 1226342 - RNA, 19 nt, Human
ugggacauuugcucaugga

SEQ ID NO: 1226343 - RNA, 16 nt, Human
ugggagcuuuuguaga

SEQ ID NO: 1226344 - RNA, 13 nt, Human
ugggcauucaaau

SEQ ID NO: 1226345 - RNA, 19 nt, Human
ugggguggggggggugcug

SEQ ID NO: 1226346 - RNA, 17 nt, Human
uggguagacacacauga

SEQ ID NO: 1226347 - RNA, 21 nt, Human
ugggguggggggggugcuggg

SEQ ID NO: 1226348 - RNA, 22 nt, Human
ugggguggggggggugcugggc

SEQ ID NO: 1226349 - RNA, 23 nt, Human
uggguaggaaagaggaagcaaau

SEQ ID NO: 1226350 - RNA, 12 nt, Human
uguuuguuuagu

SEQ ID NO: 1226351 - RNA, 18 nt, Human
uguuuuaaaaugagaaau

SEQ ID NO: 1226352 - RNA, 21 nt, Human
uguuuguuuagucuugucuca

SEQ ID NO: 1226353 - RNA, 16 nt, Human
uguuucuauuuuuuga

SEQ ID NO: 1226354 - RNA, 22 nt, Human
uguuucuauuuuuugaaaagca

SEQ ID NO: 1226355 - RNA, 23 nt, Human
uguuuuaaaaugagaaaucuaaa

SEQ ID NO: 1226356 - RNA, 19 nt, Human
uuaaaagaaugauuaugaa

SEQ ID NO: 1226357 - RNA, 12 nt, Human
uuaacauguuaa

SEQ ID NO: 1226358 - RNA, 18 nt, Human
uuaacauguuaaaccaug

SEQ ID NO: 1226359 - RNA, 19 nt, Human
uuaacauguuaaaccaugg

SEQ ID NO: 1226360 - RNA, 19 nt, Human
uuaaauagcuuuuuucucu

SEQ ID NO: 1226361 - RNA, 20 nt, Human
uuaaagcuuccauuguuguc

SEQ ID NO: 1226362 - RNA, 15 nt, Human
uuaaagcuuccauug

SEQ ID NO: 1226363 - RNA, 16 nt, Human
uuaauagguuuggaca

SEQ ID NO: 1226364 - RNA, 20 nt, Human
uuaauaauuauaugcuauuu

SEQ ID NO: 1226365 - RNA, 23 nt, Human
uuaauaauuauaugcuauuucua

SEQ ID NO: 1226366 - RNA, 18 nt, Human
uuaauaauguuucaaaca

SEQ ID NO: 1226367 - RNA, 18 nt, Human
uuaauaauuauaugcuau

SEQ ID NO: 1226368 - RNA, 21 nt, Human
uuaauagguuuggacaaaaug

SEQ ID NO: 1226369 - RNA, 20 nt, Human
uuacauuuguauaaaauaau

SEQ ID NO: 1226370 - RNA, 21 nt, Human
uuaccacuuguguuuugcaag

SEQ ID NO: 1226371 - RNA, 16 nt, Human
uuacggaacucaaaua

SEQ ID NO: 1226372 - RNA, 15 nt, Human
uuacaauaguucugu

SEQ ID NO: 1226373 - RNA, 17 nt, Human
uuacaauaguucugugg

SEQ ID NO: 1226374 - RNA, 23 nt, Human
uuacauggcuggagcuagaauuu

SEQ ID NO: 1226375 - RNA, 22 nt, Human
uuacauggcuggagcuagaauu

SEQ ID NO: 1226376 - RNA, 15 nt, Human
uuacauuuguauaaa

SEQ ID NO: 1226377 - RNA, 14 nt, Human
uuacauuuguauaa

SEQ ID NO: 1226378 - RNA, 18 nt, Human
uguuaaaccaugggauaa

SEQ ID NO: 1226379 - RNA, 20 nt, Human
uguuaaaccaugggauaaau

SEQ ID NO: 1226380 - RNA, 21 nt, Human
uguuaaaccaugggauaaaug

SEQ ID NO: 1226381 - RNA, 23 nt, Human
uguuaaaccaugggauaaaugcc

SEQ ID NO: 1226382 - RNA, 21 nt, Human
uguucaagcgauucuccugcc

SEQ ID NO: 1226383 - RNA, 16 nt, Human
uguucacaauauauuu

SEQ ID NO: 1226384 - RNA, 12 nt, Human
uguuauaaucuu

SEQ ID NO: 1226385 - RNA, 16 nt, Human
uguuagaucuaguuca

SEQ ID NO: 1226386 - RNA, 17 nt, Human
ugugugaagugagugag

SEQ ID NO: 1226387 - RNA, 22 nt, Human
uguguuuaggaacuacugagga

SEQ ID NO: 1226388 - RNA, 20 nt, Human
uguugaaacggaugauuucu

SEQ ID NO: 1226389 - RNA, 21 nt, Human
uguugaaacggaugauuucua

SEQ ID NO: 1226390 - RNA, 22 nt, Human
uguugaaacggaugauuucuau

SEQ ID NO: 1226391 - RNA, 23 nt, Human
uguugaaacggaugauuucuaug

SEQ ID NO: 1226392 - RNA, 12 nt, Human
uguucuauagcu

SEQ ID NO: 1226393 - RNA, 13 nt, Human
uguucauaaauaa

SEQ ID NO: 1226394 - RNA, 14 nt, Human
uguucauuccucca

SEQ ID NO: 1226395 - RNA, 15 nt, Human
uguucauuccuccag

SEQ ID NO: 1226396 - RNA, 16 nt, Human
uguucauuccuccagg

SEQ ID NO: 1226397 - RNA, 21 nt, Human
uguuggagaagaacugaaauc

SEQ ID NO: 1226398 - RNA, 19 nt, Human
uguugaagagguuuuaaag

SEQ ID NO: 1226399 - RNA, 14 nt, Human
uguuguuuguuuag

SEQ ID NO: 1226400 - RNA, 14 nt, Human
ugugcgcuaaacuu

SEQ ID NO: 1226401 - RNA, 19 nt, Human
ugugcgcuaaacuuuucug

SEQ ID NO: 1226402 - RNA, 22 nt, Human
ugugcgcuaaacuuuucugaua

SEQ ID NO: 1226403 - RNA, 23 nt, Human
ugugcgcuaaacuuuucugauag

SEQ ID NO: 1226404 - RNA, 14 nt, Human
ugucuuuuuucuaa

SEQ ID NO: 1226405 - RNA, 13 nt, Human
ugugaaacauguu

SEQ ID NO: 1226406 - RNA, 16 nt, Human
ugugaaucauuuuacc

SEQ ID NO: 1226407 - RNA, 13 nt, Human
ugugauauaagug

SEQ ID NO: 1226408 - RNA, 19 nt, Human
uguauacuauaguaccagu

SEQ ID NO: 1226409 - RNA, 15 nt, Human
uguauacuauaguac

SEQ ID NO: 1226410 - RNA, 17 nt, Human
uguauacuauaguacca

SEQ ID NO: 1226411 - RNA, 16 nt, Human
uguauagaaccucuuu

SEQ ID NO: 1226412 - RNA, 14 nt, Human
uguauacuauagua

SEQ ID NO: 1226413 - RNA, 16 nt, Human
uguaugcacaguaaaa

SEQ ID NO: 1226414 - RNA, 16 nt, Human
uguauuguauauuaca

SEQ ID NO: 1226415 - RNA, 18 nt, Human
uguauuguauauuacaau

SEQ ID NO: 1226416 - RNA, 13 nt, Human
uguacucaauuuu

SEQ ID NO: 1226417 - RNA, 17 nt, Human
uguagauaauacaguuc

SEQ ID NO: 1226418 - RNA, 22 nt, Human
uuguauucaaaaauuaucuaua

SEQ ID NO: 1226419 - RNA, 14 nt, Human
uuguauucagaguu

SEQ ID NO: 1226420 - RNA, 21 nt, Human
uuguauucagaguugaugguu

SEQ ID NO: 1226421 - RNA, 16 nt, Human
uuguaaaggaauuuaa

SEQ ID NO: 1226422 - RNA, 15 nt, Human
uuggcuuuucugauc

SEQ ID NO: 1226423 - RNA, 19 nt, Human
uuggcuuuucugauccagu

SEQ ID NO: 1226424 - RNA, 22 nt, Human
uuggcuuuucugauccaguuuu

SEQ ID NO: 1226425 - RNA, 12 nt, Human
uugguaaaccuu

SEQ ID NO: 1226426 - RNA, 14 nt, Human
uugguaaaccuuuu

SEQ ID NO: 1226427 - RNA, 12 nt, Human
uuggaaaucuuu

SEQ ID NO: 1226428 - RNA, 15 nt, Human
uuggaaaucuuuaaa

SEQ ID NO: 1226429 - RNA, 21 nt, Human
uuggaccaaaaaccaguauug

SEQ ID NO: 1226430 - RNA, 16 nt, Human
uugccacccucaugcu

SEQ ID NO: 1226431 - RNA, 13 nt, Human
uugccacccucau

SEQ ID NO: 1226432 - RNA, 14 nt, Human
uugcauagaauaaa

SEQ ID NO: 1226433 - RNA, 13 nt, Human
uugaugaagaagu

SEQ ID NO: 1226434 - RNA, 12 nt, Human
uugaugaagaag

SEQ ID NO: 1226435 - RNA, 21 nt, Human
uugauuggugauuagguggug

SEQ ID NO: 1226436 - RNA, 15 nt, Human
uugaggacacugaua

SEQ ID NO: 1226437 - RNA, 14 nt, Human
uugaggacacugau

SEQ ID NO: 1226438 - RNA, 13 nt, Human
uugaggacacaug

SEQ ID NO: 1226439 - RNA, 14 nt, Human
uugaggacacaugu

SEQ ID NO: 1226440 - RNA, 15 nt, Human
uugaggacacauguc

SEQ ID NO: 1226441 - RNA, 16 nt, Human
uugaggacacaugucc

SEQ ID NO: 1226442 - RNA, 11 nt, Human
uugaggacaca

SEQ ID NO: 1226443 - RNA, 21 nt, Human
uugaccugccucccuucaugc

SEQ ID NO: 1226444 - RNA, 23 nt, Human
uugaccugccucccuucaugcau

SEQ ID NO: 1226445 - RNA, 22 nt, Human
uugaccugccucccuucaugca

SEQ ID NO: 1226446 - RNA, 14 nt, Human
uucugagcauuuaa

SEQ ID NO: 1226447 - RNA, 21 nt, Human
uugaaacggaugauuucuaug

SEQ ID NO: 1226448 - RNA, 22 nt, Human
uugaaacggaugauuucuaugc

SEQ ID NO: 1226449 - RNA, 15 nt, Human
uucuauauuuucauu

SEQ ID NO: 1226450 - RNA, 16 nt, Human
uucuauauuuucauuc

SEQ ID NO: 1226451 - RNA, 18 nt, Human
uucuauauuuucauucuc

SEQ ID NO: 1226452 - RNA, 21 nt, Human
uucuauauuuucauucuccua

SEQ ID NO: 1226453 - RNA, 11 nt, Human
uucuauauuuu

SEQ ID NO: 1226454 - RNA, 14 nt, Human
uucuauauuuucau

SEQ ID NO: 1226455 - RNA, 17 nt, Human
uucuaugcugaguuugu

SEQ ID NO: 1226456 - RNA, 18 nt, Human
uucuccauggcccugcca

SEQ ID NO: 1226457 - RNA, 23 nt, Human
uucucuccucuccccaugauguu

SEQ ID NO: 1226458 - RNA, 17 nt, Human
uucucugauacagaaaa

SEQ ID NO: 1226459 - RNA, 16 nt, Human
uucucugauacagaaa

SEQ ID NO: 1226460 - RNA, 15 nt, Human
uucucugauacagaa

SEQ ID NO: 1226461 - RNA, 14 nt, Human
uucucugauacaga

SEQ ID NO: 1226462 - RNA, 15 nt, Human
uuccuucccugcugu

SEQ ID NO: 1226463 - RNA, 19 nt, Human
uuccuucccugcugugaaa

SEQ ID NO: 1226464 - RNA, 21 nt, Human
uuccuucccugcugugaaaga

SEQ ID NO: 1226465 - RNA, 20 nt, Human
uuccuagguauaauucacau

SEQ ID NO: 1226466 - RNA, 13 nt, Human
uucccuuuccuga

SEQ ID NO: 1226467 - RNA, 14 nt, Human
uucccuucaucugg

SEQ ID NO: 1226468 - RNA, 15 nt, Human
uucccuucaucugga

SEQ ID NO: 1226469 - RNA, 16 nt, Human
uucccuucaucuggaa

SEQ ID NO: 1226470 - RNA, 15 nt, Human
uucaucuaggauuuu

SEQ ID NO: 1226471 - RNA, 22 nt, Human
uucaguuuauuugaaccaauaa

SEQ ID NO: 1226472 - RNA, 16 nt, Human
uucaugaccaguaaag

SEQ ID NO: 1226473 - RNA, 11 nt, Human
uucccaaaagc

SEQ ID NO: 1226474 - RNA, 21 nt, Human
uucccaaaagcccauucauuc

SEQ ID NO: 1226475 - RNA, 11 nt, Human
uucacugauuu

SEQ ID NO: 1226476 - RNA, 15 nt, Human
uuacgugcucugugg

SEQ ID NO: 1226477 - RNA, 15 nt, Human
uuacuaaaauggacu

SEQ ID NO: 1226478 - RNA, 16 nt, Human
uuacuaaaauggacug

SEQ ID NO: 1226479 - RNA, 17 nt, Human
uuacuaaaauggacugu

SEQ ID NO: 1226480 - RNA, 18 nt, Human
uuacuaaaauggacugug

SEQ ID NO: 1226481 - RNA, 19 nt, Human
uucaaugccccugaauuua

SEQ ID NO: 1226482 - RNA, 13 nt, Human
uuuuaugauccag

SEQ ID NO: 1226483 - RNA, 15 nt, Human
uuuuaugauccagca

SEQ ID NO: 1226484 - RNA, 13 nt, Human
uuuuccugaaaac

SEQ ID NO: 1226485 - RNA, 16 nt, Human
uuuuaugauacuugaa

SEQ ID NO: 1226486 - RNA, 20 nt, Human
uuuuaugauacuugaaaauu

SEQ ID NO: 1226487 - RNA, 10 nt, Human
uuuuauauuu

SEQ ID NO: 1226488 - RNA, 20 nt, Human
uuuuauaugcuucuguuuua

SEQ ID NO: 1226489 - RNA, 15 nt, Human
uuuuauaugcuucug

SEQ ID NO: 1226490 - RNA, 14 nt, Human
uuuuacuguacaga

SEQ ID NO: 1226491 - RNA, 21 nt, Human
uuuuaauuugguuuucacauu

SEQ ID NO: 1226492 - RNA, 17 nt, Human
uuuuaauuugguuuuca

SEQ ID NO: 1226493 - RNA, 22 nt, Human
uuuuacauaaauuuaguauuuu

SEQ ID NO: 1226494 - RNA, 13 nt, Human
uuuuacauuaaau

SEQ ID NO: 1226495 - RNA, 19 nt, Human
uuuguuguuuguuuagucu

SEQ ID NO: 1226496 - RNA, 15 nt, Human
uuuuaaaaugagaaa

SEQ ID NO: 1226497 - RNA, 22 nt, Human
uuuuaaaaugagaaaucuaaaa

SEQ ID NO: 1226498 - RNA, 12 nt, Human
uuuguguuagag

SEQ ID NO: 1226499 - RNA, 12 nt, Human
uuuguuguuugu

SEQ ID NO: 1226500 - RNA, 14 nt, Human
uuuguuguuuguuu

SEQ ID NO: 1226501 - RNA, 21 nt, Human
uuuguauaaaauaauuuuuau

SEQ ID NO: 1226502 - RNA, 11 nt, Human
uuuguauagaa

SEQ ID NO: 1226503 - RNA, 16 nt, Human
uuuggaaaucuuuaaa

SEQ ID NO: 1226504 - RNA, 18 nt, Human
uuuggaacccuaaauaau

SEQ ID NO: 1226505 - RNA, 11 nt, Human
uuugcagcuuu

SEQ ID NO: 1226506 - RNA, 19 nt, Human
uuugcauaacguauaaaag

SEQ ID NO: 1226507 - RNA, 23 nt, Human
uuugcauaacguauaaaagccug

SEQ ID NO: 1226508 - RNA, 22 nt, Human
uuucuuacugucuuuuuucuaa

SEQ ID NO: 1226509 - RNA, 21 nt, Human
uuucagauaaucacaauacau

SEQ ID NO: 1226510 - RNA, 15 nt, Human
uuucagcagcugcag

SEQ ID NO: 1226511 - RNA, 15 nt, Human
uuucagauaaucaca

SEQ ID NO: 1226512 - RNA, 17 nt, Human
uuucuaggacugaauua

SEQ ID NO: 1226513 - RNA, 16 nt, Human
uuucuaggacugaauu

SEQ ID NO: 1226514 - RNA, 14 nt, Human
uuucucuuucguua

SEQ ID NO: 1226515 - RNA, 17 nt, Human
uuuauuggcuuuucuga

SEQ ID NO: 1226516 - RNA, 21 nt, Human
uuuauuggcuuuucugaucca

SEQ ID NO: 1226517 - RNA, 14 nt, Human
uuuaugcauauuau

SEQ ID NO: 1226518 - RNA, 13 nt, Human
uuuaugauccagc

SEQ ID NO: 1226519 - RNA, 18 nt, Human
uuguauuguauauuacaa

SEQ ID NO: 1226520 - RNA, 19 nt, Human
uuguauuguauauuacaau

SEQ ID NO: 1226521 - RNA, 17 nt, Human
uuuacauggcuggagcu

SEQ ID NO: 1226522 - RNA, 17 nt, Human
uuuacaauaguucugug

SEQ ID NO: 1226523 - RNA, 22 nt, Human
uuuacauggcuggagcuagaau

SEQ ID NO: 1226524 - RNA, 12 nt, Human
uuuagaaacaca

SEQ ID NO: 1226525 - RNA, 20 nt, Human
uuuagaaacacaacuauauu

SEQ ID NO: 1226526 - RNA, 17 nt, Human
uuuagaauaugccuugu

SEQ ID NO: 1226527 - RNA, 12 nt, Human
uuuuuucugaaa

SEQ ID NO: 1226528 - RNA, 20 nt, Human
uuuuuuauacaggaugauga

SEQ ID NO: 1226529 - RNA, 20 nt, Human
uuuugaaaagcagacauuuu

SEQ ID NO: 1226530 - RNA, 13 nt, Human
uuuuuucuuacug

SEQ ID NO: 1226531 - RNA, 12 nt, Human
ggagugcagugg

SEQ ID NO: 1226532 - RNA, 12 nt, Human
ggauaaaugcca

SEQ ID NO: 1226533 - RNA, 22 nt, Human
ggauaauaaggaaaaguuuaau

SEQ ID NO: 1226534 - RNA, 14 nt, Human
ggcacacaccacca

SEQ ID NO: 1226535 - RNA, 17 nt, Human
ggcaauuaauuccuuca

SEQ ID NO: 1226536 - RNA, 20 nt, Human
ggcaauuaauuccuucagca

SEQ ID NO: 1226537 - RNA, 19 nt, Human
ggcaauuaauuccuucagc

SEQ ID NO: 1226538 - RNA, 18 nt, Human
ggaggaaggaggacccag

SEQ ID NO: 1226539 - RNA, 12 nt, Human
ggaggacccagg

SEQ ID NO: 1226540 - RNA, 14 nt, Human
ggaggacccaggac

SEQ ID NO: 1226541 - RNA, 13 nt, Human
ggaggacccagga

SEQ ID NO: 1226542 - RNA, 17 nt, Human
ggaggugagaccaccuc

SEQ ID NO: 1226543 - RNA, 18 nt, Human
ggccaggcuugucucgaa

SEQ ID NO: 1226544 - RNA, 16 nt, Human
ggcacuggcgaggaga

SEQ ID NO: 1226545 - RNA, 23 nt, Human
ggccccacccucguggacaccug

SEQ ID NO: 1226546 - RNA, 16 nt, Human
aaaacauuccauccuu

SEQ ID NO: 1226547 - RNA, 15 nt, Human
aaaacccagauaaag

SEQ ID NO: 1226548 - RNA, 21 nt, Human
gggacauuugcucauggaauu

SEQ ID NO: 1226549 - RNA, 20 nt, Human
gggacauuugcucauggaau

SEQ ID NO: 1226550 - RNA, 15 nt, Human
aaaaauauauacuaa

SEQ ID NO: 1226551 - RNA, 14 nt, Human
aaaaauauuuuaug

SEQ ID NO: 1226552 - RNA, 22 nt, Human
gggaggcucuggagcccacugu

SEQ ID NO: 1226553 - RNA, 14 nt, Human
aaaagcagacauuu

SEQ ID NO: 1226554 - RNA, 13 nt, Human
aaaagcagacauu

SEQ ID NO: 1226555 - RNA, 19 nt, Human
aaaaguauguuagugcaaa

SEQ ID NO: 1226556 - RNA, 21 nt, Human
gggccaggcugggucgcccug

SEQ ID NO: 1226557 - RNA, 14 nt, Human
gggccaggcugggu

SEQ ID NO: 1226558 - RNA, 15 nt, Human
gggccaggcuggguc

SEQ ID NO: 1226559 - RNA, 12 nt, Human
gggcuaccagga

SEQ ID NO: 1226560 - RNA, 15 nt, Human
gggcuaccaggaaag

SEQ ID NO: 1226561 - RNA, 13 nt, Human
ggggccaggcugg

SEQ ID NO: 1226562 - RNA, 20 nt, Human
aaacaagcacuaaacaaaga

SEQ ID NO: 1226563 - RNA, 15 nt, Human
aaacacccucacacu

SEQ ID NO: 1226564 - RNA, 18 nt, Human
ggguggggggggugcugg

SEQ ID NO: 1226565 - RNA, 16 nt, Human
aaagaaugauuaugaa

SEQ ID NO: 1226566 - RNA, 23 nt, Human
gguaugaacuugaggacacaugu

SEQ ID NO: 1226567 - RNA, 22 nt, Human
gguaugaacuugaggacacaug

SEQ ID NO: 1226568 - RNA, 19 nt, Human
aaagcaggcagaacucauc

SEQ ID NO: 1226569 - RNA, 17 nt, Human
aaagcaggcagaacuca

SEQ ID NO: 1226570 - RNA, 12 nt, Human
aaagcaucccuc

SEQ ID NO: 1226571 - RNA, 15 nt, Human
aaagcaucccucacc

SEQ ID NO: 1226572 - RNA, 17 nt, Human
aaagcaucccucaccca

SEQ ID NO: 1226573 - RNA, 24 nt, Human
aaagcaucccucacccauccuaga

SEQ ID NO: 1226574 - RNA, 20 nt, Human
ggugcugggccccugccucu

SEQ ID NO: 1226575 - RNA, 13 nt, Human
ggucggaccagcu

SEQ ID NO: 1226576 - RNA, 14 nt, Human
ggucggaccagcuu

SEQ ID NO: 1226577 - RNA, 16 nt, Human
aaagccuguuuaagag

SEQ ID NO: 1226578 - RNA, 18 nt, Human
aaagccuguuuaagagac

SEQ ID NO: 1226579 - RNA, 19 nt, Human
gguuucaccauguuggcca

SEQ ID NO: 1226580 - RNA, 16 nt, Human
aaaguuuguugaaaca

SEQ ID NO: 1226581 - RNA, 16 nt, Human
aaaguugaauuuuaca

SEQ ID NO: 1226582 - RNA, 16 nt, Human
aaaguugaauuuauug

SEQ ID NO: 1226583 - RNA, 22 nt, Human
aaaguugaauuuauuggcuuuu

SEQ ID NO: 1226584 - RNA, 13 nt, Human
aaaguugaauuua

SEQ ID NO: 1226585 - RNA, 16 nt, Human
aaaguuuaauauuaaa

SEQ ID NO: 1226586 - RNA, 19 nt, Human
aaaguuuaauauuaaagcc

SEQ ID NO: 1226587 - RNA, 20 nt, Human
aaaguuuaauauuaaagcca

SEQ ID NO: 1226588 - RNA, 21 nt, Human
aaaguuuaauauuaaagccau

SEQ ID NO: 1226589 - RNA, 22 nt, Human
aaaguuuaauauuaaagccaug

SEQ ID NO: 1226590 - RNA, 20 nt, Human
gguuuggacaaaauggaaua

SEQ ID NO: 1226591 - RNA, 19 nt, Human
aaauaaugaauacauuucc

SEQ ID NO: 1226592 - RNA, 20 nt, Human
aaauaauuuuuauauuugaa

SEQ ID NO: 1226593 - RNA, 18 nt, Human
aaauaauuuuuauauuug

SEQ ID NO: 1226594 - RNA, 21 nt, Human
aaauaauuuuuauauuugaaa

SEQ ID NO: 1226595 - RNA, 18 nt, Human
gcuggagaugaggccaga

SEQ ID NO: 1226596 - RNA, 20 nt, Human
gcuggagaugaggccagacc

SEQ ID NO: 1226597 - RNA, 21 nt, Human
gcuggagaugaggccagacca

SEQ ID NO: 1226598 - RNA, 17 nt, Human
gcucuggagcccacugu

SEQ ID NO: 1226599 - RNA, 17 nt, Human
gcugaauuucccucucu

SEQ ID NO: 1226600 - RNA, 24 nt, Human
gcugaauuucccucucucauaccc

SEQ ID NO: 1226601 - RNA, 15 nt, Human
gcucuggagcccacu

SEQ ID NO: 1226602 - RNA, 16 nt, Human
gcucuggagcccacug

SEQ ID NO: 1226603 - RNA, 15 nt, Human
gcuuuuuuaucaugu

SEQ ID NO: 1226604 - RNA, 18 nt, Human
gcuuuuuuaucaugugaa

SEQ ID NO: 1226605 - RNA, 20 nt, Human
gcuuuuuuaucaugugaaau

SEQ ID NO: 1226606 - RNA, 17 nt, Human
ggaaaccuuccacccag

SEQ ID NO: 1226607 - RNA, 22 nt, Human
gcuuuuuucucugauacagaaa

SEQ ID NO: 1226608 - RNA, 12 nt, Human
gcuuuucugauc

SEQ ID NO: 1226609 - RNA, 15 nt, Human
gcuuuucugauccag

SEQ ID NO: 1226610 - RNA, 16 nt, Human
gcuuuucugauccagu

SEQ ID NO: 1226611 - RNA, 11 nt, Human
gcuuuucugau

SEQ ID NO: 1226612 - RNA, 19 nt, Human
ggaaauucccuucaucugg

SEQ ID NO: 1226613 - RNA, 22 nt, Human
ggaaauucccuucaucuggaac

SEQ ID NO: 1226614 - RNA, 20 nt, Human
ggaaauucccuucaucugga

SEQ ID NO: 1226615 - RNA, 18 nt, Human
ggaaaccuuccacccagu

SEQ ID NO: 1226616 - RNA, 21 nt, Human
ggaaacuaggugcauauuuau

SEQ ID NO: 1226617 - RNA, 20 nt, Human
ggaagaagagaucaggaaga

SEQ ID NO: 1226618 - RNA, 21 nt, Human
ggaagaagagaucaggaagag

SEQ ID NO: 1226619 - RNA, 22 nt, Human
ggaagaagagaucaggaagaga

SEQ ID NO: 1226620 - RNA, 19 nt, Human
gcuuccuggcaauagucaa

SEQ ID NO: 1226621 - RNA, 18 nt, Human
gcuguauuuuaaaagaau

SEQ ID NO: 1226622 - RNA, 13 nt, Human
gcuguauuuuaaa

SEQ ID NO: 1226623 - RNA, 12 nt, Human
gcuguauuuuaa

SEQ ID NO: 1226624 - RNA, 20 nt, Human
gcuggagugcaguggcgcga

SEQ ID NO: 1226625 - RNA, 13 nt, Human
gcuguuuuuuugu

SEQ ID NO: 1226626 - RNA, 14 nt, Human
gcuuaauucaaaua

SEQ ID NO: 1226627 - RNA, 15 nt, Human
gcuuaauucaaauaa

SEQ ID NO: 1226628 - RNA, 16 nt, Human
gcuucaaauuguaagc

SEQ ID NO: 1226629 - RNA, 22 nt, Human
gccaugugcuaguaauuggaaa

SEQ ID NO: 1226630 - RNA, 24 nt, Human
gccaucaauaaaaaauuaugacau

SEQ ID NO: 1226631 - RNA, 17 nt, Human
gccccugccucucugca

SEQ ID NO: 1226632 - RNA, 18 nt, Human
gccccugccucucugcag

SEQ ID NO: 1226633 - RNA, 15 nt, Human
gccccugccucucug

SEQ ID NO: 1226634 - RNA, 16 nt, Human
gccccugccucucugc

SEQ ID NO: 1226635 - RNA, 20 nt, Human
gccccacccucguggacacc

SEQ ID NO: 1226636 - RNA, 21 nt, Human
gccccacccucguggacaccu

SEQ ID NO: 1226637 - RNA, 22 nt, Human
gccccacccucguggacaccug

SEQ ID NO: 1226638 - RNA, 23 nt, Human
gccccacccucguggacaccugc

SEQ ID NO: 1226639 - RNA, 16 nt, Human
gcccauucauuccauu

SEQ ID NO: 1226640 - RNA, 19 nt, Human
gcccauucauuccauucug

SEQ ID NO: 1226641 - RNA, 23 nt, Human
gcccauucauuccauucuggaag

SEQ ID NO: 1226642 - RNA, 16 nt, Human
gccauaugaaaaggcu

SEQ ID NO: 1226643 - RNA, 23 nt, Human
gcguugaaauuguaauuauaucu

SEQ ID NO: 1226644 - RNA, 24 nt, Human
gcguugaaauuguaauuauaucug

SEQ ID NO: 1226645 - RNA, 18 nt, Human
gcuaauuuugaaaaacug

SEQ ID NO: 1226646 - RNA, 18 nt, Human
gcuacuguaaggcaauca

SEQ ID NO: 1226647 - RNA, 19 nt, Human
gcuacuguaaggcaaucau

SEQ ID NO: 1226648 - RNA, 12 nt, Human
gcgugaucucag

SEQ ID NO: 1226649 - RNA, 15 nt, Human
gcgugaucucagcuc

SEQ ID NO: 1226650 - RNA, 16 nt, Human
gcgugaucucagcuca

SEQ ID NO: 1226651 - RNA, 23 nt, Human
gcggaggaaggaggacccaggac

SEQ ID NO: 1226652 - RNA, 19 nt, Human
gcgagauaccccaccuccc

SEQ ID NO: 1226653 - RNA, 23 nt, Human
gcgauucuccugccucagccucc

SEQ ID NO: 1226654 - RNA, 16 nt, Human
gccuccaacccuagca

SEQ ID NO: 1226655 - RNA, 20 nt, Human
gccuccaacccuagcaaaag

SEQ ID NO: 1226656 - RNA, 14 nt, Human
gagauguagccccu

SEQ ID NO: 1226657 - RNA, 15 nt, Human
gacugaaaauauugu

SEQ ID NO: 1226658 - RNA, 19 nt, Human
gacugaaaauauuguuuua

SEQ ID NO: 1226659 - RNA, 21 nt, Human
gacuggguaggaaagaggaag

SEQ ID NO: 1226660 - RNA, 12 nt, Human
gacuggugacug

SEQ ID NO: 1226661 - RNA, 15 nt, Human
gacuggugacugauu

SEQ ID NO: 1226662 - RNA, 18 nt, Human
gacuggugacugauucuu

SEQ ID NO: 1226663 - RNA, 14 nt, Human
gacucaaaccaaau

SEQ ID NO: 1226664 - RNA, 16 nt, Human
gacucuuaagaagacu

SEQ ID NO: 1226665 - RNA, 18 nt, Human
gacucuuaagaagacugc

SEQ ID NO: 1226666 - RNA, 17 nt, Human
gacucuuaagaagacug

SEQ ID NO: 1226667 - RNA, 23 nt, Human
gaaugagagacacacugaagaag

SEQ ID NO: 1226668 - RNA, 22 nt, Human
gaaugagagacacacugaagaa

SEQ ID NO: 1226669 - RNA, 13 nt, Human
gaaugagacaucc

SEQ ID NO: 1226670 - RNA, 15 nt, Human
gaaugagacauccag

SEQ ID NO: 1226671 - RNA, 20 nt, Human
gaaugagagacacacugaag

SEQ ID NO: 1226672 - RNA, 13 nt, Human
gaagggcaaguuu

SEQ ID NO: 1226673 - RNA, 13 nt, Human
gaagugacuuugg

SEQ ID NO: 1226674 - RNA, 15 nt, Human
gaagugacuuuggcu

SEQ ID NO: 1226675 - RNA, 20 nt, Human
gaagugacuuuggcugcaug

SEQ ID NO: 1226676 - RNA, 21 nt, Human
gaagugacuuuggcugcaugc

SEQ ID NO: 1226677 - RNA, 17 nt, Human
gacagucaccucaugga

SEQ ID NO: 1226678 - RNA, 14 nt, Human
gacagugaaagaaa

SEQ ID NO: 1226679 - RNA, 13 nt, Human
gaauuuuguguua

SEQ ID NO: 1226680 - RNA, 16 nt, Human
gaauuuuguguuagag

SEQ ID NO: 1226681 - RNA, 22 nt, Human
gaauuuuguguuagagauuuuu

SEQ ID NO: 1226682 - RNA, 15 nt, Human
gacaaaauggaauac

SEQ ID NO: 1226683 - RNA, 14 nt, Human
gaauuaugaaacuu

SEQ ID NO: 1226684 - RNA, 12 nt, Human
gaauuaugaaac

SEQ ID NO: 1226685 - RNA, 11 nt, Human
gaauuaguuuu

SEQ ID NO: 1226686 - RNA, 12 nt, Human
gacacacaugaa

SEQ ID NO: 1226687 - RNA, 13 nt, Human
gacacacugaaga

SEQ ID NO: 1226688 - RNA, 14 nt, Human
gacacacugaagaa

SEQ ID NO: 1226689 - RNA, 23 nt, Human
gauccaggccggcuugccacacc

SEQ ID NO: 1226690 - RNA, 11 nt, Human
gauccaguuuu

SEQ ID NO: 1226691 - RNA, 17 nt, Human
gauccaguuuuguuugg

SEQ ID NO: 1226692 - RNA, 22 nt, Human
gauccaguuuuguuuggaccaa

SEQ ID NO: 1226693 - RNA, 18 nt, Human
gauuacugccuauuuuaa

SEQ ID NO: 1226694 - RNA, 14 nt, Human
gauuagaauucugu

SEQ ID NO: 1226695 - RNA, 15 nt, Human
gauuagaauucugua

SEQ ID NO: 1226696 - RNA, 23 nt, Human
gauuagaauucuguauagauuag

SEQ ID NO: 1226697 - RNA, 22 nt, Human
gauuacaggugugagccaccac

SEQ ID NO: 1226698 - RNA, 14 nt, Human
gauuagagaguguu

SEQ ID NO: 1226699 - RNA, 18 nt, Human
gauuagagaguguugaaa

SEQ ID NO: 1226700 - RNA, 13 nt, Human
gauuauucacuga

SEQ ID NO: 1226701 - RNA, 15 nt, Human
gauuauucacugauu

SEQ ID NO: 1226702 - RNA, 16 nt, Human
gauuauucacugauuu

SEQ ID NO: 1226703 - RNA, 21 nt, Human
gauuauucacugauuugacau

SEQ ID NO: 1226704 - RNA, 19 nt, Human
gagugcugaaggaauggaa

SEQ ID NO: 1226705 - RNA, 16 nt, Human
gaguuuagcuggaaaa

SEQ ID NO: 1226706 - RNA, 14 nt, Human
gauaugugaacagu

SEQ ID NO: 1226707 - RNA, 13 nt, Human
gauaugugaacag

SEQ ID NO: 1226708 - RNA, 16 nt, Human
gauacuugaaaauuaa

SEQ ID NO: 1226709 - RNA, 17 nt, Human
gauacuugaaaauuaac

SEQ ID NO: 1226710 - RNA, 14 nt, Human
gcagagccaggaag

SEQ ID NO: 1226711 - RNA, 15 nt, Human
gcagagccaggaaga

SEQ ID NO: 1226712 - RNA, 18 nt, Human
gcacuuuagaauaugccu

SEQ ID NO: 1226713 - RNA, 19 nt, Human
gcacuuuagaauaugccuu

SEQ ID NO: 1226714 - RNA, 20 nt, Human
gcacuuuagaauaugccuug

SEQ ID NO: 1226715 - RNA, 20 nt, Human
gcagaaagcaucccucaccc

SEQ ID NO: 1226716 - RNA, 21 nt, Human
gcauaacauaaaucugugaac

SEQ ID NO: 1226717 - RNA, 23 nt, Human
gcauaacauaaaucugugaacuu

SEQ ID NO: 1226718 - RNA, 22 nt, Human
gcauaacguauaaaagccuguu

SEQ ID NO: 1226719 - RNA, 18 nt, Human
gcagagcugauggagaag

SEQ ID NO: 1226720 - RNA, 19 nt, Human
gcagagcugauggagaagg

SEQ ID NO: 1226721 - RNA, 16 nt, Human
gcagagccaggaagau

SEQ ID NO: 1226722 - RNA, 15 nt, Human
cugcuacaauguccu

SEQ ID NO: 1226723 - RNA, 17 nt, Human
cugcuuuuuauggccug

SEQ ID NO: 1226724 - RNA, 18 nt, Human
cugcuuuuuauggccugu

SEQ ID NO: 1226725 - RNA, 21 nt, Human
cuggaaaucaggguuaguauu

SEQ ID NO: 1226726 - RNA, 15 nt, Human
cuggaaccaucagaa

SEQ ID NO: 1226727 - RNA, 16 nt, Human
cuggaaccaucagaaa

SEQ ID NO: 1226728 - RNA, 13 nt, Human
cuggacugugugc

SEQ ID NO: 1226729 - RNA, 14 nt, Human
cuguacuuuuuggc

SEQ ID NO: 1226730 - RNA, 15 nt, Human
cuguacuuuuuggca

SEQ ID NO: 1226731 - RNA, 22 nt, Human
cugucacccagguuggagugca

SEQ ID NO: 1226732 - RNA, 13 nt, Human
cuguaaaacuaag

SEQ ID NO: 1226733 - RNA, 17 nt, Human
cuguaaaauaaaagguc

SEQ ID NO: 1226734 - RNA, 22 nt, Human
cuguacuugcucuugaugccug

SEQ ID NO: 1226735 - RNA, 23 nt, Human
cuguacuugcucuugaugccugg

SEQ ID NO: 1226736 - RNA, 16 nt, Human
cuggacugugugcuca

SEQ ID NO: 1226737 - RNA, 19 nt, Human
cuggacugugugcucagga

SEQ ID NO: 1226738 - RNA, 10 nt, Human
cugggacagg

SEQ ID NO: 1226739 - RNA, 16 nt, Human
cuggugcacuggcccc

SEQ ID NO: 1226740 - RNA, 19 nt, Human
cuggugcacuggccccacc

SEQ ID NO: 1226741 - RNA, 14 nt, Human
cuuaugcuuaaauu

SEQ ID NO: 1226742 - RNA, 14 nt, Human
cuuauuauuuuuga

SEQ ID NO: 1226743 - RNA, 16 nt, Human
cuuauuauuuuugaga

SEQ ID NO: 1226744 - RNA, 20 nt, Human
cuuauuguagcauccuggaa

SEQ ID NO: 1226745 - RNA, 23 nt, Human
cuuauuguagcauccuggaauau

SEQ ID NO: 1226746 - RNA, 13 nt, Human
cuucaugcaugga

SEQ ID NO: 1226747 - RNA, 15 nt, Human
cuucaugcauggaaa

SEQ ID NO: 1226748 - RNA, 21 nt, Human
cuucaugcauggaaauucccu

SEQ ID NO: 1226749 - RNA, 11 nt, Human
cuucaucugga

SEQ ID NO: 1226750 - RNA, 12 nt, Human
cuucaucuggaa

SEQ ID NO: 1226751 - RNA, 13 nt, Human
cuucaucuggaac

SEQ ID NO: 1226752 - RNA, 15 nt, Human
cuucaucuggaacca

SEQ ID NO: 1226753 - RNA, 19 nt, Human
cuucaucuggauuccagag

SEQ ID NO: 1226754 - RNA, 15 nt, Human
cuucacuguaaaaua

SEQ ID NO: 1226755 - RNA, 12 nt, Human
cuugaugaagaa

SEQ ID NO: 1226756 - RNA, 13 nt, Human
cuugaugaagaag

SEQ ID NO: 1226757 - RNA, 12 nt, Human
cuugaugccugg

SEQ ID NO: 1226758 - RNA, 13 nt, Human
cuugaugccuggc

SEQ ID NO: 1226759 - RNA, 14 nt, Human
cuugccuuuuucau

SEQ ID NO: 1226760 - RNA, 15 nt, Human
cuugccuuuuucauu

SEQ ID NO: 1226761 - RNA, 20 nt, Human
cuugccuuuuucauuauuuu

SEQ ID NO: 1226762 - RNA, 22 nt, Human
cuugccuuuuucauuauuuuau

SEQ ID NO: 1226763 - RNA, 23 nt, Human
cuugccuuuuucauuauuuuauu

SEQ ID NO: 1226764 - RNA, 13 nt, Human
gaaaaaaaauuau

SEQ ID NO: 1226765 - RNA, 19 nt, Human
cuuuuguagaagucacauu

SEQ ID NO: 1226766 - RNA, 15 nt, Human
cuuuuggcauuuuac

SEQ ID NO: 1226767 - RNA, 17 nt, Human
gaaauauuuauuuuaau

SEQ ID NO: 1226768 - RNA, 22 nt, Human
gaaauauuuauuuuaauaaugu

SEQ ID NO: 1226769 - RNA, 18 nt, Human
gaaauauuuauuuuaaua

SEQ ID NO: 1226770 - RNA, 15 nt, Human
gaaacuuuuggaagg

SEQ ID NO: 1226771 - RNA, 13 nt, Human
gaaacuuuuggaa

SEQ ID NO: 1226772 - RNA, 13 nt, Human
cuuuguaaugaaa

SEQ ID NO: 1226773 - RNA, 11 nt, Human
cuuuguauaga

SEQ ID NO: 1226774 - RNA, 20 nt, Human
cuuuguauagaaccucuuug

SEQ ID NO: 1226775 - RNA, 14 nt, Human
cuuuuaugugaaac

SEQ ID NO: 1226776 - RNA, 18 nt, Human
cuuuuaugugaaacaugu

SEQ ID NO: 1226777 - RNA, 18 nt, Human
cuuuccugagucccaucc

SEQ ID NO: 1226778 - RNA, 20 nt, Human
cuuuccugagucccaucccu

SEQ ID NO: 1226779 - RNA, 22 nt, Human
cuuuccugagucccaucccugc

SEQ ID NO: 1226780 - RNA, 12 nt, Human
ccaaauuaagag

SEQ ID NO: 1226781 - RNA, 18 nt, Human
ccaaagugcugggauuaa

SEQ ID NO: 1226782 - RNA, 21 nt, Human
cauucuccuaucaccugucuu

SEQ ID NO: 1226783 - RNA, 22 nt, Human
cauggcuggagcuagaauuuga

SEQ ID NO: 1226784 - RNA, 12 nt, Human
cauuuccaagca

SEQ ID NO: 1226785 - RNA, 16 nt, Human
ccaaaaaccaguauug

SEQ ID NO: 1226786 - RNA, 19 nt, Human
ccaaaaaccaguauuguac

SEQ ID NO: 1226787 - RNA, 20 nt, Human
ccaaaaaccaguauuguaca

SEQ ID NO: 1226788 - RNA, 21 nt, Human
caugauugguuucuaggcagu

SEQ ID NO: 1226789 - RNA, 16 nt, Human
caugaauuugugaagg

SEQ ID NO: 1226790 - RNA, 14 nt, Human
caugaauuugugaa

SEQ ID NO: 1226791 - RNA, 16 nt, Human
caugaauuaguuuuau

SEQ ID NO: 1226792 - RNA, 14 nt, Human
caugaccaguaaag

SEQ ID NO: 1226793 - RNA, 14 nt, Human
cauccuugagucaa

SEQ ID NO: 1226794 - RNA, 11 nt, Human
caucagcaaac

SEQ ID NO: 1226795 - RNA, 17 nt, Human
cagagcuggagaugagg

SEQ ID NO: 1226796 - RNA, 21 nt, Human
cagagcuggagaugaggccag

SEQ ID NO: 1226797 - RNA, 22 nt, Human
cagagcuggagaugaggccaga

SEQ ID NO: 1226798 - RNA, 23 nt, Human
cagagcuggagaugaggccagac

SEQ ID NO: 1226799 - RNA, 22 nt, Human
cagaucauugugaaauuauuca

SEQ ID NO: 1226800 - RNA, 13 nt, Human
cagauacuggauu

SEQ ID NO: 1226801 - RNA, 16 nt, Human
cagaucauugugaaau

SEQ ID NO: 1226802 - RNA, 21 nt, Human
cagcccccacugccuuugacc

SEQ ID NO: 1226803 - RNA, 24 nt, Human
caggacagcccuucuuuccacaga

SEQ ID NO: 1226804 - RNA, 23 nt, Human
caggacagcccuucuuuccacag

SEQ ID NO: 1226805 - RNA, 21 nt, Human
cagggaggaggcagagaagaa

SEQ ID NO: 1226806 - RNA, 15 nt, Human
cagggaggaggcaga

SEQ ID NO: 1226807 - RNA, 12 nt, Human
caggguggcagc

SEQ ID NO: 1226808 - RNA, 15 nt, Human
caagcuauucaauuc

SEQ ID NO: 1226809 - RNA, 15 nt, Human
caauaaagcugcuga

SEQ ID NO: 1226810 - RNA, 17 nt, Human
caauaaagcugcugaga

SEQ ID NO: 1226811 - RNA, 23 nt, Human
caauaaagcugcugagaaucuag

SEQ ID NO: 1226812 - RNA, 22 nt, Human
caauaaagcugcugagaaucua

SEQ ID NO: 1226813 - RNA, 15 nt, Human
caauucuugccaaau

SEQ ID NO: 1226814 - RNA, 21 nt, Human
caauucuucccuaucuuugcc

SEQ ID NO: 1226815 - RNA, 22 nt, Human
caauucuucccuaucuuugcca

SEQ ID NO: 1226816 - RNA, 19 nt, Human
caauucuuuuaacuguugu

SEQ ID NO: 1226817 - RNA, 11 nt, Human
caauuuaaaug

SEQ ID NO: 1226818 - RNA, 13 nt, Human
caauuuaaauguu

SEQ ID NO: 1226819 - RNA, 14 nt, Human
caauuuaaauguua

SEQ ID NO: 1226820 - RNA, 17 nt, Human
caaugcuguauuuuaaa

SEQ ID NO: 1226821 - RNA, 16 nt, Human
caaugcuguauuuuaa

SEQ ID NO: 1226822 - RNA, 23 nt, Human
caaugcuguauuuuaaaagaaug

SEQ ID NO: 1226823 - RNA, 21 nt, Human
cacagccucuuagaugcaguu

SEQ ID NO: 1226824 - RNA, 17 nt, Human
cacagccucuuagaugc

SEQ ID NO: 1226825 - RNA, 21 nt, Human
cacaguaaaaauggaaacuau

SEQ ID NO: 1226826 - RNA, 22 nt, Human
cacacaugaaguccaagcauuu

SEQ ID NO: 1226827 - RNA, 17 nt, Human
cacacaugaaguccaag

SEQ ID NO: 1226828 - RNA, 18 nt, Human
cacacaugcuucccuuuc

SEQ ID NO: 1226829 - RNA, 13 nt, Human
cacccucaugcug

SEQ ID NO: 1226830 - RNA, 14 nt, Human
cacccucaugcugu

SEQ ID NO: 1226831 - RNA, 16 nt, Human
cacccucaugcugugu

SEQ ID NO: 1226832 - RNA, 21 nt, Human
cacccucaugcugugugacuc

SEQ ID NO: 1226833 - RNA, 21 nt, Human
cacccucguggacaccugccc

SEQ ID NO: 1226834 - RNA, 23 nt, Human
cacccucguggacaccugcccug

SEQ ID NO: 1226835 - RNA, 18 nt, Human
caccugcccugcccugcc

SEQ ID NO: 1226836 - RNA, 19 nt, Human
caccugcccugcccugcca

SEQ ID NO: 1226837 - RNA, 20 nt, Human
caccugcccugcccugccac

SEQ ID NO: 1226838 - RNA, 21 nt, Human
caccugcccugcccugccacc

SEQ ID NO: 1226839 - RNA, 22 nt, Human
caccugcccugcccugccaccu

SEQ ID NO: 1226840 - RNA, 23 nt, Human
caccugcccugcccugccaccug

SEQ ID NO: 1226841 - RNA, 14 nt, Human
cacuaguauuucua

SEQ ID NO: 1226842 - RNA, 14 nt, Human
cacucuuucuuuca

SEQ ID NO: 1226843 - RNA, 15 nt, Human
cacucuuucuuucaa

SEQ ID NO: 1226844 - RNA, 19 nt, Human
cacuuguguuuugcaagcc

SEQ ID NO: 1226845 - RNA, 16 nt, Human
cacuugucaauaaaau

SEQ ID NO: 1226846 - RNA, 22 nt, Human
cacuuguguuuugcaagccaga

SEQ ID NO: 1226847 - RNA, 18 nt, Human
cacugggagaaaugaaaa

SEQ ID NO: 1226848 - RNA, 17 nt, Human
cacugggacuugcaaaa

SEQ ID NO: 1226849 - RNA, 21 nt, Human
caaagucucuggaauuugaaa

SEQ ID NO: 1226850 - RNA, 14 nt, Human
caacacuaacauga

SEQ ID NO: 1226851 - RNA, 15 nt, Human
caaauccuugaagau

SEQ ID NO: 1226852 - RNA, 12 nt, Human
caacaauaaaua

SEQ ID NO: 1226853 - RNA, 20 nt, Human
caaacaggaucaguuaacua

SEQ ID NO: 1226854 - RNA, 17 nt, Human
auuugcucauggaauug

SEQ ID NO: 1226855 - RNA, 14 nt, Human
auuugcucauggaa

SEQ ID NO: 1226856 - RNA, 13 nt, Human
auuuggaaaucuu

SEQ ID NO: 1226857 - RNA, 17 nt, Human
auuuggaaaucuuuaaa

SEQ ID NO: 1226858 - RNA, 11 nt, Human
auuuggaaauc

SEQ ID NO: 1226859 - RNA, 12 nt, Human
auuuggaaaucu

SEQ ID NO: 1226860 - RNA, 19 nt, Human
auuuuauagcuacuaauuu

SEQ ID NO: 1226861 - RNA, 14 nt, Human
auuuuaugauccag

SEQ ID NO: 1226862 - RNA, 15 nt, Human
auuuuaugauccagc

SEQ ID NO: 1226863 - RNA, 16 nt, Human
auuuuaugauccagca

SEQ ID NO: 1226864 - RNA, 21 nt, Human
auucauaauuauuauuuggcc

SEQ ID NO: 1226865 - RNA, 14 nt, Human
auuaugaaacuugu

SEQ ID NO: 1226866 - RNA, 15 nt, Human
auuaugaaacuugug

SEQ ID NO: 1226867 - RNA, 18 nt, Human
auuaugaaacuuuuggaa

SEQ ID NO: 1226868 - RNA, 21 nt, Human
auuaugaaacuuguguaaaua

SEQ ID NO: 1226869 - RNA, 18 nt, Human
auuaugaaacuuguguaa

SEQ ID NO: 1226870 - RNA, 20 nt, Human
auuaugaaacuuguguaaau

SEQ ID NO: 1226871 - RNA, 17 nt, Human
auuaugaauuacauuug

SEQ ID NO: 1226872 - RNA, 14 nt, Human
auuaugaauuacau

SEQ ID NO: 1226873 - RNA, 17 nt, Human
auucaaaguugccuaaa

SEQ ID NO: 1226874 - RNA, 18 nt, Human
auucaaaguugccuaaau

SEQ ID NO: 1226875 - RNA, 20 nt, Human
auucaaaguugccuaaaucc

SEQ ID NO: 1226876 - RNA, 21 nt, Human
auucaaaguugccuaaaucca

SEQ ID NO: 1226877 - RNA, 22 nt, Human
auucaaaguugccuaaauccau

SEQ ID NO: 1226878 - RNA, 18 nt, Human
auuaugaauuacauuugu

SEQ ID NO: 1226879 - RNA, 20 nt, Human
auucaaugccccugaauuua

SEQ ID NO: 1226880 - RNA, 18 nt, Human
auucaaugccccugaauu

SEQ ID NO: 1226881 - RNA, 18 nt, Human
auucaaauguauuacagu

SEQ ID NO: 1226882 - RNA, 16 nt, Human
auucaaauguauuaca

SEQ ID NO: 1226883 - RNA, 15 nt, Human
auuacaacggaguca

SEQ ID NO: 1226884 - RNA, 17 nt, Human
auuacaacggagucaaa

SEQ ID NO: 1226885 - RNA, 22 nt, Human
auuaauuccuucagcacuuuag

SEQ ID NO: 1226886 - RNA, 19 nt, Human
auuacaguggggaaugaag

SEQ ID NO: 1226887 - RNA, 12 nt, Human
auuacaguauaa

SEQ ID NO: 1226888 - RNA, 14 nt, Human
auuacaguauaauu

SEQ ID NO: 1226889 - RNA, 15 nt, Human
auuacaguauaauua

SEQ ID NO: 1226890 - RNA, 16 nt, Human
auuacaguauaauuaa

SEQ ID NO: 1226891 - RNA, 18 nt, Human
auuagcagucccuccaca

SEQ ID NO: 1226892 - RNA, 13 nt, Human
auuguaauuauau

SEQ ID NO: 1226893 - RNA, 14 nt, Human
auuguaauuauauc

SEQ ID NO: 1226894 - RNA, 16 nt, Human
auuguugucugcaacu

SEQ ID NO: 1226895 - RNA, 16 nt, Human
ccuauuuccagaaaua

SEQ ID NO: 1226896 - RNA, 15 nt, Human
ccuauuuuaauaaac

SEQ ID NO: 1226897 - RNA, 16 nt, Human
ccguagguuauuuuca

SEQ ID NO: 1226898 - RNA, 18 nt, Human
ccuaagcuggagugcagu

SEQ ID NO: 1226899 - RNA, 19 nt, Human
ccuaagcuggagugcagug

SEQ ID NO: 1226900 - RNA, 14 nt, Human
ccuaauaaagcugu

SEQ ID NO: 1226901 - RNA, 23 nt, Human
ccuaauaaagcuguguggcaguc

SEQ ID NO: 1226902 - RNA, 11 nt, Human
cccucacccau

SEQ ID NO: 1226903 - RNA, 13 nt, Human
cccucacccaucc

SEQ ID NO: 1226904 - RNA, 17 nt, Human
cccucacccauccuaga

SEQ ID NO: 1226905 - RNA, 17 nt, Human
cccuucuuuccacagaa

SEQ ID NO: 1226906 - RNA, 23 nt, Human
ccucucugcaggucccuaauaaa

SEQ ID NO: 1226907 - RNA, 21 nt, Human
ccucucugcaggucccuaaua

SEQ ID NO: 1226908 - RNA, 22 nt, Human
ccucucugcaggucccuaauaa

SEQ ID NO: 1226909 - RNA, 13 nt, Human
ccucucugcaggu

SEQ ID NO: 1226910 - RNA, 15 nt, Human
ccucucugcaggucc

SEQ ID NO: 1226911 - RNA, 23 nt, Human
ccugacccuccaccgcagaagga

SEQ ID NO: 1226912 - RNA, 14 nt, Human
cccacugccuuuga

SEQ ID NO: 1226913 - RNA, 13 nt, Human
cccacuucagccu

SEQ ID NO: 1226914 - RNA, 15 nt, Human
cccacuucagccucc

SEQ ID NO: 1226915 - RNA, 22 nt, Human
cccacccucguggacaccugcc

SEQ ID NO: 1226916 - RNA, 23 nt, Human
cccacccucguggacaccugccc

SEQ ID NO: 1226917 - RNA, 20 nt, Human
cccacccucguggacaccug

SEQ ID NO: 1226918 - RNA, 14 nt, Human
cccauccuagaggc

SEQ ID NO: 1226919 - RNA, 18 nt, Human
ccagcagauuuccagccu

SEQ ID NO: 1226920 - RNA, 21 nt, Human
ccagcagauuauucacugauu

SEQ ID NO: 1226921 - RNA, 22 nt, Human
ccagcagauuauucacugauuu

SEQ ID NO: 1226922 - RNA, 17 nt, Human
ccaggaagaucccccag

SEQ ID NO: 1226923 - RNA, 18 nt, Human
ccaggaagaucccccaga

SEQ ID NO: 1226924 - RNA, 19 nt, Human
ccaggaagaucccccagaa

SEQ ID NO: 1226925 - RNA, 20 nt, Human
ccaggaaagcgccuccaacc

SEQ ID NO: 1226926 - RNA, 15 nt, Human
ccagauccuggaaau

SEQ ID NO: 1226927 - RNA, 18 nt, Human
ccagagugcugaaggaau

SEQ ID NO: 1226928 - RNA, 17 nt, Human
ccuuuuucauuauuuua

SEQ ID NO: 1226929 - RNA, 15 nt, Human
cgccggaucugaggg

SEQ ID NO: 1226930 - RNA, 17 nt, Human
cggagucaaaaauuaaa

SEQ ID NO: 1226931 - RNA, 23 nt, Human
cuaguugaucagcuuauugucua

SEQ ID NO: 1226932 - RNA, 16 nt, Human
cuacaaccuccgccuc

SEQ ID NO: 1226933 - RNA, 11 nt, Human
cuaauuuuugu

SEQ ID NO: 1226934 - RNA, 20 nt, Human
cuaauuuuuguauuuuuagu

SEQ ID NO: 1226935 - RNA, 13 nt, Human
cuaauuuuuuugu

SEQ ID NO: 1226936 - RNA, 18 nt, Human
cuaccucuccagccucag

SEQ ID NO: 1226937 - RNA, 16 nt, Human
cuaagaaacuuaaauu

SEQ ID NO: 1226938 - RNA, 13 nt, Human
cuaaacuuuucug

SEQ ID NO: 1226939 - RNA, 15 nt, Human
cuaaacuuuucugau

SEQ ID NO: 1226940 - RNA, 19 nt, Human
cuccaggguggcagcaaca

SEQ ID NO: 1226941 - RNA, 23 nt, Human
cuccagguauucguuaucuaaua

SEQ ID NO: 1226942 - RNA, 18 nt, Human
cucagccucccaaguaac

SEQ ID NO: 1226943 - RNA, 16 nt, Human
cuccaaagucucugga

SEQ ID NO: 1226944 - RNA, 18 nt, Human
cuccaacccuagcaaaag

SEQ ID NO: 1226945 - RNA, 15 nt, Human
cucuuagaugcaguu

SEQ ID NO: 1226946 - RNA, 15 nt, Human
cucuccccaugaugu

SEQ ID NO: 1226947 - RNA, 18 nt, Human
cucucaauauucaauaaa

SEQ ID NO: 1226948 - RNA, 10 nt, Human
cucucaauau

SEQ ID NO: 1226949 - RNA, 21 nt, Human
cucucaauauucaauaaagcu

SEQ ID NO: 1226950 - RNA, 19 nt, Human
cucucaauauucaauaaag

SEQ ID NO: 1226951 - RNA, 21 nt, Human
cucucacuuguuuuauuuaac

SEQ ID NO: 1226952 - RNA, 22 nt, Human
cugaaaauugaugggauuuggu

SEQ ID NO: 1226953 - RNA, 21 nt, Human
cucuuagaugcaguucugaag

SEQ ID NO: 1226954 - RNA, 20 nt, Human
cucuuagaugcaguucugaa

SEQ ID NO: 1226955 - RNA, 18 nt, Human
aacuuccagauccuggaa

SEQ ID NO: 1226956 - RNA, 19 nt, Human
aacugcuaaucuacuuucu

SEQ ID NO: 1226957 - RNA, 17 nt, Human
aacugggacaggggaga

SEQ ID NO: 1226958 - RNA, 16 nt, Human
aacuggggcuccucca

SEQ ID NO: 1226959 - RNA, 14 nt, Human
gugaacuugaaauu

SEQ ID NO: 1226960 - RNA, 15 nt, Human
gugaacuugaaauuu

SEQ ID NO: 1226961 - RNA, 16 nt, Human
aacucuucaaggucug

SEQ ID NO: 1226962 - RNA, 19 nt, Human
aacucuucaaggucugcuu

SEQ ID NO: 1226963 - RNA, 13 nt, Human
aacugaaaucaua

SEQ ID NO: 1226964 - RNA, 12 nt, Human
aacugaaaucau

SEQ ID NO: 1226965 - RNA, 14 nt, Human
aacccagauaaagg

SEQ ID NO: 1226966 - RNA, 24 nt, Human
aaccucuaaauucuuucauuuuag

SEQ ID NO: 1226967 - RNA, 12 nt, Human
aaccucuaaauu

SEQ ID NO: 1226968 - RNA, 14 nt, Human
aaccucauccucuc

SEQ ID NO: 1226969 - RNA, 20 nt, Human
aaccaagugaucaaacuaca

SEQ ID NO: 1226970 - RNA, 21 nt, Human
aacuagaguuuagcuggaaaa

SEQ ID NO: 1226971 - RNA, 16 nt, Human
gucuuucacauuuaaa

SEQ ID NO: 1226972 - RNA, 14 nt, Human
gucugucugucugu

SEQ ID NO: 1226973 - RNA, 16 nt, Human
gucugucugucugucc

SEQ ID NO: 1226974 - RNA, 17 nt, Human
aacacaacuauauuguu

SEQ ID NO: 1226975 - RNA, 24 nt, Human
guccagugggaggugagaccaccu

SEQ ID NO: 1226976 - RNA, 15 nt, Human
guccaguguuucuuu

SEQ ID NO: 1226977 - RNA, 15 nt, Human
aacaaugcuguauuu

SEQ ID NO: 1226978 - RNA, 12 nt, Human
aacaauaaaaga

SEQ ID NO: 1226979 - RNA, 16 nt, Human
aacacaacuauauugu

SEQ ID NO: 1226980 - RNA, 15 nt, Human
aacacaacuauauug

SEQ ID NO: 1226981 - RNA, 22 nt, Human
aacaaugcuguauuuuaaaaga

SEQ ID NO: 1226982 - RNA, 17 nt, Human
aacaaugcuguauuuua

SEQ ID NO: 1226983 - RNA, 21 nt, Human
aacaagccuccuuuuaaagua

SEQ ID NO: 1226984 - RNA, 20 nt, Human
aaauuuuuguaguagcguuu
